United States Patent Application Publication US 2007/0042381 A1 - sequence listing, part 68

SEQ ID NO: 3097437 - RNA, 16 nt, Molluscum contagiosum virus
guacugccgccaggaa

SEQ ID NO: 3097438 - RNA, 17 nt, Molluscum contagiosum virus
gcgcagugcggccagca

SEQ ID NO: 3097439 - RNA, 16 nt, Molluscum contagiosum virus
cccaagggcguagagc

SEQ ID NO: 3097440 - RNA, 15 nt, Molluscum contagiosum virus
ggaaagauagggcau

SEQ ID NO: 3097441 - RNA, 15 nt, Molluscum contagiosum virus
ccaagaacagagaaa

SEQ ID NO: 3097442 - RNA, 14 nt, Molluscum contagiosum virus
cgcucgccucuggg

SEQ ID NO: 3097443 - RNA, 18 nt, Molluscum contagiosum virus
cggacacguugcagcagc

SEQ ID NO: 3097444 - RNA, 19 nt, Molluscum contagiosum virus
cgcacucgcuggccucugc

SEQ ID NO: 3097445 - RNA, 19 nt, Molluscum contagiosum virus
gcaagacccagcaaggccc

SEQ ID NO: 3097446 - RNA, 19 nt, Molluscum contagiosum virus
gcuucuuuacgggcgccag

SEQ ID NO: 3097447 - RNA, 18 nt, Molluscum contagiosum virus
cugcucgcgcaucugccg

SEQ ID NO: 3097448 - RNA, 22 nt, Molluscum contagiosum virus
gccgcggaacugacugcugccc

SEQ ID NO: 3097449 - RNA, 23 nt, Molluscum contagiosum virus
auucuuguacgggcgugcgcagc

SEQ ID NO: 3097450 - RNA, 22 nt, Molluscum contagiosum virus
gcuccagagccgcgugcgccgc

SEQ ID NO: 3097451 - RNA, 21 nt, Molluscum contagiosum virus
aagcaccgccugcugcagcuc

SEQ ID NO: 3097452 - RNA, 12 nt, Molluscum contagiosum virus
uacacuuccugc

SEQ ID NO: 3097453 - RNA, 19 nt, Molluscum contagiosum virus
gugcuggcggggcuggcag

SEQ ID NO: 3097454 - RNA, 18 nt, Molluscum contagiosum virus
aggaaagcgcacacuugc

SEQ ID NO: 3097455 - RNA, 23 nt, Molluscum contagiosum virus
cauccuugauaaaagcacagucc

SEQ ID NO: 3097456 - RNA, 15 nt, Molluscum contagiosum virus
uguuuguagccgcgc

SEQ ID NO: 3097457 - RNA, 18 nt, Molluscum contagiosum virus
aagugcuccgcacgugga

SEQ ID NO: 3097458 - RNA, 22 nt, Molluscum contagiosum virus
caagauuguagagacgcugccg

SEQ ID NO: 3097459 - RNA, 17 nt, Molluscum contagiosum virus
aggaacucgaggcucug

SEQ ID NO: 3097460 - RNA, 21 nt, Molluscum contagiosum virus
cgcugguuugcgcgagcugcg

SEQ ID NO: 3097461 - RNA, 19 nt, Molluscum contagiosum virus
cucggcguggugcuggcca

SEQ ID NO: 3097462 - RNA, 14 nt, Molluscum contagiosum virus
agcuccugcugguu

SEQ ID NO: 3097463 - RNA, 16 nt, Molluscum contagiosum virus
cgcggccaugcuccug

SEQ ID NO: 3097464 - RNA, 13 nt, Molluscum contagiosum virus
ggcuguguuccag

SEQ ID NO: 3097465 - RNA, 19 nt, Molluscum contagiosum virus
gcucgcgcgcacgcgcacg

SEQ ID NO: 3097466 - RNA, 13 nt, Molluscum contagiosum virus
gcucucagagcau

SEQ ID NO: 3097467 - RNA, 17 nt, Molluscum contagiosum virus
gcagacaaagacagucc

SEQ ID NO: 3097468 - RNA, 23 nt, Molluscum contagiosum virus
cugccucguggaacaaagaggca

SEQ ID NO: 3097469 - RNA, 23 nt, Molluscum contagiosum virus
cacgcucgcgacgugcgcgcugc

SEQ ID NO: 3097470 - RNA, 15 nt, Molluscum contagiosum virus
gccccugcgcgagca

SEQ ID NO: 3097471 - RNA, 22 nt, Molluscum contagiosum virus
caucagagaagugcuccgcacg

SEQ ID NO: 3097472 - RNA, 23 nt, Molluscum contagiosum virus
ggccaugaucauggcgccgcugc

SEQ ID NO: 3097473 - RNA, 16 nt, Molluscum contagiosum virus
gaacaaaaaacaacuc

SEQ ID NO: 3097474 - RNA, 12 nt, Molluscum contagiosum virus
ccgccaggaacg

SEQ ID NO: 3097475 - RNA, 15 nt, Molluscum contagiosum virus
ccuggcuugcgcgcg

SEQ ID NO: 3097476 - RNA, 13 nt, Molluscum contagiosum virus
cgccgccucgcgc

SEQ ID NO: 3097477 - RNA, 19 nt, Molluscum contagiosum virus
gcugagcgcggagcuggcg

SEQ ID NO: 3097478 - RNA, 18 nt, Molluscum contagiosum virus
cgagucguacacgcagag

SEQ ID NO: 3097479 - RNA, 23 nt, Molluscum contagiosum virus
gcucgagcgcgcgccugcuggcg

SEQ ID NO: 3097480 - RNA, 19 nt, Molluscum contagiosum virus
gcucaccgcgcagaagcca

SEQ ID NO: 3097481 - RNA, 18 nt, Molluscum contagiosum virus
cagcggcgccgcagcuuu

SEQ ID NO: 3097482 - RNA, 18 nt, Molluscum contagiosum virus
cagcgugcgcgggcacgc

SEQ ID NO: 3097483 - RNA, 22 nt, Molluscum contagiosum virus
caauggcgcgcgagcacagcgc

SEQ ID NO: 3097484 - RNA, 17 nt, Molluscum contagiosum virus
cgguuugcuaacaggaa

SEQ ID NO: 3097485 - RNA, 14 nt, Molluscum contagiosum virus
acuggacugagccg

SEQ ID NO: 3097486 - RNA, 22 nt, Molluscum contagiosum virus
cgaggccggccgugcagagcaa

SEQ ID NO: 3097487 - RNA, 21 nt, Molluscum contagiosum virus
ggcgcacaacuugggcccgcc

SEQ ID NO: 3097488 - RNA, 12 nt, Molluscum contagiosum virus
acccuuggcagc

SEQ ID NO: 3097489 - RNA, 22 nt, Molluscum contagiosum virus
cgcaagaacaaccagacgugcu

SEQ ID NO: 3097490 - RNA, 14 nt, Molluscum contagiosum virus
cggcgcgcccagcg

SEQ ID NO: 3097491 - RNA, 22 nt, Molluscum contagiosum virus
ugcccccaccgggguccgcucc

SEQ ID NO: 3097492 - RNA, 17 nt, Molluscum contagiosum virus
cggaggacucggaggcc

SEQ ID NO: 3097493 - RNA, 18 nt, Molluscum contagiosum virus
gcgugcagggcgugcuug

SEQ ID NO: 3097494 - RNA, 13 nt, Molluscum contagiosum virus
cgugcgagcagag

SEQ ID NO: 3097495 - RNA, 17 nt, Molluscum contagiosum virus
gccguucacgcacacga

SEQ ID NO: 3097496 - RNA, 15 nt, Molluscum contagiosum virus
gcucgcacacgugca

SEQ ID NO: 3097497 - RNA, 23 nt, Molluscum contagiosum virus
ugcccgcgggggcguggcagaua

SEQ ID NO: 3097498 - RNA, 15 nt, Molluscum contagiosum virus
ccgcgccagcgacag

SEQ ID NO: 3097499 - RNA, 19 nt, Molluscum contagiosum virus
ccaagcacauucucaacca

SEQ ID NO: 3097500 - RNA, 22 nt, Molluscum contagiosum virus
cucgcggucgggccccugcgcg

SEQ ID NO: 3097501 - RNA, 21 nt, Molluscum contagiosum virus
gcacgcgcacagucuugcgca

SEQ ID NO: 3097502 - RNA, 16 nt, Molluscum contagiosum virus
gcgagccagccaggcg

SEQ ID NO: 3097503 - RNA, 20 nt, Molluscum contagiosum virus
gcugcggcucuacccggagg

SEQ ID NO: 3097504 - RNA, 17 nt, Molluscum contagiosum virus
cgaggcgcgcacgcugc

SEQ ID NO: 3097505 - RNA, 14 nt, Molluscum contagiosum virus
gcgugacggugcug

SEQ ID NO: 3097506 - RNA, 21 nt, Molluscum contagiosum virus
caagggcagcucaagcugcuc

SEQ ID NO: 3097507 - RNA, 15 nt, Molluscum contagiosum virus
gacgccuuccugcug

SEQ ID NO: 3097508 - RNA, 18 nt, Molluscum contagiosum virus
gcucaagacgcugcuggc

SEQ ID NO: 3097509 - RNA, 19 nt, Molluscum contagiosum virus
cuugcgcggaagaagcugc

SEQ ID NO: 3097510 - RNA, 20 nt, Molluscum contagiosum virus
guugaagcucucgcagagga

SEQ ID NO: 3097511 - RNA, 17 nt, Molluscum contagiosum virus
cugccgucgcgcgcugu

SEQ ID NO: 3097512 - RNA, 19 nt, Molluscum contagiosum virus
aagcugcacgugcagcggc

SEQ ID NO: 3097513 - RNA, 19 nt, Molluscum contagiosum virus
cccugguuugcgcucucag

SEQ ID NO: 3097514 - RNA, 12 nt, Molluscum contagiosum virus
cucacgcccucu

SEQ ID NO: 3097515 - RNA, 15 nt, Molluscum contagiosum virus
uuucgggaagcacag

SEQ ID NO: 3097516 - RNA, 14 nt, Molluscum contagiosum virus
ccugcgacagcugc

SEQ ID NO: 3097517 - RNA, 16 nt, Molluscum contagiosum virus
agcguacucgggccgc

SEQ ID NO: 3097518 - RNA, 20 nt, Molluscum contagiosum virus
cugcguggacagcaucccug

SEQ ID NO: 3097519 - RNA, 16 nt, Molluscum contagiosum virus
caucaucgagcugcag

SEQ ID NO: 3097520 - RNA, 20 nt, Molluscum contagiosum virus
gugccagagucgccgcugcg

SEQ ID NO: 3097521 - RNA, 16 nt, Molluscum contagiosum virus
uccaagaagaggccgg

SEQ ID NO: 3097522 - RNA, 22 nt, Molluscum contagiosum virus
ucagcuccgacgugaccucgcu

SEQ ID NO: 3097523 - RNA, 15 nt, Molluscum contagiosum virus
acuggcgcagcagga

SEQ ID NO: 3097524 - RNA, 17 nt, Molluscum contagiosum virus
caagaucguuuugcacu

SEQ ID NO: 3097525 - RNA, 13 nt, Molluscum contagiosum virus
ugcgcgugccucu

SEQ ID NO: 3097526 - RNA, 21 nt, Molluscum contagiosum virus
gcguaguaguagcgcucgccc

SEQ ID NO: 3097527 - RNA, 21 nt, Molluscum contagiosum virus
gcaggaaagguacccgcagga

SEQ ID NO: 3097528 - RNA, 14 nt, Molluscum contagiosum virus
aagacgagcugugc

SEQ ID NO: 3097529 - RNA, 14 nt, Molluscum contagiosum virus
agacaggccggggc

SEQ ID NO: 3097530 - RNA, 15 nt, Molluscum contagiosum virus
cgcggacgcgcccug

SEQ ID NO: 3097531 - RNA, 20 nt, Molluscum contagiosum virus
acgugcgccagcucugggcg

SEQ ID NO: 3097532 - RNA, 13 nt, Molluscum contagiosum virus
cugcgcgcggacu

SEQ ID NO: 3097533 - RNA, 13 nt, Molluscum contagiosum virus
acgaggagccccg

SEQ ID NO: 3097534 - RNA, 19 nt, Molluscum contagiosum virus
cgcgacgugugcucugugc

SEQ ID NO: 3097535 - RNA, 16 nt, Molluscum contagiosum virus
cugcugguucugcucg

SEQ ID NO: 3097536 - RNA, 22 nt, Molluscum contagiosum virus
cggcaaaugcgucccagcagcu

SEQ ID NO: 3097537 - RNA, 13 nt, Molluscum contagiosum virus
ccugguggagcac

SEQ ID NO: 3097538 - RNA, 20 nt, Molluscum contagiosum virus
cgcgcgcacaucggcacugc

SEQ ID NO: 3097539 - RNA, 21 nt, Molluscum contagiosum virus
ucggcacaucucucagggcag

SEQ ID NO: 3097540 - RNA, 15 nt, Molluscum contagiosum virus
cguggcguugcugcu

SEQ ID NO: 3097541 - RNA, 18 nt, Molluscum contagiosum virus
acagccgccugccgcgcu

SEQ ID NO: 3097542 - RNA, 12 nt, Molluscum contagiosum virus
caaggauuuaaa

SEQ ID NO: 3097543 - RNA, 17 nt, Molluscum contagiosum virus
gcugcguuuccagggca

SEQ ID NO: 3097544 - RNA, 14 nt, Molluscum contagiosum virus
caguaccugcugcc

SEQ ID NO: 3097545 - RNA, 17 nt, Molluscum contagiosum virus
gacaaguacaugcacgu

SEQ ID NO: 3097546 - RNA, 15 nt, Molluscum contagiosum virus
cguacgagcagcugc

SEQ ID NO: 3097547 - RNA, 22 nt, Molluscum contagiosum virus
caaaauggcugcgaccaagaca

SEQ ID NO: 3097548 - RNA, 17 nt, Molluscum contagiosum virus
cagaugaggcugcucuc

SEQ ID NO: 3097549 - RNA, 20 nt, Molluscum contagiosum virus
ugccgccugcgcgcacccga

SEQ ID NO: 3097550 - RNA, 18 nt, Molluscum contagiosum virus
gcagugcucuuuaguaca

SEQ ID NO: 3097551 - RNA, 20 nt, Molluscum contagiosum virus
gcugcuggaacaggugcgca

SEQ ID NO: 3097552 - RNA, 18 nt, Molluscum contagiosum virus
ucguggcguugcugcugc

SEQ ID NO: 3097553 - RNA, 14 nt, Molluscum contagiosum virus
gccugccgcgagca

SEQ ID NO: 3097554 - RNA, 22 nt, Molluscum contagiosum virus
gccgcggcacugggugcccgag

SEQ ID NO: 3097555 - RNA, 22 nt, Molluscum contagiosum virus
agaacaagaagcgcuucuuugc

SEQ ID NO: 3097556 - RNA, 15 nt, Molluscum contagiosum virus
ucgacacugugcugg

SEQ ID NO: 3097557 - RNA, 16 nt, Molluscum contagiosum virus
gcucgguuggcggcgc

SEQ ID NO: 3097558 - RNA, 18 nt, Molluscum contagiosum virus
aggcucgagcugcaucuu

SEQ ID NO: 3097559 - RNA, 21 nt, Molluscum contagiosum virus
gcgguggucuccgcgggcagc

SEQ ID NO: 3097560 - RNA, 15 nt, Molluscum contagiosum virus
cuggacugagccgca

SEQ ID NO: 3097561 - RNA, 13 nt, Molluscum contagiosum virus
gcgccugaaccug

SEQ ID NO: 3097562 - RNA, 15 nt, Molluscum contagiosum virus
gcgcgcgcggcgcag

SEQ ID NO: 3097563 - RNA, 15 nt, Molluscum contagiosum virus
ggcggcacccgccgc

SEQ ID NO: 3097564 - RNA, 15 nt, Molluscum contagiosum virus
cgcgcugcgggcgcc

SEQ ID NO: 3097565 - RNA, 17 nt, Molluscum contagiosum virus
cccgcggagcugugcca

SEQ ID NO: 3097566 - RNA, 15 nt, Molluscum contagiosum virus
gcgugucuggagccc

SEQ ID NO: 3097567 - RNA, 16 nt, Molluscum contagiosum virus
cgcgcucacugcagca

SEQ ID NO: 3097568 - RNA, 14 nt, Molluscum contagiosum virus
gcgcaugcgcgccg

SEQ ID NO: 3097569 - RNA, 12 nt, Molluscum contagiosum virus
cagcagccaggc

SEQ ID NO: 3097570 - RNA, 21 nt, Molluscum contagiosum virus
gagccuucucgucgagagcgc

SEQ ID NO: 3097571 - RNA, 23 nt, Molluscum contagiosum virus
acaggagcauuccuuguccuggc

SEQ ID NO: 3097572 - RNA, 18 nt, Molluscum contagiosum virus
aggucggaagaaggcgcc

SEQ ID NO: 3097573 - RNA, 13 nt, Molluscum contagiosum virus
ucaugcugcucau

SEQ ID NO: 3097574 - RNA, 16 nt, Molluscum contagiosum virus
augacggcgggaaggg

SEQ ID NO: 3097575 - RNA, 18 nt, Molluscum contagiosum virus
caccugcgcuuccucuac

SEQ ID NO: 3097576 - RNA, 22 nt, Molluscum contagiosum virus
uaggucggaagaaggcgccuac

SEQ ID NO: 3097577 - RNA, 14 nt, Molluscum contagiosum virus
aggacuaccagcuc

SEQ ID NO: 3097578 - RNA, 19 nt, Molluscum contagiosum virus
gcgugcgcgugccucugcc

SEQ ID NO: 3097579 - RNA, 14 nt, Molluscum contagiosum virus
ugcacuacugcucc

SEQ ID NO: 3097580 - RNA, 20 nt, Molluscum contagiosum virus
ggagaaagaagugugccugc

SEQ ID NO: 3097581 - RNA, 23 nt, Molluscum contagiosum virus
cguggucgcgcgcgcucugccgc

SEQ ID NO: 3097582 - RNA, 15 nt, Molluscum contagiosum virus
caaguccagcgcgcu

SEQ ID NO: 3097583 - RNA, 16 nt, Molluscum contagiosum virus
gcugagcgcagcacac

SEQ ID NO: 3097584 - RNA, 19 nt, Molluscum contagiosum virus
caugcccggccucgccucc

SEQ ID NO: 3097585 - RNA, 14 nt, Molluscum contagiosum virus
ccgcgggcugcaag

SEQ ID NO: 3097586 - RNA, 21 nt, Molluscum contagiosum virus
ccugucggcacaucucucagg

SEQ ID NO: 3097587 - RNA, 13 nt, Molluscum contagiosum virus
uguacaaagagcu

SEQ ID NO: 3097588 - RNA, 16 nt, Molluscum contagiosum virus
gcgcagaagccaacac

SEQ ID NO: 3097589 - RNA, 17 nt, Molluscum contagiosum virus
ccauggacacgcugcgc

SEQ ID NO: 3097590 - RNA, 17 nt, Molluscum contagiosum virus
uugcgcguccacaaagg

SEQ ID NO: 3097591 - RNA, 18 nt, Molluscum contagiosum virus
gcuugcauguucucuuug

SEQ ID NO: 3097592 - RNA, 21 nt, Molluscum contagiosum virus
cagcagccgcguagcuagcuc

SEQ ID NO: 3097593 - RNA, 16 nt, Molluscum contagiosum virus
ucucagcggcacugcg

SEQ ID NO: 3097594 - RNA, 15 nt, Molluscum contagiosum virus
cgcgucugugcgcgc

SEQ ID NO: 3097595 - RNA, 16 nt, Molluscum contagiosum virus
gcgccgcaaaagcaag

SEQ ID NO: 3097596 - RNA, 14 nt, Molluscum contagiosum virus
ggcagccgccuggc

SEQ ID NO: 3097597 - RNA, 13 nt, Molluscum contagiosum virus
gggucgugcaggu

SEQ ID NO: 3097598 - RNA, 20 nt, Molluscum contagiosum virus
ccgcggcgcggcggaagugg

SEQ ID NO: 3097599 - RNA, 17 nt, Molluscum contagiosum virus
gcgccgaugcagugcgg

SEQ ID NO: 3097600 - RNA, 19 nt, Molluscum contagiosum virus
ugagccacaaacacucgcg

SEQ ID NO: 3097601 - RNA, 20 nt, Molluscum contagiosum virus
gcuucuacugcgcacccgcc

SEQ ID NO: 3097602 - RNA, 16 nt, Molluscum contagiosum virus
accuccugcuuugcac

SEQ ID NO: 3097603 - RNA, 21 nt, Molluscum contagiosum virus
caaaagaggccugcugaagaa

SEQ ID NO: 3097604 - RNA, 15 nt, Molluscum contagiosum virus
gggcgagcaguguga

SEQ ID NO: 3097605 - RNA, 22 nt, Molluscum contagiosum virus
cguggcgcuuggcgagcgcugc

SEQ ID NO: 3097606 - RNA, 16 nt, Molluscum contagiosum virus
cgagcgcuaucucugg

SEQ ID NO: 3097607 - RNA, 17 nt, Molluscum contagiosum virus
agcgccuguccgugggc

SEQ ID NO: 3097608 - RNA, 14 nt, Molluscum contagiosum virus
cgcaagcgcugcuc

SEQ ID NO: 3097609 - RNA, 18 nt, Molluscum contagiosum virus
gaauuaaacaaacgugca

SEQ ID NO: 3097610 - RNA, 22 nt, Molluscum contagiosum virus
cugucguaacaauggacacgca

SEQ ID NO: 3097611 - RNA, 20 nt, Molluscum contagiosum virus
agcgcuacgacgacaugcac

SEQ ID NO: 3097612 - RNA, 20 nt, Molluscum contagiosum virus
cuucuucgcaagugcacacc

SEQ ID NO: 3097613 - RNA, 21 nt, Molluscum contagiosum virus
gcuaccugcgcaagcucagcc

SEQ ID NO: 3097614 - RNA, 19 nt, Molluscum contagiosum virus
gacgcggucgcgcccuugc

SEQ ID NO: 3097615 - RNA, 15 nt, Molluscum contagiosum virus
cggggcuggcagaag

SEQ ID NO: 3097616 - RNA, 22 nt, Molluscum contagiosum virus
uaccagcucgucaacggugcgc

SEQ ID NO: 3097617 - RNA, 14 nt, Molluscum contagiosum virus
agcggcgacuugcu

SEQ ID NO: 3097618 - RNA, 19 nt, Molluscum contagiosum virus
cgcuggaccccgagcugcg

SEQ ID NO: 3097619 - RNA, 16 nt, Molluscum contagiosum virus
cacguacucgcugcuc

SEQ ID NO: 3097620 - RNA, 22 nt, Molluscum contagiosum virus
ccgcagcgcuggagcuggcugg

SEQ ID NO: 3097621 - RNA, 19 nt, Molluscum contagiosum virus
ccgcuggggcggagagcuc

SEQ ID NO: 3097622 - RNA, 22 nt, Molluscum contagiosum virus
gccggcaacgcugccgcuggcg

SEQ ID NO: 3097623 - RNA, 15 nt, Molluscum contagiosum virus
gcgcggagaucgccg

SEQ ID NO: 3097624 - RNA, 19 nt, Molluscum contagiosum virus
cucguggcguugcugcugc

SEQ ID NO: 3097625 - RNA, 20 nt, Molluscum contagiosum virus
gauguagguacccgcaaccc

SEQ ID NO: 3097626 - RNA, 13 nt, Molluscum contagiosum virus
cacgcgcccgaag

SEQ ID NO: 3097627 - RNA, 23 nt, Molluscum contagiosum virus
cggccagagccuucucgguguag

SEQ ID NO: 3097628 - RNA, 16 nt, Molluscum contagiosum virus
uccacaaagacgggcc

SEQ ID NO: 3097629 - RNA, 19 nt, Molluscum contagiosum virus
gcccgugcucaggccagca

SEQ ID NO: 3097630 - RNA, 16 nt, Molluscum contagiosum virus
uggucaacagcuacac

SEQ ID NO: 3097631 - RNA, 13 nt, Molluscum contagiosum virus
gaaagaagaagga

SEQ ID NO: 3097632 - RNA, 23 nt, Molluscum contagiosum virus
gaugcucaagcacugccucaugu

SEQ ID NO: 3097633 - RNA, 13 nt, Molluscum contagiosum virus
gggacggaauuug

SEQ ID NO: 3097634 - RNA, 17 nt, Molluscum contagiosum virus
uggaggugcgcgacucc

SEQ ID NO: 3097635 - RNA, 23 nt, Molluscum contagiosum virus
gcgaaccauuuuuugccccgcgc

SEQ ID NO: 3097636 - RNA, 13 nt, Molluscum contagiosum virus
caagaacagagaa

SEQ ID NO: 3097637 - RNA, 17 nt, Molluscum contagiosum virus
gggcagcucaagcugcu

SEQ ID NO: 3097638 - RNA, 18 nt, Molluscum contagiosum virus
cgcggcgcacggugugcu

SEQ ID NO: 3097639 - RNA, 18 nt, Molluscum contagiosum virus
guuggcgccagccuggcg

SEQ ID NO: 3097640 - RNA, 22 nt, Molluscum contagiosum virus
uuccgcgagcacguggacagca

SEQ ID NO: 3097641 - RNA, 15 nt, Molluscum contagiosum virus
cugcggcugcuggag

SEQ ID NO: 3097642 - RNA, 13 nt, Molluscum contagiosum virus
cgcggagggcagc

SEQ ID NO: 3097643 - RNA, 16 nt, Molluscum contagiosum virus
agugcucccgaggcgc

SEQ ID NO: 3097644 - RNA, 23 nt, Molluscum contagiosum virus
ccugcgcaacgcgggccaggcac

SEQ ID NO: 3097645 - RNA, 21 nt, Molluscum contagiosum virus
ccgcgcagcucguugcgcagc

SEQ ID NO: 3097646 - RNA, 15 nt, Molluscum contagiosum virus
cagagcugcccgcca

SEQ ID NO: 3097647 - RNA, 16 nt, Molluscum contagiosum virus
aggagccucuguccug

SEQ ID NO: 3097648 - RNA, 19 nt, Molluscum contagiosum virus
ggaacggcgacuuguagug

SEQ ID NO: 3097649 - RNA, 14 nt, Molluscum contagiosum virus
cucaagcuggcaac

SEQ ID NO: 3097650 - RNA, 20 nt, Molluscum contagiosum virus
augcucgucgccgggccccu

SEQ ID NO: 3097651 - RNA, 18 nt, Molluscum contagiosum virus
ggcacgccgcagcgcugg

SEQ ID NO: 3097652 - RNA, 14 nt, Molluscum contagiosum virus
cgugcgcuuugagg

SEQ ID NO: 3097653 - RNA, 15 nt, Molluscum contagiosum virus
cgcacuucacggcgu

SEQ ID NO: 3097654 - RNA, 22 nt, Molluscum contagiosum virus
cgcgagcgcgcccccgagcugc

SEQ ID NO: 3097655 - RNA, 22 nt, Molluscum contagiosum virus
guccgccucgagcacgccucca

SEQ ID NO: 3097656 - RNA, 20 nt, Molluscum contagiosum virus
cuuuuccgcgaaguccuggg

SEQ ID NO: 3097657 - RNA, 17 nt, Molluscum contagiosum virus
ccuuggcagcaacugca

SEQ ID NO: 3097658 - RNA, 22 nt, Molluscum contagiosum virus
gacguccacaaagcccuccuga

SEQ ID NO: 3097659 - RNA, 16 nt, Molluscum contagiosum virus
cggaaccguggugcgc

SEQ ID NO: 3097660 - RNA, 22 nt, Molluscum contagiosum virus
gcacuauggacgcuugcuagca

SEQ ID NO: 3097661 - RNA, 15 nt, Molluscum contagiosum virus
gcucucgcgcgccag

SEQ ID NO: 3097662 - RNA, 22 nt, Molluscum contagiosum virus
ggcugccgcugccugugcccag

SEQ ID NO: 3097663 - RNA, 20 nt, Molluscum contagiosum virus
ggaggcgcuagugcagauga

SEQ ID NO: 3097664 - RNA, 9 nt, Molluscum contagiosum virus
agcaaggag

SEQ ID NO: 3097665 - RNA, 16 nt, Molluscum contagiosum virus
cgcagucgcaguaccc

SEQ ID NO: 3097666 - RNA, 22 nt, Molluscum contagiosum virus
gaccucgcgcuuccggcggcuc

SEQ ID NO: 3097667 - RNA, 23 nt, Molluscum contagiosum virus
gcaaccucgggaagcccucaggg

SEQ ID NO: 3097668 - RNA, 22 nt, Molluscum contagiosum virus
gcuggcuucuuguugucugcgg

SEQ ID NO: 3097669 - RNA, 15 nt, Molluscum contagiosum virus
caagacgcugcuggc

SEQ ID NO: 3097670 - RNA, 22 nt, Molluscum contagiosum virus
gaggccugcugaagaaggagcc

SEQ ID NO: 3097671 - RNA, 16 nt, Molluscum contagiosum virus
gccugcgggcggcaca

SEQ ID NO: 3097672 - RNA, 16 nt, Molluscum contagiosum virus
gccugugccugcaaga

SEQ ID NO: 3097673 - RNA, 12 nt, Molluscum contagiosum virus
caucgcgcugcu

SEQ ID NO: 3097674 - RNA, 19 nt, Molluscum contagiosum virus
cgcugcggcaacugccugc

SEQ ID NO: 3097675 - RNA, 18 nt, Molluscum contagiosum virus
ggccgaagucuaggcagc

SEQ ID NO: 3097676 - RNA, 12 nt, Molluscum contagiosum virus
gccugaggccgc

SEQ ID NO: 3097677 - RNA, 16 nt, Molluscum contagiosum virus
cagccgucgccgcgcc

SEQ ID NO: 3097678 - RNA, 19 nt, Molluscum contagiosum virus
caagagggggcuguuauuu

SEQ ID NO: 3097679 - RNA, 17 nt, Molluscum contagiosum virus
ugcgcuucggcucccag

SEQ ID NO: 3097680 - RNA, 14 nt, Molluscum contagiosum virus
gguugccaggcaca

SEQ ID NO: 3097681 - RNA, 21 nt, Molluscum contagiosum virus
ccuggauaucgagcgcgagau

SEQ ID NO: 3097682 - RNA, 18 nt, Molluscum contagiosum virus
ugccgcugccugugccca

SEQ ID NO: 3097683 - RNA, 18 nt, Molluscum contagiosum virus
ggagagcacuucucgccg

SEQ ID NO: 3097684 - RNA, 18 nt, Molluscum contagiosum virus
gccguuuuacacagggcu

SEQ ID NO: 3097685 - RNA, 13 nt, Molluscum contagiosum virus
cgacaggaacgca

SEQ ID NO: 3097686 - RNA, 14 nt, Molluscum contagiosum virus
guucgagcugcugc

SEQ ID NO: 3097687 - RNA, 16 nt, Molluscum contagiosum virus
gcugcucucggcagcg

SEQ ID NO: 3097688 - RNA, 12 nt, Molluscum contagiosum virus
gcgcgugccugu

SEQ ID NO: 3097689 - RNA, 15 nt, Molluscum contagiosum virus
guccggcgcucgccu

SEQ ID NO: 3097690 - RNA, 15 nt, Molluscum contagiosum virus
cacgaccacgcuggc

SEQ ID NO: 3097691 - RNA, 15 nt, Molluscum contagiosum virus
ggaagccgccagcca

SEQ ID NO: 3097692 - RNA, 13 nt, Molluscum contagiosum virus
cgcagcagugcca

SEQ ID NO: 3097693 - RNA, 14 nt, Molluscum contagiosum virus
acgccgagcgggca

SEQ ID NO: 3097694 - RNA, 16 nt, Molluscum contagiosum virus
ugguccaccagcugcc

SEQ ID NO: 3097695 - RNA, 15 nt, Molluscum contagiosum virus
gcucgaggcgccguc

SEQ ID NO: 3097696 - RNA, 16 nt, Molluscum contagiosum virus
gcuacccguugcugcg

SEQ ID NO: 3097697 - RNA, 14 nt, Molluscum contagiosum virus
aagaacaccaagag

SEQ ID NO: 3097698 - RNA, 13 nt, Molluscum contagiosum virus
cgagcuagugcac

SEQ ID NO: 3097699 - RNA, 23 nt, Molluscum contagiosum virus
agaucaaccgcaaggaaaacugc

SEQ ID NO: 3097700 - RNA, 23 nt, Molluscum contagiosum virus
ccugaggaagcaagacccagcaa

SEQ ID NO: 3097701 - RNA, 17 nt, Molluscum contagiosum virus
gacgcgaacugcccgag

SEQ ID NO: 3097702 - RNA, 14 nt, Molluscum contagiosum virus
guggucaagacugg

SEQ ID NO: 3097703 - RNA, 18 nt, Molluscum contagiosum virus
cccagcaccgcgccgcga

SEQ ID NO: 3097704 - RNA, 16 nt, Molluscum contagiosum virus
gugaugugcgcacaga

SEQ ID NO: 3097705 - RNA, 20 nt, Molluscum contagiosum virus
ggcucaacucguaggacaac

SEQ ID NO: 3097706 - RNA, 16 nt, Molluscum contagiosum virus
ucagguacguguccac

SEQ ID NO: 3097707 - RNA, 16 nt, Molluscum contagiosum virus
acaugcgugcuagccc

SEQ ID NO: 3097708 - RNA, 22 nt, Molluscum contagiosum virus
acggcaaacgccacugggucug

SEQ ID NO: 3097709 - RNA, 21 nt, Molluscum contagiosum virus
guggacgcgcgagugugugca

SEQ ID NO: 3097710 - RNA, 16 nt, Molluscum contagiosum virus
gcucaugcgcaagcag

SEQ ID NO: 3097711 - RNA, 24 nt, Molluscum contagiosum virus
guucgagaagacggggcgcacgcc

SEQ ID NO: 3097712 - RNA, 17 nt, Molluscum contagiosum virus
gcgcggcgcgcccagcg

SEQ ID NO: 3097713 - RNA, 14 nt, Molluscum contagiosum virus
ucggcaugcagcgc

SEQ ID NO: 3097714 - RNA, 15 nt, Molluscum contagiosum virus
guucgcugcuggcag

SEQ ID NO: 3097715 - RNA, 17 nt, Molluscum contagiosum virus
acugcccgcgcccugca

SEQ ID NO: 3097716 - RNA, 16 nt, Molluscum contagiosum virus
ccuggauaucgagcgc

SEQ ID NO: 3097717 - RNA, 20 nt, Molluscum contagiosum virus
ggagaccggcgucggcaaga

SEQ ID NO: 3097718 - RNA, 23 nt, Molluscum contagiosum virus
cagccuguguugcgcgcgccugc

SEQ ID NO: 3097719 - RNA, 20 nt, Molluscum contagiosum virus
ccgugggcagcuucugcucg

SEQ ID NO: 3097720 - RNA, 20 nt, Molluscum contagiosum virus
gccucgcaggcgaggucaca

SEQ ID NO: 3097721 - RNA, 15 nt, Molluscum contagiosum virus
gccugcuggcgggga

SEQ ID NO: 3097722 - RNA, 15 nt, Molluscum contagiosum virus
cuguuacggacggcg

SEQ ID NO: 3097723 - RNA, 15 nt, Molluscum contagiosum virus
aaugcgagcaaggcg

SEQ ID NO: 3097724 - RNA, 13 nt, Molluscum contagiosum virus
gcucuucucgcag

SEQ ID NO: 3097725 - RNA, 14 nt, Molluscum contagiosum virus
gacgugcugcuggc

SEQ ID NO: 3097726 - RNA, 13 nt, Molluscum contagiosum virus
ucucugcccucag

SEQ ID NO: 3097727 - RNA, 17 nt, Molluscum contagiosum virus
agcacgccuccaagaag

SEQ ID NO: 3097728 - RNA, 18 nt, Molluscum contagiosum virus
cugcggcucuacccggag

SEQ ID NO: 3097729 - RNA, 14 nt, Molluscum contagiosum virus
agagccgccggggc

SEQ ID NO: 3097730 - RNA, 19 nt, Molluscum contagiosum virus
aggaucggagcgcagcugc

SEQ ID NO: 3097731 - RNA, 13 nt, Molluscum contagiosum virus
cgccggcgcggcg

SEQ ID NO: 3097732 - RNA, 23 nt, Molluscum contagiosum virus
ccgcugcgcgcucuggagccucc

SEQ ID NO: 3097733 - RNA, 18 nt, Molluscum contagiosum virus
ucagcaccaaggacgugu

SEQ ID NO: 3097734 - RNA, 15 nt, Molluscum contagiosum virus
gagugcugagccaca

SEQ ID NO: 3097735 - RNA, 15 nt, Molluscum contagiosum virus
ugcuuccuccuccaa

SEQ ID NO: 3097736 - RNA, 20 nt, Molluscum contagiosum virus
ggucuucccgcuggcggcac

SEQ ID NO: 3097737 - RNA, 20 nt, Molluscum contagiosum virus
gagaccuggucacacuggug

SEQ ID NO: 3097738 - RNA, 20 nt, Molluscum contagiosum virus
guccuacacgccgcuggagc

SEQ ID NO: 3097739 - RNA, 18 nt, Molluscum contagiosum virus
uggcguugccgagcgagc

SEQ ID NO: 3097740 - RNA, 16 nt, Molluscum contagiosum virus
uuggcgcgcaagcgcu

SEQ ID NO: 3097741 - RNA, 19 nt, Molluscum contagiosum virus
cuuggcguucgcagugccc

SEQ ID NO: 3097742 - RNA, 14 nt, Molluscum contagiosum virus
gcgagacugugccg

SEQ ID NO: 3097743 - RNA, 18 nt, Molluscum contagiosum virus
cggggcgcgcgcugcgca

SEQ ID NO: 3097744 - RNA, 12 nt, Molluscum contagiosum virus
ccgaggaggcgc

SEQ ID NO: 3097745 - RNA, 19 nt, Molluscum contagiosum virus
accugcgacagcugcugcu

SEQ ID NO: 3097746 - RNA, 16 nt, Molluscum contagiosum virus
gugcgccuuuccucuc

SEQ ID NO: 3097747 - RNA, 19 nt, Molluscum contagiosum virus
gcugcaggaccugcuggug

SEQ ID NO: 3097748 - RNA, 19 nt, Molluscum contagiosum virus
cuuccgcaccuggucgagc

SEQ ID NO: 3097749 - RNA, 15 nt, Molluscum contagiosum virus
cgaacugcaacguga

SEQ ID NO: 3097750 - RNA, 16 nt, Molluscum contagiosum virus
cgccacgagcgccgcg

SEQ ID NO: 3097751 - RNA, 17 nt, Molluscum contagiosum virus
gcuggcgcucgcgcgca

SEQ ID NO: 3097752 - RNA, 14 nt, Molluscum contagiosum virus
cgcugcgcgcucug

SEQ ID NO: 3097753 - RNA, 15 nt, Molluscum contagiosum virus
ucaagacgcugguga

SEQ ID NO: 3097754 - RNA, 15 nt, Molluscum contagiosum virus
caaugcgcaaggccg

SEQ ID NO: 3097755 - RNA, 17 nt, Molluscum contagiosum virus
cacgaccgcgcacgcag

SEQ ID NO: 3097756 - RNA, 17 nt, Molluscum contagiosum virus
gaggggcaguguuccug

SEQ ID NO: 3097757 - RNA, 16 nt, Molluscum contagiosum virus
agcaccaagaagcggc

SEQ ID NO: 3097758 - RNA, 16 nt, Molluscum contagiosum virus
acggcgugcuggccag

SEQ ID NO: 3097759 - RNA, 17 nt, Molluscum contagiosum virus
ccacgugcgcuggccca

SEQ ID NO: 3097760 - RNA, 15 nt, Molluscum contagiosum virus
agagccgccggggcc

SEQ ID NO: 3097761 - RNA, 22 nt, Molluscum contagiosum virus
cggcacacaugcuagcgggcaa

SEQ ID NO: 3097762 - RNA, 18 nt, Molluscum contagiosum virus
guggccuuuagcagcggc

SEQ ID NO: 3097763 - RNA, 14 nt, Molluscum contagiosum virus
gcgacagcugcugc

SEQ ID NO: 3097764 - RNA, 16 nt, Molluscum contagiosum virus
ccugcacgacccucuu

SEQ ID NO: 3097765 - RNA, 21 nt, Molluscum contagiosum virus
gugugcgcgcugcacgccgcc

SEQ ID NO: 3097766 - RNA, 15 nt, Molluscum contagiosum virus
ucgcacacugcagca

SEQ ID NO: 3097767 - RNA, 19 nt, Molluscum contagiosum virus
cgcgccgcgcgcgccggga

SEQ ID NO: 3097768 - RNA, 18 nt, Molluscum contagiosum virus
cugacgccgauguccugc

SEQ ID NO: 3097769 - RNA, 16 nt, Molluscum contagiosum virus
uucaggaacaaggcca

SEQ ID NO: 3097770 - RNA, 15 nt, Molluscum contagiosum virus
gcuggcaccgggcgc

SEQ ID NO: 3097771 - RNA, 14 nt, Molluscum contagiosum virus
auguccacggacau

SEQ ID NO: 3097772 - RNA, 12 nt, Molluscum contagiosum virus
gguucugcgcug

SEQ ID NO: 3097773 - RNA, 18 nt, Molluscum contagiosum virus
ucuuccggaggcagcgcu

SEQ ID NO: 3097774 - RNA, 14 nt, Molluscum contagiosum virus
aacuagugcugcug

SEQ ID NO: 3097775 - RNA, 23 nt, Molluscum contagiosum virus
gagggcgggcacgugcugcugcg

SEQ ID NO: 3097776 - RNA, 20 nt, Molluscum contagiosum virus
ggcuuggacuccgaggcagg

SEQ ID NO: 3097777 - RNA, 14 nt, Molluscum contagiosum virus
ucgcguccgcgcag

SEQ ID NO: 3097778 - RNA, 11 nt, Molluscum contagiosum virus
cacguuggagg

SEQ ID NO: 3097779 - RNA, 21 nt, Molluscum contagiosum virus
cgcaaacaagcagucucaugg

SEQ ID NO: 3097780 - RNA, 23 nt, Molluscum contagiosum virus
gcuaccacgagcacugccugccg

SEQ ID NO: 3097781 - RNA, 16 nt, Molluscum contagiosum virus
cggugcaaccgcugcu

SEQ ID NO: 3097782 - RNA, 15 nt, Molluscum contagiosum virus
gcgugcgcgggcacg

SEQ ID NO: 3097783 - RNA, 20 nt, Molluscum contagiosum virus
acggcgcucgccucugggcg

SEQ ID NO: 3097784 - RNA, 21 nt, Molluscum contagiosum virus
gcgauguuuugaacagacaac

SEQ ID NO: 3097785 - RNA, 19 nt, Molluscum contagiosum virus
cagcuaggauccugcucaa

SEQ ID NO: 3097786 - RNA, 15 nt, Molluscum contagiosum virus
cgugcuggagcaggg

SEQ ID NO: 3097787 - RNA, 19 nt, Molluscum contagiosum virus
acuaagccgcgugcuggcg

SEQ ID NO: 3097788 - RNA, 19 nt, Molluscum contagiosum virus
accugcacgacccucuucg

SEQ ID NO: 3097789 - RNA, 21 nt, Molluscum contagiosum virus
acgagccgcugcuccugcucu

SEQ ID NO: 3097790 - RNA, 17 nt, Molluscum contagiosum virus
ggcaaucgcgugcuugc

SEQ ID NO: 3097791 - RNA, 21 nt, Molluscum contagiosum virus
cagcucggcgagagcgcgcag

SEQ ID NO: 3097792 - RNA, 14 nt, Molluscum contagiosum virus
cgugcaccucaaga

SEQ ID NO: 3097793 - RNA, 18 nt, Molluscum contagiosum virus
cacugcggcaacgagcac

SEQ ID NO: 3097794 - RNA, 20 nt, Molluscum contagiosum virus
ccggcaccacgugcgcuggc

SEQ ID NO: 3097795 - RNA, 21 nt, Molluscum contagiosum virus
cccggccucgccuccgggcgc

SEQ ID NO: 3097796 - RNA, 16 nt, Molluscum contagiosum virus
ggcacauccgcuaccu

SEQ ID NO: 3097797 - RNA, 14 nt, Molluscum contagiosum virus
accgcgggcgcaga

SEQ ID NO: 3097798 - RNA, 13 nt, Molluscum contagiosum virus
uuuacugcaagau

SEQ ID NO: 3097799 - RNA, 14 nt, Molluscum contagiosum virus
cagcccugugcccg

SEQ ID NO: 3097800 - RNA, 15 nt, Molluscum contagiosum virus
acaugcggagacugu

SEQ ID NO: 3097801 - RNA, 16 nt, Molluscum contagiosum virus
gcccggaucugguccg

SEQ ID NO: 3097802 - RNA, 16 nt, Molluscum contagiosum virus
gcaacaaggaaaggca

SEQ ID NO: 3097803 - RNA, 20 nt, Molluscum contagiosum virus
ccugcucucgcgcgccagca

SEQ ID NO: 3097804 - RNA, 18 nt, Molluscum contagiosum virus
cuccaagaagaggccagc

SEQ ID NO: 3097805 - RNA, 18 nt, Molluscum contagiosum virus
ccgcugccugugcccagu

SEQ ID NO: 3097806 - RNA, 17 nt, Molluscum contagiosum virus
cgcgcggcaagccuggc

SEQ ID NO: 3097807 - RNA, 14 nt, Molluscum contagiosum virus
gcccgccgggcacc

SEQ ID NO: 3097808 - RNA, 11 nt, Molluscum contagiosum virus
agagccgccgg

SEQ ID NO: 3097809 - RNA, 13 nt, Molluscum contagiosum virus
ugcggagcuggcc

SEQ ID NO: 3097810 - RNA, 11 nt, Molluscum contagiosum virus
cgagcugcuag

SEQ ID NO: 3097811 - RNA, 13 nt, Molluscum contagiosum virus
uggcggggcuggc

SEQ ID NO: 3097812 - RNA, 21 nt, Molluscum contagiosum virus
cccagcgugacaaucucugcg

SEQ ID NO: 3097813 - RNA, 15 nt, Molluscum contagiosum virus
cacgcacucgcuggc

SEQ ID NO: 3097814 - RNA, 21 nt, Molluscum contagiosum virus
gccggcucagcguggagcacc

SEQ ID NO: 3097815 - RNA, 18 nt, Molluscum contagiosum virus
ucgcgcuuuuuucuucgc

SEQ ID NO: 3097816 - RNA, 16 nt, Molluscum contagiosum virus
cacgugcacgcgcacg

SEQ ID NO: 3097817 - RNA, 17 nt, Molluscum contagiosum virus
cucgacaaggaggcuuu

SEQ ID NO: 3097818 - RNA, 20 nt, Molluscum contagiosum virus
cgccgcaaacacugucucug

SEQ ID NO: 3097819 - RNA, 17 nt, Molluscum contagiosum virus
cgcggugugcacaugcc

SEQ ID NO: 3097820 - RNA, 15 nt, Molluscum contagiosum virus
gacaagacaacacuc

SEQ ID NO: 3097821 - RNA, 12 nt, Molluscum contagiosum virus
gagccugcugcu

SEQ ID NO: 3097822 - RNA, 16 nt, Molluscum contagiosum virus
ggcggagguggcggag

SEQ ID NO: 3097823 - RNA, 15 nt, Molluscum contagiosum virus
accagcucgcgccgc

SEQ ID NO: 3097824 - RNA, 17 nt, Molluscum contagiosum virus
gagaagaccuguucuuu

SEQ ID NO: 3097825 - RNA, 19 nt, Molluscum contagiosum virus
ccacgagcguguccaggug

SEQ ID NO: 3097826 - RNA, 12 nt, Molluscum contagiosum virus
guccccaagagc

SEQ ID NO: 3097827 - RNA, 15 nt, Molluscum contagiosum virus
cggacaagacaacac

SEQ ID NO: 3097828 - RNA, 19 nt, Molluscum contagiosum virus
accggagacaccagcuccg

SEQ ID NO: 3097829 - RNA, 17 nt, Molluscum contagiosum virus
cgcugcgcgugcugggc

SEQ ID NO: 3097830 - RNA, 21 nt, Molluscum contagiosum virus
uagcagcuucuuggagcccuu

SEQ ID NO: 3097831 - RNA, 21 nt, Molluscum contagiosum virus
gugcaauuccguccagugaaa

SEQ ID NO: 3097832 - RNA, 22 nt, Molluscum contagiosum virus
cggacaagacaacacucgugcu

SEQ ID NO: 3097833 - RNA, 22 nt, Molluscum contagiosum virus
gcaaggccguccccggaaagca

SEQ ID NO: 3097834 - RNA, 19 nt, Molluscum contagiosum virus
uccgcacagagggacagca

SEQ ID NO: 3097835 - RNA, 19 nt, Molluscum contagiosum virus
gcugcgcuccaugcugccg

SEQ ID NO: 3097836 - RNA, 15 nt, Molluscum contagiosum virus
ccacggccgcgcgcg

SEQ ID NO: 3097837 - RNA, 20 nt, Molluscum contagiosum virus
cgagcgcguccaugagcauc

SEQ ID NO: 3097838 - RNA, 14 nt, Molluscum contagiosum virus
gugacggcccaccu

SEQ ID NO: 3097839 - RNA, 15 nt, Molluscum contagiosum virus
ggccgaacugcucug

SEQ ID NO: 3097840 - RNA, 20 nt, Molluscum contagiosum virus
cguccacgcaggacuggcac

SEQ ID NO: 3097841 - RNA, 14 nt, Molluscum contagiosum virus
cgcccgcugcucua

SEQ ID NO: 3097842 - RNA, 20 nt, Molluscum contagiosum virus
gcaagaagaucgcggcgccg

SEQ ID NO: 3097843 - RNA, 16 nt, Molluscum contagiosum virus
uggacuccgaggcagg

SEQ ID NO: 3097844 - RNA, 23 nt, Molluscum contagiosum virus
gcucgcgacgugcgcgcugcgcg

SEQ ID NO: 3097845 - RNA, 14 nt, Molluscum contagiosum virus
guguccgcacgcac

SEQ ID NO: 3097846 - RNA, 18 nt, Molluscum contagiosum virus
gcacgugugcggagagcc

SEQ ID NO: 3097847 - RNA, 21 nt, Molluscum contagiosum virus
gucagccgcacggcgcccagg

SEQ ID NO: 3097848 - RNA, 18 nt, Molluscum contagiosum virus
ucguggacgagcagagcc

SEQ ID NO: 3097849 - RNA, 11 nt, Molluscum contagiosum virus
gcacgcacggc

SEQ ID NO: 3097850 - RNA, 21 nt, Molluscum contagiosum virus
cgaggccggccgugcagagca

SEQ ID NO: 3097851 - RNA, 18 nt, Molluscum contagiosum virus
cggagacagugacagacu

SEQ ID NO: 3097852 - RNA, 16 nt, Molluscum contagiosum virus
agguggcacccuggcu

SEQ ID NO: 3097853 - RNA, 15 nt, Molluscum contagiosum virus
acuacuuccugcagc

SEQ ID NO: 3097854 - RNA, 22 nt, Molluscum contagiosum virus
cuucccguuccugggcaacgcg

SEQ ID NO: 3097855 - RNA, 15 nt, Molluscum contagiosum virus
ccgcaguaccaguac

SEQ ID NO: 3097856 - RNA, 16 nt, Molluscum contagiosum virus
gcucgcgcucgggaag

SEQ ID NO: 3097857 - RNA, 19 nt, Molluscum contagiosum virus
gccgugaacgaggcugcug

SEQ ID NO: 3097858 - RNA, 17 nt, Molluscum contagiosum virus
uguagcgguugaccagc

SEQ ID NO: 3097859 - RNA, 16 nt, Molluscum contagiosum virus
gccgaacugcucugcg

SEQ ID NO: 3097860 - RNA, 21 nt, Molluscum contagiosum virus
ccugcgcaacgugcugcgccg

SEQ ID NO: 3097861 - RNA, 17 nt, Molluscum contagiosum virus
agggcagcucaagcugc

SEQ ID NO: 3097862 - RNA, 17 nt, Molluscum contagiosum virus
gcgcgccgcugcccgcg

SEQ ID NO: 3097863 - RNA, 18 nt, Molluscum contagiosum virus
gaucacgccgugacggcc

SEQ ID NO: 3097864 - RNA, 14 nt, Molluscum contagiosum virus
ggcggcggccacgc

SEQ ID NO: 3097865 - RNA, 11 nt, Molluscum contagiosum virus
gagcugcugcc

SEQ ID NO: 3097866 - RNA, 21 nt, Molluscum contagiosum virus
gcuggcgcucggcguggugcu

SEQ ID NO: 3097867 - RNA, 18 nt, Molluscum contagiosum virus
gcgagcugaggcaacauc

SEQ ID NO: 3097868 - RNA, 20 nt, Molluscum contagiosum virus
cgagcgcccgugcuugcgca

SEQ ID NO: 3097869 - RNA, 22 nt, Molluscum contagiosum virus
ccacgugcgcuggcccacgcug

SEQ ID NO: 3097870 - RNA, 13 nt, Molluscum contagiosum virus
agcggccuguucu

SEQ ID NO: 3097871 - RNA, 16 nt, Molluscum contagiosum virus
ucgcgguggcaggcgc

SEQ ID NO: 3097872 - RNA, 15 nt, Molluscum contagiosum virus
ugagugcgggucaca

SEQ ID NO: 3097873 - RNA, 16 nt, Molluscum contagiosum virus
gccguggcaaacaggc

SEQ ID NO: 3097874 - RNA, 18 nt, Molluscum contagiosum virus
cacuagcaaggcgccgcg

SEQ ID NO: 3097875 - RNA, 20 nt, Molluscum contagiosum virus
gccccagaaggucgugcgag

SEQ ID NO: 3097876 - RNA, 19 nt, Molluscum contagiosum virus
ucaccuucggaacugcgga

SEQ ID NO: 3097877 - RNA, 18 nt, Molluscum contagiosum virus
gcgcgaacucgcggcagu

SEQ ID NO: 3097878 - RNA, 15 nt, Molluscum contagiosum virus
aggagggagagcugc

SEQ ID NO: 3097879 - RNA, 15 nt, Molluscum contagiosum virus
gccacgcccgggccc

SEQ ID NO: 3097880 - RNA, 21 nt, Molluscum contagiosum virus
cuuuaacgcgugcggugacuu

SEQ ID NO: 3097881 - RNA, 19 nt, Molluscum contagiosum virus
gggcgcagccacgacucgc

SEQ ID NO: 3097882 - RNA, 14 nt, Molluscum contagiosum virus
caaccacagcucuc

SEQ ID NO: 3097883 - RNA, 21 nt, Molluscum contagiosum virus
cggcugguguuaccgggucgc

SEQ ID NO: 3097884 - RNA, 11 nt, Molluscum contagiosum virus
augagcggcac

SEQ ID NO: 3097885 - RNA, 20 nt, Molluscum contagiosum virus
ccugcugaagaaggagcccu

SEQ ID NO: 3097886 - RNA, 13 nt, Molluscum contagiosum virus
aggaaaaggcaca

SEQ ID NO: 3097887 - RNA, 15 nt, Molluscum contagiosum virus
cuggcaccgggcgcc

SEQ ID NO: 3097888 - RNA, 19 nt, Molluscum contagiosum virus
agcuccgcgacuaccugcu

SEQ ID NO: 3097889 - RNA, 20 nt, Molluscum contagiosum virus
gauacuuccgguguccccgg

SEQ ID NO: 3097890 - RNA, 17 nt, Molluscum contagiosum virus
cccgcgaacgagagaca

SEQ ID NO: 3097891 - RNA, 17 nt, Molluscum contagiosum virus
agacgcuccauucucuc

SEQ ID NO: 3097892 - RNA, 22 nt, Molluscum contagiosum virus
gucucucguucgcgggcccgcc

SEQ ID NO: 3097893 - RNA, 21 nt, Molluscum contagiosum virus
ccaggaacgcgccgcggaugu

SEQ ID NO: 3097894 - RNA, 14 nt, Molluscum contagiosum virus
uacgcgccggggcg

SEQ ID NO: 3097895 - RNA, 15 nt, Molluscum contagiosum virus
gccgcgcaccuggag

SEQ ID NO: 3097896 - RNA, 17 nt, Molluscum contagiosum virus
gacggaaccguggugcg

SEQ ID NO: 3097897 - RNA, 17 nt, Molluscum contagiosum virus
cguucgacggcuggugu

SEQ ID NO: 3097898 - RNA, 18 nt, Molluscum contagiosum virus
aaaucuguucgagcaaca

SEQ ID NO: 3097899 - RNA, 13 nt, Molluscum contagiosum virus
aacugcugggcgu

SEQ ID NO: 3097900 - RNA, 22 nt, Molluscum contagiosum virus
gacgacaugcacacgcaccgcc

SEQ ID NO: 3097901 - RNA, 16 nt, Molluscum contagiosum virus
gacgcccuccucgacc

SEQ ID NO: 3097902 - RNA, 12 nt, Molluscum contagiosum virus
gccgcggaggga

SEQ ID NO: 3097903 - RNA, 20 nt, Molluscum contagiosum virus
caggcggccgcguugcagca

SEQ ID NO: 3097904 - RNA, 15 nt, Molluscum contagiosum virus
uggcugugcgcccac

SEQ ID NO: 3097905 - RNA, 22 nt, Molluscum contagiosum virus
cacgcuggcacggccggcgccg

SEQ ID NO: 3097906 - RNA, 13 nt, Molluscum contagiosum virus
cgcccacgugcca

SEQ ID NO: 3097907 - RNA, 18 nt, Molluscum contagiosum virus
accaggcgcgugcccugc

SEQ ID NO: 3097908 - RNA, 19 nt, Molluscum contagiosum virus
ggccacucucccgggcucu

SEQ ID NO: 3097909 - RNA, 15 nt, Molluscum contagiosum virus
ccgcgcucacugcag

SEQ ID NO: 3097910 - RNA, 21 nt, Molluscum contagiosum virus
accugauuuucccgggcggcg

SEQ ID NO: 3097911 - RNA, 19 nt, Molluscum contagiosum virus
guaccgccgcggccgcgag

SEQ ID NO: 3097912 - RNA, 22 nt, Molluscum contagiosum virus
gaacgucuucuaccgcccgcug

SEQ ID NO: 3097913 - RNA, 16 nt, Molluscum contagiosum virus
cgagggcucguccucu

SEQ ID NO: 3097914 - RNA, 15 nt, Molluscum contagiosum virus
uuuucccgggcggcg

SEQ ID NO: 3097915 - RNA, 18 nt, Molluscum contagiosum virus
cgucgaagaccaccagca

SEQ ID NO: 3097916 - RNA, 23 nt, Molluscum contagiosum virus
gaauguagccuuuguucuuagca

SEQ ID NO: 3097917 - RNA, 13 nt, Molluscum contagiosum virus
gccuucgacggcu

SEQ ID NO: 3097918 - RNA, 21 nt, Molluscum contagiosum virus
gcgcggcuuggcgcccuuccu

SEQ ID NO: 3097919 - RNA, 20 nt, Molluscum contagiosum virus
agaucaggcagcugcugcgc

SEQ ID NO: 3097920 - RNA, 13 nt, Molluscum contagiosum virus
aguucggccgcac

SEQ ID NO: 3097921 - RNA, 16 nt, Molluscum contagiosum virus
guccgguacugcugca

SEQ ID NO: 3097922 - RNA, 17 nt, Molluscum contagiosum virus
auccugguuccucuccu

SEQ ID NO: 3097923 - RNA, 20 nt, Molluscum contagiosum virus
cgugcuggagggcacgcugc

SEQ ID NO: 3097924 - RNA, 22 nt, Molluscum contagiosum virus
ggaacucggcuucugcugcaca

SEQ ID NO: 3097925 - RNA, 23 nt, Molluscum contagiosum virus
ucgcccggcaggcucccgcuguc

SEQ ID NO: 3097926 - RNA, 15 nt, Molluscum contagiosum virus
acgacucgcugccag

SEQ ID NO: 3097927 - RNA, 20 nt, Molluscum contagiosum virus
gagcguacucgggccgcgag

SEQ ID NO: 3097928 - RNA, 19 nt, Molluscum contagiosum virus
gguacuuguugugcacgcu

SEQ ID NO: 3097929 - RNA, 12 nt, Molluscum contagiosum virus
acugcagcagcc

SEQ ID NO: 3097930 - RNA, 18 nt, Molluscum contagiosum virus
ugcgcaagcucagccucu

SEQ ID NO: 3097931 - RNA, 23 nt, Molluscum contagiosum virus
uggacgcgcucaagauccgagaa

SEQ ID NO: 3097932 - RNA, 20 nt, Molluscum contagiosum virus
cuggcuuccgacgucaagca

SEQ ID NO: 3097933 - RNA, 21 nt, Molluscum contagiosum virus
acagucuccacgcgugcgcgc

SEQ ID NO: 3097934 - RNA, 14 nt, Molluscum contagiosum virus
cugauuacauccug

SEQ ID NO: 3097935 - RNA, 13 nt, Molluscum contagiosum virus
auacuccugcugg

SEQ ID NO: 3097936 - RNA, 14 nt, Molluscum contagiosum virus
ugcugucccucugu

SEQ ID NO: 3097937 - RNA, 18 nt, Molluscum contagiosum virus
uccgaugugagcaagcug

SEQ ID NO: 3097938 - RNA, 14 nt, Molluscum contagiosum virus
cacgugcugcugcg

SEQ ID NO: 3097939 - RNA, 17 nt, Molluscum contagiosum virus
acucggcuucugcugca

SEQ ID NO: 3097940 - RNA, 22 nt, Molluscum contagiosum virus
gcugccgcgcguuuucccgagg

SEQ ID NO: 3097941 - RNA, 22 nt, Molluscum contagiosum virus
cacuugcacgcgcacgcgcccu

SEQ ID NO: 3097942 - RNA, 20 nt, Molluscum contagiosum virus
ucgcaaucugacggugcaac

SEQ ID NO: 3097943 - RNA, 16 nt, Molluscum contagiosum virus
gcgcaacgcgggccag

SEQ ID NO: 3097944 - RNA, 21 nt, Molluscum contagiosum virus
cuucucgcagcguuccaggaa

SEQ ID NO: 3097945 - RNA, 16 nt, Molluscum contagiosum virus
ucuuggcaugcgugcu

SEQ ID NO: 3097946 - RNA, 22 nt, Molluscum contagiosum virus
ccgcguaccaccguggaggagc

SEQ ID NO: 3097947 - RNA, 14 nt, Molluscum contagiosum virus
cggacgcgggccug

SEQ ID NO: 3097948 - RNA, 16 nt, Molluscum contagiosum virus
gcacggcgcccaggaa

SEQ ID NO: 3097949 - RNA, 17 nt, Molluscum contagiosum virus
cacgugcagcggcgcca

SEQ ID NO: 3097950 - RNA, 12 nt, Molluscum contagiosum virus
ucggcggccgga

SEQ ID NO: 3097951 - RNA, 23 nt, Molluscum contagiosum virus
cucguggaucgcgcgcaccugca

SEQ ID NO: 3097952 - RNA, 14 nt, Molluscum contagiosum virus
uuucguugccugca

SEQ ID NO: 3097953 - RNA, 20 nt, Molluscum contagiosum virus
cacggccuucuccucgcucu

SEQ ID NO: 3097954 - RNA, 21 nt, Molluscum contagiosum virus
gcacuagacugucgacagaga

SEQ ID NO: 3097955 - RNA, 18 nt, Molluscum contagiosum virus
cacauugcugcugcaggc

SEQ ID NO: 3097956 - RNA, 12 nt, Molluscum contagiosum virus
caagccugcuca

SEQ ID NO: 3097957 - RNA, 18 nt, Molluscum contagiosum virus
accgcggcgggugccgcc

SEQ ID NO: 3097958 - RNA, 23 nt, Molluscum contagiosum virus
aggaguccgugacagagugccug

SEQ ID NO: 3097959 - RNA, 21 nt, Molluscum contagiosum virus
ggaccuuggcgcgccgcugcc

SEQ ID NO: 3097960 - RNA, 18 nt, Molluscum contagiosum virus
cggaggucuacaacgagc

SEQ ID NO: 3097961 - RNA, 20 nt, Molluscum contagiosum virus
gcucuacgagacucuggaag

SEQ ID NO: 3097962 - RNA, 20 nt, Molluscum contagiosum virus
ccuucuucgugcugugccua

SEQ ID NO: 3097963 - RNA, 18 nt, Molluscum contagiosum virus
caccgcggcgcggagcgc

SEQ ID NO: 3097964 - RNA, 16 nt, Molluscum contagiosum virus
acuggcaccugcggcu

SEQ ID NO: 3097965 - RNA, 16 nt, Molluscum contagiosum virus
agacgacucgcugcca

SEQ ID NO: 3097966 - RNA, 14 nt, Molluscum contagiosum virus
gcggcggccccugc

SEQ ID NO: 3097967 - RNA, 13 nt, Molluscum contagiosum virus
ucgcgcugcagca

SEQ ID NO: 3097968 - RNA, 12 nt, Molluscum contagiosum virus
aggagcuguccg

SEQ ID NO: 3097969 - RNA, 13 nt, Molluscum contagiosum virus
guucgcugcuggc

SEQ ID NO: 3097970 - RNA, 19 nt, Molluscum contagiosum virus
agcagacguacgagcaggc

SEQ ID NO: 3097971 - RNA, 22 nt, Molluscum contagiosum virus
cagugcaguggcuacuggagga

SEQ ID NO: 3097972 - RNA, 19 nt, Molluscum contagiosum virus
gcuucgccgcgcgcgccag

SEQ ID NO: 3097973 - RNA, 19 nt, Molluscum contagiosum virus
gacgcagcgcgagcugugc

SEQ ID NO: 3097974 - RNA, 15 nt, Molluscum contagiosum virus
gcucgcgcgccagca

SEQ ID NO: 3097975 - RNA, 17 nt, Molluscum contagiosum virus
gaugaguaccgcgggcg

SEQ ID NO: 3097976 - RNA, 19 nt, Molluscum contagiosum virus
gcaccgccuggugcugcgc

SEQ ID NO: 3097977 - RNA, 20 nt, Molluscum contagiosum virus
gaacugacugcugcccccgc

SEQ ID NO: 3097978 - RNA, 16 nt, Molluscum contagiosum virus
aagaagugugccugcu

SEQ ID NO: 3097979 - RNA, 17 nt, Molluscum contagiosum virus
ccucgucguccacaggc

SEQ ID NO: 3097980 - RNA, 14 nt, Molluscum contagiosum virus
cgugcugcggcugc

SEQ ID NO: 3097981 - RNA, 18 nt, Molluscum contagiosum virus
ggcacccgcaggaaaggc

SEQ ID NO: 3097982 - RNA, 19 nt, Molluscum contagiosum virus
cguuagcguugguaacaag

SEQ ID NO: 3097983 - RNA, 20 nt, Molluscum contagiosum virus
gggcgccaaguccgagcaag

SEQ ID NO: 3097984 - RNA, 15 nt, Molluscum contagiosum virus
ccccgcgcgugcagu

SEQ ID NO: 3097985 - RNA, 18 nt, Molluscum contagiosum virus
caggaguccgugacagag

SEQ ID NO: 3097986 - RNA, 18 nt, Molluscum contagiosum virus
ggaggccaacgccagcug

SEQ ID NO: 3097987 - RNA, 13 nt, Molluscum contagiosum virus
guccugcgugcuu

SEQ ID NO: 3097988 - RNA, 20 nt, Molluscum contagiosum virus
gucccagcagcugcuccgcc

SEQ ID NO: 3097989 - RNA, 13 nt, Molluscum contagiosum virus
cugacggcagcaa

SEQ ID NO: 3097990 - RNA, 22 nt, Molluscum contagiosum virus
uucugcgcgccgcucgucgcug

SEQ ID NO: 3097991 - RNA, 21 nt, Molluscum contagiosum virus
cacucgcgcguccgcaaagac

SEQ ID NO: 3097992 - RNA, 22 nt, Molluscum contagiosum virus
gcgcgaaacgguaagcucgacg

SEQ ID NO: 3097993 - RNA, 13 nt, Molluscum contagiosum virus
ggcacgcugagca

SEQ ID NO: 3097994 - RNA, 13 nt, Molluscum contagiosum virus
aaaggcacacccc

SEQ ID NO: 3097995 - RNA, 14 nt, Molluscum contagiosum virus
cccgagcuggugau

SEQ ID NO: 3097996 - RNA, 19 nt, Molluscum contagiosum virus
ugcacgggcaugcacagcu

SEQ ID NO: 3097997 - RNA, 14 nt, Molluscum contagiosum virus
cgugcugaucacgc

SEQ ID NO: 3097998 - RNA, 16 nt, Molluscum contagiosum virus
cugggcgguugccugc

SEQ ID NO: 3097999 - RNA, 18 nt, Molluscum contagiosum virus
ggaacaggugcgcaagca

SEQ ID NO: 3098000 - RNA, 15 nt, Molluscum contagiosum virus
gcgcgcugcacgccg

SEQ ID NO: 3098001 - RNA, 20 nt, Molluscum contagiosum virus
gggcaagcucgcgcugcuga

SEQ ID NO: 3098002 - RNA, 11 nt, Molluscum contagiosum virus
aguccugggcg

SEQ ID NO: 3098003 - RNA, 13 nt, Molluscum contagiosum virus
gcgcccgccagca

SEQ ID NO: 3098004 - RNA, 20 nt, Molluscum contagiosum virus
cgccgggcaccggcgcucac

SEQ ID NO: 3098005 - RNA, 14 nt, Molluscum contagiosum virus
cgcgccgcgcgccg

SEQ ID NO: 3098006 - RNA, 15 nt, Molluscum contagiosum virus
cggccuagagcuggc

SEQ ID NO: 3098007 - RNA, 21 nt, Molluscum contagiosum virus
aagugcacaccagacaaaguc

SEQ ID NO: 3098008 - RNA, 21 nt, Molluscum contagiosum virus
aaggagcccgucuacauuuug

SEQ ID NO: 3098009 - RNA, 17 nt, Molluscum contagiosum virus
cgacguccuagagcaga

SEQ ID NO: 3098010 - RNA, 20 nt, Molluscum contagiosum virus
cugugcuacgcgagcacugc

SEQ ID NO: 3098011 - RNA, 10 nt, Molluscum contagiosum virus
uagcagagca

SEQ ID NO: 3098012 - RNA, 21 nt, Molluscum contagiosum virus
ccuguuaaauggacgugcucc

SEQ ID NO: 3098013 - RNA, 15 nt, Molluscum contagiosum virus
ggccuacgugcugcg

SEQ ID NO: 3098014 - RNA, 21 nt, Molluscum contagiosum virus
acuaugcgucuuccugcugcc

SEQ ID NO: 3098015 - RNA, 20 nt, Molluscum contagiosum virus
cgcgcacuaccgcaaccagc

SEQ ID NO: 3098016 - RNA, 23 nt, Molluscum contagiosum virus
ggagacggccguuuuugggacag

SEQ ID NO: 3098017 - RNA, 18 nt, Molluscum contagiosum virus
ccgcaggaaaggcacccc

SEQ ID NO: 3098018 - RNA, 22 nt, Molluscum contagiosum virus
ggacgugcuccgaguccagcuu

SEQ ID NO: 3098019 - RNA, 19 nt, Molluscum contagiosum virus
ggugccggccgccggcgcc

SEQ ID NO: 3098020 - RNA, 21 nt, Molluscum contagiosum virus
gccucgucguccacaggcgcg

SEQ ID NO: 3098021 - RNA, 19 nt, Molluscum contagiosum virus
gcggccaaccgccugcucu

SEQ ID NO: 3098022 - RNA, 18 nt, Molluscum contagiosum virus
ggucaucgggcugcagcc

SEQ ID NO: 3098023 - RNA, 16 nt, Molluscum contagiosum virus
gcagcacgcgaugagc

SEQ ID NO: 3098024 - RNA, 22 nt, Molluscum contagiosum virus
gcaccagucucgaugugacaac

SEQ ID NO: 3098025 - RNA, 20 nt, Molluscum contagiosum virus
ugcgccugccgcgcaugcug

SEQ ID NO: 3098026 - RNA, 22 nt, Molluscum contagiosum virus
cgguugccugcacaagcaggag

SEQ ID NO: 3098027 - RNA, 23 nt, Molluscum contagiosum virus
cgaggugcugcgccacgugcgca

SEQ ID NO: 3098028 - RNA, 13 nt, Molluscum contagiosum virus
gcuggccucugcc

SEQ ID NO: 3098029 - RNA, 21 nt, Molluscum contagiosum virus
agcgcuucuuccggcagcugg

SEQ ID NO: 3098030 - RNA, 15 nt, Molluscum contagiosum virus
augagcguggagaag

SEQ ID NO: 3098031 - RNA, 14 nt, Molluscum contagiosum virus
gucgaggccuucgc

SEQ ID NO: 3098032 - RNA, 20 nt, Molluscum contagiosum virus
cgcggucgacgagugcgccg

SEQ ID NO: 3098033 - RNA, 17 nt, Molluscum contagiosum virus
cuccagguccuccagcg

SEQ ID NO: 3098034 - RNA, 16 nt, Molluscum contagiosum virus
aacaagagcuuacuag

SEQ ID NO: 3098035 - RNA, 23 nt, Molluscum contagiosum virus
cgagcgggcaaugggcacgcucu

SEQ ID NO: 3098036 - RNA, 16 nt, Molluscum contagiosum virus
cguacugggagcuuuc

SEQ ID NO: 3098037 - RNA, 21 nt, Molluscum contagiosum virus
cggcggggcugcuggcggugc

SEQ ID NO: 3098038 - RNA, 18 nt, Molluscum contagiosum virus
ggucuucccgcuggcggc

SEQ ID NO: 3098039 - RNA, 22 nt, Molluscum contagiosum virus
cgggcacggguguacaaagagc

SEQ ID NO: 3098040 - RNA, 14 nt, Molluscum contagiosum virus
gcaagucucccucg

SEQ ID NO: 3098041 - RNA, 23 nt, Molluscum contagiosum virus
caugccggggaugaacgcgcugc

SEQ ID NO: 3098042 - RNA, 16 nt, Molluscum contagiosum virus
guacuccguggugcgc

SEQ ID NO: 3098043 - RNA, 21 nt, Molluscum contagiosum virus
guagucgcccccgugccggaa

SEQ ID NO: 3098044 - RNA, 17 nt, Molluscum contagiosum virus
cagcggcgccgcagcuu

SEQ ID NO: 3098045 - RNA, 20 nt, Molluscum contagiosum virus
aggaacucuacgacaugcuc

SEQ ID NO: 3098046 - RNA, 13 nt, Molluscum contagiosum virus
cuccauggagcgc

SEQ ID NO: 3098047 - RNA, 15 nt, Molluscum contagiosum virus
uugcucgcuugccgc

SEQ ID NO: 3098048 - RNA, 16 nt, Molluscum contagiosum virus
agcugcaagccagccc

SEQ ID NO: 3098049 - RNA, 12 nt, Molluscum contagiosum virus
agcuuucagagu

SEQ ID NO: 3098050 - RNA, 18 nt, Molluscum contagiosum virus
cguggcaaacaggcacac

SEQ ID NO: 3098051 - RNA, 21 nt, Molluscum contagiosum virus
cuccuuuccaucggaacuagc

SEQ ID NO: 3098052 - RNA, 18 nt, Molluscum contagiosum virus
caggccccgcaccagugc

SEQ ID NO: 3098053 - RNA, 19 nt, Molluscum contagiosum virus
cuaguggcaagggccugcg

SEQ ID NO: 3098054 - RNA, 17 nt, Molluscum contagiosum virus
ucagccccgcgccagca

SEQ ID NO: 3098055 - RNA, 18 nt, Molluscum contagiosum virus
gugcgaaggcucgagcug

SEQ ID NO: 3098056 - RNA, 16 nt, Molluscum contagiosum virus
ccggccuagagcuggc

SEQ ID NO: 3098057 - RNA, 20 nt, Molluscum contagiosum virus
uucaccuucggaacugcgga

SEQ ID NO: 3098058 - RNA, 16 nt, Molluscum contagiosum virus
ccagcagcgccagcuu

SEQ ID NO: 3098059 - RNA, 12 nt, Molluscum contagiosum virus
cugcccucggga

SEQ ID NO: 3098060 - RNA, 18 nt, Molluscum contagiosum virus
cagcguuacguacagcgg

SEQ ID NO: 3098061 - RNA, 22 nt, Molluscum contagiosum virus
acacgcugaguuacguggccgc

SEQ ID NO: 3098062 - RNA, 14 nt, Molluscum contagiosum virus
aucuugaugaccac

SEQ ID NO: 3098063 - RNA, 15 nt, Molluscum contagiosum virus
caguucggccgcacg

SEQ ID NO: 3098064 - RNA, 19 nt, Molluscum contagiosum virus
cuggcucgcgccugcgcuu

SEQ ID NO: 3098065 - RNA, 13 nt, Molluscum contagiosum virus
cugcucuggagca

SEQ ID NO: 3098066 - RNA, 15 nt, Molluscum contagiosum virus
gccuaccugcaggag

SEQ ID NO: 3098067 - RNA, 12 nt, Molluscum contagiosum virus
ccgagugcuggc

SEQ ID NO: 3098068 - RNA, 21 nt, Molluscum contagiosum virus
gccgccggugcgugcccagca

SEQ ID NO: 3098069 - RNA, 14 nt, Molluscum contagiosum virus
ugcccgaggagagc

SEQ ID NO: 3098070 - RNA, 19 nt, Molluscum contagiosum virus
gcacuacucgucuugcgcg

SEQ ID NO: 3098071 - RNA, 12 nt, Molluscum contagiosum virus
aacagcagcugg

SEQ ID NO: 3098072 - RNA, 22 nt, Molluscum contagiosum virus
cccgcaggaaaggcaccccgca

SEQ ID NO: 3098073 - RNA, 19 nt, Molluscum contagiosum virus
aaggaucucugcccucaga

SEQ ID NO: 3098074 - RNA, 17 nt, Molluscum contagiosum virus
gcagcugcgcgagccgc

SEQ ID NO: 3098075 - RNA, 21 nt, Molluscum contagiosum virus
caugcugucucugucccugca

SEQ ID NO: 3098076 - RNA, 15 nt, Molluscum contagiosum virus
uggacagcaagcagc

SEQ ID NO: 3098077 - RNA, 21 nt, Molluscum contagiosum virus
ugggcacugcuacgagccgcu

SEQ ID NO: 3098078 - RNA, 18 nt, Molluscum contagiosum virus
guggagccugaggccgcg

SEQ ID NO: 3098079 - RNA, 14 nt, Molluscum contagiosum virus
gcugucaacagugc

SEQ ID NO: 3098080 - RNA, 21 nt, Molluscum contagiosum virus
gaucuccacgucgaucagcuc

SEQ ID NO: 3098081 - RNA, 20 nt, Molluscum contagiosum virus
acgcaacgucgcacuggccu

SEQ ID NO: 3098082 - RNA, 18 nt, Molluscum contagiosum virus
cugcgcguggaguacagc

SEQ ID NO: 3098083 - RNA, 15 nt, Molluscum contagiosum virus
caucgagcugcagag

SEQ ID NO: 3098084 - RNA, 19 nt, Molluscum contagiosum virus
acuugcggcgcuagcgccc

SEQ ID NO: 3098085 - RNA, 17 nt, Molluscum contagiosum virus
cguccacaaaggcgggc

SEQ ID NO: 3098086 - RNA, 14 nt, Molluscum contagiosum virus
ccugccagcagagc

SEQ ID NO: 3098087 - RNA, 18 nt, Molluscum contagiosum virus
gcaagacccagcaaggcc

SEQ ID NO: 3098088 - RNA, 19 nt, Molluscum contagiosum virus
gcccagccugacggcagca

SEQ ID NO: 3098089 - RNA, 15 nt, Molluscum contagiosum virus
cgcgaaguccugggc

SEQ ID NO: 3098090 - RNA, 19 nt, Molluscum contagiosum virus
agugacuagcgcuggcugc

SEQ ID NO: 3098091 - RNA, 18 nt, Molluscum contagiosum virus
agaaaugcgcacacuugc

SEQ ID NO: 3098092 - RNA, 13 nt, Molluscum contagiosum virus
ggacggagagcgc

SEQ ID NO: 3098093 - RNA, 17 nt, Molluscum contagiosum virus
cacggagaucaggcagc

SEQ ID NO: 3098094 - RNA, 20 nt, Molluscum contagiosum virus
uccuccaauccuccugccgc

SEQ ID NO: 3098095 - RNA, 17 nt, Molluscum contagiosum virus
aagacggaguuggagac

SEQ ID NO: 3098096 - RNA, 21 nt, Molluscum contagiosum virus
ccuucgguuucuaugcccagc

SEQ ID NO: 3098097 - RNA, 18 nt, Molluscum contagiosum virus
agcacgggcgggacagac

SEQ ID NO: 3098098 - RNA, 19 nt, Molluscum contagiosum virus
cugcgcaauaaggcggugg

SEQ ID NO: 3098099 - RNA, 17 nt, Molluscum contagiosum virus
cuuccggggcgggcggc

SEQ ID NO: 3098100 - RNA, 23 nt, Molluscum contagiosum virus
gccggaaauagcgcgcuagcucc

SEQ ID NO: 3098101 - RNA, 21 nt, Molluscum contagiosum virus
gugcaagagcucguggacagc

SEQ ID NO: 3098102 - RNA, 21 nt, Molluscum contagiosum virus
aacccgcauugggccuugauu

SEQ ID NO: 3098103 - RNA, 14 nt, Molluscum contagiosum virus
cagcugcugcucgc

SEQ ID NO: 3098104 - RNA, 20 nt, Molluscum contagiosum virus
ccggugcgugcccagcaggu

SEQ ID NO: 3098105 - RNA, 12 nt, Molluscum contagiosum virus
cggcagcuggag

SEQ ID NO: 3098106 - RNA, 17 nt, Molluscum contagiosum virus
uggcuugcugcaguaug

SEQ ID NO: 3098107 - RNA, 20 nt, Molluscum contagiosum virus
uucuuuacgggcgccagcua

SEQ ID NO: 3098108 - RNA, 18 nt, Molluscum contagiosum virus
uccgcgggcgcacgcuug

SEQ ID NO: 3098109 - RNA, 13 nt, Molluscum contagiosum virus
gcgcggcugcucg

SEQ ID NO: 3098110 - RNA, 13 nt, Molluscum contagiosum virus
gcggggcugcugg

SEQ ID NO: 3098111 - RNA, 20 nt, Molluscum contagiosum virus
aucaagaucggacucagcau

SEQ ID NO: 3098112 - RNA, 18 nt, Molluscum contagiosum virus
cgcaagucucccucgcgc

SEQ ID NO: 3098113 - RNA, 16 nt, Molluscum contagiosum virus
uugcguaucggaguca

SEQ ID NO: 3098114 - RNA, 16 nt, Molluscum contagiosum virus
uaaugaagcgcugugc

SEQ ID NO: 3098115 - RNA, 15 nt, Molluscum contagiosum virus
agccucgcuggugug

SEQ ID NO: 3098116 - RNA, 21 nt, Molluscum contagiosum virus
cugcaggcaaagcggggcgcg

SEQ ID NO: 3098117 - RNA, 15 nt, Molluscum contagiosum virus
caaaggaagagcccg

SEQ ID NO: 3098118 - RNA, 21 nt, Molluscum contagiosum virus
accucacucacaugugcugcc

SEQ ID NO: 3098119 - RNA, 23 nt, Molluscum contagiosum virus
agcgcgugccgcucggaggcuug

SEQ ID NO: 3098120 - RNA, 17 nt, Molluscum contagiosum virus
ggucacgcaagcuuugu

SEQ ID NO: 3098121 - RNA, 13 nt, Molluscum contagiosum virus
cugugccugcaag

SEQ ID NO: 3098122 - RNA, 19 nt, Molluscum contagiosum virus
cugcggacgcaaaucuguu

SEQ ID NO: 3098123 - RNA, 22 nt, Molluscum contagiosum virus
agcacgccuccaagaagaggcc

SEQ ID NO: 3098124 - RNA, 22 nt, Molluscum contagiosum virus
cucgccugcgaaaaagcccgcg

SEQ ID NO: 3098125 - RNA, 17 nt, Molluscum contagiosum virus
cgaccuacuccuggcca

SEQ ID NO: 3098126 - RNA, 14 nt, Molluscum contagiosum virus
gagaaaggcaccca

SEQ ID NO: 3098127 - RNA, 14 nt, Molluscum contagiosum virus
caacgacagagccc

SEQ ID NO: 3098128 - RNA, 13 nt, Molluscum contagiosum virus
cgucgccugagcu

SEQ ID NO: 3098129 - RNA, 19 nt, Molluscum contagiosum virus
gcucuucgaccucugcuuc

SEQ ID NO: 3098130 - RNA, 19 nt, Molluscum contagiosum virus
acacgcuguugcugcugcc

SEQ ID NO: 3098131 - RNA, 17 nt, Molluscum contagiosum virus
aacgaggaaaggcaccc

SEQ ID NO: 3098132 - RNA, 14 nt, Molluscum contagiosum virus
gcgugugccggugc

SEQ ID NO: 3098133 - RNA, 21 nt, Molluscum contagiosum virus
gccuggagggcagugccaagg

SEQ ID NO: 3098134 - RNA, 19 nt, Molluscum contagiosum virus
gcacguuccaaaagacaga

SEQ ID NO: 3098135 - RNA, 12 nt, Molluscum contagiosum virus
agcuagcucugc

SEQ ID NO: 3098136 - RNA, 15 nt, Molluscum contagiosum virus
gaacauaugucuccc

SEQ ID NO: 3098137 - RNA, 22 nt, Molluscum contagiosum virus
agacggaguccucgacaaugag

SEQ ID NO: 3098138 - RNA, 18 nt, Molluscum contagiosum virus
cacguccucaagcgcccu

SEQ ID NO: 3098139 - RNA, 17 nt, Molluscum contagiosum virus
cggaucugcgcacacgu

SEQ ID NO: 3098140 - RNA, 23 nt, Molluscum contagiosum virus
ccagcguaaugaagcgcugugcg

SEQ ID NO: 3098141 - RNA, 16 nt, Molluscum contagiosum virus
cccgcacgugggcuac

SEQ ID NO: 3098142 - RNA, 14 nt, Molluscum contagiosum virus
ggcgcggccucuuu

SEQ ID NO: 3098143 - RNA, 22 nt, Molluscum contagiosum virus
caggucggccagcagcuccugg

SEQ ID NO: 3098144 - RNA, 19 nt, Molluscum contagiosum virus
cggcguccucuuuugggca

SEQ ID NO: 3098145 - RNA, 14 nt, Molluscum contagiosum virus
gagacauauguucu

SEQ ID NO: 3098146 - RNA, 22 nt, Molluscum contagiosum virus
cugccgccgccgcgaggacccg

SEQ ID NO: 3098147 - RNA, 20 nt, Molluscum contagiosum virus
aagcaagacccagcaaggcc

SEQ ID NO: 3098148 - RNA, 19 nt, Molluscum contagiosum virus
ucuggcucguacugcugca

SEQ ID NO: 3098149 - RNA, 18 nt, Molluscum contagiosum virus
gcuuggacagcaagcagc

SEQ ID NO: 3098150 - RNA, 20 nt, Molluscum contagiosum virus
cggcgcccgugagcauggag

SEQ ID NO: 3098151 - RNA, 18 nt, Molluscum contagiosum virus
agguguuccugccgggag

SEQ ID NO: 3098152 - RNA, 14 nt, Molluscum contagiosum virus
ggugccggccgccg

SEQ ID NO: 3098153 - RNA, 17 nt, Molluscum contagiosum virus
cgguguccucuucacau

SEQ ID NO: 3098154 - RNA, 19 nt, Molluscum contagiosum virus
cugcgagcgccugcgagca

SEQ ID NO: 3098155 - RNA, 14 nt, Molluscum contagiosum virus
cagcagcgccagcu

SEQ ID NO: 3098156 - RNA, 21 nt, Molluscum contagiosum virus
uucucauagcauauaaaucau

SEQ ID NO: 3098157 - RNA, 22 nt, Molluscum contagiosum virus
uguccaaggugaacgaccucaa

SEQ ID NO: 3098158 - RNA, 18 nt, Molluscum contagiosum virus
gacccccuccccagcgcc

SEQ ID NO: 3098159 - RNA, 18 nt, Molluscum contagiosum virus
cugcgccacugccacggc

SEQ ID NO: 3098160 - RNA, 15 nt, Molluscum contagiosum virus
agcaagcagccgcac

SEQ ID NO: 3098161 - RNA, 18 nt, Molluscum contagiosum virus
cugacacgcucuucggca

SEQ ID NO: 3098162 - RNA, 18 nt, Molluscum contagiosum virus
accuacgaggugcugcgc

SEQ ID NO: 3098163 - RNA, 15 nt, Molluscum contagiosum virus
cgccgcgugcccguc

SEQ ID NO: 3098164 - RNA, 16 nt, Molluscum contagiosum virus
cugcaggaccugcugg

SEQ ID NO: 3098165 - RNA, 17 nt, Molluscum contagiosum virus
gaugaacaccauccugc

SEQ ID NO: 3098166 - RNA, 22 nt, Molluscum contagiosum virus
cucaacauccaaaccaacguga

SEQ ID NO: 3098167 - RNA, 14 nt, Molluscum contagiosum virus
cgcucgcccagcuc

SEQ ID NO: 3098168 - RNA, 18 nt, Molluscum contagiosum virus
ggcggguccgcaggcucg

SEQ ID NO: 3098169 - RNA, 15 nt, Molluscum contagiosum virus
ccgcgugcgccgccg

SEQ ID NO: 3098170 - RNA, 22 nt, Molluscum contagiosum virus
cgcccgcgaaagaacacggaca

SEQ ID NO: 3098171 - RNA, 22 nt, Molluscum contagiosum virus
aaagacggacccgcgaacgagg

SEQ ID NO: 3098172 - RNA, 22 nt, Molluscum contagiosum virus
acaggggggagacgguggaggu

SEQ ID NO: 3098173 - RNA, 18 nt, Molluscum contagiosum virus
agcccaggaacaucugca

SEQ ID NO: 3098174 - RNA, 18 nt, Molluscum contagiosum virus
cgugaccuugugcgcgca

SEQ ID NO: 3098175 - RNA, 15 nt, Molluscum contagiosum virus
cacaucggcacugcu

SEQ ID NO: 3098176 - RNA, 16 nt, Molluscum contagiosum virus
cagcauguugcucuac

SEQ ID NO: 3098177 - RNA, 22 nt, Molluscum contagiosum virus
ccgacaaggagggagagcugcc

SEQ ID NO: 3098178 - RNA, 18 nt, Molluscum contagiosum virus
cagagcccgcggcgcacg

SEQ ID NO: 3098179 - RNA, 19 nt, Molluscum contagiosum virus
agugcgcgugucuggagcc

SEQ ID NO: 3098180 - RNA, 22 nt, Molluscum contagiosum virus
uccggccuguaaauggaccaca

SEQ ID NO: 3098181 - RNA, 14 nt, Molluscum contagiosum virus
uggagacggcagug

SEQ ID NO: 3098182 - RNA, 22 nt, Molluscum contagiosum virus
gcgcugcugguucugcucgcag

SEQ ID NO: 3098183 - RNA, 15 nt, Molluscum contagiosum virus
agagggucgugcagg

SEQ ID NO: 3098184 - RNA, 20 nt, Molluscum contagiosum virus
cacaguucacggcgcucgcc

SEQ ID NO: 3098185 - RNA, 20 nt, Molluscum contagiosum virus
cgccgggaauaccggagaca

SEQ ID NO: 3098186 - RNA, 17 nt, Molluscum contagiosum virus
gcggcgcgcgcugagcg

SEQ ID NO: 3098187 - RNA, 20 nt, Molluscum contagiosum virus
aaggcacccgcaggaaaggc

SEQ ID NO: 3098188 - RNA, 14 nt, Molluscum contagiosum virus
gacugugccgcucc

SEQ ID NO: 3098189 - RNA, 17 nt, Molluscum contagiosum virus
ggcgcuuucgcccgccg

SEQ ID NO: 3098190 - RNA, 18 nt, Molluscum contagiosum virus
cuguccgcgggcgcacgc

SEQ ID NO: 3098191 - RNA, 20 nt, Molluscum contagiosum virus
gcagcaaagggcggccgcag

SEQ ID NO: 3098192 - RNA, 17 nt, Molluscum contagiosum virus
gcgugcucggugucggu

SEQ ID NO: 3098193 - RNA, 20 nt, Molluscum contagiosum virus
uggcccuuuucuaggccuca

SEQ ID NO: 3098194 - RNA, 14 nt, Molluscum contagiosum virus
ugcgugguguccac

SEQ ID NO: 3098195 - RNA, 22 nt, Molluscum contagiosum virus
acggcccgaaggccaccucgca

SEQ ID NO: 3098196 - RNA, 17 nt, Molluscum contagiosum virus
uaaagaagcggugcagc

SEQ ID NO: 3098197 - RNA, 20 nt, Molluscum contagiosum virus
ccucggaggaaaagcacgcg

SEQ ID NO: 3098198 - RNA, 15 nt, Molluscum contagiosum virus
cuccgaggaggcaag

SEQ ID NO: 3098199 - RNA, 15 nt, Molluscum contagiosum virus
cucguguuguugcau

SEQ ID NO: 3098200 - RNA, 14 nt, Molluscum contagiosum virus
accgccugcgggag

SEQ ID NO: 3098201 - RNA, 17 nt, Molluscum contagiosum virus
guccagccgcagccgcg

SEQ ID NO: 3098202 - RNA, 14 nt, Molluscum contagiosum virus
gcccagcuucagca

SEQ ID NO: 3098203 - RNA, 14 nt, Molluscum contagiosum virus
ccggcggccucccu

SEQ ID NO: 3098204 - RNA, 16 nt, Molluscum contagiosum virus
gcgcugcucuggagca

SEQ ID NO: 3098205 - RNA, 14 nt, Molluscum contagiosum virus
agggcagcucaagc

SEQ ID NO: 3098206 - RNA, 18 nt, Molluscum contagiosum virus
ucgcgcguccgcaaagac

SEQ ID NO: 3098207 - RNA, 12 nt, Molluscum contagiosum virus
caccgcuccgca

SEQ ID NO: 3098208 - RNA, 19 nt, Molluscum contagiosum virus
caagaggacgagcugcuaa

SEQ ID NO: 3098209 - RNA, 20 nt, Molluscum contagiosum virus
guucuuuccggacgauaaau

SEQ ID NO: 3098210 - RNA, 21 nt, Molluscum contagiosum virus
cgggaccgcagacaaagacag

SEQ ID NO: 3098211 - RNA, 14 nt, Molluscum contagiosum virus
uguacaacucggug

SEQ ID NO: 3098212 - RNA, 18 nt, Molluscum contagiosum virus
agcuagcucuggcagccc

SEQ ID NO: 3098213 - RNA, 21 nt, Molluscum contagiosum virus
agcguacggcccgaaggccac

SEQ ID NO: 3098214 - RNA, 19 nt, Molluscum contagiosum virus
accagcgcggccguggcug

SEQ ID NO: 3098215 - RNA, 14 nt, Molluscum contagiosum virus
accugggcgccgcg

SEQ ID NO: 3098216 - RNA, 13 nt, Molluscum contagiosum virus
accacgugccaga

SEQ ID NO: 3098217 - RNA, 15 nt, Molluscum contagiosum virus
ccuggcugcugcgcg

SEQ ID NO: 3098218 - RNA, 21 nt, Molluscum contagiosum virus
gucuucgcguagucagggccu

SEQ ID NO: 3098219 - RNA, 16 nt, Molluscum contagiosum virus
gccccgcaccagugcc

SEQ ID NO: 3098220 - RNA, 19 nt, Molluscum contagiosum virus
gaaggacgcguucuccagg

SEQ ID NO: 3098221 - RNA, 17 nt, Molluscum contagiosum virus
ccgcggagaccaccgcu

SEQ ID NO: 3098222 - RNA, 15 nt, Molluscum contagiosum virus
caagagcuggucgcc

SEQ ID NO: 3098223 - RNA, 17 nt, Molluscum contagiosum virus
cguaguacugcagcagc

SEQ ID NO: 3098224 - RNA, 18 nt, Molluscum contagiosum virus
gaacaaugaggagaggaa

SEQ ID NO: 3098225 - RNA, 17 nt, Molluscum contagiosum virus
ccgggcggcgcgccgcg

SEQ ID NO: 3098226 - RNA, 17 nt, Molluscum contagiosum virus
ccgcgcucgugccgccu

SEQ ID NO: 3098227 - RNA, 11 nt, Molluscum contagiosum virus
cacgcagagcc

SEQ ID NO: 3098228 - RNA, 14 nt, Molluscum contagiosum virus
ucacggcucugcgu

SEQ ID NO: 3098229 - RNA, 21 nt, Molluscum contagiosum virus
cuugaauugagugcgggucac

SEQ ID NO: 3098230 - RNA, 18 nt, Molluscum contagiosum virus
ggcaagaggggagccagc

SEQ ID NO: 3098231 - RNA, 17 nt, Molluscum contagiosum virus
gaugguggcgcugcugc

SEQ ID NO: 3098232 - RNA, 20 nt, Molluscum contagiosum virus
cucggcaugugcgcaccgcg

SEQ ID NO: 3098233 - RNA, 17 nt, Molluscum contagiosum virus
agcugucgcgcagcagc

SEQ ID NO: 3098234 - RNA, 14 nt, Molluscum contagiosum virus
gagcuccggcugcu

SEQ ID NO: 3098235 - RNA, 16 nt, Molluscum contagiosum virus
caucagcaacaagcuc

SEQ ID NO: 3098236 - RNA, 21 nt, Molluscum contagiosum virus
cuuuguggucaagacuggccu

SEQ ID NO: 3098237 - RNA, 17 nt, Molluscum contagiosum virus
cacaagccguccgccuc

SEQ ID NO: 3098238 - RNA, 14 nt, Molluscum contagiosum virus
caggaaaggcaccc

SEQ ID NO: 3098239 - RNA, 13 nt, Molluscum contagiosum virus
ugcggccagcacc

SEQ ID NO: 3098240 - RNA, 17 nt, Molluscum contagiosum virus
uguucacaccaugcagc

SEQ ID NO: 3098241 - RNA, 17 nt, Molluscum contagiosum virus
acagagaaaggcaccca

SEQ ID NO: 3098242 - RNA, 18 nt, Molluscum contagiosum virus
ccgggcgccgcggcugcc

SEQ ID NO: 3098243 - RNA, 18 nt, Molluscum contagiosum virus
cuuuuuaaauggccgaga

SEQ ID NO: 3098244 - RNA, 19 nt, Molluscum contagiosum virus
agcuauccgcugucugaaa

SEQ ID NO: 3098245 - RNA, 18 nt, Molluscum contagiosum virus
ugcuccgcacguggaguc

SEQ ID NO: 3098246 - RNA, 22 nt, Molluscum contagiosum virus
agcgugcccuucuccgaggaaa

SEQ ID NO: 3098247 - RNA, 22 nt, Molluscum contagiosum virus
gugcuccacgcgcagcuucucu

SEQ ID NO: 3098248 - RNA, 20 nt, Molluscum contagiosum virus
cacaccgucgcguggugcuu

SEQ ID NO: 3098249 - RNA, 20 nt, Molluscum contagiosum virus
accccgcgcguacgcugcuc

SEQ ID NO: 3098250 - RNA, 14 nt, Molluscum contagiosum virus
cagcuaagccggag

SEQ ID NO: 3098251 - RNA, 22 nt, Molluscum contagiosum virus
ugccgcgccuugagcgcgccgc

SEQ ID NO: 3098252 - RNA, 19 nt, Molluscum contagiosum virus
cagcucaagacgcugcugg

SEQ ID NO: 3098253 - RNA, 16 nt, Molluscum contagiosum virus
cccgagagugacgccu

SEQ ID NO: 3098254 - RNA, 22 nt, Molluscum contagiosum virus
gcucgcaggcggugggcgccgc

SEQ ID NO: 3098255 - RNA, 16 nt, Molluscum contagiosum virus
gacacacuccuguccu

SEQ ID NO: 3098256 - RNA, 20 nt, Molluscum contagiosum virus
cuuguugucgagcagauuca

SEQ ID NO: 3098257 - RNA, 13 nt, Molluscum contagiosum virus
cgcgcgccgggcc

SEQ ID NO: 3098258 - RNA, 19 nt, Molluscum contagiosum virus
cucgcucggaaagagcgcg

SEQ ID NO: 3098259 - RNA, 15 nt, Molluscum contagiosum virus
cccucguguacgaga

SEQ ID NO: 3098260 - RNA, 16 nt, Molluscum contagiosum virus
uggaggcccaggccau

SEQ ID NO: 3098261 - RNA, 14 nt, Molluscum contagiosum virus
ucgccgcgggcugg

SEQ ID NO: 3098262 - RNA, 13 nt, Molluscum contagiosum virus
gcagcugcaggac

SEQ ID NO: 3098263 - RNA, 16 nt, Molluscum contagiosum virus
cacgugcagcggcgcc

SEQ ID NO: 3098264 - RNA, 22 nt, Molluscum contagiosum virus
ggcccuucuugacgcgagacug

SEQ ID NO: 3098265 - RNA, 17 nt, Molluscum contagiosum virus
cggcuucugcugcacac

SEQ ID NO: 3098266 - RNA, 18 nt, Molluscum contagiosum virus
caggcgcgcaagugcgug

SEQ ID NO: 3098267 - RNA, 23 nt, Molluscum contagiosum virus
ccggcaacgcugccgcuggcgcu

SEQ ID NO: 3098268 - RNA, 14 nt, Molluscum contagiosum virus
acgaggugcugcgc

SEQ ID NO: 3098269 - RNA, 16 nt, Molluscum contagiosum virus
cagcucugggcgcgcu

SEQ ID NO: 3098270 - RNA, 16 nt, Molluscum contagiosum virus
ggcgcgcagcuccgcg

SEQ ID NO: 3098271 - RNA, 19 nt, Molluscum contagiosum virus
gcuucggcucccagcagcg

SEQ ID NO: 3098272 - RNA, 14 nt, Molluscum contagiosum virus
ccgcugcgccgcca

SEQ ID NO: 3098273 - RNA, 19 nt, Molluscum contagiosum virus
aggcaccccgaaaggcacc

SEQ ID NO: 3098274 - RNA, 14 nt, Molluscum contagiosum virus
ccucugccugcaag

SEQ ID NO: 3098275 - RNA, 16 nt, Molluscum contagiosum virus
cugaagaaggagcccu

SEQ ID NO: 3098276 - RNA, 13 nt, Molluscum contagiosum virus
ggcggcugugccc

SEQ ID NO: 3098277 - RNA, 22 nt, Molluscum contagiosum virus
ggauagccccucgagcagcggu

SEQ ID NO: 3098278 - RNA, 11 nt, Molluscum contagiosum virus
uggaagaacag

SEQ ID NO: 3098279 - RNA, 13 nt, Molluscum contagiosum virus
ggagguuggaagc

SEQ ID NO: 3098280 - RNA, 16 nt, Molluscum contagiosum virus
ggcgucgcgcacagaa

SEQ ID NO: 3098281 - RNA, 17 nt, Molluscum contagiosum virus
gugcgcaaagcaacugc

SEQ ID NO: 3098282 - RNA, 18 nt, Molluscum contagiosum virus
gaagaaacagccaugugu

SEQ ID NO: 3098283 - RNA, 14 nt, Molluscum contagiosum virus
gagcugccauggca

SEQ ID NO: 3098284 - RNA, 18 nt, Molluscum contagiosum virus
aagaaacgggagucacuu

SEQ ID NO: 3098285 - RNA, 20 nt, Molluscum contagiosum virus
ccucacucacaugugcugcc

SEQ ID NO: 3098286 - RNA, 21 nt, Molluscum contagiosum virus
augccagacccgaaagcugcc

SEQ ID NO: 3098287 - RNA, 19 nt, Molluscum contagiosum virus
gauggucacgcgcaaggcc

SEQ ID NO: 3098288 - RNA, 20 nt, Molluscum contagiosum virus
gcggcaaucuucgugcgcuc

SEQ ID NO: 3098289 - RNA, 20 nt, Molluscum contagiosum virus
ggaggcagcgcuuguuucgc

SEQ ID NO: 3098290 - RNA, 23 nt, Molluscum contagiosum virus
cgcguugucgagaauagcugggg

SEQ ID NO: 3098291 - RNA, 16 nt, Molluscum contagiosum virus
ggaacgccgccacgcc

SEQ ID NO: 3098292 - RNA, 16 nt, Molluscum contagiosum virus
ccgaagucgcagcagc

SEQ ID NO: 3098293 - RNA, 23 nt, Molluscum contagiosum virus
gggcacgcucauacuccugcugg

SEQ ID NO: 3098294 - RNA, 18 nt, Molluscum contagiosum virus
cgcgcccggcgggcacau

SEQ ID NO: 3098295 - RNA, 15 nt, Molluscum contagiosum virus
gagcgcggcaacagc

SEQ ID NO: 3098296 - RNA, 16 nt, Molluscum contagiosum virus
cggaggcugcucccuc

SEQ ID NO: 3098297 - RNA, 18 nt, Molluscum contagiosum virus
agcgccgccaugcugcgc

SEQ ID NO: 3098298 - RNA, 15 nt, Molluscum contagiosum virus
gcgcgcugcucugga

SEQ ID NO: 3098299 - RNA, 16 nt, Molluscum contagiosum virus
gacgagacgugggcaa

SEQ ID NO: 3098300 - RNA, 21 nt, Molluscum contagiosum virus
gacagagcucggcaacacaaa

SEQ ID NO: 3098301 - RNA, 22 nt, Molluscum contagiosum virus
gcccgcgcacgagcugcugccc

SEQ ID NO: 3098302 - RNA, 15 nt, Molluscum contagiosum virus
cgcacgcacggagca

SEQ ID NO: 3098303 - RNA, 14 nt, Molluscum contagiosum virus
cuagccgccgcugc

SEQ ID NO: 3098304 - RNA, 16 nt, Molluscum contagiosum virus
gccagcuuucccuagc

SEQ ID NO: 3098305 - RNA, 16 nt, Molluscum contagiosum virus
gcgcccaacgcccgcg

SEQ ID NO: 3098306 - RNA, 14 nt, Molluscum contagiosum virus
agaggacgagcugc

SEQ ID NO: 3098307 - RNA, 23 nt, Molluscum contagiosum virus
agcaagcugcaagccagcccgcu

SEQ ID NO: 3098308 - RNA, 14 nt, Molluscum contagiosum virus
uaccugaagcugga

SEQ ID NO: 3098309 - RNA, 14 nt, Molluscum contagiosum virus
auggcgcgcagcuc

SEQ ID NO: 3098310 - RNA, 15 nt, Molluscum contagiosum virus
acgggcacgagcacg

SEQ ID NO: 3098311 - RNA, 16 nt, Molluscum contagiosum virus
cgacggugugccgcug

SEQ ID NO: 3098312 - RNA, 22 nt, Molluscum contagiosum virus
guacgagcagcugcugcgcacg

SEQ ID NO: 3098313 - RNA, 17 nt, Molluscum contagiosum virus
cuggcgagcgcucugca

SEQ ID NO: 3098314 - RNA, 15 nt, Molluscum contagiosum virus
ugccgccggcgccgc

SEQ ID NO: 3098315 - RNA, 19 nt, Molluscum contagiosum virus
agauccguaguagccgcaa

SEQ ID NO: 3098316 - RNA, 19 nt, Molluscum contagiosum virus
gcuuccgcgagucugccag

SEQ ID NO: 3098317 - RNA, 10 nt, Molluscum contagiosum virus
ggguguacaa

SEQ ID NO: 3098318 - RNA, 21 nt, Molluscum contagiosum virus
caaggaaaggcaccugcagga

SEQ ID NO: 3098319 - RNA, 15 nt, Molluscum contagiosum virus
cggaucggcacugug

SEQ ID NO: 3098320 - RNA, 22 nt, Molluscum contagiosum virus
aggcgccgcaccucaccgcgca

SEQ ID NO: 3098321 - RNA, 16 nt, Molluscum contagiosum virus
acgcaacgucgcacug

SEQ ID NO: 3098322 - RNA, 13 nt, Molluscum contagiosum virus
caucaccccgcug

SEQ ID NO: 3098323 - RNA, 17 nt, Molluscum contagiosum virus
caucaucgcggagcugc

SEQ ID NO: 3098324 - RNA, 17 nt, Molluscum contagiosum virus
gcugcugguucugcucg

SEQ ID NO: 3098325 - RNA, 16 nt, Molluscum contagiosum virus
gacggagacagugaca

SEQ ID NO: 3098326 - RNA, 16 nt, Molluscum contagiosum virus
cguggucgccgcggcc

SEQ ID NO: 3098327 - RNA, 23 nt, Molluscum contagiosum virus
ggcccuaaauaaugaaccugcac

SEQ ID NO: 3098328 - RNA, 15 nt, Molluscum contagiosum virus
accagguacuccuug

SEQ ID NO: 3098329 - RNA, 17 nt, Molluscum contagiosum virus
cgaacggaacacagugc

SEQ ID NO: 3098330 - RNA, 16 nt, Molluscum contagiosum virus
agcuggccggcucgcu

SEQ ID NO: 3098331 - RNA, 12 nt, Molluscum contagiosum virus
aggggagccagc

SEQ ID NO: 3098332 - RNA, 17 nt, Molluscum contagiosum virus
caccguugacgagcugg

SEQ ID NO: 3098333 - RNA, 13 nt, Molluscum contagiosum virus
guacgugcugccc

SEQ ID NO: 3098334 - RNA, 21 nt, Molluscum contagiosum virus
ugcagcagccccgacgccagc

SEQ ID NO: 3098335 - RNA, 21 nt, Molluscum contagiosum virus
gggcgaacugcccggcggcaa

SEQ ID NO: 3098336 - RNA, 16 nt, Molluscum contagiosum virus
cagugugugaucacgu

SEQ ID NO: 3098337 - RNA, 21 nt, Molluscum contagiosum virus
ccagccugcucacgcccgagg

SEQ ID NO: 3098338 - RNA, 13 nt, Molluscum contagiosum virus
cugccccucgggg

SEQ ID NO: 3098339 - RNA, 23 nt, Molluscum contagiosum virus
cuugcucuucgaccucugcuuca

SEQ ID NO: 3098340 - RNA, 17 nt, Molluscum contagiosum virus
ccgcgagcacuggcugg

SEQ ID NO: 3098341 - RNA, 13 nt, Molluscum contagiosum virus
gagcuggcugggc

SEQ ID NO: 3098342 - RNA, 19 nt, Molluscum contagiosum virus
gcacugcgcgcaugccuug

SEQ ID NO: 3098343 - RNA, 19 nt, Molluscum contagiosum virus
gguugcgcacguuggccac

SEQ ID NO: 3098344 - RNA, 16 nt, Molluscum contagiosum virus
cguccacgaugcgcuc

SEQ ID NO: 3098345 - RNA, 19 nt, Molluscum contagiosum virus
auggcugcucucggcagcg

SEQ ID NO: 3098346 - RNA, 14 nt, Molluscum contagiosum virus
ugcgcgcaugccuu

SEQ ID NO: 3098347 - RNA, 16 nt, Molluscum contagiosum virus
cagcagccgcagccca

SEQ ID NO: 3098348 - RNA, 20 nt, Molluscum contagiosum virus
gccuccaagaagaggccagc

SEQ ID NO: 3098349 - RNA, 18 nt, Molluscum contagiosum virus
cuccgacuaccuaggcac

SEQ ID NO: 3098350 - RNA, 18 nt, Molluscum contagiosum virus
cgcgagcagcugcugcgc

SEQ ID NO: 3098351 - RNA, 16 nt, Molluscum contagiosum virus
gcggccuggccacgcc

SEQ ID NO: 3098352 - RNA, 19 nt, Molluscum contagiosum virus
cacucgcucucucagggug

SEQ ID NO: 3098353 - RNA, 21 nt, Molluscum contagiosum virus
agcggccacucucccgggcuc

SEQ ID NO: 3098354 - RNA, 22 nt, Molluscum contagiosum virus
ccugcggacccgccggugcuug

SEQ ID NO: 3098355 - RNA, 20 nt, Molluscum contagiosum virus
ucugcgugcuugugcgccug

SEQ ID NO: 3098356 - RNA, 17 nt, Molluscum contagiosum virus
gcagaaggaagggcccg

SEQ ID NO: 3098357 - RNA, 23 nt, Molluscum contagiosum virus
gauagcuuuucaguuuuguccuc

SEQ ID NO: 3098358 - RNA, 22 nt, Molluscum contagiosum virus
cgcuucggcucgggaacaaagg

SEQ ID NO: 3098359 - RNA, 14 nt, Molluscum contagiosum virus
ggcgcgcgugccgc

SEQ ID NO: 3098360 - RNA, 16 nt, Molluscum contagiosum virus
cuccgagucgcgccuc

SEQ ID NO: 3098361 - RNA, 19 nt, Molluscum contagiosum virus
cgagcucgcgcgccagcac

SEQ ID NO: 3098362 - RNA, 21 nt, Molluscum contagiosum virus
cgcaggaugcuggggcucgcg

SEQ ID NO: 3098363 - RNA, 14 nt, Molluscum contagiosum virus
cugcacaguucacg

SEQ ID NO: 3098364 - RNA, 20 nt, Molluscum contagiosum virus
accuccugcaccugcuggaa

SEQ ID NO: 3098365 - RNA, 15 nt, Molluscum contagiosum virus
ccuggcguccgcacg

SEQ ID NO: 3098366 - RNA, 20 nt, Molluscum contagiosum virus
ucggacggaggucugcuuug

SEQ ID NO: 3098367 - RNA, 17 nt, Molluscum contagiosum virus
accgcgacaugccucgc

SEQ ID NO: 3098368 - RNA, 15 nt, Molluscum contagiosum virus
ucgcuggaggauucu

SEQ ID NO: 3098369 - RNA, 21 nt, Molluscum contagiosum virus
uggacguguccggagccaagc

SEQ ID NO: 3098370 - RNA, 11 nt, Molluscum contagiosum virus
cgacagagccc

SEQ ID NO: 3098371 - RNA, 16 nt, Molluscum contagiosum virus
gcgucuuacugcugca

SEQ ID NO: 3098372 - RNA, 16 nt, Molluscum contagiosum virus
ucacugcagcagcccc

SEQ ID NO: 3098373 - RNA, 13 nt, Molluscum contagiosum virus
acucggacacugg

SEQ ID NO: 3098374 - RNA, 14 nt, Molluscum contagiosum virus
cagcuccgccggga

SEQ ID NO: 3098375 - RNA, 14 nt, Molluscum contagiosum virus
uuguguuggccagg

SEQ ID NO: 3098376 - RNA, 13 nt, Molluscum contagiosum virus
gucgcgcagcugc

SEQ ID NO: 3098377 - RNA, 21 nt, Molluscum contagiosum virus
caucgggcugcagcccuucca

SEQ ID NO: 3098378 - RNA, 20 nt, Molluscum contagiosum virus
cuuccggcagcuggagcugc

SEQ ID NO: 3098379 - RNA, 18 nt, Molluscum contagiosum virus
guggcacccuggcugcug

SEQ ID NO: 3098380 - RNA, 15 nt, Molluscum contagiosum virus
ggcgcgguccagccg

SEQ ID NO: 3098381 - RNA, 11 nt, Molluscum contagiosum virus
cuggcuccugu

SEQ ID NO: 3098382 - RNA, 15 nt, Molluscum contagiosum virus
cgccagccugcuggc

SEQ ID NO: 3098383 - RNA, 18 nt, Molluscum contagiosum virus
uccacggguagcagcgcc

SEQ ID NO: 3098384 - RNA, 16 nt, Molluscum contagiosum virus
cccauuagugugccuc

SEQ ID NO: 3098385 - RNA, 20 nt, Molluscum contagiosum virus
gcaagugggcgucgaccugg

SEQ ID NO: 3098386 - RNA, 15 nt, Molluscum contagiosum virus
gcgcaaaccucugag

SEQ ID NO: 3098387 - RNA, 17 nt, Molluscum contagiosum virus
ugugacaacaugugauc

SEQ ID NO: 3098388 - RNA, 17 nt, Molluscum contagiosum virus
cgauaacaucugcuaua

SEQ ID NO: 3098389 - RNA, 13 nt, Molluscum contagiosum virus
aggucgaggaggg

SEQ ID NO: 3098390 - RNA, 22 nt, Molluscum contagiosum virus
agcucgugccugucggcacauc

SEQ ID NO: 3098391 - RNA, 18 nt, Molluscum contagiosum virus
gaagucguuaggcggcuc

SEQ ID NO: 3098392 - RNA, 17 nt, Molluscum contagiosum virus
cacaguucggccgcacg

SEQ ID NO: 3098393 - RNA, 15 nt, Molluscum contagiosum virus
ccucuacaccagcug

SEQ ID NO: 3098394 - RNA, 21 nt, Molluscum contagiosum virus
cagcagcggcgcgugcuccuc

SEQ ID NO: 3098395 - RNA, 13 nt, Molluscum contagiosum virus
cagacuaggcaau

SEQ ID NO: 3098396 - RNA, 15 nt, Molluscum contagiosum virus
ccggcagcuggagcu

SEQ ID NO: 3098397 - RNA, 21 nt, Molluscum contagiosum virus
acgcggcucuggagcggccac

SEQ ID NO: 3098398 - RNA, 18 nt, Molluscum contagiosum virus
gcccgaguuugcccgcgg

SEQ ID NO: 3098399 - RNA, 18 nt, Molluscum contagiosum virus
gccccaaaagugaagauc

SEQ ID NO: 3098400 - RNA, 17 nt, Molluscum contagiosum virus
gacgcgcagcucgacgc

SEQ ID NO: 3098401 - RNA, 20 nt, Molluscum contagiosum virus
cgugcuccacgcgcagcuuc

SEQ ID NO: 3098402 - RNA, 19 nt, Molluscum contagiosum virus
aaagcccuccugagaagca

SEQ ID NO: 3098403 - RNA, 14 nt, Molluscum contagiosum virus
cgccgguuugcuaa

SEQ ID NO: 3098404 - RNA, 17 nt, Molluscum contagiosum virus
aagcucgaggcgcuugg

SEQ ID NO: 3098405 - RNA, 21 nt, Molluscum contagiosum virus
gcgcgcacgaacgcaacucgc

SEQ ID NO: 3098406 - RNA, 23 nt, Molluscum contagiosum virus
aggaaaggcaccccgaaggaaag

SEQ ID NO: 3098407 - RNA, 14 nt, Molluscum contagiosum virus
cgaggccugcgugg

SEQ ID NO: 3098408 - RNA, 21 nt, Molluscum contagiosum virus
ccaaucccaguaguggcggca

SEQ ID NO: 3098409 - RNA, 17 nt, Molluscum contagiosum virus
gcacccaccaggaacag

SEQ ID NO: 3098410 - RNA, 18 nt, Molluscum contagiosum virus
ccagcgggaaacugcugc

SEQ ID NO: 3098411 - RNA, 13 nt, Molluscum contagiosum virus
caagccagagcuu

SEQ ID NO: 3098412 - RNA, 16 nt, Molluscum contagiosum virus
cugcaucuagccuccu

SEQ ID NO: 3098413 - RNA, 23 nt, Molluscum contagiosum virus
gcgccgaaacacggccuccagca

SEQ ID NO: 3098414 - RNA, 13 nt, Molluscum contagiosum virus
cgcggggcuccuc

SEQ ID NO: 3098415 - RNA, 16 nt, Molluscum contagiosum virus
cgaagcccagcuucag

SEQ ID NO: 3098416 - RNA, 19 nt, Molluscum contagiosum virus
agggcagcucaagcugcuc

SEQ ID NO: 3098417 - RNA, 16 nt, Molluscum contagiosum virus
gcuggcggggcuggca

SEQ ID NO: 3098418 - RNA, 18 nt, Molluscum contagiosum virus
ucaacuguugccuggagg

SEQ ID NO: 3098419 - RNA, 14 nt, Molluscum contagiosum virus
cgcggcgcucugcc

SEQ ID NO: 3098420 - RNA, 15 nt, Molluscum contagiosum virus
gcagcucuuccacga

SEQ ID NO: 3098421 - RNA, 21 nt, Molluscum contagiosum virus
uucccgaggcguccagcggcu

SEQ ID NO: 3098422 - RNA, 17 nt, Molluscum contagiosum virus
gcgcacgaccacgugca

SEQ ID NO: 3098423 - RNA, 13 nt, Molluscum contagiosum virus
aacacgagacuga

SEQ ID NO: 3098424 - RNA, 13 nt, Molluscum contagiosum virus
gauuucgcgcagc

SEQ ID NO: 3098425 - RNA, 16 nt, Molluscum contagiosum virus
ugcccgaguuugcccg

SEQ ID NO: 3098426 - RNA, 15 nt, Molluscum contagiosum virus
gcgucugggugccca

SEQ ID NO: 3098427 - RNA, 19 nt, Molluscum contagiosum virus
gcaggaucggagcgcagcu

SEQ ID NO: 3098428 - RNA, 21 nt, Molluscum contagiosum virus
gcgguguccuugcgccgccaa

SEQ ID NO: 3098429 - RNA, 16 nt, Molluscum contagiosum virus
ccucggcgcacacucc

SEQ ID NO: 3098430 - RNA, 15 nt, Molluscum contagiosum virus
ccggcagugcuugcu

SEQ ID NO: 3098431 - RNA, 18 nt, Molluscum contagiosum virus
cgcgcgucgagggcgccg

SEQ ID NO: 3098432 - RNA, 16 nt, Molluscum contagiosum virus
ccccgcgcgcagcgcg

SEQ ID NO: 3098433 - RNA, 16 nt, Molluscum contagiosum virus
uacacgcagagccagc

SEQ ID NO: 3098434 - RNA, 12 nt, Molluscum contagiosum virus
auaccugugcca

SEQ ID NO: 3098435 - RNA, 14 nt, Molluscum contagiosum virus
cccugcccgcguga

SEQ ID NO: 3098436 - RNA, 18 nt, Molluscum contagiosum virus
gcacgaagcuacgcuccg

SEQ ID NO: 3098437 - RNA, 16 nt, Molluscum contagiosum virus
ccgugaacgaggcugc

SEQ ID NO: 3098438 - RNA, 14 nt, Molluscum contagiosum virus
gcggcuggaccugc

SEQ ID NO: 3098439 - RNA, 12 nt, Molluscum contagiosum virus
ugcgaggccugc

SEQ ID NO: 3098440 - RNA, 15 nt, Molluscum contagiosum virus
gagcuuaauuuugca

SEQ ID NO: 3098441 - RNA, 14 nt, Molluscum contagiosum virus
guagcaaggggucu

SEQ ID NO: 3098442 - RNA, 16 nt, Molluscum contagiosum virus
gacccucuucgacuua

SEQ ID NO: 3098443 - RNA, 18 nt, Molluscum contagiosum virus
caagcugagcgcgcugcg

SEQ ID NO: 3098444 - RNA, 14 nt, Molluscum contagiosum virus
gaagugugccugcu

SEQ ID NO: 3098445 - RNA, 16 nt, Molluscum contagiosum virus
ccuuccgcgcgggcau

SEQ ID NO: 3098446 - RNA, 11 nt, Molluscum contagiosum virus
cuccugaugcc

SEQ ID NO: 3098447 - RNA, 23 nt, Molluscum contagiosum virus
aaggcauccucgccgaacggcag

SEQ ID NO: 3098448 - RNA, 16 nt, Molluscum contagiosum virus
cgcgcgcucagcgccg

SEQ ID NO: 3098449 - RNA, 14 nt, Molluscum contagiosum virus
uccggccuguaaau

SEQ ID NO: 3098450 - RNA, 19 nt, Molluscum contagiosum virus
gcacgagcgcgggcgcccg

SEQ ID NO: 3098451 - RNA, 18 nt, Molluscum contagiosum virus
cccuccagguccuccagc

SEQ ID NO: 3098452 - RNA, 14 nt, Molluscum contagiosum virus
gaggcucuguucug

SEQ ID NO: 3098453 - RNA, 14 nt, Molluscum contagiosum virus
gcagcgcgccacca

SEQ ID NO: 3098454 - RNA, 20 nt, Molluscum contagiosum virus
acaaggaaaggcacccacca

SEQ ID NO: 3098455 - RNA, 17 nt, Molluscum contagiosum virus
cacggcgagcugccaug

SEQ ID NO: 3098456 - RNA, 14 nt, Molluscum contagiosum virus
cgucgcggagcgcg

SEQ ID NO: 3098457 - RNA, 22 nt, Molluscum contagiosum virus
gugcugcgucacaagcaccgcc

SEQ ID NO: 3098458 - RNA, 12 nt, Molluscum contagiosum virus
gugcugugccua

SEQ ID NO: 3098459 - RNA, 22 nt, Molluscum contagiosum virus
ggcucuguucugcuuggacgac

SEQ ID NO: 3098460 - RNA, 22 nt, Molluscum contagiosum virus
cgcgcgcucugccgcccgcgcc

SEQ ID NO: 3098461 - RNA, 20 nt, Molluscum contagiosum virus
gcccgggcguagccuagcca

SEQ ID NO: 3098462 - RNA, 14 nt, Molluscum contagiosum virus
gugcguacccuggc

SEQ ID NO: 3098463 - RNA, 15 nt, Molluscum contagiosum virus
acggugcagccgcug

SEQ ID NO: 3098464 - RNA, 14 nt, Molluscum contagiosum virus
gguuccgugcgcuc

SEQ ID NO: 3098465 - RNA, 18 nt, Molluscum contagiosum virus
gcgcaagucaccgcuccg

SEQ ID NO: 3098466 - RNA, 23 nt, Molluscum contagiosum virus
cgggcacauccgcuaccuggugg

SEQ ID NO: 3098467 - RNA, 18 nt, Molluscum contagiosum virus
ccuccgcacacgcgcgcg

SEQ ID NO: 3098468 - RNA, 20 nt, Molluscum contagiosum virus
cacgcaacgucgcacuggcc

SEQ ID NO: 3098469 - RNA, 18 nt, Molluscum contagiosum virus
cggcgccaccggcagugc

SEQ ID NO: 3098470 - RNA, 22 nt, Molluscum contagiosum virus
caucaugggcucgggcaagacc

SEQ ID NO: 3098471 - RNA, 18 nt, Molluscum contagiosum virus
gcacagcacaggccccag

SEQ ID NO: 3098472 - RNA, 13 nt, Molluscum contagiosum virus
gccaucaauucaa

SEQ ID NO: 3098473 - RNA, 20 nt, Molluscum contagiosum virus
gcgcgugccuguggcgcaca

SEQ ID NO: 3098474 - RNA, 18 nt, Molluscum contagiosum virus
aucgagaugcucaagcac

SEQ ID NO: 3098475 - RNA, 15 nt, Molluscum contagiosum virus
gcucgaggugugccu

SEQ ID NO: 3098476 - RNA, 13 nt, Molluscum contagiosum virus
ccagcagcgccag

SEQ ID NO: 3098477 - RNA, 19 nt, Molluscum contagiosum virus
gaagcaacgacaaggaaag

SEQ ID NO: 3098478 - RNA, 14 nt, Molluscum contagiosum virus
ccggagacaccagc

SEQ ID NO: 3098479 - RNA, 21 nt, Molluscum contagiosum virus
gcgauccuugcguacuuggaa

SEQ ID NO: 3098480 - RNA, 17 nt, Molluscum contagiosum virus
accgccgcggccgcgag

SEQ ID NO: 3098481 - RNA, 21 nt, Molluscum contagiosum virus
gcgcacacgcgucgggaagug

SEQ ID NO: 3098482 - RNA, 23 nt, Molluscum contagiosum virus
ggaguacagccgcgcggcagaca

SEQ ID NO: 3098483 - RNA, 14 nt, Molluscum contagiosum virus
ccuaccgcgcggga

SEQ ID NO: 3098484 - RNA, 12 nt, Molluscum contagiosum virus
cgccuggagcgc

SEQ ID NO: 3098485 - RNA, 19 nt, Molluscum contagiosum virus
gaucauggcgccgcugcgg

SEQ ID NO: 3098486 - RNA, 15 nt, Molluscum contagiosum virus
ugcugguucugcucg

SEQ ID NO: 3098487 - RNA, 18 nt, Molluscum contagiosum virus
gccugccgcgcaugcugg

SEQ ID NO: 3098488 - RNA, 22 nt, Molluscum contagiosum virus
gacaugcugugcggcacgccug

SEQ ID NO: 3098489 - RNA, 13 nt, Molluscum contagiosum virus
cggcaggcucccg

SEQ ID NO: 3098490 - RNA, 13 nt, Molluscum contagiosum virus
cggugggcgccgc

SEQ ID NO: 3098491 - RNA, 15 nt, Molluscum contagiosum virus
ucgcggagggcagca

SEQ ID NO: 3098492 - RNA, 21 nt, Molluscum contagiosum virus
gacagcaagcagcgcgcgcag

SEQ ID NO: 3098493 - RNA, 15 nt, Molluscum contagiosum virus
gccaccgcgcccuuu

SEQ ID NO: 3098494 - RNA, 19 nt, Molluscum contagiosum virus
cagccgcguagcuagcucu

SEQ ID NO: 3098495 - RNA, 16 nt, Molluscum contagiosum virus
ccaguaccugcugccg

SEQ ID NO: 3098496 - RNA, 13 nt, Molluscum contagiosum virus
gccuuccugcugg

SEQ ID NO: 3098497 - RNA, 17 nt, Molluscum contagiosum virus
cuagugcacgcccuuau

SEQ ID NO: 3098498 - RNA, 22 nt, Molluscum contagiosum virus
cugcaacucgcgcugcagcacc

SEQ ID NO: 3098499 - RNA, 16 nt, Molluscum contagiosum virus
gugucuggagcccacg

SEQ ID NO: 3098500 - RNA, 15 nt, Molluscum contagiosum virus
accacguggaccuga

SEQ ID NO: 3098501 - RNA, 16 nt, Molluscum contagiosum virus
cguggcgagcaucugc

SEQ ID NO: 3098502 - RNA, 15 nt, Molluscum contagiosum virus
cgggcuucgccgccg

SEQ ID NO: 3098503 - RNA, 17 nt, Molluscum contagiosum virus
cgagaccuuccuccagg

SEQ ID NO: 3098504 - RNA, 21 nt, Molluscum contagiosum virus
agaagacauugccuuuugcac

SEQ ID NO: 3098505 - RNA, 21 nt, Molluscum contagiosum virus
ggcaacaacgucacgcucgag

SEQ ID NO: 3098506 - RNA, 12 nt, Molluscum contagiosum virus
cgcggccgcggc

SEQ ID NO: 3098507 - RNA, 12 nt, Molluscum contagiosum virus
aggagcccuugc

SEQ ID NO: 3098508 - RNA, 20 nt, Molluscum contagiosum virus
acgcugcgcgugcugggccc

SEQ ID NO: 3098509 - RNA, 18 nt, Molluscum contagiosum virus
cgcggcuaccacgggccc

SEQ ID NO: 3098510 - RNA, 19 nt, Molluscum contagiosum virus
acccuuaauaaaaaaucaa

SEQ ID NO: 3098511 - RNA, 20 nt, Molluscum contagiosum virus
gcgcccgcugcgcgcucugg

SEQ ID NO: 3098512 - RNA, 19 nt, Molluscum contagiosum virus
uguuggaagucguggccgu

SEQ ID NO: 3098513 - RNA, 15 nt, Molluscum contagiosum virus
gacgggcacgagcac

SEQ ID NO: 3098514 - RNA, 18 nt, Molluscum contagiosum virus
ccgcgcaaaagcacagca

SEQ ID NO: 3098515 - RNA, 14 nt, Molluscum contagiosum virus
caggaacaaggcca

SEQ ID NO: 3098516 - RNA, 23 nt, Molluscum contagiosum virus
caaccgcauguccacggacaugg

SEQ ID NO: 3098517 - RNA, 15 nt, Molluscum contagiosum virus
ccaggaacgccgcca

SEQ ID NO: 3098518 - RNA, 18 nt, Molluscum contagiosum virus
agguugcgcggggcaggc

SEQ ID NO: 3098519 - RNA, 17 nt, Molluscum contagiosum virus
gugcgcgacggcgagcu

SEQ ID NO: 3098520 - RNA, 15 nt, Molluscum contagiosum virus
uccgcccgcgcuucu

SEQ ID NO: 3098521 - RNA, 19 nt, Molluscum contagiosum virus
uagcgcgccgcaaagcuca

SEQ ID NO: 3098522 - RNA, 14 nt, Molluscum contagiosum virus
ucgcgcucuucccg

SEQ ID NO: 3098523 - RNA, 16 nt, Molluscum contagiosum virus
agucagaguccgaccc

SEQ ID NO: 3098524 - RNA, 14 nt, Molluscum contagiosum virus
gcuacucaggcgcg

SEQ ID NO: 3098525 - RNA, 22 nt, Molluscum contagiosum virus
cucgcgcaggucaucgacgagc

SEQ ID NO: 3098526 - RNA, 14 nt, Molluscum contagiosum virus
ggucucggcagcag

SEQ ID NO: 3098527 - RNA, 14 nt, Molluscum contagiosum virus
gcugcgcacgggcg

SEQ ID NO: 3098528 - RNA, 14 nt, Molluscum contagiosum virus
ggcgugcugugccu

SEQ ID NO: 3098529 - RNA, 14 nt, Molluscum contagiosum virus
caugcgcgcgcugc

SEQ ID NO: 3098530 - RNA, 21 nt, Molluscum contagiosum virus
ccuggcacuggcgcgcacgcg

SEQ ID NO: 3098531 - RNA, 13 nt, Molluscum contagiosum virus
uugcggcgccgcc

SEQ ID NO: 3098532 - RNA, 18 nt, Molluscum contagiosum virus
ccucccucgucgcgcuuc

SEQ ID NO: 3098533 - RNA, 17 nt, Molluscum contagiosum virus
uucaaguuugacaaggg

SEQ ID NO: 3098534 - RNA, 19 nt, Molluscum contagiosum virus
ucaacaagcugcuggcaca

SEQ ID NO: 3098535 - RNA, 12 nt, Molluscum contagiosum virus
augcccagccug

SEQ ID NO: 3098536 - RNA, 13 nt, Molluscum contagiosum virus
aucgcgcgcgggc

SEQ ID NO: 3098537 - RNA, 20 nt, Molluscum contagiosum virus
acaugcuucgcgcaaacaag

SEQ ID NO: 3098538 - RNA, 22 nt, Molluscum contagiosum virus
gccgucuccucucgcgaucugc

SEQ ID NO: 3098539 - RNA, 21 nt, Molluscum contagiosum virus
agugcgucgacguggagccug

SEQ ID NO: 3098540 - RNA, 15 nt, Molluscum contagiosum virus
cgccgccgcaggccc

SEQ ID NO: 3098541 - RNA, 21 nt, Molluscum contagiosum virus
cucgagcacgccuccaagaag

SEQ ID NO: 3098542 - RNA, 21 nt, Molluscum contagiosum virus
gccgacaacgcacccgcgcgg

SEQ ID NO: 3098543 - RNA, 17 nt, Molluscum contagiosum virus
cgcgcagaagcccgggu

SEQ ID NO: 3098544 - RNA, 15 nt, Molluscum contagiosum virus
ggaccugcugguggu

SEQ ID NO: 3098545 - RNA, 18 nt, Molluscum contagiosum virus
acgacaaggaaaggcacc

SEQ ID NO: 3098546 - RNA, 15 nt, Molluscum contagiosum virus
cacgcucgaggagga

SEQ ID NO: 3098547 - RNA, 17 nt, Molluscum contagiosum virus
ccugcggcugcggcgcg

SEQ ID NO: 3098548 - RNA, 20 nt, Molluscum contagiosum virus
caccaagaagcggcccugca

SEQ ID NO: 3098549 - RNA, 22 nt, Molluscum contagiosum virus
accagcgcggccguggcugcgg

SEQ ID NO: 3098550 - RNA, 18 nt, Molluscum contagiosum virus
gagcgcgcgccugcuggc

SEQ ID NO: 3098551 - RNA, 18 nt, Molluscum contagiosum virus
uagcagggcggcgccugc

SEQ ID NO: 3098552 - RNA, 18 nt, Molluscum contagiosum virus
cgcugccuggugcacaca

SEQ ID NO: 3098553 - RNA, 17 nt, Molluscum contagiosum virus
cguagcaaaugcgcugc

SEQ ID NO: 3098554 - RNA, 18 nt, Molluscum contagiosum virus
gccacgcagcuggcgggc

SEQ ID NO: 3098555 - RNA, 15 nt, Molluscum contagiosum virus
guaccuggugcgccc

SEQ ID NO: 3098556 - RNA, 23 nt, Molluscum contagiosum virus
cgcggcuagcaccgcaugggccc

SEQ ID NO: 3098557 - RNA, 11 nt, Molluscum contagiosum virus
uugugcugcug

SEQ ID NO: 3098558 - RNA, 13 nt, Molluscum contagiosum virus
cugccacaugcag

SEQ ID NO: 3098559 - RNA, 21 nt, Molluscum contagiosum virus
ugugcacgcuguccaggcgcu

SEQ ID NO: 3098560 - RNA, 14 nt, Molluscum contagiosum virus
ucaucgccagcauc

SEQ ID NO: 3098561 - RNA, 20 nt, Molluscum contagiosum virus
cugggaggacacgcgcacgc

SEQ ID NO: 3098562 - RNA, 22 nt, Molluscum contagiosum virus
ucucagagcuccgcgcaugcca

SEQ ID NO: 3098563 - RNA, 14 nt, Molluscum contagiosum virus
accaggaacaggga

SEQ ID NO: 3098564 - RNA, 19 nt, Molluscum contagiosum virus
cgcaugcggcaggcgcugc

SEQ ID NO: 3098565 - RNA, 23 nt, Molluscum contagiosum virus
cgggaacgaggaaaggcaccccg

SEQ ID NO: 3098566 - RNA, 18 nt, Molluscum contagiosum virus
gaccuuccuccagggcac

SEQ ID NO: 3098567 - RNA, 13 nt, Molluscum contagiosum virus
acaugcagcugca

SEQ ID NO: 3098568 - RNA, 19 nt, Molluscum contagiosum virus
cacuuccgugagcaguccc

SEQ ID NO: 3098569 - RNA, 17 nt, Molluscum contagiosum virus
uggcgcgcccggcgccc

SEQ ID NO: 3098570 - RNA, 21 nt, Molluscum contagiosum virus
cuugcuagcaacuugcucuac

SEQ ID NO: 3098571 - RNA, 17 nt, Molluscum contagiosum virus
cagcgcgcggagaucgc

SEQ ID NO: 3098572 - RNA, 16 nt, Molluscum contagiosum virus
gaggccagcacaagcc

SEQ ID NO: 3098573 - RNA, 22 nt, Molluscum contagiosum virus
gcacuggcuggcguucgacggc

SEQ ID NO: 3098574 - RNA, 14 nt, Molluscum contagiosum virus
ccccguccucgcuc

SEQ ID NO: 3098575 - RNA, 21 nt, Molluscum contagiosum virus
accgcggacuccuuucggugg

SEQ ID NO: 3098576 - RNA, 12 nt, Molluscum contagiosum virus
gcguccaugagc

SEQ ID NO: 3098577 - RNA, 15 nt, Molluscum contagiosum virus
acucgcgcugcagca

SEQ ID NO: 3098578 - RNA, 19 nt, Molluscum contagiosum virus
acuuccgcgcgcucuugca

SEQ ID NO: 3098579 - RNA, 19 nt, Molluscum contagiosum virus
ggcgguggcggcucugccg

SEQ ID NO: 3098580 - RNA, 20 nt, Molluscum contagiosum virus
cuacaccgagaucaugggcg

SEQ ID NO: 3098581 - RNA, 18 nt, Molluscum contagiosum virus
uggcggugcggcgcacgc

SEQ ID NO: 3098582 - RNA, 24 nt, Molluscum contagiosum virus
cagcaaaacugaauaaguauucgc

SEQ ID NO: 3098583 - RNA, 17 nt, Molluscum contagiosum virus
gcgcaaccgcgugcgug

SEQ ID NO: 3098584 - RNA, 17 nt, Molluscum contagiosum virus
ggcgcaccugcuagagc

SEQ ID NO: 3098585 - RNA, 23 nt, Molluscum contagiosum virus
cggcacgccgcucggcacugcug

SEQ ID NO: 3098586 - RNA, 13 nt, Molluscum contagiosum virus
cgagcagcugcug

SEQ ID NO: 3098587 - RNA, 20 nt, Molluscum contagiosum virus
cacgcugcucgugcugcucu

SEQ ID NO: 3098588 - RNA, 17 nt, Molluscum contagiosum virus
caucucgcagacgcagc

SEQ ID NO: 3098589 - RNA, 22 nt, Molluscum contagiosum virus
cuucccgacgucuuccccaaga

SEQ ID NO: 3098590 - RNA, 16 nt, Molluscum contagiosum virus
acgagcgcgugccgcu

SEQ ID NO: 3098591 - RNA, 14 nt, Molluscum contagiosum virus
gaguucaacacgca

SEQ ID NO: 3098592 - RNA, 12 nt, Molluscum contagiosum virus
ccgcgugcuggc

SEQ ID NO: 3098593 - RNA, 13 nt, Molluscum contagiosum virus
cgugucgagcugc

SEQ ID NO: 3098594 - RNA, 22 nt, Molluscum contagiosum virus
gaaacgcacagccccugcugcu

SEQ ID NO: 3098595 - RNA, 17 nt, Molluscum contagiosum virus
ggcguggccaggccgcg

SEQ ID NO: 3098596 - RNA, 19 nt, Molluscum contagiosum virus
cgccagcgcgcccaccagc

SEQ ID NO: 3098597 - RNA, 19 nt, Molluscum contagiosum virus
ucgccgaacggcagacccc

SEQ ID NO: 3098598 - RNA, 16 nt, Molluscum contagiosum virus
cggugaccggagcggc

SEQ ID NO: 3098599 - RNA, 17 nt, Molluscum contagiosum virus
ggcguccggugcucgcc

SEQ ID NO: 3098600 - RNA, 23 nt, Molluscum contagiosum virus
acaucuucgugcccacgcuggcg

SEQ ID NO: 3098601 - RNA, 16 nt, Molluscum contagiosum virus
cagcuacugcgugcga

SEQ ID NO: 3098602 - RNA, 13 nt, Molluscum contagiosum virus
gcgcgcgcgcagg

SEQ ID NO: 3098603 - RNA, 13 nt, Molluscum contagiosum virus
gcacccgcgcggc

SEQ ID NO: 3098604 - RNA, 18 nt, Molluscum contagiosum virus
augcucuacgugcugcag

SEQ ID NO: 3098605 - RNA, 21 nt, Molluscum contagiosum virus
cgucuggggauggccacggga

SEQ ID NO: 3098606 - RNA, 20 nt, Molluscum contagiosum virus
ggagcccuugaucgacaugg

SEQ ID NO: 3098607 - RNA, 19 nt, Molluscum contagiosum virus
gcgcgcacaagauggcgca

SEQ ID NO: 3098608 - RNA, 12 nt, Molluscum contagiosum virus
cuccgugcgcca

SEQ ID NO: 3098609 - RNA, 23 nt, Molluscum contagiosum virus
acuugagcaccaagaagcggccc

SEQ ID NO: 3098610 - RNA, 20 nt, Molluscum contagiosum virus
uuucgccggaggaaggacag

SEQ ID NO: 3098611 - RNA, 13 nt, Molluscum contagiosum virus
gccggcgaaccga

SEQ ID NO: 3098612 - RNA, 14 nt, Molluscum contagiosum virus
ugugccugcgcaac

SEQ ID NO: 3098613 - RNA, 16 nt, Molluscum contagiosum virus
ccgcgccuugagcgcg

SEQ ID NO: 3098614 - RNA, 16 nt, Molluscum contagiosum virus
cugcgcgagccgcugc

SEQ ID NO: 3098615 - RNA, 17 nt, Molluscum contagiosum virus
cucgugcugggccugcc

SEQ ID NO: 3098616 - RNA, 19 nt, Molluscum contagiosum virus
gaacucggcuucugcugca

SEQ ID NO: 3098617 - RNA, 20 nt, Molluscum contagiosum virus
gcucgggccggcgcgccgcg

SEQ ID NO: 3098618 - RNA, 13 nt, Molluscum contagiosum virus
cgcgccagcagcg

SEQ ID NO: 3098619 - RNA, 13 nt, Molluscum contagiosum virus
cgcggcagcagcc

SEQ ID NO: 3098620 - RNA, 23 nt, Molluscum contagiosum virus
uuccacgaccgcaagugcacgcg

SEQ ID NO: 3098621 - RNA, 19 nt, Molluscum contagiosum virus
agccucucucguggggagg

SEQ ID NO: 3098622 - RNA, 15 nt, Molluscum contagiosum virus
gcugccggcucaagc

SEQ ID NO: 3098623 - RNA, 13 nt, Molluscum contagiosum virus
uguccucuucaca

SEQ ID NO: 3098624 - RNA, 13 nt, Molluscum contagiosum virus
cagcggcgccgca

SEQ ID NO: 3098625 - RNA, 15 nt, Molluscum contagiosum virus
gauuguagagacgcu

SEQ ID NO: 3098626 - RNA, 15 nt, Molluscum contagiosum virus
caagcaguaccugcu

SEQ ID NO: 3098627 - RNA, 14 nt, Molluscum contagiosum virus
gcuggagcuggcug

SEQ ID NO: 3098628 - RNA, 23 nt, Molluscum contagiosum virus
ccaagaacagagaaaggcaccca

SEQ ID NO: 3098629 - RNA, 17 nt, Molluscum contagiosum virus
ggcaggccgcccacgcu

SEQ ID NO: 3098630 - RNA, 22 nt, Molluscum contagiosum virus
cucagcggcacugcgcgcaugc

SEQ ID NO: 3098631 - RNA, 17 nt, Molluscum contagiosum virus
caugugcgagaacuggc

SEQ ID NO: 3098632 - RNA, 18 nt, Molluscum contagiosum virus
cucugccaccgcggcgcg

SEQ ID NO: 3098633 - RNA, 21 nt, Molluscum contagiosum virus
ugcucccgguccuugcuccuc

SEQ ID NO: 3098634 - RNA, 19 nt, Molluscum contagiosum virus
augcuuuuguuacucucag

SEQ ID NO: 3098635 - RNA, 19 nt, Molluscum contagiosum virus
cugcgcaagcucagccucu

SEQ ID NO: 3098636 - RNA, 20 nt, Molluscum contagiosum virus
uggcguccgcacgaggagcc

SEQ ID NO: 3098637 - RNA, 23 nt, Molluscum contagiosum virus
cacgcugcucgugcugcucugcg

SEQ ID NO: 3098638 - RNA, 15 nt, Molluscum contagiosum virus
gccgcucggcccgcg

SEQ ID NO: 3098639 - RNA, 17 nt, Molluscum contagiosum virus
gugcugucccucugugc

SEQ ID NO: 3098640 - RNA, 21 nt, Molluscum contagiosum virus
agcgcaggcaguugccgcagc

SEQ ID NO: 3098641 - RNA, 20 nt, Molluscum contagiosum virus
cgccgaggacuaccuggcgg

SEQ ID NO: 3098642 - RNA, 14 nt, Molluscum contagiosum virus
cuggccgaugccua

SEQ ID NO: 3098643 - RNA, 16 nt, Molluscum contagiosum virus
cagccucgagcgccgu

SEQ ID NO: 3098644 - RNA, 18 nt, Molluscum contagiosum virus
cggcgcgccgcacgcugc

SEQ ID NO: 3098645 - RNA, 20 nt, Molluscum contagiosum virus
ccgcgcccgacucgcagcuc

SEQ ID NO: 3098646 - RNA, 13 nt, Molluscum contagiosum virus
gcgcugcuggugc

SEQ ID NO: 3098647 - RNA, 20 nt, Molluscum contagiosum virus
gcacgugcagcggcgccacg

SEQ ID NO: 3098648 - RNA, 23 nt, Molluscum contagiosum virus
guggccaaagucuuccuggggcu

SEQ ID NO: 3098649 - RNA, 22 nt, Molluscum contagiosum virus
cgccaaccaccacguggaccug

SEQ ID NO: 3098650 - RNA, 15 nt, Molluscum contagiosum virus
gcuugccccucgucc

SEQ ID NO: 3098651 - RNA, 20 nt, Molluscum contagiosum virus
cgccuggccgaacugcucug

SEQ ID NO: 3098652 - RNA, 15 nt, Molluscum contagiosum virus
gaagaguuggacagc

SEQ ID NO: 3098653 - RNA, 18 nt, Molluscum contagiosum virus
cggcucuggagcggccac

SEQ ID NO: 3098654 - RNA, 15 nt, Molluscum contagiosum virus
cgcacgaccacgcug

SEQ ID NO: 3098655 - RNA, 22 nt, Molluscum contagiosum virus
gacucucguucuuccggcagcg

SEQ ID NO: 3098656 - RNA, 13 nt, Molluscum contagiosum virus
ccccccuucuguc

SEQ ID NO: 3098657 - RNA, 22 nt, Molluscum contagiosum virus
ccgcgcgcgacuacgcacuggc

SEQ ID NO: 3098658 - RNA, 13 nt, Molluscum contagiosum virus
gccugcugcucuu

SEQ ID NO: 3098659 - RNA, 15 nt, Molluscum contagiosum virus
gcgagccagccaggc

SEQ ID NO: 3098660 - RNA, 17 nt, Molluscum contagiosum virus
aguacugcagcagcucc

SEQ ID NO: 3098661 - RNA, 18 nt, Molluscum contagiosum virus
gccgccuuugcgcugucu

SEQ ID NO: 3098662 - RNA, 19 nt, Molluscum contagiosum virus
cuccgggcacguccgccuc

SEQ ID NO: 3098663 - RNA, 13 nt, Molluscum contagiosum virus
caugaggcagugc

SEQ ID NO: 3098664 - RNA, 21 nt, Molluscum contagiosum virus
gaucucgcgcacgaccacgug

SEQ ID NO: 3098665 - RNA, 15 nt, Molluscum contagiosum virus
ccugcacuacugcuc

SEQ ID NO: 3098666 - RNA, 15 nt, Molluscum contagiosum virus
gcaccggcagcgcga

SEQ ID NO: 3098667 - RNA, 14 nt, Molluscum contagiosum virus
cuccuaucucaaag

SEQ ID NO: 3098668 - RNA, 21 nt, Molluscum contagiosum virus
gggcaagcgccgccaugcugc

SEQ ID NO: 3098669 - RNA, 22 nt, Molluscum contagiosum virus
uggagggcagugccaagguucu

SEQ ID NO: 3098670 - RNA, 23 nt, Molluscum contagiosum virus
agaaaggcacccaccaggaacag

SEQ ID NO: 3098671 - RNA, 20 nt, Molluscum contagiosum virus
cgagcugcuaacaacaugag

SEQ ID NO: 3098672 - RNA, 22 nt, Molluscum contagiosum virus
cucgcagcguuccaggaacgcc

SEQ ID NO: 3098673 - RNA, 16 nt, Molluscum contagiosum virus
gccugccagcgccagc

SEQ ID NO: 3098674 - RNA, 18 nt, Molluscum contagiosum virus
gcugggcgugggcagccg

SEQ ID NO: 3098675 - RNA, 14 nt, Molluscum contagiosum virus
acucaacaagcugc

SEQ ID NO: 3098676 - RNA, 13 nt, Molluscum contagiosum virus
cgcgucugcucuc

SEQ ID NO: 3098677 - RNA, 12 nt, Molluscum contagiosum virus
guaccuggugcg

SEQ ID NO: 3098678 - RNA, 16 nt, Molluscum contagiosum virus
caaaugcgcugcucgc

SEQ ID NO: 3098679 - RNA, 15 nt, Molluscum contagiosum virus
ccaacuaccuggggc

SEQ ID NO: 3098680 - RNA, 15 nt, Molluscum contagiosum virus
ugcgcgugcugggcc

SEQ ID NO: 3098681 - RNA, 20 nt, Molluscum contagiosum virus
cuuccucuacaccagcugga

SEQ ID NO: 3098682 - RNA, 21 nt, Molluscum contagiosum virus
uggagcagacguacgagcagg

SEQ ID NO: 3098683 - RNA, 13 nt, Molluscum contagiosum virus
gcacgugcugcgc

SEQ ID NO: 3098684 - RNA, 16 nt, Molluscum contagiosum virus
ucuuucccgggcacug

SEQ ID NO: 3098685 - RNA, 17 nt, Molluscum contagiosum virus
gaucaccccgcagcuca

SEQ ID NO: 3098686 - RNA, 14 nt, Molluscum contagiosum virus
cgcguucacaaagg

SEQ ID NO: 3098687 - RNA, 22 nt, Molluscum contagiosum virus
aagacguggacgaggccaaccu

SEQ ID NO: 3098688 - RNA, 22 nt, Molluscum contagiosum virus
aaagggcugcuugcgaccccag

SEQ ID NO: 3098689 - RNA, 18 nt, Molluscum contagiosum virus
cagcgggaaacugcugcc

SEQ ID NO: 3098690 - RNA, 18 nt, Molluscum contagiosum virus
caccugcaucgcgccgcc

SEQ ID NO: 3098691 - RNA, 22 nt, Molluscum contagiosum virus
uccgacggaacgagccugccgc

SEQ ID NO: 3098692 - RNA, 15 nt, Molluscum contagiosum virus
accaccaccagcacg

SEQ ID NO: 3098693 - RNA, 15 nt, Molluscum contagiosum virus
gaggagaaaguaaau

SEQ ID NO: 3098694 - RNA, 21 nt, Molluscum contagiosum virus
acacuugcgcguucgcaaaga

SEQ ID NO: 3098695 - RNA, 16 nt, Molluscum contagiosum virus
cugcucgcgcgcgcac

SEQ ID NO: 3098696 - RNA, 22 nt, Molluscum contagiosum virus
gacuccaaggaggucccuagcc

SEQ ID NO: 3098697 - RNA, 16 nt, Molluscum contagiosum virus
agcgcuggagcuggcu

SEQ ID NO: 3098698 - RNA, 15 nt, Molluscum contagiosum virus
cggcgggggcagcag

SEQ ID NO: 3098699 - RNA, 14 nt, Molluscum contagiosum virus
ggcgcggcugcucg

SEQ ID NO: 3098700 - RNA, 20 nt, Molluscum contagiosum virus
cugcgcacgcuugugcgcac

SEQ ID NO: 3098701 - RNA, 22 nt, Molluscum contagiosum virus
cagauucggaggcggagcugcc

SEQ ID NO: 3098702 - RNA, 18 nt, Molluscum contagiosum virus
ucuccaggaacgcgccgc

SEQ ID NO: 3098703 - RNA, 18 nt, Molluscum contagiosum virus
cccuugauccaggcccgu

SEQ ID NO: 3098704 - RNA, 19 nt, Molluscum contagiosum virus
gaaguccaucggugggcuc

SEQ ID NO: 3098705 - RNA, 13 nt, Molluscum contagiosum virus
guggcgcugugcg

SEQ ID NO: 3098706 - RNA, 23 nt, Molluscum contagiosum virus
gucuugccgaagccgcaggccag

SEQ ID NO: 3098707 - RNA, 15 nt, Molluscum contagiosum virus
ccagcuccgccggga

SEQ ID NO: 3098708 - RNA, 19 nt, Molluscum contagiosum virus
gguuguagcgguugaccag

SEQ ID NO: 3098709 - RNA, 14 nt, Molluscum contagiosum virus
ccaccaggaacagg

SEQ ID NO: 3098710 - RNA, 14 nt, Molluscum contagiosum virus
aagugacuagcgcu

SEQ ID NO: 3098711 - RNA, 16 nt, Molluscum contagiosum virus
gccgcgucguagcaaa

SEQ ID NO: 3098712 - RNA, 18 nt, Molluscum contagiosum virus
cgacuugcugcggagcgc

SEQ ID NO: 3098713 - RNA, 20 nt, Molluscum contagiosum virus
ucgagcgcgcgccugcuggc

SEQ ID NO: 3098714 - RNA, 16 nt, Molluscum contagiosum virus
acgcuguugcugcugc

SEQ ID NO: 3098715 - RNA, 15 nt, Molluscum contagiosum virus
caaacgcuguuuuca

SEQ ID NO: 3098716 - RNA, 15 nt, Molluscum contagiosum virus
cguccuguagcaagg

SEQ ID NO: 3098717 - RNA, 24 nt, Molluscum contagiosum virus
acucgcagcucacgagauggcugc

SEQ ID NO: 3098718 - RNA, 18 nt, Molluscum contagiosum virus
gcggcgcaagcaccggca

SEQ ID NO: 3098719 - RNA, 13 nt, Molluscum contagiosum virus
acugcaagaucua

SEQ ID NO: 3098720 - RNA, 21 nt, Molluscum contagiosum virus
cggccugcacggcuaccgcga

SEQ ID NO: 3098721 - RNA, 14 nt, Molluscum contagiosum virus
acgucguagcgcuc

SEQ ID NO: 3098722 - RNA, 16 nt, Molluscum contagiosum virus
gcaaagacgagggaug

SEQ ID NO: 3098723 - RNA, 14 nt, Molluscum contagiosum virus
cggugcucgccccu

SEQ ID NO: 3098724 - RNA, 20 nt, Molluscum contagiosum virus
cgucuucacuccgcacagcu

SEQ ID NO: 3098725 - RNA, 16 nt, Molluscum contagiosum virus
aaauaugaaccacuuc

SEQ ID NO: 3098726 - RNA, 24 nt, Molluscum contagiosum virus
cagccugcuggcaccgcgcgcgcu

SEQ ID NO: 3098727 - RNA, 20 nt, Molluscum contagiosum virus
gcgcuggaugcugcucgacg

SEQ ID NO: 3098728 - RNA, 18 nt, Molluscum contagiosum virus
cauuuucucuggagagcg

SEQ ID NO: 3098729 - RNA, 16 nt, Molluscum contagiosum virus
ccaagucgcgcucuuc

SEQ ID NO: 3098730 - RNA, 17 nt, Molluscum contagiosum virus
ccgaagcaaaagcgcuc

SEQ ID NO: 3098731 - RNA, 18 nt, Molluscum contagiosum virus
cuggcucgcgccugcgcu

SEQ ID NO: 3098732 - RNA, 22 nt, Molluscum contagiosum virus
cggacgaucuuacaggccaccg

SEQ ID NO: 3098733 - RNA, 21 nt, Molluscum contagiosum virus
cacgcgacggugugccgcugg

SEQ ID NO: 3098734 - RNA, 16 nt, Molluscum contagiosum virus
cggaugcaggcacugc

SEQ ID NO: 3098735 - RNA, 18 nt, Molluscum contagiosum virus
cgacggcgugcuggccag

SEQ ID NO: 3098736 - RNA, 13 nt, Molluscum contagiosum virus
cgcagccacgacu

SEQ ID NO: 3098737 - RNA, 21 nt, Molluscum contagiosum virus
gcacugccgcguccucagguu

SEQ ID NO: 3098738 - RNA, 17 nt, Molluscum contagiosum virus
ucaacucguaggacaac

SEQ ID NO: 3098739 - RNA, 19 nt, Molluscum contagiosum virus
cgcgcacgcucucgcuggc

SEQ ID NO: 3098740 - RNA, 14 nt, Molluscum contagiosum virus
agcagcuccagcau

SEQ ID NO: 3098741 - RNA, 22 nt, Molluscum contagiosum virus
gcccggcaggcucccgcugucg

SEQ ID NO: 3098742 - RNA, 18 nt, Molluscum contagiosum virus
guucucuuuguuccugcg

SEQ ID NO: 3098743 - RNA, 17 nt, Molluscum contagiosum virus
cgcgagcguuucugccg

SEQ ID NO: 3098744 - RNA, 22 nt, Molluscum contagiosum virus
gucacgcugaucuucuaccugg

SEQ ID NO: 3098745 - RNA, 17 nt, Molluscum contagiosum virus
cggcaacugccugcgcu

SEQ ID NO: 3098746 - RNA, 17 nt, Molluscum contagiosum virus
acgcgcggcagcagccu

SEQ ID NO: 3098747 - RNA, 14 nt, Molluscum contagiosum virus
cgcuggcuccgcug

SEQ ID NO: 3098748 - RNA, 13 nt, Molluscum contagiosum virus
aagacuggcucag

SEQ ID NO: 3098749 - RNA, 16 nt, Molluscum contagiosum virus
ucaggagcauggccgc

SEQ ID NO: 3098750 - RNA, 17 nt, Molluscum contagiosum virus
agcgcgcccaccagcag

SEQ ID NO: 3098751 - RNA, 21 nt, Molluscum contagiosum virus
acgcgugccuggcuugcgcgc

SEQ ID NO: 3098752 - RNA, 14 nt, Molluscum contagiosum virus
gcaaccagcugcug

SEQ ID NO: 3098753 - RNA, 15 nt, Molluscum contagiosum virus
aagcucaagcccggc

SEQ ID NO: 3098754 - RNA, 19 nt, Molluscum contagiosum virus
ggaugccacgcagcuggcg

SEQ ID NO: 3098755 - RNA, 13 nt, Molluscum contagiosum virus
ggcucgccaugcu

SEQ ID NO: 3098756 - RNA, 21 nt, Molluscum contagiosum virus
cgugcuuacggacaggaugcc

SEQ ID NO: 3098757 - RNA, 11 nt, Molluscum contagiosum virus
cacgagcugcu

SEQ ID NO: 3098758 - RNA, 16 nt, Molluscum contagiosum virus
cgagcacgagcauucc

SEQ ID NO: 3098759 - RNA, 17 nt, Molluscum contagiosum virus
gcaaggcgcgcgcuggc

SEQ ID NO: 3098760 - RNA, 15 nt, Molluscum contagiosum virus
ccgagcagcggggac

SEQ ID NO: 3098761 - RNA, 18 nt, Molluscum contagiosum virus
cuccuggucuucccgcug

SEQ ID NO: 3098762 - RNA, 17 nt, Molluscum contagiosum virus
gcccgugcuugcgcacg

SEQ ID NO: 3098763 - RNA, 13 nt, Molluscum contagiosum virus
ugcgacugccagc

SEQ ID NO: 3098764 - RNA, 20 nt, Molluscum contagiosum virus
auaaggcgguggcggcucug

SEQ ID NO: 3098765 - RNA, 18 nt, Molluscum contagiosum virus
ugcgcuuuuuuuguccug

SEQ ID NO: 3098766 - RNA, 19 nt, Molluscum contagiosum virus
ccacaugaccaagcacauu

SEQ ID NO: 3098767 - RNA, 14 nt, Molluscum contagiosum virus
agcccgcccccgag

SEQ ID NO: 3098768 - RNA, 16 nt, Molluscum contagiosum virus
gccgagccgcuggccg

SEQ ID NO: 3098769 - RNA, 20 nt, Molluscum contagiosum virus
cugcaacucgcgcugcagca

SEQ ID NO: 3098770 - RNA, 23 nt, Molluscum contagiosum virus
ucaccagcuacgagccgcugcuc

SEQ ID NO: 3098771 - RNA, 17 nt, Molluscum contagiosum virus
cggcuccuugagaauca

SEQ ID NO: 3098772 - RNA, 21 nt, Molluscum contagiosum virus
gccgcgugcaugcccagcaug

SEQ ID NO: 3098773 - RNA, 16 nt, Molluscum contagiosum virus
ccgcggcgugcccguc

SEQ ID NO: 3098774 - RNA, 16 nt, Molluscum contagiosum virus
cgagcgcgucugcucu

SEQ ID NO: 3098775 - RNA, 19 nt, Molluscum contagiosum virus
cguagcggacgaagcugug

SEQ ID NO: 3098776 - RNA, 13 nt, Molluscum contagiosum virus
ucggagaagaaca

SEQ ID NO: 3098777 - RNA, 22 nt, Molluscum contagiosum virus
cgcgcguguuugugcugucccu

SEQ ID NO: 3098778 - RNA, 15 nt, Molluscum contagiosum virus
cgagaacuggcgcag

SEQ ID NO: 3098779 - RNA, 22 nt, Molluscum contagiosum virus
ucggcggcaugcgcgcgcagca

SEQ ID NO: 3098780 - RNA, 13 nt, Molluscum contagiosum virus
gugcgaaggcucg

SEQ ID NO: 3098781 - RNA, 17 nt, Molluscum contagiosum virus
uagugaaccgcauuugu

SEQ ID NO: 3098782 - RNA, 14 nt, Molluscum contagiosum virus
cgccugugccugca

SEQ ID NO: 3098783 - RNA, 14 nt, Molluscum contagiosum virus
acgagcccgcaaga

SEQ ID NO: 3098784 - RNA, 20 nt, Molluscum contagiosum virus
ccaaggacuucgagaccuac

SEQ ID NO: 3098785 - RNA, 19 nt, Molluscum contagiosum virus
gcugcucgugcugcucugc

SEQ ID NO: 3098786 - RNA, 18 nt, Molluscum contagiosum virus
cacgcuggcacggccggc

SEQ ID NO: 3098787 - RNA, 22 nt, Molluscum contagiosum virus
gcgcguaugcgaacagccgccg

SEQ ID NO: 3098788 - RNA, 20 nt, Molluscum contagiosum virus
gucgcguuccaggugcuggg

SEQ ID NO: 3098789 - RNA, 13 nt, Molluscum contagiosum virus
agcuggagcugcc

SEQ ID NO: 3098790 - RNA, 18 nt, Molluscum contagiosum virus
gagaccugucgugcaaug

SEQ ID NO: 3098791 - RNA, 20 nt, Molluscum contagiosum virus
gccugcugaagaaggagccc

SEQ ID NO: 3098792 - RNA, 21 nt, Molluscum contagiosum virus
cugcagcagcuccagcauggc

SEQ ID NO: 3098793 - RNA, 17 nt, Molluscum contagiosum virus
cggacaaaauggcugcg

SEQ ID NO: 3098794 - RNA, 13 nt, Molluscum contagiosum virus
cucucguggggag

SEQ ID NO: 3098795 - RNA, 12 nt, Molluscum contagiosum virus
acaccugugccc

SEQ ID NO: 3098796 - RNA, 23 nt, Molluscum contagiosum virus
ccgcggagaccaccgcuggggcg

SEQ ID NO: 3098797 - RNA, 15 nt, Molluscum contagiosum virus
aagaggggagccagc

SEQ ID NO: 3098798 - RNA, 15 nt, Molluscum contagiosum virus
guccggcgcuugccc

SEQ ID NO: 3098799 - RNA, 19 nt, Molluscum contagiosum virus
ccgcagcgcuggagcuggc

SEQ ID NO: 3098800 - RNA, 12 nt, Molluscum contagiosum virus
gcagcgugccgc

SEQ ID NO: 3098801 - RNA, 14 nt, Molluscum contagiosum virus
cuucugcaagcugc

SEQ ID NO: 3098802 - RNA, 11 nt, Molluscum contagiosum virus
ugccuggcagu

SEQ ID NO: 3098803 - RNA, 17 nt, Molluscum contagiosum virus
gccgcgccgcugcgccg

SEQ ID NO: 3098804 - RNA, 12 nt, Molluscum contagiosum virus
gcaaggccuggc

SEQ ID NO: 3098805 - RNA, 19 nt, Molluscum contagiosum virus
acuugcgcguccgcaaagc

SEQ ID NO: 3098806 - RNA, 17 nt, Molluscum contagiosum virus
acgaagacgaagcgcuc

SEQ ID NO: 3098807 - RNA, 19 nt, Molluscum contagiosum virus
ccucgccgaacggcagacc

SEQ ID NO: 3098808 - RNA, 21 nt, Molluscum contagiosum virus
ucucagggcagcgaaaaguag

SEQ ID NO: 3098809 - RNA, 18 nt, Molluscum contagiosum virus
ugucuugaugcuguuacu

SEQ ID NO: 3098810 - RNA, 15 nt, Molluscum contagiosum virus
acacacacacacucg

SEQ ID NO: 3098811 - RNA, 17 nt, Molluscum contagiosum virus
gcgacuagccugugccc

SEQ ID NO: 3098812 - RNA, 22 nt, Molluscum contagiosum virus
cggugcucgccccuccccggcg

SEQ ID NO: 3098813 - RNA, 14 nt, Molluscum contagiosum virus
cgugagcgcgcucu

SEQ ID NO: 3098814 - RNA, 17 nt, Molluscum contagiosum virus
auccuggggaaccgcug

SEQ ID NO: 3098815 - RNA, 22 nt, Molluscum contagiosum virus
gcugccggcaacgcugccgcug

SEQ ID NO: 3098816 - RNA, 21 nt, Molluscum contagiosum virus
ccaucaucgcgcugcucuucg

SEQ ID NO: 3098817 - RNA, 15 nt, Molluscum contagiosum virus
ugcacuuccaguaug

SEQ ID NO: 3098818 - RNA, 14 nt, Molluscum contagiosum virus
gcaagcgcaccuuu

SEQ ID NO: 3098819 - RNA, 23 nt, Molluscum contagiosum virus
cagcuuagcuuccgucugcugcu

SEQ ID NO: 3098820 - RNA, 14 nt, Molluscum contagiosum virus
gcagucgccuuccu

SEQ ID NO: 3098821 - RNA, 22 nt, Molluscum contagiosum virus
cgucagggaugccagugcagug

SEQ ID NO: 3098822 - RNA, 18 nt, Molluscum contagiosum virus
uauuuccggcuccggcuu

SEQ ID NO: 3098823 - RNA, 13 nt, Molluscum contagiosum virus
ggcucacagccgu

SEQ ID NO: 3098824 - RNA, 13 nt, Molluscum contagiosum virus
gccagcggcgccg

SEQ ID NO: 3098825 - RNA, 22 nt, Molluscum contagiosum virus
cacacucacgcguccacaaaga

SEQ ID NO: 3098826 - RNA, 23 nt, Molluscum contagiosum virus
cgccgcuggagcacgacuacggc

SEQ ID NO: 3098827 - RNA, 13 nt, Molluscum contagiosum virus
gcuugccgcuuga

SEQ ID NO: 3098828 - RNA, 19 nt, Molluscum contagiosum virus
cggguaguugcgagccagc

SEQ ID NO: 3098829 - RNA, 23 nt, Molluscum contagiosum virus
gccagcuuggugcgcucgagcuc

SEQ ID NO: 3098830 - RNA, 16 nt, Molluscum contagiosum virus
aggcauaccugugcca

SEQ ID NO: 3098831 - RNA, 13 nt, Molluscum contagiosum virus
gcacgcggcgcuc

SEQ ID NO: 3098832 - RNA, 16 nt, Molluscum contagiosum virus
gcacgcugcguuucca

SEQ ID NO: 3098833 - RNA, 21 nt, Molluscum contagiosum virus
gccagcgcgcccaccagcagc

SEQ ID NO: 3098834 - RNA, 20 nt, Molluscum contagiosum virus
cacgccgcagcgcuggagcu

SEQ ID NO: 3098835 - RNA, 23 nt, Molluscum contagiosum virus
ccgcgagcacguggacagcaucc

SEQ ID NO: 3098836 - RNA, 16 nt, Molluscum contagiosum virus
gcgcagcuguuucugc

SEQ ID NO: 3098837 - RNA, 18 nt, Molluscum contagiosum virus
gcguggcgcgcgagcugc

SEQ ID NO: 3098838 - RNA, 17 nt, Molluscum contagiosum virus
cugcgacagcugcugcu

SEQ ID NO: 3098839 - RNA, 22 nt, Molluscum contagiosum virus
ggcaagcgccgccaugcugcgc

SEQ ID NO: 3098840 - RNA, 17 nt, Molluscum contagiosum virus
aacugcccggcggcaag

SEQ ID NO: 3098841 - RNA, 18 nt, Molluscum contagiosum virus
cguggaaaagcagggccc

SEQ ID NO: 3098842 - RNA, 20 nt, Molluscum contagiosum virus
uccuugcuccucgcacgggc

SEQ ID NO: 3098843 - RNA, 15 nt, Molluscum contagiosum virus
agucacgaccgaccc

SEQ ID NO: 3098844 - RNA, 18 nt, Molluscum contagiosum virus
cacgccuucguggagccc

SEQ ID NO: 3098845 - RNA, 15 nt, Molluscum contagiosum virus
gccgcguugcagcag

SEQ ID NO: 3098846 - RNA, 16 nt, Molluscum contagiosum virus
gcgcccgacgagcuug

SEQ ID NO: 3098847 - RNA, 14 nt, Molluscum contagiosum virus
ccccgcgcugcgcg

SEQ ID NO: 3098848 - RNA, 19 nt, Molluscum contagiosum virus
ugcuagagcauauccugau

SEQ ID NO: 3098849 - RNA, 21 nt, Molluscum contagiosum virus
cgcgccuugcagcgcagcagc

SEQ ID NO: 3098850 - RNA, 21 nt, Molluscum contagiosum virus
uggagagcguacucgggccgc

SEQ ID NO: 3098851 - RNA, 13 nt, Molluscum contagiosum virus
uuggaggaggaag

SEQ ID NO: 3098852 - RNA, 23 nt, Molluscum contagiosum virus
agcugcccgaguuucggaagagc

SEQ ID NO: 3098853 - RNA, 18 nt, Molluscum contagiosum virus
gcuccuggucuucccgcu

SEQ ID NO: 3098854 - RNA, 14 nt, Molluscum contagiosum virus
aaacugcauccugg

SEQ ID NO: 3098855 - RNA, 22 nt, Molluscum contagiosum virus
gggcucugucguugucgccgug

SEQ ID NO: 3098856 - RNA, 17 nt, Molluscum contagiosum virus
ugugcuacugcacugca

SEQ ID NO: 3098857 - RNA, 21 nt, Molluscum contagiosum virus
cuuugaggaacuagugcugcu

SEQ ID NO: 3098858 - RNA, 16 nt, Molluscum contagiosum virus
gccuucgcgcugcccg

SEQ ID NO: 3098859 - RNA, 17 nt, Molluscum contagiosum virus
gggcgcgcacuaccgca

SEQ ID NO: 3098860 - RNA, 19 nt, Molluscum contagiosum virus
agcgagucaucggcgaguu

SEQ ID NO: 3098861 - RNA, 12 nt, Molluscum contagiosum virus
gacggcgagcgc

SEQ ID NO: 3098862 - RNA, 16 nt, Molluscum contagiosum virus
acgcuguccaggcgcu

SEQ ID NO: 3098863 - RNA, 21 nt, Molluscum contagiosum virus
aagaagcagcagaccaagaag

SEQ ID NO: 3098864 - RNA, 15 nt, Molluscum contagiosum virus
cgccuagccugcagu

SEQ ID NO: 3098865 - RNA, 14 nt, Molluscum contagiosum virus
aaggaaaacugcau

SEQ ID NO: 3098866 - RNA, 14 nt, Molluscum contagiosum virus
gggugccuacucgc

SEQ ID NO: 3098867 - RNA, 14 nt, Molluscum contagiosum virus
cgccaccgcgcccu

SEQ ID NO: 3098868 - RNA, 22 nt, Molluscum contagiosum virus
gcccuucguguucgcggacggc

SEQ ID NO: 3098869 - RNA, 18 nt, Molluscum contagiosum virus
uccucgcuccgcagcagg

SEQ ID NO: 3098870 - RNA, 18 nt, Molluscum contagiosum virus
cuucaagcacgagcugcu

SEQ ID NO: 3098871 - RNA, 20 nt, Molluscum contagiosum virus
ccgccgcggcgcccacggcg

SEQ ID NO: 3098872 - RNA, 13 nt, Molluscum contagiosum virus
cgcgcgcgcgcag

SEQ ID NO: 3098873 - RNA, 23 nt, Molluscum contagiosum virus
agucauucucuucgaaggcagcg

SEQ ID NO: 3098874 - RNA, 17 nt, Molluscum contagiosum virus
caggcgcgcaagugcgu

SEQ ID NO: 3098875 - RNA, 11 nt, Molluscum contagiosum virus
cgcgcgcagua

SEQ ID NO: 3098876 - RNA, 23 nt, Molluscum contagiosum virus
ggcgcggccucuuuuugcgccgc

SEQ ID NO: 3098877 - RNA, 12 nt, Molluscum contagiosum virus
gaaggugcucag

SEQ ID NO: 3098878 - RNA, 16 nt, Molluscum contagiosum virus
cgcgucgcgcgccgcg

SEQ ID NO: 3098879 - RNA, 20 nt, Molluscum contagiosum virus
cugcagcagcuccagcaugg

SEQ ID NO: 3098880 - RNA, 16 nt, Molluscum contagiosum virus
cgucguccggaggcac

SEQ ID NO: 3098881 - RNA, 13 nt, Molluscum contagiosum virus
cgcgcugcgccac

SEQ ID NO: 3098882 - RNA, 23 nt, Molluscum contagiosum virus
gcuucacgcugcucgugcugcuc

SEQ ID NO: 3098883 - RNA, 17 nt, Molluscum contagiosum virus
gcguccgugcgcagggc

SEQ ID NO: 3098884 - RNA, 15 nt, Molluscum contagiosum virus
gucgugcaggucgag

SEQ ID NO: 3098885 - RNA, 16 nt, Molluscum contagiosum virus
ugcgcgacaugcugcc

SEQ ID NO: 3098886 - RNA, 23 nt, Molluscum contagiosum virus
ggcgcaaccgcgugcgugcacag

SEQ ID NO: 3098887 - RNA, 19 nt, Molluscum contagiosum virus
cuacgaggugcugcgccac

SEQ ID NO: 3098888 - RNA, 15 nt, Molluscum contagiosum virus
ccaaggacgacaaca

SEQ ID NO: 3098889 - RNA, 14 nt, Molluscum contagiosum virus
uacgacgacaugca

SEQ ID NO: 3098890 - RNA, 18 nt, Molluscum contagiosum virus
ggcgccgcuaccagcucg

SEQ ID NO: 3098891 - RNA, 13 nt, Molluscum contagiosum virus
gucagaggauucu

SEQ ID NO: 3098892 - RNA, 15 nt, Molluscum contagiosum virus
acaucggcacugcuc

SEQ ID NO: 3098893 - RNA, 18 nt, Molluscum contagiosum virus
ucggcguggccaggccgc

SEQ ID NO: 3098894 - RNA, 20 nt, Molluscum contagiosum virus
cgagcaauugcugggcacaa

SEQ ID NO: 3098895 - RNA, 14 nt, Molluscum contagiosum virus
agcugcggacgcgg

SEQ ID NO: 3098896 - RNA, 14 nt, Molluscum contagiosum virus
gcagcccuuccacg

SEQ ID NO: 3098897 - RNA, 17 nt, Molluscum contagiosum virus
cgccgcugcgcaucugc

SEQ ID NO: 3098898 - RNA, 16 nt, Molluscum contagiosum virus
gcagagccgcgaaagc

SEQ ID NO: 3098899 - RNA, 17 nt, Molluscum contagiosum virus
cgugcuugugcgccugu

SEQ ID NO: 3098900 - RNA, 15 nt, Molluscum contagiosum virus
acuugccguguucua

SEQ ID NO: 3098901 - RNA, 15 nt, Molluscum contagiosum virus
aacgucgcacuggcc

SEQ ID NO: 3098902 - RNA, 13 nt, Molluscum contagiosum virus
gugccgcugcgcg

SEQ ID NO: 3098903 - RNA, 17 nt, Molluscum contagiosum virus
ggccgccacuguugcuu

SEQ ID NO: 3098904 - RNA, 14 nt, Molluscum contagiosum virus
uagcagagcacgag

SEQ ID NO: 3098905 - RNA, 18 nt, Molluscum contagiosum virus
cagccaugaggacagcuu

SEQ ID NO: 3098906 - RNA, 14 nt, Molluscum contagiosum virus
gcgggcacggcuac

SEQ ID NO: 3098907 - RNA, 21 nt, Molluscum contagiosum virus
ggaggugcgcgacuccaucug

SEQ ID NO: 3098908 - RNA, 14 nt, Molluscum contagiosum virus
gcaugcccagcaug

SEQ ID NO: 3098909 - RNA, 20 nt, Molluscum contagiosum virus
uggaacugcagcagcuggcc

SEQ ID NO: 3098910 - RNA, 13 nt, Molluscum contagiosum virus
cgcggaggcgcaa

SEQ ID NO: 3098911 - RNA, 14 nt, Molluscum contagiosum virus
cgaggccggcaagc

SEQ ID NO: 3098912 - RNA, 14 nt, Molluscum contagiosum virus
gccgcgcgcgcacg

SEQ ID NO: 3098913 - RNA, 14 nt, Molluscum contagiosum virus
cucgacgcgcugcu

SEQ ID NO: 3098914 - RNA, 16 nt, Molluscum contagiosum virus
uucuggcgcgcgugcc

SEQ ID NO: 3098915 - RNA, 14 nt, Molluscum contagiosum virus
cgcgcgccugcgcg

SEQ ID NO: 3098916 - RNA, 13 nt, Molluscum contagiosum virus
ggcggggcugcug

SEQ ID NO: 3098917 - RNA, 16 nt, Molluscum contagiosum virus
ucgacgggcgcagcca

SEQ ID NO: 3098918 - RNA, 17 nt, Molluscum contagiosum virus
cguuagcguugguaaca

SEQ ID NO: 3098919 - RNA, 15 nt, Molluscum contagiosum virus
cggggcccaugcuca

SEQ ID NO: 3098920 - RNA, 20 nt, Molluscum contagiosum virus
cguggaucgcgcgcaccugc

SEQ ID NO: 3098921 - RNA, 17 nt, Molluscum contagiosum virus
uggagaucgacaagauc

SEQ ID NO: 3098922 - RNA, 16 nt, Molluscum contagiosum virus
ggaaggcgaccagcug

SEQ ID NO: 3098923 - RNA, 15 nt, Molluscum contagiosum virus
cggcgcgugagcgcc

SEQ ID NO: 3098924 - RNA, 17 nt, Molluscum contagiosum virus
ggccgucgcgagcuugg

SEQ ID NO: 3098925 - RNA, 17 nt, Molluscum contagiosum virus
ccgcguacgcgccgggg

SEQ ID NO: 3098926 - RNA, 19 nt, Molluscum contagiosum virus
cagcucgccgcgcgccgcu

SEQ ID NO: 3098927 - RNA, 13 nt, Molluscum contagiosum virus
ccagcagccaggc

SEQ ID NO: 3098928 - RNA, 19 nt, Molluscum contagiosum virus
gcugcguuuccagggcagu

SEQ ID NO: 3098929 - RNA, 17 nt, Molluscum contagiosum virus
gaagaagcagcagacca

SEQ ID NO: 3098930 - RNA, 21 nt, Molluscum contagiosum virus
gaugaaaagcgugauguugag

SEQ ID NO: 3098931 - RNA, 15 nt, Molluscum contagiosum virus
gcacagaaagccaac

SEQ ID NO: 3098932 - RNA, 17 nt, Molluscum contagiosum virus
agcccgcugcgcauggc

SEQ ID NO: 3098933 - RNA, 23 nt, Molluscum contagiosum virus
gcuaguuaccagaggguggcuug

SEQ ID NO: 3098934 - RNA, 16 nt, Molluscum contagiosum virus
cagcugcgcgagccgc

SEQ ID NO: 3098935 - RNA, 15 nt, Molluscum contagiosum virus
gccggcgcgccgcgg

SEQ ID NO: 3098936 - RNA, 14 nt, Molluscum contagiosum virus
gccugcccgugugc

SEQ ID NO: 3098937 - RNA, 23 nt, Molluscum contagiosum virus
cgcucggaauuccuugugcaauu

SEQ ID NO: 3098938 - RNA, 21 nt, Molluscum contagiosum virus
cugacggucguccuggagccu

SEQ ID NO: 3098939 - RNA, 23 nt, Molluscum contagiosum virus
gcaucuucuuguuguugugacac

SEQ ID NO: 3098940 - RNA, 13 nt, Molluscum contagiosum virus
cgcaugcuggaga

SEQ ID NO: 3098941 - RNA, 14 nt, Molluscum contagiosum virus
ggcgcgguccagcc

SEQ ID NO: 3098942 - RNA, 20 nt, Molluscum contagiosum virus
gcagcuucuuggagcccuug

SEQ ID NO: 3098943 - RNA, 16 nt, Molluscum contagiosum virus
acgccuucguggagcc

SEQ ID NO: 3098944 - RNA, 16 nt, Molluscum contagiosum virus
ccgggcgccggcucug

SEQ ID NO: 3098945 - RNA, 15 nt, Molluscum contagiosum virus
gagccgggacgcgga

SEQ ID NO: 3098946 - RNA, 15 nt, Molluscum contagiosum virus
accugucgugcaaug

SEQ ID NO: 3098947 - RNA, 22 nt, Molluscum contagiosum virus
gcggcgcguccucggccagagc

SEQ ID NO: 3098948 - RNA, 19 nt, Molluscum contagiosum virus
ggcgccgcggccugggcca

SEQ ID NO: 3098949 - RNA, 16 nt, Molluscum contagiosum virus
agacgcguaccagcgc

SEQ ID NO: 3098950 - RNA, 23 nt, Molluscum contagiosum virus
gcgcauguauauacuccccgcgc

SEQ ID NO: 3098951 - RNA, 18 nt, Molluscum contagiosum virus
gccgggcacccagcccug

SEQ ID NO: 3098952 - RNA, 16 nt, Molluscum contagiosum virus
ccgccgcugccgcgcg

SEQ ID NO: 3098953 - RNA, 17 nt, Molluscum contagiosum virus
ccagcguuugauacagu

SEQ ID NO: 3098954 - RNA, 15 nt, Molluscum contagiosum virus
cgcugcagcaccugc

SEQ ID NO: 3098955 - RNA, 16 nt, Molluscum contagiosum virus
gcacgccgugggcagc

SEQ ID NO: 3098956 - RNA, 18 nt, Molluscum contagiosum virus
ucuacagccgccugccgc

SEQ ID NO: 3098957 - RNA, 15 nt, Molluscum contagiosum virus
agugcgcgugcgccu

SEQ ID NO: 3098958 - RNA, 23 nt, Molluscum contagiosum virus
gcgccgacgugcgcgugacgauu

SEQ ID NO: 3098959 - RNA, 19 nt, Molluscum contagiosum virus
acgugccaagaccugggcg

SEQ ID NO: 3098960 - RNA, 14 nt, Molluscum contagiosum virus
cugcuuccuccucc

SEQ ID NO: 3098961 - RNA, 23 nt, Molluscum contagiosum virus
cguaacaauggacacgcacuggc

SEQ ID NO: 3098962 - RNA, 16 nt, Molluscum contagiosum virus
ucccaagacucugccg

SEQ ID NO: 3098963 - RNA, 17 nt, Molluscum contagiosum virus
agucggcguggccaggc

SEQ ID NO: 3098964 - RNA, 15 nt, Molluscum contagiosum virus
cauagcccaugcgca

SEQ ID NO: 3098965 - RNA, 21 nt, Molluscum contagiosum virus
cucgccgcgcgccgcugcucg

SEQ ID NO: 3098966 - RNA, 19 nt, Molluscum contagiosum virus
gccgcgcgcuacgcgccga

SEQ ID NO: 3098967 - RNA, 23 nt, Molluscum contagiosum virus
ggcgcgcgagcacagcgcgcgga

SEQ ID NO: 3098968 - RNA, 20 nt, Molluscum contagiosum virus
cugcgccuucugccugcccg

SEQ ID NO: 3098969 - RNA, 19 nt, Molluscum contagiosum virus
cguagacgauuuugccgca

SEQ ID NO: 3098970 - RNA, 15 nt, Molluscum contagiosum virus
auaccggagacacca

SEQ ID NO: 3098971 - RNA, 15 nt, Molluscum contagiosum virus
ccgucagccucugug

SEQ ID NO: 3098972 - RNA, 15 nt, Molluscum contagiosum virus
gcccucgcgcgcagc

SEQ ID NO: 3098973 - RNA, 13 nt, Molluscum contagiosum virus
agcgcgccucucg

SEQ ID NO: 3098974 - RNA, 16 nt, Molluscum contagiosum virus
ugggcgagagcuuuuc

SEQ ID NO: 3098975 - RNA, 16 nt, Molluscum contagiosum virus
cacgcgcucuccagag

SEQ ID NO: 3098976 - RNA, 14 nt, Molluscum contagiosum virus
gccgccgugggcgc

SEQ ID NO: 3098977 - RNA, 17 nt, Molluscum contagiosum virus
ugagcagcaaaacugaa

SEQ ID NO: 3098978 - RNA, 14 nt, Molluscum contagiosum virus
ggcacgugcugcug

SEQ ID NO: 3098979 - RNA, 19 nt, Molluscum contagiosum virus
gacguggaccuuggcgcgc

SEQ ID NO: 3098980 - RNA, 14 nt, Molluscum contagiosum virus
acuccaaggagggc

SEQ ID NO: 3098981 - RNA, 22 nt, Molluscum contagiosum virus
uuccggagacaccagcuccgcc

SEQ ID NO: 3098982 - RNA, 16 nt, Molluscum contagiosum virus
ggaaaggcacccacca

SEQ ID NO: 3098983 - RNA, 21 nt, Molluscum contagiosum virus
caccuaaauggacgcgccgcg

SEQ ID NO: 3098984 - RNA, 14 nt, Molluscum contagiosum virus
cggacggcgcgcag

SEQ ID NO: 3098985 - RNA, 23 nt, Molluscum contagiosum virus
cgcaugguggcgauccuguccau

SEQ ID NO: 3098986 - RNA, 19 nt, Molluscum contagiosum virus
gccguagucuucgugcgug

SEQ ID NO: 3098987 - RNA, 18 nt, Molluscum contagiosum virus
cacgcgcacgcucucgcu

SEQ ID NO: 3098988 - RNA, 14 nt, Molluscum contagiosum virus
ggcgagauugagcu

SEQ ID NO: 3098989 - RNA, 21 nt, Molluscum contagiosum virus
gcucaaaguguacuauuacac

SEQ ID NO: 3098990 - RNA, 13 nt, Molluscum contagiosum virus
gcacgaggagccc

SEQ ID NO: 3098991 - RNA, 11 nt, Molluscum contagiosum virus
ccacugggaac

SEQ ID NO: 3098992 - RNA, 14 nt, Molluscum contagiosum virus
gugccuuguucuga

SEQ ID NO: 3098993 - RNA, 21 nt, Molluscum contagiosum virus
ccgcgccgaaacacggccucc

SEQ ID NO: 3098994 - RNA, 18 nt, Molluscum contagiosum virus
cacgcgucgcgcaggcgc

SEQ ID NO: 3098995 - RNA, 20 nt, Molluscum contagiosum virus
agcugcagagcgugcugguc

SEQ ID NO: 3098996 - RNA, 16 nt, Molluscum contagiosum virus
acggaaacagcaccgu

SEQ ID NO: 3098997 - RNA, 19 nt, Molluscum contagiosum virus
ccaauggagccgcugcugc

SEQ ID NO: 3098998 - RNA, 20 nt, Molluscum contagiosum virus
accgccguacccggggagaa

SEQ ID NO: 3098999 - RNA, 18 nt, Molluscum contagiosum virus
acuaccacgucggcgaga

SEQ ID NO: 3099000 - RNA, 16 nt, Molluscum contagiosum virus
acucgcugcugcucuu

SEQ ID NO: 3099001 - RNA, 12 nt, Molluscum contagiosum virus
aggacaccgcgg

SEQ ID NO: 3099002 - RNA, 15 nt, Molluscum contagiosum virus
cgcgcgaacucucau

SEQ ID NO: 3099003 - RNA, 16 nt, Molluscum contagiosum virus
cagccugcuggcaccg

SEQ ID NO: 3099004 - RNA, 18 nt, Molluscum contagiosum virus
gcgucacaagcaccgccu

SEQ ID NO: 3099005 - RNA, 20 nt, Molluscum contagiosum virus
gaacucggcuucugcugcac

SEQ ID NO: 3099006 - RNA, 18 nt, Molluscum contagiosum virus
cguucucuaccagcucgu

SEQ ID NO: 3099007 - RNA, 18 nt, Molluscum contagiosum virus
augucgaacaccuccugc

SEQ ID NO: 3099008 - RNA, 19 nt, Molluscum contagiosum virus
ugcacuuucaacucucuac

SEQ ID NO: 3099009 - RNA, 23 nt, Molluscum contagiosum virus
gcucgcgcgcaagaacaaccaga

SEQ ID NO: 3099010 - RNA, 15 nt, Molluscum contagiosum virus
cgcgcaagcgcugcu

SEQ ID NO: 3099011 - RNA, 14 nt, Molluscum contagiosum virus
gacagcucagcagg

SEQ ID NO: 3099012 - RNA, 17 nt, Molluscum contagiosum virus
acuuugagcgagugccg

SEQ ID NO: 3099013 - RNA, 19 nt, Molluscum contagiosum virus
gcaccguaccgcgcccgcc

SEQ ID NO: 3099014 - RNA, 19 nt, Molluscum contagiosum virus
agcgcgccuagcuccagcg

SEQ ID NO: 3099015 - RNA, 19 nt, Molluscum contagiosum virus
cgcuuggcgagcgcugccg

SEQ ID NO: 3099016 - RNA, 13 nt, Molluscum contagiosum virus
ggcgcugcucgcg

SEQ ID NO: 3099017 - RNA, 20 nt, Molluscum contagiosum virus
cgcacguggaaucacggcca

SEQ ID NO: 3099018 - RNA, 18 nt, Molluscum contagiosum virus
cuggcucguacugcugca

SEQ ID NO: 3099019 - RNA, 21 nt, Molluscum contagiosum virus
gagcaggacgacgacacagcc

SEQ ID NO: 3099020 - RNA, 20 nt, Molluscum contagiosum virus
gcgagcacccccgcugcacg

SEQ ID NO: 3099021 - RNA, 23 nt, Molluscum contagiosum virus
gaaccugugcgcgguggugcugg

SEQ ID NO: 3099022 - RNA, 21 nt, Molluscum contagiosum virus
cgccggaccagauccgggcgc

SEQ ID NO: 3099023 - RNA, 18 nt, Molluscum contagiosum virus
cgcgggcgcgcggcaagc

SEQ ID NO: 3099024 - RNA, 14 nt, Molluscum contagiosum virus
ccuggcagccgagc

SEQ ID NO: 3099025 - RNA, 16 nt, Molluscum contagiosum virus
caagcgccgccaugcu

SEQ ID NO: 3099026 - RNA, 17 nt, Molluscum contagiosum virus
cgcguucgcguacggcg

SEQ ID NO: 3099027 - RNA, 13 nt, Molluscum contagiosum virus
gccaaugacggcg

SEQ ID NO: 3099028 - RNA, 23 nt, Molluscum contagiosum virus
cccgcaggaaagguaccccgcag

SEQ ID NO: 3099029 - RNA, 12 nt, Molluscum contagiosum virus
acaugugccugc

SEQ ID NO: 3099030 - RNA, 18 nt, Molluscum contagiosum virus
gcgaucgcagcagugcca

SEQ ID NO: 3099031 - RNA, 13 nt, Molluscum contagiosum virus
gcagcaaacugug

SEQ ID NO: 3099032 - RNA, 22 nt, Molluscum contagiosum virus
uccccgcgcucacugcagcagc

SEQ ID NO: 3099033 - RNA, 18 nt, Molluscum contagiosum virus
cgaaacacggccuccagc

SEQ ID NO: 3099034 - RNA, 19 nt, Molluscum contagiosum virus
cagcuguuucugccgcgcc

SEQ ID NO: 3099035 - RNA, 21 nt, Molluscum contagiosum virus
cgcugcuccccgccagcacca

SEQ ID NO: 3099036 - RNA, 21 nt, Molluscum contagiosum virus
agacuucuccgaccgugcccu

SEQ ID NO: 3099037 - RNA, 16 nt, Molluscum contagiosum virus
gcagacaaggagaugg

SEQ ID NO: 3099038 - RNA, 22 nt, Molluscum contagiosum virus
ugcggagggugcacgcgggcgc

SEQ ID NO: 3099039 - RNA, 16 nt, Molluscum contagiosum virus
accgcgggcacgggca

SEQ ID NO: 3099040 - RNA, 14 nt, Molluscum contagiosum virus
acgugcgcaucccu

SEQ ID NO: 3099041 - RNA, 13 nt, Molluscum contagiosum virus
cacgcuagcgggc

SEQ ID NO: 3099042 - RNA, 20 nt, Molluscum contagiosum virus
ggcgcgcugugagcgcgccg

SEQ ID NO: 3099043 - RNA, 20 nt, Molluscum contagiosum virus
guagcccaggaacaucugca

SEQ ID NO: 3099044 - RNA, 15 nt, Molluscum contagiosum virus
ccucgagaagaccug

SEQ ID NO: 3099045 - RNA, 14 nt, Molluscum contagiosum virus
gaacugcugggcgu

SEQ ID NO: 3099046 - RNA, 21 nt, Molluscum contagiosum virus
agacugcuacgucgcggcgca

SEQ ID NO: 3099047 - RNA, 15 nt, Molluscum contagiosum virus
cacucgagaagaggg

SEQ ID NO: 3099048 - RNA, 20 nt, Molluscum contagiosum virus
cgcguacauaaaauggacca

SEQ ID NO: 3099049 - RNA, 14 nt, Molluscum contagiosum virus
acggacggcgcacg

SEQ ID NO: 3099050 - RNA, 13 nt, Molluscum contagiosum virus
acgagaaugacuu

SEQ ID NO: 3099051 - RNA, 20 nt, Molluscum contagiosum virus
ugggcucgcgcuuuuccagg

SEQ ID NO: 3099052 - RNA, 19 nt, Molluscum contagiosum virus
acuccaagugaacuacagu

SEQ ID NO: 3099053 - RNA, 13 nt, Molluscum contagiosum virus
cccgcgcucgccg

SEQ ID NO: 3099054 - RNA, 19 nt, Molluscum contagiosum virus
agcacgaugcccagcagcg

SEQ ID NO: 3099055 - RNA, 21 nt, Molluscum contagiosum virus
cgacgugcugcugcagaacug

SEQ ID NO: 3099056 - RNA, 20 nt, Molluscum contagiosum virus
caucgacgugcagacgcuca

SEQ ID NO: 3099057 - RNA, 15 nt, Molluscum contagiosum virus
cgcugcccgcgccgc

SEQ ID NO: 3099058 - RNA, 17 nt, Molluscum contagiosum virus
gagcaaggccuggccuu

SEQ ID NO: 3099059 - RNA, 16 nt, Molluscum contagiosum virus
cgcuggccucugccug

SEQ ID NO: 3099060 - RNA, 22 nt, Molluscum contagiosum virus
acaucaucgcggagcugcgcgc

SEQ ID NO: 3099061 - RNA, 22 nt, Molluscum contagiosum virus
cgcuaggggugccgcugcgcug

SEQ ID NO: 3099062 - RNA, 21 nt, Molluscum contagiosum virus
guuugcggaugcucgcuugcc

SEQ ID NO: 3099063 - RNA, 20 nt, Molluscum contagiosum virus
cgaaggucaucaccagccug

SEQ ID NO: 3099064 - RNA, 17 nt, Molluscum contagiosum virus
aucuccaacuagacaag

SEQ ID NO: 3099065 - RNA, 14 nt, Molluscum contagiosum virus
cugcguuuccaggg

SEQ ID NO: 3099066 - RNA, 20 nt, Molluscum contagiosum virus
gcuccgaaccccucgugcug

SEQ ID NO: 3099067 - RNA, 20 nt, Molluscum contagiosum virus
cuggcaaugagggcgaggcc

SEQ ID NO: 3099068 - RNA, 15 nt, Molluscum contagiosum virus
cgccagcgcgcccac

SEQ ID NO: 3099069 - RNA, 12 nt, Molluscum contagiosum virus
gccggacagcuc

SEQ ID NO: 3099070 - RNA, 15 nt, Molluscum contagiosum virus
cgcacagccccugcu

SEQ ID NO: 3099071 - RNA, 24 nt, Molluscum contagiosum virus
auggaaggcgaccagcugguccug

SEQ ID NO: 3099072 - RNA, 15 nt, Molluscum contagiosum virus
ccgcucguguuuguc

SEQ ID NO: 3099073 - RNA, 19 nt, Molluscum contagiosum virus
gcacgcgcacuugccuggc

SEQ ID NO: 3099074 - RNA, 21 nt, Molluscum contagiosum virus
cccugguuugcgcucucagag

SEQ ID NO: 3099075 - RNA, 16 nt, Molluscum contagiosum virus
gcgaaguccugggcga

SEQ ID NO: 3099076 - RNA, 23 nt, Molluscum contagiosum virus
gacgugcugcgcgcccaggcgcg

SEQ ID NO: 3099077 - RNA, 19 nt, Molluscum contagiosum virus
aguaccagauuagcaacug

SEQ ID NO: 3099078 - RNA, 17 nt, Molluscum contagiosum virus
cuacgagacucuggaag

SEQ ID NO: 3099079 - RNA, 20 nt, Molluscum contagiosum virus
ccgcgcuuugucgaggccuu

SEQ ID NO: 3099080 - RNA, 15 nt, Molluscum contagiosum virus
cgcgccgcucgcgcu

SEQ ID NO: 3099081 - RNA, 17 nt, Molluscum contagiosum virus
cggcagcuggagcugcc

SEQ ID NO: 3099082 - RNA, 20 nt, Molluscum contagiosum virus
ggcaagcuucgggccgcugc

SEQ ID NO: 3099083 - RNA, 22 nt, Molluscum contagiosum virus
cggcugcucgcugccuggugca

SEQ ID NO: 3099084 - RNA, 14 nt, Molluscum contagiosum virus
guuacucucagagc

SEQ ID NO: 3099085 - RNA, 17 nt, Molluscum contagiosum virus
cacugcuacgagccgcu

SEQ ID NO: 3099086 - RNA, 15 nt, Molluscum contagiosum virus
ccgcgugcacccucc

SEQ ID NO: 3099087 - RNA, 18 nt, Molluscum contagiosum virus
uagcaagcacgccaggug

SEQ ID NO: 3099088 - RNA, 13 nt, Molluscum contagiosum virus
cugcggcugcugg

SEQ ID NO: 3099089 - RNA, 18 nt, Molluscum contagiosum virus
cggaccuaaagcugcugg

SEQ ID NO: 3099090 - RNA, 20 nt, Molluscum contagiosum virus
agcagcgcgagcuugccccu

SEQ ID NO: 3099091 - RNA, 22 nt, Molluscum contagiosum virus
agucgcaguacccgagcugugc

SEQ ID NO: 3099092 - RNA, 21 nt, Molluscum contagiosum virus
acguggagccugaggccgcgg

SEQ ID NO: 3099093 - RNA, 17 nt, Molluscum contagiosum virus
gcucuucgacagcgugc

SEQ ID NO: 3099094 - RNA, 18 nt, Molluscum contagiosum virus
auagccccucgagcagcg

SEQ ID NO: 3099095 - RNA, 15 nt, Molluscum contagiosum virus
cgacgggcgcgcuuc

SEQ ID NO: 3099096 - RNA, 19 nt, Molluscum contagiosum virus
cgcgggccuguccgcgggc

SEQ ID NO: 3099097 - RNA, 17 nt, Molluscum contagiosum virus
agagaaaggcacccacc

SEQ ID NO: 3099098 - RNA, 14 nt, Molluscum contagiosum virus
cagcucaagcugcu

SEQ ID NO: 3099099 - RNA, 18 nt, Molluscum contagiosum virus
ggcgcuuucgcccgccgc

SEQ ID NO: 3099100 - RNA, 14 nt, Molluscum contagiosum virus
cggccguggcugcg

SEQ ID NO: 3099101 - RNA, 22 nt, Molluscum contagiosum virus
cucauccacgcggaggacggcg

SEQ ID NO: 3099102 - RNA, 18 nt, Molluscum contagiosum virus
gcaccgcgccccacugug

SEQ ID NO: 3099103 - RNA, 18 nt, Molluscum contagiosum virus
cagcgacuacgcgcugcu

SEQ ID NO: 3099104 - RNA, 14 nt, Molluscum contagiosum virus
gagagcgugagcag

SEQ ID NO: 3099105 - RNA, 17 nt, Molluscum contagiosum virus
auccaaaccaacgugag

SEQ ID NO: 3099106 - RNA, 22 nt, Molluscum contagiosum virus
gcuccgugcccacgagcgccag

SEQ ID NO: 3099107 - RNA, 13 nt, Molluscum contagiosum virus
ucgcggugcagcu

SEQ ID NO: 3099108 - RNA, 18 nt, Molluscum contagiosum virus
ucgcuugcccggagccgg

SEQ ID NO: 3099109 - RNA, 18 nt, Molluscum contagiosum virus
gagaagcuguaccuggug

SEQ ID NO: 3099110 - RNA, 19 nt, Molluscum contagiosum virus
ccgcgcugguggccgcacu

SEQ ID NO: 3099111 - RNA, 18 nt, Molluscum contagiosum virus
gcgagucaaugacacgag

SEQ ID NO: 3099112 - RNA, 18 nt, Molluscum contagiosum virus
gcgggcccgcgaacgaga

SEQ ID NO: 3099113 - RNA, 16 nt, Molluscum contagiosum virus
gcaggaaaggcacccc

SEQ ID NO: 3099114 - RNA, 16 nt, Molluscum contagiosum virus
gcgcugcacaccgagc

SEQ ID NO: 3099115 - RNA, 17 nt, Molluscum contagiosum virus
cgacauuucgcgccugu

SEQ ID NO: 3099116 - RNA, 14 nt, Molluscum contagiosum virus
cacugucgcgcagc

SEQ ID NO: 3099117 - RNA, 19 nt, Molluscum contagiosum virus
acgagcugacgcagacgca

SEQ ID NO: 3099118 - RNA, 12 nt, Molluscum contagiosum virus
gcccgcgccgca

SEQ ID NO: 3099119 - RNA, 16 nt, Molluscum contagiosum virus
ugcugcgcacggaggg

SEQ ID NO: 3099120 - RNA, 17 nt, Molluscum contagiosum virus
cgcgccuuuccggccug

SEQ ID NO: 3099121 - RNA, 19 nt, Molluscum contagiosum virus
ugcuccgcacguggaauca

SEQ ID NO: 3099122 - RNA, 20 nt, Molluscum contagiosum virus
gcgacuuuguccugagccuu

SEQ ID NO: 3099123 - RNA, 18 nt, Molluscum contagiosum virus
ugcuugcccgaccuuggu

SEQ ID NO: 3099124 - RNA, 17 nt, Molluscum contagiosum virus
gcgcccgccaccaugcu

SEQ ID NO: 3099125 - RNA, 14 nt, Molluscum contagiosum virus
caggacuggcaccu

SEQ ID NO: 3099126 - RNA, 16 nt, Molluscum contagiosum virus
acagggauucgccgcg

SEQ ID NO: 3099127 - RNA, 14 nt, Molluscum contagiosum virus
gucuccguccccgg

SEQ ID NO: 3099128 - RNA, 14 nt, Molluscum contagiosum virus
gcagacggcaaguu

SEQ ID NO: 3099129 - RNA, 18 nt, Molluscum contagiosum virus
cuaccaacucugugaccu

SEQ ID NO: 3099130 - RNA, 19 nt, Molluscum contagiosum virus
gccgggcgccggcucugcc

SEQ ID NO: 3099131 - RNA, 13 nt, Molluscum contagiosum virus
uucugcgcugcca

SEQ ID NO: 3099132 - RNA, 15 nt, Molluscum contagiosum virus
cccgaaggccaccuc

SEQ ID NO: 3099133 - RNA, 22 nt, Molluscum contagiosum virus
ugaaggacgcguucuccaggaa

SEQ ID NO: 3099134 - RNA, 19 nt, Molluscum contagiosum virus
gcucgcggcucggcucuug

SEQ ID NO: 3099135 - RNA, 12 nt, Molluscum contagiosum virus
gaaaugacggcg

SEQ ID NO: 3099136 - RNA, 20 nt, Molluscum contagiosum virus
gcugcucuacuuccacgagc

SEQ ID NO: 3099137 - RNA, 22 nt, Molluscum contagiosum virus
acgaccgacccaucggagaagu

SEQ ID NO: 3099138 - RNA, 13 nt, Molluscum contagiosum virus
agcacgcaacugc

SEQ ID NO: 3099139 - RNA, 21 nt, Molluscum contagiosum virus
ccugcaaacgcgaaacuggac

SEQ ID NO: 3099140 - RNA, 13 nt, Molluscum contagiosum virus
gacacugugcugg

SEQ ID NO: 3099141 - RNA, 14 nt, Molluscum contagiosum virus
gguagcuagcucug

SEQ ID NO: 3099142 - RNA, 15 nt, Molluscum contagiosum virus
ccacgugcucaagug

SEQ ID NO: 3099143 - RNA, 23 nt, Molluscum contagiosum virus
aguggacaagcuagacuggagca

SEQ ID NO: 3099144 - RNA, 16 nt, Molluscum contagiosum virus
uggcgauagcgauggc

SEQ ID NO: 3099145 - RNA, 23 nt, Molluscum contagiosum virus
gcgcaccgcguugccgcccgccg

SEQ ID NO: 3099146 - RNA, 15 nt, Molluscum contagiosum virus
cugcucgacgggcgc

SEQ ID NO: 3099147 - RNA, 16 nt, Molluscum contagiosum virus
cgcgugucuggagccc

SEQ ID NO: 3099148 - RNA, 19 nt, Molluscum contagiosum virus
ccagacaaagucgacgaca

SEQ ID NO: 3099149 - RNA, 19 nt, Molluscum contagiosum virus
ggcgcgagcgacggcaggc

SEQ ID NO: 3099150 - RNA, 18 nt, Molluscum contagiosum virus
cuguccgacgucacgcug

SEQ ID NO: 3099151 - RNA, 16 nt, Molluscum contagiosum virus
cgucauggagcaggag

SEQ ID NO: 3099152 - RNA, 22 nt, Molluscum contagiosum virus
cgcaggaaagguacccgcagga

SEQ ID NO: 3099153 - RNA, 13 nt, Molluscum contagiosum virus
gccgccauccuga

SEQ ID NO: 3099154 - RNA, 23 nt, Molluscum contagiosum virus
caggaaagguacccgcaggaaag

SEQ ID NO: 3099155 - RNA, 14 nt, Molluscum contagiosum virus
caugcgacugccag

SEQ ID NO: 3099156 - RNA, 23 nt, Molluscum contagiosum virus
ugcuuccggugccggccgccggc

SEQ ID NO: 3099157 - RNA, 15 nt, Molluscum contagiosum virus
ggucccuagccuucc

SEQ ID NO: 3099158 - RNA, 15 nt, Molluscum contagiosum virus
cugccgcagagccgc

SEQ ID NO: 3099159 - RNA, 21 nt, Molluscum contagiosum virus
auuguucggaggcugcucccu

SEQ ID NO: 3099160 - RNA, 14 nt, Molluscum contagiosum virus
cgcgugcugggccc

SEQ ID NO: 3099161 - RNA, 23 nt, Molluscum contagiosum virus
gacuaccuggcggcgcuggagac

SEQ ID NO: 3099162 - RNA, 17 nt, Molluscum contagiosum virus
cgccagccugugcgcca

SEQ ID NO: 3099163 - RNA, 21 nt, Molluscum contagiosum virus
gcaccggaagcaacgacaagg

SEQ ID NO: 3099164 - RNA, 17 nt, Molluscum contagiosum virus
aggccuacgugcugcgc

SEQ ID NO: 3099165 - RNA, 21 nt, Molluscum contagiosum virus
cccgcaaacacgagacugagu

SEQ ID NO: 3099166 - RNA, 22 nt, Molluscum contagiosum virus
cucuccuacacauuccucggcg

SEQ ID NO: 3099167 - RNA, 18 nt, Molluscum contagiosum virus
cgaugagcgucucggugc

SEQ ID NO: 3099168 - RNA, 16 nt, Molluscum contagiosum virus
gcuggcgcgcugcgug

SEQ ID NO: 3099169 - RNA, 19 nt, Molluscum contagiosum virus
cggcguccggugcucgccc

SEQ ID NO: 3099170 - RNA, 19 nt, Molluscum contagiosum virus
cggcagccgcagaugcgca

SEQ ID NO: 3099171 - RNA, 16 nt, Molluscum contagiosum virus
cccgcggcgugcccgu

SEQ ID NO: 3099172 - RNA, 19 nt, Molluscum contagiosum virus
gcuuugugcgucucccagg

SEQ ID NO: 3099173 - RNA, 15 nt, Molluscum contagiosum virus
caacgccagcuguag

SEQ ID NO: 3099174 - RNA, 20 nt, Molluscum contagiosum virus
cacgaagcggcggacagcaa

SEQ ID NO: 3099175 - RNA, 17 nt, Molluscum contagiosum virus
cgcagcguccggcaugc

SEQ ID NO: 3099176 - RNA, 21 nt, Molluscum contagiosum virus
cugcgcuggaugcugcucgac

SEQ ID NO: 3099177 - RNA, 14 nt, Molluscum contagiosum virus
gccugcgagcagcc

SEQ ID NO: 3099178 - RNA, 22 nt, Molluscum contagiosum virus
cagcagcgcgacuagccugugc

SEQ ID NO: 3099179 - RNA, 17 nt, Molluscum contagiosum virus
cuuucccgggcacugua

SEQ ID NO: 3099180 - RNA, 18 nt, Molluscum contagiosum virus
ccgucggaagucggcgug

SEQ ID NO: 3099181 - RNA, 13 nt, Molluscum contagiosum virus
caggaacagggaa

SEQ ID NO: 3099182 - RNA, 17 nt, Molluscum contagiosum virus
guucuucgcagaggaca

SEQ ID NO: 3099183 - RNA, 12 nt, Molluscum contagiosum virus
gggcaauguuug

SEQ ID NO: 3099184 - RNA, 15 nt, Molluscum contagiosum virus
gugccgggcgccggc

SEQ ID NO: 3099185 - RNA, 14 nt, Molluscum contagiosum virus
cgagggcgaggcca

SEQ ID NO: 3099186 - RNA, 17 nt, Molluscum contagiosum virus
ggcgcucgccccuuccc

SEQ ID NO: 3099187 - RNA, 22 nt, Molluscum contagiosum virus
gagacugcuacgucgcggcgca

SEQ ID NO: 3099188 - RNA, 19 nt, Molluscum contagiosum virus
augaacaccauccugcgcu

SEQ ID NO: 3099189 - RNA, 15 nt, Molluscum contagiosum virus
cugccuggugcacac

SEQ ID NO: 3099190 - RNA, 21 nt, Molluscum contagiosum virus
agcauucccggcgcgcgcggc

SEQ ID NO: 3099191 - RNA, 17 nt, Molluscum contagiosum virus
ugcguugucuccuccug

SEQ ID NO: 3099192 - RNA, 18 nt, Molluscum contagiosum virus
auagucaucaaagcacaa

SEQ ID NO: 3099193 - RNA, 12 nt, Molluscum contagiosum virus
gacacugugcug

SEQ ID NO: 3099194 - RNA, 22 nt, Molluscum contagiosum virus
ucugcgcgcaagucaccgcucc

SEQ ID NO: 3099195 - RNA, 21 nt, Molluscum contagiosum virus
ucgaggcgcuugggcacugcu

SEQ ID NO: 3099196 - RNA, 15 nt, Molluscum contagiosum virus
cucagaaauacaccg

SEQ ID NO: 3099197 - RNA, 14 nt, Molluscum contagiosum virus
ucggugcucaugcg

SEQ ID NO: 3099198 - RNA, 21 nt, Molluscum contagiosum virus
accugcugcgagagcaugccu

SEQ ID NO: 3099199 - RNA, 23 nt, Molluscum contagiosum virus
caccccgaaaggcacccgcagga

SEQ ID NO: 3099200 - RNA, 20 nt, Molluscum contagiosum virus
aacgugggcaccugcaucgc

SEQ ID NO: 3099201 - RNA, 16 nt, Molluscum contagiosum virus
agcagcugcuccgccu

SEQ ID NO: 3099202 - RNA, 21 nt, Molluscum contagiosum virus
uccuacgaguugagccguucu

SEQ ID NO: 3099203 - RNA, 20 nt, Molluscum contagiosum virus
cucgcgcgcagcucgcacac

SEQ ID NO: 3099204 - RNA, 22 nt, Molluscum contagiosum virus
cugcgcacgcuugugcgcacgc

SEQ ID NO: 3099205 - RNA, 17 nt, Molluscum contagiosum virus
gcugcgcgcucuggagc

SEQ ID NO: 3099206 - RNA, 21 nt, Molluscum contagiosum virus
caggacgacgacacagcccug

SEQ ID NO: 3099207 - RNA, 20 nt, Molluscum contagiosum virus
gcugggauaacaggcgugcg

SEQ ID NO: 3099208 - RNA, 14 nt, Molluscum contagiosum virus
cgcugcuccugcuc

SEQ ID NO: 3099209 - RNA, 19 nt, Molluscum contagiosum virus
gcggcgcguacucgcgccg

SEQ ID NO: 3099210 - RNA, 17 nt, Molluscum contagiosum virus
cccuccccagcgccgcc

SEQ ID NO: 3099211 - RNA, 19 nt, Molluscum contagiosum virus
gcggccauggucacgcgca

SEQ ID NO: 3099212 - RNA, 14 nt, Molluscum contagiosum virus
gcacugagaaguga

SEQ ID NO: 3099213 - RNA, 20 nt, Molluscum contagiosum virus
cccgcggagaccaccgcugg

SEQ ID NO: 3099214 - RNA, 13 nt, Molluscum contagiosum virus
gacgcgggccugu

SEQ ID NO: 3099215 - RNA, 18 nt, Molluscum contagiosum virus
gagaacuacaaaacugaa

SEQ ID NO: 3099216 - RNA, 18 nt, Molluscum contagiosum virus
gguguacgaaaguacuuu

SEQ ID NO: 3099217 - RNA, 15 nt, Molluscum contagiosum virus
cccggccucgccucc

SEQ ID NO: 3099218 - RNA, 19 nt, Molluscum contagiosum virus
gcucgagccugccagcgcc

SEQ ID NO: 3099219 - RNA, 16 nt, Molluscum contagiosum virus
ccgcgggccgccgccc

SEQ ID NO: 3099220 - RNA, 18 nt, Molluscum contagiosum virus
acuguugcuuccggggcg

SEQ ID NO: 3099221 - RNA, 14 nt, Molluscum contagiosum virus
gcgugcggcgcacc

SEQ ID NO: 3099222 - RNA, 17 nt, Molluscum contagiosum virus
cuguaggggagggcggc

SEQ ID NO: 3099223 - RNA, 21 nt, Molluscum contagiosum virus
ggccacgggauguuggagcgc

SEQ ID NO: 3099224 - RNA, 19 nt, Molluscum contagiosum virus
gcugcucgacgggcgcagc

SEQ ID NO: 3099225 - RNA, 14 nt, Molluscum contagiosum virus
ccgcguacacgugc

SEQ ID NO: 3099226 - RNA, 17 nt, Molluscum contagiosum virus
caccccgaaaggcaccc

SEQ ID NO: 3099227 - RNA, 21 nt, Molluscum contagiosum virus
gccucgcauucuucuccgaug

SEQ ID NO: 3099228 - RNA, 14 nt, Molluscum contagiosum virus
cgagccagccaggc

SEQ ID NO: 3099229 - RNA, 16 nt, Molluscum contagiosum virus
gcgagacgcugcugca

SEQ ID NO: 3099230 - RNA, 19 nt, Molluscum contagiosum virus
agggcgcgcgucgagggcg

SEQ ID NO: 3099231 - RNA, 17 nt, Molluscum contagiosum virus
gcgcccucgcgcgcagc

SEQ ID NO: 3099232 - RNA, 15 nt, Molluscum contagiosum virus
uuccgacgggccgcc

SEQ ID NO: 3099233 - RNA, 13 nt, Molluscum contagiosum virus
cuagccugugccc

SEQ ID NO: 3099234 - RNA, 15 nt, Molluscum contagiosum virus
ccaggaacgaggaaa

SEQ ID NO: 3099235 - RNA, 16 nt, Molluscum contagiosum virus
cuggacgggcacgagc

SEQ ID NO: 3099236 - RNA, 18 nt, Molluscum contagiosum virus
ccuccugcuuugcacgcg

SEQ ID NO: 3099237 - RNA, 18 nt, Molluscum contagiosum virus
uuuuugcggcgccgccgc

SEQ ID NO: 3099238 - RNA, 22 nt, Molluscum contagiosum virus
cgggaaggcaggccccgcacca

SEQ ID NO: 3099239 - RNA, 11 nt, Molluscum contagiosum virus
cgcugcgccac

SEQ ID NO: 3099240 - RNA, 23 nt, Molluscum contagiosum virus
cgagcgcuucuuccggcagcugg

SEQ ID NO: 3099241 - RNA, 16 nt, Molluscum contagiosum virus
gcagccgcagcccacg

SEQ ID NO: 3099242 - RNA, 19 nt, Molluscum contagiosum virus
gcgacgugaagacgcuggc

SEQ ID NO: 3099243 - RNA, 16 nt, Molluscum contagiosum virus
cugcuuugucugcagg

SEQ ID NO: 3099244 - RNA, 21 nt, Molluscum contagiosum virus
cgaacugcccggcggcaagcc

SEQ ID NO: 3099245 - RNA, 21 nt, Molluscum contagiosum virus
agaaagaccuugucagugggc

SEQ ID NO: 3099246 - RNA, 19 nt, Molluscum contagiosum virus
gugaagacgcuggcggcgc

SEQ ID NO: 3099247 - RNA, 16 nt, Molluscum contagiosum virus
cgcagcaagcagccgc

SEQ ID NO: 3099248 - RNA, 11 nt, Molluscum contagiosum virus
cgcgcuuuguc

SEQ ID NO: 3099249 - RNA, 14 nt, Molluscum contagiosum virus
cgcgugccuggcuu

SEQ ID NO: 3099250 - RNA, 14 nt, Molluscum contagiosum virus
gccguccgccucga

SEQ ID NO: 3099251 - RNA, 21 nt, Molluscum contagiosum virus
gcgcggcgcuuucgcccgccg

SEQ ID NO: 3099252 - RNA, 20 nt, Molluscum contagiosum virus
gaggguggcuugcugcagua

SEQ ID NO: 3099253 - RNA, 12 nt, Molluscum contagiosum virus
ggaucaccacug

SEQ ID NO: 3099254 - RNA, 23 nt, Molluscum contagiosum virus
cguagacagugcggcgcggcugc

SEQ ID NO: 3099255 - RNA, 22 nt, Molluscum contagiosum virus
gcccuacgcgcgcgugcugcua

SEQ ID NO: 3099256 - RNA, 21 nt, Molluscum contagiosum virus
ccagguucucgcgguuguagc

SEQ ID NO: 3099257 - RNA, 18 nt, Molluscum contagiosum virus
cguacucaacaagcugcu

SEQ ID NO: 3099258 - RNA, 15 nt, Molluscum contagiosum virus
cugcgaguccuccuc

SEQ ID NO: 3099259 - RNA, 14 nt, Molluscum contagiosum virus
cgcgcccaccagca

SEQ ID NO: 3099260 - RNA, 21 nt, Molluscum contagiosum virus
caugaacaacauggugcuggc

SEQ ID NO: 3099261 - RNA, 16 nt, Molluscum contagiosum virus
acgguaaacucuugca

SEQ ID NO: 3099262 - RNA, 17 nt, Molluscum contagiosum virus
cuguaaauggacccgcu

SEQ ID NO: 3099263 - RNA, 14 nt, Molluscum contagiosum virus
agcguccagccgca

SEQ ID NO: 3099264 - RNA, 19 nt, Molluscum contagiosum virus
acuccuuucgacgcugccu

SEQ ID NO: 3099265 - RNA, 21 nt, Molluscum contagiosum virus
gggaagcccucaggggcucuc

SEQ ID NO: 3099266 - RNA, 16 nt, Molluscum contagiosum virus
agaccucgcgcuuccg

SEQ ID NO: 3099267 - RNA, 18 nt, Molluscum contagiosum virus
agcagcggggacucuccc

SEQ ID NO: 3099268 - RNA, 20 nt, Molluscum contagiosum virus
gggaaaacgcgcggcagcag

SEQ ID NO: 3099269 - RNA, 15 nt, Molluscum contagiosum virus
agaagaggccagcac

SEQ ID NO: 3099270 - RNA, 15 nt, Molluscum contagiosum virus
ggcaccugcaggaaa

SEQ ID NO: 3099271 - RNA, 19 nt, Molluscum contagiosum virus
cgucgaugaaggcgcggcu

SEQ ID NO: 3099272 - RNA, 24 nt, Molluscum contagiosum virus
gcgccgggaauaggucggaagaag

SEQ ID NO: 3099273 - RNA, 20 nt, Molluscum contagiosum virus
caugcgcgcagugccgcuga

SEQ ID NO: 3099274 - RNA, 20 nt, Molluscum contagiosum virus
ccacgcgugcgcgccaggug

SEQ ID NO: 3099275 - RNA, 11 nt, Molluscum contagiosum virus
cagucccagca

SEQ ID NO: 3099276 - RNA, 22 nt, Molluscum contagiosum virus
gaauaccggagacaccagcucc

SEQ ID NO: 3099277 - RNA, 16 nt, Molluscum contagiosum virus
cgcaacacggcggugc

SEQ ID NO: 3099278 - RNA, 21 nt, Molluscum contagiosum virus
gcagguuugcacccgcgcagc

SEQ ID NO: 3099279 - RNA, 11 nt, Molluscum contagiosum virus
gcguagagcaa

SEQ ID NO: 3099280 - RNA, 18 nt, Molluscum contagiosum virus
gucgguaugcgaggccug

SEQ ID NO: 3099281 - RNA, 15 nt, Molluscum contagiosum virus
agugcgcgccaagaa

SEQ ID NO: 3099282 - RNA, 12 nt, Molluscum contagiosum virus
ucgucagaggga

SEQ ID NO: 3099283 - RNA, 23 nt, Molluscum contagiosum virus
caugcagcugcaggaccugcugg

SEQ ID NO: 3099284 - RNA, 15 nt, Molluscum contagiosum virus
cgcuggccucugccu

SEQ ID NO: 3099285 - RNA, 12 nt, Molluscum contagiosum virus
cgcggcgcucug

SEQ ID NO: 3099286 - RNA, 19 nt, Molluscum contagiosum virus
gagaaaugcgcacacuugc

SEQ ID NO: 3099287 - RNA, 17 nt, Molluscum contagiosum virus
cgcacuugcgcgccugu

SEQ ID NO: 3099288 - RNA, 19 nt, Molluscum contagiosum virus
gcacacgugcacguccugc

SEQ ID NO: 3099289 - RNA, 20 nt, Molluscum contagiosum virus
cgccagugcgugcacugucu

SEQ ID NO: 3099290 - RNA, 17 nt, Molluscum contagiosum virus
cacgagcaguccgccuc

SEQ ID NO: 3099291 - RNA, 19 nt, Molluscum contagiosum virus
cgggcccgcaugcagucac

SEQ ID NO: 3099292 - RNA, 14 nt, Molluscum contagiosum virus
cccguggcgcgccg

SEQ ID NO: 3099293 - RNA, 17 nt, Molluscum contagiosum virus
gagggccuuggcggcgc

SEQ ID NO: 3099294 - RNA, 22 nt, Molluscum contagiosum virus
ucgaccugcacgacccucuucg

SEQ ID NO: 3099295 - RNA, 16 nt, Molluscum contagiosum virus
uagcaaaugcgcugcu

SEQ ID NO: 3099296 - RNA, 17 nt, Molluscum contagiosum virus
guuccgaacaguacuuu

SEQ ID NO: 3099297 - RNA, 21 nt, Molluscum contagiosum virus
cuggcgcgugcgagcagaggc

SEQ ID NO: 3099298 - RNA, 13 nt, Molluscum contagiosum virus
cgaggccuacagc

SEQ ID NO: 3099299 - RNA, 15 nt, Molluscum contagiosum virus
ggagagagagacaug

SEQ ID NO: 3099300 - RNA, 20 nt, Molluscum contagiosum virus
ccugcugguggugcuggagc

SEQ ID NO: 3099301 - RNA, 21 nt, Molluscum contagiosum virus
ucgugcaccagcgcgcagaag

SEQ ID NO: 3099302 - RNA, 13 nt, Molluscum contagiosum virus
ccucgagagggag

SEQ ID NO: 3099303 - RNA, 13 nt, Molluscum contagiosum virus
gcgcggcgcagug

SEQ ID NO: 3099304 - RNA, 11 nt, Molluscum contagiosum virus
cgagcgugcaa

SEQ ID NO: 3099305 - RNA, 19 nt, Molluscum contagiosum virus
gcccaccagcagccaggcu

SEQ ID NO: 3099306 - RNA, 17 nt, Molluscum contagiosum virus
gcuccaugagguacucc

SEQ ID NO: 3099307 - RNA, 18 nt, Molluscum contagiosum virus
caauacucuguagcaucu

SEQ ID NO: 3099308 - RNA, 13 nt, Molluscum contagiosum virus
ccaagccugcuca

SEQ ID NO: 3099309 - RNA, 20 nt, Molluscum contagiosum virus
accugcgacagcugcugcuc

SEQ ID NO: 3099310 - RNA, 13 nt, Molluscum contagiosum virus
cacagcaaaagcu

SEQ ID NO: 3099311 - RNA, 18 nt, Molluscum contagiosum virus
auggcauucucggacagu

SEQ ID NO: 3099312 - RNA, 22 nt, Molluscum contagiosum virus
gacuucccgacgucuuccccaa

SEQ ID NO: 3099313 - RNA, 19 nt, Molluscum contagiosum virus
ggcguacgcgcagggagcu

SEQ ID NO: 3099314 - RNA, 19 nt, Molluscum contagiosum virus
cgcacgaccacgcuggcac

SEQ ID NO: 3099315 - RNA, 22 nt, Molluscum contagiosum virus
cuggcugcugcgcgaccgcacc

SEQ ID NO: 3099316 - RNA, 21 nt, Molluscum contagiosum virus
cgcagaacacgggggcugccg

SEQ ID NO: 3099317 - RNA, 14 nt, Molluscum contagiosum virus
agccgagcgccgcc

SEQ ID NO: 3099318 - RNA, 18 nt, Molluscum contagiosum virus
gcgaacaucucggcuccg

SEQ ID NO: 3099319 - RNA, 15 nt, Molluscum contagiosum virus
gcugcugcacagcuu

SEQ ID NO: 3099320 - RNA, 19 nt, Molluscum contagiosum virus
aaaggcaaagccugcugcg

SEQ ID NO: 3099321 - RNA, 13 nt, Molluscum contagiosum virus
cgcugcagcuagg

SEQ ID NO: 3099322 - RNA, 23 nt, Molluscum contagiosum virus
gcgcgcuaguggcaagggccugc

SEQ ID NO: 3099323 - RNA, 16 nt, Molluscum contagiosum virus
gccgcucguccagcug

SEQ ID NO: 3099324 - RNA, 14 nt, Molluscum contagiosum virus
cugugcggcacgcc

SEQ ID NO: 3099325 - RNA, 14 nt, Molluscum contagiosum virus
gccgcugcgccgcc

SEQ ID NO: 3099326 - RNA, 23 nt, Molluscum contagiosum virus
uggcacccuucugaggggcagug

SEQ ID NO: 3099327 - RNA, 13 nt, Molluscum contagiosum virus
cucgagcacgccu

SEQ ID NO: 3099328 - RNA, 22 nt, Molluscum contagiosum virus
cgcugcggcgcucgcagcacau

SEQ ID NO: 3099329 - RNA, 16 nt, Molluscum contagiosum virus
gcgaacgugcgaacac

SEQ ID NO: 3099330 - RNA, 15 nt, Molluscum contagiosum virus
gcgcucgccccuucc

SEQ ID NO: 3099331 - RNA, 23 nt, Molluscum contagiosum virus
guggcgccauugcucgcggugcc

SEQ ID NO: 3099332 - RNA, 23 nt, Molluscum contagiosum virus
acgucuggcucguacugcugcag

SEQ ID NO: 3099333 - RNA, 13 nt, Molluscum contagiosum virus
caagcagucucau

SEQ ID NO: 3099334 - RNA, 17 nt, Molluscum contagiosum virus
cuccgguacguacagug

SEQ ID NO: 3099335 - RNA, 20 nt, Molluscum contagiosum virus
gcgucgugcaccuggagcag

SEQ ID NO: 3099336 - RNA, 13 nt, Molluscum contagiosum virus
gacucgcugccag

SEQ ID NO: 3099337 - RNA, 17 nt, Molluscum contagiosum virus
cucgcgggcguggggag

SEQ ID NO: 3099338 - RNA, 15 nt, Molluscum contagiosum virus
cggcgcgaagcaggc

SEQ ID NO: 3099339 - RNA, 15 nt, Molluscum contagiosum virus
cuuggcgcccuuccu

SEQ ID NO: 3099340 - RNA, 21 nt, Molluscum contagiosum virus
agcaugcugucucugucccug

SEQ ID NO: 3099341 - RNA, 21 nt, Molluscum contagiosum virus
cacgcgagcaauggcggccug

SEQ ID NO: 3099342 - RNA, 22 nt, Molluscum contagiosum virus
aaauggccuugcgagcgcugcc

SEQ ID NO: 3099343 - RNA, 16 nt, Molluscum contagiosum virus
ggcgcccgugccgccg

SEQ ID NO: 3099344 - RNA, 12 nt, Molluscum contagiosum virus
cagugcgugcac

SEQ ID NO: 3099345 - RNA, 18 nt, Molluscum contagiosum virus
ggaagcaacgacaaggaa

SEQ ID NO: 3099346 - RNA, 20 nt, Molluscum contagiosum virus
ugucgucaaaggcaaagccu

SEQ ID NO: 3099347 - RNA, 15 nt, Molluscum contagiosum virus
gggcgcgcaccccgu

SEQ ID NO: 3099348 - RNA, 23 nt, Molluscum contagiosum virus
uggcgugaccauggacacgcugc

SEQ ID NO: 3099349 - RNA, 16 nt, Molluscum contagiosum virus
agcaccgccugcugca

SEQ ID NO: 3099350 - RNA, 17 nt, Molluscum contagiosum virus
ccgcgcaagagccgccg

SEQ ID NO: 3099351 - RNA, 13 nt, Molluscum contagiosum virus
gcggagcugcccg

SEQ ID NO: 3099352 - RNA, 22 nt, Molluscum contagiosum virus
gaaguguugccgccggccuugu

SEQ ID NO: 3099353 - RNA, 19 nt, Molluscum contagiosum virus
gccagccgcucguccagcu

SEQ ID NO: 3099354 - RNA, 21 nt, Molluscum contagiosum virus
acaguaccagauuagcaacug

SEQ ID NO: 3099355 - RNA, 12 nt, Molluscum contagiosum virus
cacacacacucg

SEQ ID NO: 3099356 - RNA, 22 nt, Molluscum contagiosum virus
uccagcucggguuccagcuccg

SEQ ID NO: 3099357 - RNA, 14 nt, Molluscum contagiosum virus
ccggcgcgcgcgcg

SEQ ID NO: 3099358 - RNA, 15 nt, Molluscum contagiosum virus
gagcucgccuccuug

SEQ ID NO: 3099359 - RNA, 16 nt, Molluscum contagiosum virus
cgccaccaugcuuguu

SEQ ID NO: 3099360 - RNA, 12 nt, Molluscum contagiosum virus
uauacuccaaaa

SEQ ID NO: 3099361 - RNA, 13 nt, Molluscum contagiosum virus
cgccgccggugcg

SEQ ID NO: 3099362 - RNA, 12 nt, Molluscum contagiosum virus
cguggacagcau

SEQ ID NO: 3099363 - RNA, 14 nt, Molluscum contagiosum virus
gaacugcagcagcu

SEQ ID NO: 3099364 - RNA, 12 nt, Molluscum contagiosum virus
uggugcagaucu

SEQ ID NO: 3099365 - RNA, 14 nt, Molluscum contagiosum virus
cagcugcaggaccu

SEQ ID NO: 3099366 - RNA, 21 nt, Molluscum contagiosum virus
cgaggauacgcccgcgaaaga

SEQ ID NO: 3099367 - RNA, 19 nt, Molluscum contagiosum virus
acggugcaaccgcugcucg

SEQ ID NO: 3099368 - RNA, 13 nt, Molluscum contagiosum virus
cgcgguggcaggc

SEQ ID NO: 3099369 - RNA, 23 nt, Molluscum contagiosum virus
gacgugugcucugugcgcgcaga

SEQ ID NO: 3099370 - RNA, 14 nt, Molluscum contagiosum virus
cgagacgcugcugc

SEQ ID NO: 3099371 - RNA, 21 nt, Molluscum contagiosum virus
ucagccccgggcccgcaugca

SEQ ID NO: 3099372 - RNA, 14 nt, Molluscum contagiosum virus
caaagacgggcccg

SEQ ID NO: 3099373 - RNA, 22 nt, Molluscum contagiosum virus
caccuggcgagcgcucugcauu

SEQ ID NO: 3099374 - RNA, 22 nt, Molluscum contagiosum virus
cucgggugcccggacagagccc

SEQ ID NO: 3099375 - RNA, 14 nt, Molluscum contagiosum virus
cugucccucugugc

SEQ ID NO: 3099376 - RNA, 15 nt, Molluscum contagiosum virus
acacggccuccagca

SEQ ID NO: 3099377 - RNA, 16 nt, Molluscum contagiosum virus
cgaacaccgacaagga

SEQ ID NO: 3099378 - RNA, 22 nt, Molluscum contagiosum virus
ccgcgaggacccgcgcuuuguc

SEQ ID NO: 3099379 - RNA, 21 nt, Molluscum contagiosum virus
cgcgccaugguuuccgugucc

SEQ ID NO: 3099380 - RNA, 16 nt, Molluscum contagiosum virus
guggugcugggcgugg

SEQ ID NO: 3099381 - RNA, 16 nt, Molluscum contagiosum virus
ggcgccgaugcagugc

SEQ ID NO: 3099382 - RNA, 17 nt, Molluscum contagiosum virus
gccgcgcgagugccagc

SEQ ID NO: 3099383 - RNA, 12 nt, Molluscum contagiosum virus
cggcugcccugu

SEQ ID NO: 3099384 - RNA, 19 nt, Molluscum contagiosum virus
gacacgggugagcucgcca

SEQ ID NO: 3099385 - RNA, 13 nt, Molluscum contagiosum virus
ggucaagauccaa

SEQ ID NO: 3099386 - RNA, 21 nt, Molluscum contagiosum virus
agccgcgugcgccgccgcagg

SEQ ID NO: 3099387 - RNA, 13 nt, Molluscum contagiosum virus
acugcaacgugag

SEQ ID NO: 3099388 - RNA, 22 nt, Molluscum contagiosum virus
caccguaccgcgcccgccagca

SEQ ID NO: 3099389 - RNA, 21 nt, Molluscum contagiosum virus
cgcugcucuacuuccacgagc

SEQ ID NO: 3099390 - RNA, 18 nt, Molluscum contagiosum virus
cuggacggugcuggugcu

SEQ ID NO: 3099391 - RNA, 13 nt, Molluscum contagiosum virus
aggcaggagccuc

SEQ ID NO: 3099392 - RNA, 13 nt, Molluscum contagiosum virus
ucaucgcggagcu

SEQ ID NO: 3099393 - RNA, 19 nt, Molluscum contagiosum virus
gcccgcgggcugcaagauu

SEQ ID NO: 3099394 - RNA, 14 nt, Molluscum contagiosum virus
gcgugccgcccgag

SEQ ID NO: 3099395 - RNA, 21 nt, Molluscum contagiosum virus
ugcucgcggucgggccccugc

SEQ ID NO: 3099396 - RNA, 15 nt, Molluscum contagiosum virus
ccgcgcccgccagca

SEQ ID NO: 3099397 - RNA, 16 nt, Molluscum contagiosum virus
guccggggaggagcuc

SEQ ID NO: 3099398 - RNA, 15 nt, Molluscum contagiosum virus
ccagguccuccagcg

SEQ ID NO: 3099399 - RNA, 21 nt, Molluscum contagiosum virus
ugccgagcgugcaagaagucu

SEQ ID NO: 3099400 - RNA, 18 nt, Molluscum contagiosum virus
uguaauaguacacuuuga

SEQ ID NO: 3099401 - RNA, 19 nt, Molluscum contagiosum virus
acgugacgcgccucgagca

SEQ ID NO: 3099402 - RNA, 18 nt, Molluscum contagiosum virus
gaagcaaugcgcaaggcc

SEQ ID NO: 3099403 - RNA, 18 nt, Molluscum contagiosum virus
gcgcgcucgaggcgccgu

SEQ ID NO: 3099404 - RNA, 17 nt, Molluscum contagiosum virus
gcggcggcguaggccug

SEQ ID NO: 3099405 - RNA, 13 nt, Molluscum contagiosum virus
ccugcugcgcgcg

SEQ ID NO: 3099406 - RNA, 21 nt, Molluscum contagiosum virus
gccgcuuucugggcgcgugcg

SEQ ID NO: 3099407 - RNA, 16 nt, Molluscum contagiosum virus
gcacacuccucggcgc

SEQ ID NO: 3099408 - RNA, 23 nt, Molluscum contagiosum virus
caaggaaaggcacccaccaggaa

SEQ ID NO: 3099409 - RNA, 15 nt, Molluscum contagiosum virus
gcuggugggcgugcg

SEQ ID NO: 3099410 - RNA, 23 nt, Molluscum contagiosum virus
ggaaaacuguaggggagggcggc

SEQ ID NO: 3099411 - RNA, 22 nt, Molluscum contagiosum virus
gaaaauuuaaucaaggauuuaa

SEQ ID NO: 3099412 - RNA, 16 nt, Molluscum contagiosum virus
cgugccacugccgccg

SEQ ID NO: 3099413 - RNA, 16 nt, Molluscum contagiosum virus
cgcacgcucucgcugg

SEQ ID NO: 3099414 - RNA, 15 nt, Molluscum contagiosum virus
gcggagcgccuucug

SEQ ID NO: 3099415 - RNA, 13 nt, Molluscum contagiosum virus
aggucuuggggaa

SEQ ID NO: 3099416 - RNA, 18 nt, Molluscum contagiosum virus
ccugccgccugcaggcaa

SEQ ID NO: 3099417 - RNA, 16 nt, Molluscum contagiosum virus
ucgccggacagcucag

SEQ ID NO: 3099418 - RNA, 15 nt, Molluscum contagiosum virus
caaccccgcgcugcg

SEQ ID NO: 3099419 - RNA, 16 nt, Molluscum contagiosum virus
cgauggcgcagcuccu

SEQ ID NO: 3099420 - RNA, 21 nt, Molluscum contagiosum virus
gcgggaagaaggugcucagca

SEQ ID NO: 3099421 - RNA, 14 nt, Molluscum contagiosum virus
cagacgccgagcgg

SEQ ID NO: 3099422 - RNA, 14 nt, Molluscum contagiosum virus
uacacgcagagcca

SEQ ID NO: 3099423 - RNA, 14 nt, Molluscum contagiosum virus
ggcucaagcuggca

SEQ ID NO: 3099424 - RNA, 20 nt, Molluscum contagiosum virus
aagcacgccagguguuccug

SEQ ID NO: 3099425 - RNA, 17 nt, Molluscum contagiosum virus
cauggaggcgcuagugc

SEQ ID NO: 3099426 - RNA, 20 nt, Molluscum contagiosum virus
uggcagcggcaaaggcccgc

SEQ ID NO: 3099427 - RNA, 20 nt, Molluscum contagiosum virus
augcuuuuguuacucucaga

SEQ ID NO: 3099428 - RNA, 17 nt, Molluscum contagiosum virus
cugcuugcccgcgccgc

SEQ ID NO: 3099429 - RNA, 21 nt, Molluscum contagiosum virus
gcgcccgugcucgcgggccuu

SEQ ID NO: 3099430 - RNA, 13 nt, Molluscum contagiosum virus
gagcugcugcccg

SEQ ID NO: 3099431 - RNA, 21 nt, Molluscum contagiosum virus
caaggaaaggcacccaccagg

SEQ ID NO: 3099432 - RNA, 18 nt, Molluscum contagiosum virus
caaccucgagaagaccug

SEQ ID NO: 3099433 - RNA, 16 nt, Molluscum contagiosum virus
cccgcugucgcgcguc

SEQ ID NO: 3099434 - RNA, 18 nt, Molluscum contagiosum virus
ucggggcccucggcgcgc

SEQ ID NO: 3099435 - RNA, 17 nt, Molluscum contagiosum virus
gaagaucaagcacgcua

SEQ ID NO: 3099436 - RNA, 17 nt, Molluscum contagiosum virus
ugaacucgcugcugcuc

SEQ ID NO: 3099437 - RNA, 16 nt, Molluscum contagiosum virus
cucgaugggcuccagg

SEQ ID NO: 3099438 - RNA, 20 nt, Molluscum contagiosum virus
guccgcggacgcgggccugu

SEQ ID NO: 3099439 - RNA, 21 nt, Molluscum contagiosum virus
ccaggcggucuuccagcacug

SEQ ID NO: 3099440 - RNA, 13 nt, Molluscum contagiosum virus
cgcccaaggccgc

SEQ ID NO: 3099441 - RNA, 12 nt, Molluscum contagiosum virus
aucgugcuggag

SEQ ID NO: 3099442 - RNA, 14 nt, Molluscum contagiosum virus
gccagcgggaaacu

SEQ ID NO: 3099443 - RNA, 23 nt, Molluscum contagiosum virus
gcugcucccucucgaggaauuug

SEQ ID NO: 3099444 - RNA, 15 nt, Molluscum contagiosum virus
cggagaucaggcagc

SEQ ID NO: 3099445 - RNA, 22 nt, Molluscum contagiosum virus
cgccaggaaaggcaggagccuc

SEQ ID NO: 3099446 - RNA, 15 nt, Molluscum contagiosum virus
cacgagcacugccug

SEQ ID NO: 3099447 - RNA, 16 nt, Molluscum contagiosum virus
cgcgaaguuccugcau

SEQ ID NO: 3099448 - RNA, 14 nt, Molluscum contagiosum virus
cgcggcccgcgggc

SEQ ID NO: 3099449 - RNA, 18 nt, Molluscum contagiosum virus
cgcaggacuggcaccugc

SEQ ID NO: 3099450 - RNA, 12 nt, Molluscum contagiosum virus
caagcacgccag

SEQ ID NO: 3099451 - RNA, 13 nt, Molluscum contagiosum virus
ccggacagcucag

SEQ ID NO: 3099452 - RNA, 18 nt, Molluscum contagiosum virus
cgcucgcggugcagcugc

SEQ ID NO: 3099453 - RNA, 15 nt, Molluscum contagiosum virus
cccuaagggcccgcu

SEQ ID NO: 3099454 - RNA, 11 nt, Molluscum contagiosum virus
cgccugcuggc

SEQ ID NO: 3099455 - RNA, 23 nt, Molluscum contagiosum virus
uuccgucccccgcggagcugugc

SEQ ID NO: 3099456 - RNA, 13 nt, Molluscum contagiosum virus
ugcccgccagaag

SEQ ID NO: 3099457 - RNA, 21 nt, Molluscum contagiosum virus
cuucuggcaaacgcacugugu

SEQ ID NO: 3099458 - RNA, 22 nt, Molluscum contagiosum virus
aguccgcccccagguggagcug

SEQ ID NO: 3099459 - RNA, 16 nt, Molluscum contagiosum virus
gaugggcuccagguuc

SEQ ID NO: 3099460 - RNA, 15 nt, Molluscum contagiosum virus
caacagugcgugcca

SEQ ID NO: 3099461 - RNA, 15 nt, Molluscum contagiosum virus
gcgcaugacagccau

SEQ ID NO: 3099462 - RNA, 20 nt, Molluscum contagiosum virus
cgcuaccagcucgcgcaguu

SEQ ID NO: 3099463 - RNA, 13 nt, Molluscum contagiosum virus
gaucaccgaggag

SEQ ID NO: 3099464 - RNA, 15 nt, Molluscum contagiosum virus
cgcgcgcuggcgugc

SEQ ID NO: 3099465 - RNA, 13 nt, Molluscum contagiosum virus
ggcgcacuggggc

SEQ ID NO: 3099466 - RNA, 19 nt, Molluscum contagiosum virus
gagcugcagagcgugcugg

SEQ ID NO: 3099467 - RNA, 17 nt, Molluscum contagiosum virus
ccggaauguagccuuug

SEQ ID NO: 3099468 - RNA, 15 nt, Molluscum contagiosum virus
gcccgagcgcgcgug

SEQ ID NO: 3099469 - RNA, 15 nt, Molluscum contagiosum virus
uccucaccuuccugg

SEQ ID NO: 3099470 - RNA, 14 nt, Molluscum contagiosum virus
cauacuccugcugg

SEQ ID NO: 3099471 - RNA, 21 nt, Molluscum contagiosum virus
gcaggaaagguaccccgcagg

SEQ ID NO: 3099472 - RNA, 21 nt, Molluscum contagiosum virus
ccaggaaaacggaaacagcac

SEQ ID NO: 3099473 - RNA, 15 nt, Molluscum contagiosum virus
agcggucucggcagc

SEQ ID NO: 3099474 - RNA, 23 nt, Molluscum contagiosum virus
acguuuucuuugcgcucaucaag

SEQ ID NO: 3099475 - RNA, 15 nt, Molluscum contagiosum virus
uuccugcgucgccug

SEQ ID NO: 3099476 - RNA, 23 nt, Molluscum contagiosum virus
aaagacgagcugugcgagccagu

SEQ ID NO: 3099477 - RNA, 11 nt, Molluscum contagiosum virus
caagacuggca

SEQ ID NO: 3099478 - RNA, 12 nt, Molluscum contagiosum virus
ggcuuugacaug

SEQ ID NO: 3099479 - RNA, 16 nt, Molluscum contagiosum virus
auggccggcaacuggc

SEQ ID NO: 3099480 - RNA, 22 nt, Molluscum contagiosum virus
gagccucccccgcgcacugcca

SEQ ID NO: 3099481 - RNA, 13 nt, Molluscum contagiosum virus
agggcagccucaa

SEQ ID NO: 3099482 - RNA, 12 nt, Molluscum contagiosum virus
ggcuuggacagc

SEQ ID NO: 3099483 - RNA, 15 nt, Molluscum contagiosum virus
accugggcaggccgc

SEQ ID NO: 3099484 - RNA, 21 nt, Molluscum contagiosum virus
uucuacgggaagcugcacgug

SEQ ID NO: 3099485 - RNA, 21 nt, Molluscum contagiosum virus
acgcgcccacgugccaagacc

SEQ ID NO: 3099486 - RNA, 16 nt, Molluscum contagiosum virus
aggugcacgugcugca

SEQ ID NO: 3099487 - RNA, 17 nt, Molluscum contagiosum virus
uguccucuuggccccuc

SEQ ID NO: 3099488 - RNA, 17 nt, Molluscum contagiosum virus
gagacgcggccgcggag

SEQ ID NO: 3099489 - RNA, 22 nt, Molluscum contagiosum virus
gcccgcgcuucugccugcuccc

SEQ ID NO: 3099490 - RNA, 13 nt, Molluscum contagiosum virus
cucuuuguuccug

SEQ ID NO: 3099491 - RNA, 19 nt, Molluscum contagiosum virus
uggccaaagucuuccuggg

SEQ ID NO: 3099492 - RNA, 16 nt, Molluscum contagiosum virus
ccucgagcacgccucc

SEQ ID NO: 3099493 - RNA, 17 nt, Molluscum contagiosum virus
guacccgcaaccccgcg

SEQ ID NO: 3099494 - RNA, 17 nt, Molluscum contagiosum virus
agcuuacuagacuggcu

SEQ ID NO: 3099495 - RNA, 19 nt, Molluscum contagiosum virus
aacucggcuucugcugcac

SEQ ID NO: 3099496 - RNA, 20 nt, Molluscum contagiosum virus
cugcgcgcgcggcgcagugc

SEQ ID NO: 3099497 - RNA, 13 nt, Molluscum contagiosum virus
ugcccgcgccgca

SEQ ID NO: 3099498 - RNA, 16 nt, Molluscum contagiosum virus
gagcugcgugugccgg

SEQ ID NO: 3099499 - RNA, 13 nt, Molluscum contagiosum virus
ggacacgcgcacg

SEQ ID NO: 3099500 - RNA, 21 nt, Molluscum contagiosum virus
cuucgcacgcaaaugcgcgcg

SEQ ID NO: 3099501 - RNA, 14 nt, Molluscum contagiosum virus
cagaacugccuggu

SEQ ID NO: 3099502 - RNA, 22 nt, Molluscum contagiosum virus
gcgcccgcggcacaugcagcug

SEQ ID NO: 3099503 - RNA, 22 nt, Molluscum contagiosum virus
cgccgagcccgagcccgggccc

SEQ ID NO: 3099504 - RNA, 14 nt, Molluscum contagiosum virus
ccugcuugucugcc

SEQ ID NO: 3099505 - RNA, 14 nt, Molluscum contagiosum virus
cggagacaccagcu

SEQ ID NO: 3099506 - RNA, 14 nt, Molluscum contagiosum virus
gcugcgcuaccacg

SEQ ID NO: 3099507 - RNA, 18 nt, Molluscum contagiosum virus
cuaccaagaacagagaaa

SEQ ID NO: 3099508 - RNA, 15 nt, Molluscum contagiosum virus
ugccugcacugagaa

SEQ ID NO: 3099509 - RNA, 22 nt, Molluscum contagiosum virus
cucgcgagcguuucugccggag

SEQ ID NO: 3099510 - RNA, 18 nt, Molluscum contagiosum virus
gcugcaggaccugcuggu

SEQ ID NO: 3099511 - RNA, 20 nt, Molluscum contagiosum virus
ccggcgcaacgagcagcccg

SEQ ID NO: 3099512 - RNA, 14 nt, Molluscum contagiosum virus
gcucggaggcgcag

SEQ ID NO: 3099513 - RNA, 17 nt, Molluscum contagiosum virus
uacgaucgcgcucagga

SEQ ID NO: 3099514 - RNA, 18 nt, Molluscum contagiosum virus
cgcacucgggugcccgga

SEQ ID NO: 3099515 - RNA, 13 nt, Molluscum contagiosum virus
ccggcgcucgccu

SEQ ID NO: 3099516 - RNA, 22 nt, Molluscum contagiosum virus
gaccacgugccagagucgccgc

SEQ ID NO: 3099517 - RNA, 14 nt, Molluscum contagiosum virus
uggugcuggccaac

SEQ ID NO: 3099518 - RNA, 16 nt, Molluscum contagiosum virus
ggcgcucgccuuuccc

SEQ ID NO: 3099519 - RNA, 12 nt, Molluscum contagiosum virus
cauggcgccgcu

SEQ ID NO: 3099520 - RNA, 20 nt, Molluscum contagiosum virus
caguuagaaaugcuugcuuc

SEQ ID NO: 3099521 - RNA, 16 nt, Molluscum contagiosum virus
ccugcuggcgugcgua

SEQ ID NO: 3099522 - RNA, 14 nt, Molluscum contagiosum virus
gcccaccagcagcc

SEQ ID NO: 3099523 - RNA, 18 nt, Molluscum contagiosum virus
gcucauacuccugcuggc

SEQ ID NO: 3099524 - RNA, 23 nt, Molluscum contagiosum virus
cuuugaggaacuagugcugcugg

SEQ ID NO: 3099525 - RNA, 13 nt, Molluscum contagiosum virus
cgcuacagcagcc

SEQ ID NO: 3099526 - RNA, 19 nt, Molluscum contagiosum virus
cagcagccccgacgccagc

SEQ ID NO: 3099527 - RNA, 18 nt, Molluscum contagiosum virus
ccucgcgcgcgcgcggcg

SEQ ID NO: 3099528 - RNA, 16 nt, Molluscum contagiosum virus
cguucccaagcaaagc

SEQ ID NO: 3099529 - RNA, 18 nt, Molluscum contagiosum virus
ggaguagcgugcgccugc

SEQ ID NO: 3099530 - RNA, 22 nt, Molluscum contagiosum virus
caccucugcgcggcccgcgggc

SEQ ID NO: 3099531 - RNA, 14 nt, Molluscum contagiosum virus
caaccgccugcucu

SEQ ID NO: 3099532 - RNA, 15 nt, Molluscum contagiosum virus
cgccgucgcagaaga

SEQ ID NO: 3099533 - RNA, 21 nt, Molluscum contagiosum virus
cgugaggaggcggcacugcua

SEQ ID NO: 3099534 - RNA, 14 nt, Molluscum contagiosum virus
cccaccagcagcca

SEQ ID NO: 3099535 - RNA, 14 nt, Molluscum contagiosum virus
cccgggcccggguu

SEQ ID NO: 3099536 - RNA, 15 nt, Molluscum contagiosum virus
cacgguccugggcga

SEQ ID NO: 3099537 - RNA, 21 nt, Molluscum contagiosum virus
gccgcugccaacgcggaccgc

SEQ ID NO: 3099538 - RNA, 20 nt, Molluscum contagiosum virus
agcgugugccgccgcacuau

SEQ ID NO: 3099539 - RNA, 13 nt, Molluscum contagiosum virus
gccgcggccgccg

SEQ ID NO: 3099540 - RNA, 16 nt, Molluscum contagiosum virus
ccuguccgcggacgcg

SEQ ID NO: 3099541 - RNA, 16 nt, Molluscum contagiosum virus
aucaccccgcugggcc

SEQ ID NO: 3099542 - RNA, 21 nt, Molluscum contagiosum virus
acaugcaacgcaggacacugu

SEQ ID NO: 3099543 - RNA, 22 nt, Molluscum contagiosum virus
cgagcuucgucuucaccugcau

SEQ ID NO: 3099544 - RNA, 12 nt, Molluscum contagiosum virus
gccggcgccgcg

SEQ ID NO: 3099545 - RNA, 15 nt, Molluscum contagiosum virus
cugcuggugcucgcc

SEQ ID NO: 3099546 - RNA, 13 nt, Molluscum contagiosum virus
acgggccgccgcc

SEQ ID NO: 3099547 - RNA, 13 nt, Molluscum contagiosum virus
uguugagccuucu

SEQ ID NO: 3099548 - RNA, 20 nt, Molluscum contagiosum virus
ugagcaagcugcaagccagc

SEQ ID NO: 3099549 - RNA, 14 nt, Molluscum contagiosum virus
cggcaaaggcccgc

SEQ ID NO: 3099550 - RNA, 18 nt, Molluscum contagiosum virus
cacggcguucaccuuggc

SEQ ID NO: 3099551 - RNA, 14 nt, Molluscum contagiosum virus
gcucgugcucuugg

SEQ ID NO: 3099552 - RNA, 15 nt, Molluscum contagiosum virus
gcccgcggcgcgcag

SEQ ID NO: 3099553 - RNA, 12 nt, Molluscum contagiosum virus
caaagcgcggcc

SEQ ID NO: 3099554 - RNA, 11 nt, Molluscum contagiosum virus
gccccugcugc

SEQ ID NO: 3099555 - RNA, 16 nt, Molluscum contagiosum virus
ucaagacgcugcuggc

SEQ ID NO: 3099556 - RNA, 22 nt, Molluscum contagiosum virus
ugucccugcauacacuuccugc

SEQ ID NO: 3099557 - RNA, 21 nt, Molluscum contagiosum virus
ggagcaagucugcgcaggaca

SEQ ID NO: 3099558 - RNA, 12 nt, Molluscum contagiosum virus
cgcgagcagcug

SEQ ID NO: 3099559 - RNA, 14 nt, Molluscum contagiosum virus
acagcauccuggag

SEQ ID NO: 3099560 - RNA, 22 nt, Molluscum contagiosum virus
acugucgacagagaaguccccg

SEQ ID NO: 3099561 - RNA, 13 nt, Molluscum contagiosum virus
acggcacagucug

SEQ ID NO: 3099562 - RNA, 11 nt, Molluscum contagiosum virus
cacuggcccug

SEQ ID NO: 3099563 - RNA, 12 nt, Molluscum contagiosum virus
cgcucgggccgg

SEQ ID NO: 3099564 - RNA, 14 nt, Molluscum contagiosum virus
acgcgggccaggca

SEQ ID NO: 3099565 - RNA, 16 nt, Molluscum contagiosum virus
gcagcugccgcagagc

SEQ ID NO: 3099566 - RNA, 23 nt, Molluscum contagiosum virus
cucgagcucuucucgcagcggga

SEQ ID NO: 3099567 - RNA, 12 nt, Molluscum contagiosum virus
cccgacacacuc

SEQ ID NO: 3099568 - RNA, 22 nt, Molluscum contagiosum virus
cuucgcagagaccgucaaccug

SEQ ID NO: 3099569 - RNA, 16 nt, Molluscum contagiosum virus
ucgucgaagcccagcu

SEQ ID NO: 3099570 - RNA, 13 nt, Molluscum contagiosum virus
gcacccgagggcg

SEQ ID NO: 3099571 - RNA, 22 nt, Molluscum contagiosum virus
gaaccccucgugcugggccugc

SEQ ID NO: 3099572 - RNA, 15 nt, Molluscum contagiosum virus
aggagagagagacau

SEQ ID NO: 3099573 - RNA, 21 nt, Molluscum contagiosum virus
cgcgcucgucaaugcgcacgu

SEQ ID NO: 3099574 - RNA, 15 nt, Molluscum contagiosum virus
uuagccacugugcug

SEQ ID NO: 3099575 - RNA, 21 nt, Molluscum contagiosum virus
caggguuuucacgcaggaccu

SEQ ID NO: 3099576 - RNA, 13 nt, Molluscum contagiosum virus
gaggaggcaagcg

SEQ ID NO: 3099577 - RNA, 22 nt, Molluscum contagiosum virus
caccugcacgagccggcgccgu

SEQ ID NO: 3099578 - RNA, 22 nt, Molluscum contagiosum virus
ggcgcacggucuucucggugga

SEQ ID NO: 3099579 - RNA, 19 nt, Molluscum contagiosum virus
ugaaggacgcguucuccag

SEQ ID NO: 3099580 - RNA, 16 nt, Molluscum contagiosum virus
cgaagacgaagcgcuc

SEQ ID NO: 3099581 - RNA, 14 nt, Molluscum contagiosum virus
agggguccgcgucu

SEQ ID NO: 3099582 - RNA, 13 nt, Molluscum contagiosum virus
ucggaugcgcugc

SEQ ID NO: 3099583 - RNA, 16 nt, Molluscum contagiosum virus
gugcugcgucacaagc

SEQ ID NO: 3099584 - RNA, 15 nt, Molluscum contagiosum virus
cgugcccuggaccuc

SEQ ID NO: 3099585 - RNA, 20 nt, Molluscum contagiosum virus
cacguugccgcgcgcugcuc

SEQ ID NO: 3099586 - RNA, 20 nt, Molluscum contagiosum virus
guucgcaaagacgagggaug

SEQ ID NO: 3099587 - RNA, 12 nt, Molluscum contagiosum virus
acccgugcuugc

SEQ ID NO: 3099588 - RNA, 14 nt, Molluscum contagiosum virus
ggccugcugaagaa

SEQ ID NO: 3099589 - RNA, 19 nt, Molluscum contagiosum virus
gaagaggccggcacaagcc

SEQ ID NO: 3099590 - RNA, 13 nt, Molluscum contagiosum virus
gcuucgucuucac

SEQ ID NO: 3099591 - RNA, 16 nt, Molluscum contagiosum virus
gcgaccggcgugccuu

SEQ ID NO: 3099592 - RNA, 19 nt, Molluscum contagiosum virus
cuagugcagaugaggcugc

SEQ ID NO: 3099593 - RNA, 11 nt, Molluscum contagiosum virus
ccgcaccgagc

SEQ ID NO: 3099594 - RNA, 12 nt, Molluscum contagiosum virus
caccuccagguc

SEQ ID NO: 3099595 - RNA, 20 nt, Molluscum contagiosum virus
cuagacacgagcgcggcaac

SEQ ID NO: 3099596 - RNA, 22 nt, Molluscum contagiosum virus
uggcggccaaccgccugcucuc

SEQ ID NO: 3099597 - RNA, 21 nt, Molluscum contagiosum virus
gaggacuaccuggcggcgcug

SEQ ID NO: 3099598 - RNA, 13 nt, Molluscum contagiosum virus
ugcucccucgcgc

SEQ ID NO: 3099599 - RNA, 15 nt, Molluscum contagiosum virus
gccgcgcggcagaca

SEQ ID NO: 3099600 - RNA, 13 nt, Molluscum contagiosum virus
cacuggaggugag

SEQ ID NO: 3099601 - RNA, 21 nt, Molluscum contagiosum virus
uccgcaggcgucaugcgcgcg

SEQ ID NO: 3099602 - RNA, 15 nt, Molluscum contagiosum virus
cagcgccgccaccuc

SEQ ID NO: 3099603 - RNA, 15 nt, Molluscum contagiosum virus
cguccgcauccucaa

SEQ ID NO: 3099604 - RNA, 17 nt, Molluscum contagiosum virus
cggggccggcuuugcgg

SEQ ID NO: 3099605 - RNA, 22 nt, Molluscum contagiosum virus
cacaggugcguaaugcuggcgc

SEQ ID NO: 3099606 - RNA, 15 nt, Molluscum contagiosum virus
ucacgcuagcgggcc

SEQ ID NO: 3099607 - RNA, 18 nt, Molluscum contagiosum virus
cggcgcguuuucgcggcc

SEQ ID NO: 3099608 - RNA, 22 nt, Molluscum contagiosum virus
accccucgugcugggccugccg

SEQ ID NO: 3099609 - RNA, 17 nt, Molluscum contagiosum virus
aucaaccgcaaggaaaa

SEQ ID NO: 3099610 - RNA, 20 nt, Molluscum contagiosum virus
ccuggucgagcaccugucgc

SEQ ID NO: 3099611 - RNA, 17 nt, Molluscum contagiosum virus
gaagaccaccagcacca

SEQ ID NO: 3099612 - RNA, 14 nt, Molluscum contagiosum virus
ccugugcccugucc

SEQ ID NO: 3099613 - RNA, 13 nt, Molluscum contagiosum virus
ggcaaugggcacg

SEQ ID NO: 3099614 - RNA, 23 nt, Molluscum contagiosum virus
gcacaguccagcccgcggugcgc

SEQ ID NO: 3099615 - RNA, 15 nt, Molluscum contagiosum virus
ccuugcuggcacgcg

SEQ ID NO: 3099616 - RNA, 15 nt, Molluscum contagiosum virus
gcucgaugggcucca

SEQ ID NO: 3099617 - RNA, 15 nt, Molluscum contagiosum virus
ugcgcuccaugcugc

SEQ ID NO: 3099618 - RNA, 12 nt, Molluscum contagiosum virus
cgcgcugcucug

SEQ ID NO: 3099619 - RNA, 13 nt, Molluscum contagiosum virus
ccgcgggcgcacg

SEQ ID NO: 3099620 - RNA, 22 nt, Molluscum contagiosum virus
gggaauaccggagacaccagcu

SEQ ID NO: 3099621 - RNA, 24 nt, Molluscum contagiosum virus
aaucccacguacgagcagcugcug

SEQ ID NO: 3099622 - RNA, 21 nt, Molluscum contagiosum virus
gccgccgcguacgcgccgggg

SEQ ID NO: 3099623 - RNA, 19 nt, Molluscum contagiosum virus
uccccgcgcaagagccgcc

SEQ ID NO: 3099624 - RNA, 11 nt, Molluscum contagiosum virus
ucacgccgccc

SEQ ID NO: 3099625 - RNA, 17 nt, Molluscum contagiosum virus
ccaggccgcggcagcuc

SEQ ID NO: 3099626 - RNA, 22 nt, Molluscum contagiosum virus
guccuuuuuugugucuacggac

SEQ ID NO: 3099627 - RNA, 19 nt, Molluscum contagiosum virus
ggacgcguucuccaggaac

SEQ ID NO: 3099628 - RNA, 23 nt, Molluscum contagiosum virus
ggaauuugcggcgcgggcaagca

SEQ ID NO: 3099629 - RNA, 23 nt, Molluscum contagiosum virus
acggccuucuccucgcucugcuc

SEQ ID NO: 3099630 - RNA, 12 nt, Molluscum contagiosum virus
ccaggaucacga

SEQ ID NO: 3099631 - RNA, 20 nt, Molluscum contagiosum virus
aaguuguuccggugaaaauc

SEQ ID NO: 3099632 - RNA, 23 nt, Molluscum contagiosum virus
gagaucaggcagcugcugcgcuc

SEQ ID NO: 3099633 - RNA, 22 nt, Molluscum contagiosum virus
cuucgacagcgugcgcgggcac

SEQ ID NO: 3099634 - RNA, 14 nt, Molluscum contagiosum virus
ucaaccugcugccu

SEQ ID NO: 3099635 - RNA, 13 nt, Molluscum contagiosum virus
cgcgcgcagcucg

SEQ ID NO: 3099636 - RNA, 17 nt, Molluscum contagiosum virus
aggcacccaccaggaac

SEQ ID NO: 3099637 - RNA, 15 nt, Molluscum contagiosum virus
cgugccuggcagugc

SEQ ID NO: 3099638 - RNA, 15 nt, Molluscum contagiosum virus
caaaagaggccugcu

SEQ ID NO: 3099639 - RNA, 13 nt, Molluscum contagiosum virus
cgcgcgcucugcc

SEQ ID NO: 3099640 - RNA, 16 nt, Molluscum contagiosum virus
ugcaccuacgcgccga

SEQ ID NO: 3099641 - RNA, 19 nt, Molluscum contagiosum virus
ugcuuccgcaccuggucga

SEQ ID NO: 3099642 - RNA, 13 nt, Molluscum contagiosum virus
uaccuugaagaaa

SEQ ID NO: 3099643 - RNA, 20 nt, Molluscum contagiosum virus
gccugcgcccgcaaaccuug

SEQ ID NO: 3099644 - RNA, 12 nt, Molluscum contagiosum virus
cacggcucugcg

SEQ ID NO: 3099645 - RNA, 12 nt, Molluscum contagiosum virus
cuuuuugcugau

SEQ ID NO: 3099646 - RNA, 19 nt, Molluscum contagiosum virus
gccaugaucauggcgccgc

SEQ ID NO: 3099647 - RNA, 15 nt, Molluscum contagiosum virus
gcuugcucagcagcu

SEQ ID NO: 3099648 - RNA, 18 nt, Molluscum contagiosum virus
ccgcuucgagugcucccg

SEQ ID NO: 3099649 - RNA, 12 nt, Molluscum contagiosum virus
guuccagcuccg

SEQ ID NO: 3099650 - RNA, 23 nt, Molluscum contagiosum virus
gcaguuccgauauacgggcccug

SEQ ID NO: 3099651 - RNA, 17 nt, Molluscum contagiosum virus
accgucaaccugcugcc

SEQ ID NO: 3099652 - RNA, 17 nt, Molluscum contagiosum virus
cagauccgggcgcugca

SEQ ID NO: 3099653 - RNA, 14 nt, Molluscum contagiosum virus
cgcgcucuucccgu

SEQ ID NO: 3099654 - RNA, 20 nt, Molluscum contagiosum virus
acggacugggagcaccgcgu

SEQ ID NO: 3099655 - RNA, 17 nt, Molluscum contagiosum virus
ggcuuccgacaacucgc

SEQ ID NO: 3099656 - RNA, 15 nt, Molluscum contagiosum virus
cgcguguuugugcug

SEQ ID NO: 3099657 - RNA, 15 nt, Molluscum contagiosum virus
cccgcgcgugcaguu

SEQ ID NO: 3099658 - RNA, 23 nt, Molluscum contagiosum virus
cggucugauugagccggacuugu

SEQ ID NO: 3099659 - RNA, 22 nt, Molluscum contagiosum virus
cguggugcuuacugcgggcugc

SEQ ID NO: 3099660 - RNA, 18 nt, Molluscum contagiosum virus
cagcgcgugcgcaggagc

SEQ ID NO: 3099661 - RNA, 16 nt, Molluscum contagiosum virus
gguagcucgugccugu

SEQ ID NO: 3099662 - RNA, 17 nt, Molluscum contagiosum virus
gccagcgcgcccaccag

SEQ ID NO: 3099663 - RNA, 20 nt, Molluscum contagiosum virus
ucaggaacaaggccaaagcc

SEQ ID NO: 3099664 - RNA, 21 nt, Molluscum contagiosum virus
ucgcgcgccgcgcuggcgcgc

SEQ ID NO: 3099665 - RNA, 20 nt, Molluscum contagiosum virus
cgcucggaggcuugccccgc

SEQ ID NO: 3099666 - RNA, 15 nt, Molluscum contagiosum virus
gucugcaaggccugu

SEQ ID NO: 3099667 - RNA, 15 nt, Molluscum contagiosum virus
caugcagucacgacu

SEQ ID NO: 3099668 - RNA, 22 nt, Molluscum contagiosum virus
agcaacgcgacgauggccacgc

SEQ ID NO: 3099669 - RNA, 17 nt, Molluscum contagiosum virus
guucgagaccagccgcg

SEQ ID NO: 3099670 - RNA, 20 nt, Molluscum contagiosum virus
caucuucaagccgcaggcgc

SEQ ID NO: 3099671 - RNA, 15 nt, Molluscum contagiosum virus
cagugcuugagcauc

SEQ ID NO: 3099672 - RNA, 13 nt, Molluscum contagiosum virus
ggcaaucugucca

SEQ ID NO: 3099673 - RNA, 16 nt, Molluscum contagiosum virus
agcguccgcauccuca

SEQ ID NO: 3099674 - RNA, 20 nt, Molluscum contagiosum virus
ggcacaccccgggaacgagg

SEQ ID NO: 3099675 - RNA, 22 nt, Molluscum contagiosum virus
caacacgaucaaggugcagaac

SEQ ID NO: 3099676 - RNA, 18 nt, Molluscum contagiosum virus
cacgugcugcagcugcgc

SEQ ID NO: 3099677 - RNA, 12 nt, Molluscum contagiosum virus
ggaaaaggcaca

SEQ ID NO: 3099678 - RNA, 15 nt, Molluscum contagiosum virus
gcacgaccacgcugg

SEQ ID NO: 3099679 - RNA, 18 nt, Molluscum contagiosum virus
caacacuaccacagccau

SEQ ID NO: 3099680 - RNA, 20 nt, Molluscum contagiosum virus
ucccggcugccgcugccugu

SEQ ID NO: 3099681 - RNA, 20 nt, Molluscum contagiosum virus
gucgaagagggucgugcagg

SEQ ID NO: 3099682 - RNA, 12 nt, Molluscum contagiosum virus
cgcuccaugcug

SEQ ID NO: 3099683 - RNA, 23 nt, Molluscum contagiosum virus
acgccgugggcagcuucugcucg

SEQ ID NO: 3099684 - RNA, 12 nt, Molluscum contagiosum virus
acgucuucgccg

SEQ ID NO: 3099685 - RNA, 22 nt, Molluscum contagiosum virus
agugcguuugccagaagcccug

SEQ ID NO: 3099686 - RNA, 23 nt, Molluscum contagiosum virus
caacgagcucuccgaagagcaga

SEQ ID NO: 3099687 - RNA, 23 nt, Molluscum contagiosum virus
gcaacgcgacgauggccacgcag

SEQ ID NO: 3099688 - RNA, 16 nt, Molluscum contagiosum virus
ggaacucuacgacaug

SEQ ID NO: 3099689 - RNA, 18 nt, Molluscum contagiosum virus
ccucgugguugcgcagca

SEQ ID NO: 3099690 - RNA, 19 nt, Molluscum contagiosum virus
gaacaaugaggagaggaac

SEQ ID NO: 3099691 - RNA, 13 nt, Molluscum contagiosum virus
cgcgcgagcugcu

SEQ ID NO: 3099692 - RNA, 16 nt, Molluscum contagiosum virus
ucuucccgugcaaggu

SEQ ID NO: 3099693 - RNA, 21 nt, Molluscum contagiosum virus
gugacuagcgcuggcugcagg

SEQ ID NO: 3099694 - RNA, 14 nt, Molluscum contagiosum virus
cggcugcuggagcu

SEQ ID NO: 3099695 - RNA, 20 nt, Molluscum contagiosum virus
cgagcggcaagccgugcuuu

SEQ ID NO: 3099696 - RNA, 20 nt, Molluscum contagiosum virus
gagagccuucgucauccucg

SEQ ID NO: 3099697 - RNA, 21 nt, Molluscum contagiosum virus
gagcugugcgagccaguuucu

SEQ ID NO: 3099698 - RNA, 15 nt, Molluscum contagiosum virus
gagcgcagucccagc

SEQ ID NO: 3099699 - RNA, 19 nt, Molluscum contagiosum virus
ccgccgggaauaccggaga

SEQ ID NO: 3099700 - RNA, 17 nt, Molluscum contagiosum virus
cgugcuuacggacagga

SEQ ID NO: 3099701 - RNA, 15 nt, Molluscum contagiosum virus
caccacguggaccug

SEQ ID NO: 3099702 - RNA, 14 nt, Molluscum contagiosum virus
caccagcagccagg

SEQ ID NO: 3099703 - RNA, 22 nt, Molluscum contagiosum virus
auucucguggcguugcugcugc

SEQ ID NO: 3099704 - RNA, 21 nt, Molluscum contagiosum virus
ggcggcgcgaagcaggcgcca

SEQ ID NO: 3099705 - RNA, 14 nt, Molluscum contagiosum virus
gcuguggacaugau

SEQ ID NO: 3099706 - RNA, 19 nt, Molluscum contagiosum virus
caacacgaucaaggugcag

SEQ ID NO: 3099707 - RNA, 18 nt, Molluscum contagiosum virus
cgcaagcaccggcagcgc

SEQ ID NO: 3099708 - RNA, 16 nt, Molluscum contagiosum virus
ggucgagcgcgccgcg

SEQ ID NO: 3099709 - RNA, 17 nt, Molluscum contagiosum virus
agccugcaccgagugcu

SEQ ID NO: 3099710 - RNA, 19 nt, Molluscum contagiosum virus
cgcgguggccgcgccgggc

SEQ ID NO: 3099711 - RNA, 20 nt, Molluscum contagiosum virus
cccgcggacggacgaagaga

SEQ ID NO: 3099712 - RNA, 15 nt, Molluscum contagiosum virus
gcaauugcugggcac

SEQ ID NO: 3099713 - RNA, 20 nt, Molluscum contagiosum virus
gccugcugggagcuugcacg

SEQ ID NO: 3099714 - RNA, 22 nt, Molluscum contagiosum virus
acguacgagcagcugcugcgca

SEQ ID NO: 3099715 - RNA, 21 nt, Molluscum contagiosum virus
acgcuggcucgcgccugcgcu

SEQ ID NO: 3099716 - RNA, 15 nt, Molluscum contagiosum virus
gcugcucgcuugccc

SEQ ID NO: 3099717 - RNA, 18 nt, Molluscum contagiosum virus
ccuccgcggacgcgcccu

SEQ ID NO: 3099718 - RNA, 17 nt, Molluscum contagiosum virus
uaguugcagcccaccag

SEQ ID NO: 3099719 - RNA, 21 nt, Molluscum contagiosum virus
guuugacgcccggugccuggc

SEQ ID NO: 3099720 - RNA, 15 nt, Molluscum contagiosum virus
gcgcacgugcucgcg

SEQ ID NO: 3099721 - RNA, 12 nt, Molluscum contagiosum virus
caagggcuccuu

SEQ ID NO: 3099722 - RNA, 22 nt, Molluscum contagiosum virus
gccguggcacugacgguacuca

SEQ ID NO: 3099723 - RNA, 16 nt, Molluscum contagiosum virus
uuagccacugugcuga

SEQ ID NO: 3099724 - RNA, 19 nt, Molluscum contagiosum virus
acgcacagccccugcugcu

SEQ ID NO: 3099725 - RNA, 16 nt, Molluscum contagiosum virus
ugugaacacgacaugu

SEQ ID NO: 3099726 - RNA, 21 nt, Molluscum contagiosum virus
aaugacgcgcacgccagccug

SEQ ID NO: 3099727 - RNA, 12 nt, Molluscum contagiosum virus
uugcucucuuuc

SEQ ID NO: 3099728 - RNA, 13 nt, Molluscum contagiosum virus
uuggcgcgccgcu

SEQ ID NO: 3099729 - RNA, 17 nt, Molluscum contagiosum virus
gcugggcguggcgcacc

SEQ ID NO: 3099730 - RNA, 22 nt, Molluscum contagiosum virus
aucccacguacgagcagcugcu

SEQ ID NO: 3099731 - RNA, 17 nt, Molluscum contagiosum virus
ggcgcgcgagcugcugc

SEQ ID NO: 3099732 - RNA, 13 nt, Molluscum contagiosum virus
gcgccucgcaggc

SEQ ID NO: 3099733 - RNA, 14 nt, Molluscum contagiosum virus
acugacugcugccc

SEQ ID NO: 3099734 - RNA, 21 nt, Molluscum contagiosum virus
gauuagcaacugccccaugcc

SEQ ID NO: 3099735 - RNA, 13 nt, Molluscum contagiosum virus
guguugcuguucc

SEQ ID NO: 3099736 - RNA, 13 nt, Molluscum contagiosum virus
cacgugcugcgcu

SEQ ID NO: 3099737 - RNA, 23 nt, Molluscum contagiosum virus
gcccagcucgaugggcuccaggu

SEQ ID NO: 3099738 - RNA, 18 nt, Molluscum contagiosum virus
cgugaacgaggcugcugc

SEQ ID NO: 3099739 - RNA, 20 nt, Molluscum contagiosum virus
aggugcgaaggcucgagcug

SEQ ID NO: 3099740 - RNA, 14 nt, Molluscum contagiosum virus
ggcacgcagcucuu

SEQ ID NO: 3099741 - RNA, 13 nt, Molluscum contagiosum virus
gcgccaagaacaa

SEQ ID NO: 3099742 - RNA, 16 nt, Molluscum contagiosum virus
cuggcguugcgcggcg

SEQ ID NO: 3099743 - RNA, 16 nt, Molluscum contagiosum virus
ugcuccacgcgcagcu

SEQ ID NO: 3099744 - RNA, 20 nt, Molluscum contagiosum virus
ugcgcgguggugcugggcgu

SEQ ID NO: 3099745 - RNA, 13 nt, Molluscum contagiosum virus
uucgugcugugcc

SEQ ID NO: 3099746 - RNA, 15 nt, Molluscum contagiosum virus
agccacggccgcgcu

SEQ ID NO: 3099747 - RNA, 13 nt, Molluscum contagiosum virus
acagcccccucuu

SEQ ID NO: 3099748 - RNA, 21 nt, Molluscum contagiosum virus
cuuccaggcgccgcaccucac

SEQ ID NO: 3099749 - RNA, 19 nt, Molluscum contagiosum virus
cuugcgcguucgcaaagac

SEQ ID NO: 3099750 - RNA, 15 nt, Molluscum contagiosum virus
acugaaaagcuaucc

SEQ ID NO: 3099751 - RNA, 17 nt, Molluscum contagiosum virus
gugcuggagcagacgua

SEQ ID NO: 3099752 - RNA, 22 nt, Molluscum contagiosum virus
guuugcacccgcgcagcgugcc

SEQ ID NO: 3099753 - RNA, 20 nt, Molluscum contagiosum virus
cccagcucgaugggcuccag

SEQ ID NO: 3099754 - RNA, 13 nt, Molluscum contagiosum virus
gccuuccugcgcc

SEQ ID NO: 3099755 - RNA, 15 nt, Molluscum contagiosum virus
cggcaacacaaaugc

SEQ ID NO: 3099756 - RNA, 16 nt, Molluscum contagiosum virus
gcgugcgccgugcguc

SEQ ID NO: 3099757 - RNA, 20 nt, Molluscum contagiosum virus
caguaccgugucaaacugcu

SEQ ID NO: 3099758 - RNA, 20 nt, Molluscum contagiosum virus
gcacucguggcaacaacaug

SEQ ID NO: 3099759 - RNA, 19 nt, Molluscum contagiosum virus
acgcugcgcgugcugggcc

SEQ ID NO: 3099760 - RNA, 13 nt, Molluscum contagiosum virus
cgaugggaggcgg

SEQ ID NO: 3099761 - RNA, 14 nt, Molluscum contagiosum virus
ugcccgccugccgc

SEQ ID NO: 3099762 - RNA, 17 nt, Molluscum contagiosum virus
aggucgagcgcgccgcg

SEQ ID NO: 3099763 - RNA, 13 nt, Molluscum contagiosum virus
agcacagcaggag

SEQ ID NO: 3099764 - RNA, 16 nt, Molluscum contagiosum virus
ugacagacuaggcaau

SEQ ID NO: 3099765 - RNA, 17 nt, Molluscum contagiosum virus
cgaucgcgggcacgagc

SEQ ID NO: 3099766 - RNA, 22 nt, Molluscum contagiosum virus
gugcuggucaagaacaugugcu

SEQ ID NO: 3099767 - RNA, 14 nt, Molluscum contagiosum virus
cagagcaaggcgag

SEQ ID NO: 3099768 - RNA, 15 nt, Molluscum contagiosum virus
ugagugcugagccac

SEQ ID NO: 3099769 - RNA, 17 nt, Molluscum contagiosum virus
gugcgucucucugucuc

SEQ ID NO: 3099770 - RNA, 17 nt, Molluscum contagiosum virus
gugcuccgaggaggcaa

SEQ ID NO: 3099771 - RNA, 17 nt, Molluscum contagiosum virus
ggcgccgcgcugaugcu

SEQ ID NO: 3099772 - RNA, 17 nt, Molluscum contagiosum virus
cgugcgccucgcaggcg

SEQ ID NO: 3099773 - RNA, 19 nt, Molluscum contagiosum virus
gcgcgcaggcucgcaccgu

SEQ ID NO: 3099774 - RNA, 20 nt, Molluscum contagiosum virus
gccuguuuuuaucgagccgc

SEQ ID NO: 3099775 - RNA, 21 nt, Molluscum contagiosum virus
ucaagcagcgcgccaccacca

SEQ ID NO: 3099776 - RNA, 14 nt, Molluscum contagiosum virus
gcacaaaacacaaa

SEQ ID NO: 3099777 - RNA, 21 nt, Molluscum contagiosum virus
gccgccgcugccgcgcgcgcc

SEQ ID NO: 3099778 - RNA, 16 nt, Molluscum contagiosum virus
cgcgccgcugcucgcu

SEQ ID NO: 3099779 - RNA, 23 nt, Molluscum contagiosum virus
aaggcaccccgcaggaaagguac

SEQ ID NO: 3099780 - RNA, 11 nt, Molluscum contagiosum virus
ucgccaaagag

SEQ ID NO: 3099781 - RNA, 22 nt, Molluscum contagiosum virus
guggacgagcgcuaccugaugc

SEQ ID NO: 3099782 - RNA, 18 nt, Molluscum contagiosum virus
acagacgugcacaaagcc

SEQ ID NO: 3099783 - RNA, 16 nt, Molluscum contagiosum virus
gcacugcucgcgcacg

SEQ ID NO: 3099784 - RNA, 20 nt, Molluscum contagiosum virus
gcaaccagcuggcgcccgcg

SEQ ID NO: 3099785 - RNA, 18 nt, Molluscum contagiosum virus
acaaggacggagaguugu

SEQ ID NO: 3099786 - RNA, 14 nt, Molluscum contagiosum virus
aguggccggcaagg

SEQ ID NO: 3099787 - RNA, 22 nt, Molluscum contagiosum virus
gcacgacccucuucgacuuacg

SEQ ID NO: 3099788 - RNA, 14 nt, Molluscum contagiosum virus
cgaggugcugcgcc

SEQ ID NO: 3099789 - RNA, 14 nt, Molluscum contagiosum virus
acaacgacagagcc

SEQ ID NO: 3099790 - RNA, 22 nt, Molluscum contagiosum virus
ugccagcgagcucaaggacauc

SEQ ID NO: 3099791 - RNA, 14 nt, Molluscum contagiosum virus
gcgcgugcccgcag

SEQ ID NO: 3099792 - RNA, 24 nt, Molluscum contagiosum virus
ugccuuggcgcccgugccgccggc

SEQ ID NO: 3099793 - RNA, 19 nt, Molluscum contagiosum virus
aacgcacaaaacacaaaaa

SEQ ID NO: 3099794 - RNA, 12 nt, Molluscum contagiosum virus
gcgugcuggacg

SEQ ID NO: 3099795 - RNA, 22 nt, Molluscum contagiosum virus
aggcgcgcaagugcgugucccu

SEQ ID NO: 3099796 - RNA, 14 nt, Molluscum contagiosum virus
ccugguaguccugc

SEQ ID NO: 3099797 - RNA, 14 nt, Molluscum contagiosum virus
ggaagugcgagccg

SEQ ID NO: 3099798 - RNA, 21 nt, Molluscum contagiosum virus
gcaguaugugaacacgacaug

SEQ ID NO: 3099799 - RNA, 22 nt, Molluscum contagiosum virus
ccucucgaggccggcacgagca

SEQ ID NO: 3099800 - RNA, 16 nt, Molluscum contagiosum virus
gcacggcgacucuggc

SEQ ID NO: 3099801 - RNA, 22 nt, Molluscum contagiosum virus
gcgaguaccugggcaggccgcc

SEQ ID NO: 3099802 - RNA, 13 nt, Molluscum contagiosum virus
uggacagccauga

SEQ ID NO: 3099803 - RNA, 23 nt, Molluscum contagiosum virus
acgccaaccaccacguggaccug

SEQ ID NO: 3099804 - RNA, 18 nt, Molluscum contagiosum virus
cgcugcugguucugcucg

SEQ ID NO: 3099805 - RNA, 19 nt, Molluscum contagiosum virus
cagccugcuggcaccgcgc

SEQ ID NO: 3099806 - RNA, 11 nt, Molluscum contagiosum virus
ggacggagguc

SEQ ID NO: 3099807 - RNA, 15 nt, Molluscum contagiosum virus
ccucgcucugcucuu

SEQ ID NO: 3099808 - RNA, 18 nt, Molluscum contagiosum virus
caacaaggaaaggcaccc

SEQ ID NO: 3099809 - RNA, 16 nt, Molluscum contagiosum virus
cacgcgugucugcgcu

SEQ ID NO: 3099810 - RNA, 18 nt, Molluscum contagiosum virus
gcuuccgcgagucugcca

SEQ ID NO: 3099811 - RNA, 20 nt, Molluscum contagiosum virus
ccagucucgaugugacaaca

SEQ ID NO: 3099812 - RNA, 16 nt, Molluscum contagiosum virus
uagcgugugccgccgc

SEQ ID NO: 3099813 - RNA, 14 nt, Molluscum contagiosum virus
ggccugcggcggcg

SEQ ID NO: 3099814 - RNA, 19 nt, Molluscum contagiosum virus
aaguacaacccaaacaugu

SEQ ID NO: 3099815 - RNA, 15 nt, Molluscum contagiosum virus
uuggcgugaccaugg

SEQ ID NO: 3099816 - RNA, 15 nt, Molluscum contagiosum virus
ccuguccgcgggcgc

SEQ ID NO: 3099817 - RNA, 16 nt, Molluscum contagiosum virus
gccccaugcccgacca

SEQ ID NO: 3099818 - RNA, 19 nt, Molluscum contagiosum virus
gucuccacgcgugcgcgcc

SEQ ID NO: 3099819 - RNA, 18 nt, Molluscum contagiosum virus
acugccccaugcccgacc

SEQ ID NO: 3099820 - RNA, 18 nt, Molluscum contagiosum virus
cgcaggccaggugcagcg

SEQ ID NO: 3099821 - RNA, 21 nt, Molluscum contagiosum virus
acuuauuuuuguguuuugugc

SEQ ID NO: 3099822 - RNA, 18 nt, Molluscum contagiosum virus
guggaggugcgcgacucc

SEQ ID NO: 3099823 - RNA, 13 nt, Molluscum contagiosum virus
gagccggcugccc

SEQ ID NO: 3099824 - RNA, 21 nt, Molluscum contagiosum virus
gcgugcuugugcgccugugcu

SEQ ID NO: 3099825 - RNA, 23 nt, Molluscum contagiosum virus
uguaaguggcuucgcaagcaugc

SEQ ID NO: 3099826 - RNA, 14 nt, Molluscum contagiosum virus
cgcgugccgcggac

SEQ ID NO: 3099827 - RNA, 19 nt, Molluscum contagiosum virus
ccuggcgagcgcucugcau

SEQ ID NO: 3099828 - RNA, 17 nt, Molluscum contagiosum virus
cacugccugccgccucg

SEQ ID NO: 3099829 - RNA, 15 nt, Molluscum contagiosum virus
gucgagcgcgccgcg

SEQ ID NO: 3099830 - RNA, 20 nt, Molluscum contagiosum virus
uggagaccugucgugcaaug

SEQ ID NO: 3099831 - RNA, 21 nt, Molluscum contagiosum virus
cugcuggcgcgcgcgcgccgg

SEQ ID NO: 3099832 - RNA, 18 nt, Molluscum contagiosum virus
gcgcgcuccgagacugcu

SEQ ID NO: 3099833 - RNA, 16 nt, Molluscum contagiosum virus
gcucggcugccgugcg

SEQ ID NO: 3099834 - RNA, 21 nt, Molluscum contagiosum virus
ugugcgagaacuggcgcagca

SEQ ID NO: 3099835 - RNA, 22 nt, Molluscum contagiosum virus
aaguccgcccccagguggagcu

SEQ ID NO: 3099836 - RNA, 17 nt, Molluscum contagiosum virus
cggagaacaugcucgcc

SEQ ID NO: 3099837 - RNA, 14 nt, Molluscum contagiosum virus
gaggaaaggcgcac

SEQ ID NO: 3099838 - RNA, 13 nt, Molluscum contagiosum virus
uucgcgccgccgc

SEQ ID NO: 3099839 - RNA, 16 nt, Molluscum contagiosum virus
ucaccccgcagcucaa

SEQ ID NO: 3099840 - RNA, 19 nt, Molluscum contagiosum virus
cugccgucgcgcgcugugg

SEQ ID NO: 3099841 - RNA, 20 nt, Molluscum contagiosum virus
acuggcaccugcggcugcgg

SEQ ID NO: 3099842 - RNA, 16 nt, Molluscum contagiosum virus
gguucugcgcugccag

SEQ ID NO: 3099843 - RNA, 13 nt, Molluscum contagiosum virus
cgcgguccagccg

SEQ ID NO: 3099844 - RNA, 15 nt, Molluscum contagiosum virus
agcugcuagcggcag

SEQ ID NO: 3099845 - RNA, 23 nt, Molluscum contagiosum virus
gcgucggucaccaccaccuccag

SEQ ID NO: 3099846 - RNA, 14 nt, Molluscum contagiosum virus
ucaggccagcaucu

SEQ ID NO: 3099847 - RNA, 18 nt, Molluscum contagiosum virus
gauguacgcgugcaggaa

SEQ ID NO: 3099848 - RNA, 15 nt, Molluscum contagiosum virus
ugcuggugcucgccu

SEQ ID NO: 3099849 - RNA, 17 nt, Molluscum contagiosum virus
cgcacaagggcagcuca

SEQ ID NO: 3099850 - RNA, 13 nt, Molluscum contagiosum virus
cacauugcugcug

SEQ ID NO: 3099851 - RNA, 17 nt, Molluscum contagiosum virus
cucaucgagcaccucaa

SEQ ID NO: 3099852 - RNA, 22 nt, Molluscum contagiosum virus
ccguguucgcggagcugugccg

SEQ ID NO: 3099853 - RNA, 14 nt, Molluscum contagiosum virus
gcgacuuggggcuc

SEQ ID NO: 3099854 - RNA, 21 nt, Molluscum contagiosum virus
caccgggauggucucgcugcu

SEQ ID NO: 3099855 - RNA, 17 nt, Molluscum contagiosum virus
ccgaaggaaaggccccc

SEQ ID NO: 3099856 - RNA, 20 nt, Molluscum contagiosum virus
cucguggacagccugcaccg

SEQ ID NO: 3099857 - RNA, 14 nt, Molluscum contagiosum virus
cgcgcgugcuggac

SEQ ID NO: 3099858 - RNA, 19 nt, Molluscum contagiosum virus
cuccuuugcgagcacugua

SEQ ID NO: 3099859 - RNA, 15 nt, Molluscum contagiosum virus
cgagcgcggcaacag

SEQ ID NO: 3099860 - RNA, 20 nt, Molluscum contagiosum virus
cgugguacacguagaggaag

SEQ ID NO: 3099861 - RNA, 15 nt, Molluscum contagiosum virus
ggccuccuucccuga

SEQ ID NO: 3099862 - RNA, 23 nt, Molluscum contagiosum virus
cgcgacggugugccgcugguggg

SEQ ID NO: 3099863 - RNA, 15 nt, Molluscum contagiosum virus
uccggcggcuggacc

SEQ ID NO: 3099864 - RNA, 13 nt, Molluscum contagiosum virus
gagggucgugcag

SEQ ID NO: 3099865 - RNA, 19 nt, Molluscum contagiosum virus
gccgcgcugguggccgcac

SEQ ID NO: 3099866 - RNA, 18 nt, Molluscum contagiosum virus
acgugcugcugcagaacu

SEQ ID NO: 3099867 - RNA, 21 nt, Molluscum contagiosum virus
aggagauggaacugcagcagc

SEQ ID NO: 3099868 - RNA, 20 nt, Molluscum contagiosum virus
cauucccggcgcgcgcggcg

SEQ ID NO: 3099869 - RNA, 12 nt, Molluscum contagiosum virus
aacugcugggcg

SEQ ID NO: 3099870 - RNA, 18 nt, Molluscum contagiosum virus
augcgucuuccugcugcc

SEQ ID NO: 3099871 - RNA, 13 nt, Molluscum contagiosum virus
gcccugcucaugc

SEQ ID NO: 3099872 - RNA, 11 nt, Molluscum contagiosum virus
ugagaagcugu

SEQ ID NO: 3099873 - RNA, 15 nt, Molluscum contagiosum virus
gccugagaagcugua

SEQ ID NO: 3099874 - RNA, 14 nt, Molluscum contagiosum virus
gccgcaaccucuuc

SEQ ID NO: 3099875 - RNA, 21 nt, Molluscum contagiosum virus
uuggggcggcggggcugcugg

SEQ ID NO: 3099876 - RNA, 19 nt, Molluscum contagiosum virus
gcuccaacagcagcuggcg

SEQ ID NO: 3099877 - RNA, 20 nt, Molluscum contagiosum virus
gcgcgaccuacuccuggcca

SEQ ID NO: 3099878 - RNA, 20 nt, Molluscum contagiosum virus
agcagguucucgcacaguac

SEQ ID NO: 3099879 - RNA, 15 nt, Molluscum contagiosum virus
gcgcgccgcgcgccg

SEQ ID NO: 3099880 - RNA, 22 nt, Molluscum contagiosum virus
uggagcagacguacgagcaggc

SEQ ID NO: 3099881 - RNA, 24 nt, Molluscum contagiosum virus
ccacgcccgggcccgacacguugc

SEQ ID NO: 3099882 - RNA, 22 nt, Molluscum contagiosum virus
auugcugggcacaagcuuucuc

SEQ ID NO: 3099883 - RNA, 19 nt, Molluscum contagiosum virus
cuccggcuuagcuggcgcc

SEQ ID NO: 3099884 - RNA, 16 nt, Molluscum contagiosum virus
uccucaccuuccuggg

SEQ ID NO: 3099885 - RNA, 21 nt, Molluscum contagiosum virus
gccacgagcgccgcgugcgcg

SEQ ID NO: 3099886 - RNA, 20 nt, Molluscum contagiosum virus
ggccacucucccgggcucug

SEQ ID NO: 3099887 - RNA, 23 nt, Molluscum contagiosum virus
cacggcuguaaugugcuggucaa

SEQ ID NO: 3099888 - RNA, 14 nt, Molluscum contagiosum virus
gguggacguggacg

SEQ ID NO: 3099889 - RNA, 20 nt, Molluscum contagiosum virus
ccuucaggacgcaggacgcg

SEQ ID NO: 3099890 - RNA, 14 nt, Molluscum contagiosum virus
uucccguuccuggg

SEQ ID NO: 3099891 - RNA, 17 nt, Molluscum contagiosum virus
uggcaacgcgggggcca

SEQ ID NO: 3099892 - RNA, 11 nt, Molluscum contagiosum virus
cuuccugcagc

SEQ ID NO: 3099893 - RNA, 22 nt, Molluscum contagiosum virus
aguggcgcgcauuuaccggcgc

SEQ ID NO: 3099894 - RNA, 13 nt, Molluscum contagiosum virus
cucgcugccuggu

SEQ ID NO: 3099895 - RNA, 17 nt, Molluscum contagiosum virus
cggacgaagcugugcaa

SEQ ID NO: 3099896 - RNA, 15 nt, Molluscum contagiosum virus
aaagaggccugcuga

SEQ ID NO: 3099897 - RNA, 13 nt, Molluscum contagiosum virus
cuuucgacgcugc

SEQ ID NO: 3099898 - RNA, 21 nt, Molluscum contagiosum virus
cggacacguugcagcagcaca

SEQ ID NO: 3099899 - RNA, 13 nt, Molluscum contagiosum virus
ugcgcauggccac

SEQ ID NO: 3099900 - RNA, 16 nt, Molluscum contagiosum virus
cucaccuuccugggcg

SEQ ID NO: 3099901 - RNA, 21 nt, Molluscum contagiosum virus
ugggaacaccacacgcgcggc

SEQ ID NO: 3099902 - RNA, 12 nt, Molluscum contagiosum virus
cggcgcgccggc

SEQ ID NO: 3099903 - RNA, 12 nt, Molluscum contagiosum virus
cgcugcgccgcu

SEQ ID NO: 3099904 - RNA, 15 nt, Molluscum contagiosum virus
gcaggucggccagca

SEQ ID NO: 3099905 - RNA, 24 nt, Molluscum contagiosum virus
ggcgcgugccagucgcgcgagaag

SEQ ID NO: 3099906 - RNA, 17 nt, Molluscum contagiosum virus
cuagccugugcccugga

SEQ ID NO: 3099907 - RNA, 15 nt, Molluscum contagiosum virus
cugguaguccugcua

SEQ ID NO: 3099908 - RNA, 20 nt, Molluscum contagiosum virus
cuccacgucgaucagcuccg

SEQ ID NO: 3099909 - RNA, 12 nt, Molluscum contagiosum virus
ccgugggcggca

SEQ ID NO: 3099910 - RNA, 13 nt, Molluscum contagiosum virus
ccacggcugcaag

SEQ ID NO: 3099911 - RNA, 15 nt, Molluscum contagiosum virus
ggcuguguuccagcu

SEQ ID NO: 3099912 - RNA, 11 nt, Molluscum contagiosum virus
uuccugcuggc

SEQ ID NO: 3099913 - RNA, 18 nt, Molluscum contagiosum virus
gacaaggaaaggcaccca

SEQ ID NO: 3099914 - RNA, 15 nt, Molluscum contagiosum virus
ccuugucgagacagg

SEQ ID NO: 3099915 - RNA, 14 nt, Molluscum contagiosum virus
cgucccgacagcag

SEQ ID NO: 3099916 - RNA, 16 nt, Molluscum contagiosum virus
uugccugcacugagaa

SEQ ID NO: 3099917 - RNA, 14 nt, Molluscum contagiosum virus
caccaugcgcacag

SEQ ID NO: 3099918 - RNA, 12 nt, Molluscum contagiosum virus
cagcaguccgcc

SEQ ID NO: 3099919 - RNA, 22 nt, Molluscum contagiosum virus
cgaacgagaaaugcgcacacuu

SEQ ID NO: 3099920 - RNA, 13 nt, Molluscum contagiosum virus
cgagacgcugcug

SEQ ID NO: 3099921 - RNA, 13 nt, Molluscum contagiosum virus
agaagaacagcac

SEQ ID NO: 3099922 - RNA, 18 nt, Molluscum contagiosum virus
cuugcacgggcaugcaca

SEQ ID NO: 3099923 - RNA, 20 nt, Molluscum contagiosum virus
acgggaagcugcacgugcag

SEQ ID NO: 3099924 - RNA, 11 nt, Molluscum contagiosum virus
cagcagccagg

SEQ ID NO: 3099925 - RNA, 15 nt, Molluscum contagiosum virus
cagggaaagagcacg

SEQ ID NO: 3099926 - RNA, 18 nt, Molluscum contagiosum virus
gccgagcgccgccagcuc

SEQ ID NO: 3099927 - RNA, 13 nt, Molluscum contagiosum virus
cacacacacacuc

SEQ ID NO: 3099928 - RNA, 16 nt, Molluscum contagiosum virus
agcucauagcccaugc

SEQ ID NO: 3099929 - RNA, 20 nt, Molluscum contagiosum virus
cgauuuggacgcggcaccug

SEQ ID NO: 3099930 - RNA, 14 nt, Molluscum contagiosum virus
cggcggcugugccc

SEQ ID NO: 3099931 - RNA, 19 nt, Molluscum contagiosum virus
uagugccgagcucgccucc

SEQ ID NO: 3099932 - RNA, 15 nt, Molluscum contagiosum virus
uccaugagcaucucc

SEQ ID NO: 3099933 - RNA, 20 nt, Molluscum contagiosum virus
uggcuucuccaccuucagga

SEQ ID NO: 3099934 - RNA, 14 nt, Molluscum contagiosum virus
gugcucgcacacgu

SEQ ID NO: 3099935 - RNA, 15 nt, Molluscum contagiosum virus
acggcgugcuggcca

SEQ ID NO: 3099936 - RNA, 20 nt, Molluscum contagiosum virus
uccgucacggacagcagcuc

SEQ ID NO: 3099937 - RNA, 12 nt, Molluscum contagiosum virus
cgacuuuguccu

SEQ ID NO: 3099938 - RNA, 20 nt, Molluscum contagiosum virus
cggcacuguguccccugagc

SEQ ID NO: 3099939 - RNA, 22 nt, Molluscum contagiosum virus
acggcaaguuccuggugugcca

SEQ ID NO: 3099940 - RNA, 15 nt, Molluscum contagiosum virus
guaccccgcaggaaa

SEQ ID NO: 3099941 - RNA, 19 nt, Molluscum contagiosum virus
aucugcgugacccucuucg

SEQ ID NO: 3099942 - RNA, 21 nt, Molluscum contagiosum virus
ugccaggcggucuuccagcac

SEQ ID NO: 3099943 - RNA, 23 nt, Molluscum contagiosum virus
gugccgcuccuucgaagaggucu

SEQ ID NO: 3099944 - RNA, 17 nt, Molluscum contagiosum virus
cgccucgcgcgcacugc

SEQ ID NO: 3099945 - RNA, 17 nt, Molluscum contagiosum virus
ugacgucuuccagacgc

SEQ ID NO: 3099946 - RNA, 13 nt, Molluscum contagiosum virus
cacgcgcgcgcag

SEQ ID NO: 3099947 - RNA, 12 nt, Molluscum contagiosum virus
cacgugcugcug

SEQ ID NO: 3099948 - RNA, 13 nt, Molluscum contagiosum virus
gcacgagcgcggg

SEQ ID NO: 3099949 - RNA, 12 nt, Molluscum contagiosum virus
gccgcgaggacc

SEQ ID NO: 3099950 - RNA, 14 nt, Molluscum contagiosum virus
ugcgcuccaugcug

SEQ ID NO: 3099951 - RNA, 14 nt, Molluscum contagiosum virus
ugcgccacugccac

SEQ ID NO: 3099952 - RNA, 20 nt, Molluscum contagiosum virus
aagaggaaagcgcacacuug

SEQ ID NO: 3099953 - RNA, 12 nt, Molluscum contagiosum virus
cgugcgcgcugc

SEQ ID NO: 3099954 - RNA, 21 nt, Molluscum contagiosum virus
gugcagaugaggcugcucucc

SEQ ID NO: 3099955 - RNA, 20 nt, Molluscum contagiosum virus
aauguguacgacgcgcccac

SEQ ID NO: 3099956 - RNA, 23 nt, Molluscum contagiosum virus
gagggcagugccaagguucugga

SEQ ID NO: 3099957 - RNA, 18 nt, Molluscum contagiosum virus
gggcaggcagugccgccg

SEQ ID NO: 3099958 - RNA, 23 nt, Molluscum contagiosum virus
uacugcgcgcguugccugagaag

SEQ ID NO: 3099959 - RNA, 23 nt, Molluscum contagiosum virus
acaacguaguacugcagcagcuc

SEQ ID NO: 3099960 - RNA, 13 nt, Molluscum contagiosum virus
cgccggcucugcc

SEQ ID NO: 3099961 - RNA, 22 nt, Molluscum contagiosum virus
aaggcacccgcaggaaagguac

SEQ ID NO: 3099962 - RNA, 16 nt, Molluscum contagiosum virus
gcaacggcggcgcaag

SEQ ID NO: 3099963 - RNA, 18 nt, Molluscum contagiosum virus
caguuccaccucgagcuc

SEQ ID NO: 3099964 - RNA, 18 nt, Molluscum contagiosum virus
ccacgaacgacagcgccg

SEQ ID NO: 3099965 - RNA, 13 nt, Molluscum contagiosum virus
gccgaggcgcugc

SEQ ID NO: 3099966 - RNA, 15 nt, Molluscum contagiosum virus
cgugcucacgcugcc

SEQ ID NO: 3099967 - RNA, 13 nt, Molluscum contagiosum virus
uuccggcgcggcc

SEQ ID NO: 3099968 - RNA, 22 nt, Molluscum contagiosum virus
cgggaauaccggagacaccagc

SEQ ID NO: 3099969 - RNA, 17 nt, Molluscum contagiosum virus
gcugcagaacugccugg

SEQ ID NO: 3099970 - RNA, 17 nt, Molluscum contagiosum virus
guaccaccguggaggag

SEQ ID NO: 3099971 - RNA, 13 nt, Molluscum contagiosum virus
cuugcggcacgca

SEQ ID NO: 3099972 - RNA, 18 nt, Molluscum contagiosum virus
gcgcugcucgcgcucgcg

SEQ ID NO: 3099973 - RNA, 22 nt, Molluscum contagiosum virus
cggcgucgcgcgcgaccuccgc

SEQ ID NO: 3099974 - RNA, 22 nt, Molluscum contagiosum virus
acgcccuccucgaccugcacga

SEQ ID NO: 3099975 - RNA, 22 nt, Molluscum contagiosum virus
cacgcgguugcaauagacacgg

SEQ ID NO: 3099976 - RNA, 17 nt, Molluscum contagiosum virus
caccagcuccgccggga

SEQ ID NO: 3099977 - RNA, 18 nt, Molluscum contagiosum virus
gcugcgcgacgaggaggc

SEQ ID NO: 3099978 - RNA, 14 nt, Molluscum contagiosum virus
ccggccgaggcacg

SEQ ID NO: 3099979 - RNA, 22 nt, Molluscum contagiosum virus
cugcugcgcgccgccgacgccu

SEQ ID NO: 3099980 - RNA, 11 nt, Molluscum contagiosum virus
ugcggacaugc

SEQ ID NO: 3099981 - RNA, 14 nt, Molluscum contagiosum virus
gcacgccuccaaga

SEQ ID NO: 3099982 - RNA, 18 nt, Molluscum contagiosum virus
cgagcaugucacgcucac

SEQ ID NO: 3099983 - RNA, 15 nt, Molluscum contagiosum virus
ucccgggcggcgcgc

SEQ ID NO: 3099984 - RNA, 17 nt, Molluscum contagiosum virus
gggcaucaugagccagu

SEQ ID NO: 3099985 - RNA, 13 nt, Molluscum contagiosum virus
acaccggcgcgcu

SEQ ID NO: 3099986 - RNA, 14 nt, Molluscum contagiosum virus
gcgagcggcgcgcg

SEQ ID NO: 3099987 - RNA, 11 nt, Molluscum contagiosum virus
ucugcaagcug

SEQ ID NO: 3099988 - RNA, 17 nt, Molluscum contagiosum virus
caggaccgucaccgcag

SEQ ID NO: 3099989 - RNA, 22 nt, Molluscum contagiosum virus
cacgccgaccauuuccugcgag

SEQ ID NO: 3099990 - RNA, 14 nt, Molluscum contagiosum virus
gcccgccuccgggc

SEQ ID NO: 3099991 - RNA, 16 nt, Molluscum contagiosum virus
gccugcucucgaagca

SEQ ID NO: 3099992 - RNA, 21 nt, Molluscum contagiosum virus
ccgggcgcuccgagcggcugc

SEQ ID NO: 3099993 - RNA, 18 nt, Molluscum contagiosum virus
cuaagcgcaagccagagc

SEQ ID NO: 3099994 - RNA, 22 nt, Molluscum contagiosum virus
cacgccuggcggcagcacgggc

SEQ ID NO: 3099995 - RNA, 22 nt, Molluscum contagiosum virus
gcucuacggcgugcugugccug

SEQ ID NO: 3099996 - RNA, 20 nt, Molluscum contagiosum virus
gccgcgagcacuggcuggcg

SEQ ID NO: 3099997 - RNA, 18 nt, Molluscum contagiosum virus
agggccugcgggcggcac

SEQ ID NO: 3099998 - RNA, 20 nt, Molluscum contagiosum virus
gcgcggauauggcgcgccga

SEQ ID NO: 3099999 - RNA, 19 nt, Molluscum contagiosum virus
gggcgugacucggccgcgg

SEQ ID NO: 3100000 - RNA, 20 nt, Molluscum contagiosum virus
cgccagcgcgcccaccagca

SEQ ID NO: 3100001 - RNA, 21 nt, Molluscum contagiosum virus
uggagcccgugcuggagggca

SEQ ID NO: 3100002 - RNA, 22 nt, Molluscum contagiosum virus
gagucacgaccgacccaucgga

SEQ ID NO: 3100003 - RNA, 15 nt, Molluscum contagiosum virus
cgauguacuccacca

SEQ ID NO: 3100004 - RNA, 22 nt, Molluscum contagiosum virus
cucgcccgcgcgcgcgcgaacg

SEQ ID NO: 3100005 - RNA, 17 nt, Molluscum contagiosum virus
guccgcauccucaaccg

SEQ ID NO: 3100006 - RNA, 15 nt, Molluscum contagiosum virus
cgagcgcgcgccugc

SEQ ID NO: 3100007 - RNA, 21 nt, Molluscum contagiosum virus
gaggcgcguccgcggccggga

SEQ ID NO: 3100008 - RNA, 13 nt, Molluscum contagiosum virus
acugacugcugcc

SEQ ID NO: 3100009 - RNA, 19 nt, Molluscum contagiosum virus
gacucuggcuucuccaccu

SEQ ID NO: 3100010 - RNA, 18 nt, Molluscum contagiosum virus
cgggaugcuggacgggca

SEQ ID NO: 3100011 - RNA, 16 nt, Molluscum contagiosum virus
cuacgagcagcgcuug

SEQ ID NO: 3100012 - RNA, 22 nt, Molluscum contagiosum virus
acuccuuccggagacaccagcu

SEQ ID NO: 3100013 - RNA, 21 nt, Molluscum contagiosum virus
caagagcuuacuagacuggcu

SEQ ID NO: 3100014 - RNA, 15 nt, Molluscum contagiosum virus
gccugccgcgagcac

SEQ ID NO: 3100015 - RNA, 14 nt, Molluscum contagiosum virus
gccgccgcaggccc

SEQ ID NO: 3100016 - RNA, 21 nt, Molluscum contagiosum virus
augcccggccucgccuccggg

SEQ ID NO: 3100017 - RNA, 20 nt, Molluscum contagiosum virus
gccgcccgggaaaaucaggu

SEQ ID NO: 3100018 - RNA, 16 nt, Molluscum contagiosum virus
gccugccagcagagcu

SEQ ID NO: 3100019 - RNA, 20 nt, Molluscum contagiosum virus
aaagaccgugucugguguau

SEQ ID NO: 3100020 - RNA, 20 nt, Molluscum contagiosum virus
cagggaaaugcgggaggcuc

SEQ ID NO: 3100021 - RNA, 19 nt, Molluscum contagiosum virus
acugcugcaaucugcgcuc

SEQ ID NO: 3100022 - RNA, 21 nt, Molluscum contagiosum virus
guccacaaagcccuccugaga

SEQ ID NO: 3100023 - RNA, 21 nt, Molluscum contagiosum virus
cugccagccaucgugcgcgac

SEQ ID NO: 3100024 - RNA, 17 nt, Molluscum contagiosum virus
cagccacgaagagucgc

SEQ ID NO: 3100025 - RNA, 14 nt, Molluscum contagiosum virus
ucgcacacugcagc

SEQ ID NO: 3100026 - RNA, 13 nt, Molluscum contagiosum virus
ugguucaugcugg

SEQ ID NO: 3100027 - RNA, 19 nt, Molluscum contagiosum virus
cgcgguccuguccgcggac

SEQ ID NO: 3100028 - RNA, 16 nt, Molluscum contagiosum virus
acugagugcugagcca

SEQ ID NO: 3100029 - RNA, 15 nt, Molluscum contagiosum virus
ggccagcgugcagac

SEQ ID NO: 3100030 - RNA, 17 nt, Molluscum contagiosum virus
ccgcgugcucugcuccg

SEQ ID NO: 3100031 - RNA, 22 nt, Molluscum contagiosum virus
caggucaucgggcugcagcccu

SEQ ID NO: 3100032 - RNA, 10 nt, Molluscum contagiosum virus
augccgccgc

SEQ ID NO: 3100033 - RNA, 18 nt, Molluscum contagiosum virus
aucguuccuggccaagga

SEQ ID NO: 3100034 - RNA, 17 nt, Molluscum contagiosum virus
ggcacccuggcugcugc

SEQ ID NO: 3100035 - RNA, 16 nt, Molluscum contagiosum virus
uccucgaccugcacga

SEQ ID NO: 3100036 - RNA, 14 nt, Molluscum contagiosum virus
gaaggguguggccu

SEQ ID NO: 3100037 - RNA, 15 nt, Molluscum contagiosum virus
cucgcgcgcagggcg

SEQ ID NO: 3100038 - RNA, 21 nt, Molluscum contagiosum virus
gccagugcuuugucgcaaccc

SEQ ID NO: 3100039 - RNA, 14 nt, Molluscum contagiosum virus
cgugcgcagcacgg

SEQ ID NO: 3100040 - RNA, 19 nt, Molluscum contagiosum virus
cgcugccaacgcggaccgc

SEQ ID NO: 3100041 - RNA, 19 nt, Molluscum contagiosum virus
cggcgcgugucgcggagca

SEQ ID NO: 3100042 - RNA, 17 nt, Molluscum contagiosum virus
ugccccgcgcgugcagu

SEQ ID NO: 3100043 - RNA, 17 nt, Molluscum contagiosum virus
cgccugcacgcgcacuu

SEQ ID NO: 3100044 - RNA, 15 nt, Molluscum contagiosum virus
ccucgcggcucuggu

SEQ ID NO: 3100045 - RNA, 18 nt, Molluscum contagiosum virus
ccacgugcgcuggcccac

SEQ ID NO: 3100046 - RNA, 21 nt, Molluscum contagiosum virus
ugcagcugcaggaccugcugg

SEQ ID NO: 3100047 - RNA, 16 nt, Molluscum contagiosum virus
ggagcccuugaucgac

SEQ ID NO: 3100048 - RNA, 17 nt, Molluscum contagiosum virus
guccacgugguccacca

SEQ ID NO: 3100049 - RNA, 23 nt, Molluscum contagiosum virus
gggugaggagcucgacucgagcg

SEQ ID NO: 3100050 - RNA, 19 nt, Molluscum contagiosum virus
caagugggcgucgaccugg

SEQ ID NO: 3100051 - RNA, 15 nt, Molluscum contagiosum virus
gccggugcgugccca

SEQ ID NO: 3100052 - RNA, 18 nt, Molluscum contagiosum virus
cacggcccgggugcgcgc

SEQ ID NO: 3100053 - RNA, 15 nt, Molluscum contagiosum virus
agggcacgcugcaca

SEQ ID NO: 3100054 - RNA, 14 nt, Molluscum contagiosum virus
aggccggcacaagc

SEQ ID NO: 3100055 - RNA, 13 nt, Molluscum contagiosum virus
cgcgugccgcugc

SEQ ID NO: 3100056 - RNA, 15 nt, Molluscum contagiosum virus
cucgcgagugugcau

SEQ ID NO: 3100057 - RNA, 18 nt, Molluscum contagiosum virus
cgcuggagcuggcugggc

SEQ ID NO: 3100058 - RNA, 14 nt, Molluscum contagiosum virus
ucgaggugugccug

SEQ ID NO: 3100059 - RNA, 22 nt, Molluscum contagiosum virus
gcagugccgccgcgcaaaagca

SEQ ID NO: 3100060 - RNA, 13 nt, Molluscum contagiosum virus
uucguaaagcugg

SEQ ID NO: 3100061 - RNA, 20 nt, Molluscum contagiosum virus
gccgcgccuugagcgcgccg

SEQ ID NO: 3100062 - RNA, 14 nt, Molluscum contagiosum virus
augcucgagccugc

SEQ ID NO: 3100063 - RNA, 16 nt, Molluscum contagiosum virus
gaccuacuccuggcca

SEQ ID NO: 3100064 - RNA, 15 nt, Molluscum contagiosum virus
uccucuuggccccuc

SEQ ID NO: 3100065 - RNA, 17 nt, Molluscum contagiosum virus
cgaugcccagcagcgag

SEQ ID NO: 3100066 - RNA, 13 nt, Molluscum contagiosum virus
cuggccucugcca

SEQ ID NO: 3100067 - RNA, 14 nt, Molluscum contagiosum virus
cgcgugcaggaacg

SEQ ID NO: 3100068 - RNA, 13 nt, Molluscum contagiosum virus
guugccugcacug

SEQ ID NO: 3100069 - RNA, 12 nt, Molluscum contagiosum virus
agacaccagcuc

SEQ ID NO: 3100070 - RNA, 14 nt, Molluscum contagiosum virus
ggcaagaggggagc

SEQ ID NO: 3100071 - RNA, 16 nt, Molluscum contagiosum virus
gcugcgcggcgccgca

SEQ ID NO: 3100072 - RNA, 15 nt, Molluscum contagiosum virus
cgaaaucgcaaagca

SEQ ID NO: 3100073 - RNA, 14 nt, Molluscum contagiosum virus
agaggccagcacaa

SEQ ID NO: 3100074 - RNA, 19 nt, Molluscum contagiosum virus
gcugcuccccgccagcacc

SEQ ID NO: 3100075 - RNA, 16 nt, Molluscum contagiosum virus
gcaucagcaacaagcu

SEQ ID NO: 3100076 - RNA, 19 nt, Molluscum contagiosum virus
ccuuugcgcugucucuccg

SEQ ID NO: 3100077 - RNA, 16 nt, Molluscum contagiosum virus
cacgcgucgcgcgccg

SEQ ID NO: 3100078 - RNA, 13 nt, Molluscum contagiosum virus
gcucgcugccugg

SEQ ID NO: 3100079 - RNA, 12 nt, Molluscum contagiosum virus
acagcugcugcu

SEQ ID NO: 3100080 - RNA, 23 nt, Molluscum contagiosum virus
augucgcgacggagauggacaca

SEQ ID NO: 3100081 - RNA, 17 nt, Molluscum contagiosum virus
gggccgcgaggcauguc

SEQ ID NO: 3100082 - RNA, 17 nt, Molluscum contagiosum virus
uuccggugccggccgcc

SEQ ID NO: 3100083 - RNA, 14 nt, Molluscum contagiosum virus
gaccaaggagggag

SEQ ID NO: 3100084 - RNA, 18 nt, Molluscum contagiosum virus
gaucccugcccgcgugag

SEQ ID NO: 3100085 - RNA, 16 nt, Molluscum contagiosum virus
gcgcgcugcacaccga

SEQ ID NO: 3100086 - RNA, 18 nt, Molluscum contagiosum virus
ggcacccgcaacaaggaa

SEQ ID NO: 3100087 - RNA, 14 nt, Molluscum contagiosum virus
gggcccgccuccgg

SEQ ID NO: 3100088 - RNA, 11 nt, Molluscum contagiosum virus
aacgaccucaa

SEQ ID NO: 3100089 - RNA, 23 nt, Molluscum contagiosum virus
guccaugucgcgcaucaccgagc

SEQ ID NO: 3100090 - RNA, 17 nt, Molluscum contagiosum virus
cgagcagcugcuucucu

SEQ ID NO: 3100091 - RNA, 14 nt, Molluscum contagiosum virus
cagcagcuccagca

SEQ ID NO: 3100092 - RNA, 18 nt, Molluscum contagiosum virus
gcugggcgguugccugca

SEQ ID NO: 3100093 - RNA, 13 nt, Molluscum contagiosum virus
cacccgcgcggcu

SEQ ID NO: 3100094 - RNA, 20 nt, Molluscum contagiosum virus
ugcacgcacgcgcucuccag

SEQ ID NO: 3100095 - RNA, 18 nt, Molluscum contagiosum virus
aggagacguagagcagcg

SEQ ID NO: 3100096 - RNA, 21 nt, Molluscum contagiosum virus
gugcugucccucugugcggag

SEQ ID NO: 3100097 - RNA, 22 nt, Molluscum contagiosum virus
cugcugcccauacucgaacgca

SEQ ID NO: 3100098 - RNA, 17 nt, Molluscum contagiosum virus
cagagcgugcuggucaa

SEQ ID NO: 3100099 - RNA, 18 nt, Molluscum contagiosum virus
cggagagcuccggcugcu

SEQ ID NO: 3100100 - RNA, 22 nt, Molluscum contagiosum virus
gcugcgcuacauguaugccagc

SEQ ID NO: 3100101 - RNA, 20 nt, Molluscum contagiosum virus
gugcgcucggaggggcuccg

SEQ ID NO: 3100102 - RNA, 13 nt, Molluscum contagiosum virus
gaguguuccccaa

SEQ ID NO: 3100103 - RNA, 15 nt, Molluscum contagiosum virus
ucaacgagcgcauca

SEQ ID NO: 3100104 - RNA, 18 nt, Molluscum contagiosum virus
gcccgcgcucgccgcacg

SEQ ID NO: 3100105 - RNA, 24 nt, Molluscum contagiosum virus
gccugcggguaguugcgagccagc

SEQ ID NO: 3100106 - RNA, 15 nt, Molluscum contagiosum virus
uucgggaagcacagu

SEQ ID NO: 3100107 - RNA, 21 nt, Molluscum contagiosum virus
ccgagccaaggaugccugcca

SEQ ID NO: 3100108 - RNA, 15 nt, Molluscum contagiosum virus
agugugugcaucccu

SEQ ID NO: 3100109 - RNA, 20 nt, Molluscum contagiosum virus
uccgaccgugcccuggaccu

SEQ ID NO: 3100110 - RNA, 18 nt, Molluscum contagiosum virus
gcaaacaagcagucucau

SEQ ID NO: 3100111 - RNA, 19 nt, Molluscum contagiosum virus
gcaucggcggcagcgccag

SEQ ID NO: 3100112 - RNA, 16 nt, Molluscum contagiosum virus
uccccgaacugcuggg

SEQ ID NO: 3100113 - RNA, 22 nt, Molluscum contagiosum virus
ggcgcuaugccgcgugcucugc

SEQ ID NO: 3100114 - RNA, 15 nt, Molluscum contagiosum virus
gcuccccgcgcgcag

SEQ ID NO: 3100115 - RNA, 15 nt, Molluscum contagiosum virus
caaccgccugcucuc

SEQ ID NO: 3100116 - RNA, 19 nt, Molluscum contagiosum virus
gacacgagcaccgaacaaa

SEQ ID NO: 3100117 - RNA, 13 nt, Molluscum contagiosum virus
gcgcggggcacug

SEQ ID NO: 3100118 - RNA, 14 nt, Molluscum contagiosum virus
uugcgcguccgcaa

SEQ ID NO: 3100119 - RNA, 21 nt, Molluscum contagiosum virus
uacugccgccaggaaaacgga

SEQ ID NO: 3100120 - RNA, 17 nt, Molluscum contagiosum virus
gcucguguugugccugc

SEQ ID NO: 3100121 - RNA, 15 nt, Molluscum contagiosum virus
aucgcgcgcaccugc

SEQ ID NO: 3100122 - RNA, 15 nt, Molluscum contagiosum virus
ugcgucccagcagcu

SEQ ID NO: 3100123 - RNA, 14 nt, Molluscum contagiosum virus
gcgccgggcgcgcc

SEQ ID NO: 3100124 - RNA, 21 nt, Molluscum contagiosum virus
ugccuuggcgcccgugccgcc

SEQ ID NO: 3100125 - RNA, 14 nt, Molluscum contagiosum virus
ccggaucagccccg

SEQ ID NO: 3100126 - RNA, 20 nt, Molluscum contagiosum virus
uccgacuccuuccggagaca

SEQ ID NO: 3100127 - RNA, 22 nt, Molluscum contagiosum virus
augcugcgcgagcgcgcgcugc

SEQ ID NO: 3100128 - RNA, 17 nt, Molluscum contagiosum virus
ugcgggcgcaggcccgc

SEQ ID NO: 3100129 - RNA, 22 nt, Molluscum contagiosum virus
caggcgcggcagccgcagaugc

SEQ ID NO: 3100130 - RNA, 11 nt, Molluscum contagiosum virus
ggggcuggaca

SEQ ID NO: 3100131 - RNA, 18 nt, Molluscum contagiosum virus
cuccuccacguccaggcc

SEQ ID NO: 3100132 - RNA, 20 nt, Molluscum contagiosum virus
cuagaguacuagguggcaug

SEQ ID NO: 3100133 - RNA, 16 nt, Molluscum contagiosum virus
caucucucagggcagc

SEQ ID NO: 3100134 - RNA, 23 nt, Molluscum contagiosum virus
ccucgacgcguucuagcagcgug

SEQ ID NO: 3100135 - RNA, 12 nt, Molluscum contagiosum virus
ccaagaccuggg

SEQ ID NO: 3100136 - RNA, 13 nt, Molluscum contagiosum virus
caccggcagcgcg

SEQ ID NO: 3100137 - RNA, 20 nt, Molluscum contagiosum virus
gccgaugcagugcggaugug

SEQ ID NO: 3100138 - RNA, 15 nt, Molluscum contagiosum virus
cucagcauguugcuc

SEQ ID NO: 3100139 - RNA, 14 nt, Molluscum contagiosum virus
ugcagcgcagcagc

SEQ ID NO: 3100140 - RNA, 16 nt, Molluscum contagiosum virus
ccgcuggacgccucgg

SEQ ID NO: 3100141 - RNA, 11 nt, Molluscum contagiosum virus
gccgcaggaac

SEQ ID NO: 3100142 - RNA, 14 nt, Molluscum contagiosum virus
cacgccuccaagaa

SEQ ID NO: 3100143 - RNA, 23 nt, Molluscum contagiosum virus
gucggcccgaguauacucgacgc

SEQ ID NO: 3100144 - RNA, 23 nt, Molluscum contagiosum virus
gguugcgcggggcaggcagugcc

SEQ ID NO: 3100145 - RNA, 22 nt, Molluscum contagiosum virus
uguuuccgcucgcgcugcuucc

SEQ ID NO: 3100146 - RNA, 15 nt, Molluscum contagiosum virus
gcacgacccucuucg

SEQ ID NO: 3100147 - RNA, 15 nt, Molluscum contagiosum virus
agaccuuccuccagg

SEQ ID NO: 3100148 - RNA, 23 nt, Molluscum contagiosum virus
caaagaccacuugugaaauguug

SEQ ID NO: 3100149 - RNA, 14 nt, Molluscum contagiosum virus
ccgcgccgaaacac

SEQ ID NO: 3100150 - RNA, 19 nt, Molluscum contagiosum virus
aagcuguaccuggugcgcc

SEQ ID NO: 3100151 - RNA, 20 nt, Molluscum contagiosum virus
cugcgccaagguggccaagc

SEQ ID NO: 3100152 - RNA, 20 nt, Molluscum contagiosum virus
gaggcgcuagugcagaugag

SEQ ID NO: 3100153 - RNA, 15 nt, Molluscum contagiosum virus
cuguacgugcugccc

SEQ ID NO: 3100154 - RNA, 13 nt, Molluscum contagiosum virus
agcaaggggucug

SEQ ID NO: 3100155 - RNA, 22 nt, Molluscum contagiosum virus
ccucgagcacgccuccaagaag

SEQ ID NO: 3100156 - RNA, 23 nt, Molluscum contagiosum virus
aggaaagguaccccgcaggaaag

SEQ ID NO: 3100157 - RNA, 14 nt, Molluscum contagiosum virus
gccaugcgcuugcg

SEQ ID NO: 3100158 - RNA, 18 nt, Molluscum contagiosum virus
gugcgcgacuuggggcuc

SEQ ID NO: 3100159 - RNA, 13 nt, Molluscum contagiosum virus
uccuggugugcca

SEQ ID NO: 3100160 - RNA, 22 nt, Molluscum contagiosum virus
cggacgccggcgcccgcgugca

SEQ ID NO: 3100161 - RNA, 11 nt, Molluscum contagiosum virus
cggaggcagcg

SEQ ID NO: 3100162 - RNA, 13 nt, Molluscum contagiosum virus
aggaacgaaaguc

SEQ ID NO: 3100163 - RNA, 18 nt, Molluscum contagiosum virus
ugcuccugaucugcgugg

SEQ ID NO: 3100164 - RNA, 22 nt, Molluscum contagiosum virus
aggaaaggcacccgcaggaaag

SEQ ID NO: 3100165 - RNA, 15 nt, Molluscum contagiosum virus
aggcgcagcgcggcc

SEQ ID NO: 3100166 - RNA, 17 nt, Molluscum contagiosum virus
gcgcugcucgcgcucgc

SEQ ID NO: 3100167 - RNA, 12 nt, Molluscum contagiosum virus
cucucagcggca

SEQ ID NO: 3100168 - RNA, 13 nt, Molluscum contagiosum virus
aagcuccugcugg

SEQ ID NO: 3100169 - RNA, 22 nt, Molluscum contagiosum virus
cgcgagcacccccgcugcacgc

SEQ ID NO: 3100170 - RNA, 22 nt, Molluscum contagiosum virus
cgggccuguccgcgggcgcacg

SEQ ID NO: 3100171 - RNA, 22 nt, Molluscum contagiosum virus
ccucgcaggcgaggucacacuc

SEQ ID NO: 3100172 - RNA, 23 nt, Molluscum contagiosum virus
gcgccgcagaacacgggggcugc

SEQ ID NO: 3100173 - RNA, 14 nt, Molluscum contagiosum virus
acucgcggcaagua

SEQ ID NO: 3100174 - RNA, 17 nt, Molluscum contagiosum virus
cuccaagaagaggccag

SEQ ID NO: 3100175 - RNA, 13 nt, Molluscum contagiosum virus
gggcgagcagugu

SEQ ID NO: 3100176 - RNA, 19 nt, Molluscum contagiosum virus
cauuguaaaacgacagacc

SEQ ID NO: 3100177 - RNA, 22 nt, Molluscum contagiosum virus
gcucgaaaaaguucuuggugga

SEQ ID NO: 3100178 - RNA, 21 nt, Molluscum contagiosum virus
gcagacgacucgcugccagag

SEQ ID NO: 3100179 - RNA, 20 nt, Molluscum contagiosum virus
gccaugaacaacauggugcu

SEQ ID NO: 3100180 - RNA, 13 nt, Molluscum contagiosum virus
gguuccugcgcuc

SEQ ID NO: 3100181 - RNA, 14 nt, Molluscum contagiosum virus
gcccggcaccgcgg

SEQ ID NO: 3100182 - RNA, 13 nt, Molluscum contagiosum virus
guacacgcagagc

SEQ ID NO: 3100183 - RNA, 22 nt, Molluscum contagiosum virus
agcaggcuguguuccagcucgg

SEQ ID NO: 3100184 - RNA, 14 nt, Molluscum contagiosum virus
cggcgcgcagcgcg

SEQ ID NO: 3100185 - RNA, 20 nt, Molluscum contagiosum virus
cgaccacgugccagagucgc

SEQ ID NO: 3100186 - RNA, 20 nt, Molluscum contagiosum virus
cuagaagaccacauccuuga

SEQ ID NO: 3100187 - RNA, 14 nt, Molluscum contagiosum virus
ccuucgcgcgcgcg

SEQ ID NO: 3100188 - RNA, 22 nt, Molluscum contagiosum virus
cccguccuugcucuggcucucg

SEQ ID NO: 3100189 - RNA, 24 nt, Molluscum contagiosum virus
gugcggagggugcacgcgggcgcc

SEQ ID NO: 3100190 - RNA, 15 nt, Molluscum contagiosum virus
acaaccacagcucuc

SEQ ID NO: 3100191 - RNA, 12 nt, Molluscum contagiosum virus
gagagacagcac

SEQ ID NO: 3100192 - RNA, 18 nt, Molluscum contagiosum virus
gcuucacgugcuugcccg

SEQ ID NO: 3100193 - RNA, 18 nt, Molluscum contagiosum virus
ucccugguaguccugcua

SEQ ID NO: 3100194 - RNA, 19 nt, Molluscum contagiosum virus
aagaccugcuuccuccucc

SEQ ID NO: 3100195 - RNA, 14 nt, Molluscum contagiosum virus
ggccuguccgcgga

SEQ ID NO: 3100196 - RNA, 17 nt, Molluscum contagiosum virus
ggucuccgcgggcagcc

SEQ ID NO: 3100197 - RNA, 20 nt, Molluscum contagiosum virus
ccaaccuccugcaccugcug

SEQ ID NO: 3100198 - RNA, 13 nt, Molluscum contagiosum virus
ccuggucuucccg

SEQ ID NO: 3100199 - RNA, 15 nt, Molluscum contagiosum virus
caugccuucaggaac

SEQ ID NO: 3100200 - RNA, 16 nt, Molluscum contagiosum virus
aaauagcaugucacgc

SEQ ID NO: 3100201 - RNA, 22 nt, Molluscum contagiosum virus
cagcaaacugugcuccugagga

SEQ ID NO: 3100202 - RNA, 16 nt, Molluscum contagiosum virus
gcgcguggaguacagc

SEQ ID NO: 3100203 - RNA, 19 nt, Molluscum contagiosum virus
gccaucgaaacucugcacg

SEQ ID NO: 3100204 - RNA, 23 nt, Molluscum contagiosum virus
gcagcgccuguaccccgaacggc

SEQ ID NO: 3100205 - RNA, 23 nt, Molluscum contagiosum virus
uacgccaagaggacgagcugcua

SEQ ID NO: 3100206 - RNA, 17 nt, Molluscum contagiosum virus
caagucuucggaguggg

SEQ ID NO: 3100207 - RNA, 18 nt, Molluscum contagiosum virus
augcgguccgacucggug

SEQ ID NO: 3100208 - RNA, 19 nt, Molluscum contagiosum virus
guguaugcucgucgccggg

SEQ ID NO: 3100209 - RNA, 18 nt, Molluscum contagiosum virus
gccgcgccuagccgugcg

SEQ ID NO: 3100210 - RNA, 17 nt, Molluscum contagiosum virus
uggaacugcagcagcug

SEQ ID NO: 3100211 - RNA, 14 nt, Molluscum contagiosum virus
aucgacaagaucaa

SEQ ID NO: 3100212 - RNA, 17 nt, Molluscum contagiosum virus
gcagcagugccagcagc

SEQ ID NO: 3100213 - RNA, 18 nt, Molluscum contagiosum virus
ccauuuuuacgcuacuca

SEQ ID NO: 3100214 - RNA, 19 nt, Molluscum contagiosum virus
ugcgcucgagcuccgaggg

SEQ ID NO: 3100215 - RNA, 13 nt, Molluscum contagiosum virus
cgccagcaguccg

SEQ ID NO: 3100216 - RNA, 12 nt, Molluscum contagiosum virus
acacagggcuuc

SEQ ID NO: 3100217 - RNA, 16 nt, Molluscum contagiosum virus
gggcagcuucugcucg

SEQ ID NO: 3100218 - RNA, 21 nt, Molluscum contagiosum virus
guggccaaggucucgagcucc

SEQ ID NO: 3100219 - RNA, 16 nt, Molluscum contagiosum virus
cgugugcgggcacggc

SEQ ID NO: 3100220 - RNA, 18 nt, Molluscum contagiosum virus
ccuggcggcagcacgggc

SEQ ID NO: 3100221 - RNA, 18 nt, Molluscum contagiosum virus
gcgcgcgccugcucuccg

SEQ ID NO: 3100222 - RNA, 13 nt, Molluscum contagiosum virus
cggcacugggugc

SEQ ID NO: 3100223 - RNA, 17 nt, Molluscum contagiosum virus
ccuccagcagcggcgcg

SEQ ID NO: 3100224 - RNA, 22 nt, Molluscum contagiosum virus
cacaaacucgcagaacugcugc

SEQ ID NO: 3100225 - RNA, 16 nt, Molluscum contagiosum virus
gcgcccggcgcccgca

SEQ ID NO: 3100226 - RNA, 16 nt, Molluscum contagiosum virus
acgcgaaacuggacug

SEQ ID NO: 3100227 - RNA, 14 nt, Molluscum contagiosum virus
cgcagcuguuucug

SEQ ID NO: 3100228 - RNA, 20 nt, Molluscum contagiosum virus
gccucgccuccgggcgcaca

SEQ ID NO: 3100229 - RNA, 18 nt, Molluscum contagiosum virus
gcuucucgccagaaguca

SEQ ID NO: 3100230 - RNA, 20 nt, Molluscum contagiosum virus
acgucuggcucguacugcug

SEQ ID NO: 3100231 - RNA, 12 nt, Molluscum contagiosum virus
aguaccugggca

SEQ ID NO: 3100232 - RNA, 11 nt, Molluscum contagiosum virus
ggaggcagcgc

SEQ ID NO: 3100233 - RNA, 18 nt, Molluscum contagiosum virus
cauggacgugcugcuggc

SEQ ID NO: 3100234 - RNA, 20 nt, Molluscum contagiosum virus
cagccgagcgccgccagcuc

SEQ ID NO: 3100235 - RNA, 16 nt, Molluscum contagiosum virus
cccgggcggcgcgccg

SEQ ID NO: 3100236 - RNA, 16 nt, Molluscum contagiosum virus
ccgcaggcgcgcgcca

SEQ ID NO: 3100237 - RNA, 13 nt, Molluscum contagiosum virus
cgcgagcagcugc

SEQ ID NO: 3100238 - RNA, 22 nt, Molluscum contagiosum virus
cgccgcugcgccggcugcgcca

SEQ ID NO: 3100239 - RNA, 14 nt, Molluscum contagiosum virus
agcacgggcggaag

SEQ ID NO: 3100240 - RNA, 14 nt, Molluscum contagiosum virus
aaaaggcacacccc

SEQ ID NO: 3100241 - RNA, 16 nt, Molluscum contagiosum virus
ggucgccuacgaggug

SEQ ID NO: 3100242 - RNA, 16 nt, Molluscum contagiosum virus
gacggugugccgcugg

SEQ ID NO: 3100243 - RNA, 14 nt, Molluscum contagiosum virus
accagauguucucg

SEQ ID NO: 3100244 - RNA, 22 nt, Molluscum contagiosum virus
cuagacuucuugguggacagcc

SEQ ID NO: 3100245 - RNA, 17 nt, Molluscum contagiosum virus
caugccuuuccgagcuc

SEQ ID NO: 3100246 - RNA, 13 nt, Molluscum contagiosum virus
cggggaggagcuc

SEQ ID NO: 3100247 - RNA, 16 nt, Molluscum contagiosum virus
gcagcgcuagccccag

SEQ ID NO: 3100248 - RNA, 19 nt, Molluscum contagiosum virus
cgcucauacuccugcuggc

SEQ ID NO: 3100249 - RNA, 12 nt, Molluscum contagiosum virus
gucuacgugucc

SEQ ID NO: 3100250 - RNA, 14 nt, Molluscum contagiosum virus
agugcgugccaggc

SEQ ID NO: 3100251 - RNA, 19 nt, Molluscum contagiosum virus
gcgcuggagaaagaagugu

SEQ ID NO: 3100252 - RNA, 17 nt, Molluscum contagiosum virus
ccgacaacgugcugcuc

SEQ ID NO: 3100253 - RNA, 24 nt, Molluscum contagiosum virus
gcguccggcaugcgcgcgcugcca

SEQ ID NO: 3100254 - RNA, 17 nt, Molluscum contagiosum virus
ccagaggguggcuugcu

SEQ ID NO: 3100255 - RNA, 12 nt, Molluscum contagiosum virus
cuacgucuccuc

SEQ ID NO: 3100256 - RNA, 20 nt, Molluscum contagiosum virus
gcuccgcgcggcgcucugcc

SEQ ID NO: 3100257 - RNA, 16 nt, Molluscum contagiosum virus
cgcgcgcuacugcgcg

SEQ ID NO: 3100258 - RNA, 17 nt, Molluscum contagiosum virus
gagagacagcacggcac

SEQ ID NO: 3100259 - RNA, 15 nt, Molluscum contagiosum virus
caagaucaaccgcaa

SEQ ID NO: 3100260 - RNA, 13 nt, Molluscum contagiosum virus
gggcacgagcacg

SEQ ID NO: 3100261 - RNA, 21 nt, Molluscum contagiosum virus
gcucacguacgacugcuuuga

SEQ ID NO: 3100262 - RNA, 15 nt, Molluscum contagiosum virus
gcacgccagccugga

SEQ ID NO: 3100263 - RNA, 16 nt, Molluscum contagiosum virus
cuucaggaacaaggcc

SEQ ID NO: 3100264 - RNA, 17 nt, Molluscum contagiosum virus
cuucauccgcgcgcucu

SEQ ID NO: 3100265 - RNA, 20 nt, Molluscum contagiosum virus
cuuccuuuccgugcuugaca

SEQ ID NO: 3100266 - RNA, 19 nt, Molluscum contagiosum virus
cuucgaaggcagcgaaggc

SEQ ID NO: 3100267 - RNA, 20 nt, Molluscum contagiosum virus
cuucgacggcuucauccgcg

SEQ ID NO: 3100268 - RNA, 21 nt, Molluscum contagiosum virus
cuucgacguugacgagcgcgu

SEQ ID NO: 3100269 - RNA, 16 nt, Molluscum contagiosum virus
cuucgacuucuccgcg

SEQ ID NO: 3100270 - RNA, 19 nt, Molluscum contagiosum virus
cuucgaggaacuugcacgc

SEQ ID NO: 3100271 - RNA, 21 nt, Molluscum contagiosum virus
cuucgaggugcgcgagucgcg

SEQ ID NO: 3100272 - RNA, 23 nt, Molluscum contagiosum virus
gaccgucagccucugugcggcgc

SEQ ID NO: 3100273 - RNA, 19 nt, Molluscum contagiosum virus
cuucgcgggauacgggcgc

SEQ ID NO: 3100274 - RNA, 20 nt, Molluscum contagiosum virus
cuucgcgaaggcaaccgcga

SEQ ID NO: 3100275 - RNA, 22 nt, Molluscum contagiosum virus
cuucgcgaaggcaaccgcgacg

SEQ ID NO: 3100276 - RNA, 17 nt, Molluscum contagiosum virus
cuucgcgaugugcaccu

SEQ ID NO: 3100277 - RNA, 20 nt, Molluscum contagiosum virus
cuucaagaacgacacggagc

SEQ ID NO: 3100278 - RNA, 20 nt, Molluscum contagiosum virus
cuuagcuuccgucugcugcu

SEQ ID NO: 3100279 - RNA, 12 nt, Molluscum contagiosum virus
cuuacugcugca

SEQ ID NO: 3100280 - RNA, 16 nt, Molluscum contagiosum virus
cugugcgcgacgccug

SEQ ID NO: 3100281 - RNA, 21 nt, Molluscum contagiosum virus
cugugcgcgacgccugcuagc

SEQ ID NO: 3100282 - RNA, 21 nt, Molluscum contagiosum virus
cugugcgcgaggagacguaga

SEQ ID NO: 3100283 - RNA, 21 nt, Molluscum contagiosum virus
cuguguggaacggcucaccgc

SEQ ID NO: 3100284 - RNA, 18 nt, Molluscum contagiosum virus
cuguucggcaugcagcgc

SEQ ID NO: 3100285 - RNA, 14 nt, Molluscum contagiosum virus
cuguugcugcugcc

SEQ ID NO: 3100286 - RNA, 19 nt, Molluscum contagiosum virus
gaccucgcugcugagcccu

SEQ ID NO: 3100287 - RNA, 14 nt, Molluscum contagiosum virus
gaccugcacgaccc

SEQ ID NO: 3100288 - RNA, 17 nt, Molluscum contagiosum virus
gaccgcuagagugcgcg

SEQ ID NO: 3100289 - RNA, 15 nt, Molluscum contagiosum virus
gaccuuggugcucau

SEQ ID NO: 3100290 - RNA, 18 nt, Molluscum contagiosum virus
gacgaagagacgccaagc

SEQ ID NO: 3100291 - RNA, 13 nt, Molluscum contagiosum virus
gacgaagcugugc

SEQ ID NO: 3100292 - RNA, 19 nt, Molluscum contagiosum virus
gaccuacgaggugcugcgc

SEQ ID NO: 3100293 - RNA, 15 nt, Molluscum contagiosum virus
gaccucacagcgccg

SEQ ID NO: 3100294 - RNA, 20 nt, Molluscum contagiosum virus
gaccgcgaacugcaacguga

SEQ ID NO: 3100295 - RNA, 13 nt, Molluscum contagiosum virus
gacgacucgcugc

SEQ ID NO: 3100296 - RNA, 18 nt, Molluscum contagiosum virus
gacgagauggucacgcgc

SEQ ID NO: 3100297 - RNA, 20 nt, Molluscum contagiosum virus
gacgagcagagccgggacgc

SEQ ID NO: 3100298 - RNA, 13 nt, Molluscum contagiosum virus
gacgacggcacgc

SEQ ID NO: 3100299 - RNA, 18 nt, Molluscum contagiosum virus
gacgacggcugcucgcug

SEQ ID NO: 3100300 - RNA, 20 nt, Molluscum contagiosum virus
gacgacggcugcucgcugcc

SEQ ID NO: 3100301 - RNA, 22 nt, Molluscum contagiosum virus
gacgacaauacggugcagccgc

SEQ ID NO: 3100302 - RNA, 16 nt, Molluscum contagiosum virus
gacgacaugcacacgc

SEQ ID NO: 3100303 - RNA, 22 nt, Molluscum contagiosum virus
gacgacaugcugugcggcacgc

SEQ ID NO: 3100304 - RNA, 20 nt, Molluscum contagiosum virus
gcacgacguacgagugcugg

SEQ ID NO: 3100305 - RNA, 23 nt, Molluscum contagiosum virus
gcacgagaugggcccgcgcgcgc

SEQ ID NO: 3100306 - RNA, 13 nt, Molluscum contagiosum virus
gcacgaaggacgc

SEQ ID NO: 3100307 - RNA, 19 nt, Molluscum contagiosum virus
gcacgaaggacgcgcuugc

SEQ ID NO: 3100308 - RNA, 18 nt, Molluscum contagiosum virus
gcacgaccacgcuggcac

SEQ ID NO: 3100309 - RNA, 21 nt, Molluscum contagiosum virus
gcacgaccucacagcgccgga

SEQ ID NO: 3100310 - RNA, 20 nt, Molluscum contagiosum virus
gcacgagcaguccgccucga

SEQ ID NO: 3100311 - RNA, 17 nt, Molluscum contagiosum virus
gcacgagcugcugcccg

SEQ ID NO: 3100312 - RNA, 15 nt, Molluscum contagiosum virus
gcacgagcugcugcg

SEQ ID NO: 3100313 - RNA, 17 nt, Molluscum contagiosum virus
gcacgagcugcugcgcg

SEQ ID NO: 3100314 - RNA, 14 nt, Molluscum contagiosum virus
gcacgaggagcccc

SEQ ID NO: 3100315 - RNA, 22 nt, Molluscum contagiosum virus
gcacgaggcagccgcggcgccc

SEQ ID NO: 3100316 - RNA, 23 nt, Molluscum contagiosum virus
gcacgagggcacaggguuccgcg

SEQ ID NO: 3100317 - RNA, 14 nt, Molluscum contagiosum virus
gacgagugcgccgc

SEQ ID NO: 3100318 - RNA, 16 nt, Molluscum contagiosum virus
gacgagugcgccgcgc

SEQ ID NO: 3100319 - RNA, 14 nt, Molluscum contagiosum virus
gacgaggagcuguc

SEQ ID NO: 3100320 - RNA, 19 nt, Molluscum contagiosum virus
gacgaggccuacagcgcgc

SEQ ID NO: 3100321 - RNA, 16 nt, Molluscum contagiosum virus
gacgagcgcgugcccg

SEQ ID NO: 3100322 - RNA, 24 nt, Molluscum contagiosum virus
gacgcacagucuccacgcgugcgc

SEQ ID NO: 3100323 - RNA, 15 nt, Molluscum contagiosum virus
gacgcacuagacugu

SEQ ID NO: 3100324 - RNA, 20 nt, Molluscum contagiosum virus
gacgcagacgacgcccaagc

SEQ ID NO: 3100325 - RNA, 17 nt, Molluscum contagiosum virus
gacgcagagccaugccc

SEQ ID NO: 3100326 - RNA, 19 nt, Molluscum contagiosum virus
gacgcagcgcgagcugugc

SEQ ID NO: 3100327 - RNA, 21 nt, Molluscum contagiosum virus
gcacugccacgcggagcucgc

SEQ ID NO: 3100328 - RNA, 21 nt, Molluscum contagiosum virus
gcacuacauggacgugcugcu

SEQ ID NO: 3100329 - RNA, 20 nt, Molluscum contagiosum virus
gcacuccagcgcgcccucgc

SEQ ID NO: 3100330 - RNA, 14 nt, Molluscum contagiosum virus
gcacucgcgcucgc

SEQ ID NO: 3100331 - RNA, 17 nt, Molluscum contagiosum virus
gcacugauguuuucauu

SEQ ID NO: 3100332 - RNA, 18 nt, Molluscum contagiosum virus
gcacugcagcgagcucgc

SEQ ID NO: 3100333 - RNA, 21 nt, Molluscum contagiosum virus
gcacguuguucuugcgcgugg

SEQ ID NO: 3100334 - RNA, 17 nt, Molluscum contagiosum virus
gcacguuugcgucugcg

SEQ ID NO: 3100335 - RNA, 14 nt, Molluscum contagiosum virus
gcacggugugcuac

SEQ ID NO: 3100336 - RNA, 23 nt, Molluscum contagiosum virus
gcacgcgcgagcaugccgccgcg

SEQ ID NO: 3100337 - RNA, 14 nt, Molluscum contagiosum virus
gcacguagugcucg

SEQ ID NO: 3100338 - RNA, 20 nt, Molluscum contagiosum virus
gcacgucuucgccgugugcg

SEQ ID NO: 3100339 - RNA, 19 nt, Molluscum contagiosum virus
gcacgugccccgcgcgugc

SEQ ID NO: 3100340 - RNA, 12 nt, Molluscum contagiosum virus
gcacgugcugcu

SEQ ID NO: 3100341 - RNA, 19 nt, Molluscum contagiosum virus
gcacguggaaucacggcca

SEQ ID NO: 3100342 - RNA, 22 nt, Molluscum contagiosum virus
gcacguggagucacgaccgacc

SEQ ID NO: 3100343 - RNA, 14 nt, Molluscum contagiosum virus
gcacguggcgcugc

SEQ ID NO: 3100344 - RNA, 24 nt, Molluscum contagiosum virus
gcacgugggcuacaagugcauccg

SEQ ID NO: 3100345 - RNA, 17 nt, Molluscum contagiosum virus
gcacgugugcggagagc

SEQ ID NO: 3100346 - RNA, 19 nt, Molluscum contagiosum virus
gcacggacccgggcgcggc

SEQ ID NO: 3100347 - RNA, 22 nt, Molluscum contagiosum virus
gcacggcacgugcguacgcggc

SEQ ID NO: 3100348 - RNA, 18 nt, Molluscum contagiosum virus
gcacggcccgggugcgcg

SEQ ID NO: 3100349 - RNA, 16 nt, Molluscum contagiosum virus
gcacggccggcgccgc

SEQ ID NO: 3100350 - RNA, 17 nt, Molluscum contagiosum virus
gcacggccggcgccgcg

SEQ ID NO: 3100351 - RNA, 18 nt, Molluscum contagiosum virus
gcacggccggcgccgcgc

SEQ ID NO: 3100352 - RNA, 17 nt, Molluscum contagiosum virus
gcacggcuaggcgcggc

SEQ ID NO: 3100353 - RNA, 18 nt, Molluscum contagiosum virus
gcacggcuuccggcacca

SEQ ID NO: 3100354 - RNA, 13 nt, Molluscum contagiosum virus
gcacgggcacgcc

SEQ ID NO: 3100355 - RNA, 18 nt, Molluscum contagiosum virus
gcacgggcacgcgcgcgc

SEQ ID NO: 3100356 - RNA, 19 nt, Molluscum contagiosum virus
gcacgggccggggccucgc

SEQ ID NO: 3100357 - RNA, 18 nt, Molluscum contagiosum virus
gcacgggcucgagcucuu

SEQ ID NO: 3100358 - RNA, 20 nt, Molluscum contagiosum virus
gcacgggcucgaucugcgcc

SEQ ID NO: 3100359 - RNA, 18 nt, Molluscum contagiosum virus
gcacgcuacggcugccgg

SEQ ID NO: 3100360 - RNA, 18 nt, Molluscum contagiosum virus
gcacgcuagcgagcgccc

SEQ ID NO: 3100361 - RNA, 21 nt, Molluscum contagiosum virus
gcacgcuagcgagcgcccgug

SEQ ID NO: 3100362 - RNA, 20 nt, Molluscum contagiosum virus
gcacgcucauacuccugcug

SEQ ID NO: 3100363 - RNA, 17 nt, Molluscum contagiosum virus
gcacgcucggcacucgc

SEQ ID NO: 3100364 - RNA, 22 nt, Molluscum contagiosum virus
gcacgcucuacggcgugcugug

SEQ ID NO: 3100365 - RNA, 18 nt, Molluscum contagiosum virus
gcacgcugagcaagcuca

SEQ ID NO: 3100366 - RNA, 19 nt, Molluscum contagiosum virus
gcacgcugcugcgugcgcg

SEQ ID NO: 3100367 - RNA, 15 nt, Molluscum contagiosum virus
gcacgcuuguccgcg

SEQ ID NO: 3100368 - RNA, 17 nt, Molluscum contagiosum virus
gcacgcuuguccgcgga

SEQ ID NO: 3100369 - RNA, 18 nt, Molluscum contagiosum virus
gcacgcuugugcgcacgc

SEQ ID NO: 3100370 - RNA, 20 nt, Molluscum contagiosum virus
gcacgcuugugcgcacgcug

SEQ ID NO: 3100371 - RNA, 15 nt, Molluscum contagiosum virus
gcacgcgcgcagacg

SEQ ID NO: 3100372 - RNA, 12 nt, Molluscum contagiosum virus
gcacgcgcucgc

SEQ ID NO: 3100373 - RNA, 20 nt, Molluscum contagiosum virus
gcacgcgcucguccgccgcg

SEQ ID NO: 3100374 - RNA, 17 nt, Molluscum contagiosum virus
gcacgcauguacgcggc

SEQ ID NO: 3100375 - RNA, 22 nt, Molluscum contagiosum virus
gcacgccagguguuccugccgg

SEQ ID NO: 3100376 - RNA, 18 nt, Molluscum contagiosum virus
gacgcaggacgcggucgc

SEQ ID NO: 3100377 - RNA, 20 nt, Molluscum contagiosum virus
gacgcauagucaucaaagca

SEQ ID NO: 3100378 - RNA, 18 nt, Molluscum contagiosum virus
gcacgauggggcgcucgg

SEQ ID NO: 3100379 - RNA, 18 nt, Molluscum contagiosum virus
gcacgaugucggaaccca

SEQ ID NO: 3100380 - RNA, 13 nt, Molluscum contagiosum virus
gcacgcacgcgcu

SEQ ID NO: 3100381 - RNA, 22 nt, Molluscum contagiosum virus
gcacgcacggcccgggugcgcg

SEQ ID NO: 3100382 - RNA, 15 nt, Molluscum contagiosum virus
gcacgcacguggcgc

SEQ ID NO: 3100383 - RNA, 21 nt, Molluscum contagiosum virus
gcacgccgcucggcacugcug

SEQ ID NO: 3100384 - RNA, 18 nt, Molluscum contagiosum virus
gcacgcgaacgccuacgc

SEQ ID NO: 3100385 - RNA, 16 nt, Molluscum contagiosum virus
gcacgcgcacacgcug

SEQ ID NO: 3100386 - RNA, 17 nt, Molluscum contagiosum virus
gcacgcgcacacgcuga

SEQ ID NO: 3100387 - RNA, 16 nt, Molluscum contagiosum virus
gcacgcgcacgcgcac

SEQ ID NO: 3100388 - RNA, 15 nt, Molluscum contagiosum virus
gcacgcgcacgcgcc

SEQ ID NO: 3100389 - RNA, 18 nt, Molluscum contagiosum virus
gcacgcgcacgcucucgc

SEQ ID NO: 3100390 - RNA, 21 nt, Molluscum contagiosum virus
gcacgcgcacgggccugcgcg

SEQ ID NO: 3100391 - RNA, 12 nt, Molluscum contagiosum virus
gcagagcacgag

SEQ ID NO: 3100392 - RNA, 15 nt, Molluscum contagiosum virus
gcagagccgggacgc

SEQ ID NO: 3100393 - RNA, 15 nt, Molluscum contagiosum virus
gcagaggauacccgu

SEQ ID NO: 3100394 - RNA, 22 nt, Molluscum contagiosum virus
gcagcacaccgucgcguggugc

SEQ ID NO: 3100395 - RNA, 17 nt, Molluscum contagiosum virus
gcagaggcgcguccgcg

SEQ ID NO: 3100396 - RNA, 23 nt, Molluscum contagiosum virus
gcagacggucgacgacgcgcgca

SEQ ID NO: 3100397 - RNA, 21 nt, Molluscum contagiosum virus
gcagacguacgagcaggcgca

SEQ ID NO: 3100398 - RNA, 17 nt, Molluscum contagiosum virus
gcagaacugcugcgcgc

SEQ ID NO: 3100399 - RNA, 20 nt, Molluscum contagiosum virus
gcagaagacggaguccucga

SEQ ID NO: 3100400 - RNA, 14 nt, Molluscum contagiosum virus
gcagacaacaccag

SEQ ID NO: 3100401 - RNA, 13 nt, Molluscum contagiosum virus
gcagacacagacg

SEQ ID NO: 3100402 - RNA, 14 nt, Molluscum contagiosum virus
gcacuuccgcgcgc

SEQ ID NO: 3100403 - RNA, 15 nt, Molluscum contagiosum virus
gcacuuuggccucgc

SEQ ID NO: 3100404 - RNA, 15 nt, Molluscum contagiosum virus
gcacugccugccgcc

SEQ ID NO: 3100405 - RNA, 14 nt, Molluscum contagiosum virus
gcacugcgccaagg

SEQ ID NO: 3100406 - RNA, 13 nt, Molluscum contagiosum virus
gcacugcgcgcgc

SEQ ID NO: 3100407 - RNA, 20 nt, Molluscum contagiosum virus
gcacugcgcgucugugcgcg

SEQ ID NO: 3100408 - RNA, 17 nt, Molluscum contagiosum virus
gcacugcucgcgcacgc

SEQ ID NO: 3100409 - RNA, 17 nt, Molluscum contagiosum virus
gcacugcuggcgcgcgc

SEQ ID NO: 3100410 - RNA, 14 nt, Molluscum contagiosum virus
gcacuggcgcgcac

SEQ ID NO: 3100411 - RNA, 16 nt, Molluscum contagiosum virus
gcacuggcgcgcacgc

SEQ ID NO: 3100412 - RNA, 16 nt, Molluscum contagiosum virus
gcacuggggcgaucgc

SEQ ID NO: 3100413 - RNA, 20 nt, Molluscum contagiosum virus
gcagcauucccggcgcgcgc

SEQ ID NO: 3100414 - RNA, 21 nt, Molluscum contagiosum virus
gcagcauucccggcgcgcgcg

SEQ ID NO: 3100415 - RNA, 21 nt, Molluscum contagiosum virus
gcagcaggaugcuggugucga

SEQ ID NO: 3100416 - RNA, 19 nt, Molluscum contagiosum virus
gcagcaggugcacgugcug

SEQ ID NO: 3100417 - RNA, 21 nt, Molluscum contagiosum virus
gcagcaggugcacgugcugca

SEQ ID NO: 3100418 - RNA, 22 nt, Molluscum contagiosum virus
gcagcagaccaagaagcccgag

SEQ ID NO: 3100419 - RNA, 20 nt, Molluscum contagiosum virus
gcagcagaggaguagcgugc

SEQ ID NO: 3100420 - RNA, 14 nt, Molluscum contagiosum virus
gcagcagcgugcau

SEQ ID NO: 3100421 - RNA, 20 nt, Molluscum contagiosum virus
gcagcagcuggccggcucgc

SEQ ID NO: 3100422 - RNA, 15 nt, Molluscum contagiosum virus
gcagccacggccgcg

SEQ ID NO: 3100423 - RNA, 20 nt, Molluscum contagiosum virus
gcagccccgacgccagcgcg

SEQ ID NO: 3100424 - RNA, 19 nt, Molluscum contagiosum virus
gcagcccgugcgccugccg

SEQ ID NO: 3100425 - RNA, 18 nt, Molluscum contagiosum virus
gcagcccgacgcgggcgc

SEQ ID NO: 3100426 - RNA, 17 nt, Molluscum contagiosum virus
gcagcccgagcgcgcgu

SEQ ID NO: 3100427 - RNA, 14 nt, Molluscum contagiosum virus
gcagccgcgcucgu

SEQ ID NO: 3100428 - RNA, 20 nt, Molluscum contagiosum virus
gcagccuccgguuuucgcgg

SEQ ID NO: 3100429 - RNA, 22 nt, Molluscum contagiosum virus
gcagccuccgguuuucgcggga

SEQ ID NO: 3100430 - RNA, 13 nt, Molluscum contagiosum virus
gcagccgcugcug

SEQ ID NO: 3100431 - RNA, 15 nt, Molluscum contagiosum virus
gcagccgcuggacgc

SEQ ID NO: 3100432 - RNA, 18 nt, Molluscum contagiosum virus
cucggaggcuugccccgc

SEQ ID NO: 3100433 - RNA, 21 nt, Molluscum contagiosum virus
cucggagaagaacagcacgaa

SEQ ID NO: 3100434 - RNA, 13 nt, Molluscum contagiosum virus
cucuacgagacuc

SEQ ID NO: 3100435 - RNA, 18 nt, Molluscum contagiosum virus
cucuacgccguguaccgc

SEQ ID NO: 3100436 - RNA, 14 nt, Molluscum contagiosum virus
cucuacuuccacga

SEQ ID NO: 3100437 - RNA, 21 nt, Molluscum contagiosum virus
cucguggacagccugcaccga

SEQ ID NO: 3100438 - RNA, 15 nt, Molluscum contagiosum virus
cucgugccgccugcg

SEQ ID NO: 3100439 - RNA, 19 nt, Molluscum contagiosum virus
cucgugccuuuugcgcgcu

SEQ ID NO: 3100440 - RNA, 15 nt, Molluscum contagiosum virus
cucguggucgccgcg

SEQ ID NO: 3100441 - RNA, 17 nt, Molluscum contagiosum virus
cucgugguugcgcacgu

SEQ ID NO: 3100442 - RNA, 18 nt, Molluscum contagiosum virus
cucguguacgagaaguuc

SEQ ID NO: 3100443 - RNA, 23 nt, Molluscum contagiosum virus
cucgguuggcggcgccgcgaucu

SEQ ID NO: 3100444 - RNA, 20 nt, Molluscum contagiosum virus
cucguaaaagacgcgcucgc

SEQ ID NO: 3100445 - RNA, 16 nt, Molluscum contagiosum virus
cucggcgcgcgccgcg

SEQ ID NO: 3100446 - RNA, 23 nt, Molluscum contagiosum virus
cucggcguuggccacgaacacgg

SEQ ID NO: 3100447 - RNA, 19 nt, Molluscum contagiosum virus
cucggcugccgugcgggcg

SEQ ID NO: 3100448 - RNA, 16 nt, Molluscum contagiosum virus
cucguccggcgcucgc

SEQ ID NO: 3100449 - RNA, 22 nt, Molluscum contagiosum virus
cucgugcaugacggcgcgagcc

SEQ ID NO: 3100450 - RNA, 12 nt, Molluscum contagiosum virus
cucucgagcacu

SEQ ID NO: 3100451 - RNA, 12 nt, Molluscum contagiosum virus
cucugccgcccg

SEQ ID NO: 3100452 - RNA, 19 nt, Molluscum contagiosum virus
cucugccugcaaggagguc

SEQ ID NO: 3100453 - RNA, 16 nt, Molluscum contagiosum virus
cucucggcagcgucgc

SEQ ID NO: 3100454 - RNA, 21 nt, Molluscum contagiosum virus
cucucggcagcgucgcggagc

SEQ ID NO: 3100455 - RNA, 22 nt, Molluscum contagiosum virus
cucucggcguccgcagcggcgc

SEQ ID NO: 3100456 - RNA, 17 nt, Molluscum contagiosum virus
cucuccgagacacgcga

SEQ ID NO: 3100457 - RNA, 16 nt, Molluscum contagiosum virus
cucguucgcgggcccg

SEQ ID NO: 3100458 - RNA, 13 nt, Molluscum contagiosum virus
cucugcgcgagca

SEQ ID NO: 3100459 - RNA, 20 nt, Molluscum contagiosum virus
cucugcgcgcaagucaccgc

SEQ ID NO: 3100460 - RNA, 21 nt, Molluscum contagiosum virus
cucugcgcgcaagucaccgcu

SEQ ID NO: 3100461 - RNA, 24 nt, Molluscum contagiosum virus
cucugcguaagcgccugcacacgc

SEQ ID NO: 3100462 - RNA, 16 nt, Molluscum contagiosum virus
cucugcuccgcggagg

SEQ ID NO: 3100463 - RNA, 17 nt, Molluscum contagiosum virus
cucuggagccucccccg

SEQ ID NO: 3100464 - RNA, 19 nt, Molluscum contagiosum virus
cucuggcuugcgcuuagac

SEQ ID NO: 3100465 - RNA, 13 nt, Molluscum contagiosum virus
cugcccgcgcgag

SEQ ID NO: 3100466 - RNA, 15 nt, Molluscum contagiosum virus
cugcccgcgcgcgac

SEQ ID NO: 3100467 - RNA, 13 nt, Molluscum contagiosum virus
cugcccgcggaga

SEQ ID NO: 3100468 - RNA, 15 nt, Molluscum contagiosum virus
cugccaccgcggcgc

SEQ ID NO: 3100469 - RNA, 17 nt, Molluscum contagiosum virus
cugccagccgcucgucc

SEQ ID NO: 3100470 - RNA, 17 nt, Molluscum contagiosum virus
cugccagcucgacacug

SEQ ID NO: 3100471 - RNA, 17 nt, Molluscum contagiosum virus
cugcgagaucguggacg

SEQ ID NO: 3100472 - RNA, 12 nt, Molluscum contagiosum virus
cugcgagcagcc

SEQ ID NO: 3100473 - RNA, 18 nt, Molluscum contagiosum virus
cugcgaggcgcgcacgcu

SEQ ID NO: 3100474 - RNA, 14 nt, Molluscum contagiosum virus
cugcgaguggcgcg

SEQ ID NO: 3100475 - RNA, 15 nt, Molluscum contagiosum virus
cugcgaucgcagcag

SEQ ID NO: 3100476 - RNA, 21 nt, Molluscum contagiosum virus
cugcgaucgcgggcacgagca

SEQ ID NO: 3100477 - RNA, 17 nt, Molluscum contagiosum virus
cugcgcaccugcacgac

SEQ ID NO: 3100478 - RNA, 22 nt, Molluscum contagiosum virus
cugcgcacgcuugugcgcacgc

SEQ ID NO: 3100479 - RNA, 13 nt, Molluscum contagiosum virus
cugcgcaggugca

SEQ ID NO: 3100480 - RNA, 20 nt, Molluscum contagiosum virus
cugcgccacugccacggcug

SEQ ID NO: 3100481 - RNA, 14 nt, Molluscum contagiosum virus
cugcgccagucgcg

SEQ ID NO: 3100482 - RNA, 14 nt, Molluscum contagiosum virus
cugcgcccgcggag

SEQ ID NO: 3100483 - RNA, 21 nt, Molluscum contagiosum virus
cugccgcgccuccgagcgcgc

SEQ ID NO: 3100484 - RNA, 17 nt, Molluscum contagiosum virus
cugcccgugugcgggca

SEQ ID NO: 3100485 - RNA, 19 nt, Molluscum contagiosum virus
cugcgacagcugcugcucg

SEQ ID NO: 3100486 - RNA, 14 nt, Molluscum contagiosum virus
cugccucguggaac

SEQ ID NO: 3100487 - RNA, 15 nt, Molluscum contagiosum virus
cugucaagacgggca

SEQ ID NO: 3100488 - RNA, 12 nt, Molluscum contagiosum virus
cuguccgaggac

SEQ ID NO: 3100489 - RNA, 12 nt, Molluscum contagiosum virus
cuguccgcggac

SEQ ID NO: 3100490 - RNA, 15 nt, Molluscum contagiosum virus
cugucgccgcgggcu

SEQ ID NO: 3100491 - RNA, 17 nt, Molluscum contagiosum virus
cugucgcgcagcugcgc

SEQ ID NO: 3100492 - RNA, 14 nt, Molluscum contagiosum virus
cuggugcgcccgcg

SEQ ID NO: 3100493 - RNA, 17 nt, Molluscum contagiosum virus
cuggugcugcgcgacau

SEQ ID NO: 3100494 - RNA, 22 nt, Molluscum contagiosum virus
cuggugucgagcucgcgcgcca

SEQ ID NO: 3100495 - RNA, 15 nt, Molluscum contagiosum virus
cuguacgugcugccc

SEQ ID NO: 3100496 - RNA, 16 nt, Molluscum contagiosum virus
cuguacgugcugcccg

SEQ ID NO: 3100497 - RNA, 20 nt, Molluscum contagiosum virus
cuggucgagcaccugucgcg

SEQ ID NO: 3100498 - RNA, 19 nt, Molluscum contagiosum virus
cugugcggagggugcacgc

SEQ ID NO: 3100499 - RNA, 18 nt, Molluscum contagiosum virus
cugugcuacgcgagcacu

SEQ ID NO: 3100500 - RNA, 21 nt, Molluscum contagiosum virus
cugugcuacgcgagcacugcg

SEQ ID NO: 3100501 - RNA, 23 nt, Molluscum contagiosum virus
cugugcagaacuucucgcgagcg

SEQ ID NO: 3100502 - RNA, 23 nt, Molluscum contagiosum virus
cugugcauugcgucuuacugcug

SEQ ID NO: 3100503 - RNA, 21 nt, Molluscum contagiosum virus
cugugccuaggaggagaacuc

SEQ ID NO: 3100504 - RNA, 14 nt, Molluscum contagiosum virus
cugugccugcaaga

SEQ ID NO: 3100505 - RNA, 12 nt, Molluscum contagiosum virus
cugugagcgcgc

SEQ ID NO: 3100506 - RNA, 14 nt, Molluscum contagiosum virus
cugugagcgcgccg

SEQ ID NO: 3100507 - RNA, 18 nt, Molluscum contagiosum virus
cugugagcgcgccgcucg

SEQ ID NO: 3100508 - RNA, 22 nt, Molluscum contagiosum virus
cugucguaacaauggacacgca

SEQ ID NO: 3100509 - RNA, 23 nt, Molluscum contagiosum virus
cugucuuuuccucacgucgcugg

SEQ ID NO: 3100510 - RNA, 15 nt, Molluscum contagiosum virus
cugggcgcgccgcgc

SEQ ID NO: 3100511 - RNA, 21 nt, Molluscum contagiosum virus
cugggcgcgugcgagcggcgc

SEQ ID NO: 3100512 - RNA, 17 nt, Molluscum contagiosum virus
cugggcgucgugcaccu

SEQ ID NO: 3100513 - RNA, 17 nt, Molluscum contagiosum virus
cugggcguggcgcaccu

SEQ ID NO: 3100514 - RNA, 17 nt, Molluscum contagiosum virus
cugggaggacacgcgca

SEQ ID NO: 3100515 - RNA, 17 nt, Molluscum contagiosum virus
cugggauaacaggcgug

SEQ ID NO: 3100516 - RNA, 21 nt, Molluscum contagiosum virus
cugggcaacgcgcgcgcgcug

SEQ ID NO: 3100517 - RNA, 18 nt, Molluscum contagiosum virus
cugggcacaagcuuucuc

SEQ ID NO: 3100518 - RNA, 14 nt, Molluscum contagiosum virus
cugcucgacgggcg

SEQ ID NO: 3100519 - RNA, 15 nt, Molluscum contagiosum virus
cugcucgcgcacgcg

SEQ ID NO: 3100520 - RNA, 21 nt, Molluscum contagiosum virus
cugcucgugcccgcacacgca

SEQ ID NO: 3100521 - RNA, 17 nt, Molluscum contagiosum virus
cugcucucgcgcgccag

SEQ ID NO: 3100522 - RNA, 18 nt, Molluscum contagiosum virus
cugcucuugaugcugaac

SEQ ID NO: 3100523 - RNA, 19 nt, Molluscum contagiosum virus
cugggaacaccacacgcgc

SEQ ID NO: 3100524 - RNA, 20 nt, Molluscum contagiosum virus
cugggaacaccacacgcgcg

SEQ ID NO: 3100525 - RNA, 16 nt, Molluscum contagiosum virus
cugcuagugcgcgcca

SEQ ID NO: 3100526 - RNA, 15 nt, Molluscum contagiosum virus
cugcucaugcgcaag

SEQ ID NO: 3100527 - RNA, 18 nt, Molluscum contagiosum virus
cugcucauggucgucucc

SEQ ID NO: 3100528 - RNA, 16 nt, Molluscum contagiosum virus
cugcuccccgccagca

SEQ ID NO: 3100529 - RNA, 18 nt, Molluscum contagiosum virus
cugcuccccgccagcacc

SEQ ID NO: 3100530 - RNA, 21 nt, Molluscum contagiosum virus
cugcucgaagccuucgcagag

SEQ ID NO: 3100531 - RNA, 18 nt, Molluscum contagiosum virus
cugcggcaaccgcgcccg

SEQ ID NO: 3100532 - RNA, 20 nt, Molluscum contagiosum virus
cugcggcaaccgcgcccgcg

SEQ ID NO: 3100533 - RNA, 15 nt, Molluscum contagiosum virus
cugcugcacacaccg

SEQ ID NO: 3100534 - RNA, 18 nt, Molluscum contagiosum virus
cugcugcacacaccgcga

SEQ ID NO: 3100535 - RNA, 21 nt, Molluscum contagiosum virus
cugcugcacacaccgcgagca

SEQ ID NO: 3100536 - RNA, 16 nt, Molluscum contagiosum virus
cugcugccgcgcggca

SEQ ID NO: 3100537 - RNA, 16 nt, Molluscum contagiosum virus
cugcugcgcagcaucc

SEQ ID NO: 3100538 - RNA, 13 nt, Molluscum contagiosum virus
cugcugcgcgccg

SEQ ID NO: 3100539 - RNA, 16 nt, Molluscum contagiosum virus
cugcugcgcgcgccau

SEQ ID NO: 3100540 - RNA, 20 nt, Molluscum contagiosum virus
cugcugcgguaucuacacuc

SEQ ID NO: 3100541 - RNA, 16 nt, Molluscum contagiosum virus
cuggcucguacugcug

SEQ ID NO: 3100542 - RNA, 16 nt, Molluscum contagiosum virus
cugcgguucacgcccg

SEQ ID NO: 3100543 - RNA, 22 nt, Molluscum contagiosum virus
cugcguaagcgccugcacacgc

SEQ ID NO: 3100544 - RNA, 23 nt, Molluscum contagiosum virus
cugcguaagcgccugcacacgcg

SEQ ID NO: 3100545 - RNA, 19 nt, Molluscum contagiosum virus
cugcguacacauggccgcg

SEQ ID NO: 3100546 - RNA, 18 nt, Molluscum contagiosum virus
cugcgucacaagcaccgc

SEQ ID NO: 3100547 - RNA, 16 nt, Molluscum contagiosum virus
cugcgucucgcggccg

SEQ ID NO: 3100548 - RNA, 22 nt, Molluscum contagiosum virus
cugcguguacgacgugcugcug

SEQ ID NO: 3100549 - RNA, 12 nt, Molluscum contagiosum virus
cugcguucgagc

SEQ ID NO: 3100550 - RNA, 14 nt, Molluscum contagiosum virus
cugcguugcgcguc

SEQ ID NO: 3100551 - RNA, 16 nt, Molluscum contagiosum virus
cugcguugcgcgucau

SEQ ID NO: 3100552 - RNA, 17 nt, Molluscum contagiosum virus
cugcguugcgcgucaug

SEQ ID NO: 3100553 - RNA, 18 nt, Molluscum contagiosum virus
cugcguuuugcgcggcac

SEQ ID NO: 3100554 - RNA, 20 nt, Molluscum contagiosum virus
cugcuacaugcacagacagc

SEQ ID NO: 3100555 - RNA, 12 nt, Molluscum contagiosum virus
cugcggcgcucg

SEQ ID NO: 3100556 - RNA, 13 nt, Molluscum contagiosum virus
cugcggcucgcac

SEQ ID NO: 3100557 - RNA, 12 nt, Molluscum contagiosum virus
cugcggcugcug

SEQ ID NO: 3100558 - RNA, 14 nt, Molluscum contagiosum virus
cugcggcugcugga

SEQ ID NO: 3100559 - RNA, 22 nt, Molluscum contagiosum virus
cugcggcugcuggagcuagcgc

SEQ ID NO: 3100560 - RNA, 13 nt, Molluscum contagiosum virus
cugcgggcgccgg

SEQ ID NO: 3100561 - RNA, 15 nt, Molluscum contagiosum virus
cugcgggcgcgaccu

SEQ ID NO: 3100562 - RNA, 13 nt, Molluscum contagiosum virus
cugcgggcugccg

SEQ ID NO: 3100563 - RNA, 17 nt, Molluscum contagiosum virus
cugcgcgucugugcgcg

SEQ ID NO: 3100564 - RNA, 19 nt, Molluscum contagiosum virus
cugcgcgucugugcgcgcu

SEQ ID NO: 3100565 - RNA, 23 nt, Molluscum contagiosum virus
cugcgcguggaguacagccgcgc

SEQ ID NO: 3100566 - RNA, 15 nt, Molluscum contagiosum virus
cugcgcuccaugcug

SEQ ID NO: 3100567 - RNA, 19 nt, Molluscum contagiosum virus
cugcgcuggaugcugcucg

SEQ ID NO: 3100568 - RNA, 14 nt, Molluscum contagiosum virus
cugcgcuucgagcu

SEQ ID NO: 3100569 - RNA, 17 nt, Molluscum contagiosum virus
cugcgcuugcgcgugag

SEQ ID NO: 3100570 - RNA, 14 nt, Molluscum contagiosum virus
cugcggaacgcgca

SEQ ID NO: 3100571 - RNA, 19 nt, Molluscum contagiosum virus
cugcgccgccucaugcgcg

SEQ ID NO: 3100572 - RNA, 18 nt, Molluscum contagiosum virus
cugcgccgccugcucucg

SEQ ID NO: 3100573 - RNA, 15 nt, Molluscum contagiosum virus
cugcgcggcggcagc

SEQ ID NO: 3100574 - RNA, 14 nt, Molluscum contagiosum virus
cugcgcggcgugcg

SEQ ID NO: 3100575 - RNA, 14 nt, Molluscum contagiosum virus
cugcgcgcgccaug

SEQ ID NO: 3100576 - RNA, 14 nt, Molluscum contagiosum virus
cugcgcgcgcggcg

SEQ ID NO: 3100577 - RNA, 17 nt, Molluscum contagiosum virus
cugcgcgcgcuacugcg

SEQ ID NO: 3100578 - RNA, 18 nt, Molluscum contagiosum virus
cugcgcgcgcucgcgcag

SEQ ID NO: 3100579 - RNA, 18 nt, Molluscum contagiosum virus
cugcgcgcguugccugag

SEQ ID NO: 3100580 - RNA, 17 nt, Molluscum contagiosum virus
cugcgcgcucuggagcc

SEQ ID NO: 3100581 - RNA, 11 nt, Molluscum contagiosum virus
cugcgcggagc

SEQ ID NO: 3100582 - RNA, 18 nt, Molluscum contagiosum virus
cugcgcggcccgcgggcu

SEQ ID NO: 3100583 - RNA, 20 nt, Molluscum contagiosum virus
cugcgcgacaugcugcccgc

SEQ ID NO: 3100584 - RNA, 18 nt, Molluscum contagiosum virus
cugcgcgagacgcugcug

SEQ ID NO: 3100585 - RNA, 18 nt, Molluscum contagiosum virus
cugcgcgagcagcugcug

SEQ ID NO: 3100586 - RNA, 20 nt, Molluscum contagiosum virus
cugcgcgagccgcugcacgc

SEQ ID NO: 3100587 - RNA, 16 nt, Molluscum contagiosum virus
cugcgcgcacugcucg

SEQ ID NO: 3100588 - RNA, 16 nt, Molluscum contagiosum virus
cugcgcgccgccgacg

SEQ ID NO: 3100589 - RNA, 14 nt, Molluscum contagiosum virus
cugcgcgccgcucg

SEQ ID NO: 3100590 - RNA, 12 nt, Molluscum contagiosum virus
gccaaagccgcg

SEQ ID NO: 3100591 - RNA, 23 nt, Molluscum contagiosum virus
gcaugcgcgguccuguccgcgga

SEQ ID NO: 3100592 - RNA, 15 nt, Molluscum contagiosum virus
gcauggcgagcccuu

SEQ ID NO: 3100593 - RNA, 15 nt, Molluscum contagiosum virus
gcauggcgcgcucgc

SEQ ID NO: 3100594 - RNA, 16 nt, Molluscum contagiosum virus
gcaugucacgcgucgc

SEQ ID NO: 3100595 - RNA, 19 nt, Molluscum contagiosum virus
gcauuaaacaacacgcgcg

SEQ ID NO: 3100596 - RNA, 21 nt, Molluscum contagiosum virus
gcaugcgcccucacgugcuga

SEQ ID NO: 3100597 - RNA, 14 nt, Molluscum contagiosum virus
gcaugcgccugcac

SEQ ID NO: 3100598 - RNA, 22 nt, Molluscum contagiosum virus
gcauauaaaucauggccgcgcc

SEQ ID NO: 3100599 - RNA, 22 nt, Molluscum contagiosum virus
gcaucagagaagugcuccgcac

SEQ ID NO: 3100600 - RNA, 17 nt, Molluscum contagiosum virus
gcagugccgccgcgcgc

SEQ ID NO: 3100601 - RNA, 19 nt, Molluscum contagiosum virus
gcagugccgccgcgcgcgc

SEQ ID NO: 3100602 - RNA, 14 nt, Molluscum contagiosum virus
gcagugccgcucgc

SEQ ID NO: 3100603 - RNA, 13 nt, Molluscum contagiosum virus
gcagugcucgcac

SEQ ID NO: 3100604 - RNA, 22 nt, Molluscum contagiosum virus
gcagugcucgcacacgugcacg

SEQ ID NO: 3100605 - RNA, 16 nt, Molluscum contagiosum virus
gcaguggccgucgggc

SEQ ID NO: 3100606 - RNA, 19 nt, Molluscum contagiosum virus
gcagucgccuuccugcgcc

SEQ ID NO: 3100607 - RNA, 22 nt, Molluscum contagiosum virus
gcaguucggcgacacgcccgcg

SEQ ID NO: 3100608 - RNA, 13 nt, Molluscum contagiosum virus
gcaucgagaacgc

SEQ ID NO: 3100609 - RNA, 13 nt, Molluscum contagiosum virus
gcaucgucucgcu

SEQ ID NO: 3100610 - RNA, 20 nt, Molluscum contagiosum virus
gcaucgugcucuucgcggga

SEQ ID NO: 3100611 - RNA, 16 nt, Molluscum contagiosum virus
gcaucuccacgucggc

SEQ ID NO: 3100612 - RNA, 14 nt, Molluscum contagiosum virus
gcaucccugcgcac

SEQ ID NO: 3100613 - RNA, 20 nt, Molluscum contagiosum virus
gcauccucuccaucaucgag

SEQ ID NO: 3100614 - RNA, 16 nt, Molluscum contagiosum virus
gcauccggcacgcaca

SEQ ID NO: 3100615 - RNA, 14 nt, Molluscum contagiosum virus
gcagcuaccgcgcg

SEQ ID NO: 3100616 - RNA, 14 nt, Molluscum contagiosum virus
gcagguucucgcac

SEQ ID NO: 3100617 - RNA, 18 nt, Molluscum contagiosum virus
gcagguugaagcucucgc

SEQ ID NO: 3100618 - RNA, 19 nt, Molluscum contagiosum virus
gcagguuugcacccgcgca

SEQ ID NO: 3100619 - RNA, 18 nt, Molluscum contagiosum virus
gcaguaccggccaaggca

SEQ ID NO: 3100620 - RNA, 18 nt, Molluscum contagiosum virus
gcaguagcagcgccggca

SEQ ID NO: 3100621 - RNA, 17 nt, Molluscum contagiosum virus
gcagucaguuccgcggc

SEQ ID NO: 3100622 - RNA, 21 nt, Molluscum contagiosum virus
gcagucccagcaccgcgccgc

SEQ ID NO: 3100623 - RNA, 19 nt, Molluscum contagiosum virus
gcaguccgccgucgcccgg

SEQ ID NO: 3100624 - RNA, 13 nt, Molluscum contagiosum virus
gcagcgugccgcg

SEQ ID NO: 3100625 - RNA, 13 nt, Molluscum contagiosum virus
gcagcgugcgcac

SEQ ID NO: 3100626 - RNA, 16 nt, Molluscum contagiosum virus
gcagcggcgccacgag

SEQ ID NO: 3100627 - RNA, 14 nt, Molluscum contagiosum virus
gcagcggcgcgugc

SEQ ID NO: 3100628 - RNA, 22 nt, Molluscum contagiosum virus
gcagcggcgcgugcuccucgcg

SEQ ID NO: 3100629 - RNA, 14 nt, Molluscum contagiosum virus
gcagcgcuugcgcg

SEQ ID NO: 3100630 - RNA, 21 nt, Molluscum contagiosum virus
gcagcgcgcaaaaggcacgag

SEQ ID NO: 3100631 - RNA, 13 nt, Molluscum contagiosum virus
gcagcgcgcgcag

SEQ ID NO: 3100632 - RNA, 15 nt, Molluscum contagiosum virus
gcagcgcgcgcguag

SEQ ID NO: 3100633 - RNA, 23 nt, Molluscum contagiosum virus
gcagcgcgugacgcucacggccu

SEQ ID NO: 3100634 - RNA, 17 nt, Molluscum contagiosum virus
gcagcgcccggugcggc

SEQ ID NO: 3100635 - RNA, 18 nt, Molluscum contagiosum virus
gcagcgcccggugcggcg

SEQ ID NO: 3100636 - RNA, 13 nt, Molluscum contagiosum virus
gcagcgccgcgcg

SEQ ID NO: 3100637 - RNA, 20 nt, Molluscum contagiosum virus
gcagcgccgcgcgcgcgcgu

SEQ ID NO: 3100638 - RNA, 16 nt, Molluscum contagiosum virus
gccuuucuugcggcac

SEQ ID NO: 3100639 - RNA, 22 nt, Molluscum contagiosum virus
gccuuuguucuuagcagcgccg

SEQ ID NO: 3100640 - RNA, 20 nt, Molluscum contagiosum virus
gcgaaaccugggcgccgcgc

SEQ ID NO: 3100641 - RNA, 17 nt, Molluscum contagiosum virus
gcgaaagcgccgcgcgc

SEQ ID NO: 3100642 - RNA, 18 nt, Molluscum contagiosum virus
gcgaacacggauacgcgc

SEQ ID NO: 3100643 - RNA, 12 nt, Molluscum contagiosum virus
gcgaaccgcggc

SEQ ID NO: 3100644 - RNA, 15 nt, Molluscum contagiosum virus
gcgaaccgcggcagc

SEQ ID NO: 3100645 - RNA, 13 nt, Molluscum contagiosum virus
gcgaacgccggcg

SEQ ID NO: 3100646 - RNA, 14 nt, Molluscum contagiosum virus
gcgaacgcgcaagu

SEQ ID NO: 3100647 - RNA, 20 nt, Molluscum contagiosum virus
gcgaacgcguccacggcgcg

SEQ ID NO: 3100648 - RNA, 19 nt, Molluscum contagiosum virus
gccuucucgucgagagcgc

SEQ ID NO: 3100649 - RNA, 20 nt, Molluscum contagiosum virus
gccuucuugcuggcgcucgc

SEQ ID NO: 3100650 - RNA, 16 nt, Molluscum contagiosum virus
gccuguuuccgcucgc

SEQ ID NO: 3100651 - RNA, 19 nt, Molluscum contagiosum virus
gccuguuuccgcucgcgcu

SEQ ID NO: 3100652 - RNA, 17 nt, Molluscum contagiosum virus
gccuggcguccgcacgc

SEQ ID NO: 3100653 - RNA, 15 nt, Molluscum contagiosum virus
gccugguacaaguca

SEQ ID NO: 3100654 - RNA, 20 nt, Molluscum contagiosum virus
gccuguccgcgggcgcacgc

SEQ ID NO: 3100655 - RNA, 18 nt, Molluscum contagiosum virus
gccugugggauggcucgc

SEQ ID NO: 3100656 - RNA, 14 nt, Molluscum contagiosum virus
gccgucgacgcuga

SEQ ID NO: 3100657 - RNA, 19 nt, Molluscum contagiosum virus
gccgucgcccggcaggcuc

SEQ ID NO: 3100658 - RNA, 17 nt, Molluscum contagiosum virus
gccgucgccgcgcccgc

SEQ ID NO: 3100659 - RNA, 16 nt, Molluscum contagiosum virus
gccgucucgcgcucgc

SEQ ID NO: 3100660 - RNA, 14 nt, Molluscum contagiosum virus
gccgugagcacgag

SEQ ID NO: 3100661 - RNA, 16 nt, Molluscum contagiosum virus
gccgugagcacgagau

SEQ ID NO: 3100662 - RNA, 15 nt, Molluscum contagiosum virus
gccgugcccgccgac

SEQ ID NO: 3100663 - RNA, 18 nt, Molluscum contagiosum virus
gccgugaccuucgugcuu

SEQ ID NO: 3100664 - RNA, 12 nt, Molluscum contagiosum virus
gccgugcgcgac

SEQ ID NO: 3100665 - RNA, 16 nt, Molluscum contagiosum virus
gccguccaugugcccg

SEQ ID NO: 3100666 - RNA, 22 nt, Molluscum contagiosum virus
gccguccaugugcccgcggcgc

SEQ ID NO: 3100667 - RNA, 17 nt, Molluscum contagiosum virus
gccguccccgcgcucac

SEQ ID NO: 3100668 - RNA, 20 nt, Molluscum contagiosum virus
gccguccccggaaagcagca

SEQ ID NO: 3100669 - RNA, 19 nt, Molluscum contagiosum virus
gccguccgccucgagcacg

SEQ ID NO: 3100670 - RNA, 13 nt, Molluscum contagiosum virus
gccgucacggccg

SEQ ID NO: 3100671 - RNA, 16 nt, Molluscum contagiosum virus
gccguacccggggaga

SEQ ID NO: 3100672 - RNA, 21 nt, Molluscum contagiosum virus
gccguacccggggagaagaug

SEQ ID NO: 3100673 - RNA, 14 nt, Molluscum contagiosum virus
gccguagugcucau

SEQ ID NO: 3100674 - RNA, 12 nt, Molluscum contagiosum virus
gccggugcugcg

SEQ ID NO: 3100675 - RNA, 14 nt, Molluscum contagiosum virus
gccgguggaagagc

SEQ ID NO: 3100676 - RNA, 17 nt, Molluscum contagiosum virus
gccgguggaagagcccg

SEQ ID NO: 3100677 - RNA, 15 nt, Molluscum contagiosum virus
gcgacaacgacagag

SEQ ID NO: 3100678 - RNA, 16 nt, Molluscum contagiosum virus
gcgaccagcucuuggc

SEQ ID NO: 3100679 - RNA, 18 nt, Molluscum contagiosum virus
gcgacaugccucgcggcc

SEQ ID NO: 3100680 - RNA, 18 nt, Molluscum contagiosum virus
gcgacaugcugcccgcgc

SEQ ID NO: 3100681 - RNA, 21 nt, Molluscum contagiosum virus
gcgaauguccggcgcuggaga

SEQ ID NO: 3100682 - RNA, 22 nt, Molluscum contagiosum virus
gcgaauuggccgcggaggacuc

SEQ ID NO: 3100683 - RNA, 18 nt, Molluscum contagiosum virus
gcgacacgcccgcguccc

SEQ ID NO: 3100684 - RNA, 20 nt, Molluscum contagiosum virus
gcgaccuacgaggugcugcg

SEQ ID NO: 3100685 - RNA, 19 nt, Molluscum contagiosum virus
gcgaccuacuccuggccaa

SEQ ID NO: 3100686 - RNA, 16 nt, Molluscum contagiosum virus
gcgaccugcugcgaga

SEQ ID NO: 3100687 - RNA, 19 nt, Molluscum contagiosum virus
gcgacgagcucacgccgga

SEQ ID NO: 3100688 - RNA, 16 nt, Molluscum contagiosum virus
gcgaccuuagcgaggu

SEQ ID NO: 3100689 - RNA, 15 nt, Molluscum contagiosum virus
gcgacgacagcgacg

SEQ ID NO: 3100690 - RNA, 23 nt, Molluscum contagiosum virus
gcgacgacgacuucggcgcaacg

SEQ ID NO: 3100691 - RNA, 15 nt, Molluscum contagiosum virus
gcgacgacgagcacu

SEQ ID NO: 3100692 - RNA, 16 nt, Molluscum contagiosum virus
gcgacgacgagcacua

SEQ ID NO: 3100693 - RNA, 20 nt, Molluscum contagiosum virus
gcgacgccauuuucgugcgc

SEQ ID NO: 3100694 - RNA, 21 nt, Molluscum contagiosum virus
gcgacgccauuuucgugcgcg

SEQ ID NO: 3100695 - RNA, 15 nt, Molluscum contagiosum virus
gcgacgccccggcgc

SEQ ID NO: 3100696 - RNA, 16 nt, Molluscum contagiosum virus
gcgacggugugccgcu

SEQ ID NO: 3100697 - RNA, 12 nt, Molluscum contagiosum virus
gcgacgugcgcg

SEQ ID NO: 3100698 - RNA, 20 nt, Molluscum contagiosum virus
gcgacgugcgcgcugcgcgc

SEQ ID NO: 3100699 - RNA, 15 nt, Molluscum contagiosum virus
gcgacgccguccgcg

SEQ ID NO: 3100700 - RNA, 19 nt, Molluscum contagiosum virus
gcgacgccguccgcgcagc

SEQ ID NO: 3100701 - RNA, 17 nt, Molluscum contagiosum virus
gcgacgcgaucgugcgc

SEQ ID NO: 3100702 - RNA, 19 nt, Molluscum contagiosum virus
gcgacggaaccguggugcg

SEQ ID NO: 3100703 - RNA, 21 nt, Molluscum contagiosum virus
gcgacggaaccguggugcgcg

SEQ ID NO: 3100704 - RNA, 21 nt, Molluscum contagiosum virus
gcgacggagauggacacagca

SEQ ID NO: 3100705 - RNA, 14 nt, Molluscum contagiosum virus
gcgacggcaggccc

SEQ ID NO: 3100706 - RNA, 19 nt, Molluscum contagiosum virus
gcgacgggaaccgugcugg

SEQ ID NO: 3100707 - RNA, 17 nt, Molluscum contagiosum virus
gcgagaccgcuagagug

SEQ ID NO: 3100708 - RNA, 20 nt, Molluscum contagiosum virus
gcgagaccgcuagagugcgc

SEQ ID NO: 3100709 - RNA, 22 nt, Molluscum contagiosum virus
gcgagaccgcuagagugcgcgg

SEQ ID NO: 3100710 - RNA, 15 nt, Molluscum contagiosum virus
gcgagacgggcacgc

SEQ ID NO: 3100711 - RNA, 16 nt, Molluscum contagiosum virus
gcgagacugugccgcu

SEQ ID NO: 3100712 - RNA, 14 nt, Molluscum contagiosum virus
gcgagagcgcgcgc

SEQ ID NO: 3100713 - RNA, 17 nt, Molluscum contagiosum virus
gcgagaucaacgcgcgc

SEQ ID NO: 3100714 - RNA, 17 nt, Molluscum contagiosum virus
gcgagaucccuccgaga

SEQ ID NO: 3100715 - RNA, 13 nt, Molluscum contagiosum virus
gcgagaugcgcgg

SEQ ID NO: 3100716 - RNA, 18 nt, Molluscum contagiosum virus
gcgagaugcucgccggca

SEQ ID NO: 3100717 - RNA, 17 nt, Molluscum contagiosum virus
gcgagauucuggcgcgc

SEQ ID NO: 3100718 - RNA, 20 nt, Molluscum contagiosum virus
gcgagcaagcgcccgcgagc

SEQ ID NO: 3100719 - RNA, 15 nt, Molluscum contagiosum virus
gcgagcacagcgcgc

SEQ ID NO: 3100720 - RNA, 14 nt, Molluscum contagiosum virus
gcgagcacgccugc

SEQ ID NO: 3100721 - RNA, 14 nt, Molluscum contagiosum virus
gcgagcacgggcgc

SEQ ID NO: 3100722 - RNA, 22 nt, Molluscum contagiosum virus
gcgagcacugcgcgcgcggcgc

SEQ ID NO: 3100723 - RNA, 15 nt, Molluscum contagiosum virus
gcgagcagcugcugc

SEQ ID NO: 3100724 - RNA, 20 nt, Molluscum contagiosum virus
gcgagcagugugaugccgcg

SEQ ID NO: 3100725 - RNA, 23 nt, Molluscum contagiosum virus
gcgagcagugugaugccgcgcgu

SEQ ID NO: 3100726 - RNA, 17 nt, Molluscum contagiosum virus
gcgagcaguucgcgcgc

SEQ ID NO: 3100727 - RNA, 19 nt, Molluscum contagiosum virus
gcgagcaguucgcgcgccu

SEQ ID NO: 3100728 - RNA, 16 nt, Molluscum contagiosum virus
gcgagcaucugcgcgu

SEQ ID NO: 3100729 - RNA, 13 nt, Molluscum contagiosum virus
gcgagcaugccgc

SEQ ID NO: 3100730 - RNA, 16 nt, Molluscum contagiosum virus
gcgagcaugccgccgc

SEQ ID NO: 3100731 - RNA, 15 nt, Molluscum contagiosum virus
gcgagccacgcgcau

SEQ ID NO: 3100732 - RNA, 16 nt, Molluscum contagiosum virus
gcgcguuugucgcggg

SEQ ID NO: 3100733 - RNA, 12 nt, Molluscum contagiosum virus
gcgcuaccugau

SEQ ID NO: 3100734 - RNA, 14 nt, Molluscum contagiosum virus
gcgcuacguggcgc

SEQ ID NO: 3100735 - RNA, 17 nt, Molluscum contagiosum virus
gcgcuacuugcuggcgc

SEQ ID NO: 3100736 - RNA, 17 nt, Molluscum contagiosum virus
gcgcuagagcgcggcgc

SEQ ID NO: 3100737 - RNA, 22 nt, Molluscum contagiosum virus
gcgcuagcuccacgugccgcuc

SEQ ID NO: 3100738 - RNA, 16 nt, Molluscum contagiosum virus
gcgcuagugaaccgca

SEQ ID NO: 3100739 - RNA, 19 nt, Molluscum contagiosum virus
gcgcucacugcagcagccc

SEQ ID NO: 3100740 - RNA, 16 nt, Molluscum contagiosum virus
gcgcuauugcgcggcg

SEQ ID NO: 3100741 - RNA, 19 nt, Molluscum contagiosum virus
gcgagcccggaucagcccc

SEQ ID NO: 3100742 - RNA, 23 nt, Molluscum contagiosum virus
gcgagcccuucuuuccggcgcgg

SEQ ID NO: 3100743 - RNA, 20 nt, Molluscum contagiosum virus
gcgagcgcaugcgcgccgcg

SEQ ID NO: 3100744 - RNA, 14 nt, Molluscum contagiosum virus
gcgcgugugcagca

SEQ ID NO: 3100745 - RNA, 19 nt, Molluscum contagiosum virus
gcgcgugugcagcagguag

SEQ ID NO: 3100746 - RNA, 15 nt, Molluscum contagiosum virus
gcgcguucagcgcac

SEQ ID NO: 3100747 - RNA, 17 nt, Molluscum contagiosum virus
gcgcguucagcgcacgc

SEQ ID NO: 3100748 - RNA, 19 nt, Molluscum contagiosum virus
gcgcguucauuugcgugag

SEQ ID NO: 3100749 - RNA, 20 nt, Molluscum contagiosum virus
gcgcguucuuugugcggcuc

SEQ ID NO: 3100750 - RNA, 23 nt, Molluscum contagiosum virus
gcgcguugcucccgucgagcacg

SEQ ID NO: 3100751 - RNA, 21 nt, Molluscum contagiosum virus
gcgacgugugcucugugcgcg

SEQ ID NO: 3100752 - RNA, 13 nt, Molluscum contagiosum virus
gcgacuacgcgcu

SEQ ID NO: 3100753 - RNA, 16 nt, Molluscum contagiosum virus
gcgacuccaucugcgc

SEQ ID NO: 3100754 - RNA, 21 nt, Molluscum contagiosum virus
gcgacuccaucugcgcgacgc

SEQ ID NO: 3100755 - RNA, 21 nt, Molluscum contagiosum virus
gcgacuccuuugcgagcacug

SEQ ID NO: 3100756 - RNA, 19 nt, Molluscum contagiosum virus
gcgacuggcacgcgccgcg

SEQ ID NO: 3100757 - RNA, 17 nt, Molluscum contagiosum virus
gcgacuugcugcggagc

SEQ ID NO: 3100758 - RNA, 17 nt, Molluscum contagiosum virus
gcgacuuguagugcccg

SEQ ID NO: 3100759 - RNA, 18 nt, Molluscum contagiosum virus
gcgagaacuggcgcagca

SEQ ID NO: 3100760 - RNA, 20 nt, Molluscum contagiosum virus
gcgcucgaacgcgcgugcgc

SEQ ID NO: 3100761 - RNA, 17 nt, Molluscum contagiosum virus
gcgcucgacgcgugcau

SEQ ID NO: 3100762 - RNA, 16 nt, Molluscum contagiosum virus
gcgcucgagcuccgag

SEQ ID NO: 3100763 - RNA, 24 nt, Molluscum contagiosum virus
gcgcucgauuuaacucuagcgaga

SEQ ID NO: 3100764 - RNA, 19 nt, Molluscum contagiosum virus
gcgcucgcgcgcacgcgca

SEQ ID NO: 3100765 - RNA, 15 nt, Molluscum contagiosum virus
gcgcucgcucgcgcu

SEQ ID NO: 3100766 - RNA, 23 nt, Molluscum contagiosum virus
gcgcucgucaaugcgcacgugcu

SEQ ID NO: 3100767 - RNA, 17 nt, Molluscum contagiosum virus
gcgcucucagagcauua

SEQ ID NO: 3100768 - RNA, 13 nt, Molluscum contagiosum virus
gcgcucugccgcc

SEQ ID NO: 3100769 - RNA, 21 nt, Molluscum contagiosum virus
gcgcucuucaagaacagucgc

SEQ ID NO: 3100770 - RNA, 20 nt, Molluscum contagiosum virus
gcgcucuucguggugcucac

SEQ ID NO: 3100771 - RNA, 22 nt, Molluscum contagiosum virus
gcgcugcacaguucacggcgcu

SEQ ID NO: 3100772 - RNA, 13 nt, Molluscum contagiosum virus
gcgcugcaccgcu

SEQ ID NO: 3100773 - RNA, 18 nt, Molluscum contagiosum virus
gcgcugcacgccgccagc

SEQ ID NO: 3100774 - RNA, 14 nt, Molluscum contagiosum virus
gcgcugcagcaccu

SEQ ID NO: 3100775 - RNA, 16 nt, Molluscum contagiosum virus
gcgcugccagcucgac

SEQ ID NO: 3100776 - RNA, 14 nt, Molluscum contagiosum virus
gcgcugcccgcgca

SEQ ID NO: 3100777 - RNA, 16 nt, Molluscum contagiosum virus
gcgcugcccgcgcaca

SEQ ID NO: 3100778 - RNA, 13 nt, Molluscum contagiosum virus
gcgcugcgcaagc

SEQ ID NO: 3100779 - RNA, 16 nt, Molluscum contagiosum virus
gcgcugcgcaagcgcu

SEQ ID NO: 3100780 - RNA, 13 nt, Molluscum contagiosum virus
gcgcugcgccacu

SEQ ID NO: 3100781 - RNA, 22 nt, Molluscum contagiosum virus
gcgcugcgccacugccacggcu

SEQ ID NO: 3100782 - RNA, 12 nt, Molluscum contagiosum virus
gcgcugcgccgc

SEQ ID NO: 3100783 - RNA, 14 nt, Molluscum contagiosum virus
gcgcugcgcgcgcu

SEQ ID NO: 3100784 - RNA, 11 nt, Molluscum contagiosum virus
gcgcugcgcgg

SEQ ID NO: 3100785 - RNA, 14 nt, Molluscum contagiosum virus
gcgcugcgcggcgg

SEQ ID NO: 3100786 - RNA, 19 nt, Molluscum contagiosum virus
gcgcugcuacaagcggugc

SEQ ID NO: 3100787 - RNA, 14 nt, Molluscum contagiosum virus
gcgcugcucgcgcu

SEQ ID NO: 3100788 - RNA, 17 nt, Molluscum contagiosum virus
gcgcugcucgcgcucgc

SEQ ID NO: 3100789 - RNA, 14 nt, Molluscum contagiosum virus
gcgcugcucuucgc

SEQ ID NO: 3100790 - RNA, 20 nt, Molluscum contagiosum virus
gcgcugcugguucugcucgc

SEQ ID NO: 3100791 - RNA, 22 nt, Molluscum contagiosum virus
gcgcuggagaaagaagugugcc

SEQ ID NO: 3100792 - RNA, 16 nt, Molluscum contagiosum virus
gcgcuggaugcugcuc

SEQ ID NO: 3100793 - RNA, 16 nt, Molluscum contagiosum virus
gcgcuggcccacgcug

SEQ ID NO: 3100794 - RNA, 17 nt, Molluscum contagiosum virus
gcggcaaaggcccgcga

SEQ ID NO: 3100795 - RNA, 19 nt, Molluscum contagiosum virus
gcggcaaaggcccgcgagc

SEQ ID NO: 3100796 - RNA, 15 nt, Molluscum contagiosum virus
gcggcaacagcacga

SEQ ID NO: 3100797 - RNA, 14 nt, Molluscum contagiosum virus
gcggcaaccgcgcc

SEQ ID NO: 3100798 - RNA, 15 nt, Molluscum contagiosum virus
gcggcaaccgcgccc

SEQ ID NO: 3100799 - RNA, 16 nt, Molluscum contagiosum virus
gcggcaaccgcgcccg

SEQ ID NO: 3100800 - RNA, 21 nt, Molluscum contagiosum virus
gcggcaaccgcgcccgcgcgc

SEQ ID NO: 3100801 - RNA, 16 nt, Molluscum contagiosum virus
gcggcaacgagcacgu

SEQ ID NO: 3100802 - RNA, 16 nt, Molluscum contagiosum virus
gcggcaagccgugcuu

SEQ ID NO: 3100803 - RNA, 14 nt, Molluscum contagiosum virus
gcggcaagcuuugc

SEQ ID NO: 3100804 - RNA, 16 nt, Molluscum contagiosum virus
gcggcagcuaccgcgc

SEQ ID NO: 3100805 - RNA, 18 nt, Molluscum contagiosum virus
gcggcagcuaccgcgcgc

SEQ ID NO: 3100806 - RNA, 23 nt, Molluscum contagiosum virus
gcggcagcucugcagcgccgcgc

SEQ ID NO: 3100807 - RNA, 16 nt, Molluscum contagiosum virus
gcggcaggcgcugcgc

SEQ ID NO: 3100808 - RNA, 23 nt, Molluscum contagiosum virus
gcggcaggcgcugcgcggcgcgc

SEQ ID NO: 3100809 - RNA, 21 nt, Molluscum contagiosum virus
gcggcagguuugcacccgcgc

SEQ ID NO: 3100810 - RNA, 15 nt, Molluscum contagiosum virus
gcggcaugcgcgcgc

SEQ ID NO: 3100811 - RNA, 22 nt, Molluscum contagiosum virus
gcggcacacacuugcacgcgca

SEQ ID NO: 3100812 - RNA, 21 nt, Molluscum contagiosum virus
gcggcacacaugcuagcgggc

SEQ ID NO: 3100813 - RNA, 18 nt, Molluscum contagiosum virus
gcggccaccagcgcggcc

SEQ ID NO: 3100814 - RNA, 22 nt, Molluscum contagiosum virus
gcggccacgcacucgcuggccu

SEQ ID NO: 3100815 - RNA, 18 nt, Molluscum contagiosum virus
gcggccacgcucgcgcgc

SEQ ID NO: 3100816 - RNA, 19 nt, Molluscum contagiosum virus
gcggccacgcucgcgcgca

SEQ ID NO: 3100817 - RNA, 14 nt, Molluscum contagiosum virus
gcggcacccgccgc

SEQ ID NO: 3100818 - RNA, 19 nt, Molluscum contagiosum virus
gcggcacccgccgcggugc

SEQ ID NO: 3100819 - RNA, 19 nt, Molluscum contagiosum virus
gcgcugguuaccaagggca

SEQ ID NO: 3100820 - RNA, 14 nt, Molluscum contagiosum virus
gcgcuggcgugcgc

SEQ ID NO: 3100821 - RNA, 16 nt, Molluscum contagiosum virus
gcgcugguggaggagc

SEQ ID NO: 3100822 - RNA, 16 nt, Molluscum contagiosum virus
gcggcaccugucgcgc

SEQ ID NO: 3100823 - RNA, 18 nt, Molluscum contagiosum virus
gcggcaccugucgcgcgc

SEQ ID NO: 3100824 - RNA, 18 nt, Molluscum contagiosum virus
gcggcacgcccuggcccu

SEQ ID NO: 3100825 - RNA, 18 nt, Molluscum contagiosum virus
gcggcacgccgcucggca

SEQ ID NO: 3100826 - RNA, 15 nt, Molluscum contagiosum virus
gcggcacgcgagcgc

SEQ ID NO: 3100827 - RNA, 15 nt, Molluscum contagiosum virus
gcggcacgucguccg

SEQ ID NO: 3100828 - RNA, 14 nt, Molluscum contagiosum virus
gcggcacugcgcgc

SEQ ID NO: 3100829 - RNA, 18 nt, Molluscum contagiosum virus
gcggcacugggugcccga

SEQ ID NO: 3100830 - RNA, 22 nt, Molluscum contagiosum virus
gcggcagacaacaccagcgugc

SEQ ID NO: 3100831 - RNA, 13 nt, Molluscum contagiosum virus
gcggcagcgccag

SEQ ID NO: 3100832 - RNA, 17 nt, Molluscum contagiosum virus
gcggucaggccgggcgc

SEQ ID NO: 3100833 - RNA, 19 nt, Molluscum contagiosum virus
gcggucaggccgggcgcgg

SEQ ID NO: 3100834 - RNA, 21 nt, Molluscum contagiosum virus
gcgguccgacucggugcucau

SEQ ID NO: 3100835 - RNA, 13 nt, Molluscum contagiosum virus
gcggugcagcgcc

SEQ ID NO: 3100836 - RNA, 14 nt, Molluscum contagiosum virus
gcggugcagcgccc

SEQ ID NO: 3100837 - RNA, 20 nt, Molluscum contagiosum virus
gcgguccuguccgcggacgc

SEQ ID NO: 3100838 - RNA, 19 nt, Molluscum contagiosum virus
gcggucgacgagugcgccg

SEQ ID NO: 3100839 - RNA, 20 nt, Molluscum contagiosum virus
gcggucgcgagccacgcgca

SEQ ID NO: 3100840 - RNA, 20 nt, Molluscum contagiosum virus
gcggucucggcagcagcgug

SEQ ID NO: 3100841 - RNA, 23 nt, Molluscum contagiosum virus
gcggucugaaacacggaggagcg

SEQ ID NO: 3100842 - RNA, 22 nt, Molluscum contagiosum virus
gcggucuuccagcacugcgcca

SEQ ID NO: 3100843 - RNA, 24 nt, Molluscum contagiosum virus
gcggucuuggcaugcgugcuucac

SEQ ID NO: 3100844 - RNA, 19 nt, Molluscum contagiosum virus
gcggccauggucacgcgca

SEQ ID NO: 3100845 - RNA, 15 nt, Molluscum contagiosum virus
gcggccgcgagacgc

SEQ ID NO: 3100846 - RNA, 18 nt, Molluscum contagiosum virus
gcggccgcgcucgucggc

SEQ ID NO: 3100847 - RNA, 23 nt, Molluscum contagiosum virus
gcggccgggaucggacgcagacg

SEQ ID NO: 3100848 - RNA, 14 nt, Molluscum contagiosum virus
gcggcccgcggcgc

SEQ ID NO: 3100849 - RNA, 13 nt, Molluscum contagiosum virus
gcggcccgcgggc

SEQ ID NO: 3100850 - RNA, 21 nt, Molluscum contagiosum virus
gcggcccuucguguucgcgga

SEQ ID NO: 3100851 - RNA, 17 nt, Molluscum contagiosum virus
gcggccgagucacgccc

SEQ ID NO: 3100852 - RNA, 17 nt, Molluscum contagiosum virus
gcccgccucgucgucca

SEQ ID NO: 3100853 - RNA, 14 nt, Molluscum contagiosum virus
gcccgccugccgcg

SEQ ID NO: 3100854 - RNA, 20 nt, Molluscum contagiosum virus
gcccgccuuuguggacgcgc

SEQ ID NO: 3100855 - RNA, 19 nt, Molluscum contagiosum virus
gcccgcgagauugagagcg

SEQ ID NO: 3100856 - RNA, 22 nt, Molluscum contagiosum virus
gcccgcgcgagacuugugccca

SEQ ID NO: 3100857 - RNA, 13 nt, Molluscum contagiosum virus
gcccgcgcgcgca

SEQ ID NO: 3100858 - RNA, 13 nt, Molluscum contagiosum virus
gcccgcgcggaga

SEQ ID NO: 3100859 - RNA, 22 nt, Molluscum contagiosum virus
gcccgcggacaucgacgccaac

SEQ ID NO: 3100860 - RNA, 16 nt, Molluscum contagiosum virus
gcccgcgucgcgcgcc

SEQ ID NO: 3100861 - RNA, 14 nt, Molluscum contagiosum virus
gcccgcgugcaccc

SEQ ID NO: 3100862 - RNA, 14 nt, Molluscum contagiosum virus
gcccggaagcuugc

SEQ ID NO: 3100863 - RNA, 13 nt, Molluscum contagiosum virus
gcccgcugcgcau

SEQ ID NO: 3100864 - RNA, 23 nt, Molluscum contagiosum virus
gcccgcuggcggcgcacgcgagc

SEQ ID NO: 3100865 - RNA, 15 nt, Molluscum contagiosum virus
gcccgcggacgcgca

SEQ ID NO: 3100866 - RNA, 19 nt, Molluscum contagiosum virus
gcccgcggacucgugcacc

SEQ ID NO: 3100867 - RNA, 20 nt, Molluscum contagiosum virus
gcccgcggacucgugcacca

SEQ ID NO: 3100868 - RNA, 19 nt, Molluscum contagiosum virus
gcccgcggagaccaccgcu

SEQ ID NO: 3100869 - RNA, 15 nt, Molluscum contagiosum virus
gcccgcggcgcgcag

SEQ ID NO: 3100870 - RNA, 23 nt, Molluscum contagiosum virus
gcccgcguacacgugcacgcgca

SEQ ID NO: 3100871 - RNA, 15 nt, Molluscum contagiosum virus
gcccgcgggggcgug

SEQ ID NO: 3100872 - RNA, 20 nt, Molluscum contagiosum virus
gcccgugccgccggcgccgc

SEQ ID NO: 3100873 - RNA, 15 nt, Molluscum contagiosum virus
gcccguggugggccg

SEQ ID NO: 3100874 - RNA, 22 nt, Molluscum contagiosum virus
gcccguguucgcggagcugugc

SEQ ID NO: 3100875 - RNA, 21 nt, Molluscum contagiosum virus
gcccggcagcgacuacgcgcu

SEQ ID NO: 3100876 - RNA, 14 nt, Molluscum contagiosum virus
gcccggcgggcucu

SEQ ID NO: 3100877 - RNA, 15 nt, Molluscum contagiosum virus
gcccgguacgcucgc

SEQ ID NO: 3100878 - RNA, 18 nt, Molluscum contagiosum virus
gcccgguacgcucgcgcu

SEQ ID NO: 3100879 - RNA, 12 nt, Molluscum contagiosum virus
gcccguccuccg

SEQ ID NO: 3100880 - RNA, 16 nt, Molluscum contagiosum virus
gcccugcuagugcgcg

SEQ ID NO: 3100881 - RNA, 23 nt, Molluscum contagiosum virus
gcccuuauacaaaguugaccacc

SEQ ID NO: 3100882 - RNA, 14 nt, Molluscum contagiosum virus
gccgcccacgcuca

SEQ ID NO: 3100883 - RNA, 18 nt, Molluscum contagiosum virus
gcccuggagcgcaguccc

SEQ ID NO: 3100884 - RNA, 15 nt, Molluscum contagiosum virus
gccgccgcugccgcg

SEQ ID NO: 3100885 - RNA, 13 nt, Molluscum contagiosum virus
gccgccgcaggcc

SEQ ID NO: 3100886 - RNA, 14 nt, Molluscum contagiosum virus
gccgccgcaggccc

SEQ ID NO: 3100887 - RNA, 15 nt, Molluscum contagiosum virus
gccgccucgcgcgca

SEQ ID NO: 3100888 - RNA, 16 nt, Molluscum contagiosum virus
gccgccucgcgcgcac

SEQ ID NO: 3100889 - RNA, 23 nt, Molluscum contagiosum virus
gccgccugcucucgaagcagugc

SEQ ID NO: 3100890 - RNA, 21 nt, Molluscum contagiosum virus
gccgcgaaagcgucgugcucc

SEQ ID NO: 3100891 - RNA, 21 nt, Molluscum contagiosum virus
gccgccggggcccaugcucac

SEQ ID NO: 3100892 - RNA, 19 nt, Molluscum contagiosum virus
gccgcgcccacgggcuucg

SEQ ID NO: 3100893 - RNA, 18 nt, Molluscum contagiosum virus
gccgcgcccgcggcgcac

SEQ ID NO: 3100894 - RNA, 20 nt, Molluscum contagiosum virus
gccgcgccgcacgugcugcg

SEQ ID NO: 3100895 - RNA, 19 nt, Molluscum contagiosum virus
gccgcgagacgcagacgac

SEQ ID NO: 3100896 - RNA, 12 nt, Molluscum contagiosum virus
gccgcgagcacu

SEQ ID NO: 3100897 - RNA, 13 nt, Molluscum contagiosum virus
gccgcgagcgcgu

SEQ ID NO: 3100898 - RNA, 18 nt, Molluscum contagiosum virus
gccgcgaggacccgcgcu

SEQ ID NO: 3100899 - RNA, 21 nt, Molluscum contagiosum virus
gccgcgcaagugggcgucgac

SEQ ID NO: 3100900 - RNA, 13 nt, Molluscum contagiosum virus
gccgcgcgcgcac

SEQ ID NO: 3100901 - RNA, 20 nt, Molluscum contagiosum virus
gccgcgcgcgccagcuaugc

SEQ ID NO: 3100902 - RNA, 18 nt, Molluscum contagiosum virus
gccgcgcgcggugcugcg

SEQ ID NO: 3100903 - RNA, 13 nt, Molluscum contagiosum virus
gccgcgcgcucgc

SEQ ID NO: 3100904 - RNA, 17 nt, Molluscum contagiosum virus
gccgcgccgcugcgccg

SEQ ID NO: 3100905 - RNA, 18 nt, Molluscum contagiosum virus
gccgcgccgggcgccaga

SEQ ID NO: 3100906 - RNA, 20 nt, Molluscum contagiosum virus
gccgcgccuagccgugcgcg

SEQ ID NO: 3100907 - RNA, 22 nt, Molluscum contagiosum virus
gccgcgccuugagcgcgccgcg

SEQ ID NO: 3100908 - RNA, 17 nt, Molluscum contagiosum virus
gccgcgcucgugccgcc

SEQ ID NO: 3100909 - RNA, 13 nt, Molluscum contagiosum virus
gccgcgcucgugu

SEQ ID NO: 3100910 - RNA, 20 nt, Molluscum contagiosum virus
gccgcgcugcuccgugccca

SEQ ID NO: 3100911 - RNA, 19 nt, Molluscum contagiosum virus
gccgcggacgccggcgccc

SEQ ID NO: 3100912 - RNA, 19 nt, Molluscum contagiosum virus
gccgcggagaagugcgcag

SEQ ID NO: 3100913 - RNA, 23 nt, Molluscum contagiosum virus
gccgcggaggacucggaggccgu

SEQ ID NO: 3100914 - RNA, 22 nt, Molluscum contagiosum virus
gccgcggcacugggugcccgag

SEQ ID NO: 3100915 - RNA, 16 nt, Molluscum contagiosum virus
gccgcgcggcacgccc

SEQ ID NO: 3100916 - RNA, 17 nt, Molluscum contagiosum virus
gccggcguucgcggagc

SEQ ID NO: 3100917 - RNA, 13 nt, Molluscum contagiosum virus
gccgcggugccgg

SEQ ID NO: 3100918 - RNA, 18 nt, Molluscum contagiosum virus
gccggcucagcguggagc

SEQ ID NO: 3100919 - RNA, 15 nt, Molluscum contagiosum virus
gccggcugcgccacc

SEQ ID NO: 3100920 - RNA, 15 nt, Molluscum contagiosum virus
gccggcguccgcggc

SEQ ID NO: 3100921 - RNA, 19 nt, Molluscum contagiosum virus
gccggcguccgcggcacgc

SEQ ID NO: 3100922 - RNA, 16 nt, Molluscum contagiosum virus
gccgcggccugggcca

SEQ ID NO: 3100923 - RNA, 19 nt, Molluscum contagiosum virus
gccgguacucgugcgucac

SEQ ID NO: 3100924 - RNA, 14 nt, Molluscum contagiosum virus
gccgguacugcgga

SEQ ID NO: 3100925 - RNA, 15 nt, Molluscum contagiosum virus
gccgguacugcggac

SEQ ID NO: 3100926 - RNA, 16 nt, Molluscum contagiosum virus
gccgguacugcggaca

SEQ ID NO: 3100927 - RNA, 18 nt, Molluscum contagiosum virus
gccggucuccacguggcc

SEQ ID NO: 3100928 - RNA, 18 nt, Molluscum contagiosum virus
gccgggaaugcugcgcac

SEQ ID NO: 3100929 - RNA, 13 nt, Molluscum contagiosum virus
gccgggagagccg

SEQ ID NO: 3100930 - RNA, 15 nt, Molluscum contagiosum virus
gccgggcaccggcgc

SEQ ID NO: 3100931 - RNA, 18 nt, Molluscum contagiosum virus
gccgggcacgcccgcggu

SEQ ID NO: 3100932 - RNA, 18 nt, Molluscum contagiosum virus
gccgggccccugucgcgc

SEQ ID NO: 3100933 - RNA, 19 nt, Molluscum contagiosum virus
gccgggccugcggcggcgc

SEQ ID NO: 3100934 - RNA, 16 nt, Molluscum contagiosum virus
gucgcgccgaggacgc

SEQ ID NO: 3100935 - RNA, 13 nt, Molluscum contagiosum virus
gucgcgcgccgca

SEQ ID NO: 3100936 - RNA, 20 nt, Molluscum contagiosum virus
gucgccuacgaggugcgcga

SEQ ID NO: 3100937 - RNA, 13 nt, Molluscum contagiosum virus
gucgcgacgcgcu

SEQ ID NO: 3100938 - RNA, 11 nt, Molluscum contagiosum virus
gucgcgcacgc

SEQ ID NO: 3100939 - RNA, 19 nt, Molluscum contagiosum virus
ggacgagagggcgcgcguc

SEQ ID NO: 3100940 - RNA, 15 nt, Molluscum contagiosum virus
gcucccgcacgcacc

SEQ ID NO: 3100941 - RNA, 12 nt, Molluscum contagiosum virus
ggacgcgcaagu

SEQ ID NO: 3100942 - RNA, 13 nt, Molluscum contagiosum virus
ggacgcgcggagc

SEQ ID NO: 3100943 - RNA, 21 nt, Molluscum contagiosum virus
ggacgcggaauuggcgucagg

SEQ ID NO: 3100944 - RNA, 19 nt, Molluscum contagiosum virus
ggacgcgggcguguccgcg

SEQ ID NO: 3100945 - RNA, 15 nt, Molluscum contagiosum virus
ggacgcuugcuagca

SEQ ID NO: 3100946 - RNA, 14 nt, Molluscum contagiosum virus
ggacggagagcgcg

SEQ ID NO: 3100947 - RNA, 20 nt, Molluscum contagiosum virus
ggacggcgcgcagcgcguga

SEQ ID NO: 3100948 - RNA, 14 nt, Molluscum contagiosum virus
ggacggcgugcgcc

SEQ ID NO: 3100949 - RNA, 23 nt, Molluscum contagiosum virus
ggacgugcccuacgcgcgcgugc

SEQ ID NO: 3100950 - RNA, 17 nt, Molluscum contagiosum virus
ggacguggucgcgcgcg

SEQ ID NO: 3100951 - RNA, 16 nt, Molluscum contagiosum virus
ggacucgccgcgcgcc

SEQ ID NO: 3100952 - RNA, 14 nt, Molluscum contagiosum virus
ggagagcgcgcggc

SEQ ID NO: 3100953 - RNA, 15 nt, Molluscum contagiosum virus
ggagaggacgcgugc

SEQ ID NO: 3100954 - RNA, 15 nt, Molluscum contagiosum virus
ggagaucgccgcgca

SEQ ID NO: 3100955 - RNA, 15 nt, Molluscum contagiosum virus
ggagaugacgggcac

SEQ ID NO: 3100956 - RNA, 19 nt, Molluscum contagiosum virus
ggagcaccgcguggcgcgc

SEQ ID NO: 3100957 - RNA, 21 nt, Molluscum contagiosum virus
ggagcaccgcguggcgcgcga

SEQ ID NO: 3100958 - RNA, 20 nt, Molluscum contagiosum virus
ggagcacgccuggcggcagc

SEQ ID NO: 3100959 - RNA, 18 nt, Molluscum contagiosum virus
ggagcacuuccgcgcgcu

SEQ ID NO: 3100960 - RNA, 18 nt, Molluscum contagiosum virus
ggagcagacguacgagca

SEQ ID NO: 3100961 - RNA, 20 nt, Molluscum contagiosum virus
ggagcagacguacgagcagg

SEQ ID NO: 3100962 - RNA, 17 nt, Molluscum contagiosum virus
ggagcagccccguaggc

SEQ ID NO: 3100963 - RNA, 14 nt, Molluscum contagiosum virus
ggacuuccgcgcgc

SEQ ID NO: 3100964 - RNA, 15 nt, Molluscum contagiosum virus
ggacuuccgcgcgcu

SEQ ID NO: 3100965 - RNA, 13 nt, Molluscum contagiosum virus
ggacuucuugcgc

SEQ ID NO: 3100966 - RNA, 19 nt, Molluscum contagiosum virus
gcuagagaaccugugcgcg

SEQ ID NO: 3100967 - RNA, 13 nt, Molluscum contagiosum virus
gcuagagugcgcg

SEQ ID NO: 3100968 - RNA, 18 nt, Molluscum contagiosum virus
gcuagcaggcgucgcgca

SEQ ID NO: 3100969 - RNA, 14 nt, Molluscum contagiosum virus
gcucaagaucucgc

SEQ ID NO: 3100970 - RNA, 18 nt, Molluscum contagiosum virus
gcucaaggacuaccagcu

SEQ ID NO: 3100971 - RNA, 14 nt, Molluscum contagiosum virus
gcucaagugcgucg

SEQ ID NO: 3100972 - RNA, 22 nt, Molluscum contagiosum virus
gcucacccugcacgcuacggcu

SEQ ID NO: 3100973 - RNA, 16 nt, Molluscum contagiosum virus
gcucaguugcgacgga

SEQ ID NO: 3100974 - RNA, 21 nt, Molluscum contagiosum virus
gcucauagcccaugcgcagug

SEQ ID NO: 3100975 - RNA, 23 nt, Molluscum contagiosum virus
gcucaucaccgacacgcgcccgc

SEQ ID NO: 3100976 - RNA, 17 nt, Molluscum contagiosum virus
gcucacgcugcccgcgc

SEQ ID NO: 3100977 - RNA, 21 nt, Molluscum contagiosum virus
gcucacggacucgccgcgcgc

SEQ ID NO: 3100978 - RNA, 17 nt, Molluscum contagiosum virus
gcuccagagccgcgugc

SEQ ID NO: 3100979 - RNA, 19 nt, Molluscum contagiosum virus
gcuccagcauggcgccaca

SEQ ID NO: 3100980 - RNA, 12 nt, Molluscum contagiosum virus
gcucaugcgcgg

SEQ ID NO: 3100981 - RNA, 18 nt, Molluscum contagiosum virus
gcucauggacaugcucga

SEQ ID NO: 3100982 - RNA, 14 nt, Molluscum contagiosum virus
gcuccccgccagca

SEQ ID NO: 3100983 - RNA, 14 nt, Molluscum contagiosum virus
gcuccccgcgcgca

SEQ ID NO: 3100984 - RNA, 17 nt, Molluscum contagiosum virus
gcucccgucgagcacga

SEQ ID NO: 3100985 - RNA, 18 nt, Molluscum contagiosum virus
ggaccucaaggaggcgug

SEQ ID NO: 3100986 - RNA, 20 nt, Molluscum contagiosum virus
ggaccucaaggaggcgugcg

SEQ ID NO: 3100987 - RNA, 14 nt, Molluscum contagiosum virus
ggaccucgcgcgcc

SEQ ID NO: 3100988 - RNA, 14 nt, Molluscum contagiosum virus
ggaccugcgccagc

SEQ ID NO: 3100989 - RNA, 19 nt, Molluscum contagiosum virus
ggaccugcugguggugcug

SEQ ID NO: 3100990 - RNA, 13 nt, Molluscum contagiosum virus
gcuacguggcgcg

SEQ ID NO: 3100991 - RNA, 13 nt, Molluscum contagiosum virus
gcuacguuccgcg

SEQ ID NO: 3100992 - RNA, 16 nt, Molluscum contagiosum virus
gcuacguuccgcgcgg

SEQ ID NO: 3100993 - RNA, 18 nt, Molluscum contagiosum virus
gcuacugcaacguggcgc

SEQ ID NO: 3100994 - RNA, 14 nt, Molluscum contagiosum virus
gcuacugcgcgcgu

SEQ ID NO: 3100995 - RNA, 13 nt, Molluscum contagiosum virus
gcuacuggccgcg

SEQ ID NO: 3100996 - RNA, 17 nt, Molluscum contagiosum virus
gcuacuuggacgcgauc

SEQ ID NO: 3100997 - RNA, 22 nt, Molluscum contagiosum virus
gcuagccgccgcugccgcgcgc

SEQ ID NO: 3100998 - RNA, 18 nt, Molluscum contagiosum virus
gcuagcgugugccgccgc

SEQ ID NO: 3100999 - RNA, 19 nt, Molluscum contagiosum virus
gcuagcuccacgugccgcu

SEQ ID NO: 3101000 - RNA, 15 nt, Molluscum contagiosum virus
gcuagcucugcgcgc

SEQ ID NO: 3101001 - RNA, 17 nt, Molluscum contagiosum virus
gcuagcucuggcagccc

SEQ ID NO: 3101002 - RNA, 19 nt, Molluscum contagiosum virus
gcuagcucuggcagcccgu

SEQ ID NO: 3101003 - RNA, 15 nt, Molluscum contagiosum virus
gcuaggggugccgcu

SEQ ID NO: 3101004 - RNA, 21 nt, Molluscum contagiosum virus
gcuaggggugccgcugcgcug

SEQ ID NO: 3101005 - RNA, 19 nt, Molluscum contagiosum virus
gcuaggguccaccugcgac

SEQ ID NO: 3101006 - RNA, 12 nt, Molluscum contagiosum virus
gcuaguccgcgu

SEQ ID NO: 3101007 - RNA, 23 nt, Molluscum contagiosum virus
gcuaguccgcguacagcgcgcgu

SEQ ID NO: 3101008 - RNA, 17 nt, Molluscum contagiosum virus
gcuagugccgagcucgc

SEQ ID NO: 3101009 - RNA, 15 nt, Molluscum contagiosum virus
gcuaguggcgcucgc

SEQ ID NO: 3101010 - RNA, 19 nt, Molluscum contagiosum virus
gcguaguaguagcgcucgc

SEQ ID NO: 3101011 - RNA, 22 nt, Molluscum contagiosum virus
gcgucaagacucgcccgcgcgc

SEQ ID NO: 3101012 - RNA, 21 nt, Molluscum contagiosum virus
gcgucaagaucaaccgcaagg

SEQ ID NO: 3101013 - RNA, 14 nt, Molluscum contagiosum virus
gcgucaccaccgcu

SEQ ID NO: 3101014 - RNA, 15 nt, Molluscum contagiosum virus
gcgucaugcgcgcgc

SEQ ID NO: 3101015 - RNA, 18 nt, Molluscum contagiosum virus
gcgucaugcgcgcgcgcu

SEQ ID NO: 3101016 - RNA, 15 nt, Molluscum contagiosum virus
gcguccacggcgcgc

SEQ ID NO: 3101017 - RNA, 14 nt, Molluscum contagiosum virus
gcuacgcgagcacu

SEQ ID NO: 3101018 - RNA, 15 nt, Molluscum contagiosum virus
gcuacgcgagcacug

SEQ ID NO: 3101019 - RNA, 17 nt, Molluscum contagiosum virus
gcuacgcgcucuacgcu

SEQ ID NO: 3101020 - RNA, 19 nt, Molluscum contagiosum virus
gcguacgugcacguggcgc

SEQ ID NO: 3101021 - RNA, 19 nt, Molluscum contagiosum virus
gcguaccaagccgugacgc

SEQ ID NO: 3101022 - RNA, 18 nt, Molluscum contagiosum virus
gcguacgcgccggggcgc

SEQ ID NO: 3101023 - RNA, 18 nt, Molluscum contagiosum virus
gcguacgcgucgcggagg

SEQ ID NO: 3101024 - RNA, 14 nt, Molluscum contagiosum virus
gcguacgcgugcgc

SEQ ID NO: 3101025 - RNA, 20 nt, Molluscum contagiosum virus
gcguacgcgugcgcuggcgc

SEQ ID NO: 3101026 - RNA, 21 nt, Molluscum contagiosum virus
gcguacucaacgcgauggcgc

SEQ ID NO: 3101027 - RNA, 16 nt, Molluscum contagiosum virus
gcguacuccguggugc

SEQ ID NO: 3101028 - RNA, 21 nt, Molluscum contagiosum virus
gcguagagcaauacguggcgc

SEQ ID NO: 3101029 - RNA, 15 nt, Molluscum contagiosum virus
gcguagcaugcucgu

SEQ ID NO: 3101030 - RNA, 13 nt, Molluscum contagiosum virus
gcguagccgccgc

SEQ ID NO: 3101031 - RNA, 21 nt, Molluscum contagiosum virus
gcguagcggacgaagcugugc

SEQ ID NO: 3101032 - RNA, 18 nt, Molluscum contagiosum virus
gcguagcuagcucugcgc

SEQ ID NO: 3101033 - RNA, 20 nt, Molluscum contagiosum virus
gcguagcuagcucugcgcgc

SEQ ID NO: 3101034 - RNA, 21 nt, Molluscum contagiosum virus
gcgguuguagcgguugaccag

SEQ ID NO: 3101035 - RNA, 14 nt, Molluscum contagiosum virus
gcguaacagcgcgc

SEQ ID NO: 3101036 - RNA, 20 nt, Molluscum contagiosum virus
gcguaaugcuggcgcguccg

SEQ ID NO: 3101037 - RNA, 20 nt, Molluscum contagiosum virus
gcguacacauggccgcgcgc

SEQ ID NO: 3101038 - RNA, 13 nt, Molluscum contagiosum virus
gcguacagcgcgc

SEQ ID NO: 3101039 - RNA, 20 nt, Molluscum contagiosum virus
gcguacagcgcgcgugccgc

SEQ ID NO: 3101040 - RNA, 21 nt, Molluscum contagiosum virus
gcguacaucccgcacgugggc

SEQ ID NO: 3101041 - RNA, 16 nt, Molluscum contagiosum virus
gcguacauccgcgagc

SEQ ID NO: 3101042 - RNA, 22 nt, Molluscum contagiosum virus
gcgguguaugcucgucgccggg

SEQ ID NO: 3101043 - RNA, 14 nt, Molluscum contagiosum virus
gcggccguggcugc

SEQ ID NO: 3101044 - RNA, 16 nt, Molluscum contagiosum virus
gcggugcgugcgggag

SEQ ID NO: 3101045 - RNA, 14 nt, Molluscum contagiosum virus
gcgguggcaggcgc

SEQ ID NO: 3101046 - RNA, 20 nt, Molluscum contagiosum virus
gcgguggccgcgccgggcgc

SEQ ID NO: 3101047 - RNA, 19 nt, Molluscum contagiosum virus
guacaauacaccuuucauu

SEQ ID NO: 3101048 - RNA, 23 nt, Molluscum contagiosum virus
guacaauacaccuuucauucgcu

SEQ ID NO: 3101049 - RNA, 22 nt, Molluscum contagiosum virus
guacaauacccgcuuccgcggc

SEQ ID NO: 3101050 - RNA, 19 nt, Molluscum contagiosum virus
guacacauggccgcgcgcu

SEQ ID NO: 3101051 - RNA, 14 nt, Molluscum contagiosum virus
guaacagcgcgcga

SEQ ID NO: 3101052 - RNA, 19 nt, Molluscum contagiosum virus
guaaccaugaagaugucgc

SEQ ID NO: 3101053 - RNA, 19 nt, Molluscum contagiosum virus
guaccaccguggaggagcc

SEQ ID NO: 3101054 - RNA, 22 nt, Molluscum contagiosum virus
guaccagcucgcgccgccgcgc

SEQ ID NO: 3101055 - RNA, 17 nt, Molluscum contagiosum virus
guacagcuccccgcgca

SEQ ID NO: 3101056 - RNA, 13 nt, Molluscum contagiosum virus
guacagugcgcgc

SEQ ID NO: 3101057 - RNA, 14 nt, Molluscum contagiosum virus
guacagugcgcgca

SEQ ID NO: 3101058 - RNA, 15 nt, Molluscum contagiosum virus
guacauccgcgagca

SEQ ID NO: 3101059 - RNA, 18 nt, Molluscum contagiosum virus
guacaucgacuacgcgcu

SEQ ID NO: 3101060 - RNA, 17 nt, Molluscum contagiosum virus
guaccgccgcggccgcg

SEQ ID NO: 3101061 - RNA, 12 nt, Molluscum contagiosum virus
guaccgcgcgca

SEQ ID NO: 3101062 - RNA, 14 nt, Molluscum contagiosum virus
guaccgugcgcgug

SEQ ID NO: 3101063 - RNA, 22 nt, Molluscum contagiosum virus
guaccugggcaggccgcccacg

SEQ ID NO: 3101064 - RNA, 16 nt, Molluscum contagiosum virus
guacgacgguuuccgc

SEQ ID NO: 3101065 - RNA, 15 nt, Molluscum contagiosum virus
guacgacgugcugcu

SEQ ID NO: 3101066 - RNA, 22 nt, Molluscum contagiosum virus
guacgagcagcugcugcgcacg

SEQ ID NO: 3101067 - RNA, 16 nt, Molluscum contagiosum virus
guacgcacgugccgug

SEQ ID NO: 3101068 - RNA, 20 nt, Molluscum contagiosum virus
gguugccaggcacacgcagu

SEQ ID NO: 3101069 - RNA, 22 nt, Molluscum contagiosum virus
gguugcccgccugccgcgagca

SEQ ID NO: 3101070 - RNA, 14 nt, Molluscum contagiosum virus
gguugccgcucgca

SEQ ID NO: 3101071 - RNA, 17 nt, Molluscum contagiosum virus
ggagcugcgcgagacgc

SEQ ID NO: 3101072 - RNA, 15 nt, Molluscum contagiosum virus
ggagcugcgcgcgcu

SEQ ID NO: 3101073 - RNA, 18 nt, Molluscum contagiosum virus
gguuccgagguagcucca

SEQ ID NO: 3101074 - RNA, 18 nt, Molluscum contagiosum virus
gguuccggugucagcccc

SEQ ID NO: 3101075 - RNA, 12 nt, Molluscum contagiosum virus
ggagccgcggca

SEQ ID NO: 3101076 - RNA, 17 nt, Molluscum contagiosum virus
ggagccucccccgcgca

SEQ ID NO: 3101077 - RNA, 22 nt, Molluscum contagiosum virus
ggagccaagcaacggcggcgca

SEQ ID NO: 3101078 - RNA, 22 nt, Molluscum contagiosum virus
ggagcccacguugccgcgcgcu

SEQ ID NO: 3101079 - RNA, 13 nt, Molluscum contagiosum virus
ggacuuuucgcgc

SEQ ID NO: 3101080 - RNA, 17 nt, Molluscum contagiosum virus
ggacuuuucgcgcgugc

SEQ ID NO: 3101081 - RNA, 15 nt, Molluscum contagiosum virus
ggagaacaugcucgc

SEQ ID NO: 3101082 - RNA, 20 nt, Molluscum contagiosum virus
ggagaacaugcucgccagca

SEQ ID NO: 3101083 - RNA, 13 nt, Molluscum contagiosum virus
ggagacguagagc

SEQ ID NO: 3101084 - RNA, 21 nt, Molluscum contagiosum virus
ggagcgcaaaugccgagcgca

SEQ ID NO: 3101085 - RNA, 13 nt, Molluscum contagiosum virus
ggagcgcgcacgg

SEQ ID NO: 3101086 - RNA, 14 nt, Molluscum contagiosum virus
ggagcgcgcgcagg

SEQ ID NO: 3101087 - RNA, 18 nt, Molluscum contagiosum virus
ggagcgcuucuagcucgc

SEQ ID NO: 3101088 - RNA, 23 nt, Molluscum contagiosum virus
ggagcgcuucuagcucgcgcgcg

SEQ ID NO: 3101089 - RNA, 13 nt, Molluscum contagiosum virus
ggagcuagcgcgc

SEQ ID NO: 3101090 - RNA, 12 nt, Molluscum contagiosum virus
gucgagagcgcg

SEQ ID NO: 3101091 - RNA, 18 nt, Molluscum contagiosum virus
gucgagcaccugucgcgc

SEQ ID NO: 3101092 - RNA, 15 nt, Molluscum contagiosum virus
gucgagcgcgccgcg

SEQ ID NO: 3101093 - RNA, 16 nt, Molluscum contagiosum virus
gucgagcgcgccgcgc

SEQ ID NO: 3101094 - RNA, 19 nt, Molluscum contagiosum virus
gucgaggagggcguccgua

SEQ ID NO: 3101095 - RNA, 19 nt, Molluscum contagiosum virus
gucgaggccuucgcgcccg

SEQ ID NO: 3101096 - RNA, 15 nt, Molluscum contagiosum virus
gucgaguucgcucgc

SEQ ID NO: 3101097 - RNA, 22 nt, Molluscum contagiosum virus
gucgcaaccccgcgcugcgcgg

SEQ ID NO: 3101098 - RNA, 12 nt, Molluscum contagiosum virus
gucgacggcgcc

SEQ ID NO: 3101099 - RNA, 21 nt, Molluscum contagiosum virus
gucgaccuggaagccgccagc

SEQ ID NO: 3101100 - RNA, 22 nt, Molluscum contagiosum virus
gucgcauccgaccucuuuccgc

SEQ ID NO: 3101101 - RNA, 19 nt, Molluscum contagiosum virus
gucgcacaguucacggcgc

SEQ ID NO: 3101102 - RNA, 20 nt, Molluscum contagiosum virus
gucgcacaguucacggcgcu

SEQ ID NO: 3101103 - RNA, 12 nt, Molluscum contagiosum virus
gucgccgucguc

SEQ ID NO: 3101104 - RNA, 14 nt, Molluscum contagiosum virus
gucgcccgccgagc

SEQ ID NO: 3101105 - RNA, 21 nt, Molluscum contagiosum virus
gucgcaguacccgagcugugc

SEQ ID NO: 3101106 - RNA, 18 nt, Molluscum contagiosum virus
guccuguccgcggacgcg

SEQ ID NO: 3101107 - RNA, 14 nt, Molluscum contagiosum virus
guccugcuagcgug

SEQ ID NO: 3101108 - RNA, 20 nt, Molluscum contagiosum virus
guccugcgcgguggcuuacg

SEQ ID NO: 3101109 - RNA, 21 nt, Molluscum contagiosum virus
guacgcgccggggcgcgcgcu

SEQ ID NO: 3101110 - RNA, 13 nt, Molluscum contagiosum virus
guacgcgugcagg

SEQ ID NO: 3101111 - RNA, 19 nt, Molluscum contagiosum virus
guacgcgugcgcuggcgcg

SEQ ID NO: 3101112 - RNA, 22 nt, Molluscum contagiosum virus
guacgcucuccaugcgcgcgcg

SEQ ID NO: 3101113 - RNA, 15 nt, Molluscum contagiosum virus
guccggcgcucgccc

SEQ ID NO: 3101114 - RNA, 15 nt, Molluscum contagiosum virus
guccggcgcuugccc

SEQ ID NO: 3101115 - RNA, 22 nt, Molluscum contagiosum virus
guccgcucgugccacugccgcc

SEQ ID NO: 3101116 - RNA, 16 nt, Molluscum contagiosum virus
agggcucgccaugcug

SEQ ID NO: 3101117 - RNA, 20 nt, Molluscum contagiosum virus
agggcuuccccccacggcag

SEQ ID NO: 3101118 - RNA, 16 nt, Molluscum contagiosum virus
aggggcaagcucgcgc

SEQ ID NO: 3101119 - RNA, 20 nt, Molluscum contagiosum virus
aggggccguucgcgcgccag

SEQ ID NO: 3101120 - RNA, 19 nt, Molluscum contagiosum virus
aggggugauggcggugagc

SEQ ID NO: 3101121 - RNA, 22 nt, Molluscum contagiosum virus
agggguguuuccuugccuucuc

SEQ ID NO: 3101122 - RNA, 15 nt, Molluscum contagiosum virus
agggucacgcgcaca

SEQ ID NO: 3101123 - RNA, 15 nt, Molluscum contagiosum virus
agggcgggcacgugc

SEQ ID NO: 3101124 - RNA, 15 nt, Molluscum contagiosum virus
aggucacgacgagcg

SEQ ID NO: 3101125 - RNA, 16 nt, Molluscum contagiosum virus
aggucacgacgagcga

SEQ ID NO: 3101126 - RNA, 22 nt, Molluscum contagiosum virus
aggucaucgacgagcacgagca

SEQ ID NO: 3101127 - RNA, 13 nt, Molluscum contagiosum virus
aggucgagcgcgc

SEQ ID NO: 3101128 - RNA, 18 nt, Molluscum contagiosum virus
aggucgagcgcgccgcgc

SEQ ID NO: 3101129 - RNA, 14 nt, Molluscum contagiosum virus
agcucuucgacagc

SEQ ID NO: 3101130 - RNA, 20 nt, Molluscum contagiosum virus
agcucuucgacagcgugcgc

SEQ ID NO: 3101131 - RNA, 16 nt, Molluscum contagiosum virus
agcucuucguggccaa

SEQ ID NO: 3101132 - RNA, 14 nt, Molluscum contagiosum virus
agcugcaccggcgc

SEQ ID NO: 3101133 - RNA, 17 nt, Molluscum contagiosum virus
agcugcaccggcgcgag

SEQ ID NO: 3101134 - RNA, 14 nt, Molluscum contagiosum virus
agcugcacgugcag

SEQ ID NO: 3101135 - RNA, 15 nt, Molluscum contagiosum virus
agcugcacgugcagc

SEQ ID NO: 3101136 - RNA, 21 nt, Molluscum contagiosum virus
agcugcccuuuagcguggcgc

SEQ ID NO: 3101137 - RNA, 15 nt, Molluscum contagiosum virus
agcugcagagcgugc

SEQ ID NO: 3101138 - RNA, 19 nt, Molluscum contagiosum virus
agcugccauggcagcucgg

SEQ ID NO: 3101139 - RNA, 17 nt, Molluscum contagiosum virus
agcugcgcuugcgcgug

SEQ ID NO: 3101140 - RNA, 15 nt, Molluscum contagiosum virus
agcugcuagcggcag

SEQ ID NO: 3101141 - RNA, 14 nt, Molluscum contagiosum virus
agcugcugcgcgag

SEQ ID NO: 3101142 - RNA, 22 nt, Molluscum contagiosum virus
agcucuccgagacacgcgagcg

SEQ ID NO: 3101143 - RNA, 15 nt, Molluscum contagiosum virus
agcucucgcgcgcag

SEQ ID NO: 3101144 - RNA, 12 nt, Molluscum contagiosum virus
agcucguggaca

SEQ ID NO: 3101145 - RNA, 23 nt, Molluscum contagiosum virus
agcucccgcgccacgagcgccgc

SEQ ID NO: 3101146 - RNA, 21 nt, Molluscum contagiosum virus
agcuccgcgacgaacucgaca

SEQ ID NO: 3101147 - RNA, 14 nt, Molluscum contagiosum virus
agcuccggcugcuc

SEQ ID NO: 3101148 - RNA, 14 nt, Molluscum contagiosum virus
agcuccuagcgcgc

SEQ ID NO: 3101149 - RNA, 23 nt, Molluscum contagiosum virus
agcucgcagccuccgugcgccag

SEQ ID NO: 3101150 - RNA, 17 nt, Molluscum contagiosum virus
agcucgccaaagcgcgc

SEQ ID NO: 3101151 - RNA, 22 nt, Molluscum contagiosum virus
agcucgccaaagcgcgccuucc

SEQ ID NO: 3101152 - RNA, 18 nt, Molluscum contagiosum virus
agcucgccaugugcgaag

SEQ ID NO: 3101153 - RNA, 22 nt, Molluscum contagiosum virus
agcucgccgcgcgccgcugcuc

SEQ ID NO: 3101154 - RNA, 20 nt, Molluscum contagiosum virus
agcucgccuccuugcccgag

SEQ ID NO: 3101155 - RNA, 16 nt, Molluscum contagiosum virus
agcucgcgcgcaagaa

SEQ ID NO: 3101156 - RNA, 14 nt, Molluscum contagiosum virus
agcucgcgcgcgag

SEQ ID NO: 3101157 - RNA, 23 nt, Molluscum contagiosum virus
agcucgcguccacgaugcgcucg

SEQ ID NO: 3101158 - RNA, 17 nt, Molluscum contagiosum virus
agcuagcucugcgcgcg

SEQ ID NO: 3101159 - RNA, 14 nt, Molluscum contagiosum virus
agcucaaucucgcc

SEQ ID NO: 3101160 - RNA, 17 nt, Molluscum contagiosum virus
agcucaaucucgcccag

SEQ ID NO: 3101161 - RNA, 18 nt, Molluscum contagiosum virus
agcuaaaagagcugcugc

SEQ ID NO: 3101162 - RNA, 16 nt, Molluscum contagiosum virus
agcuacgaucgcgcuc

SEQ ID NO: 3101163 - RNA, 14 nt, Molluscum contagiosum virus
agcgugcagacgac

SEQ ID NO: 3101164 - RNA, 20 nt, Molluscum contagiosum virus
agcgugguguucgccggcau

SEQ ID NO: 3101165 - RNA, 19 nt, Molluscum contagiosum virus
agcgugucagcagcgcgag

SEQ ID NO: 3101166 - RNA, 14 nt, Molluscum contagiosum virus
agcgugucgaagcg

SEQ ID NO: 3101167 - RNA, 19 nt, Molluscum contagiosum virus
agcgugucgaagcgcgcag

SEQ ID NO: 3101168 - RNA, 14 nt, Molluscum contagiosum virus
aggugcacgcgcug

SEQ ID NO: 3101169 - RNA, 18 nt, Molluscum contagiosum virus
agguucguccgcucgugc

SEQ ID NO: 3101170 - RNA, 13 nt, Molluscum contagiosum virus
aggugcugggcga

SEQ ID NO: 3101171 - RNA, 18 nt, Molluscum contagiosum virus
agucacuucucggaagcg

SEQ ID NO: 3101172 - RNA, 12 nt, Molluscum contagiosum virus
agucagcggcgg

SEQ ID NO: 3101173 - RNA, 13 nt, Molluscum contagiosum virus
agguugcgcagag

SEQ ID NO: 3101174 - RNA, 22 nt, Molluscum contagiosum virus
aguacgagcgcguaagaccaug

SEQ ID NO: 3101175 - RNA, 21 nt, Molluscum contagiosum virus
aguacgcucuccaugcgcgcg

SEQ ID NO: 3101176 - RNA, 13 nt, Molluscum contagiosum virus
aguccugggcgag

SEQ ID NO: 3101177 - RNA, 17 nt, Molluscum contagiosum virus
agucgagcacgcgcgag

SEQ ID NO: 3101178 - RNA, 22 nt, Molluscum contagiosum virus
agucgcaguacccgagcugugc

SEQ ID NO: 3101179 - RNA, 20 nt, Molluscum contagiosum virus
agucgcccugcccgcgcgag

SEQ ID NO: 3101180 - RNA, 23 nt, Molluscum contagiosum virus
aguccacggguaccgugcgcgug

SEQ ID NO: 3101181 - RNA, 23 nt, Molluscum contagiosum virus
aguccaucggugggcucgcgcuu

SEQ ID NO: 3101182 - RNA, 20 nt, Molluscum contagiosum virus
aguccgacccgugcugcuug

SEQ ID NO: 3101183 - RNA, 18 nt, Molluscum contagiosum virus
aguccgccucgagcacgc

SEQ ID NO: 3101184 - RNA, 22 nt, Molluscum contagiosum virus
agucguuugcucggggcugucg

SEQ ID NO: 3101185 - RNA, 12 nt, Molluscum contagiosum virus
agucugcgcagg

SEQ ID NO: 3101186 - RNA, 13 nt, Molluscum contagiosum virus
aucgcgcaggcgc

SEQ ID NO: 3101187 - RNA, 16 nt, Molluscum contagiosum virus
aucgcgcugcuggugc

SEQ ID NO: 3101188 - RNA, 18 nt, Molluscum contagiosum virus
aucgcggagcugcgcgcg

SEQ ID NO: 3101189 - RNA, 17 nt, Molluscum contagiosum virus
aucgugggcaucgaccc

SEQ ID NO: 3101190 - RNA, 16 nt, Molluscum contagiosum virus
aucggcacugcucacg

SEQ ID NO: 3101191 - RNA, 17 nt, Molluscum contagiosum virus
aucggagaagugcuccg

SEQ ID NO: 3101192 - RNA, 22 nt, Molluscum contagiosum virus
aucgcgucacguccucaagcgc

SEQ ID NO: 3101193 - RNA, 18 nt, Molluscum contagiosum virus
agccagucucgcgcuucc

SEQ ID NO: 3101194 - RNA, 24 nt, Molluscum contagiosum virus
agccucuggaaggagcugggcucg

SEQ ID NO: 3101195 - RNA, 17 nt, Molluscum contagiosum virus
agccugaggccgcggag

SEQ ID NO: 3101196 - RNA, 20 nt, Molluscum contagiosum virus
agccucgagcgccgugcagu

SEQ ID NO: 3101197 - RNA, 14 nt, Molluscum contagiosum virus
agccuagccauaca

SEQ ID NO: 3101198 - RNA, 21 nt, Molluscum contagiosum virus
agccguccgccucgagcacgc

SEQ ID NO: 3101199 - RNA, 21 nt, Molluscum contagiosum virus
agcgugacaaucucugcgccg

SEQ ID NO: 3101200 - RNA, 16 nt, Molluscum contagiosum virus
agcgucgcgcgccgug

SEQ ID NO: 3101201 - RNA, 18 nt, Molluscum contagiosum virus
agcgugcgcgggcacgcc

SEQ ID NO: 3101202 - RNA, 14 nt, Molluscum contagiosum virus
agcguggagcaccu

SEQ ID NO: 3101203 - RNA, 15 nt, Molluscum contagiosum virus
agcguggcgcgcgag

SEQ ID NO: 3101204 - RNA, 15 nt, Molluscum contagiosum virus
agcgagcgcccgugc

SEQ ID NO: 3101205 - RNA, 14 nt, Molluscum contagiosum virus
agcgagugcgcgug

SEQ ID NO: 3101206 - RNA, 15 nt, Molluscum contagiosum virus
agcgagugcgcgugc

SEQ ID NO: 3101207 - RNA, 16 nt, Molluscum contagiosum virus
agcgaguucgcacgcu

SEQ ID NO: 3101208 - RNA, 15 nt, Molluscum contagiosum virus
agcgcaaaugccgag

SEQ ID NO: 3101209 - RNA, 17 nt, Molluscum contagiosum virus
agcgcaugcgcgccgcg

SEQ ID NO: 3101210 - RNA, 23 nt, Molluscum contagiosum virus
agcgccacuagcaaggcgccgcg

SEQ ID NO: 3101211 - RNA, 22 nt, Molluscum contagiosum virus
agccgccgcuacuacggagcga

SEQ ID NO: 3101212 - RNA, 21 nt, Molluscum contagiosum virus
agccgccugccgcgcucgugc

SEQ ID NO: 3101213 - RNA, 13 nt, Molluscum contagiosum virus
agccgccuggccg

SEQ ID NO: 3101214 - RNA, 13 nt, Molluscum contagiosum virus
agccgcgaaagcg

SEQ ID NO: 3101215 - RNA, 23 nt, Molluscum contagiosum virus
agccgcucguccagcugcgcgag

SEQ ID NO: 3101216 - RNA, 18 nt, Molluscum contagiosum virus
agccgcugcgccgccagc

SEQ ID NO: 3101217 - RNA, 15 nt, Molluscum contagiosum virus
agccgcugcuccugc

SEQ ID NO: 3101218 - RNA, 18 nt, Molluscum contagiosum virus
agccgcuucgggcucagc

SEQ ID NO: 3101219 - RNA, 13 nt, Molluscum contagiosum virus
agccgcacggcgc

SEQ ID NO: 3101220 - RNA, 14 nt, Molluscum contagiosum virus
agccgcagccgcgc

SEQ ID NO: 3101221 - RNA, 20 nt, Molluscum contagiosum virus
agccgcccgcggacucgugc

SEQ ID NO: 3101222 - RNA, 18 nt, Molluscum contagiosum virus
agccccgcggacggacga

SEQ ID NO: 3101223 - RNA, 13 nt, Molluscum contagiosum virus
agccgagcgccgc

SEQ ID NO: 3101224 - RNA, 20 nt, Molluscum contagiosum virus
agcccauuaucgucacggcc

SEQ ID NO: 3101225 - RNA, 18 nt, Molluscum contagiosum virus
agccccagaaggucgugc

SEQ ID NO: 3101226 - RNA, 19 nt, Molluscum contagiosum virus
agcccgacgcgggcgcgca

SEQ ID NO: 3101227 - RNA, 13 nt, Molluscum contagiosum virus
agcccgagcgcgc

SEQ ID NO: 3101228 - RNA, 18 nt, Molluscum contagiosum virus
agcccgaguucgcggcgc

SEQ ID NO: 3101229 - RNA, 21 nt, Molluscum contagiosum virus
agcccgcaggccgggcaccca

SEQ ID NO: 3101230 - RNA, 14 nt, Molluscum contagiosum virus
agcccgcgcgcgag

SEQ ID NO: 3101231 - RNA, 17 nt, Molluscum contagiosum virus
agcccgcggcgcgcagc

SEQ ID NO: 3101232 - RNA, 14 nt, Molluscum contagiosum virus
agcccgcggugcgc

SEQ ID NO: 3101233 - RNA, 20 nt, Molluscum contagiosum virus
agcccggaagcuugcucagc

SEQ ID NO: 3101234 - RNA, 15 nt, Molluscum contagiosum virus
agcccgggcccgugc

SEQ ID NO: 3101235 - RNA, 22 nt, Molluscum contagiosum virus
agcccgugcuggagggcacgcu

SEQ ID NO: 3101236 - RNA, 22 nt, Molluscum contagiosum virus
cauggcucccgcacgcaccgcg

SEQ ID NO: 3101237 - RNA, 16 nt, Molluscum contagiosum virus
cauggaaagcuucucg

SEQ ID NO: 3101238 - RNA, 13 nt, Molluscum contagiosum virus
cauggccgcgucc

SEQ ID NO: 3101239 - RNA, 14 nt, Molluscum contagiosum virus
cauggccgcguccg

SEQ ID NO: 3101240 - RNA, 13 nt, Molluscum contagiosum virus
caugcccacgcgc

SEQ ID NO: 3101241 - RNA, 19 nt, Molluscum contagiosum virus
caugccgaguguugucguc

SEQ ID NO: 3101242 - RNA, 16 nt, Molluscum contagiosum virus
caugccgcgcugcucc

SEQ ID NO: 3101243 - RNA, 22 nt, Molluscum contagiosum virus
caugccggggaugaacgcgcug

SEQ ID NO: 3101244 - RNA, 22 nt, Molluscum contagiosum virus
caugccuccguuucccgcggcg

SEQ ID NO: 3101245 - RNA, 15 nt, Molluscum contagiosum virus
cauggagcgcccgcu

SEQ ID NO: 3101246 - RNA, 20 nt, Molluscum contagiosum virus
cauggagcgcccgcugcucu

SEQ ID NO: 3101247 - RNA, 22 nt, Molluscum contagiosum virus
cauggaggacggcgcgggcgcg

SEQ ID NO: 3101248 - RNA, 20 nt, Molluscum contagiosum virus
cauggccacgcccgggcccg

SEQ ID NO: 3101249 - RNA, 16 nt, Molluscum contagiosum virus
caucuacugcgacauc

SEQ ID NO: 3101250 - RNA, 19 nt, Molluscum contagiosum virus
cauacgcagaggcgcgucc

SEQ ID NO: 3101251 - RNA, 14 nt, Molluscum contagiosum virus
caguuccgaucgcg

SEQ ID NO: 3101252 - RNA, 15 nt, Molluscum contagiosum virus
caguucgagcugcug

SEQ ID NO: 3101253 - RNA, 16 nt, Molluscum contagiosum virus
caguucgagcugcugc

SEQ ID NO: 3101254 - RNA, 17 nt, Molluscum contagiosum virus
caguucggccgcacgug

SEQ ID NO: 3101255 - RNA, 14 nt, Molluscum contagiosum virus
cagugccagcagcc

SEQ ID NO: 3101256 - RNA, 22 nt, Molluscum contagiosum virus
cagugccgacgugugccgcucg

SEQ ID NO: 3101257 - RNA, 14 nt, Molluscum contagiosum virus
cagugccgccgcgc

SEQ ID NO: 3101258 - RNA, 14 nt, Molluscum contagiosum virus
cagugccgcucgcu

SEQ ID NO: 3101259 - RNA, 21 nt, Molluscum contagiosum virus
cagugcgagaucgacugcgcc

SEQ ID NO: 3101260 - RNA, 15 nt, Molluscum contagiosum virus
cagugcuugagcauc

SEQ ID NO: 3101261 - RNA, 20 nt, Molluscum contagiosum virus
cagugugccguucacgcaca

SEQ ID NO: 3101262 - RNA, 17 nt, Molluscum contagiosum virus
caugcugcccgcgcgcg

SEQ ID NO: 3101263 - RNA, 20 nt, Molluscum contagiosum virus
caugcugcccgcgcgcgacu

SEQ ID NO: 3101264 - RNA, 17 nt, Molluscum contagiosum virus
caugcugcgcgagcgcg

SEQ ID NO: 3101265 - RNA, 21 nt, Molluscum contagiosum virus
caugcugcgcgagcgcgcgcu

SEQ ID NO: 3101266 - RNA, 16 nt, Molluscum contagiosum virus
caugcuggcgggcgcg

SEQ ID NO: 3101267 - RNA, 20 nt, Molluscum contagiosum virus
caugcugugcggcacgccug

SEQ ID NO: 3101268 - RNA, 16 nt, Molluscum contagiosum virus
caugcgacugccagcc

SEQ ID NO: 3101269 - RNA, 18 nt, Molluscum contagiosum virus
caugcgcaagcagcucgg

SEQ ID NO: 3101270 - RNA, 19 nt, Molluscum contagiosum virus
caugcgcaagcagcucggc

SEQ ID NO: 3101271 - RNA, 14 nt, Molluscum contagiosum virus
caugcgcccucacg

SEQ ID NO: 3101272 - RNA, 14 nt, Molluscum contagiosum virus
caugcgcgccgcgc

SEQ ID NO: 3101273 - RNA, 18 nt, Molluscum contagiosum virus
caugcgcgccgcgcugcu

SEQ ID NO: 3101274 - RNA, 19 nt, Molluscum contagiosum virus
caugcgcgccgcgcugcug

SEQ ID NO: 3101275 - RNA, 16 nt, Molluscum contagiosum virus
caugcgcgcgcagcag

SEQ ID NO: 3101276 - RNA, 16 nt, Molluscum contagiosum virus
caugcgcgcgcgcucg

SEQ ID NO: 3101277 - RNA, 18 nt, Molluscum contagiosum virus
caugcgcuugcggucgcg

SEQ ID NO: 3101278 - RNA, 20 nt, Molluscum contagiosum virus
caugcggcaggcgcugcgcg

SEQ ID NO: 3101279 - RNA, 16 nt, Molluscum contagiosum virus
caugcucgcgcucucg

SEQ ID NO: 3101280 - RNA, 19 nt, Molluscum contagiosum virus
caugcacacucacgcgucc

SEQ ID NO: 3101281 - RNA, 16 nt, Molluscum contagiosum virus
caugcacagcugcucg

SEQ ID NO: 3101282 - RNA, 18 nt, Molluscum contagiosum virus
caugaagaugucgccgcg

SEQ ID NO: 3101283 - RNA, 17 nt, Molluscum contagiosum virus
caucugcgagcgcgaau

SEQ ID NO: 3101284 - RNA, 16 nt, Molluscum contagiosum virus
caucuccacgucggcc

SEQ ID NO: 3101285 - RNA, 17 nt, Molluscum contagiosum virus
caucucgauggcgccgu

SEQ ID NO: 3101286 - RNA, 15 nt, Molluscum contagiosum virus
caugacgacgccgga

SEQ ID NO: 3101287 - RNA, 19 nt, Molluscum contagiosum virus
aucugcgacacgcuggcga

SEQ ID NO: 3101288 - RNA, 19 nt, Molluscum contagiosum virus
aucugcgccuccgguacgu

SEQ ID NO: 3101289 - RNA, 20 nt, Molluscum contagiosum virus
aucucgcacacugcagcacg

SEQ ID NO: 3101290 - RNA, 12 nt, Molluscum contagiosum virus
aucucugcgccg

SEQ ID NO: 3101291 - RNA, 18 nt, Molluscum contagiosum virus
augaguaccgcgggcgca

SEQ ID NO: 3101292 - RNA, 17 nt, Molluscum contagiosum virus
augaagcucucgcgcgc

SEQ ID NO: 3101293 - RNA, 14 nt, Molluscum contagiosum virus
augaaggcgcggcu

SEQ ID NO: 3101294 - RNA, 17 nt, Molluscum contagiosum virus
aucugcaacucgcgcug

SEQ ID NO: 3101295 - RNA, 12 nt, Molluscum contagiosum virus
augagcagcacc

SEQ ID NO: 3101296 - RNA, 17 nt, Molluscum contagiosum virus
augagccagucucgcgc

SEQ ID NO: 3101297 - RNA, 21 nt, Molluscum contagiosum virus
augacacgcgugucugcgcuc

SEQ ID NO: 3101298 - RNA, 21 nt, Molluscum contagiosum virus
cagcggacguggucgcgcgcg

SEQ ID NO: 3101299 - RNA, 23 nt, Molluscum contagiosum virus
cagcggacguggucgcgcgcgcu

SEQ ID NO: 3101300 - RNA, 13 nt, Molluscum contagiosum virus
augccacgcagcu

SEQ ID NO: 3101301 - RNA, 20 nt, Molluscum contagiosum virus
cagcgccgccaccucggcgu

SEQ ID NO: 3101302 - RNA, 14 nt, Molluscum contagiosum virus
cagcgccgcgcggu

SEQ ID NO: 3101303 - RNA, 15 nt, Molluscum contagiosum virus
cagcgccugcuugcg

SEQ ID NO: 3101304 - RNA, 18 nt, Molluscum contagiosum virus
cagcgccugcuugcgcac

SEQ ID NO: 3101305 - RNA, 22 nt, Molluscum contagiosum virus
cagcgcgacuagccugugcccu

SEQ ID NO: 3101306 - RNA, 20 nt, Molluscum contagiosum virus
cagcgcgcccaccagcagcc

SEQ ID NO: 3101307 - RNA, 12 nt, Molluscum contagiosum virus
cagcgcgcgcac

SEQ ID NO: 3101308 - RNA, 22 nt, Molluscum contagiosum virus
cagcgcgcgcagcaccgcggcg

SEQ ID NO: 3101309 - RNA, 13 nt, Molluscum contagiosum virus
cagcgcgcggaag

SEQ ID NO: 3101310 - RNA, 21 nt, Molluscum contagiosum virus
cagcgcgcggagaucgccgcg

SEQ ID NO: 3101311 - RNA, 12 nt, Molluscum contagiosum virus
cagcgcgcggcg

SEQ ID NO: 3101312 - RNA, 20 nt, Molluscum contagiosum virus
cagcgcgcucgaggcgccgu

SEQ ID NO: 3101313 - RNA, 21 nt, Molluscum contagiosum virus
cagcgcccgcguacacgugca

SEQ ID NO: 3101314 - RNA, 16 nt, Molluscum contagiosum virus
cagcgccagccugcug

SEQ ID NO: 3101315 - RNA, 20 nt, Molluscum contagiosum virus
cagcgccagccugcuggcac

SEQ ID NO: 3101316 - RNA, 10 nt, Molluscum contagiosum virus
cagcgcagca

SEQ ID NO: 3101317 - RNA, 14 nt, Molluscum contagiosum virus
cagcgcagcagcgc

SEQ ID NO: 3101318 - RNA, 18 nt, Molluscum contagiosum virus
cagcgcagcagcgcgacu

SEQ ID NO: 3101319 - RNA, 23 nt, Molluscum contagiosum virus
augcacacacucgcgcguccaca

SEQ ID NO: 3101320 - RNA, 17 nt, Molluscum contagiosum virus
augccgccgcguacgcg

SEQ ID NO: 3101321 - RNA, 16 nt, Molluscum contagiosum virus
augccgcgugcucugc

SEQ ID NO: 3101322 - RNA, 19 nt, Molluscum contagiosum virus
cagcgauugcccgcgcgcg

SEQ ID NO: 3101323 - RNA, 24 nt, Molluscum contagiosum virus
cagcgauugcccgcgcgcggacag

SEQ ID NO: 3101324 - RNA, 13 nt, Molluscum contagiosum virus
cagucccagcacc

SEQ ID NO: 3101325 - RNA, 17 nt, Molluscum contagiosum virus
cagucccagcaccgcgc

SEQ ID NO: 3101326 - RNA, 21 nt, Molluscum contagiosum virus
cagucccagcaccgcgccgcg

SEQ ID NO: 3101327 - RNA, 14 nt, Molluscum contagiosum virus
cagucgucgccgau

SEQ ID NO: 3101328 - RNA, 14 nt, Molluscum contagiosum virus
cagucuccacgcgu

SEQ ID NO: 3101329 - RNA, 12 nt, Molluscum contagiosum virus
cagucucgcgcu

SEQ ID NO: 3101330 - RNA, 21 nt, Molluscum contagiosum virus
caguaggacauguccggcccg

SEQ ID NO: 3101331 - RNA, 15 nt, Molluscum contagiosum virus
caguaccugcugccg

SEQ ID NO: 3101332 - RNA, 16 nt, Molluscum contagiosum virus
caguaccaguaccugc

SEQ ID NO: 3101333 - RNA, 14 nt, Molluscum contagiosum virus
caggucggccagca

SEQ ID NO: 3101334 - RNA, 17 nt, Molluscum contagiosum virus
cagguggccgcgcgcgc

SEQ ID NO: 3101335 - RNA, 20 nt, Molluscum contagiosum virus
cagguggccgcgcgcgcacg

SEQ ID NO: 3101336 - RNA, 22 nt, Molluscum contagiosum virus
cagguagagcaacaugcugagu

SEQ ID NO: 3101337 - RNA, 20 nt, Molluscum contagiosum virus
cagguagugguccaccagcu

SEQ ID NO: 3101338 - RNA, 22 nt, Molluscum contagiosum virus
caggucaacuccgagcgcgcgc

SEQ ID NO: 3101339 - RNA, 23 nt, Molluscum contagiosum virus
caggucaacuccgagcgcgcgcg

SEQ ID NO: 3101340 - RNA, 17 nt, Molluscum contagiosum virus
caggucaucgacgagca

SEQ ID NO: 3101341 - RNA, 14 nt, Molluscum contagiosum virus
cagcggcgccgcag

SEQ ID NO: 3101342 - RNA, 13 nt, Molluscum contagiosum virus
cagcggcgcgugc

SEQ ID NO: 3101343 - RNA, 16 nt, Molluscum contagiosum virus
cagcggcgcgugcucc

SEQ ID NO: 3101344 - RNA, 19 nt, Molluscum contagiosum virus
cagcggcaaaggcccgcga

SEQ ID NO: 3101345 - RNA, 20 nt, Molluscum contagiosum virus
cagcggcaaaggcccgcgag

SEQ ID NO: 3101346 - RNA, 16 nt, Molluscum contagiosum virus
cagcggcacugcgcgc

SEQ ID NO: 3101347 - RNA, 22 nt, Molluscum contagiosum virus
cagcggcuuguagucgcccccg

SEQ ID NO: 3101348 - RNA, 18 nt, Molluscum contagiosum virus
cagcggcgugcugcagcc

SEQ ID NO: 3101349 - RNA, 18 nt, Molluscum contagiosum virus
cagcggcugcccgcggag

SEQ ID NO: 3101350 - RNA, 16 nt, Molluscum contagiosum virus
cagcgcguccaugcug

SEQ ID NO: 3101351 - RNA, 21 nt, Molluscum contagiosum virus
cagcgugacaaucucugcgcc

SEQ ID NO: 3101352 - RNA, 16 nt, Molluscum contagiosum virus
cagcgugccgcggcac

SEQ ID NO: 3101353 - RNA, 23 nt, Molluscum contagiosum virus
cagcgugcgcgggcacgccgcag

SEQ ID NO: 3101354 - RNA, 14 nt, Molluscum contagiosum virus
cagcguuccaggaa

SEQ ID NO: 3101355 - RNA, 22 nt, Molluscum contagiosum virus
cagcgguggucuccgcgggcag

SEQ ID NO: 3101356 - RNA, 20 nt, Molluscum contagiosum virus
cagcguacggcccgaaggcc

SEQ ID NO: 3101357 - RNA, 24 nt, Molluscum contagiosum virus
cagcguagcggacgaagcugugca

SEQ ID NO: 3101358 - RNA, 18 nt, Molluscum contagiosum virus
cagcgucgcgcgccgugc

SEQ ID NO: 3101359 - RNA, 13 nt, Molluscum contagiosum virus
cagcgucgcggag

SEQ ID NO: 3101360 - RNA, 17 nt, Molluscum contagiosum virus
cagcgucgcggagcgcg

SEQ ID NO: 3101361 - RNA, 17 nt, Molluscum contagiosum virus
cggcaggcgcugcgcgg

SEQ ID NO: 3101362 - RNA, 20 nt, Molluscum contagiosum virus
cggcaggcgcugcgcggcgc

SEQ ID NO: 3101363 - RNA, 21 nt, Molluscum contagiosum virus
cggcacacaugcuagcgggca

SEQ ID NO: 3101364 - RNA, 15 nt, Molluscum contagiosum virus
cggcaccacgugcgc

SEQ ID NO: 3101365 - RNA, 17 nt, Molluscum contagiosum virus
cggcagcgucgcggagc

SEQ ID NO: 3101366 - RNA, 22 nt, Molluscum contagiosum virus
cggcagcgucgcggagcgcgca

SEQ ID NO: 3101367 - RNA, 17 nt, Molluscum contagiosum virus
cggcagcuaccgcgcgc

SEQ ID NO: 3101368 - RNA, 18 nt, Molluscum contagiosum virus
cggcagcuaccgcgcgcg

SEQ ID NO: 3101369 - RNA, 17 nt, Molluscum contagiosum virus
cggcagcucugcagcgc

SEQ ID NO: 3101370 - RNA, 20 nt, Molluscum contagiosum virus
cggcagcucugcagcgccgc

SEQ ID NO: 3101371 - RNA, 21 nt, Molluscum contagiosum virus
cggcagcucugcagcgccgcg

SEQ ID NO: 3101372 - RNA, 19 nt, Molluscum contagiosum virus
cggcagcuggagcugccgc

SEQ ID NO: 3101373 - RNA, 16 nt, Molluscum contagiosum virus
cggcaggaagcuggcg

SEQ ID NO: 3101374 - RNA, 12 nt, Molluscum contagiosum virus
cggcacgcgagc

SEQ ID NO: 3101375 - RNA, 17 nt, Molluscum contagiosum virus
cggcacgcugagcaagc

SEQ ID NO: 3101376 - RNA, 17 nt, Molluscum contagiosum virus
cggcacgcugcguuucc

SEQ ID NO: 3101377 - RNA, 22 nt, Molluscum contagiosum virus
cggcacggacccgggcgcggca

SEQ ID NO: 3101378 - RNA, 16 nt, Molluscum contagiosum virus
cggcacgggcacgcgc

SEQ ID NO: 3101379 - RNA, 19 nt, Molluscum contagiosum virus
cggcacgggcacgcgcgcg

SEQ ID NO: 3101380 - RNA, 13 nt, Molluscum contagiosum virus
cggcacgucgucc

SEQ ID NO: 3101381 - RNA, 21 nt, Molluscum contagiosum virus
cggcacgugcguacgcggcgc

SEQ ID NO: 3101382 - RNA, 15 nt, Molluscum contagiosum virus
cggcacucgcguccg

SEQ ID NO: 3101383 - RNA, 13 nt, Molluscum contagiosum virus
cggcacugcgcgc

SEQ ID NO: 3101384 - RNA, 13 nt, Molluscum contagiosum virus
cggcacugcuagc

SEQ ID NO: 3101385 - RNA, 15 nt, Molluscum contagiosum virus
cggcacugcucacgg

SEQ ID NO: 3101386 - RNA, 14 nt, Molluscum contagiosum virus
cggcacugcuggcg

SEQ ID NO: 3101387 - RNA, 15 nt, Molluscum contagiosum virus
cggcacugcuggcgc

SEQ ID NO: 3101388 - RNA, 13 nt, Molluscum contagiosum virus
cggcacccgccag

SEQ ID NO: 3101389 - RNA, 13 nt, Molluscum contagiosum virus
cggcacccgccgc

SEQ ID NO: 3101390 - RNA, 18 nt, Molluscum contagiosum virus
cggcacccgccgcggugc

SEQ ID NO: 3101391 - RNA, 14 nt, Molluscum contagiosum virus
cggcacccgugcgc

SEQ ID NO: 3101392 - RNA, 16 nt, Molluscum contagiosum virus
cggcacccgugcgcgc

SEQ ID NO: 3101393 - RNA, 19 nt, Molluscum contagiosum virus
cggcacccgugcgcgcgcu

SEQ ID NO: 3101394 - RNA, 13 nt, Molluscum contagiosum virus
cggcaccgcgccg

SEQ ID NO: 3101395 - RNA, 19 nt, Molluscum contagiosum virus
cggcaccguaccgcgcccg

SEQ ID NO: 3101396 - RNA, 21 nt, Molluscum contagiosum virus
cggcaccguaccgcgcccgcc

SEQ ID NO: 3101397 - RNA, 15 nt, Molluscum contagiosum virus
cggcaccugucgcgc

SEQ ID NO: 3101398 - RNA, 17 nt, Molluscum contagiosum virus
cggcaacaacgucacgc

SEQ ID NO: 3101399 - RNA, 19 nt, Molluscum contagiosum virus
cggcacacacuugcacgcg

SEQ ID NO: 3101400 - RNA, 20 nt, Molluscum contagiosum virus
cggcacacacuugcacgcgc

SEQ ID NO: 3101401 - RNA, 22 nt, Molluscum contagiosum virus
cggcagacaacaccagcgugcc

SEQ ID NO: 3101402 - RNA, 14 nt, Molluscum contagiosum virus
cggcagacgccagc

SEQ ID NO: 3101403 - RNA, 16 nt, Molluscum contagiosum virus
cggcagacgccagcga

SEQ ID NO: 3101404 - RNA, 15 nt, Molluscum contagiosum virus
cggcagcagcgugca

SEQ ID NO: 3101405 - RNA, 17 nt, Molluscum contagiosum virus
cggcagcaugcucacgu

SEQ ID NO: 3101406 - RNA, 17 nt, Molluscum contagiosum virus
cggcagcgacuacgcgc

SEQ ID NO: 3101407 - RNA, 21 nt, Molluscum contagiosum virus
cggcagcgacuacgcgcugcu

SEQ ID NO: 3101408 - RNA, 23 nt, Molluscum contagiosum virus
cggcagcgcauccgagucgagca

SEQ ID NO: 3101409 - RNA, 13 nt, Molluscum contagiosum virus
cggcagcgccagc

SEQ ID NO: 3101410 - RNA, 17 nt, Molluscum contagiosum virus
cggcagcgccagcgaga

SEQ ID NO: 3101411 - RNA, 13 nt, Molluscum contagiosum virus
cggcagcgccgcg

SEQ ID NO: 3101412 - RNA, 16 nt, Molluscum contagiosum virus
cggcagcgccgcgcgc

SEQ ID NO: 3101413 - RNA, 17 nt, Molluscum contagiosum virus
cggcagcgccgcgcgcg

SEQ ID NO: 3101414 - RNA, 13 nt, Molluscum contagiosum virus
cggcagcgcgccu

SEQ ID NO: 3101415 - RNA, 16 nt, Molluscum contagiosum virus
cggcagcgcgccuagc

SEQ ID NO: 3101416 - RNA, 17 nt, Molluscum contagiosum virus
ccacgcgugcugcgcgg

SEQ ID NO: 3101417 - RNA, 13 nt, Molluscum contagiosum virus
ccacgcuggcacg

SEQ ID NO: 3101418 - RNA, 16 nt, Molluscum contagiosum virus
ccacgggcuucgcugc

SEQ ID NO: 3101419 - RNA, 18 nt, Molluscum contagiosum virus
ccacggguaccgugcgcg

SEQ ID NO: 3101420 - RNA, 20 nt, Molluscum contagiosum virus
ccacggguaccgugcgcgug

SEQ ID NO: 3101421 - RNA, 20 nt, Molluscum contagiosum virus
ccacguccgacucggacacg

SEQ ID NO: 3101422 - RNA, 15 nt, Molluscum contagiosum virus
ccacggccgcgcgcg

SEQ ID NO: 3101423 - RNA, 18 nt, Molluscum contagiosum virus
ccacgugccagagucgcc

SEQ ID NO: 3101424 - RNA, 12 nt, Molluscum contagiosum virus
ccacgugcgcug

SEQ ID NO: 3101425 - RNA, 13 nt, Molluscum contagiosum virus
ccacgugcgcugg

SEQ ID NO: 3101426 - RNA, 23 nt, Molluscum contagiosum virus
ccacgugguccaccagcacgaag

SEQ ID NO: 3101427 - RNA, 19 nt, Molluscum contagiosum virus
ccacguggugguuggcgug

SEQ ID NO: 3101428 - RNA, 20 nt, Molluscum contagiosum virus
ccacuccgucgcgcucgaag

SEQ ID NO: 3101429 - RNA, 15 nt, Molluscum contagiosum virus
ccagacgcagagcca

SEQ ID NO: 3101430 - RNA, 21 nt, Molluscum contagiosum virus
ccacugggaacaccacacgcg

SEQ ID NO: 3101431 - RNA, 21 nt, Molluscum contagiosum virus
ccagagccgcgugcgccgccg

SEQ ID NO: 3101432 - RNA, 17 nt, Molluscum contagiosum virus
ccagauguucucgccag

SEQ ID NO: 3101433 - RNA, 20 nt, Molluscum contagiosum virus
ccagauugccggcgcgcgcu

SEQ ID NO: 3101434 - RNA, 12 nt, Molluscum contagiosum virus
ccagcacgcgcg

SEQ ID NO: 3101435 - RNA, 20 nt, Molluscum contagiosum virus
ccagcagagcugcccgccag

SEQ ID NO: 3101436 - RNA, 12 nt, Molluscum contagiosum virus
ccagcagcgaga

SEQ ID NO: 3101437 - RNA, 23 nt, Molluscum contagiosum virus
ccagcagcgcccggugcggcgug

SEQ ID NO: 3101438 - RNA, 16 nt, Molluscum contagiosum virus
ccagcagcggcgcgug

SEQ ID NO: 3101439 - RNA, 14 nt, Molluscum contagiosum virus
ccagcgacgagcag

SEQ ID NO: 3101440 - RNA, 15 nt, Molluscum contagiosum virus
ccugaugacggcaga

SEQ ID NO: 3101441 - RNA, 17 nt, Molluscum contagiosum virus
ccugaugcccgcgagau

SEQ ID NO: 3101442 - RNA, 13 nt, Molluscum contagiosum virus
ccugcaaacgcga

SEQ ID NO: 3101443 - RNA, 21 nt, Molluscum contagiosum virus
ccugcacaagcaggaguccgu

SEQ ID NO: 3101444 - RNA, 15 nt, Molluscum contagiosum virus
ccugcaccaccagug

SEQ ID NO: 3101445 - RNA, 19 nt, Molluscum contagiosum virus
ccagccaggcgccggcgcg

SEQ ID NO: 3101446 - RNA, 16 nt, Molluscum contagiosum virus
ccagccaucgugcgcg

SEQ ID NO: 3101447 - RNA, 15 nt, Molluscum contagiosum virus
ccagcccgcggugcg

SEQ ID NO: 3101448 - RNA, 17 nt, Molluscum contagiosum virus
ccagcccgcugcgcaug

SEQ ID NO: 3101449 - RNA, 13 nt, Molluscum contagiosum virus
ccagccgcgagcg

SEQ ID NO: 3101450 - RNA, 23 nt, Molluscum contagiosum virus
ccagccgcucguccagcugcgcg

SEQ ID NO: 3101451 - RNA, 19 nt, Molluscum contagiosum virus
ccagccgcugcgccgccag

SEQ ID NO: 3101452 - RNA, 15 nt, Molluscum contagiosum virus
ccagccugacggcag

SEQ ID NO: 3101453 - RNA, 21 nt, Molluscum contagiosum virus
ccagccugcuggcaccgcgcg

SEQ ID NO: 3101454 - RNA, 17 nt, Molluscum contagiosum virus
ccagauccgggcgcugc

SEQ ID NO: 3101455 - RNA, 16 nt, Molluscum contagiosum virus
ccugcacgagccggcg

SEQ ID NO: 3101456 - RNA, 14 nt, Molluscum contagiosum virus
ccugcacgcacgcg

SEQ ID NO: 3101457 - RNA, 13 nt, Molluscum contagiosum virus
ccugcacgcgcac

SEQ ID NO: 3101458 - RNA, 22 nt, Molluscum contagiosum virus
ccugcaggaaaggcacccgcag

SEQ ID NO: 3101459 - RNA, 18 nt, Molluscum contagiosum virus
ccugcauuucaugcgcgg

SEQ ID NO: 3101460 - RNA, 15 nt, Molluscum contagiosum virus
ccugccacaccagcu

SEQ ID NO: 3101461 - RNA, 18 nt, Molluscum contagiosum virus
ccugcucuccgcgggaag

SEQ ID NO: 3101462 - RNA, 20 nt, Molluscum contagiosum virus
ccugcugaagaaggagcccu

SEQ ID NO: 3101463 - RNA, 16 nt, Molluscum contagiosum virus
ccugcugcagcuccgc

SEQ ID NO: 3101464 - RNA, 14 nt, Molluscum contagiosum virus
ccugcugccgagcu

SEQ ID NO: 3101465 - RNA, 21 nt, Molluscum contagiosum virus
ccugcugcgagagcaugccua

SEQ ID NO: 3101466 - RNA, 19 nt, Molluscum contagiosum virus
ccugcgcgagcaagcgccc

SEQ ID NO: 3101467 - RNA, 18 nt, Molluscum contagiosum virus
ccugcgcgcgagagcuuc

SEQ ID NO: 3101468 - RNA, 21 nt, Molluscum contagiosum virus
ccugcgcgcggcaguggcgug

SEQ ID NO: 3101469 - RNA, 20 nt, Molluscum contagiosum virus
ccugcgcuuccucuacacca

SEQ ID NO: 3101470 - RNA, 16 nt, Molluscum contagiosum virus
ccugcggaacgcgcau

SEQ ID NO: 3101471 - RNA, 13 nt, Molluscum contagiosum virus
ccugcggcucgca

SEQ ID NO: 3101472 - RNA, 12 nt, Molluscum contagiosum virus
ccugcgggcgcu

SEQ ID NO: 3101473 - RNA, 19 nt, Molluscum contagiosum virus
ccugcggguaguugcgagc

SEQ ID NO: 3101474 - RNA, 16 nt, Molluscum contagiosum virus
ccugcuagugcgcgcc

SEQ ID NO: 3101475 - RNA, 16 nt, Molluscum contagiosum virus
ccugcucaugcgcaag

SEQ ID NO: 3101476 - RNA, 14 nt, Molluscum contagiosum virus
ccugcuggcaccgc

SEQ ID NO: 3101477 - RNA, 15 nt, Molluscum contagiosum virus
ccugcuggcaccgcg

SEQ ID NO: 3101478 - RNA, 21 nt, Molluscum contagiosum virus
ccugcuggcaccgcgcgcgcu

SEQ ID NO: 3101479 - RNA, 15 nt, Molluscum contagiosum virus
ccugcuggcgcgcug

SEQ ID NO: 3101480 - RNA, 13 nt, Molluscum contagiosum virus
ccugcuugcccgc

SEQ ID NO: 3101481 - RNA, 20 nt, Molluscum contagiosum virus
ccuggaacgcgaccuucacu

SEQ ID NO: 3101482 - RNA, 18 nt, Molluscum contagiosum virus
ccuggaacucuacgccgc

SEQ ID NO: 3101483 - RNA, 19 nt, Molluscum contagiosum virus
ccuggagggucacgcgcac

SEQ ID NO: 3101484 - RNA, 21 nt, Molluscum contagiosum virus
ccuggagggucacgcgcacau

SEQ ID NO: 3101485 - RNA, 22 nt, Molluscum contagiosum virus
ccugcgcaacgugcugcgccgc

SEQ ID NO: 3101486 - RNA, 22 nt, Molluscum contagiosum virus
ccugcgccgccucaugcgcgug

SEQ ID NO: 3101487 - RNA, 18 nt, Molluscum contagiosum virus
ccuggcuugcgcgcgccc

SEQ ID NO: 3101488 - RNA, 14 nt, Molluscum contagiosum virus
ccuggcggcgcugg

SEQ ID NO: 3101489 - RNA, 19 nt, Molluscum contagiosum virus
cgaagacgcguaccagcgc

SEQ ID NO: 3101490 - RNA, 15 nt, Molluscum contagiosum virus
cgaagagcgagaaca

SEQ ID NO: 3101491 - RNA, 18 nt, Molluscum contagiosum virus
cgaagagcgagaacacgg

SEQ ID NO: 3101492 - RNA, 18 nt, Molluscum contagiosum virus
cgaagagggucgugcagg

SEQ ID NO: 3101493 - RNA, 16 nt, Molluscum contagiosum virus
cgaagagugcgcaaca

SEQ ID NO: 3101494 - RNA, 16 nt, Molluscum contagiosum virus
cgaagcaggcgccauc

SEQ ID NO: 3101495 - RNA, 23 nt, Molluscum contagiosum virus
ccuggugcuggggcuagcgcugc

SEQ ID NO: 3101496 - RNA, 15 nt, Molluscum contagiosum virus
ccugguggagcacuu

SEQ ID NO: 3101497 - RNA, 19 nt, Molluscum contagiosum virus
ccuggugugccagcggcgc

SEQ ID NO: 3101498 - RNA, 12 nt, Molluscum contagiosum virus
cgaacugcuggg

SEQ ID NO: 3101499 - RNA, 18 nt, Molluscum contagiosum virus
cgaagaaggggccgaagu

SEQ ID NO: 3101500 - RNA, 15 nt, Molluscum contagiosum virus
cgaagaccaccagca

SEQ ID NO: 3101501 - RNA, 23 nt, Molluscum contagiosum virus
cgaagaccaccagcaccagcaca

SEQ ID NO: 3101502 - RNA, 18 nt, Molluscum contagiosum virus
cgaagacgagcgcgugcc

SEQ ID NO: 3101503 - RNA, 19 nt, Molluscum contagiosum virus
cgaaggcaaccgcgacgag

SEQ ID NO: 3101504 - RNA, 14 nt, Molluscum contagiosum virus
cgaagcgcgcagcg

SEQ ID NO: 3101505 - RNA, 16 nt, Molluscum contagiosum virus
cgaagcugcgcuugcg

SEQ ID NO: 3101506 - RNA, 18 nt, Molluscum contagiosum virus
cgaagcugcgcuugcgcg

SEQ ID NO: 3101507 - RNA, 17 nt, Molluscum contagiosum virus
cgacacgcgcccgccgc

SEQ ID NO: 3101508 - RNA, 13 nt, Molluscum contagiosum virus
cgacaacucgcgc

SEQ ID NO: 3101509 - RNA, 19 nt, Molluscum contagiosum virus
cgacaacgcacccgcgcgg

SEQ ID NO: 3101510 - RNA, 18 nt, Molluscum contagiosum virus
cgacaugccucgcggccc

SEQ ID NO: 3101511 - RNA, 16 nt, Molluscum contagiosum virus
cgaccaaaugcgcgug

SEQ ID NO: 3101512 - RNA, 16 nt, Molluscum contagiosum virus
cgacagcgcgcgcacg

SEQ ID NO: 3101513 - RNA, 14 nt, Molluscum contagiosum virus
cgacagcgugcgcg

SEQ ID NO: 3101514 - RNA, 17 nt, Molluscum contagiosum virus
cgacacugugcuggcgc

SEQ ID NO: 3101515 - RNA, 13 nt, Molluscum contagiosum virus
cgacagcgacgag

SEQ ID NO: 3101516 - RNA, 20 nt, Molluscum contagiosum virus
cgacccaucggagaagugcu

SEQ ID NO: 3101517 - RNA, 23 nt, Molluscum contagiosum virus
cgacguuuucuuugcgcucauca

SEQ ID NO: 3101518 - RNA, 14 nt, Molluscum contagiosum virus
cgacuacgcgcugc

SEQ ID NO: 3101519 - RNA, 18 nt, Molluscum contagiosum virus
cgacuagcgugcgcagca

SEQ ID NO: 3101520 - RNA, 21 nt, Molluscum contagiosum virus
cgacuagcgugcgcagcauuc

SEQ ID NO: 3101521 - RNA, 17 nt, Molluscum contagiosum virus
cgacucggugcucaugc

SEQ ID NO: 3101522 - RNA, 19 nt, Molluscum contagiosum virus
cgacucggugcucaugcgc

SEQ ID NO: 3101523 - RNA, 16 nt, Molluscum contagiosum virus
cgacucucaacgagcg

SEQ ID NO: 3101524 - RNA, 15 nt, Molluscum contagiosum virus
cgacgugcgcgcugc

SEQ ID NO: 3101525 - RNA, 13 nt, Molluscum contagiosum virus
cgacgugcgcgug

SEQ ID NO: 3101526 - RNA, 22 nt, Molluscum contagiosum virus
cgacguggagccugaggccgcg

SEQ ID NO: 3101527 - RNA, 19 nt, Molluscum contagiosum virus
cgaccauuuccugcgagug

SEQ ID NO: 3101528 - RNA, 13 nt, Molluscum contagiosum virus
cgaccacgugcca

SEQ ID NO: 3101529 - RNA, 16 nt, Molluscum contagiosum virus
cgaccacgugccagag

SEQ ID NO: 3101530 - RNA, 14 nt, Molluscum contagiosum virus
cgagcaaggcgcgc

SEQ ID NO: 3101531 - RNA, 15 nt, Molluscum contagiosum virus
cgagcaaugcgagca

SEQ ID NO: 3101532 - RNA, 18 nt, Molluscum contagiosum virus
cgagagugacgccucgag

SEQ ID NO: 3101533 - RNA, 15 nt, Molluscum contagiosum virus
cgagauucguggcga

SEQ ID NO: 3101534 - RNA, 21 nt, Molluscum contagiosum virus
cgagauucguggcgagcaucu

SEQ ID NO: 3101535 - RNA, 17 nt, Molluscum contagiosum virus
cgagggcgccgggcgca

SEQ ID NO: 3101536 - RNA, 14 nt, Molluscum contagiosum virus
cgagggcgcgcugg

SEQ ID NO: 3101537 - RNA, 20 nt, Molluscum contagiosum virus
cgagggccuuggcggcgcgg

SEQ ID NO: 3101538 - RNA, 16 nt, Molluscum contagiosum virus
cgagggaugcgcacac

SEQ ID NO: 3101539 - RNA, 14 nt, Molluscum contagiosum virus
cgaguaccgcgcgc

SEQ ID NO: 3101540 - RNA, 22 nt, Molluscum contagiosum virus
cgaguacgcucuccaugcgcgc

SEQ ID NO: 3101541 - RNA, 16 nt, Molluscum contagiosum virus
cgaguacugcugcggc

SEQ ID NO: 3101542 - RNA, 18 nt, Molluscum contagiosum virus
cgaguacugcugcggcuc

SEQ ID NO: 3101543 - RNA, 20 nt, Molluscum contagiosum virus
cgaguauacucgacgcgcgc

SEQ ID NO: 3101544 - RNA, 17 nt, Molluscum contagiosum virus
cgagucaaugacacgag

SEQ ID NO: 3101545 - RNA, 20 nt, Molluscum contagiosum virus
cgaguccccagacuucucca

SEQ ID NO: 3101546 - RNA, 22 nt, Molluscum contagiosum virus
cgagggggacgugcccuacgcg

SEQ ID NO: 3101547 - RNA, 14 nt, Molluscum contagiosum virus
cgaggucgcgucca

SEQ ID NO: 3101548 - RNA, 13 nt, Molluscum contagiosum virus
cgagagcgcgcgc

SEQ ID NO: 3101549 - RNA, 22 nt, Molluscum contagiosum virus
cgagacugcuacgucgcggcgc

SEQ ID NO: 3101550 - RNA, 20 nt, Molluscum contagiosum virus
cgagaauuucgacagcaucc

SEQ ID NO: 3101551 - RNA, 14 nt, Molluscum contagiosum virus
cgagacacgcgagc

SEQ ID NO: 3101552 - RNA, 13 nt, Molluscum contagiosum virus
cgacuuuucgcgc

SEQ ID NO: 3101553 - RNA, 18 nt, Molluscum contagiosum virus
cgacuuuucgcgccgcgg

SEQ ID NO: 3101554 - RNA, 16 nt, Molluscum contagiosum virus
cgagaccagccgcgag

SEQ ID NO: 3101555 - RNA, 17 nt, Molluscum contagiosum virus
cgagaccagccgcgagc

SEQ ID NO: 3101556 - RNA, 17 nt, Molluscum contagiosum virus
cgagacgcagacgacgc

SEQ ID NO: 3101557 - RNA, 15 nt, Molluscum contagiosum virus
cgagacgcugcgcga

SEQ ID NO: 3101558 - RNA, 15 nt, Molluscum contagiosum virus
cgagacgcugcugca

SEQ ID NO: 3101559 - RNA, 19 nt, Molluscum contagiosum virus
cgacucgagcgagcuacgc

SEQ ID NO: 3101560 - RNA, 17 nt, Molluscum contagiosum virus
cgacucgcagcucacga

SEQ ID NO: 3101561 - RNA, 13 nt, Molluscum contagiosum virus
cgacucgcgcccg

SEQ ID NO: 3101562 - RNA, 16 nt, Molluscum contagiosum virus
cgacuucggcgcaacg

SEQ ID NO: 3101563 - RNA, 13 nt, Molluscum contagiosum virus
cgacuucucgcgc

SEQ ID NO: 3101564 - RNA, 20 nt, Molluscum contagiosum virus
cgacuugcugcggagcgccu

SEQ ID NO: 3101565 - RNA, 19 nt, Molluscum contagiosum virus
cgagaaaaagcugucgcgc

SEQ ID NO: 3101566 - RNA, 23 nt, Molluscum contagiosum virus
cgagaaaaagcugucgcgcagca

SEQ ID NO: 3101567 - RNA, 20 nt, Molluscum contagiosum virus
cgagaaagaccuugucagug

SEQ ID NO: 3101568 - RNA, 18 nt, Molluscum contagiosum virus
cgagaaagucaugcucgc

SEQ ID NO: 3101569 - RNA, 15 nt, Molluscum contagiosum virus
cgagaaaugcgcaca

SEQ ID NO: 3101570 - RNA, 13 nt, Molluscum contagiosum virus
cgagaacuggcgc

SEQ ID NO: 3101571 - RNA, 17 nt, Molluscum contagiosum virus
cgagaacuggcgcagca

SEQ ID NO: 3101572 - RNA, 15 nt, Molluscum contagiosum virus
cgagaagacggggcg

SEQ ID NO: 3101573 - RNA, 20 nt, Molluscum contagiosum virus
cgagaagacggggcgcacgc

SEQ ID NO: 3101574 - RNA, 15 nt, Molluscum contagiosum virus
cggaugccacgcagc

SEQ ID NO: 3101575 - RNA, 16 nt, Molluscum contagiosum virus
cggaugccacgcagcu

SEQ ID NO: 3101576 - RNA, 15 nt, Molluscum contagiosum virus
cggaugucacgcaga

SEQ ID NO: 3101577 - RNA, 14 nt, Molluscum contagiosum virus
cggcaaaggcccgc

SEQ ID NO: 3101578 - RNA, 18 nt, Molluscum contagiosum virus
cggcaaaggcccgcgagc

SEQ ID NO: 3101579 - RNA, 17 nt, Molluscum contagiosum virus
cggcaaccgcgcccgcg

SEQ ID NO: 3101580 - RNA, 15 nt, Molluscum contagiosum virus
cggcaacgcugccgc

SEQ ID NO: 3101581 - RNA, 17 nt, Molluscum contagiosum virus
cggaucugcgcacacgu

SEQ ID NO: 3101582 - RNA, 15 nt, Molluscum contagiosum virus
cggaguccgcgccca

SEQ ID NO: 3101583 - RNA, 14 nt, Molluscum contagiosum virus
cggauacgcgcaca

SEQ ID NO: 3101584 - RNA, 16 nt, Molluscum contagiosum virus
cggauauggcgcgccg

SEQ ID NO: 3101585 - RNA, 20 nt, Molluscum contagiosum virus
cggaucagccccgcgccagc

SEQ ID NO: 3101586 - RNA, 21 nt, Molluscum contagiosum virus
cggaucagccccgcgccagca

SEQ ID NO: 3101587 - RNA, 20 nt, Molluscum contagiosum virus
cggagguuggaagcacgcaa

SEQ ID NO: 3101588 - RNA, 18 nt, Molluscum contagiosum virus
cggaggucgagcgcgccg

SEQ ID NO: 3101589 - RNA, 22 nt, Molluscum contagiosum virus
cggagcucgccaaagcgcgccu

SEQ ID NO: 3101590 - RNA, 16 nt, Molluscum contagiosum virus
cggagcugcgcgcgcu

SEQ ID NO: 3101591 - RNA, 16 nt, Molluscum contagiosum virus
cggagcuggcguugcc

SEQ ID NO: 3101592 - RNA, 18 nt, Molluscum contagiosum virus
cggagcuggcguugccga

SEQ ID NO: 3101593 - RNA, 19 nt, Molluscum contagiosum virus
cggaggagcgauccacgag

SEQ ID NO: 3101594 - RNA, 18 nt, Molluscum contagiosum virus
cggaggcacgggcucgau

SEQ ID NO: 3101595 - RNA, 18 nt, Molluscum contagiosum virus
cggaggccgcucccgcga

SEQ ID NO: 3101596 - RNA, 14 nt, Molluscum contagiosum virus
cgcugccgcuggcg

SEQ ID NO: 3101597 - RNA, 23 nt, Molluscum contagiosum virus
cgcugccgcuucgugcgcggaga

SEQ ID NO: 3101598 - RNA, 15 nt, Molluscum contagiosum virus
cgcugccggcaacgc

SEQ ID NO: 3101599 - RNA, 22 nt, Molluscum contagiosum virus
cgcugagcaagcucaagaagcc

SEQ ID NO: 3101600 - RNA, 12 nt, Molluscum contagiosum virus
cgcugacggcgc

SEQ ID NO: 3101601 - RNA, 20 nt, Molluscum contagiosum virus
cgcugacggcgcugcgcgug

SEQ ID NO: 3101602 - RNA, 22 nt, Molluscum contagiosum virus
cgcugaucaccgaggagccgcg

SEQ ID NO: 3101603 - RNA, 16 nt, Molluscum contagiosum virus
cgcugcaaggcgcgcg

SEQ ID NO: 3101604 - RNA, 20 nt, Molluscum contagiosum virus
cgcugcacaguucacggcgc

SEQ ID NO: 3101605 - RNA, 23 nt, Molluscum contagiosum virus
cgcugcacaguucacggcgcucg

SEQ ID NO: 3101606 - RNA, 13 nt, Molluscum contagiosum virus
cgcugcacgcucu

SEQ ID NO: 3101607 - RNA, 22 nt, Molluscum contagiosum virus
cgcugcagaacuguagcguccg

SEQ ID NO: 3101608 - RNA, 16 nt, Molluscum contagiosum virus
cgcugccaacgcggac

SEQ ID NO: 3101609 - RNA, 15 nt, Molluscum contagiosum virus
cgcugcccgcgcaca

SEQ ID NO: 3101610 - RNA, 15 nt, Molluscum contagiosum virus
cgcugcccgcgcacg

SEQ ID NO: 3101611 - RNA, 17 nt, Molluscum contagiosum virus
cgcugcccgcgcacgag

SEQ ID NO: 3101612 - RNA, 17 nt, Molluscum contagiosum virus
cgcugccgcgcgcgccg

SEQ ID NO: 3101613 - RNA, 16 nt, Molluscum contagiosum virus
cggagaucgacacgag

SEQ ID NO: 3101614 - RNA, 14 nt, Molluscum contagiosum virus
cggagccgcggcag

SEQ ID NO: 3101615 - RNA, 16 nt, Molluscum contagiosum virus
cggagcgcagcugccg

SEQ ID NO: 3101616 - RNA, 16 nt, Molluscum contagiosum virus
cggacugggagcaccg

SEQ ID NO: 3101617 - RNA, 19 nt, Molluscum contagiosum virus
cggacuucgacgcgcggca

SEQ ID NO: 3101618 - RNA, 20 nt, Molluscum contagiosum virus
cggacuucgacgcgcggcag

SEQ ID NO: 3101619 - RNA, 18 nt, Molluscum contagiosum virus
cggacuucucgcucacgc

SEQ ID NO: 3101620 - RNA, 18 nt, Molluscum contagiosum virus
cggacuucuugcgcggcg

SEQ ID NO: 3101621 - RNA, 20 nt, Molluscum contagiosum virus
cggacuuuucgcgcgugcgc

SEQ ID NO: 3101622 - RNA, 20 nt, Molluscum contagiosum virus
cggagaacaugcucgccagc

SEQ ID NO: 3101623 - RNA, 16 nt, Molluscum contagiosum virus
cggagaagugcgcagc

SEQ ID NO: 3101624 - RNA, 23 nt, Molluscum contagiosum virus
cggagaagugcuccgcacgugga

SEQ ID NO: 3101625 - RNA, 18 nt, Molluscum contagiosum virus
cggagacaccagcuccgc

SEQ ID NO: 3101626 - RNA, 21 nt, Molluscum contagiosum virus
cggagagcagugccgcucgcu

SEQ ID NO: 3101627 - RNA, 14 nt, Molluscum contagiosum virus
cgccuccgggcgca

SEQ ID NO: 3101628 - RNA, 18 nt, Molluscum contagiosum virus
cgccuccgagcgcgcgug

SEQ ID NO: 3101629 - RNA, 20 nt, Molluscum contagiosum virus
cgccguuucgcaagucuccc

SEQ ID NO: 3101630 - RNA, 14 nt, Molluscum contagiosum virus
cgccuccaagaaga

SEQ ID NO: 3101631 - RNA, 18 nt, Molluscum contagiosum virus
cgccugacucccgucagc

SEQ ID NO: 3101632 - RNA, 14 nt, Molluscum contagiosum virus
cgccugcacuacug

SEQ ID NO: 3101633 - RNA, 20 nt, Molluscum contagiosum virus
cgcucgagcuccgagggcgc

SEQ ID NO: 3101634 - RNA, 22 nt, Molluscum contagiosum virus
cgcucgaggaccucgcgcgccg

SEQ ID NO: 3101635 - RNA, 18 nt, Molluscum contagiosum virus
cgcucgaggaggaccacg

SEQ ID NO: 3101636 - RNA, 13 nt, Molluscum contagiosum virus
cgcucgagggcgc

SEQ ID NO: 3101637 - RNA, 14 nt, Molluscum contagiosum virus
cgcucgagggcgcc

SEQ ID NO: 3101638 - RNA, 20 nt, Molluscum contagiosum virus
cgcucgcgacgugcgcgcug

SEQ ID NO: 3101639 - RNA, 14 nt, Molluscum contagiosum virus
cgcucgcgagaagu

SEQ ID NO: 3101640 - RNA, 22 nt, Molluscum contagiosum virus
cgcucgcgcaaguccagcgcgc

SEQ ID NO: 3101641 - RNA, 23 nt, Molluscum contagiosum virus
cgcucgcgcaaguccagcgcgcu

SEQ ID NO: 3101642 - RNA, 22 nt, Molluscum contagiosum virus
cgcucgcgcgcaugcucgcgcu

SEQ ID NO: 3101643 - RNA, 12 nt, Molluscum contagiosum virus
cgcucgcgcucc

SEQ ID NO: 3101644 - RNA, 13 nt, Molluscum contagiosum virus
cgcucgcgcuucc

SEQ ID NO: 3101645 - RNA, 18 nt, Molluscum contagiosum virus
cgcucgcgugccgcggac

SEQ ID NO: 3101646 - RNA, 21 nt, Molluscum contagiosum virus
cgcucgcgugccgcggacgcc

SEQ ID NO: 3101647 - RNA, 11 nt, Molluscum contagiosum virus
cgcucgcuaga

SEQ ID NO: 3101648 - RNA, 18 nt, Molluscum contagiosum virus
cgcucgcuagaggacgcc

SEQ ID NO: 3101649 - RNA, 12 nt, Molluscum contagiosum virus
cgcucgcucagc

SEQ ID NO: 3101650 - RNA, 16 nt, Molluscum contagiosum virus
cgcucgcucgcucagc

SEQ ID NO: 3101651 - RNA, 12 nt, Molluscum contagiosum virus
cgcucgcugucc

SEQ ID NO: 3101652 - RNA, 22 nt, Molluscum contagiosum virus
cgcucguggaucgcgcgcaccu

SEQ ID NO: 3101653 - RNA, 16 nt, Molluscum contagiosum virus
cgcucuacgccagcga

SEQ ID NO: 3101654 - RNA, 17 nt, Molluscum contagiosum virus
cgcucuccaugcgcgcg

SEQ ID NO: 3101655 - RNA, 16 nt, Molluscum contagiosum virus
cgcucucgcuggcucc

SEQ ID NO: 3101656 - RNA, 17 nt, Molluscum contagiosum virus
cgcucguccagcugcgc

SEQ ID NO: 3101657 - RNA, 20 nt, Molluscum contagiosum virus
cgcucguccagcugcgcgag

SEQ ID NO: 3101658 - RNA, 23 nt, Molluscum contagiosum virus
cgcucgucggcggcaugcgcgcg

SEQ ID NO: 3101659 - RNA, 19 nt, Molluscum contagiosum virus
cgcucugccaccgcggcgc

SEQ ID NO: 3101660 - RNA, 21 nt, Molluscum contagiosum virus
cgcucuuacugcagcagcucc

SEQ ID NO: 3101661 - RNA, 21 nt, Molluscum contagiosum virus
cgcucuucguggugcucacgc

SEQ ID NO: 3101662 - RNA, 21 nt, Molluscum contagiosum virus
cgcucuuuugcaagcgcgaaa

SEQ ID NO: 3101663 - RNA, 15 nt, Molluscum contagiosum virus
cgccucgagcacgcc

SEQ ID NO: 3101664 - RNA, 17 nt, Molluscum contagiosum virus
cgccucgagcacgccuc

SEQ ID NO: 3101665 - RNA, 20 nt, Molluscum contagiosum virus
cgccucggacuucgacgcgc

SEQ ID NO: 3101666 - RNA, 21 nt, Molluscum contagiosum virus
cgccucggacuucgacgcgcg

SEQ ID NO: 3101667 - RNA, 23 nt, Molluscum contagiosum virus
cgccucgggaaaacgcgcggcag

SEQ ID NO: 3101668 - RNA, 24 nt, Molluscum contagiosum virus
cgccucgggaaaacgcgcggcagc

SEQ ID NO: 3101669 - RNA, 18 nt, Molluscum contagiosum virus
cgcucggaaagagcgcgc

SEQ ID NO: 3101670 - RNA, 15 nt, Molluscum contagiosum virus
cgcucggcacucgcu

SEQ ID NO: 3101671 - RNA, 18 nt, Molluscum contagiosum virus
cgcucggcguggugcugg

SEQ ID NO: 3101672 - RNA, 15 nt, Molluscum contagiosum virus
cgcucggcugccgug

SEQ ID NO: 3101673 - RNA, 16 nt, Molluscum contagiosum virus
cgcucggcccgcggac

SEQ ID NO: 3101674 - RNA, 14 nt, Molluscum contagiosum virus
cgaguucacggcga

SEQ ID NO: 3101675 - RNA, 14 nt, Molluscum contagiosum virus
cgagucgcgccgag

SEQ ID NO: 3101676 - RNA, 15 nt, Molluscum contagiosum virus
cgagucgcgggcgcg

SEQ ID NO: 3101677 - RNA, 17 nt, Molluscum contagiosum virus
cgagucguacacgcaga

SEQ ID NO: 3101678 - RNA, 17 nt, Molluscum contagiosum virus
cgagugcgccgcgcccg

SEQ ID NO: 3101679 - RNA, 12 nt, Molluscum contagiosum virus
cgagugcgcgug

SEQ ID NO: 3101680 - RNA, 12 nt, Molluscum contagiosum virus
cgagugugcaug

SEQ ID NO: 3101681 - RNA, 16 nt, Molluscum contagiosum virus
cgagugugcgcgcccc

SEQ ID NO: 3101682 - RNA, 14 nt, Molluscum contagiosum virus
cgagugugugcauc

SEQ ID NO: 3101683 - RNA, 19 nt, Molluscum contagiosum virus
cgaucuuccgcgacgagcu

SEQ ID NO: 3101684 - RNA, 21 nt, Molluscum contagiosum virus
cgaucuucuucuugcgcaccu

SEQ ID NO: 3101685 - RNA, 17 nt, Molluscum contagiosum virus
cgaugagaacaacagcg

SEQ ID NO: 3101686 - RNA, 17 nt, Molluscum contagiosum virus
cgaugccaacagacuug

SEQ ID NO: 3101687 - RNA, 14 nt, Molluscum contagiosum virus
cgauggggcgcucg

SEQ ID NO: 3101688 - RNA, 15 nt, Molluscum contagiosum virus
cgauccuguccaucu

SEQ ID NO: 3101689 - RNA, 15 nt, Molluscum contagiosum virus
cgaucgcagcagugc

SEQ ID NO: 3101690 - RNA, 14 nt, Molluscum contagiosum virus
cgaucaagacauuu

SEQ ID NO: 3101691 - RNA, 20 nt, Molluscum contagiosum virus
cgaucaagacauuucuccuc

SEQ ID NO: 3101692 - RNA, 18 nt, Molluscum contagiosum virus
cgccaccucggcguuggc

SEQ ID NO: 3101693 - RNA, 22 nt, Molluscum contagiosum virus
cgccaccucggcguuggccacg

SEQ ID NO: 3101694 - RNA, 19 nt, Molluscum contagiosum virus
cgccacgaagaacgcggcg

SEQ ID NO: 3101695 - RNA, 14 nt, Molluscum contagiosum virus
cgccacgagcgccg

SEQ ID NO: 3101696 - RNA, 21 nt, Molluscum contagiosum virus
cgccacgagcgccgcgacgcc

SEQ ID NO: 3101697 - RNA, 20 nt, Molluscum contagiosum virus
cgccacgagcgccgcgugcg

SEQ ID NO: 3101698 - RNA, 17 nt, Molluscum contagiosum virus
cgccacuagcaaggcgc

SEQ ID NO: 3101699 - RNA, 19 nt, Molluscum contagiosum virus
cgauguacgcgugcaggaa

SEQ ID NO: 3101700 - RNA, 14 nt, Molluscum contagiosum virus
cgccacugccacgg

SEQ ID NO: 3101701 - RNA, 18 nt, Molluscum contagiosum virus
cgccacugccacggcugc

SEQ ID NO: 3101702 - RNA, 18 nt, Molluscum contagiosum virus
cgccacugcggcaacgag

SEQ ID NO: 3101703 - RNA, 16 nt, Molluscum contagiosum virus
cgccacuggaagaaca

SEQ ID NO: 3101704 - RNA, 13 nt, Molluscum contagiosum virus
cgccagcacgcgc

SEQ ID NO: 3101705 - RNA, 15 nt, Molluscum contagiosum virus
cgccagcagcgcccg

SEQ ID NO: 3101706 - RNA, 18 nt, Molluscum contagiosum virus
cgccagcaguccgccguc

SEQ ID NO: 3101707 - RNA, 18 nt, Molluscum contagiosum virus
cgccagcgucgcgcgccg

SEQ ID NO: 3101708 - RNA, 18 nt, Molluscum contagiosum virus
cgccagcuaagccggagc

SEQ ID NO: 3101709 - RNA, 18 nt, Molluscum contagiosum virus
cgccagcuccgcgcggcg

SEQ ID NO: 3101710 - RNA, 19 nt, Molluscum contagiosum virus
cgccagcuccgcgcggcgc

SEQ ID NO: 3101711 - RNA, 16 nt, Molluscum contagiosum virus
cgccaccggcagugcu

SEQ ID NO: 3101712 - RNA, 13 nt, Molluscum contagiosum virus
cgccgugcgcgug

SEQ ID NO: 3101713 - RNA, 19 nt, Molluscum contagiosum virus
cgccgucgucgccgccguc

SEQ ID NO: 3101714 - RNA, 23 nt, Molluscum contagiosum virus
cgccguccaugugcccgcggcgc

SEQ ID NO: 3101715 - RNA, 21 nt, Molluscum contagiosum virus
cgccguuccacuacaagcagc

SEQ ID NO: 3101716 - RNA, 15 nt, Molluscum contagiosum virus
cgccguucguugucc

SEQ ID NO: 3101717 - RNA, 14 nt, Molluscum contagiosum virus
cgccguugcgcgug

SEQ ID NO: 3101718 - RNA, 21 nt, Molluscum contagiosum virus
cgccguguaccgccgcggccg

SEQ ID NO: 3101719 - RNA, 13 nt, Molluscum contagiosum virus
cgccguccgcgca

SEQ ID NO: 3101720 - RNA, 16 nt, Molluscum contagiosum virus
cgccguccgcgcagcc

SEQ ID NO: 3101721 - RNA, 20 nt, Molluscum contagiosum virus
cgccgggccugcggcggcgc

SEQ ID NO: 3101722 - RNA, 19 nt, Molluscum contagiosum virus
cgccggccuuguucgcgcu

SEQ ID NO: 3101723 - RNA, 14 nt, Molluscum contagiosum virus
cgccggcgcgcgcg

SEQ ID NO: 3101724 - RNA, 13 nt, Molluscum contagiosum virus
cgccggcgcggcg

SEQ ID NO: 3101725 - RNA, 13 nt, Molluscum contagiosum virus
cgcccacgugcca

SEQ ID NO: 3101726 - RNA, 17 nt, Molluscum contagiosum virus
cgcccagcaccuggaac

SEQ ID NO: 3101727 - RNA, 14 nt, Molluscum contagiosum virus
cgcccagcgccacg

SEQ ID NO: 3101728 - RNA, 19 nt, Molluscum contagiosum virus
cgcccaacgcccgcgcccg

SEQ ID NO: 3101729 - RNA, 18 nt, Molluscum contagiosum virus
cgccaucgugguggagga

SEQ ID NO: 3101730 - RNA, 23 nt, Molluscum contagiosum virus
cgccggccagcgagucucgcgcg

SEQ ID NO: 3101731 - RNA, 15 nt, Molluscum contagiosum virus
cgccgcugucacgcg

SEQ ID NO: 3101732 - RNA, 16 nt, Molluscum contagiosum virus
cgccgcugucacgcga

SEQ ID NO: 3101733 - RNA, 16 nt, Molluscum contagiosum virus
cgccggacagcucagc

SEQ ID NO: 3101734 - RNA, 16 nt, Molluscum contagiosum virus
cgccaugccaacgcac

SEQ ID NO: 3101735 - RNA, 15 nt, Molluscum contagiosum virus
cgccaugcugcgcga

SEQ ID NO: 3101736 - RNA, 21 nt, Molluscum contagiosum virus
cgccauuuccgagcgcgcacg

SEQ ID NO: 3101737 - RNA, 23 nt, Molluscum contagiosum virus
cgccauuuccgagcgcgcacgag

SEQ ID NO: 3101738 - RNA, 19 nt, Molluscum contagiosum virus
cgccauuuucgugcgcguc

SEQ ID NO: 3101739 - RNA, 17 nt, Molluscum contagiosum virus
cgccauccagcgcauca

SEQ ID NO: 3101740 - RNA, 14 nt, Molluscum contagiosum virus
cgccauccgcgagc

SEQ ID NO: 3101741 - RNA, 20 nt, Molluscum contagiosum virus
cgccauccgcgagcuaauca

SEQ ID NO: 3101742 - RNA, 22 nt, Molluscum contagiosum virus
cgccaguggccagcgcgcggcg

SEQ ID NO: 3101743 - RNA, 23 nt, Molluscum contagiosum virus
cgccaguggccagcgcgcggcgc

SEQ ID NO: 3101744 - RNA, 23 nt, Molluscum contagiosum virus
cgccagccuggaguacucgaagu

SEQ ID NO: 3101745 - RNA, 15 nt, Molluscum contagiosum virus
cgccagcgacgcgac

SEQ ID NO: 3101746 - RNA, 20 nt, Molluscum contagiosum virus
cgccagggcggagccccgag

SEQ ID NO: 3101747 - RNA, 17 nt, Molluscum contagiosum virus
cgccaggugcgaaggcu

SEQ ID NO: 3101748 - RNA, 16 nt, Molluscum contagiosum virus
cgccaguccgcggcgc

SEQ ID NO: 3101749 - RNA, 17 nt, Molluscum contagiosum virus
aagccaccgcgcaggac

SEQ ID NO: 3101750 - RNA, 18 nt, Molluscum contagiosum virus
aagcgcccucguguacga

SEQ ID NO: 3101751 - RNA, 14 nt, Molluscum contagiosum virus
aagcgccgcgcgcg

SEQ ID NO: 3101752 - RNA, 21 nt, Molluscum contagiosum virus
aagcgccgcucgguacaacuu

SEQ ID NO: 3101753 - RNA, 14 nt, Molluscum contagiosum virus
aagcgcgcucgggc

SEQ ID NO: 3101754 - RNA, 13 nt, Molluscum contagiosum virus
aagcgcggccgcg

SEQ ID NO: 3101755 - RNA, 18 nt, Molluscum contagiosum virus
aagcagguggccgcgcgc

SEQ ID NO: 3101756 - RNA, 17 nt, Molluscum contagiosum virus
aagcauggucuucgcgc

SEQ ID NO: 3101757 - RNA, 22 nt, Molluscum contagiosum virus
aagagccauguuuccugcggcg

SEQ ID NO: 3101758 - RNA, 20 nt, Molluscum contagiosum virus
aagagcccgcacacgccgcg

SEQ ID NO: 3101759 - RNA, 15 nt, Molluscum contagiosum virus
aagagcgcgccucuc

SEQ ID NO: 3101760 - RNA, 16 nt, Molluscum contagiosum virus
aagaggacguguacgc

SEQ ID NO: 3101761 - RNA, 22 nt, Molluscum contagiosum virus
aagacgcuggugaucacgcacg

SEQ ID NO: 3101762 - RNA, 15 nt, Molluscum contagiosum virus
aagacgggcccgcga

SEQ ID NO: 3101763 - RNA, 15 nt, Molluscum contagiosum virus
aagacggggccgcga

SEQ ID NO: 3101764 - RNA, 22 nt, Molluscum contagiosum virus
aagacguggacgaggccaaccu

SEQ ID NO: 3101765 - RNA, 22 nt, Molluscum contagiosum virus
aagauauacaccaggcgcgugc

SEQ ID NO: 3101766 - RNA, 15 nt, Molluscum contagiosum virus
aagauccaagcgcaa

SEQ ID NO: 3101767 - RNA, 14 nt, Molluscum contagiosum virus
aagaugcugcgcgu

SEQ ID NO: 3101768 - RNA, 16 nt, Molluscum contagiosum virus
aacugcagcagcuggc

SEQ ID NO: 3101769 - RNA, 12 nt, Molluscum contagiosum virus
aacuucgcgcug

SEQ ID NO: 3101770 - RNA, 22 nt, Molluscum contagiosum virus
aagaagaggccagcacaagccg

SEQ ID NO: 3101771 - RNA, 22 nt, Molluscum contagiosum virus
aagaagaggccggcacaagccg

SEQ ID NO: 3101772 - RNA, 19 nt, Molluscum contagiosum virus
aacgugcugcgccgccugc

SEQ ID NO: 3101773 - RNA, 14 nt, Molluscum contagiosum virus
aacucugcucgugc

SEQ ID NO: 3101774 - RNA, 13 nt, Molluscum contagiosum virus
aacgggcucgugc

SEQ ID NO: 3101775 - RNA, 15 nt, Molluscum contagiosum virus
ucccacguacgagca

SEQ ID NO: 3101776 - RNA, 16 nt, Molluscum contagiosum virus
uccaugcgcgcgcgau

SEQ ID NO: 3101777 - RNA, 17 nt, Molluscum contagiosum virus
uccaggugcugggcgag

SEQ ID NO: 3101778 - RNA, 24 nt, Molluscum contagiosum virus
uccagguggccaacggcgccaucg

SEQ ID NO: 3101779 - RNA, 16 nt, Molluscum contagiosum virus
uccaguggcgcccgug

SEQ ID NO: 3101780 - RNA, 23 nt, Molluscum contagiosum virus
ucgaacgcaaggugugcgcgcug

SEQ ID NO: 3101781 - RNA, 14 nt, Molluscum contagiosum virus
ucgaacgcgcgugc

SEQ ID NO: 3101782 - RNA, 15 nt, Molluscum contagiosum virus
ucgaacgcgcgugcg

SEQ ID NO: 3101783 - RNA, 17 nt, Molluscum contagiosum virus
ucgaacgcgcgugcgcg

SEQ ID NO: 3101784 - RNA, 22 nt, Molluscum contagiosum virus
ucgaagacgucggggcgcgugc

SEQ ID NO: 3101785 - RNA, 13 nt, Molluscum contagiosum virus
ucgaagaggucuc

SEQ ID NO: 3101786 - RNA, 14 nt, Molluscum contagiosum virus
ucgaagcagugcuc

SEQ ID NO: 3101787 - RNA, 19 nt, Molluscum contagiosum virus
ucgaaggcgugcgccgugc

SEQ ID NO: 3101788 - RNA, 19 nt, Molluscum contagiosum virus
uccuggcacuggcgcgcac

SEQ ID NO: 3101789 - RNA, 11 nt, Molluscum contagiosum virus
uccugggcgac

SEQ ID NO: 3101790 - RNA, 14 nt, Molluscum contagiosum virus
uccuguccucucga

SEQ ID NO: 3101791 - RNA, 14 nt, Molluscum contagiosum virus
uccgaggacgacgc

SEQ ID NO: 3101792 - RNA, 16 nt, Molluscum contagiosum virus
uccugccgucgcccgu

SEQ ID NO: 3101793 - RNA, 18 nt, Molluscum contagiosum virus
uccgagccggacgcgcga

SEQ ID NO: 3101794 - RNA, 16 nt, Molluscum contagiosum virus
uccgagcgcgcgcgcu

SEQ ID NO: 3101795 - RNA, 16 nt, Molluscum contagiosum virus
ucgacgacgcgcgcac

SEQ ID NO: 3101796 - RNA, 17 nt, Molluscum contagiosum virus
ucgacgacgcgcgcacg

SEQ ID NO: 3101797 - RNA, 13 nt, Molluscum contagiosum virus
ucgacgcgcgcgg

SEQ ID NO: 3101798 - RNA, 19 nt, Molluscum contagiosum virus
ucgacgcggugcgcgcgug

SEQ ID NO: 3101799 - RNA, 20 nt, Molluscum contagiosum virus
ucgacgcggugcgcgcgugc

SEQ ID NO: 3101800 - RNA, 21 nt, Molluscum contagiosum virus
ucgacgcggugcgcgcgugcg

SEQ ID NO: 3101801 - RNA, 23 nt, Molluscum contagiosum virus
ucgacgcgugcauggcacgcgag

SEQ ID NO: 3101802 - RNA, 22 nt, Molluscum contagiosum virus
ucgaaaaggcugauccugcgcg

SEQ ID NO: 3101803 - RNA, 23 nt, Molluscum contagiosum virus
ucgaaaaggcugauccugcgcgu

SEQ ID NO: 3101804 - RNA, 19 nt, Molluscum contagiosum virus
ucgacaagaucaaggucac

SEQ ID NO: 3101805 - RNA, 13 nt, Molluscum contagiosum virus
ucgacagcgugcg

SEQ ID NO: 3101806 - RNA, 18 nt, Molluscum contagiosum virus
ucgaccaaaugcgcgugc

SEQ ID NO: 3101807 - RNA, 19 nt, Molluscum contagiosum virus
ucgacccguaccccgaggg

SEQ ID NO: 3101808 - RNA, 17 nt, Molluscum contagiosum virus
ucgacccuucgcgcgcg

SEQ ID NO: 3101809 - RNA, 15 nt, Molluscum contagiosum virus
ucccucgucgcgcuu

SEQ ID NO: 3101810 - RNA, 14 nt, Molluscum contagiosum virus
ucccgucgagcacg

SEQ ID NO: 3101811 - RNA, 19 nt, Molluscum contagiosum virus
uccgaccucuuuccgcgcu

SEQ ID NO: 3101812 - RNA, 16 nt, Molluscum contagiosum virus
uccgacccggcucgcu

SEQ ID NO: 3101813 - RNA, 18 nt, Molluscum contagiosum virus
ucccgcgccacgagcgcc

SEQ ID NO: 3101814 - RNA, 17 nt, Molluscum contagiosum virus
ucccgcuggcggcacgu

SEQ ID NO: 3101815 - RNA, 12 nt, Molluscum contagiosum virus
uugugcucgcuu

SEQ ID NO: 3101816 - RNA, 17 nt, Molluscum contagiosum virus
ucguggccguagugcuc

SEQ ID NO: 3101817 - RNA, 21 nt, Molluscum contagiosum virus
ucguggcguugcugcugcgcg

SEQ ID NO: 3101818 - RNA, 20 nt, Molluscum contagiosum virus
ucgugggauaggcacacacg

SEQ ID NO: 3101819 - RNA, 16 nt, Molluscum contagiosum virus
ucgugcccgcacacgc

SEQ ID NO: 3101820 - RNA, 17 nt, Molluscum contagiosum virus
ucgugcccgcacacgca

SEQ ID NO: 3101821 - RNA, 20 nt, Molluscum contagiosum virus
ucgugccgccugcgcgcacc

SEQ ID NO: 3101822 - RNA, 21 nt, Molluscum contagiosum virus
ucgugccugucggcacaucuc

SEQ ID NO: 3101823 - RNA, 16 nt, Molluscum contagiosum virus
ucgugccugucucgca

SEQ ID NO: 3101824 - RNA, 20 nt, Molluscum contagiosum virus
ucgugccuuuugcgcgcugc

SEQ ID NO: 3101825 - RNA, 12 nt, Molluscum contagiosum virus
ucgugcgcgacu

SEQ ID NO: 3101826 - RNA, 23 nt, Molluscum contagiosum virus
ucgugcgcgacuuggggcucgcc

SEQ ID NO: 3101827 - RNA, 21 nt, Molluscum contagiosum virus
ucguggaggaaacacccgcgc

SEQ ID NO: 3101828 - RNA, 18 nt, Molluscum contagiosum virus
ucguggaucgcgcgcacc

SEQ ID NO: 3101829 - RNA, 18 nt, Molluscum contagiosum virus
ucguggccaacuucgcgg

SEQ ID NO: 3101830 - RNA, 17 nt, Molluscum contagiosum virus
ucgugcuccacgcgcag

SEQ ID NO: 3101831 - RNA, 21 nt, Molluscum contagiosum virus
ucgugcucguguguccgcacg

SEQ ID NO: 3101832 - RNA, 22 nt, Molluscum contagiosum virus
ucgugcucguguguccgcacgc

SEQ ID NO: 3101833 - RNA, 21 nt, Molluscum contagiosum virus
uuugcgagcacuguacgcacg

SEQ ID NO: 3101834 - RNA, 15 nt, Molluscum contagiosum virus
uuucguacgcggagg

SEQ ID NO: 3101835 - RNA, 15 nt, Molluscum contagiosum virus
uuucguccgccgcuc

SEQ ID NO: 3101836 - RNA, 15 nt, Molluscum contagiosum virus
ucgucaaugcgcacg

SEQ ID NO: 3101837 - RNA, 14 nt, Molluscum contagiosum virus
ucgucacgcuagcg

SEQ ID NO: 3101838 - RNA, 17 nt, Molluscum contagiosum virus
ucgucacggccuucgcg

SEQ ID NO: 3101839 - RNA, 15 nt, Molluscum contagiosum virus
ucgucccgcgcuccg

SEQ ID NO: 3101840 - RNA, 15 nt, Molluscum contagiosum virus
ucguaguccagcgcg

SEQ ID NO: 3101841 - RNA, 13 nt, Molluscum contagiosum virus
ucguccgcucgug

SEQ ID NO: 3101842 - RNA, 16 nt, Molluscum contagiosum virus
ucguccggcgcucgcc

SEQ ID NO: 3101843 - RNA, 22 nt, Molluscum contagiosum virus
ucgucgaucgccucgacgcugg

SEQ ID NO: 3101844 - RNA, 21 nt, Molluscum contagiosum virus
ucgucuccgggggcgcgcugg

SEQ ID NO: 3101845 - RNA, 16 nt, Molluscum contagiosum virus
ucgucugcgucucgcg

SEQ ID NO: 3101846 - RNA, 20 nt, Molluscum contagiosum virus
ucgucuuugcgaacgcgcaa

SEQ ID NO: 3101847 - RNA, 21 nt, Molluscum contagiosum virus
ucgugcaaagcaucgacgugc

SEQ ID NO: 3101848 - RNA, 19 nt, Molluscum contagiosum virus
ucgugcaauggcaggugcg

SEQ ID NO: 3101849 - RNA, 17 nt, Molluscum contagiosum virus
ucgugcaccacgugcuc

SEQ ID NO: 3101850 - RNA, 22 nt, Molluscum contagiosum virus
ucggugccagauugccggcgcg

SEQ ID NO: 3101851 - RNA, 16 nt, Molluscum contagiosum virus
ucggugcucaugcgcg

SEQ ID NO: 3101852 - RNA, 14 nt, Molluscum contagiosum virus
ucggugggcucgcg

SEQ ID NO: 3101853 - RNA, 20 nt, Molluscum contagiosum virus
ucguaaaagacgcgcucgcg

SEQ ID NO: 3101854 - RNA, 23 nt, Molluscum contagiosum virus
ucgggcuagcaagcacgccaggu

SEQ ID NO: 3101855 - RNA, 13 nt, Molluscum contagiosum virus
ucgggcugcgcgg

SEQ ID NO: 3101856 - RNA, 22 nt, Molluscum contagiosum virus
ucggggcagggaaagagcacgc

SEQ ID NO: 3101857 - RNA, 16 nt, Molluscum contagiosum virus
ucggguacacgugcuu

SEQ ID NO: 3101858 - RNA, 15 nt, Molluscum contagiosum virus
ucggggcugacggcc

SEQ ID NO: 3101859 - RNA, 20 nt, Molluscum contagiosum virus
ucgagaugcucuacgugcug

SEQ ID NO: 3101860 - RNA, 16 nt, Molluscum contagiosum virus
ucgagcaccugucgcg

SEQ ID NO: 3101861 - RNA, 19 nt, Molluscum contagiosum virus
ucgagcaccugucgcgcga

SEQ ID NO: 3101862 - RNA, 14 nt, Molluscum contagiosum virus
ucgagcacgcgcga

SEQ ID NO: 3101863 - RNA, 15 nt, Molluscum contagiosum virus
ucgagcacgcgcgag

SEQ ID NO: 3101864 - RNA, 20 nt, Molluscum contagiosum virus
ucgagcagauucacgagcuc

SEQ ID NO: 3101865 - RNA, 15 nt, Molluscum contagiosum virus
ucgggccccugcgcg

SEQ ID NO: 3101866 - RNA, 16 nt, Molluscum contagiosum virus
ucgggccccugcgcga

SEQ ID NO: 3101867 - RNA, 19 nt, Molluscum contagiosum virus
ucgggccgcugccgucgcg

SEQ ID NO: 3101868 - RNA, 20 nt, Molluscum contagiosum virus
ucgggcgccaacacgagcgc

SEQ ID NO: 3101869 - RNA, 13 nt, Molluscum contagiosum virus
ucgagaccucgcg

SEQ ID NO: 3101870 - RNA, 19 nt, Molluscum contagiosum virus
ucgagaccucgcgcuuccg

SEQ ID NO: 3101871 - RNA, 15 nt, Molluscum contagiosum virus
ucgagacgcugcgcg

SEQ ID NO: 3101872 - RNA, 20 nt, Molluscum contagiosum virus
ucgagaagacggggcgcacg

SEQ ID NO: 3101873 - RNA, 21 nt, Molluscum contagiosum virus
ucgagaagacggggcgcacgc

SEQ ID NO: 3101874 - RNA, 18 nt, Molluscum contagiosum virus
ucgagaccacgcgcgcug

SEQ ID NO: 3101875 - RNA, 19 nt, Molluscum contagiosum virus
ucgagaccacgcgcgcugc

SEQ ID NO: 3101876 - RNA, 18 nt, Molluscum contagiosum virus
ucgacggcuucauccgcg

SEQ ID NO: 3101877 - RNA, 20 nt, Molluscum contagiosum virus
ucgacggcuucauccgcgcg

SEQ ID NO: 3101878 - RNA, 22 nt, Molluscum contagiosum virus
ucgacgacgaugacaucuggag

SEQ ID NO: 3101879 - RNA, 13 nt, Molluscum contagiosum virus
uccugcggcgcug

SEQ ID NO: 3101880 - RNA, 20 nt, Molluscum contagiosum virus
ucgacgggaacgaggucauc

SEQ ID NO: 3101881 - RNA, 13 nt, Molluscum contagiosum virus
ucgacgggcgcag

SEQ ID NO: 3101882 - RNA, 17 nt, Molluscum contagiosum virus
ucgacgugaucgcgcag

SEQ ID NO: 3101883 - RNA, 15 nt, Molluscum contagiosum virus
ucgacgugcagacgc

SEQ ID NO: 3101884 - RNA, 12 nt, Molluscum contagiosum virus
ucgacguggacc

SEQ ID NO: 3101885 - RNA, 21 nt, Molluscum contagiosum virus
ucgacgugguacuggcgcccg

SEQ ID NO: 3101886 - RNA, 15 nt, Molluscum contagiosum virus
ucgacuacacgcgcu

SEQ ID NO: 3101887 - RNA, 17 nt, Molluscum contagiosum virus
ccgguggcgcgcgagcu

SEQ ID NO: 3101888 - RNA, 21 nt, Molluscum contagiosum virus
ccguaccccgagggcgcgacc

SEQ ID NO: 3101889 - RNA, 22 nt, Molluscum contagiosum virus
ccguaccccgagggcgcgaccg

SEQ ID NO: 3101890 - RNA, 14 nt, Molluscum contagiosum virus
ccguaccgcgcccg

SEQ ID NO: 3101891 - RNA, 21 nt, Molluscum contagiosum virus
ccguacgcaacuugugcgccc

SEQ ID NO: 3101892 - RNA, 15 nt, Molluscum contagiosum virus
ccguacucgcguccg

SEQ ID NO: 3101893 - RNA, 21 nt, Molluscum contagiosum virus
ccguaggcgggccugcgcccg

SEQ ID NO: 3101894 - RNA, 21 nt, Molluscum contagiosum virus
ccguagugcucaucgugcccg

SEQ ID NO: 3101895 - RNA, 19 nt, Molluscum contagiosum virus
ccguccgccucgagcacgc

SEQ ID NO: 3101896 - RNA, 12 nt, Molluscum contagiosum virus
ccgucucgcgcu

SEQ ID NO: 3101897 - RNA, 12 nt, Molluscum contagiosum virus
ccgugagcgcgc

SEQ ID NO: 3101898 - RNA, 19 nt, Molluscum contagiosum virus
ccgucuuugcggacgcgcg

SEQ ID NO: 3101899 - RNA, 13 nt, Molluscum contagiosum virus
ccgugaacucgac

SEQ ID NO: 3101900 - RNA, 15 nt, Molluscum contagiosum virus
ccgucgccgcgcccg

SEQ ID NO: 3101901 - RNA, 12 nt, Molluscum contagiosum virus
ccgucgcgagcu

SEQ ID NO: 3101902 - RNA, 13 nt, Molluscum contagiosum virus
ccgucgcgcucga

SEQ ID NO: 3101903 - RNA, 14 nt, Molluscum contagiosum virus
ccgucgucgccgcc

SEQ ID NO: 3101904 - RNA, 13 nt, Molluscum contagiosum virus
ccgucgucgccgu

SEQ ID NO: 3101905 - RNA, 22 nt, Molluscum contagiosum virus
ccgguacguacagugcgcgcac

SEQ ID NO: 3101906 - RNA, 16 nt, Molluscum contagiosum virus
ccggucaccgcguccg

SEQ ID NO: 3101907 - RNA, 13 nt, Molluscum contagiosum virus
ccggugcucgccc

SEQ ID NO: 3101908 - RNA, 17 nt, Molluscum contagiosum virus
ccgguggaagagcccgc

SEQ ID NO: 3101909 - RNA, 22 nt, Molluscum contagiosum virus
ccgugcugcggcaaccgcgccc

SEQ ID NO: 3101910 - RNA, 23 nt, Molluscum contagiosum virus
ccgugcugcggcaaccgcgcccg

SEQ ID NO: 3101911 - RNA, 16 nt, Molluscum contagiosum virus
cgcgcaauagcgcccg

SEQ ID NO: 3101912 - RNA, 17 nt, Molluscum contagiosum virus
cgcgcaauagcgcccgu

SEQ ID NO: 3101913 - RNA, 12 nt, Molluscum contagiosum virus
cgcgcacaagau

SEQ ID NO: 3101914 - RNA, 13 nt, Molluscum contagiosum virus
cgcgcacacgcug

SEQ ID NO: 3101915 - RNA, 14 nt, Molluscum contagiosum virus
cgcgcacacgcuga

SEQ ID NO: 3101916 - RNA, 20 nt, Molluscum contagiosum virus
cgcgcacaucggcacugcuc

SEQ ID NO: 3101917 - RNA, 13 nt, Molluscum contagiosum virus
ccgugcccgagcc

SEQ ID NO: 3101918 - RNA, 15 nt, Molluscum contagiosum virus
ccgugcccgagcccg

SEQ ID NO: 3101919 - RNA, 17 nt, Molluscum contagiosum virus
ccgugccgccggcgccg

SEQ ID NO: 3101920 - RNA, 19 nt, Molluscum contagiosum virus
ccgugccgccggcgccgcu

SEQ ID NO: 3101921 - RNA, 11 nt, Molluscum contagiosum virus
ccgugcgagcu

SEQ ID NO: 3101922 - RNA, 14 nt, Molluscum contagiosum virus
cgcgcaucugccgc

SEQ ID NO: 3101923 - RNA, 17 nt, Molluscum contagiosum virus
cgcgcaucugccgcgac

SEQ ID NO: 3101924 - RNA, 16 nt, Molluscum contagiosum virus
cgcgcaugaggcggcg

SEQ ID NO: 3101925 - RNA, 15 nt, Molluscum contagiosum virus
cgcgcaugcucgcgc

SEQ ID NO: 3101926 - RNA, 18 nt, Molluscum contagiosum virus
cgcgcauggagagcguac

SEQ ID NO: 3101927 - RNA, 22 nt, Molluscum contagiosum virus
cgcgccaacacguuuucuuuca

SEQ ID NO: 3101928 - RNA, 21 nt, Molluscum contagiosum virus
cgcgccaacgacuagcgugcg

SEQ ID NO: 3101929 - RNA, 14 nt, Molluscum contagiosum virus
cgcgcaucgcgggc

SEQ ID NO: 3101930 - RNA, 22 nt, Molluscum contagiosum virus
cgcgcaucggcggcagcgccag

SEQ ID NO: 3101931 - RNA, 22 nt, Molluscum contagiosum virus
cgcgccauggcgagcuagugca

SEQ ID NO: 3101932 - RNA, 22 nt, Molluscum contagiosum virus
cgcgccaugguuuccguguccg

SEQ ID NO: 3101933 - RNA, 18 nt, Molluscum contagiosum virus
cgcgcccaagaagaagca

SEQ ID NO: 3101934 - RNA, 19 nt, Molluscum contagiosum virus
cgcgcccaaggccgcgggc

SEQ ID NO: 3101935 - RNA, 17 nt, Molluscum contagiosum virus
cgcgcccaccagcagcc

SEQ ID NO: 3101936 - RNA, 17 nt, Molluscum contagiosum virus
cgcgcccagcgccacga

SEQ ID NO: 3101937 - RNA, 22 nt, Molluscum contagiosum virus
cgcgccagcacgcgcucguccg

SEQ ID NO: 3101938 - RNA, 14 nt, Molluscum contagiosum virus
cgcgccagcagcgc

SEQ ID NO: 3101939 - RNA, 15 nt, Molluscum contagiosum virus
cgcgccagcaguccg

SEQ ID NO: 3101940 - RNA, 13 nt, Molluscum contagiosum virus
cgcgccagcgaca

SEQ ID NO: 3101941 - RNA, 16 nt, Molluscum contagiosum virus
cgcgcacgagcgcggg

SEQ ID NO: 3101942 - RNA, 17 nt, Molluscum contagiosum virus
cgcgcacgagcgcgggc

SEQ ID NO: 3101943 - RNA, 14 nt, Molluscum contagiosum virus
cgcgcacgcgcacg

SEQ ID NO: 3101944 - RNA, 14 nt, Molluscum contagiosum virus
cgcgcacgcgcgac

SEQ ID NO: 3101945 - RNA, 15 nt, Molluscum contagiosum virus
cgcgcacgcgcgagc

SEQ ID NO: 3101946 - RNA, 13 nt, Molluscum contagiosum virus
cgcgcacgcgcgc

SEQ ID NO: 3101947 - RNA, 13 nt, Molluscum contagiosum virus
cgcgcacgcggcg

SEQ ID NO: 3101948 - RNA, 14 nt, Molluscum contagiosum virus
cgcgcacgcggcgc

SEQ ID NO: 3101949 - RNA, 16 nt, Molluscum contagiosum virus
cgcgcacgcugcgcac

SEQ ID NO: 3101950 - RNA, 22 nt, Molluscum contagiosum virus
cgcgcacguaccuucgcggagc

SEQ ID NO: 3101951 - RNA, 17 nt, Molluscum contagiosum virus
cgcgcacugccacgcgg

SEQ ID NO: 3101952 - RNA, 20 nt, Molluscum contagiosum virus
cgcgcacugccacgcggagc

SEQ ID NO: 3101953 - RNA, 14 nt, Molluscum contagiosum virus
cgcgcacugcucgc

SEQ ID NO: 3101954 - RNA, 16 nt, Molluscum contagiosum virus
cgcgcacugcucgcgc

SEQ ID NO: 3101955 - RNA, 19 nt, Molluscum contagiosum virus
cgcgcacugcucgcgcacg

SEQ ID NO: 3101956 - RNA, 13 nt, Molluscum contagiosum virus
cgcgcagaagcca

SEQ ID NO: 3101957 - RNA, 20 nt, Molluscum contagiosum virus
cgcgcagaagccaacacgca

SEQ ID NO: 3101958 - RNA, 21 nt, Molluscum contagiosum virus
cgcgcagacguggugcucgug

SEQ ID NO: 3101959 - RNA, 21 nt, Molluscum contagiosum virus
cgcgcagcacaccgucgcgug

SEQ ID NO: 3101960 - RNA, 13 nt, Molluscum contagiosum virus
cgcgcagcgcccg

SEQ ID NO: 3101961 - RNA, 15 nt, Molluscum contagiosum virus
cgcgcagcgcgucuu

SEQ ID NO: 3101962 - RNA, 13 nt, Molluscum contagiosum virus
cgcgcagcgugcc

SEQ ID NO: 3101963 - RNA, 15 nt, Molluscum contagiosum virus
cgcgcagcucgacgc

SEQ ID NO: 3101964 - RNA, 21 nt, Molluscum contagiosum virus
cgcgcagcucgccgcgcgccg

SEQ ID NO: 3101965 - RNA, 14 nt, Molluscum contagiosum virus
cgcgcagcugcgcc

SEQ ID NO: 3101966 - RNA, 17 nt, Molluscum contagiosum virus
cgcgcaggcgcgccaug

SEQ ID NO: 3101967 - RNA, 14 nt, Molluscum contagiosum virus
cgcgcaggcucgca

SEQ ID NO: 3101968 - RNA, 24 nt, Molluscum contagiosum virus
cgcgcagguugagcgcgcggaugc

SEQ ID NO: 3101969 - RNA, 22 nt, Molluscum contagiosum virus
cgcgcaguucgagcugcugcgc

SEQ ID NO: 3101970 - RNA, 14 nt, Molluscum contagiosum virus
cgcgcaguugugcg

SEQ ID NO: 3101971 - RNA, 15 nt, Molluscum contagiosum virus
cgcgcauacgcgccg

SEQ ID NO: 3101972 - RNA, 19 nt, Molluscum contagiosum virus
cgcgcauacgcgccgcgcg

SEQ ID NO: 3101973 - RNA, 20 nt, Molluscum contagiosum virus
cgcgcauacgcgccgcgcgc

SEQ ID NO: 3101974 - RNA, 12 nt, Molluscum contagiosum virus
cgcgcccucgcg

SEQ ID NO: 3101975 - RNA, 14 nt, Molluscum contagiosum virus
cgcgccgcgccgaa

SEQ ID NO: 3101976 - RNA, 14 nt, Molluscum contagiosum virus
cgcgccgcgcgccg

SEQ ID NO: 3101977 - RNA, 15 nt, Molluscum contagiosum virus
cgcgccgcgcugcug

SEQ ID NO: 3101978 - RNA, 12 nt, Molluscum contagiosum virus
cgcgccgcggcg

SEQ ID NO: 3101979 - RNA, 12 nt, Molluscum contagiosum virus
cgcgccgcgggc

SEQ ID NO: 3101980 - RNA, 20 nt, Molluscum contagiosum virus
cgcgccgcugcccgcgcacg

SEQ ID NO: 3101981 - RNA, 20 nt, Molluscum contagiosum virus
cgcgccgcugucacgcgagc

SEQ ID NO: 3101982 - RNA, 14 nt, Molluscum contagiosum virus
cgcgccggccagcg

SEQ ID NO: 3101983 - RNA, 21 nt, Molluscum contagiosum virus
cgcgccggccagcgagucucg

SEQ ID NO: 3101984 - RNA, 19 nt, Molluscum contagiosum virus
cgcgccggcccgagcguca

SEQ ID NO: 3101985 - RNA, 15 nt, Molluscum contagiosum virus
cgcgccggcgcggcg

SEQ ID NO: 3101986 - RNA, 20 nt, Molluscum contagiosum virus
cgcgccggcguucgcggagc

SEQ ID NO: 3101987 - RNA, 17 nt, Molluscum contagiosum virus
cgcgccgggaaugcugc

SEQ ID NO: 3101988 - RNA, 22 nt, Molluscum contagiosum virus
cgcgccgggaaugcugcgcacg

SEQ ID NO: 3101989 - RNA, 23 nt, Molluscum contagiosum virus
cgcgccgggaaugcugcgcacgc

SEQ ID NO: 3101990 - RNA, 13 nt, Molluscum contagiosum virus
cgcgccgggcgcc

SEQ ID NO: 3101991 - RNA, 15 nt, Molluscum contagiosum virus
cgcgccgggcgccag

SEQ ID NO: 3101992 - RNA, 13 nt, Molluscum contagiosum virus
cgcgcccugcacg

SEQ ID NO: 3101993 - RNA, 22 nt, Molluscum contagiosum virus
cgcgcccugcacgaccgcggac

SEQ ID NO: 3101994 - RNA, 14 nt, Molluscum contagiosum virus
cgcgcccugcgcgc

SEQ ID NO: 3101995 - RNA, 20 nt, Molluscum contagiosum virus
cgcgcccugcgcgcgagagc

SEQ ID NO: 3101996 - RNA, 19 nt, Molluscum contagiosum virus
cgcgcccuugcacucgacc

SEQ ID NO: 3101997 - RNA, 18 nt, Molluscum contagiosum virus
cgcgcccuuugcggcacg

SEQ ID NO: 3101998 - RNA, 19 nt, Molluscum contagiosum virus
cgcgccgaggacgcgcccg

SEQ ID NO: 3101999 - RNA, 21 nt, Molluscum contagiosum virus
cgcgccgaggacuaccuggcg

SEQ ID NO: 3102000 - RNA, 11 nt, Molluscum contagiosum virus
cgcgccgagua

SEQ ID NO: 3102001 - RNA, 17 nt, Molluscum contagiosum virus
cgcgccgaguacugcug

SEQ ID NO: 3102002 - RNA, 12 nt, Molluscum contagiosum virus
cgcgccgcaaac

SEQ ID NO: 3102003 - RNA, 16 nt, Molluscum contagiosum virus
cgcgccgcacgugcug

SEQ ID NO: 3102004 - RNA, 12 nt, Molluscum contagiosum virus
cgcgcccgccgc

SEQ ID NO: 3102005 - RNA, 14 nt, Molluscum contagiosum virus
cgcgcccgcgcccg

SEQ ID NO: 3102006 - RNA, 17 nt, Molluscum contagiosum virus
cgcgcccgcggcgcacg

SEQ ID NO: 3102007 - RNA, 13 nt, Molluscum contagiosum virus
cgcgcccgcgucg

SEQ ID NO: 3102008 - RNA, 22 nt, Molluscum contagiosum virus
cgcgcccgcgucgcgcgccgcg

SEQ ID NO: 3102009 - RNA, 15 nt, Molluscum contagiosum virus
cgcgcccgcugcgcg

SEQ ID NO: 3102010 - RNA, 15 nt, Molluscum contagiosum virus
cgcgcccggcgcccg

SEQ ID NO: 3102011 - RNA, 15 nt, Molluscum contagiosum virus
cgucgugcuccacgc

SEQ ID NO: 3102012 - RNA, 21 nt, Molluscum contagiosum virus
cgucguccggaggcacgggcu

SEQ ID NO: 3102013 - RNA, 14 nt, Molluscum contagiosum virus
cgucgucgucgucg

SEQ ID NO: 3102014 - RNA, 23 nt, Molluscum contagiosum virus
cgucguagcaaaugcgcugcucg

SEQ ID NO: 3102015 - RNA, 21 nt, Molluscum contagiosum virus
cgucggcuuggacagcaagca

SEQ ID NO: 3102016 - RNA, 17 nt, Molluscum contagiosum virus
cgucgggaaguguugcc

SEQ ID NO: 3102017 - RNA, 23 nt, Molluscum contagiosum virus
cgucggcggcaugcgcgcgcagc

SEQ ID NO: 3102018 - RNA, 16 nt, Molluscum contagiosum virus
cgcgccucgaacugcu

SEQ ID NO: 3102019 - RNA, 17 nt, Molluscum contagiosum virus
cgcgccucucgaggccg

SEQ ID NO: 3102020 - RNA, 20 nt, Molluscum contagiosum virus
cgcgccucucgaggccggca

SEQ ID NO: 3102021 - RNA, 14 nt, Molluscum contagiosum virus
cgcgccugcgcgag

SEQ ID NO: 3102022 - RNA, 15 nt, Molluscum contagiosum virus
cgcgccugcgcgagc

SEQ ID NO: 3102023 - RNA, 16 nt, Molluscum contagiosum virus
cgcgccugcgcgagca

SEQ ID NO: 3102024 - RNA, 13 nt, Molluscum contagiosum virus
cgcgccugcuggc

SEQ ID NO: 3102025 - RNA, 14 nt, Molluscum contagiosum virus
cgucgcgccgcucg

SEQ ID NO: 3102026 - RNA, 13 nt, Molluscum contagiosum virus
cgucgcgcgccgc

SEQ ID NO: 3102027 - RNA, 13 nt, Molluscum contagiosum virus
cgucgcgcgcucg

SEQ ID NO: 3102028 - RNA, 17 nt, Molluscum contagiosum virus
cgucgcggccacgcacu

SEQ ID NO: 3102029 - RNA, 17 nt, Molluscum contagiosum virus
cgucgcggucgcggagc

SEQ ID NO: 3102030 - RNA, 18 nt, Molluscum contagiosum virus
cgcgccgucucgcggggc

SEQ ID NO: 3102031 - RNA, 18 nt, Molluscum contagiosum virus
cgcgccgcgggcgcagag

SEQ ID NO: 3102032 - RNA, 15 nt, Molluscum contagiosum virus
cgcgccuaccgcgcg

SEQ ID NO: 3102033 - RNA, 20 nt, Molluscum contagiosum virus
gaggccuacgugcugcgcac

SEQ ID NO: 3102034 - RNA, 23 nt, Molluscum contagiosum virus
gaggcccugcuugcccgcgccgc

SEQ ID NO: 3102035 - RNA, 14 nt, Molluscum contagiosum virus
gaggccuucgcgcc

SEQ ID NO: 3102036 - RNA, 18 nt, Molluscum contagiosum virus
gaggcgcgcacgcugcgc

SEQ ID NO: 3102037 - RNA, 17 nt, Molluscum contagiosum virus
gaggcgcguccgcggcc

SEQ ID NO: 3102038 - RNA, 19 nt, Molluscum contagiosum virus
gaggcgcuaccucgcggga

SEQ ID NO: 3102039 - RNA, 14 nt, Molluscum contagiosum virus
gaggcgcugccgcg

SEQ ID NO: 3102040 - RNA, 20 nt, Molluscum contagiosum virus
gaggcgcugccgcgggacga

SEQ ID NO: 3102041 - RNA, 19 nt, Molluscum contagiosum virus
gaggcggagcugcccgcga

SEQ ID NO: 3102042 - RNA, 21 nt, Molluscum contagiosum virus
gaggcguacuccguggugcgc

SEQ ID NO: 3102043 - RNA, 18 nt, Molluscum contagiosum virus
gaggcguccugcgggagc

SEQ ID NO: 3102044 - RNA, 17 nt, Molluscum contagiosum virus
gaggcucgagcgcgcgc

SEQ ID NO: 3102045 - RNA, 16 nt, Molluscum contagiosum virus
gaggcucucgagcacu

SEQ ID NO: 3102046 - RNA, 14 nt, Molluscum contagiosum virus
gauguucucgccag

SEQ ID NO: 3102047 - RNA, 14 nt, Molluscum contagiosum virus
gauuucgcgcagca

SEQ ID NO: 3102048 - RNA, 15 nt, Molluscum contagiosum virus
gauugcccgcgcgcg

SEQ ID NO: 3102049 - RNA, 16 nt, Molluscum contagiosum virus
gcaacaaaagagcgcg

SEQ ID NO: 3102050 - RNA, 16 nt, Molluscum contagiosum virus
gcaaccccgcgcugcg

SEQ ID NO: 3102051 - RNA, 19 nt, Molluscum contagiosum virus
gcaaaugccgagcgcacgc

SEQ ID NO: 3102052 - RNA, 20 nt, Molluscum contagiosum virus
gcaaaugccgagcgcacgcc

SEQ ID NO: 3102053 - RNA, 13 nt, Molluscum contagiosum virus
gcaaaugcgcugc

SEQ ID NO: 3102054 - RNA, 18 nt, Molluscum contagiosum virus
gcaacgagcacgugugcg

SEQ ID NO: 3102055 - RNA, 20 nt, Molluscum contagiosum virus
gcaacgagcagcccgugcgc

SEQ ID NO: 3102056 - RNA, 22 nt, Molluscum contagiosum virus
gcaacgcaaacgcacgcgcgcg

SEQ ID NO: 3102057 - RNA, 16 nt, Molluscum contagiosum virus
gcaacggcggcgcaag

SEQ ID NO: 3102058 - RNA, 12 nt, Molluscum contagiosum virus
gcaacguggcgc

SEQ ID NO: 3102059 - RNA, 15 nt, Molluscum contagiosum virus
gcaacguggcgccgc

SEQ ID NO: 3102060 - RNA, 18 nt, Molluscum contagiosum virus
gcaacguugugcgcaacg

SEQ ID NO: 3102061 - RNA, 14 nt, Molluscum contagiosum virus
gcaacucgcgcugc

SEQ ID NO: 3102062 - RNA, 14 nt, Molluscum contagiosum virus
gcaaaagcgcucgc

SEQ ID NO: 3102063 - RNA, 19 nt, Molluscum contagiosum virus
gcaaacauguagcgcgcgc

SEQ ID NO: 3102064 - RNA, 15 nt, Molluscum contagiosum virus
gcaaacgcacgcgcg

SEQ ID NO: 3102065 - RNA, 11 nt, Molluscum contagiosum virus
gcaaacgcuga

SEQ ID NO: 3102066 - RNA, 18 nt, Molluscum contagiosum virus
gcaaacgcugacggcgcu

SEQ ID NO: 3102067 - RNA, 21 nt, Molluscum contagiosum virus
gcaaacgcugacggcgcugcg

SEQ ID NO: 3102068 - RNA, 23 nt, Molluscum contagiosum virus
gcaaacgcuguuuucacgcaagg

SEQ ID NO: 3102069 - RNA, 15 nt, Molluscum contagiosum virus
gcaaagccugcugcg

SEQ ID NO: 3102070 - RNA, 18 nt, Molluscum contagiosum virus
gcaaagccugcugcgcgc

SEQ ID NO: 3102071 - RNA, 20 nt, Molluscum contagiosum virus
gcaaagccugcugcgcgcgc

SEQ ID NO: 3102072 - RNA, 18 nt, Molluscum contagiosum virus
gcaaagcggggcgcgcgc

SEQ ID NO: 3102073 - RNA, 22 nt, Molluscum contagiosum virus
gcaaaggaguuggcgcgcaagc

SEQ ID NO: 3102074 - RNA, 19 nt, Molluscum contagiosum virus
gcaaaggcccgcgagcacg

SEQ ID NO: 3102075 - RNA, 19 nt, Molluscum contagiosum virus
gcaaaguucucgcguucgc

SEQ ID NO: 3102076 - RNA, 21 nt, Molluscum contagiosum virus
cuauguaaagaaacgcgcccg

SEQ ID NO: 3102077 - RNA, 17 nt, Molluscum contagiosum virus
gagcucuuccccgcggg

SEQ ID NO: 3102078 - RNA, 21 nt, Molluscum contagiosum virus
gagcucuucgacagcgugcgc

SEQ ID NO: 3102079 - RNA, 18 nt, Molluscum contagiosum virus
gagcuggagcgagugcgc

SEQ ID NO: 3102080 - RNA, 20 nt, Molluscum contagiosum virus
gagcuggccgaagucgcagc

SEQ ID NO: 3102081 - RNA, 15 nt, Molluscum contagiosum virus
gagcuggcugggcac

SEQ ID NO: 3102082 - RNA, 23 nt, Molluscum contagiosum virus
gagcugggauaacaggcgugcgc

SEQ ID NO: 3102083 - RNA, 22 nt, Molluscum contagiosum virus
gagcuguucaacaucguggcgc

SEQ ID NO: 3102084 - RNA, 14 nt, Molluscum contagiosum virus
gagcugcgcgcgcu

SEQ ID NO: 3102085 - RNA, 14 nt, Molluscum contagiosum virus
gagcugcgugugcc

SEQ ID NO: 3102086 - RNA, 20 nt, Molluscum contagiosum virus
gagcugcuaacaacaugagg

SEQ ID NO: 3102087 - RNA, 15 nt, Molluscum contagiosum virus
cuacgucaagcaggc

SEQ ID NO: 3102088 - RNA, 15 nt, Molluscum contagiosum virus
cuacguuccgcgcgg

SEQ ID NO: 3102089 - RNA, 17 nt, Molluscum contagiosum virus
cuacuucgaggccggca

SEQ ID NO: 3102090 - RNA, 22 nt, Molluscum contagiosum virus
cuagccgccgcugccgcgcgcg

SEQ ID NO: 3102091 - RNA, 16 nt, Molluscum contagiosum virus
cuagccgugcgcgcac

SEQ ID NO: 3102092 - RNA, 20 nt, Molluscum contagiosum virus
cuagccugugcccuggaagc

SEQ ID NO: 3102093 - RNA, 16 nt, Molluscum contagiosum virus
cuagcgugcgcagcau

SEQ ID NO: 3102094 - RNA, 14 nt, Molluscum contagiosum virus
cuagcucugcgcgc

SEQ ID NO: 3102095 - RNA, 16 nt, Molluscum contagiosum virus
cuagcucugcgcgcgg

SEQ ID NO: 3102096 - RNA, 23 nt, Molluscum contagiosum virus
cuagcugugcgcuacguggcgcg

SEQ ID NO: 3102097 - RNA, 22 nt, Molluscum contagiosum virus
gaggacgagccccgcgccggcg

SEQ ID NO: 3102098 - RNA, 12 nt, Molluscum contagiosum virus
gaggacgcgggc

SEQ ID NO: 3102099 - RNA, 21 nt, Molluscum contagiosum virus
gaggacgcgggcguguccgcg

SEQ ID NO: 3102100 - RNA, 22 nt, Molluscum contagiosum virus
gaggacgcgggcguguccgcgg

SEQ ID NO: 3102101 - RNA, 15 nt, Molluscum contagiosum virus
gaggacggcgcgggc

SEQ ID NO: 3102102 - RNA, 17 nt, Molluscum contagiosum virus
gaggacggcgcgggcgc

SEQ ID NO: 3102103 - RNA, 15 nt, Molluscum contagiosum virus
gaggacggcgugcgc

SEQ ID NO: 3102104 - RNA, 18 nt, Molluscum contagiosum virus
gaggacuaccuggcggcg

SEQ ID NO: 3102105 - RNA, 19 nt, Molluscum contagiosum virus
gaggacuaccuggcggcgc

SEQ ID NO: 3102106 - RNA, 16 nt, Molluscum contagiosum virus
gaggacuuccgcgcgc

SEQ ID NO: 3102107 - RNA, 13 nt, Molluscum contagiosum virus
gaggacacgcgca

SEQ ID NO: 3102108 - RNA, 14 nt, Molluscum contagiosum virus
gagcuuugugcgac

SEQ ID NO: 3102109 - RNA, 18 nt, Molluscum contagiosum virus
gaggaaaagcacgcggcc

SEQ ID NO: 3102110 - RNA, 15 nt, Molluscum contagiosum virus
gagcugcugcgcuac

SEQ ID NO: 3102111 - RNA, 17 nt, Molluscum contagiosum virus
gagcugcuucgcgacca

SEQ ID NO: 3102112 - RNA, 17 nt, Molluscum contagiosum virus
gaggaccacgccgacca

SEQ ID NO: 3102113 - RNA, 15 nt, Molluscum contagiosum virus
gaggaccgcgagcgc

SEQ ID NO: 3102114 - RNA, 15 nt, Molluscum contagiosum virus
gaggaccucgcgcgc

SEQ ID NO: 3102115 - RNA, 14 nt, Molluscum contagiosum virus
gaggagccgcccgc

SEQ ID NO: 3102116 - RNA, 14 nt, Molluscum contagiosum virus
gaggagagcggcgc

SEQ ID NO: 3102117 - RNA, 16 nt, Molluscum contagiosum virus
gaggaggcgcccucgc

SEQ ID NO: 3102118 - RNA, 16 nt, Molluscum contagiosum virus
gaggcacucgucgcgc

SEQ ID NO: 3102119 - RNA, 16 nt, Molluscum contagiosum virus
gaggcagccgcggcgc

SEQ ID NO: 3102120 - RNA, 20 nt, Molluscum contagiosum virus
gaggcagugcuugagcaucu

SEQ ID NO: 3102121 - RNA, 17 nt, Molluscum contagiosum virus
gaggcaugucgcggugc

SEQ ID NO: 3102122 - RNA, 20 nt, Molluscum contagiosum virus
cgucuugacaggcgcgcaag

SEQ ID NO: 3102123 - RNA, 21 nt, Molluscum contagiosum virus
cgucuugacaggcgcgcaagu

SEQ ID NO: 3102124 - RNA, 20 nt, Molluscum contagiosum virus
cgucuuugcgaacgcgcaag

SEQ ID NO: 3102125 - RNA, 20 nt, Molluscum contagiosum virus
cgucuuugcggacgcgcgag

SEQ ID NO: 3102126 - RNA, 15 nt, Molluscum contagiosum virus
cgucuccaacaagcu

SEQ ID NO: 3102127 - RNA, 19 nt, Molluscum contagiosum virus
cgucugcgaggcgcgcacg

SEQ ID NO: 3102128 - RNA, 13 nt, Molluscum contagiosum virus
cgucugcugcucg

SEQ ID NO: 3102129 - RNA, 22 nt, Molluscum contagiosum virus
cgucucgcggaagaauuccuuc

SEQ ID NO: 3102130 - RNA, 21 nt, Molluscum contagiosum virus
cgucucgcggggcaagcgcgc

SEQ ID NO: 3102131 - RNA, 15 nt, Molluscum contagiosum virus
cgugaauguacgcgg

SEQ ID NO: 3102132 - RNA, 20 nt, Molluscum contagiosum virus
cgugacaaucucugcgccgc

SEQ ID NO: 3102133 - RNA, 18 nt, Molluscum contagiosum virus
cgugacacuaccgucgcc

SEQ ID NO: 3102134 - RNA, 20 nt, Molluscum contagiosum virus
cgugacagagugccuggcgc

SEQ ID NO: 3102135 - RNA, 18 nt, Molluscum contagiosum virus
cgugagcucccgcgccac

SEQ ID NO: 3102136 - RNA, 23 nt, Molluscum contagiosum virus
cgugaggaagaccuuggacacgu

SEQ ID NO: 3102137 - RNA, 19 nt, Molluscum contagiosum virus
cgugacucggccgcggggc

SEQ ID NO: 3102138 - RNA, 19 nt, Molluscum contagiosum virus
cgugcacccuccgcacaga

SEQ ID NO: 3102139 - RNA, 17 nt, Molluscum contagiosum virus
cgugcaccucaagaaga

SEQ ID NO: 3102140 - RNA, 19 nt, Molluscum contagiosum virus
cgugcacguggcgcacacg

SEQ ID NO: 3102141 - RNA, 21 nt, Molluscum contagiosum virus
cgugcacguggcgcacacgga

SEQ ID NO: 3102142 - RNA, 16 nt, Molluscum contagiosum virus
cgugcagcggcgccac

SEQ ID NO: 3102143 - RNA, 17 nt, Molluscum contagiosum virus
cgugcagcggcgccacg

SEQ ID NO: 3102144 - RNA, 17 nt, Molluscum contagiosum virus
cgugcaggaacgcgcgc

SEQ ID NO: 3102145 - RNA, 20 nt, Molluscum contagiosum virus
cgugcaggaacgcgcgcucg

SEQ ID NO: 3102146 - RNA, 19 nt, Molluscum contagiosum virus
cgugcagggcgugcuugcc

SEQ ID NO: 3102147 - RNA, 16 nt, Molluscum contagiosum virus
cgugcaguuucuccuc

SEQ ID NO: 3102148 - RNA, 16 nt, Molluscum contagiosum virus
cgugcauggcacgcga

SEQ ID NO: 3102149 - RNA, 18 nt, Molluscum contagiosum virus
cgugcauggcacgcgagc

SEQ ID NO: 3102150 - RNA, 14 nt, Molluscum contagiosum virus
cgugcaagcccagc

SEQ ID NO: 3102151 - RNA, 21 nt, Molluscum contagiosum virus
cgugaucgcgcaggcgcgcca

SEQ ID NO: 3102152 - RNA, 16 nt, Molluscum contagiosum virus
cgugaugugcgcacag

SEQ ID NO: 3102153 - RNA, 15 nt, Molluscum contagiosum virus
cgugcaacaggagca

SEQ ID NO: 3102154 - RNA, 19 nt, Molluscum contagiosum virus
cgugcccacgagcgccagc

SEQ ID NO: 3102155 - RNA, 14 nt, Molluscum contagiosum virus
cgugccccgcgcgu

SEQ ID NO: 3102156 - RNA, 15 nt, Molluscum contagiosum virus
cgugcccgagcccgc

SEQ ID NO: 3102157 - RNA, 21 nt, Molluscum contagiosum virus
cgugcccgguacgcucgcgcu

SEQ ID NO: 3102158 - RNA, 18 nt, Molluscum contagiosum virus
cgugccacugccgccguu

SEQ ID NO: 3102159 - RNA, 16 nt, Molluscum contagiosum virus
cgugcgcagcagcucg

SEQ ID NO: 3102160 - RNA, 20 nt, Molluscum contagiosum virus
cgugcgcagcagcucggggc

SEQ ID NO: 3102161 - RNA, 16 nt, Molluscum contagiosum virus
cgugcgcaggagcagu

SEQ ID NO: 3102162 - RNA, 18 nt, Molluscum contagiosum virus
cgugcgcagugcugcgcg

SEQ ID NO: 3102163 - RNA, 13 nt, Molluscum contagiosum virus
cgugcgccgccgc

SEQ ID NO: 3102164 - RNA, 14 nt, Molluscum contagiosum virus
cgugcgagcggcgc

SEQ ID NO: 3102165 - RNA, 22 nt, Molluscum contagiosum virus
cgugcgagcggcgcgcgcugag

SEQ ID NO: 3102166 - RNA, 13 nt, Molluscum contagiosum virus
cgugccgccggcg

SEQ ID NO: 3102167 - RNA, 17 nt, Molluscum contagiosum virus
cgugccgccggcgccgc

SEQ ID NO: 3102168 - RNA, 15 nt, Molluscum contagiosum virus
cgugccgcugcgcgg

SEQ ID NO: 3102169 - RNA, 18 nt, Molluscum contagiosum virus
cgugccgcugcgcggagc

SEQ ID NO: 3102170 - RNA, 23 nt, Molluscum contagiosum virus
cgugccggaaauagcgcgcuagc

SEQ ID NO: 3102171 - RNA, 21 nt, Molluscum contagiosum virus
cgugccucugccagccgcucg

SEQ ID NO: 3102172 - RNA, 16 nt, Molluscum contagiosum virus
cuaccgcgcgcgcaag

SEQ ID NO: 3102173 - RNA, 14 nt, Molluscum contagiosum virus
cuaccgcgcgggag

SEQ ID NO: 3102174 - RNA, 17 nt, Molluscum contagiosum virus
cgugcugcagcugcgcg

SEQ ID NO: 3102175 - RNA, 23 nt, Molluscum contagiosum virus
cgugcugcggcaaccgcgcccgc

SEQ ID NO: 3102176 - RNA, 12 nt, Molluscum contagiosum virus
cgugcugcugcg

SEQ ID NO: 3102177 - RNA, 19 nt, Molluscum contagiosum virus
cgugcuggacgcgcacgcg

SEQ ID NO: 3102178 - RNA, 15 nt, Molluscum contagiosum virus
cgugcucugcuccgc

SEQ ID NO: 3102179 - RNA, 19 nt, Molluscum contagiosum virus
cgugcucugcuccgcggag

SEQ ID NO: 3102180 - RNA, 20 nt, Molluscum contagiosum virus
cgugcucugcuccgcggagg

SEQ ID NO: 3102181 - RNA, 12 nt, Molluscum contagiosum virus
cgugcgcgagcu

SEQ ID NO: 3102182 - RNA, 17 nt, Molluscum contagiosum virus
cgugcgcgcacacgacg

SEQ ID NO: 3102183 - RNA, 13 nt, Molluscum contagiosum virus
cgugcgcgccagg

SEQ ID NO: 3102184 - RNA, 15 nt, Molluscum contagiosum virus
cgugcgcgcugcgcg

SEQ ID NO: 3102185 - RNA, 14 nt, Molluscum contagiosum virus
cgugcgcugcgcgc

SEQ ID NO: 3102186 - RNA, 17 nt, Molluscum contagiosum virus
cgugcgcuggcccacgc

SEQ ID NO: 3102187 - RNA, 17 nt, Molluscum contagiosum virus
cgugcgggcgagcaugu

SEQ ID NO: 3102188 - RNA, 17 nt, Molluscum contagiosum virus
cgugcguacgugcacgu

SEQ ID NO: 3102189 - RNA, 17 nt, Molluscum contagiosum virus
cgugcguacucaacgcg

SEQ ID NO: 3102190 - RNA, 18 nt, Molluscum contagiosum virus
cgugcguacucaacgcga

SEQ ID NO: 3102191 - RNA, 14 nt, Molluscum contagiosum virus
cgugcgugcacagc

SEQ ID NO: 3102192 - RNA, 13 nt, Molluscum contagiosum virus
cgugcucacgcug

SEQ ID NO: 3102193 - RNA, 17 nt, Molluscum contagiosum virus
cgugcucacgcugcccg

SEQ ID NO: 3102194 - RNA, 15 nt, Molluscum contagiosum virus
cgugcucaggccagc

SEQ ID NO: 3102195 - RNA, 19 nt, Molluscum contagiosum virus
cgugcucaggccagcaucu

SEQ ID NO: 3102196 - RNA, 13 nt, Molluscum contagiosum virus
cgugcuccacgcg

SEQ ID NO: 3102197 - RNA, 16 nt, Molluscum contagiosum virus
cgugcuccacgcgcag

SEQ ID NO: 3102198 - RNA, 17 nt, Molluscum contagiosum virus
cgugcuccacgcgcagc

SEQ ID NO: 3102199 - RNA, 17 nt, Molluscum contagiosum virus
cgugcuccucgcguagc

SEQ ID NO: 3102200 - RNA, 22 nt, Molluscum contagiosum virus
cgugcuccucgcguagcagcgc

SEQ ID NO: 3102201 - RNA, 14 nt, Molluscum contagiosum virus
cgugcucgcgagcg

SEQ ID NO: 3102202 - RNA, 23 nt, Molluscum contagiosum virus
cgugcucgcucggcaacgccagc

SEQ ID NO: 3102203 - RNA, 20 nt, Molluscum contagiosum virus
cgugcucgguagcguggagc

SEQ ID NO: 3102204 - RNA, 19 nt, Molluscum contagiosum virus
cuagagaaccugugcgcgg

SEQ ID NO: 3102205 - RNA, 21 nt, Molluscum contagiosum virus
cuagagcagaaggugcgcagc

SEQ ID NO: 3102206 - RNA, 21 nt, Molluscum contagiosum virus
cuagagcuggcaccgggcgcc

SEQ ID NO: 3102207 - RNA, 15 nt, Molluscum contagiosum virus
cuagcaaggcgccgc

SEQ ID NO: 3102208 - RNA, 13 nt, Molluscum contagiosum virus
cuagcacgggcgg

SEQ ID NO: 3102209 - RNA, 21 nt, Molluscum contagiosum virus
cuagcacguuaaucacgauga

SEQ ID NO: 3102210 - RNA, 21 nt, Molluscum contagiosum virus
cuagcagcgugcgcaccagcu

SEQ ID NO: 3102211 - RNA, 18 nt, Molluscum contagiosum virus
cuagcccagcacgcgcgg

SEQ ID NO: 3102212 - RNA, 18 nt, Molluscum contagiosum virus
cuacugggaggacacgcg

SEQ ID NO: 3102213 - RNA, 19 nt, Molluscum contagiosum virus
cuacugggaggacacgcgc

SEQ ID NO: 3102214 - RNA, 21 nt, Molluscum contagiosum virus
cuacggcgaguucugccggcu

SEQ ID NO: 3102215 - RNA, 21 nt, Molluscum contagiosum virus
cuacggcgugcugugccugcg

SEQ ID NO: 3102216 - RNA, 19 nt, Molluscum contagiosum virus
cuaccggcaguagcagcgc

SEQ ID NO: 3102217 - RNA, 14 nt, Molluscum contagiosum virus
cuaccgucgccggu

SEQ ID NO: 3102218 - RNA, 18 nt, Molluscum contagiosum virus
cuaccuggcggcgcugga

SEQ ID NO: 3102219 - RNA, 20 nt, Molluscum contagiosum virus
cuacgcgcgcguaacagcgc

SEQ ID NO: 3102220 - RNA, 13 nt, Molluscum contagiosum virus
cuacgcgcgcgug

SEQ ID NO: 3102221 - RNA, 15 nt, Molluscum contagiosum virus
cuacgcgcugcuaga

SEQ ID NO: 3102222 - RNA, 13 nt, Molluscum contagiosum virus
cuacgagcagcgc

SEQ ID NO: 3102223 - RNA, 15 nt, Molluscum contagiosum virus
cuacgaggugcugcg

SEQ ID NO: 3102224 - RNA, 22 nt, Molluscum contagiosum virus
cuacgcaacacggcggugcccg

SEQ ID NO: 3102225 - RNA, 20 nt, Molluscum contagiosum virus
cuacgcaagcugaggcgugc

SEQ ID NO: 3102226 - RNA, 13 nt, Molluscum contagiosum virus
cuacgcagcgcgc

SEQ ID NO: 3102227 - RNA, 15 nt, Molluscum contagiosum virus
cuacgcagcgcgcgg

SEQ ID NO: 3102228 - RNA, 22 nt, Molluscum contagiosum virus
cuacgcgagcacugcgcgcgcg

SEQ ID NO: 3102229 - RNA, 21 nt, Molluscum contagiosum virus
gcaauccugguacgcgcgcgc

SEQ ID NO: 3102230 - RNA, 20 nt, Molluscum contagiosum virus
gcaaucgcgugcuugcugcg

SEQ ID NO: 3102231 - RNA, 20 nt, Molluscum contagiosum virus
gcaagagccgccggggccca

SEQ ID NO: 3102232 - RNA, 19 nt, Molluscum contagiosum virus
gcaagauucuucgcgaagg

SEQ ID NO: 3102233 - RNA, 20 nt, Molluscum contagiosum virus
gcaagcaccggcagcgcgau

SEQ ID NO: 3102234 - RNA, 16 nt, Molluscum contagiosum virus
gcaagcagcgcgcgca

SEQ ID NO: 3102235 - RNA, 13 nt, Molluscum contagiosum virus
gcaagcgcaagcc

SEQ ID NO: 3102236 - RNA, 14 nt, Molluscum contagiosum virus
gcaagcgcccgcga

SEQ ID NO: 3102237 - RNA, 14 nt, Molluscum contagiosum virus
gcaagcgcgcucgg

SEQ ID NO: 3102238 - RNA, 14 nt, Molluscum contagiosum virus
gcaagcgcguucgc

SEQ ID NO: 3102239 - RNA, 16 nt, Molluscum contagiosum virus
gcaagcgcguucgcgc

SEQ ID NO: 3102240 - RNA, 20 nt, Molluscum contagiosum virus
gcaagcgcguucgcgcgugc

SEQ ID NO: 3102241 - RNA, 22 nt, Molluscum contagiosum virus
gcaagcgcuacuugcuggcgcg

SEQ ID NO: 3102242 - RNA, 22 nt, Molluscum contagiosum virus
gcaagcgggcuucgccgccgga

SEQ ID NO: 3102243 - RNA, 14 nt, Molluscum contagiosum virus
gcaagcguacgcgu

SEQ ID NO: 3102244 - RNA, 17 nt, Molluscum contagiosum virus
gcaagcguacgcgucgc

SEQ ID NO: 3102245 - RNA, 20 nt, Molluscum contagiosum virus
gcaagcguacgcgucgcgga

SEQ ID NO: 3102246 - RNA, 16 nt, Molluscum contagiosum virus
gcaagcugagcgcgcu

SEQ ID NO: 3102247 - RNA, 18 nt, Molluscum contagiosum virus
gcaagcugagcgcgcugc

SEQ ID NO: 3102248 - RNA, 19 nt, Molluscum contagiosum virus
gcaagcugagcgcgcugcg

SEQ ID NO: 3102249 - RNA, 16 nt, Molluscum contagiosum virus
gcaagcuucgggccgc

SEQ ID NO: 3102250 - RNA, 24 nt, Molluscum contagiosum virus
gcaagcuucgggccgcugccgucg

SEQ ID NO: 3102251 - RNA, 17 nt, Molluscum contagiosum virus
gcaagcuuugugcucgc

SEQ ID NO: 3102252 - RNA, 13 nt, Molluscum contagiosum virus
gcaaggcgcgcgc

SEQ ID NO: 3102253 - RNA, 14 nt, Molluscum contagiosum virus
gcaaggcggacgcc

SEQ ID NO: 3102254 - RNA, 22 nt, Molluscum contagiosum virus
gcaagggccugcgggcggcaca

SEQ ID NO: 3102255 - RNA, 18 nt, Molluscum contagiosum virus
gcaaggugugcgcgcugc

SEQ ID NO: 3102256 - RNA, 16 nt, Molluscum contagiosum virus
gcaagguuuacgccgu

SEQ ID NO: 3102257 - RNA, 19 nt, Molluscum contagiosum virus
gcaaguccagcgcgcucga

SEQ ID NO: 3102258 - RNA, 16 nt, Molluscum contagiosum virus
gcaagucgcgcgcugc

SEQ ID NO: 3102259 - RNA, 14 nt, Molluscum contagiosum virus
gcaaguucgcugcu

SEQ ID NO: 3102260 - RNA, 15 nt, Molluscum contagiosum virus
gcaauagcgcccgua

SEQ ID NO: 3102261 - RNA, 16 nt, Molluscum contagiosum virus
gcaaugcagugcacca

SEQ ID NO: 3102262 - RNA, 16 nt, Molluscum contagiosum virus
gcaaugcgugcgugcg

SEQ ID NO: 3102263 - RNA, 17 nt, Molluscum contagiosum virus
gcaauugcugggcacaa

SEQ ID NO: 3102264 - RNA, 21 nt, Molluscum contagiosum virus
gcaagaagaucgcggcgccgc

SEQ ID NO: 3102265 - RNA, 21 nt, Molluscum contagiosum virus
gcaagaccaucaucgcgcugc

SEQ ID NO: 3102266 - RNA, 21 nt, Molluscum contagiosum virus
gcacaacgggcucgugcugga

SEQ ID NO: 3102267 - RNA, 23 nt, Molluscum contagiosum virus
gcacaacgggcucgugcuggagc

SEQ ID NO: 3102268 - RNA, 15 nt, Molluscum contagiosum virus
gcacaaacacgcgcg

SEQ ID NO: 3102269 - RNA, 16 nt, Molluscum contagiosum virus
gcacaaacacgcgcgc

SEQ ID NO: 3102270 - RNA, 18 nt, Molluscum contagiosum virus
gcacaaacacgcgcgcgc

SEQ ID NO: 3102271 - RNA, 14 nt, Molluscum contagiosum virus
gcacaaacgcgacu

SEQ ID NO: 3102272 - RNA, 20 nt, Molluscum contagiosum virus
gcacaagccguccgccucga

SEQ ID NO: 3102273 - RNA, 21 nt, Molluscum contagiosum virus
gcacaagccguccgccucgag

SEQ ID NO: 3102274 - RNA, 15 nt, Molluscum contagiosum virus
gcacacaccgcgagc

SEQ ID NO: 3102275 - RNA, 13 nt, Molluscum contagiosum virus
gcacaccgagcgc

SEQ ID NO: 3102276 - RNA, 12 nt, Molluscum contagiosum virus
gcacaccggcgc

SEQ ID NO: 3102277 - RNA, 18 nt, Molluscum contagiosum virus
gcacaccgucgcguggug

SEQ ID NO: 3102278 - RNA, 17 nt, Molluscum contagiosum virus
gcacacgaaucgcucgc

SEQ ID NO: 3102279 - RNA, 19 nt, Molluscum contagiosum virus
gcacacgacgacggcugcu

SEQ ID NO: 3102280 - RNA, 22 nt, Molluscum contagiosum virus
gcacacgacgacggcugcucgc

SEQ ID NO: 3102281 - RNA, 15 nt, Molluscum contagiosum virus
gcacacgagugcccg

SEQ ID NO: 3102282 - RNA, 18 nt, Molluscum contagiosum virus
gcacacgagugcccgcgc

SEQ ID NO: 3102283 - RNA, 22 nt, Molluscum contagiosum virus
gcacacgagugcccgcgcgcug

SEQ ID NO: 3102284 - RNA, 22 nt, Molluscum contagiosum virus
gcacacgcaccgccuggugcug

SEQ ID NO: 3102285 - RNA, 13 nt, Molluscum contagiosum virus
gcacacgcgcgcg

SEQ ID NO: 3102286 - RNA, 14 nt, Molluscum contagiosum virus
gcacacgcgcgcgc

SEQ ID NO: 3102287 - RNA, 17 nt, Molluscum contagiosum virus
gcacacgcgcgcgcagg

SEQ ID NO: 3102288 - RNA, 18 nt, Molluscum contagiosum virus
gcacacgcgcgcgugcug

SEQ ID NO: 3102289 - RNA, 20 nt, Molluscum contagiosum virus
gcacacgcgcgcgugcugcu

SEQ ID NO: 3102290 - RNA, 13 nt, Molluscum contagiosum virus
gcacacgcgucgc

SEQ ID NO: 3102291 - RNA, 23 nt, Molluscum contagiosum virus
gcacacugcagcacgucuugcgc

SEQ ID NO: 3102292 - RNA, 22 nt, Molluscum contagiosum virus
acuuaucccagaaaacgcacug

SEQ ID NO: 3102293 - RNA, 18 nt, Molluscum contagiosum virus
acugucgcgcagcugcgc

SEQ ID NO: 3102294 - RNA, 23 nt, Molluscum contagiosum virus
acugucuuuuccucacgucgcug

SEQ ID NO: 3102295 - RNA, 23 nt, Molluscum contagiosum virus
acuuccguugcgagaacgggcgc

SEQ ID NO: 3102296 - RNA, 15 nt, Molluscum contagiosum virus
acuuccuugcgcagg

SEQ ID NO: 3102297 - RNA, 17 nt, Molluscum contagiosum virus
acuuccuugcgcaggac

SEQ ID NO: 3102298 - RNA, 20 nt, Molluscum contagiosum virus
acuucgacgcggugcgcgcg

SEQ ID NO: 3102299 - RNA, 20 nt, Molluscum contagiosum virus
acuucgcagacgacucgcug

SEQ ID NO: 3102300 - RNA, 17 nt, Molluscum contagiosum virus
acuucauccucuaccgc

SEQ ID NO: 3102301 - RNA, 14 nt, Molluscum contagiosum virus
acuuccacgagcug

SEQ ID NO: 3102302 - RNA, 13 nt, Molluscum contagiosum virus
acuucccgaggac

SEQ ID NO: 3102303 - RNA, 18 nt, Molluscum contagiosum virus
acuggcgcccggcgccga

SEQ ID NO: 3102304 - RNA, 18 nt, Molluscum contagiosum virus
acuggcgcgcacgcgcac

SEQ ID NO: 3102305 - RNA, 14 nt, Molluscum contagiosum virus
acugggagcuuucc

SEQ ID NO: 3102306 - RNA, 19 nt, Molluscum contagiosum virus
acugggaggacacgcgcac

SEQ ID NO: 3102307 - RNA, 20 nt, Molluscum contagiosum virus
acuggggcgaucgcgucacg

SEQ ID NO: 3102308 - RNA, 15 nt, Molluscum contagiosum virus
acuggcaccugcggc

SEQ ID NO: 3102309 - RNA, 16 nt, Molluscum contagiosum virus
acuggcacgcgccgcg

SEQ ID NO: 3102310 - RNA, 17 nt, Molluscum contagiosum virus
acuggcacgcgccgcgc

SEQ ID NO: 3102311 - RNA, 15 nt, Molluscum contagiosum virus
acuggccguguaagu

SEQ ID NO: 3102312 - RNA, 18 nt, Molluscum contagiosum virus
acuggaagaacaggccgc

SEQ ID NO: 3102313 - RNA, 14 nt, Molluscum contagiosum virus
acuggagcacggac

SEQ ID NO: 3102314 - RNA, 13 nt, Molluscum contagiosum virus
acugcagcacguc

SEQ ID NO: 3102315 - RNA, 23 nt, Molluscum contagiosum virus
acugacugcugcccccgccgcgg

SEQ ID NO: 3102316 - RNA, 14 nt, Molluscum contagiosum virus
acugcucgcgcacg

SEQ ID NO: 3102317 - RNA, 19 nt, Molluscum contagiosum virus
acugcucgcgcacgcgcac

SEQ ID NO: 3102318 - RNA, 22 nt, Molluscum contagiosum virus
acugcugcaggcaaagcggggc

SEQ ID NO: 3102319 - RNA, 19 nt, Molluscum contagiosum virus
acugcugcaguguguacgg

SEQ ID NO: 3102320 - RNA, 17 nt, Molluscum contagiosum virus
acugcugcccccgccgc

SEQ ID NO: 3102321 - RNA, 22 nt, Molluscum contagiosum virus
acugcugcccccgccgcggcgc

SEQ ID NO: 3102322 - RNA, 12 nt, Molluscum contagiosum virus
acugcugggcgu

SEQ ID NO: 3102323 - RNA, 20 nt, Molluscum contagiosum virus
acugcgcgcacugcucgcgc

SEQ ID NO: 3102324 - RNA, 12 nt, Molluscum contagiosum virus
acugcgcgcaug

SEQ ID NO: 3102325 - RNA, 16 nt, Molluscum contagiosum virus
acugcgcgcgcggcgc

SEQ ID NO: 3102326 - RNA, 16 nt, Molluscum contagiosum virus
acugcggacucgcgag

SEQ ID NO: 3102327 - RNA, 21 nt, Molluscum contagiosum virus
acugcuacgucgcggcgcacg

SEQ ID NO: 3102328 - RNA, 18 nt, Molluscum contagiosum virus
acugcuagcgacgcggac

SEQ ID NO: 3102329 - RNA, 22 nt, Molluscum contagiosum virus
acugcaggccccuacacgcaac

SEQ ID NO: 3102330 - RNA, 20 nt, Molluscum contagiosum virus
acugccaaagcuaugcgcag

SEQ ID NO: 3102331 - RNA, 14 nt, Molluscum contagiosum virus
acugccacgcggag

SEQ ID NO: 3102332 - RNA, 21 nt, Molluscum contagiosum virus
acugccacgcggagcucgcca

SEQ ID NO: 3102333 - RNA, 21 nt, Molluscum contagiosum virus
acugcccgcgcccugcacgac

SEQ ID NO: 3102334 - RNA, 14 nt, Molluscum contagiosum virus
acugccgccaggaa

SEQ ID NO: 3102335 - RNA, 16 nt, Molluscum contagiosum virus
acugccgccgccgcga

SEQ ID NO: 3102336 - RNA, 18 nt, Molluscum contagiosum virus
acugcgacauccacauga

SEQ ID NO: 3102337 - RNA, 16 nt, Molluscum contagiosum virus
caccaaggacguguac

SEQ ID NO: 3102338 - RNA, 15 nt, Molluscum contagiosum virus
cacauugcugcugca

SEQ ID NO: 3102339 - RNA, 23 nt, Molluscum contagiosum virus
cacauguguuuguagccgcgcga

SEQ ID NO: 3102340 - RNA, 18 nt, Molluscum contagiosum virus
caccacggccgacggcac

SEQ ID NO: 3102341 - RNA, 20 nt, Molluscum contagiosum virus
caccagacaaagucgacgac

SEQ ID NO: 3102342 - RNA, 17 nt, Molluscum contagiosum virus
caccccgcugggccgca

SEQ ID NO: 3102343 - RNA, 16 nt, Molluscum contagiosum virus
cacccgagcggggacg

SEQ ID NO: 3102344 - RNA, 13 nt, Molluscum contagiosum virus
caccagcgcggcc

SEQ ID NO: 3102345 - RNA, 14 nt, Molluscum contagiosum virus
caccagcgcggccg

SEQ ID NO: 3102346 - RNA, 16 nt, Molluscum contagiosum virus
cacacuggugcgcgug

SEQ ID NO: 3102347 - RNA, 17 nt, Molluscum contagiosum virus
acuucaagcacgagcug

SEQ ID NO: 3102348 - RNA, 17 nt, Molluscum contagiosum virus
cacacuugcacgcgcac

SEQ ID NO: 3102349 - RNA, 19 nt, Molluscum contagiosum virus
cacacuugcacgcgcacgc

SEQ ID NO: 3102350 - RNA, 14 nt, Molluscum contagiosum virus
cacacuugcgcguc

SEQ ID NO: 3102351 - RNA, 16 nt, Molluscum contagiosum virus
cacacuugcgcguccg

SEQ ID NO: 3102352 - RNA, 14 nt, Molluscum contagiosum virus
cacacuugcgcguu

SEQ ID NO: 3102353 - RNA, 14 nt, Molluscum contagiosum virus
acuugcacgcgcac

SEQ ID NO: 3102354 - RNA, 15 nt, Molluscum contagiosum virus
acuugcacgcgcacg

SEQ ID NO: 3102355 - RNA, 15 nt, Molluscum contagiosum virus
acuugcgcguccaca

SEQ ID NO: 3102356 - RNA, 20 nt, Molluscum contagiosum virus
acuugcgcguccacaaaggc

SEQ ID NO: 3102357 - RNA, 16 nt, Molluscum contagiosum virus
acuugcugguugccgc

SEQ ID NO: 3102358 - RNA, 16 nt, Molluscum contagiosum virus
cacacucacgcgucca

SEQ ID NO: 3102359 - RNA, 16 nt, Molluscum contagiosum virus
cacacucgcgcgucca

SEQ ID NO: 3102360 - RNA, 16 nt, Molluscum contagiosum virus
cacacucgcgcguccg

SEQ ID NO: 3102361 - RNA, 16 nt, Molluscum contagiosum virus
cacagcaggagcacgc

SEQ ID NO: 3102362 - RNA, 19 nt, Molluscum contagiosum virus
cacagcaggagcacgccug

SEQ ID NO: 3102363 - RNA, 16 nt, Molluscum contagiosum virus
cacagacauggcccgc

SEQ ID NO: 3102364 - RNA, 16 nt, Molluscum contagiosum virus
cacagccccugcugcu

SEQ ID NO: 3102365 - RNA, 15 nt, Molluscum contagiosum virus
cacaguucacggcgc

SEQ ID NO: 3102366 - RNA, 19 nt, Molluscum contagiosum virus
cacaguucacggcgcucgc

SEQ ID NO: 3102367 - RNA, 19 nt, Molluscum contagiosum virus
cacaguccaacccgcggcg

SEQ ID NO: 3102368 - RNA, 21 nt, Molluscum contagiosum virus
cacaguccaacccgcggcgcg

SEQ ID NO: 3102369 - RNA, 21 nt, Molluscum contagiosum virus
cacaucaugggcucgggcaag

SEQ ID NO: 3102370 - RNA, 13 nt, Molluscum contagiosum virus
cacauccgcuacc

SEQ ID NO: 3102371 - RNA, 15 nt, Molluscum contagiosum virus
acuacacugucgcgc

SEQ ID NO: 3102372 - RNA, 23 nt, Molluscum contagiosum virus
acguuugcgucugcgaggcgcgc

SEQ ID NO: 3102373 - RNA, 17 nt, Molluscum contagiosum virus
acguuuucaagcgcgag

SEQ ID NO: 3102374 - RNA, 20 nt, Molluscum contagiosum virus
acguugcgcguucagcgcac

SEQ ID NO: 3102375 - RNA, 21 nt, Molluscum contagiosum virus
acguugcgcguucagcgcacg

SEQ ID NO: 3102376 - RNA, 13 nt, Molluscum contagiosum virus
acuccacgcccgg

SEQ ID NO: 3102377 - RNA, 17 nt, Molluscum contagiosum virus
acuccagcgcgcccucg

SEQ ID NO: 3102378 - RNA, 15 nt, Molluscum contagiosum virus
acuccaucugcgcga

SEQ ID NO: 3102379 - RNA, 14 nt, Molluscum contagiosum virus
acuccgagcgcgac

SEQ ID NO: 3102380 - RNA, 13 nt, Molluscum contagiosum virus
acuccgagcgcgc

SEQ ID NO: 3102381 - RNA, 14 nt, Molluscum contagiosum virus
acuaccucuuugag

SEQ ID NO: 3102382 - RNA, 15 nt, Molluscum contagiosum virus
acuacgcacuggcga

SEQ ID NO: 3102383 - RNA, 14 nt, Molluscum contagiosum virus
acuagcacgggcgg

SEQ ID NO: 3102384 - RNA, 18 nt, Molluscum contagiosum virus
acuagcacgggcgggaca

SEQ ID NO: 3102385 - RNA, 20 nt, Molluscum contagiosum virus
acuagcguagcaugcucguc

SEQ ID NO: 3102386 - RNA, 14 nt, Molluscum contagiosum virus
acuagcgugcgcag

SEQ ID NO: 3102387 - RNA, 19 nt, Molluscum contagiosum virus
acucgcagaacugcugcgc

SEQ ID NO: 3102388 - RNA, 24 nt, Molluscum contagiosum virus
acuccguggaggaucgcuacgugc

SEQ ID NO: 3102389 - RNA, 23 nt, Molluscum contagiosum virus
acuccguuuuucugugcucgcgc

SEQ ID NO: 3102390 - RNA, 21 nt, Molluscum contagiosum virus
acucgaacgcaaggugugcgc

SEQ ID NO: 3102391 - RNA, 22 nt, Molluscum contagiosum virus
acucgagcacguagugcucguc

SEQ ID NO: 3102392 - RNA, 23 nt, Molluscum contagiosum virus
acucgagccccagaaggucgugc

SEQ ID NO: 3102393 - RNA, 21 nt, Molluscum contagiosum virus
acucgagcgagcuacgcgcuc

SEQ ID NO: 3102394 - RNA, 20 nt, Molluscum contagiosum virus
acucgcgcguccacaagggc

SEQ ID NO: 3102395 - RNA, 17 nt, Molluscum contagiosum virus
acucgcgcguccgcaaa

SEQ ID NO: 3102396 - RNA, 20 nt, Molluscum contagiosum virus
acucgcguccgcaucggcgc

SEQ ID NO: 3102397 - RNA, 22 nt, Molluscum contagiosum virus
acucgcuacugcaacguggcgc

SEQ ID NO: 3102398 - RNA, 14 nt, Molluscum contagiosum virus
acucgcugccagag

SEQ ID NO: 3102399 - RNA, 15 nt, Molluscum contagiosum virus
acucggcaugugcgc

SEQ ID NO: 3102400 - RNA, 15 nt, Molluscum contagiosum virus
acucggugcucaugc

SEQ ID NO: 3102401 - RNA, 19 nt, Molluscum contagiosum virus
acucggugcucaugcgcgg

SEQ ID NO: 3102402 - RNA, 19 nt, Molluscum contagiosum virus
acucgugcgccgcgccgaa

SEQ ID NO: 3102403 - RNA, 23 nt, Molluscum contagiosum virus
cacggugugcuacugcacugcag

SEQ ID NO: 3102404 - RNA, 22 nt, Molluscum contagiosum virus
cacguacuugcugguugccgcu

SEQ ID NO: 3102405 - RNA, 19 nt, Molluscum contagiosum virus
cacguaggggacgcgcggu

SEQ ID NO: 3102406 - RNA, 14 nt, Molluscum contagiosum virus
cacgucuucgccgu

SEQ ID NO: 3102407 - RNA, 19 nt, Molluscum contagiosum virus
cacgugaacuccaaggucg

SEQ ID NO: 3102408 - RNA, 19 nt, Molluscum contagiosum virus
cacgucggcgagacgugcg

SEQ ID NO: 3102409 - RNA, 14 nt, Molluscum contagiosum virus
cacggcuugccgcu

SEQ ID NO: 3102410 - RNA, 18 nt, Molluscum contagiosum virus
cacggcuugccgcucggc

SEQ ID NO: 3102411 - RNA, 19 nt, Molluscum contagiosum virus
cacgggcucgaucugcgcc

SEQ ID NO: 3102412 - RNA, 22 nt, Molluscum contagiosum virus
cacggcguucaccuuggcgcug

SEQ ID NO: 3102413 - RNA, 15 nt, Molluscum contagiosum virus
cacgguagagcugcg

SEQ ID NO: 3102414 - RNA, 14 nt, Molluscum contagiosum virus
cacggcgcgcaccu

SEQ ID NO: 3102415 - RNA, 16 nt, Molluscum contagiosum virus
cacggcgcucgccucu

SEQ ID NO: 3102416 - RNA, 17 nt, Molluscum contagiosum virus
cacggcggacgcgccua

SEQ ID NO: 3102417 - RNA, 23 nt, Molluscum contagiosum virus
cacggcgacaacgacagagcccg

SEQ ID NO: 3102418 - RNA, 13 nt, Molluscum contagiosum virus
cacggcgagcgcg

SEQ ID NO: 3102419 - RNA, 19 nt, Molluscum contagiosum virus
cagagcuccccgcgcgcag

SEQ ID NO: 3102420 - RNA, 20 nt, Molluscum contagiosum virus
cagagccaugcccgggcgug

SEQ ID NO: 3102421 - RNA, 23 nt, Molluscum contagiosum virus
cagagcccaaggggagacauaug

SEQ ID NO: 3102422 - RNA, 18 nt, Molluscum contagiosum virus
cagagcccgcggcgcacg

SEQ ID NO: 3102423 - RNA, 23 nt, Molluscum contagiosum virus
cagagcccgggagaguggccgcu

SEQ ID NO: 3102424 - RNA, 18 nt, Molluscum contagiosum virus
cagagccgcgugcgccgc

SEQ ID NO: 3102425 - RNA, 13 nt, Molluscum contagiosum virus
cagagccgggacg

SEQ ID NO: 3102426 - RNA, 16 nt, Molluscum contagiosum virus
cagagauccgcccgcg

SEQ ID NO: 3102427 - RNA, 17 nt, Molluscum contagiosum virus
cagagcacugcgcgucu

SEQ ID NO: 3102428 - RNA, 15 nt, Molluscum contagiosum virus
cagacguggugcucg

SEQ ID NO: 3102429 - RNA, 17 nt, Molluscum contagiosum virus
cagagcauuagcagcga

SEQ ID NO: 3102430 - RNA, 20 nt, Molluscum contagiosum virus
cagagcauuagcagcgagga

SEQ ID NO: 3102431 - RNA, 22 nt, Molluscum contagiosum virus
cagagacacacgcuugcgcaug

SEQ ID NO: 3102432 - RNA, 22 nt, Molluscum contagiosum virus
cagagaccgucaaccugcugcc

SEQ ID NO: 3102433 - RNA, 19 nt, Molluscum contagiosum virus
cacgucgacaaguccaccu

SEQ ID NO: 3102434 - RNA, 20 nt, Molluscum contagiosum virus
cacgugccagagucgccgcu

SEQ ID NO: 3102435 - RNA, 20 nt, Molluscum contagiosum virus
cacgugccccgcgcgugcag

SEQ ID NO: 3102436 - RNA, 14 nt, Molluscum contagiosum virus
cacgugcucgcggu

SEQ ID NO: 3102437 - RNA, 20 nt, Molluscum contagiosum virus
cacgugcugaucacgcucgc

SEQ ID NO: 3102438 - RNA, 15 nt, Molluscum contagiosum virus
cagacggcgcgcucg

SEQ ID NO: 3102439 - RNA, 15 nt, Molluscum contagiosum virus
cacgcgcgagcggag

SEQ ID NO: 3102440 - RNA, 23 nt, Molluscum contagiosum virus
cacgcgcgagcggagcgggcacg

SEQ ID NO: 3102441 - RNA, 23 nt, Molluscum contagiosum virus
cacgcgcgccgcugucacgcgag

SEQ ID NO: 3102442 - RNA, 23 nt, Molluscum contagiosum virus
cacgcgcgcgccuuuccggccug

SEQ ID NO: 3102443 - RNA, 15 nt, Molluscum contagiosum virus
cacgcgcgcgcgaag

SEQ ID NO: 3102444 - RNA, 14 nt, Molluscum contagiosum virus
cacgcgcgcugccg

SEQ ID NO: 3102445 - RNA, 14 nt, Molluscum contagiosum virus
cacgcgcgggcgca

SEQ ID NO: 3102446 - RNA, 16 nt, Molluscum contagiosum virus
cacgccuucguggagc

SEQ ID NO: 3102447 - RNA, 22 nt, Molluscum contagiosum virus
cacgccuucguggagcccgugc

SEQ ID NO: 3102448 - RNA, 18 nt, Molluscum contagiosum virus
cacgcgaauguccggcgc

SEQ ID NO: 3102449 - RNA, 19 nt, Molluscum contagiosum virus
cacgcgacggugugccgcu

SEQ ID NO: 3102450 - RNA, 18 nt, Molluscum contagiosum virus
cacgcgagcacgccugca

SEQ ID NO: 3102451 - RNA, 14 nt, Molluscum contagiosum virus
cacgcgcaaggucu

SEQ ID NO: 3102452 - RNA, 16 nt, Molluscum contagiosum virus
cacgcgcaaggucuuc

SEQ ID NO: 3102453 - RNA, 17 nt, Molluscum contagiosum virus
cacgcgcacgcgcacac

SEQ ID NO: 3102454 - RNA, 16 nt, Molluscum contagiosum virus
cacgcgcacgcgcgag

SEQ ID NO: 3102455 - RNA, 16 nt, Molluscum contagiosum virus
cacgcgcacgcucucg

SEQ ID NO: 3102456 - RNA, 22 nt, Molluscum contagiosum virus
cacgcgcacgggccugcgcgcu

SEQ ID NO: 3102457 - RNA, 14 nt, Molluscum contagiosum virus
cacgcgccgcgcgg

SEQ ID NO: 3102458 - RNA, 16 nt, Molluscum contagiosum virus
cacgcgccgcgcggcu

SEQ ID NO: 3102459 - RNA, 11 nt, Molluscum contagiosum virus
cacgcgcuucg

SEQ ID NO: 3102460 - RNA, 21 nt, Molluscum contagiosum virus
cacgcgcuucguggacgagcg

SEQ ID NO: 3102461 - RNA, 21 nt, Molluscum contagiosum virus
cacgcggcgcgugucgcggag

SEQ ID NO: 3102462 - RNA, 21 nt, Molluscum contagiosum virus
cacgcgggcccaccgcgccag

SEQ ID NO: 3102463 - RNA, 12 nt, Molluscum contagiosum virus
cacgcgggcgcc

SEQ ID NO: 3102464 - RNA, 19 nt, Molluscum contagiosum virus
cacgcgguuucgaucgcgc

SEQ ID NO: 3102465 - RNA, 14 nt, Molluscum contagiosum virus
cacgcgucgcgcag

SEQ ID NO: 3102466 - RNA, 15 nt, Molluscum contagiosum virus
cacgcgugcugcgcg

SEQ ID NO: 3102467 - RNA, 18 nt, Molluscum contagiosum virus
cacgcgugcugcgcggcg

SEQ ID NO: 3102468 - RNA, 22 nt, Molluscum contagiosum virus
cacgcgugcugcgcggcgccgc

SEQ ID NO: 3102469 - RNA, 18 nt, Molluscum contagiosum virus
cacgcgugucugcgcucg

SEQ ID NO: 3102470 - RNA, 17 nt, Molluscum contagiosum virus
cacgcuacgcagcgcgc

SEQ ID NO: 3102471 - RNA, 21 nt, Molluscum contagiosum virus
cacgcuagcgagcgcccgugc

SEQ ID NO: 3102472 - RNA, 22 nt, Molluscum contagiosum virus
cacgcuagucguuggcgcgccc

SEQ ID NO: 3102473 - RNA, 19 nt, Molluscum contagiosum virus
cacgcucauacuccugcug

SEQ ID NO: 3102474 - RNA, 24 nt, Molluscum contagiosum virus
cacgcucaucucgcagacgcagcg

SEQ ID NO: 3102475 - RNA, 17 nt, Molluscum contagiosum virus
cacgcucgcgacgugcg

SEQ ID NO: 3102476 - RNA, 15 nt, Molluscum contagiosum virus
cacggccuucgcgcu

SEQ ID NO: 3102477 - RNA, 18 nt, Molluscum contagiosum virus
cacggccuucgcguuccg

SEQ ID NO: 3102478 - RNA, 22 nt, Molluscum contagiosum virus
cacggccgacggcacgggcacg

SEQ ID NO: 3102479 - RNA, 16 nt, Molluscum contagiosum virus
cacggccgcgcgcgac

SEQ ID NO: 3102480 - RNA, 15 nt, Molluscum contagiosum virus
cacggccggcgccgc

SEQ ID NO: 3102481 - RNA, 18 nt, Molluscum contagiosum virus
cacggccuccagcagcgg

SEQ ID NO: 3102482 - RNA, 14 nt, Molluscum contagiosum virus
cacggacaugguca

SEQ ID NO: 3102483 - RNA, 19 nt, Molluscum contagiosum virus
cacgcuugugcgcacgcug

SEQ ID NO: 3102484 - RNA, 16 nt, Molluscum contagiosum virus
cacggacccgggcgcg

SEQ ID NO: 3102485 - RNA, 20 nt, Molluscum contagiosum virus
cacggacccgggcgcggcac

SEQ ID NO: 3102486 - RNA, 20 nt, Molluscum contagiosum virus
cacggacucgccgcgcgccg

SEQ ID NO: 3102487 - RNA, 21 nt, Molluscum contagiosum virus
cacggacuuuucgcgcgugcg

SEQ ID NO: 3102488 - RNA, 15 nt, Molluscum contagiosum virus
cacggauacgcgcac

SEQ ID NO: 3102489 - RNA, 17 nt, Molluscum contagiosum virus
cacggauacgcgcacac

SEQ ID NO: 3102490 - RNA, 15 nt, Molluscum contagiosum virus
cacgcucucgcuggc

SEQ ID NO: 3102491 - RNA, 15 nt, Molluscum contagiosum virus
cacgcugcacgagcu

SEQ ID NO: 3102492 - RNA, 19 nt, Molluscum contagiosum virus
cacgcugcgcacgggcgcg

SEQ ID NO: 3102493 - RNA, 15 nt, Molluscum contagiosum virus
cacgcugcgcgugcu

SEQ ID NO: 3102494 - RNA, 14 nt, Molluscum contagiosum virus
cacgcugcgcucgg

SEQ ID NO: 3102495 - RNA, 18 nt, Molluscum contagiosum virus
cacgcugcgcucggcgcg

SEQ ID NO: 3102496 - RNA, 18 nt, Molluscum contagiosum virus
cacgcugcucgugcugcu

SEQ ID NO: 3102497 - RNA, 18 nt, Molluscum contagiosum virus
cacgcugcugcgugcgcg

SEQ ID NO: 3102498 - RNA, 22 nt, Molluscum contagiosum virus
cacgcugcugcgugcgcgcgau

SEQ ID NO: 3102499 - RNA, 16 nt, Molluscum contagiosum virus
cacgcuggcgcucggc

SEQ ID NO: 3102500 - RNA, 20 nt, Molluscum contagiosum virus
cacgccgguggcgcgcgagc

SEQ ID NO: 3102501 - RNA, 15 nt, Molluscum contagiosum virus
cacgccugcacgcgc

SEQ ID NO: 3102502 - RNA, 22 nt, Molluscum contagiosum virus
cacgcgcgugagcacgggcgag

SEQ ID NO: 3102503 - RNA, 13 nt, Molluscum contagiosum virus
cacgcgcucgcgc

SEQ ID NO: 3102504 - RNA, 14 nt, Molluscum contagiosum virus
cagaucgcgagagg

SEQ ID NO: 3102505 - RNA, 12 nt, Molluscum contagiosum virus
cagcaagcgcac

SEQ ID NO: 3102506 - RNA, 18 nt, Molluscum contagiosum virus
cagauucacgagcucggu

SEQ ID NO: 3102507 - RNA, 16 nt, Molluscum contagiosum virus
cagaugaggcugcucu

SEQ ID NO: 3102508 - RNA, 16 nt, Molluscum contagiosum virus
cagagucgccgcugcg

SEQ ID NO: 3102509 - RNA, 16 nt, Molluscum contagiosum virus
cagagugccuggcgcg

SEQ ID NO: 3102510 - RNA, 19 nt, Molluscum contagiosum virus
cagauaguuuggacgagcu

SEQ ID NO: 3102511 - RNA, 22 nt, Molluscum contagiosum virus
cagcacaaagagcacggacagc

SEQ ID NO: 3102512 - RNA, 23 nt, Molluscum contagiosum virus
cagcacaaagagcacggacagca

SEQ ID NO: 3102513 - RNA, 17 nt, Molluscum contagiosum virus
cagcacaccgucgcgug

SEQ ID NO: 3102514 - RNA, 19 nt, Molluscum contagiosum virus
cagcacaugcaggccgaga

SEQ ID NO: 3102515 - RNA, 16 nt, Molluscum contagiosum virus
cagcaccgcgccgcga

SEQ ID NO: 3102516 - RNA, 14 nt, Molluscum contagiosum virus
cagcacgcgcgggc

SEQ ID NO: 3102517 - RNA, 23 nt, Molluscum contagiosum virus
cagcacgcgcucguccgccgcgu

SEQ ID NO: 3102518 - RNA, 16 nt, Molluscum contagiosum virus
cagcagccccgacgcc

SEQ ID NO: 3102519 - RNA, 14 nt, Molluscum contagiosum virus
cagcagccgcagcc

SEQ ID NO: 3102520 - RNA, 18 nt, Molluscum contagiosum virus
cagcagccgcagcccacg

SEQ ID NO: 3102521 - RNA, 22 nt, Molluscum contagiosum virus
cagcagccucguucacggcuag

SEQ ID NO: 3102522 - RNA, 14 nt, Molluscum contagiosum virus
cagcagcgagacca

SEQ ID NO: 3102523 - RNA, 19 nt, Molluscum contagiosum virus
cagcacggggucguagucc

SEQ ID NO: 3102524 - RNA, 12 nt, Molluscum contagiosum virus
cagcacugcgcc

SEQ ID NO: 3102525 - RNA, 16 nt, Molluscum contagiosum virus
cagcagagcugcccgc

SEQ ID NO: 3102526 - RNA, 22 nt, Molluscum contagiosum virus
cagcaccaaggacguguacgug

SEQ ID NO: 3102527 - RNA, 17 nt, Molluscum contagiosum virus
uccaacuuccacgucuc

SEQ ID NO: 3102528 - RNA, 14 nt, Molluscum contagiosum virus
ucaugcgcguggcu

SEQ ID NO: 3102529 - RNA, 23 nt, Molluscum contagiosum virus
ucaucgugcccgguacgcucgcg

SEQ ID NO: 3102530 - RNA, 15 nt, Molluscum contagiosum virus
ucaucuucgugcuga

SEQ ID NO: 3102531 - RNA, 15 nt, Molluscum contagiosum virus
ucauccucuaccgcc

SEQ ID NO: 3102532 - RNA, 15 nt, Molluscum contagiosum virus
ucaucgacgagcacg

SEQ ID NO: 3102533 - RNA, 14 nt, Molluscum contagiosum virus
ucaggccggucgcg

SEQ ID NO: 3102534 - RNA, 13 nt, Molluscum contagiosum virus
ucauagcgccacg

SEQ ID NO: 3102535 - RNA, 17 nt, Molluscum contagiosum virus
uccacgcccggcgugau

SEQ ID NO: 3102536 - RNA, 16 nt, Molluscum contagiosum virus
uccacgccuucgugga

SEQ ID NO: 3102537 - RNA, 14 nt, Molluscum contagiosum virus
uccacgcgcgugag

SEQ ID NO: 3102538 - RNA, 14 nt, Molluscum contagiosum virus
uccacgcgugcgcg

SEQ ID NO: 3102539 - RNA, 18 nt, Molluscum contagiosum virus
uccacgcgugcgcgccag

SEQ ID NO: 3102540 - RNA, 13 nt, Molluscum contagiosum virus
uccacgcgugcug

SEQ ID NO: 3102541 - RNA, 17 nt, Molluscum contagiosum virus
uccacgcgugcugcgcg

SEQ ID NO: 3102542 - RNA, 13 nt, Molluscum contagiosum virus
uccacggacaugg

SEQ ID NO: 3102543 - RNA, 12 nt, Molluscum contagiosum virus
uccaccugcgca

SEQ ID NO: 3102544 - RNA, 16 nt, Molluscum contagiosum virus
uccaccugcgcaacgu

SEQ ID NO: 3102545 - RNA, 18 nt, Molluscum contagiosum virus
uccacgacgagccugcgg

SEQ ID NO: 3102546 - RNA, 20 nt, Molluscum contagiosum virus
uccacgauggaacggcgacu

SEQ ID NO: 3102547 - RNA, 19 nt, Molluscum contagiosum virus
uccacggguaccgugcgcg

SEQ ID NO: 3102548 - RNA, 23 nt, Molluscum contagiosum virus
uccacggguaccgugcgcgugag

SEQ ID NO: 3102549 - RNA, 19 nt, Molluscum contagiosum virus
uccacguccgacucggaca

SEQ ID NO: 3102550 - RNA, 21 nt, Molluscum contagiosum virus
uccagcccgcggugcgcacau

SEQ ID NO: 3102551 - RNA, 20 nt, Molluscum contagiosum virus
uccagccgcagccgcgcuag

SEQ ID NO: 3102552 - RNA, 20 nt, Molluscum contagiosum virus
uccagccgucgccgcgcccg

SEQ ID NO: 3102553 - RNA, 21 nt, Molluscum contagiosum virus
uccagcgcgcccucgcgcgcg

SEQ ID NO: 3102554 - RNA, 19 nt, Molluscum contagiosum virus
uccagcgcgcucgaggcgc

SEQ ID NO: 3102555 - RNA, 20 nt, Molluscum contagiosum virus
uccagcggcugcccgcggag

SEQ ID NO: 3102556 - RNA, 22 nt, Molluscum contagiosum virus
uccagcguuuccucuggcucca

SEQ ID NO: 3102557 - RNA, 14 nt, Molluscum contagiosum virus
uccagcugcgcgag

SEQ ID NO: 3102558 - RNA, 15 nt, Molluscum contagiosum virus
ucgccuuccugcgcc

SEQ ID NO: 3102559 - RNA, 21 nt, Molluscum contagiosum virus
ucgccuucuugcuggcgcucg

SEQ ID NO: 3102560 - RNA, 18 nt, Molluscum contagiosum virus
ucgccuuugugacaagga

SEQ ID NO: 3102561 - RNA, 14 nt, Molluscum contagiosum virus
ucgcgaacgcgucc

SEQ ID NO: 3102562 - RNA, 13 nt, Molluscum contagiosum virus
ucgcgaccuggcg

SEQ ID NO: 3102563 - RNA, 18 nt, Molluscum contagiosum virus
ucgcgaccuggcgcgugc

SEQ ID NO: 3102564 - RNA, 17 nt, Molluscum contagiosum virus
ucgcgacgacgagcacu

SEQ ID NO: 3102565 - RNA, 14 nt, Molluscum contagiosum virus
ucgcgacgugcgcg

SEQ ID NO: 3102566 - RNA, 22 nt, Molluscum contagiosum virus
ucgcgagcacuuuggccucgcg

SEQ ID NO: 3102567 - RNA, 14 nt, Molluscum contagiosum virus
ucgcgagcgccacu

SEQ ID NO: 3102568 - RNA, 14 nt, Molluscum contagiosum virus
ucgcggacggcgcg

SEQ ID NO: 3102569 - RNA, 14 nt, Molluscum contagiosum virus
ucgcggagcgcacg

SEQ ID NO: 3102570 - RNA, 15 nt, Molluscum contagiosum virus
ucgcggagcgcacga

SEQ ID NO: 3102571 - RNA, 16 nt, Molluscum contagiosum virus
ucgcggagcgcgcacg

SEQ ID NO: 3102572 - RNA, 15 nt, Molluscum contagiosum virus
ucgcggagcugcgcg

SEQ ID NO: 3102573 - RNA, 20 nt, Molluscum contagiosum virus
ucgcgggauacgggcgcuau

SEQ ID NO: 3102574 - RNA, 19 nt, Molluscum contagiosum virus
ucgcgccugaaccugggcg

SEQ ID NO: 3102575 - RNA, 13 nt, Molluscum contagiosum virus
ucgcgccugcgcu

SEQ ID NO: 3102576 - RNA, 14 nt, Molluscum contagiosum virus
ucgcgcgagaaguc

SEQ ID NO: 3102577 - RNA, 17 nt, Molluscum contagiosum virus
ucgcgcgcaccugcacg

SEQ ID NO: 3102578 - RNA, 12 nt, Molluscum contagiosum virus
ucgcgcgccagc

SEQ ID NO: 3102579 - RNA, 23 nt, Molluscum contagiosum virus
ucgcgcgccaguacgcaugcgcg

SEQ ID NO: 3102580 - RNA, 14 nt, Molluscum contagiosum virus
ucgcgcgccgcaaa

SEQ ID NO: 3102581 - RNA, 18 nt, Molluscum contagiosum virus
ucgcgcgccgccgcaaca

SEQ ID NO: 3102582 - RNA, 16 nt, Molluscum contagiosum virus
ucgcgcgccgcgcugg

SEQ ID NO: 3102583 - RNA, 22 nt, Molluscum contagiosum virus
ucgcgcgccgcgcuggcgcgcg

SEQ ID NO: 3102584 - RNA, 14 nt, Molluscum contagiosum virus
ucgcgcgccugccg

SEQ ID NO: 3102585 - RNA, 13 nt, Molluscum contagiosum virus
ucgcgcgccugcg

SEQ ID NO: 3102586 - RNA, 15 nt, Molluscum contagiosum virus
ucgcgcgccugcgcg

SEQ ID NO: 3102587 - RNA, 17 nt, Molluscum contagiosum virus
ucgcgcgccugcgcgag

SEQ ID NO: 3102588 - RNA, 11 nt, Molluscum contagiosum virus
ucgcgcgcgac

SEQ ID NO: 3102589 - RNA, 13 nt, Molluscum contagiosum virus
ucgcgcgcgggcu

SEQ ID NO: 3102590 - RNA, 21 nt, Molluscum contagiosum virus
ucgcgcgcguaaagagcgucc

SEQ ID NO: 3102591 - RNA, 17 nt, Molluscum contagiosum virus
ucgcgcgcuaccugcgc

SEQ ID NO: 3102592 - RNA, 18 nt, Molluscum contagiosum virus
ucgcgcgcuaccugcgca

SEQ ID NO: 3102593 - RNA, 21 nt, Molluscum contagiosum virus
ucgcgcgucgcggucgcggag

SEQ ID NO: 3102594 - RNA, 12 nt, Molluscum contagiosum virus
ucgcgcgugcug

SEQ ID NO: 3102595 - RNA, 15 nt, Molluscum contagiosum virus
ucgcgcucgcgggag

SEQ ID NO: 3102596 - RNA, 17 nt, Molluscum contagiosum virus
ucgcgcucuacgccagc

SEQ ID NO: 3102597 - RNA, 11 nt, Molluscum contagiosum virus
ucgcgcuuccc

SEQ ID NO: 3102598 - RNA, 15 nt, Molluscum contagiosum virus
ucgcgcuuccgcgag

SEQ ID NO: 3102599 - RNA, 13 nt, Molluscum contagiosum virus
ucgcgcuuugcgc

SEQ ID NO: 3102600 - RNA, 14 nt, Molluscum contagiosum virus
uccacggcgcgcac

SEQ ID NO: 3102601 - RNA, 15 nt, Molluscum contagiosum virus
uccagguccuccagc

SEQ ID NO: 3102602 - RNA, 14 nt, Molluscum contagiosum virus
ucgcgcccugcgcg

SEQ ID NO: 3102603 - RNA, 16 nt, Molluscum contagiosum virus
ucgcgcccugcgcgcg

SEQ ID NO: 3102604 - RNA, 18 nt, Molluscum contagiosum virus
ucgcgcccugcgcgcgag

SEQ ID NO: 3102605 - RNA, 15 nt, Molluscum contagiosum virus
ucgcgccgcucggaa

SEQ ID NO: 3102606 - RNA, 18 nt, Molluscum contagiosum virus
ucgcgcaaguccagcgcg

SEQ ID NO: 3102607 - RNA, 14 nt, Molluscum contagiosum virus
ucgcgcacgcgcac

SEQ ID NO: 3102608 - RNA, 16 nt, Molluscum contagiosum virus
ucgcgcacgcgcacgc

SEQ ID NO: 3102609 - RNA, 14 nt, Molluscum contagiosum virus
ucgcgcagcagcua

SEQ ID NO: 3102610 - RNA, 23 nt, Molluscum contagiosum virus
ucgcgcagcaggcacuccagcgc

SEQ ID NO: 3102611 - RNA, 14 nt, Molluscum contagiosum virus
ucgcgcaggucauc

SEQ ID NO: 3102612 - RNA, 19 nt, Molluscum contagiosum virus
ucgcgcaucaccgagcgag

SEQ ID NO: 3102613 - RNA, 21 nt, Molluscum contagiosum virus
ggggacucucccgucgccgga

SEQ ID NO: 3102614 - RNA, 14 nt, Molluscum contagiosum virus
gggcugcgcggcgg

SEQ ID NO: 3102615 - RNA, 22 nt, Molluscum contagiosum virus
ggggacgcgacgcgcguggagc

SEQ ID NO: 3102616 - RNA, 17 nt, Molluscum contagiosum virus
ggcugcucucggcagcg

SEQ ID NO: 3102617 - RNA, 20 nt, Molluscum contagiosum virus
ggcugcucucggcagcgucg

SEQ ID NO: 3102618 - RNA, 13 nt, Molluscum contagiosum virus
gggcgcugcaccg

SEQ ID NO: 3102619 - RNA, 13 nt, Molluscum contagiosum virus
gggcgcgugcugg

SEQ ID NO: 3102620 - RNA, 18 nt, Molluscum contagiosum virus
gggcgcgcgccagcagcg

SEQ ID NO: 3102621 - RNA, 11 nt, Molluscum contagiosum virus
gggcgccagcu

SEQ ID NO: 3102622 - RNA, 12 nt, Molluscum contagiosum virus
gggcgugcucac

SEQ ID NO: 3102623 - RNA, 23 nt, Molluscum contagiosum virus
gggcguguccgcgggcgcgcgcc

SEQ ID NO: 3102624 - RNA, 15 nt, Molluscum contagiosum virus
gggcgcuuccccguc

SEQ ID NO: 3102625 - RNA, 20 nt, Molluscum contagiosum virus
gggcucgggcucgaggugug

SEQ ID NO: 3102626 - RNA, 20 nt, Molluscum contagiosum virus
gggcugcaucuucagcacca

SEQ ID NO: 3102627 - RNA, 15 nt, Molluscum contagiosum virus
ggcucgaggugugcc

SEQ ID NO: 3102628 - RNA, 14 nt, Molluscum contagiosum virus
ggcuccugugucgc

SEQ ID NO: 3102629 - RNA, 19 nt, Molluscum contagiosum virus
ggcucgggcucgaggugug

SEQ ID NO: 3102630 - RNA, 19 nt, Molluscum contagiosum virus
ggcucuaagcgcacgcgcg

SEQ ID NO: 3102631 - RNA, 16 nt, Molluscum contagiosum virus
ggcucucaacugcagg

SEQ ID NO: 3102632 - RNA, 19 nt, Molluscum contagiosum virus
ggcucucaacugcaggccc

SEQ ID NO: 3102633 - RNA, 16 nt, Molluscum contagiosum virus
ggcgugugcgggcucu

SEQ ID NO: 3102634 - RNA, 13 nt, Molluscum contagiosum virus
ggcuccgcuggac

SEQ ID NO: 3102635 - RNA, 18 nt, Molluscum contagiosum virus
ggcugauccugcgcgugu

SEQ ID NO: 3102636 - RNA, 21 nt, Molluscum contagiosum virus
ggcugcagcccuuccacgaca

SEQ ID NO: 3102637 - RNA, 20 nt, Molluscum contagiosum virus
ggcugccggcgcgugagcgc

SEQ ID NO: 3102638 - RNA, 21 nt, Molluscum contagiosum virus
ggcucuuccuuugcucuacgc

SEQ ID NO: 3102639 - RNA, 17 nt, Molluscum contagiosum virus
ggcucgcgccugcgcuu

SEQ ID NO: 3102640 - RNA, 21 nt, Molluscum contagiosum virus
ggcucgcggcuaggacuagca

SEQ ID NO: 3102641 - RNA, 13 nt, Molluscum contagiosum virus
ggcugcugcgcga

SEQ ID NO: 3102642 - RNA, 19 nt, Molluscum contagiosum virus
ggcuggaccugcgccagcg

SEQ ID NO: 3102643 - RNA, 15 nt, Molluscum contagiosum virus
ggcuggacugugcuu

SEQ ID NO: 3102644 - RNA, 11 nt, Molluscum contagiosum virus
ggcgugcucgc

SEQ ID NO: 3102645 - RNA, 18 nt, Molluscum contagiosum virus
ggcggugggcgccgcggc

SEQ ID NO: 3102646 - RNA, 14 nt, Molluscum contagiosum virus
ggcguacgugcgcc

SEQ ID NO: 3102647 - RNA, 18 nt, Molluscum contagiosum virus
ggcguacgugcgccagcu

SEQ ID NO: 3102648 - RNA, 22 nt, Molluscum contagiosum virus
ggcguccuucuuugcgugcgcc

SEQ ID NO: 3102649 - RNA, 18 nt, Molluscum contagiosum virus
ggcgugcagggcgugcuu

SEQ ID NO: 3102650 - RNA, 19 nt, Molluscum contagiosum virus
ggcgugcauuuuuccgcuu

SEQ ID NO: 3102651 - RNA, 13 nt, Molluscum contagiosum virus
ggcgugcgcagca

SEQ ID NO: 3102652 - RNA, 22 nt, Molluscum contagiosum virus
ggcgugcgccgugcgucucucu

SEQ ID NO: 3102653 - RNA, 13 nt, Molluscum contagiosum virus
ggcgugcucacgc

SEQ ID NO: 3102654 - RNA, 12 nt, Molluscum contagiosum virus
ggcgugcucagc

SEQ ID NO: 3102655 - RNA, 16 nt, Molluscum contagiosum virus
ggcgugcucagcacca

SEQ ID NO: 3102656 - RNA, 13 nt, Molluscum contagiosum virus
ggccgcgagcgcg

SEQ ID NO: 3102657 - RNA, 19 nt, Molluscum contagiosum virus
ggccgcgaggcaugucgcg

SEQ ID NO: 3102658 - RNA, 18 nt, Molluscum contagiosum virus
ggccgcgcccacgggcuu

SEQ ID NO: 3102659 - RNA, 16 nt, Molluscum contagiosum virus
ggccgcgccgcgccga

SEQ ID NO: 3102660 - RNA, 23 nt, Molluscum contagiosum virus
ggcgggcacauccgcuaccuggu

SEQ ID NO: 3102661 - RNA, 16 nt, Molluscum contagiosum virus
ggcggcgucgcgcgcg

SEQ ID NO: 3102662 - RNA, 22 nt, Molluscum contagiosum virus
ggcggucuuccagcacugcgcc

SEQ ID NO: 3102663 - RNA, 18 nt, Molluscum contagiosum virus
ggcgggccugcgcccgca

SEQ ID NO: 3102664 - RNA, 22 nt, Molluscum contagiosum virus
gcgcgcguucauuugcgugagg

SEQ ID NO: 3102665 - RNA, 12 nt, Molluscum contagiosum virus
gcgcgcguugcc

SEQ ID NO: 3102666 - RNA, 20 nt, Molluscum contagiosum virus
gcgcgcguuuccguggcgug

SEQ ID NO: 3102667 - RNA, 21 nt, Molluscum contagiosum virus
gcgcgcguuugucgcgggcgc

SEQ ID NO: 3102668 - RNA, 15 nt, Molluscum contagiosum virus
gcgcccgcagcgcgc

SEQ ID NO: 3102669 - RNA, 17 nt, Molluscum contagiosum virus
gcgcccgccgcccaagg

SEQ ID NO: 3102670 - RNA, 12 nt, Molluscum contagiosum virus
gcgcgcugcgug

SEQ ID NO: 3102671 - RNA, 12 nt, Molluscum contagiosum virus
gcgcgcuggccg

SEQ ID NO: 3102672 - RNA, 16 nt, Molluscum contagiosum virus
gcgcgcuggcgugcgc

SEQ ID NO: 3102673 - RNA, 20 nt, Molluscum contagiosum virus
gcgcgcugguuaccaagggc

SEQ ID NO: 3102674 - RNA, 15 nt, Molluscum contagiosum virus
gcgcgcuuagcacac

SEQ ID NO: 3102675 - RNA, 22 nt, Molluscum contagiosum virus
gcgcgcuuuuugccgcucacag

SEQ ID NO: 3102676 - RNA, 19 nt, Molluscum contagiosum virus
gcgcggaagcccgagcgcg

SEQ ID NO: 3102677 - RNA, 16 nt, Molluscum contagiosum virus
gcgcgcuacugcgcgc

SEQ ID NO: 3102678 - RNA, 19 nt, Molluscum contagiosum virus
gcgcgcuagagcgcggcgc

SEQ ID NO: 3102679 - RNA, 23 nt, Molluscum contagiosum virus
gcgcgcuauucaaagcugugcgu

SEQ ID NO: 3102680 - RNA, 20 nt, Molluscum contagiosum virus
gcgcgcuauucucguggcgu

SEQ ID NO: 3102681 - RNA, 13 nt, Molluscum contagiosum virus
gcgcgcuccgaga

SEQ ID NO: 3102682 - RNA, 22 nt, Molluscum contagiosum virus
gcgcgcucgaacgcgcgugcgc

SEQ ID NO: 3102683 - RNA, 15 nt, Molluscum contagiosum virus
gcgcgcucgaggcgc

SEQ ID NO: 3102684 - RNA, 16 nt, Molluscum contagiosum virus
gcgcgcucgaggcgcc

SEQ ID NO: 3102685 - RNA, 20 nt, Molluscum contagiosum virus
gcgcgcucgccaccgcgccc

SEQ ID NO: 3102686 - RNA, 15 nt, Molluscum contagiosum virus
gcgcgcucgcgcagg

SEQ ID NO: 3102687 - RNA, 15 nt, Molluscum contagiosum virus
gcgcgcucuacgaga

SEQ ID NO: 3102688 - RNA, 22 nt, Molluscum contagiosum virus
gcgcgcucugccgcccgcgccc

SEQ ID NO: 3102689 - RNA, 13 nt, Molluscum contagiosum virus
gcgcgcugcacac

SEQ ID NO: 3102690 - RNA, 13 nt, Molluscum contagiosum virus
gcgcgcugccgcg

SEQ ID NO: 3102691 - RNA, 13 nt, Molluscum contagiosum virus
gcgcgcugcgaac

SEQ ID NO: 3102692 - RNA, 13 nt, Molluscum contagiosum virus
gcgcgcugcgcac

SEQ ID NO: 3102693 - RNA, 12 nt, Molluscum contagiosum virus
gcgcgcugcgcc

SEQ ID NO: 3102694 - RNA, 13 nt, Molluscum contagiosum virus
gcgcgcugcgcgc

SEQ ID NO: 3102695 - RNA, 14 nt, Molluscum contagiosum virus
gcgcgcugcgcgcg

SEQ ID NO: 3102696 - RNA, 15 nt, Molluscum contagiosum virus
gcgcgcugcgggcgc

SEQ ID NO: 3102697 - RNA, 12 nt, Molluscum contagiosum virus
gcgccagcacgc

SEQ ID NO: 3102698 - RNA, 15 nt, Molluscum contagiosum virus
gcgccagcacgcgcu

SEQ ID NO: 3102699 - RNA, 15 nt, Molluscum contagiosum virus
gcgccauccagcgca

SEQ ID NO: 3102700 - RNA, 14 nt, Molluscum contagiosum virus
gcgccauugcucgc

SEQ ID NO: 3102701 - RNA, 17 nt, Molluscum contagiosum virus
gcgcccaacgcccgcgc

SEQ ID NO: 3102702 - RNA, 18 nt, Molluscum contagiosum virus
gcgcccaaggccgcgggc

SEQ ID NO: 3102703 - RNA, 13 nt, Molluscum contagiosum virus
gcgcccacgggcu

SEQ ID NO: 3102704 - RNA, 13 nt, Molluscum contagiosum virus
gcgcccgcgcgcu

SEQ ID NO: 3102705 - RNA, 12 nt, Molluscum contagiosum virus
gcgcccgcggac

SEQ ID NO: 3102706 - RNA, 13 nt, Molluscum contagiosum virus
gcgcccgcggaga

SEQ ID NO: 3102707 - RNA, 11 nt, Molluscum contagiosum virus
gcgcccgcggc

SEQ ID NO: 3102708 - RNA, 14 nt, Molluscum contagiosum virus
gcgcccgcggcaca

SEQ ID NO: 3102709 - RNA, 13 nt, Molluscum contagiosum virus
gcgcccgcggcgc

SEQ ID NO: 3102710 - RNA, 17 nt, Molluscum contagiosum virus
gcgcccgcggcgcacgg

SEQ ID NO: 3102711 - RNA, 17 nt, Molluscum contagiosum virus
gcgcccggugcggcgug

SEQ ID NO: 3102712 - RNA, 14 nt, Molluscum contagiosum virus
gcgcccgugccgcc

SEQ ID NO: 3102713 - RNA, 20 nt, Molluscum contagiosum virus
gcgcccgugcuugcgcacgg

SEQ ID NO: 3102714 - RNA, 15 nt, Molluscum contagiosum virus
gcgcccucacgugcu

SEQ ID NO: 3102715 - RNA, 16 nt, Molluscum contagiosum virus
gcgcgcgguacucggc

SEQ ID NO: 3102716 - RNA, 16 nt, Molluscum contagiosum virus
gcgcgcggugcugcgc

SEQ ID NO: 3102717 - RNA, 14 nt, Molluscum contagiosum virus
gcgcgcgugccgcc

SEQ ID NO: 3102718 - RNA, 14 nt, Molluscum contagiosum virus
gcgcgcgugccgcg

SEQ ID NO: 3102719 - RNA, 13 nt, Molluscum contagiosum virus
gcgcgcgugccgg

SEQ ID NO: 3102720 - RNA, 19 nt, Molluscum contagiosum virus
gcgcgcgugccuguggcgc

SEQ ID NO: 3102721 - RNA, 16 nt, Molluscum contagiosum virus
gcgcgcgugcggacgc

SEQ ID NO: 3102722 - RNA, 12 nt, Molluscum contagiosum virus
gcgcgcgugcuc

SEQ ID NO: 3102723 - RNA, 13 nt, Molluscum contagiosum virus
gcgcgcgugcucg

SEQ ID NO: 3102724 - RNA, 15 nt, Molluscum contagiosum virus
gcgcgcgugcucgcg

SEQ ID NO: 3102725 - RNA, 14 nt, Molluscum contagiosum virus
gcgcgcgugcugcu

SEQ ID NO: 3102726 - RNA, 14 nt, Molluscum contagiosum virus
ggccgagcgugacc

SEQ ID NO: 3102727 - RNA, 16 nt, Molluscum contagiosum virus
ggccgaggcacgcggu

SEQ ID NO: 3102728 - RNA, 12 nt, Molluscum contagiosum virus
ggccgacggcac

SEQ ID NO: 3102729 - RNA, 13 nt, Molluscum contagiosum virus
ggccgcaugcacc

SEQ ID NO: 3102730 - RNA, 21 nt, Molluscum contagiosum virus
ggccgcaugcaccuacgcgcc

SEQ ID NO: 3102731 - RNA, 12 nt, Molluscum contagiosum virus
ggccgcacgcgu

SEQ ID NO: 3102732 - RNA, 13 nt, Molluscum contagiosum virus
ggccgcacgcgua

SEQ ID NO: 3102733 - RNA, 14 nt, Molluscum contagiosum virus
ggccgcccacgcuc

SEQ ID NO: 3102734 - RNA, 16 nt, Molluscum contagiosum virus
ggcccgcgcgugaagg

SEQ ID NO: 3102735 - RNA, 17 nt, Molluscum contagiosum virus
ggcccaccgcgccagcg

SEQ ID NO: 3102736 - RNA, 23 nt, Molluscum contagiosum virus
ggcccaccuucuugucgcgcgcc

SEQ ID NO: 3102737 - RNA, 13 nt, Molluscum contagiosum virus
ggcccgugcccga

SEQ ID NO: 3102738 - RNA, 20 nt, Molluscum contagiosum virus
ggcccgugcucaggccagca

SEQ ID NO: 3102739 - RNA, 19 nt, Molluscum contagiosum virus
ggccgaagucgcagcagcg

SEQ ID NO: 3102740 - RNA, 23 nt, Molluscum contagiosum virus
ggccgaaucgucggcacgcugca

SEQ ID NO: 3102741 - RNA, 17 nt, Molluscum contagiosum virus
ggccagcuucaucaagc

SEQ ID NO: 3102742 - RNA, 19 nt, Molluscum contagiosum virus
ggccacucucccgggcucu

SEQ ID NO: 3102743 - RNA, 16 nt, Molluscum contagiosum virus
ggccagcgcgcggcgc

SEQ ID NO: 3102744 - RNA, 19 nt, Molluscum contagiosum virus
ggccaggccuugcucccaa

SEQ ID NO: 3102745 - RNA, 12 nt, Molluscum contagiosum virus
ggccaggcgcgg

SEQ ID NO: 3102746 - RNA, 13 nt, Molluscum contagiosum virus
ggccccugcgcga

SEQ ID NO: 3102747 - RNA, 22 nt, Molluscum contagiosum virus
gcgcggagacuuccuugcgcag

SEQ ID NO: 3102748 - RNA, 19 nt, Molluscum contagiosum virus
gcgcggagaucgccgcgca

SEQ ID NO: 3102749 - RNA, 13 nt, Molluscum contagiosum virus
gcgcggagcucgc

SEQ ID NO: 3102750 - RNA, 13 nt, Molluscum contagiosum virus
gcgcggagcuggc

SEQ ID NO: 3102751 - RNA, 16 nt, Molluscum contagiosum virus
gcgcggaucugcgcac

SEQ ID NO: 3102752 - RNA, 16 nt, Molluscum contagiosum virus
ggccacgcacucgcug

SEQ ID NO: 3102753 - RNA, 14 nt, Molluscum contagiosum virus
ggccacgcucgcgc

SEQ ID NO: 3102754 - RNA, 17 nt, Molluscum contagiosum virus
ggccacgcucgcgcgca

SEQ ID NO: 3102755 - RNA, 19 nt, Molluscum contagiosum virus
gcgcggcaacagcacgacg

SEQ ID NO: 3102756 - RNA, 17 nt, Molluscum contagiosum virus
gcgcggcaagcagcgug

SEQ ID NO: 3102757 - RNA, 13 nt, Molluscum contagiosum virus
gcgcggcacgccc

SEQ ID NO: 3102758 - RNA, 14 nt, Molluscum contagiosum virus
gcgcggcacgcccu

SEQ ID NO: 3102759 - RNA, 17 nt, Molluscum contagiosum virus
gcgcggcagacgccagc

SEQ ID NO: 3102760 - RNA, 22 nt, Molluscum contagiosum virus
gcgcggccauggucacgcgcac

SEQ ID NO: 3102761 - RNA, 18 nt, Molluscum contagiosum virus
gcgcggcccgagcaggac

SEQ ID NO: 3102762 - RNA, 13 nt, Molluscum contagiosum virus
gcgcggccgcgcu

SEQ ID NO: 3102763 - RNA, 17 nt, Molluscum contagiosum virus
gcgagcguuucugccgg

SEQ ID NO: 3102764 - RNA, 18 nt, Molluscum contagiosum virus
gcgagcguuucugccgga

SEQ ID NO: 3102765 - RNA, 19 nt, Molluscum contagiosum virus
gcgagcuaaucagcgccau

SEQ ID NO: 3102766 - RNA, 16 nt, Molluscum contagiosum virus
gcgagcuagugcacac

SEQ ID NO: 3102767 - RNA, 12 nt, Molluscum contagiosum virus
gcgagcucgaga

SEQ ID NO: 3102768 - RNA, 15 nt, Molluscum contagiosum virus
gcgagcucgucgcgc

SEQ ID NO: 3102769 - RNA, 17 nt, Molluscum contagiosum virus
gcgagcucgucgcgcgc

SEQ ID NO: 3102770 - RNA, 19 nt, Molluscum contagiosum virus
gcgagcucgucgcgcgcgu

SEQ ID NO: 3102771 - RNA, 15 nt, Molluscum contagiosum virus
gcgagcugcgggcgc

SEQ ID NO: 3102772 - RNA, 16 nt, Molluscum contagiosum virus
gcgagcugcuagcggc

SEQ ID NO: 3102773 - RNA, 17 nt, Molluscum contagiosum virus
gcgaggacaacucgcgg

SEQ ID NO: 3102774 - RNA, 21 nt, Molluscum contagiosum virus
gcgagcgcaugcgcgccgcgc

SEQ ID NO: 3102775 - RNA, 19 nt, Molluscum contagiosum virus
gcgagcgcccgugcuugcg

SEQ ID NO: 3102776 - RNA, 15 nt, Molluscum contagiosum virus
gcgagcgccgcucgc

SEQ ID NO: 3102777 - RNA, 12 nt, Molluscum contagiosum virus
gcgagcgccugc

SEQ ID NO: 3102778 - RNA, 20 nt, Molluscum contagiosum virus
gcgagcggcgacuugcugcg

SEQ ID NO: 3102779 - RNA, 20 nt, Molluscum contagiosum virus
gcgagcggcuuuucgccgga

SEQ ID NO: 3102780 - RNA, 18 nt, Molluscum contagiosum virus
gcgaguccccgagcagcg

SEQ ID NO: 3102781 - RNA, 22 nt, Molluscum contagiosum virus
gcgagucgcccguguucgcgga

SEQ ID NO: 3102782 - RNA, 15 nt, Molluscum contagiosum virus
gcgagucgcgggcgc

SEQ ID NO: 3102783 - RNA, 18 nt, Molluscum contagiosum virus
gcgagucucccguggcgc

SEQ ID NO: 3102784 - RNA, 19 nt, Molluscum contagiosum virus
gcgagucucccguggcgcg

SEQ ID NO: 3102785 - RNA, 16 nt, Molluscum contagiosum virus
gcgauugcccgcgcgc

SEQ ID NO: 3102786 - RNA, 23 nt, Molluscum contagiosum virus
gcgcaaaccucugagcgagcgca

SEQ ID NO: 3102787 - RNA, 12 nt, Molluscum contagiosum virus
gcgaggccaagg

SEQ ID NO: 3102788 - RNA, 13 nt, Molluscum contagiosum virus
gcgaggcgcgcac

SEQ ID NO: 3102789 - RNA, 19 nt, Molluscum contagiosum virus
gcgaucacaaguccgcggc

SEQ ID NO: 3102790 - RNA, 19 nt, Molluscum contagiosum virus
gcgaucgcggccaugcgcu

SEQ ID NO: 3102791 - RNA, 17 nt, Molluscum contagiosum virus
gcgaugaacccgcauug

SEQ ID NO: 3102792 - RNA, 13 nt, Molluscum contagiosum virus
gcgaugcgcucgc

SEQ ID NO: 3102793 - RNA, 16 nt, Molluscum contagiosum virus
gcgcacaaacgcgcgc

SEQ ID NO: 3102794 - RNA, 14 nt, Molluscum contagiosum virus
gcgcacaacuuggg

SEQ ID NO: 3102795 - RNA, 14 nt, Molluscum contagiosum virus
gcgcacacgucagc

SEQ ID NO: 3102796 - RNA, 18 nt, Molluscum contagiosum virus
gcgcacacuccucggcgc

SEQ ID NO: 3102797 - RNA, 19 nt, Molluscum contagiosum virus
gcgcacacuccucggcgcu

SEQ ID NO: 3102798 - RNA, 14 nt, Molluscum contagiosum virus
gcgcacacuugcgc

SEQ ID NO: 3102799 - RNA, 21 nt, Molluscum contagiosum virus
gcgcacagacauggcccgcgc

SEQ ID NO: 3102800 - RNA, 16 nt, Molluscum contagiosum virus
gcgcacagacggcgcg

SEQ ID NO: 3102801 - RNA, 23 nt, Molluscum contagiosum virus
gcgcaguucgagcugcugcgcga

SEQ ID NO: 3102802 - RNA, 14 nt, Molluscum contagiosum virus
gcgcaacacggccu

SEQ ID NO: 3102803 - RNA, 20 nt, Molluscum contagiosum virus
gcgcaacauguccgcaagca

SEQ ID NO: 3102804 - RNA, 15 nt, Molluscum contagiosum virus
gcgcaaccagcuggc

SEQ ID NO: 3102805 - RNA, 17 nt, Molluscum contagiosum virus
gcgcaacgagcagcccg

SEQ ID NO: 3102806 - RNA, 13 nt, Molluscum contagiosum virus
gcgcaacgcgggc

SEQ ID NO: 3102807 - RNA, 21 nt, Molluscum contagiosum virus
gcgcaacgucuuccgcgcgcu

SEQ ID NO: 3102808 - RNA, 12 nt, Molluscum contagiosum virus
gcgcaacgugcu

SEQ ID NO: 3102809 - RNA, 19 nt, Molluscum contagiosum virus
gcgcaacgugcugcgccgc

SEQ ID NO: 3102810 - RNA, 20 nt, Molluscum contagiosum virus
gcgcaagcagcucggcgaga

SEQ ID NO: 3102811 - RNA, 19 nt, Molluscum contagiosum virus
gcgcaagcauggucuucgc

SEQ ID NO: 3102812 - RNA, 23 nt, Molluscum contagiosum virus
gcgcaagugggcgucgaccugga

SEQ ID NO: 3102813 - RNA, 12 nt, Molluscum contagiosum virus
gcgcaagugugc

SEQ ID NO: 3102814 - RNA, 13 nt, Molluscum contagiosum virus
gcgcaucaugcgc

SEQ ID NO: 3102815 - RNA, 13 nt, Molluscum contagiosum virus
gcgccaaggcgcu

SEQ ID NO: 3102816 - RNA, 21 nt, Molluscum contagiosum virus
gcgccaagguggccaagcgcu

SEQ ID NO: 3102817 - RNA, 21 nt, Molluscum contagiosum virus
gcgccacgagcgccgcgacgc

SEQ ID NO: 3102818 - RNA, 20 nt, Molluscum contagiosum virus
gcgccacgagcgccgcgugc

SEQ ID NO: 3102819 - RNA, 22 nt, Molluscum contagiosum virus
gcgccacgagcgccgcgugcgc

SEQ ID NO: 3102820 - RNA, 15 nt, Molluscum contagiosum virus
gcgcauacgcgccgc

SEQ ID NO: 3102821 - RNA, 20 nt, Molluscum contagiosum virus
gcgcauacgcgccgcgcgcu

SEQ ID NO: 3102822 - RNA, 18 nt, Molluscum contagiosum virus
gcgcaucagagaagugcu

SEQ ID NO: 3102823 - RNA, 19 nt, Molluscum contagiosum virus
gcgcaaggacaccgcgggc

SEQ ID NO: 3102824 - RNA, 15 nt, Molluscum contagiosum virus
gcgcaaggccgcgcc

SEQ ID NO: 3102825 - RNA, 17 nt, Molluscum contagiosum virus
gcgcaaguccagcgcgc

SEQ ID NO: 3102826 - RNA, 21 nt, Molluscum contagiosum virus
gcgcaagucgcgcgcugcgaa

SEQ ID NO: 3102827 - RNA, 20 nt, Molluscum contagiosum virus
gcgcaucgcgggcacgcagc

SEQ ID NO: 3102828 - RNA, 21 nt, Molluscum contagiosum virus
gcgcaucgcgggcacgcagcu

SEQ ID NO: 3102829 - RNA, 14 nt, Molluscum contagiosum virus
gcgcaucugcgagc

SEQ ID NO: 3102830 - RNA, 15 nt, Molluscum contagiosum virus
gcgcaugcgcgccgc

SEQ ID NO: 3102831 - RNA, 18 nt, Molluscum contagiosum virus
gcgcaugcggcaggcgcu

SEQ ID NO: 3102832 - RNA, 20 nt, Molluscum contagiosum virus
gcgcaugcggcaggcgcugc

SEQ ID NO: 3102833 - RNA, 18 nt, Molluscum contagiosum virus
gcgcaugcucgcgcucuc

SEQ ID NO: 3102834 - RNA, 13 nt, Molluscum contagiosum virus
gcgcauggccacg

SEQ ID NO: 3102835 - RNA, 16 nt, Molluscum contagiosum virus
gcgcauggccacgccc

SEQ ID NO: 3102836 - RNA, 14 nt, Molluscum contagiosum virus
gcgcauucgcgcgc

SEQ ID NO: 3102837 - RNA, 15 nt, Molluscum contagiosum virus
gcgcauucgcgcgcc

SEQ ID NO: 3102838 - RNA, 16 nt, Molluscum contagiosum virus
gcgcauucgcgcgccc

SEQ ID NO: 3102839 - RNA, 16 nt, Molluscum contagiosum virus
gcgcauuuaccggcgc

SEQ ID NO: 3102840 - RNA, 17 nt, Molluscum contagiosum virus
gcgcauuuaccggcgcu

SEQ ID NO: 3102841 - RNA, 20 nt, Molluscum contagiosum virus
gcgcauuuaccggcgcuugc

SEQ ID NO: 3102842 - RNA, 15 nt, Molluscum contagiosum virus
gcgccaaccgcgagc

SEQ ID NO: 3102843 - RNA, 19 nt, Molluscum contagiosum virus
cucgaccugcacgacccuc

SEQ ID NO: 3102844 - RNA, 20 nt, Molluscum contagiosum virus
cucgacgcguucuagcagcg

SEQ ID NO: 3102845 - RNA, 16 nt, Molluscum contagiosum virus
cucgacgugaucgcgc

SEQ ID NO: 3102846 - RNA, 15 nt, Molluscum contagiosum virus
cucgacugcguuguc

SEQ ID NO: 3102847 - RNA, 16 nt, Molluscum contagiosum virus
cucgagaagagggucg

SEQ ID NO: 3102848 - RNA, 11 nt, Molluscum contagiosum virus
cucgagcacgu

SEQ ID NO: 3102849 - RNA, 12 nt, Molluscum contagiosum virus
cucgagcagcgg

SEQ ID NO: 3102850 - RNA, 20 nt, Molluscum contagiosum virus
cucgagcaggucaucgggcu

SEQ ID NO: 3102851 - RNA, 18 nt, Molluscum contagiosum virus
cucgagccccagaagguc

SEQ ID NO: 3102852 - RNA, 19 nt, Molluscum contagiosum virus
cucgagcgagcuacgcgcu

SEQ ID NO: 3102853 - RNA, 14 nt, Molluscum contagiosum virus
cuccgcacacgcgc

SEQ ID NO: 3102854 - RNA, 15 nt, Molluscum contagiosum virus
cuccgcacacgcgcg

SEQ ID NO: 3102855 - RNA, 22 nt, Molluscum contagiosum virus
cuccgcacacgcgcgcgugcug

SEQ ID NO: 3102856 - RNA, 13 nt, Molluscum contagiosum virus
cuccggcugcucc

SEQ ID NO: 3102857 - RNA, 24 nt, Molluscum contagiosum virus
cuccgcgcggcgcucugccaccgc

SEQ ID NO: 3102858 - RNA, 19 nt, Molluscum contagiosum virus
cuccgcgggaagaggacgc

SEQ ID NO: 3102859 - RNA, 20 nt, Molluscum contagiosum virus
cuccggaggccgcucccgcg

SEQ ID NO: 3102860 - RNA, 17 nt, Molluscum contagiosum virus
cuccugugucgcgcgag

SEQ ID NO: 3102861 - RNA, 19 nt, Molluscum contagiosum virus
cuccuucgacgcgcguucu

SEQ ID NO: 3102862 - RNA, 23 nt, Molluscum contagiosum virus
cucgaacgcaaggugugcgcgcu

SEQ ID NO: 3102863 - RNA, 22 nt, Molluscum contagiosum virus
cucgaacgcgcgugcgcgugcc

SEQ ID NO: 3102864 - RNA, 22 nt, Molluscum contagiosum virus
cucgaacucgugcgccgcgccg

SEQ ID NO: 3102865 - RNA, 15 nt, Molluscum contagiosum virus
cuccucucgcgaucu

SEQ ID NO: 3102866 - RNA, 18 nt, Molluscum contagiosum virus
cucgacauuucgcgccug

SEQ ID NO: 3102867 - RNA, 20 nt, Molluscum contagiosum virus
cucgaccaaaugcgcgugcg

SEQ ID NO: 3102868 - RNA, 17 nt, Molluscum contagiosum virus
cuccguggugcgcgucu

SEQ ID NO: 3102869 - RNA, 14 nt, Molluscum contagiosum virus
cuccguuucccgcg

SEQ ID NO: 3102870 - RNA, 21 nt, Molluscum contagiosum virus
cuccguacagcuccccgcgca

SEQ ID NO: 3102871 - RNA, 18 nt, Molluscum contagiosum virus
cuccucggcgcuacgcac

SEQ ID NO: 3102872 - RNA, 16 nt, Molluscum contagiosum virus
cuaacggacgcggcca

SEQ ID NO: 3102873 - RNA, 21 nt, Molluscum contagiosum virus
cuaaauaaugaaccugcacgc

SEQ ID NO: 3102874 - RNA, 14 nt, Molluscum contagiosum virus
cguuugucgcgggc

SEQ ID NO: 3102875 - RNA, 22 nt, Molluscum contagiosum virus
cuacaagcggugcagcuacugc

SEQ ID NO: 3102876 - RNA, 17 nt, Molluscum contagiosum virus
cuacaccagcuggacgg

SEQ ID NO: 3102877 - RNA, 16 nt, Molluscum contagiosum virus
cuacacugucgcgcag

SEQ ID NO: 3102878 - RNA, 15 nt, Molluscum contagiosum virus
cuacagcgcgcugca

SEQ ID NO: 3102879 - RNA, 20 nt, Molluscum contagiosum virus
cuacaguuccgaucgcgaga

SEQ ID NO: 3102880 - RNA, 20 nt, Molluscum contagiosum virus
cuaccacgggcccgcgcgug

SEQ ID NO: 3102881 - RNA, 13 nt, Molluscum contagiosum virus
cuaccacgucggc

SEQ ID NO: 3102882 - RNA, 16 nt, Molluscum contagiosum virus
cuaccacgucggcgag

SEQ ID NO: 3102883 - RNA, 16 nt, Molluscum contagiosum virus
cuaccagcucgcgcag

SEQ ID NO: 3102884 - RNA, 13 nt, Molluscum contagiosum virus
cucccugcgggcg

SEQ ID NO: 3102885 - RNA, 17 nt, Molluscum contagiosum virus
cuccgaaaaaggcccgg

SEQ ID NO: 3102886 - RNA, 12 nt, Molluscum contagiosum virus
cucccgcggccg

SEQ ID NO: 3102887 - RNA, 20 nt, Molluscum contagiosum virus
cucccggcggcaagcgagau

SEQ ID NO: 3102888 - RNA, 12 nt, Molluscum contagiosum virus
cucccgucgagc

SEQ ID NO: 3102889 - RNA, 14 nt, Molluscum contagiosum virus
cucccgucgagcac

SEQ ID NO: 3102890 - RNA, 16 nt, Molluscum contagiosum virus
cucccgucgagcacga

SEQ ID NO: 3102891 - RNA, 21 nt, Molluscum contagiosum virus
cguuccagagcacugcgcguc

SEQ ID NO: 3102892 - RNA, 18 nt, Molluscum contagiosum virus
cguucgacuacacgcgcu

SEQ ID NO: 3102893 - RNA, 17 nt, Molluscum contagiosum virus
cguugcacgugcgugcc

SEQ ID NO: 3102894 - RNA, 16 nt, Molluscum contagiosum virus
cguugccgagcgagca

SEQ ID NO: 3102895 - RNA, 12 nt, Molluscum contagiosum virus
cguugccugcac

SEQ ID NO: 3102896 - RNA, 14 nt, Molluscum contagiosum virus
cguugcugcgccac

SEQ ID NO: 3102897 - RNA, 13 nt, Molluscum contagiosum virus
cguugcugcugcg

SEQ ID NO: 3102898 - RNA, 16 nt, Molluscum contagiosum virus
cguugcugcugcgcgc

SEQ ID NO: 3102899 - RNA, 13 nt, Molluscum contagiosum virus
cguuggcgccagc

SEQ ID NO: 3102900 - RNA, 13 nt, Molluscum contagiosum virus
cguuggcgcgccc

SEQ ID NO: 3102901 - RNA, 14 nt, Molluscum contagiosum virus
cguuggcgcgcccg

SEQ ID NO: 3102902 - RNA, 22 nt, Molluscum contagiosum virus
cguuggcgcgcccggcgcccgc

SEQ ID NO: 3102903 - RNA, 15 nt, Molluscum contagiosum virus
cguuguccgcgucca

SEQ ID NO: 3102904 - RNA, 15 nt, Molluscum contagiosum virus
cguucgcgcgccagu

SEQ ID NO: 3102905 - RNA, 12 nt, Molluscum contagiosum virus
cguucgcggagc

SEQ ID NO: 3102906 - RNA, 15 nt, Molluscum contagiosum virus
cgcgcgcgagcacgu

SEQ ID NO: 3102907 - RNA, 22 nt, Molluscum contagiosum virus
cgcgcgcgauguacaagcccgu

SEQ ID NO: 3102908 - RNA, 13 nt, Molluscum contagiosum virus
cgcgcgcgcacgc

SEQ ID NO: 3102909 - RNA, 12 nt, Molluscum contagiosum virus
cgcgcgcgccag

SEQ ID NO: 3102910 - RNA, 13 nt, Molluscum contagiosum virus
cgcgcgcgccagc

SEQ ID NO: 3102911 - RNA, 14 nt, Molluscum contagiosum virus
cgcgcgcgccgcag

SEQ ID NO: 3102912 - RNA, 12 nt, Molluscum contagiosum virus
cgcgcgcgccgg

SEQ ID NO: 3102913 - RNA, 13 nt, Molluscum contagiosum virus
cgcgcgcgcgccg

SEQ ID NO: 3102914 - RNA, 14 nt, Molluscum contagiosum virus
cgcgcgcgcgcgag

SEQ ID NO: 3102915 - RNA, 16 nt, Molluscum contagiosum virus
cgcgcgcgcgcggcgc

SEQ ID NO: 3102916 - RNA, 13 nt, Molluscum contagiosum virus
cgcgcgcgcggcg

SEQ ID NO: 3102917 - RNA, 14 nt, Molluscum contagiosum virus
cgcgcgcgcggcgc

SEQ ID NO: 3102918 - RNA, 14 nt, Molluscum contagiosum virus
cgcgcgcgcucugc

SEQ ID NO: 3102919 - RNA, 14 nt, Molluscum contagiosum virus
cgcgcgcgcugcug

SEQ ID NO: 3102920 - RNA, 18 nt, Molluscum contagiosum virus
cgcgcgcggagaggacgc

SEQ ID NO: 3102921 - RNA, 11 nt, Molluscum contagiosum virus
cgcgcgcggca

SEQ ID NO: 3102922 - RNA, 12 nt, Molluscum contagiosum virus
cgcgcgcggcaa

SEQ ID NO: 3102923 - RNA, 12 nt, Molluscum contagiosum virus
cgcgcgcggcac

SEQ ID NO: 3102924 - RNA, 13 nt, Molluscum contagiosum virus
cgcgcgcggcacg

SEQ ID NO: 3102925 - RNA, 21 nt, Molluscum contagiosum virus
cgcgcgcggucgacgggaacg

SEQ ID NO: 3102926 - RNA, 23 nt, Molluscum contagiosum virus
cgcgcgcguaaagagcguccagc

SEQ ID NO: 3102927 - RNA, 14 nt, Molluscum contagiosum virus
cgcgcgcgucgucg

SEQ ID NO: 3102928 - RNA, 12 nt, Molluscum contagiosum virus
cgcgcgcgugcc

SEQ ID NO: 3102929 - RNA, 20 nt, Molluscum contagiosum virus
cgcgcgcguuugucgcgggc

SEQ ID NO: 3102930 - RNA, 20 nt, Molluscum contagiosum virus
cgcgcgcuaccugcgcaagc

SEQ ID NO: 3102931 - RNA, 18 nt, Molluscum contagiosum virus
cgcgcgcuagccgccgcu

SEQ ID NO: 3102932 - RNA, 22 nt, Molluscum contagiosum virus
cgcgcgcuagccgccgcugccg

SEQ ID NO: 3102933 - RNA, 20 nt, Molluscum contagiosum virus
cgcgcgcuaggggugccgcu

SEQ ID NO: 3102934 - RNA, 13 nt, Molluscum contagiosum virus
cgcgcgcuccgag

SEQ ID NO: 3102935 - RNA, 12 nt, Molluscum contagiosum virus
cgcgcgcucgcg

SEQ ID NO: 3102936 - RNA, 13 nt, Molluscum contagiosum virus
cgcgcgcucgcgc

SEQ ID NO: 3102937 - RNA, 14 nt, Molluscum contagiosum virus
cgcgcgcucgcgcu

SEQ ID NO: 3102938 - RNA, 17 nt, Molluscum contagiosum virus
cgcgcgcucgcucgcgc

SEQ ID NO: 3102939 - RNA, 16 nt, Molluscum contagiosum virus
cgcgcgcucugccgcc

SEQ ID NO: 3102940 - RNA, 13 nt, Molluscum contagiosum virus
cgcgcgcugagcg

SEQ ID NO: 3102941 - RNA, 19 nt, Molluscum contagiosum virus
cgcgcgcugagcgcggagc

SEQ ID NO: 3102942 - RNA, 13 nt, Molluscum contagiosum virus
cgcgcgcugcgcg

SEQ ID NO: 3102943 - RNA, 14 nt, Molluscum contagiosum virus
cgcgcgcugcgcgc

SEQ ID NO: 3102944 - RNA, 17 nt, Molluscum contagiosum virus
cgcgcgcugcgcgccgc

SEQ ID NO: 3102945 - RNA, 18 nt, Molluscum contagiosum virus
cgcgcgcugcgcgcggac

SEQ ID NO: 3102946 - RNA, 13 nt, Molluscum contagiosum virus
cgcgcgcugcucu

SEQ ID NO: 3102947 - RNA, 18 nt, Molluscum contagiosum virus
cgcgcgcuuuuugccgcu

SEQ ID NO: 3102948 - RNA, 20 nt, Molluscum contagiosum virus
cgcgcggaagcccgccucgu

SEQ ID NO: 3102949 - RNA, 13 nt, Molluscum contagiosum virus
cgcgcaagugugc

SEQ ID NO: 3102950 - RNA, 14 nt, Molluscum contagiosum virus
cgcgcaagugugcg

SEQ ID NO: 3102951 - RNA, 18 nt, Molluscum contagiosum virus
cgcgcaagugugcgcauc

SEQ ID NO: 3102952 - RNA, 15 nt, Molluscum contagiosum virus
cgcgcaauagcgccc

SEQ ID NO: 3102953 - RNA, 17 nt, Molluscum contagiosum virus
cgcgcgccuugcagcgc

SEQ ID NO: 3102954 - RNA, 20 nt, Molluscum contagiosum virus
cgcgcgccuugcagcgcagc

SEQ ID NO: 3102955 - RNA, 16 nt, Molluscum contagiosum virus
cgcgcggugcugcgcc

SEQ ID NO: 3102956 - RNA, 18 nt, Molluscum contagiosum virus
cgcgcggugcugcgccag

SEQ ID NO: 3102957 - RNA, 16 nt, Molluscum contagiosum virus
cgcgcguacgcgugcg

SEQ ID NO: 3102958 - RNA, 19 nt, Molluscum contagiosum virus
cgcgcguacgcgugcgcug

SEQ ID NO: 3102959 - RNA, 17 nt, Molluscum contagiosum virus
cgcgcguacgcugcucg

SEQ ID NO: 3102960 - RNA, 13 nt, Molluscum contagiosum virus
cgcgcgucacgga

SEQ ID NO: 3102961 - RNA, 16 nt, Molluscum contagiosum virus
cguucacuugcgcgcg

SEQ ID NO: 3102962 - RNA, 20 nt, Molluscum contagiosum virus
cguucacuugcgcgcgugcc

SEQ ID NO: 3102963 - RNA, 23 nt, Molluscum contagiosum virus
cgcgcggaugcuggcgagcacgu

SEQ ID NO: 3102964 - RNA, 13 nt, Molluscum contagiosum virus
cgcgcggcagacg

SEQ ID NO: 3102965 - RNA, 12 nt, Molluscum contagiosum virus
cgcgcggcagca

SEQ ID NO: 3102966 - RNA, 14 nt, Molluscum contagiosum virus
cgcgcggcgccgag

SEQ ID NO: 3102967 - RNA, 15 nt, Molluscum contagiosum virus
cgcgcggcgcucugc

SEQ ID NO: 3102968 - RNA, 18 nt, Molluscum contagiosum virus
cgcgcggcuaagcucugc

SEQ ID NO: 3102969 - RNA, 21 nt, Molluscum contagiosum virus
cgcgcggcuuggcgcccuucc

SEQ ID NO: 3102970 - RNA, 20 nt, Molluscum contagiosum virus
cgcgcggggcacugcgcacg

SEQ ID NO: 3102971 - RNA, 19 nt, Molluscum contagiosum virus
cgcgaucuuccgcgacgag

SEQ ID NO: 3102972 - RNA, 21 nt, Molluscum contagiosum virus
cgcgaucuuccgcgacgagcu

SEQ ID NO: 3102973 - RNA, 14 nt, Molluscum contagiosum virus
cgcgaugugcaccu

SEQ ID NO: 3102974 - RNA, 23 nt, Molluscum contagiosum virus
cgcgauuuacuucgacgcggugc

SEQ ID NO: 3102975 - RNA, 15 nt, Molluscum contagiosum virus
cgcgcaacacugcag

SEQ ID NO: 3102976 - RNA, 13 nt, Molluscum contagiosum virus
cgcgcaaccagcu

SEQ ID NO: 3102977 - RNA, 18 nt, Molluscum contagiosum virus
cgcgcaaccagcuggcgc

SEQ ID NO: 3102978 - RNA, 21 nt, Molluscum contagiosum virus
cgcgcaaccagcuggcgcccg

SEQ ID NO: 3102979 - RNA, 19 nt, Molluscum contagiosum virus
cgcgcaagaacaaccagac

SEQ ID NO: 3102980 - RNA, 17 nt, Molluscum contagiosum virus
cgcgcaaggccgcgccc

SEQ ID NO: 3102981 - RNA, 20 nt, Molluscum contagiosum virus
cgcgcaagucaccgcuccgc

SEQ ID NO: 3102982 - RNA, 18 nt, Molluscum contagiosum virus
cgcgcaaguccagcgcgc

SEQ ID NO: 3102983 - RNA, 23 nt, Molluscum contagiosum virus
cgcgcaaguccagcgcgcucgag

SEQ ID NO: 3102984 - RNA, 16 nt, Molluscum contagiosum virus
cgcgcaagucgcgcgc

SEQ ID NO: 3102985 - RNA, 18 nt, Molluscum contagiosum virus
cgcgagucgcgccgagga

SEQ ID NO: 3102986 - RNA, 12 nt, Molluscum contagiosum virus
cgcgagugugca

SEQ ID NO: 3102987 - RNA, 14 nt, Molluscum contagiosum virus
cgcgagugugcgug

SEQ ID NO: 3102988 - RNA, 17 nt, Molluscum contagiosum virus
cgcgagugugcgugucu

SEQ ID NO: 3102989 - RNA, 20 nt, Molluscum contagiosum virus
cgcgaguugcgucucccgcg

SEQ ID NO: 3102990 - RNA, 19 nt, Molluscum contagiosum virus
cgcgaggagacguagagca

SEQ ID NO: 3102991 - RNA, 20 nt, Molluscum contagiosum virus
cgcgaggcaugucgcggugc

SEQ ID NO: 3102992 - RNA, 17 nt, Molluscum contagiosum virus
cgcgagcucgcgucauc

SEQ ID NO: 3102993 - RNA, 15 nt, Molluscum contagiosum virus
cgcgagcugcgggcg

SEQ ID NO: 3102994 - RNA, 19 nt, Molluscum contagiosum virus
cgcgagcuggagcgcgucg

SEQ ID NO: 3102995 - RNA, 20 nt, Molluscum contagiosum virus
cgcgagcaguucgcgcgccu

SEQ ID NO: 3102996 - RNA, 22 nt, Molluscum contagiosum virus
cgcgagcaguucgcgcgccugc

SEQ ID NO: 3102997 - RNA, 17 nt, Molluscum contagiosum virus
cgcgagcaugccgccgc

SEQ ID NO: 3102998 - RNA, 22 nt, Molluscum contagiosum virus
cgcgagcaugccgccgcguacg

SEQ ID NO: 3102999 - RNA, 13 nt, Molluscum contagiosum virus
cgcgagccacgcg

SEQ ID NO: 3103000 - RNA, 22 nt, Molluscum contagiosum virus
cgcgagcccaccgauggacuuc

SEQ ID NO: 3103001 - RNA, 17 nt, Molluscum contagiosum virus
cgcgagcaagcgcccgc

SEQ ID NO: 3103002 - RNA, 18 nt, Molluscum contagiosum virus
cgcgagcaagcgcccgcg

SEQ ID NO: 3103003 - RNA, 22 nt, Molluscum contagiosum virus
cgcgagcaagcgcccgcgagcg

SEQ ID NO: 3103004 - RNA, 16 nt, Molluscum contagiosum virus
cgcgagcacccccgcu

SEQ ID NO: 3103005 - RNA, 18 nt, Molluscum contagiosum virus
cgcgagcacgccugcacg

SEQ ID NO: 3103006 - RNA, 16 nt, Molluscum contagiosum virus
ccuccagcagcggcgc

SEQ ID NO: 3103007 - RNA, 19 nt, Molluscum contagiosum virus
cgcgagcgcaugcgcgccg

SEQ ID NO: 3103008 - RNA, 20 nt, Molluscum contagiosum virus
cgcgagcgcaugcgcgccgc

SEQ ID NO: 3103009 - RNA, 23 nt, Molluscum contagiosum virus
cgcgagcgcaugcgcgccgcgcu

SEQ ID NO: 3103010 - RNA, 13 nt, Molluscum contagiosum virus
cgcgagcgccacu

SEQ ID NO: 3103011 - RNA, 14 nt, Molluscum contagiosum virus
cgcgagcgcgcgcu

SEQ ID NO: 3103012 - RNA, 22 nt, Molluscum contagiosum virus
cgcgagcgcgcgcugcgcgccg

SEQ ID NO: 3103013 - RNA, 13 nt, Molluscum contagiosum virus
cgcgagcgcgggc

SEQ ID NO: 3103014 - RNA, 23 nt, Molluscum contagiosum virus
ccucauuguucggaggcugcucc

SEQ ID NO: 3103015 - RNA, 14 nt, Molluscum contagiosum virus
ccuccagggcacga

SEQ ID NO: 3103016 - RNA, 12 nt, Molluscum contagiosum virus
cgcgagaacuuu

SEQ ID NO: 3103017 - RNA, 22 nt, Molluscum contagiosum virus
cgcgagaagucgggcuggcgug

SEQ ID NO: 3103018 - RNA, 23 nt, Molluscum contagiosum virus
cgcgagagcuacagcaugcgugc

SEQ ID NO: 3103019 - RNA, 13 nt, Molluscum contagiosum virus
cgcgagaugcgcg

SEQ ID NO: 3103020 - RNA, 14 nt, Molluscum contagiosum virus
cgcgagaugcgcgg

SEQ ID NO: 3103021 - RNA, 15 nt, Molluscum contagiosum virus
ccucaccgcgcacau

SEQ ID NO: 3103022 - RNA, 16 nt, Molluscum contagiosum virus
ccucaccucugcgcgg

SEQ ID NO: 3103023 - RNA, 20 nt, Molluscum contagiosum virus
ccucacggcgagcgcgcccu

SEQ ID NO: 3103024 - RNA, 17 nt, Molluscum contagiosum virus
ccucagccgagcgccgc

SEQ ID NO: 3103025 - RNA, 20 nt, Molluscum contagiosum virus
ccuaucucaaagaacgcgcg

SEQ ID NO: 3103026 - RNA, 19 nt, Molluscum contagiosum virus
ccuauaaauggacgcgcuc

SEQ ID NO: 3103027 - RNA, 20 nt, Molluscum contagiosum virus
ccuacgagcacauacacgcg

SEQ ID NO: 3103028 - RNA, 20 nt, Molluscum contagiosum virus
ccuacguggcgucgcgccgc

SEQ ID NO: 3103029 - RNA, 23 nt, Molluscum contagiosum virus
ccgcguagcuagcucugcgcgcg

SEQ ID NO: 3103030 - RNA, 17 nt, Molluscum contagiosum virus
ccgcgguggccgcgccg

SEQ ID NO: 3103031 - RNA, 21 nt, Molluscum contagiosum virus
ccgcguucuucguggcgcugg

SEQ ID NO: 3103032 - RNA, 16 nt, Molluscum contagiosum virus
ccgcuagagugcgcgg

SEQ ID NO: 3103033 - RNA, 19 nt, Molluscum contagiosum virus
ccgcuagagugcgcggaag

SEQ ID NO: 3103034 - RNA, 22 nt, Molluscum contagiosum virus
ccgcucacagcuucgcgagccc

SEQ ID NO: 3103035 - RNA, 17 nt, Molluscum contagiosum virus
ccgcuccggucaccgcg

SEQ ID NO: 3103036 - RNA, 16 nt, Molluscum contagiosum virus
ccgcuccuggucuucc

SEQ ID NO: 3103037 - RNA, 16 nt, Molluscum contagiosum virus
ccgcucggcacugcug

SEQ ID NO: 3103038 - RNA, 18 nt, Molluscum contagiosum virus
ccgcucggcacugcuggc

SEQ ID NO: 3103039 - RNA, 19 nt, Molluscum contagiosum virus
ccgcucguccagcugcgcg

SEQ ID NO: 3103040 - RNA, 22 nt, Molluscum contagiosum virus
ccgcucguccagcugcgcgagc

SEQ ID NO: 3103041 - RNA, 18 nt, Molluscum contagiosum virus
ccguggaggagccgcccg

SEQ ID NO: 3103042 - RNA, 23 nt, Molluscum contagiosum virus
ccgugcugcgucacaagcaccgc

SEQ ID NO: 3103043 - RNA, 17 nt, Molluscum contagiosum virus
ccgcuggugggcgugcg

SEQ ID NO: 3103044 - RNA, 17 nt, Molluscum contagiosum virus
ccgcuguacgugcugcc

SEQ ID NO: 3103045 - RNA, 17 nt, Molluscum contagiosum virus
ccgcugucacgcgagcu

SEQ ID NO: 3103046 - RNA, 13 nt, Molluscum contagiosum virus
ccgcugcgcggag

SEQ ID NO: 3103047 - RNA, 15 nt, Molluscum contagiosum virus
ccgcugcgcggagcu

SEQ ID NO: 3103048 - RNA, 14 nt, Molluscum contagiosum virus
ccgcugcucgacau

SEQ ID NO: 3103049 - RNA, 21 nt, Molluscum contagiosum virus
ccgcugcuucguaaagcuggc

SEQ ID NO: 3103050 - RNA, 18 nt, Molluscum contagiosum virus
ccgcuggcggcgcacgcg

SEQ ID NO: 3103051 - RNA, 16 nt, Molluscum contagiosum virus
ccgcugcccgcgcacg

SEQ ID NO: 3103052 - RNA, 15 nt, Molluscum contagiosum virus
ccgcugccgcgcgcg

SEQ ID NO: 3103053 - RNA, 16 nt, Molluscum contagiosum virus
ccgcugccgcgcgcgc

SEQ ID NO: 3103054 - RNA, 18 nt, Molluscum contagiosum virus
ccgcugccgucgcgcgcu

SEQ ID NO: 3103055 - RNA, 22 nt, Molluscum contagiosum virus
ccgcugccgucgcgcgcugugg

SEQ ID NO: 3103056 - RNA, 15 nt, Molluscum contagiosum virus
ccguggugcgcgacc

SEQ ID NO: 3103057 - RNA, 16 nt, Molluscum contagiosum virus
ccguggugcgcgaccu

SEQ ID NO: 3103058 - RNA, 13 nt, Molluscum contagiosum virus
ccguggcgcgccg

SEQ ID NO: 3103059 - RNA, 13 nt, Molluscum contagiosum virus
ccgugggcgccgc

SEQ ID NO: 3103060 - RNA, 14 nt, Molluscum contagiosum virus
ccguguaccgccgc

SEQ ID NO: 3103061 - RNA, 18 nt, Molluscum contagiosum virus
ccguguccuacacgccgc

SEQ ID NO: 3103062 - RNA, 19 nt, Molluscum contagiosum virus
ccguguccuacacgccgcu

SEQ ID NO: 3103063 - RNA, 16 nt, Molluscum contagiosum virus
ccgugucggcaccgcg

SEQ ID NO: 3103064 - RNA, 15 nt, Molluscum contagiosum virus
ccguucacgggcacg

SEQ ID NO: 3103065 - RNA, 19 nt, Molluscum contagiosum virus
ccguugcacgugcgugccc

SEQ ID NO: 3103066 - RNA, 14 nt, Molluscum contagiosum virus
ccuagacacgagcg

SEQ ID NO: 3103067 - RNA, 20 nt, Molluscum contagiosum virus
ccuagaggaugcggauccuc

SEQ ID NO: 3103068 - RNA, 17 nt, Molluscum contagiosum virus
ccuagcguuucgcgaag

SEQ ID NO: 3103069 - RNA, 20 nt, Molluscum contagiosum virus
ccuaggcacuccgcgcaccg

SEQ ID NO: 3103070 - RNA, 20 nt, Molluscum contagiosum virus
ccgcaugcaccuacgcgccg

SEQ ID NO: 3103071 - RNA, 16 nt, Molluscum contagiosum virus
ccgcauugggccuuga

SEQ ID NO: 3103072 - RNA, 12 nt, Molluscum contagiosum virus
ccgccagcacca

SEQ ID NO: 3103073 - RNA, 19 nt, Molluscum contagiosum virus
ccgccagcgucgcgcgccg

SEQ ID NO: 3103074 - RNA, 13 nt, Molluscum contagiosum virus
ccgcgggcgcacg

SEQ ID NO: 3103075 - RNA, 17 nt, Molluscum contagiosum virus
ccgcgggcgcgcgccag

SEQ ID NO: 3103076 - RNA, 15 nt, Molluscum contagiosum virus
ccgcgggcgugcccg

SEQ ID NO: 3103077 - RNA, 18 nt, Molluscum contagiosum virus
ccgcgggcuggacugugc

SEQ ID NO: 3103078 - RNA, 22 nt, Molluscum contagiosum virus
ccgcggugcguugugcggggcu

SEQ ID NO: 3103079 - RNA, 20 nt, Molluscum contagiosum virus
ccgcgguguccuugcgccgc

SEQ ID NO: 3103080 - RNA, 23 nt, Molluscum contagiosum virus
ccgcguacacgugcacgcgcacg

SEQ ID NO: 3103081 - RNA, 18 nt, Molluscum contagiosum virus
ccgcguacagcgcgcgug

SEQ ID NO: 3103082 - RNA, 20 nt, Molluscum contagiosum virus
ccgcguacgcacgugccgug

SEQ ID NO: 3103083 - RNA, 14 nt, Molluscum contagiosum virus
ccgcguacgcgccg

SEQ ID NO: 3103084 - RNA, 15 nt, Molluscum contagiosum virus
ccgcgucgcgcgccg

SEQ ID NO: 3103085 - RNA, 20 nt, Molluscum contagiosum virus
ccgcgucguagacgcgcccg

SEQ ID NO: 3103086 - RNA, 12 nt, Molluscum contagiosum virus
ccgcgugcaccc

SEQ ID NO: 3103087 - RNA, 15 nt, Molluscum contagiosum virus
ccgcgugcacccucc

SEQ ID NO: 3103088 - RNA, 13 nt, Molluscum contagiosum virus
ccgcgugcgccgc

SEQ ID NO: 3103089 - RNA, 15 nt, Molluscum contagiosum virus
ccgcgugcgugcaca

SEQ ID NO: 3103090 - RNA, 13 nt, Molluscum contagiosum virus
ccgcgugcucgug

SEQ ID NO: 3103091 - RNA, 14 nt, Molluscum contagiosum virus
ccgcgugcucgugu

SEQ ID NO: 3103092 - RNA, 13 nt, Molluscum contagiosum virus
ccgcgugcucugc

SEQ ID NO: 3103093 - RNA, 18 nt, Molluscum contagiosum virus
ccgcgugcucugcuccgc

SEQ ID NO: 3103094 - RNA, 13 nt, Molluscum contagiosum virus
ccgcgugcuggcg

SEQ ID NO: 3103095 - RNA, 16 nt, Molluscum contagiosum virus
ccgcguggcgcgcgac

SEQ ID NO: 3103096 - RNA, 15 nt, Molluscum contagiosum virus
ccgcacgcugcugcg

SEQ ID NO: 3103097 - RNA, 17 nt, Molluscum contagiosum virus
ccgcacgcugcugcgug

SEQ ID NO: 3103098 - RNA, 18 nt, Molluscum contagiosum virus
ccgcacguggagucacga

SEQ ID NO: 3103099 - RNA, 23 nt, Molluscum contagiosum virus
ccgcacuauggacgcuugcuagc

SEQ ID NO: 3103100 - RNA, 14 nt, Molluscum contagiosum virus
ccgcacucgccgcg

SEQ ID NO: 3103101 - RNA, 18 nt, Molluscum contagiosum virus
ccgcacucgccgcggaac

SEQ ID NO: 3103102 - RNA, 19 nt, Molluscum contagiosum virus
ccgcaagugcacgcggcgc

SEQ ID NO: 3103103 - RNA, 22 nt, Molluscum contagiosum virus
ccgcaagugcacgcggcgcgug

SEQ ID NO: 3103104 - RNA, 19 nt, Molluscum contagiosum virus
ccgcaauuacgugcgcgag

SEQ ID NO: 3103105 - RNA, 18 nt, Molluscum contagiosum virus
ccgcagcacgcgugugcg

SEQ ID NO: 3103106 - RNA, 15 nt, Molluscum contagiosum virus
ccgcagccacggccg

SEQ ID NO: 3103107 - RNA, 16 nt, Molluscum contagiosum virus
ccgcagcccacgugcc

SEQ ID NO: 3103108 - RNA, 22 nt, Molluscum contagiosum virus
ccgcagcccgagcgcgcgugcg

SEQ ID NO: 3103109 - RNA, 15 nt, Molluscum contagiosum virus
ccgcagccgcgcucg

SEQ ID NO: 3103110 - RNA, 18 nt, Molluscum contagiosum virus
ccgcagccggagcuugcg

SEQ ID NO: 3103111 - RNA, 16 nt, Molluscum contagiosum virus
ccgcagcggcgccacc

SEQ ID NO: 3103112 - RNA, 22 nt, Molluscum contagiosum virus
ccgcaggaaaggcaccccgcag

SEQ ID NO: 3103113 - RNA, 21 nt, Molluscum contagiosum virus
ccgcaggaaagguacccgcag

SEQ ID NO: 3103114 - RNA, 18 nt, Molluscum contagiosum virus
ccgcaggaaccgcgugcg

SEQ ID NO: 3103115 - RNA, 19 nt, Molluscum contagiosum virus
ccgcaggcccggcggcccg

SEQ ID NO: 3103116 - RNA, 16 nt, Molluscum contagiosum virus
ccgcaggcgcgcgcca

SEQ ID NO: 3103117 - RNA, 20 nt, Molluscum contagiosum virus
ccgcaggcgucaugcgcgcg

SEQ ID NO: 3103118 - RNA, 22 nt, Molluscum contagiosum virus
ccgcaggcgucaugcgcgcgcg

SEQ ID NO: 3103119 - RNA, 20 nt, Molluscum contagiosum virus
ccgcagugcucgcacacgug

SEQ ID NO: 3103120 - RNA, 18 nt, Molluscum contagiosum virus
ccgauuuggacgcggcac

SEQ ID NO: 3103121 - RNA, 20 nt, Molluscum contagiosum virus
ccgcaaaauguagacgggcu

SEQ ID NO: 3103122 - RNA, 14 nt, Molluscum contagiosum virus
ccgauguccugcgg

SEQ ID NO: 3103123 - RNA, 15 nt, Molluscum contagiosum virus
ccgaucgcgagaacg

SEQ ID NO: 3103124 - RNA, 16 nt, Molluscum contagiosum virus
ccgaugcagugcggau

SEQ ID NO: 3103125 - RNA, 15 nt, Molluscum contagiosum virus
cacugcuggcgcgcg

SEQ ID NO: 3103126 - RNA, 15 nt, Molluscum contagiosum virus
cagaagcgagagcgc

SEQ ID NO: 3103127 - RNA, 18 nt, Molluscum contagiosum virus
cacuuccgugagcagucc

SEQ ID NO: 3103128 - RNA, 14 nt, Molluscum contagiosum virus
cacuugcacgcgca

SEQ ID NO: 3103129 - RNA, 16 nt, Molluscum contagiosum virus
cacuugccgggcgacg

SEQ ID NO: 3103130 - RNA, 17 nt, Molluscum contagiosum virus
cacugugcuggcgcacu

SEQ ID NO: 3103131 - RNA, 20 nt, Molluscum contagiosum virus
cacuggcgcgcacgcgcacg

SEQ ID NO: 3103132 - RNA, 22 nt, Molluscum contagiosum virus
cacugggaacaccacacgcgcg

SEQ ID NO: 3103133 - RNA, 15 nt, Molluscum contagiosum virus
cagacaacaccagcg

SEQ ID NO: 3103134 - RNA, 19 nt, Molluscum contagiosum virus
cagacaacaccagcgugcc

SEQ ID NO: 3103135 - RNA, 15 nt, Molluscum contagiosum virus
cagaccaagaagccc

SEQ ID NO: 3103136 - RNA, 21 nt, Molluscum contagiosum virus
cagaccagagugacgucuucc

SEQ ID NO: 3103137 - RNA, 19 nt, Molluscum contagiosum virus
cagaccccugaaaggcauc

SEQ ID NO: 3103138 - RNA, 18 nt, Molluscum contagiosum virus
cagacccgaaagcugccc

SEQ ID NO: 3103139 - RNA, 13 nt, Molluscum contagiosum virus
cagcagcgccagc

SEQ ID NO: 3103140 - RNA, 14 nt, Molluscum contagiosum virus
cagcagcgccagcu

SEQ ID NO: 3103141 - RNA, 17 nt, Molluscum contagiosum virus
cagcagcggcgcgugcu

SEQ ID NO: 3103142 - RNA, 12 nt, Molluscum contagiosum virus
cagcagcgugca

SEQ ID NO: 3103143 - RNA, 23 nt, Molluscum contagiosum virus
cagcagcuccagcauggcgccac

SEQ ID NO: 3103144 - RNA, 16 nt, Molluscum contagiosum virus
cagcagcuggccggcu

SEQ ID NO: 3103145 - RNA, 14 nt, Molluscum contagiosum virus
cagcagcuggcgcg

SEQ ID NO: 3103146 - RNA, 17 nt, Molluscum contagiosum virus
cagacgcagcgcgagcu

SEQ ID NO: 3103147 - RNA, 13 nt, Molluscum contagiosum virus
cagacgcgcgucc

SEQ ID NO: 3103148 - RNA, 15 nt, Molluscum contagiosum virus
cagcaggugcacgug

SEQ ID NO: 3103149 - RNA, 23 nt, Molluscum contagiosum virus
cagcaggcacuccagcgcgcccu

SEQ ID NO: 3103150 - RNA, 20 nt, Molluscum contagiosum virus
cagcagucaguuccgcggcg

SEQ ID NO: 3103151 - RNA, 15 nt, Molluscum contagiosum virus
cagcaguccgccguc

SEQ ID NO: 3103152 - RNA, 16 nt, Molluscum contagiosum virus
cagcaucgggcugucg

SEQ ID NO: 3103153 - RNA, 20 nt, Molluscum contagiosum virus
cagcaugaacucgcugcugc

SEQ ID NO: 3103154 - RNA, 15 nt, Molluscum contagiosum virus
cagcauggcgccaca

SEQ ID NO: 3103155 - RNA, 20 nt, Molluscum contagiosum virus
cagcauuagcgccaaggcgc

SEQ ID NO: 3103156 - RNA, 16 nt, Molluscum contagiosum virus
cagcauucccggcgcg

SEQ ID NO: 3103157 - RNA, 17 nt, Molluscum contagiosum virus
cagcauucccggcgcgc

SEQ ID NO: 3103158 - RNA, 14 nt, Molluscum contagiosum virus
cagccccgcgccag

SEQ ID NO: 3103159 - RNA, 20 nt, Molluscum contagiosum virus
cagccccgcgccagcagucc

SEQ ID NO: 3103160 - RNA, 16 nt, Molluscum contagiosum virus
cagccccugcugcucg

SEQ ID NO: 3103161 - RNA, 13 nt, Molluscum contagiosum virus
cagccgagccggg

SEQ ID NO: 3103162 - RNA, 19 nt, Molluscum contagiosum virus
cagccgagcgccgccagcu

SEQ ID NO: 3103163 - RNA, 16 nt, Molluscum contagiosum virus
cagccgcaccgggacg

SEQ ID NO: 3103164 - RNA, 14 nt, Molluscum contagiosum virus
cagccgcacggcgc

SEQ ID NO: 3103165 - RNA, 21 nt, Molluscum contagiosum virus
cagcccgacuucucgcgcgac

SEQ ID NO: 3103166 - RNA, 22 nt, Molluscum contagiosum virus
cagcccgacuucucgcgcgacu

SEQ ID NO: 3103167 - RNA, 24 nt, Molluscum contagiosum virus
cagccaggcuaggcgcgacugcac

SEQ ID NO: 3103168 - RNA, 18 nt, Molluscum contagiosum virus
cagccaucgugcgcgacu

SEQ ID NO: 3103169 - RNA, 20 nt, Molluscum contagiosum virus
cagcgacgagcagcugcuuc

SEQ ID NO: 3103170 - RNA, 13 nt, Molluscum contagiosum virus
cagcgacgcgacg

SEQ ID NO: 3103171 - RNA, 19 nt, Molluscum contagiosum virus
cagccgccugccgcgcucg

SEQ ID NO: 3103172 - RNA, 14 nt, Molluscum contagiosum virus
cagccgcgagcgcg

SEQ ID NO: 3103173 - RNA, 14 nt, Molluscum contagiosum virus
cagccgcgcggcag

SEQ ID NO: 3103174 - RNA, 13 nt, Molluscum contagiosum virus
cagccgcugcgcc

SEQ ID NO: 3103175 - RNA, 13 nt, Molluscum contagiosum virus
cagccgcugcugc

SEQ ID NO: 3103176 - RNA, 14 nt, Molluscum contagiosum virus
cagccgcuggacgc

SEQ ID NO: 3103177 - RNA, 20 nt, Molluscum contagiosum virus
cagccgucgccgcgcccgcg

SEQ ID NO: 3103178 - RNA, 20 nt, Molluscum contagiosum virus
cagccuagaaacgacgggcg

SEQ ID NO: 3103179 - RNA, 20 nt, Molluscum contagiosum virus
cagcgagaucaacgcgcgcg

SEQ ID NO: 3103180 - RNA, 22 nt, Molluscum contagiosum virus
cagccuccgguuuucgcgggag

SEQ ID NO: 3103181 - RNA, 21 nt, Molluscum contagiosum virus
cagccuccgugcgccaguccg

SEQ ID NO: 3103182 - RNA, 14 nt, Molluscum contagiosum virus
cacuccucggcgcu

SEQ ID NO: 3103183 - RNA, 12 nt, Molluscum contagiosum virus
cacucgagaaga

SEQ ID NO: 3103184 - RNA, 16 nt, Molluscum contagiosum virus
cacucgauggacgcca

SEQ ID NO: 3103185 - RNA, 22 nt, Molluscum contagiosum virus
cacucgcgaacuacgagcgcac

SEQ ID NO: 3103186 - RNA, 14 nt, Molluscum contagiosum virus
cacucgcgcucgcg

SEQ ID NO: 3103187 - RNA, 14 nt, Molluscum contagiosum virus
cacucucgcgcgug

SEQ ID NO: 3103188 - RNA, 17 nt, Molluscum contagiosum virus
cacucacaugugcugcc

SEQ ID NO: 3103189 - RNA, 15 nt, Molluscum contagiosum virus
cacugcucgcgcacg

SEQ ID NO: 3103190 - RNA, 18 nt, Molluscum contagiosum virus
cacugcggcaacgagcac

SEQ ID NO: 3103191 - RNA, 20 nt, Molluscum contagiosum virus
cacugcggcaacgagcacgu

SEQ ID NO: 3103192 - RNA, 14 nt, Molluscum contagiosum virus
cacuccgucgcgcu

SEQ ID NO: 3103193 - RNA, 16 nt, Molluscum contagiosum virus
cacuccgucgcgcucg

SEQ ID NO: 3103194 - RNA, 15 nt, Molluscum contagiosum virus
cacguugcacugcgc

SEQ ID NO: 3103195 - RNA, 16 nt, Molluscum contagiosum virus
cacguugccgcgcgcu

SEQ ID NO: 3103196 - RNA, 18 nt, Molluscum contagiosum virus
cacguugccgcgcgcugc

SEQ ID NO: 3103197 - RNA, 22 nt, Molluscum contagiosum virus
cacguugggguugucgggcgcu

SEQ ID NO: 3103198 - RNA, 19 nt, Molluscum contagiosum virus
cacguuuuucgcgggcgcc

SEQ ID NO: 3103199 - RNA, 13 nt, Molluscum contagiosum virus
cacgccgcucggc

SEQ ID NO: 3103200 - RNA, 23 nt, Molluscum contagiosum virus
cacgugcugcagcugcgcgagcc

SEQ ID NO: 3103201 - RNA, 17 nt, Molluscum contagiosum virus
cacgugcugcugcggcu

SEQ ID NO: 3103202 - RNA, 23 nt, Molluscum contagiosum virus
cacgugcugcugcggcugcugga

SEQ ID NO: 3103203 - RNA, 22 nt, Molluscum contagiosum virus
cacguggccaaggucucgagcu

SEQ ID NO: 3103204 - RNA, 23 nt, Molluscum contagiosum virus
cacguggugguuggcgugcucgc

SEQ ID NO: 3103205 - RNA, 19 nt, Molluscum contagiosum virus
cacguuccagagcacugcg

SEQ ID NO: 3103206 - RNA, 15 nt, Molluscum contagiosum virus
cacgccagguguucc

SEQ ID NO: 3103207 - RNA, 19 nt, Molluscum contagiosum virus
cacgcccgaggaccggcgc

SEQ ID NO: 3103208 - RNA, 15 nt, Molluscum contagiosum virus
cacgcccgcgcugcg

SEQ ID NO: 3103209 - RNA, 13 nt, Molluscum contagiosum virus
cacgcccgcgucc

SEQ ID NO: 3103210 - RNA, 22 nt, Molluscum contagiosum virus
cacgccgacuuccgacgggccg

SEQ ID NO: 3103211 - RNA, 13 nt, Molluscum contagiosum virus
cacgcacgcgcgg

SEQ ID NO: 3103212 - RNA, 15 nt, Molluscum contagiosum virus
cacgcacgcgcgggc

SEQ ID NO: 3103213 - RNA, 19 nt, Molluscum contagiosum virus
cacgcacggcccgggugcg

SEQ ID NO: 3103214 - RNA, 17 nt, Molluscum contagiosum virus
cacgcacuugcgcgccu

SEQ ID NO: 3103215 - RNA, 19 nt, Molluscum contagiosum virus
cacgcagcuggcgggcgug

SEQ ID NO: 3103216 - RNA, 18 nt, Molluscum contagiosum virus
cacgcaggacuggcaccu

SEQ ID NO: 3103217 - RNA, 18 nt, Molluscum contagiosum virus
cacgcaaaugcgcgcgaa

SEQ ID NO: 3103218 - RNA, 14 nt, Molluscum contagiosum virus
cacgcagugccacg

SEQ ID NO: 3103219 - RNA, 22 nt, Molluscum contagiosum virus
cacgacgcuuucguccgccgcu

SEQ ID NO: 3103220 - RNA, 22 nt, Molluscum contagiosum virus
cacgacggaacguuggcccgca

SEQ ID NO: 3103221 - RNA, 21 nt, Molluscum contagiosum virus
cacgacggacuucuugcgcgg

SEQ ID NO: 3103222 - RNA, 13 nt, Molluscum contagiosum virus
cacgaccgcgcac

SEQ ID NO: 3103223 - RNA, 18 nt, Molluscum contagiosum virus
cacgcaagcccgcgcgcg

SEQ ID NO: 3103224 - RNA, 20 nt, Molluscum contagiosum virus
cacgcaaggcaugcgcgcag

SEQ ID NO: 3103225 - RNA, 16 nt, Molluscum contagiosum virus
cacgcaaucgcgcgcg

SEQ ID NO: 3103226 - RNA, 15 nt, Molluscum contagiosum virus
cacgcacacgacgac

SEQ ID NO: 3103227 - RNA, 16 nt, Molluscum contagiosum virus
cacgcacacgacgacg

SEQ ID NO: 3103228 - RNA, 14 nt, Molluscum contagiosum virus
cacgaugcgcucgu

SEQ ID NO: 3103229 - RNA, 17 nt, Molluscum contagiosum virus
cacgaugcgcucguggu

SEQ ID NO: 3103230 - RNA, 19 nt, Molluscum contagiosum virus
cacgaugugcgcgcgacgu

SEQ ID NO: 3103231 - RNA, 20 nt, Molluscum contagiosum virus
caccguggaggagccgcccg

SEQ ID NO: 3103232 - RNA, 17 nt, Molluscum contagiosum virus
caccguugccgcggcag

SEQ ID NO: 3103233 - RNA, 15 nt, Molluscum contagiosum virus
caccucugcgcggcc

SEQ ID NO: 3103234 - RNA, 16 nt, Molluscum contagiosum virus
caccugcacgacguac

SEQ ID NO: 3103235 - RNA, 15 nt, Molluscum contagiosum virus
caccugcacgagccg

SEQ ID NO: 3103236 - RNA, 13 nt, Molluscum contagiosum virus
caccucgcacgug

SEQ ID NO: 3103237 - RNA, 16 nt, Molluscum contagiosum virus
caccuagagcacgaag

SEQ ID NO: 3103238 - RNA, 15 nt, Molluscum contagiosum virus
caccucaccgcgcac

SEQ ID NO: 3103239 - RNA, 16 nt, Molluscum contagiosum virus
caccgccugcugcagc

SEQ ID NO: 3103240 - RNA, 21 nt, Molluscum contagiosum virus
caccgccuguaccugcucggg

SEQ ID NO: 3103241 - RNA, 20 nt, Molluscum contagiosum virus
caccgcgagcaccacuacug

SEQ ID NO: 3103242 - RNA, 19 nt, Molluscum contagiosum virus
caccggccuuuugucguuc

SEQ ID NO: 3103243 - RNA, 13 nt, Molluscum contagiosum virus
caccgggcgccgc

SEQ ID NO: 3103244 - RNA, 15 nt, Molluscum contagiosum virus
caccgcggcgcggag

SEQ ID NO: 3103245 - RNA, 22 nt, Molluscum contagiosum virus
caccgcguccgcuaccgcagcc

SEQ ID NO: 3103246 - RNA, 16 nt, Molluscum contagiosum virus
caccguaccgcgcccg

SEQ ID NO: 3103247 - RNA, 17 nt, Molluscum contagiosum virus
caccuucggaacugcgg

SEQ ID NO: 3103248 - RNA, 18 nt, Molluscum contagiosum virus
caccuucggaacugcgga

SEQ ID NO: 3103249 - RNA, 13 nt, Molluscum contagiosum virus
caccugcgacgcc

SEQ ID NO: 3103250 - RNA, 11 nt, Molluscum contagiosum virus
caccugcgcaa

SEQ ID NO: 3103251 - RNA, 16 nt, Molluscum contagiosum virus
caccuuuuccacgcgg

SEQ ID NO: 3103252 - RNA, 17 nt, Molluscum contagiosum virus
cacgaagacuacggcac

SEQ ID NO: 3103253 - RNA, 22 nt, Molluscum contagiosum virus
cacgaaggacgcgcuugcgcgg

SEQ ID NO: 3103254 - RNA, 14 nt, Molluscum contagiosum virus
cacgaaucgcucgc

SEQ ID NO: 3103255 - RNA, 21 nt, Molluscum contagiosum virus
cacgacguacgagugcuggag

SEQ ID NO: 3103256 - RNA, 15 nt, Molluscum contagiosum virus
cacgacucgcgucug

SEQ ID NO: 3103257 - RNA, 21 nt, Molluscum contagiosum virus
cacgagacugagugcugagcc

SEQ ID NO: 3103258 - RNA, 17 nt, Molluscum contagiosum virus
cacgagauggcugcucu

SEQ ID NO: 3103259 - RNA, 21 nt, Molluscum contagiosum virus
cacgagaugggcccgcgcgcg

SEQ ID NO: 3103260 - RNA, 20 nt, Molluscum contagiosum virus
cacgagcacugccugccgcc

SEQ ID NO: 3103261 - RNA, 21 nt, Molluscum contagiosum virus
cacgagcgaaaacgcgugucu

SEQ ID NO: 3103262 - RNA, 13 nt, Molluscum contagiosum virus
cacgagcgcggca

SEQ ID NO: 3103263 - RNA, 14 nt, Molluscum contagiosum virus
cacgagcgcggcaa

SEQ ID NO: 3103264 - RNA, 14 nt, Molluscum contagiosum virus
cacgagcugcugcc

SEQ ID NO: 3103265 - RNA, 20 nt, Molluscum contagiosum virus
cacgaggacugggaacccgu

SEQ ID NO: 3103266 - RNA, 20 nt, Molluscum contagiosum virus
cacgagggccuuggcggcgc

SEQ ID NO: 3103267 - RNA, 21 nt, Molluscum contagiosum virus
cacgaggggcaagcucgcgcu

SEQ ID NO: 3103268 - RNA, 18 nt, Molluscum contagiosum virus
cacgagugcccgcgcgcu

SEQ ID NO: 3103269 - RNA, 17 nt, Molluscum contagiosum virus
cacgagugcuugcgcgg

SEQ ID NO: 3103270 - RNA, 15 nt, Molluscum contagiosum virus
agaaaaauacgugua

SEQ ID NO: 3103271 - RNA, 15 nt, Molluscum contagiosum virus
agaaacgacgggcgc

SEQ ID NO: 3103272 - RNA, 15 nt, Molluscum contagiosum virus
agaagugugccugcu

SEQ ID NO: 3103273 - RNA, 18 nt, Molluscum contagiosum virus
agaagagggucgugcagg

SEQ ID NO: 3103274 - RNA, 14 nt, Molluscum contagiosum virus
agacaacaccagcg

SEQ ID NO: 3103275 - RNA, 21 nt, Molluscum contagiosum virus
agacaacacucgugcucgugu

SEQ ID NO: 3103276 - RNA, 17 nt, Molluscum contagiosum virus
acguguccgcauccgcc

SEQ ID NO: 3103277 - RNA, 17 nt, Molluscum contagiosum virus
acgugguccaccagcac

SEQ ID NO: 3103278 - RNA, 23 nt, Molluscum contagiosum virus
acgugugcucugugcgcgcagac

SEQ ID NO: 3103279 - RNA, 13 nt, Molluscum contagiosum virus
acguggcgccgcu

SEQ ID NO: 3103280 - RNA, 16 nt, Molluscum contagiosum virus
acgucuccucgcgcac

SEQ ID NO: 3103281 - RNA, 20 nt, Molluscum contagiosum virus
acgugccaagaccugggcgu

SEQ ID NO: 3103282 - RNA, 15 nt, Molluscum contagiosum virus
acgugcccuacgcgc

SEQ ID NO: 3103283 - RNA, 21 nt, Molluscum contagiosum virus
acgugcgccagcucugggcgc

SEQ ID NO: 3103284 - RNA, 17 nt, Molluscum contagiosum virus
acgugcgcgcugcgcgc

SEQ ID NO: 3103285 - RNA, 17 nt, Molluscum contagiosum virus
acgugcguacgcggcgc

SEQ ID NO: 3103286 - RNA, 21 nt, Molluscum contagiosum virus
acgugcgucuuuuugcggcgc

SEQ ID NO: 3103287 - RNA, 22 nt, Molluscum contagiosum virus
acgugcgugguguccacgcgcg

SEQ ID NO: 3103288 - RNA, 17 nt, Molluscum contagiosum virus
acgugcugcagcguaug

SEQ ID NO: 3103289 - RNA, 19 nt, Molluscum contagiosum virus
acgugcugcagcugcgcga

SEQ ID NO: 3103290 - RNA, 20 nt, Molluscum contagiosum virus
acgugcugcagcugcgcgag

SEQ ID NO: 3103291 - RNA, 14 nt, Molluscum contagiosum virus
acgugcugcgcacg

SEQ ID NO: 3103292 - RNA, 13 nt, Molluscum contagiosum virus
acgugcugcgccg

SEQ ID NO: 3103293 - RNA, 15 nt, Molluscum contagiosum virus
acgugcugcugcggc

SEQ ID NO: 3103294 - RNA, 14 nt, Molluscum contagiosum virus
acgugcuugcgcgc

SEQ ID NO: 3103295 - RNA, 17 nt, Molluscum contagiosum virus
acgugcuugcgcgcgag

SEQ ID NO: 3103296 - RNA, 15 nt, Molluscum contagiosum virus
acguggacguggaua

SEQ ID NO: 3103297 - RNA, 14 nt, Molluscum contagiosum virus
acgucuucuaccgc

SEQ ID NO: 3103298 - RNA, 19 nt, Molluscum contagiosum virus
acgugacagucagcggcgu

SEQ ID NO: 3103299 - RNA, 16 nt, Molluscum contagiosum virus
acgugaccucgcugcu

SEQ ID NO: 3103300 - RNA, 16 nt, Molluscum contagiosum virus
acgugacgcgccucga

SEQ ID NO: 3103301 - RNA, 16 nt, Molluscum contagiosum virus
acgugacugagggcgc

SEQ ID NO: 3103302 - RNA, 15 nt, Molluscum contagiosum virus
acgugaucgcgcagg

SEQ ID NO: 3103303 - RNA, 15 nt, Molluscum contagiosum virus
acgugcacgcgcacg

SEQ ID NO: 3103304 - RNA, 14 nt, Molluscum contagiosum virus
acgugcagcggcgc

SEQ ID NO: 3103305 - RNA, 23 nt, Molluscum contagiosum virus
acgugcagcggcgccacgagcgc

SEQ ID NO: 3103306 - RNA, 15 nt, Molluscum contagiosum virus
acgucgcgcgcucgc

SEQ ID NO: 3103307 - RNA, 15 nt, Molluscum contagiosum virus
acguaguacugcagc

SEQ ID NO: 3103308 - RNA, 18 nt, Molluscum contagiosum virus
caccgacacgcgcccgcc

SEQ ID NO: 3103309 - RNA, 19 nt, Molluscum contagiosum virus
caccgagcgcuacgacgac

SEQ ID NO: 3103310 - RNA, 17 nt, Molluscum contagiosum virus
caccgccgagauggagc

SEQ ID NO: 3103311 - RNA, 16 nt, Molluscum contagiosum virus
caccgcaucccccgcg

SEQ ID NO: 3103312 - RNA, 17 nt, Molluscum contagiosum virus
agagcacgcgcucgcgc

SEQ ID NO: 3103313 - RNA, 14 nt, Molluscum contagiosum virus
agagcacugcgcgu

SEQ ID NO: 3103314 - RNA, 13 nt, Molluscum contagiosum virus
cacccgcgcucga

SEQ ID NO: 3103315 - RNA, 19 nt, Molluscum contagiosum virus
cacccgcaggaaaggcacc

SEQ ID NO: 3103316 - RNA, 20 nt, Molluscum contagiosum virus
agacuugccgucucgcgcuc

SEQ ID NO: 3103317 - RNA, 13 nt, Molluscum contagiosum virus
agagaaccugugc

SEQ ID NO: 3103318 - RNA, 15 nt, Molluscum contagiosum virus
agagaaccugugcgc

SEQ ID NO: 3103319 - RNA, 17 nt, Molluscum contagiosum virus
agacguggugcucgugg

SEQ ID NO: 3103320 - RNA, 21 nt, Molluscum contagiosum virus
agacuaccggcaguagcagcg

SEQ ID NO: 3103321 - RNA, 18 nt, Molluscum contagiosum virus
agacuauaugcgaagcgu

SEQ ID NO: 3103322 - RNA, 18 nt, Molluscum contagiosum virus
agacgucccgcagugugc

SEQ ID NO: 3103323 - RNA, 16 nt, Molluscum contagiosum virus
agacgugcggcacgcu

SEQ ID NO: 3103324 - RNA, 18 nt, Molluscum contagiosum virus
agaccuggucacacuggu

SEQ ID NO: 3103325 - RNA, 14 nt, Molluscum contagiosum virus
agacgcagcgcgag

SEQ ID NO: 3103326 - RNA, 20 nt, Molluscum contagiosum virus
agacgcagcgcgagcugugc

SEQ ID NO: 3103327 - RNA, 14 nt, Molluscum contagiosum virus
agacgcgcucgcgc

SEQ ID NO: 3103328 - RNA, 16 nt, Molluscum contagiosum virus
agacgcgcucgcgcuc

SEQ ID NO: 3103329 - RNA, 15 nt, Molluscum contagiosum virus
agacgcuagcugugc

SEQ ID NO: 3103330 - RNA, 14 nt, Molluscum contagiosum virus
agacgcugcgcgac

SEQ ID NO: 3103331 - RNA, 18 nt, Molluscum contagiosum virus
agacagcacggcacgugc

SEQ ID NO: 3103332 - RNA, 22 nt, Molluscum contagiosum virus
agacaucaucgcggagcugcgc

SEQ ID NO: 3103333 - RNA, 12 nt, Molluscum contagiosum virus
agaccacgcgcg

SEQ ID NO: 3103334 - RNA, 13 nt, Molluscum contagiosum virus
agaccacgcgcgc

SEQ ID NO: 3103335 - RNA, 15 nt, Molluscum contagiosum virus
acgcagucgccuucc

SEQ ID NO: 3103336 - RNA, 21 nt, Molluscum contagiosum virus
acgcagucgccuuccugcgcc

SEQ ID NO: 3103337 - RNA, 17 nt, Molluscum contagiosum virus
acgcauguacgcggcgg

SEQ ID NO: 3103338 - RNA, 14 nt, Molluscum contagiosum virus
acgccaagcgucgc

SEQ ID NO: 3103339 - RNA, 17 nt, Molluscum contagiosum virus
acgccauuuucgugcgc

SEQ ID NO: 3103340 - RNA, 13 nt, Molluscum contagiosum virus
acgccagcgacgc

SEQ ID NO: 3103341 - RNA, 12 nt, Molluscum contagiosum virus
acgccagcgcgc

SEQ ID NO: 3103342 - RNA, 18 nt, Molluscum contagiosum virus
acgccggggggcgccaag

SEQ ID NO: 3103343 - RNA, 22 nt, Molluscum contagiosum virus
acgccggggggcgccaaguccg

SEQ ID NO: 3103344 - RNA, 22 nt, Molluscum contagiosum virus
acgcccgagggcgggcacgugc

SEQ ID NO: 3103345 - RNA, 14 nt, Molluscum contagiosum virus
acgccgagcccgag

SEQ ID NO: 3103346 - RNA, 18 nt, Molluscum contagiosum virus
acgccgagcccgagcccg

SEQ ID NO: 3103347 - RNA, 13 nt, Molluscum contagiosum virus
acgccgagcgggc

SEQ ID NO: 3103348 - RNA, 14 nt, Molluscum contagiosum virus
acgccuagccugca

SEQ ID NO: 3103349 - RNA, 23 nt, Molluscum contagiosum virus
acgccuccaagaagaggccagca

SEQ ID NO: 3103350 - RNA, 23 nt, Molluscum contagiosum virus
acgccuccaagaagaggccggca

SEQ ID NO: 3103351 - RNA, 16 nt, Molluscum contagiosum virus
acgccguccgcgcagc

SEQ ID NO: 3103352 - RNA, 15 nt, Molluscum contagiosum virus
acgccgugcgcgugc

SEQ ID NO: 3103353 - RNA, 23 nt, Molluscum contagiosum virus
acgccgugcgcgugcggcggcgc

SEQ ID NO: 3103354 - RNA, 14 nt, Molluscum contagiosum virus
acgcagaggcgcgu

SEQ ID NO: 3103355 - RNA, 18 nt, Molluscum contagiosum virus
acgcagcgcgagcugugc

SEQ ID NO: 3103356 - RNA, 23 nt, Molluscum contagiosum virus
acgcagcuguggcgccugcgcgc

SEQ ID NO: 3103357 - RNA, 20 nt, Molluscum contagiosum virus
acgcaggaccuggcuggcgc

SEQ ID NO: 3103358 - RNA, 12 nt, Molluscum contagiosum virus
acgcacgcgcgc

SEQ ID NO: 3103359 - RNA, 14 nt, Molluscum contagiosum virus
acgcacgcgcgggc

SEQ ID NO: 3103360 - RNA, 14 nt, Molluscum contagiosum virus
acgcacucgcuggc

SEQ ID NO: 3103361 - RNA, 14 nt, Molluscum contagiosum virus
acgcacuugcgcgc

SEQ ID NO: 3103362 - RNA, 15 nt, Molluscum contagiosum virus
acgcagaaguggcgc

SEQ ID NO: 3103363 - RNA, 13 nt, Molluscum contagiosum virus
acgcgcgcgcagg

SEQ ID NO: 3103364 - RNA, 20 nt, Molluscum contagiosum virus
acgcgcgcguaacagcgcgc

SEQ ID NO: 3103365 - RNA, 13 nt, Molluscum contagiosum virus
acgcgcgcuuagc

SEQ ID NO: 3103366 - RNA, 18 nt, Molluscum contagiosum virus
acgcgcggcagacgccag

SEQ ID NO: 3103367 - RNA, 19 nt, Molluscum contagiosum virus
acgcgcggcagcagccucg

SEQ ID NO: 3103368 - RNA, 14 nt, Molluscum contagiosum virus
acgcgcggcggcgc

SEQ ID NO: 3103369 - RNA, 15 nt, Molluscum contagiosum virus
acgcggacgcgcagc

SEQ ID NO: 3103370 - RNA, 23 nt, Molluscum contagiosum virus
acgcggaggucgagcgcgccgcg

SEQ ID NO: 3103371 - RNA, 22 nt, Molluscum contagiosum virus
acgcgcguccgcaggcgucaug

SEQ ID NO: 3103372 - RNA, 17 nt, Molluscum contagiosum virus
acgcgcguggagcgcgc

SEQ ID NO: 3103373 - RNA, 21 nt, Molluscum contagiosum virus
acgcgcuaccgcaagcucaug

SEQ ID NO: 3103374 - RNA, 12 nt, Molluscum contagiosum virus
acgcgcugcgcc

SEQ ID NO: 3103375 - RNA, 14 nt, Molluscum contagiosum virus
acgcgcugcggcgc

SEQ ID NO: 3103376 - RNA, 14 nt, Molluscum contagiosum virus
acgcgcuugcgcgg

SEQ ID NO: 3103377 - RNA, 15 nt, Molluscum contagiosum virus
acgcguccacggcgc

SEQ ID NO: 3103378 - RNA, 23 nt, Molluscum contagiosum virus
acgcguccgccucuuccucgugc

SEQ ID NO: 3103379 - RNA, 20 nt, Molluscum contagiosum virus
acgcgugcauggcacgcgag

SEQ ID NO: 3103380 - RNA, 22 nt, Molluscum contagiosum virus
acgcgugccuggcuugcgcgcg

SEQ ID NO: 3103381 - RNA, 15 nt, Molluscum contagiosum virus
acgcgugcgcgccag

SEQ ID NO: 3103382 - RNA, 15 nt, Molluscum contagiosum virus
acgcgugcugcgcgg

SEQ ID NO: 3103383 - RNA, 23 nt, Molluscum contagiosum virus
acgcgugcugcgcggcgccgcag

SEQ ID NO: 3103384 - RNA, 15 nt, Molluscum contagiosum virus
acgcggugagugcgc

SEQ ID NO: 3103385 - RNA, 14 nt, Molluscum contagiosum virus
acgcggugcgcgcg

SEQ ID NO: 3103386 - RNA, 17 nt, Molluscum contagiosum virus
acgcggugcgcgcgugc

SEQ ID NO: 3103387 - RNA, 23 nt, Molluscum contagiosum virus
acgcggugugcacaugcccgugc

SEQ ID NO: 3103388 - RNA, 15 nt, Molluscum contagiosum virus
acgcguacauccgcg

SEQ ID NO: 3103389 - RNA, 17 nt, Molluscum contagiosum virus
acgcguacauccgcgag

SEQ ID NO: 3103390 - RNA, 14 nt, Molluscum contagiosum virus
acgcguaccagcgc

SEQ ID NO: 3103391 - RNA, 16 nt, Molluscum contagiosum virus
acgcguacguguccau

SEQ ID NO: 3103392 - RNA, 23 nt, Molluscum contagiosum virus
acgcguacguguccaugcacgac

SEQ ID NO: 3103393 - RNA, 22 nt, Molluscum contagiosum virus
acgcguagcacgaaggacgcgc

SEQ ID NO: 3103394 - RNA, 24 nt, Molluscum contagiosum virus
acgcgcaagugugcgcaucccucg

SEQ ID NO: 3103395 - RNA, 15 nt, Molluscum contagiosum virus
acgcgcacgcgcgag

SEQ ID NO: 3103396 - RNA, 20 nt, Molluscum contagiosum virus
acgcgcacgggccugcgcgc

SEQ ID NO: 3103397 - RNA, 14 nt, Molluscum contagiosum virus
acgcgcagcucgac

SEQ ID NO: 3103398 - RNA, 21 nt, Molluscum contagiosum virus
acgcgcagcuguuucugccgc

SEQ ID NO: 3103399 - RNA, 18 nt, Molluscum contagiosum virus
acgcgcaugaggcggcgc

SEQ ID NO: 3103400 - RNA, 15 nt, Molluscum contagiosum virus
acgcgcccuaagggc

SEQ ID NO: 3103401 - RNA, 19 nt, Molluscum contagiosum virus
acgcgccgacaugcgcacg

SEQ ID NO: 3103402 - RNA, 14 nt, Molluscum contagiosum virus
acgcgccgcgcgag

SEQ ID NO: 3103403 - RNA, 21 nt, Molluscum contagiosum virus
acgcgcaaggccgcgcccaag

SEQ ID NO: 3103404 - RNA, 18 nt, Molluscum contagiosum virus
acgcgccggggcgcgcgc

SEQ ID NO: 3103405 - RNA, 19 nt, Molluscum contagiosum virus
acgcgccucgagcagguca

SEQ ID NO: 3103406 - RNA, 15 nt, Molluscum contagiosum virus
acgcgcgagcggagc

SEQ ID NO: 3103407 - RNA, 24 nt, Molluscum contagiosum virus
acgcgcgagugugugcaucccucg

SEQ ID NO: 3103408 - RNA, 17 nt, Molluscum contagiosum virus
acgcgacuucgcccgug

SEQ ID NO: 3103409 - RNA, 13 nt, Molluscum contagiosum virus
acgcgagcggagc

SEQ ID NO: 3103410 - RNA, 23 nt, Molluscum contagiosum virus
acgcgagcggcuuuucgccggag

SEQ ID NO: 3103411 - RNA, 20 nt, Molluscum contagiosum virus
acgcgaucuuccgcgacgag

SEQ ID NO: 3103412 - RNA, 23 nt, Molluscum contagiosum virus
acgcgaccuucacucgcucgcgc

SEQ ID NO: 3103413 - RNA, 22 nt, Molluscum contagiosum virus
acgcgacgcgcguggagcgcgc

SEQ ID NO: 3103414 - RNA, 17 nt, Molluscum contagiosum virus
acgccgccagcgacgag

SEQ ID NO: 3103415 - RNA, 15 nt, Molluscum contagiosum virus
acgccuucguggagc

SEQ ID NO: 3103416 - RNA, 19 nt, Molluscum contagiosum virus
acgccuucuuccugcgcgu

SEQ ID NO: 3103417 - RNA, 20 nt, Molluscum contagiosum virus
acgcgaaacuggacugagcc

SEQ ID NO: 3103418 - RNA, 16 nt, Molluscum contagiosum virus
acgcgaacugcccgag

SEQ ID NO: 3103419 - RNA, 21 nt, Molluscum contagiosum virus
acgcguucuagcagcgugcgc

SEQ ID NO: 3103420 - RNA, 20 nt, Molluscum contagiosum virus
acggaggucuacaacgagcu

SEQ ID NO: 3103421 - RNA, 13 nt, Molluscum contagiosum virus
acggagcgcgcgc

SEQ ID NO: 3103422 - RNA, 17 nt, Molluscum contagiosum virus
acggagcggaucgugcu

SEQ ID NO: 3103423 - RNA, 14 nt, Molluscum contagiosum virus
acggcacgcugagc

SEQ ID NO: 3103424 - RNA, 13 nt, Molluscum contagiosum virus
acggcacggaccc

SEQ ID NO: 3103425 - RNA, 22 nt, Molluscum contagiosum virus
acggcacgugcguacgcggcgc

SEQ ID NO: 3103426 - RNA, 20 nt, Molluscum contagiosum virus
acggcacuaaggccgucagc

SEQ ID NO: 3103427 - RNA, 15 nt, Molluscum contagiosum virus
acggcagacggcaag

SEQ ID NO: 3103428 - RNA, 20 nt, Molluscum contagiosum virus
acggcgacgacagcgacgag

SEQ ID NO: 3103429 - RNA, 16 nt, Molluscum contagiosum virus
acggcgacgagggcgc

SEQ ID NO: 3103430 - RNA, 18 nt, Molluscum contagiosum virus
acggcgacgcgaucgugc

SEQ ID NO: 3103431 - RNA, 14 nt, Molluscum contagiosum virus
acggcgagcgccgc

SEQ ID NO: 3103432 - RNA, 13 nt, Molluscum contagiosum virus
acggcgagcgcgc

SEQ ID NO: 3103433 - RNA, 18 nt, Molluscum contagiosum virus
acggcgauucgugcucgu

SEQ ID NO: 3103434 - RNA, 14 nt, Molluscum contagiosum virus
acggcgcccaggaa

SEQ ID NO: 3103435 - RNA, 20 nt, Molluscum contagiosum virus
acggcgccuucgucgcgcgc

SEQ ID NO: 3103436 - RNA, 21 nt, Molluscum contagiosum virus
acggcgccuucgucgcgcgcu

SEQ ID NO: 3103437 - RNA, 13 nt, Molluscum contagiosum virus
acggcgcgcagcg

SEQ ID NO: 3103438 - RNA, 13 nt, Molluscum contagiosum virus
acggcgcgcgcgc

SEQ ID NO: 3103439 - RNA, 19 nt, Molluscum contagiosum virus
acggcgcggaucugcgcac

SEQ ID NO: 3103440 - RNA, 20 nt, Molluscum contagiosum virus
acggcgcggaucugcgcaca

SEQ ID NO: 3103441 - RNA, 19 nt, Molluscum contagiosum virus
acggcgcgggcgcgcccga

SEQ ID NO: 3103442 - RNA, 14 nt, Molluscum contagiosum virus
acggcgcugcgcgu

SEQ ID NO: 3103443 - RNA, 15 nt, Molluscum contagiosum virus
acggacucgccgcgc

SEQ ID NO: 3103444 - RNA, 21 nt, Molluscum contagiosum virus
acggacuuuucgcgcgugcgc

SEQ ID NO: 3103445 - RNA, 23 nt, Molluscum contagiosum virus
acgcuggcacggccggcgccgcg

SEQ ID NO: 3103446 - RNA, 20 nt, Molluscum contagiosum virus
acgcuggccgugcccgccga

SEQ ID NO: 3103447 - RNA, 15 nt, Molluscum contagiosum virus
acgcuggcgcucggc

SEQ ID NO: 3103448 - RNA, 13 nt, Molluscum contagiosum virus
acgcuggcggcgc

SEQ ID NO: 3103449 - RNA, 17 nt, Molluscum contagiosum virus
acgcuggucacgcgcuu

SEQ ID NO: 3103450 - RNA, 18 nt, Molluscum contagiosum virus
acgcuucgcauugaccuc

SEQ ID NO: 3103451 - RNA, 16 nt, Molluscum contagiosum virus
acgcuuggcgggcagc

SEQ ID NO: 3103452 - RNA, 19 nt, Molluscum contagiosum virus
acgcuuguccgcggacgcg

SEQ ID NO: 3103453 - RNA, 12 nt, Molluscum contagiosum virus
acggacccgcga

SEQ ID NO: 3103454 - RNA, 19 nt, Molluscum contagiosum virus
acggacgcccuccucgacc

SEQ ID NO: 3103455 - RNA, 11 nt, Molluscum contagiosum virus
acggacgccuu

SEQ ID NO: 3103456 - RNA, 12 nt, Molluscum contagiosum virus
acggacgcggcc

SEQ ID NO: 3103457 - RNA, 19 nt, Molluscum contagiosum virus
acgcggcucuggagcggcc

SEQ ID NO: 3103458 - RNA, 16 nt, Molluscum contagiosum virus
acgcggccaugcuccu

SEQ ID NO: 3103459 - RNA, 19 nt, Molluscum contagiosum virus
acgcggcgcgugucgcgga

SEQ ID NO: 3103460 - RNA, 13 nt, Molluscum contagiosum virus
acgcgugugcgag

SEQ ID NO: 3103461 - RNA, 14 nt, Molluscum contagiosum virus
acgcgggccugucc

SEQ ID NO: 3103462 - RNA, 13 nt, Molluscum contagiosum virus
acgcgggcgccgg

SEQ ID NO: 3103463 - RNA, 12 nt, Molluscum contagiosum virus
acgcugcgcacg

SEQ ID NO: 3103464 - RNA, 15 nt, Molluscum contagiosum virus
acgcugcgcgacgag

SEQ ID NO: 3103465 - RNA, 15 nt, Molluscum contagiosum virus
acgcugcggcggcgc

SEQ ID NO: 3103466 - RNA, 16 nt, Molluscum contagiosum virus
acgcugcucgugcugc

SEQ ID NO: 3103467 - RNA, 16 nt, Molluscum contagiosum virus
acgcuacgcagcgcgc

SEQ ID NO: 3103468 - RNA, 16 nt, Molluscum contagiosum virus
acgcucacggccuucg

SEQ ID NO: 3103469 - RNA, 23 nt, Molluscum contagiosum virus
acgcucaucucgcagacgcagcg

SEQ ID NO: 3103470 - RNA, 17 nt, Molluscum contagiosum virus
acgcucggcugccgugc

SEQ ID NO: 3103471 - RNA, 21 nt, Molluscum contagiosum virus
acgcugcacaugugcgugcac

SEQ ID NO: 3103472 - RNA, 23 nt, Molluscum contagiosum virus
acguaugcguaguaguagcgcuc

SEQ ID NO: 3103473 - RNA, 15 nt, Molluscum contagiosum virus
acgucaauggcgcgc

SEQ ID NO: 3103474 - RNA, 19 nt, Molluscum contagiosum virus
acguccaggccgcggcagc

SEQ ID NO: 3103475 - RNA, 14 nt, Molluscum contagiosum virus
acguagagcagcgc

SEQ ID NO: 3103476 - RNA, 16 nt, Molluscum contagiosum virus
acguacgagcaggcgc

SEQ ID NO: 3103477 - RNA, 15 nt, Molluscum contagiosum virus
acguacagugcgcgc

SEQ ID NO: 3103478 - RNA, 15 nt, Molluscum contagiosum virus
acggguaccgugcgc

SEQ ID NO: 3103479 - RNA, 15 nt, Molluscum contagiosum virus
acggucacgcaagcu

SEQ ID NO: 3103480 - RNA, 14 nt, Molluscum contagiosum virus
acgguccugggcga

SEQ ID NO: 3103481 - RNA, 15 nt, Molluscum contagiosum virus
acggugcugcgcacg

SEQ ID NO: 3103482 - RNA, 12 nt, Molluscum contagiosum virus
acggccgcgcgc

SEQ ID NO: 3103483 - RNA, 14 nt, Molluscum contagiosum virus
acggccgcgcgcga

SEQ ID NO: 3103484 - RNA, 16 nt, Molluscum contagiosum virus
acggccggcgccgcgc

SEQ ID NO: 3103485 - RNA, 13 nt, Molluscum contagiosum virus
acggccgucuccu

SEQ ID NO: 3103486 - RNA, 20 nt, Molluscum contagiosum virus
acggcaaacgccacuggguc

SEQ ID NO: 3103487 - RNA, 17 nt, Molluscum contagiosum virus
acggcccgggugcgcgc

SEQ ID NO: 3103488 - RNA, 19 nt, Molluscum contagiosum virus
acggcccgggugcgcgcgc

SEQ ID NO: 3103489 - RNA, 17 nt, Molluscum contagiosum virus
acggcggcacccgccgc

SEQ ID NO: 3103490 - RNA, 19 nt, Molluscum contagiosum virus
acggcggcacccgccgcgg

SEQ ID NO: 3103491 - RNA, 15 nt, Molluscum contagiosum virus
acggcggcgcucaac

SEQ ID NO: 3103492 - RNA, 12 nt, Molluscum contagiosum virus
acggccugcggc

SEQ ID NO: 3103493 - RNA, 13 nt, Molluscum contagiosum virus
acggccuucgcgc

SEQ ID NO: 3103494 - RNA, 22 nt, Molluscum contagiosum virus
acggcgugacggugcugcgcac

SEQ ID NO: 3103495 - RNA, 14 nt, Molluscum contagiosum virus
acggcgugcgcgag

SEQ ID NO: 3103496 - RNA, 17 nt, Molluscum contagiosum virus
acggcuaggcgcggcgg

SEQ ID NO: 3103497 - RNA, 22 nt, Molluscum contagiosum virus
acggcugcaagcacaacgggcu

SEQ ID NO: 3103498 - RNA, 19 nt, Molluscum contagiosum virus
acggcugccggcccccgga

SEQ ID NO: 3103499 - RNA, 16 nt, Molluscum contagiosum virus
acggcuguaaugugcu

SEQ ID NO: 3103500 - RNA, 18 nt, Molluscum contagiosum virus
acggcuucauccgcgcgc

SEQ ID NO: 3103501 - RNA, 14 nt, Molluscum contagiosum virus
acgggaaccgugcu

SEQ ID NO: 3103502 - RNA, 17 nt, Molluscum contagiosum virus
acgggcgugcgcagcag

SEQ ID NO: 3103503 - RNA, 18 nt, Molluscum contagiosum virus
acgggcucgaucugcgcc

SEQ ID NO: 3103504 - RNA, 15 nt, Molluscum contagiosum virus
acgggcacgccgcgg

SEQ ID NO: 3103505 - RNA, 14 nt, Molluscum contagiosum virus
acgggcacgcgcgc

SEQ ID NO: 3103506 - RNA, 17 nt, Molluscum contagiosum virus
acgggcgcgcguacgcg

SEQ ID NO: 3103507 - RNA, 21 nt, Molluscum contagiosum virus
acgggcgcuauugcgcggcgc

SEQ ID NO: 3103508 - RNA, 20 nt, Molluscum contagiosum virus
ccaacucugugaccugcgcc

SEQ ID NO: 3103509 - RNA, 20 nt, Molluscum contagiosum virus
ccaacuagacaaggggccau

SEQ ID NO: 3103510 - RNA, 16 nt, Molluscum contagiosum virus
ccaacagcagcuggcg

SEQ ID NO: 3103511 - RNA, 23 nt, Molluscum contagiosum virus
ccaacagcagcuggcgcgcgccg

SEQ ID NO: 3103512 - RNA, 15 nt, Molluscum contagiosum virus
ccaacccucgcaagc

SEQ ID NO: 3103513 - RNA, 15 nt, Molluscum contagiosum virus
ccaacgauggcgugg

SEQ ID NO: 3103514 - RNA, 21 nt, Molluscum contagiosum virus
ccaacgcaccggcagggaaau

SEQ ID NO: 3103515 - RNA, 16 nt, Molluscum contagiosum virus
ccaacgcccgcgcccg

SEQ ID NO: 3103516 - RNA, 19 nt, Molluscum contagiosum virus
cauugcgaggcaccgcccg

SEQ ID NO: 3103517 - RNA, 13 nt, Molluscum contagiosum virus
cauugcugcugca

SEQ ID NO: 3103518 - RNA, 21 nt, Molluscum contagiosum virus
ccaaaucgcguuugccaggca

SEQ ID NO: 3103519 - RNA, 13 nt, Molluscum contagiosum virus
ccaacuucgcggu

SEQ ID NO: 3103520 - RNA, 19 nt, Molluscum contagiosum virus
ccaagaagaggccagcaca

SEQ ID NO: 3103521 - RNA, 19 nt, Molluscum contagiosum virus
ccaagaagaggccggcaca

SEQ ID NO: 3103522 - RNA, 23 nt, Molluscum contagiosum virus
ccaagaccugggcgucgugcacc

SEQ ID NO: 3103523 - RNA, 13 nt, Molluscum contagiosum virus
ccaagcacgcgcg

SEQ ID NO: 3103524 - RNA, 14 nt, Molluscum contagiosum virus
cauguuuccugcgg

SEQ ID NO: 3103525 - RNA, 19 nt, Molluscum contagiosum virus
cauguuuguucgcgcgccg

SEQ ID NO: 3103526 - RNA, 19 nt, Molluscum contagiosum virus
cauguccuuucagacagcg

SEQ ID NO: 3103527 - RNA, 14 nt, Molluscum contagiosum virus
caugugcgugcacc

SEQ ID NO: 3103528 - RNA, 22 nt, Molluscum contagiosum virus
cauuaacgaagaguggcucaca

SEQ ID NO: 3103529 - RNA, 23 nt, Molluscum contagiosum virus
cauguguuuguagccgcgcgaac

SEQ ID NO: 3103530 - RNA, 21 nt, Molluscum contagiosum virus
caugucacgcgucgcgcgccg

SEQ ID NO: 3103531 - RNA, 15 nt, Molluscum contagiosum virus
caugucacgcucacg

SEQ ID NO: 3103532 - RNA, 16 nt, Molluscum contagiosum virus
caugucacgcucacgc

SEQ ID NO: 3103533 - RNA, 18 nt, Molluscum contagiosum virus
caugucaggccggucgcg

SEQ ID NO: 3103534 - RNA, 13 nt, Molluscum contagiosum virus
cauguccggcccg

SEQ ID NO: 3103535 - RNA, 18 nt, Molluscum contagiosum virus
cagggagcugcggacgcg

SEQ ID NO: 3103536 - RNA, 17 nt, Molluscum contagiosum virus
cagggcaaucgcgugcu

SEQ ID NO: 3103537 - RNA, 15 nt, Molluscum contagiosum virus
cagggcacgaucgcg

SEQ ID NO: 3103538 - RNA, 15 nt, Molluscum contagiosum virus
cagggcccgcgcucg

SEQ ID NO: 3103539 - RNA, 16 nt, Molluscum contagiosum virus
caggcgcugcgcggcg

SEQ ID NO: 3103540 - RNA, 18 nt, Molluscum contagiosum virus
caggcgcugcgcggcgcg

SEQ ID NO: 3103541 - RNA, 21 nt, Molluscum contagiosum virus
cagggaaaaaucccccgccag

SEQ ID NO: 3103542 - RNA, 16 nt, Molluscum contagiosum virus
cagggaaagagcacgc

SEQ ID NO: 3103543 - RNA, 23 nt, Molluscum contagiosum virus
cagggaaagagcacgcgcucgcg

SEQ ID NO: 3103544 - RNA, 22 nt, Molluscum contagiosum virus
caggcggucuuccagcacugcg

SEQ ID NO: 3103545 - RNA, 23 nt, Molluscum contagiosum virus
caggcggucuuccagcacugcgc

SEQ ID NO: 3103546 - RNA, 18 nt, Molluscum contagiosum virus
caggcggugggcgccgcg

SEQ ID NO: 3103547 - RNA, 19 nt, Molluscum contagiosum virus
caggcggugggcgccgcgg

SEQ ID NO: 3103548 - RNA, 22 nt, Molluscum contagiosum virus
caggcggugggcgccgcggccu

SEQ ID NO: 3103549 - RNA, 16 nt, Molluscum contagiosum virus
caggcguagcgcgucu

SEQ ID NO: 3103550 - RNA, 21 nt, Molluscum contagiosum virus
caggcgucaugcgcgcgcgcu

SEQ ID NO: 3103551 - RNA, 16 nt, Molluscum contagiosum virus
caggcuaggcgcgacu

SEQ ID NO: 3103552 - RNA, 12 nt, Molluscum contagiosum virus
caggcucccgcu

SEQ ID NO: 3103553 - RNA, 19 nt, Molluscum contagiosum virus
caggcucuaagcgcacgcg

SEQ ID NO: 3103554 - RNA, 20 nt, Molluscum contagiosum virus
caggcucuaagcgcacgcgc

SEQ ID NO: 3103555 - RNA, 21 nt, Molluscum contagiosum virus
caggcuguguuccagcucggg

SEQ ID NO: 3103556 - RNA, 14 nt, Molluscum contagiosum virus
caggccgcgcccgu

SEQ ID NO: 3103557 - RNA, 13 nt, Molluscum contagiosum virus
caggccgcggcag

SEQ ID NO: 3103558 - RNA, 22 nt, Molluscum contagiosum virus
caggccgcuagcaggcgucgcg

SEQ ID NO: 3103559 - RNA, 15 nt, Molluscum contagiosum virus
caggccgggcgcggu

SEQ ID NO: 3103560 - RNA, 17 nt, Molluscum contagiosum virus
caggccggucgcggaag

SEQ ID NO: 3103561 - RNA, 21 nt, Molluscum contagiosum virus
caggccucuuuugcgucgcga

SEQ ID NO: 3103562 - RNA, 16 nt, Molluscum contagiosum virus
caggcgcagcgcggcc

SEQ ID NO: 3103563 - RNA, 22 nt, Molluscum contagiosum virus
caggcccggcggcccgcggcgc

SEQ ID NO: 3103564 - RNA, 21 nt, Molluscum contagiosum virus
caggcgccaucgcgcgugacu

SEQ ID NO: 3103565 - RNA, 19 nt, Molluscum contagiosum virus
caggcgcccaacgcccgcg

SEQ ID NO: 3103566 - RNA, 22 nt, Molluscum contagiosum virus
caggcgccgcaccucaccgcgc

SEQ ID NO: 3103567 - RNA, 14 nt, Molluscum contagiosum virus
caggcgccggcgcg

SEQ ID NO: 3103568 - RNA, 20 nt, Molluscum contagiosum virus
caggcgcgaacucgcggcag

SEQ ID NO: 3103569 - RNA, 21 nt, Molluscum contagiosum virus
caggcgcgcaagugcgugucc

SEQ ID NO: 3103570 - RNA, 14 nt, Molluscum contagiosum virus
caggcgcgcgcgau

SEQ ID NO: 3103571 - RNA, 18 nt, Molluscum contagiosum virus
caggcgcggucgcccgcc

SEQ ID NO: 3103572 - RNA, 20 nt, Molluscum contagiosum virus
caggcgcggucgcccgccga

SEQ ID NO: 3103573 - RNA, 22 nt, Molluscum contagiosum virus
caggcgcgugcccugcacgcgc

SEQ ID NO: 3103574 - RNA, 14 nt, Molluscum contagiosum virus
caaaacgcgacgcc

SEQ ID NO: 3103575 - RNA, 15 nt, Molluscum contagiosum virus
caaaagagcgcgccu

SEQ ID NO: 3103576 - RNA, 16 nt, Molluscum contagiosum virus
auggucuuacgcgcuc

SEQ ID NO: 3103577 - RNA, 18 nt, Molluscum contagiosum virus
auguccaugucgcgcauc

SEQ ID NO: 3103578 - RNA, 18 nt, Molluscum contagiosum virus
caaaaaaaagugcgcgug

SEQ ID NO: 3103579 - RNA, 19 nt, Molluscum contagiosum virus
auguacaagcccguacgca

SEQ ID NO: 3103580 - RNA, 18 nt, Molluscum contagiosum virus
augucacgcgucgcgcgc

SEQ ID NO: 3103581 - RNA, 19 nt, Molluscum contagiosum virus
augucacgcucacgcaguc

SEQ ID NO: 3103582 - RNA, 14 nt, Molluscum contagiosum virus
caaagucgcgcgcg

SEQ ID NO: 3103583 - RNA, 20 nt, Molluscum contagiosum virus
caaaucuguucgagcaacag

SEQ ID NO: 3103584 - RNA, 15 nt, Molluscum contagiosum virus
caaaugcgcgcgaac

SEQ ID NO: 3103585 - RNA, 23 nt, Molluscum contagiosum virus
caaagaucgcgguggcaggcgcg

SEQ ID NO: 3103586 - RNA, 15 nt, Molluscum contagiosum virus
caaagccggccccgc

SEQ ID NO: 3103587 - RNA, 14 nt, Molluscum contagiosum virus
caaagccugcugcg

SEQ ID NO: 3103588 - RNA, 13 nt, Molluscum contagiosum virus
caaagcgcggccg

SEQ ID NO: 3103589 - RNA, 12 nt, Molluscum contagiosum virus
caaagcggggcg

SEQ ID NO: 3103590 - RNA, 17 nt, Molluscum contagiosum virus
caaaggaguuggcgcgc

SEQ ID NO: 3103591 - RNA, 16 nt, Molluscum contagiosum virus
caaaggcccgcgagca

SEQ ID NO: 3103592 - RNA, 18 nt, Molluscum contagiosum virus
caaaggcccgcgagcacg

SEQ ID NO: 3103593 - RNA, 14 nt, Molluscum contagiosum virus
caaaggcgggcccg

SEQ ID NO: 3103594 - RNA, 15 nt, Molluscum contagiosum virus
caaaggcgggcccgc

SEQ ID NO: 3103595 - RNA, 14 nt, Molluscum contagiosum virus
caaagggcggccgc

SEQ ID NO: 3103596 - RNA, 14 nt, Molluscum contagiosum virus
caaagacgggcccg

SEQ ID NO: 3103597 - RNA, 15 nt, Molluscum contagiosum virus
caaagacgggcccgc

SEQ ID NO: 3103598 - RNA, 15 nt, Molluscum contagiosum virus
caaagacggggccgc

SEQ ID NO: 3103599 - RNA, 22 nt, Molluscum contagiosum virus
caaagagacgcggccgcggagg

SEQ ID NO: 3103600 - RNA, 15 nt, Molluscum contagiosum virus
caaagaagcgcgccc

SEQ ID NO: 3103601 - RNA, 15 nt, Molluscum contagiosum virus
caaagaaugcaugcg

SEQ ID NO: 3103602 - RNA, 19 nt, Molluscum contagiosum virus
caaagacgagggaugcgca

SEQ ID NO: 3103603 - RNA, 22 nt, Molluscum contagiosum virus
caggcaguugccgcagcgggcu

SEQ ID NO: 3103604 - RNA, 17 nt, Molluscum contagiosum virus
caggcauggcauggcgc

SEQ ID NO: 3103605 - RNA, 18 nt, Molluscum contagiosum virus
caggcauggcauggcgcg

SEQ ID NO: 3103606 - RNA, 13 nt, Molluscum contagiosum virus
caagucacugcua

SEQ ID NO: 3103607 - RNA, 22 nt, Molluscum contagiosum virus
caagcuuugcacgcacgcgcuc

SEQ ID NO: 3103608 - RNA, 13 nt, Molluscum contagiosum virus
caaggacaccgcg

SEQ ID NO: 3103609 - RNA, 17 nt, Molluscum contagiosum virus
caagguuugcgggcgca

SEQ ID NO: 3103610 - RNA, 20 nt, Molluscum contagiosum virus
caaguacaugcacgucgaca

SEQ ID NO: 3103611 - RNA, 22 nt, Molluscum contagiosum virus
caaguaccagccgcugcgccgc

SEQ ID NO: 3103612 - RNA, 15 nt, Molluscum contagiosum virus
caagcugagcgcgcu

SEQ ID NO: 3103613 - RNA, 17 nt, Molluscum contagiosum virus
caagcugcaccggcgcg

SEQ ID NO: 3103614 - RNA, 21 nt, Molluscum contagiosum virus
caagcggucaggccgggcgcg

SEQ ID NO: 3103615 - RNA, 16 nt, Molluscum contagiosum virus
caaggagcugcgcgag

SEQ ID NO: 3103616 - RNA, 13 nt, Molluscum contagiosum virus
caaggaggucaug

SEQ ID NO: 3103617 - RNA, 19 nt, Molluscum contagiosum virus
caaggauuacgcugccgug

SEQ ID NO: 3103618 - RNA, 18 nt, Molluscum contagiosum virus
caagggcaucccgccgcu

SEQ ID NO: 3103619 - RNA, 12 nt, Molluscum contagiosum virus
caagggccugcg

SEQ ID NO: 3103620 - RNA, 17 nt, Molluscum contagiosum virus
caagggccugcgggcgg

SEQ ID NO: 3103621 - RNA, 14 nt, Molluscum contagiosum virus
caagggcguagagc

SEQ ID NO: 3103622 - RNA, 22 nt, Molluscum contagiosum virus
caaggucuacguguccgcaucc

SEQ ID NO: 3103623 - RNA, 16 nt, Molluscum contagiosum virus
caaggccgcgggcgcg

SEQ ID NO: 3103624 - RNA, 20 nt, Molluscum contagiosum virus
caaggccgcgggcgcggagu

SEQ ID NO: 3103625 - RNA, 22 nt, Molluscum contagiosum virus
caaggcgcgcaucgcgggcacg

SEQ ID NO: 3103626 - RNA, 16 nt, Molluscum contagiosum virus
caagcgcaacacggcc

SEQ ID NO: 3103627 - RNA, 21 nt, Molluscum contagiosum virus
caagcgcaccguugacgagcu

SEQ ID NO: 3103628 - RNA, 19 nt, Molluscum contagiosum virus
caagccccccucacggcga

SEQ ID NO: 3103629 - RNA, 14 nt, Molluscum contagiosum virus
caagcgcccgcgag

SEQ ID NO: 3103630 - RNA, 21 nt, Molluscum contagiosum virus
caagcgccgccaugcugcgcg

SEQ ID NO: 3103631 - RNA, 18 nt, Molluscum contagiosum virus
caagcgcguucgcgcgug

SEQ ID NO: 3103632 - RNA, 23 nt, Molluscum contagiosum virus
caagcgcguucgcgcgugcugga

SEQ ID NO: 3103633 - RNA, 21 nt, Molluscum contagiosum virus
caagcgcuacuugcuggcgcg

SEQ ID NO: 3103634 - RNA, 13 nt, Molluscum contagiosum virus
caagcgcugcucg

SEQ ID NO: 3103635 - RNA, 14 nt, Molluscum contagiosum virus
caagcccgaguucg

SEQ ID NO: 3103636 - RNA, 20 nt, Molluscum contagiosum virus
caagcccgaguucgcggcgc

SEQ ID NO: 3103637 - RNA, 21 nt, Molluscum contagiosum virus
caagcccgaguucgcggcgcg

SEQ ID NO: 3103638 - RNA, 16 nt, Molluscum contagiosum virus
caagcccgcgcgcgag

SEQ ID NO: 3103639 - RNA, 15 nt, Molluscum contagiosum virus
caagccgcaggcgcg

SEQ ID NO: 3103640 - RNA, 16 nt, Molluscum contagiosum virus
caagccgcaggcgcgc

SEQ ID NO: 3103641 - RNA, 22 nt, Molluscum contagiosum virus
caagccguccgccucgagcacg

SEQ ID NO: 3103642 - RNA, 17 nt, Molluscum contagiosum virus
caagauucuucgcgaag

SEQ ID NO: 3103643 - RNA, 16 nt, Molluscum contagiosum virus
caagcacaacgggcuc

SEQ ID NO: 3103644 - RNA, 17 nt, Molluscum contagiosum virus
caagcacaacgggcucg

SEQ ID NO: 3103645 - RNA, 19 nt, Molluscum contagiosum virus
caagcacacgacggaacgu

SEQ ID NO: 3103646 - RNA, 18 nt, Molluscum contagiosum virus
caagcaccgccugcugca

SEQ ID NO: 3103647 - RNA, 14 nt, Molluscum contagiosum virus
caagcacggcuucc

SEQ ID NO: 3103648 - RNA, 20 nt, Molluscum contagiosum virus
caagcacuacauggacgugc

SEQ ID NO: 3103649 - RNA, 16 nt, Molluscum contagiosum virus
caagcagcgcgccacc

SEQ ID NO: 3103650 - RNA, 15 nt, Molluscum contagiosum virus
caagcaggcaugcaa

SEQ ID NO: 3103651 - RNA, 20 nt, Molluscum contagiosum virus
caagcagguggccgcgcgcg

SEQ ID NO: 3103652 - RNA, 14 nt, Molluscum contagiosum virus
caagcaguaccugc

SEQ ID NO: 3103653 - RNA, 15 nt, Molluscum contagiosum virus
caagcccagcagcga

SEQ ID NO: 3103654 - RNA, 20 nt, Molluscum contagiosum virus
caagcccagcagcgaggccg

SEQ ID NO: 3103655 - RNA, 14 nt, Molluscum contagiosum virus
caacacgagcacga

SEQ ID NO: 3103656 - RNA, 13 nt, Molluscum contagiosum virus
caacacgagcgcg

SEQ ID NO: 3103657 - RNA, 20 nt, Molluscum contagiosum virus
caacacgcuguugcugcugc

SEQ ID NO: 3103658 - RNA, 16 nt, Molluscum contagiosum virus
caacacucgugcucgu

SEQ ID NO: 3103659 - RNA, 20 nt, Molluscum contagiosum virus
caacacugacgcucgggccg

SEQ ID NO: 3103660 - RNA, 19 nt, Molluscum contagiosum virus
caacagcacgacggucuuc

SEQ ID NO: 3103661 - RNA, 18 nt, Molluscum contagiosum virus
caacagcagcuggcgcgc

SEQ ID NO: 3103662 - RNA, 15 nt, Molluscum contagiosum virus
caacagcgcgacgcc

SEQ ID NO: 3103663 - RNA, 23 nt, Molluscum contagiosum virus
caacaggaauguguacgacgcgc

SEQ ID NO: 3103664 - RNA, 21 nt, Molluscum contagiosum virus
augccggggaugaacgcgcug

SEQ ID NO: 3103665 - RNA, 20 nt, Molluscum contagiosum virus
augcgaggccugcguggaca

SEQ ID NO: 3103666 - RNA, 18 nt, Molluscum contagiosum virus
augcucacguacgacugc

SEQ ID NO: 3103667 - RNA, 12 nt, Molluscum contagiosum virus
augcucgcgcuc

SEQ ID NO: 3103668 - RNA, 21 nt, Molluscum contagiosum virus
augcucgcuugccggcggcgc

SEQ ID NO: 3103669 - RNA, 12 nt, Molluscum contagiosum virus
augcugcgcacg

SEQ ID NO: 3103670 - RNA, 17 nt, Molluscum contagiosum virus
augcugcgcgagcgcgc

SEQ ID NO: 3103671 - RNA, 18 nt, Molluscum contagiosum virus
augcugcucgacgggcgc

SEQ ID NO: 3103672 - RNA, 19 nt, Molluscum contagiosum virus
augcugcucgacgggcgca

SEQ ID NO: 3103673 - RNA, 16 nt, Molluscum contagiosum virus
augcuggacgggcacg

SEQ ID NO: 3103674 - RNA, 15 nt, Molluscum contagiosum virus
auggacacgcugcgc

SEQ ID NO: 3103675 - RNA, 21 nt, Molluscum contagiosum virus
auggaccgguuccgugcgcuc

SEQ ID NO: 3103676 - RNA, 15 nt, Molluscum contagiosum virus
auggacgcgccgcgc

SEQ ID NO: 3103677 - RNA, 12 nt, Molluscum contagiosum virus
auggacgucgcg

SEQ ID NO: 3103678 - RNA, 15 nt, Molluscum contagiosum virus
auggacgucgcggcc

SEQ ID NO: 3103679 - RNA, 14 nt, Molluscum contagiosum virus
auggacgugcuccg

SEQ ID NO: 3103680 - RNA, 20 nt, Molluscum contagiosum virus
augcguaguaguagcgcucg

SEQ ID NO: 3103681 - RNA, 19 nt, Molluscum contagiosum virus
augcgucuuccugcugccg

SEQ ID NO: 3103682 - RNA, 20 nt, Molluscum contagiosum virus
auggagcaggagaacuacaa

SEQ ID NO: 3103683 - RNA, 15 nt, Molluscum contagiosum virus
augcgcgugcggcgc

SEQ ID NO: 3103684 - RNA, 14 nt, Molluscum contagiosum virus
augcgcuucggcuc

SEQ ID NO: 3103685 - RNA, 19 nt, Molluscum contagiosum virus
augcgcuugcggucgcgag

SEQ ID NO: 3103686 - RNA, 13 nt, Molluscum contagiosum virus
augcggcaggcgc

SEQ ID NO: 3103687 - RNA, 11 nt, Molluscum contagiosum virus
auggcugcuca

SEQ ID NO: 3103688 - RNA, 19 nt, Molluscum contagiosum virus
augggcacaagucucgcgc

SEQ ID NO: 3103689 - RNA, 14 nt, Molluscum contagiosum virus
augggcacggcaac

SEQ ID NO: 3103690 - RNA, 15 nt, Molluscum contagiosum virus
auggccgcgccgcgc

SEQ ID NO: 3103691 - RNA, 23 nt, Molluscum contagiosum virus
ccagcgagaucaacgcgcgcgug

SEQ ID NO: 3103692 - RNA, 15 nt, Molluscum contagiosum virus
ccagcgauugcccgc

SEQ ID NO: 3103693 - RNA, 18 nt, Molluscum contagiosum virus
ccagcgauugcccgcgcg

SEQ ID NO: 3103694 - RNA, 22 nt, Molluscum contagiosum virus
ccaggaucacgaugugcgcgcg

SEQ ID NO: 3103695 - RNA, 13 nt, Molluscum contagiosum virus
ccaggcacacgca

SEQ ID NO: 3103696 - RNA, 13 nt, Molluscum contagiosum virus
ccaggccgcgccg

SEQ ID NO: 3103697 - RNA, 14 nt, Molluscum contagiosum virus
ccaggcuaggcgcg

SEQ ID NO: 3103698 - RNA, 11 nt, Molluscum contagiosum virus
ccaggcgccgc

SEQ ID NO: 3103699 - RNA, 11 nt, Molluscum contagiosum virus
ccaggcgccgg

SEQ ID NO: 3103700 - RNA, 18 nt, Molluscum contagiosum virus
ccagcguacggcccgaag

SEQ ID NO: 3103701 - RNA, 17 nt, Molluscum contagiosum virus
ccagcuugagcacacgg

SEQ ID NO: 3103702 - RNA, 14 nt, Molluscum contagiosum virus
ccaggaacgcgccg

SEQ ID NO: 3103703 - RNA, 16 nt, Molluscum contagiosum virus
ccagcgucgcgcgccg

SEQ ID NO: 3103704 - RNA, 15 nt, Molluscum contagiosum virus
ccagcgugugaccgc

SEQ ID NO: 3103705 - RNA, 18 nt, Molluscum contagiosum virus
ccagcggauaugcgccug

SEQ ID NO: 3103706 - RNA, 13 nt, Molluscum contagiosum virus
ccagcggcgccgc

SEQ ID NO: 3103707 - RNA, 15 nt, Molluscum contagiosum virus
ccagcggcugcccgc

SEQ ID NO: 3103708 - RNA, 16 nt, Molluscum contagiosum virus
ccagcgccgccucgcg

SEQ ID NO: 3103709 - RNA, 14 nt, Molluscum contagiosum virus
ccagcgccuccgcg

SEQ ID NO: 3103710 - RNA, 16 nt, Molluscum contagiosum virus
ccagcgcgcccaccag

SEQ ID NO: 3103711 - RNA, 18 nt, Molluscum contagiosum virus
ccagcgcgcccaccagca

SEQ ID NO: 3103712 - RNA, 24 nt, Molluscum contagiosum virus
ccagcucauagcccaugcgcagug

SEQ ID NO: 3103713 - RNA, 13 nt, Molluscum contagiosum virus
ccagcuccgcgcg

SEQ ID NO: 3103714 - RNA, 22 nt, Molluscum contagiosum virus
ccagcucgacacugugcuggcg

SEQ ID NO: 3103715 - RNA, 19 nt, Molluscum contagiosum virus
ccagcucuuggcgggcacc

SEQ ID NO: 3103716 - RNA, 13 nt, Molluscum contagiosum virus
ccagcugcgcgag

SEQ ID NO: 3103717 - RNA, 15 nt, Molluscum contagiosum virus
ccagcugcgcgagcu

SEQ ID NO: 3103718 - RNA, 18 nt, Molluscum contagiosum virus
ccagcuggacggugcugg

SEQ ID NO: 3103719 - RNA, 20 nt, Molluscum contagiosum virus
cccaggccauggagcgcccg

SEQ ID NO: 3103720 - RNA, 22 nt, Molluscum contagiosum virus
cccagcguggccagcuucauca

SEQ ID NO: 3103721 - RNA, 21 nt, Molluscum contagiosum virus
ccaggugcgaaggcucgagcu

SEQ ID NO: 3103722 - RNA, 19 nt, Molluscum contagiosum virus
ccagggcaguacgcgcgug

SEQ ID NO: 3103723 - RNA, 20 nt, Molluscum contagiosum virus
ccaguaccagcucgcgccgc

SEQ ID NO: 3103724 - RNA, 13 nt, Molluscum contagiosum virus
ccagucgcgcgag

SEQ ID NO: 3103725 - RNA, 17 nt, Molluscum contagiosum virus
ccagucgcgcgagaagu

SEQ ID NO: 3103726 - RNA, 13 nt, Molluscum contagiosum virus
ccagugcgcuugc

SEQ ID NO: 3103727 - RNA, 20 nt, Molluscum contagiosum virus
ccaguggcgcccgugcucgc

SEQ ID NO: 3103728 - RNA, 15 nt, Molluscum contagiosum virus
cccaugcccgaccac

SEQ ID NO: 3103729 - RNA, 12 nt, Molluscum contagiosum virus
cccccgcggagc

SEQ ID NO: 3103730 - RNA, 20 nt, Molluscum contagiosum virus
ccccgaacugcugggcgugg

SEQ ID NO: 3103731 - RNA, 17 nt, Molluscum contagiosum virus
cccgccugccgcgagca

SEQ ID NO: 3103732 - RNA, 22 nt, Molluscum contagiosum virus
cccgcgaacgagagacacgcac

SEQ ID NO: 3103733 - RNA, 22 nt, Molluscum contagiosum virus
cccgcgaacgagggacacgcac

SEQ ID NO: 3103734 - RNA, 13 nt, Molluscum contagiosum virus
cccgcgaagagca

SEQ ID NO: 3103735 - RNA, 13 nt, Molluscum contagiosum virus
cccgcgcugcgcg

SEQ ID NO: 3103736 - RNA, 16 nt, Molluscum contagiosum virus
cccgcgcucgccgcac

SEQ ID NO: 3103737 - RNA, 14 nt, Molluscum contagiosum virus
cccgcgcacgagcu

SEQ ID NO: 3103738 - RNA, 23 nt, Molluscum contagiosum virus
cccgcgcacugccacgcggagcu

SEQ ID NO: 3103739 - RNA, 15 nt, Molluscum contagiosum virus
cccgcgcagcgugcc

SEQ ID NO: 3103740 - RNA, 15 nt, Molluscum contagiosum virus
cccgcgcccgcgccg

SEQ ID NO: 3103741 - RNA, 14 nt, Molluscum contagiosum virus
cccgcgccgcggcg

SEQ ID NO: 3103742 - RNA, 12 nt, Molluscum contagiosum virus
cccgcgcgcccg

SEQ ID NO: 3103743 - RNA, 19 nt, Molluscum contagiosum virus
cccgcgcgcgacuacgcac

SEQ ID NO: 3103744 - RNA, 14 nt, Molluscum contagiosum virus
cccgcgcgcgagcu

SEQ ID NO: 3103745 - RNA, 15 nt, Molluscum contagiosum virus
cccgcgcgcgugccg

SEQ ID NO: 3103746 - RNA, 18 nt, Molluscum contagiosum virus
cccgcgcggcucgcgcac

SEQ ID NO: 3103747 - RNA, 13 nt, Molluscum contagiosum virus
ccccgccgcggcg

SEQ ID NO: 3103748 - RNA, 16 nt, Molluscum contagiosum virus
cgcuguacaugccgca

SEQ ID NO: 3103749 - RNA, 20 nt, Molluscum contagiosum virus
cgcuguacgugcugcccgug

SEQ ID NO: 3103750 - RNA, 22 nt, Molluscum contagiosum virus
cgcuguauaguccccggcgccg

SEQ ID NO: 3103751 - RNA, 18 nt, Molluscum contagiosum virus
cgcuguauucggcguacg

SEQ ID NO: 3103752 - RNA, 13 nt, Molluscum contagiosum virus
cgcugucacgcga

SEQ ID NO: 3103753 - RNA, 14 nt, Molluscum contagiosum virus
cgcugggcgcgccg

SEQ ID NO: 3103754 - RNA, 15 nt, Molluscum contagiosum virus
cgcugcuggcgcaca

SEQ ID NO: 3103755 - RNA, 16 nt, Molluscum contagiosum virus
cgcugcuggcgcacau

SEQ ID NO: 3103756 - RNA, 15 nt, Molluscum contagiosum virus
cgcugcuguccuuca

SEQ ID NO: 3103757 - RNA, 15 nt, Molluscum contagiosum virus
cgcuggucacgcgcu

SEQ ID NO: 3103758 - RNA, 20 nt, Molluscum contagiosum virus
cgcuggugggcgugcggcgc

SEQ ID NO: 3103759 - RNA, 23 nt, Molluscum contagiosum virus
cgcuggugggcgugcggcgcacc

SEQ ID NO: 3103760 - RNA, 16 nt, Molluscum contagiosum virus
cgcuggugugcacuga

SEQ ID NO: 3103761 - RNA, 14 nt, Molluscum contagiosum virus
cgcugcuucccgcu

SEQ ID NO: 3103762 - RNA, 19 nt, Molluscum contagiosum virus
cgcugcuucccgcugagcg

SEQ ID NO: 3103763 - RNA, 14 nt, Molluscum contagiosum virus
cgcuggacgccucg

SEQ ID NO: 3103764 - RNA, 18 nt, Molluscum contagiosum virus
cgcuggacuugcgcgagc

SEQ ID NO: 3103765 - RNA, 20 nt, Molluscum contagiosum virus
cgcuggagaaagaagugugc

SEQ ID NO: 3103766 - RNA, 16 nt, Molluscum contagiosum virus
cgcuggagacggcagu

SEQ ID NO: 3103767 - RNA, 19 nt, Molluscum contagiosum virus
cgcuggagaugauuccguc

SEQ ID NO: 3103768 - RNA, 20 nt, Molluscum contagiosum virus
cgcuggcacggccggcgccg

SEQ ID NO: 3103769 - RNA, 22 nt, Molluscum contagiosum virus
cgcuggcccacgcuggcgcucg

SEQ ID NO: 3103770 - RNA, 15 nt, Molluscum contagiosum virus
cgcuggccgugcccg

SEQ ID NO: 3103771 - RNA, 16 nt, Molluscum contagiosum virus
cgcuggccgugcccgc

SEQ ID NO: 3103772 - RNA, 20 nt, Molluscum contagiosum virus
cgcuggccgugcccgccgac

SEQ ID NO: 3103773 - RNA, 22 nt, Molluscum contagiosum virus
cgcuggccucugccugcaagga

SEQ ID NO: 3103774 - RNA, 14 nt, Molluscum contagiosum virus
cgcuggcgcgcgcg

SEQ ID NO: 3103775 - RNA, 15 nt, Molluscum contagiosum virus
cgcuggcggcgcacg

SEQ ID NO: 3103776 - RNA, 13 nt, Molluscum contagiosum virus
cgcccgagcgcgu

SEQ ID NO: 3103777 - RNA, 17 nt, Molluscum contagiosum virus
cgcccgagcgcgugucu

SEQ ID NO: 3103778 - RNA, 16 nt, Molluscum contagiosum virus
cgcccgaggacgagcc

SEQ ID NO: 3103779 - RNA, 21 nt, Molluscum contagiosum virus
cgcccgcaaugcagugcacca

SEQ ID NO: 3103780 - RNA, 14 nt, Molluscum contagiosum virus
cgcccgcagcgcgc

SEQ ID NO: 3103781 - RNA, 19 nt, Molluscum contagiosum virus
cgcccgacuuuucgcgccg

SEQ ID NO: 3103782 - RNA, 13 nt, Molluscum contagiosum virus
cgcccgccgagua

SEQ ID NO: 3103783 - RNA, 15 nt, Molluscum contagiosum virus
cgcccgccgaguacc

SEQ ID NO: 3103784 - RNA, 20 nt, Molluscum contagiosum virus
cgcccgcgaaaaacgugacu

SEQ ID NO: 3103785 - RNA, 13 nt, Molluscum contagiosum virus
cgcccgcugcucu

SEQ ID NO: 3103786 - RNA, 14 nt, Molluscum contagiosum virus
cgcccgcgcccgcg

SEQ ID NO: 3103787 - RNA, 17 nt, Molluscum contagiosum virus
cgcccgcgcccgcgccg

SEQ ID NO: 3103788 - RNA, 12 nt, Molluscum contagiosum virus
cgcccgcggcac

SEQ ID NO: 3103789 - RNA, 14 nt, Molluscum contagiosum virus
cgcccgcggcgcac

SEQ ID NO: 3103790 - RNA, 23 nt, Molluscum contagiosum virus
cgcccggcagcgacuacgcgcug

SEQ ID NO: 3103791 - RNA, 17 nt, Molluscum contagiosum virus
cgcccggcaggcucccg

SEQ ID NO: 3103792 - RNA, 15 nt, Molluscum contagiosum virus
cgcccggcgugaucu

SEQ ID NO: 3103793 - RNA, 20 nt, Molluscum contagiosum virus
cgcccggugcggcguguucc

SEQ ID NO: 3103794 - RNA, 16 nt, Molluscum contagiosum virus
cgcccguaaagaagcg

SEQ ID NO: 3103795 - RNA, 19 nt, Molluscum contagiosum virus
cgcgugucuacccggcacg

SEQ ID NO: 3103796 - RNA, 22 nt, Molluscum contagiosum virus
cgcgugucugcgcucgccugcu

SEQ ID NO: 3103797 - RNA, 18 nt, Molluscum contagiosum virus
cgcguugccgcccgccga

SEQ ID NO: 3103798 - RNA, 22 nt, Molluscum contagiosum virus
cgcgugcugagcuagugccgag

SEQ ID NO: 3103799 - RNA, 14 nt, Molluscum contagiosum virus
cgcgugcugcggcu

SEQ ID NO: 3103800 - RNA, 15 nt, Molluscum contagiosum virus
cgcgugcugcuacgc

SEQ ID NO: 3103801 - RNA, 14 nt, Molluscum contagiosum virus
cgcgugcuggacgc

SEQ ID NO: 3103802 - RNA, 20 nt, Molluscum contagiosum virus
cgcgugcuggacgcgcacgc

SEQ ID NO: 3103803 - RNA, 22 nt, Molluscum contagiosum virus
cgcgugcuggacgcgcacgcgg

SEQ ID NO: 3103804 - RNA, 14 nt, Molluscum contagiosum virus
cgcguggugcuuac

SEQ ID NO: 3103805 - RNA, 19 nt, Molluscum contagiosum virus
cgcguggugcuuacugcgg

SEQ ID NO: 3103806 - RNA, 15 nt, Molluscum contagiosum virus
cgcccucgcgcgcag

SEQ ID NO: 3103807 - RNA, 22 nt, Molluscum contagiosum virus
cgcccucacgugcugaucacgc

SEQ ID NO: 3103808 - RNA, 17 nt, Molluscum contagiosum virus
cgcccgugcucgcgggc

SEQ ID NO: 3103809 - RNA, 18 nt, Molluscum contagiosum virus
cgcccguguucgcggagc

SEQ ID NO: 3103810 - RNA, 13 nt, Molluscum contagiosum virus
cgccgaaguacuu

SEQ ID NO: 3103811 - RNA, 19 nt, Molluscum contagiosum virus
cgccgacaacgcacccgcg

SEQ ID NO: 3103812 - RNA, 18 nt, Molluscum contagiosum virus
cgcccuucaacgcgcgug

SEQ ID NO: 3103813 - RNA, 14 nt, Molluscum contagiosum virus
cgcccucguguacg

SEQ ID NO: 3103814 - RNA, 16 nt, Molluscum contagiosum virus
cgcugcugcgugcgcg

SEQ ID NO: 3103815 - RNA, 13 nt, Molluscum contagiosum virus
cgcugcucgcgcu

SEQ ID NO: 3103816 - RNA, 21 nt, Molluscum contagiosum virus
cgcugcucgcuugcccggagc

SEQ ID NO: 3103817 - RNA, 22 nt, Molluscum contagiosum virus
cgcugcucuacgucuccucgcg

SEQ ID NO: 3103818 - RNA, 20 nt, Molluscum contagiosum virus
cgcugcucuacuuccacgag

SEQ ID NO: 3103819 - RNA, 14 nt, Molluscum contagiosum virus
cgcugcugcacagc

SEQ ID NO: 3103820 - RNA, 22 nt, Molluscum contagiosum virus
cgcucgaacgcgcgugcgcgug

SEQ ID NO: 3103821 - RNA, 22 nt, Molluscum contagiosum virus
cgcugccgguggaagagcccgc

SEQ ID NO: 3103822 - RNA, 22 nt, Molluscum contagiosum virus
cgcugccugugcuacgcgagca

SEQ ID NO: 3103823 - RNA, 19 nt, Molluscum contagiosum virus
cgcugcgaacauggacgcg

SEQ ID NO: 3103824 - RNA, 20 nt, Molluscum contagiosum virus
cgcugcgcacgugcgcgccg

SEQ ID NO: 3103825 - RNA, 18 nt, Molluscum contagiosum virus
cgcugcgccggcugcgcc

SEQ ID NO: 3103826 - RNA, 18 nt, Molluscum contagiosum virus
cgcugcuacaagcggugc

SEQ ID NO: 3103827 - RNA, 21 nt, Molluscum contagiosum virus
cgcugcuagagaaccugugcg

SEQ ID NO: 3103828 - RNA, 23 nt, Molluscum contagiosum virus
cgcugcuagagaaccugugcgcg

SEQ ID NO: 3103829 - RNA, 18 nt, Molluscum contagiosum virus
cgcugcuauacgcgccag

SEQ ID NO: 3103830 - RNA, 16 nt, Molluscum contagiosum virus
cgcugcuccccgccag

SEQ ID NO: 3103831 - RNA, 19 nt, Molluscum contagiosum virus
cgcucacagcuucgcgagc

SEQ ID NO: 3103832 - RNA, 23 nt, Molluscum contagiosum virus
cgcucacagcuucgcgagcccgg

SEQ ID NO: 3103833 - RNA, 18 nt, Molluscum contagiosum virus
cgcuccgagcggcugcuc

SEQ ID NO: 3103834 - RNA, 20 nt, Molluscum contagiosum virus
cgcuccgagucguacacgca

SEQ ID NO: 3103835 - RNA, 16 nt, Molluscum contagiosum virus
cgcuccgcagccggag

SEQ ID NO: 3103836 - RNA, 13 nt, Molluscum contagiosum virus
cgcuccgcucgcg

SEQ ID NO: 3103837 - RNA, 14 nt, Molluscum contagiosum virus
cgcuccgcucgcgc

SEQ ID NO: 3103838 - RNA, 17 nt, Molluscum contagiosum virus
cgcuccgcucgcgcgug

SEQ ID NO: 3103839 - RNA, 14 nt, Molluscum contagiosum virus
cgcugcgcgacgag

SEQ ID NO: 3103840 - RNA, 14 nt, Molluscum contagiosum virus
cgcugcgcgccgcg

SEQ ID NO: 3103841 - RNA, 18 nt, Molluscum contagiosum virus
cgcugcgcggagcucgcg

SEQ ID NO: 3103842 - RNA, 13 nt, Molluscum contagiosum virus
cgcugcgcggcgc

SEQ ID NO: 3103843 - RNA, 16 nt, Molluscum contagiosum virus
cgcugcgcggcgcgcg

SEQ ID NO: 3103844 - RNA, 18 nt, Molluscum contagiosum virus
cgcugcgcucggcgcgcg

SEQ ID NO: 3103845 - RNA, 21 nt, Molluscum contagiosum virus
cgcugcgcuggaugcugcucg

SEQ ID NO: 3103846 - RNA, 18 nt, Molluscum contagiosum virus
cgcugcggcggcgcaacg

SEQ ID NO: 3103847 - RNA, 13 nt, Molluscum contagiosum virus
cgcugcgggcgcc

SEQ ID NO: 3103848 - RNA, 14 nt, Molluscum contagiosum virus
cgcugcgggcgccg

SEQ ID NO: 3103849 - RNA, 15 nt, Molluscum contagiosum virus
cgcugcgggcgccgg

SEQ ID NO: 3103850 - RNA, 22 nt, Molluscum contagiosum virus
cgcucauacuccugcuggcgug

SEQ ID NO: 3103851 - RNA, 20 nt, Molluscum contagiosum virus
cgcucaucaccgacacgcgc

SEQ ID NO: 3103852 - RNA, 21 nt, Molluscum contagiosum virus
cgcucaucaccgacacgcgcc

SEQ ID NO: 3103853 - RNA, 18 nt, Molluscum contagiosum virus
cgcucauccacgcggagg

SEQ ID NO: 3103854 - RNA, 19 nt, Molluscum contagiosum virus
cgcucauccacgcggagga

SEQ ID NO: 3103855 - RNA, 21 nt, Molluscum contagiosum virus
cgcucaucucgcagacgcagc

SEQ ID NO: 3103856 - RNA, 15 nt, Molluscum contagiosum virus
cgcuccacgcccgag

SEQ ID NO: 3103857 - RNA, 16 nt, Molluscum contagiosum virus
cgcuccagagccgcgu

SEQ ID NO: 3103858 - RNA, 16 nt, Molluscum contagiosum virus
cgcguuuucgcggccu

SEQ ID NO: 3103859 - RNA, 17 nt, Molluscum contagiosum virus
cgcuaaagaucgugcgc

SEQ ID NO: 3103860 - RNA, 22 nt, Molluscum contagiosum virus
cgcuaggggugccgcugcgcug

SEQ ID NO: 3103861 - RNA, 14 nt, Molluscum contagiosum virus
cgcuaugccgcgug

SEQ ID NO: 3103862 - RNA, 16 nt, Molluscum contagiosum virus
cgcuaugccgcgugcu

SEQ ID NO: 3103863 - RNA, 23 nt, Molluscum contagiosum virus
cgcuaugccgcgugcucugcucc

SEQ ID NO: 3103864 - RNA, 20 nt, Molluscum contagiosum virus
cgcuaaucugccgcggcgga

SEQ ID NO: 3103865 - RNA, 14 nt, Molluscum contagiosum virus
cgcuacagcagccg

SEQ ID NO: 3103866 - RNA, 21 nt, Molluscum contagiosum virus
cgcuacauguaugccagcgag

SEQ ID NO: 3103867 - RNA, 19 nt, Molluscum contagiosum virus
cgcuacccguugcugcgcc

SEQ ID NO: 3103868 - RNA, 22 nt, Molluscum contagiosum virus
cgcuacccguugcugcgccacg

SEQ ID NO: 3103869 - RNA, 17 nt, Molluscum contagiosum virus
cgcuaccuaccggcagc

SEQ ID NO: 3103870 - RNA, 18 nt, Molluscum contagiosum virus
cgcuaccugaugcgcaug

SEQ ID NO: 3103871 - RNA, 22 nt, Molluscum contagiosum virus
cgcuacgacgacaugcacacgc

SEQ ID NO: 3103872 - RNA, 16 nt, Molluscum contagiosum virus
cgcguuucggccugca

SEQ ID NO: 3103873 - RNA, 19 nt, Molluscum contagiosum virus
cgcguuugucgcgggcgcg

SEQ ID NO: 3103874 - RNA, 23 nt, Molluscum contagiosum virus
cgcuacuugcuggcgcgcggaga

SEQ ID NO: 3103875 - RNA, 16 nt, Molluscum contagiosum virus
cgcuagagcgcggcgc

SEQ ID NO: 3103876 - RNA, 21 nt, Molluscum contagiosum virus
cgcuagcaggcgucgcgcaca

SEQ ID NO: 3103877 - RNA, 13 nt, Molluscum contagiosum virus
cccggcgcgcgcg

SEQ ID NO: 3103878 - RNA, 18 nt, Molluscum contagiosum virus
cccggcacgugccccgcg

SEQ ID NO: 3103879 - RNA, 17 nt, Molluscum contagiosum virus
cccggcaggcucccgcu

SEQ ID NO: 3103880 - RNA, 16 nt, Molluscum contagiosum virus
cccgcuuccgcggccg

SEQ ID NO: 3103881 - RNA, 14 nt, Molluscum contagiosum virus
cccggaauuccgug

SEQ ID NO: 3103882 - RNA, 17 nt, Molluscum contagiosum virus
cccggaucagccccgcg

SEQ ID NO: 3103883 - RNA, 21 nt, Molluscum contagiosum virus
cccggaucagccccgcgccag

SEQ ID NO: 3103884 - RNA, 15 nt, Molluscum contagiosum virus
cccgcuggcggcacg

SEQ ID NO: 3103885 - RNA, 17 nt, Molluscum contagiosum virus
cccgcuggcggcgcacg

SEQ ID NO: 3103886 - RNA, 23 nt, Molluscum contagiosum virus
cccgcugucgcgcgucgcggucg

SEQ ID NO: 3103887 - RNA, 17 nt, Molluscum contagiosum virus
cccgcggacgcgcagcu

SEQ ID NO: 3103888 - RNA, 13 nt, Molluscum contagiosum virus
cccgcggcgcacg

SEQ ID NO: 3103889 - RNA, 14 nt, Molluscum contagiosum virus
cccgcggcgcgccg

SEQ ID NO: 3103890 - RNA, 13 nt, Molluscum contagiosum virus
cccgcggcgugcc

SEQ ID NO: 3103891 - RNA, 23 nt, Molluscum contagiosum virus
cccgcguccgugcgcagggcaau

SEQ ID NO: 3103892 - RNA, 16 nt, Molluscum contagiosum virus
cccgcgucgcgcgccg

SEQ ID NO: 3103893 - RNA, 18 nt, Molluscum contagiosum virus
cccgcggaagugcgagcc

SEQ ID NO: 3103894 - RNA, 21 nt, Molluscum contagiosum virus
cccgcuccgcucgcgcgugcu

SEQ ID NO: 3103895 - RNA, 20 nt, Molluscum contagiosum virus
ccgagcagaaggaagggccc

SEQ ID NO: 3103896 - RNA, 18 nt, Molluscum contagiosum virus
ccgagaucacggcgugcg

SEQ ID NO: 3103897 - RNA, 22 nt, Molluscum contagiosum virus
ccgagaucacggcgugcgcgag

SEQ ID NO: 3103898 - RNA, 14 nt, Molluscum contagiosum virus
ccgacggcgacgac

SEQ ID NO: 3103899 - RNA, 18 nt, Molluscum contagiosum virus
ccgacgggccgccgcccg

SEQ ID NO: 3103900 - RNA, 17 nt, Molluscum contagiosum virus
ccgacugcccgcgcccu

SEQ ID NO: 3103901 - RNA, 16 nt, Molluscum contagiosum virus
ccgacugccgccgccg

SEQ ID NO: 3103902 - RNA, 16 nt, Molluscum contagiosum virus
ccgacuuuucgcgccg

SEQ ID NO: 3103903 - RNA, 17 nt, Molluscum contagiosum virus
ccgagaaaaagcugucg

SEQ ID NO: 3103904 - RNA, 15 nt, Molluscum contagiosum virus
cccgggggcgcuucc

SEQ ID NO: 3103905 - RNA, 16 nt, Molluscum contagiosum virus
cccggcucgcucauca

SEQ ID NO: 3103906 - RNA, 17 nt, Molluscum contagiosum virus
cccgggcccgcaugcag

SEQ ID NO: 3103907 - RNA, 17 nt, Molluscum contagiosum virus
ccgacgccagcgcgccc

SEQ ID NO: 3103908 - RNA, 18 nt, Molluscum contagiosum virus
ccgacgccagcgcgccca

SEQ ID NO: 3103909 - RNA, 20 nt, Molluscum contagiosum virus
ccgaccgugcccuggaccuc

SEQ ID NO: 3103910 - RNA, 15 nt, Molluscum contagiosum virus
ccgagggcgcgaccg

SEQ ID NO: 3103911 - RNA, 13 nt, Molluscum contagiosum virus
ccgagggcgugcg

SEQ ID NO: 3103912 - RNA, 20 nt, Molluscum contagiosum virus
cgagccagccaggcgccggc

SEQ ID NO: 3103913 - RNA, 15 nt, Molluscum contagiosum virus
cgagccaaggaugcc

SEQ ID NO: 3103914 - RNA, 23 nt, Molluscum contagiosum virus
cgagccaaggaugccugccagca

SEQ ID NO: 3103915 - RNA, 18 nt, Molluscum contagiosum virus
ccgaguaccgcgcgcacg

SEQ ID NO: 3103916 - RNA, 22 nt, Molluscum contagiosum virus
ccgaguauacucgacgcgcgcg

SEQ ID NO: 3103917 - RNA, 18 nt, Molluscum contagiosum virus
ccgaguauucgcccauca

SEQ ID NO: 3103918 - RNA, 22 nt, Molluscum contagiosum virus
ccgagucgagcacgcgcgagcg

SEQ ID NO: 3103919 - RNA, 15 nt, Molluscum contagiosum virus
ccgagucgcgccucg

SEQ ID NO: 3103920 - RNA, 20 nt, Molluscum contagiosum virus
cgagcacagcgcgcggaagc

SEQ ID NO: 3103921 - RNA, 20 nt, Molluscum contagiosum virus
cgagcacccccgcugcacgc

SEQ ID NO: 3103922 - RNA, 13 nt, Molluscum contagiosum virus
cgagccgcgcgag

SEQ ID NO: 3103923 - RNA, 15 nt, Molluscum contagiosum virus
cgagccgcgcgagcg

SEQ ID NO: 3103924 - RNA, 17 nt, Molluscum contagiosum virus
cgagccgcgcgagcgcg

SEQ ID NO: 3103925 - RNA, 17 nt, Molluscum contagiosum virus
cgagccggacgcgcgaa

SEQ ID NO: 3103926 - RNA, 19 nt, Molluscum contagiosum virus
cgagccugccagcgccagc

SEQ ID NO: 3103927 - RNA, 15 nt, Molluscum contagiosum virus
cgagccugccgcgag

SEQ ID NO: 3103928 - RNA, 21 nt, Molluscum contagiosum virus
cgagcgaaaacgcgugucuuc

SEQ ID NO: 3103929 - RNA, 18 nt, Molluscum contagiosum virus
cgagcgaaccgcggcagc

SEQ ID NO: 3103930 - RNA, 19 nt, Molluscum contagiosum virus
cgagcgaaccgcggcagcc

SEQ ID NO: 3103931 - RNA, 19 nt, Molluscum contagiosum virus
cgagcgacuacaccuggcg

SEQ ID NO: 3103932 - RNA, 13 nt, Molluscum contagiosum virus
cgagcgagcacgc

SEQ ID NO: 3103933 - RNA, 19 nt, Molluscum contagiosum virus
cgagcgcacgccgcucucg

SEQ ID NO: 3103934 - RNA, 13 nt, Molluscum contagiosum virus
cgagcgccacuag

SEQ ID NO: 3103935 - RNA, 22 nt, Molluscum contagiosum virus
cgagcgccacuagcaaggcgcc

SEQ ID NO: 3103936 - RNA, 18 nt, Molluscum contagiosum virus
cgagcgccagccugugcg

SEQ ID NO: 3103937 - RNA, 13 nt, Molluscum contagiosum virus
ccgagcccgagcc

SEQ ID NO: 3103938 - RNA, 15 nt, Molluscum contagiosum virus
ccgagcccgcccccg

SEQ ID NO: 3103939 - RNA, 14 nt, Molluscum contagiosum virus
ccgagcccggccag

SEQ ID NO: 3103940 - RNA, 19 nt, Molluscum contagiosum virus
ccgagcccggccagacuac

SEQ ID NO: 3103941 - RNA, 19 nt, Molluscum contagiosum virus
ccgagccggacgcgcgaac

SEQ ID NO: 3103942 - RNA, 19 nt, Molluscum contagiosum virus
ccgagccgggggaacacgc

SEQ ID NO: 3103943 - RNA, 16 nt, Molluscum contagiosum virus
ccgagcgcacgccgcu

SEQ ID NO: 3103944 - RNA, 16 nt, Molluscum contagiosum virus
ccgagcgccgccagcu

SEQ ID NO: 3103945 - RNA, 13 nt, Molluscum contagiosum virus
ccgagcgcgcgcg

SEQ ID NO: 3103946 - RNA, 15 nt, Molluscum contagiosum virus
ccgagcgcgcgugcu

SEQ ID NO: 3103947 - RNA, 22 nt, Molluscum contagiosum virus
ccgagcugcggcgcgugcugag

SEQ ID NO: 3103948 - RNA, 22 nt, Molluscum contagiosum virus
ccgagcuucuaaaucgcgcgcg

SEQ ID NO: 3103949 - RNA, 21 nt, Molluscum contagiosum virus
ccgaggacgacgccgagcccg

SEQ ID NO: 3103950 - RNA, 21 nt, Molluscum contagiosum virus
ccgaggacgagccccgcgccg

SEQ ID NO: 3103951 - RNA, 15 nt, Molluscum contagiosum virus
ccgaggacgcgcccg

SEQ ID NO: 3103952 - RNA, 20 nt, Molluscum contagiosum virus
ccgaggacuuccgcgcgcuc

SEQ ID NO: 3103953 - RNA, 18 nt, Molluscum contagiosum virus
ccgaggagagcggcgccc

SEQ ID NO: 3103954 - RNA, 15 nt, Molluscum contagiosum virus
cgagcaccugucgcg

SEQ ID NO: 3103955 - RNA, 16 nt, Molluscum contagiosum virus
cgagcaccugucgcgc

SEQ ID NO: 3103956 - RNA, 20 nt, Molluscum contagiosum virus
cgagcaccugucgcgcgagc

SEQ ID NO: 3103957 - RNA, 18 nt, Molluscum contagiosum virus
cgagcacgccuccaagaa

SEQ ID NO: 3103958 - RNA, 16 nt, Molluscum contagiosum virus
cgagcacgccugcacg

SEQ ID NO: 3103959 - RNA, 17 nt, Molluscum contagiosum virus
cgagcacgccugcacgc

SEQ ID NO: 3103960 - RNA, 18 nt, Molluscum contagiosum virus
cgagcacgccugcacgcg

SEQ ID NO: 3103961 - RNA, 15 nt, Molluscum contagiosum virus
cgagcacgcgcgagc

SEQ ID NO: 3103962 - RNA, 14 nt, Molluscum contagiosum virus
cgagcacgggcgcc

SEQ ID NO: 3103963 - RNA, 21 nt, Molluscum contagiosum virus
cgagcacguccguugcacgug

SEQ ID NO: 3103964 - RNA, 19 nt, Molluscum contagiosum virus
cgagcacguggacagcauc

SEQ ID NO: 3103965 - RNA, 16 nt, Molluscum contagiosum virus
cgagcacuacgugcuc

SEQ ID NO: 3103966 - RNA, 16 nt, Molluscum contagiosum virus
cgagcacugccugccg

SEQ ID NO: 3103967 - RNA, 14 nt, Molluscum contagiosum virus
cgagcacugcgcgc

SEQ ID NO: 3103968 - RNA, 15 nt, Molluscum contagiosum virus
cgagcacugcgcgcg

SEQ ID NO: 3103969 - RNA, 17 nt, Molluscum contagiosum virus
cgagcacugcgcgcgcg

SEQ ID NO: 3103970 - RNA, 19 nt, Molluscum contagiosum virus
cgagcagagccgggacgcg

SEQ ID NO: 3103971 - RNA, 24 nt, Molluscum contagiosum virus
cgagcagagccgggacgcggaugc

SEQ ID NO: 3103972 - RNA, 19 nt, Molluscum contagiosum virus
cgagcagcccgugcgccug

SEQ ID NO: 3103973 - RNA, 22 nt, Molluscum contagiosum virus
cgagcagcgcuugcgcgccaac

SEQ ID NO: 3103974 - RNA, 15 nt, Molluscum contagiosum virus
cgagcagcugcugcg

SEQ ID NO: 3103975 - RNA, 19 nt, Molluscum contagiosum virus
cgagcagcugcugcgcacg

SEQ ID NO: 3103976 - RNA, 14 nt, Molluscum contagiosum virus
cgagcaggcgcagc

SEQ ID NO: 3103977 - RNA, 15 nt, Molluscum contagiosum virus
cgagcaggcgcagcg

SEQ ID NO: 3103978 - RNA, 18 nt, Molluscum contagiosum virus
cgagcaguccgccucgag

SEQ ID NO: 3103979 - RNA, 22 nt, Molluscum contagiosum virus
cgagcaguccgccucgagcacg

SEQ ID NO: 3103980 - RNA, 16 nt, Molluscum contagiosum virus
cgagcaguucgcgcgc

SEQ ID NO: 3103981 - RNA, 14 nt, Molluscum contagiosum virus
cgagcaucugcgcg

SEQ ID NO: 3103982 - RNA, 15 nt, Molluscum contagiosum virus
cgagcaucugcgcgu

SEQ ID NO: 3103983 - RNA, 16 nt, Molluscum contagiosum virus
cgagcaucugcgcgug

SEQ ID NO: 3103984 - RNA, 15 nt, Molluscum contagiosum virus
cgcaccuccuucgcg

SEQ ID NO: 3103985 - RNA, 19 nt, Molluscum contagiosum virus
cgcagccucgagcgccgug

SEQ ID NO: 3103986 - RNA, 19 nt, Molluscum contagiosum virus
cgcagccuccgugcgccag

SEQ ID NO: 3103987 - RNA, 20 nt, Molluscum contagiosum virus
cgcagccuccgugcgccagu

SEQ ID NO: 3103988 - RNA, 13 nt, Molluscum contagiosum virus
cgcagcgcccgcg

SEQ ID NO: 3103989 - RNA, 13 nt, Molluscum contagiosum virus
cgcagcgcgagcu

SEQ ID NO: 3103990 - RNA, 18 nt, Molluscum contagiosum virus
cgcagcgcgagcugugca

SEQ ID NO: 3103991 - RNA, 13 nt, Molluscum contagiosum virus
cgcagcgcgcgcg

SEQ ID NO: 3103992 - RNA, 13 nt, Molluscum contagiosum virus
cgcagcgcgcggu

SEQ ID NO: 3103993 - RNA, 13 nt, Molluscum contagiosum virus
cgcagcgcggccu

SEQ ID NO: 3103994 - RNA, 14 nt, Molluscum contagiosum virus
cgcagcggcgccac

SEQ ID NO: 3103995 - RNA, 20 nt, Molluscum contagiosum virus
cgcagcguuccaggaacgcc

SEQ ID NO: 3103996 - RNA, 16 nt, Molluscum contagiosum virus
cgcagcuccuagcgcg

SEQ ID NO: 3103997 - RNA, 16 nt, Molluscum contagiosum virus
cgcagcucgccgcgcg

SEQ ID NO: 3103998 - RNA, 19 nt, Molluscum contagiosum virus
cgcagcucgccgcgcgccg

SEQ ID NO: 3103999 - RNA, 21 nt, Molluscum contagiosum virus
cgcagcucgccgcgcgccgcu

SEQ ID NO: 3104000 - RNA, 19 nt, Molluscum contagiosum virus
cgcagcucuuccacgaagu

SEQ ID NO: 3104001 - RNA, 15 nt, Molluscum contagiosum virus
cgcagcugcgccugc

SEQ ID NO: 3104002 - RNA, 21 nt, Molluscum contagiosum virus
cgcagcuguggcgccugcgcg

SEQ ID NO: 3104003 - RNA, 19 nt, Molluscum contagiosum virus
cgcaggaaagguacccgca

SEQ ID NO: 3104004 - RNA, 20 nt, Molluscum contagiosum virus
cgcaggaaaggucgggcccg

SEQ ID NO: 3104005 - RNA, 20 nt, Molluscum contagiosum virus
cgcaggacaugauccgcgac

SEQ ID NO: 3104006 - RNA, 14 nt, Molluscum contagiosum virus
cgcaggaccgcgac

SEQ ID NO: 3104007 - RNA, 21 nt, Molluscum contagiosum virus
cgcaggacgcggucgcgcccu

SEQ ID NO: 3104008 - RNA, 22 nt, Molluscum contagiosum virus
cgcaggacgcggucgcgcccuu

SEQ ID NO: 3104009 - RNA, 20 nt, Molluscum contagiosum virus
cgcaggacuggcaccugcgg

SEQ ID NO: 3104010 - RNA, 15 nt, Molluscum contagiosum virus
cgcaggccgcgcccg

SEQ ID NO: 3104011 - RNA, 15 nt, Molluscum contagiosum virus
cgcaggccgggcacc

SEQ ID NO: 3104012 - RNA, 18 nt, Molluscum contagiosum virus
cgccaagccugcucacgg

SEQ ID NO: 3104013 - RNA, 22 nt, Molluscum contagiosum virus
cgccaagccugcucacggcggc

SEQ ID NO: 3104014 - RNA, 16 nt, Molluscum contagiosum virus
cgcauucgcgcgcccc

SEQ ID NO: 3104015 - RNA, 20 nt, Molluscum contagiosum virus
cgccaaagaggacguguacg

SEQ ID NO: 3104016 - RNA, 15 nt, Molluscum contagiosum virus
cgccaacacgagcgc

SEQ ID NO: 3104017 - RNA, 14 nt, Molluscum contagiosum virus
cgccaaccgcgagc

SEQ ID NO: 3104018 - RNA, 20 nt, Molluscum contagiosum virus
cgccaacgcggacgcgcagc

SEQ ID NO: 3104019 - RNA, 22 nt, Molluscum contagiosum virus
cgcaucccccgcguuguccgcg

SEQ ID NO: 3104020 - RNA, 23 nt, Molluscum contagiosum virus
cgcaugaaaggcaccugcggcuc

SEQ ID NO: 3104021 - RNA, 18 nt, Molluscum contagiosum virus
cgcagugcucgcacacgu

SEQ ID NO: 3104022 - RNA, 21 nt, Molluscum contagiosum virus
cgcaguucggcgacacgcccg

SEQ ID NO: 3104023 - RNA, 23 nt, Molluscum contagiosum virus
cgcaguuggucaccgccuguacc

SEQ ID NO: 3104024 - RNA, 23 nt, Molluscum contagiosum virus
cgcaguugugcguacccuggcag

SEQ ID NO: 3104025 - RNA, 16 nt, Molluscum contagiosum virus
cgcaugcaccuacgcg

SEQ ID NO: 3104026 - RNA, 22 nt, Molluscum contagiosum virus
cgcaugcgcgguccuguccgcg

SEQ ID NO: 3104027 - RNA, 16 nt, Molluscum contagiosum virus
cgcauggccacgcccg

SEQ ID NO: 3104028 - RNA, 21 nt, Molluscum contagiosum virus
cgcagucccagcaccgcgccg

SEQ ID NO: 3104029 - RNA, 17 nt, Molluscum contagiosum virus
cgcaggcgucaugcgcg

SEQ ID NO: 3104030 - RNA, 19 nt, Molluscum contagiosum virus
cgcaggucaucgacgagca

SEQ ID NO: 3104031 - RNA, 22 nt, Molluscum contagiosum virus
cgcaguaccaguaccugcugcc

SEQ ID NO: 3104032 - RNA, 23 nt, Molluscum contagiosum virus
cgcacacgaaucgcucgcggugc

SEQ ID NO: 3104033 - RNA, 20 nt, Molluscum contagiosum virus
cgcacacgagugcccgcgcg

SEQ ID NO: 3104034 - RNA, 14 nt, Molluscum contagiosum virus
cgcacacgccgcgu

SEQ ID NO: 3104035 - RNA, 21 nt, Molluscum contagiosum virus
cgcacacgcgucgggaagugu

SEQ ID NO: 3104036 - RNA, 18 nt, Molluscum contagiosum virus
cgcacacggacgagcccu

SEQ ID NO: 3104037 - RNA, 18 nt, Molluscum contagiosum virus
cgcacacucgcgcguccg

SEQ ID NO: 3104038 - RNA, 14 nt, Molluscum contagiosum virus
cgcacacuugcgcg

SEQ ID NO: 3104039 - RNA, 16 nt, Molluscum contagiosum virus
cgcacacuugcgcguc

SEQ ID NO: 3104040 - RNA, 18 nt, Molluscum contagiosum virus
cgcacacuugcgcgucca

SEQ ID NO: 3104041 - RNA, 18 nt, Molluscum contagiosum virus
cgcacacuugcgcguccg

SEQ ID NO: 3104042 - RNA, 16 nt, Molluscum contagiosum virus
cgcacacuugcgcguu

SEQ ID NO: 3104043 - RNA, 18 nt, Molluscum contagiosum virus
cgcacacuugcgcguucg

SEQ ID NO: 3104044 - RNA, 21 nt, Molluscum contagiosum virus
cgcacagacauggcccgcgcg

SEQ ID NO: 3104045 - RNA, 20 nt, Molluscum contagiosum virus
cgcacagucuccacgcgugc

SEQ ID NO: 3104046 - RNA, 21 nt, Molluscum contagiosum virus
cgcacagucuccacgcgugcg

SEQ ID NO: 3104047 - RNA, 20 nt, Molluscum contagiosum virus
cgcacaguucacggcgcuug

SEQ ID NO: 3104048 - RNA, 14 nt, Molluscum contagiosum virus
cgcacaaacgcgcg

SEQ ID NO: 3104049 - RNA, 20 nt, Molluscum contagiosum virus
cgcacaaagaacgcgcgucg

SEQ ID NO: 3104050 - RNA, 18 nt, Molluscum contagiosum virus
cgcaacuagggagcggca

SEQ ID NO: 3104051 - RNA, 20 nt, Molluscum contagiosum virus
cgcaaaaggcacgaggcagc

SEQ ID NO: 3104052 - RNA, 12 nt, Molluscum contagiosum virus
cgcacccgccac

SEQ ID NO: 3104053 - RNA, 14 nt, Molluscum contagiosum virus
cgcacccgccacga

SEQ ID NO: 3104054 - RNA, 13 nt, Molluscum contagiosum virus
cgcacccgcgccg

SEQ ID NO: 3104055 - RNA, 15 nt, Molluscum contagiosum virus
cgcacccgcgcggcu

SEQ ID NO: 3104056 - RNA, 14 nt, Molluscum contagiosum virus
cgcaccguacucgc

SEQ ID NO: 3104057 - RNA, 21 nt, Molluscum contagiosum virus
cgcaccgccuggugcugcgcg

SEQ ID NO: 3104058 - RNA, 14 nt, Molluscum contagiosum virus
cgcaagagccgccg

SEQ ID NO: 3104059 - RNA, 12 nt, Molluscum contagiosum virus
cgcaagccagag

SEQ ID NO: 3104060 - RNA, 19 nt, Molluscum contagiosum virus
cgcaagcccgcgcgcgagc

SEQ ID NO: 3104061 - RNA, 15 nt, Molluscum contagiosum virus
cgcaagccgcguacc

SEQ ID NO: 3104062 - RNA, 19 nt, Molluscum contagiosum virus
cgcaagcgcugcucguaga

SEQ ID NO: 3104063 - RNA, 17 nt, Molluscum contagiosum virus
cgcaagcguacgcgucg

SEQ ID NO: 3104064 - RNA, 23 nt, Molluscum contagiosum virus
cgcaagcuuugugcucgcuuagc

SEQ ID NO: 3104065 - RNA, 19 nt, Molluscum contagiosum virus
cgcaaggacaccgcgggcg

SEQ ID NO: 3104066 - RNA, 16 nt, Molluscum contagiosum virus
cgcaaggccgcgccca

SEQ ID NO: 3104067 - RNA, 20 nt, Molluscum contagiosum virus
cgcaaggugugcgcgcugca

SEQ ID NO: 3104068 - RNA, 18 nt, Molluscum contagiosum virus
cgcaagucaccgcuccgc

SEQ ID NO: 3104069 - RNA, 19 nt, Molluscum contagiosum virus
cgcaaguccagcgcgcucg

SEQ ID NO: 3104070 - RNA, 21 nt, Molluscum contagiosum virus
cgcaaguccagcgcgcucgag

SEQ ID NO: 3104071 - RNA, 19 nt, Molluscum contagiosum virus
cgcaagugcacaccagaca

SEQ ID NO: 3104072 - RNA, 17 nt, Molluscum contagiosum virus
cgcaagugcacgcggcg

SEQ ID NO: 3104073 - RNA, 18 nt, Molluscum contagiosum virus
cgagcgcccgugcuugcg

SEQ ID NO: 3104074 - RNA, 13 nt, Molluscum contagiosum virus
cgcaacacggcgg

SEQ ID NO: 3104075 - RNA, 14 nt, Molluscum contagiosum virus
cgcaaccccgcgcg

SEQ ID NO: 3104076 - RNA, 20 nt, Molluscum contagiosum virus
cgcaaccccgcgcugcgcgg

SEQ ID NO: 3104077 - RNA, 14 nt, Molluscum contagiosum virus
cgcaaccgcgugcg

SEQ ID NO: 3104078 - RNA, 20 nt, Molluscum contagiosum virus
cgcaaccgcgugcgugcaca

SEQ ID NO: 3104079 - RNA, 22 nt, Molluscum contagiosum virus
cgcaaccucuuccggaggcagc

SEQ ID NO: 3104080 - RNA, 16 nt, Molluscum contagiosum virus
cgagccccgcgccggc

SEQ ID NO: 3104081 - RNA, 14 nt, Molluscum contagiosum virus
cgagcccgcggcgc

SEQ ID NO: 3104082 - RNA, 16 nt, Molluscum contagiosum virus
cgagcccgcggcgcgc

SEQ ID NO: 3104083 - RNA, 19 nt, Molluscum contagiosum virus
cgagcccgcggcgcgcagc

SEQ ID NO: 3104084 - RNA, 22 nt, Molluscum contagiosum virus
cgagcccgggcccgugcccgag

SEQ ID NO: 3104085 - RNA, 21 nt, Molluscum contagiosum virus
cgagcccuucuuuccggcgcg

SEQ ID NO: 3104086 - RNA, 18 nt, Molluscum contagiosum virus
aacagcaccguugccgcg

SEQ ID NO: 3104087 - RNA, 16 nt, Molluscum contagiosum virus
aacagcagcuggcgcg

SEQ ID NO: 3104088 - RNA, 17 nt, Molluscum contagiosum virus
aacacugucucugcgcg

SEQ ID NO: 3104089 - RNA, 23 nt, Molluscum contagiosum virus
aacacgcuguugcugcugccgcg

SEQ ID NO: 3104090 - RNA, 21 nt, Molluscum contagiosum virus
aaaugguguacgaaaguacuu

SEQ ID NO: 3104091 - RNA, 17 nt, Molluscum contagiosum virus
aaacacgcuacgcagcg

SEQ ID NO: 3104092 - RNA, 20 nt, Molluscum contagiosum virus
aaacacggccuccagcagcg

SEQ ID NO: 3104093 - RNA, 18 nt, Molluscum contagiosum virus
aaaccucugagcgagcgc

SEQ ID NO: 3104094 - RNA, 20 nt, Molluscum contagiosum virus
aaagcuggccgaggucuucc

SEQ ID NO: 3104095 - RNA, 15 nt, Molluscum contagiosum virus
aaaguacgagagcgc

SEQ ID NO: 3104096 - RNA, 18 nt, Molluscum contagiosum virus
aaaggugcgauggacgac

SEQ ID NO: 3104097 - RNA, 23 nt, Molluscum contagiosum virus
aaacguguuggcgcgguccgcgu

SEQ ID NO: 3104098 - RNA, 19 nt, Molluscum contagiosum virus
uggauuucggcgcgcgugc

SEQ ID NO: 3104099 - RNA, 19 nt, Molluscum contagiosum virus
uggcaacgcaaacgcacgc

SEQ ID NO: 3104100 - RNA, 19 nt, Molluscum contagiosum virus
uggcaauccugguacgcgc

SEQ ID NO: 3104101 - RNA, 17 nt, Molluscum contagiosum virus
uggaggugcgcgacucc

SEQ ID NO: 3104102 - RNA, 22 nt, Molluscum contagiosum virus
uggaguccaugcccacgcgcaa

SEQ ID NO: 3104103 - RNA, 20 nt, Molluscum contagiosum virus
uggaguuuaaugacgcgcac

SEQ ID NO: 3104104 - RNA, 17 nt, Molluscum contagiosum virus
uggcacccuggcugcug

SEQ ID NO: 3104105 - RNA, 21 nt, Molluscum contagiosum virus
uggcacccuggcugcugcgcg

SEQ ID NO: 3104106 - RNA, 15 nt, Molluscum contagiosum virus
uggcaccgcgcgcgc

SEQ ID NO: 3104107 - RNA, 16 nt, Molluscum contagiosum virus
uggcaccgggcgccgc

SEQ ID NO: 3104108 - RNA, 20 nt, Molluscum contagiosum virus
uggcaccugcggcugcggcg

SEQ ID NO: 3104109 - RNA, 14 nt, Molluscum contagiosum virus
uggcacuggcgcgc

SEQ ID NO: 3104110 - RNA, 14 nt, Molluscum contagiosum virus
uggcaggcgcgcgc

SEQ ID NO: 3104111 - RNA, 22 nt, Molluscum contagiosum virus
uggcaugcgcccucacgugcug

SEQ ID NO: 3104112 - RNA, 13 nt, Molluscum contagiosum virus
uggcaugcgugcu

SEQ ID NO: 3104113 - RNA, 17 nt, Molluscum contagiosum virus
uggcauggcgcgcucgc

SEQ ID NO: 3104114 - RNA, 15 nt, Molluscum contagiosum virus
uggcauucucggaca

SEQ ID NO: 3104115 - RNA, 22 nt, Molluscum contagiosum virus
uggccaacaggaauguguacga

SEQ ID NO: 3104116 - RNA, 19 nt, Molluscum contagiosum virus
uggccacucucgcgcguga

SEQ ID NO: 3104117 - RNA, 20 nt, Molluscum contagiosum virus
uggcccgugcacguccucca

SEQ ID NO: 3104118 - RNA, 16 nt, Molluscum contagiosum virus
uggcacgcgccgcgcg

SEQ ID NO: 3104119 - RNA, 21 nt, Molluscum contagiosum virus
uggagcccacguugccgcgcg

SEQ ID NO: 3104120 - RNA, 14 nt, Molluscum contagiosum virus
uggagcccgugcug

SEQ ID NO: 3104121 - RNA, 17 nt, Molluscum contagiosum virus
uggagccgcugcugcgg

SEQ ID NO: 3104122 - RNA, 19 nt, Molluscum contagiosum virus
uggagccucccccgcgcac

SEQ ID NO: 3104123 - RNA, 14 nt, Molluscum contagiosum virus
uggagcgagugcgc

SEQ ID NO: 3104124 - RNA, 18 nt, Molluscum contagiosum virus
uggagcgagugcgcgugc

SEQ ID NO: 3104125 - RNA, 19 nt, Molluscum contagiosum virus
uggagcgccuugccgagga

SEQ ID NO: 3104126 - RNA, 16 nt, Molluscum contagiosum virus
uggagcgcgcggacgc

SEQ ID NO: 3104127 - RNA, 23 nt, Molluscum contagiosum virus
uggagaaagaagugugccugcug

SEQ ID NO: 3104128 - RNA, 15 nt, Molluscum contagiosum virus
uggagaacggcgugc

SEQ ID NO: 3104129 - RNA, 22 nt, Molluscum contagiosum virus
uggagaaggucuacgaggagca

SEQ ID NO: 3104130 - RNA, 12 nt, Molluscum contagiosum virus
uggacggugcug

SEQ ID NO: 3104131 - RNA, 17 nt, Molluscum contagiosum virus
uggacgucgcggccacg

SEQ ID NO: 3104132 - RNA, 22 nt, Molluscum contagiosum virus
uggacgugggcgaacugcccgg

SEQ ID NO: 3104133 - RNA, 17 nt, Molluscum contagiosum virus
uggacguguccgacgcg

SEQ ID NO: 3104134 - RNA, 16 nt, Molluscum contagiosum virus
uggagcuagcgcgcgc

SEQ ID NO: 3104135 - RNA, 18 nt, Molluscum contagiosum virus
uggagcugccgcugcgcg

SEQ ID NO: 3104136 - RNA, 19 nt, Molluscum contagiosum virus
uggagcugccgcugcgcga

SEQ ID NO: 3104137 - RNA, 19 nt, Molluscum contagiosum virus
uggagcaagcgcguucgcg

SEQ ID NO: 3104138 - RNA, 17 nt, Molluscum contagiosum virus
uggagcacuuccgcgcg

SEQ ID NO: 3104139 - RNA, 19 nt, Molluscum contagiosum virus
uggagcacuuccgcgcgcu

SEQ ID NO: 3104140 - RNA, 17 nt, Molluscum contagiosum virus
uggagggucacgcgcac

SEQ ID NO: 3104141 - RNA, 19 nt, Molluscum contagiosum virus
uggacgccguugcgcguga

SEQ ID NO: 3104142 - RNA, 17 nt, Molluscum contagiosum virus
uggagggcacgcugcac

SEQ ID NO: 3104143 - RNA, 18 nt, Molluscum contagiosum virus
uaagcgccccgagcacgu

SEQ ID NO: 3104144 - RNA, 15 nt, Molluscum contagiosum virus
uaaauggcgcgcgcg

SEQ ID NO: 3104145 - RNA, 21 nt, Molluscum contagiosum virus
uaaaguacgagagcgcaugcc

SEQ ID NO: 3104146 - RNA, 19 nt, Molluscum contagiosum virus
uaaagaguuccagcagcgc

SEQ ID NO: 3104147 - RNA, 17 nt, Molluscum contagiosum virus
uacacgugcacgcgcac

SEQ ID NO: 3104148 - RNA, 20 nt, Molluscum contagiosum virus
uacagaugccacgaccgcgc

SEQ ID NO: 3104149 - RNA, 15 nt, Molluscum contagiosum virus
uacagccgccugccg

SEQ ID NO: 3104150 - RNA, 14 nt, Molluscum contagiosum virus
uacagcgcgcgugc

SEQ ID NO: 3104151 - RNA, 14 nt, Molluscum contagiosum virus
uacagugcgcgcac

SEQ ID NO: 3104152 - RNA, 15 nt, Molluscum contagiosum virus
uaaugacgcgcacgc

SEQ ID NO: 3104153 - RNA, 15 nt, Molluscum contagiosum virus
uaaggcggaccgcgc

SEQ ID NO: 3104154 - RNA, 16 nt, Molluscum contagiosum virus
uaagggcccgcuggcg

SEQ ID NO: 3104155 - RNA, 20 nt, Molluscum contagiosum virus
uaagggcggacgcacuagac

SEQ ID NO: 3104156 - RNA, 15 nt, Molluscum contagiosum virus
uacacauugcgugug

SEQ ID NO: 3104157 - RNA, 18 nt, Molluscum contagiosum virus
uacacgcagagccagcgc

SEQ ID NO: 3104158 - RNA, 18 nt, Molluscum contagiosum virus
uacacgcgcuuugucgcg

SEQ ID NO: 3104159 - RNA, 17 nt, Molluscum contagiosum virus
ucaaggcgcgcaucgcg

SEQ ID NO: 3104160 - RNA, 19 nt, Molluscum contagiosum virus
ucaacuccgagcgcgcgcg

SEQ ID NO: 3104161 - RNA, 17 nt, Molluscum contagiosum virus
ucaaugcgcacgugcuc

SEQ ID NO: 3104162 - RNA, 16 nt, Molluscum contagiosum virus
ucacaugugcugccgg

SEQ ID NO: 3104163 - RNA, 17 nt, Molluscum contagiosum virus
ucacaaagggguccgcg

SEQ ID NO: 3104164 - RNA, 20 nt, Molluscum contagiosum virus
ucaccgccuguaccugcucg

SEQ ID NO: 3104165 - RNA, 20 nt, Molluscum contagiosum virus
ucacgaccgacccaucggag

SEQ ID NO: 3104166 - RNA, 22 nt, Molluscum contagiosum virus
ucacgcacacgaaucgcucgcg

SEQ ID NO: 3104167 - RNA, 16 nt, Molluscum contagiosum virus
ucacgcccgcgcugcg

SEQ ID NO: 3104168 - RNA, 21 nt, Molluscum contagiosum virus
ucacgcccuucaacgcgcgug

SEQ ID NO: 3104169 - RNA, 18 nt, Molluscum contagiosum virus
ucacgccgguggcgcgcg

SEQ ID NO: 3104170 - RNA, 20 nt, Molluscum contagiosum virus
ucacgccgguggcgcgcgag

SEQ ID NO: 3104171 - RNA, 18 nt, Molluscum contagiosum virus
ucaacagcuacaccgaga

SEQ ID NO: 3104172 - RNA, 13 nt, Molluscum contagiosum virus
uacaugcgugcua

SEQ ID NO: 3104173 - RNA, 18 nt, Molluscum contagiosum virus
ucaaccucgagaagaccu

SEQ ID NO: 3104174 - RNA, 17 nt, Molluscum contagiosum virus
ucaacgcgauggcgcag

SEQ ID NO: 3104175 - RNA, 14 nt, Molluscum contagiosum virus
ucaacgcgcgcgug

SEQ ID NO: 3104176 - RNA, 17 nt, Molluscum contagiosum virus
ucaacgcgcgcgugcug

SEQ ID NO: 3104177 - RNA, 13 nt, Molluscum contagiosum virus
ucaacgcgcgugc

SEQ ID NO: 3104178 - RNA, 14 nt, Molluscum contagiosum virus
ucaacuuccacauc

SEQ ID NO: 3104179 - RNA, 15 nt, Molluscum contagiosum virus
ucaacuucgcgcugu

SEQ ID NO: 3104180 - RNA, 22 nt, Molluscum contagiosum virus
ucaagaacagucgcgcgccugc

SEQ ID NO: 3104181 - RNA, 16 nt, Molluscum contagiosum virus
ucaagacucgcccgcg

SEQ ID NO: 3104182 - RNA, 15 nt, Molluscum contagiosum virus
ucaagaggugcgugc

SEQ ID NO: 3104183 - RNA, 15 nt, Molluscum contagiosum virus
ucaagcaccugcgcu

SEQ ID NO: 3104184 - RNA, 19 nt, Molluscum contagiosum virus
ucaagcaccugcgcuuccu

SEQ ID NO: 3104185 - RNA, 21 nt, Molluscum contagiosum virus
ucaagcacggcuuccggcacc

SEQ ID NO: 3104186 - RNA, 23 nt, Molluscum contagiosum virus
ucaagcacuacauggacgugcug

SEQ ID NO: 3104187 - RNA, 19 nt, Molluscum contagiosum virus
ucaagcagguggccgcgcg

SEQ ID NO: 3104188 - RNA, 21 nt, Molluscum contagiosum virus
ucaagcagguggccgcgcgcg

SEQ ID NO: 3104189 - RNA, 22 nt, Molluscum contagiosum virus
ucaagccgcaggcgcgcgccau

SEQ ID NO: 3104190 - RNA, 16 nt, Molluscum contagiosum virus
guucugcgcgccgcuc

SEQ ID NO: 3104191 - RNA, 21 nt, Molluscum contagiosum virus
guucugcacagcacaggcccc

SEQ ID NO: 3104192 - RNA, 17 nt, Molluscum contagiosum virus
guugccaggcacacgca

SEQ ID NO: 3104193 - RNA, 23 nt, Molluscum contagiosum virus
guugccgcccgccgaguaccgcg

SEQ ID NO: 3104194 - RNA, 17 nt, Molluscum contagiosum virus
guugccgcgcgcugcuc

SEQ ID NO: 3104195 - RNA, 13 nt, Molluscum contagiosum virus
guugccgugccca

SEQ ID NO: 3104196 - RNA, 19 nt, Molluscum contagiosum virus
guugcgagccagccaggcg

SEQ ID NO: 3104197 - RNA, 19 nt, Molluscum contagiosum virus
guugcgcacguuggccacg

SEQ ID NO: 3104198 - RNA, 16 nt, Molluscum contagiosum virus
guugcgcaugcgcaag

SEQ ID NO: 3104199 - RNA, 13 nt, Molluscum contagiosum virus
guuccccgugagc

SEQ ID NO: 3104200 - RNA, 13 nt, Molluscum contagiosum virus
guucgcgcgccag

SEQ ID NO: 3104201 - RNA, 13 nt, Molluscum contagiosum virus
guucgcgcugcuc

SEQ ID NO: 3104202 - RNA, 16 nt, Molluscum contagiosum virus
guucgcgggaccgccc

SEQ ID NO: 3104203 - RNA, 19 nt, Molluscum contagiosum virus
guuccggacgugcacgcac

SEQ ID NO: 3104204 - RNA, 17 nt, Molluscum contagiosum virus
guuccggcagcgccgcg

SEQ ID NO: 3104205 - RNA, 17 nt, Molluscum contagiosum virus
guucgacuacacgcgcu

SEQ ID NO: 3104206 - RNA, 22 nt, Molluscum contagiosum virus
guucgagaagacggggcgcacg

SEQ ID NO: 3104207 - RNA, 20 nt, Molluscum contagiosum virus
guuuacaucggcuccgcgcc

SEQ ID NO: 3104208 - RNA, 16 nt, Molluscum contagiosum virus
guugucgaguucgcuc

SEQ ID NO: 3104209 - RNA, 17 nt, Molluscum contagiosum virus
guuuacguccacgcgcc

SEQ ID NO: 3104210 - RNA, 15 nt, Molluscum contagiosum virus
guuugcacccgcgca

SEQ ID NO: 3104211 - RNA, 20 nt, Molluscum contagiosum virus
guuugccacggccgcgcgcg

SEQ ID NO: 3104212 - RNA, 20 nt, Molluscum contagiosum virus
guucuggacguguccgacgc

SEQ ID NO: 3104213 - RNA, 12 nt, Molluscum contagiosum virus
guugcgcgcgcc

SEQ ID NO: 3104214 - RNA, 16 nt, Molluscum contagiosum virus
guugcgcgugugcagc

SEQ ID NO: 3104215 - RNA, 19 nt, Molluscum contagiosum virus
guugacgagcgcgugcccg

SEQ ID NO: 3104216 - RNA, 21 nt, Molluscum contagiosum virus
guuggcgcgcaagcgcugcuc

SEQ ID NO: 3104217 - RNA, 16 nt, Molluscum contagiosum virus
guuggcgugcucgcuc

SEQ ID NO: 3104218 - RNA, 20 nt, Molluscum contagiosum virus
guuggcuuucugugcgcgac

SEQ ID NO: 3104219 - RNA, 17 nt, Molluscum contagiosum virus
guugcguuggcgccagc

SEQ ID NO: 3104220 - RNA, 18 nt, Molluscum contagiosum virus
guugcguuggcgccagcc

SEQ ID NO: 3104221 - RNA, 22 nt, Molluscum contagiosum virus
guugcugcugccgcgcggcacg

SEQ ID NO: 3104222 - RNA, 12 nt, Molluscum contagiosum virus
ugcccacgcgca

SEQ ID NO: 3104223 - RNA, 14 nt, Molluscum contagiosum virus
ugcccagccugacg

SEQ ID NO: 3104224 - RNA, 22 nt, Molluscum contagiosum virus
ugccaagaccugggcgucgugc

SEQ ID NO: 3104225 - RNA, 22 nt, Molluscum contagiosum virus
ugccaagguucuggacgugucc

SEQ ID NO: 3104226 - RNA, 20 nt, Molluscum contagiosum virus
ugcaucuuugccuucgugga

SEQ ID NO: 3104227 - RNA, 17 nt, Molluscum contagiosum virus
ugcaugacggcgcgagc

SEQ ID NO: 3104228 - RNA, 15 nt, Molluscum contagiosum virus
ugcaugcggagcugg

SEQ ID NO: 3104229 - RNA, 20 nt, Molluscum contagiosum virus
ugcauguuuguucgcgcgcc

SEQ ID NO: 3104230 - RNA, 17 nt, Molluscum contagiosum virus
ugccacaugcaguacgc

SEQ ID NO: 3104231 - RNA, 18 nt, Molluscum contagiosum virus
ugccacgaccgcgcacgc

SEQ ID NO: 3104232 - RNA, 17 nt, Molluscum contagiosum virus
ugccacgcagcuggcgg

SEQ ID NO: 3104233 - RNA, 22 nt, Molluscum contagiosum virus
ugccagagucgccgcugcgcau

SEQ ID NO: 3104234 - RNA, 21 nt, Molluscum contagiosum virus
ugccagauugccggcgcgcgc

SEQ ID NO: 3104235 - RNA, 22 nt, Molluscum contagiosum virus
ugccagcgagcucaaggacauc

SEQ ID NO: 3104236 - RNA, 18 nt, Molluscum contagiosum virus
ugccagcggcgccgcagc

SEQ ID NO: 3104237 - RNA, 17 nt, Molluscum contagiosum virus
ugccaggcggucuucca

SEQ ID NO: 3104238 - RNA, 19 nt, Molluscum contagiosum virus
ugccagucgcgccucgcau

SEQ ID NO: 3104239 - RNA, 21 nt, Molluscum contagiosum virus
ugagcagcaccgcacgccagc

SEQ ID NO: 3104240 - RNA, 17 nt, Molluscum contagiosum virus
ugagcgcgccgcucgcg

SEQ ID NO: 3104241 - RNA, 14 nt, Molluscum contagiosum virus
ugagcgcgcugcgc

SEQ ID NO: 3104242 - RNA, 23 nt, Molluscum contagiosum virus
ugagcggcacgggaaggcucuca

SEQ ID NO: 3104243 - RNA, 13 nt, Molluscum contagiosum virus
ugagcucgcgcgc

SEQ ID NO: 3104244 - RNA, 21 nt, Molluscum contagiosum virus
ugagcucuuuguacacccgug

SEQ ID NO: 3104245 - RNA, 17 nt, Molluscum contagiosum virus
ugagcccagaacauguc

SEQ ID NO: 3104246 - RNA, 16 nt, Molluscum contagiosum virus
ugcaggaacgcgcgcu

SEQ ID NO: 3104247 - RNA, 22 nt, Molluscum contagiosum virus
ugcaggaggaccgcgagcgcau

SEQ ID NO: 3104248 - RNA, 17 nt, Molluscum contagiosum virus
ugcaggauuuccucgcg

SEQ ID NO: 3104249 - RNA, 18 nt, Molluscum contagiosum virus
ugcaggauuuccucgcgg

SEQ ID NO: 3104250 - RNA, 14 nt, Molluscum contagiosum virus
ugcagggcgugcuu

SEQ ID NO: 3104251 - RNA, 14 nt, Molluscum contagiosum virus
ugcaguacggcgcg

SEQ ID NO: 3104252 - RNA, 21 nt, Molluscum contagiosum virus
ugacggccggcgggcgcgugc

SEQ ID NO: 3104253 - RNA, 15 nt, Molluscum contagiosum virus
ugacgguccugcgcg

SEQ ID NO: 3104254 - RNA, 17 nt, Molluscum contagiosum virus
ugacgucuuccagacgc

SEQ ID NO: 3104255 - RNA, 16 nt, Molluscum contagiosum virus
ugacggcgcugcgcgu

SEQ ID NO: 3104256 - RNA, 18 nt, Molluscum contagiosum virus
ugacggcgcugcgcgugg

SEQ ID NO: 3104257 - RNA, 20 nt, Molluscum contagiosum virus
ugacggcgguucucgcgcuu

SEQ ID NO: 3104258 - RNA, 19 nt, Molluscum contagiosum virus
ugacggcgucucucgaaca

SEQ ID NO: 3104259 - RNA, 14 nt, Molluscum contagiosum virus
ugacggcagcaagc

SEQ ID NO: 3104260 - RNA, 14 nt, Molluscum contagiosum virus
ugacgagcgcgugc

SEQ ID NO: 3104261 - RNA, 17 nt, Molluscum contagiosum virus
ugaccucgcugcugagc

SEQ ID NO: 3104262 - RNA, 16 nt, Molluscum contagiosum virus
ugaccagugcgugcuc

SEQ ID NO: 3104263 - RNA, 15 nt, Molluscum contagiosum virus
ugaccgacggcgacg

SEQ ID NO: 3104264 - RNA, 18 nt, Molluscum contagiosum virus
ugaccggagcggcggacg

SEQ ID NO: 3104265 - RNA, 14 nt, Molluscum contagiosum virus
ugacgccgcgcgcg

SEQ ID NO: 3104266 - RNA, 12 nt, Molluscum contagiosum virus
ugacgcgcacgc

SEQ ID NO: 3104267 - RNA, 19 nt, Molluscum contagiosum virus
ugacgcguacauccgcgag

SEQ ID NO: 3104268 - RNA, 13 nt, Molluscum contagiosum virus
ugacggagccgcg

SEQ ID NO: 3104269 - RNA, 14 nt, Molluscum contagiosum virus
ugacgaagcugcgc

SEQ ID NO: 3104270 - RNA, 18 nt, Molluscum contagiosum virus
ugacgaagcugcgcuugc

SEQ ID NO: 3104271 - RNA, 17 nt, Molluscum contagiosum virus
ucacggagcgcgcgcag

SEQ ID NO: 3104272 - RNA, 16 nt, Molluscum contagiosum virus
ucacggccuucgcgcu

SEQ ID NO: 3104273 - RNA, 18 nt, Molluscum contagiosum virus
ucacgucaauggcgcgcg

SEQ ID NO: 3104274 - RNA, 20 nt, Molluscum contagiosum virus
ucacgucaauggcgcgcgag

SEQ ID NO: 3104275 - RNA, 22 nt, Molluscum contagiosum virus
ucacgugcugaucacgcucgcg

SEQ ID NO: 3104276 - RNA, 13 nt, Molluscum contagiosum virus
ucacucgcucgcg

SEQ ID NO: 3104277 - RNA, 15 nt, Molluscum contagiosum virus
ucacgcucgcgacgu

SEQ ID NO: 3104278 - RNA, 23 nt, Molluscum contagiosum virus
ucacgcugcccgcgccgcccgug

SEQ ID NO: 3104279 - RNA, 15 nt, Molluscum contagiosum virus
ucacgcugcgcucgg

SEQ ID NO: 3104280 - RNA, 19 nt, Molluscum contagiosum virus
ucacgcgcuaccgcaagcu

SEQ ID NO: 3104281 - RNA, 16 nt, Molluscum contagiosum virus
ucacgcgcuucgugga

SEQ ID NO: 3104282 - RNA, 18 nt, Molluscum contagiosum virus
ucacgaugugcgcgcgac

SEQ ID NO: 3104283 - RNA, 16 nt, Molluscum contagiosum virus
ucagcacacgucggag

SEQ ID NO: 3104284 - RNA, 13 nt, Molluscum contagiosum virus
ucagcagcgcgag

SEQ ID NO: 3104285 - RNA, 15 nt, Molluscum contagiosum virus
ucagccccgcgccag

SEQ ID NO: 3104286 - RNA, 18 nt, Molluscum contagiosum virus
ucagccccgggcccgcau

SEQ ID NO: 3104287 - RNA, 13 nt, Molluscum contagiosum virus
ucagccgagcgcc

SEQ ID NO: 3104288 - RNA, 19 nt, Molluscum contagiosum virus
ucagccgagcgccgccagc

SEQ ID NO: 3104289 - RNA, 13 nt, Molluscum contagiosum virus
ucagaacgacacc

SEQ ID NO: 3104290 - RNA, 22 nt, Molluscum contagiosum virus
ucacuucucggaagcgcccgug

SEQ ID NO: 3104291 - RNA, 12 nt, Molluscum contagiosum virus
ucacuuucgcgc

SEQ ID NO: 3104292 - RNA, 13 nt, Molluscum contagiosum virus
ucacuuucgcgcg

SEQ ID NO: 3104293 - RNA, 15 nt, Molluscum contagiosum virus
ucacuuucgcgcgca

SEQ ID NO: 3104294 - RNA, 16 nt, Molluscum contagiosum virus
ucacuuucgcgcgcac

SEQ ID NO: 3104295 - RNA, 14 nt, Molluscum contagiosum virus
ucagcgucgacggc

SEQ ID NO: 3104296 - RNA, 14 nt, Molluscum contagiosum virus
ucagcuucauggag

SEQ ID NO: 3104297 - RNA, 20 nt, Molluscum contagiosum virus
ucaggacaaagucgcgcgcg

SEQ ID NO: 3104298 - RNA, 23 nt, Molluscum contagiosum virus
ucaggacgcaggacgcggucgcg

SEQ ID NO: 3104299 - RNA, 19 nt, Molluscum contagiosum virus
ucaggcaaaagccgccgcg

SEQ ID NO: 3104300 - RNA, 23 nt, Molluscum contagiosum virus
ucaggcaaaagccgccgcgcgcg

SEQ ID NO: 3104301 - RNA, 12 nt, Molluscum contagiosum virus
ucagcgcgcgca

SEQ ID NO: 3104302 - RNA, 13 nt, Molluscum contagiosum virus
ucagcgcgcgcag

SEQ ID NO: 3104303 - RNA, 19 nt, Molluscum contagiosum virus
ucagcggcacugcgcgcau

SEQ ID NO: 3104304 - RNA, 13 nt, Molluscum contagiosum virus
ucagcggcggucu

SEQ ID NO: 3104305 - RNA, 17 nt, Molluscum contagiosum virus
ucagccucugugcggcg

SEQ ID NO: 3104306 - RNA, 14 nt, Molluscum contagiosum virus
ugacaggcgcgcaa

SEQ ID NO: 3104307 - RNA, 20 nt, Molluscum contagiosum virus
ugacagucagcggcgugcug

SEQ ID NO: 3104308 - RNA, 12 nt, Molluscum contagiosum virus
ugaaggcgcggc

SEQ ID NO: 3104309 - RNA, 15 nt, Molluscum contagiosum virus
ugacacgcgugucug

SEQ ID NO: 3104310 - RNA, 17 nt, Molluscum contagiosum virus
ugaaccugggcgcgcac

SEQ ID NO: 3104311 - RNA, 12 nt, Molluscum contagiosum virus
ugaacgcgcugc

SEQ ID NO: 3104312 - RNA, 14 nt, Molluscum contagiosum virus
ugaacucgcugcug

SEQ ID NO: 3104313 - RNA, 13 nt, Molluscum contagiosum virus
ugccggcgcguga

SEQ ID NO: 3104314 - RNA, 22 nt, Molluscum contagiosum virus
ugccgggcuugcucccucgcgc

SEQ ID NO: 3104315 - RNA, 19 nt, Molluscum contagiosum virus
ugccggggaugaacgcgcu

SEQ ID NO: 3104316 - RNA, 23 nt, Molluscum contagiosum virus
ugccggggaugaacgcgcugcgc

SEQ ID NO: 3104317 - RNA, 15 nt, Molluscum contagiosum virus
ugcgugcgcugcgcg

SEQ ID NO: 3104318 - RNA, 21 nt, Molluscum contagiosum virus
ugcgugguguccacgcgcgug

SEQ ID NO: 3104319 - RNA, 21 nt, Molluscum contagiosum virus
ugcguguuggcuucugcgcgg

SEQ ID NO: 3104320 - RNA, 21 nt, Molluscum contagiosum virus
ugccggcaacgcugccgcugg

SEQ ID NO: 3104321 - RNA, 19 nt, Molluscum contagiosum virus
ugccggcgcaaucucgcgg

SEQ ID NO: 3104322 - RNA, 12 nt, Molluscum contagiosum virus
ugccgcgugcuc

SEQ ID NO: 3104323 - RNA, 14 nt, Molluscum contagiosum virus
ugccgcugcgcugg

SEQ ID NO: 3104324 - RNA, 24 nt, Molluscum contagiosum virus
ugccggaaauagcgcgcuagcucc

SEQ ID NO: 3104325 - RNA, 19 nt, Molluscum contagiosum virus
ugccgccgccgcgaggacc

SEQ ID NO: 3104326 - RNA, 14 nt, Molluscum contagiosum virus
ugccgccucggacg

SEQ ID NO: 3104327 - RNA, 18 nt, Molluscum contagiosum virus
ugccgcgcgcuacgcgcc

SEQ ID NO: 3104328 - RNA, 14 nt, Molluscum contagiosum virus
ugccgcggcacugg

SEQ ID NO: 3104329 - RNA, 13 nt, Molluscum contagiosum virus
ugcccccgaggug

SEQ ID NO: 3104330 - RNA, 18 nt, Molluscum contagiosum virus
ugcccccgagguggccaa

SEQ ID NO: 3104331 - RNA, 13 nt, Molluscum contagiosum virus
ugccccgcgcgcc

SEQ ID NO: 3104332 - RNA, 16 nt, Molluscum contagiosum virus
ugcccgcgcgcggaca

SEQ ID NO: 3104333 - RNA, 14 nt, Molluscum contagiosum virus
ugcccgcgcgcugu

SEQ ID NO: 3104334 - RNA, 22 nt, Molluscum contagiosum virus
ugcccgcuccgcucgcgcgugc

SEQ ID NO: 3104335 - RNA, 14 nt, Molluscum contagiosum virus
ugcccggcagcgag

SEQ ID NO: 3104336 - RNA, 18 nt, Molluscum contagiosum virus
ugcccgguacgcucgcgc

SEQ ID NO: 3104337 - RNA, 14 nt, Molluscum contagiosum virus
ugccgagcgcacgc

SEQ ID NO: 3104338 - RNA, 22 nt, Molluscum contagiosum virus
ugccgagcucugucccgcaagc

SEQ ID NO: 3104339 - RNA, 14 nt, Molluscum contagiosum virus
ugccgaggcgcugc

SEQ ID NO: 3104340 - RNA, 19 nt, Molluscum contagiosum virus
ugccgaggcgcugccgcgg

SEQ ID NO: 3104341 - RNA, 20 nt, Molluscum contagiosum virus
ugcugcccgccuucgacggc

SEQ ID NO: 3104342 - RNA, 18 nt, Molluscum contagiosum virus
ugcugccgcgcggcacgc

SEQ ID NO: 3104343 - RNA, 20 nt, Molluscum contagiosum virus
ugcugccgggagaggaaagg

SEQ ID NO: 3104344 - RNA, 20 nt, Molluscum contagiosum virus
ugcugccucccaagcagcgc

SEQ ID NO: 3104345 - RNA, 14 nt, Molluscum contagiosum virus
ugcugcgcagcauc

SEQ ID NO: 3104346 - RNA, 13 nt, Molluscum contagiosum virus
ugcugcgccacgu

SEQ ID NO: 3104347 - RNA, 19 nt, Molluscum contagiosum virus
ugcugcgccacgugcgcau

SEQ ID NO: 3104348 - RNA, 11 nt, Molluscum contagiosum virus
ugcugcgcgac

SEQ ID NO: 3104349 - RNA, 13 nt, Molluscum contagiosum virus
ugcugcgcgccgc

SEQ ID NO: 3104350 - RNA, 15 nt, Molluscum contagiosum virus
ugcugcgcgcgccau

SEQ ID NO: 3104351 - RNA, 13 nt, Molluscum contagiosum virus
ugcugcgcgcgcu

SEQ ID NO: 3104352 - RNA, 15 nt, Molluscum contagiosum virus
ugcugcgcggcgccg

SEQ ID NO: 3104353 - RNA, 22 nt, Molluscum contagiosum virus
ugcugcgcuucgccgcgcgcgc

SEQ ID NO: 3104354 - RNA, 19 nt, Molluscum contagiosum virus
ugcugcggcaaccgcgccc

SEQ ID NO: 3104355 - RNA, 15 nt, Molluscum contagiosum virus
ugcugcggcugcugg

SEQ ID NO: 3104356 - RNA, 17 nt, Molluscum contagiosum virus
ugcugcgugcgcgcgau

SEQ ID NO: 3104357 - RNA, 23 nt, Molluscum contagiosum virus
ugcugcucaaggacuaccagcuc

SEQ ID NO: 3104358 - RNA, 14 nt, Molluscum contagiosum virus
ugcugcucgacggg

SEQ ID NO: 3104359 - RNA, 18 nt, Molluscum contagiosum virus
ugcugcucgcacccgcgc

SEQ ID NO: 3104360 - RNA, 15 nt, Molluscum contagiosum virus
ugcugcugcgcgcgc

SEQ ID NO: 3104361 - RNA, 22 nt, Molluscum contagiosum virus
ugcugcuuguugugggcucgcg

SEQ ID NO: 3104362 - RNA, 15 nt, Molluscum contagiosum virus
ugcuggacacucgcg

SEQ ID NO: 3104363 - RNA, 15 nt, Molluscum contagiosum virus
ugcuggacgcgcacg

SEQ ID NO: 3104364 - RNA, 16 nt, Molluscum contagiosum virus
ugcuggacgcgcacgc

SEQ ID NO: 3104365 - RNA, 15 nt, Molluscum contagiosum virus
ugcuggacgggcacg

SEQ ID NO: 3104366 - RNA, 14 nt, Molluscum contagiosum virus
ugcuggagcggcau

SEQ ID NO: 3104367 - RNA, 14 nt, Molluscum contagiosum virus
ugcuggagggcacg

SEQ ID NO: 3104368 - RNA, 15 nt, Molluscum contagiosum virus
ugcuggagggcacgc

SEQ ID NO: 3104369 - RNA, 19 nt, Molluscum contagiosum virus
ugcuggcaccgcgcgcgcu

SEQ ID NO: 3104370 - RNA, 22 nt, Molluscum contagiosum virus
ugcuggcgaaaccugggcgccg

SEQ ID NO: 3104371 - RNA, 19 nt, Molluscum contagiosum virus
ugcuggcgagcacguccuc

SEQ ID NO: 3104372 - RNA, 12 nt, Molluscum contagiosum virus
ugcuggcgcgcu

SEQ ID NO: 3104373 - RNA, 19 nt, Molluscum contagiosum virus
ugcuggcgcucgcgcgcac

SEQ ID NO: 3104374 - RNA, 22 nt, Molluscum contagiosum virus
ugcuggcgcucgcgcgcacgcg

SEQ ID NO: 3104375 - RNA, 15 nt, Molluscum contagiosum virus
ugcuggcggggcugg

SEQ ID NO: 3104376 - RNA, 12 nt, Molluscum contagiosum virus
ugcugggcgugg

SEQ ID NO: 3104377 - RNA, 20 nt, Molluscum contagiosum virus
ugcuggucaagaaggcgcug

SEQ ID NO: 3104378 - RNA, 15 nt, Molluscum contagiosum virus
ugcugguggugcugg

SEQ ID NO: 3104379 - RNA, 15 nt, Molluscum contagiosum virus
ugcugugccugcgca

SEQ ID NO: 3104380 - RNA, 19 nt, Molluscum contagiosum virus
ugcuguugccgcgcucgug

SEQ ID NO: 3104381 - RNA, 11 nt, Molluscum contagiosum virus
uggaccugauu

SEQ ID NO: 3104382 - RNA, 11 nt, Molluscum contagiosum virus
uggacgcgcaa

SEQ ID NO: 3104383 - RNA, 11 nt, Molluscum contagiosum virus
uggacgcgcac

SEQ ID NO: 3104384 - RNA, 14 nt, Molluscum contagiosum virus
uggacgcgcacgcg

SEQ ID NO: 3104385 - RNA, 17 nt, Molluscum contagiosum virus
uggacgcgccgcgcgag

SEQ ID NO: 3104386 - RNA, 20 nt, Molluscum contagiosum virus
uggacgcgccgcgcgagugc

SEQ ID NO: 3104387 - RNA, 19 nt, Molluscum contagiosum virus
uggacgaugguggcgcugc

SEQ ID NO: 3104388 - RNA, 21 nt, Molluscum contagiosum virus
uggacgaugguggcgcugcug

SEQ ID NO: 3104389 - RNA, 21 nt, Molluscum contagiosum virus
uggacgcacagggcugcgugg

SEQ ID NO: 3104390 - RNA, 19 nt, Molluscum contagiosum virus
uggacgacaugcugugcgg

SEQ ID NO: 3104391 - RNA, 14 nt, Molluscum contagiosum virus
uggacgagcagagc

SEQ ID NO: 3104392 - RNA, 20 nt, Molluscum contagiosum virus
uggacgagcgcuaccugaug

SEQ ID NO: 3104393 - RNA, 20 nt, Molluscum contagiosum virus
uggacacgcacuggcgcugc

SEQ ID NO: 3104394 - RNA, 16 nt, Molluscum contagiosum virus
uggacacgcugcgcgu

SEQ ID NO: 3104395 - RNA, 20 nt, Molluscum contagiosum virus
uggacacgcugcgcgugcug

SEQ ID NO: 3104396 - RNA, 17 nt, Molluscum contagiosum virus
uggacacgugcguggug

SEQ ID NO: 3104397 - RNA, 17 nt, Molluscum contagiosum virus
uggacagcaagcagcgc

SEQ ID NO: 3104398 - RNA, 21 nt, Molluscum contagiosum virus
uggacagcaagcagcgcgcgc

SEQ ID NO: 3104399 - RNA, 23 nt, Molluscum contagiosum virus
uggacagccugcaccgagugcug

SEQ ID NO: 3104400 - RNA, 18 nt, Molluscum contagiosum virus
uggaacaggugcgcaagc

SEQ ID NO: 3104401 - RNA, 13 nt, Molluscum contagiosum virus
uggaaaggaggcu

SEQ ID NO: 3104402 - RNA, 22 nt, Molluscum contagiosum virus
ugcguuggcgccagccuggcgg

SEQ ID NO: 3104403 - RNA, 14 nt, Molluscum contagiosum virus
ugcuacaggacguc

SEQ ID NO: 3104404 - RNA, 20 nt, Molluscum contagiosum virus
ugcuacgucgcggcgcacgg

SEQ ID NO: 3104405 - RNA, 21 nt, Molluscum contagiosum virus
ugcuagcccgcaccugcgccg

SEQ ID NO: 3104406 - RNA, 17 nt, Molluscum contagiosum virus
ugcuagcgacgcggaca

SEQ ID NO: 3104407 - RNA, 23 nt, Molluscum contagiosum virus
ugcucgagauucguggcgagcau

SEQ ID NO: 3104408 - RNA, 16 nt, Molluscum contagiosum virus
ugcucgcaggcggugg

SEQ ID NO: 3104409 - RNA, 16 nt, Molluscum contagiosum virus
ugcucugugcgcgcag

SEQ ID NO: 3104410 - RNA, 14 nt, Molluscum contagiosum virus
ugcucuuccaggag

SEQ ID NO: 3104411 - RNA, 15 nt, Molluscum contagiosum virus
ugcugaagacgcugg

SEQ ID NO: 3104412 - RNA, 19 nt, Molluscum contagiosum virus
ugcugcacagcuuccugga

SEQ ID NO: 3104413 - RNA, 15 nt, Molluscum contagiosum virus
ugcugcagcugcgcg

SEQ ID NO: 3104414 - RNA, 13 nt, Molluscum contagiosum virus
ugcugcaggcgua

SEQ ID NO: 3104415 - RNA, 22 nt, Molluscum contagiosum virus
ugcugcaguaugaaucuacggc

SEQ ID NO: 3104416 - RNA, 14 nt, Molluscum contagiosum virus
ugcuucugcgcugg

SEQ ID NO: 3104417 - RNA, 13 nt, Molluscum contagiosum virus
ugcuugcgcacga

SEQ ID NO: 3104418 - RNA, 16 nt, Molluscum contagiosum virus
ugcuugugcgccugug

SEQ ID NO: 3104419 - RNA, 19 nt, Molluscum contagiosum virus
ugcuuuuucugugcgccuu

SEQ ID NO: 3104420 - RNA, 14 nt, Molluscum contagiosum virus
ugcucgcgcucgcg

SEQ ID NO: 3104421 - RNA, 20 nt, Molluscum contagiosum virus
ugcucgcggagggcagcauc

SEQ ID NO: 3104422 - RNA, 17 nt, Molluscum contagiosum virus
ugcucgcgugcgugcug

SEQ ID NO: 3104423 - RNA, 16 nt, Molluscum contagiosum virus
ugcucggacacacgca

SEQ ID NO: 3104424 - RNA, 17 nt, Molluscum contagiosum virus
ugcucggacacacgcac

SEQ ID NO: 3104425 - RNA, 21 nt, Molluscum contagiosum virus
ugcucgguagcguggagcugg

SEQ ID NO: 3104426 - RNA, 18 nt, Molluscum contagiosum virus
ugcucuaccuggugcugg

SEQ ID NO: 3104427 - RNA, 22 nt, Molluscum contagiosum virus
ugcucuacuggcggcgcccgug

SEQ ID NO: 3104428 - RNA, 20 nt, Molluscum contagiosum virus
ugcucucgcugcugcccaua

SEQ ID NO: 3104429 - RNA, 15 nt, Molluscum contagiosum virus
ugcucaugcgcaagc

SEQ ID NO: 3104430 - RNA, 15 nt, Molluscum contagiosum virus
ugcuccacgcgcagc

SEQ ID NO: 3104431 - RNA, 17 nt, Molluscum contagiosum virus
ugcucccgaggcgcgcu

SEQ ID NO: 3104432 - RNA, 17 nt, Molluscum contagiosum virus
ugcucccucgcgcgcag

SEQ ID NO: 3104433 - RNA, 13 nt, Molluscum contagiosum virus
ugcucccucucga

SEQ ID NO: 3104434 - RNA, 12 nt, Molluscum contagiosum virus
ugcuccgaggag

SEQ ID NO: 3104435 - RNA, 15 nt, Molluscum contagiosum virus
ugcuccgaggaggca

SEQ ID NO: 3104436 - RNA, 19 nt, Molluscum contagiosum virus
gugcgcagcauucccggcg

SEQ ID NO: 3104437 - RNA, 16 nt, Molluscum contagiosum virus
gugcgagaucgacugc

SEQ ID NO: 3104438 - RNA, 13 nt, Molluscum contagiosum virus
gugcgagcacgag

SEQ ID NO: 3104439 - RNA, 21 nt, Molluscum contagiosum virus
gugcgcacagacggcgcgcuc

SEQ ID NO: 3104440 - RNA, 16 nt, Molluscum contagiosum virus
gugcgcacaugccgag

SEQ ID NO: 3104441 - RNA, 12 nt, Molluscum contagiosum virus
gugcgcaccauc

SEQ ID NO: 3104442 - RNA, 20 nt, Molluscum contagiosum virus
gugccuccgcggacgcgccc

SEQ ID NO: 3104443 - RNA, 17 nt, Molluscum contagiosum virus
gugcgaccugcugcgag

SEQ ID NO: 3104444 - RNA, 16 nt, Molluscum contagiosum virus
gugccguucacgcaca

SEQ ID NO: 3104445 - RNA, 15 nt, Molluscum contagiosum virus
guccgcgggcgcacg

SEQ ID NO: 3104446 - RNA, 19 nt, Molluscum contagiosum virus
guccgcgggcgcgcgccag

SEQ ID NO: 3104447 - RNA, 19 nt, Molluscum contagiosum virus
gugcgcgacggcgagcucu

SEQ ID NO: 3104448 - RNA, 14 nt, Molluscum contagiosum virus
gugcgcgacgggcu

SEQ ID NO: 3104449 - RNA, 15 nt, Molluscum contagiosum virus
gugcgcgagcugagg

SEQ ID NO: 3104450 - RNA, 13 nt, Molluscum contagiosum virus
gugcgccgcgccc

SEQ ID NO: 3104451 - RNA, 15 nt, Molluscum contagiosum virus
gugcgccgcgcccgc

SEQ ID NO: 3104452 - RNA, 21 nt, Molluscum contagiosum virus
gugcgccucggacuucgacgc

SEQ ID NO: 3104453 - RNA, 14 nt, Molluscum contagiosum virus
gugcgcgcugcacg

SEQ ID NO: 3104454 - RNA, 22 nt, Molluscum contagiosum virus
gugcgcgcugcacgccgccagc

SEQ ID NO: 3104455 - RNA, 13 nt, Molluscum contagiosum virus
gugcgcgcugcgc

SEQ ID NO: 3104456 - RNA, 18 nt, Molluscum contagiosum virus
gugcgcgcugcgcgcgcu

SEQ ID NO: 3104457 - RNA, 19 nt, Molluscum contagiosum virus
gugcgcgcugcgcgcgcuc

SEQ ID NO: 3104458 - RNA, 15 nt, Molluscum contagiosum virus
gugcgccaguccgcg

SEQ ID NO: 3104459 - RNA, 22 nt, Molluscum contagiosum virus
gugcgcgguggugcugggcgug

SEQ ID NO: 3104460 - RNA, 17 nt, Molluscum contagiosum virus
gugcgcgugacacaccg

SEQ ID NO: 3104461 - RNA, 16 nt, Molluscum contagiosum virus
gugcgcgugcgccugc

SEQ ID NO: 3104462 - RNA, 14 nt, Molluscum contagiosum virus
gugcgcuacguggc

SEQ ID NO: 3104463 - RNA, 21 nt, Molluscum contagiosum virus
gugcgcucgcuagaggacgcc

SEQ ID NO: 3104464 - RNA, 17 nt, Molluscum contagiosum virus
gugcgcuggcgcgcgcg

SEQ ID NO: 3104465 - RNA, 12 nt, Molluscum contagiosum virus
gugcggagagcc

SEQ ID NO: 3104466 - RNA, 19 nt, Molluscum contagiosum virus
gugcggccaccagcgcggc

SEQ ID NO: 3104467 - RNA, 18 nt, Molluscum contagiosum virus
ggucgccuacgaggugcg

SEQ ID NO: 3104468 - RNA, 19 nt, Molluscum contagiosum virus
ggucgccuacgaggugcgc

SEQ ID NO: 3104469 - RNA, 20 nt, Molluscum contagiosum virus
ggucgagcgcgccgcgcgcu

SEQ ID NO: 3104470 - RNA, 21 nt, Molluscum contagiosum virus
ggucgagcgcgccgcgcgcuc

SEQ ID NO: 3104471 - RNA, 17 nt, Molluscum contagiosum virus
ggucgaguucacggcga

SEQ ID NO: 3104472 - RNA, 18 nt, Molluscum contagiosum virus
ggcacaugcagcugcagg

SEQ ID NO: 3104473 - RNA, 17 nt, Molluscum contagiosum virus
ggcacauggacggcgcc

SEQ ID NO: 3104474 - RNA, 20 nt, Molluscum contagiosum virus
ggucgacgacgcgcgcacgu

SEQ ID NO: 3104475 - RNA, 15 nt, Molluscum contagiosum virus
ggucgacgagugcgc

SEQ ID NO: 3104476 - RNA, 20 nt, Molluscum contagiosum virus
ggugccgccgugggcgccgc

SEQ ID NO: 3104477 - RNA, 12 nt, Molluscum contagiosum virus
ggugccgcgcgc

SEQ ID NO: 3104478 - RNA, 19 nt, Molluscum contagiosum virus
ggugccguccccgcgcuca

SEQ ID NO: 3104479 - RNA, 20 nt, Molluscum contagiosum virus
ggugccuggcguccgcacgc

SEQ ID NO: 3104480 - RNA, 21 nt, Molluscum contagiosum virus
ggugccuggcguccgcacgca

SEQ ID NO: 3104481 - RNA, 15 nt, Molluscum contagiosum virus
ggugcgcccgcggca

SEQ ID NO: 3104482 - RNA, 17 nt, Molluscum contagiosum virus
ggugcgcgacgggcucu

SEQ ID NO: 3104483 - RNA, 13 nt, Molluscum contagiosum virus
ggugcgcgcgcgc

SEQ ID NO: 3104484 - RNA, 14 nt, Molluscum contagiosum virus
ggugcgcgcgcgcg

SEQ ID NO: 3104485 - RNA, 17 nt, Molluscum contagiosum virus
gguggcaggcgcgcgcg

SEQ ID NO: 3104486 - RNA, 14 nt, Molluscum contagiosum virus
gguggccaagcgcu

SEQ ID NO: 3104487 - RNA, 14 nt, Molluscum contagiosum virus
gguggccgcgcgcg

SEQ ID NO: 3104488 - RNA, 14 nt, Molluscum contagiosum virus
ggugcugcgcacgg

SEQ ID NO: 3104489 - RNA, 20 nt, Molluscum contagiosum virus
ggugcugcgccacgugcgca

SEQ ID NO: 3104490 - RNA, 12 nt, Molluscum contagiosum virus
ggugcuggccau

SEQ ID NO: 3104491 - RNA, 21 nt, Molluscum contagiosum virus
gguggaagagcccgcacacgc

SEQ ID NO: 3104492 - RNA, 17 nt, Molluscum contagiosum virus
ggugcacgugcugcagc

SEQ ID NO: 3104493 - RNA, 14 nt, Molluscum contagiosum virus
ggugagugcgcgca

SEQ ID NO: 3104494 - RNA, 16 nt, Molluscum contagiosum virus
gguguucugcgcgccg

SEQ ID NO: 3104495 - RNA, 16 nt, Molluscum contagiosum virus
ggugucgagcucgcgc

SEQ ID NO: 3104496 - RNA, 23 nt, Molluscum contagiosum virus
ggugucgagcucgcgcgccagca

SEQ ID NO: 3104497 - RNA, 17 nt, Molluscum contagiosum virus
gucagccgcacggcgcc

SEQ ID NO: 3104498 - RNA, 18 nt, Molluscum contagiosum virus
gucagccucugugcggcg

SEQ ID NO: 3104499 - RNA, 17 nt, Molluscum contagiosum virus
gucacugcuagugcugg

SEQ ID NO: 3104500 - RNA, 17 nt, Molluscum contagiosum virus
gguucacuagcgcaggc

SEQ ID NO: 3104501 - RNA, 17 nt, Molluscum contagiosum virus
gucagcggcgugcugca

SEQ ID NO: 3104502 - RNA, 20 nt, Molluscum contagiosum virus
guccagccgcaccgggacga

SEQ ID NO: 3104503 - RNA, 16 nt, Molluscum contagiosum virus
gucaucgggcugcagc

SEQ ID NO: 3104504 - RNA, 14 nt, Molluscum contagiosum virus
gucaugcgcgcgcg

SEQ ID NO: 3104505 - RNA, 16 nt, Molluscum contagiosum virus
guccaacccgcggcgc

SEQ ID NO: 3104506 - RNA, 20 nt, Molluscum contagiosum virus
guccaacccgcggcgcgccg

SEQ ID NO: 3104507 - RNA, 17 nt, Molluscum contagiosum virus
guccaccagcacgaagc

SEQ ID NO: 3104508 - RNA, 22 nt, Molluscum contagiosum virus
guccacgugguccaccagcacg

SEQ ID NO: 3104509 - RNA, 19 nt, Molluscum contagiosum virus
guccagcgcguccaugcug

SEQ ID NO: 3104510 - RNA, 16 nt, Molluscum contagiosum virus
guccagcggcugcccg

SEQ ID NO: 3104511 - RNA, 13 nt, Molluscum contagiosum virus
guccaugcccacg

SEQ ID NO: 3104512 - RNA, 19 nt, Molluscum contagiosum virus
gucccagcaccgcgccgcg

SEQ ID NO: 3104513 - RNA, 17 nt, Molluscum contagiosum virus
guccagcuucucgaagg

SEQ ID NO: 3104514 - RNA, 17 nt, Molluscum contagiosum virus
guccaucaaggccuacg

SEQ ID NO: 3104515 - RNA, 16 nt, Molluscum contagiosum virus
gugccgccgugggcgc

SEQ ID NO: 3104516 - RNA, 20 nt, Molluscum contagiosum virus
gugccgccgugggcgccgcg

SEQ ID NO: 3104517 - RNA, 16 nt, Molluscum contagiosum virus
gugccgcucgcugucc

SEQ ID NO: 3104518 - RNA, 18 nt, Molluscum contagiosum virus
gugccgcucggaggcuug

SEQ ID NO: 3104519 - RNA, 16 nt, Molluscum contagiosum virus
gugccguccccgcgcu

SEQ ID NO: 3104520 - RNA, 16 nt, Molluscum contagiosum virus
gugcccuacgcgcgcg

SEQ ID NO: 3104521 - RNA, 15 nt, Molluscum contagiosum virus
gugccgacgugugcc

SEQ ID NO: 3104522 - RNA, 17 nt, Molluscum contagiosum virus
gugccgacgugugccgc

SEQ ID NO: 3104523 - RNA, 18 nt, Molluscum contagiosum virus
gugccugcaagaggcgcu

SEQ ID NO: 3104524 - RNA, 19 nt, Molluscum contagiosum virus
gugccugcaagaggcgcug

SEQ ID NO: 3104525 - RNA, 19 nt, Molluscum contagiosum virus
gugccugccaucuacgagc

SEQ ID NO: 3104526 - RNA, 15 nt, Molluscum contagiosum virus
gugccuggcuugcgc

SEQ ID NO: 3104527 - RNA, 20 nt, Molluscum contagiosum virus
gugccuggcuugcgcgcgcc

SEQ ID NO: 3104528 - RNA, 17 nt, Molluscum contagiosum virus
gugccugucucgcaagc

SEQ ID NO: 3104529 - RNA, 18 nt, Molluscum contagiosum virus
gugccugucucgcaagca

SEQ ID NO: 3104530 - RNA, 18 nt, Molluscum contagiosum virus
gugccuguggcgcacacg

SEQ ID NO: 3104531 - RNA, 21 nt, Molluscum contagiosum virus
gugcgaacacggauacgcgca

SEQ ID NO: 3104532 - RNA, 12 nt, Molluscum contagiosum virus
gugcgaagggcu

SEQ ID NO: 3104533 - RNA, 19 nt, Molluscum contagiosum virus
guccgacaccagcggcagg

SEQ ID NO: 3104534 - RNA, 21 nt, Molluscum contagiosum virus
guccgacaccggacgaaaggu

SEQ ID NO: 3104535 - RNA, 13 nt, Molluscum contagiosum virus
guccgcacgcaca

SEQ ID NO: 3104536 - RNA, 18 nt, Molluscum contagiosum virus
guccgcagcggcgccacc

SEQ ID NO: 3104537 - RNA, 21 nt, Molluscum contagiosum virus
guccgcaggcgucaugcgcgc

SEQ ID NO: 3104538 - RNA, 17 nt, Molluscum contagiosum virus
ggcaaccgcgacgagca

SEQ ID NO: 3104539 - RNA, 19 nt, Molluscum contagiosum virus
ggcaaccgcgacgagcaga

SEQ ID NO: 3104540 - RNA, 20 nt, Molluscum contagiosum virus
ggcaaccgcgcccgcgcgcu

SEQ ID NO: 3104541 - RNA, 14 nt, Molluscum contagiosum virus
ggcaagccgagcca

SEQ ID NO: 3104542 - RNA, 17 nt, Molluscum contagiosum virus
ggcaagcgcgcucgggc

SEQ ID NO: 3104543 - RNA, 20 nt, Molluscum contagiosum virus
ggcaagcucccgcugcgcuu

SEQ ID NO: 3104544 - RNA, 19 nt, Molluscum contagiosum virus
ggcaaggcguaagagcgug

SEQ ID NO: 3104545 - RNA, 15 nt, Molluscum contagiosum virus
ggcaaucgcgugcuu

SEQ ID NO: 3104546 - RNA, 18 nt, Molluscum contagiosum virus
ggcaaugccgaugcuagc

SEQ ID NO: 3104547 - RNA, 22 nt, Molluscum contagiosum virus
ggcaauguuugcggaugcucgc

SEQ ID NO: 3104548 - RNA, 20 nt, Molluscum contagiosum virus
ggcacacacuugcacgcgca

SEQ ID NO: 3104549 - RNA, 13 nt, Molluscum contagiosum virus
ggaugccugucuu

SEQ ID NO: 3104550 - RNA, 22 nt, Molluscum contagiosum virus
ggcaaagccugcugcgcgcgcc

SEQ ID NO: 3104551 - RNA, 20 nt, Molluscum contagiosum virus
ggcaaagcggggcgcgcgcc

SEQ ID NO: 3104552 - RNA, 22 nt, Molluscum contagiosum virus
ggauaccaugcucucgcugcug

SEQ ID NO: 3104553 - RNA, 12 nt, Molluscum contagiosum virus
ggauacgcgcac

SEQ ID NO: 3104554 - RNA, 16 nt, Molluscum contagiosum virus
ggagucacgaccgacc

SEQ ID NO: 3104555 - RNA, 17 nt, Molluscum contagiosum virus
ggaguccaugcccacgc

SEQ ID NO: 3104556 - RNA, 22 nt, Molluscum contagiosum virus
ggaggucugcuuugucugcagg

SEQ ID NO: 3104557 - RNA, 20 nt, Molluscum contagiosum virus
ggaucacgaugugcgcgcga

SEQ ID NO: 3104558 - RNA, 13 nt, Molluscum contagiosum virus
ggaucacggcucu

SEQ ID NO: 3104559 - RNA, 17 nt, Molluscum contagiosum virus
ggaucagccccgcgcca

SEQ ID NO: 3104560 - RNA, 15 nt, Molluscum contagiosum virus
ggaugaacgcgcugc

SEQ ID NO: 3104561 - RNA, 14 nt, Molluscum contagiosum virus
ggagggucacgcgc

SEQ ID NO: 3104562 - RNA, 19 nt, Molluscum contagiosum virus
ggagguaguaguacggcac

SEQ ID NO: 3104563 - RNA, 14 nt, Molluscum contagiosum virus
ggaggacacgcgca

SEQ ID NO: 3104564 - RNA, 17 nt, Molluscum contagiosum virus
ggaggaccgcgagcgca

SEQ ID NO: 3104565 - RNA, 20 nt, Molluscum contagiosum virus
ggaggaccgcgagcgcaugc

SEQ ID NO: 3104566 - RNA, 20 nt, Molluscum contagiosum virus
ggaggaucgcuacgugcgca

SEQ ID NO: 3104567 - RNA, 19 nt, Molluscum contagiosum virus
ggaggccgucuucgccggc

SEQ ID NO: 3104568 - RNA, 16 nt, Molluscum contagiosum virus
ggaggcggcacugcua

SEQ ID NO: 3104569 - RNA, 20 nt, Molluscum contagiosum virus
ggaggcggcacugcuagcga

SEQ ID NO: 3104570 - RNA, 16 nt, Molluscum contagiosum virus
ggaggcguccugcggg

SEQ ID NO: 3104571 - RNA, 15 nt, Molluscum contagiosum virus
ggaggcucgagcgcg

SEQ ID NO: 3104572 - RNA, 15 nt, Molluscum contagiosum virus
gcuuggccggaacgc

SEQ ID NO: 3104573 - RNA, 14 nt, Molluscum contagiosum virus
ggagcugcggacgc

SEQ ID NO: 3104574 - RNA, 16 nt, Molluscum contagiosum virus
gcuucuuugcgcgcau

SEQ ID NO: 3104575 - RNA, 19 nt, Molluscum contagiosum virus
gcuugccgugccuagcguu

SEQ ID NO: 3104576 - RNA, 14 nt, Molluscum contagiosum virus
gcuugcggcacgca

SEQ ID NO: 3104577 - RNA, 19 nt, Molluscum contagiosum virus
gcuugcucccucgcgcgca

SEQ ID NO: 3104578 - RNA, 22 nt, Molluscum contagiosum virus
gcuugcucuucgaccucugcuu

SEQ ID NO: 3104579 - RNA, 13 nt, Molluscum contagiosum virus
gcuuccggcacca

SEQ ID NO: 3104580 - RNA, 23 nt, Molluscum contagiosum virus
gcuuccggcaccacgugcgcugg

SEQ ID NO: 3104581 - RNA, 14 nt, Molluscum contagiosum virus
gcuuccggugccgg

SEQ ID NO: 3104582 - RNA, 14 nt, Molluscum contagiosum virus
gcuuccuuuucucc

SEQ ID NO: 3104583 - RNA, 14 nt, Molluscum contagiosum virus
gcuucgccgcgcgc

SEQ ID NO: 3104584 - RNA, 21 nt, Molluscum contagiosum virus
gcuucucgaacuccaggcgca

SEQ ID NO: 3104585 - RNA, 20 nt, Molluscum contagiosum virus
gcuucuggcaaacgcacugu

SEQ ID NO: 3104586 - RNA, 19 nt, Molluscum contagiosum virus
gcuucggcggcugugcccg

SEQ ID NO: 3104587 - RNA, 13 nt, Molluscum contagiosum virus
gcuucgggcucag

SEQ ID NO: 3104588 - RNA, 23 nt, Molluscum contagiosum virus
gcuuagaccuuuacgucgcgcgc

SEQ ID NO: 3104589 - RNA, 17 nt, Molluscum contagiosum virus
gcuuagcacacgcgcgc

SEQ ID NO: 3104590 - RNA, 16 nt, Molluscum contagiosum virus
gcuucauccgcgcgcu

SEQ ID NO: 3104591 - RNA, 15 nt, Molluscum contagiosum virus
gcuucccgaguacua

SEQ ID NO: 3104592 - RNA, 14 nt, Molluscum contagiosum virus
gcuguucgcggcgc

SEQ ID NO: 3104593 - RNA, 18 nt, Molluscum contagiosum virus
gcuguugcugcugccgcg

SEQ ID NO: 3104594 - RNA, 14 nt, Molluscum contagiosum virus
gcugggcguggcgc

SEQ ID NO: 3104595 - RNA, 18 nt, Molluscum contagiosum virus
gcugugagcgcgccgcuc

SEQ ID NO: 3104596 - RNA, 22 nt, Molluscum contagiosum virus
gcugugccuaggaggagaacuc

SEQ ID NO: 3104597 - RNA, 20 nt, Molluscum contagiosum virus
gcuguucaacaucguggcgc

SEQ ID NO: 3104598 - RNA, 21 nt, Molluscum contagiosum virus
gcuggcgugcgcagugcugcg

SEQ ID NO: 3104599 - RNA, 15 nt, Molluscum contagiosum virus
gcuggcggggaaagc

SEQ ID NO: 3104600 - RNA, 16 nt, Molluscum contagiosum virus
gcuggcgggugccgug

SEQ ID NO: 3104601 - RNA, 14 nt, Molluscum contagiosum virus
gcugcccgugcccg

SEQ ID NO: 3104602 - RNA, 20 nt, Molluscum contagiosum virus
gcugcccguggugggccgcg

SEQ ID NO: 3104603 - RNA, 18 nt, Molluscum contagiosum virus
gcuggcgcacuggggcga

SEQ ID NO: 3104604 - RNA, 15 nt, Molluscum contagiosum virus
gcuggcgcccgcgga

SEQ ID NO: 3104605 - RNA, 14 nt, Molluscum contagiosum virus
gcugcccgcgcgcg

SEQ ID NO: 3104606 - RNA, 15 nt, Molluscum contagiosum virus
gcugccagcucgaca

SEQ ID NO: 3104607 - RNA, 14 nt, Molluscum contagiosum virus
gcugcccccgccgc

SEQ ID NO: 3104608 - RNA, 15 nt, Molluscum contagiosum virus
gcuggcgcgcgcgca

SEQ ID NO: 3104609 - RNA, 16 nt, Molluscum contagiosum virus
gcuggcgcgcgcgcaa

SEQ ID NO: 3104610 - RNA, 23 nt, Molluscum contagiosum virus
gcuggcgcguccguucacgggca

SEQ ID NO: 3104611 - RNA, 17 nt, Molluscum contagiosum virus
gcuggcgcucgcgcgca

SEQ ID NO: 3104612 - RNA, 17 nt, Molluscum contagiosum virus
gcuggcgcucggcgugg

SEQ ID NO: 3104613 - RNA, 20 nt, Molluscum contagiosum virus
gcuggcgcucggcguggugc

SEQ ID NO: 3104614 - RNA, 17 nt, Molluscum contagiosum virus
gcuggcggcgcacgcga

SEQ ID NO: 3104615 - RNA, 19 nt, Molluscum contagiosum virus
gcugcaaagcgcggccgcg

SEQ ID NO: 3104616 - RNA, 22 nt, Molluscum contagiosum virus
gcugcaaagcgcggccgcgcuc

SEQ ID NO: 3104617 - RNA, 23 nt, Molluscum contagiosum virus
gcugcaagccagcccgcugcgca

SEQ ID NO: 3104618 - RNA, 16 nt, Molluscum contagiosum virus
gcugcaaggcgcgcgc

SEQ ID NO: 3104619 - RNA, 19 nt, Molluscum contagiosum virus
gcugcaaggcgcgcgcugg

SEQ ID NO: 3104620 - RNA, 19 nt, Molluscum contagiosum virus
gcugcacacaccgcgagca

SEQ ID NO: 3104621 - RNA, 23 nt, Molluscum contagiosum virus
gcugcacaguucacggcgcucgc

SEQ ID NO: 3104622 - RNA, 13 nt, Molluscum contagiosum virus
gcugcaccggcgc

SEQ ID NO: 3104623 - RNA, 14 nt, Molluscum contagiosum virus
gcugcacgugcagc

SEQ ID NO: 3104624 - RNA, 15 nt, Molluscum contagiosum virus
gcugcacgugcagcg

SEQ ID NO: 3104625 - RNA, 18 nt, Molluscum contagiosum virus
gcugcacgugcagcggcg

SEQ ID NO: 3104626 - RNA, 21 nt, Molluscum contagiosum virus
gcugcacuacaaccauggcgc

SEQ ID NO: 3104627 - RNA, 14 nt, Molluscum contagiosum virus
gcugcagagcgugc

SEQ ID NO: 3104628 - RNA, 22 nt, Molluscum contagiosum virus
gcugaugcuagcgugugccgcc

SEQ ID NO: 3104629 - RNA, 19 nt, Molluscum contagiosum virus
gcugaguuacguggccgcg

SEQ ID NO: 3104630 - RNA, 21 nt, Molluscum contagiosum virus
gcugaucaccgaggagccgcg

SEQ ID NO: 3104631 - RNA, 14 nt, Molluscum contagiosum virus
gcggacguggucgc

SEQ ID NO: 3104632 - RNA, 18 nt, Molluscum contagiosum virus
gcggacguggucgcgcgc

SEQ ID NO: 3104633 - RNA, 15 nt, Molluscum contagiosum virus
gcggagcgcacgaag

SEQ ID NO: 3104634 - RNA, 23 nt, Molluscum contagiosum virus
gcggagcgcuagcagggcggcgc

SEQ ID NO: 3104635 - RNA, 20 nt, Molluscum contagiosum virus
gcggagaaaaggaagcuugc

SEQ ID NO: 3104636 - RNA, 21 nt, Molluscum contagiosum virus
gcggagacuuccuugcgcagg

SEQ ID NO: 3104637 - RNA, 14 nt, Molluscum contagiosum virus
gcggagagcagugc

SEQ ID NO: 3104638 - RNA, 18 nt, Molluscum contagiosum virus
gcggagagcagugccgcu

SEQ ID NO: 3104639 - RNA, 21 nt, Molluscum contagiosum virus
gcggagagcagugccgcucgc

SEQ ID NO: 3104640 - RNA, 16 nt, Molluscum contagiosum virus
gcggagaucgccgcgc

SEQ ID NO: 3104641 - RNA, 17 nt, Molluscum contagiosum virus
gcggagaucgccgcgca

SEQ ID NO: 3104642 - RNA, 20 nt, Molluscum contagiosum virus
gcggagaucgccgcgcaagu

SEQ ID NO: 3104643 - RNA, 15 nt, Molluscum contagiosum virus
gcggccguugccgga

SEQ ID NO: 3104644 - RNA, 19 nt, Molluscum contagiosum virus
gcggccucccucgucgcgc

SEQ ID NO: 3104645 - RNA, 19 nt, Molluscum contagiosum virus
gcggauacuucgcgcgucg

SEQ ID NO: 3104646 - RNA, 23 nt, Molluscum contagiosum virus
gcggccuguucuuccaguggcgc

SEQ ID NO: 3104647 - RNA, 16 nt, Molluscum contagiosum virus
gcggagggugcacgcg

SEQ ID NO: 3104648 - RNA, 19 nt, Molluscum contagiosum virus
gcggagggugcacgcgggc

SEQ ID NO: 3104649 - RNA, 21 nt, Molluscum contagiosum virus
gcggaggucgagcgcgccgcg

SEQ ID NO: 3104650 - RNA, 14 nt, Molluscum contagiosum virus
gcggagcuggccac

SEQ ID NO: 3104651 - RNA, 12 nt, Molluscum contagiosum virus
gcggagcugugc

SEQ ID NO: 3104652 - RNA, 20 nt, Molluscum contagiosum virus
gcggagcugugccaucucgc

SEQ ID NO: 3104653 - RNA, 19 nt, Molluscum contagiosum virus
gcggagcugugccgcagca

SEQ ID NO: 3104654 - RNA, 12 nt, Molluscum contagiosum virus
gcggacgcgggc

SEQ ID NO: 3104655 - RNA, 19 nt, Molluscum contagiosum virus
gcggacgcgggccgcgcgc

SEQ ID NO: 3104656 - RNA, 23 nt, Molluscum contagiosum virus
gcggacgaaagcgucgugugcgc

SEQ ID NO: 3104657 - RNA, 13 nt, Molluscum contagiosum virus
gcggacgccggcg

SEQ ID NO: 3104658 - RNA, 14 nt, Molluscum contagiosum virus
gcggacgccggcgc

SEQ ID NO: 3104659 - RNA, 22 nt, Molluscum contagiosum virus
gcggaacuggacgccguugcgc

SEQ ID NO: 3104660 - RNA, 16 nt, Molluscum contagiosum virus
gcggaagcccgagcgc

SEQ ID NO: 3104661 - RNA, 16 nt, Molluscum contagiosum virus
gcggaaguggugcccg

SEQ ID NO: 3104662 - RNA, 18 nt, Molluscum contagiosum virus
gcggacagagcccgcggc

SEQ ID NO: 3104663 - RNA, 20 nt, Molluscum contagiosum virus
gcggacagagcccgcggcgc

SEQ ID NO: 3104664 - RNA, 21 nt, Molluscum contagiosum virus
gcgcuugcucacgcugcgcuc

SEQ ID NO: 3104665 - RNA, 14 nt, Molluscum contagiosum virus
gcgcuucuuugcgc

SEQ ID NO: 3104666 - RNA, 21 nt, Molluscum contagiosum virus
gcgcuucggcucccagcagcg

SEQ ID NO: 3104667 - RNA, 21 nt, Molluscum contagiosum virus
gcgcuucguggacgagcgcua

SEQ ID NO: 3104668 - RNA, 18 nt, Molluscum contagiosum virus
gcgcugugagcgcgccgc

SEQ ID NO: 3104669 - RNA, 14 nt, Molluscum contagiosum virus
gcgcugucgcgcag

SEQ ID NO: 3104670 - RNA, 17 nt, Molluscum contagiosum virus
gcgcuugggcacugcua

SEQ ID NO: 3104671 - RNA, 16 nt, Molluscum contagiosum virus
gcgcuuugcgcggcgu

SEQ ID NO: 3104672 - RNA, 19 nt, Molluscum contagiosum virus
gcggaaaaaaacugcgcac

SEQ ID NO: 3104673 - RNA, 15 nt, Molluscum contagiosum virus
gcggaaacaagcaca

SEQ ID NO: 3104674 - RNA, 12 nt, Molluscum contagiosum virus
gcggcgugcccg

SEQ ID NO: 3104675 - RNA, 15 nt, Molluscum contagiosum virus
gcggcgggugccgcc

SEQ ID NO: 3104676 - RNA, 14 nt, Molluscum contagiosum virus
gcggcgucgcgcgc

SEQ ID NO: 3104677 - RNA, 12 nt, Molluscum contagiosum virus
gcggcgugcagg

SEQ ID NO: 3104678 - RNA, 21 nt, Molluscum contagiosum virus
gcggcgagcgcauucgcgcgc

SEQ ID NO: 3104679 - RNA, 19 nt, Molluscum contagiosum virus
gcggcgcuugauguccgcg

SEQ ID NO: 3104680 - RNA, 20 nt, Molluscum contagiosum virus
gcggcgcuugauguccgcga

SEQ ID NO: 3104681 - RNA, 22 nt, Molluscum contagiosum virus
gcggcgcuuucgcccgccgcgc

SEQ ID NO: 3104682 - RNA, 19 nt, Molluscum contagiosum virus
gcggcggaaguggugcccg

SEQ ID NO: 3104683 - RNA, 13 nt, Molluscum contagiosum virus
gcggcggacagca

SEQ ID NO: 3104684 - RNA, 21 nt, Molluscum contagiosum virus
gcggcgcacaaucucgccggc

SEQ ID NO: 3104685 - RNA, 15 nt, Molluscum contagiosum virus
gcggcgcacgcggcu

SEQ ID NO: 3104686 - RNA, 22 nt, Molluscum contagiosum virus
gcggcgccacgagcgccgcgac

SEQ ID NO: 3104687 - RNA, 22 nt, Molluscum contagiosum virus
gcggcgccgacaacgugcugcu

SEQ ID NO: 3104688 - RNA, 15 nt, Molluscum contagiosum virus
gcggcgccguggcgc

SEQ ID NO: 3104689 - RNA, 20 nt, Molluscum contagiosum virus
gcggcgccugcgccuggcau

SEQ ID NO: 3104690 - RNA, 18 nt, Molluscum contagiosum virus
gcggcgcgacggcgacgc

SEQ ID NO: 3104691 - RNA, 14 nt, Molluscum contagiosum virus
gcggcgcgcccagc

SEQ ID NO: 3104692 - RNA, 13 nt, Molluscum contagiosum virus
gcggcgcgccgcg

SEQ ID NO: 3104693 - RNA, 14 nt, Molluscum contagiosum virus
gcggcgcgccgcgc

SEQ ID NO: 3104694 - RNA, 14 nt, Molluscum contagiosum virus
gcggcgcgccggcc

SEQ ID NO: 3104695 - RNA, 15 nt, Molluscum contagiosum virus
gcggcgcgccggccc

SEQ ID NO: 3104696 - RNA, 23 nt, Molluscum contagiosum virus
gcggcgcgcgcugagcgcggagc

SEQ ID NO: 3104697 - RNA, 18 nt, Molluscum contagiosum virus
gcggcgcguacucgcgcc

SEQ ID NO: 3104698 - RNA, 14 nt, Molluscum contagiosum virus
gcggcgcgugccgc

SEQ ID NO: 3104699 - RNA, 19 nt, Molluscum contagiosum virus
gcggcgcgugccgcugcgc

SEQ ID NO: 3104700 - RNA, 15 nt, Molluscum contagiosum virus
gcggcgcgugcugag

SEQ ID NO: 3104701 - RNA, 14 nt, Molluscum contagiosum virus
gcggcgcgugucgc

SEQ ID NO: 3104702 - RNA, 15 nt, Molluscum contagiosum virus
gcggcgcgugucgcg

SEQ ID NO: 3104703 - RNA, 17 nt, Molluscum contagiosum virus
gcggcgcgugucgcgga

SEQ ID NO: 3104704 - RNA, 19 nt, Molluscum contagiosum virus
gcggcgcguuuucgcggcc

SEQ ID NO: 3104705 - RNA, 16 nt, Molluscum contagiosum virus
gcggcgcucguggcgc

SEQ ID NO: 3104706 - RNA, 17 nt, Molluscum contagiosum virus
gcggcgcucguggcgcg

SEQ ID NO: 3104707 - RNA, 15 nt, Molluscum contagiosum virus
gcggcgcucugccac

SEQ ID NO: 3104708 - RNA, 23 nt, Molluscum contagiosum virus
gcggcgcucugccaccgcggcgc

SEQ ID NO: 3104709 - RNA, 16 nt, Molluscum contagiosum virus
gcgucgagggcgccgg

SEQ ID NO: 3104710 - RNA, 20 nt, Molluscum contagiosum virus
gcgucgagggcgccgggcgc

SEQ ID NO: 3104711 - RNA, 22 nt, Molluscum contagiosum virus
gcgucgcacaguucacggcgcu

SEQ ID NO: 3104712 - RNA, 14 nt, Molluscum contagiosum virus
gcguccggcgcucg

SEQ ID NO: 3104713 - RNA, 15 nt, Molluscum contagiosum virus
gcguccggcgcucgc

SEQ ID NO: 3104714 - RNA, 14 nt, Molluscum contagiosum virus
gcguccggcgcuug

SEQ ID NO: 3104715 - RNA, 16 nt, Molluscum contagiosum virus
gcgucgcgcacgcgcg

SEQ ID NO: 3104716 - RNA, 12 nt, Molluscum contagiosum virus
gcgucgcgcagg

SEQ ID NO: 3104717 - RNA, 17 nt, Molluscum contagiosum virus
gcgucgcgcaggcgccc

SEQ ID NO: 3104718 - RNA, 17 nt, Molluscum contagiosum virus
gcgucgcgcgccgcgcu

SEQ ID NO: 3104719 - RNA, 19 nt, Molluscum contagiosum virus
gcgucgcgcgccgcgcugg

SEQ ID NO: 3104720 - RNA, 20 nt, Molluscum contagiosum virus
gcgucgcggagcgcgcacgg

SEQ ID NO: 3104721 - RNA, 13 nt, Molluscum contagiosum virus
gcggcugcggcgc

SEQ ID NO: 3104722 - RNA, 19 nt, Molluscum contagiosum virus
gcggcuggaccugcgccag

SEQ ID NO: 3104723 - RNA, 13 nt, Molluscum contagiosum virus
gcggcugugcccg

SEQ ID NO: 3104724 - RNA, 17 nt, Molluscum contagiosum virus
gcggcugugcccgcggc

SEQ ID NO: 3104725 - RNA, 19 nt, Molluscum contagiosum virus
gcggcugugcccgcggcgu

SEQ ID NO: 3104726 - RNA, 21 nt, Molluscum contagiosum virus
gcguccagccgcagccgcgcu

SEQ ID NO: 3104727 - RNA, 22 nt, Molluscum contagiosum virus
gcggcuacgaugaacuaccgug

SEQ ID NO: 3104728 - RNA, 14 nt, Molluscum contagiosum virus
gcggcuccgcgcgc

SEQ ID NO: 3104729 - RNA, 15 nt, Molluscum contagiosum virus
gcggcucucgcggcc

SEQ ID NO: 3104730 - RNA, 15 nt, Molluscum contagiosum virus
gcggcugcccgcgga

SEQ ID NO: 3104731 - RNA, 17 nt, Molluscum contagiosum virus
gcucgggaagcacguag

SEQ ID NO: 3104732 - RNA, 20 nt, Molluscum contagiosum virus
gcucgggccggcgcgccgcg

SEQ ID NO: 3104733 - RNA, 22 nt, Molluscum contagiosum virus
gcucgggcuagcaagcacgcca

SEQ ID NO: 3104734 - RNA, 18 nt, Molluscum contagiosum virus
gcucguccccgugcacga

SEQ ID NO: 3104735 - RNA, 20 nt, Molluscum contagiosum virus
gcucgugcucucugcgcagg

SEQ ID NO: 3104736 - RNA, 21 nt, Molluscum contagiosum virus
gcucgugcucuuggcguucgc

SEQ ID NO: 3104737 - RNA, 21 nt, Molluscum contagiosum virus
gcucguggacagccugcaccg

SEQ ID NO: 3104738 - RNA, 20 nt, Molluscum contagiosum virus
gcucgugguugcgcacguug

SEQ ID NO: 3104739 - RNA, 18 nt, Molluscum contagiosum virus
gcucuaagcgcacgcgcg

SEQ ID NO: 3104740 - RNA, 14 nt, Molluscum contagiosum virus
gcucuacgccagcg

SEQ ID NO: 3104741 - RNA, 17 nt, Molluscum contagiosum virus
gcucuacgccagcgacg

SEQ ID NO: 3104742 - RNA, 18 nt, Molluscum contagiosum virus
gcugaagaaggagcccuu

SEQ ID NO: 3104743 - RNA, 24 nt, Molluscum contagiosum virus
gcugaaggcauaccugugccagcg

SEQ ID NO: 3104744 - RNA, 18 nt, Molluscum contagiosum virus
gcugacccucgcggcucu

SEQ ID NO: 3104745 - RNA, 17 nt, Molluscum contagiosum virus
gcugaccgagcgugggc

SEQ ID NO: 3104746 - RNA, 19 nt, Molluscum contagiosum virus
gcugacggccggcgggcgc

SEQ ID NO: 3104747 - RNA, 14 nt, Molluscum contagiosum virus
gcugagcgugucga

SEQ ID NO: 3104748 - RNA, 16 nt, Molluscum contagiosum virus
gcugagcuagugccga

SEQ ID NO: 3104749 - RNA, 17 nt, Molluscum contagiosum virus
gcugagcuagugccgag

SEQ ID NO: 3104750 - RNA, 23 nt, Molluscum contagiosum virus
gcucucggccauggaggcgcuag

SEQ ID NO: 3104751 - RNA, 14 nt, Molluscum contagiosum virus
gcucucgagcacuu

SEQ ID NO: 3104752 - RNA, 22 nt, Molluscum contagiosum virus
gcucugcgugcuugugcgccug

SEQ ID NO: 3104753 - RNA, 18 nt, Molluscum contagiosum virus
gcucugcguuuugcgcgg

SEQ ID NO: 3104754 - RNA, 22 nt, Molluscum contagiosum virus
gcucuggagccucccccgcgca

SEQ ID NO: 3104755 - RNA, 20 nt, Molluscum contagiosum virus
gcucugucccgcaagccaca

SEQ ID NO: 3104756 - RNA, 18 nt, Molluscum contagiosum virus
gcgugcaggaacgcgcgc

SEQ ID NO: 3104757 - RNA, 15 nt, Molluscum contagiosum virus
gcgugcaguuucucc

SEQ ID NO: 3104758 - RNA, 16 nt, Molluscum contagiosum virus
gcgugcauuuuuccgc

SEQ ID NO: 3104759 - RNA, 20 nt, Molluscum contagiosum virus
gcgugacucggccgcggggc

SEQ ID NO: 3104760 - RNA, 19 nt, Molluscum contagiosum virus
gcgugcaagcccagcagcg

SEQ ID NO: 3104761 - RNA, 21 nt, Molluscum contagiosum virus
gcgugcacccuccgcacagag

SEQ ID NO: 3104762 - RNA, 23 nt, Molluscum contagiosum virus
gcgugccgcccgaguccgcgcuc

SEQ ID NO: 3104763 - RNA, 15 nt, Molluscum contagiosum virus
gcgugccgcggacgc

SEQ ID NO: 3104764 - RNA, 19 nt, Molluscum contagiosum virus
gcgugccuggcuugcgcgc

SEQ ID NO: 3104765 - RNA, 21 nt, Molluscum contagiosum virus
gcgugccuggcuugcgcgcgc

SEQ ID NO: 3104766 - RNA, 15 nt, Molluscum contagiosum virus
gcgugccuguggcgc

SEQ ID NO: 3104767 - RNA, 14 nt, Molluscum contagiosum virus
gcgugcgagcagag

SEQ ID NO: 3104768 - RNA, 17 nt, Molluscum contagiosum virus
gcgugcgagcggcgcgc

SEQ ID NO: 3104769 - RNA, 22 nt, Molluscum contagiosum virus
gcgugcgauugccccugggcuu

SEQ ID NO: 3104770 - RNA, 13 nt, Molluscum contagiosum virus
gcgugcgccucgc

SEQ ID NO: 3104771 - RNA, 22 nt, Molluscum contagiosum virus
gcgugcgcgccaggugcgaagg

SEQ ID NO: 3104772 - RNA, 16 nt, Molluscum contagiosum virus
gcucggcgagagcgcg

SEQ ID NO: 3104773 - RNA, 18 nt, Molluscum contagiosum virus
gcgucgugcuccacgcgc

SEQ ID NO: 3104774 - RNA, 19 nt, Molluscum contagiosum virus
gcgucgugcuccacgcgca

SEQ ID NO: 3104775 - RNA, 17 nt, Molluscum contagiosum virus
gcgucguagacgcgccc

SEQ ID NO: 3104776 - RNA, 23 nt, Molluscum contagiosum virus
gcguccuucuuugcgugcgccuc

SEQ ID NO: 3104777 - RNA, 14 nt, Molluscum contagiosum virus
gcgucuccgcgcgg

SEQ ID NO: 3104778 - RNA, 22 nt, Molluscum contagiosum virus
gcgucucucugucucccgccgc

SEQ ID NO: 3104779 - RNA, 21 nt, Molluscum contagiosum virus
gcgugacaaucucugcgccgc

SEQ ID NO: 3104780 - RNA, 23 nt, Molluscum contagiosum virus
gcgugacaaucucugcgccgcgc

SEQ ID NO: 3104781 - RNA, 13 nt, Molluscum contagiosum virus
gcgucgugugcgc

SEQ ID NO: 3104782 - RNA, 14 nt, Molluscum contagiosum virus
gcgucgugugcgcg

SEQ ID NO: 3104783 - RNA, 14 nt, Molluscum contagiosum virus
gcgucucccgcggc

SEQ ID NO: 3104784 - RNA, 18 nt, Molluscum contagiosum virus
gaaagagcacgcgcucgc

SEQ ID NO: 3104785 - RNA, 12 nt, Molluscum contagiosum virus
gaaagcgccgcg

SEQ ID NO: 3104786 - RNA, 16 nt, Molluscum contagiosum virus
gaaagcgccgcgcgcg

SEQ ID NO: 3104787 - RNA, 20 nt, Molluscum contagiosum virus
gaaagcuucugucgcuucgc

SEQ ID NO: 3104788 - RNA, 19 nt, Molluscum contagiosum virus
gaaaggcacccaccaggaa

SEQ ID NO: 3104789 - RNA, 18 nt, Molluscum contagiosum virus
gaaaggcaccccgcagga

SEQ ID NO: 3104790 - RNA, 17 nt, Molluscum contagiosum virus
gaaaggcacccgcagga

SEQ ID NO: 3104791 - RNA, 20 nt, Molluscum contagiosum virus
gaaaggcaccugcggcucgc

SEQ ID NO: 3104792 - RNA, 14 nt, Molluscum contagiosum virus
gaaaggcaugauuc

SEQ ID NO: 3104793 - RNA, 19 nt, Molluscum contagiosum virus
gaaaccucaccucugcgcg

SEQ ID NO: 3104794 - RNA, 21 nt, Molluscum contagiosum virus
gaaacucuccgacgugcugcg

SEQ ID NO: 3104795 - RNA, 17 nt, Molluscum contagiosum virus
gaaacacccgcgcucga

SEQ ID NO: 3104796 - RNA, 22 nt, Molluscum contagiosum virus
gaaacagcaccguugccgcggc

SEQ ID NO: 3104797 - RNA, 22 nt, Molluscum contagiosum virus
gaaacaguaggacauguccggc

SEQ ID NO: 3104798 - RNA, 18 nt, Molluscum contagiosum virus
gaaacagccgugcuccga

SEQ ID NO: 3104799 - RNA, 19 nt, Molluscum contagiosum virus
gaaaacggaaacagcaccg

SEQ ID NO: 3104800 - RNA, 14 nt, Molluscum contagiosum virus
gaaaagcgcgagcc

SEQ ID NO: 3104801 - RNA, 20 nt, Molluscum contagiosum virus
gaaaaggcugauccugcgcg

SEQ ID NO: 3104802 - RNA, 14 nt, Molluscum contagiosum virus
gaacaucagcacgg

SEQ ID NO: 3104803 - RNA, 17 nt, Molluscum contagiosum virus
gaacauguugugcucgu

SEQ ID NO: 3104804 - RNA, 23 nt, Molluscum contagiosum virus
gaacaagucgucgaucgccucga

SEQ ID NO: 3104805 - RNA, 18 nt, Molluscum contagiosum virus
gaacacgggggcugccgg

SEQ ID NO: 3104806 - RNA, 18 nt, Molluscum contagiosum virus
gaacagucgcgcgccugc

SEQ ID NO: 3104807 - RNA, 14 nt, Molluscum contagiosum virus
gaagggcccgcggc

SEQ ID NO: 3104808 - RNA, 18 nt, Molluscum contagiosum virus
gaagguacuucccgagga

SEQ ID NO: 3104809 - RNA, 23 nt, Molluscum contagiosum virus
gaaguacuucgcgaugugcaccu

SEQ ID NO: 3104810 - RNA, 21 nt, Molluscum contagiosum virus
gaaguccaucggugggcucgc

SEQ ID NO: 3104811 - RNA, 17 nt, Molluscum contagiosum virus
gaacgcgcaagugugcg

SEQ ID NO: 3104812 - RNA, 21 nt, Molluscum contagiosum virus
gaaggaucccugcccgcguga

SEQ ID NO: 3104813 - RNA, 14 nt, Molluscum contagiosum virus
gaaggccaccucgc

SEQ ID NO: 3104814 - RNA, 17 nt, Molluscum contagiosum virus
gaaccugcacgcggcgu

SEQ ID NO: 3104815 - RNA, 23 nt, Molluscum contagiosum virus
gaaccuggaacucuacgccgcgc

SEQ ID NO: 3104816 - RNA, 20 nt, Molluscum contagiosum virus
gaaccugggcaucgucucgc

SEQ ID NO: 3104817 - RNA, 16 nt, Molluscum contagiosum virus
gaacgagccugccgcg

SEQ ID NO: 3104818 - RNA, 19 nt, Molluscum contagiosum virus
gaacgaggcugcugccgcg

SEQ ID NO: 3104819 - RNA, 20 nt, Molluscum contagiosum virus
gaacgccgugcgcgugcggc

SEQ ID NO: 3104820 - RNA, 21 nt, Molluscum contagiosum virus
cguaauccaugucgagcccug

SEQ ID NO: 3104821 - RNA, 17 nt, Molluscum contagiosum virus
cguacagcgcgcgugcc

SEQ ID NO: 3104822 - RNA, 18 nt, Molluscum contagiosum virus
cguacagcgcgcgugccg

SEQ ID NO: 3104823 - RNA, 17 nt, Molluscum contagiosum virus
cguacagcuccccgcgc

SEQ ID NO: 3104824 - RNA, 20 nt, Molluscum contagiosum virus
cguacagcuccccgcgcaag

SEQ ID NO: 3104825 - RNA, 15 nt, Molluscum contagiosum virus
cguaccagcgccugc

SEQ ID NO: 3104826 - RNA, 23 nt, Molluscum contagiosum virus
cggugugcuacugcacugcagcg

SEQ ID NO: 3104827 - RNA, 15 nt, Molluscum contagiosum virus
cgguggcaggcgcgc

SEQ ID NO: 3104828 - RNA, 22 nt, Molluscum contagiosum virus
cgguggccgcgccgggcgccag

SEQ ID NO: 3104829 - RNA, 14 nt, Molluscum contagiosum virus
cgguggacgcacag

SEQ ID NO: 3104830 - RNA, 15 nt, Molluscum contagiosum virus
cgggccugcgcccgc

SEQ ID NO: 3104831 - RNA, 16 nt, Molluscum contagiosum virus
cgggccugcgcccgca

SEQ ID NO: 3104832 - RNA, 13 nt, Molluscum contagiosum virus
cgggccugcgcgc

SEQ ID NO: 3104833 - RNA, 21 nt, Molluscum contagiosum virus
cgggccuguaccugcgacagc

SEQ ID NO: 3104834 - RNA, 14 nt, Molluscum contagiosum virus
cggugcucgccccu

SEQ ID NO: 3104835 - RNA, 21 nt, Molluscum contagiosum virus
cggugcucuucggggacggcg

SEQ ID NO: 3104836 - RNA, 15 nt, Molluscum contagiosum virus
cggugcugcgccagg

SEQ ID NO: 3104837 - RNA, 23 nt, Molluscum contagiosum virus
cguacuugcugguugccgcucgc

SEQ ID NO: 3104838 - RNA, 23 nt, Molluscum contagiosum virus
cguagacgcgcccguccuccguc

SEQ ID NO: 3104839 - RNA, 13 nt, Molluscum contagiosum virus
cguagagcagcgc

SEQ ID NO: 3104840 - RNA, 21 nt, Molluscum contagiosum virus
cguagcaaaugcgcugcucgc

SEQ ID NO: 3104841 - RNA, 14 nt, Molluscum contagiosum virus
cgguugagcgccgu

SEQ ID NO: 3104842 - RNA, 12 nt, Molluscum contagiosum virus
cguacgcggagg

SEQ ID NO: 3104843 - RNA, 17 nt, Molluscum contagiosum virus
cguacgcgucgcggagg

SEQ ID NO: 3104844 - RNA, 15 nt, Molluscum contagiosum virus
cguacgugcgccagc

SEQ ID NO: 3104845 - RNA, 20 nt, Molluscum contagiosum virus
cguacucgcguccgcgcagc

SEQ ID NO: 3104846 - RNA, 23 nt, Molluscum contagiosum virus
cguacucgcugcuccccgccagc

SEQ ID NO: 3104847 - RNA, 14 nt, Molluscum contagiosum virus
cguaccgcgcccgc

SEQ ID NO: 3104848 - RNA, 17 nt, Molluscum contagiosum virus
cguacgagcagcugcug

SEQ ID NO: 3104849 - RNA, 18 nt, Molluscum contagiosum virus
cguacgagcagcugcugc

SEQ ID NO: 3104850 - RNA, 13 nt, Molluscum contagiosum virus
cguacgagcaggc

SEQ ID NO: 3104851 - RNA, 14 nt, Molluscum contagiosum virus
cguacgagcaggcg

SEQ ID NO: 3104852 - RNA, 19 nt, Molluscum contagiosum virus
cguagcagcgccugcacgc

SEQ ID NO: 3104853 - RNA, 13 nt, Molluscum contagiosum virus
cguagcgcgucuc

SEQ ID NO: 3104854 - RNA, 21 nt, Molluscum contagiosum virus
cguagcggacgaagcugugca

SEQ ID NO: 3104855 - RNA, 18 nt, Molluscum contagiosum virus
cguaguccagcgcgucca

SEQ ID NO: 3104856 - RNA, 15 nt, Molluscum contagiosum virus
cgucaagcagcgcgc

SEQ ID NO: 3104857 - RNA, 17 nt, Molluscum contagiosum virus
cgucaagcagcgcgcca

SEQ ID NO: 3104858 - RNA, 18 nt, Molluscum contagiosum virus
cgucaagcagcgcgccac

SEQ ID NO: 3104859 - RNA, 22 nt, Molluscum contagiosum virus
cgucaagcagguggccgcgcgc

SEQ ID NO: 3104860 - RNA, 21 nt, Molluscum contagiosum virus
cuuuucgcgccgcgggcacau

SEQ ID NO: 3104861 - RNA, 15 nt, Molluscum contagiosum virus
cuuuugccgcggcgc

SEQ ID NO: 3104862 - RNA, 16 nt, Molluscum contagiosum virus
cuuuuugcggcgccgc

SEQ ID NO: 3104863 - RNA, 16 nt, Molluscum contagiosum virus
gaaaaaagagccggcu

SEQ ID NO: 3104864 - RNA, 19 nt, Molluscum contagiosum virus
gaauguguacgacgcgccc

SEQ ID NO: 3104865 - RNA, 18 nt, Molluscum contagiosum virus
gaagugacuagcgcuggc

SEQ ID NO: 3104866 - RNA, 18 nt, Molluscum contagiosum virus
gaaguggccgucgcgagc

SEQ ID NO: 3104867 - RNA, 17 nt, Molluscum contagiosum virus
gacaaucucugcgccgc

SEQ ID NO: 3104868 - RNA, 22 nt, Molluscum contagiosum virus
gacaaucucugcgccgcgcgcg

SEQ ID NO: 3104869 - RNA, 15 nt, Molluscum contagiosum virus
gacaaguacaugcac

SEQ ID NO: 3104870 - RNA, 13 nt, Molluscum contagiosum virus
gacaaagucgcgc

SEQ ID NO: 3104871 - RNA, 19 nt, Molluscum contagiosum virus
gacacgagccgugugcucg

SEQ ID NO: 3104872 - RNA, 21 nt, Molluscum contagiosum virus
gacacgagggccuuggcggcg

SEQ ID NO: 3104873 - RNA, 19 nt, Molluscum contagiosum virus
gacaccgacgaggugcgcg

SEQ ID NO: 3104874 - RNA, 12 nt, Molluscum contagiosum virus
gacaccgcgggc

SEQ ID NO: 3104875 - RNA, 18 nt, Molluscum contagiosum virus
gacaccgcguuuguggcg

SEQ ID NO: 3104876 - RNA, 22 nt, Molluscum contagiosum virus
gacacucuucgcaggcgugcuc

SEQ ID NO: 3104877 - RNA, 14 nt, Molluscum contagiosum virus
gacagagcccggga

SEQ ID NO: 3104878 - RNA, 18 nt, Molluscum contagiosum virus
gacagagugccuggcgcg

SEQ ID NO: 3104879 - RNA, 20 nt, Molluscum contagiosum virus
gacacguuccagagcacugc

SEQ ID NO: 3104880 - RNA, 16 nt, Molluscum contagiosum virus
gacacguugcagcagc

SEQ ID NO: 3104881 - RNA, 16 nt, Molluscum contagiosum virus
gacacgcgugcaugcg

SEQ ID NO: 3104882 - RNA, 22 nt, Molluscum contagiosum virus
gacacgcgugcaugcgagcgcg

SEQ ID NO: 3104883 - RNA, 17 nt, Molluscum contagiosum virus
gacacgcgugucugcgc

SEQ ID NO: 3104884 - RNA, 19 nt, Molluscum contagiosum virus
gacacgcugcgcgugcugg

SEQ ID NO: 3104885 - RNA, 23 nt, Molluscum contagiosum virus
gacagcaaacagccuguguugcg

SEQ ID NO: 3104886 - RNA, 20 nt, Molluscum contagiosum virus
gacgccaagcgucgcgacgc

SEQ ID NO: 3104887 - RNA, 13 nt, Molluscum contagiosum virus
gacgccagcgcgc

SEQ ID NO: 3104888 - RNA, 20 nt, Molluscum contagiosum virus
gacgcccggcaccgcggcgg

SEQ ID NO: 3104889 - RNA, 15 nt, Molluscum contagiosum virus
gacgccuuccugcug

SEQ ID NO: 3104890 - RNA, 20 nt, Molluscum contagiosum virus
gacgccuuccugcuggcgcg

SEQ ID NO: 3104891 - RNA, 17 nt, Molluscum contagiosum virus
gacgccuuuugugcagc

SEQ ID NO: 3104892 - RNA, 19 nt, Molluscum contagiosum virus
gacgcgacgccguccgcgc

SEQ ID NO: 3104893 - RNA, 15 nt, Molluscum contagiosum virus
gacgcgagacugugc

SEQ ID NO: 3104894 - RNA, 19 nt, Molluscum contagiosum virus
gacgccgauguccugcgga

SEQ ID NO: 3104895 - RNA, 20 nt, Molluscum contagiosum virus
gacgccggggggcgccaagu

SEQ ID NO: 3104896 - RNA, 15 nt, Molluscum contagiosum virus
gacgccguccgcgca

SEQ ID NO: 3104897 - RNA, 23 nt, Molluscum contagiosum virus
gacgccgucgaugaaggcgcggc

SEQ ID NO: 3104898 - RNA, 15 nt, Molluscum contagiosum virus
gacuuacggacgccc

SEQ ID NO: 3104899 - RNA, 14 nt, Molluscum contagiosum virus
gacuuagccacugu

SEQ ID NO: 3104900 - RNA, 18 nt, Molluscum contagiosum virus
gacuuagccacugugcug

SEQ ID NO: 3104901 - RNA, 13 nt, Molluscum contagiosum virus
gacugcgcccgug

SEQ ID NO: 3104902 - RNA, 22 nt, Molluscum contagiosum virus
gacugcgccuucugccugcccg

SEQ ID NO: 3104903 - RNA, 22 nt, Molluscum contagiosum virus
gacugcguugucuccuccugau

SEQ ID NO: 3104904 - RNA, 17 nt, Molluscum contagiosum virus
gacugcuacgucgcggc

SEQ ID NO: 3104905 - RNA, 19 nt, Molluscum contagiosum virus
gacugcuacgucgcggcgc

SEQ ID NO: 3104906 - RNA, 19 nt, Molluscum contagiosum virus
gacugcugcccccgccgcg

SEQ ID NO: 3104907 - RNA, 23 nt, Molluscum contagiosum virus
gacugcugcccccgccgcggcgc

SEQ ID NO: 3104908 - RNA, 14 nt, Molluscum contagiosum virus
gacuggcacgcgcc

SEQ ID NO: 3104909 - RNA, 16 nt, Molluscum contagiosum virus
gacuggcacgcgccgc

SEQ ID NO: 3104910 - RNA, 17 nt, Molluscum contagiosum virus
gacgcucgggccggcgc

SEQ ID NO: 3104911 - RNA, 16 nt, Molluscum contagiosum virus
gacgcugcggcggcgc

SEQ ID NO: 3104912 - RNA, 18 nt, Molluscum contagiosum virus
gacgcgggccuguccgcg

SEQ ID NO: 3104913 - RNA, 22 nt, Molluscum contagiosum virus
gacggcaccguaccgcgcccgc

SEQ ID NO: 3104914 - RNA, 16 nt, Molluscum contagiosum virus
gacggcacgggcacgc

SEQ ID NO: 3104915 - RNA, 20 nt, Molluscum contagiosum virus
gacggcacgggcacgcgcgc

SEQ ID NO: 3104916 - RNA, 16 nt, Molluscum contagiosum virus
gacggccggcgggcgc

SEQ ID NO: 3104917 - RNA, 21 nt, Molluscum contagiosum virus
gacucgagcgagcuacgcgcu

SEQ ID NO: 3104918 - RNA, 17 nt, Molluscum contagiosum virus
gacucgcgcccgcuccc

SEQ ID NO: 3104919 - RNA, 20 nt, Molluscum contagiosum virus
gacuccuuugcgagcacugu

SEQ ID NO: 3104920 - RNA, 14 nt, Molluscum contagiosum virus
gacgcggccgcgga

SEQ ID NO: 3104921 - RNA, 13 nt, Molluscum contagiosum virus
gacgcggucgcgc

SEQ ID NO: 3104922 - RNA, 13 nt, Molluscum contagiosum virus
gacgcggugcgcg

SEQ ID NO: 3104923 - RNA, 19 nt, Molluscum contagiosum virus
gacgcgugcaagcccagca

SEQ ID NO: 3104924 - RNA, 23 nt, Molluscum contagiosum virus
gacgcgugcauggcacgcgagca

SEQ ID NO: 3104925 - RNA, 16 nt, Molluscum contagiosum virus
gacgcuagcugugcgc

SEQ ID NO: 3104926 - RNA, 14 nt, Molluscum contagiosum virus
gacgcucacggccu

SEQ ID NO: 3104927 - RNA, 14 nt, Molluscum contagiosum virus
gacgcuggcggcgc

SEQ ID NO: 3104928 - RNA, 15 nt, Molluscum contagiosum virus
gacgcuggugaucac

SEQ ID NO: 3104929 - RNA, 23 nt, Molluscum contagiosum virus
gacgcuggugaucacgcacgaag

SEQ ID NO: 3104930 - RNA, 15 nt, Molluscum contagiosum virus
gacggaaccguggug

SEQ ID NO: 3104931 - RNA, 17 nt, Molluscum contagiosum virus
gacggaauuugcggcgc

SEQ ID NO: 3104932 - RNA, 13 nt, Molluscum contagiosum virus
gacggacccgcga

SEQ ID NO: 3104933 - RNA, 21 nt, Molluscum contagiosum virus
gacggacuucuugcgcggcgg

SEQ ID NO: 3104934 - RNA, 19 nt, Molluscum contagiosum virus
gacggagagcgcgcggcgc

SEQ ID NO: 3104935 - RNA, 17 nt, Molluscum contagiosum virus
gacgcgccucgagcagg

SEQ ID NO: 3104936 - RNA, 20 nt, Molluscum contagiosum virus
gacgcgccucgagcagguca

SEQ ID NO: 3104937 - RNA, 15 nt, Molluscum contagiosum virus
gacgcgcgagugugc

SEQ ID NO: 3104938 - RNA, 16 nt, Molluscum contagiosum virus
gacgcgcgagugugcg

SEQ ID NO: 3104939 - RNA, 17 nt, Molluscum contagiosum virus
gacgcgcgagugugcgu

SEQ ID NO: 3104940 - RNA, 16 nt, Molluscum contagiosum virus
gacgcgcggcagacgc

SEQ ID NO: 3104941 - RNA, 24 nt, Molluscum contagiosum virus
gacgcgcguggagcgcgcggacgc

SEQ ID NO: 3104942 - RNA, 16 nt, Molluscum contagiosum virus
gacgcgcuugcgcgga

SEQ ID NO: 3104943 - RNA, 22 nt, Molluscum contagiosum virus
gacgcgaguugcgucucccgcg

SEQ ID NO: 3104944 - RNA, 16 nt, Molluscum contagiosum virus
gacgcgaucuuccgcg

SEQ ID NO: 3104945 - RNA, 16 nt, Molluscum contagiosum virus
gacgcgcaagugugcg

SEQ ID NO: 3104946 - RNA, 17 nt, Molluscum contagiosum virus
gacgcgcaagugugcgc

SEQ ID NO: 3104947 - RNA, 18 nt, Molluscum contagiosum virus
gacgcgcacgcgggacgc

SEQ ID NO: 3104948 - RNA, 15 nt, Molluscum contagiosum virus
gacgcgcagcucgac

SEQ ID NO: 3104949 - RNA, 20 nt, Molluscum contagiosum virus
gacgcccuccucgaccugca

SEQ ID NO: 3104950 - RNA, 13 nt, Molluscum contagiosum virus
gcccgcccgcgcu

SEQ ID NO: 3104951 - RNA, 17 nt, Molluscum contagiosum virus
gcccgccgacugccgcc

SEQ ID NO: 3104952 - RNA, 23 nt, Molluscum contagiosum virus
gcccgccgggcaccggcgcucac

SEQ ID NO: 3104953 - RNA, 22 nt, Molluscum contagiosum virus
gcccgaguauacucgacgcgcg

SEQ ID NO: 3104954 - RNA, 15 nt, Molluscum contagiosum virus
gcccgaguccgcgcu

SEQ ID NO: 3104955 - RNA, 17 nt, Molluscum contagiosum virus
gcccgaguucgcggcgc

SEQ ID NO: 3104956 - RNA, 22 nt, Molluscum contagiosum virus
gcccgacuuuggcuacgacggc

SEQ ID NO: 3104957 - RNA, 19 nt, Molluscum contagiosum virus
gcccgacuuuucgcgccgc

SEQ ID NO: 3104958 - RNA, 12 nt, Molluscum contagiosum virus
gcccgagcccga

SEQ ID NO: 3104959 - RNA, 24 nt, Molluscum contagiosum virus
gcccgagcuaaauggacgcggacc

SEQ ID NO: 3104960 - RNA, 23 nt, Molluscum contagiosum virus
gcccgaggacgagccccgcgccg

SEQ ID NO: 3104961 - RNA, 20 nt, Molluscum contagiosum virus
gcccgaggagagcggcgccc

SEQ ID NO: 3104962 - RNA, 14 nt, Molluscum contagiosum virus
gcccgaagccguag

SEQ ID NO: 3104963 - RNA, 15 nt, Molluscum contagiosum virus
gcccgacgcgggcgc

SEQ ID NO: 3104964 - RNA, 14 nt, Molluscum contagiosum virus
gccccgacgccagc

SEQ ID NO: 3104965 - RNA, 15 nt, Molluscum contagiosum virus
gccccgacgccagcg

SEQ ID NO: 3104966 - RNA, 15 nt, Molluscum contagiosum virus
gccccgagacccgca

SEQ ID NO: 3104967 - RNA, 14 nt, Molluscum contagiosum virus
gccccgcgccagca

SEQ ID NO: 3104968 - RNA, 11 nt, Molluscum contagiosum virus
gccccgcgcgc

SEQ ID NO: 3104969 - RNA, 19 nt, Molluscum contagiosum virus
gccccguccucgcucgugc

SEQ ID NO: 3104970 - RNA, 16 nt, Molluscum contagiosum virus
gccagcgucgcgcgcc

SEQ ID NO: 3104971 - RNA, 20 nt, Molluscum contagiosum virus
gccagcgucgcgcgccgugc

SEQ ID NO: 3104972 - RNA, 17 nt, Molluscum contagiosum virus
gccagcgugcagacgac

SEQ ID NO: 3104973 - RNA, 18 nt, Molluscum contagiosum virus
gccagcuccgcgcggcgc

SEQ ID NO: 3104974 - RNA, 23 nt, Molluscum contagiosum virus
gccagcuccgcgcggcgcucugc

SEQ ID NO: 3104975 - RNA, 17 nt, Molluscum contagiosum virus
gccagcucgacacugug

SEQ ID NO: 3104976 - RNA, 18 nt, Molluscum contagiosum virus
gccagcucgacacugugc

SEQ ID NO: 3104977 - RNA, 21 nt, Molluscum contagiosum virus
gccagcucgacacugugcugg

SEQ ID NO: 3104978 - RNA, 16 nt, Molluscum contagiosum virus
gccagcgacgcgacgc

SEQ ID NO: 3104979 - RNA, 23 nt, Molluscum contagiosum virus
gccagcgagaucaacgcgcgcgu

SEQ ID NO: 3104980 - RNA, 20 nt, Molluscum contagiosum virus
gccagcgagucucgcgcgcc

SEQ ID NO: 3104981 - RNA, 23 nt, Molluscum contagiosum virus
gccagcgagucucgcgcgccacc

SEQ ID NO: 3104982 - RNA, 14 nt, Molluscum contagiosum virus
gccagcgcgcgccu

SEQ ID NO: 3104983 - RNA, 14 nt, Molluscum contagiosum virus
gccagcggcgccgc

SEQ ID NO: 3104984 - RNA, 15 nt, Molluscum contagiosum virus
gccagcuugagcaca

SEQ ID NO: 3104985 - RNA, 16 nt, Molluscum contagiosum virus
gcccccgccaugccaa

SEQ ID NO: 3104986 - RNA, 22 nt, Molluscum contagiosum virus
gcccccgguucccggugcugcu

SEQ ID NO: 3104987 - RNA, 14 nt, Molluscum contagiosum virus
gcccccgugcugug

SEQ ID NO: 3104988 - RNA, 13 nt, Molluscum contagiosum virus
gccaccgcggcgc

SEQ ID NO: 3104989 - RNA, 17 nt, Molluscum contagiosum virus
gccacgaacacggcgcg

SEQ ID NO: 3104990 - RNA, 22 nt, Molluscum contagiosum virus
gccacgaagagucgcgccugga

SEQ ID NO: 3104991 - RNA, 20 nt, Molluscum contagiosum virus
gccaagaccugggcgucgug

SEQ ID NO: 3104992 - RNA, 20 nt, Molluscum contagiosum virus
gccaagcguuggcgcccgag

SEQ ID NO: 3104993 - RNA, 13 nt, Molluscum contagiosum virus
gccaaggucucga

SEQ ID NO: 3104994 - RNA, 21 nt, Molluscum contagiosum virus
gccaagguucuggacgugucc

SEQ ID NO: 3104995 - RNA, 20 nt, Molluscum contagiosum virus
gccacaccccguacggcgca

SEQ ID NO: 3104996 - RNA, 15 nt, Molluscum contagiosum virus
gccacgagcgccgcg

SEQ ID NO: 3104997 - RNA, 21 nt, Molluscum contagiosum virus
gccacgagcgccgcgugcgcg

SEQ ID NO: 3104998 - RNA, 14 nt, Molluscum contagiosum virus
gccacgcagcuggc

SEQ ID NO: 3104999 - RNA, 14 nt, Molluscum contagiosum virus
gccacgccagcccg

SEQ ID NO: 3105000 - RNA, 15 nt, Molluscum contagiosum virus
gccacggccgcgcgc

SEQ ID NO: 3105001 - RNA, 14 nt, Molluscum contagiosum virus
gccacggccgcgcu

SEQ ID NO: 3105002 - RNA, 14 nt, Molluscum contagiosum virus
gccagacgcagagc

SEQ ID NO: 3105003 - RNA, 17 nt, Molluscum contagiosum virus
gccagcaagcucgaugc

SEQ ID NO: 3105004 - RNA, 16 nt, Molluscum contagiosum virus
gccagcacgcgcucgu

SEQ ID NO: 3105005 - RNA, 22 nt, Molluscum contagiosum virus
gccagcagcgcccggugcggcg

SEQ ID NO: 3105006 - RNA, 15 nt, Molluscum contagiosum virus
gccagccaggcgccg

SEQ ID NO: 3105007 - RNA, 17 nt, Molluscum contagiosum virus
gccagccaucgugcgcg

SEQ ID NO: 3105008 - RNA, 20 nt, Molluscum contagiosum virus
gccagcccgacuucucgcgc

SEQ ID NO: 3105009 - RNA, 16 nt, Molluscum contagiosum virus
gccagccugugcgcca

SEQ ID NO: 3105010 - RNA, 23 nt, Molluscum contagiosum virus
gcaggucaacuccgagcgcgcgc

SEQ ID NO: 3105011 - RNA, 17 nt, Molluscum contagiosum virus
gcagguggccgcgcgcg

SEQ ID NO: 3105012 - RNA, 18 nt, Molluscum contagiosum virus
gcagguggccgcgcgcgc

SEQ ID NO: 3105013 - RNA, 16 nt, Molluscum contagiosum virus
gccaacuucgucucga

SEQ ID NO: 3105014 - RNA, 13 nt, Molluscum contagiosum virus
gccaagaacaagc

SEQ ID NO: 3105015 - RNA, 20 nt, Molluscum contagiosum virus
gccaacacgcaaucgcgcgc

SEQ ID NO: 3105016 - RNA, 21 nt, Molluscum contagiosum virus
gccaacacgcaaucgcgcgcg

SEQ ID NO: 3105017 - RNA, 17 nt, Molluscum contagiosum virus
gccaacccucgcaagcu

SEQ ID NO: 3105018 - RNA, 13 nt, Molluscum contagiosum virus
gcaggcgagguca

SEQ ID NO: 3105019 - RNA, 15 nt, Molluscum contagiosum virus
gcaggcgcagcgcgg

SEQ ID NO: 3105020 - RNA, 16 nt, Molluscum contagiosum virus
gcaggcgcaggccgcg

SEQ ID NO: 3105021 - RNA, 13 nt, Molluscum contagiosum virus
gcaggcgcgcgcg

SEQ ID NO: 3105022 - RNA, 14 nt, Molluscum contagiosum virus
gcaggcgcugcgcg

SEQ ID NO: 3105023 - RNA, 19 nt, Molluscum contagiosum virus
gcaggcggugggcgccgcg

SEQ ID NO: 3105024 - RNA, 22 nt, Molluscum contagiosum virus
gcaggccccgcaccagugccga

SEQ ID NO: 3105025 - RNA, 21 nt, Molluscum contagiosum virus
gcaggcccggcggcccgcggc

SEQ ID NO: 3105026 - RNA, 13 nt, Molluscum contagiosum virus
gcaggccgcccac

SEQ ID NO: 3105027 - RNA, 17 nt, Molluscum contagiosum virus
gcagcuguccaagguga

SEQ ID NO: 3105028 - RNA, 18 nt, Molluscum contagiosum virus
gcagcuguuucugccgcg

SEQ ID NO: 3105029 - RNA, 15 nt, Molluscum contagiosum virus
gcaggcgucgcgcac

SEQ ID NO: 3105030 - RNA, 14 nt, Molluscum contagiosum virus
gcaggcgugcucag

SEQ ID NO: 3105031 - RNA, 20 nt, Molluscum contagiosum virus
gcagggaaagagcacgcgcu

SEQ ID NO: 3105032 - RNA, 22 nt, Molluscum contagiosum virus
gcagggaaagagcacgcgcucg

SEQ ID NO: 3105033 - RNA, 16 nt, Molluscum contagiosum virus
gcagggagcugcggac

SEQ ID NO: 3105034 - RNA, 16 nt, Molluscum contagiosum virus
gcagggcccgcgcucg

SEQ ID NO: 3105035 - RNA, 17 nt, Molluscum contagiosum virus
gcagggcccgcgcucgc

SEQ ID NO: 3105036 - RNA, 23 nt, Molluscum contagiosum virus
gagaacgcaagcguacgcgucgc

SEQ ID NO: 3105037 - RNA, 15 nt, Molluscum contagiosum virus
gagaacucgcgugcc

SEQ ID NO: 3105038 - RNA, 15 nt, Molluscum contagiosum virus
gacucuggaagccuu

SEQ ID NO: 3105039 - RNA, 20 nt, Molluscum contagiosum virus
gacuugcugcggagcgccuu

SEQ ID NO: 3105040 - RNA, 17 nt, Molluscum contagiosum virus
gacuugugcccaugucc

SEQ ID NO: 3105041 - RNA, 18 nt, Molluscum contagiosum virus
gacuuuguccugagccuu

SEQ ID NO: 3105042 - RNA, 16 nt, Molluscum contagiosum virus
gagaaagacgucccgc

SEQ ID NO: 3105043 - RNA, 17 nt, Molluscum contagiosum virus
gagaagaugcugcgcgu

SEQ ID NO: 3105044 - RNA, 18 nt, Molluscum contagiosum virus
gagaagcaaugcgcaagg

SEQ ID NO: 3105045 - RNA, 18 nt, Molluscum contagiosum virus
gagacaucaucgcggagc

SEQ ID NO: 3105046 - RNA, 12 nt, Molluscum contagiosum virus
gagaccagccgc

SEQ ID NO: 3105047 - RNA, 18 nt, Molluscum contagiosum virus
gagaccagccgcgagcgc

SEQ ID NO: 3105048 - RNA, 14 nt, Molluscum contagiosum virus
gagacgcggccgcg

SEQ ID NO: 3105049 - RNA, 20 nt, Molluscum contagiosum virus
gagaccgucaaccugcugcc

SEQ ID NO: 3105050 - RNA, 16 nt, Molluscum contagiosum virus
gagacgugcggcacgc

SEQ ID NO: 3105051 - RNA, 14 nt, Molluscum contagiosum virus
gagacguugccgga

SEQ ID NO: 3105052 - RNA, 14 nt, Molluscum contagiosum virus
gagacuucuugcac

SEQ ID NO: 3105053 - RNA, 13 nt, Molluscum contagiosum virus
gagagcgcgcgca

SEQ ID NO: 3105054 - RNA, 19 nt, Molluscum contagiosum virus
gagagcguacucgggccgc

SEQ ID NO: 3105055 - RNA, 23 nt, Molluscum contagiosum virus
gagacgcugccggcaacgcugcc

SEQ ID NO: 3105056 - RNA, 16 nt, Molluscum contagiosum virus
gcagcuucugcucgcg

SEQ ID NO: 3105057 - RNA, 19 nt, Molluscum contagiosum virus
gcagcuucuuggagcccuu

SEQ ID NO: 3105058 - RNA, 18 nt, Molluscum contagiosum virus
gcagcucggcgagagcgc

SEQ ID NO: 3105059 - RNA, 17 nt, Molluscum contagiosum virus
gcagcucugcagcgccg

SEQ ID NO: 3105060 - RNA, 18 nt, Molluscum contagiosum virus
gcaggauuuccucgcgga

SEQ ID NO: 3105061 - RNA, 18 nt, Molluscum contagiosum virus
gcaggcaaagcggggcgc

SEQ ID NO: 3105062 - RNA, 17 nt, Molluscum contagiosum virus
gcaggcacgacgccgac

SEQ ID NO: 3105063 - RNA, 18 nt, Molluscum contagiosum virus
gcaggcacgacgccgaca

SEQ ID NO: 3105064 - RNA, 17 nt, Molluscum contagiosum virus
gcaggaaccgcgugcgc

SEQ ID NO: 3105065 - RNA, 17 nt, Molluscum contagiosum virus
gcaggaacgcgcgcucg

SEQ ID NO: 3105066 - RNA, 17 nt, Molluscum contagiosum virus
gcaggaagcuggcgcgg

SEQ ID NO: 3105067 - RNA, 18 nt, Molluscum contagiosum virus
gcaggaccuggcuggcgc

SEQ ID NO: 3105068 - RNA, 17 nt, Molluscum contagiosum virus
gcaggagcacgccuggc

SEQ ID NO: 3105069 - RNA, 19 nt, Molluscum contagiosum virus
gcaggagcacgccuggcgg

SEQ ID NO: 3105070 - RNA, 14 nt, Molluscum contagiosum virus
gagagguugcgcgg

SEQ ID NO: 3105071 - RNA, 16 nt, Molluscum contagiosum virus
gagagugacgccucga

SEQ ID NO: 3105072 - RNA, 14 nt, Molluscum contagiosum virus
gagagugcgggagc

SEQ ID NO: 3105073 - RNA, 16 nt, Molluscum contagiosum virus
gcagcuacugcgugcg

SEQ ID NO: 3105074 - RNA, 19 nt, Molluscum contagiosum virus
gcagcucaagacgcugcug

SEQ ID NO: 3105075 - RNA, 22 nt, Molluscum contagiosum virus
gcagcucaagacgcugcuggcg

SEQ ID NO: 3105076 - RNA, 12 nt, Molluscum contagiosum virus
gcagcuccgcga

SEQ ID NO: 3105077 - RNA, 18 nt, Molluscum contagiosum virus
gcagcuccuagcgcgcgu

SEQ ID NO: 3105078 - RNA, 19 nt, Molluscum contagiosum virus
gcagcugcaggaccugcug

SEQ ID NO: 3105079 - RNA, 12 nt, Molluscum contagiosum virus
gcagcugccgca

SEQ ID NO: 3105080 - RNA, 15 nt, Molluscum contagiosum virus
gcagcugcugcgcac

SEQ ID NO: 3105081 - RNA, 18 nt, Molluscum contagiosum virus
gcagcugcugcgcacgug

SEQ ID NO: 3105082 - RNA, 15 nt, Molluscum contagiosum virus
gcagcugcugcgcuc

SEQ ID NO: 3105083 - RNA, 18 nt, Molluscum contagiosum virus
gcagcuggagcugccgcu

SEQ ID NO: 3105084 - RNA, 16 nt, Molluscum contagiosum virus
gcagcuggcgcgcgcc

SEQ ID NO: 3105085 - RNA, 20 nt, Molluscum contagiosum virus
gcccgcaaugcagugcacca

SEQ ID NO: 3105086 - RNA, 13 nt, Molluscum contagiosum virus
gcccgcacacgca

SEQ ID NO: 3105087 - RNA, 15 nt, Molluscum contagiosum virus
cggcaggcucccgcu

SEQ ID NO: 3105088 - RNA, 19 nt, Molluscum contagiosum virus
cggcaggcucccgcugucg

SEQ ID NO: 3105089 - RNA, 22 nt, Molluscum contagiosum virus
cggcaggcucccgcugucgcgc

SEQ ID NO: 3105090 - RNA, 22 nt, Molluscum contagiosum virus
cggcagguuugcacccgcgcag

SEQ ID NO: 3105091 - RNA, 23 nt, Molluscum contagiosum virus
cggcagguuugcacccgcgcagc

SEQ ID NO: 3105092 - RNA, 21 nt, Molluscum contagiosum virus
cggcaguggccgucgggcgcc

SEQ ID NO: 3105093 - RNA, 15 nt, Molluscum contagiosum virus
cggcaucgcgcugcu

SEQ ID NO: 3105094 - RNA, 14 nt, Molluscum contagiosum virus
cggcaugcgcgcgc

SEQ ID NO: 3105095 - RNA, 17 nt, Molluscum contagiosum virus
cggcaugcgcgcgcagc

SEQ ID NO: 3105096 - RNA, 22 nt, Molluscum contagiosum virus
cggcaugugcgcaccgcgggcu

SEQ ID NO: 3105097 - RNA, 21 nt, Molluscum contagiosum virus
cggccacaccccguacggcgc

SEQ ID NO: 3105098 - RNA, 12 nt, Molluscum contagiosum virus
cggccaccagcg

SEQ ID NO: 3105099 - RNA, 12 nt, Molluscum contagiosum virus
cggcccgcggac

SEQ ID NO: 3105100 - RNA, 13 nt, Molluscum contagiosum virus
cggcccgcggcgc

SEQ ID NO: 3105101 - RNA, 12 nt, Molluscum contagiosum virus
cggcccgcgggc

SEQ ID NO: 3105102 - RNA, 19 nt, Molluscum contagiosum virus
cggcccgcgggcugcaaga

SEQ ID NO: 3105103 - RNA, 13 nt, Molluscum contagiosum virus
cggccgccggcgc

SEQ ID NO: 3105104 - RNA, 14 nt, Molluscum contagiosum virus
cggccacgcucgcg

SEQ ID NO: 3105105 - RNA, 13 nt, Molluscum contagiosum virus
cggccagagccca

SEQ ID NO: 3105106 - RNA, 21 nt, Molluscum contagiosum virus
cggccagcgugcagacgaccg

SEQ ID NO: 3105107 - RNA, 15 nt, Molluscum contagiosum virus
cggccauggucacgc

SEQ ID NO: 3105108 - RNA, 21 nt, Molluscum contagiosum virus
cggccguguacaugcucaagc

SEQ ID NO: 3105109 - RNA, 21 nt, Molluscum contagiosum virus
cggccguguccuacacgccgc

SEQ ID NO: 3105110 - RNA, 19 nt, Molluscum contagiosum virus
cggccggauugccgcagcc

SEQ ID NO: 3105111 - RNA, 22 nt, Molluscum contagiosum virus
cggccgcgagacgcagacgacg

SEQ ID NO: 3105112 - RNA, 13 nt, Molluscum contagiosum virus
cggccguugccgg

SEQ ID NO: 3105113 - RNA, 19 nt, Molluscum contagiosum virus
cggccugcccugcucaugc

SEQ ID NO: 3105114 - RNA, 17 nt, Molluscum contagiosum virus
cggccuagagcuggcac

SEQ ID NO: 3105115 - RNA, 19 nt, Molluscum contagiosum virus
cggccuccagcagcggcgc

SEQ ID NO: 3105116 - RNA, 18 nt, Molluscum contagiosum virus
cggcgcaagcaccggcag

SEQ ID NO: 3105117 - RNA, 15 nt, Molluscum contagiosum virus
cggcgcaaucucgcg

SEQ ID NO: 3105118 - RNA, 20 nt, Molluscum contagiosum virus
cggcgcacacuccucggcgc

SEQ ID NO: 3105119 - RNA, 14 nt, Molluscum contagiosum virus
cggcgauguacgcg

SEQ ID NO: 3105120 - RNA, 16 nt, Molluscum contagiosum virus
cggcgauguacgcgug

SEQ ID NO: 3105121 - RNA, 19 nt, Molluscum contagiosum virus
cggcgauguacgcgugcag

SEQ ID NO: 3105122 - RNA, 15 nt, Molluscum contagiosum virus
cggcgccaccggcag

SEQ ID NO: 3105123 - RNA, 14 nt, Molluscum contagiosum virus
cggcgccacgagcg

SEQ ID NO: 3105124 - RNA, 17 nt, Molluscum contagiosum virus
cggcgcccaggaacagu

SEQ ID NO: 3105125 - RNA, 11 nt, Molluscum contagiosum virus
cggcgcccgca

SEQ ID NO: 3105126 - RNA, 15 nt, Molluscum contagiosum virus
cggcgcccgcgugca

SEQ ID NO: 3105127 - RNA, 17 nt, Molluscum contagiosum virus
cggcgcccggugccagc

SEQ ID NO: 3105128 - RNA, 23 nt, Molluscum contagiosum virus
cggcgccgacaacgugcugcuca

SEQ ID NO: 3105129 - RNA, 22 nt, Molluscum contagiosum virus
cggcgagcgcauucgcgcgccc

SEQ ID NO: 3105130 - RNA, 13 nt, Molluscum contagiosum virus
cggcgagcgccgc

SEQ ID NO: 3105131 - RNA, 18 nt, Molluscum contagiosum virus
cggcgagcgccgcucgca

SEQ ID NO: 3105132 - RNA, 14 nt, Molluscum contagiosum virus
cggcgagcgcgccc

SEQ ID NO: 3105133 - RNA, 19 nt, Molluscum contagiosum virus
cggcgagcugccauggcag

SEQ ID NO: 3105134 - RNA, 23 nt, Molluscum contagiosum virus
cggcgagcugccauggcagcucg

SEQ ID NO: 3105135 - RNA, 21 nt, Molluscum contagiosum virus
cggcgagaugcgagcgcgucu

SEQ ID NO: 3105136 - RNA, 15 nt, Molluscum contagiosum virus
cggccuguucuucca

SEQ ID NO: 3105137 - RNA, 21 nt, Molluscum contagiosum virus
cggcgaacaucucggcuccgc

SEQ ID NO: 3105138 - RNA, 23 nt, Molluscum contagiosum virus
cggcgaaccgacugcccgcgccc

SEQ ID NO: 3105139 - RNA, 16 nt, Molluscum contagiosum virus
cggcgacaacgacaga

SEQ ID NO: 3105140 - RNA, 22 nt, Molluscum contagiosum virus
cggcgacaacgacagagcccgg

SEQ ID NO: 3105141 - RNA, 15 nt, Molluscum contagiosum virus
cggcggcaagcgaga

SEQ ID NO: 3105142 - RNA, 12 nt, Molluscum contagiosum virus
cggcggccacgc

SEQ ID NO: 3105143 - RNA, 14 nt, Molluscum contagiosum virus
cggcggcaugcgcg

SEQ ID NO: 3105144 - RNA, 13 nt, Molluscum contagiosum virus
cggcggcuuucuc

SEQ ID NO: 3105145 - RNA, 20 nt, Molluscum contagiosum virus
cggcggcuuucucacgcccg

SEQ ID NO: 3105146 - RNA, 22 nt, Molluscum contagiosum virus
cggcggcuuucucacgcccgcg

SEQ ID NO: 3105147 - RNA, 15 nt, Molluscum contagiosum virus
cggcgggcgcgugcu

SEQ ID NO: 3105148 - RNA, 14 nt, Molluscum contagiosum virus
cggcggggcugcug

SEQ ID NO: 3105149 - RNA, 16 nt, Molluscum contagiosum virus
cggcggugcccgccaa

SEQ ID NO: 3105150 - RNA, 12 nt, Molluscum contagiosum virus
cggcggcuccgc

SEQ ID NO: 3105151 - RNA, 14 nt, Molluscum contagiosum virus
cggcggcgcgugcu

SEQ ID NO: 3105152 - RNA, 19 nt, Molluscum contagiosum virus
cggcguguuuugugucgcg

SEQ ID NO: 3105153 - RNA, 14 nt, Molluscum contagiosum virus
cggcguucgcggag

SEQ ID NO: 3105154 - RNA, 17 nt, Molluscum contagiosum virus
cggcgugugcgcgagcu

SEQ ID NO: 3105155 - RNA, 15 nt, Molluscum contagiosum virus
cggcgugugcgggcu

SEQ ID NO: 3105156 - RNA, 16 nt, Molluscum contagiosum virus
cggcguguuccggcag

SEQ ID NO: 3105157 - RNA, 22 nt, Molluscum contagiosum virus
cggcgugagcucgucgcggaag

SEQ ID NO: 3105158 - RNA, 15 nt, Molluscum contagiosum virus
cggcguccgcggcac

SEQ ID NO: 3105159 - RNA, 19 nt, Molluscum contagiosum virus
cggcguccgcggcacgcga

SEQ ID NO: 3105160 - RNA, 16 nt, Molluscum contagiosum virus
cggcguccggugcucg

SEQ ID NO: 3105161 - RNA, 19 nt, Molluscum contagiosum virus
cggcgucgaaacacugcgg

SEQ ID NO: 3105162 - RNA, 19 nt, Molluscum contagiosum virus
cggcgucgucgugaacgcg

SEQ ID NO: 3105163 - RNA, 21 nt, Molluscum contagiosum virus
cggcgccuguuuccgcucgcg

SEQ ID NO: 3105164 - RNA, 22 nt, Molluscum contagiosum virus
cggcgccuguuuccgcucgcgc

SEQ ID NO: 3105165 - RNA, 21 nt, Molluscum contagiosum virus
cggcgccuuugccacgccagc

SEQ ID NO: 3105166 - RNA, 17 nt, Molluscum contagiosum virus
cggcgcgaaaagucggg

SEQ ID NO: 3105167 - RNA, 21 nt, Molluscum contagiosum virus
cggcgagucgcgggcgcgcgc

SEQ ID NO: 3105168 - RNA, 19 nt, Molluscum contagiosum virus
cggcgcgacggcgacgcga

SEQ ID NO: 3105169 - RNA, 16 nt, Molluscum contagiosum virus
cggcgcgagaugcucg

SEQ ID NO: 3105170 - RNA, 14 nt, Molluscum contagiosum virus
cggcgcgcagcucg

SEQ ID NO: 3105171 - RNA, 15 nt, Molluscum contagiosum virus
cggcgcgccggcccg

SEQ ID NO: 3105172 - RNA, 13 nt, Molluscum contagiosum virus
cggcgcgcgccgc

SEQ ID NO: 3105173 - RNA, 16 nt, Molluscum contagiosum virus
cggcgcgcgcgcgcag

SEQ ID NO: 3105174 - RNA, 19 nt, Molluscum contagiosum virus
cggcgcgcgcgcgcaggcu

SEQ ID NO: 3105175 - RNA, 16 nt, Molluscum contagiosum virus
cggcgcgcgcgcuagc

SEQ ID NO: 3105176 - RNA, 14 nt, Molluscum contagiosum virus
cggcgcgcgcggcg

SEQ ID NO: 3105177 - RNA, 19 nt, Molluscum contagiosum virus
cggcgcuuucgcccgccgc

SEQ ID NO: 3105178 - RNA, 22 nt, Molluscum contagiosum virus
cggcgccgcuaccagcucgcgc

SEQ ID NO: 3105179 - RNA, 19 nt, Molluscum contagiosum virus
cggcgcggccuggccacgc

SEQ ID NO: 3105180 - RNA, 14 nt, Molluscum contagiosum virus
cggcgcggcuagca

SEQ ID NO: 3105181 - RNA, 15 nt, Molluscum contagiosum virus
cggcgcgggcaagca

SEQ ID NO: 3105182 - RNA, 22 nt, Molluscum contagiosum virus
cggcgcgugccagucgcgcgag

SEQ ID NO: 3105183 - RNA, 19 nt, Molluscum contagiosum virus
cggcgcgugccgcugcgcg

SEQ ID NO: 3105184 - RNA, 16 nt, Molluscum contagiosum virus
cggcgcgugcuccucg

SEQ ID NO: 3105185 - RNA, 23 nt, Molluscum contagiosum virus
cggcgcgugcugcggcugcugcc

SEQ ID NO: 3105186 - RNA, 19 nt, Molluscum contagiosum virus
cggcgcguuucggccugca

SEQ ID NO: 3105187 - RNA, 16 nt, Molluscum contagiosum virus
cggcgcuagcgcccgu

SEQ ID NO: 3105188 - RNA, 15 nt, Molluscum contagiosum virus
cggcgcuaugccgcg

SEQ ID NO: 3105189 - RNA, 14 nt, Molluscum contagiosum virus
cggcgcucacugcg

SEQ ID NO: 3105190 - RNA, 14 nt, Molluscum contagiosum virus
cggcgcugcgcgug

SEQ ID NO: 3105191 - RNA, 16 nt, Molluscum contagiosum virus
cggcucagcguggagc

SEQ ID NO: 3105192 - RNA, 20 nt, Molluscum contagiosum virus
cggcucagcguggagcaccu

SEQ ID NO: 3105193 - RNA, 14 nt, Molluscum contagiosum virus
cggcucccagcagc

SEQ ID NO: 3105194 - RNA, 15 nt, Molluscum contagiosum virus
cggcucugcguugcg

SEQ ID NO: 3105195 - RNA, 22 nt, Molluscum contagiosum virus
cggcugccgugcgggcgcggcg

SEQ ID NO: 3105196 - RNA, 13 nt, Molluscum contagiosum virus
cggcugcgccacc

SEQ ID NO: 3105197 - RNA, 16 nt, Molluscum contagiosum virus
cggcugcggcgcgacg

SEQ ID NO: 3105198 - RNA, 21 nt, Molluscum contagiosum virus
cggcuaagcucugcguuuugc

SEQ ID NO: 3105199 - RNA, 15 nt, Molluscum contagiosum virus
cggcuaggcgcggcg

SEQ ID NO: 3105200 - RNA, 13 nt, Molluscum contagiosum virus
cggcucaagaaca

SEQ ID NO: 3105201 - RNA, 17 nt, Molluscum contagiosum virus
cggcugugcccgcggcg

SEQ ID NO: 3105202 - RNA, 15 nt, Molluscum contagiosum virus
cggcuuacacacgca

SEQ ID NO: 3105203 - RNA, 14 nt, Molluscum contagiosum virus
cggcuucugcugca

SEQ ID NO: 3105204 - RNA, 17 nt, Molluscum contagiosum virus
cgggaaaacgcgcggca

SEQ ID NO: 3105205 - RNA, 20 nt, Molluscum contagiosum virus
cgggaaguguugccgccggc

SEQ ID NO: 3105206 - RNA, 21 nt, Molluscum contagiosum virus
cgggaaguguugccgccggcc

SEQ ID NO: 3105207 - RNA, 19 nt, Molluscum contagiosum virus
cgggaaugcugcgcacgcu

SEQ ID NO: 3105208 - RNA, 22 nt, Molluscum contagiosum virus
cgggacagacaucacgcguucg

SEQ ID NO: 3105209 - RNA, 22 nt, Molluscum contagiosum virus
cgggaccgcccuuguggacgcg

SEQ ID NO: 3105210 - RNA, 21 nt, Molluscum contagiosum virus
cgggaccucuuucucgcgccg

SEQ ID NO: 3105211 - RNA, 22 nt, Molluscum contagiosum virus
cgggacgagagggcgcgcgucg

SEQ ID NO: 3105212 - RNA, 17 nt, Molluscum contagiosum virus
cgggagcaacgaaccgu

SEQ ID NO: 3105213 - RNA, 21 nt, Molluscum contagiosum virus
cgggagcaagucugcgcagga

SEQ ID NO: 3105214 - RNA, 19 nt, Molluscum contagiosum virus
cgggacgcggaugccacgc

SEQ ID NO: 3105215 - RNA, 13 nt, Molluscum contagiosum virus
cgggacgcgugcc

SEQ ID NO: 3105216 - RNA, 18 nt, Molluscum contagiosum virus
cgggauacagcgcggaga

SEQ ID NO: 3105217 - RNA, 23 nt, Molluscum contagiosum virus
cgggaggcuccugccgucgcccg

SEQ ID NO: 3105218 - RNA, 19 nt, Molluscum contagiosum virus
cgggaggcucucgagcacu

SEQ ID NO: 3105219 - RNA, 21 nt, Molluscum contagiosum virus
cgggaucggacgcagacgcgc

SEQ ID NO: 3105220 - RNA, 21 nt, Molluscum contagiosum virus
cgggauggucucgcugcuggg

SEQ ID NO: 3105221 - RNA, 22 nt, Molluscum contagiosum virus
cgggauuugccgguugcgcgug

SEQ ID NO: 3105222 - RNA, 18 nt, Molluscum contagiosum virus
cgggcacauggacggcgc

SEQ ID NO: 3105223 - RNA, 20 nt, Molluscum contagiosum virus
cgggcaccggcgcucacugc

SEQ ID NO: 3105224 - RNA, 12 nt, Molluscum contagiosum virus
cgggcacgagca

SEQ ID NO: 3105225 - RNA, 15 nt, Molluscum contagiosum virus
cgggcacgagcacgu

SEQ ID NO: 3105226 - RNA, 23 nt, Molluscum contagiosum virus
cgggcacgccgcagcgcuggagc

SEQ ID NO: 3105227 - RNA, 17 nt, Molluscum contagiosum virus
cgggcacgcgcgcgccu

SEQ ID NO: 3105228 - RNA, 20 nt, Molluscum contagiosum virus
cgggcacgcucauacuccug

SEQ ID NO: 3105229 - RNA, 16 nt, Molluscum contagiosum virus
cgggcacgugcugcug

SEQ ID NO: 3105230 - RNA, 21 nt, Molluscum contagiosum virus
cgggcacgugcugcugcggcu

SEQ ID NO: 3105231 - RNA, 16 nt, Molluscum contagiosum virus
cgggcacuucucgcgc

SEQ ID NO: 3105232 - RNA, 22 nt, Molluscum contagiosum virus
cgggcacuucucgcgcgacacg

SEQ ID NO: 3105233 - RNA, 18 nt, Molluscum contagiosum virus
cgggcccaccgcgccagc

SEQ ID NO: 3105234 - RNA, 15 nt, Molluscum contagiosum virus
cgggccggcgcgccg

SEQ ID NO: 3105235 - RNA, 16 nt, Molluscum contagiosum virus
cgggccccugcgcgag

SEQ ID NO: 3105236 - RNA, 17 nt, Molluscum contagiosum virus
cgggccccugcgcgagc

SEQ ID NO: 3105237 - RNA, 18 nt, Molluscum contagiosum virus
cgggccccugcgcgagca

SEQ ID NO: 3105238 - RNA, 21 nt, Molluscum contagiosum virus
cgggccccugucgcgcacgag

SEQ ID NO: 3105239 - RNA, 14 nt, Molluscum contagiosum virus
cgggcccgacacgu

SEQ ID NO: 3105240 - RNA, 22 nt, Molluscum contagiosum virus
cgggcccgccuuuguggacgcg

SEQ ID NO: 3105241 - RNA, 22 nt, Molluscum contagiosum virus
cgggcccggguuugugcccgag

SEQ ID NO: 3105242 - RNA, 16 nt, Molluscum contagiosum virus
cgggcccgugcccgag

SEQ ID NO: 3105243 - RNA, 22 nt, Molluscum contagiosum virus
cgggcccgugcucaggccagca

SEQ ID NO: 3105244 - RNA, 18 nt, Molluscum contagiosum virus
cgggcccuucuugacgcg

SEQ ID NO: 3105245 - RNA, 16 nt, Molluscum contagiosum virus
cgggccgccgcccgcg

SEQ ID NO: 3105246 - RNA, 17 nt, Molluscum contagiosum virus
cgggccgccgcccgcga

SEQ ID NO: 3105247 - RNA, 21 nt, Molluscum contagiosum virus
aggaccucgcgcgccgccgca

SEQ ID NO: 3105248 - RNA, 14 nt, Molluscum contagiosum virus
aggacgcgcggagc

SEQ ID NO: 3105249 - RNA, 19 nt, Molluscum contagiosum virus
aggacgcguucuccaggaa

SEQ ID NO: 3105250 - RNA, 22 nt, Molluscum contagiosum virus
aggaacugcccgcgucgcgcac

SEQ ID NO: 3105251 - RNA, 17 nt, Molluscum contagiosum virus
aggacaaagucgcgcgc

SEQ ID NO: 3105252 - RNA, 16 nt, Molluscum contagiosum virus
aggacacgcgcacgcg

SEQ ID NO: 3105253 - RNA, 17 nt, Molluscum contagiosum virus
aggaagggcccgcggcu

SEQ ID NO: 3105254 - RNA, 18 nt, Molluscum contagiosum virus
aggaauguguacgacgcg

SEQ ID NO: 3105255 - RNA, 13 nt, Molluscum contagiosum virus
aggagagcggcgc

SEQ ID NO: 3105256 - RNA, 17 nt, Molluscum contagiosum virus
aggagagcggcgccccu

SEQ ID NO: 3105257 - RNA, 17 nt, Molluscum contagiosum virus
aggaugcuggugucgag

SEQ ID NO: 3105258 - RNA, 20 nt, Molluscum contagiosum virus
aggcaaaagccgccgcgcgc

SEQ ID NO: 3105259 - RNA, 14 nt, Molluscum contagiosum virus
aggagccgcccgcg

SEQ ID NO: 3105260 - RNA, 21 nt, Molluscum contagiosum virus
aggagccucuguccugcgugc

SEQ ID NO: 3105261 - RNA, 19 nt, Molluscum contagiosum virus
aggagcuccgugcugcggc

SEQ ID NO: 3105262 - RNA, 14 nt, Molluscum contagiosum virus
aggagcugcgcgag

SEQ ID NO: 3105263 - RNA, 18 nt, Molluscum contagiosum virus
aggaggccaacgccagcu

SEQ ID NO: 3105264 - RNA, 14 nt, Molluscum contagiosum virus
aggauacgcccgcg

SEQ ID NO: 3105265 - RNA, 18 nt, Molluscum contagiosum virus
aggaucacgaugugcgcg

SEQ ID NO: 3105266 - RNA, 19 nt, Molluscum contagiosum virus
agcgggcaaugggcacgcu

SEQ ID NO: 3105267 - RNA, 18 nt, Molluscum contagiosum virus
agcguacggcccgaaggc

SEQ ID NO: 3105268 - RNA, 16 nt, Molluscum contagiosum virus
agcuggcguugccgag

SEQ ID NO: 3105269 - RNA, 17 nt, Molluscum contagiosum virus
agcugguagagaacgac

SEQ ID NO: 3105270 - RNA, 15 nt, Molluscum contagiosum virus
agcuuggugcgcucg

SEQ ID NO: 3105271 - RNA, 13 nt, Molluscum contagiosum virus
aggaaacgcagca

SEQ ID NO: 3105272 - RNA, 18 nt, Molluscum contagiosum virus
aggaaaggcacccgcagg

SEQ ID NO: 3105273 - RNA, 17 nt, Molluscum contagiosum virus
agcuguaccuggugcgc

SEQ ID NO: 3105274 - RNA, 21 nt, Molluscum contagiosum virus
agcuguagcaggaucggagcg

SEQ ID NO: 3105275 - RNA, 18 nt, Molluscum contagiosum virus
agcuucaucaagcacggc

SEQ ID NO: 3105276 - RNA, 19 nt, Molluscum contagiosum virus
agcuuccucaaggcgcacg

SEQ ID NO: 3105277 - RNA, 15 nt, Molluscum contagiosum virus
agcuucggacgagcu

SEQ ID NO: 3105278 - RNA, 21 nt, Molluscum contagiosum virus
agcuucuccggaggccgcucc

SEQ ID NO: 3105279 - RNA, 22 nt, Molluscum contagiosum virus
agcgcugccugugcuacgcgag

SEQ ID NO: 3105280 - RNA, 17 nt, Molluscum contagiosum virus
agcgcuucuuccggcag

SEQ ID NO: 3105281 - RNA, 17 nt, Molluscum contagiosum virus
agcggacguggucgcgc

SEQ ID NO: 3105282 - RNA, 21 nt, Molluscum contagiosum virus
agcggagaaaaggaagcuugc

SEQ ID NO: 3105283 - RNA, 15 nt, Molluscum contagiosum virus
agcggcaagccgugc

SEQ ID NO: 3105284 - RNA, 16 nt, Molluscum contagiosum virus
agcggcgcgcgcugag

SEQ ID NO: 3105285 - RNA, 14 nt, Molluscum contagiosum virus
agcggcggacagca

SEQ ID NO: 3105286 - RNA, 18 nt, Molluscum contagiosum virus
agcgccgucucgcggaag

SEQ ID NO: 3105287 - RNA, 20 nt, Molluscum contagiosum virus
agcggcgacuugcugcggag

SEQ ID NO: 3105288 - RNA, 12 nt, Molluscum contagiosum virus
agcggcgccgac

SEQ ID NO: 3105289 - RNA, 18 nt, Molluscum contagiosum virus
agugugccugcugcgcuu

SEQ ID NO: 3105290 - RNA, 17 nt, Molluscum contagiosum virus
aguuauucucugcgcgc

SEQ ID NO: 3105291 - RNA, 19 nt, Molluscum contagiosum virus
aguucucgcguucgcguuc

SEQ ID NO: 3105292 - RNA, 19 nt, Molluscum contagiosum virus
aguucugcacagcacaggc

SEQ ID NO: 3105293 - RNA, 20 nt, Molluscum contagiosum virus
aguucgagcugcugcgcgag

SEQ ID NO: 3105294 - RNA, 15 nt, Molluscum contagiosum virus
aguuccgaucgcgag

SEQ ID NO: 3105295 - RNA, 20 nt, Molluscum contagiosum virus
aggcaccugcggcucgcacu

SEQ ID NO: 3105296 - RNA, 15 nt, Molluscum contagiosum virus
aggcagcugcugcgc

SEQ ID NO: 3105297 - RNA, 15 nt, Molluscum contagiosum virus
aggccaccucgcacg

SEQ ID NO: 3105298 - RNA, 14 nt, Molluscum contagiosum virus
aggccagcacaagc

SEQ ID NO: 3105299 - RNA, 16 nt, Molluscum contagiosum virus
aggcacuccagcgcgc

SEQ ID NO: 3105300 - RNA, 13 nt, Molluscum contagiosum virus
aggcacuccgcgc

SEQ ID NO: 3105301 - RNA, 19 nt, Molluscum contagiosum virus
aggcacucgucgcgcugcu

SEQ ID NO: 3105302 - RNA, 15 nt, Molluscum contagiosum virus
aggcagccgcggcgc

SEQ ID NO: 3105303 - RNA, 20 nt, Molluscum contagiosum virus
aggcagccgcggcgcccggu

SEQ ID NO: 3105304 - RNA, 18 nt, Molluscum contagiosum virus
aggcaaagccugcugcgc

SEQ ID NO: 3105305 - RNA, 18 nt, Molluscum contagiosum virus
aggcaaagcggggcgcgc

SEQ ID NO: 3105306 - RNA, 20 nt, Molluscum contagiosum virus
aggcaaagcggggcgcgcgc

SEQ ID NO: 3105307 - RNA, 13 nt, Molluscum contagiosum virus
aggcaagcgggcu

SEQ ID NO: 3105308 - RNA, 21 nt, Molluscum contagiosum virus
agugccgggcgccggcucugc

SEQ ID NO: 3105309 - RNA, 22 nt, Molluscum contagiosum virus
agugcgagaucgacugcgccuu

SEQ ID NO: 3105310 - RNA, 17 nt, Molluscum contagiosum virus
agugcgagccgugaccu

SEQ ID NO: 3105311 - RNA, 17 nt, Molluscum contagiosum virus
agugcgccgcgcccgcg

SEQ ID NO: 3105312 - RNA, 17 nt, Molluscum contagiosum virus
agugcacaccggcgcgc

SEQ ID NO: 3105313 - RNA, 13 nt, Molluscum contagiosum virus
agugcaccagcac

SEQ ID NO: 3105314 - RNA, 20 nt, Molluscum contagiosum virus
agugcucccgaggcgcgcuc

SEQ ID NO: 3105315 - RNA, 22 nt, Molluscum contagiosum virus
agugcccggaauuauguguagu

SEQ ID NO: 3105316 - RNA, 15 nt, Molluscum contagiosum virus
agugccgagcgugca

SEQ ID NO: 3105317 - RNA, 15 nt, Molluscum contagiosum virus
aguggccgucgcgag

SEQ ID NO: 3105318 - RNA, 15 nt, Molluscum contagiosum virus
aguggcgcucgcgag

SEQ ID NO: 3105319 - RNA, 17 nt, Molluscum contagiosum virus
agcacuguacgcacgca

SEQ ID NO: 3105320 - RNA, 21 nt, Molluscum contagiosum virus
agcacgccagguguuccugcc

SEQ ID NO: 3105321 - RNA, 15 nt, Molluscum contagiosum virus
agcacgcgugugcga

SEQ ID NO: 3105322 - RNA, 16 nt, Molluscum contagiosum virus
agcacgucuugcgcgg

SEQ ID NO: 3105323 - RNA, 21 nt, Molluscum contagiosum virus
agcacguuguucuugcgcgug

SEQ ID NO: 3105324 - RNA, 14 nt, Molluscum contagiosum virus
agcaagcgcccgcg

SEQ ID NO: 3105325 - RNA, 14 nt, Molluscum contagiosum virus
agcacaccgucgcg

SEQ ID NO: 3105326 - RNA, 21 nt, Molluscum contagiosum virus
agcaccgccugcugcagcucc

SEQ ID NO: 3105327 - RNA, 15 nt, Molluscum contagiosum virus
agcaccugcgcuucc

SEQ ID NO: 3105328 - RNA, 16 nt, Molluscum contagiosum virus
agcacgacggucuucc

SEQ ID NO: 3105329 - RNA, 23 nt, Molluscum contagiosum virus
agcagcucggcgagagcgcgcag

SEQ ID NO: 3105330 - RNA, 20 nt, Molluscum contagiosum virus
agcagcugcugcgcacgugc

SEQ ID NO: 3105331 - RNA, 18 nt, Molluscum contagiosum virus
agcagcugcugcgcuucg

SEQ ID NO: 3105332 - RNA, 19 nt, Molluscum contagiosum virus
agcaggacgacgacacagc

SEQ ID NO: 3105333 - RNA, 15 nt, Molluscum contagiosum virus
agcaggugcacgugc

SEQ ID NO: 3105334 - RNA, 16 nt, Molluscum contagiosum virus
agcagguucucgcaca

SEQ ID NO: 3105335 - RNA, 15 nt, Molluscum contagiosum virus
agcagugccgcucgc

SEQ ID NO: 3105336 - RNA, 17 nt, Molluscum contagiosum virus
agcagccccgacgccag

SEQ ID NO: 3105337 - RNA, 14 nt, Molluscum contagiosum virus
agcagcgcgcgcag

SEQ ID NO: 3105338 - RNA, 15 nt, Molluscum contagiosum virus
agcagcggcgcgugc

SEQ ID NO: 3105339 - RNA, 19 nt, Molluscum contagiosum virus
agcagcggucucggcagca

SEQ ID NO: 3105340 - RNA, 19 nt, Molluscum contagiosum virus
agcagcuccagcauggcgc

SEQ ID NO: 3105341 - RNA, 23 nt, Molluscum contagiosum virus
agcaugccgccgcguacgcgccg

SEQ ID NO: 3105342 - RNA, 19 nt, Molluscum contagiosum virus
agccacgaagagucgcgcc

SEQ ID NO: 3105343 - RNA, 23 nt, Molluscum contagiosum virus
agcgccagcuuggugcgcucgag

SEQ ID NO: 3105344 - RNA, 15 nt, Molluscum contagiosum virus
agcgcgugccgcucg

SEQ ID NO: 3105345 - RNA, 11 nt, Molluscum contagiosum virus
agcgcgugucu

SEQ ID NO: 3105346 - RNA, 17 nt, Molluscum contagiosum virus
agcgcguucgcgcgugc

SEQ ID NO: 3105347 - RNA, 20 nt, Molluscum contagiosum virus
agcgcguucgcgcgugcugg

SEQ ID NO: 3105348 - RNA, 15 nt, Molluscum contagiosum virus
agcgccgccaugcug

SEQ ID NO: 3105349 - RNA, 21 nt, Molluscum contagiosum virus
agcgccgccaugcugcgcgag

SEQ ID NO: 3105350 - RNA, 15 nt, Molluscum contagiosum virus
agcgccgcucgcacg

SEQ ID NO: 3105351 - RNA, 19 nt, Molluscum contagiosum virus
agcgccgcucgcacggcga

SEQ ID NO: 3105352 - RNA, 14 nt, Molluscum contagiosum virus
agcgccuugccgag

SEQ ID NO: 3105353 - RNA, 20 nt, Molluscum contagiosum virus
agcgcgaauuggccgcggag

SEQ ID NO: 3105354 - RNA, 14 nt, Molluscum contagiosum virus
agcgcgagcugugc

SEQ ID NO: 3105355 - RNA, 13 nt, Molluscum contagiosum virus
agcgcgagcuugc

SEQ ID NO: 3105356 - RNA, 20 nt, Molluscum contagiosum virus
agcgcgaguacaagcucgac

SEQ ID NO: 3105357 - RNA, 15 nt, Molluscum contagiosum virus
agcgcgcaguugugc

SEQ ID NO: 3105358 - RNA, 12 nt, Molluscum contagiosum virus
agcgcgccgcgc

SEQ ID NO: 3105359 - RNA, 17 nt, Molluscum contagiosum virus
agcgcgccgcgcgcucg

SEQ ID NO: 3105360 - RNA, 18 nt, Molluscum contagiosum virus
agcgcgccgcucgcgcuc

SEQ ID NO: 3105361 - RNA, 14 nt, Molluscum contagiosum virus
agcgcgccucucga

SEQ ID NO: 3105362 - RNA, 22 nt, Molluscum contagiosum virus
agcgcgcgccgacgugcgcgug

SEQ ID NO: 3105363 - RNA, 15 nt, Molluscum contagiosum virus
agcgcgcgcugcgcg

SEQ ID NO: 3105364 - RNA, 13 nt, Molluscum contagiosum virus
agcgcgcugcaca

SEQ ID NO: 3105365 - RNA, 13 nt, Molluscum contagiosum virus
agcgcgcugcgcc

SEQ ID NO: 3105366 - RNA, 14 nt, Molluscum contagiosum virus
agcgcgcugcgccg

SEQ ID NO: 3105367 - RNA, 15 nt, Molluscum contagiosum virus
agcgcgcuggacuug

SEQ ID NO: 3105368 - RNA, 21 nt, Molluscum contagiosum virus
agcgcgcuggacuugcgcgag

SEQ ID NO: 3105369 - RNA, 14 nt, Molluscum contagiosum virus
agcgcggagcuggc

SEQ ID NO: 3105370 - RNA, 19 nt, Molluscum contagiosum virus
agcgcggcaacagcacgac

SEQ ID NO: 3105371 - RNA, 16 nt, Molluscum contagiosum virus
agcgcggccgcgcucg

SEQ ID NO: 3105372 - RNA, 18 nt, Molluscum contagiosum virus
agcgcggccgcgcucguc

SEQ ID NO: 3105373 - RNA, 14 nt, Molluscum contagiosum virus
agaucaacgcgcgc

SEQ ID NO: 3105374 - RNA, 12 nt, Molluscum contagiosum virus
agaucacggcgu

SEQ ID NO: 3105375 - RNA, 18 nt, Molluscum contagiosum virus
agaucaggcagcugcugc

SEQ ID NO: 3105376 - RNA, 18 nt, Molluscum contagiosum virus
agagcuggcaccgggcgc

SEQ ID NO: 3105377 - RNA, 14 nt, Molluscum contagiosum virus
agaggaaagcgcac

SEQ ID NO: 3105378 - RNA, 17 nt, Molluscum contagiosum virus
agaugcgagcgcgucug

SEQ ID NO: 3105379 - RNA, 15 nt, Molluscum contagiosum virus
acgacccucuucgac

SEQ ID NO: 3105380 - RNA, 22 nt, Molluscum contagiosum virus
acgaccgcaagugcacgcggcg

SEQ ID NO: 3105381 - RNA, 23 nt, Molluscum contagiosum virus
acgaccgcaagugcacgcggcgc

SEQ ID NO: 3105382 - RNA, 18 nt, Molluscum contagiosum virus
acgaccgcgcacgcagca

SEQ ID NO: 3105383 - RNA, 22 nt, Molluscum contagiosum virus
agagcucguggacagccugcac

SEQ ID NO: 3105384 - RNA, 13 nt, Molluscum contagiosum virus
acgacggcacgcu

SEQ ID NO: 3105385 - RNA, 15 nt, Molluscum contagiosum virus
acgacggcugcucgc

SEQ ID NO: 3105386 - RNA, 20 nt, Molluscum contagiosum virus
agagcgguuccugcuucucg

SEQ ID NO: 3105387 - RNA, 19 nt, Molluscum contagiosum virus
agagcguccagccgcagcc

SEQ ID NO: 3105388 - RNA, 16 nt, Molluscum contagiosum virus
agagcuccccgcgcgc

SEQ ID NO: 3105389 - RNA, 21 nt, Molluscum contagiosum virus
agagcuccccgcgcgcagcgc

SEQ ID NO: 3105390 - RNA, 15 nt, Molluscum contagiosum virus
acgacaugcucgcgc

SEQ ID NO: 3105391 - RNA, 16 nt, Molluscum contagiosum virus
acgacaugcugugcgg

SEQ ID NO: 3105392 - RNA, 22 nt, Molluscum contagiosum virus
acgacaugcugugcggcacgcc

SEQ ID NO: 3105393 - RNA, 14 nt, Molluscum contagiosum virus
acgaacgcugcagc

SEQ ID NO: 3105394 - RNA, 23 nt, Molluscum contagiosum virus
acgaacaugggguuucggaacgc

SEQ ID NO: 3105395 - RNA, 15 nt, Molluscum contagiosum virus
acgaaccgugcgagc

SEQ ID NO: 3105396 - RNA, 17 nt, Molluscum contagiosum virus
acgaacgacagcgccgc

SEQ ID NO: 3105397 - RNA, 20 nt, Molluscum contagiosum virus
acgaaucgccgucuuuacgu

SEQ ID NO: 3105398 - RNA, 18 nt, Molluscum contagiosum virus
acgacaauacggugcagc

SEQ ID NO: 3105399 - RNA, 20 nt, Molluscum contagiosum virus
acgacacagcccuggacgac

SEQ ID NO: 3105400 - RNA, 13 nt, Molluscum contagiosum virus
acgacacuggcgc

SEQ ID NO: 3105401 - RNA, 20 nt, Molluscum contagiosum virus
acgacagcgccgccaccucg

SEQ ID NO: 3105402 - RNA, 12 nt, Molluscum contagiosum virus
accuggccuucg

SEQ ID NO: 3105403 - RNA, 14 nt, Molluscum contagiosum virus
accugggcgucgug

SEQ ID NO: 3105404 - RNA, 14 nt, Molluscum contagiosum virus
accugucgcgcgag

SEQ ID NO: 3105405 - RNA, 19 nt, Molluscum contagiosum virus
accugcucgggcugcgcgg

SEQ ID NO: 3105406 - RNA, 14 nt, Molluscum contagiosum virus
accuggaacgcgag

SEQ ID NO: 3105407 - RNA, 17 nt, Molluscum contagiosum virus
accugucggagcaggac

SEQ ID NO: 3105408 - RNA, 18 nt, Molluscum contagiosum virus
accuucaggacgcaggac

SEQ ID NO: 3105409 - RNA, 19 nt, Molluscum contagiosum virus
accuguucuuucagcgcgc

SEQ ID NO: 3105410 - RNA, 23 nt, Molluscum contagiosum virus
accuguucuuucagcgcgcgcag

SEQ ID NO: 3105411 - RNA, 14 nt, Molluscum contagiosum virus
accuuccugggcgg

SEQ ID NO: 3105412 - RNA, 16 nt, Molluscum contagiosum virus
aauguguacgacgcgc

SEQ ID NO: 3105413 - RNA, 13 nt, Molluscum contagiosum virus
aauuccgugucgu

SEQ ID NO: 3105414 - RNA, 20 nt, Molluscum contagiosum virus
acaacaaguuccccgugagc

SEQ ID NO: 3105415 - RNA, 16 nt, Molluscum contagiosum virus
acaaggaggcuuucuu

SEQ ID NO: 3105416 - RNA, 21 nt, Molluscum contagiosum virus
acaagucgucgaucgccucga

SEQ ID NO: 3105417 - RNA, 18 nt, Molluscum contagiosum virus
acaaucucugcgccgcgc

SEQ ID NO: 3105418 - RNA, 16 nt, Molluscum contagiosum virus
acacauggccgcgcgc

SEQ ID NO: 3105419 - RNA, 12 nt, Molluscum contagiosum virus
acaccaugcagc

SEQ ID NO: 3105420 - RNA, 12 nt, Molluscum contagiosum virus
acacacucgcgc

SEQ ID NO: 3105421 - RNA, 16 nt, Molluscum contagiosum virus
acacacucgcgcgucc

SEQ ID NO: 3105422 - RNA, 20 nt, Molluscum contagiosum virus
acaccuggcgagcgcucugc

SEQ ID NO: 3105423 - RNA, 13 nt, Molluscum contagiosum virus
accagcugccgcu

SEQ ID NO: 3105424 - RNA, 16 nt, Molluscum contagiosum virus
accaguacaucaccgc

SEQ ID NO: 3105425 - RNA, 13 nt, Molluscum contagiosum virus
accagugcgccuc

SEQ ID NO: 3105426 - RNA, 14 nt, Molluscum contagiosum virus
accaucaucgcgcu

SEQ ID NO: 3105427 - RNA, 20 nt, Molluscum contagiosum virus
accaugcggcguacgcgcag

SEQ ID NO: 3105428 - RNA, 23 nt, Molluscum contagiosum virus
acaccgagaucaugggcgugcuc

SEQ ID NO: 3105429 - RNA, 19 nt, Molluscum contagiosum virus
acaacucauagcgccacga

SEQ ID NO: 3105430 - RNA, 16 nt, Molluscum contagiosum virus
acaacucugcucgugc

SEQ ID NO: 3105431 - RNA, 15 nt, Molluscum contagiosum virus
acaagaagcgcuucu

SEQ ID NO: 3105432 - RNA, 23 nt, Molluscum contagiosum virus
acaagaagcgcuucuuugcgcgc

SEQ ID NO: 3105433 - RNA, 22 nt, Molluscum contagiosum virus
acaagcguaagccaccgcgcag

SEQ ID NO: 3105434 - RNA, 16 nt, Molluscum contagiosum virus
acaagcguguucgugc

SEQ ID NO: 3105435 - RNA, 19 nt, Molluscum contagiosum virus
acaagcugcaccggcgcga

SEQ ID NO: 3105436 - RNA, 16 nt, Molluscum contagiosum virus
acaaagggguccgcgu

SEQ ID NO: 3105437 - RNA, 22 nt, Molluscum contagiosum virus
accugauuuucccgggcggcgc

SEQ ID NO: 3105438 - RNA, 18 nt, Molluscum contagiosum virus
accugcacgagccggcgc

SEQ ID NO: 3105439 - RNA, 22 nt, Molluscum contagiosum virus
acccuggcugcugcgcgaccgc

SEQ ID NO: 3105440 - RNA, 18 nt, Molluscum contagiosum virus
accucugagcgagcgcag

SEQ ID NO: 3105441 - RNA, 23 nt, Molluscum contagiosum virus
accugcaggaaaggcacccgcag

SEQ ID NO: 3105442 - RNA, 22 nt, Molluscum contagiosum virus
accugcaggcucuaagcgcacg

SEQ ID NO: 3105443 - RNA, 19 nt, Molluscum contagiosum virus
accugcauugagcucgcgc

SEQ ID NO: 3105444 - RNA, 17 nt, Molluscum contagiosum virus
accugcgcaacgugcug

SEQ ID NO: 3105445 - RNA, 17 nt, Molluscum contagiosum virus
accugcggcugcggcgc

SEQ ID NO: 3105446 - RNA, 21 nt, Molluscum contagiosum virus
acccucgcaagcugagcgcgc

SEQ ID NO: 3105447 - RNA, 23 nt, Molluscum contagiosum virus
acccucgcaagcugagcgcgcug

SEQ ID NO: 3105448 - RNA, 13 nt, Molluscum contagiosum virus
acccggcacgugc

SEQ ID NO: 3105449 - RNA, 16 nt, Molluscum contagiosum virus
acccggcucgcucauc

SEQ ID NO: 3105450 - RNA, 22 nt, Molluscum contagiosum virus
acccgcgcucgacgcgugcaug

SEQ ID NO: 3105451 - RNA, 17 nt, Molluscum contagiosum virus
acccgugcccgcuccgc

SEQ ID NO: 3105452 - RNA, 18 nt, Molluscum contagiosum virus
acccgugcgcgcgcugag

SEQ ID NO: 3105453 - RNA, 18 nt, Molluscum contagiosum virus
accccaagaagaacgucu

SEQ ID NO: 3105454 - RNA, 18 nt, Molluscum contagiosum virus
acccaucggagaagugcu

SEQ ID NO: 3105455 - RNA, 22 nt, Molluscum contagiosum virus
accccagugcgagaucgacugc

SEQ ID NO: 3105456 - RNA, 21 nt, Molluscum contagiosum virus
accccgagcugcggcgcgugc

SEQ ID NO: 3105457 - RNA, 13 nt, Molluscum contagiosum virus
accccgagggcgc

SEQ ID NO: 3105458 - RNA, 20 nt, Molluscum contagiosum virus
accccuugcuacaggacguc

SEQ ID NO: 3105459 - RNA, 10 nt, Molluscum contagiosum virus
accccgccgc

SEQ ID NO: 3105460 - RNA, 13 nt, Molluscum contagiosum virus
accccgccgcgua

SEQ ID NO: 3105461 - RNA, 21 nt, Molluscum contagiosum virus
acccgcaggaaaggcaccccg

SEQ ID NO: 3105462 - RNA, 23 nt, Molluscum contagiosum virus
acccgcaggaaagguacccgcag

SEQ ID NO: 3105463 - RNA, 14 nt, Molluscum contagiosum virus
accccgcugggccg

SEQ ID NO: 3105464 - RNA, 22 nt, Molluscum contagiosum virus
ccacaccgggaauggccgcgag

SEQ ID NO: 3105465 - RNA, 23 nt, Molluscum contagiosum virus
ccacaggcgcgaacucgcggcag

SEQ ID NO: 3105466 - RNA, 22 nt, Molluscum contagiosum virus
ccacauuucaaaaacgcgcccc

SEQ ID NO: 3105467 - RNA, 15 nt, Molluscum contagiosum virus
ccacaaagacgggcc

SEQ ID NO: 3105468 - RNA, 13 nt, Molluscum contagiosum virus
ccaagugcgcgug

SEQ ID NO: 3105469 - RNA, 20 nt, Molluscum contagiosum virus
ccaaggccgcgggcgcggag

SEQ ID NO: 3105470 - RNA, 17 nt, Molluscum contagiosum virus
ccaaggagcugcgcgag

SEQ ID NO: 3105471 - RNA, 16 nt, Molluscum contagiosum virus
caucggcgccgccccg

SEQ ID NO: 3105472 - RNA, 17 nt, Molluscum contagiosum virus
caucggcuccgcgcccg

SEQ ID NO: 3105473 - RNA, 14 nt, Molluscum contagiosum virus
caucgggcugcagc

SEQ ID NO: 3105474 - RNA, 13 nt, Molluscum contagiosum virus
caucgggcugucg

SEQ ID NO: 3105475 - RNA, 17 nt, Molluscum contagiosum virus
ccaagcucuggcuugcg

SEQ ID NO: 3105476 - RNA, 19 nt, Molluscum contagiosum virus
ccacgccgucgaaguacuu

SEQ ID NO: 3105477 - RNA, 18 nt, Molluscum contagiosum virus
ccacgcgcaugaggcggc

SEQ ID NO: 3105478 - RNA, 11 nt, Molluscum contagiosum virus
ccacgcgcccg

SEQ ID NO: 3105479 - RNA, 13 nt, Molluscum contagiosum virus
ccacgcgggcccg

SEQ ID NO: 3105480 - RNA, 14 nt, Molluscum contagiosum virus
ccacgcgggcccgu

SEQ ID NO: 3105481 - RNA, 13 nt, Molluscum contagiosum virus
ccacgcgugcgcg

SEQ ID NO: 3105482 - RNA, 14 nt, Molluscum contagiosum virus
ccacgcgugcugcg

SEQ ID NO: 3105483 - RNA, 13 nt, Molluscum contagiosum virus
ccacgagcgccgc

SEQ ID NO: 3105484 - RNA, 22 nt, Molluscum contagiosum virus
ccacgagcgccgcgugcgcgcg

SEQ ID NO: 3105485 - RNA, 16 nt, Molluscum contagiosum virus
ccacgacauggaccgc

SEQ ID NO: 3105486 - RNA, 14 nt, Molluscum contagiosum virus
ccacgcagcuggcg

SEQ ID NO: 3105487 - RNA, 21 nt, Molluscum contagiosum virus
ccacgcccgagggcgggcacg

SEQ ID NO: 3105488 - RNA, 16 nt, Molluscum contagiosum virus
ccaccguggaggagcc

SEQ ID NO: 3105489 - RNA, 19 nt, Molluscum contagiosum virus
ccaccuggaaaagcgcgag

SEQ ID NO: 3105490 - RNA, 19 nt, Molluscum contagiosum virus
ccacgaacgacagcgccgc

SEQ ID NO: 3105491 - RNA, 17 nt, Molluscum contagiosum virus
ccacgaagaacgcggcg

SEQ ID NO: 3105492 - RNA, 15 nt, Molluscum contagiosum virus
ccaccuucaggacgc

SEQ ID NO: 3105493 - RNA, 17 nt, Molluscum contagiosum virus
ccaccacguggaccuga

SEQ ID NO: 3105494 - RNA, 14 nt, Molluscum contagiosum virus
ccaccgcggcgcgg

SEQ ID NO: 3105495 - RNA, 13 nt, Molluscum contagiosum virus
auucccguggacc

SEQ ID NO: 3105496 - RNA, 19 nt, Molluscum contagiosum virus
auucgcgcgcccccgcaaa

SEQ ID NO: 3105497 - RNA, 20 nt, Molluscum contagiosum virus
auucggcguacgugcgccag

SEQ ID NO: 3105498 - RNA, 14 nt, Molluscum contagiosum virus
auugccacgcaaaa

SEQ ID NO: 3105499 - RNA, 20 nt, Molluscum contagiosum virus
auuucguugauuugcgcacc

SEQ ID NO: 3105500 - RNA, 20 nt, Molluscum contagiosum virus
auuacgcugccgugagcacg

SEQ ID NO: 3105501 - RNA, 18 nt, Molluscum contagiosum virus
auucacuuucgucgccuc

SEQ ID NO: 3105502 - RNA, 19 nt, Molluscum contagiosum virus
auacaccggcuuggccaag

SEQ ID NO: 3105503 - RNA, 15 nt, Molluscum contagiosum virus
auguugugcucgugu

SEQ ID NO: 3105504 - RNA, 16 nt, Molluscum contagiosum virus
augugcuggucaagaa

SEQ ID NO: 3105505 - RNA, 14 nt, Molluscum contagiosum virus
cauccgcgagcacc

SEQ ID NO: 3105506 - RNA, 14 nt, Molluscum contagiosum virus
cauccuccacgcug

SEQ ID NO: 3105507 - RNA, 14 nt, Molluscum contagiosum virus
cauccggcacgcac

SEQ ID NO: 3105508 - RNA, 16 nt, Molluscum contagiosum virus
cauccggccgaggcac

SEQ ID NO: 3105509 - RNA, 15 nt, Molluscum contagiosum virus
caucgacgagcacga

SEQ ID NO: 3105510 - RNA, 13 nt, Molluscum contagiosum virus
caucgcgcugcug

SEQ ID NO: 3105511 - RNA, 15 nt, Molluscum contagiosum virus
caucgcgcugcuggu

SEQ ID NO: 3105512 - RNA, 17 nt, Molluscum contagiosum virus
caucgcggagcugcgcg

SEQ ID NO: 3105513 - RNA, 21 nt, Molluscum contagiosum virus
caucggagaagugcuccgcac

SEQ ID NO: 3105514 - RNA, 17 nt, Molluscum contagiosum virus
cauccagccgucgccgc

SEQ ID NO: 3105515 - RNA, 22 nt, Molluscum contagiosum virus
cauccagccgucgccgcgcccg

SEQ ID NO: 3105516 - RNA, 18 nt, Molluscum contagiosum virus
caucaucgccagcaucaa

SEQ ID NO: 3105517 - RNA, 15 nt, Molluscum contagiosum virus
cauacuccugcuggc

SEQ ID NO: 3105518 - RNA, 14 nt, Molluscum contagiosum virus
cauagcgccacgag

SEQ ID NO: 3105519 - RNA, 19 nt, Molluscum contagiosum virus
auuucuuuuuccgggacgc

SEQ ID NO: 3105520 - RNA, 14 nt, Molluscum contagiosum virus
aacccucgcaagcu

SEQ ID NO: 3105521 - RNA, 17 nt, Molluscum contagiosum virus
aaccuacuugcucgugu

SEQ ID NO: 3105522 - RNA, 15 nt, Molluscum contagiosum virus
aaccgcgugcgcagu

SEQ ID NO: 3105523 - RNA, 17 nt, Molluscum contagiosum virus
aaccagcuggcgcccgc

SEQ ID NO: 3105524 - RNA, 22 nt, Molluscum contagiosum virus
aacagcuuggcacagugcugga

SEQ ID NO: 3105525 - RNA, 22 nt, Molluscum contagiosum virus
aacggcggcgcaagcgcaagcc

SEQ ID NO: 3105526 - RNA, 14 nt, Molluscum contagiosum virus
aaccugggcgccgc

SEQ ID NO: 3105527 - RNA, 14 nt, Molluscum contagiosum virus
aacgacuagcgugc

SEQ ID NO: 3105528 - RNA, 13 nt, Molluscum contagiosum virus
aacgacgggcgcg

SEQ ID NO: 3105529 - RNA, 17 nt, Molluscum contagiosum virus
aacgcgagacgggcacg

SEQ ID NO: 3105530 - RNA, 19 nt, Molluscum contagiosum virus
aacgcgaggccggccgugc

SEQ ID NO: 3105531 - RNA, 19 nt, Molluscum contagiosum virus
aacgcgcaagugugcgcau

SEQ ID NO: 3105532 - RNA, 16 nt, Molluscum contagiosum virus
aacgcgcgcgccucgc

SEQ ID NO: 3105533 - RNA, 14 nt, Molluscum contagiosum virus
aacgcgcgcucguc

SEQ ID NO: 3105534 - RNA, 22 nt, Molluscum contagiosum virus
aacgcgcgcucgucaaugcgca

SEQ ID NO: 3105535 - RNA, 15 nt, Molluscum contagiosum virus
aacgcgcgugcgcgu

SEQ ID NO: 3105536 - RNA, 17 nt, Molluscum contagiosum virus
aacgcggcgugugcggg

SEQ ID NO: 3105537 - RNA, 12 nt, Molluscum contagiosum virus
aacgcugccgcu

SEQ ID NO: 3105538 - RNA, 15 nt, Molluscum contagiosum virus
ucggcguacgugcgc

SEQ ID NO: 3105539 - RNA, 23 nt, Molluscum contagiosum virus
ucggcuuggacagcaagcagcgc

SEQ ID NO: 3105540 - RNA, 17 nt, Molluscum contagiosum virus
ucggcggcagcgccagc

SEQ ID NO: 3105541 - RNA, 15 nt, Molluscum contagiosum virus
ucggcggcaugcgcg

SEQ ID NO: 3105542 - RNA, 17 nt, Molluscum contagiosum virus
ucggcggcugugcccgc

SEQ ID NO: 3105543 - RNA, 18 nt, Molluscum contagiosum virus
ucggcgcgccgucucgcg

SEQ ID NO: 3105544 - RNA, 22 nt, Molluscum contagiosum virus
ucggcgcuacgcacuucacggc

SEQ ID NO: 3105545 - RNA, 21 nt, Molluscum contagiosum virus
ucggcgcuaugccgcgugcuc

SEQ ID NO: 3105546 - RNA, 17 nt, Molluscum contagiosum virus
ucggcgacacgcccgcg

SEQ ID NO: 3105547 - RNA, 14 nt, Molluscum contagiosum virus
ucggcagcgucgcg

SEQ ID NO: 3105548 - RNA, 17 nt, Molluscum contagiosum virus
ucggagcaggacgacga

SEQ ID NO: 3105549 - RNA, 12 nt, Molluscum contagiosum virus
ucggcaccgcgc

SEQ ID NO: 3105550 - RNA, 14 nt, Molluscum contagiosum virus
ucggagaagugcuc

SEQ ID NO: 3105551 - RNA, 18 nt, Molluscum contagiosum virus
ucggacagugccuccgcg

SEQ ID NO: 3105552 - RNA, 20 nt, Molluscum contagiosum virus
ucggacgcagacgcgcgucc

SEQ ID NO: 3105553 - RNA, 21 nt, Molluscum contagiosum virus
ucgcugcugggcaucgugcuc

SEQ ID NO: 3105554 - RNA, 20 nt, Molluscum contagiosum virus
ucgcuugccggcggcgcaag

SEQ ID NO: 3105555 - RNA, 15 nt, Molluscum contagiosum virus
ucgcugcacgcgaau

SEQ ID NO: 3105556 - RNA, 18 nt, Molluscum contagiosum virus
ucgcugcgcaggugcacg

SEQ ID NO: 3105557 - RNA, 18 nt, Molluscum contagiosum virus
ucgcugcuccccgccagc

SEQ ID NO: 3105558 - RNA, 20 nt, Molluscum contagiosum virus
ucgcguaccaagccgugacg

SEQ ID NO: 3105559 - RNA, 22 nt, Molluscum contagiosum virus
ucgcguagcagcgccugcacgc

SEQ ID NO: 3105560 - RNA, 22 nt, Molluscum contagiosum virus
ucgcguccacgaugcgcucgug

SEQ ID NO: 3105561 - RNA, 23 nt, Molluscum contagiosum virus
ucgcguggugcuuacugcgggcu

SEQ ID NO: 3105562 - RNA, 22 nt, Molluscum contagiosum virus
ucgcggucgacgagugcgccgc

SEQ ID NO: 3105563 - RNA, 19 nt, Molluscum contagiosum virus
ucgcgguggcaggcgcgcg

SEQ ID NO: 3105564 - RNA, 16 nt, Molluscum contagiosum virus
gguccaccugcgacgc

SEQ ID NO: 3105565 - RNA, 14 nt, Molluscum contagiosum virus
gguccuguccgcgg

SEQ ID NO: 3105566 - RNA, 17 nt, Molluscum contagiosum virus
ggucgacgacgcgcgca

SEQ ID NO: 3105567 - RNA, 18 nt, Molluscum contagiosum virus
ucgcgggcacgagcaugu

SEQ ID NO: 3105568 - RNA, 12 nt, Molluscum contagiosum virus
ucgcgggcgccg

SEQ ID NO: 3105569 - RNA, 13 nt, Molluscum contagiosum virus
ucgcgggcgcgcg

SEQ ID NO: 3105570 - RNA, 23 nt, Molluscum contagiosum virus
ggucacgcgcaaggccgcgccca

SEQ ID NO: 3105571 - RNA, 13 nt, Molluscum contagiosum virus
ggucacgcgcaca

SEQ ID NO: 3105572 - RNA, 22 nt, Molluscum contagiosum virus
gguacugaacgucuucgagagc

SEQ ID NO: 3105573 - RNA, 23 nt, Molluscum contagiosum virus
ggucaccaccaccuccagguccc

SEQ ID NO: 3105574 - RNA, 19 nt, Molluscum contagiosum virus
ggucaccacuccgucgcgc

SEQ ID NO: 3105575 - RNA, 18 nt, Molluscum contagiosum virus
gguacuggcgcccggcgc

SEQ ID NO: 3105576 - RNA, 14 nt, Molluscum contagiosum virus
gguagcgcgccgca

SEQ ID NO: 3105577 - RNA, 12 nt, Molluscum contagiosum virus
gguagcggaggc

SEQ ID NO: 3105578 - RNA, 16 nt, Molluscum contagiosum virus
ggucaacuccgagcgc

SEQ ID NO: 3105579 - RNA, 20 nt, Molluscum contagiosum virus
ggucaacuccgagcgcgcgc

SEQ ID NO: 3105580 - RNA, 21 nt, Molluscum contagiosum virus
ggucaacuccgagcgcgcgcg

SEQ ID NO: 3105581 - RNA, 21 nt, Molluscum contagiosum virus
gguacggugccguccccgcgc

SEQ ID NO: 3105582 - RNA, 17 nt, Molluscum contagiosum virus
gguacguacagugcgcg

SEQ ID NO: 3105583 - RNA, 16 nt, Molluscum contagiosum virus
gguaccgugcgcguga

SEQ ID NO: 3105584 - RNA, 16 nt, Molluscum contagiosum virus
gguaccugcaggcucu

SEQ ID NO: 3105585 - RNA, 21 nt, Molluscum contagiosum virus
gguacccgcaaccccgcgcgu

SEQ ID NO: 3105586 - RNA, 22 nt, Molluscum contagiosum virus
gguacccgcaaccccgcgcgua

SEQ ID NO: 3105587 - RNA, 13 nt, Molluscum contagiosum virus
gguacccgcagga

SEQ ID NO: 3105588 - RNA, 20 nt, Molluscum contagiosum virus
gguacaagucaucggagagc

SEQ ID NO: 3105589 - RNA, 13 nt, Molluscum contagiosum virus
gguaacgcgcgcg

SEQ ID NO: 3105590 - RNA, 14 nt, Molluscum contagiosum virus
gguaacgcgcgcgc

SEQ ID NO: 3105591 - RNA, 17 nt, Molluscum contagiosum virus
gggcgagagacagcacg

SEQ ID NO: 3105592 - RNA, 12 nt, Molluscum contagiosum virus
gggucacgcaga

SEQ ID NO: 3105593 - RNA, 15 nt, Molluscum contagiosum virus
gcgcagagcuccccg

SEQ ID NO: 3105594 - RNA, 18 nt, Molluscum contagiosum virus
gcgcagagcuccccgcgc

SEQ ID NO: 3105595 - RNA, 23 nt, Molluscum contagiosum virus
gcgcagagcuccccgcgcgcagc

SEQ ID NO: 3105596 - RNA, 18 nt, Molluscum contagiosum virus
gcgcacgggccugcgcgc

SEQ ID NO: 3105597 - RNA, 16 nt, Molluscum contagiosum virus
gcgcacguuggccacg

SEQ ID NO: 3105598 - RNA, 20 nt, Molluscum contagiosum virus
gcgcacuacucgucuugcgc

SEQ ID NO: 3105599 - RNA, 13 nt, Molluscum contagiosum virus
gcgcacugcggga

SEQ ID NO: 3105600 - RNA, 13 nt, Molluscum contagiosum virus
gcgcacugcucgc

SEQ ID NO: 3105601 - RNA, 15 nt, Molluscum contagiosum virus
gcgcagacgccgagc

SEQ ID NO: 3105602 - RNA, 23 nt, Molluscum contagiosum virus
gcgcagcaggcacuccagcgcgc

SEQ ID NO: 3105603 - RNA, 20 nt, Molluscum contagiosum virus
gcgcagcaggugcacgugcu

SEQ ID NO: 3105604 - RNA, 18 nt, Molluscum contagiosum virus
gcgcagcauucccggcgc

SEQ ID NO: 3105605 - RNA, 13 nt, Molluscum contagiosum virus
gcgcagccacgac

SEQ ID NO: 3105606 - RNA, 18 nt, Molluscum contagiosum virus
gcgcagcucgccgcgcgc

SEQ ID NO: 3105607 - RNA, 21 nt, Molluscum contagiosum virus
gcgcagcucgccgcgcgccgc

SEQ ID NO: 3105608 - RNA, 13 nt, Molluscum contagiosum virus
gcgcagcugcgcc

SEQ ID NO: 3105609 - RNA, 17 nt, Molluscum contagiosum virus
gcgcagcugcgccugca

SEQ ID NO: 3105610 - RNA, 14 nt, Molluscum contagiosum virus
gcgcagucccagca

SEQ ID NO: 3105611 - RNA, 17 nt, Molluscum contagiosum virus
gcgcagucccagcaccg

SEQ ID NO: 3105612 - RNA, 21 nt, Molluscum contagiosum virus
gcgcagucccagcaccgcgcc

SEQ ID NO: 3105613 - RNA, 19 nt, Molluscum contagiosum virus
gcgcagugccgcugagaga

SEQ ID NO: 3105614 - RNA, 13 nt, Molluscum contagiosum virus
gcgcagugcugcg

SEQ ID NO: 3105615 - RNA, 19 nt, Molluscum contagiosum virus
gcgcaguucgagcugcugc

SEQ ID NO: 3105616 - RNA, 18 nt, Molluscum contagiosum virus
gcgcgcauacgcgccgcg

SEQ ID NO: 3105617 - RNA, 19 nt, Molluscum contagiosum virus
gcgcgcaucgcgggcacgc

SEQ ID NO: 3105618 - RNA, 22 nt, Molluscum contagiosum virus
gcgcgcaucggcggcagcgcca

SEQ ID NO: 3105619 - RNA, 14 nt, Molluscum contagiosum virus
gcgcgcaugcucgc

SEQ ID NO: 3105620 - RNA, 20 nt, Molluscum contagiosum virus
gcgcgccaacgacuagcgug

SEQ ID NO: 3105621 - RNA, 21 nt, Molluscum contagiosum virus
gcgcgccaacgacuagcgugc

SEQ ID NO: 3105622 - RNA, 17 nt, Molluscum contagiosum virus
gcgcgccaagugcuccg

SEQ ID NO: 3105623 - RNA, 22 nt, Molluscum contagiosum virus
gcgcagcuguuucugccgcgcc

SEQ ID NO: 3105624 - RNA, 21 nt, Molluscum contagiosum virus
gcgcagcuucucugcgaucgc

SEQ ID NO: 3105625 - RNA, 14 nt, Molluscum contagiosum virus
gcgcaggccgcgcc

SEQ ID NO: 3105626 - RNA, 16 nt, Molluscum contagiosum virus
gcgcaggccgcgcccg

SEQ ID NO: 3105627 - RNA, 17 nt, Molluscum contagiosum virus
gcgcagggagcugcgga

SEQ ID NO: 3105628 - RNA, 14 nt, Molluscum contagiosum virus
gcgcgccagcagcg

SEQ ID NO: 3105629 - RNA, 16 nt, Molluscum contagiosum virus
gcgcgccagcagcgcc

SEQ ID NO: 3105630 - RNA, 17 nt, Molluscum contagiosum virus
gcgcgccaguacgcaug

SEQ ID NO: 3105631 - RNA, 22 nt, Molluscum contagiosum virus
gcgcaggucaucgacgagcacg

SEQ ID NO: 3105632 - RNA, 20 nt, Molluscum contagiosum virus
gcgcgcccccgagcugcgug

SEQ ID NO: 3105633 - RNA, 20 nt, Molluscum contagiosum virus
gcgcgcccccgugcuguguu

SEQ ID NO: 3105634 - RNA, 15 nt, Molluscum contagiosum virus
gcgcgccgcgccgca

SEQ ID NO: 3105635 - RNA, 13 nt, Molluscum contagiosum virus
gcgcgccgcgcgc

SEQ ID NO: 3105636 - RNA, 14 nt, Molluscum contagiosum virus
gcgcgccgcgcgcu

SEQ ID NO: 3105637 - RNA, 17 nt, Molluscum contagiosum virus
gcgcgccgcgcuggcgc

SEQ ID NO: 3105638 - RNA, 15 nt, Molluscum contagiosum virus
gcgcgccgcgggccg

SEQ ID NO: 3105639 - RNA, 16 nt, Molluscum contagiosum virus
gcgcgccgcgggccgc

SEQ ID NO: 3105640 - RNA, 19 nt, Molluscum contagiosum virus
gcgcgccgggaaugcugcg

SEQ ID NO: 3105641 - RNA, 14 nt, Molluscum contagiosum virus
gcgcgccgggccgc

SEQ ID NO: 3105642 - RNA, 15 nt, Molluscum contagiosum virus
gcgcgccgggccgcg

SEQ ID NO: 3105643 - RNA, 21 nt, Molluscum contagiosum virus
gcgcgccgguagggugccgag

SEQ ID NO: 3105644 - RNA, 17 nt, Molluscum contagiosum virus
gcgcgcccgcugcgcgc

SEQ ID NO: 3105645 - RNA, 19 nt, Molluscum contagiosum virus
gcgcgcccgcugcgcgcuc

SEQ ID NO: 3105646 - RNA, 15 nt, Molluscum contagiosum virus
gcgcgcccggcgccc

SEQ ID NO: 3105647 - RNA, 22 nt, Molluscum contagiosum virus
gcgcgcccucgcgcgcagcaca

SEQ ID NO: 3105648 - RNA, 16 nt, Molluscum contagiosum virus
gcgcgccgacgugcgc

SEQ ID NO: 3105649 - RNA, 17 nt, Molluscum contagiosum virus
gcgcgccgacgugcgcg

SEQ ID NO: 3105650 - RNA, 14 nt, Molluscum contagiosum virus
gcgcgccgagcgca

SEQ ID NO: 3105651 - RNA, 20 nt, Molluscum contagiosum virus
gcgcgccgaguacugcugcg

SEQ ID NO: 3105652 - RNA, 14 nt, Molluscum contagiosum virus
gcgcgccgcaaagc

SEQ ID NO: 3105653 - RNA, 22 nt, Molluscum contagiosum virus
gcgcgccgcacgcugcugcgug

SEQ ID NO: 3105654 - RNA, 13 nt, Molluscum contagiosum virus
gcgcgccgccgca

SEQ ID NO: 3105655 - RNA, 13 nt, Molluscum contagiosum virus
gcgcgcgcggcgc

SEQ ID NO: 3105656 - RNA, 15 nt, Molluscum contagiosum virus
gcgcgcgcggucgac

SEQ ID NO: 3105657 - RNA, 20 nt, Molluscum contagiosum virus
gcgcgcggagaggacgcgug

SEQ ID NO: 3105658 - RNA, 12 nt, Molluscum contagiosum virus
gcgcgcgccgca

SEQ ID NO: 3105659 - RNA, 14 nt, Molluscum contagiosum virus
gcgcgcgcgcaagu

SEQ ID NO: 3105660 - RNA, 13 nt, Molluscum contagiosum virus
gcgcgcgcgcgag

SEQ ID NO: 3105661 - RNA, 16 nt, Molluscum contagiosum virus
gcgcgcgcgcgccgga

SEQ ID NO: 3105662 - RNA, 15 nt, Molluscum contagiosum virus
gcgcgcgcgcggcgc

SEQ ID NO: 3105663 - RNA, 18 nt, Molluscum contagiosum virus
gcgcgccugccgccugca

SEQ ID NO: 3105664 - RNA, 14 nt, Molluscum contagiosum virus
gcgcgccugcgcga

SEQ ID NO: 3105665 - RNA, 22 nt, Molluscum contagiosum virus
gcgcgcgacgacguugugcucc

SEQ ID NO: 3105666 - RNA, 13 nt, Molluscum contagiosum virus
gcgcgcgagcaca

SEQ ID NO: 3105667 - RNA, 19 nt, Molluscum contagiosum virus
gcgcgcgagcacagcgcgc

SEQ ID NO: 3105668 - RNA, 17 nt, Molluscum contagiosum virus
gcgcgcgagcugcugcg

SEQ ID NO: 3105669 - RNA, 12 nt, Molluscum contagiosum virus
gcgcgcgcacgc

SEQ ID NO: 3105670 - RNA, 15 nt, Molluscum contagiosum virus
gcgcgcgcacgcgcg

SEQ ID NO: 3105671 - RNA, 15 nt, Molluscum contagiosum virus
gcgcgcgcagcaccg

SEQ ID NO: 3105672 - RNA, 15 nt, Molluscum contagiosum virus
gcgcgcgcagcgcgc

SEQ ID NO: 3105673 - RNA, 14 nt, Molluscum contagiosum virus
gcgcgcgcauggag

SEQ ID NO: 3105674 - RNA, 13 nt, Molluscum contagiosum virus
gcgcgcgccagcu

SEQ ID NO: 3105675 - RNA, 21 nt, Molluscum contagiosum virus
gcgcgcgccauccagcgcauc

SEQ ID NO: 3105676 - RNA, 18 nt, Molluscum contagiosum virus
ggcacccaccaggaacga

SEQ ID NO: 3105677 - RNA, 18 nt, Molluscum contagiosum virus
ggcacccgugcgcgcgcu

SEQ ID NO: 3105678 - RNA, 19 nt, Molluscum contagiosum virus
ggcacccgugcgcgcgcug

SEQ ID NO: 3105679 - RNA, 17 nt, Molluscum contagiosum virus
ggcacccucagaccaga

SEQ ID NO: 3105680 - RNA, 21 nt, Molluscum contagiosum virus
ggcacccuggcugcugcgcga

SEQ ID NO: 3105681 - RNA, 23 nt, Molluscum contagiosum virus
ggcaccgccguguugcguagagc

SEQ ID NO: 3105682 - RNA, 12 nt, Molluscum contagiosum virus
ggcaccgcgcgc

SEQ ID NO: 3105683 - RNA, 19 nt, Molluscum contagiosum virus
ggcacggcacccgccagcu

SEQ ID NO: 3105684 - RNA, 16 nt, Molluscum contagiosum virus
ggcacgggcacgcgcg

SEQ ID NO: 3105685 - RNA, 12 nt, Molluscum contagiosum virus
ggcacgggcucg

SEQ ID NO: 3105686 - RNA, 20 nt, Molluscum contagiosum virus
ggcacgggcucgaucugcgc

SEQ ID NO: 3105687 - RNA, 21 nt, Molluscum contagiosum virus
ggcacguggcuaugagcggca

SEQ ID NO: 3105688 - RNA, 21 nt, Molluscum contagiosum virus
ggcacguuugcgucugcgagg

SEQ ID NO: 3105689 - RNA, 15 nt, Molluscum contagiosum virus
ggcacuccagcgcgc

SEQ ID NO: 3105690 - RNA, 16 nt, Molluscum contagiosum virus
ggcacuccgcgcaccg

SEQ ID NO: 3105691 - RNA, 16 nt, Molluscum contagiosum virus
ggcacugcuacgagcc

SEQ ID NO: 3105692 - RNA, 19 nt, Molluscum contagiosum virus
ggcacugcuggcgcgcgcg

SEQ ID NO: 3105693 - RNA, 14 nt, Molluscum contagiosum virus
ggcacuucucgcgc

SEQ ID NO: 3105694 - RNA, 22 nt, Molluscum contagiosum virus
ggcagaacaguaacugcugcag

SEQ ID NO: 3105695 - RNA, 14 nt, Molluscum contagiosum virus
ggcagacgccagcg

SEQ ID NO: 3105696 - RNA, 21 nt, Molluscum contagiosum virus
ggcaucgucucgcucuuccgc

SEQ ID NO: 3105697 - RNA, 17 nt, Molluscum contagiosum virus
ggcaucgugcucuucgc

SEQ ID NO: 3105698 - RNA, 23 nt, Molluscum contagiosum virus
ggcaggcagugccgccgcgcgcg

SEQ ID NO: 3105699 - RNA, 17 nt, Molluscum contagiosum virus
ggcagggaaagagcacg

SEQ ID NO: 3105700 - RNA, 21 nt, Molluscum contagiosum virus
ggcagggaaagagcacgcgcu

SEQ ID NO: 3105701 - RNA, 13 nt, Molluscum contagiosum virus
ggcaggucgcggu

SEQ ID NO: 3105702 - RNA, 16 nt, Molluscum contagiosum virus
ggcaguacgcgcgugg

SEQ ID NO: 3105703 - RNA, 22 nt, Molluscum contagiosum virus
ggcagugcuugcuucggcggcu

SEQ ID NO: 3105704 - RNA, 21 nt, Molluscum contagiosum virus
ggcauaccugugccagcgccu

SEQ ID NO: 3105705 - RNA, 18 nt, Molluscum contagiosum virus
ggcagcucugcagcgccg

SEQ ID NO: 3105706 - RNA, 16 nt, Molluscum contagiosum virus
ggcagcuucugcucgc

SEQ ID NO: 3105707 - RNA, 19 nt, Molluscum contagiosum virus
ggcagcuucugcucgcgca

SEQ ID NO: 3105708 - RNA, 14 nt, Molluscum contagiosum virus
ggcagauagcucgc

SEQ ID NO: 3105709 - RNA, 23 nt, Molluscum contagiosum virus
ggcagauagcucgcgcgcgagca

SEQ ID NO: 3105710 - RNA, 13 nt, Molluscum contagiosum virus
ggcagcagcgugc

SEQ ID NO: 3105711 - RNA, 20 nt, Molluscum contagiosum virus
ggcagcaggaagacgcauag

SEQ ID NO: 3105712 - RNA, 12 nt, Molluscum contagiosum virus
ggcacgagcacg

SEQ ID NO: 3105713 - RNA, 21 nt, Molluscum contagiosum virus
ggcacgaggcagccgcggcgc

SEQ ID NO: 3105714 - RNA, 17 nt, Molluscum contagiosum virus
gcgcgcggcacgccgcu

SEQ ID NO: 3105715 - RNA, 15 nt, Molluscum contagiosum virus
gcgcgcggcgcgccc

SEQ ID NO: 3105716 - RNA, 15 nt, Molluscum contagiosum virus
ggcagccuugcgaga

SEQ ID NO: 3105717 - RNA, 23 nt, Molluscum contagiosum virus
ggcagcgacuacgcgcugcuaga

SEQ ID NO: 3105718 - RNA, 16 nt, Molluscum contagiosum virus
ggcagcgccagcgaga

SEQ ID NO: 3105719 - RNA, 15 nt, Molluscum contagiosum virus
ggcagcgccgcgcgc

SEQ ID NO: 3105720 - RNA, 16 nt, Molluscum contagiosum virus
ggcagcgccgcgcgcg

SEQ ID NO: 3105721 - RNA, 23 nt, Molluscum contagiosum virus
ggcagcgccgcgcgcgcgcguga

SEQ ID NO: 3105722 - RNA, 17 nt, Molluscum contagiosum virus
ggcagcuaccgcgcgcg

SEQ ID NO: 3105723 - RNA, 21 nt, Molluscum contagiosum virus
ggcagcgucgcggagcgcgca

SEQ ID NO: 3105724 - RNA, 15 nt, Molluscum contagiosum virus
gggcacugcgcacgg

SEQ ID NO: 3105725 - RNA, 17 nt, Molluscum contagiosum virus
gggcacuucucgcgcga

SEQ ID NO: 3105726 - RNA, 19 nt, Molluscum contagiosum virus
gggcagggaaagagcacgc

SEQ ID NO: 3105727 - RNA, 13 nt, Molluscum contagiosum virus
gggcccgcgcgcg

SEQ ID NO: 3105728 - RNA, 12 nt, Molluscum contagiosum virus
gggccgcgcgca

SEQ ID NO: 3105729 - RNA, 12 nt, Molluscum contagiosum virus
gggccgcggcgc

SEQ ID NO: 3105730 - RNA, 14 nt, Molluscum contagiosum virus
ggguacacgugcuu

SEQ ID NO: 3105731 - RNA, 13 nt, Molluscum contagiosum virus
ggguaccgugcgc

SEQ ID NO: 3105732 - RNA, 19 nt, Molluscum contagiosum virus
gggccuuuucacuggccgu

SEQ ID NO: 3105733 - RNA, 18 nt, Molluscum contagiosum virus
gggcaccugcaucgcgcc

SEQ ID NO: 3105734 - RNA, 15 nt, Molluscum contagiosum virus
gggcacgccgugggc

SEQ ID NO: 3105735 - RNA, 13 nt, Molluscum contagiosum virus
gggcacgcgcgca

SEQ ID NO: 3105736 - RNA, 13 nt, Molluscum contagiosum virus
gggcacgcgcgcg

SEQ ID NO: 3105737 - RNA, 22 nt, Molluscum contagiosum virus
gggauuugccgguugcgcgugu

SEQ ID NO: 3105738 - RNA, 14 nt, Molluscum contagiosum virus
gggcaacgcgcgcg

SEQ ID NO: 3105739 - RNA, 15 nt, Molluscum contagiosum virus
gggcaaugggcacgc

SEQ ID NO: 3105740 - RNA, 14 nt, Molluscum contagiosum virus
gggaacccguggcc

SEQ ID NO: 3105741 - RNA, 13 nt, Molluscum contagiosum virus
ggcuucugcgcgg

SEQ ID NO: 3105742 - RNA, 16 nt, Molluscum contagiosum virus
ggcuuugacaugcacc

SEQ ID NO: 3105743 - RNA, 17 nt, Molluscum contagiosum virus
ggcuuuucaugugcgag

SEQ ID NO: 3105744 - RNA, 21 nt, Molluscum contagiosum virus
gggacacgcacuugcgcgccu

SEQ ID NO: 3105745 - RNA, 18 nt, Molluscum contagiosum virus
ggccgucgggcgccaaca

SEQ ID NO: 3105746 - RNA, 17 nt, Molluscum contagiosum virus
ggccggcgggcgcgugc

SEQ ID NO: 3105747 - RNA, 18 nt, Molluscum contagiosum virus
ggccugcccugcucaugc

SEQ ID NO: 3105748 - RNA, 17 nt, Molluscum contagiosum virus
ggccugcguggacagca

SEQ ID NO: 3105749 - RNA, 13 nt, Molluscum contagiosum virus
ggccggucgcgga

SEQ ID NO: 3105750 - RNA, 22 nt, Molluscum contagiosum virus
ggccguagugcucaucgugccc

SEQ ID NO: 3105751 - RNA, 16 nt, Molluscum contagiosum virus
ggccgcuccagagccg

SEQ ID NO: 3105752 - RNA, 22 nt, Molluscum contagiosum virus
ggccaccucgcacgugugcagg

SEQ ID NO: 3105753 - RNA, 17 nt, Molluscum contagiosum virus
ggccacgaacacggcgc

SEQ ID NO: 3105754 - RNA, 13 nt, Molluscum contagiosum virus
ggccgcgcucguc

SEQ ID NO: 3105755 - RNA, 15 nt, Molluscum contagiosum virus
ggcgacgacagcgac

SEQ ID NO: 3105756 - RNA, 20 nt, Molluscum contagiosum virus
ggcgacgucaaccgggcucu

SEQ ID NO: 3105757 - RNA, 20 nt, Molluscum contagiosum virus
ggcgacguucgagaccagcc

SEQ ID NO: 3105758 - RNA, 19 nt, Molluscum contagiosum virus
ggcgagcaucugcgcgugc

SEQ ID NO: 3105759 - RNA, 14 nt, Molluscum contagiosum virus
ggcgagcgcucugc

SEQ ID NO: 3105760 - RNA, 13 nt, Molluscum contagiosum virus
ggccuguccgcgg

SEQ ID NO: 3105761 - RNA, 14 nt, Molluscum contagiosum virus
ggccugugcugugc

SEQ ID NO: 3105762 - RNA, 23 nt, Molluscum contagiosum virus
ggccuucuaccacagguuucuca

SEQ ID NO: 3105763 - RNA, 20 nt, Molluscum contagiosum virus
ggccucguccuggaggggug

SEQ ID NO: 3105764 - RNA, 20 nt, Molluscum contagiosum virus
ggcgcaacgcuggccgccau

SEQ ID NO: 3105765 - RNA, 15 nt, Molluscum contagiosum virus
ggcgcaagcgcaagc

SEQ ID NO: 3105766 - RNA, 24 nt, Molluscum contagiosum virus
ggcgcacacuccucggcgcuacgc

SEQ ID NO: 3105767 - RNA, 20 nt, Molluscum contagiosum virus
ggcgcacauuaguagcgagc

SEQ ID NO: 3105768 - RNA, 14 nt, Molluscum contagiosum virus
ggcgcacgcgagca

SEQ ID NO: 3105769 - RNA, 12 nt, Molluscum contagiosum virus
ggcgcacgcuug

SEQ ID NO: 3105770 - RNA, 20 nt, Molluscum contagiosum virus
ggcgcacggccugcggcagg

SEQ ID NO: 3105771 - RNA, 19 nt, Molluscum contagiosum virus
ggcgcagcuccuagcgcgc

SEQ ID NO: 3105772 - RNA, 20 nt, Molluscum contagiosum virus
ggcgcagcuccuagcgcgcg

SEQ ID NO: 3105773 - RNA, 16 nt, Molluscum contagiosum virus
ggcgcaggccgcgccc

SEQ ID NO: 3105774 - RNA, 13 nt, Molluscum contagiosum virus
ggcgagucgcggg

SEQ ID NO: 3105775 - RNA, 14 nt, Molluscum contagiosum virus
ggcgaucugcucgc

SEQ ID NO: 3105776 - RNA, 19 nt, Molluscum contagiosum virus
ggcgcaucagagaagugcu

SEQ ID NO: 3105777 - RNA, 22 nt, Molluscum contagiosum virus
gcgcaccugcacgagccggcgc

SEQ ID NO: 3105778 - RNA, 14 nt, Molluscum contagiosum virus
gcgcaccugcuaga

SEQ ID NO: 3105779 - RNA, 19 nt, Molluscum contagiosum virus
gcgcaccugcuagagcaua

SEQ ID NO: 3105780 - RNA, 19 nt, Molluscum contagiosum virus
gcgcacgaccacgugcagg

SEQ ID NO: 3105781 - RNA, 16 nt, Molluscum contagiosum virus
gcgcacgagcgcgggc

SEQ ID NO: 3105782 - RNA, 18 nt, Molluscum contagiosum virus
gcgcacgagcgcgggcgc

SEQ ID NO: 3105783 - RNA, 17 nt, Molluscum contagiosum virus
gcgcacgagcugcugcc

SEQ ID NO: 3105784 - RNA, 20 nt, Molluscum contagiosum virus
gcgcacgcaagcccgcgcgc

SEQ ID NO: 3105785 - RNA, 24 nt, Molluscum contagiosum virus
gcgcacgcaagcccgcgcgcgagc

SEQ ID NO: 3105786 - RNA, 12 nt, Molluscum contagiosum virus
gcgcacgcagca

SEQ ID NO: 3105787 - RNA, 14 nt, Molluscum contagiosum virus
gcgcacgcagcagg

SEQ ID NO: 3105788 - RNA, 15 nt, Molluscum contagiosum virus
gcgcacgcgagcacg

SEQ ID NO: 3105789 - RNA, 18 nt, Molluscum contagiosum virus
gcgcacgcgagcacgccu

SEQ ID NO: 3105790 - RNA, 18 nt, Molluscum contagiosum virus
gcgcacgcgcacgggccu

SEQ ID NO: 3105791 - RNA, 21 nt, Molluscum contagiosum virus
gcgcacgcuagucguuggcgc

SEQ ID NO: 3105792 - RNA, 17 nt, Molluscum contagiosum virus
gcgcacgcugcgcacgg

SEQ ID NO: 3105793 - RNA, 21 nt, Molluscum contagiosum virus
gcgcacgcugcgcacgggcgc

SEQ ID NO: 3105794 - RNA, 17 nt, Molluscum contagiosum virus
gcgcacgcuuguccgcg

SEQ ID NO: 3105795 - RNA, 18 nt, Molluscum contagiosum virus
gcgcacgcuuguccgcgg

SEQ ID NO: 3105796 - RNA, 20 nt, Molluscum contagiosum virus
gcgcacgcuuguccgcggac

SEQ ID NO: 3105797 - RNA, 22 nt, Molluscum contagiosum virus
gcgcacgcuuguccgcggacgc

SEQ ID NO: 3105798 - RNA, 19 nt, Molluscum contagiosum virus
gcgcacgcuugugcgcacg

SEQ ID NO: 3105799 - RNA, 12 nt, Molluscum contagiosum virus
gcgcacggaccu

SEQ ID NO: 3105800 - RNA, 20 nt, Molluscum contagiosum virus
gcgcacccgagggcgugcgc

SEQ ID NO: 3105801 - RNA, 14 nt, Molluscum contagiosum virus
gcgcacccgccacg

SEQ ID NO: 3105802 - RNA, 13 nt, Molluscum contagiosum virus
gcgcaccgcgggc

SEQ ID NO: 3105803 - RNA, 21 nt, Molluscum contagiosum virus
gcgcaccgcguugccgcccgc

SEQ ID NO: 3105804 - RNA, 15 nt, Molluscum contagiosum virus
gcaccacgugcuccg

SEQ ID NO: 3105805 - RNA, 15 nt, Molluscum contagiosum virus
gcaccagguagagca

SEQ ID NO: 3105806 - RNA, 17 nt, Molluscum contagiosum virus
gcacaucggcacugcuc

SEQ ID NO: 3105807 - RNA, 18 nt, Molluscum contagiosum virus
gcacaugugcgugcaccu

SEQ ID NO: 3105808 - RNA, 15 nt, Molluscum contagiosum virus
gcacagccccugcug

SEQ ID NO: 3105809 - RNA, 20 nt, Molluscum contagiosum virus
gcacagccccugcugcucgc

SEQ ID NO: 3105810 - RNA, 21 nt, Molluscum contagiosum virus
gcacagccccugcugcucgcg

SEQ ID NO: 3105811 - RNA, 19 nt, Molluscum contagiosum virus
gcacagcgcgcggaagccc

SEQ ID NO: 3105812 - RNA, 18 nt, Molluscum contagiosum virus
gcacagggauucgccgcg

SEQ ID NO: 3105813 - RNA, 17 nt, Molluscum contagiosum virus
gcacaggguuccgcgcc

SEQ ID NO: 3105814 - RNA, 19 nt, Molluscum contagiosum virus
gcacaguccaacccgcggc

SEQ ID NO: 3105815 - RNA, 17 nt, Molluscum contagiosum virus
gcacaguccagcccgcg

SEQ ID NO: 3105816 - RNA, 20 nt, Molluscum contagiosum virus
gcacaguucacggcgcucgc

SEQ ID NO: 3105817 - RNA, 20 nt, Molluscum contagiosum virus
gcacaguucacggcgcuugc

SEQ ID NO: 3105818 - RNA, 14 nt, Molluscum contagiosum virus
gcaccgagugcugg

SEQ ID NO: 3105819 - RNA, 17 nt, Molluscum contagiosum virus
gcacccuggcugcugcg

SEQ ID NO: 3105820 - RNA, 14 nt, Molluscum contagiosum virus
gcaccccgcaggaa

SEQ ID NO: 3105821 - RNA, 13 nt, Molluscum contagiosum virus
gcacccgcaggaa

SEQ ID NO: 3105822 - RNA, 16 nt, Molluscum contagiosum virus
gcacccgcgcagcgug

SEQ ID NO: 3105823 - RNA, 21 nt, Molluscum contagiosum virus
gcaccgcccgcccgcgcucga

SEQ ID NO: 3105824 - RNA, 16 nt, Molluscum contagiosum virus
gcaccgccgacaacgc

SEQ ID NO: 3105825 - RNA, 16 nt, Molluscum contagiosum virus
gcaccgccguguugcg

SEQ ID NO: 3105826 - RNA, 18 nt, Molluscum contagiosum virus
gcaccgccuggugcugcg

SEQ ID NO: 3105827 - RNA, 22 nt, Molluscum contagiosum virus
gcaccgccuggugcugcgcgac

SEQ ID NO: 3105828 - RNA, 14 nt, Molluscum contagiosum virus
gcaccgcgcgcgcu

SEQ ID NO: 3105829 - RNA, 16 nt, Molluscum contagiosum virus
gcaccgcgcgcgcucc

SEQ ID NO: 3105830 - RNA, 16 nt, Molluscum contagiosum virus
gaguacagccgcgcgg

SEQ ID NO: 3105831 - RNA, 23 nt, Molluscum contagiosum virus
gaguacgcucuccaugcgcgcgc

SEQ ID NO: 3105832 - RNA, 19 nt, Molluscum contagiosum virus
gaguauacucgacgcgcgc

SEQ ID NO: 3105833 - RNA, 12 nt, Molluscum contagiosum virus
gagucacgaccg

SEQ ID NO: 3105834 - RNA, 16 nt, Molluscum contagiosum virus
gagugaaggguguggc

SEQ ID NO: 3105835 - RNA, 12 nt, Molluscum contagiosum virus
gagugacgccuc

SEQ ID NO: 3105836 - RNA, 22 nt, Molluscum contagiosum virus
gagugcgggagcaagucugcgc

SEQ ID NO: 3105837 - RNA, 17 nt, Molluscum contagiosum virus
gagugcuggagcagacg

SEQ ID NO: 3105838 - RNA, 16 nt, Molluscum contagiosum virus
gagucgagcacgcgcg

SEQ ID NO: 3105839 - RNA, 19 nt, Molluscum contagiosum virus
gagucgccgcugcgcaucu

SEQ ID NO: 3105840 - RNA, 10 nt, Molluscum contagiosum virus
gaguccgcgc

SEQ ID NO: 3105841 - RNA, 13 nt, Molluscum contagiosum virus
gaguccgcggcga

SEQ ID NO: 3105842 - RNA, 19 nt, Molluscum contagiosum virus
gcacagacggcgcgcucgg

SEQ ID NO: 3105843 - RNA, 22 nt, Molluscum contagiosum virus
gauagcgauggcuguuccggcg

SEQ ID NO: 3105844 - RNA, 22 nt, Molluscum contagiosum virus
gagcagcccgugcgccugccgc

SEQ ID NO: 3105845 - RNA, 23 nt, Molluscum contagiosum virus
gagcagcccgugcgccugccgcg

SEQ ID NO: 3105846 - RNA, 14 nt, Molluscum contagiosum virus
gagcaagcgcccgc

SEQ ID NO: 3105847 - RNA, 14 nt, Molluscum contagiosum virus
gagcaaggccuggc

SEQ ID NO: 3105848 - RNA, 14 nt, Molluscum contagiosum virus
gagcaagucugcgc

SEQ ID NO: 3105849 - RNA, 15 nt, Molluscum contagiosum virus
gagcaaugcgagcaa

SEQ ID NO: 3105850 - RNA, 21 nt, Molluscum contagiosum virus
gagcaguccgccucgagcacg

SEQ ID NO: 3105851 - RNA, 17 nt, Molluscum contagiosum virus
gagcagugccgccgcgc

SEQ ID NO: 3105852 - RNA, 18 nt, Molluscum contagiosum virus
gagcagugccgccgcgca

SEQ ID NO: 3105853 - RNA, 20 nt, Molluscum contagiosum virus
gagcagugccgcucgcuguc

SEQ ID NO: 3105854 - RNA, 16 nt, Molluscum contagiosum virus
gagcaguuccggucuc

SEQ ID NO: 3105855 - RNA, 16 nt, Molluscum contagiosum virus
gagcaguucgcgcgcc

SEQ ID NO: 3105856 - RNA, 19 nt, Molluscum contagiosum virus
gagcaguucgcgcgccugc

SEQ ID NO: 3105857 - RNA, 22 nt, Molluscum contagiosum virus
gagcaguucgcgcgccugcgcg

SEQ ID NO: 3105858 - RNA, 20 nt, Molluscum contagiosum virus
gagcacgccugcacgcgcac

SEQ ID NO: 3105859 - RNA, 12 nt, Molluscum contagiosum virus
gagcacgcgcga

SEQ ID NO: 3105860 - RNA, 17 nt, Molluscum contagiosum virus
gagcacgcgcucgcgca

SEQ ID NO: 3105861 - RNA, 22 nt, Molluscum contagiosum virus
gagcacgcuuuccuuugcggcg

SEQ ID NO: 3105862 - RNA, 16 nt, Molluscum contagiosum virus
gagcacggacagcacc

SEQ ID NO: 3105863 - RNA, 17 nt, Molluscum contagiosum virus
gagcacggacagcaccc

SEQ ID NO: 3105864 - RNA, 19 nt, Molluscum contagiosum virus
gagcacguccucugcgagc

SEQ ID NO: 3105865 - RNA, 18 nt, Molluscum contagiosum virus
gagcacguggacagcauc

SEQ ID NO: 3105866 - RNA, 15 nt, Molluscum contagiosum virus
gagcacugcgcgcgc

SEQ ID NO: 3105867 - RNA, 16 nt, Molluscum contagiosum virus
gagcacugcgcgcgcg

SEQ ID NO: 3105868 - RNA, 21 nt, Molluscum contagiosum virus
gagcacugcgcgucugugcgc

SEQ ID NO: 3105869 - RNA, 18 nt, Molluscum contagiosum virus
gagcacuguacgcacgca

SEQ ID NO: 3105870 - RNA, 16 nt, Molluscum contagiosum virus
gagcacuuccgcgcgc

SEQ ID NO: 3105871 - RNA, 14 nt, Molluscum contagiosum virus
gagcacuugccgcg

SEQ ID NO: 3105872 - RNA, 15 nt, Molluscum contagiosum virus
gagcagaaggugcgc

SEQ ID NO: 3105873 - RNA, 14 nt, Molluscum contagiosum virus
gagguacugccgcc

SEQ ID NO: 3105874 - RNA, 18 nt, Molluscum contagiosum virus
gaggucaagggugugggc

SEQ ID NO: 3105875 - RNA, 17 nt, Molluscum contagiosum virus
gaggucgagcgcgccgc

SEQ ID NO: 3105876 - RNA, 14 nt, Molluscum contagiosum virus
gagggucgugcagg

SEQ ID NO: 3105877 - RNA, 13 nt, Molluscum contagiosum virus
gaguaccgcgcgc

SEQ ID NO: 3105878 - RNA, 22 nt, Molluscum contagiosum virus
gaguaccgcgcgcacgcggcgc

SEQ ID NO: 3105879 - RNA, 16 nt, Molluscum contagiosum virus
gaguacgacgcggagg

SEQ ID NO: 3105880 - RNA, 21 nt, Molluscum contagiosum virus
gaguacgacgguuuccgcgcc

SEQ ID NO: 3105881 - RNA, 20 nt, Molluscum contagiosum virus
gagguucguccgcucgugcc

SEQ ID NO: 3105882 - RNA, 13 nt, Molluscum contagiosum virus
gaggugcgcgcaa

SEQ ID NO: 3105883 - RNA, 17 nt, Molluscum contagiosum virus
gagcagcgcuugcgcgc

SEQ ID NO: 3105884 - RNA, 14 nt, Molluscum contagiosum virus
gagcagcugcugcg

SEQ ID NO: 3105885 - RNA, 18 nt, Molluscum contagiosum virus
gagcaggcgcagcgcggc

SEQ ID NO: 3105886 - RNA, 15 nt, Molluscum contagiosum virus
gagcagggcuacgag

SEQ ID NO: 3105887 - RNA, 20 nt, Molluscum contagiosum virus
gagcaggguuuucacgcagg

SEQ ID NO: 3105888 - RNA, 20 nt, Molluscum contagiosum virus
gaggggaaagaugaagcucu

SEQ ID NO: 3105889 - RNA, 15 nt, Molluscum contagiosum virus
gagggucacgcgcac

SEQ ID NO: 3105890 - RNA, 17 nt, Molluscum contagiosum virus
gagggccuuggcggcgc

SEQ ID NO: 3105891 - RNA, 20 nt, Molluscum contagiosum virus
gagggccuuggcggcgcggc

SEQ ID NO: 3105892 - RNA, 14 nt, Molluscum contagiosum virus
gagggcgaggccuu

SEQ ID NO: 3105893 - RNA, 22 nt, Molluscum contagiosum virus
gagggcgagucucccguggcgc

SEQ ID NO: 3105894 - RNA, 15 nt, Molluscum contagiosum virus
gagggcgccgggcgc

SEQ ID NO: 3105895 - RNA, 15 nt, Molluscum contagiosum virus
gcaccuggaacgcga

SEQ ID NO: 3105896 - RNA, 16 nt, Molluscum contagiosum virus
gcaccuggaacgcgac

SEQ ID NO: 3105897 - RNA, 23 nt, Molluscum contagiosum virus
gcaccuuuggugcagaucucgcg

SEQ ID NO: 3105898 - RNA, 15 nt, Molluscum contagiosum virus
gcacgaacggacgcc

SEQ ID NO: 3105899 - RNA, 13 nt, Molluscum contagiosum virus
gcaccugcaggaa

SEQ ID NO: 3105900 - RNA, 18 nt, Molluscum contagiosum virus
gcaccugcaucgcgccgc

SEQ ID NO: 3105901 - RNA, 13 nt, Molluscum contagiosum virus
gcaccugcgccgc

SEQ ID NO: 3105902 - RNA, 15 nt, Molluscum contagiosum virus
gcaccugcggcugcg

SEQ ID NO: 3105903 - RNA, 14 nt, Molluscum contagiosum virus
gcaccggcgcucac

SEQ ID NO: 3105904 - RNA, 14 nt, Molluscum contagiosum virus
gcaccgggcgccgc

SEQ ID NO: 3105905 - RNA, 18 nt, Molluscum contagiosum virus
gcaccguaccgcgcccgc

SEQ ID NO: 3105906 - RNA, 22 nt, Molluscum contagiosum virus
gcaccguacucgcguccgcgca

SEQ ID NO: 3105907 - RNA, 12 nt, Molluscum contagiosum virus
gcaccgcggcga

SEQ ID NO: 3105908 - RNA, 14 nt, Molluscum contagiosum virus
gcaccgcguggcgc

SEQ ID NO: 3105909 - RNA, 16 nt, Molluscum contagiosum virus
ccggcgagaugcgagc

SEQ ID NO: 3105910 - RNA, 23 nt, Molluscum contagiosum virus
ccggcgagaugcgagcgcgucug

SEQ ID NO: 3105911 - RNA, 19 nt, Molluscum contagiosum virus
ccggcaguagcagcgccgg

SEQ ID NO: 3105912 - RNA, 16 nt, Molluscum contagiosum virus
ccggcauccggccgag

SEQ ID NO: 3105913 - RNA, 14 nt, Molluscum contagiosum virus
ccggcgcccgccac

SEQ ID NO: 3105914 - RNA, 17 nt, Molluscum contagiosum virus
ccggccuuguucgcgcu

SEQ ID NO: 3105915 - RNA, 20 nt, Molluscum contagiosum virus
ccggccuuguucgcgcuucu

SEQ ID NO: 3105916 - RNA, 21 nt, Molluscum contagiosum virus
cgcgcgacgugugcucugugc

SEQ ID NO: 3105917 - RNA, 22 nt, Molluscum contagiosum virus
cgcgcgacgugugcucugugcg

SEQ ID NO: 3105918 - RNA, 20 nt, Molluscum contagiosum virus
cgcgcgacuggcacgcgccg

SEQ ID NO: 3105919 - RNA, 16 nt, Molluscum contagiosum virus
cgcgcgagaagucggg

SEQ ID NO: 3105920 - RNA, 22 nt, Molluscum contagiosum virus
cgcgcgagaagucgggcuggcg

SEQ ID NO: 3105921 - RNA, 20 nt, Molluscum contagiosum virus
cgcgcgagaugcgcggacag

SEQ ID NO: 3105922 - RNA, 21 nt, Molluscum contagiosum virus
cgcgcgagcaugccgccgcgu

SEQ ID NO: 3105923 - RNA, 14 nt, Molluscum contagiosum virus
cgcgcgagcgccgg

SEQ ID NO: 3105924 - RNA, 19 nt, Molluscum contagiosum virus
cgcgcgagcggagcgggca

SEQ ID NO: 3105925 - RNA, 13 nt, Molluscum contagiosum virus
ccggcgcgccgcg

SEQ ID NO: 3105926 - RNA, 15 nt, Molluscum contagiosum virus
ccggcgcgcgcgcgc

SEQ ID NO: 3105927 - RNA, 20 nt, Molluscum contagiosum virus
ccggcgcgcgcggcgcgccc

SEQ ID NO: 3105928 - RNA, 11 nt, Molluscum contagiosum virus
ccggcgcggcc

SEQ ID NO: 3105929 - RNA, 15 nt, Molluscum contagiosum virus
ccggcgcggcgagcc

SEQ ID NO: 3105930 - RNA, 18 nt, Molluscum contagiosum virus
cgcgccugcuggcgggga

SEQ ID NO: 3105931 - RNA, 23 nt, Molluscum contagiosum virus
cgcgccugucaagacgggcacgc

SEQ ID NO: 3105932 - RNA, 15 nt, Molluscum contagiosum virus
cgcgccuuccgcgcg

SEQ ID NO: 3105933 - RNA, 18 nt, Molluscum contagiosum virus
cgcgccuuccgcgcgggc

SEQ ID NO: 3105934 - RNA, 17 nt, Molluscum contagiosum virus
cgcgcgcccgcugcgcg

SEQ ID NO: 3105935 - RNA, 19 nt, Molluscum contagiosum virus
cgcgcgcccgcugcgcgcu

SEQ ID NO: 3105936 - RNA, 11 nt, Molluscum contagiosum virus
cgcgcgccgag

SEQ ID NO: 3105937 - RNA, 17 nt, Molluscum contagiosum virus
cgcgcgccgcaaaagca

SEQ ID NO: 3105938 - RNA, 19 nt, Molluscum contagiosum virus
cgcgcgccgcagaacacgg

SEQ ID NO: 3105939 - RNA, 12 nt, Molluscum contagiosum virus
cgcgcgccgcgc

SEQ ID NO: 3105940 - RNA, 13 nt, Molluscum contagiosum virus
cgcgcgccgcgcg

SEQ ID NO: 3105941 - RNA, 12 nt, Molluscum contagiosum virus
cgcgcgccgcgg

SEQ ID NO: 3105942 - RNA, 19 nt, Molluscum contagiosum virus
cgcgcgccgcugucacgcg

SEQ ID NO: 3105943 - RNA, 13 nt, Molluscum contagiosum virus
cgcgcgccugcug

SEQ ID NO: 3105944 - RNA, 19 nt, Molluscum contagiosum virus
cgcggaacugacugcugcc

SEQ ID NO: 3105945 - RNA, 16 nt, Molluscum contagiosum virus
cgcggaagaauuccuu

SEQ ID NO: 3105946 - RNA, 17 nt, Molluscum contagiosum virus
cgcggaagaucgcgucg

SEQ ID NO: 3105947 - RNA, 22 nt, Molluscum contagiosum virus
cgcggaagcccgagcgcgucca

SEQ ID NO: 3105948 - RNA, 19 nt, Molluscum contagiosum virus
cgcggacacauugcgaggc

SEQ ID NO: 3105949 - RNA, 21 nt, Molluscum contagiosum virus
cgcggacagagcccgcggcgc

SEQ ID NO: 3105950 - RNA, 14 nt, Molluscum contagiosum virus
cgcgcgcaagaaca

SEQ ID NO: 3105951 - RNA, 16 nt, Molluscum contagiosum virus
cgcgcgcaagcgccgc

SEQ ID NO: 3105952 - RNA, 17 nt, Molluscum contagiosum virus
cgcgcgcaagcgccgcu

SEQ ID NO: 3105953 - RNA, 19 nt, Molluscum contagiosum virus
cgcgcgcaagcgccgcucg

SEQ ID NO: 3105954 - RNA, 13 nt, Molluscum contagiosum virus
cgcgcgcacgcga

SEQ ID NO: 3105955 - RNA, 18 nt, Molluscum contagiosum virus
cgcgcgcacgcgaacgcc

SEQ ID NO: 3105956 - RNA, 16 nt, Molluscum contagiosum virus
cgcgcgcacgcgcacg

SEQ ID NO: 3105957 - RNA, 13 nt, Molluscum contagiosum virus
cgcgcgcacugcg

SEQ ID NO: 3105958 - RNA, 14 nt, Molluscum contagiosum virus
cgcgcgcacugcgg

SEQ ID NO: 3105959 - RNA, 11 nt, Molluscum contagiosum virus
cgcgcgcagca

SEQ ID NO: 3105960 - RNA, 15 nt, Molluscum contagiosum virus
cgcgcgcagcaccgc

SEQ ID NO: 3105961 - RNA, 22 nt, Molluscum contagiosum virus
cgcgcgcagcaggugcacgugc

SEQ ID NO: 3105962 - RNA, 17 nt, Molluscum contagiosum virus
cgcgcgcaggaaagguc

SEQ ID NO: 3105963 - RNA, 14 nt, Molluscum contagiosum virus
cgcgcgcaggcucg

SEQ ID NO: 3105964 - RNA, 14 nt, Molluscum contagiosum virus
cgcgcgcagggcgc

SEQ ID NO: 3105965 - RNA, 18 nt, Molluscum contagiosum virus
cgcgcgcauacgcgccgc

SEQ ID NO: 3105966 - RNA, 17 nt, Molluscum contagiosum virus
cgcgcgcaugcucgcgc

SEQ ID NO: 3105967 - RNA, 11 nt, Molluscum contagiosum virus
cgcgcgccaca

SEQ ID NO: 3105968 - RNA, 12 nt, Molluscum contagiosum virus
cgcgcgccagca

SEQ ID NO: 3105969 - RNA, 22 nt, Molluscum contagiosum virus
cgcgcgccagcaagcucgaugc

SEQ ID NO: 3105970 - RNA, 20 nt, Molluscum contagiosum virus
cgcgcgccagcacgcgcucg

SEQ ID NO: 3105971 - RNA, 16 nt, Molluscum contagiosum virus
cgcgcgccagcagcgc

SEQ ID NO: 3105972 - RNA, 21 nt, Molluscum contagiosum virus
cgcgcgccagcuaugcgcccg

SEQ ID NO: 3105973 - RNA, 18 nt, Molluscum contagiosum virus
cgcggauauggcgcgccg

SEQ ID NO: 3105974 - RNA, 20 nt, Molluscum contagiosum virus
cgcggauauggcgcgccgag

SEQ ID NO: 3105975 - RNA, 17 nt, Molluscum contagiosum virus
cgcggaucugcgcacac

SEQ ID NO: 3105976 - RNA, 18 nt, Molluscum contagiosum virus
cgcggaucugcgcacacg

SEQ ID NO: 3105977 - RNA, 20 nt, Molluscum contagiosum virus
cgcggaggucgagcgcgccg

SEQ ID NO: 3105978 - RNA, 13 nt, Molluscum contagiosum virus
cgcggacgcgggc

SEQ ID NO: 3105979 - RNA, 17 nt, Molluscum contagiosum virus
cgcggacggcgcgcagc

SEQ ID NO: 3105980 - RNA, 16 nt, Molluscum contagiosum virus
cgcggacucgugcacc

SEQ ID NO: 3105981 - RNA, 19 nt, Molluscum contagiosum virus
cgcggacucgugcaccacg

SEQ ID NO: 3105982 - RNA, 22 nt, Molluscum contagiosum virus
cgcggacuucucgcucacgcgc

SEQ ID NO: 3105983 - RNA, 14 nt, Molluscum contagiosum virus
cgcggagaagugcg

SEQ ID NO: 3105984 - RNA, 15 nt, Molluscum contagiosum virus
cgcggagcgcgcacg

SEQ ID NO: 3105985 - RNA, 22 nt, Molluscum contagiosum virus
cgcggagcgcuagcagggcggc

SEQ ID NO: 3105986 - RNA, 15 nt, Molluscum contagiosum virus
cgcggagcugcgcgc

SEQ ID NO: 3105987 - RNA, 14 nt, Molluscum contagiosum virus
cgcggagcugugcc

SEQ ID NO: 3105988 - RNA, 20 nt, Molluscum contagiosum virus
cgcgcgagcugcuagcggca

SEQ ID NO: 3105989 - RNA, 14 nt, Molluscum contagiosum virus
cgcgcgagcugcug

SEQ ID NO: 3105990 - RNA, 16 nt, Molluscum contagiosum virus
cgcgcgagcugcugcg

SEQ ID NO: 3105991 - RNA, 13 nt, Molluscum contagiosum virus
cgcgcgagggcgc

SEQ ID NO: 3105992 - RNA, 17 nt, Molluscum contagiosum virus
cgcgcgagugccagcga

SEQ ID NO: 3105993 - RNA, 14 nt, Molluscum contagiosum virus
cgcgcgagugugcg

SEQ ID NO: 3105994 - RNA, 16 nt, Molluscum contagiosum virus
cgcgcgagugugugca

SEQ ID NO: 3105995 - RNA, 18 nt, Molluscum contagiosum virus
cgcgccuugagcgcgccg

SEQ ID NO: 3105996 - RNA, 20 nt, Molluscum contagiosum virus
cgcgccuugagcgcgccgcg

SEQ ID NO: 3105997 - RNA, 13 nt, Molluscum contagiosum virus
cgcgcgaacgugc

SEQ ID NO: 3105998 - RNA, 20 nt, Molluscum contagiosum virus
cgcgcgaacucucaucgagc

SEQ ID NO: 3105999 - RNA, 17 nt, Molluscum contagiosum virus
cgcggaccuaaagcugc

SEQ ID NO: 3106000 - RNA, 16 nt, Molluscum contagiosum virus
cgcgcgaucgcggcca

SEQ ID NO: 3106001 - RNA, 17 nt, Molluscum contagiosum virus
cgcggcagcucugcagc

SEQ ID NO: 3106002 - RNA, 18 nt, Molluscum contagiosum virus
cgcggccaugcgcuugcg

SEQ ID NO: 3106003 - RNA, 22 nt, Molluscum contagiosum virus
cgcggccauggucacgcgcacg

SEQ ID NO: 3106004 - RNA, 22 nt, Molluscum contagiosum virus
cgcggccgagucacgccccagc

SEQ ID NO: 3106005 - RNA, 12 nt, Molluscum contagiosum virus
cgcggccgccac

SEQ ID NO: 3106006 - RNA, 13 nt, Molluscum contagiosum virus
cgcggccgcgaga

SEQ ID NO: 3106007 - RNA, 14 nt, Molluscum contagiosum virus
cgcggccgcgcucg

SEQ ID NO: 3106008 - RNA, 14 nt, Molluscum contagiosum virus
cgcggccgcggagg

SEQ ID NO: 3106009 - RNA, 15 nt, Molluscum contagiosum virus
cgcggccgcggaggg

SEQ ID NO: 3106010 - RNA, 16 nt, Molluscum contagiosum virus
cgcggaugccacgcag

SEQ ID NO: 3106011 - RNA, 17 nt, Molluscum contagiosum virus
cgcggaugccacgcagc

SEQ ID NO: 3106012 - RNA, 22 nt, Molluscum contagiosum virus
cgcggauguccuugaugccgug

SEQ ID NO: 3106013 - RNA, 19 nt, Molluscum contagiosum virus
cgcggcacaugcagcugca

SEQ ID NO: 3106014 - RNA, 16 nt, Molluscum contagiosum virus
cgcggcaccugucgcg

SEQ ID NO: 3106015 - RNA, 20 nt, Molluscum contagiosum virus
cgcggcacugggugcccgag

SEQ ID NO: 3106016 - RNA, 16 nt, Molluscum contagiosum virus
cgcggcagacgccagc

SEQ ID NO: 3106017 - RNA, 17 nt, Molluscum contagiosum virus
cgcggcgagucgcgggc

SEQ ID NO: 3106018 - RNA, 20 nt, Molluscum contagiosum virus
cgcggcgagugcggccacca

SEQ ID NO: 3106019 - RNA, 23 nt, Molluscum contagiosum virus
cgcggcgcacaaucucgccggcu

SEQ ID NO: 3106020 - RNA, 19 nt, Molluscum contagiosum virus
cgcggccguggcacugacg

SEQ ID NO: 3106021 - RNA, 21 nt, Molluscum contagiosum virus
cgcggcgcgcagcucgccgcg

SEQ ID NO: 3106022 - RNA, 14 nt, Molluscum contagiosum virus
cgcggcgcgcccag

SEQ ID NO: 3106023 - RNA, 15 nt, Molluscum contagiosum virus
cgcggcgcgcccagc

SEQ ID NO: 3106024 - RNA, 12 nt, Molluscum contagiosum virus
cgcggcgcgccg

SEQ ID NO: 3106025 - RNA, 13 nt, Molluscum contagiosum virus
cgcggcgcgccgc

SEQ ID NO: 3106026 - RNA, 19 nt, Molluscum contagiosum virus
cgugcuggagggcacgcug

SEQ ID NO: 3106027 - RNA, 13 nt, Molluscum contagiosum virus
cgugcugucagug

SEQ ID NO: 3106028 - RNA, 19 nt, Molluscum contagiosum virus
cgugcuguugccgcgcucg

SEQ ID NO: 3106029 - RNA, 14 nt, Molluscum contagiosum virus
cgugcuugcgcacg

SEQ ID NO: 3106030 - RNA, 17 nt, Molluscum contagiosum virus
cgugcuuguagcgcaag

SEQ ID NO: 3106031 - RNA, 12 nt, Molluscum contagiosum virus
cucgccggcgag

SEQ ID NO: 3106032 - RNA, 15 nt, Molluscum contagiosum virus
cucgccuuuccccgg

SEQ ID NO: 3106033 - RNA, 21 nt, Molluscum contagiosum virus
cucgcgggcguggggagcugg

SEQ ID NO: 3106034 - RNA, 20 nt, Molluscum contagiosum virus
cucgcgcucgggaagcacgu

SEQ ID NO: 3106035 - RNA, 15 nt, Molluscum contagiosum virus
cucgcgcuuccccgc

SEQ ID NO: 3106036 - RNA, 23 nt, Molluscum contagiosum virus
cucgcguuagcgcuggcccgugc

SEQ ID NO: 3106037 - RNA, 24 nt, Molluscum contagiosum virus
cucgcucaucaccgacacgcgccc

SEQ ID NO: 3106038 - RNA, 19 nt, Molluscum contagiosum virus
cucgcucauccacgcggag

SEQ ID NO: 3106039 - RNA, 22 nt, Molluscum contagiosum virus
cucgcgucaucgcugcacgcga

SEQ ID NO: 3106040 - RNA, 14 nt, Molluscum contagiosum virus
cucgcucgcgcaag

SEQ ID NO: 3106041 - RNA, 21 nt, Molluscum contagiosum virus
cucgcgcgacacgagcgaguu

SEQ ID NO: 3106042 - RNA, 15 nt, Molluscum contagiosum virus
cucgcgcgacuggca

SEQ ID NO: 3106043 - RNA, 17 nt, Molluscum contagiosum virus
cucgcgcgacuggcacg

SEQ ID NO: 3106044 - RNA, 21 nt, Molluscum contagiosum virus
cucgcgcgcagcacaccgucg

SEQ ID NO: 3106045 - RNA, 13 nt, Molluscum contagiosum virus
cucgcgcgccacc

SEQ ID NO: 3106046 - RNA, 13 nt, Molluscum contagiosum virus
cucgcgcgccagc

SEQ ID NO: 3106047 - RNA, 12 nt, Molluscum contagiosum virus
cucgcgcgcgag

SEQ ID NO: 3106048 - RNA, 16 nt, Molluscum contagiosum virus
cucgcgcgcgagcacg

SEQ ID NO: 3106049 - RNA, 17 nt, Molluscum contagiosum virus
cucgcgcgcgagcacgu

SEQ ID NO: 3106050 - RNA, 17 nt, Molluscum contagiosum virus
cucgcgacgugcgcgcu

SEQ ID NO: 3106051 - RNA, 14 nt, Molluscum contagiosum virus
cucgcgagaaguuc

SEQ ID NO: 3106052 - RNA, 22 nt, Molluscum contagiosum virus
cucgcgagaaguucugcacagc

SEQ ID NO: 3106053 - RNA, 19 nt, Molluscum contagiosum virus
cucgcgagcgccacuagca

SEQ ID NO: 3106054 - RNA, 16 nt, Molluscum contagiosum virus
cucgcgagggcucguc

SEQ ID NO: 3106055 - RNA, 20 nt, Molluscum contagiosum virus
cucgcgcaauacugcgggcu

SEQ ID NO: 3106056 - RNA, 17 nt, Molluscum contagiosum virus
cucgcgcacgaccacgu

SEQ ID NO: 3106057 - RNA, 17 nt, Molluscum contagiosum virus
cucgcgcaucugccgcg

SEQ ID NO: 3106058 - RNA, 20 nt, Molluscum contagiosum virus
gagcacaaagagacgcggcc

SEQ ID NO: 3106059 - RNA, 23 nt, Molluscum contagiosum virus
gagcacaaagagacgcggccgcg

SEQ ID NO: 3106060 - RNA, 17 nt, Molluscum contagiosum virus
gagcacauacacgcgca

SEQ ID NO: 3106061 - RNA, 16 nt, Molluscum contagiosum virus
gagcaccgcguggcgc

SEQ ID NO: 3106062 - RNA, 17 nt, Molluscum contagiosum virus
gagcaccugucgcgcga

SEQ ID NO: 3106063 - RNA, 22 nt, Molluscum contagiosum virus
gagcacgacuacggcgagccca

SEQ ID NO: 3106064 - RNA, 17 nt, Molluscum contagiosum virus
gagaucgacaagaucaa

SEQ ID NO: 3106065 - RNA, 23 nt, Molluscum contagiosum virus
gagaugauuccgucccccgcgga

SEQ ID NO: 3106066 - RNA, 20 nt, Molluscum contagiosum virus
gagaugcgccuuuuccgcga

SEQ ID NO: 3106067 - RNA, 20 nt, Molluscum contagiosum virus
gagaugcgguccgacucggu

SEQ ID NO: 3106068 - RNA, 23 nt, Molluscum contagiosum virus
gagaugggcccgcgcgcgcagcg

SEQ ID NO: 3106069 - RNA, 16 nt, Molluscum contagiosum virus
gagauggucacgcgca

SEQ ID NO: 3106070 - RNA, 19 nt, Molluscum contagiosum virus
gagaucaacgcgcgcgugc

SEQ ID NO: 3106071 - RNA, 20 nt, Molluscum contagiosum virus
gagaucacggcgugcgcgag

SEQ ID NO: 3106072 - RNA, 20 nt, Molluscum contagiosum virus
gagauccacgcgugcugcgc

SEQ ID NO: 3106073 - RNA, 22 nt, Molluscum contagiosum virus
cucgcugccagagauccgcccg

SEQ ID NO: 3106074 - RNA, 23 nt, Molluscum contagiosum virus
cucgcucggaaagagcgcgcgaa

SEQ ID NO: 3106075 - RNA, 12 nt, Molluscum contagiosum virus
cucgcugcugcc

SEQ ID NO: 3106076 - RNA, 14 nt, Molluscum contagiosum virus
cucgcugcugcucu

SEQ ID NO: 3106077 - RNA, 20 nt, Molluscum contagiosum virus
cucgcuguccuuccgacccg

SEQ ID NO: 3106078 - RNA, 19 nt, Molluscum contagiosum virus
cucggaaaauccgcgcccg

SEQ ID NO: 3106079 - RNA, 16 nt, Molluscum contagiosum virus
cucggaagagcguccg

SEQ ID NO: 3106080 - RNA, 19 nt, Molluscum contagiosum virus
cucggacagugccuccgcg

SEQ ID NO: 3106081 - RNA, 17 nt, Molluscum contagiosum virus
gagaguucugcgcccgc

SEQ ID NO: 3106082 - RNA, 20 nt, Molluscum contagiosum virus
gagaguucugcgcccgcgga

SEQ ID NO: 3106083 - RNA, 20 nt, Molluscum contagiosum virus
cguggcgcugggcgcgccgc

SEQ ID NO: 3106084 - RNA, 21 nt, Molluscum contagiosum virus
cguggcgcugggcgcgccgcg

SEQ ID NO: 3106085 - RNA, 23 nt, Molluscum contagiosum virus
cguggcgcuuggcgagcgcugcc

SEQ ID NO: 3106086 - RNA, 22 nt, Molluscum contagiosum virus
cgugggcaccugcaucgcgccg

SEQ ID NO: 3106087 - RNA, 19 nt, Molluscum contagiosum virus
cgugggcagcuucugcucg

SEQ ID NO: 3106088 - RNA, 22 nt, Molluscum contagiosum virus
cguggcgugcuuguagcgcaag

SEQ ID NO: 3106089 - RNA, 16 nt, Molluscum contagiosum virus
cguggcguugcugcug

SEQ ID NO: 3106090 - RNA, 20 nt, Molluscum contagiosum virus
cguggugguuggcgugcucg

SEQ ID NO: 3106091 - RNA, 15 nt, Molluscum contagiosum virus
cgugguguccacgcg

SEQ ID NO: 3106092 - RNA, 14 nt, Molluscum contagiosum virus
cgugguugcgcagc

SEQ ID NO: 3106093 - RNA, 18 nt, Molluscum contagiosum virus
cguguaccgccgcggccg

SEQ ID NO: 3106094 - RNA, 16 nt, Molluscum contagiosum virus
cguguacgagaaguuc

SEQ ID NO: 3106095 - RNA, 19 nt, Molluscum contagiosum virus
cgugucagcagcgcgagcu

SEQ ID NO: 3106096 - RNA, 18 nt, Molluscum contagiosum virus
cguguccuacacgccgcu

SEQ ID NO: 3106097 - RNA, 13 nt, Molluscum contagiosum virus
cgugucgcggagc

SEQ ID NO: 3106098 - RNA, 19 nt, Molluscum contagiosum virus
cguggaccuuggcgcgccg

SEQ ID NO: 3106099 - RNA, 12 nt, Molluscum contagiosum virus
cguggacgagca

SEQ ID NO: 3106100 - RNA, 19 nt, Molluscum contagiosum virus
cguggaggacaccgccgua

SEQ ID NO: 3106101 - RNA, 20 nt, Molluscum contagiosum virus
cguggaggacaccgccguac

SEQ ID NO: 3106102 - RNA, 20 nt, Molluscum contagiosum virus
cguggagucacgaccgaccc

SEQ ID NO: 3106103 - RNA, 19 nt, Molluscum contagiosum virus
cguggauaccaugcucucg

SEQ ID NO: 3106104 - RNA, 18 nt, Molluscum contagiosum virus
cguggccaggccgcgccg

SEQ ID NO: 3106105 - RNA, 16 nt, Molluscum contagiosum virus
cguggcgccgcugcug

SEQ ID NO: 3106106 - RNA, 13 nt, Molluscum contagiosum virus
cguggcgcgccgg

SEQ ID NO: 3106107 - RNA, 14 nt, Molluscum contagiosum virus
cguggcgcgccggc

SEQ ID NO: 3106108 - RNA, 14 nt, Molluscum contagiosum virus
cguggcgcgcgagc

SEQ ID NO: 3106109 - RNA, 15 nt, Molluscum contagiosum virus
cguggcgcgcgagcu

SEQ ID NO: 3106110 - RNA, 19 nt, Molluscum contagiosum virus
cguguuccggcagcgccgc

SEQ ID NO: 3106111 - RNA, 23 nt, Molluscum contagiosum virus
cguguguccgcacgcacacgacg

SEQ ID NO: 3106112 - RNA, 14 nt, Molluscum contagiosum virus
cgugugcgagcacg

SEQ ID NO: 3106113 - RNA, 17 nt, Molluscum contagiosum virus
cguggucgccgcggccg

SEQ ID NO: 3106114 - RNA, 16 nt, Molluscum contagiosum virus
cgugggcgagcgcacg

SEQ ID NO: 3106115 - RNA, 12 nt, Molluscum contagiosum virus
cgugggcgccgc

SEQ ID NO: 3106116 - RNA, 22 nt, Molluscum contagiosum virus
cgugucuggagcccacguugcc

SEQ ID NO: 3106117 - RNA, 21 nt, Molluscum contagiosum virus
cgugucugguguauccaggau

SEQ ID NO: 3106118 - RNA, 21 nt, Molluscum contagiosum virus
cucgaggccggcacgagcagu

SEQ ID NO: 3106119 - RNA, 14 nt, Molluscum contagiosum virus
cucgagugcacgua

SEQ ID NO: 3106120 - RNA, 17 nt, Molluscum contagiosum virus
cucgauggacgccagcu

SEQ ID NO: 3106121 - RNA, 17 nt, Molluscum contagiosum virus
cucgcacacgugcacgu

SEQ ID NO: 3106122 - RNA, 21 nt, Molluscum contagiosum virus
cucgcagccuccgugcgccag

SEQ ID NO: 3106123 - RNA, 15 nt, Molluscum contagiosum virus
cucgcagcucacgag

SEQ ID NO: 3106124 - RNA, 23 nt, Molluscum contagiosum virus
cucgcaggcgaggucacacucga

SEQ ID NO: 3106125 - RNA, 22 nt, Molluscum contagiosum virus
cucgcaggcggugggcgccgcg

SEQ ID NO: 3106126 - RNA, 22 nt, Molluscum contagiosum virus
cucgccaguggccagcgcgcgg

SEQ ID NO: 3106127 - RNA, 20 nt, Molluscum contagiosum virus
cucgcccgacuuuucgcgcc

SEQ ID NO: 3106128 - RNA, 20 nt, Molluscum contagiosum virus
cucgcccgcgcgcgcgcgaa

SEQ ID NO: 3106129 - RNA, 15 nt, Molluscum contagiosum virus
ccggaacgccgugcg

SEQ ID NO: 3106130 - RNA, 17 nt, Molluscum contagiosum virus
ccgcuucgugcgcggag

SEQ ID NO: 3106131 - RNA, 15 nt, Molluscum contagiosum virus
ccggagacaccagcu

SEQ ID NO: 3106132 - RNA, 14 nt, Molluscum contagiosum virus
ccggacguccaucc

SEQ ID NO: 3106133 - RNA, 20 nt, Molluscum contagiosum virus
ccggacgauaaauggaccuc

SEQ ID NO: 3106134 - RNA, 15 nt, Molluscum contagiosum virus
ccggacgcgcgaacu

SEQ ID NO: 3106135 - RNA, 15 nt, Molluscum contagiosum virus
ccggcacgugccccg

SEQ ID NO: 3106136 - RNA, 21 nt, Molluscum contagiosum virus
ccggcacgugccccgcgcgug

SEQ ID NO: 3106137 - RNA, 14 nt, Molluscum contagiosum virus
ccggcacgugcccg

SEQ ID NO: 3106138 - RNA, 15 nt, Molluscum contagiosum virus
ccggcagcgcauccg

SEQ ID NO: 3106139 - RNA, 13 nt, Molluscum contagiosum virus
ccggcagcgccgc

SEQ ID NO: 3106140 - RNA, 14 nt, Molluscum contagiosum virus
ccggcagcgccgcg

SEQ ID NO: 3106141 - RNA, 19 nt, Molluscum contagiosum virus
ccggcagcgccgcgcgcgc

SEQ ID NO: 3106142 - RNA, 14 nt, Molluscum contagiosum virus
ccggcagcgcgccu

SEQ ID NO: 3106143 - RNA, 16 nt, Molluscum contagiosum virus
ccggcagcgcgccuag

SEQ ID NO: 3106144 - RNA, 18 nt, Molluscum contagiosum virus
ccggcagcuggagcugcc

SEQ ID NO: 3106145 - RNA, 21 nt, Molluscum contagiosum virus
ccggcagcuggagcugccgcu

SEQ ID NO: 3106146 - RNA, 18 nt, Molluscum contagiosum virus
ccggcacccgugcgcgcg

SEQ ID NO: 3106147 - RNA, 19 nt, Molluscum contagiosum virus
ccggaaagaagggcucgcc

SEQ ID NO: 3106148 - RNA, 20 nt, Molluscum contagiosum virus
ccggaaagauauacaccagg

SEQ ID NO: 3106149 - RNA, 13 nt, Molluscum contagiosum virus
gaugcugcgcgug

SEQ ID NO: 3106150 - RNA, 21 nt, Molluscum contagiosum virus
gaugcuggacgggcacgagca

SEQ ID NO: 3106151 - RNA, 20 nt, Molluscum contagiosum virus
gauggaccgguuccgugcgc

SEQ ID NO: 3106152 - RNA, 14 nt, Molluscum contagiosum virus
gauggacgccagcu

SEQ ID NO: 3106153 - RNA, 12 nt, Molluscum contagiosum virus
gauggcgcugag

SEQ ID NO: 3106154 - RNA, 16 nt, Molluscum contagiosum virus
gauggcguccucgcuc

SEQ ID NO: 3106155 - RNA, 13 nt, Molluscum contagiosum virus
gauggcguggcgg

SEQ ID NO: 3106156 - RNA, 14 nt, Molluscum contagiosum virus
gauggcucgcgggc

SEQ ID NO: 3106157 - RNA, 16 nt, Molluscum contagiosum virus
gaugcucaagcacugc

SEQ ID NO: 3106158 - RNA, 18 nt, Molluscum contagiosum virus
gaugcucuacgugcugca

SEQ ID NO: 3106159 - RNA, 16 nt, Molluscum contagiosum virus
gaugcuagcgugugcc

SEQ ID NO: 3106160 - RNA, 20 nt, Molluscum contagiosum virus
gaugccgugguacacguaga

SEQ ID NO: 3106161 - RNA, 22 nt, Molluscum contagiosum virus
gaugcagugcggaugugcuagc

SEQ ID NO: 3106162 - RNA, 17 nt, Molluscum contagiosum virus
gaugacgggcacgcuca

SEQ ID NO: 3106163 - RNA, 18 nt, Molluscum contagiosum virus
gaugaguaccgcgggcgc

SEQ ID NO: 3106164 - RNA, 22 nt, Molluscum contagiosum virus
gaugcaaacauguagcgcgcgc

SEQ ID NO: 3106165 - RNA, 16 nt, Molluscum contagiosum virus
gaugaacuaccgugug

SEQ ID NO: 3106166 - RNA, 16 nt, Molluscum contagiosum virus
gaucuugaugaccacg

SEQ ID NO: 3106167 - RNA, 16 nt, Molluscum contagiosum virus
gaugaacgcgcugcgc

SEQ ID NO: 3106168 - RNA, 14 nt, Molluscum contagiosum virus
gaucgcgagaacgc

SEQ ID NO: 3106169 - RNA, 18 nt, Molluscum contagiosum virus
gaucaggcagcugcugcg

SEQ ID NO: 3106170 - RNA, 16 nt, Molluscum contagiosum virus
gaucacaaguccgcgg

SEQ ID NO: 3106171 - RNA, 15 nt, Molluscum contagiosum virus
gaucacgaugugcgc

SEQ ID NO: 3106172 - RNA, 16 nt, Molluscum contagiosum virus
gaucacgaugugcgcg

SEQ ID NO: 3106173 - RNA, 15 nt, Molluscum contagiosum virus
gaucacggcgugcgc

SEQ ID NO: 3106174 - RNA, 16 nt, Molluscum contagiosum virus
gaucacggcgugcgcg

SEQ ID NO: 3106175 - RNA, 17 nt, Molluscum contagiosum virus
gaucagccccgcgccag

SEQ ID NO: 3106176 - RNA, 15 nt, Molluscum contagiosum virus
gagcgucgaacuucu

SEQ ID NO: 3106177 - RNA, 22 nt, Molluscum contagiosum virus
gagcucaaucucgcccagcacc

SEQ ID NO: 3106178 - RNA, 22 nt, Molluscum contagiosum virus
gagcucacgccggaccagaucc

SEQ ID NO: 3106179 - RNA, 16 nt, Molluscum contagiosum virus
gagcuccccgcgcgca

SEQ ID NO: 3106180 - RNA, 17 nt, Molluscum contagiosum virus
gagcucgaaaaaguucu

SEQ ID NO: 3106181 - RNA, 13 nt, Molluscum contagiosum virus
gagcucgcgcgca

SEQ ID NO: 3106182 - RNA, 19 nt, Molluscum contagiosum virus
gagcucgcgcgccagcacg

SEQ ID NO: 3106183 - RNA, 23 nt, Molluscum contagiosum virus
gagcucgcgcgccagcacgcgcu

SEQ ID NO: 3106184 - RNA, 16 nt, Molluscum contagiosum virus
gagcucgucgcgcgcg

SEQ ID NO: 3106185 - RNA, 19 nt, Molluscum contagiosum virus
gagcucugucccgcaagcc

SEQ ID NO: 3106186 - RNA, 14 nt, Molluscum contagiosum virus
gaucaacgcgcgcg

SEQ ID NO: 3106187 - RNA, 20 nt, Molluscum contagiosum virus
gagcggcacgggaaggcucu

SEQ ID NO: 3106188 - RNA, 20 nt, Molluscum contagiosum virus
gagcggcauggaaagcuucu

SEQ ID NO: 3106189 - RNA, 22 nt, Molluscum contagiosum virus
gagcggccuccggagaagcuuu

SEQ ID NO: 3106190 - RNA, 20 nt, Molluscum contagiosum virus
gagcggcgacuugcugcgga

SEQ ID NO: 3106191 - RNA, 14 nt, Molluscum contagiosum virus
gagcggcgcgcgcu

SEQ ID NO: 3106192 - RNA, 12 nt, Molluscum contagiosum virus
gagcgcgcacga

SEQ ID NO: 3106193 - RNA, 12 nt, Molluscum contagiosum virus
gagcgcgcgcac

SEQ ID NO: 3106194 - RNA, 22 nt, Molluscum contagiosum virus
gagcgcgcggcgccgagcaacu

SEQ ID NO: 3106195 - RNA, 12 nt, Molluscum contagiosum virus
gagcgcgcgugc

SEQ ID NO: 3106196 - RNA, 18 nt, Molluscum contagiosum virus
gagcgcggcaacagcacg

SEQ ID NO: 3106197 - RNA, 21 nt, Molluscum contagiosum virus
gagcgcggcuuacacacgcac

SEQ ID NO: 3106198 - RNA, 20 nt, Molluscum contagiosum virus
gagcgcguccaugagcaucu

SEQ ID NO: 3106199 - RNA, 13 nt, Molluscum contagiosum virus
gagcgcugccgcu

SEQ ID NO: 3106200 - RNA, 20 nt, Molluscum contagiosum virus
gagcgcccgugcuugcgcac

SEQ ID NO: 3106201 - RNA, 19 nt, Molluscum contagiosum virus
gagcgccgccagcuccgcg

SEQ ID NO: 3106202 - RNA, 15 nt, Molluscum contagiosum virus
gagcgccgcgugcgc

SEQ ID NO: 3106203 - RNA, 18 nt, Molluscum contagiosum virus
cucacaccuagagcacga

SEQ ID NO: 3106204 - RNA, 16 nt, Molluscum contagiosum virus
cucaacucguaggaca

SEQ ID NO: 3106205 - RNA, 20 nt, Molluscum contagiosum virus
cucaagagccgcuucgggcu

SEQ ID NO: 3106206 - RNA, 16 nt, Molluscum contagiosum virus
cucacgcgcuaccgca

SEQ ID NO: 3106207 - RNA, 17 nt, Molluscum contagiosum virus
cucacgcuucguggcca

SEQ ID NO: 3106208 - RNA, 19 nt, Molluscum contagiosum virus
cucacggccuucgcguucc

SEQ ID NO: 3106209 - RNA, 16 nt, Molluscum contagiosum virus
cucacggcgagcgcgc

SEQ ID NO: 3106210 - RNA, 20 nt, Molluscum contagiosum virus
cucacggcgagcgcgcccuu

SEQ ID NO: 3106211 - RNA, 21 nt, Molluscum contagiosum virus
cucacgugcugaucacgcucg

SEQ ID NO: 3106212 - RNA, 22 nt, Molluscum contagiosum virus
cgcgcuuuuugccgcucacagc

SEQ ID NO: 3106213 - RNA, 16 nt, Molluscum contagiosum virus
cgcgcuuugcgcggcg

SEQ ID NO: 3106214 - RNA, 13 nt, Molluscum contagiosum virus
cgcgcuugcgcgg

SEQ ID NO: 3106215 - RNA, 24 nt, Molluscum contagiosum virus
cgcgcuuagcacacgcgcgcgcag

SEQ ID NO: 3106216 - RNA, 18 nt, Molluscum contagiosum virus
cgcgcuuccgcgagucug

SEQ ID NO: 3106217 - RNA, 18 nt, Molluscum contagiosum virus
cgcgcuggcgcgcgcgcu

SEQ ID NO: 3106218 - RNA, 18 nt, Molluscum contagiosum virus
cgcgcuccauguacgucg

SEQ ID NO: 3106219 - RNA, 14 nt, Molluscum contagiosum virus
cgcgcuccgagucg

SEQ ID NO: 3106220 - RNA, 16 nt, Molluscum contagiosum virus
cgcgcugagcgcggag

SEQ ID NO: 3106221 - RNA, 20 nt, Molluscum contagiosum virus
cgcgcugaucaccgaggagc

SEQ ID NO: 3106222 - RNA, 21 nt, Molluscum contagiosum virus
cgcgcugcacgccgccagcga

SEQ ID NO: 3106223 - RNA, 13 nt, Molluscum contagiosum virus
cgcgcugcgcaag

SEQ ID NO: 3106224 - RNA, 13 nt, Molluscum contagiosum virus
cgcgcugcgcacg

SEQ ID NO: 3106225 - RNA, 14 nt, Molluscum contagiosum virus
cgcgcugcgcacgu

SEQ ID NO: 3106226 - RNA, 14 nt, Molluscum contagiosum virus
cgcgcugcgccacu

SEQ ID NO: 3106227 - RNA, 14 nt, Molluscum contagiosum virus
cgcgcugcgcgccg

SEQ ID NO: 3106228 - RNA, 15 nt, Molluscum contagiosum virus
cgcgcugcgcgcgcu

SEQ ID NO: 3106229 - RNA, 20 nt, Molluscum contagiosum virus
cgcgcugcuucccgcugagc

SEQ ID NO: 3106230 - RNA, 19 nt, Molluscum contagiosum virus
cgcgcuggacuugcgcgag

SEQ ID NO: 3106231 - RNA, 21 nt, Molluscum contagiosum virus
cgcgcuggacuugcgcgagcg

SEQ ID NO: 3106232 - RNA, 17 nt, Molluscum contagiosum virus
cgcgcucacccugcacg

SEQ ID NO: 3106233 - RNA, 14 nt, Molluscum contagiosum virus
cgcgcucacugcag

SEQ ID NO: 3106234 - RNA, 16 nt, Molluscum contagiosum virus
cgcgcucacugcagca

SEQ ID NO: 3106235 - RNA, 19 nt, Molluscum contagiosum virus
cgcgcucacugcagcagcc

SEQ ID NO: 3106236 - RNA, 20 nt, Molluscum contagiosum virus
cgcgcucgaacgcgcgugcg

SEQ ID NO: 3106237 - RNA, 16 nt, Molluscum contagiosum virus
cgcgcucgacgcgugc

SEQ ID NO: 3106238 - RNA, 17 nt, Molluscum contagiosum virus
cgcgcucgacgcgugca

SEQ ID NO: 3106239 - RNA, 13 nt, Molluscum contagiosum virus
cgcgcucgcgcag

SEQ ID NO: 3106240 - RNA, 15 nt, Molluscum contagiosum virus
cgcgcucgcgcuucc

SEQ ID NO: 3106241 - RNA, 15 nt, Molluscum contagiosum virus
cgcgcucgcgugccg

SEQ ID NO: 3106242 - RNA, 20 nt, Molluscum contagiosum virus
cgcgcucgcgugccgcggac

SEQ ID NO: 3106243 - RNA, 19 nt, Molluscum contagiosum virus
cgcgcucgcucgcgcuccg

SEQ ID NO: 3106244 - RNA, 20 nt, Molluscum contagiosum virus
cgcgcucgucaaugcgcacg

SEQ ID NO: 3106245 - RNA, 18 nt, Molluscum contagiosum virus
cgcgcucguccgccgcgu

SEQ ID NO: 3106246 - RNA, 13 nt, Molluscum contagiosum virus
cgcgcucucacgc

SEQ ID NO: 3106247 - RNA, 22 nt, Molluscum contagiosum virus
cgcgcucugccgcccgcgcccg

SEQ ID NO: 3106248 - RNA, 16 nt, Molluscum contagiosum virus
cgcgcguugcugcccg

SEQ ID NO: 3106249 - RNA, 18 nt, Molluscum contagiosum virus
cgcgcguugcugcccgug

SEQ ID NO: 3106250 - RNA, 17 nt, Molluscum contagiosum virus
cgcgcuaccugcgcaag

SEQ ID NO: 3106251 - RNA, 14 nt, Molluscum contagiosum virus
cgcgcuacgcgccg

SEQ ID NO: 3106252 - RNA, 16 nt, Molluscum contagiosum virus
cgcgcuacgcgccgag

SEQ ID NO: 3106253 - RNA, 22 nt, Molluscum contagiosum virus
cgcgcuacugcgcgcacugcuc

SEQ ID NO: 3106254 - RNA, 16 nt, Molluscum contagiosum virus
cgcgcuagcuccacgu

SEQ ID NO: 3106255 - RNA, 20 nt, Molluscum contagiosum virus
cgcgcuauucaaagcugugc

SEQ ID NO: 3106256 - RNA, 21 nt, Molluscum contagiosum virus
cgcgcuauucaaagcugugcg

SEQ ID NO: 3106257 - RNA, 22 nt, Molluscum contagiosum virus
gagcaugccgccgcguacgcgc

SEQ ID NO: 3106258 - RNA, 21 nt, Molluscum contagiosum virus
cucccgcacgcaccgcgacau

SEQ ID NO: 3106259 - RNA, 15 nt, Molluscum contagiosum virus
cucaucaagcccgag

SEQ ID NO: 3106260 - RNA, 12 nt, Molluscum contagiosum virus
gagccccgcgga

SEQ ID NO: 3106261 - RNA, 22 nt, Molluscum contagiosum virus
gagcccgaucuugaaugucgcg

SEQ ID NO: 3106262 - RNA, 13 nt, Molluscum contagiosum virus
gagcccgcggcgc

SEQ ID NO: 3106263 - RNA, 18 nt, Molluscum contagiosum virus
gagcccggaucagccccg

SEQ ID NO: 3106264 - RNA, 19 nt, Molluscum contagiosum virus
gagccgcgcgagcgcgccc

SEQ ID NO: 3106265 - RNA, 14 nt, Molluscum contagiosum virus
gagccgcccgcgga

SEQ ID NO: 3106266 - RNA, 20 nt, Molluscum contagiosum virus
gagcgcaguuguuugucgcg

SEQ ID NO: 3106267 - RNA, 19 nt, Molluscum contagiosum virus
gagcgcaugccggggauga

SEQ ID NO: 3106268 - RNA, 14 nt, Molluscum contagiosum virus
gagcgcaugcgcgc

SEQ ID NO: 3106269 - RNA, 18 nt, Molluscum contagiosum virus
gagcgcaugcgcgccgcg

SEQ ID NO: 3106270 - RNA, 14 nt, Molluscum contagiosum virus
gagcgagcacgcca

SEQ ID NO: 3106271 - RNA, 22 nt, Molluscum contagiosum virus
gagcgaguucgcacgcuagcga

SEQ ID NO: 3106272 - RNA, 15 nt, Molluscum contagiosum virus
gagcgcagcugccgg

SEQ ID NO: 3106273 - RNA, 23 nt, Molluscum contagiosum virus
cucacucacaugugcugccggcu

SEQ ID NO: 3106274 - RNA, 14 nt, Molluscum contagiosum virus
cucacugcagcagc

SEQ ID NO: 3106275 - RNA, 16 nt, Molluscum contagiosum virus
cucagccgagcgccgc

SEQ ID NO: 3106276 - RNA, 14 nt, Molluscum contagiosum virus
cucauagcgccacg

SEQ ID NO: 3106277 - RNA, 20 nt, Molluscum contagiosum virus
cucauagcgccacgagcagu

SEQ ID NO: 3106278 - RNA, 20 nt, Molluscum contagiosum virus
cucagcggcacugcgcgcau

SEQ ID NO: 3106279 - RNA, 21 nt, Molluscum contagiosum virus
cucaggacaaagucgcgcgcg

SEQ ID NO: 3106280 - RNA, 23 nt, Molluscum contagiosum virus
cucaugcgcgggaugcuggacgg

SEQ ID NO: 3106281 - RNA, 17 nt, Molluscum contagiosum virus
cuccaacguuuucggcu

SEQ ID NO: 3106282 - RNA, 13 nt, Molluscum contagiosum virus
cuccacgcccgag

SEQ ID NO: 3106283 - RNA, 20 nt, Molluscum contagiosum virus
cuccacgcugcguucgagcu

SEQ ID NO: 3106284 - RNA, 17 nt, Molluscum contagiosum virus
cucaucggcgagcucuu

SEQ ID NO: 3106285 - RNA, 13 nt, Molluscum contagiosum virus
cuccagcgccagc

SEQ ID NO: 3106286 - RNA, 20 nt, Molluscum contagiosum virus
cuccagcgcgcccucgcgcg

SEQ ID NO: 3106287 - RNA, 16 nt, Molluscum contagiosum virus
cuccaggaacgcgccg

SEQ ID NO: 3106288 - RNA, 19 nt, Molluscum contagiosum virus
cuccaggggaaugaucgac

SEQ ID NO: 3106289 - RNA, 16 nt, Molluscum contagiosum virus
cuccaugagguacucc

SEQ ID NO: 3106290 - RNA, 13 nt, Molluscum contagiosum virus
ccgcccgaguccg

SEQ ID NO: 3106291 - RNA, 13 nt, Molluscum contagiosum virus
ccgcccgcgcccg

SEQ ID NO: 3106292 - RNA, 21 nt, Molluscum contagiosum virus
ccgcccuuguggacgcgcgag

SEQ ID NO: 3106293 - RNA, 18 nt, Molluscum contagiosum virus
ccgccgacaacgcacccg

SEQ ID NO: 3106294 - RNA, 20 nt, Molluscum contagiosum virus
ccgccgacaacgcacccgcg

SEQ ID NO: 3106295 - RNA, 14 nt, Molluscum contagiosum virus
ccgccgcgugcccg

SEQ ID NO: 3106296 - RNA, 13 nt, Molluscum contagiosum virus
ccgccggcgccgc

SEQ ID NO: 3106297 - RNA, 14 nt, Molluscum contagiosum virus
ccgccgcgcgcgau

SEQ ID NO: 3106298 - RNA, 16 nt, Molluscum contagiosum virus
ccgccggucuccacgu

SEQ ID NO: 3106299 - RNA, 17 nt, Molluscum contagiosum virus
ccgccugcugcagcucc

SEQ ID NO: 3106300 - RNA, 14 nt, Molluscum contagiosum virus
ccgccuguaccugc

SEQ ID NO: 3106301 - RNA, 20 nt, Molluscum contagiosum virus
ccgccuuuguggacgcgcaa

SEQ ID NO: 3106302 - RNA, 15 nt, Molluscum contagiosum virus
ccgccaugcugcgcg

SEQ ID NO: 3106303 - RNA, 23 nt, Molluscum contagiosum virus
ccgcgaaagaggaaagcgcacac

SEQ ID NO: 3106304 - RNA, 23 nt, Molluscum contagiosum virus
ccgcgaacgagaaaugcgcacac

SEQ ID NO: 3106305 - RNA, 22 nt, Molluscum contagiosum virus
ccgcgacaugccucgcggcccg

SEQ ID NO: 3106306 - RNA, 12 nt, Molluscum contagiosum virus
ccgcgaagagca

SEQ ID NO: 3106307 - RNA, 15 nt, Molluscum contagiosum virus
ccgcgaagagcacga

SEQ ID NO: 3106308 - RNA, 17 nt, Molluscum contagiosum virus
ccgcgaaguccugggcg

SEQ ID NO: 3106309 - RNA, 17 nt, Molluscum contagiosum virus
ccgcgacgaacucgaca

SEQ ID NO: 3106310 - RNA, 19 nt, Molluscum contagiosum virus
ccgcgagcacuggcuggcg

SEQ ID NO: 3106311 - RNA, 19 nt, Molluscum contagiosum virus
ccgcgagcgcaugcgcgcc

SEQ ID NO: 3106312 - RNA, 23 nt, Molluscum contagiosum virus
ccgcgcaauacgguggaggcgac

SEQ ID NO: 3106313 - RNA, 12 nt, Molluscum contagiosum virus
ccgcgcaccgcg

SEQ ID NO: 3106314 - RNA, 17 nt, Molluscum contagiosum virus
ccgcgccuagccgugcg

SEQ ID NO: 3106315 - RNA, 15 nt, Molluscum contagiosum virus
ccgcgcgagcgcgcc

SEQ ID NO: 3106316 - RNA, 16 nt, Molluscum contagiosum virus
ccgcgcgagcgcgccc

SEQ ID NO: 3106317 - RNA, 17 nt, Molluscum contagiosum virus
ccgcgcgagcgcgcccc

SEQ ID NO: 3106318 - RNA, 13 nt, Molluscum contagiosum virus
ccgcgcgcacgcg

SEQ ID NO: 3106319 - RNA, 18 nt, Molluscum contagiosum virus
ccgcgcgcccgcugcgcg

SEQ ID NO: 3106320 - RNA, 17 nt, Molluscum contagiosum virus
ccgcgcgccgcgcgccg

SEQ ID NO: 3106321 - RNA, 19 nt, Molluscum contagiosum virus
ccgcgcgcgcaagcgccgc

SEQ ID NO: 3106322 - RNA, 12 nt, Molluscum contagiosum virus
ccgcgcgcgcca

SEQ ID NO: 3106323 - RNA, 13 nt, Molluscum contagiosum virus
ccgcgcgcgccag

SEQ ID NO: 3106324 - RNA, 20 nt, Molluscum contagiosum virus
ccgcgcgcgccagcuaugcg

SEQ ID NO: 3106325 - RNA, 13 nt, Molluscum contagiosum virus
ccgcgcgcgcgcg

SEQ ID NO: 3106326 - RNA, 16 nt, Molluscum contagiosum virus
ccgcgcgcgcgcgaac

SEQ ID NO: 3106327 - RNA, 15 nt, Molluscum contagiosum virus
ccgcgcgcgcgcgug

SEQ ID NO: 3106328 - RNA, 22 nt, Molluscum contagiosum virus
ccgcgcgcggcuaagcucugcg

SEQ ID NO: 3106329 - RNA, 17 nt, Molluscum contagiosum virus
ccgcgcacugccacgcg

SEQ ID NO: 3106330 - RNA, 13 nt, Molluscum contagiosum virus
ccgcgcagcgugc

SEQ ID NO: 3106331 - RNA, 17 nt, Molluscum contagiosum virus
ccgcgcaugccagaccc

SEQ ID NO: 3106332 - RNA, 12 nt, Molluscum contagiosum virus
ccgcgccacgag

SEQ ID NO: 3106333 - RNA, 13 nt, Molluscum contagiosum virus
ccgcgccagcgac

SEQ ID NO: 3106334 - RNA, 19 nt, Molluscum contagiosum virus
ccgcgcccaagaagaagca

SEQ ID NO: 3106335 - RNA, 18 nt, Molluscum contagiosum virus
ccgcgcccgcggcgcacg

SEQ ID NO: 3106336 - RNA, 22 nt, Molluscum contagiosum virus
ccgcgcgggccaugucugugcg

SEQ ID NO: 3106337 - RNA, 13 nt, Molluscum contagiosum virus
ccgcgccgcgccg

SEQ ID NO: 3106338 - RNA, 14 nt, Molluscum contagiosum virus
ccgcgccgggcgcc

SEQ ID NO: 3106339 - RNA, 12 nt, Molluscum contagiosum virus
ccgcgcucgaca

SEQ ID NO: 3106340 - RNA, 14 nt, Molluscum contagiosum virus
ccgcgcucgccgca

SEQ ID NO: 3106341 - RNA, 21 nt, Molluscum contagiosum virus
ccgcgcucgccgcacgcgaag

SEQ ID NO: 3106342 - RNA, 16 nt, Molluscum contagiosum virus
ccgcgcugaugcuagc

SEQ ID NO: 3106343 - RNA, 11 nt, Molluscum contagiosum virus
ccgcgcgucug

SEQ ID NO: 3106344 - RNA, 17 nt, Molluscum contagiosum virus
ccgcgcgucugcgagug

SEQ ID NO: 3106345 - RNA, 12 nt, Molluscum contagiosum virus
ccgcgcguugcu

SEQ ID NO: 3106346 - RNA, 22 nt, Molluscum contagiosum virus
ccgcgcguuuucccgaggcguc

SEQ ID NO: 3106347 - RNA, 14 nt, Molluscum contagiosum virus
ccgcgcugcgcaag

SEQ ID NO: 3106348 - RNA, 13 nt, Molluscum contagiosum virus
ccgcgcugcgcgg

SEQ ID NO: 3106349 - RNA, 16 nt, Molluscum contagiosum virus
ccgcgcuucgagcacg

SEQ ID NO: 3106350 - RNA, 15 nt, Molluscum contagiosum virus
ccgcgcuuugcgcgg

SEQ ID NO: 3106351 - RNA, 17 nt, Molluscum contagiosum virus
ccgcggaagugcgagcc

SEQ ID NO: 3106352 - RNA, 19 nt, Molluscum contagiosum virus
ccgcggaagugcgagccgu

SEQ ID NO: 3106353 - RNA, 18 nt, Molluscum contagiosum virus
ccgcggacgccggcgccc

SEQ ID NO: 3106354 - RNA, 15 nt, Molluscum contagiosum virus
cgcgcgugagcacgg

SEQ ID NO: 3106355 - RNA, 17 nt, Molluscum contagiosum virus
cgcgcgugccgcccgag

SEQ ID NO: 3106356 - RNA, 23 nt, Molluscum contagiosum virus
cgcgcgugccuguggcgcacacg

SEQ ID NO: 3106357 - RNA, 14 nt, Molluscum contagiosum virus
cgcgcgugcucgac

SEQ ID NO: 3106358 - RNA, 21 nt, Molluscum contagiosum virus
cgcgacuccaucugcgcgacg

SEQ ID NO: 3106359 - RNA, 18 nt, Molluscum contagiosum virus
cgcgacuggcacgcgccg

SEQ ID NO: 3106360 - RNA, 20 nt, Molluscum contagiosum virus
cgcgacuggcacgcgccgcg

SEQ ID NO: 3106361 - RNA, 15 nt, Molluscum contagiosum virus
cgcgacuucgcccgu

SEQ ID NO: 3106362 - RNA, 16 nt, Molluscum contagiosum virus
cgcgcgucugcgagug

SEQ ID NO: 3106363 - RNA, 20 nt, Molluscum contagiosum virus
cgcgcgucugcgaguggcgc

SEQ ID NO: 3106364 - RNA, 16 nt, Molluscum contagiosum virus
cgcgacgugcgcgcug

SEQ ID NO: 3106365 - RNA, 15 nt, Molluscum contagiosum virus
cgcgaccgcaccgag

SEQ ID NO: 3106366 - RNA, 15 nt, Molluscum contagiosum virus
cgcgaccggcgugcc

SEQ ID NO: 3106367 - RNA, 21 nt, Molluscum contagiosum virus
cgcgacgacggcacgcugagc

SEQ ID NO: 3106368 - RNA, 15 nt, Molluscum contagiosum virus
cgcgacgagcagacg

SEQ ID NO: 3106369 - RNA, 16 nt, Molluscum contagiosum virus
cgcgacgagcucacgc

SEQ ID NO: 3106370 - RNA, 16 nt, Molluscum contagiosum virus
cgcgacgauggccacg

SEQ ID NO: 3106371 - RNA, 20 nt, Molluscum contagiosum virus
cgcgacgccguccgcgcagc

SEQ ID NO: 3106372 - RNA, 13 nt, Molluscum contagiosum virus
cgcgacgcgcgug

SEQ ID NO: 3106373 - RNA, 17 nt, Molluscum contagiosum virus
cgcgacgcgcguggagc

SEQ ID NO: 3106374 - RNA, 17 nt, Molluscum contagiosum virus
cgcgacgcguccgccuc

SEQ ID NO: 3106375 - RNA, 22 nt, Molluscum contagiosum virus
cgcgacggcgugcuggccagcc

SEQ ID NO: 3106376 - RNA, 15 nt, Molluscum contagiosum virus
cgcgacgggaaccgu

SEQ ID NO: 3106377 - RNA, 15 nt, Molluscum contagiosum virus
cgccugcucucgcgc

SEQ ID NO: 3106378 - RNA, 21 nt, Molluscum contagiosum virus
cgccugcucucgcgcgccagc

SEQ ID NO: 3106379 - RNA, 16 nt, Molluscum contagiosum virus
cgcgacaggggccaca

SEQ ID NO: 3106380 - RNA, 15 nt, Molluscum contagiosum virus
cgcgacaugcugccc

SEQ ID NO: 3106381 - RNA, 19 nt, Molluscum contagiosum virus
cgcgaacgugcgaacacgg

SEQ ID NO: 3106382 - RNA, 19 nt, Molluscum contagiosum virus
cgcgaauuggccgcggagg

SEQ ID NO: 3106383 - RNA, 20 nt, Molluscum contagiosum virus
cgcgaauuggccgcggagga

SEQ ID NO: 3106384 - RNA, 17 nt, Molluscum contagiosum virus
cgcgacaagcgcgucug

SEQ ID NO: 3106385 - RNA, 14 nt, Molluscum contagiosum virus
cgcgaacgcgucca

SEQ ID NO: 3106386 - RNA, 16 nt, Molluscum contagiosum virus
cgcgaacgcguccacg

SEQ ID NO: 3106387 - RNA, 20 nt, Molluscum contagiosum virus
cgcgaacgcguccacggcgc

SEQ ID NO: 3106388 - RNA, 23 nt, Molluscum contagiosum virus
cgccuucuugcuggcgcucgcgc

SEQ ID NO: 3106389 - RNA, 18 nt, Molluscum contagiosum virus
cgccuugcagcgcagcag

SEQ ID NO: 3106390 - RNA, 15 nt, Molluscum contagiosum virus
cgccuugccgaggag

SEQ ID NO: 3106391 - RNA, 13 nt, Molluscum contagiosum virus
cgccuuugcgcug

SEQ ID NO: 3106392 - RNA, 21 nt, Molluscum contagiosum virus
cgcgaaaaccggaggcugcgc

SEQ ID NO: 3106393 - RNA, 15 nt, Molluscum contagiosum virus
cgcgaaagaacacgg

SEQ ID NO: 3106394 - RNA, 22 nt, Molluscum contagiosum virus
cgcgaaagcgucgugcuccacg

SEQ ID NO: 3106395 - RNA, 13 nt, Molluscum contagiosum virus
cgccuuccugcug

SEQ ID NO: 3106396 - RNA, 15 nt, Molluscum contagiosum virus
cgccuuccugcuggc

SEQ ID NO: 3106397 - RNA, 15 nt, Molluscum contagiosum virus
cgccugccgcgagca

SEQ ID NO: 3106398 - RNA, 22 nt, Molluscum contagiosum virus
cgccugccgcgagcacuggcug

SEQ ID NO: 3106399 - RNA, 16 nt, Molluscum contagiosum virus
ccgggcucgggcucga

SEQ ID NO: 3106400 - RNA, 18 nt, Molluscum contagiosum virus
ccgggcucuuccggcccg

SEQ ID NO: 3106401 - RNA, 12 nt, Molluscum contagiosum virus
ccgggcgcgcca

SEQ ID NO: 3106402 - RNA, 15 nt, Molluscum contagiosum virus
ccgggcccgggcccg

SEQ ID NO: 3106403 - RNA, 21 nt, Molluscum contagiosum virus
ccgggcccggguuugugcccg

SEQ ID NO: 3106404 - RNA, 12 nt, Molluscum contagiosum virus
ccgggcgcacaa

SEQ ID NO: 3106405 - RNA, 23 nt, Molluscum contagiosum virus
ccggggagaagaugcugcgcgug

SEQ ID NO: 3106406 - RNA, 13 nt, Molluscum contagiosum virus
ccgggcacgcccg

SEQ ID NO: 3106407 - RNA, 16 nt, Molluscum contagiosum virus
ccgggaaggcaggccc

SEQ ID NO: 3106408 - RNA, 20 nt, Molluscum contagiosum virus
ccgggccccugucgcgcacg

SEQ ID NO: 3106409 - RNA, 15 nt, Molluscum contagiosum virus
ccgggcccgagcccg

SEQ ID NO: 3106410 - RNA, 12 nt, Molluscum contagiosum virus
ccggcugccgcu

SEQ ID NO: 3106411 - RNA, 15 nt, Molluscum contagiosum virus
ccgggaaacgcacag

SEQ ID NO: 3106412 - RNA, 21 nt, Molluscum contagiosum virus
ccgggaaagcaaccacacgcg

SEQ ID NO: 3106413 - RNA, 23 nt, Molluscum contagiosum virus
ccgggauuugccgguugcgcgug

SEQ ID NO: 3106414 - RNA, 15 nt, Molluscum contagiosum virus
ccggcgugagcucgu

SEQ ID NO: 3106415 - RNA, 22 nt, Molluscum contagiosum virus
ccggcguucacggacucgagcc

SEQ ID NO: 3106416 - RNA, 20 nt, Molluscum contagiosum virus
ccggcguccggcgcucgccc

SEQ ID NO: 3106417 - RNA, 21 nt, Molluscum contagiosum virus
ccggcguuggcuuucugugcg

SEQ ID NO: 3106418 - RNA, 17 nt, Molluscum contagiosum virus
ccggcggcuggaccugc

SEQ ID NO: 3106419 - RNA, 14 nt, Molluscum contagiosum virus
ccggcgggcgcgug

SEQ ID NO: 3106420 - RNA, 20 nt, Molluscum contagiosum virus
ccggcggcccgcggcgcgcc

SEQ ID NO: 3106421 - RNA, 15 nt, Molluscum contagiosum virus
ccggcgcucgccccu

SEQ ID NO: 3106422 - RNA, 21 nt, Molluscum contagiosum virus
ccggcgcuugccccucguccg

SEQ ID NO: 3106423 - RNA, 12 nt, Molluscum contagiosum virus
ccggcgcuugcg

SEQ ID NO: 3106424 - RNA, 13 nt, Molluscum contagiosum virus
ccgcggcgcgccg

SEQ ID NO: 3106425 - RNA, 14 nt, Molluscum contagiosum virus
ccgcggcgugcccg

SEQ ID NO: 3106426 - RNA, 20 nt, Molluscum contagiosum virus
ccgcggcuaccacgggcccg

SEQ ID NO: 3106427 - RNA, 17 nt, Molluscum contagiosum virus
ccgcggcugccucgugc

SEQ ID NO: 3106428 - RNA, 22 nt, Molluscum contagiosum virus
ccgcgggcacauggacggcgcc

SEQ ID NO: 3106429 - RNA, 14 nt, Molluscum contagiosum virus
ccgcggacgcgcag

SEQ ID NO: 3106430 - RNA, 15 nt, Molluscum contagiosum virus
ccgcggacgcgcccu

SEQ ID NO: 3106431 - RNA, 14 nt, Molluscum contagiosum virus
ccgcggacucgugc

SEQ ID NO: 3106432 - RNA, 23 nt, Molluscum contagiosum virus
ccgcggagaccaccgcuggggcg

SEQ ID NO: 3106433 - RNA, 14 nt, Molluscum contagiosum virus
ccgcggagcugugc

SEQ ID NO: 3106434 - RNA, 20 nt, Molluscum contagiosum virus
ccgcggagggaggcucgagc

SEQ ID NO: 3106435 - RNA, 19 nt, Molluscum contagiosum virus
ucgccgcgcgccgcugcuc

SEQ ID NO: 3106436 - RNA, 17 nt, Molluscum contagiosum virus
ucgccgcgcgcgccagc

SEQ ID NO: 3106437 - RNA, 19 nt, Molluscum contagiosum virus
ucgccggcaucgcgcugcu

SEQ ID NO: 3106438 - RNA, 19 nt, Molluscum contagiosum virus
ucgccgggccccugucgcg

SEQ ID NO: 3106439 - RNA, 16 nt, Molluscum contagiosum virus
ucgcccugcccgcgcg

SEQ ID NO: 3106440 - RNA, 23 nt, Molluscum contagiosum virus
ucgccagaagucagaguccgacc

SEQ ID NO: 3106441 - RNA, 17 nt, Molluscum contagiosum virus
ucgccuccgggcgcaca

SEQ ID NO: 3106442 - RNA, 20 nt, Molluscum contagiosum virus
ucgccuccuugcccgaggag

SEQ ID NO: 3106443 - RNA, 20 nt, Molluscum contagiosum virus
uccucgaaggcgugcgccgu

SEQ ID NO: 3106444 - RNA, 16 nt, Molluscum contagiosum virus
uccucaaggcgcacga

SEQ ID NO: 3106445 - RNA, 23 nt, Molluscum contagiosum virus
uccuagagcagaaggugcgcagc

SEQ ID NO: 3106446 - RNA, 21 nt, Molluscum contagiosum virus
uccggcuuagcuggcgcccgu

SEQ ID NO: 3106447 - RNA, 12 nt, Molluscum contagiosum virus
uccgggcgcugc

SEQ ID NO: 3106448 - RNA, 12 nt, Molluscum contagiosum virus
uccgugucguuc

SEQ ID NO: 3106449 - RNA, 18 nt, Molluscum contagiosum virus
uccgugccauuucguuga

SEQ ID NO: 3106450 - RNA, 17 nt, Molluscum contagiosum virus
uccgugcccacgagcgc

SEQ ID NO: 3106451 - RNA, 16 nt, Molluscum contagiosum virus
ucgagcgcgccgcgcg

SEQ ID NO: 3106452 - RNA, 18 nt, Molluscum contagiosum virus
ucgagcgcgccgcgcgcu

SEQ ID NO: 3106453 - RNA, 22 nt, Molluscum contagiosum virus
ucgagcgcgccgcgcgcucgcg

SEQ ID NO: 3106454 - RNA, 14 nt, Molluscum contagiosum virus
ucgagcgcgcgccu

SEQ ID NO: 3106455 - RNA, 22 nt, Molluscum contagiosum virus
ucgagcgcgcgccugcuggcgg

SEQ ID NO: 3106456 - RNA, 22 nt, Molluscum contagiosum virus
ucgagcgcgcuggacuugcgcg

SEQ ID NO: 3106457 - RNA, 23 nt, Molluscum contagiosum virus
ucgagcuccgagggcgcgugcuc

SEQ ID NO: 3106458 - RNA, 17 nt, Molluscum contagiosum virus
ucgagcugacucggaca

SEQ ID NO: 3106459 - RNA, 17 nt, Molluscum contagiosum virus
ucgagcugcugcgcgag

SEQ ID NO: 3106460 - RNA, 19 nt, Molluscum contagiosum virus
ucgagcuucggacgagcuc

SEQ ID NO: 3106461 - RNA, 17 nt, Molluscum contagiosum virus
ucgaggcacucgucgcg

SEQ ID NO: 3106462 - RNA, 14 nt, Molluscum contagiosum virus
ucgaggccuucgcg

SEQ ID NO: 3106463 - RNA, 16 nt, Molluscum contagiosum virus
ucgaggccuucgcgcc

SEQ ID NO: 3106464 - RNA, 12 nt, Molluscum contagiosum virus
ucgagggcgccg

SEQ ID NO: 3106465 - RNA, 16 nt, Molluscum contagiosum virus
ucgagggggacgugcc

SEQ ID NO: 3106466 - RNA, 23 nt, Molluscum contagiosum virus
ucgagggggacgugcccuacgcg

SEQ ID NO: 3106467 - RNA, 19 nt, Molluscum contagiosum virus
ucgagugcucccgaggcgc

SEQ ID NO: 3106468 - RNA, 19 nt, Molluscum contagiosum virus
uccucucacgcccucucga

SEQ ID NO: 3106469 - RNA, 13 nt, Molluscum contagiosum virus
uccucggcgcaca

SEQ ID NO: 3106470 - RNA, 14 nt, Molluscum contagiosum virus
ucgagcaggucauc

SEQ ID NO: 3106471 - RNA, 18 nt, Molluscum contagiosum virus
uccugcauuucaugcgcg

SEQ ID NO: 3106472 - RNA, 14 nt, Molluscum contagiosum virus
ucgagcccgagccc

SEQ ID NO: 3106473 - RNA, 20 nt, Molluscum contagiosum virus
ucgagccgcgcuucgagcac

SEQ ID NO: 3106474 - RNA, 19 nt, Molluscum contagiosum virus
ucgagcgagcuacgcgcuc

SEQ ID NO: 3106475 - RNA, 15 nt, Molluscum contagiosum virus
ucgaucucgcgcacg

SEQ ID NO: 3106476 - RNA, 17 nt, Molluscum contagiosum virus
ucgaugacagcaucggg

SEQ ID NO: 3106477 - RNA, 20 nt, Molluscum contagiosum virus
ucgcaaccccgcgcugcgcg

SEQ ID NO: 3106478 - RNA, 20 nt, Molluscum contagiosum virus
ucgcaagcugagcgcgcugc

SEQ ID NO: 3106479 - RNA, 18 nt, Molluscum contagiosum virus
ucgcaagucucccucgcg

SEQ ID NO: 3106480 - RNA, 22 nt, Molluscum contagiosum virus
ucgcaagucucccucgcgcgca

SEQ ID NO: 3106481 - RNA, 16 nt, Molluscum contagiosum virus
ucgccaaugacggcgu

SEQ ID NO: 3106482 - RNA, 15 nt, Molluscum contagiosum virus
ucgaguucgcucgcu

SEQ ID NO: 3106483 - RNA, 19 nt, Molluscum contagiosum virus
ucgcacgcuagcgagcgcc

SEQ ID NO: 3106484 - RNA, 22 nt, Molluscum contagiosum virus
ucgcacgcuagcgagcgcccgu

SEQ ID NO: 3106485 - RNA, 18 nt, Molluscum contagiosum virus
ucgcagaacugcugcgcg

SEQ ID NO: 3106486 - RNA, 16 nt, Molluscum contagiosum virus
ucgcagacgacucgcu

SEQ ID NO: 3106487 - RNA, 20 nt, Molluscum contagiosum virus
ucgcagacgacucgcugcca

SEQ ID NO: 3106488 - RNA, 19 nt, Molluscum contagiosum virus
ucgcagacgcagcgcgagc

SEQ ID NO: 3106489 - RNA, 20 nt, Molluscum contagiosum virus
ucgcagcguuccaggaacgc

SEQ ID NO: 3106490 - RNA, 13 nt, Molluscum contagiosum virus
ucgcaggcgugcu

SEQ ID NO: 3106491 - RNA, 22 nt, Molluscum contagiosum virus
ucgcagggggggcuugcggucu

SEQ ID NO: 3106492 - RNA, 14 nt, Molluscum contagiosum virus
ggcgcucgcgcgca

SEQ ID NO: 3106493 - RNA, 13 nt, Molluscum contagiosum virus
ggcgcucacugcg

SEQ ID NO: 3106494 - RNA, 12 nt, Molluscum contagiosum virus
ggcgcugucgcg

SEQ ID NO: 3106495 - RNA, 18 nt, Molluscum contagiosum virus
ggcgcuugggcacugcua

SEQ ID NO: 3106496 - RNA, 17 nt, Molluscum contagiosum virus
ggcggcaagcuuugcuu

SEQ ID NO: 3106497 - RNA, 22 nt, Molluscum contagiosum virus
ggcggcauccugaugacggcag

SEQ ID NO: 3106498 - RNA, 21 nt, Molluscum contagiosum virus
ggcgcguugcucccgucgagc

SEQ ID NO: 3106499 - RNA, 14 nt, Molluscum contagiosum virus
ggcgcgugcgagca

SEQ ID NO: 3106500 - RNA, 11 nt, Molluscum contagiosum virus
ggcgcgugcuc

SEQ ID NO: 3106501 - RNA, 12 nt, Molluscum contagiosum virus
ggcggcgcggcu

SEQ ID NO: 3106502 - RNA, 14 nt, Molluscum contagiosum virus
ggcggcgcuggaga

SEQ ID NO: 3106503 - RNA, 20 nt, Molluscum contagiosum virus
ggcggcgauggcgauagcga

SEQ ID NO: 3106504 - RNA, 12 nt, Molluscum contagiosum virus
ggcggcgcaagg

SEQ ID NO: 3106505 - RNA, 20 nt, Molluscum contagiosum virus
ggcggccucccucgucgcgc

SEQ ID NO: 3106506 - RNA, 19 nt, Molluscum contagiosum virus
uccggcggcuccgcgcgcg

SEQ ID NO: 3106507 - RNA, 20 nt, Molluscum contagiosum virus
uccggcgugagcucgucgcg

SEQ ID NO: 3106508 - RNA, 13 nt, Molluscum contagiosum virus
uccggcgcucgcc

SEQ ID NO: 3106509 - RNA, 16 nt, Molluscum contagiosum virus
uccgcuguacgugcug

SEQ ID NO: 3106510 - RNA, 20 nt, Molluscum contagiosum virus
uccggacgugcacgcacgcg

SEQ ID NO: 3106511 - RNA, 19 nt, Molluscum contagiosum virus
uccgcguacagcgcgcgug

SEQ ID NO: 3106512 - RNA, 13 nt, Molluscum contagiosum virus
ggcggcgucgcgc

SEQ ID NO: 3106513 - RNA, 21 nt, Molluscum contagiosum virus
uccgaggacgacgccgagccc

SEQ ID NO: 3106514 - RNA, 18 nt, Molluscum contagiosum virus
uccgcaauuacgugcgcg

SEQ ID NO: 3106515 - RNA, 18 nt, Molluscum contagiosum virus
uccgcaauucuagcgcga

SEQ ID NO: 3106516 - RNA, 16 nt, Molluscum contagiosum virus
uccgcacacgcgcgcg

SEQ ID NO: 3106517 - RNA, 20 nt, Molluscum contagiosum virus
uccgcacacgcgcgcgugcu

SEQ ID NO: 3106518 - RNA, 23 nt, Molluscum contagiosum virus
uccgcaggcgucaugcgcgcgcg

SEQ ID NO: 3106519 - RNA, 22 nt, Molluscum contagiosum virus
uccgccucggaaaacgcccgag

SEQ ID NO: 3106520 - RNA, 18 nt, Molluscum contagiosum virus
uccgcgaaguccugggcg

SEQ ID NO: 3106521 - RNA, 20 nt, Molluscum contagiosum virus
uccgcgaaguccugggcgag

SEQ ID NO: 3106522 - RNA, 18 nt, Molluscum contagiosum virus
uccgcgacgaacucgaca

SEQ ID NO: 3106523 - RNA, 15 nt, Molluscum contagiosum virus
uccgcggcacgcgag

SEQ ID NO: 3106524 - RNA, 15 nt, Molluscum contagiosum virus
gcgcgugaguccgcg

SEQ ID NO: 3106525 - RNA, 17 nt, Molluscum contagiosum virus
gcgcgugaguccgcggc

SEQ ID NO: 3106526 - RNA, 17 nt, Molluscum contagiosum virus
gcgcguacucgcgccgc

SEQ ID NO: 3106527 - RNA, 18 nt, Molluscum contagiosum virus
gcgcguacucgcgccgcg

SEQ ID NO: 3106528 - RNA, 16 nt, Molluscum contagiosum virus
gcgcgucucugcgcag

SEQ ID NO: 3106529 - RNA, 19 nt, Molluscum contagiosum virus
gcgcgucugcaucgugggc

SEQ ID NO: 3106530 - RNA, 19 nt, Molluscum contagiosum virus
gcgcgucugcgaguggcgc

SEQ ID NO: 3106531 - RNA, 15 nt, Molluscum contagiosum virus
gcgcgucugugcgcg

SEQ ID NO: 3106532 - RNA, 17 nt, Molluscum contagiosum virus
gcgcguccgcaggcguc

SEQ ID NO: 3106533 - RNA, 15 nt, Molluscum contagiosum virus
gcgcgucgcggucgc

SEQ ID NO: 3106534 - RNA, 20 nt, Molluscum contagiosum virus
gcgcguacgcgugcgcuggc

SEQ ID NO: 3106535 - RNA, 18 nt, Molluscum contagiosum virus
gcgcguacgcugcucgag

SEQ ID NO: 3106536 - RNA, 14 nt, Molluscum contagiosum virus
gcgcgacaugcugc

SEQ ID NO: 3106537 - RNA, 20 nt, Molluscum contagiosum virus
gcgcgugccagucgcgcgag

SEQ ID NO: 3106538 - RNA, 18 nt, Molluscum contagiosum virus
gcgcgugccgcugcgcgg

SEQ ID NO: 3106539 - RNA, 21 nt, Molluscum contagiosum virus
gcgcgugcgagcggcgcgcgc

SEQ ID NO: 3106540 - RNA, 13 nt, Molluscum contagiosum virus
gcgcgugcgcagg

SEQ ID NO: 3106541 - RNA, 13 nt, Molluscum contagiosum virus
gcgcgugcgcgug

SEQ ID NO: 3106542 - RNA, 21 nt, Molluscum contagiosum virus
gcgcgugcguacgugcacgug

SEQ ID NO: 3106543 - RNA, 13 nt, Molluscum contagiosum virus
gcgcgugcgucuc

SEQ ID NO: 3106544 - RNA, 12 nt, Molluscum contagiosum virus
gcgcgugcucga

SEQ ID NO: 3106545 - RNA, 23 nt, Molluscum contagiosum virus
gcgcgugcucgacucggaugcgc

SEQ ID NO: 3106546 - RNA, 12 nt, Molluscum contagiosum virus
gcgcgugcucgc

SEQ ID NO: 3106547 - RNA, 12 nt, Molluscum contagiosum virus
gcgcgugcucgg

SEQ ID NO: 3106548 - RNA, 16 nt, Molluscum contagiosum virus
gcgcgugcugcggcug

SEQ ID NO: 3106549 - RNA, 17 nt, Molluscum contagiosum virus
gcgcgugcuggacgcgc

SEQ ID NO: 3106550 - RNA, 19 nt, Molluscum contagiosum virus
gcgcgugcuggacgcgcac

SEQ ID NO: 3106551 - RNA, 15 nt, Molluscum contagiosum virus
gcgcgugcugggccc

SEQ ID NO: 3106552 - RNA, 20 nt, Molluscum contagiosum virus
ggcgcgagaugcucgccggc

SEQ ID NO: 3106553 - RNA, 21 nt, Molluscum contagiosum virus
ggcgcgagaugcucgccggca

SEQ ID NO: 3106554 - RNA, 22 nt, Molluscum contagiosum virus
ggcgcgagcgacggcaggcccu

SEQ ID NO: 3106555 - RNA, 17 nt, Molluscum contagiosum virus
ggcgcgggagcucacgg

SEQ ID NO: 3106556 - RNA, 15 nt, Molluscum contagiosum virus
ggcgcgccgcgcgcg

SEQ ID NO: 3106557 - RNA, 19 nt, Molluscum contagiosum virus
ggcgcgcgagcacagcgcg

SEQ ID NO: 3106558 - RNA, 14 nt, Molluscum contagiosum virus
ggcgcgcgccagca

SEQ ID NO: 3106559 - RNA, 18 nt, Molluscum contagiosum virus
ggcgcgcgcugcgcacgu

SEQ ID NO: 3106560 - RNA, 14 nt, Molluscum contagiosum virus
ggcgcgcggagagc

SEQ ID NO: 3106561 - RNA, 14 nt, Molluscum contagiosum virus
ggcgcgcguacgcg

SEQ ID NO: 3106562 - RNA, 13 nt, Molluscum contagiosum virus
ggcgcgcgugcuu

SEQ ID NO: 3106563 - RNA, 19 nt, Molluscum contagiosum virus
ggcgcgcucgcgugcuagg

SEQ ID NO: 3106564 - RNA, 16 nt, Molluscum contagiosum virus
ggcgcgcugugagcgc

SEQ ID NO: 3106565 - RNA, 17 nt, Molluscum contagiosum virus
gcgcgugucuggagccc

SEQ ID NO: 3106566 - RNA, 18 nt, Molluscum contagiosum virus
ggcgcauccuccacgcug

SEQ ID NO: 3106567 - RNA, 17 nt, Molluscum contagiosum virus
gcgcguggcucgcgacc

SEQ ID NO: 3106568 - RNA, 21 nt, Molluscum contagiosum virus
ggcgcccgugcucgcgggccu

SEQ ID NO: 3106569 - RNA, 18 nt, Molluscum contagiosum virus
ggcgccgccccgccagca

SEQ ID NO: 3106570 - RNA, 22 nt, Molluscum contagiosum virus
ggcgccgcgcugaugcuagcgu

SEQ ID NO: 3106571 - RNA, 23 nt, Molluscum contagiosum virus
ggcgccgcgcugaugcuagcgug

SEQ ID NO: 3106572 - RNA, 16 nt, Molluscum contagiosum virus
ggcgccggcgcgcgcg

SEQ ID NO: 3106573 - RNA, 21 nt, Molluscum contagiosum virus
ggcgccagaacauugccacgc

SEQ ID NO: 3106574 - RNA, 19 nt, Molluscum contagiosum virus
ggcgccuucgucgcgcgcu

SEQ ID NO: 3106575 - RNA, 13 nt, Molluscum contagiosum virus
gcgccgugcugcg

SEQ ID NO: 3106576 - RNA, 17 nt, Molluscum contagiosum virus
gcgccgugcugcgucac

SEQ ID NO: 3106577 - RNA, 17 nt, Molluscum contagiosum virus
gcgccgugucggcaccg

SEQ ID NO: 3106578 - RNA, 16 nt, Molluscum contagiosum virus
gcgccuacucuugcgc

SEQ ID NO: 3106579 - RNA, 14 nt, Molluscum contagiosum virus
gcgccuagcuccag

SEQ ID NO: 3106580 - RNA, 18 nt, Molluscum contagiosum virus
gcgccguccaugugcccg

SEQ ID NO: 3106581 - RNA, 15 nt, Molluscum contagiosum virus
gcgccgcgcgccgcg

SEQ ID NO: 3106582 - RNA, 18 nt, Molluscum contagiosum virus
gcgccugugccugcaaga

SEQ ID NO: 3106583 - RNA, 15 nt, Molluscum contagiosum virus
gcgccuuccgcgcgg

SEQ ID NO: 3106584 - RNA, 23 nt, Molluscum contagiosum virus
gcgccuuggcggggaucuugcgu

SEQ ID NO: 3106585 - RNA, 17 nt, Molluscum contagiosum virus
gcgccuuugccacgcca

SEQ ID NO: 3106586 - RNA, 23 nt, Molluscum contagiosum virus
gcgcgaacucucaucgagcaccu

SEQ ID NO: 3106587 - RNA, 14 nt, Molluscum contagiosum virus
gcgcgaagcaggcg

SEQ ID NO: 3106588 - RNA, 16 nt, Molluscum contagiosum virus
gcgcgaauuggccgcg

SEQ ID NO: 3106589 - RNA, 14 nt, Molluscum contagiosum virus
gcgccugccgcgca

SEQ ID NO: 3106590 - RNA, 12 nt, Molluscum contagiosum virus
gcgccugcgcga

SEQ ID NO: 3106591 - RNA, 16 nt, Molluscum contagiosum virus
gcgccugcgcgagcaa

SEQ ID NO: 3106592 - RNA, 14 nt, Molluscum contagiosum virus
gcgccugcuugcgc

SEQ ID NO: 3106593 - RNA, 17 nt, Molluscum contagiosum virus
gcgccgggcgcgccaac

SEQ ID NO: 3106594 - RNA, 17 nt, Molluscum contagiosum virus
gcgccggggcgcgcgcu

SEQ ID NO: 3106595 - RNA, 19 nt, Molluscum contagiosum virus
gcgccgguagggugccgag

SEQ ID NO: 3106596 - RNA, 12 nt, Molluscum contagiosum virus
gcgccgcggcgg

SEQ ID NO: 3106597 - RNA, 17 nt, Molluscum contagiosum virus
gcgccgcguacgcacgu

SEQ ID NO: 3106598 - RNA, 13 nt, Molluscum contagiosum virus
gcgccgcuaccag

SEQ ID NO: 3106599 - RNA, 13 nt, Molluscum contagiosum virus
gcgccgcucgcac

SEQ ID NO: 3106600 - RNA, 21 nt, Molluscum contagiosum virus
gcgccgcucgucgcugcggac

SEQ ID NO: 3106601 - RNA, 23 nt, Molluscum contagiosum virus
gcgccgcugcccgcgcacgagcu

SEQ ID NO: 3106602 - RNA, 13 nt, Molluscum contagiosum virus
gcgccgcugcgcc

SEQ ID NO: 3106603 - RNA, 15 nt, Molluscum contagiosum virus
gcgccgcugcgccgg

SEQ ID NO: 3106604 - RNA, 16 nt, Molluscum contagiosum virus
gcgccgcugcucgcuu

SEQ ID NO: 3106605 - RNA, 19 nt, Molluscum contagiosum virus
gcgccggcacccgugcgcg

SEQ ID NO: 3106606 - RNA, 20 nt, Molluscum contagiosum virus
gcgccggcacccgugcgcgc

SEQ ID NO: 3106607 - RNA, 23 nt, Molluscum contagiosum virus
gcgccggcacccgugcgcgcgcu

SEQ ID NO: 3106608 - RNA, 19 nt, Molluscum contagiosum virus
gcgccggcgcgcgcgcgca

SEQ ID NO: 3106609 - RNA, 12 nt, Molluscum contagiosum virus
gcgccgccucgc

SEQ ID NO: 3106610 - RNA, 17 nt, Molluscum contagiosum virus
gcgccgccucgcgcgca

SEQ ID NO: 3106611 - RNA, 18 nt, Molluscum contagiosum virus
gcgccgccucgcgcgcac

SEQ ID NO: 3106612 - RNA, 16 nt, Molluscum contagiosum virus
gcgccgaggacgcgcc

SEQ ID NO: 3106613 - RNA, 13 nt, Molluscum contagiosum virus
gcgccgaggacua

SEQ ID NO: 3106614 - RNA, 15 nt, Molluscum contagiosum virus
gcgccgcacgcugcu

SEQ ID NO: 3106615 - RNA, 23 nt, Molluscum contagiosum virus
gcgccgcacgcugcugcgugcgc

SEQ ID NO: 3106616 - RNA, 14 nt, Molluscum contagiosum virus
gcgccgcacgugcu

SEQ ID NO: 3106617 - RNA, 18 nt, Molluscum contagiosum virus
gcgccgcacgugcugcgc

SEQ ID NO: 3106618 - RNA, 16 nt, Molluscum contagiosum virus
gcgccgcagcacgcgu

SEQ ID NO: 3106619 - RNA, 12 nt, Molluscum contagiosum virus
gcgccgccagcg

SEQ ID NO: 3106620 - RNA, 15 nt, Molluscum contagiosum virus
gcgccgccagcuccg

SEQ ID NO: 3106621 - RNA, 16 nt, Molluscum contagiosum virus
gcgccgccgacgccuu

SEQ ID NO: 3106622 - RNA, 20 nt, Molluscum contagiosum virus
gcgccgccgcgccgcugcgc

SEQ ID NO: 3106623 - RNA, 12 nt, Molluscum contagiosum virus
gcgcgcacgcga

SEQ ID NO: 3106624 - RNA, 13 nt, Molluscum contagiosum virus
gcgcgcacgcgca

SEQ ID NO: 3106625 - RNA, 14 nt, Molluscum contagiosum virus
gcgcgcacgcgcac

SEQ ID NO: 3106626 - RNA, 12 nt, Molluscum contagiosum virus
gcgcgcacggca

SEQ ID NO: 3106627 - RNA, 18 nt, Molluscum contagiosum virus
gcgcgcacggcuaggcgc

SEQ ID NO: 3106628 - RNA, 19 nt, Molluscum contagiosum virus
gcgcgcacucgggugcccg

SEQ ID NO: 3106629 - RNA, 17 nt, Molluscum contagiosum virus
gcgcgcacugcgggacc

SEQ ID NO: 3106630 - RNA, 13 nt, Molluscum contagiosum virus
gcgcgcacugcuc

SEQ ID NO: 3106631 - RNA, 18 nt, Molluscum contagiosum virus
gcgcgcacugcucgcgca

SEQ ID NO: 3106632 - RNA, 13 nt, Molluscum contagiosum virus
gcgcgcaagcgcu

SEQ ID NO: 3106633 - RNA, 21 nt, Molluscum contagiosum virus
gcgcgcaagucgcgcgcugcg

SEQ ID NO: 3106634 - RNA, 19 nt, Molluscum contagiosum virus
gcgcgcacaaacgcgcgca

SEQ ID NO: 3106635 - RNA, 20 nt, Molluscum contagiosum virus
gcgcgcacaaacgcgcgcac

SEQ ID NO: 3106636 - RNA, 16 nt, Molluscum contagiosum virus
gcgcgcacacgacgcu

SEQ ID NO: 3106637 - RNA, 14 nt, Molluscum contagiosum virus
gcgcgcacaucggc

SEQ ID NO: 3106638 - RNA, 23 nt, Molluscum contagiosum virus
gcgcgcacaucggcacugcucac

SEQ ID NO: 3106639 - RNA, 18 nt, Molluscum contagiosum virus
gcgcgacuggcacgcgcc

SEQ ID NO: 3106640 - RNA, 20 nt, Molluscum contagiosum virus
gcgcgagacgcugcugcaca

SEQ ID NO: 3106641 - RNA, 15 nt, Molluscum contagiosum virus
gcgcgagaugcucgc

SEQ ID NO: 3106642 - RNA, 15 nt, Molluscum contagiosum virus
gcgcgagcaugccgc

SEQ ID NO: 3106643 - RNA, 12 nt, Molluscum contagiosum virus
gcgcgagcgacg

SEQ ID NO: 3106644 - RNA, 15 nt, Molluscum contagiosum virus
gcgcgagcgacggca

SEQ ID NO: 3106645 - RNA, 15 nt, Molluscum contagiosum virus
gcgcgagcgcgcgcu

SEQ ID NO: 3106646 - RNA, 12 nt, Molluscum contagiosum virus
gcgcgagcuugc

SEQ ID NO: 3106647 - RNA, 15 nt, Molluscum contagiosum virus
gcgcgagugccagcg

SEQ ID NO: 3106648 - RNA, 12 nt, Molluscum contagiosum virus
gcgcgagugugc

SEQ ID NO: 3106649 - RNA, 14 nt, Molluscum contagiosum virus
gcgcgacgccauca

SEQ ID NO: 3106650 - RNA, 16 nt, Molluscum contagiosum virus
gcgcgacgccaucagg

SEQ ID NO: 3106651 - RNA, 17 nt, Molluscum contagiosum virus
gcgcgacgccgucgaug

SEQ ID NO: 3106652 - RNA, 13 nt, Molluscum contagiosum virus
gcgcgacgucguc

SEQ ID NO: 3106653 - RNA, 24 nt, Molluscum contagiosum virus
gcgcgacgucgucaaggauguagc

SEQ ID NO: 3106654 - RNA, 14 nt, Molluscum contagiosum virus
gcgcgacuacgcac

SEQ ID NO: 3106655 - RNA, 21 nt, Molluscum contagiosum virus
gcgcgacuccaucugcgcgac

SEQ ID NO: 3106656 - RNA, 17 nt, Molluscum contagiosum virus
gcgcgcagacguggugc

SEQ ID NO: 3106657 - RNA, 13 nt, Molluscum contagiosum virus
gcgcgcagcacac

SEQ ID NO: 3106658 - RNA, 18 nt, Molluscum contagiosum virus
gcgcgcagcaggugcacg

SEQ ID NO: 3106659 - RNA, 13 nt, Molluscum contagiosum virus
gcgcgcagcgccc

SEQ ID NO: 3106660 - RNA, 15 nt, Molluscum contagiosum virus
gcgcgcaggaaaggu

SEQ ID NO: 3106661 - RNA, 14 nt, Molluscum contagiosum virus
gcgcgcaguugugc

SEQ ID NO: 3106662 - RNA, 24 nt, Molluscum contagiosum virus
gcgcgcaaaaggcacgaggcagcc

SEQ ID NO: 3106663 - RNA, 21 nt, Molluscum contagiosum virus
gcgcgcaaccagcuggcgccc

SEQ ID NO: 3106664 - RNA, 17 nt, Molluscum contagiosum virus
gcgcggcuagcaccgca

SEQ ID NO: 3106665 - RNA, 18 nt, Molluscum contagiosum virus
gcgcggcuuacacacgca

SEQ ID NO: 3106666 - RNA, 14 nt, Molluscum contagiosum virus
gcgcgggagcucac

SEQ ID NO: 3106667 - RNA, 22 nt, Molluscum contagiosum virus
gcgcgggaggcguccugcggga

SEQ ID NO: 3106668 - RNA, 16 nt, Molluscum contagiosum virus
gcgcgggcacgccgca

SEQ ID NO: 3106669 - RNA, 22 nt, Molluscum contagiosum virus
gcgcgggccaugucugugcgcg

SEQ ID NO: 3106670 - RNA, 17 nt, Molluscum contagiosum virus
gcgcgggccuguccgcg

SEQ ID NO: 3106671 - RNA, 18 nt, Molluscum contagiosum virus
gcgcgguaacgcgcgcgc

SEQ ID NO: 3106672 - RNA, 16 nt, Molluscum contagiosum virus
gcgcgguagcucgugc

SEQ ID NO: 3106673 - RNA, 16 nt, Molluscum contagiosum virus
gcgcgguccagccgca

SEQ ID NO: 3106674 - RNA, 17 nt, Molluscum contagiosum virus
gcgcgguccuguccgcg

SEQ ID NO: 3106675 - RNA, 22 nt, Molluscum contagiosum virus
gcgcggucgcccgccgagcucu

SEQ ID NO: 3106676 - RNA, 15 nt, Molluscum contagiosum virus
gcgcggugcugcgcc

SEQ ID NO: 3106677 - RNA, 19 nt, Molluscum contagiosum virus
gcgcggugcugcgccagga

SEQ ID NO: 3106678 - RNA, 18 nt, Molluscum contagiosum virus
gcgcgguggugcugggcg

SEQ ID NO: 3106679 - RNA, 17 nt, Molluscum contagiosum virus
gcgcggggcacugcgca

SEQ ID NO: 3106680 - RNA, 18 nt, Molluscum contagiosum virus
gcgcggggcacugcgcac

SEQ ID NO: 3106681 - RNA, 22 nt, Molluscum contagiosum virus
gcgcggggcaggcagugccgcc

SEQ ID NO: 3106682 - RNA, 15 nt, Molluscum contagiosum virus
gcgcggcgagccgcg

SEQ ID NO: 3106683 - RNA, 19 nt, Molluscum contagiosum virus
gcgcggcgagccgcgcgag

SEQ ID NO: 3106684 - RNA, 22 nt, Molluscum contagiosum virus
gcgcggcgcgugccagucgcgc

SEQ ID NO: 3106685 - RNA, 17 nt, Molluscum contagiosum virus
gcgcggcgcucugccac

SEQ ID NO: 3106686 - RNA, 20 nt, Molluscum contagiosum virus
gcgcggcgguguaugcucgu

SEQ ID NO: 3106687 - RNA, 21 nt, Molluscum contagiosum virus
gcgcccuuugcggcacgggcu

SEQ ID NO: 3106688 - RNA, 18 nt, Molluscum contagiosum virus
gcgccgacagcgcgcgca

SEQ ID NO: 3106689 - RNA, 15 nt, Molluscum contagiosum virus
gcgccgacaugcgca

SEQ ID NO: 3106690 - RNA, 16 nt, Molluscum contagiosum virus
gcgccgacaugcgcac

SEQ ID NO: 3106691 - RNA, 21 nt, Molluscum contagiosum virus
gcgccgacaugcgcacgcgcg

SEQ ID NO: 3106692 - RNA, 15 nt, Molluscum contagiosum virus
gcgcccucgcgcgca

SEQ ID NO: 3106693 - RNA, 15 nt, Molluscum contagiosum virus
gcgcccucgcgcgcg

SEQ ID NO: 3106694 - RNA, 22 nt, Molluscum contagiosum virus
gcgcccuggagcgcagucccag

SEQ ID NO: 3106695 - RNA, 16 nt, Molluscum contagiosum virus
uuggucaccacgaucu

SEQ ID NO: 3106696 - RNA, 13 nt, Molluscum contagiosum virus
uuggccgcggagg

SEQ ID NO: 3106697 - RNA, 11 nt, Molluscum contagiosum virus
uuggcgcgcaa

SEQ ID NO: 3106698 - RNA, 20 nt, Molluscum contagiosum virus
uugcugcugccgcgcggcac

SEQ ID NO: 3106699 - RNA, 24 nt, Molluscum contagiosum virus
uugcgcagagcuccccgcgcgcag

SEQ ID NO: 3106700 - RNA, 14 nt, Molluscum contagiosum virus
uugccgcgcgcugc

SEQ ID NO: 3106701 - RNA, 16 nt, Molluscum contagiosum virus
uugccgcgcgcugcuc

SEQ ID NO: 3106702 - RNA, 18 nt, Molluscum contagiosum virus
uuccgucccccgcggagc

SEQ ID NO: 3106703 - RNA, 17 nt, Molluscum contagiosum virus
uuccgugcuugacaagu

SEQ ID NO: 3106704 - RNA, 19 nt, Molluscum contagiosum virus
uucgaaguuucacgcguga

SEQ ID NO: 3106705 - RNA, 21 nt, Molluscum contagiosum virus
uuccuggcacuggcgcgcacg

SEQ ID NO: 3106706 - RNA, 12 nt, Molluscum contagiosum virus
uuccgcucgcgc

SEQ ID NO: 3106707 - RNA, 13 nt, Molluscum contagiosum virus
uuccggcaccacg

SEQ ID NO: 3106708 - RNA, 23 nt, Molluscum contagiosum virus
uuccggcaccacgugcgcuggcc

SEQ ID NO: 3106709 - RNA, 21 nt, Molluscum contagiosum virus
uuccggcgcggccuggccacg

SEQ ID NO: 3106710 - RNA, 13 nt, Molluscum contagiosum virus
uuccgcgacgagc

SEQ ID NO: 3106711 - RNA, 22 nt, Molluscum contagiosum virus
uucgggcgcaaucacggcugua

SEQ ID NO: 3106712 - RNA, 20 nt, Molluscum contagiosum virus
uucguguucgcggacggcgc

SEQ ID NO: 3106713 - RNA, 20 nt, Molluscum contagiosum virus
uucguugagaccgccgcuga

SEQ ID NO: 3106714 - RNA, 18 nt, Molluscum contagiosum virus
uucgcggacggcgcgcag

SEQ ID NO: 3106715 - RNA, 19 nt, Molluscum contagiosum virus
uucgcggacggcgcgcagc

SEQ ID NO: 3106716 - RNA, 21 nt, Molluscum contagiosum virus
uucgcggagcugugccgcagc

SEQ ID NO: 3106717 - RNA, 13 nt, Molluscum contagiosum virus
uucgaucgcgcuc

SEQ ID NO: 3106718 - RNA, 20 nt, Molluscum contagiosum virus
uucgcaagucucccucgcgc

SEQ ID NO: 3106719 - RNA, 15 nt, Molluscum contagiosum virus
uucgcacgaccacgc

SEQ ID NO: 3106720 - RNA, 13 nt, Molluscum contagiosum virus
uucgccgcgcgcg

SEQ ID NO: 3106721 - RNA, 23 nt, Molluscum contagiosum virus
uucgcgaaggcaaccgcgacgag

SEQ ID NO: 3106722 - RNA, 22 nt, Molluscum contagiosum virus
uucgcgaccuggcgcgugcgag

SEQ ID NO: 3106723 - RNA, 19 nt, Molluscum contagiosum virus
uucgacuucuccgcgcugc

SEQ ID NO: 3106724 - RNA, 20 nt, Molluscum contagiosum virus
uucgagaccuacgucaagca

SEQ ID NO: 3106725 - RNA, 19 nt, Molluscum contagiosum virus
uucgagacgcugcgcgacg

SEQ ID NO: 3106726 - RNA, 15 nt, Molluscum contagiosum virus
uugaaugucgcgacg

SEQ ID NO: 3106727 - RNA, 15 nt, Molluscum contagiosum virus
uugaacucgagcacg

SEQ ID NO: 3106728 - RNA, 13 nt, Molluscum contagiosum virus
uucugcgcugcca

SEQ ID NO: 3106729 - RNA, 23 nt, Molluscum contagiosum virus
uucugguuccugcgcuccgacgc

SEQ ID NO: 3106730 - RNA, 15 nt, Molluscum contagiosum virus
uugcacccgcgcagc

SEQ ID NO: 3106731 - RNA, 23 nt, Molluscum contagiosum virus
uugcaccggcaacagcgcgacgc

SEQ ID NO: 3106732 - RNA, 14 nt, Molluscum contagiosum virus
uugcacgcgcacgc

SEQ ID NO: 3106733 - RNA, 18 nt, Molluscum contagiosum virus
uugcacgcgcacgcgccc

SEQ ID NO: 3106734 - RNA, 16 nt, Molluscum contagiosum virus
uugcacgugcgugccc

SEQ ID NO: 3106735 - RNA, 14 nt, Molluscum contagiosum virus
uugcgcgagcgcgu

SEQ ID NO: 3106736 - RNA, 12 nt, Molluscum contagiosum virus
uugcgcgcgccc

SEQ ID NO: 3106737 - RNA, 22 nt, Molluscum contagiosum virus
uugcgcgcgcccucgcgcgcag

SEQ ID NO: 3106738 - RNA, 23 nt, Molluscum contagiosum virus
uugcgcgcggggcacugcgcacg

SEQ ID NO: 3106739 - RNA, 22 nt, Molluscum contagiosum virus
uugcgcgcggugcgggcgcgag

SEQ ID NO: 3106740 - RNA, 23 nt, Molluscum contagiosum virus
uugcgcggauauggcgcgccgag

SEQ ID NO: 3106741 - RNA, 16 nt, Molluscum contagiosum virus
uugcggaugcucgcuu

SEQ ID NO: 3106742 - RNA, 18 nt, Molluscum contagiosum virus
uugcgugcgccucgcagg

SEQ ID NO: 3106743 - RNA, 24 nt, Molluscum contagiosum virus
uugcgugggugaggagcucgacuc

SEQ ID NO: 3106744 - RNA, 23 nt, Molluscum contagiosum virus
uugcguguugaacucgagcacgu

SEQ ID NO: 3106745 - RNA, 20 nt, Molluscum contagiosum virus
uugcuauuaccugaccgacg

SEQ ID NO: 3106746 - RNA, 13 nt, Molluscum contagiosum virus
uuaaucacgauga

SEQ ID NO: 3106747 - RNA, 16 nt, Molluscum contagiosum virus
uuaccaagucgcgcuc

SEQ ID NO: 3106748 - RNA, 17 nt, Molluscum contagiosum virus
uuagcguggcgcgcgag

SEQ ID NO: 3106749 - RNA, 16 nt, Molluscum contagiosum virus
uuagcacacgcgcgcg

SEQ ID NO: 3106750 - RNA, 19 nt, Molluscum contagiosum virus
uuagcacacgcgcgcgcag

SEQ ID NO: 3106751 - RNA, 16 nt, Molluscum contagiosum virus
uucccgcggcgugccc

SEQ ID NO: 3106752 - RNA, 21 nt, Molluscum contagiosum virus
uuccgacaacucgcgcuggcc

SEQ ID NO: 3106753 - RNA, 18 nt, Molluscum contagiosum virus
uuccgacccggcucgcuc

SEQ ID NO: 3106754 - RNA, 20 nt, Molluscum contagiosum virus
uuccgagccgccggucucca

SEQ ID NO: 3106755 - RNA, 15 nt, Molluscum contagiosum virus
uuccgagcgcgcacg

SEQ ID NO: 3106756 - RNA, 13 nt, Molluscum contagiosum virus
uuccacgucucca

SEQ ID NO: 3106757 - RNA, 18 nt, Molluscum contagiosum virus
uuccagcacugcgccaag

SEQ ID NO: 3106758 - RNA, 22 nt, Molluscum contagiosum virus
uucacaagguagucacgcgcga

SEQ ID NO: 3106759 - RNA, 12 nt, Molluscum contagiosum virus
uucagcgcacgc

SEQ ID NO: 3106760 - RNA, 16 nt, Molluscum contagiosum virus
uguagucgcccccgug

SEQ ID NO: 3106761 - RNA, 20 nt, Molluscum contagiosum virus
ugucacgcgucgcgcgccgc

SEQ ID NO: 3106762 - RNA, 14 nt, Molluscum contagiosum virus
uguacgugcugccc

SEQ ID NO: 3106763 - RNA, 15 nt, Molluscum contagiosum virus
uguagaagcgcacga

SEQ ID NO: 3106764 - RNA, 16 nt, Molluscum contagiosum virus
uguagagacgcugccg

SEQ ID NO: 3106765 - RNA, 19 nt, Molluscum contagiosum virus
uguagcaucugcgacacgc

SEQ ID NO: 3106766 - RNA, 14 nt, Molluscum contagiosum virus
uguacgacgcgccc

SEQ ID NO: 3106767 - RNA, 17 nt, Molluscum contagiosum virus
uguacgacgugcugcug

SEQ ID NO: 3106768 - RNA, 19 nt, Molluscum contagiosum virus
uguacggcgugugcgcgag

SEQ ID NO: 3106769 - RNA, 17 nt, Molluscum contagiosum virus
uguccgcgggcgcacgc

SEQ ID NO: 3106770 - RNA, 13 nt, Molluscum contagiosum virus
uguccggcccgaa

SEQ ID NO: 3106771 - RNA, 13 nt, Molluscum contagiosum virus
ugucccgcaagcc

SEQ ID NO: 3106772 - RNA, 13 nt, Molluscum contagiosum virus
ugucucgcaagca

SEQ ID NO: 3106773 - RNA, 23 nt, Molluscum contagiosum virus
ugucgcucguggaucgcgcgcac

SEQ ID NO: 3106774 - RNA, 22 nt, Molluscum contagiosum virus
uguccuucugguuccugcgcuc

SEQ ID NO: 3106775 - RNA, 19 nt, Molluscum contagiosum virus
ugucgaggccuucgcgccc

SEQ ID NO: 3106776 - RNA, 14 nt, Molluscum contagiosum virus
uguugcgcgcgccu

SEQ ID NO: 3106777 - RNA, 18 nt, Molluscum contagiosum virus
uuaaacaacacgcgcgag

SEQ ID NO: 3106778 - RNA, 13 nt, Molluscum contagiosum virus
uguguugagccuu

SEQ ID NO: 3106779 - RNA, 19 nt, Molluscum contagiosum virus
uguuacggacggcgcacgc

SEQ ID NO: 3106780 - RNA, 22 nt, Molluscum contagiosum virus
ugugucgcgagugugcgcgccc

SEQ ID NO: 3106781 - RNA, 13 nt, Molluscum contagiosum virus
uguucacgugcuc

SEQ ID NO: 3106782 - RNA, 20 nt, Molluscum contagiosum virus
uguucgcgcugcucgcgcuc

SEQ ID NO: 3106783 - RNA, 20 nt, Molluscum contagiosum virus
uguucgcggacggcgcgcag

SEQ ID NO: 3106784 - RNA, 12 nt, Molluscum contagiosum virus
uguucgcggagc

SEQ ID NO: 3106785 - RNA, 23 nt, Molluscum contagiosum virus
ugugccgcucggcccgcggacgc

SEQ ID NO: 3106786 - RNA, 18 nt, Molluscum contagiosum virus
ugugccggugcugcggcg

SEQ ID NO: 3106787 - RNA, 12 nt, Molluscum contagiosum virus
ugucuuccgcuc

SEQ ID NO: 3106788 - RNA, 14 nt, Molluscum contagiosum virus
ugugagcgcgccgc

SEQ ID NO: 3106789 - RNA, 13 nt, Molluscum contagiosum virus
ugugcaggaacug

SEQ ID NO: 3106790 - RNA, 21 nt, Molluscum contagiosum virus
ugugcauggcggcggccacgc

SEQ ID NO: 3106791 - RNA, 16 nt, Molluscum contagiosum virus
ugugccugcgcaacgc

SEQ ID NO: 3106792 - RNA, 16 nt, Molluscum contagiosum virus
ugugcgcacgcugacc

SEQ ID NO: 3106793 - RNA, 13 nt, Molluscum contagiosum virus
ugugcgcgcacgg

SEQ ID NO: 3106794 - RNA, 13 nt, Molluscum contagiosum virus
ugugcggacaugc

SEQ ID NO: 3106795 - RNA, 18 nt, Molluscum contagiosum virus
ugugcggagggugcacgc

SEQ ID NO: 3106796 - RNA, 16 nt, Molluscum contagiosum virus
ugugcgugacacgcga

SEQ ID NO: 3106797 - RNA, 14 nt, Molluscum contagiosum virus
ugugcgugcaccuc

SEQ ID NO: 3106798 - RNA, 23 nt, Molluscum contagiosum virus
ugugcugacccccuccccagcgc

SEQ ID NO: 3106799 - RNA, 20 nt, Molluscum contagiosum virus
uguaccgccgcggccgcgag

SEQ ID NO: 3106800 - RNA, 18 nt, Molluscum contagiosum virus
ugguguccacgcgcguga

SEQ ID NO: 3106801 - RNA, 15 nt, Molluscum contagiosum virus
ugguguucugcgcgc

SEQ ID NO: 3106802 - RNA, 18 nt, Molluscum contagiosum virus
ugguguucugcgcgccgc

SEQ ID NO: 3106803 - RNA, 18 nt, Molluscum contagiosum virus
ugguugccaggcacacgc

SEQ ID NO: 3106804 - RNA, 15 nt, Molluscum contagiosum virus
ugguugccgcucgca

SEQ ID NO: 3106805 - RNA, 13 nt, Molluscum contagiosum virus
ugguugcgcacgu

SEQ ID NO: 3106806 - RNA, 17 nt, Molluscum contagiosum virus
uggugcgcgacgacggc

SEQ ID NO: 3106807 - RNA, 21 nt, Molluscum contagiosum virus
uggugcgcgacgacggcacgc

SEQ ID NO: 3106808 - RNA, 18 nt, Molluscum contagiosum virus
uggugggccgcggcgcgg

SEQ ID NO: 3106809 - RNA, 14 nt, Molluscum contagiosum virus
uggugccgcgcgcu

SEQ ID NO: 3106810 - RNA, 18 nt, Molluscum contagiosum virus
uggugccgcgcgcuacgc

SEQ ID NO: 3106811 - RNA, 17 nt, Molluscum contagiosum virus
uggucuucccgcuggcg

SEQ ID NO: 3106812 - RNA, 13 nt, Molluscum contagiosum virus
uggugcacacaca

SEQ ID NO: 3106813 - RNA, 13 nt, Molluscum contagiosum virus
uggucacgcgcac

SEQ ID NO: 3106814 - RNA, 15 nt, Molluscum contagiosum virus
uggucacgcgcacgc

SEQ ID NO: 3106815 - RNA, 16 nt, Molluscum contagiosum virus
uggucacgcgcacgcg

SEQ ID NO: 3106816 - RNA, 13 nt, Molluscum contagiosum virus
uggucgcgcgcgc

SEQ ID NO: 3106817 - RNA, 14 nt, Molluscum contagiosum virus
uggucgcgcgcgcu

SEQ ID NO: 3106818 - RNA, 12 nt, Molluscum contagiosum virus
ugggcgcgccgc

SEQ ID NO: 3106819 - RNA, 11 nt, Molluscum contagiosum virus
ugggcgcgugc

SEQ ID NO: 3106820 - RNA, 17 nt, Molluscum contagiosum virus
ugggcggcauccugaug

SEQ ID NO: 3106821 - RNA, 22 nt, Molluscum contagiosum virus
ugggcgucgcacaguucacggc

SEQ ID NO: 3106822 - RNA, 17 nt, Molluscum contagiosum virus
ugggcgugcggcgcacc

SEQ ID NO: 3106823 - RNA, 15 nt, Molluscum contagiosum virus
ugggcgugcucacgc

SEQ ID NO: 3106824 - RNA, 20 nt, Molluscum contagiosum virus
ugggcgugcucacgcugccc

SEQ ID NO: 3106825 - RNA, 17 nt, Molluscum contagiosum virus
ugggccgaaucgucggc

SEQ ID NO: 3106826 - RNA, 15 nt, Molluscum contagiosum virus
ugggcgagcgcacgu

SEQ ID NO: 3106827 - RNA, 14 nt, Molluscum contagiosum virus
uggggcucgccggc

SEQ ID NO: 3106828 - RNA, 11 nt, Molluscum contagiosum virus
uggggcucgcg

SEQ ID NO: 3106829 - RNA, 20 nt, Molluscum contagiosum virus
ugggcucggaguccgcgccc

SEQ ID NO: 3106830 - RNA, 16 nt, Molluscum contagiosum virus
ugggcuugcggcacgc

SEQ ID NO: 3106831 - RNA, 20 nt, Molluscum contagiosum virus
uggcgaaaccugggcgccgc

SEQ ID NO: 3106832 - RNA, 23 nt, Molluscum contagiosum virus
uggccgcgcccucgcucgagggc

SEQ ID NO: 3106833 - RNA, 17 nt, Molluscum contagiosum virus
uggccgcgcgcgcacgc

SEQ ID NO: 3106834 - RNA, 22 nt, Molluscum contagiosum virus
uggccgcgcgcgcacgcaagcc

SEQ ID NO: 3106835 - RNA, 20 nt, Molluscum contagiosum virus
uggcgagcaucugcgcgugc

SEQ ID NO: 3106836 - RNA, 22 nt, Molluscum contagiosum virus
uggcgagcaucugcgcgugcug

SEQ ID NO: 3106837 - RNA, 15 nt, Molluscum contagiosum virus
uggcgagcgcugccg

SEQ ID NO: 3106838 - RNA, 16 nt, Molluscum contagiosum virus
uggcgcaccugcuaga

SEQ ID NO: 3106839 - RNA, 16 nt, Molluscum contagiosum virus
uggcgccagccuggcg

SEQ ID NO: 3106840 - RNA, 19 nt, Molluscum contagiosum virus
uggcgcccgaggacgagcc

SEQ ID NO: 3106841 - RNA, 16 nt, Molluscum contagiosum virus
uggcgcucgcgcgcac

SEQ ID NO: 3106842 - RNA, 18 nt, Molluscum contagiosum virus
uggcgcucgcgcgcacgc

SEQ ID NO: 3106843 - RNA, 17 nt, Molluscum contagiosum virus
uggcgcucggcguggug

SEQ ID NO: 3106844 - RNA, 21 nt, Molluscum contagiosum virus
uggcgcugcacaguucacggc

SEQ ID NO: 3106845 - RNA, 21 nt, Molluscum contagiosum virus
uggcgcugggcgcgccgcgcg

SEQ ID NO: 3106846 - RNA, 14 nt, Molluscum contagiosum virus
uggcgccgcugcug

SEQ ID NO: 3106847 - RNA, 14 nt, Molluscum contagiosum virus
uggcgccugcgcgc

SEQ ID NO: 3106848 - RNA, 19 nt, Molluscum contagiosum virus
uggcgcgcccggcgcccgc

SEQ ID NO: 3106849 - RNA, 15 nt, Molluscum contagiosum virus
uggcgcgccgcugcc

SEQ ID NO: 3106850 - RNA, 15 nt, Molluscum contagiosum virus
uggcgcgccggcgcg

SEQ ID NO: 3106851 - RNA, 14 nt, Molluscum contagiosum virus
uggcgcgcgagcug

SEQ ID NO: 3106852 - RNA, 19 nt, Molluscum contagiosum virus
uggcgcgcgagcugcuagc

SEQ ID NO: 3106853 - RNA, 14 nt, Molluscum contagiosum virus
uggcgcgcgcgcug

SEQ ID NO: 3106854 - RNA, 17 nt, Molluscum contagiosum virus
uggcgcgcgcgcugcgc

SEQ ID NO: 3106855 - RNA, 20 nt, Molluscum contagiosum virus
uggcgcgcgcggucgacggg

SEQ ID NO: 3106856 - RNA, 14 nt, Molluscum contagiosum virus
uggcgcgcgugccg

SEQ ID NO: 3106857 - RNA, 17 nt, Molluscum contagiosum virus
ugggcacgcucuacggc

SEQ ID NO: 3106858 - RNA, 23 nt, Molluscum contagiosum virus
ugggcacgcucuacggcgugcug

SEQ ID NO: 3106859 - RNA, 15 nt, Molluscum contagiosum virus
ugggcacugcuacga

SEQ ID NO: 3106860 - RNA, 18 nt, Molluscum contagiosum virus
ugggcaggccgcccacgc

SEQ ID NO: 3106861 - RNA, 17 nt, Molluscum contagiosum virus
ugggauaacaggcgugc

SEQ ID NO: 3106862 - RNA, 16 nt, Molluscum contagiosum virus
ugggcaacgcgcgcgc

SEQ ID NO: 3106863 - RNA, 21 nt, Molluscum contagiosum virus
ugggcaccugcaucgcgccgc

SEQ ID NO: 3106864 - RNA, 19 nt, Molluscum contagiosum virus
uggcugcgguagcggacgc

SEQ ID NO: 3106865 - RNA, 14 nt, Molluscum contagiosum virus
uggcugcugcgcga

SEQ ID NO: 3106866 - RNA, 23 nt, Molluscum contagiosum virus
ugggaaaccucaccucugcgcgg

SEQ ID NO: 3106867 - RNA, 19 nt, Molluscum contagiosum virus
ugggaggacacgcgcacgc

SEQ ID NO: 3106868 - RNA, 14 nt, Molluscum contagiosum virus
uggcggaugucacg

SEQ ID NO: 3106869 - RNA, 13 nt, Molluscum contagiosum virus
uggcggcgcacgc

SEQ ID NO: 3106870 - RNA, 21 nt, Molluscum contagiosum virus
uggcggcgcacgcgagcacgc

SEQ ID NO: 3106871 - RNA, 12 nt, Molluscum contagiosum virus
uggcggcgcugg

SEQ ID NO: 3106872 - RNA, 14 nt, Molluscum contagiosum virus
uggcgggcgugccc

SEQ ID NO: 3106873 - RNA, 16 nt, Molluscum contagiosum virus
uggcucuucucgcagc

SEQ ID NO: 3106874 - RNA, 13 nt, Molluscum contagiosum virus
uggcgugacaggu

SEQ ID NO: 3106875 - RNA, 13 nt, Molluscum contagiosum virus
uggcgugcgcagu

SEQ ID NO: 3106876 - RNA, 12 nt, Molluscum contagiosum virus
uggcguguacgu

SEQ ID NO: 3106877 - RNA, 14 nt, Molluscum contagiosum virus
uggcguucgacggc

SEQ ID NO: 3106878 - RNA, 22 nt, Molluscum contagiosum virus
uggcuacuggaggagugucgcg

SEQ ID NO: 3106879 - RNA, 16 nt, Molluscum contagiosum virus
ugcggcacgggcucga

SEQ ID NO: 3106880 - RNA, 19 nt, Molluscum contagiosum virus
ugcggcaggaagcuggcgc

SEQ ID NO: 3106881 - RNA, 21 nt, Molluscum contagiosum virus
ugcggcaggaagcuggcgcgg

SEQ ID NO: 3106882 - RNA, 13 nt, Molluscum contagiosum virus
ugcggcaggcgcu

SEQ ID NO: 3106883 - RNA, 14 nt, Molluscum contagiosum virus
ugcggcaggcgcug

SEQ ID NO: 3106884 - RNA, 18 nt, Molluscum contagiosum virus
ugcggcaggcgcugcgcg

SEQ ID NO: 3106885 - RNA, 15 nt, Molluscum contagiosum virus
ugcggccaccagcgc

SEQ ID NO: 3106886 - RNA, 16 nt, Molluscum contagiosum virus
ugcggccaccagcgcg

SEQ ID NO: 3106887 - RNA, 19 nt, Molluscum contagiosum virus
ugcgcgugcgggcgagcau

SEQ ID NO: 3106888 - RNA, 20 nt, Molluscum contagiosum virus
ugcgcguguagcggcgcuug

SEQ ID NO: 3106889 - RNA, 11 nt, Molluscum contagiosum virus
ugcgcgugucu

SEQ ID NO: 3106890 - RNA, 22 nt, Molluscum contagiosum virus
ugcgcgugucuggagcccacgu

SEQ ID NO: 3106891 - RNA, 20 nt, Molluscum contagiosum virus
ugcgcgugugcagcagguag

SEQ ID NO: 3106892 - RNA, 18 nt, Molluscum contagiosum virus
ugcgcuacguuccgcgcg

SEQ ID NO: 3106893 - RNA, 17 nt, Molluscum contagiosum virus
ugcgcugccagcucgac

SEQ ID NO: 3106894 - RNA, 21 nt, Molluscum contagiosum virus
ugcgcugccgguggaagagcc

SEQ ID NO: 3106895 - RNA, 16 nt, Molluscum contagiosum virus
ugcgcuucgccgcgcg

SEQ ID NO: 3106896 - RNA, 18 nt, Molluscum contagiosum virus
ugcgcgucugugcgcgcu

SEQ ID NO: 3106897 - RNA, 22 nt, Molluscum contagiosum virus
ugcgcgugccucugccagccgc

SEQ ID NO: 3106898 - RNA, 17 nt, Molluscum contagiosum virus
ugcgcgugcgccugccg

SEQ ID NO: 3106899 - RNA, 15 nt, Molluscum contagiosum virus
ugcgcguccgcaaag

SEQ ID NO: 3106900 - RNA, 22 nt, Molluscum contagiosum virus
ugcgcggggcaggcagugccgc

SEQ ID NO: 3106901 - RNA, 21 nt, Molluscum contagiosum virus
ugcgcgcacggcuaggcgcgg

SEQ ID NO: 3106902 - RNA, 22 nt, Molluscum contagiosum virus
ugcgcgcacugcucgcgcacgc

SEQ ID NO: 3106903 - RNA, 15 nt, Molluscum contagiosum virus
ugcgcgccgcgcugc

SEQ ID NO: 3106904 - RNA, 21 nt, Molluscum contagiosum virus
ugcgcgcgcccucgcgcgcag

SEQ ID NO: 3106905 - RNA, 13 nt, Molluscum contagiosum virus
ugcgcgcgcgcgu

SEQ ID NO: 3106906 - RNA, 12 nt, Molluscum contagiosum virus
ugcgcgcgcgcu

SEQ ID NO: 3106907 - RNA, 18 nt, Molluscum contagiosum virus
ugcgcgcgcuacugcgcg

SEQ ID NO: 3106908 - RNA, 18 nt, Molluscum contagiosum virus
ugcgcgcgcucauggcgc

SEQ ID NO: 3106909 - RNA, 12 nt, Molluscum contagiosum virus
ugcgcgcgcuga

SEQ ID NO: 3106910 - RNA, 23 nt, Molluscum contagiosum virus
ugcgcgcgguaacgcgcgcgccu

SEQ ID NO: 3106911 - RNA, 11 nt, Molluscum contagiosum virus
ugcgcgcgugc

SEQ ID NO: 3106912 - RNA, 13 nt, Molluscum contagiosum virus
ugcgcgcugcgcg

SEQ ID NO: 3106913 - RNA, 12 nt, Molluscum contagiosum virus
ugcggcgcgugc

SEQ ID NO: 3106914 - RNA, 20 nt, Molluscum contagiosum virus
ugcggcgcgugccgcugcgc

SEQ ID NO: 3106915 - RNA, 21 nt, Molluscum contagiosum virus
ugcggcgcgugccgcugcgcg

SEQ ID NO: 3106916 - RNA, 22 nt, Molluscum contagiosum virus
ugcggcgcgugccgcugcgcgg

SEQ ID NO: 3106917 - RNA, 17 nt, Molluscum contagiosum virus
ugcggcgcgugcugagc

SEQ ID NO: 3106918 - RNA, 15 nt, Molluscum contagiosum virus
ugcggcggcgcacgc

SEQ ID NO: 3106919 - RNA, 20 nt, Molluscum contagiosum virus
ugcggcguacgcgcagggag

SEQ ID NO: 3106920 - RNA, 21 nt, Molluscum contagiosum virus
ugcggcaaccgcgcccgcgcg

SEQ ID NO: 3106921 - RNA, 19 nt, Molluscum contagiosum virus
ugcggcaacugccugcgcu

SEQ ID NO: 3106922 - RNA, 18 nt, Molluscum contagiosum virus
ugcgcuugggcgucgucu

SEQ ID NO: 3106923 - RNA, 20 nt, Molluscum contagiosum virus
ugcggagacuguuaggcauc

SEQ ID NO: 3106924 - RNA, 20 nt, Molluscum contagiosum virus
ugcggugacgguccugcgcg

SEQ ID NO: 3106925 - RNA, 17 nt, Molluscum contagiosum virus
ugcgggcuagcacgcau

SEQ ID NO: 3106926 - RNA, 17 nt, Molluscum contagiosum virus
uggccgagccgcuggcc

SEQ ID NO: 3106927 - RNA, 22 nt, Molluscum contagiosum virus
ugcguacacauggccgcgcgcu

SEQ ID NO: 3106928 - RNA, 23 nt, Molluscum contagiosum virus
ugcgucacaagcaccgccugcug

SEQ ID NO: 3106929 - RNA, 22 nt, Molluscum contagiosum virus
ugcgugaggaagaccuuggaca

SEQ ID NO: 3106930 - RNA, 13 nt, Molluscum contagiosum virus
uagcccagcacgc

SEQ ID NO: 3106931 - RNA, 14 nt, Molluscum contagiosum virus
uagccgccgcugcc

SEQ ID NO: 3106932 - RNA, 17 nt, Molluscum contagiosum virus
uagccgcgacgcaagcg

SEQ ID NO: 3106933 - RNA, 21 nt, Molluscum contagiosum virus
uagaccuuuacgucgcgcgcu

SEQ ID NO: 3106934 - RNA, 20 nt, Molluscum contagiosum virus
uagagcagaaggugcgcagc

SEQ ID NO: 3106935 - RNA, 21 nt, Molluscum contagiosum virus
uagagcuggcaccgggcgccg

SEQ ID NO: 3106936 - RNA, 15 nt, Molluscum contagiosum virus
uagaggagauggcaa

SEQ ID NO: 3106937 - RNA, 15 nt, Molluscum contagiosum virus
uagcacacgcgcgcg

SEQ ID NO: 3106938 - RNA, 22 nt, Molluscum contagiosum virus
uagcaccgcaugggcccuggcg

SEQ ID NO: 3106939 - RNA, 13 nt, Molluscum contagiosum virus
uagcagagcacga

SEQ ID NO: 3106940 - RNA, 16 nt, Molluscum contagiosum virus
uagcagcgccugcacg

SEQ ID NO: 3106941 - RNA, 14 nt, Molluscum contagiosum virus
uagcagcgugcgca

SEQ ID NO: 3106942 - RNA, 21 nt, Molluscum contagiosum virus
uagcagggcggcgccugcgcc

SEQ ID NO: 3106943 - RNA, 23 nt, Molluscum contagiosum virus
uagcaugucacgcgucgcgcgcc

SEQ ID NO: 3106944 - RNA, 18 nt, Molluscum contagiosum virus
uacuucuacgagcagcgc

SEQ ID NO: 3106945 - RNA, 17 nt, Molluscum contagiosum virus
uacuuggaagagucgcg

SEQ ID NO: 3106946 - RNA, 19 nt, Molluscum contagiosum virus
uacugcaacguggcgccgc

SEQ ID NO: 3106947 - RNA, 21 nt, Molluscum contagiosum virus
uacgucgcgcgcucgcucgcg

SEQ ID NO: 3106948 - RNA, 14 nt, Molluscum contagiosum virus
uacgucuccucgcg

SEQ ID NO: 3106949 - RNA, 14 nt, Molluscum contagiosum virus
uacgcgucgcggag

SEQ ID NO: 3106950 - RNA, 18 nt, Molluscum contagiosum virus
uaccggcaguagcagcgc

SEQ ID NO: 3106951 - RNA, 13 nt, Molluscum contagiosum virus
uaccagcucgcgc

SEQ ID NO: 3106952 - RNA, 21 nt, Molluscum contagiosum virus
uacgagcacauacacgcgcau

SEQ ID NO: 3106953 - RNA, 13 nt, Molluscum contagiosum virus
uacgagcaggcgc

SEQ ID NO: 3106954 - RNA, 14 nt, Molluscum contagiosum virus
uacgagcaggcgca

SEQ ID NO: 3106955 - RNA, 19 nt, Molluscum contagiosum virus
uacgagcccaucaaggcgc

SEQ ID NO: 3106956 - RNA, 23 nt, Molluscum contagiosum virus
uacgagcccaucaaggcgcgcau

SEQ ID NO: 3106957 - RNA, 19 nt, Molluscum contagiosum virus
uacgaggugcugcgccacg

SEQ ID NO: 3106958 - RNA, 14 nt, Molluscum contagiosum virus
uaccugcgcaagcu

SEQ ID NO: 3106959 - RNA, 19 nt, Molluscum contagiosum virus
uaccuguguuucguacgcg

SEQ ID NO: 3106960 - RNA, 19 nt, Molluscum contagiosum virus
uacgacaugcucgcgcucu

SEQ ID NO: 3106961 - RNA, 14 nt, Molluscum contagiosum virus
uacgccagcgacgc

SEQ ID NO: 3106962 - RNA, 21 nt, Molluscum contagiosum virus
uacgcacgcacguggcgcugc

SEQ ID NO: 3106963 - RNA, 14 nt, Molluscum contagiosum virus
uacgcgcagggagc

SEQ ID NO: 3106964 - RNA, 15 nt, Molluscum contagiosum virus
uacgcgccggggcgc

SEQ ID NO: 3106965 - RNA, 22 nt, Molluscum contagiosum virus
uacgcgccggggcgcgcgcugc

SEQ ID NO: 3106966 - RNA, 19 nt, Molluscum contagiosum virus
uacgcgcgcguaacagcgc

SEQ ID NO: 3106967 - RNA, 15 nt, Molluscum contagiosum virus
uacgcgcgcgugcug

SEQ ID NO: 3106968 - RNA, 20 nt, Molluscum contagiosum virus
uacgcgcugcggcgcucgca

SEQ ID NO: 3106969 - RNA, 14 nt, Molluscum contagiosum virus
uacgcuacagcagc

SEQ ID NO: 3106970 - RNA, 14 nt, Molluscum contagiosum virus
uacgcucgcgcugu

SEQ ID NO: 3106971 - RNA, 15 nt, Molluscum contagiosum virus
uacggacggcgcacg

SEQ ID NO: 3106972 - RNA, 20 nt, Molluscum contagiosum virus
uacgggaagcugcacgugca

SEQ ID NO: 3106973 - RNA, 19 nt, Molluscum contagiosum virus
uacgggcgcuauugcgcgg

SEQ ID NO: 3106974 - RNA, 13 nt, Molluscum contagiosum virus
guguucugcgcgc

SEQ ID NO: 3106975 - RNA, 17 nt, Molluscum contagiosum virus
gugugcucugugcgcgc

SEQ ID NO: 3106976 - RNA, 15 nt, Molluscum contagiosum virus
guuccagcagcgcca

SEQ ID NO: 3106977 - RNA, 16 nt, Molluscum contagiosum virus
guuccagcagcgccag

SEQ ID NO: 3106978 - RNA, 20 nt, Molluscum contagiosum virus
guuccaggaacgccgccacg

SEQ ID NO: 3106979 - RNA, 21 nt, Molluscum contagiosum virus
uacaugcucaagcaccugcgc

SEQ ID NO: 3106980 - RNA, 15 nt, Molluscum contagiosum virus
guucagguagcgcgc

SEQ ID NO: 3106981 - RNA, 22 nt, Molluscum contagiosum virus
guucaacaucguggcgcgcgcg

SEQ ID NO: 3106982 - RNA, 18 nt, Molluscum contagiosum virus
uaccgcgacggcgugcug

SEQ ID NO: 3106983 - RNA, 14 nt, Molluscum contagiosum virus
uaccgcgcgcacgc

SEQ ID NO: 3106984 - RNA, 17 nt, Molluscum contagiosum virus
uaccgcgcgcgcaagcg

SEQ ID NO: 3106985 - RNA, 17 nt, Molluscum contagiosum virus
gugguuuacaucggcuc

SEQ ID NO: 3106986 - RNA, 20 nt, Molluscum contagiosum virus
gugucagccccgggcccgca

SEQ ID NO: 3106987 - RNA, 15 nt, Molluscum contagiosum virus
gugucgagcucgcgc

SEQ ID NO: 3106988 - RNA, 24 nt, Molluscum contagiosum virus
gugugcaggaacugcccgcgucgc

SEQ ID NO: 3106989 - RNA, 18 nt, Molluscum contagiosum virus
gugugccagcggcgccgc

SEQ ID NO: 3106990 - RNA, 15 nt, Molluscum contagiosum virus
guguaccgccgcggc

SEQ ID NO: 3106991 - RNA, 22 nt, Molluscum contagiosum virus
guguacgcacggggccgcacgc

SEQ ID NO: 3106992 - RNA, 12 nt, Molluscum contagiosum virus
guggugcgcgac

SEQ ID NO: 3106993 - RNA, 16 nt, Molluscum contagiosum virus
guggucgcgcgcgcuc

SEQ ID NO: 3106994 - RNA, 22 nt, Molluscum contagiosum virus
gugggcaccugcaucgcgccgc

SEQ ID NO: 3106995 - RNA, 14 nt, Molluscum contagiosum virus
gugggccgcggcgc

SEQ ID NO: 3106996 - RNA, 20 nt, Molluscum contagiosum virus
gugggcgacgugaagacgcu

SEQ ID NO: 3106997 - RNA, 15 nt, Molluscum contagiosum virus
guggcuugcugcagu

SEQ ID NO: 3106998 - RNA, 17 nt, Molluscum contagiosum virus
guggcggcucugccgcg

SEQ ID NO: 3106999 - RNA, 21 nt, Molluscum contagiosum virus
guggcguccgcacgaggagcc

SEQ ID NO: 3107000 - RNA, 20 nt, Molluscum contagiosum virus
guggcguugcugcugcgcgc

SEQ ID NO: 3107001 - RNA, 14 nt, Molluscum contagiosum virus
guggccuacguggc

SEQ ID NO: 3107002 - RNA, 16 nt, Molluscum contagiosum virus
guggccuacguggcgu

SEQ ID NO: 3107003 - RNA, 13 nt, Molluscum contagiosum virus
guggcgagcaucu

SEQ ID NO: 3107004 - RNA, 20 nt, Molluscum contagiosum virus
guggcgagcaucugcgcgug

SEQ ID NO: 3107005 - RNA, 20 nt, Molluscum contagiosum virus
guggcgcacacggacgagcc

SEQ ID NO: 3107006 - RNA, 15 nt, Molluscum contagiosum virus
guggcgccugcgcgc

SEQ ID NO: 3107007 - RNA, 16 nt, Molluscum contagiosum virus
guggcgccugcgcgcg

SEQ ID NO: 3107008 - RNA, 14 nt, Molluscum contagiosum virus
guggcgcugggcgc

SEQ ID NO: 3107009 - RNA, 15 nt, Molluscum contagiosum virus
guggcgcuuggcgag

SEQ ID NO: 3107010 - RNA, 22 nt, Molluscum contagiosum virus
guggcgcuuggcgagcgcugcc

SEQ ID NO: 3107011 - RNA, 18 nt, Molluscum contagiosum virus
guggccaacggcgccauc

SEQ ID NO: 3107012 - RNA, 21 nt, Molluscum contagiosum virus
guggccaacuucgcggucgac

SEQ ID NO: 3107013 - RNA, 15 nt, Molluscum contagiosum virus
guggaggugcgcgac

SEQ ID NO: 3107014 - RNA, 14 nt, Molluscum contagiosum virus
guggaucgcgcgca

SEQ ID NO: 3107015 - RNA, 13 nt, Molluscum contagiosum virus
guggccagcgcgc

SEQ ID NO: 3107016 - RNA, 21 nt, Molluscum contagiosum virus
guggccgcgccgggcgccaga

SEQ ID NO: 3107017 - RNA, 23 nt, Molluscum contagiosum virus
guggccgcgcgcgcacgcaagcc

SEQ ID NO: 3107018 - RNA, 20 nt, Molluscum contagiosum virus
guggacgcgcaagugugcgc

SEQ ID NO: 3107019 - RNA, 23 nt, Molluscum contagiosum virus
guggacgcgcgagugugugcauc

SEQ ID NO: 3107020 - RNA, 14 nt, Molluscum contagiosum virus
guggaccuuggcgc

SEQ ID NO: 3107021 - RNA, 19 nt, Molluscum contagiosum virus
guggaccuuggcgcgccgc

SEQ ID NO: 3107022 - RNA, 23 nt, Molluscum contagiosum virus
guggaccuuggcgcgccgcugcc

SEQ ID NO: 3107023 - RNA, 17 nt, Molluscum contagiosum virus
guggacgaugguggcgc

SEQ ID NO: 3107024 - RNA, 16 nt, Molluscum contagiosum virus
gugcucguguguccgc

SEQ ID NO: 3107025 - RNA, 20 nt, Molluscum contagiosum virus
gugcucguguguccgcacgc

SEQ ID NO: 3107026 - RNA, 22 nt, Molluscum contagiosum virus
gugcucguguguccgcacgcac

SEQ ID NO: 3107027 - RNA, 15 nt, Molluscum contagiosum virus
gugcucugugcgcgc

SEQ ID NO: 3107028 - RNA, 20 nt, Molluscum contagiosum virus
gugcucuucggggacggcgu

SEQ ID NO: 3107029 - RNA, 22 nt, Molluscum contagiosum virus
gugcucuuuaguacaacgcgcu

SEQ ID NO: 3107030 - RNA, 18 nt, Molluscum contagiosum virus
gugcugaagacgcuggcc

SEQ ID NO: 3107031 - RNA, 18 nt, Molluscum contagiosum virus
gugcugcagcugcgcgag

SEQ ID NO: 3107032 - RNA, 13 nt, Molluscum contagiosum virus
gugcugcgcacgc

SEQ ID NO: 3107033 - RNA, 13 nt, Molluscum contagiosum virus
gugcugcgccacg

SEQ ID NO: 3107034 - RNA, 23 nt, Molluscum contagiosum virus
gugcgucacguacucgcugcucc

SEQ ID NO: 3107035 - RNA, 19 nt, Molluscum contagiosum virus
gugcgugcccaagugcgcg

SEQ ID NO: 3107036 - RNA, 21 nt, Molluscum contagiosum virus
gugcgugcccaagugcgcgug

SEQ ID NO: 3107037 - RNA, 15 nt, Molluscum contagiosum virus
gugcgugcgcugcgc

SEQ ID NO: 3107038 - RNA, 18 nt, Molluscum contagiosum virus
gugcgugguguccacgcg

SEQ ID NO: 3107039 - RNA, 20 nt, Molluscum contagiosum virus
gugcgugguguccacgcgcg

SEQ ID NO: 3107040 - RNA, 14 nt, Molluscum contagiosum virus
gugcuugcgcacgg

SEQ ID NO: 3107041 - RNA, 14 nt, Molluscum contagiosum virus
gugcuggacgcgca

SEQ ID NO: 3107042 - RNA, 23 nt, Molluscum contagiosum virus
gugcuggagcagacguacgagca

SEQ ID NO: 3107043 - RNA, 21 nt, Molluscum contagiosum virus
gugcuggagggcacgcugcac

SEQ ID NO: 3107044 - RNA, 20 nt, Molluscum contagiosum virus
gugcuggucaagaaggcgcu

SEQ ID NO: 3107045 - RNA, 22 nt, Molluscum contagiosum virus
gugcuguccuacuucgucaagc

SEQ ID NO: 3107046 - RNA, 16 nt, Molluscum contagiosum virus
gugcuguugccgcgcu

SEQ ID NO: 3107047 - RNA, 15 nt, Molluscum contagiosum virus
ucgugguugcgcacg

SEQ ID NO: 3107048 - RNA, 15 nt, Molluscum contagiosum virus
ucgugugcgcgcacg

SEQ ID NO: 3107049 - RNA, 19 nt, Molluscum contagiosum virus
ucguguguccgcacgcaca

SEQ ID NO: 3107050 - RNA, 22 nt, Molluscum contagiosum virus
uauaguccccggcgccggcacc

SEQ ID NO: 3107051 - RNA, 19 nt, Molluscum contagiosum virus
ucuacguguccgcauccgc

SEQ ID NO: 3107052 - RNA, 23 nt, Molluscum contagiosum virus
ucuacuaaaguacgagagcgcau

SEQ ID NO: 3107053 - RNA, 20 nt, Molluscum contagiosum virus
ucuacugcgacauccacaug

SEQ ID NO: 3107054 - RNA, 17 nt, Molluscum contagiosum virus
ucuacuggcggcgcccg

SEQ ID NO: 3107055 - RNA, 16 nt, Molluscum contagiosum virus
ucguuggcgcgcccgg

SEQ ID NO: 3107056 - RNA, 18 nt, Molluscum contagiosum virus
ucuaagcgcacgcgcgac

SEQ ID NO: 3107057 - RNA, 15 nt, Molluscum contagiosum virus
ucuacgaggagcacg

SEQ ID NO: 3107058 - RNA, 19 nt, Molluscum contagiosum virus
uagcucgugccugucggca

SEQ ID NO: 3107059 - RNA, 15 nt, Molluscum contagiosum virus
uagcuggcgcccgua

SEQ ID NO: 3107060 - RNA, 16 nt, Molluscum contagiosum virus
uaggcgggccugcgcc

SEQ ID NO: 3107061 - RNA, 21 nt, Molluscum contagiosum virus
uagggcaucgagaacgccgcg

SEQ ID NO: 3107062 - RNA, 15 nt, Molluscum contagiosum virus
uagguacccgcaacc

SEQ ID NO: 3107063 - RNA, 16 nt, Molluscum contagiosum virus
uagcgcccguggcgcc

SEQ ID NO: 3107064 - RNA, 12 nt, Molluscum contagiosum virus
uagcgcgcgugu

SEQ ID NO: 3107065 - RNA, 22 nt, Molluscum contagiosum virus
uagcggcggcguaggccugcgg

SEQ ID NO: 3107066 - RNA, 16 nt, Molluscum contagiosum virus
uagcguucccaagcaa

SEQ ID NO: 3107067 - RNA, 14 nt, Molluscum contagiosum virus
uaguagcgcucgcc

SEQ ID NO: 3107068 - RNA, 21 nt, Molluscum contagiosum virus
uaggcacacacgaacgcacgc

SEQ ID NO: 3107069 - RNA, 17 nt, Molluscum contagiosum virus
uaggcacuccgcgcacc

SEQ ID NO: 3107070 - RNA, 20 nt, Molluscum contagiosum virus
uauacuccccgcgcgcgugc

SEQ ID NO: 3107071 - RNA, 17 nt, Molluscum contagiosum virus
uauacucgacgcgcgcg

SEQ ID NO: 3107072 - RNA, 17 nt, Molluscum contagiosum virus
uaguccgcguacagcgc

SEQ ID NO: 3107073 - RNA, 14 nt, Molluscum contagiosum virus
uaguggcgcucgcg

SEQ ID NO: 3107074 - RNA, 18 nt, Molluscum contagiosum virus
uagugguccaccagcugc

SEQ ID NO: 3107075 - RNA, 14 nt, Molluscum contagiosum virus
ucuccgcgcugcac

SEQ ID NO: 3107076 - RNA, 16 nt, Molluscum contagiosum virus
ucucccucgcgcgcau

SEQ ID NO: 3107077 - RNA, 22 nt, Molluscum contagiosum virus
ucuccgaagagcagaaggcgua

SEQ ID NO: 3107078 - RNA, 15 nt, Molluscum contagiosum virus
ucuccgaccgugccc

SEQ ID NO: 3107079 - RNA, 17 nt, Molluscum contagiosum virus
ucuccgagacacgcgag

SEQ ID NO: 3107080 - RNA, 15 nt, Molluscum contagiosum virus
ucuagcucgcgcgcg

SEQ ID NO: 3107081 - RNA, 18 nt, Molluscum contagiosum virus
ucucagcggcacugcgcg

SEQ ID NO: 3107082 - RNA, 17 nt, Molluscum contagiosum virus
ucucccgccgcgugccc

SEQ ID NO: 3107083 - RNA, 23 nt, Molluscum contagiosum virus
ucuccaagaagacggcgcgcgcg

SEQ ID NO: 3107084 - RNA, 13 nt, Molluscum contagiosum virus
ucuccaggaacgc

SEQ ID NO: 3107085 - RNA, 14 nt, Molluscum contagiosum virus
ucucgcacgcggag

SEQ ID NO: 3107086 - RNA, 20 nt, Molluscum contagiosum virus
ucucgcagacgcagcgcgag

SEQ ID NO: 3107087 - RNA, 22 nt, Molluscum contagiosum virus
ucuccuccuugauuucgcgcag

SEQ ID NO: 3107088 - RNA, 20 nt, Molluscum contagiosum virus
ucucgcgcgggcagggcgac

SEQ ID NO: 3107089 - RNA, 13 nt, Molluscum contagiosum virus
ucucgcgcucgcc

SEQ ID NO: 3107090 - RNA, 20 nt, Molluscum contagiosum virus
ucucgcggggcaagcgcgcu

SEQ ID NO: 3107091 - RNA, 19 nt, Molluscum contagiosum virus
ucucggcagcgucgcggag

SEQ ID NO: 3107092 - RNA, 14 nt, Molluscum contagiosum virus
ucucgccggcugua

SEQ ID NO: 3107093 - RNA, 12 nt, Molluscum contagiosum virus
ucucgcgcacga

SEQ ID NO: 3107094 - RNA, 20 nt, Molluscum contagiosum virus
ucucugcgaucgcgggcacg

SEQ ID NO: 3107095 - RNA, 13 nt, Molluscum contagiosum virus
ucucugcgcgcaa

SEQ ID NO: 3107096 - RNA, 16 nt, Molluscum contagiosum virus
ucugccguucggcgag

SEQ ID NO: 3107097 - RNA, 13 nt, Molluscum contagiosum virus
ucugccucgugga

SEQ ID NO: 3107098 - RNA, 15 nt, Molluscum contagiosum virus
ucugcgagcgcgaau

SEQ ID NO: 3107099 - RNA, 22 nt, Molluscum contagiosum virus
ucugcgcagguagcggcucgcg

SEQ ID NO: 3107100 - RNA, 15 nt, Molluscum contagiosum virus
ucugcgcccgcggag

SEQ ID NO: 3107101 - RNA, 15 nt, Molluscum contagiosum virus
ucugcgccgcgcgcg

SEQ ID NO: 3107102 - RNA, 14 nt, Molluscum contagiosum virus
ucugcgcgagcagc

SEQ ID NO: 3107103 - RNA, 19 nt, Molluscum contagiosum virus
ucugcgcuccacgcccgag

SEQ ID NO: 3107104 - RNA, 17 nt, Molluscum contagiosum virus
ucugcguugcgcgucau

SEQ ID NO: 3107105 - RNA, 14 nt, Molluscum contagiosum virus
ucugcuccgcggag

SEQ ID NO: 3107106 - RNA, 12 nt, Molluscum contagiosum virus
ucugcucgcagu

SEQ ID NO: 3107107 - RNA, 13 nt, Molluscum contagiosum virus
ucugcucgcgcau

SEQ ID NO: 3107108 - RNA, 20 nt, Molluscum contagiosum virus
ucugcugcacacaccgcgag

SEQ ID NO: 3107109 - RNA, 17 nt, Molluscum contagiosum virus
ucuggacguguccgacg

SEQ ID NO: 3107110 - RNA, 22 nt, Molluscum contagiosum virus
ucuggaucaccacuggacacgu

SEQ ID NO: 3107111 - RNA, 19 nt, Molluscum contagiosum virus
ucugguuccugcgcuccga

SEQ ID NO: 3107112 - RNA, 15 nt, Molluscum contagiosum virus
ucugucccgcccgug

SEQ ID NO: 3107113 - RNA, 19 nt, Molluscum contagiosum virus
ucuguccgucuugcgcaca

SEQ ID NO: 3107114 - RNA, 11 nt, Molluscum contagiosum virus
ucuuccacaug

SEQ ID NO: 3107115 - RNA, 20 nt, Molluscum contagiosum virus
ucuucccguuccugggcaac

SEQ ID NO: 3107116 - RNA, 14 nt, Molluscum contagiosum virus
ucuuccggcccgac

SEQ ID NO: 3107117 - RNA, 15 nt, Molluscum contagiosum virus
ucuuccuggggcugg

SEQ ID NO: 3107118 - RNA, 22 nt, Molluscum contagiosum virus
ucuucgaaguggccgucgcgag

SEQ ID NO: 3107119 - RNA, 20 nt, Molluscum contagiosum virus
ucuucgagacgcugcgcgac

SEQ ID NO: 3107120 - RNA, 23 nt, Molluscum contagiosum virus
ucuucgagacgcugcgcgacgag

SEQ ID NO: 3107121 - RNA, 22 nt, Molluscum contagiosum virus
ucuucgcgcugguuugcgcgag

SEQ ID NO: 3107122 - RNA, 19 nt, Molluscum contagiosum virus
ucugaaaggacaugggcac

SEQ ID NO: 3107123 - RNA, 20 nt, Molluscum contagiosum virus
ucugacacuugcggcgcuag

SEQ ID NO: 3107124 - RNA, 20 nt, Molluscum contagiosum virus
ucugcaaggccuguccgacg

SEQ ID NO: 3107125 - RNA, 15 nt, Molluscum contagiosum virus
ucugcacgggcacgc

SEQ ID NO: 3107126 - RNA, 13 nt, Molluscum contagiosum virus
ucugcagcgccgc

SEQ ID NO: 3107127 - RNA, 17 nt, Molluscum contagiosum virus
ucugcagcgccgcgcgg

SEQ ID NO: 3107128 - RNA, 18 nt, Molluscum contagiosum virus
ucugccaccgcggcgcgg

SEQ ID NO: 3107129 - RNA, 20 nt, Molluscum contagiosum virus
ucugccaccgcggcgcggag

SEQ ID NO: 3107130 - RNA, 14 nt, Molluscum contagiosum virus
ugaggcugcucucc

SEQ ID NO: 3107131 - RNA, 19 nt, Molluscum contagiosum virus
ugagguacuccacgcccgg

SEQ ID NO: 3107132 - RNA, 22 nt, Molluscum contagiosum virus
ugaguaccgcgggcgcagacgc

SEQ ID NO: 3107133 - RNA, 13 nt, Molluscum contagiosum virus
ugagugcgcgcac

SEQ ID NO: 3107134 - RNA, 18 nt, Molluscum contagiosum virus
ugaguuucuggugccgcg

SEQ ID NO: 3107135 - RNA, 14 nt, Molluscum contagiosum virus
ucuuuccggcgcgg

SEQ ID NO: 3107136 - RNA, 24 nt, Molluscum contagiosum virus
ucuuugccccccccccgacgcgag

SEQ ID NO: 3107137 - RNA, 18 nt, Molluscum contagiosum virus
ucuuugcgaacgcgcaag

SEQ ID NO: 3107138 - RNA, 18 nt, Molluscum contagiosum virus
ucuuugcggacgcgcgag

SEQ ID NO: 3107139 - RNA, 20 nt, Molluscum contagiosum virus
ugaaaagcgugauguugagc

SEQ ID NO: 3107140 - RNA, 17 nt, Molluscum contagiosum virus
ugaacaacauggugcug

SEQ ID NO: 3107141 - RNA, 18 nt, Molluscum contagiosum virus
ugaacaccauccugcgcu

SEQ ID NO: 3107142 - RNA, 17 nt, Molluscum contagiosum virus
ugaacagcauuagcgcc

SEQ ID NO: 3107143 - RNA, 18 nt, Molluscum contagiosum virus
ugaacagcuucacgauga

SEQ ID NO: 3107144 - RNA, 16 nt, Molluscum contagiosum virus
ucugggcgcgugcgag

SEQ ID NO: 3107145 - RNA, 14 nt, Molluscum contagiosum virus
ucuuguugcgcaug

SEQ ID NO: 3107146 - RNA, 18 nt, Molluscum contagiosum virus
ucuuguugucugcggacg

SEQ ID NO: 3107147 - RNA, 17 nt, Molluscum contagiosum virus
ucuugcuggcgcucgcg

SEQ ID NO: 3107148 - RNA, 23 nt, Molluscum contagiosum virus
ucuugcuggcgcucgcgcgcacg

SEQ ID NO: 3107149 - RNA, 16 nt, Molluscum contagiosum virus
ucugccgcccgcgccc

SEQ ID NO: 3107150 - RNA, 15 nt, Molluscum contagiosum virus
ucuucguggcgcugg

SEQ ID NO: 3107151 - RNA, 19 nt, Molluscum contagiosum virus
ucuucguggcgcugggcgc

SEQ ID NO: 3107152 - RNA, 21 nt, Molluscum contagiosum virus
ucuugaaacaguaggacaugu

SEQ ID NO: 3107153 - RNA, 20 nt, Molluscum contagiosum virus
ugaucgcgcaggcgcgccau

SEQ ID NO: 3107154 - RNA, 21 nt, Molluscum contagiosum virus
ugcaacucgcgcugcagcacc

SEQ ID NO: 3107155 - RNA, 22 nt, Molluscum contagiosum virus
ugcaagcacaacgggcucgugc

SEQ ID NO: 3107156 - RNA, 23 nt, Molluscum contagiosum virus
ugcaaagacgguacauauucccu

SEQ ID NO: 3107157 - RNA, 13 nt, Molluscum contagiosum virus
ugcaaagcgcggc

SEQ ID NO: 3107158 - RNA, 14 nt, Molluscum contagiosum virus
ugcaaggcgcgcgc

SEQ ID NO: 3107159 - RNA, 19 nt, Molluscum contagiosum virus
ugcaagguuuacgccgugc

SEQ ID NO: 3107160 - RNA, 16 nt, Molluscum contagiosum virus
ugcacaagcaggaguc

SEQ ID NO: 3107161 - RNA, 14 nt, Molluscum contagiosum virus
ugcacaccggcgcg

SEQ ID NO: 3107162 - RNA, 16 nt, Molluscum contagiosum virus
ugcacaccggcgcgcu

SEQ ID NO: 3107163 - RNA, 18 nt, Molluscum contagiosum virus
ugcacaccggcgcgcuga

SEQ ID NO: 3107164 - RNA, 20 nt, Molluscum contagiosum virus
ugcacgacguacgagugcug

SEQ ID NO: 3107165 - RNA, 15 nt, Molluscum contagiosum virus
ugcacgcacgcgcgg

SEQ ID NO: 3107166 - RNA, 19 nt, Molluscum contagiosum virus
ugcacgcacgcgcgggcau

SEQ ID NO: 3107167 - RNA, 14 nt, Molluscum contagiosum virus
ugcacagcguagcg

SEQ ID NO: 3107168 - RNA, 18 nt, Molluscum contagiosum virus
ugcacaguucacggcgcu

SEQ ID NO: 3107169 - RNA, 20 nt, Molluscum contagiosum virus
ugcaccagcaccggcgugug

SEQ ID NO: 3107170 - RNA, 13 nt, Molluscum contagiosum virus
ugcacgcgcacgc

SEQ ID NO: 3107171 - RNA, 16 nt, Molluscum contagiosum virus
ugcacgcggcgcgugu

SEQ ID NO: 3107172 - RNA, 14 nt, Molluscum contagiosum virus
ugcacgcgggcgcc

SEQ ID NO: 3107173 - RNA, 22 nt, Molluscum contagiosum virus
ugcacggcuaccgcgacggcgu

SEQ ID NO: 3107174 - RNA, 15 nt, Molluscum contagiosum virus
ugcacguccugcgag

SEQ ID NO: 3107175 - RNA, 15 nt, Molluscum contagiosum virus
ugcacgucgacaagu

SEQ ID NO: 3107176 - RNA, 22 nt, Molluscum contagiosum virus
ugcacuacaaccauggcgcgcu

SEQ ID NO: 3107177 - RNA, 13 nt, Molluscum contagiosum virus
ugcacucgcgcuc

SEQ ID NO: 3107178 - RNA, 12 nt, Molluscum contagiosum virus
ugcacugcgcgg

SEQ ID NO: 3107179 - RNA, 18 nt, Molluscum contagiosum virus
ugcacugcgcggcgugcg

SEQ ID NO: 3107180 - RNA, 17 nt, Molluscum contagiosum virus
ugcagaaacagccgugc

SEQ ID NO: 3107181 - RNA, 15 nt, Molluscum contagiosum virus
ugcagaacagcacgu

SEQ ID NO: 3107182 - RNA, 14 nt, Molluscum contagiosum virus
ugcagaaccugcgg

SEQ ID NO: 3107183 - RNA, 12 nt, Molluscum contagiosum virus
ugcagcgcccgg

SEQ ID NO: 3107184 - RNA, 14 nt, Molluscum contagiosum virus
ugcagcgccgcgcg

SEQ ID NO: 3107185 - RNA, 15 nt, Molluscum contagiosum virus
ugcagcgccgcgcgg

SEQ ID NO: 3107186 - RNA, 12 nt, Molluscum contagiosum virus
ugcagcgcgugc

SEQ ID NO: 3107187 - RNA, 16 nt, Molluscum contagiosum virus
ugcagcggcgccacga

SEQ ID NO: 3107188 - RNA, 14 nt, Molluscum contagiosum virus
ugcagagcgugcug

SEQ ID NO: 3107189 - RNA, 18 nt, Molluscum contagiosum virus
ugcagcacgucuugcgcg

SEQ ID NO: 3107190 - RNA, 23 nt, Molluscum contagiosum virus
ugcagcccgacgcgggcgcgcac

SEQ ID NO: 3107191 - RNA, 16 nt, Molluscum contagiosum virus
ugcagccgcugcugcu

SEQ ID NO: 3107192 - RNA, 16 nt, Molluscum contagiosum virus
ugccguucacgcacac

SEQ ID NO: 3107193 - RNA, 16 nt, Molluscum contagiosum virus
ugccuaugccgaggug

SEQ ID NO: 3107194 - RNA, 14 nt, Molluscum contagiosum virus
ugccgucgcccgug

SEQ ID NO: 3107195 - RNA, 12 nt, Molluscum contagiosum virus
ugcagcugcgcg

SEQ ID NO: 3107196 - RNA, 20 nt, Molluscum contagiosum virus
ugcacccgcgcagcgugccg

SEQ ID NO: 3107197 - RNA, 17 nt, Molluscum contagiosum virus
ugcgagaacucgcgugc

SEQ ID NO: 3107198 - RNA, 20 nt, Molluscum contagiosum virus
ugcgagcacuguacgcacgc

SEQ ID NO: 3107199 - RNA, 14 nt, Molluscum contagiosum virus
ugcgagcagcccgc

SEQ ID NO: 3107200 - RNA, 17 nt, Molluscum contagiosum virus
ugcgagcggcgcgcgcu

SEQ ID NO: 3107201 - RNA, 19 nt, Molluscum contagiosum virus
ugcgagcggcgcgcgcuga

SEQ ID NO: 3107202 - RNA, 16 nt, Molluscum contagiosum virus
ugcgaggccugcgugg

SEQ ID NO: 3107203 - RNA, 14 nt, Molluscum contagiosum virus
ugcgaggcgcgcac

SEQ ID NO: 3107204 - RNA, 16 nt, Molluscum contagiosum virus
ugcgaggcgcgcacgc

SEQ ID NO: 3107205 - RNA, 15 nt, Molluscum contagiosum virus
ugcgaguggcgcgca

SEQ ID NO: 3107206 - RNA, 21 nt, Molluscum contagiosum virus
ugcgcaaagcaacugcggacu

SEQ ID NO: 3107207 - RNA, 22 nt, Molluscum contagiosum virus
ugcgcaacgucuuccgcgcgcu

SEQ ID NO: 3107208 - RNA, 14 nt, Molluscum contagiosum virus
ugcgcaacgugcug

SEQ ID NO: 3107209 - RNA, 17 nt, Molluscum contagiosum virus
ugcgcaacgugcugcgc

SEQ ID NO: 3107210 - RNA, 20 nt, Molluscum contagiosum virus
ugcgcaacgugcugcgccgc

SEQ ID NO: 3107211 - RNA, 18 nt, Molluscum contagiosum virus
ugcgcaauaaggcggugg

SEQ ID NO: 3107212 - RNA, 13 nt, Molluscum contagiosum virus
ugcgccucggacu

SEQ ID NO: 3107213 - RNA, 14 nt, Molluscum contagiosum virus
ugcgccugccggcg

SEQ ID NO: 3107214 - RNA, 16 nt, Molluscum contagiosum virus
ugcgcaccgcgggcug

SEQ ID NO: 3107215 - RNA, 16 nt, Molluscum contagiosum virus
ugcgcgacgaggaggc

SEQ ID NO: 3107216 - RNA, 20 nt, Molluscum contagiosum virus
ugcgcgacuccaucugcgcg

SEQ ID NO: 3107217 - RNA, 17 nt, Molluscum contagiosum virus
ugcgcgagccgcugcac

SEQ ID NO: 3107218 - RNA, 19 nt, Molluscum contagiosum virus
ugcgcgagccgcugcacgc

SEQ ID NO: 3107219 - RNA, 20 nt, Molluscum contagiosum virus
ugcgcgagcgcgcgcugcgc

SEQ ID NO: 3107220 - RNA, 13 nt, Molluscum contagiosum virus
ugcgcgagucgcg

SEQ ID NO: 3107221 - RNA, 19 nt, Molluscum contagiosum virus
ugcgccuucugccugcccg

SEQ ID NO: 3107222 - RNA, 13 nt, Molluscum contagiosum virus
ugcgcccgcaaac

SEQ ID NO: 3107223 - RNA, 19 nt, Molluscum contagiosum virus
ugcgcccgugcgaggagca

SEQ ID NO: 3107224 - RNA, 16 nt, Molluscum contagiosum virus
ugcgcacgcgcgucau

SEQ ID NO: 3107225 - RNA, 14 nt, Molluscum contagiosum virus
ugcgcacgugcgcg

SEQ ID NO: 3107226 - RNA, 15 nt, Molluscum contagiosum virus
ugcgcacgugcgcgc

SEQ ID NO: 3107227 - RNA, 23 nt, Molluscum contagiosum virus
ugcgcagagcuccccgcgcgcag

SEQ ID NO: 3107228 - RNA, 23 nt, Molluscum contagiosum virus
ugcgcagcauucccggcgcgcgc

SEQ ID NO: 3107229 - RNA, 15 nt, Molluscum contagiosum virus
ugcgcaggaccgcga

SEQ ID NO: 3107230 - RNA, 18 nt, Molluscum contagiosum virus
ugcgcaucccugcgcacc

SEQ ID NO: 3107231 - RNA, 15 nt, Molluscum contagiosum virus
ugcgcauggccacgc

SEQ ID NO: 3107232 - RNA, 16 nt, Molluscum contagiosum virus
ugccuuggcgcccgug

SEQ ID NO: 3107233 - RNA, 23 nt, Molluscum contagiosum virus
ugcgaacgcgcaagugugcgcau

SEQ ID NO: 3107234 - RNA, 19 nt, Molluscum contagiosum virus
ugcgaagacgagcgcgugc

SEQ ID NO: 3107235 - RNA, 13 nt, Molluscum contagiosum virus
ugcgaaggucauc

SEQ ID NO: 3107236 - RNA, 14 nt, Molluscum contagiosum virus
ugcgacagcugcug

SEQ ID NO: 3107237 - RNA, 19 nt, Molluscum contagiosum virus
ugccugcaagaggcgcugu

SEQ ID NO: 3107238 - RNA, 16 nt, Molluscum contagiosum virus
ugccugcaaggagguc

SEQ ID NO: 3107239 - RNA, 17 nt, Molluscum contagiosum virus
gaagcaggcgccaucgc

SEQ ID NO: 3107240 - RNA, 23 nt, Molluscum contagiosum virus
gaagcaggcgccaucgcgcguga

SEQ ID NO: 3107241 - RNA, 14 nt, Molluscum contagiosum virus
gaagcagugcucgg

SEQ ID NO: 3107242 - RNA, 18 nt, Molluscum contagiosum virus
gaagcagugcucgggaga

SEQ ID NO: 3107243 - RNA, 14 nt, Molluscum contagiosum virus
gaagcacguagcuc

SEQ ID NO: 3107244 - RNA, 16 nt, Molluscum contagiosum virus
gaagcacguagcucgc

SEQ ID NO: 3107245 - RNA, 17 nt, Molluscum contagiosum virus
gaagaugcugcgcgugg

SEQ ID NO: 3107246 - RNA, 23 nt, Molluscum contagiosum virus
gaagagacgccaagcgucgcgac

SEQ ID NO: 3107247 - RNA, 19 nt, Molluscum contagiosum virus
gaagaggccagcacaagcc

SEQ ID NO: 3107248 - RNA, 19 nt, Molluscum contagiosum virus
gaagaggccggcacaagcc

SEQ ID NO: 3107249 - RNA, 12 nt, Molluscum contagiosum virus
gaagagucgcgc

SEQ ID NO: 3107250 - RNA, 20 nt, Molluscum contagiosum virus
gacagcacaaacacgcgcgc

SEQ ID NO: 3107251 - RNA, 16 nt, Molluscum contagiosum virus
gacagcgacgagaucu

SEQ ID NO: 3107252 - RNA, 13 nt, Molluscum contagiosum virus
gacagcgcgcgca

SEQ ID NO: 3107253 - RNA, 16 nt, Molluscum contagiosum virus
gacagcgcgcgcacgc

SEQ ID NO: 3107254 - RNA, 13 nt, Molluscum contagiosum virus
gacagcgugcgcg

SEQ ID NO: 3107255 - RNA, 20 nt, Molluscum contagiosum virus
gacagcgugcgcgggcacgc

SEQ ID NO: 3107256 - RNA, 16 nt, Molluscum contagiosum virus
gaagcucucgcgcgca

SEQ ID NO: 3107257 - RNA, 16 nt, Molluscum contagiosum virus
gaagcugcacgugcag

SEQ ID NO: 3107258 - RNA, 15 nt, Molluscum contagiosum virus
gaagcccgucggggc

SEQ ID NO: 3107259 - RNA, 22 nt, Molluscum contagiosum virus
gaagccuucuucgugcugugcc

SEQ ID NO: 3107260 - RNA, 17 nt, Molluscum contagiosum virus
gaagcgaaaggacgcgc

SEQ ID NO: 3107261 - RNA, 12 nt, Molluscum contagiosum virus
gaagcgcgcccc

SEQ ID NO: 3107262 - RNA, 15 nt, Molluscum contagiosum virus
gaagacggcgcgcgc

SEQ ID NO: 3107263 - RNA, 16 nt, Molluscum contagiosum virus
gaagacggcgcgcgcg

SEQ ID NO: 3107264 - RNA, 16 nt, Molluscum contagiosum virus
gaagacgucggggcgc

SEQ ID NO: 3107265 - RNA, 12 nt, Molluscum contagiosum virus
gaagacgugcuu

SEQ ID NO: 3107266 - RNA, 20 nt, Molluscum contagiosum virus
gaagacguuuacguccacgc

SEQ ID NO: 3107267 - RNA, 21 nt, Molluscum contagiosum virus
gaagacguuuacguccacgcg

SEQ ID NO: 3107268 - RNA, 18 nt, Molluscum contagiosum virus
gaagacuugccgucucgc

SEQ ID NO: 3107269 - RNA, 14 nt, Molluscum contagiosum virus
gaagaacgcggcgu

SEQ ID NO: 3107270 - RNA, 23 nt, Molluscum contagiosum virus
gaagaagaaaagacgagcugugc

SEQ ID NO: 3107271 - RNA, 14 nt, Molluscum contagiosum virus
gaagaaggagccca

SEQ ID NO: 3107272 - RNA, 14 nt, Molluscum contagiosum virus
gaagaaggagcccu

SEQ ID NO: 3107273 - RNA, 20 nt, Molluscum contagiosum virus
gaagacgagcgcgugccgcu

SEQ ID NO: 3107274 - RNA, 22 nt, Molluscum contagiosum virus
gaagacgcguaccagcgccugc

SEQ ID NO: 3107275 - RNA, 18 nt, Molluscum contagiosum virus
gaacgcgcaagugugcgc

SEQ ID NO: 3107276 - RNA, 12 nt, Molluscum contagiosum virus
gaacgcgccgcg

SEQ ID NO: 3107277 - RNA, 11 nt, Molluscum contagiosum virus
gaacgcgcgcu

SEQ ID NO: 3107278 - RNA, 14 nt, Molluscum contagiosum virus
gaacgcgcgcucgu

SEQ ID NO: 3107279 - RNA, 23 nt, Molluscum contagiosum virus
gaacgcgcugcgccacugccacg

SEQ ID NO: 3107280 - RNA, 23 nt, Molluscum contagiosum virus
gaacgcguccacggcgcgcaccu

SEQ ID NO: 3107281 - RNA, 18 nt, Molluscum contagiosum virus
gaacgugacgcgccucga

SEQ ID NO: 3107282 - RNA, 17 nt, Molluscum contagiosum virus
gaacguggucaagaucc

SEQ ID NO: 3107283 - RNA, 14 nt, Molluscum contagiosum virus
gaacuagugcugcu

SEQ ID NO: 3107284 - RNA, 12 nt, Molluscum contagiosum virus
gaacuccaggcg

SEQ ID NO: 3107285 - RNA, 16 nt, Molluscum contagiosum virus
gaacucgagcacguag

SEQ ID NO: 3107286 - RNA, 17 nt, Molluscum contagiosum virus
gaacucgugcgccgcgc

SEQ ID NO: 3107287 - RNA, 22 nt, Molluscum contagiosum virus
gaacucuacacguggaauugcg

SEQ ID NO: 3107288 - RNA, 15 nt, Molluscum contagiosum virus
gaacucuacgccgcg

SEQ ID NO: 3107289 - RNA, 20 nt, Molluscum contagiosum virus
gaacucuacgccgcgcaccu

SEQ ID NO: 3107290 - RNA, 16 nt, Molluscum contagiosum virus
gaacugcccgcgucgc

SEQ ID NO: 3107291 - RNA, 23 nt, Molluscum contagiosum virus
gaacugcugggcguggcgcaccu

SEQ ID NO: 3107292 - RNA, 19 nt, Molluscum contagiosum virus
gaacuggacgccguugcgc

SEQ ID NO: 3107293 - RNA, 20 nt, Molluscum contagiosum virus
gacccagaagcgagagcgcg

SEQ ID NO: 3107294 - RNA, 18 nt, Molluscum contagiosum virus
gacggcgacgacagcgac

SEQ ID NO: 3107295 - RNA, 18 nt, Molluscum contagiosum virus
gacggcgccucgagcgcg

SEQ ID NO: 3107296 - RNA, 15 nt, Molluscum contagiosum virus
gacggcgcgcagcgc

SEQ ID NO: 3107297 - RNA, 12 nt, Molluscum contagiosum virus
gacggcgcgcgc

SEQ ID NO: 3107298 - RNA, 14 nt, Molluscum contagiosum virus
gacggcgcgggcgc

SEQ ID NO: 3107299 - RNA, 14 nt, Molluscum contagiosum virus
gacggcgcugcgcg

SEQ ID NO: 3107300 - RNA, 14 nt, Molluscum contagiosum virus
gacggcgugcgccg

SEQ ID NO: 3107301 - RNA, 15 nt, Molluscum contagiosum virus
gacggcgugcgccgc

SEQ ID NO: 3107302 - RNA, 21 nt, Molluscum contagiosum virus
gaccgcaagugcacgcggcgc

SEQ ID NO: 3107303 - RNA, 16 nt, Molluscum contagiosum virus
gaccagauccgggcgc

SEQ ID NO: 3107304 - RNA, 13 nt, Molluscum contagiosum virus
gaccaccagcacc

SEQ ID NO: 3107305 - RNA, 14 nt, Molluscum contagiosum virus
gaccaccagcacca

SEQ ID NO: 3107306 - RNA, 13 nt, Molluscum contagiosum virus
gaccacgcgcgcu

SEQ ID NO: 3107307 - RNA, 14 nt, Molluscum contagiosum virus
gacaucaucgcgga

SEQ ID NO: 3107308 - RNA, 22 nt, Molluscum contagiosum virus
gacaucaucgcggagcugcgcg

SEQ ID NO: 3107309 - RNA, 16 nt, Molluscum contagiosum virus
gacaugcacacgcacc

SEQ ID NO: 3107310 - RNA, 12 nt, Molluscum contagiosum virus
gacaugccucgc

SEQ ID NO: 3107311 - RNA, 13 nt, Molluscum contagiosum virus
gacaugcgcacgc

SEQ ID NO: 3107312 - RNA, 22 nt, Molluscum contagiosum virus
gacauggaccgcgucaagauca

SEQ ID NO: 3107313 - RNA, 23 nt, Molluscum contagiosum virus
gacagggugccuacucgcgacgc

SEQ ID NO: 3107314 - RNA, 17 nt, Molluscum contagiosum virus
gacagugccuccgcgga

SEQ ID NO: 3107315 - RNA, 16 nt, Molluscum contagiosum virus
gacaucacgcguucgc

SEQ ID NO: 3107316 - RNA, 16 nt, Molluscum contagiosum virus
cugcugcucgcggagg

SEQ ID NO: 3107317 - RNA, 22 nt, Molluscum contagiosum virus
cugcugcugcaaagcgcggccg

SEQ ID NO: 3107318 - RNA, 18 nt, Molluscum contagiosum virus
cugcuggcaccgcgcgcg

SEQ ID NO: 3107319 - RNA, 14 nt, Molluscum contagiosum virus
cugcuggcagacac

SEQ ID NO: 3107320 - RNA, 15 nt, Molluscum contagiosum virus
cugcuggcgcgcgcg

SEQ ID NO: 3107321 - RNA, 17 nt, Molluscum contagiosum virus
cugcuucacgcugcucg

SEQ ID NO: 3107322 - RNA, 21 nt, Molluscum contagiosum virus
cugaucaccgaggagccgcgc

SEQ ID NO: 3107323 - RNA, 19 nt, Molluscum contagiosum virus
cuggacgggcacgagcacg

SEQ ID NO: 3107324 - RNA, 20 nt, Molluscum contagiosum virus
cuggacgggcacgagcacgu

SEQ ID NO: 3107325 - RNA, 17 nt, Molluscum contagiosum virus
cuggaagaacaggccgc

SEQ ID NO: 3107326 - RNA, 18 nt, Molluscum contagiosum virus
cugcagaaacagccgugc

SEQ ID NO: 3107327 - RNA, 18 nt, Molluscum contagiosum virus
cugcacgugcagcggcgc

SEQ ID NO: 3107328 - RNA, 15 nt, Molluscum contagiosum virus
cugcacuacugcucc

SEQ ID NO: 3107329 - RNA, 20 nt, Molluscum contagiosum virus
cugcacgcgaauguccggcg

SEQ ID NO: 3107330 - RNA, 16 nt, Molluscum contagiosum virus
cugcacgcuacggcug

SEQ ID NO: 3107331 - RNA, 17 nt, Molluscum contagiosum virus
cugcacgagcugcugua

SEQ ID NO: 3107332 - RNA, 22 nt, Molluscum contagiosum virus
cugcagcagccccgacgccagc

SEQ ID NO: 3107333 - RNA, 16 nt, Molluscum contagiosum virus
cugcagcagcuccagc

SEQ ID NO: 3107334 - RNA, 16 nt, Molluscum contagiosum virus
cugcagcagcuccucc

SEQ ID NO: 3107335 - RNA, 14 nt, Molluscum contagiosum virus
cugcagcagcuggc

SEQ ID NO: 3107336 - RNA, 21 nt, Molluscum contagiosum virus
cugcagcccgacgcgggcgcg

SEQ ID NO: 3107337 - RNA, 16 nt, Molluscum contagiosum virus
cugcagcugcgcgagc

SEQ ID NO: 3107338 - RNA, 23 nt, Molluscum contagiosum virus
cugcagcugcgcgagccgcugca

SEQ ID NO: 3107339 - RNA, 13 nt, Molluscum contagiosum virus
cugcaggaccugc

SEQ ID NO: 3107340 - RNA, 11 nt, Molluscum contagiosum virus
cuggccaacac

SEQ ID NO: 3107341 - RNA, 19 nt, Molluscum contagiosum virus
cuggacgccguugcgcgug

SEQ ID NO: 3107342 - RNA, 14 nt, Molluscum contagiosum virus
cuggcccugcuagu

SEQ ID NO: 3107343 - RNA, 16 nt, Molluscum contagiosum virus
cuggcccugcuugacg

SEQ ID NO: 3107344 - RNA, 14 nt, Molluscum contagiosum virus
cuggccgagcguga

SEQ ID NO: 3107345 - RNA, 18 nt, Molluscum contagiosum virus
cuggccgugcccgccgac

SEQ ID NO: 3107346 - RNA, 21 nt, Molluscum contagiosum virus
cuggcgaaaccugggcgccgc

SEQ ID NO: 3107347 - RNA, 13 nt, Molluscum contagiosum virus
cuggcgagcacgu

SEQ ID NO: 3107348 - RNA, 17 nt, Molluscum contagiosum virus
cuggcaccgcgcgcgcu

SEQ ID NO: 3107349 - RNA, 17 nt, Molluscum contagiosum virus
cuggcaccgggcgccgc

SEQ ID NO: 3107350 - RNA, 14 nt, Molluscum contagiosum virus
cuggcacgcgccgc

SEQ ID NO: 3107351 - RNA, 21 nt, Molluscum contagiosum virus
cuggcacuggcgcgcacgcgc

SEQ ID NO: 3107352 - RNA, 18 nt, Molluscum contagiosum virus
cuggcagugccgggcgcc

SEQ ID NO: 3107353 - RNA, 21 nt, Molluscum contagiosum virus
cuggcagugccgggcgccggc

SEQ ID NO: 3107354 - RNA, 22 nt, Molluscum contagiosum virus
cuggcagugccgggcgccggcu

SEQ ID NO: 3107355 - RNA, 22 nt, Molluscum contagiosum virus
cuggagcaagcgcguucgcgcg

SEQ ID NO: 3107356 - RNA, 20 nt, Molluscum contagiosum virus
cuggagcgagugcgcgugcg

SEQ ID NO: 3107357 - RNA, 19 nt, Molluscum contagiosum virus
cuggagcugccgcugcgcg

SEQ ID NO: 3107358 - RNA, 17 nt, Molluscum contagiosum virus
cuggagggcacgcugca

SEQ ID NO: 3107359 - RNA, 17 nt, Molluscum contagiosum virus
cuggagggucacgcgca

SEQ ID NO: 3107360 - RNA, 17 nt, Molluscum contagiosum virus
cuggagguucguccgcu

SEQ ID NO: 3107361 - RNA, 18 nt, Molluscum contagiosum virus
cuggaguuuaaugacgcg

SEQ ID NO: 3107362 - RNA, 14 nt, Molluscum contagiosum virus
cuugccccucgucc

SEQ ID NO: 3107363 - RNA, 23 nt, Molluscum contagiosum virus
cuuggcggcgcggcuagcaccgc

SEQ ID NO: 3107364 - RNA, 18 nt, Molluscum contagiosum virus
cuugggagcaaggccugg

SEQ ID NO: 3107365 - RNA, 20 nt, Molluscum contagiosum virus
cuugggcacugcuacgagcc

SEQ ID NO: 3107366 - RNA, 16 nt, Molluscum contagiosum virus
cuuggggaagacgucg

SEQ ID NO: 3107367 - RNA, 20 nt, Molluscum contagiosum virus
cuugguguucugcgcgccgc

SEQ ID NO: 3107368 - RNA, 13 nt, Molluscum contagiosum virus
cuuguccgcggac

SEQ ID NO: 3107369 - RNA, 19 nt, Molluscum contagiosum virus
cuugcgcgcggugcgggcg

SEQ ID NO: 3107370 - RNA, 16 nt, Molluscum contagiosum virus
cuuugcgaacgcgcaa

SEQ ID NO: 3107371 - RNA, 21 nt, Molluscum contagiosum virus
cuuugcggcacgggcucgagc

SEQ ID NO: 3107372 - RNA, 19 nt, Molluscum contagiosum virus
cuuucucacgcccgcgcug

SEQ ID NO: 3107373 - RNA, 15 nt, Molluscum contagiosum virus
cuuucucacgcgcua

SEQ ID NO: 3107374 - RNA, 20 nt, Molluscum contagiosum virus
cuuucaggggucugucguuu

SEQ ID NO: 3107375 - RNA, 16 nt, Molluscum contagiosum virus
cuuuacgggcgccagc

SEQ ID NO: 3107376 - RNA, 19 nt, Molluscum contagiosum virus
cuugcucacgcugcgcucg

SEQ ID NO: 3107377 - RNA, 18 nt, Molluscum contagiosum virus
cuugcucggacacacgca

SEQ ID NO: 3107378 - RNA, 12 nt, Molluscum contagiosum virus
cuugcuggcacg

SEQ ID NO: 3107379 - RNA, 18 nt, Molluscum contagiosum virus
cuugcuggcgcgcggaga

SEQ ID NO: 3107380 - RNA, 15 nt, Molluscum contagiosum virus
cuuggaagagucgcg

SEQ ID NO: 3107381 - RNA, 21 nt, Molluscum contagiosum virus
cuuggacagcaagcagcgcgc

SEQ ID NO: 3107382 - RNA, 15 nt, Molluscum contagiosum virus
cuuggcaugcgugcu

SEQ ID NO: 3107383 - RNA, 20 nt, Molluscum contagiosum virus
cuuggccaagcuuugcacgc

SEQ ID NO: 3107384 - RNA, 21 nt, Molluscum contagiosum virus
cuuggcgcccgugccgccggc

SEQ ID NO: 3107385 - RNA, 13 nt, Molluscum contagiosum virus
cuuggcgcgccgc

SEQ ID NO: 3107386 - RNA, 20 nt, Molluscum contagiosum virus
cuuggcgcgccgcugcccgc

SEQ ID NO: 3107387 - RNA, 14 nt, Molluscum contagiosum virus
cuugacaggcgcgc

SEQ ID NO: 3107388 - RNA, 14 nt, Molluscum contagiosum virus
cuugagcgcgccgc

SEQ ID NO: 3107389 - RNA, 16 nt, Molluscum contagiosum virus
cuucgucaagcagcgc

SEQ ID NO: 3107390 - RNA, 13 nt, Molluscum contagiosum virus
cuucucgucgaga

SEQ ID NO: 3107391 - RNA, 19 nt, Molluscum contagiosum virus
cuucucugcgaucgcgggc

SEQ ID NO: 3107392 - RNA, 16 nt, Molluscum contagiosum virus
cuggcggcgcacgcga

SEQ ID NO: 3107393 - RNA, 20 nt, Molluscum contagiosum virus
cuggcgauguccaugucgcg

SEQ ID NO: 3107394 - RNA, 16 nt, Molluscum contagiosum virus
cuggcgcgcgccgagc

SEQ ID NO: 3107395 - RNA, 21 nt, Molluscum contagiosum virus
cuggcgcgcggagagcagugc

SEQ ID NO: 3107396 - RNA, 15 nt, Molluscum contagiosum virus
cuucgugcgcggaga

SEQ ID NO: 3107397 - RNA, 14 nt, Molluscum contagiosum virus
cuucguggacgagc

SEQ ID NO: 3107398 - RNA, 15 nt, Molluscum contagiosum virus
cuucguggagcccgu

SEQ ID NO: 3107399 - RNA, 23 nt, Molluscum contagiosum virus
cuucguggcgcugggcgcgccgc

SEQ ID NO: 3107400 - RNA, 14 nt, Molluscum contagiosum virus
cuggcgggcgcggu

SEQ ID NO: 3107401 - RNA, 22 nt, Molluscum contagiosum virus
cuggcucagaacgacaccgcga

SEQ ID NO: 3107402 - RNA, 22 nt, Molluscum contagiosum virus
cuggcuccugugucgcgcgagc

SEQ ID NO: 3107403 - RNA, 14 nt, Molluscum contagiosum virus
cgggccuguccgcg

SEQ ID NO: 3107404 - RNA, 17 nt, Molluscum contagiosum virus
cgggccuguccgcgggc

SEQ ID NO: 3107405 - RNA, 23 nt, Molluscum contagiosum virus
cgggccuguccgcgggcgcacgc

SEQ ID NO: 3107406 - RNA, 13 nt, Molluscum contagiosum virus
cgggcgcgccaac

SEQ ID NO: 3107407 - RNA, 21 nt, Molluscum contagiosum virus
cgggcgcgccaacgacuagcg

SEQ ID NO: 3107408 - RNA, 13 nt, Molluscum contagiosum virus
cgggcgcgcgcca

SEQ ID NO: 3107409 - RNA, 14 nt, Molluscum contagiosum virus
cgggcgcgcgccag

SEQ ID NO: 3107410 - RNA, 15 nt, Molluscum contagiosum virus
cgggcgcgcgccagc

SEQ ID NO: 3107411 - RNA, 15 nt, Molluscum contagiosum virus
cgggcgcgcgcggag

SEQ ID NO: 3107412 - RNA, 14 nt, Molluscum contagiosum virus
cgggcgcgcguacg

SEQ ID NO: 3107413 - RNA, 16 nt, Molluscum contagiosum virus
cgggcgaaagcgccgc

SEQ ID NO: 3107414 - RNA, 18 nt, Molluscum contagiosum virus
cgggcgaaagcgccgcgc

SEQ ID NO: 3107415 - RNA, 22 nt, Molluscum contagiosum virus
cgggcgagagacagcacggcac

SEQ ID NO: 3107416 - RNA, 13 nt, Molluscum contagiosum virus
cggacucgcgagc

SEQ ID NO: 3107417 - RNA, 14 nt, Molluscum contagiosum virus
cggacucgcgagca

SEQ ID NO: 3107418 - RNA, 14 nt, Molluscum contagiosum virus
cgggggcgcuuccc

SEQ ID NO: 3107419 - RNA, 23 nt, Molluscum contagiosum virus
cggggcccaugcucaccgccgag

SEQ ID NO: 3107420 - RNA, 19 nt, Molluscum contagiosum virus
cggggcccucggcgcgccg

SEQ ID NO: 3107421 - RNA, 21 nt, Molluscum contagiosum virus
cggggcccucggcgcgccguc

SEQ ID NO: 3107422 - RNA, 17 nt, Molluscum contagiosum virus
cgguaacgcgcgcgccu

SEQ ID NO: 3107423 - RNA, 13 nt, Molluscum contagiosum virus
cgguaagcgcccc

SEQ ID NO: 3107424 - RNA, 20 nt, Molluscum contagiosum virus
cggguaccgugcgcgugagc

SEQ ID NO: 3107425 - RNA, 11 nt, Molluscum contagiosum virus
cgguacugcug

SEQ ID NO: 3107426 - RNA, 13 nt, Molluscum contagiosum virus
cgguacugcugca

SEQ ID NO: 3107427 - RNA, 15 nt, Molluscum contagiosum virus
cgguacaugcugucc

SEQ ID NO: 3107428 - RNA, 21 nt, Molluscum contagiosum virus
cgggcucgaucugcgccuccg

SEQ ID NO: 3107429 - RNA, 13 nt, Molluscum contagiosum virus
cgggcucgggcag

SEQ ID NO: 3107430 - RNA, 17 nt, Molluscum contagiosum virus
cgggcucgugcuggagc

SEQ ID NO: 3107431 - RNA, 19 nt, Molluscum contagiosum virus
cgggcucuuccaccggcag

SEQ ID NO: 3107432 - RNA, 21 nt, Molluscum contagiosum virus
cgggcugcacgacggucacgc

SEQ ID NO: 3107433 - RNA, 14 nt, Molluscum contagiosum virus
cgggcugcgcggcg

SEQ ID NO: 3107434 - RNA, 18 nt, Molluscum contagiosum virus
cgggcugucgcccggcag

SEQ ID NO: 3107435 - RNA, 14 nt, Molluscum contagiosum virus
cgggcuucgccgcc

SEQ ID NO: 3107436 - RNA, 21 nt, Molluscum contagiosum virus
cgggcuucgcgacgacgagca

SEQ ID NO: 3107437 - RNA, 23 nt, Molluscum contagiosum virus
cgggcuugcucccucgcgcgcag

SEQ ID NO: 3107438 - RNA, 24 nt, Molluscum contagiosum virus
cgggcuugcucccucgcgcgcagc

SEQ ID NO: 3107439 - RNA, 15 nt, Molluscum contagiosum virus
cgggcgugcgcagca

SEQ ID NO: 3107440 - RNA, 20 nt, Molluscum contagiosum virus
cgggcguguccgcgggcgcg

SEQ ID NO: 3107441 - RNA, 14 nt, Molluscum contagiosum virus
cgggcgcggcgucg

SEQ ID NO: 3107442 - RNA, 22 nt, Molluscum contagiosum virus
cgggcgucaagacucgcccgcg

SEQ ID NO: 3107443 - RNA, 14 nt, Molluscum contagiosum virus
cgggcggcgcgccg

SEQ ID NO: 3107444 - RNA, 15 nt, Molluscum contagiosum virus
cgggcggcgcgccgc

SEQ ID NO: 3107445 - RNA, 19 nt, Molluscum contagiosum virus
cgggcgcuauugcgcggcg

SEQ ID NO: 3107446 - RNA, 18 nt, Molluscum contagiosum virus
cgggcgcuccgagcggcu

SEQ ID NO: 3107447 - RNA, 13 nt, Molluscum contagiosum virus
cgggcgcugcacc

SEQ ID NO: 3107448 - RNA, 15 nt, Molluscum contagiosum virus
cgggcgcugcaccgc

SEQ ID NO: 3107449 - RNA, 19 nt, Molluscum contagiosum virus
cgggcgcagacgccgagcg

SEQ ID NO: 3107450 - RNA, 18 nt, Molluscum contagiosum virus
cgggcgccaacacgagcg

SEQ ID NO: 3107451 - RNA, 14 nt, Molluscum contagiosum virus
cgggcgccgcggcu

SEQ ID NO: 3107452 - RNA, 14 nt, Molluscum contagiosum virus
cgggcgccggcguc

SEQ ID NO: 3107453 - RNA, 19 nt, Molluscum contagiosum virus
cggucgacgacgcgcgcac

SEQ ID NO: 3107454 - RNA, 13 nt, Molluscum contagiosum virus
cggucgacgagug

SEQ ID NO: 3107455 - RNA, 23 nt, Molluscum contagiosum virus
cggucgacgagugcgccgcgccc

SEQ ID NO: 3107456 - RNA, 15 nt, Molluscum contagiosum virus
cggucgcccgccgag

SEQ ID NO: 3107457 - RNA, 18 nt, Molluscum contagiosum virus
cggucgcccuccgccgua

SEQ ID NO: 3107458 - RNA, 13 nt, Molluscum contagiosum virus
cggugagcgccgu

SEQ ID NO: 3107459 - RNA, 17 nt, Molluscum contagiosum virus
cggugcagccgcugcug

SEQ ID NO: 3107460 - RNA, 16 nt, Molluscum contagiosum virus
cggugcagcuacugcg

SEQ ID NO: 3107461 - RNA, 14 nt, Molluscum contagiosum virus
cggugcagcugccg

SEQ ID NO: 3107462 - RNA, 18 nt, Molluscum contagiosum virus
cggugcagcugccgcaga

SEQ ID NO: 3107463 - RNA, 23 nt, Molluscum contagiosum virus
cggugcccgccaagagcuggucg

SEQ ID NO: 3107464 - RNA, 17 nt, Molluscum contagiosum virus
cggugccggccgccggc

SEQ ID NO: 3107465 - RNA, 18 nt, Molluscum contagiosum virus
cggugcgggucucggggc

SEQ ID NO: 3107466 - RNA, 16 nt, Molluscum contagiosum virus
cggugagugcgcgcac

SEQ ID NO: 3107467 - RNA, 23 nt, Molluscum contagiosum virus
cgucagccucugugcggcgccgu

SEQ ID NO: 3107468 - RNA, 15 nt, Molluscum contagiosum virus
cgucacggccggcgc

SEQ ID NO: 3107469 - RNA, 14 nt, Molluscum contagiosum virus
cgucacggccuucg

SEQ ID NO: 3107470 - RNA, 14 nt, Molluscum contagiosum virus
cgucacguacucgc

SEQ ID NO: 3107471 - RNA, 15 nt, Molluscum contagiosum virus
cguccgcgcagcucg

SEQ ID NO: 3107472 - RNA, 18 nt, Molluscum contagiosum virus
cguccgcggggcuccucg

SEQ ID NO: 3107473 - RNA, 13 nt, Molluscum contagiosum virus
cguccggcgcucg

SEQ ID NO: 3107474 - RNA, 13 nt, Molluscum contagiosum virus
cgucaugugcgug

SEQ ID NO: 3107475 - RNA, 15 nt, Molluscum contagiosum virus
cguccacaggcgcga

SEQ ID NO: 3107476 - RNA, 15 nt, Molluscum contagiosum virus
cguccacgacgagcc

SEQ ID NO: 3107477 - RNA, 12 nt, Molluscum contagiosum virus
cguccacgcgcc

SEQ ID NO: 3107478 - RNA, 17 nt, Molluscum contagiosum virus
cguccagcugcgcgagc

SEQ ID NO: 3107479 - RNA, 18 nt, Molluscum contagiosum virus
cguccaugugcccgcggc

SEQ ID NO: 3107480 - RNA, 20 nt, Molluscum contagiosum virus
cguccaugugcccgcggcgc

SEQ ID NO: 3107481 - RNA, 19 nt, Molluscum contagiosum virus
cgucgccggacagcucagc

SEQ ID NO: 3107482 - RNA, 15 nt, Molluscum contagiosum virus
cgucgccgcgcccgc

SEQ ID NO: 3107483 - RNA, 17 nt, Molluscum contagiosum virus
cucugggcgucgcacag

SEQ ID NO: 3107484 - RNA, 14 nt, Molluscum contagiosum virus
cucugucucccgcc

SEQ ID NO: 3107485 - RNA, 13 nt, Molluscum contagiosum virus
cucuuccggcccg

SEQ ID NO: 3107486 - RNA, 13 nt, Molluscum contagiosum virus
cucuucggcgucc

SEQ ID NO: 3107487 - RNA, 15 nt, Molluscum contagiosum virus
cgucgagggcgccgg

SEQ ID NO: 3107488 - RNA, 20 nt, Molluscum contagiosum virus
cgucgcacaguucacggcgc

SEQ ID NO: 3107489 - RNA, 21 nt, Molluscum contagiosum virus
cgucgcccggcaggcucccgc

SEQ ID NO: 3107490 - RNA, 19 nt, Molluscum contagiosum virus
cgucgaaguccgucacgga

SEQ ID NO: 3107491 - RNA, 12 nt, Molluscum contagiosum virus
cgucgacggcgc

SEQ ID NO: 3107492 - RNA, 22 nt, Molluscum contagiosum virus
cgucgaccuggaagccgccagc

SEQ ID NO: 3107493 - RNA, 15 nt, Molluscum contagiosum virus
cugcaaagcgcggcc

SEQ ID NO: 3107494 - RNA, 17 nt, Molluscum contagiosum virus
cugaugcccaggcgcgu

SEQ ID NO: 3107495 - RNA, 15 nt, Molluscum contagiosum virus
cugagguuggccagc

SEQ ID NO: 3107496 - RNA, 15 nt, Molluscum contagiosum virus
cugcaacucgcgcug

SEQ ID NO: 3107497 - RNA, 20 nt, Molluscum contagiosum virus
cugcaagaggcgcugucgcg

SEQ ID NO: 3107498 - RNA, 18 nt, Molluscum contagiosum virus
cugcacacaccgcgagca

SEQ ID NO: 3107499 - RNA, 21 nt, Molluscum contagiosum virus
cugagauauacaaagaagcgc

SEQ ID NO: 3107500 - RNA, 21 nt, Molluscum contagiosum virus
cugagauccacgcgugcugcg

SEQ ID NO: 3107501 - RNA, 12 nt, Molluscum contagiosum virus
cugagcgcagca

SEQ ID NO: 3107502 - RNA, 18 nt, Molluscum contagiosum virus
cugagcgcgcugcgccgc

SEQ ID NO: 3107503 - RNA, 13 nt, Molluscum contagiosum virus
cugagcgcggagc

SEQ ID NO: 3107504 - RNA, 20 nt, Molluscum contagiosum virus
cugagcgugucgaagcgcgc

SEQ ID NO: 3107505 - RNA, 23 nt, Molluscum contagiosum virus
cugagcgugucgaagcgcgcagc

SEQ ID NO: 3107506 - RNA, 21 nt, Molluscum contagiosum virus
cugacagcguguucggggccg

SEQ ID NO: 3107507 - RNA, 23 nt, Molluscum contagiosum virus
cugacagcguguucggggccgcg

SEQ ID NO: 3107508 - RNA, 22 nt, Molluscum contagiosum virus
cugacccccuccccagcgccgc

SEQ ID NO: 3107509 - RNA, 21 nt, Molluscum contagiosum virus
cugaccgacggcgacgacagc

SEQ ID NO: 3107510 - RNA, 22 nt, Molluscum contagiosum virus
cugagaagcaaugcgcaaggcc

SEQ ID NO: 3107511 - RNA, 14 nt, Molluscum contagiosum virus
gcccacgcgcaagg

SEQ ID NO: 3107512 - RNA, 13 nt, Molluscum contagiosum virus
gcccagcgccacg

SEQ ID NO: 3107513 - RNA, 15 nt, Molluscum contagiosum virus
gcccagcguggccag

SEQ ID NO: 3107514 - RNA, 21 nt, Molluscum contagiosum virus
gcccaggccauggagcgcccg

SEQ ID NO: 3107515 - RNA, 21 nt, Molluscum contagiosum virus
gcccaucaaggcgcgcaucgc

SEQ ID NO: 3107516 - RNA, 17 nt, Molluscum contagiosum virus
gcccaugcucaccgccg

SEQ ID NO: 3107517 - RNA, 20 nt, Molluscum contagiosum virus
gccccagcaccagguagagc

SEQ ID NO: 3107518 - RNA, 16 nt, Molluscum contagiosum virus
gccaugcuccugaucu

SEQ ID NO: 3107519 - RNA, 14 nt, Molluscum contagiosum virus
gccaugcugcgcga

SEQ ID NO: 3107520 - RNA, 16 nt, Molluscum contagiosum virus
gccauggagcgcccgc

SEQ ID NO: 3107521 - RNA, 19 nt, Molluscum contagiosum virus
gccauggucacgcgcacgc

SEQ ID NO: 3107522 - RNA, 16 nt, Molluscum contagiosum virus
gccaugucugugcgcg

SEQ ID NO: 3107523 - RNA, 22 nt, Molluscum contagiosum virus
gccauguuuccugcggcgcugc

SEQ ID NO: 3107524 - RNA, 22 nt, Molluscum contagiosum virus
gccaguagcgaaugcagugccc

SEQ ID NO: 3107525 - RNA, 15 nt, Molluscum contagiosum virus
gccaguccgcggcgc

SEQ ID NO: 3107526 - RNA, 20 nt, Molluscum contagiosum virus
gccagucgcgacgcgcuugc

SEQ ID NO: 3107527 - RNA, 16 nt, Molluscum contagiosum virus
gccagucgcgccucgc

SEQ ID NO: 3107528 - RNA, 22 nt, Molluscum contagiosum virus
gccaugaacaacauggugcugg

SEQ ID NO: 3107529 - RNA, 22 nt, Molluscum contagiosum virus
gcccacgagcgccagccugugc

SEQ ID NO: 3107530 - RNA, 14 nt, Molluscum contagiosum virus
gccauugugacacg

SEQ ID NO: 3107531 - RNA, 17 nt, Molluscum contagiosum virus
gcccaccuucuugucgc

SEQ ID NO: 3107532 - RNA, 15 nt, Molluscum contagiosum virus
gcccacguugccgcg

SEQ ID NO: 3107533 - RNA, 18 nt, Molluscum contagiosum virus
gcccacguugccgcgcgc

SEQ ID NO: 3107534 - RNA, 19 nt, Molluscum contagiosum virus
gcccacguugccgcgcgcu

SEQ ID NO: 3107535 - RNA, 14 nt, Molluscum contagiosum virus
gcccagcacgcgcg

SEQ ID NO: 3107536 - RNA, 16 nt, Molluscum contagiosum virus
gacggucacgcaagcu

SEQ ID NO: 3107537 - RNA, 14 nt, Molluscum contagiosum virus
gacgugcgcgcugc

SEQ ID NO: 3107538 - RNA, 14 nt, Molluscum contagiosum virus
gacgugcggcacgc

SEQ ID NO: 3107539 - RNA, 23 nt, Molluscum contagiosum virus
gacgugcuccgaguccagcuucu

SEQ ID NO: 3107540 - RNA, 17 nt, Molluscum contagiosum virus
gacgugcuucacgaccu

SEQ ID NO: 3107541 - RNA, 22 nt, Molluscum contagiosum virus
gacguggaccuuggcgcgccgc

SEQ ID NO: 3107542 - RNA, 22 nt, Molluscum contagiosum virus
gacguggauaccaugcucucgc

SEQ ID NO: 3107543 - RNA, 17 nt, Molluscum contagiosum virus
gacguggucgcgcgcgc

SEQ ID NO: 3107544 - RNA, 19 nt, Molluscum contagiosum virus
gacuacgcacggcggacgc

SEQ ID NO: 3107545 - RNA, 18 nt, Molluscum contagiosum virus
gacuacgcgcugcggcgc

SEQ ID NO: 3107546 - RNA, 22 nt, Molluscum contagiosum virus
gccaggcacacgcagugccacg

SEQ ID NO: 3107547 - RNA, 12 nt, Molluscum contagiosum virus
gacucagcaugu

SEQ ID NO: 3107548 - RNA, 19 nt, Molluscum contagiosum virus
gccagcuuggugcgcucga

SEQ ID NO: 3107549 - RNA, 11 nt, Molluscum contagiosum virus
gccaggaacga

SEQ ID NO: 3107550 - RNA, 18 nt, Molluscum contagiosum virus
gccaggugcgaaggcucg

SEQ ID NO: 3107551 - RNA, 19 nt, Molluscum contagiosum virus
gccaggcgccggcgcgcgc

SEQ ID NO: 3107552 - RNA, 15 nt, Molluscum contagiosum virus
gccaggcgcggucgc

SEQ ID NO: 3107553 - RNA, 22 nt, Molluscum contagiosum virus
gccaggcgcggucgcccgccga

SEQ ID NO: 3107554 - RNA, 14 nt, Molluscum contagiosum virus
gccaggcguagcgc

SEQ ID NO: 3107555 - RNA, 15 nt, Molluscum contagiosum virus
gccaggcuaggcgcg

SEQ ID NO: 3107556 - RNA, 11 nt, Molluscum contagiosum virus
gacgucgcggc

SEQ ID NO: 3107557 - RNA, 22 nt, Molluscum contagiosum virus
gacgucgcggccacgcacucgc

SEQ ID NO: 3107558 - RNA, 19 nt, Molluscum contagiosum virus
gacgugaucgcgcaggcgc

SEQ ID NO: 3107559 - RNA, 18 nt, Molluscum contagiosum virus
gacgugcccuacgcgcgc

SEQ ID NO: 3107560 - RNA, 20 nt, Molluscum contagiosum virus
gacgucaaccgggcucucgc

SEQ ID NO: 3107561 - RNA, 23 nt, Molluscum contagiosum virus
gacgucaaccgggcucucgcgga

SEQ ID NO: 3107562 - RNA, 22 nt, Molluscum contagiosum virus
gacguacgagcaggcgcagcgc

SEQ ID NO: 3107563 - RNA, 23 nt, Molluscum contagiosum virus
gacggcugguguuaccgggucgc

SEQ ID NO: 3107564 - RNA, 19 nt, Molluscum contagiosum virus
gacggcuucauccgcgcgc

SEQ ID NO: 3107565 - RNA, 22 nt, Molluscum contagiosum virus
gacgggagagguugcgcggggc

SEQ ID NO: 3107566 - RNA, 13 nt, Molluscum contagiosum virus
gacgggcccgcga

SEQ ID NO: 3107567 - RNA, 17 nt, Molluscum contagiosum virus
gacgggccgccgcccgc

SEQ ID NO: 3107568 - RNA, 22 nt, Molluscum contagiosum virus
gacgggcgcagccacgacucgc

SEQ ID NO: 3107569 - RNA, 12 nt, Molluscum contagiosum virus
gacggugcugcg

SEQ ID NO: 3107570 - RNA, 15 nt, Molluscum contagiosum virus
gacggugcugcgcac

SEQ ID NO: 3107571 - RNA, 15 nt, Molluscum contagiosum virus
gugaccugcgccauc

SEQ ID NO: 3107572 - RNA, 20 nt, Molluscum contagiosum virus
gugacaaucucugcgccgcg

SEQ ID NO: 3107573 - RNA, 23 nt, Molluscum contagiosum virus
gugacaaucucugcgccgcgcgc

SEQ ID NO: 3107574 - RNA, 21 nt, Molluscum contagiosum virus
gugagaaaguucccguccgcg

SEQ ID NO: 3107575 - RNA, 14 nt, Molluscum contagiosum virus
gugacucggccgcg

SEQ ID NO: 3107576 - RNA, 12 nt, Molluscum contagiosum virus
gugaguccgcgg

SEQ ID NO: 3107577 - RNA, 12 nt, Molluscum contagiosum virus
gugagugcgcgc

SEQ ID NO: 3107578 - RNA, 17 nt, Molluscum contagiosum virus
gugcaagcccagcagcg

SEQ ID NO: 3107579 - RNA, 13 nt, Molluscum contagiosum virus
gugcaauuccguc

SEQ ID NO: 3107580 - RNA, 19 nt, Molluscum contagiosum virus
gugcacagcguagcggacg

SEQ ID NO: 3107581 - RNA, 19 nt, Molluscum contagiosum virus
gugcacauugcugcugcag

SEQ ID NO: 3107582 - RNA, 14 nt, Molluscum contagiosum virus
gugcaccagcaccg

SEQ ID NO: 3107583 - RNA, 15 nt, Molluscum contagiosum virus
gugcacgcacgcgcg

SEQ ID NO: 3107584 - RNA, 19 nt, Molluscum contagiosum virus
gugcacgcacgcgcgggca

SEQ ID NO: 3107585 - RNA, 20 nt, Molluscum contagiosum virus
gugcacgcggcgcgugucgc

SEQ ID NO: 3107586 - RNA, 17 nt, Molluscum contagiosum virus
gugcacguccugcgagu

SEQ ID NO: 3107587 - RNA, 17 nt, Molluscum contagiosum virus
gugcacguggcgcacac

SEQ ID NO: 3107588 - RNA, 21 nt, Molluscum contagiosum virus
gugaacgaggcugcugccgcg

SEQ ID NO: 3107589 - RNA, 13 nt, Molluscum contagiosum virus
gucuucuaccgcc

SEQ ID NO: 3107590 - RNA, 15 nt, Molluscum contagiosum virus
gucugggaggugucc

SEQ ID NO: 3107591 - RNA, 15 nt, Molluscum contagiosum virus
gucuggccgggcucg

SEQ ID NO: 3107592 - RNA, 13 nt, Molluscum contagiosum virus
gucugugcgcgag

SEQ ID NO: 3107593 - RNA, 19 nt, Molluscum contagiosum virus
gucguuccggacgugcacg

SEQ ID NO: 3107594 - RNA, 21 nt, Molluscum contagiosum virus
gucuccuccuugauuucgcgc

SEQ ID NO: 3107595 - RNA, 21 nt, Molluscum contagiosum virus
gucucgaaccgaggccgcgcu

SEQ ID NO: 3107596 - RNA, 23 nt, Molluscum contagiosum virus
gucucgagcuuccucaaggcgca

SEQ ID NO: 3107597 - RNA, 14 nt, Molluscum contagiosum virus
gucucgcgcucgcc

SEQ ID NO: 3107598 - RNA, 22 nt, Molluscum contagiosum virus
gucucgcggggcaagcgcgcuc

SEQ ID NO: 3107599 - RNA, 18 nt, Molluscum contagiosum virus
gucucgcucuuccgcgag

SEQ ID NO: 3107600 - RNA, 13 nt, Molluscum contagiosum virus
gucugcaaggccu

SEQ ID NO: 3107601 - RNA, 13 nt, Molluscum contagiosum virus
gucucugcgcgag

SEQ ID NO: 3107602 - RNA, 16 nt, Molluscum contagiosum virus
gugcagcgcgugcgca

SEQ ID NO: 3107603 - RNA, 16 nt, Molluscum contagiosum virus
gugcagcggcgccacg

SEQ ID NO: 3107604 - RNA, 17 nt, Molluscum contagiosum virus
gugcaggaacgcgcgcu

SEQ ID NO: 3107605 - RNA, 13 nt, Molluscum contagiosum virus
gugcauggcacgc

SEQ ID NO: 3107606 - RNA, 18 nt, Molluscum contagiosum virus
gugcauggcacgcgagca

SEQ ID NO: 3107607 - RNA, 22 nt, Molluscum contagiosum virus
gugcauggcggcggccacgcuc

SEQ ID NO: 3107608 - RNA, 13 nt, Molluscum contagiosum virus
gugcccgccaaga

SEQ ID NO: 3107609 - RNA, 13 nt, Molluscum contagiosum virus
gugcccgcgcgcu

SEQ ID NO: 3107610 - RNA, 21 nt, Molluscum contagiosum virus
gugccagagucgccgcugcgc

SEQ ID NO: 3107611 - RNA, 20 nt, Molluscum contagiosum virus
gugccagcguacggcccgaa

SEQ ID NO: 3107612 - RNA, 15 nt, Molluscum contagiosum virus
gugccaucucgcaca

SEQ ID NO: 3107613 - RNA, 18 nt, Molluscum contagiosum virus
gugcccacgcuggcgcgc

SEQ ID NO: 3107614 - RNA, 17 nt, Molluscum contagiosum virus
gugcccaugcucgagcc

SEQ ID NO: 3107615 - RNA, 22 nt, Molluscum contagiosum virus
ggaaucguuccuucugcuagga

SEQ ID NO: 3107616 - RNA, 16 nt, Molluscum contagiosum virus
ggacaaagucgcgcgc

SEQ ID NO: 3107617 - RNA, 17 nt, Molluscum contagiosum virus
ggacaaagucgcgcgcg

SEQ ID NO: 3107618 - RNA, 17 nt, Molluscum contagiosum virus
ggacaacucauagcgcc

SEQ ID NO: 3107619 - RNA, 16 nt, Molluscum contagiosum virus
ggacaagucacugcua

SEQ ID NO: 3107620 - RNA, 13 nt, Molluscum contagiosum virus
ggacaccgcgggc

SEQ ID NO: 3107621 - RNA, 16 nt, Molluscum contagiosum virus
ggacaccgcgggcgug

SEQ ID NO: 3107622 - RNA, 21 nt, Molluscum contagiosum virus
ggacacguugcagcagcacag

SEQ ID NO: 3107623 - RNA, 14 nt, Molluscum contagiosum virus
ggacacucgcggca

SEQ ID NO: 3107624 - RNA, 19 nt, Molluscum contagiosum virus
ggacagagcccgcggcgca

SEQ ID NO: 3107625 - RNA, 22 nt, Molluscum contagiosum virus
ggacagagcccgcggcgcacgg

SEQ ID NO: 3107626 - RNA, 18 nt, Molluscum contagiosum virus
ggacagcaagcagcgcgc

SEQ ID NO: 3107627 - RNA, 22 nt, Molluscum contagiosum virus
ggacagcaugaacucgcugcug

SEQ ID NO: 3107628 - RNA, 15 nt, Molluscum contagiosum virus
ggacagccugcaccg

SEQ ID NO: 3107629 - RNA, 12 nt, Molluscum contagiosum virus
ggaagcgcgugc

SEQ ID NO: 3107630 - RNA, 15 nt, Molluscum contagiosum virus
ggaagcugcacgugc

SEQ ID NO: 3107631 - RNA, 18 nt, Molluscum contagiosum virus
ggaagugcgagccgugac

SEQ ID NO: 3107632 - RNA, 19 nt, Molluscum contagiosum virus
ggaagagcguccgcggugc

SEQ ID NO: 3107633 - RNA, 23 nt, Molluscum contagiosum virus
ggaacgaggucaucuucgugcug

SEQ ID NO: 3107634 - RNA, 16 nt, Molluscum contagiosum virus
ggaacuagugcugcug

SEQ ID NO: 3107635 - RNA, 14 nt, Molluscum contagiosum virus
ggaacucgcgcgcg

SEQ ID NO: 3107636 - RNA, 21 nt, Molluscum contagiosum virus
ggaacucuacgacaugcucgc

SEQ ID NO: 3107637 - RNA, 14 nt, Molluscum contagiosum virus
ggaacugacugcug

SEQ ID NO: 3107638 - RNA, 16 nt, Molluscum contagiosum virus
guacucgcguccgcgc

SEQ ID NO: 3107639 - RNA, 21 nt, Molluscum contagiosum virus
guacuucaucuucaagccgca

SEQ ID NO: 3107640 - RNA, 13 nt, Molluscum contagiosum virus
guacugcugcagg

SEQ ID NO: 3107641 - RNA, 16 nt, Molluscum contagiosum virus
ggaccuaaagcugcug

SEQ ID NO: 3107642 - RNA, 16 nt, Molluscum contagiosum virus
ggaccucaaggaggcg

SEQ ID NO: 3107643 - RNA, 16 nt, Molluscum contagiosum virus
guacguacagugcgcg

SEQ ID NO: 3107644 - RNA, 16 nt, Molluscum contagiosum virus
guacgugcuugcgcgc

SEQ ID NO: 3107645 - RNA, 15 nt, Molluscum contagiosum virus
guagcgugcgccugc

SEQ ID NO: 3107646 - RNA, 18 nt, Molluscum contagiosum virus
guagcuagcucugcgcgc

SEQ ID NO: 3107647 - RNA, 13 nt, Molluscum contagiosum virus
guagguacccgca

SEQ ID NO: 3107648 - RNA, 16 nt, Molluscum contagiosum virus
guagguacccgcaacc

SEQ ID NO: 3107649 - RNA, 16 nt, Molluscum contagiosum virus
guagagcaacaugcug

SEQ ID NO: 3107650 - RNA, 17 nt, Molluscum contagiosum virus
guagagcagcgcuagcc

SEQ ID NO: 3107651 - RNA, 19 nt, Molluscum contagiosum virus
guagcacgaaggacgcgcu

SEQ ID NO: 3107652 - RNA, 14 nt, Molluscum contagiosum virus
guagccgcgacgca

SEQ ID NO: 3107653 - RNA, 17 nt, Molluscum contagiosum virus
guagccgcgacgcaagc

SEQ ID NO: 3107654 - RNA, 18 nt, Molluscum contagiosum virus
guagccgcgacgcaagcg

SEQ ID NO: 3107655 - RNA, 12 nt, Molluscum contagiosum virus
guagccgcgcga

SEQ ID NO: 3107656 - RNA, 23 nt, Molluscum contagiosum virus
guagccuuuguucuuagcagcgc

SEQ ID NO: 3107657 - RNA, 12 nt, Molluscum contagiosum virus
guagcgcgccgc

SEQ ID NO: 3107658 - RNA, 18 nt, Molluscum contagiosum virus
guauacucgacgcgcgcg

SEQ ID NO: 3107659 - RNA, 19 nt, Molluscum contagiosum virus
guauauacuccccgcgcgc

SEQ ID NO: 3107660 - RNA, 20 nt, Molluscum contagiosum virus
guauauacuccccgcgcgcg

SEQ ID NO: 3107661 - RNA, 15 nt, Molluscum contagiosum virus
guaguaguagcgcuc

SEQ ID NO: 3107662 - RNA, 13 nt, Molluscum contagiosum virus
gucacacuacgcu

SEQ ID NO: 3107663 - RNA, 21 nt, Molluscum contagiosum virus
gucaagacucgcccgcgcgcg

SEQ ID NO: 3107664 - RNA, 18 nt, Molluscum contagiosum virus
gucaagcagcgcgccacc

SEQ ID NO: 3107665 - RNA, 19 nt, Molluscum contagiosum virus
gucacgcuggucacgcgcu

SEQ ID NO: 3107666 - RNA, 16 nt, Molluscum contagiosum virus
gucacggccuucgcgc

SEQ ID NO: 3107667 - RNA, 21 nt, Molluscum contagiosum virus
gucgcgcgcuaccugcgcaag

SEQ ID NO: 3107668 - RNA, 22 nt, Molluscum contagiosum virus
gucgcgcgcuaccugcgcaagc

SEQ ID NO: 3107669 - RNA, 16 nt, Molluscum contagiosum virus
gucgcgcuuccgcgag

SEQ ID NO: 3107670 - RNA, 21 nt, Molluscum contagiosum virus
gucacgcaagcuuugugcucg

SEQ ID NO: 3107671 - RNA, 18 nt, Molluscum contagiosum virus
gucacgcgcaaggccgcg

SEQ ID NO: 3107672 - RNA, 18 nt, Molluscum contagiosum virus
gucgggccccugcgcgag

SEQ ID NO: 3107673 - RNA, 14 nt, Molluscum contagiosum virus
gucguaccuguguu

SEQ ID NO: 3107674 - RNA, 21 nt, Molluscum contagiosum virus
gucguagcaaaugcgcugcuc

SEQ ID NO: 3107675 - RNA, 13 nt, Molluscum contagiosum virus
gucguagcggcgg

SEQ ID NO: 3107676 - RNA, 22 nt, Molluscum contagiosum virus
gucgugcuuccugcaaacuuga

SEQ ID NO: 3107677 - RNA, 20 nt, Molluscum contagiosum virus
gucgugcgcguucggaacgc

SEQ ID NO: 3107678 - RNA, 18 nt, Molluscum contagiosum virus
gucggcggcaugcgcgcg

SEQ ID NO: 3107679 - RNA, 16 nt, Molluscum contagiosum virus
gucgcgggcgcgcgcg

SEQ ID NO: 3107680 - RNA, 15 nt, Molluscum contagiosum virus
gccucagccgagcgc

SEQ ID NO: 3107681 - RNA, 22 nt, Molluscum contagiosum virus
gccuccgaggacgacgccgagc

SEQ ID NO: 3107682 - RNA, 14 nt, Molluscum contagiosum virus
gccucgucguccac

SEQ ID NO: 3107683 - RNA, 15 nt, Molluscum contagiosum virus
gccucgagcacgccu

SEQ ID NO: 3107684 - RNA, 16 nt, Molluscum contagiosum virus
gccucgagcacgccuc

SEQ ID NO: 3107685 - RNA, 18 nt, Molluscum contagiosum virus
gccugccgcgagcacugg

SEQ ID NO: 3107686 - RNA, 13 nt, Molluscum contagiosum virus
gccugcacgcgca

SEQ ID NO: 3107687 - RNA, 12 nt, Molluscum contagiosum virus
gccugcacggcu

SEQ ID NO: 3107688 - RNA, 16 nt, Molluscum contagiosum virus
gccugagaagcuguac

SEQ ID NO: 3107689 - RNA, 14 nt, Molluscum contagiosum virus
gccugcacacgcgu

SEQ ID NO: 3107690 - RNA, 23 nt, Molluscum contagiosum virus
gccucugccagccgcucguccag

SEQ ID NO: 3107691 - RNA, 15 nt, Molluscum contagiosum virus
gccucguucacggcu

SEQ ID NO: 3107692 - RNA, 16 nt, Molluscum contagiosum virus
gccucguucacggcua

SEQ ID NO: 3107693 - RNA, 20 nt, Molluscum contagiosum virus
gcgggaggcucucgagcacu

SEQ ID NO: 3107694 - RNA, 16 nt, Molluscum contagiosum virus
gcgggcaagcagggcc

SEQ ID NO: 3107695 - RNA, 22 nt, Molluscum contagiosum virus
gcgggcacggcuaccacgagca

SEQ ID NO: 3107696 - RNA, 16 nt, Molluscum contagiosum virus
gcgggcacgggcaccg

SEQ ID NO: 3107697 - RNA, 20 nt, Molluscum contagiosum virus
gcgggcacgugcugcugcgg

SEQ ID NO: 3107698 - RNA, 22 nt, Molluscum contagiosum virus
gcgggaccugguucaugcuggc

SEQ ID NO: 3107699 - RNA, 22 nt, Molluscum contagiosum virus
gccugcggacccgccggugcuu

SEQ ID NO: 3107700 - RNA, 22 nt, Molluscum contagiosum virus
gccugcuggcggggaaagcuga

SEQ ID NO: 3107701 - RNA, 21 nt, Molluscum contagiosum virus
gcggcuuuaacguuagcacua

SEQ ID NO: 3107702 - RNA, 17 nt, Molluscum contagiosum virus
gcggcuuucucacgccc

SEQ ID NO: 3107703 - RNA, 20 nt, Molluscum contagiosum virus
gcgggaagaggacgccggca

SEQ ID NO: 3107704 - RNA, 20 nt, Molluscum contagiosum virus
gcgggccaguacuacucggc

SEQ ID NO: 3107705 - RNA, 22 nt, Molluscum contagiosum virus
gcgggccaguacuacucggcgc

SEQ ID NO: 3107706 - RNA, 15 nt, Molluscum contagiosum virus
gcgggccgcgcgcac

SEQ ID NO: 3107707 - RNA, 13 nt, Molluscum contagiosum virus
gcgggccugcgcc

SEQ ID NO: 3107708 - RNA, 14 nt, Molluscum contagiosum virus
gcgggccugcgccc

SEQ ID NO: 3107709 - RNA, 17 nt, Molluscum contagiosum virus
gcgggccugcgcccgca

SEQ ID NO: 3107710 - RNA, 19 nt, Molluscum contagiosum virus
gcgggccuguaccugcgac

SEQ ID NO: 3107711 - RNA, 20 nt, Molluscum contagiosum virus
gcgggccuguaccugcgaca

SEQ ID NO: 3107712 - RNA, 17 nt, Molluscum contagiosum virus
gcgggccuguccgcggg

SEQ ID NO: 3107713 - RNA, 18 nt, Molluscum contagiosum virus
gcgggccuguccgcgggc

SEQ ID NO: 3107714 - RNA, 20 nt, Molluscum contagiosum virus
gcgggccuguccgcgggcgc

SEQ ID NO: 3107715 - RNA, 18 nt, Molluscum contagiosum virus
gcgggcgaaagcgccgcg

SEQ ID NO: 3107716 - RNA, 19 nt, Molluscum contagiosum virus
gcgggcgaaagcgccgcgc

SEQ ID NO: 3107717 - RNA, 13 nt, Molluscum contagiosum virus
gcgggcgcaggcc

SEQ ID NO: 3107718 - RNA, 14 nt, Molluscum contagiosum virus
gcgggcgcaggccc

SEQ ID NO: 3107719 - RNA, 22 nt, Molluscum contagiosum virus
gcguguacucgaaggugcucag

SEQ ID NO: 3107720 - RNA, 22 nt, Molluscum contagiosum virus
gcguguaucaugcacaugcgcu

SEQ ID NO: 3107721 - RNA, 18 nt, Molluscum contagiosum virus
gcgugucgcggagcaacg

SEQ ID NO: 3107722 - RNA, 23 nt, Molluscum contagiosum virus
gcgugucgcggagcaacgcgacc

SEQ ID NO: 3107723 - RNA, 16 nt, Molluscum contagiosum virus
gcgugcuucacgugcu

SEQ ID NO: 3107724 - RNA, 19 nt, Molluscum contagiosum virus
gcgugcuuguagcgcaagg

SEQ ID NO: 3107725 - RNA, 22 nt, Molluscum contagiosum virus
gcguggacagcaucccugccac

SEQ ID NO: 3107726 - RNA, 22 nt, Molluscum contagiosum virus
gcguggcuuugucggugugcuu

SEQ ID NO: 3107727 - RNA, 19 nt, Molluscum contagiosum virus
gcguggugcuuacugcggg

SEQ ID NO: 3107728 - RNA, 18 nt, Molluscum contagiosum virus
gcgugguguccacgcgcg

SEQ ID NO: 3107729 - RNA, 17 nt, Molluscum contagiosum virus
gcgugguguucgccggc

SEQ ID NO: 3107730 - RNA, 16 nt, Molluscum contagiosum virus
gcguucgcagugcccg

SEQ ID NO: 3107731 - RNA, 17 nt, Molluscum contagiosum virus
gcguucuccaggaacgc

SEQ ID NO: 3107732 - RNA, 19 nt, Molluscum contagiosum virus
gcguuggucuugugacccg

SEQ ID NO: 3107733 - RNA, 13 nt, Molluscum contagiosum virus
gcguuguccgcgu

SEQ ID NO: 3107734 - RNA, 16 nt, Molluscum contagiosum virus
gcguucuucguggcgc

SEQ ID NO: 3107735 - RNA, 19 nt, Molluscum contagiosum virus
gcguguuccggcagcgccg

SEQ ID NO: 3107736 - RNA, 15 nt, Molluscum contagiosum virus
gcguuccaggaacgc

SEQ ID NO: 3107737 - RNA, 20 nt, Molluscum contagiosum virus
gcguggacuuuggcgugacc

SEQ ID NO: 3107738 - RNA, 16 nt, Molluscum contagiosum virus
gcgugucugcgcucgc

SEQ ID NO: 3107739 - RNA, 16 nt, Molluscum contagiosum virus
gcgugucuggagccca

SEQ ID NO: 3107740 - RNA, 18 nt, Molluscum contagiosum virus
gcgggugccgccgugggc

SEQ ID NO: 3107741 - RNA, 18 nt, Molluscum contagiosum virus
gcgugcgcuggcgcgcgc

SEQ ID NO: 3107742 - RNA, 17 nt, Molluscum contagiosum virus
gcgugcguacgugcacg

SEQ ID NO: 3107743 - RNA, 13 nt, Molluscum contagiosum virus
gcgugcgugcaca

SEQ ID NO: 3107744 - RNA, 14 nt, Molluscum contagiosum virus
gcgugcgugcacag

SEQ ID NO: 3107745 - RNA, 14 nt, Molluscum contagiosum virus
gcgugcucacgccc

SEQ ID NO: 3107746 - RNA, 15 nt, Molluscum contagiosum virus
gcgugcucacgcccu

SEQ ID NO: 3107747 - RNA, 17 nt, Molluscum contagiosum virus
gcgugcucgguagcgug

SEQ ID NO: 3107748 - RNA, 21 nt, Molluscum contagiosum virus
gcgugcucgguagcguggagc

SEQ ID NO: 3107749 - RNA, 16 nt, Molluscum contagiosum virus
gcgugcugcgcggcgc

SEQ ID NO: 3107750 - RNA, 14 nt, Molluscum contagiosum virus
gcgggcggcggccc

SEQ ID NO: 3107751 - RNA, 16 nt, Molluscum contagiosum virus
gcgggcggcgucgcgc

SEQ ID NO: 3107752 - RNA, 21 nt, Molluscum contagiosum virus
gcggggcucguccucgggcgc

SEQ ID NO: 3107753 - RNA, 16 nt, Molluscum contagiosum virus
gcggggcugcuggcgg

SEQ ID NO: 3107754 - RNA, 17 nt, Molluscum contagiosum virus
gcgggcguguccgcggg

SEQ ID NO: 3107755 - RNA, 20 nt, Molluscum contagiosum virus
gcgggcguguccgcgggcgc

SEQ ID NO: 3107756 - RNA, 19 nt, Molluscum contagiosum virus
gcgggcucuuccaccggca

SEQ ID NO: 3107757 - RNA, 23 nt, Molluscum contagiosum virus
gcggggacucucccgucgccgga

SEQ ID NO: 3107758 - RNA, 15 nt, Molluscum contagiosum virus
gcgggcgccgggcgc

SEQ ID NO: 3107759 - RNA, 12 nt, Molluscum contagiosum virus
gcgggcgcgcac

SEQ ID NO: 3107760 - RNA, 15 nt, Molluscum contagiosum virus
gcgggcgcgcgcgga

SEQ ID NO: 3107761 - RNA, 22 nt, Molluscum contagiosum virus
gcuccgcgcccggcgggcacau

SEQ ID NO: 3107762 - RNA, 18 nt, Molluscum contagiosum virus
gcuccgcggaggccaagc

SEQ ID NO: 3107763 - RNA, 15 nt, Molluscum contagiosum virus
gcuccgcuggacccc

SEQ ID NO: 3107764 - RNA, 23 nt, Molluscum contagiosum virus
gcuccgcuggaccccgagcugcg

SEQ ID NO: 3107765 - RNA, 23 nt, Molluscum contagiosum virus
gcuccggcuuagcuggcgcccgu

SEQ ID NO: 3107766 - RNA, 13 nt, Molluscum contagiosum virus
gcuccgugcugcg

SEQ ID NO: 3107767 - RNA, 22 nt, Molluscum contagiosum virus
gcuccuauaaauggccgcgccc

SEQ ID NO: 3107768 - RNA, 17 nt, Molluscum contagiosum virus
gcuccucgcacgggcgc

SEQ ID NO: 3107769 - RNA, 14 nt, Molluscum contagiosum virus
gcuacgcagcgcgc

SEQ ID NO: 3107770 - RNA, 15 nt, Molluscum contagiosum virus
gcucccucgcgcgca

SEQ ID NO: 3107771 - RNA, 19 nt, Molluscum contagiosum virus
gcucgaacgcgcgugcgcg

SEQ ID NO: 3107772 - RNA, 20 nt, Molluscum contagiosum virus
gcucgacacugugcuggcgc

SEQ ID NO: 3107773 - RNA, 15 nt, Molluscum contagiosum virus
gcucgacgggcgcag

SEQ ID NO: 3107774 - RNA, 15 nt, Molluscum contagiosum virus
gcuaccugcgcaagc

SEQ ID NO: 3107775 - RNA, 19 nt, Molluscum contagiosum virus
gcuaccugguggagcacuu

SEQ ID NO: 3107776 - RNA, 22 nt, Molluscum contagiosum virus
gcuacgacgacaugcacacgca

SEQ ID NO: 3107777 - RNA, 22 nt, Molluscum contagiosum virus
gcuacgaggccuacgugcugcg

SEQ ID NO: 3107778 - RNA, 22 nt, Molluscum contagiosum virus
gcuccgcacguggagucacgac

SEQ ID NO: 3107779 - RNA, 16 nt, Molluscum contagiosum virus
gcuccgccaacgcgga

SEQ ID NO: 3107780 - RNA, 21 nt, Molluscum contagiosum virus
gcuccgccaacgcggacgcgc

SEQ ID NO: 3107781 - RNA, 16 nt, Molluscum contagiosum virus
gcuaaucugccgcggc

SEQ ID NO: 3107782 - RNA, 16 nt, Molluscum contagiosum virus
gcuaccagcucgcgca

SEQ ID NO: 3107783 - RNA, 16 nt, Molluscum contagiosum virus
gcuacccguugcugcg

SEQ ID NO: 3107784 - RNA, 21 nt, Molluscum contagiosum virus
gcuaccgcagccacggccgcg

SEQ ID NO: 3107785 - RNA, 15 nt, Molluscum contagiosum virus
gcuaccgcgcgcgca

SEQ ID NO: 3107786 - RNA, 16 nt, Molluscum contagiosum virus
gcuaccgcgcgcgcaa

SEQ ID NO: 3107787 - RNA, 14 nt, Molluscum contagiosum virus
gcucggaguccgcg

SEQ ID NO: 3107788 - RNA, 16 nt, Molluscum contagiosum virus
gcugcccuuuagcgug

SEQ ID NO: 3107789 - RNA, 20 nt, Molluscum contagiosum virus
gcugcccuuuagcguggcgc

SEQ ID NO: 3107790 - RNA, 21 nt, Molluscum contagiosum virus
gcugcccuuuagcguggcgcg

SEQ ID NO: 3107791 - RNA, 15 nt, Molluscum contagiosum virus
gcugccgcgcgcgcc

SEQ ID NO: 3107792 - RNA, 20 nt, Molluscum contagiosum virus
gcucgcggcuaggacuagca

SEQ ID NO: 3107793 - RNA, 21 nt, Molluscum contagiosum virus
gcucgcuuagccaacagcgca

SEQ ID NO: 3107794 - RNA, 23 nt, Molluscum contagiosum virus
gcucgcuugccggcggcgcaagc

SEQ ID NO: 3107795 - RNA, 16 nt, Molluscum contagiosum virus
gcucggaaagagcgcg

SEQ ID NO: 3107796 - RNA, 16 nt, Molluscum contagiosum virus
gcucggaagagcgucc

SEQ ID NO: 3107797 - RNA, 15 nt, Molluscum contagiosum virus
gcucggacacacgca

SEQ ID NO: 3107798 - RNA, 14 nt, Molluscum contagiosum virus
gcucgcggugccgg

SEQ ID NO: 3107799 - RNA, 15 nt, Molluscum contagiosum virus
gcucgcggugccgga

SEQ ID NO: 3107800 - RNA, 14 nt, Molluscum contagiosum virus
gcucgcgugccgcg

SEQ ID NO: 3107801 - RNA, 20 nt, Molluscum contagiosum virus
gcucgcgugccgcggacgcc

SEQ ID NO: 3107802 - RNA, 18 nt, Molluscum contagiosum virus
gcucgcgugcgugcugcg

SEQ ID NO: 3107803 - RNA, 18 nt, Molluscum contagiosum virus
gcucgcuaaucugccgcg

SEQ ID NO: 3107804 - RNA, 14 nt, Molluscum contagiosum virus
gcucgccgcgcgcc

SEQ ID NO: 3107805 - RNA, 18 nt, Molluscum contagiosum virus
gcucgcgacgugcgcgcu

SEQ ID NO: 3107806 - RNA, 14 nt, Molluscum contagiosum virus
gcucgcgagugugc

SEQ ID NO: 3107807 - RNA, 18 nt, Molluscum contagiosum virus
gcucgcgcaaguccagcg

SEQ ID NO: 3107808 - RNA, 22 nt, Molluscum contagiosum virus
gcucgcgcaaguccagcgcgcu

SEQ ID NO: 3107809 - RNA, 23 nt, Molluscum contagiosum virus
gcucgcgcaauacugcgggcugu

SEQ ID NO: 3107810 - RNA, 15 nt, Molluscum contagiosum virus
gcucgcgcacgcgca

SEQ ID NO: 3107811 - RNA, 18 nt, Molluscum contagiosum virus
gcucgcgcaucugccgcg

SEQ ID NO: 3107812 - RNA, 22 nt, Molluscum contagiosum virus
gcucgcgccugaaccugggcgc

SEQ ID NO: 3107813 - RNA, 13 nt, Molluscum contagiosum virus
gcucgcgcgcaag

SEQ ID NO: 3107814 - RNA, 12 nt, Molluscum contagiosum virus
gcucgcgcgcau

SEQ ID NO: 3107815 - RNA, 23 nt, Molluscum contagiosum virus
gcucgcgcgcaugcucgcgcucu

SEQ ID NO: 3107816 - RNA, 15 nt, Molluscum contagiosum virus
gcucgcgcgugcucg

SEQ ID NO: 3107817 - RNA, 12 nt, Molluscum contagiosum virus
gcucgcggaggg

SEQ ID NO: 3107818 - RNA, 12 nt, Molluscum contagiosum virus
gcucgagaacga

SEQ ID NO: 3107819 - RNA, 15 nt, Molluscum contagiosum virus
gcucgagcgcgcgcc

SEQ ID NO: 3107820 - RNA, 21 nt, Molluscum contagiosum virus
gcucgagggcgccgugcugcg

SEQ ID NO: 3107821 - RNA, 15 nt, Molluscum contagiosum virus
gcucgcacacgugca

SEQ ID NO: 3107822 - RNA, 18 nt, Molluscum contagiosum virus
gcucgcacccgcgccgcg

SEQ ID NO: 3107823 - RNA, 19 nt, Molluscum contagiosum virus
gcucgcacuugccgggcga

SEQ ID NO: 3107824 - RNA, 22 nt, Molluscum contagiosum virus
gcucgcagccuccgugcgccag

SEQ ID NO: 3107825 - RNA, 19 nt, Molluscum contagiosum virus
gcucgcaggcggugggcgc

SEQ ID NO: 3107826 - RNA, 15 nt, Molluscum contagiosum virus
gcucgccgcacgcga

SEQ ID NO: 3107827 - RNA, 15 nt, Molluscum contagiosum virus
gcuuucucacgcgcu

SEQ ID NO: 3107828 - RNA, 16 nt, Molluscum contagiosum virus
gcuuugucgcgaacgc

SEQ ID NO: 3107829 - RNA, 22 nt, Molluscum contagiosum virus
ggaaaccucaccucugcgcggc

SEQ ID NO: 3107830 - RNA, 23 nt, Molluscum contagiosum virus
ggaaagauauacaccaggcgcgu

SEQ ID NO: 3107831 - RNA, 12 nt, Molluscum contagiosum virus
ggaaagcgcaca

SEQ ID NO: 3107832 - RNA, 22 nt, Molluscum contagiosum virus
ggaaagcuggcgggugccgugc

SEQ ID NO: 3107833 - RNA, 21 nt, Molluscum contagiosum virus
ggaaaacgcccgagcgcgugu

SEQ ID NO: 3107834 - RNA, 22 nt, Molluscum contagiosum virus
ggaaaauccgcgcccgcgcggc

SEQ ID NO: 3107835 - RNA, 24 nt, Molluscum contagiosum virus
ggaacaucugcaacucgcgcugca

SEQ ID NO: 3107836 - RNA, 19 nt, Molluscum contagiosum virus
ggaacaccacacgcgcggc

SEQ ID NO: 3107837 - RNA, 22 nt, Molluscum contagiosum virus
gcuggaccccgagcugcggcgc

SEQ ID NO: 3107838 - RNA, 18 nt, Molluscum contagiosum virus
gcuggacgggcacgagca

SEQ ID NO: 3107839 - RNA, 22 nt, Molluscum contagiosum virus
gcuggacgggcacgagcacguc

SEQ ID NO: 3107840 - RNA, 13 nt, Molluscum contagiosum virus
gcuggacgugggc

SEQ ID NO: 3107841 - RNA, 21 nt, Molluscum contagiosum virus
gcuggacuuccugcugcgcag

SEQ ID NO: 3107842 - RNA, 19 nt, Molluscum contagiosum virus
gcuggagaaagaagugugc

SEQ ID NO: 3107843 - RNA, 13 nt, Molluscum contagiosum virus
gcuggagcacgac

SEQ ID NO: 3107844 - RNA, 12 nt, Molluscum contagiosum virus
gcuggagcagac

SEQ ID NO: 3107845 - RNA, 17 nt, Molluscum contagiosum virus
gcuggagcgagugcgcg

SEQ ID NO: 3107846 - RNA, 22 nt, Molluscum contagiosum virus
gcuggagcgagugcgcgugcgc

SEQ ID NO: 3107847 - RNA, 18 nt, Molluscum contagiosum virus
gcuggagggcacgcugca

SEQ ID NO: 3107848 - RNA, 15 nt, Molluscum contagiosum virus
gcuggcaccgggcgc

SEQ ID NO: 3107849 - RNA, 12 nt, Molluscum contagiosum virus
gcuggcacgcga

SEQ ID NO: 3107850 - RNA, 23 nt, Molluscum contagiosum virus
gcuggcacggccggcgccgcgca

SEQ ID NO: 3107851 - RNA, 17 nt, Molluscum contagiosum virus
gcugcuucgcgaccacg

SEQ ID NO: 3107852 - RNA, 19 nt, Molluscum contagiosum virus
gcugcuguuucugugucac

SEQ ID NO: 3107853 - RNA, 14 nt, Molluscum contagiosum virus
gcuggccgugcccg

SEQ ID NO: 3107854 - RNA, 23 nt, Molluscum contagiosum virus
gcuggcgaaaccugggcgccgcg

SEQ ID NO: 3107855 - RNA, 15 nt, Molluscum contagiosum virus
gcuggcgagcacguc

SEQ ID NO: 3107856 - RNA, 16 nt, Molluscum contagiosum virus
gcugcgcacgugcgcg

SEQ ID NO: 3107857 - RNA, 16 nt, Molluscum contagiosum virus
gcugcgccacugccac

SEQ ID NO: 3107858 - RNA, 15 nt, Molluscum contagiosum virus
gcugcgccggcugcg

SEQ ID NO: 3107859 - RNA, 18 nt, Molluscum contagiosum virus
gcugcgcgagcgcgcgcu

SEQ ID NO: 3107860 - RNA, 16 nt, Molluscum contagiosum virus
gcugcgcgccgccgac

SEQ ID NO: 3107861 - RNA, 13 nt, Molluscum contagiosum virus
gcugcgcgccgcg

SEQ ID NO: 3107862 - RNA, 12 nt, Molluscum contagiosum virus
gcugcgcgcgcu

SEQ ID NO: 3107863 - RNA, 18 nt, Molluscum contagiosum virus
gcugcgcgcgcucgcgca

SEQ ID NO: 3107864 - RNA, 22 nt, Molluscum contagiosum virus
gcugcgcggcgccgcagcacgc

SEQ ID NO: 3107865 - RNA, 19 nt, Molluscum contagiosum virus
gcugcgcucggcgcgcgcc

SEQ ID NO: 3107866 - RNA, 19 nt, Molluscum contagiosum virus
gcugcgcuggaugcugcuc

SEQ ID NO: 3107867 - RNA, 20 nt, Molluscum contagiosum virus
gcugcgcuucgccgcgcgcg

SEQ ID NO: 3107868 - RNA, 20 nt, Molluscum contagiosum virus
gcugcgcuucuauugccgcg

SEQ ID NO: 3107869 - RNA, 23 nt, Molluscum contagiosum virus
gcugcggacgcgggccgcgcgca

SEQ ID NO: 3107870 - RNA, 13 nt, Molluscum contagiosum virus
gcugcggcgcucg

SEQ ID NO: 3107871 - RNA, 15 nt, Molluscum contagiosum virus
gcugccgcugcgcga

SEQ ID NO: 3107872 - RNA, 16 nt, Molluscum contagiosum virus
gcugccgcugcgcgac

SEQ ID NO: 3107873 - RNA, 18 nt, Molluscum contagiosum virus
gcugccgcuucgugcgcg

SEQ ID NO: 3107874 - RNA, 12 nt, Molluscum contagiosum virus
gcugcgugcgcg

SEQ ID NO: 3107875 - RNA, 14 nt, Molluscum contagiosum virus
gcugcgugugccgg

SEQ ID NO: 3107876 - RNA, 20 nt, Molluscum contagiosum virus
gcugcuacaagcggugcagc

SEQ ID NO: 3107877 - RNA, 19 nt, Molluscum contagiosum virus
gcugcuagagaaccugugc

SEQ ID NO: 3107878 - RNA, 14 nt, Molluscum contagiosum virus
gcugcugcgcacgu

SEQ ID NO: 3107879 - RNA, 15 nt, Molluscum contagiosum virus
gcugcugcgcgcgcu

SEQ ID NO: 3107880 - RNA, 14 nt, Molluscum contagiosum virus
gcugcugcucgcac

SEQ ID NO: 3107881 - RNA, 21 nt, Molluscum contagiosum virus
gcugcuggugcucgccugcau

SEQ ID NO: 3107882 - RNA, 21 nt, Molluscum contagiosum virus
gcugcucuacuuccacgagcu

SEQ ID NO: 3107883 - RNA, 16 nt, Molluscum contagiosum virus
gcugcucugcgugcuu

SEQ ID NO: 3107884 - RNA, 16 nt, Molluscum contagiosum virus
gcugccgucgcgcgcu

SEQ ID NO: 3107885 - RNA, 14 nt, Molluscum contagiosum virus
gcccuucuugacgc

SEQ ID NO: 3107886 - RNA, 22 nt, Molluscum contagiosum virus
gcccuucuugacgcgagacugu

SEQ ID NO: 3107887 - RNA, 22 nt, Molluscum contagiosum virus
gccgacgccuuccugcuggcgc

SEQ ID NO: 3107888 - RNA, 18 nt, Molluscum contagiosum virus
gccgaagucgcagcagcg

SEQ ID NO: 3107889 - RNA, 15 nt, Molluscum contagiosum virus
gccgaaucgucggca

SEQ ID NO: 3107890 - RNA, 15 nt, Molluscum contagiosum virus
gccgugucggcaccg

SEQ ID NO: 3107891 - RNA, 14 nt, Molluscum contagiosum virus
gccgugggcgccgc

SEQ ID NO: 3107892 - RNA, 16 nt, Molluscum contagiosum virus
gccgugguacacguag

SEQ ID NO: 3107893 - RNA, 23 nt, Molluscum contagiosum virus
gccuacgagcacauacacgcgca

SEQ ID NO: 3107894 - RNA, 16 nt, Molluscum contagiosum virus
gccuacgaggugcgcg

SEQ ID NO: 3107895 - RNA, 13 nt, Molluscum contagiosum virus
gccuacguggcgg

SEQ ID NO: 3107896 - RNA, 13 nt, Molluscum contagiosum virus
gccuagagcuggc

SEQ ID NO: 3107897 - RNA, 22 nt, Molluscum contagiosum virus
gccuagagcuggcaccgggcgc

SEQ ID NO: 3107898 - RNA, 19 nt, Molluscum contagiosum virus
gccggcgcccgcgugcacc

SEQ ID NO: 3107899 - RNA, 20 nt, Molluscum contagiosum virus
gccggcgcccgcgugcaccc

SEQ ID NO: 3107900 - RNA, 22 nt, Molluscum contagiosum virus
gccggcgcgcgcgcgcaggcuc

SEQ ID NO: 3107901 - RNA, 13 nt, Molluscum contagiosum virus
gccggcgcggcga

SEQ ID NO: 3107902 - RNA, 16 nt, Molluscum contagiosum virus
gccggcgcgugagcgc

SEQ ID NO: 3107903 - RNA, 21 nt, Molluscum contagiosum virus
gccggcgcuucuacugcgcac

SEQ ID NO: 3107904 - RNA, 22 nt, Molluscum contagiosum virus
gccgugcugucucucgcccgac

SEQ ID NO: 3107905 - RNA, 14 nt, Molluscum contagiosum virus
gccguggcgugcuu

SEQ ID NO: 3107906 - RNA, 17 nt, Molluscum contagiosum virus
gccggccuuguucgcgc

SEQ ID NO: 3107907 - RNA, 23 nt, Molluscum contagiosum virus
gccggcaacgcugccgcuggcgc

SEQ ID NO: 3107908 - RNA, 16 nt, Molluscum contagiosum virus
gccggaacucgcgcgc

SEQ ID NO: 3107909 - RNA, 20 nt, Molluscum contagiosum virus
gccggaccagauccgggcgc

SEQ ID NO: 3107910 - RNA, 20 nt, Molluscum contagiosum virus
gccggcacccgugcgcgcgc

SEQ ID NO: 3107911 - RNA, 13 nt, Molluscum contagiosum virus
gccggccccgcga

SEQ ID NO: 3107912 - RNA, 14 nt, Molluscum contagiosum virus
gccggccgccggcg

SEQ ID NO: 3107913 - RNA, 15 nt, Molluscum contagiosum virus
gccggccgccggcgc

SEQ ID NO: 3107914 - RNA, 21 nt, Molluscum contagiosum virus
gccgcuggugggcgugcggcg

SEQ ID NO: 3107915 - RNA, 15 nt, Molluscum contagiosum virus
gccgcuucgggcuca

SEQ ID NO: 3107916 - RNA, 15 nt, Molluscum contagiosum virus
gccgcuucgugcgcg

SEQ ID NO: 3107917 - RNA, 19 nt, Molluscum contagiosum virus
gccgcuucgugcgcggaga

SEQ ID NO: 3107918 - RNA, 15 nt, Molluscum contagiosum virus
gccgcuucuugacgc

SEQ ID NO: 3107919 - RNA, 17 nt, Molluscum contagiosum virus
gccgcuugaaggacgcg

SEQ ID NO: 3107920 - RNA, 12 nt, Molluscum contagiosum virus
gccgcugcgcau

SEQ ID NO: 3107921 - RNA, 13 nt, Molluscum contagiosum virus
gccgcugcgccgc

SEQ ID NO: 3107922 - RNA, 17 nt, Molluscum contagiosum virus
gccgcugcgccgccagc

SEQ ID NO: 3107923 - RNA, 13 nt, Molluscum contagiosum virus
gccgcugcgcgac

SEQ ID NO: 3107924 - RNA, 18 nt, Molluscum contagiosum virus
gccgcugcgcuugcucac

SEQ ID NO: 3107925 - RNA, 13 nt, Molluscum contagiosum virus
gccgcuggacgcc

SEQ ID NO: 3107926 - RNA, 14 nt, Molluscum contagiosum virus
gccgcuggacgccu

SEQ ID NO: 3107927 - RNA, 19 nt, Molluscum contagiosum virus
gccgcucguccagcugcgc

SEQ ID NO: 3107928 - RNA, 16 nt, Molluscum contagiosum virus
gccgcucgucgcugcg

SEQ ID NO: 3107929 - RNA, 19 nt, Molluscum contagiosum virus
gccgcucgcaagaguucaa

SEQ ID NO: 3107930 - RNA, 17 nt, Molluscum contagiosum virus
gccgcucggcccgcgga

SEQ ID NO: 3107931 - RNA, 16 nt, Molluscum contagiosum virus
gccgcugcccgcgcac

SEQ ID NO: 3107932 - RNA, 19 nt, Molluscum contagiosum virus
gccgcugccaacgcggacc

SEQ ID NO: 3107933 - RNA, 21 nt, Molluscum contagiosum virus
gccgcacgcugcugcgugcgc

SEQ ID NO: 3107934 - RNA, 14 nt, Molluscum contagiosum virus
gccgcacggcgccc

SEQ ID NO: 3107935 - RNA, 23 nt, Molluscum contagiosum virus
gccgcagagccgcgaaagcgucg

SEQ ID NO: 3107936 - RNA, 20 nt, Molluscum contagiosum virus
gccgcagcgcuggagcuggc

SEQ ID NO: 3107937 - RNA, 16 nt, Molluscum contagiosum virus
gccgcaggcgcgcgcc

SEQ ID NO: 3107938 - RNA, 17 nt, Molluscum contagiosum virus
gccgcagugcucgcaca

SEQ ID NO: 3107939 - RNA, 14 nt, Molluscum contagiosum virus
gccgccaccucggc

SEQ ID NO: 3107940 - RNA, 13 nt, Molluscum contagiosum virus
gccgccagcgacg

SEQ ID NO: 3107941 - RNA, 22 nt, Molluscum contagiosum virus
gccgccagcuccgcgcggcgcu

SEQ ID NO: 3107942 - RNA, 12 nt, Molluscum contagiosum virus
gccgcgugcccg

SEQ ID NO: 3107943 - RNA, 13 nt, Molluscum contagiosum virus
gccgcgugcgccg

SEQ ID NO: 3107944 - RNA, 14 nt, Molluscum contagiosum virus
gccgcgugcgcgcg

SEQ ID NO: 3107945 - RNA, 13 nt, Molluscum contagiosum virus
gccgcgugcucgu

SEQ ID NO: 3107946 - RNA, 15 nt, Molluscum contagiosum virus
gccgcgugcucgugu

SEQ ID NO: 3107947 - RNA, 11 nt, Molluscum contagiosum virus
gccgcgugcug

SEQ ID NO: 3107948 - RNA, 12 nt, Molluscum contagiosum virus
gccgcgugcugg

SEQ ID NO: 3107949 - RNA, 23 nt, Molluscum contagiosum virus
gccgcguagcuagcucugcgcgc

SEQ ID NO: 3107950 - RNA, 14 nt, Molluscum contagiosum virus
gccgccaugcugcg

SEQ ID NO: 3107951 - RNA, 17 nt, Molluscum contagiosum virus
gccgccaugcugcgcga

SEQ ID NO: 3107952 - RNA, 15 nt, Molluscum contagiosum virus
gccgagcucgccucc

SEQ ID NO: 3107953 - RNA, 16 nt, Molluscum contagiosum virus
gccgagauggagcuca

SEQ ID NO: 3107954 - RNA, 17 nt, Molluscum contagiosum virus
gccgagccgcuggccga

SEQ ID NO: 3107955 - RNA, 14 nt, Molluscum contagiosum virus
gccgagccggggga

SEQ ID NO: 3107956 - RNA, 17 nt, Molluscum contagiosum virus
gccgagcgccgccagcu

SEQ ID NO: 3107957 - RNA, 19 nt, Molluscum contagiosum virus
gccgagcggcaagccgugc

SEQ ID NO: 3107958 - RNA, 14 nt, Molluscum contagiosum virus
gccgagcgugacca

SEQ ID NO: 3107959 - RNA, 20 nt, Molluscum contagiosum virus
gccgaguaccgcgcgcacgc

SEQ ID NO: 3107960 - RNA, 15 nt, Molluscum contagiosum virus
gccgacagcgcgcgc

SEQ ID NO: 3107961 - RNA, 16 nt, Molluscum contagiosum virus
gccgacgugugccgcu

SEQ ID NO: 3107962 - RNA, 20 nt, Molluscum contagiosum virus
gccgacuuccgacgggccgc

SEQ ID NO: 3107963 - RNA, 21 nt, Molluscum contagiosum virus
gccgagaaaaagcugucgcgc

SEQ ID NO: 3107964 - RNA, 13 nt, Molluscum contagiosum virus
aagucugcgcagg

SEQ ID NO: 3107965 - RNA, 12 nt, Molluscum contagiosum virus
aagugcgcgugu

SEQ ID NO: 3107966 - RNA, 16 nt, Molluscum contagiosum virus
aagggcggucccgcga

SEQ ID NO: 3107967 - RNA, 17 nt, Molluscum contagiosum virus
aagguaccccgcaggaa

SEQ ID NO: 3107968 - RNA, 16 nt, Molluscum contagiosum virus
aagguacccgcaggaa

SEQ ID NO: 3107969 - RNA, 15 nt, Molluscum contagiosum virus
aaggcgggcccgcga

SEQ ID NO: 3107970 - RNA, 19 nt, Molluscum contagiosum virus
aaggcgguggcggcucugc

SEQ ID NO: 3107971 - RNA, 16 nt, Molluscum contagiosum virus
aaggcgugcgccgugc

SEQ ID NO: 3107972 - RNA, 15 nt, Molluscum contagiosum virus
aagguggccaagcgc

SEQ ID NO: 3107973 - RNA, 12 nt, Molluscum contagiosum virus
aaggcgccgcgu

SEQ ID NO: 3107974 - RNA, 24 nt, Molluscum contagiosum virus
aaguacaugaggcagugcuugagc

SEQ ID NO: 3107975 - RNA, 23 nt, Molluscum contagiosum virus
aaguaccagccgcugcgccgcca

SEQ ID NO: 3107976 - RNA, 16 nt, Molluscum contagiosum virus
aaggcacccgcaggaa

SEQ ID NO: 3107977 - RNA, 17 nt, Molluscum contagiosum virus
aaggccaaagccgcgga

SEQ ID NO: 3107978 - RNA, 15 nt, Molluscum contagiosum virus
aaggccguccccgga

SEQ ID NO: 3107979 - RNA, 19 nt, Molluscum contagiosum virus
aaggaaaaggcacaccccg

SEQ ID NO: 3107980 - RNA, 15 nt, Molluscum contagiosum virus
aaggagcccaagcac

SEQ ID NO: 3107981 - RNA, 18 nt, Molluscum contagiosum virus
aagcguacgcgucgcgga

SEQ ID NO: 3107982 - RNA, 12 nt, Molluscum contagiosum virus
aaugacgcgcac

SEQ ID NO: 3107983 - RNA, 21 nt, Molluscum contagiosum virus
acacguuggaggacguggaca

SEQ ID NO: 3107984 - RNA, 18 nt, Molluscum contagiosum virus
aaugcaugcggagcuggc

SEQ ID NO: 3107985 - RNA, 20 nt, Molluscum contagiosum virus
aaugcgguucacuagcgcag

SEQ ID NO: 3107986 - RNA, 22 nt, Molluscum contagiosum virus
aaugcgguucacuagcgcaggc

SEQ ID NO: 3107987 - RNA, 17 nt, Molluscum contagiosum virus
aaugcugccguguacgu

SEQ ID NO: 3107988 - RNA, 22 nt, Molluscum contagiosum virus
acaccuggcgagcgcucugcau

SEQ ID NO: 3107989 - RNA, 21 nt, Molluscum contagiosum virus
acacgaggggcaagcucgcgc

SEQ ID NO: 3107990 - RNA, 20 nt, Molluscum contagiosum virus
acacgccgggaaacgcacag

SEQ ID NO: 3107991 - RNA, 14 nt, Molluscum contagiosum virus
acacgcgcgcgugc

SEQ ID NO: 3107992 - RNA, 13 nt, Molluscum contagiosum virus
acacgcgcggcgg

SEQ ID NO: 3107993 - RNA, 15 nt, Molluscum contagiosum virus
acacgcgucgcgcag

SEQ ID NO: 3107994 - RNA, 17 nt, Molluscum contagiosum virus
acacgcucuucggcacg

SEQ ID NO: 3107995 - RNA, 14 nt, Molluscum contagiosum virus
acacgcuggcgaag

SEQ ID NO: 3107996 - RNA, 16 nt, Molluscum contagiosum virus
acacggauacgcgcac

SEQ ID NO: 3107997 - RNA, 23 nt, Molluscum contagiosum virus
acacgacgacggcugcucgcugc

SEQ ID NO: 3107998 - RNA, 21 nt, Molluscum contagiosum virus
acacugcagaaacagccgugc

SEQ ID NO: 3107999 - RNA, 16 nt, Molluscum contagiosum virus
acacucgugcucgugu

SEQ ID NO: 3108000 - RNA, 15 nt, Molluscum contagiosum virus
acacucuucgcaggc

SEQ ID NO: 3108001 - RNA, 13 nt, Molluscum contagiosum virus
acagacggcgcgc

SEQ ID NO: 3108002 - RNA, 15 nt, Molluscum contagiosum virus
acacuuuccgucguc

SEQ ID NO: 3108003 - RNA, 16 nt, Molluscum contagiosum virus
acacuuuccgucgucg

SEQ ID NO: 3108004 - RNA, 17 nt, Molluscum contagiosum virus
acacugucucugcgcga

SEQ ID NO: 3108005 - RNA, 18 nt, Molluscum contagiosum virus
acagccccugcugcucgc

SEQ ID NO: 3108006 - RNA, 21 nt, Molluscum contagiosum virus
acagccccugcugcucgcgga

SEQ ID NO: 3108007 - RNA, 15 nt, Molluscum contagiosum virus
acagccgccugccgc

SEQ ID NO: 3108008 - RNA, 16 nt, Molluscum contagiosum virus
acagccgccugccgcg

SEQ ID NO: 3108009 - RNA, 23 nt, Molluscum contagiosum virus
acagccgccugccgcgcucgugc

SEQ ID NO: 3108010 - RNA, 19 nt, Molluscum contagiosum virus
acagccgcuuucugggcgc

SEQ ID NO: 3108011 - RNA, 22 nt, Molluscum contagiosum virus
acagccuagaaacgacgggcgc

SEQ ID NO: 3108012 - RNA, 18 nt, Molluscum contagiosum virus
acagccuguguugcgcgc

SEQ ID NO: 3108013 - RNA, 12 nt, Molluscum contagiosum virus
acagcgcaagcu

SEQ ID NO: 3108014 - RNA, 14 nt, Molluscum contagiosum virus
acagcgcgcgcacg

SEQ ID NO: 3108015 - RNA, 13 nt, Molluscum contagiosum virus
acagcgcgcgugc

SEQ ID NO: 3108016 - RNA, 16 nt, Molluscum contagiosum virus
acagcaagcagcgcgc

SEQ ID NO: 3108017 - RNA, 16 nt, Molluscum contagiosum virus
acagcacggcacgugc

SEQ ID NO: 3108018 - RNA, 16 nt, Molluscum contagiosum virus
acagagugccuggcgc

SEQ ID NO: 3108019 - RNA, 17 nt, Molluscum contagiosum virus
acaugaucgacgaggac

SEQ ID NO: 3108020 - RNA, 16 nt, Molluscum contagiosum virus
acaugcaacgcaggac

SEQ ID NO: 3108021 - RNA, 23 nt, Molluscum contagiosum virus
acaugcacacucacgcguccaca

SEQ ID NO: 3108022 - RNA, 20 nt, Molluscum contagiosum virus
acaugcgcacgcgcgucaug

SEQ ID NO: 3108023 - RNA, 23 nt, Molluscum contagiosum virus
acaugcucgacgugaucgcgcag

SEQ ID NO: 3108024 - RNA, 22 nt, Molluscum contagiosum virus
acaugcucgcgcucuacgccag

SEQ ID NO: 3108025 - RNA, 16 nt, Molluscum contagiosum virus
acaugcuguccaccuc

SEQ ID NO: 3108026 - RNA, 17 nt, Molluscum contagiosum virus
acaugcugugcggcacg

SEQ ID NO: 3108027 - RNA, 17 nt, Molluscum contagiosum virus
acauggagcgcaucaug

SEQ ID NO: 3108028 - RNA, 15 nt, Molluscum contagiosum virus
acauccggcacgugc

SEQ ID NO: 3108029 - RNA, 23 nt, Molluscum contagiosum virus
acaucgacaagcacgucuuugac

SEQ ID NO: 3108030 - RNA, 13 nt, Molluscum contagiosum virus
acauguccaagaa

SEQ ID NO: 3108031 - RNA, 22 nt, Molluscum contagiosum virus
acaucaucgcggagcugcgcgc

SEQ ID NO: 3108032 - RNA, 14 nt, Molluscum contagiosum virus
acaggugcguaaug

SEQ ID NO: 3108033 - RNA, 18 nt, Molluscum contagiosum virus
acagcgugcgcgggcacg

SEQ ID NO: 3108034 - RNA, 21 nt, Molluscum contagiosum virus
acagcguguucggggccgcga

SEQ ID NO: 3108035 - RNA, 17 nt, Molluscum contagiosum virus
acagcuccccgcgcaag

SEQ ID NO: 3108036 - RNA, 17 nt, Molluscum contagiosum virus
acaguccaacccgcggc

SEQ ID NO: 3108037 - RNA, 17 nt, Molluscum contagiosum virus
acaguccagcccgcggu

SEQ ID NO: 3108038 - RNA, 17 nt, Molluscum contagiosum virus
acauguugugcucgugu

SEQ ID NO: 3108039 - RNA, 19 nt, Molluscum contagiosum virus
accaagguggggcgcaucc

SEQ ID NO: 3108040 - RNA, 15 nt, Molluscum contagiosum virus
accaagaagcccgag

SEQ ID NO: 3108041 - RNA, 12 nt, Molluscum contagiosum virus
accacacgcgcg

SEQ ID NO: 3108042 - RNA, 15 nt, Molluscum contagiosum virus
accagccgcugcgcc

SEQ ID NO: 3108043 - RNA, 20 nt, Molluscum contagiosum virus
accagcggcaggcggccgcg

SEQ ID NO: 3108044 - RNA, 23 nt, Molluscum contagiosum virus
accagcuacgagccgcugcuccu

SEQ ID NO: 3108045 - RNA, 19 nt, Molluscum contagiosum virus
accagcucgcgccgccgcg

SEQ ID NO: 3108046 - RNA, 17 nt, Molluscum contagiosum virus
accacuccgucgcgcuc

SEQ ID NO: 3108047 - RNA, 22 nt, Molluscum contagiosum virus
accagaaccuucuucgucgugc

SEQ ID NO: 3108048 - RNA, 15 nt, Molluscum contagiosum virus
accgagugcuggccg

SEQ ID NO: 3108049 - RNA, 19 nt, Molluscum contagiosum virus
accgcauuuguguugccga

SEQ ID NO: 3108050 - RNA, 20 nt, Molluscum contagiosum virus
accgcccuuguggacgcgcg

SEQ ID NO: 3108051 - RNA, 17 nt, Molluscum contagiosum virus
accgccugcugcagcuc

SEQ ID NO: 3108052 - RNA, 21 nt, Molluscum contagiosum virus
accgccuguaccugcucgggc

SEQ ID NO: 3108053 - RNA, 14 nt, Molluscum contagiosum virus
accgcggcgcggag

SEQ ID NO: 3108054 - RNA, 12 nt, Molluscum contagiosum virus
accgcgggcacg

SEQ ID NO: 3108055 - RNA, 14 nt, Molluscum contagiosum virus
accuacgcgccgac

SEQ ID NO: 3108056 - RNA, 14 nt, Molluscum contagiosum virus
accuagagcacgaa

SEQ ID NO: 3108057 - RNA, 17 nt, Molluscum contagiosum virus
accucaccucugcgcgg

SEQ ID NO: 3108058 - RNA, 14 nt, Molluscum contagiosum virus
accuccugcaccug

SEQ ID NO: 3108059 - RNA, 13 nt, Molluscum contagiosum virus
accucgcgcuucc

SEQ ID NO: 3108060 - RNA, 21 nt, Molluscum contagiosum virus
accguacucgcguccgcgcag

SEQ ID NO: 3108061 - RNA, 13 nt, Molluscum contagiosum virus
accgucaccgcag

SEQ ID NO: 3108062 - RNA, 18 nt, Molluscum contagiosum virus
acgacgggcgcgcuucuc

SEQ ID NO: 3108063 - RNA, 22 nt, Molluscum contagiosum virus
accgcuggggcgugacucggcc

SEQ ID NO: 3108064 - RNA, 21 nt, Molluscum contagiosum virus
accgcguugccgcccgccgag

SEQ ID NO: 3108065 - RNA, 13 nt, Molluscum contagiosum virus
accgcgucaagau

SEQ ID NO: 3108066 - RNA, 20 nt, Molluscum contagiosum virus
accgcgucaagaucaaccgc

SEQ ID NO: 3108067 - RNA, 13 nt, Molluscum contagiosum virus
accgcgugcgcag

SEQ ID NO: 3108068 - RNA, 16 nt, Molluscum contagiosum virus
accgcgugcgugcaca

SEQ ID NO: 3108069 - RNA, 22 nt, Molluscum contagiosum virus
accgcguggacaacagcacgac

SEQ ID NO: 3108070 - RNA, 22 nt, Molluscum contagiosum virus
accgcuucuuuacgggcgccag

SEQ ID NO: 3108071 - RNA, 20 nt, Molluscum contagiosum virus
accggccaaggcaaaguucu

SEQ ID NO: 3108072 - RNA, 13 nt, Molluscum contagiosum virus
accgggcgccgcg

SEQ ID NO: 3108073 - RNA, 20 nt, Molluscum contagiosum virus
accgggcacuucucgcgcga

SEQ ID NO: 3108074 - RNA, 15 nt, Molluscum contagiosum virus
aggcgggccugcgcc

SEQ ID NO: 3108075 - RNA, 17 nt, Molluscum contagiosum virus
aggcgcugucgcgcagg

SEQ ID NO: 3108076 - RNA, 19 nt, Molluscum contagiosum virus
aggcgcugucgcgcaggcu

SEQ ID NO: 3108077 - RNA, 23 nt, Molluscum contagiosum virus
aggcgcaccuugacgccgcgcgc

SEQ ID NO: 3108078 - RNA, 14 nt, Molluscum contagiosum virus
aggccggcacaagc

SEQ ID NO: 3108079 - RNA, 18 nt, Molluscum contagiosum virus
aggccggcacgagcaguc

SEQ ID NO: 3108080 - RNA, 21 nt, Molluscum contagiosum virus
aggcgccgcguacgcacgugc

SEQ ID NO: 3108081 - RNA, 17 nt, Molluscum contagiosum virus
aggcgcgccauggcgag

SEQ ID NO: 3108082 - RNA, 24 nt, Molluscum contagiosum virus
aggcgcgccauggcgagcuagugc

SEQ ID NO: 3108083 - RNA, 18 nt, Molluscum contagiosum virus
aggccgcccacgcucaac

SEQ ID NO: 3108084 - RNA, 14 nt, Molluscum contagiosum virus
aggccgagaugagc

SEQ ID NO: 3108085 - RNA, 19 nt, Molluscum contagiosum virus
aggccgagaugagcggcgc

SEQ ID NO: 3108086 - RNA, 23 nt, Molluscum contagiosum virus
aggccgggcgcgguagcucgugc

SEQ ID NO: 3108087 - RNA, 19 nt, Molluscum contagiosum virus
aggccggucgcggaagacg

SEQ ID NO: 3108088 - RNA, 22 nt, Molluscum contagiosum virus
aggccgucagcgucgacggcgc

SEQ ID NO: 3108089 - RNA, 21 nt, Molluscum contagiosum virus
aggccguccccggaaagcagc

SEQ ID NO: 3108090 - RNA, 16 nt, Molluscum contagiosum virus
aggccucagccgagcg

SEQ ID NO: 3108091 - RNA, 15 nt, Molluscum contagiosum virus
aggccugcguggaca

SEQ ID NO: 3108092 - RNA, 17 nt, Molluscum contagiosum virus
aggccuucgcgcccgac

SEQ ID NO: 3108093 - RNA, 19 nt, Molluscum contagiosum virus
aggccuucgcgcccgacga

SEQ ID NO: 3108094 - RNA, 22 nt, Molluscum contagiosum virus
aggccuucgcgcccgacgagcu

SEQ ID NO: 3108095 - RNA, 15 nt, Molluscum contagiosum virus
auacuucaacuacaa

SEQ ID NO: 3108096 - RNA, 10 nt, Molluscum contagiosum virus
auacgcgcuc

SEQ ID NO: 3108097 - RNA, 16 nt, Molluscum contagiosum virus
auagcccaugcgcagu

SEQ ID NO: 3108098 - RNA, 17 nt, Molluscum contagiosum virus
auaguccccggcgccgg

SEQ ID NO: 3108099 - RNA, 14 nt, Molluscum contagiosum virus
agggaggcucgagc

SEQ ID NO: 3108100 - RNA, 22 nt, Molluscum contagiosum virus
agggaggcucgagcgcgcgccu

SEQ ID NO: 3108101 - RNA, 15 nt, Molluscum contagiosum virus
agggcgcgcgucgag

SEQ ID NO: 3108102 - RNA, 15 nt, Molluscum contagiosum virus
agggcacgcugcaca

SEQ ID NO: 3108103 - RNA, 19 nt, Molluscum contagiosum virus
aggcuucgaggugcgcgag

SEQ ID NO: 3108104 - RNA, 21 nt, Molluscum contagiosum virus
aggcuuucuuccucgacgagg

SEQ ID NO: 3108105 - RNA, 17 nt, Molluscum contagiosum virus
aggcggugggcgccgcg

SEQ ID NO: 3108106 - RNA, 16 nt, Molluscum contagiosum virus
aggcgucaugcgcgcg

SEQ ID NO: 3108107 - RNA, 16 nt, Molluscum contagiosum virus
aggcguccugcgggag

SEQ ID NO: 3108108 - RNA, 14 nt, Molluscum contagiosum virus
aggcucgagcgcgc

SEQ ID NO: 3108109 - RNA, 15 nt, Molluscum contagiosum virus
aggcucgagcugcau

SEQ ID NO: 3108110 - RNA, 23 nt, Molluscum contagiosum virus
aggcucuguucugcuuggacgac

SEQ ID NO: 3108111 - RNA, 14 nt, Molluscum contagiosum virus
acgcaaaugcgcgc

SEQ ID NO: 3108112 - RNA, 21 nt, Molluscum contagiosum virus
acgcaaccuacuugcucgugu

SEQ ID NO: 3108113 - RNA, 14 nt, Molluscum contagiosum virus
acgcaacugcccgc

SEQ ID NO: 3108114 - RNA, 23 nt, Molluscum contagiosum virus
acgaucuucuucuugcgcaccuc

SEQ ID NO: 3108115 - RNA, 22 nt, Molluscum contagiosum virus
acgaugcaaacauguagcgcgc

SEQ ID NO: 3108116 - RNA, 15 nt, Molluscum contagiosum virus
acgaugcgcucgugg

SEQ ID NO: 3108117 - RNA, 16 nt, Molluscum contagiosum virus
acgagugcccgcgcgc

SEQ ID NO: 3108118 - RNA, 15 nt, Molluscum contagiosum virus
acgagugcgccgcgc

SEQ ID NO: 3108119 - RNA, 22 nt, Molluscum contagiosum virus
acgauuccgcuguacgugcugc

SEQ ID NO: 3108120 - RNA, 16 nt, Molluscum contagiosum virus
acgcaagcccgcgcgc

SEQ ID NO: 3108121 - RNA, 19 nt, Molluscum contagiosum virus
acgcaagcccgcgcgcgag

SEQ ID NO: 3108122 - RNA, 15 nt, Molluscum contagiosum virus
acgcaagcguacgcg

SEQ ID NO: 3108123 - RNA, 18 nt, Molluscum contagiosum virus
acgcaagcugaggcgugc

SEQ ID NO: 3108124 - RNA, 17 nt, Molluscum contagiosum virus
acgcaaggcaugcgcgc

SEQ ID NO: 3108125 - RNA, 17 nt, Molluscum contagiosum virus
acgcaaggugugcgcgc

SEQ ID NO: 3108126 - RNA, 14 nt, Molluscum contagiosum virus
acgcaaucgcgcgc

SEQ ID NO: 3108127 - RNA, 15 nt, Molluscum contagiosum virus
acgcacaaaacacaa

SEQ ID NO: 3108128 - RNA, 22 nt, Molluscum contagiosum virus
acgcacacgagugcccgcgcgc

SEQ ID NO: 3108129 - RNA, 14 nt, Molluscum contagiosum virus
acgcacacucgcgc

SEQ ID NO: 3108130 - RNA, 18 nt, Molluscum contagiosum virus
acgcacacucgcgcgucc

SEQ ID NO: 3108131 - RNA, 23 nt, Molluscum contagiosum virus
acgcaccgccuggugcugcgcga

SEQ ID NO: 3108132 - RNA, 17 nt, Molluscum contagiosum virus
acgcacgcacguggcgc

SEQ ID NO: 3108133 - RNA, 18 nt, Molluscum contagiosum virus
aggccagcacaagccguc

SEQ ID NO: 3108134 - RNA, 22 nt, Molluscum contagiosum virus
aggcccacuuccgugagcaguc

SEQ ID NO: 3108135 - RNA, 15 nt, Molluscum contagiosum virus
acgacuagcgugcgc

SEQ ID NO: 3108136 - RNA, 23 nt, Molluscum contagiosum virus
acgacugcuuugacacgcucauc

SEQ ID NO: 3108137 - RNA, 16 nt, Molluscum contagiosum virus
acgacuuccgcggcgu

SEQ ID NO: 3108138 - RNA, 21 nt, Molluscum contagiosum virus
acgacuuccgcggcgugcagg

SEQ ID NO: 3108139 - RNA, 16 nt, Molluscum contagiosum virus
acgagaaaugcgcaca

SEQ ID NO: 3108140 - RNA, 12 nt, Molluscum contagiosum virus
acgagagggcgc

SEQ ID NO: 3108141 - RNA, 19 nt, Molluscum contagiosum virus
acgagaugggcccgcgcgc

SEQ ID NO: 3108142 - RNA, 20 nt, Molluscum contagiosum virus
acgagauggucacgcgcaag

SEQ ID NO: 3108143 - RNA, 18 nt, Molluscum contagiosum virus
acgagcacugccugccgc

SEQ ID NO: 3108144 - RNA, 23 nt, Molluscum contagiosum virus
acgagcacugccugccgccucgg

SEQ ID NO: 3108145 - RNA, 17 nt, Molluscum contagiosum virus
acgagcagcccgugcgc

SEQ ID NO: 3108146 - RNA, 19 nt, Molluscum contagiosum virus
acgagcagcgcuugcgcgc

SEQ ID NO: 3108147 - RNA, 17 nt, Molluscum contagiosum virus
acgagcagcugcugcgc

SEQ ID NO: 3108148 - RNA, 14 nt, Molluscum contagiosum virus
acgagcaggcgcag

SEQ ID NO: 3108149 - RNA, 16 nt, Molluscum contagiosum virus
acgagcaggcgcagcg

SEQ ID NO: 3108150 - RNA, 16 nt, Molluscum contagiosum virus
acgagccccgcgccgg

SEQ ID NO: 3108151 - RNA, 14 nt, Molluscum contagiosum virus
acgagcgcaucagc

SEQ ID NO: 3108152 - RNA, 20 nt, Molluscum contagiosum virus
acgagcgccagccugugcgc

SEQ ID NO: 3108153 - RNA, 13 nt, Molluscum contagiosum virus
acgagcgccgcga

SEQ ID NO: 3108154 - RNA, 16 nt, Molluscum contagiosum virus
acgagcugcugcccgc

SEQ ID NO: 3108155 - RNA, 16 nt, Molluscum contagiosum virus
acgagcugcugcgcgc

SEQ ID NO: 3108156 - RNA, 14 nt, Molluscum contagiosum virus
acgagcugugcgag

SEQ ID NO: 3108157 - RNA, 22 nt, Molluscum contagiosum virus
acgaggccuacgugcugcgcac

SEQ ID NO: 3108158 - RNA, 16 nt, Molluscum contagiosum virus
acgagggaugcgcaca

SEQ ID NO: 3108159 - RNA, 23 nt, Molluscum contagiosum virus
acgaggucgcguccacgcaggac

SEQ ID NO: 3108160 - RNA, 13 nt, Molluscum contagiosum virus
acgaggugcgcgc

SEQ ID NO: 3108161 - RNA, 16 nt, Molluscum contagiosum virus
acgagcgcgugccgcu

SEQ ID NO: 3108162 - RNA, 17 nt, Molluscum contagiosum virus
acgaggagcacggcauc

SEQ ID NO: 3108163 - RNA, 21 nt, Molluscum contagiosum virus
caaucccacguacgagcagcu

SEQ ID NO: 3108164 - RNA, 14 nt, Molluscum contagiosum virus
caauacccgcuucc

SEQ ID NO: 3108165 - RNA, 18 nt, Molluscum contagiosum virus
caaugcagugcaccagca

SEQ ID NO: 3108166 - RNA, 17 nt, Molluscum contagiosum virus
caaugcgcacgugcucg

SEQ ID NO: 3108167 - RNA, 18 nt, Molluscum contagiosum virus
caaugcgcacgugcucgc

SEQ ID NO: 3108168 - RNA, 16 nt, Molluscum contagiosum virus
caauggcgcgcgagca

SEQ ID NO: 3108169 - RNA, 21 nt, Molluscum contagiosum virus
caauggcgcgcgagcacagcg

SEQ ID NO: 3108170 - RNA, 14 nt, Molluscum contagiosum virus
caagaugacgacgg

SEQ ID NO: 3108171 - RNA, 14 nt, Molluscum contagiosum virus
caagauucugcgga

SEQ ID NO: 3108172 - RNA, 16 nt, Molluscum contagiosum virus
caagucgcgcgcugcg

SEQ ID NO: 3108173 - RNA, 21 nt, Molluscum contagiosum virus
caagucggggcccucggcgcg

SEQ ID NO: 3108174 - RNA, 19 nt, Molluscum contagiosum virus
caagucguuugcucggggc

SEQ ID NO: 3108175 - RNA, 15 nt, Molluscum contagiosum virus
caagucucccucgcg

SEQ ID NO: 3108176 - RNA, 18 nt, Molluscum contagiosum virus
caacguaguacugcagca

SEQ ID NO: 3108177 - RNA, 22 nt, Molluscum contagiosum virus
caacguaguacugcagcagcuc

SEQ ID NO: 3108178 - RNA, 22 nt, Molluscum contagiosum virus
caacuugcucuacuggcggcgc

SEQ ID NO: 3108179 - RNA, 14 nt, Molluscum contagiosum virus
caacuugggcccgc

SEQ ID NO: 3108180 - RNA, 19 nt, Molluscum contagiosum virus
caacuacaaggugcugucc

SEQ ID NO: 3108181 - RNA, 15 nt, Molluscum contagiosum virus
caagaagacggcgcg

SEQ ID NO: 3108182 - RNA, 21 nt, Molluscum contagiosum virus
caagaagacggcgcgcgcgcu

SEQ ID NO: 3108183 - RNA, 20 nt, Molluscum contagiosum virus
caagaagaucgcggcgccgc

SEQ ID NO: 3108184 - RNA, 21 nt, Molluscum contagiosum virus
caagaccgugacggccgugua

SEQ ID NO: 3108185 - RNA, 15 nt, Molluscum contagiosum virus
caagacgcugcuggc

SEQ ID NO: 3108186 - RNA, 13 nt, Molluscum contagiosum virus
caagacgggcacg

SEQ ID NO: 3108187 - RNA, 19 nt, Molluscum contagiosum virus
caagacucgcccgcgcgcg

SEQ ID NO: 3108188 - RNA, 19 nt, Molluscum contagiosum virus
caacgggcucgugcuggag

SEQ ID NO: 3108189 - RNA, 13 nt, Molluscum contagiosum virus
caacgcgcgcgcg

SEQ ID NO: 3108190 - RNA, 13 nt, Molluscum contagiosum virus
caacgcggacgcg

SEQ ID NO: 3108191 - RNA, 20 nt, Molluscum contagiosum virus
caacgucgcacuggccugca

SEQ ID NO: 3108192 - RNA, 14 nt, Molluscum contagiosum virus
caacgugcugcgcc

SEQ ID NO: 3108193 - RNA, 16 nt, Molluscum contagiosum virus
caacgugcugcgccgc

SEQ ID NO: 3108194 - RNA, 14 nt, Molluscum contagiosum virus
caacgugcugcuca

SEQ ID NO: 3108195 - RNA, 16 nt, Molluscum contagiosum virus
caacgcacccgcgcgg

SEQ ID NO: 3108196 - RNA, 14 nt, Molluscum contagiosum virus
caacgccgggcacg

SEQ ID NO: 3108197 - RNA, 21 nt, Molluscum contagiosum virus
caacgccuaccaccgggcacu

SEQ ID NO: 3108198 - RNA, 20 nt, Molluscum contagiosum virus
aucccggaacgcaaguacaa

SEQ ID NO: 3108199 - RNA, 21 nt, Molluscum contagiosum virus
auccgcaauuacgugcgcgag

SEQ ID NO: 3108200 - RNA, 20 nt, Molluscum contagiosum virus
auccgcaauucuagcgcgag

SEQ ID NO: 3108201 - RNA, 15 nt, Molluscum contagiosum virus
aucgacgagcacgag

SEQ ID NO: 3108202 - RNA, 16 nt, Molluscum contagiosum virus
aucgagcugguggccu

SEQ ID NO: 3108203 - RNA, 23 nt, Molluscum contagiosum virus
caaccgcaaggaaaacugcaucc

SEQ ID NO: 3108204 - RNA, 15 nt, Molluscum contagiosum virus
caaccuccugcaccu

SEQ ID NO: 3108205 - RNA, 19 nt, Molluscum contagiosum virus
caaccuccugcaccugcug

SEQ ID NO: 3108206 - RNA, 21 nt, Molluscum contagiosum virus
caaccuccugcaccugcugga

SEQ ID NO: 3108207 - RNA, 23 nt, Molluscum contagiosum virus
caaccuguuaaauggacgugcuc

SEQ ID NO: 3108208 - RNA, 19 nt, Molluscum contagiosum virus
caacgacuagcgugcgcag

SEQ ID NO: 3108209 - RNA, 20 nt, Molluscum contagiosum virus
caacgagcacgugugcggag

SEQ ID NO: 3108210 - RNA, 15 nt, Molluscum contagiosum virus
caacgagcgcaucag

SEQ ID NO: 3108211 - RNA, 14 nt, Molluscum contagiosum virus
caacgaggucuucc

SEQ ID NO: 3108212 - RNA, 16 nt, Molluscum contagiosum virus
caaccagcuggcgccc

SEQ ID NO: 3108213 - RNA, 20 nt, Molluscum contagiosum virus
caacauuuacuucgggcgca

SEQ ID NO: 3108214 - RNA, 15 nt, Molluscum contagiosum virus
caaccacagcucucc

SEQ ID NO: 3108215 - RNA, 15 nt, Molluscum contagiosum virus
auccaaacccccgag

SEQ ID NO: 3108216 - RNA, 19 nt, Molluscum contagiosum virus
auccacauuacgcucgugg

SEQ ID NO: 3108217 - RNA, 21 nt, Molluscum contagiosum virus
auccagcgcaucaugcgcuuc

SEQ ID NO: 3108218 - RNA, 20 nt, Molluscum contagiosum virus
aucagcuccgacgugaccuc

SEQ ID NO: 3108219 - RNA, 22 nt, Molluscum contagiosum virus
aucaaggauuuaaauggcgcgc

SEQ ID NO: 3108220 - RNA, 18 nt, Molluscum contagiosum virus
aucaaggccuacggcaag

SEQ ID NO: 3108221 - RNA, 16 nt, Molluscum contagiosum virus
auaucugucgccgcgg

SEQ ID NO: 3108222 - RNA, 18 nt, Molluscum contagiosum virus
auauggccgugcgcgacg

SEQ ID NO: 3108223 - RNA, 17 nt, Molluscum contagiosum virus
aucacgaugugcgcgcg

SEQ ID NO: 3108224 - RNA, 17 nt, Molluscum contagiosum virus
aucacggcgugcgcgag

SEQ ID NO: 3108225 - RNA, 17 nt, Molluscum contagiosum virus
aucagagaagugcuccg

SEQ ID NO: 3108226 - RNA, 18 nt, Molluscum contagiosum virus
caggcagugccgccgcgc

SEQ ID NO: 3108227 - RNA, 21 nt, Molluscum contagiosum virus
caggcagugccgccgcgcgcg

SEQ ID NO: 3108228 - RNA, 19 nt, Molluscum contagiosum virus
caggcacuccagcgcgccc

SEQ ID NO: 3108229 - RNA, 15 nt, Molluscum contagiosum virus
caggcagcugcugcg

SEQ ID NO: 3108230 - RNA, 15 nt, Molluscum contagiosum virus
caggacgugcacgug

SEQ ID NO: 3108231 - RNA, 14 nt, Molluscum contagiosum virus
caggaccugcuggu

SEQ ID NO: 3108232 - RNA, 18 nt, Molluscum contagiosum virus
caggaccuuaacgccguc

SEQ ID NO: 3108233 - RNA, 18 nt, Molluscum contagiosum virus
caggaucggagcgcagcu

SEQ ID NO: 3108234 - RNA, 17 nt, Molluscum contagiosum virus
caggaggaccgcgagcg

SEQ ID NO: 3108235 - RNA, 19 nt, Molluscum contagiosum virus
caggaaaggcaccccgcag

SEQ ID NO: 3108236 - RNA, 18 nt, Molluscum contagiosum virus
caggaaaggcacccgcag

SEQ ID NO: 3108237 - RNA, 19 nt, Molluscum contagiosum virus
caggaaagguaccccgcag

SEQ ID NO: 3108238 - RNA, 18 nt, Molluscum contagiosum virus
caggaaagguacccgcag

SEQ ID NO: 3108239 - RNA, 18 nt, Molluscum contagiosum virus
caggaacgcaccacggcc

SEQ ID NO: 3108240 - RNA, 14 nt, Molluscum contagiosum virus
caggaacgccgcca

SEQ ID NO: 3108241 - RNA, 16 nt, Molluscum contagiosum virus
caggaacgcgccgcgg

SEQ ID NO: 3108242 - RNA, 14 nt, Molluscum contagiosum virus
caggaacgcgcgcu

SEQ ID NO: 3108243 - RNA, 18 nt, Molluscum contagiosum virus
caggaacugcccgcgucg

SEQ ID NO: 3108244 - RNA, 15 nt, Molluscum contagiosum virus
caggaagcuggcgcg

SEQ ID NO: 3108245 - RNA, 17 nt, Molluscum contagiosum virus
caggaagcuggcgcggu

SEQ ID NO: 3108246 - RNA, 18 nt, Molluscum contagiosum virus
cacacuacgcuggcucgc

SEQ ID NO: 3108247 - RNA, 15 nt, Molluscum contagiosum virus
cacacucacgcgucc

SEQ ID NO: 3108248 - RNA, 19 nt, Molluscum contagiosum virus
cagcuaccgcgcgcgcaag

SEQ ID NO: 3108249 - RNA, 19 nt, Molluscum contagiosum virus
cagcuacgagccgcugcuc

SEQ ID NO: 3108250 - RNA, 20 nt, Molluscum contagiosum virus
cagcuacgagccgcugcucc

SEQ ID NO: 3108251 - RNA, 18 nt, Molluscum contagiosum virus
cagcucaagacgcugcug

SEQ ID NO: 3108252 - RNA, 15 nt, Molluscum contagiosum virus
cagcucaagcugcuc

SEQ ID NO: 3108253 - RNA, 16 nt, Molluscum contagiosum virus
cagcucaagcugcuca

SEQ ID NO: 3108254 - RNA, 21 nt, Molluscum contagiosum virus
cagcucacgagauggcugcuc

SEQ ID NO: 3108255 - RNA, 16 nt, Molluscum contagiosum virus
cagcucauagcccaug

SEQ ID NO: 3108256 - RNA, 15 nt, Molluscum contagiosum virus
cagcuccgcgcggcg

SEQ ID NO: 3108257 - RNA, 13 nt, Molluscum contagiosum virus
cagcucgccgcgc

SEQ ID NO: 3108258 - RNA, 17 nt, Molluscum contagiosum virus
cagcucgccgcgcgccg

SEQ ID NO: 3108259 - RNA, 12 nt, Molluscum contagiosum virus
cagcucgcgcag

SEQ ID NO: 3108260 - RNA, 18 nt, Molluscum contagiosum virus
cagcucgcgccgccgcgc

SEQ ID NO: 3108261 - RNA, 16 nt, Molluscum contagiosum virus
cacaagauggcgcagc

SEQ ID NO: 3108262 - RNA, 16 nt, Molluscum contagiosum virus
cacaaagacggggccg

SEQ ID NO: 3108263 - RNA, 18 nt, Molluscum contagiosum virus
cacaaagagacgcggccg

SEQ ID NO: 3108264 - RNA, 19 nt, Molluscum contagiosum virus
cacaaagccaaccccgagc

SEQ ID NO: 3108265 - RNA, 20 nt, Molluscum contagiosum virus
cacaaagggguccgcgucug

SEQ ID NO: 3108266 - RNA, 20 nt, Molluscum contagiosum virus
caauucaaaggugcucaccc

SEQ ID NO: 3108267 - RNA, 12 nt, Molluscum contagiosum virus
cagcugcgcgag

SEQ ID NO: 3108268 - RNA, 15 nt, Molluscum contagiosum virus
cagcugcgcgagccg

SEQ ID NO: 3108269 - RNA, 21 nt, Molluscum contagiosum virus
cagcugcugcgcuucgccgcg

SEQ ID NO: 3108270 - RNA, 22 nt, Molluscum contagiosum virus
cagcugcugcgcuucgccgcgc

SEQ ID NO: 3108271 - RNA, 20 nt, Molluscum contagiosum virus
cacaagucucgcgcgggcag

SEQ ID NO: 3108272 - RNA, 18 nt, Molluscum contagiosum virus
cagcugcaggaccugcug

SEQ ID NO: 3108273 - RNA, 16 nt, Molluscum contagiosum virus
cagcuucgcgagcccg

SEQ ID NO: 3108274 - RNA, 19 nt, Molluscum contagiosum virus
cagcugcugucgcucgugg

SEQ ID NO: 3108275 - RNA, 15 nt, Molluscum contagiosum virus
cagcuggagcugccg

SEQ ID NO: 3108276 - RNA, 15 nt, Molluscum contagiosum virus
cagcuggcgcccgcg

SEQ ID NO: 3108277 - RNA, 16 nt, Molluscum contagiosum virus
cagcuggcgcgcgccg

SEQ ID NO: 3108278 - RNA, 15 nt, Molluscum contagiosum virus
cacaccgcguggaca

SEQ ID NO: 3108279 - RNA, 10 nt, Molluscum contagiosum virus
cacacacacu

SEQ ID NO: 3108280 - RNA, 14 nt, Molluscum contagiosum virus
cacacaccgcgagc

SEQ ID NO: 3108281 - RNA, 15 nt, Molluscum contagiosum virus
cacacacgaacgcac

SEQ ID NO: 3108282 - RNA, 20 nt, Molluscum contagiosum virus
cacacacuugcacgcgcacg

SEQ ID NO: 3108283 - RNA, 16 nt, Molluscum contagiosum virus
cagcucggcgagagcg

SEQ ID NO: 3108284 - RNA, 20 nt, Molluscum contagiosum virus
cagcucggcgagagcgcgca

SEQ ID NO: 3108285 - RNA, 21 nt, Molluscum contagiosum virus
cagcucggcgagagcgcgcag

SEQ ID NO: 3108286 - RNA, 17 nt, Molluscum contagiosum virus
cagcucguugcgcagcc

SEQ ID NO: 3108287 - RNA, 13 nt, Molluscum contagiosum virus
cacacgcgcggcg

SEQ ID NO: 3108288 - RNA, 22 nt, Molluscum contagiosum virus
cacacgcgucgcgcaggcgccc

SEQ ID NO: 3108289 - RNA, 22 nt, Molluscum contagiosum virus
cacacgcugaguuacguggccg

SEQ ID NO: 3108290 - RNA, 14 nt, Molluscum contagiosum virus
cacacggacgagcc

SEQ ID NO: 3108291 - RNA, 22 nt, Molluscum contagiosum virus
ccauuuuuugccccgcgcgccc

SEQ ID NO: 3108292 - RNA, 16 nt, Molluscum contagiosum virus
cccaaggccgcgggcg

SEQ ID NO: 3108293 - RNA, 19 nt, Molluscum contagiosum virus
cccaaggccgcgggcgcgg

SEQ ID NO: 3108294 - RNA, 14 nt, Molluscum contagiosum virus
cccaagugcgcgug

SEQ ID NO: 3108295 - RNA, 16 nt, Molluscum contagiosum virus
ccauggucacgcgcac

SEQ ID NO: 3108296 - RNA, 17 nt, Molluscum contagiosum virus
ccauggucacgcgcacg

SEQ ID NO: 3108297 - RNA, 14 nt, Molluscum contagiosum virus
ccaugucgagcccu

SEQ ID NO: 3108298 - RNA, 22 nt, Molluscum contagiosum virus
ccaugucgcgcaucaccgagcg

SEQ ID NO: 3108299 - RNA, 17 nt, Molluscum contagiosum virus
ccaugucugugcgcgag

SEQ ID NO: 3108300 - RNA, 21 nt, Molluscum contagiosum virus
ccaugugcccgcggcgcgaaa

SEQ ID NO: 3108301 - RNA, 21 nt, Molluscum contagiosum virus
ccauguuuccugcggcgcugc

SEQ ID NO: 3108302 - RNA, 20 nt, Molluscum contagiosum virus
cccaaaagugaagaucaagc

SEQ ID NO: 3108303 - RNA, 12 nt, Molluscum contagiosum virus
cccacgcuggcg

SEQ ID NO: 3108304 - RNA, 23 nt, Molluscum contagiosum virus
ccaucggagaagugcuccgcacg

SEQ ID NO: 3108305 - RNA, 14 nt, Molluscum contagiosum virus
ccaucugcgcgacg

SEQ ID NO: 3108306 - RNA, 19 nt, Molluscum contagiosum virus
ccaucuccaagcacgcgcg

SEQ ID NO: 3108307 - RNA, 18 nt, Molluscum contagiosum virus
ccaugaucauggcgccgc

SEQ ID NO: 3108308 - RNA, 20 nt, Molluscum contagiosum virus
ccauggacacgcugcgcgug

SEQ ID NO: 3108309 - RNA, 15 nt, Molluscum contagiosum virus
ccauggaggcgcuag

SEQ ID NO: 3108310 - RNA, 17 nt, Molluscum contagiosum virus
ccaugcccacgcgcaag

SEQ ID NO: 3108311 - RNA, 15 nt, Molluscum contagiosum virus
cccagcaccgcgccg

SEQ ID NO: 3108312 - RNA, 22 nt, Molluscum contagiosum virus
cccagcaccuggaacgcgaccu

SEQ ID NO: 3108313 - RNA, 16 nt, Molluscum contagiosum virus
cccagcagcgaggccg

SEQ ID NO: 3108314 - RNA, 19 nt, Molluscum contagiosum virus
ccccggcguccggcgcucg

SEQ ID NO: 3108315 - RNA, 23 nt, Molluscum contagiosum virus
ccccuugcgucuccgcgaguccu

SEQ ID NO: 3108316 - RNA, 18 nt, Molluscum contagiosum virus
cccgaacugcugggcgug

SEQ ID NO: 3108317 - RNA, 14 nt, Molluscum contagiosum virus
ccccugagcgaguu

SEQ ID NO: 3108318 - RNA, 19 nt, Molluscum contagiosum virus
ccccugcugcucgcggagg

SEQ ID NO: 3108319 - RNA, 21 nt, Molluscum contagiosum virus
cccgaguuccuguugcgcgag

SEQ ID NO: 3108320 - RNA, 23 nt, Molluscum contagiosum virus
cccgaguuccuguugcgcgagcg

SEQ ID NO: 3108321 - RNA, 16 nt, Molluscum contagiosum virus
cccgagcccgagcccg

SEQ ID NO: 3108322 - RNA, 15 nt, Molluscum contagiosum virus
cccgagcccgcggcg

SEQ ID NO: 3108323 - RNA, 22 nt, Molluscum contagiosum virus
cccgagcccgcggcgcgcagcu

SEQ ID NO: 3108324 - RNA, 14 nt, Molluscum contagiosum virus
cccgagcgcgcgug

SEQ ID NO: 3108325 - RNA, 22 nt, Molluscum contagiosum virus
cccgccgaguaccgcgcgcacg

SEQ ID NO: 3108326 - RNA, 20 nt, Molluscum contagiosum virus
cccgagcugcggcgcgugcu

SEQ ID NO: 3108327 - RNA, 15 nt, Molluscum contagiosum virus
cccgagcugcgugug

SEQ ID NO: 3108328 - RNA, 17 nt, Molluscum contagiosum virus
cccgagcugcgugugcc

SEQ ID NO: 3108329 - RNA, 22 nt, Molluscum contagiosum virus
cccgaggacgagccccgcgccg

SEQ ID NO: 3108330 - RNA, 12 nt, Molluscum contagiosum virus
cccgaggacgcg

SEQ ID NO: 3108331 - RNA, 16 nt, Molluscum contagiosum virus
cccgaggacgcgggcg

SEQ ID NO: 3108332 - RNA, 21 nt, Molluscum contagiosum virus
cccgaggacgcgggcgugucc

SEQ ID NO: 3108333 - RNA, 17 nt, Molluscum contagiosum virus
cccgaggagagcggcgc

SEQ ID NO: 3108334 - RNA, 23 nt, Molluscum contagiosum virus
cccgagggcgcgaccggcgugcc

SEQ ID NO: 3108335 - RNA, 13 nt, Molluscum contagiosum virus
cccgacucgcagc

SEQ ID NO: 3108336 - RNA, 19 nt, Molluscum contagiosum virus
cccgacuucucgcgcgacu

SEQ ID NO: 3108337 - RNA, 16 nt, Molluscum contagiosum virus
cccgacuuuucgcgcc

SEQ ID NO: 3108338 - RNA, 22 nt, Molluscum contagiosum virus
cccgacacguugcacugcgcgg

SEQ ID NO: 3108339 - RNA, 17 nt, Molluscum contagiosum virus
cccuacgcgcgcgugcu

SEQ ID NO: 3108340 - RNA, 16 nt, Molluscum contagiosum virus
cccgugugcgggcacg

SEQ ID NO: 3108341 - RNA, 17 nt, Molluscum contagiosum virus
cccguguucgcggagcu

SEQ ID NO: 3108342 - RNA, 22 nt, Molluscum contagiosum virus
cccguggugggccgcggcgcgg

SEQ ID NO: 3108343 - RNA, 19 nt, Molluscum contagiosum virus
cccucgcgcgcgcgcggcg

SEQ ID NO: 3108344 - RNA, 14 nt, Molluscum contagiosum virus
cccucggcgcgccg

SEQ ID NO: 3108345 - RNA, 17 nt, Molluscum contagiosum virus
cccucguccggcgcucg

SEQ ID NO: 3108346 - RNA, 16 nt, Molluscum contagiosum virus
cccucgucgcgcuucc

SEQ ID NO: 3108347 - RNA, 17 nt, Molluscum contagiosum virus
cccucguguacgagaag

SEQ ID NO: 3108348 - RNA, 20 nt, Molluscum contagiosum virus
cccggguuugugcccgagcu

SEQ ID NO: 3108349 - RNA, 13 nt, Molluscum contagiosum virus
cccgccgggcacc

SEQ ID NO: 3108350 - RNA, 13 nt, Molluscum contagiosum virus
cccgccgcgugcc

SEQ ID NO: 3108351 - RNA, 17 nt, Molluscum contagiosum virus
cccgccagaagugaaau

SEQ ID NO: 3108352 - RNA, 17 nt, Molluscum contagiosum virus
cccguccucgcucgugc

SEQ ID NO: 3108353 - RNA, 20 nt, Molluscum contagiosum virus
cccguggcgcgccggcgcgg

SEQ ID NO: 3108354 - RNA, 14 nt, Molluscum contagiosum virus
cccgugcgcgcgcu

SEQ ID NO: 3108355 - RNA, 16 nt, Molluscum contagiosum virus
cccgugcuugcgcacg

SEQ ID NO: 3108356 - RNA, 20 nt, Molluscum contagiosum virus
cccucacaccuagagcacga

SEQ ID NO: 3108357 - RNA, 18 nt, Molluscum contagiosum virus
cccugcccgcgcgagacu

SEQ ID NO: 3108358 - RNA, 13 nt, Molluscum contagiosum virus
cccugcgcgagca

SEQ ID NO: 3108359 - RNA, 20 nt, Molluscum contagiosum virus
cccugcuaguccgcguacag

SEQ ID NO: 3108360 - RNA, 13 nt, Molluscum contagiosum virus
cccuggacgacgu

SEQ ID NO: 3108361 - RNA, 20 nt, Molluscum contagiosum virus
cccuggcugcugcgcgaccg

SEQ ID NO: 3108362 - RNA, 15 nt, Molluscum contagiosum virus
ccgaacugcucugcg

SEQ ID NO: 3108363 - RNA, 15 nt, Molluscum contagiosum virus
ccgaagucgcagcag

SEQ ID NO: 3108364 - RNA, 20 nt, Molluscum contagiosum virus
ccgacaccggacgaaagguc

SEQ ID NO: 3108365 - RNA, 14 nt, Molluscum contagiosum virus
ccgacacgcgcccg

SEQ ID NO: 3108366 - RNA, 15 nt, Molluscum contagiosum virus
ccuccccagcgccgc

SEQ ID NO: 3108367 - RNA, 16 nt, Molluscum contagiosum virus
ccuccgagcgcgcgug

SEQ ID NO: 3108368 - RNA, 20 nt, Molluscum contagiosum virus
ccucgaaggcgugcgccgug

SEQ ID NO: 3108369 - RNA, 16 nt, Molluscum contagiosum virus
ccucgcguagcagcgc

SEQ ID NO: 3108370 - RNA, 20 nt, Molluscum contagiosum virus
ccucgcguagcagcgccugc

SEQ ID NO: 3108371 - RNA, 12 nt, Molluscum contagiosum virus
ccucgcgcacag

SEQ ID NO: 3108372 - RNA, 19 nt, Molluscum contagiosum virus
ccucgcgcgcagcacaccg

SEQ ID NO: 3108373 - RNA, 14 nt, Molluscum contagiosum virus
ccucgaccugcacg

SEQ ID NO: 3108374 - RNA, 15 nt, Molluscum contagiosum virus
ccucgaccugcacga

SEQ ID NO: 3108375 - RNA, 12 nt, Molluscum contagiosum virus
ccucgagcacgc

SEQ ID NO: 3108376 - RNA, 13 nt, Molluscum contagiosum virus
ccucgagcgccgc

SEQ ID NO: 3108377 - RNA, 19 nt, Molluscum contagiosum virus
ccuccuagcccagcacgcg

SEQ ID NO: 3108378 - RNA, 23 nt, Molluscum contagiosum virus
ccucgcaggcgaggucacacucg

SEQ ID NO: 3108379 - RNA, 21 nt, Molluscum contagiosum virus
ccugugcccgaccccgccguc

SEQ ID NO: 3108380 - RNA, 17 nt, Molluscum contagiosum virus
ccugugcuacgcgagca

SEQ ID NO: 3108381 - RNA, 20 nt, Molluscum contagiosum virus
ccugugcugugcagaacuuc

SEQ ID NO: 3108382 - RNA, 17 nt, Molluscum contagiosum virus
ccuguggcgcacacgcg

SEQ ID NO: 3108383 - RNA, 16 nt, Molluscum contagiosum virus
ccuguguugcgcgcgc

SEQ ID NO: 3108384 - RNA, 18 nt, Molluscum contagiosum virus
ccuguucuuucagcgcgc

SEQ ID NO: 3108385 - RNA, 12 nt, Molluscum contagiosum virus
ccugacggcagc

SEQ ID NO: 3108386 - RNA, 19 nt, Molluscum contagiosum virus
ccugagauccacgcgugcu

SEQ ID NO: 3108387 - RNA, 19 nt, Molluscum contagiosum virus
ccugaaccugggcgcgcac

SEQ ID NO: 3108388 - RNA, 18 nt, Molluscum contagiosum virus
ccucggcacucgcguccg

SEQ ID NO: 3108389 - RNA, 13 nt, Molluscum contagiosum virus
ccucggcgcacac

SEQ ID NO: 3108390 - RNA, 13 nt, Molluscum contagiosum virus
ccucggcgcgccg

SEQ ID NO: 3108391 - RNA, 19 nt, Molluscum contagiosum virus
ccucgggccgcagccgcgc

SEQ ID NO: 3108392 - RNA, 15 nt, Molluscum contagiosum virus
ccucgugcugggccu

SEQ ID NO: 3108393 - RNA, 22 nt, Molluscum contagiosum virus
ccucgugggauaggcacacacg

SEQ ID NO: 3108394 - RNA, 20 nt, Molluscum contagiosum virus
ccucguggucgccgcggccg

SEQ ID NO: 3108395 - RNA, 19 nt, Molluscum contagiosum virus
ccucucgaggccggcacga

SEQ ID NO: 3108396 - RNA, 16 nt, Molluscum contagiosum virus
ccucucgugcgucgug

SEQ ID NO: 3108397 - RNA, 18 nt, Molluscum contagiosum virus
ccucgucguccacaggcg

SEQ ID NO: 3108398 - RNA, 12 nt, Molluscum contagiosum virus
ccucugcgagcg

SEQ ID NO: 3108399 - RNA, 14 nt, Molluscum contagiosum virus
ccucugcgcggccc

SEQ ID NO: 3108400 - RNA, 22 nt, Molluscum contagiosum virus
ccucugcuucacgcugcucgug

SEQ ID NO: 3108401 - RNA, 17 nt, Molluscum contagiosum virus
ccuucgcggagcgcacg

SEQ ID NO: 3108402 - RNA, 14 nt, Molluscum contagiosum virus
ccuucccggcgucc

SEQ ID NO: 3108403 - RNA, 23 nt, Molluscum contagiosum virus
ccuuccggagacaccagcuccgc

SEQ ID NO: 3108404 - RNA, 23 nt, Molluscum contagiosum virus
ccuucgacguugacgagcgcgug

SEQ ID NO: 3108405 - RNA, 22 nt, Molluscum contagiosum virus
ccuucuuccugcgcgugcgucc

SEQ ID NO: 3108406 - RNA, 15 nt, Molluscum contagiosum virus
ccuugaagggcacaa

SEQ ID NO: 3108407 - RNA, 14 nt, Molluscum contagiosum virus
ccuugagcgcgccg

SEQ ID NO: 3108408 - RNA, 15 nt, Molluscum contagiosum virus
ccuugcacucgcgcu

SEQ ID NO: 3108409 - RNA, 13 nt, Molluscum contagiosum virus
ccuugcagcgcag

SEQ ID NO: 3108410 - RNA, 14 nt, Molluscum contagiosum virus
ccuugcagcgcagc

SEQ ID NO: 3108411 - RNA, 18 nt, Molluscum contagiosum virus
ccuugcuacaggacgucc

SEQ ID NO: 3108412 - RNA, 18 nt, Molluscum contagiosum virus
ccuugcucgcuugccgcu

SEQ ID NO: 3108413 - RNA, 17 nt, Molluscum contagiosum virus
ccuugcuggcacgcgag

SEQ ID NO: 3108414 - RNA, 23 nt, Molluscum contagiosum virus
ccuuggcaacgcaaacgcacgcg

SEQ ID NO: 3108415 - RNA, 22 nt, Molluscum contagiosum virus
ccuugcccgaggagagcggcgc

SEQ ID NO: 3108416 - RNA, 22 nt, Molluscum contagiosum virus
cgaacaagacgcuagcugugcg

SEQ ID NO: 3108417 - RNA, 17 nt, Molluscum contagiosum virus
cgaacacggcgcggauc

SEQ ID NO: 3108418 - RNA, 12 nt, Molluscum contagiosum virus
cgaacagagcgc

SEQ ID NO: 3108419 - RNA, 16 nt, Molluscum contagiosum virus
cgaacagagcgccagc

SEQ ID NO: 3108420 - RNA, 16 nt, Molluscum contagiosum virus
ccuuuccccggcgucc

SEQ ID NO: 3108421 - RNA, 22 nt, Molluscum contagiosum virus
ccuuuguucuuagcagcgccgc

SEQ ID NO: 3108422 - RNA, 13 nt, Molluscum contagiosum virus
ccuuggcgcgccg

SEQ ID NO: 3108423 - RNA, 16 nt, Molluscum contagiosum virus
ccuuggcgcugcacag

SEQ ID NO: 3108424 - RNA, 18 nt, Molluscum contagiosum virus
ccuuggcggugcgcaaag

SEQ ID NO: 3108425 - RNA, 15 nt, Molluscum contagiosum virus
ccuuguggacgcgcg

SEQ ID NO: 3108426 - RNA, 17 nt, Molluscum contagiosum virus
cgaacgagaaaugcgca

SEQ ID NO: 3108427 - RNA, 18 nt, Molluscum contagiosum virus
cgaacuccaggcgcaccu

SEQ ID NO: 3108428 - RNA, 18 nt, Molluscum contagiosum virus
cgaacucgugcgccgcgc

SEQ ID NO: 3108429 - RNA, 20 nt, Molluscum contagiosum virus
cgaacucucaucgagcaccu

SEQ ID NO: 3108430 - RNA, 23 nt, Molluscum contagiosum virus
cgacggcgccucgagcgcgcugg

SEQ ID NO: 3108431 - RNA, 19 nt, Molluscum contagiosum virus
cgacgcguucuagcagcgu

SEQ ID NO: 3108432 - RNA, 19 nt, Molluscum contagiosum virus
cgacgcuuucguccgccgc

SEQ ID NO: 3108433 - RNA, 21 nt, Molluscum contagiosum virus
cgacggaacgagccugccgcg

SEQ ID NO: 3108434 - RNA, 20 nt, Molluscum contagiosum virus
cgacggucuuccaggucuuc

SEQ ID NO: 3108435 - RNA, 15 nt, Molluscum contagiosum virus
cgacguacgagugcu

SEQ ID NO: 3108436 - RNA, 13 nt, Molluscum contagiosum virus
cgacggcugcucg

SEQ ID NO: 3108437 - RNA, 21 nt, Molluscum contagiosum virus
cgagcgcgagauucuggcgcg

SEQ ID NO: 3108438 - RNA, 16 nt, Molluscum contagiosum virus
cgagcgcgccgcgcgc

SEQ ID NO: 3108439 - RNA, 13 nt, Molluscum contagiosum virus
cgagcgcgcgcgc

SEQ ID NO: 3108440 - RNA, 16 nt, Molluscum contagiosum virus
cgagcgcgcgugcucg

SEQ ID NO: 3108441 - RNA, 18 nt, Molluscum contagiosum virus
cgagcgcgcuggacuugc

SEQ ID NO: 3108442 - RNA, 21 nt, Molluscum contagiosum virus
cgacgucaaccgggcucucgc

SEQ ID NO: 3108443 - RNA, 20 nt, Molluscum contagiosum virus
cgacgucacgcuggucacgc

SEQ ID NO: 3108444 - RNA, 17 nt, Molluscum contagiosum virus
cgacgugaucgcgcagg

SEQ ID NO: 3108445 - RNA, 17 nt, Molluscum contagiosum virus
cgagcgccgccagcucc

SEQ ID NO: 3108446 - RNA, 21 nt, Molluscum contagiosum virus
cgagcgccgccagcuccgcgc

SEQ ID NO: 3108447 - RNA, 15 nt, Molluscum contagiosum virus
cgagcgccgcgugcg

SEQ ID NO: 3108448 - RNA, 17 nt, Molluscum contagiosum virus
cgagcgccgcgugcgcg

SEQ ID NO: 3108449 - RNA, 15 nt, Molluscum contagiosum virus
cgagcgccgcucgca

SEQ ID NO: 3108450 - RNA, 14 nt, Molluscum contagiosum virus
cgagcgccugcgag

SEQ ID NO: 3108451 - RNA, 16 nt, Molluscum contagiosum virus
cgagcgccugcgagca

SEQ ID NO: 3108452 - RNA, 21 nt, Molluscum contagiosum virus
cgacgcgcguggagcgcgcgg

SEQ ID NO: 3108453 - RNA, 14 nt, Molluscum contagiosum virus
cgacgcgcugcucu

SEQ ID NO: 3108454 - RNA, 17 nt, Molluscum contagiosum virus
cgacgcggaggucgagc

SEQ ID NO: 3108455 - RNA, 22 nt, Molluscum contagiosum virus
cgacgcgcgcggcaagcagcgu

SEQ ID NO: 3108456 - RNA, 18 nt, Molluscum contagiosum virus
cgacgcgcggcagacgcc

SEQ ID NO: 3108457 - RNA, 20 nt, Molluscum contagiosum virus
cgacgccuuguucaccaucc

SEQ ID NO: 3108458 - RNA, 19 nt, Molluscum contagiosum virus
cgacgcgagaaagaccuug

SEQ ID NO: 3108459 - RNA, 22 nt, Molluscum contagiosum virus
cgacgcgaucuuccgcgacgag

SEQ ID NO: 3108460 - RNA, 15 nt, Molluscum contagiosum virus
cgacgccaucaggaa

SEQ ID NO: 3108461 - RNA, 18 nt, Molluscum contagiosum virus
cgacgccccggcgcgaaa

SEQ ID NO: 3108462 - RNA, 14 nt, Molluscum contagiosum virus
cgacgccgagcccg

SEQ ID NO: 3108463 - RNA, 15 nt, Molluscum contagiosum virus
cgacgccgagcccga

SEQ ID NO: 3108464 - RNA, 17 nt, Molluscum contagiosum virus
cgacgccguccgcgcag

SEQ ID NO: 3108465 - RNA, 13 nt, Molluscum contagiosum virus
cgacgacacgcgu

SEQ ID NO: 3108466 - RNA, 17 nt, Molluscum contagiosum virus
cgacgacagcgacgaga

SEQ ID NO: 3108467 - RNA, 16 nt, Molluscum contagiosum virus
cgaccuacgaggugcu

SEQ ID NO: 3108468 - RNA, 18 nt, Molluscum contagiosum virus
cgacgaggccuacagcgc

SEQ ID NO: 3108469 - RNA, 13 nt, Molluscum contagiosum virus
cgacgagggcgcc

SEQ ID NO: 3108470 - RNA, 14 nt, Molluscum contagiosum virus
cgacgaggugcgcg

SEQ ID NO: 3108471 - RNA, 15 nt, Molluscum contagiosum virus
cgacgagugcgccgc

SEQ ID NO: 3108472 - RNA, 16 nt, Molluscum contagiosum virus
cgacgagugcgccgcg

SEQ ID NO: 3108473 - RNA, 14 nt, Molluscum contagiosum virus
cgacgauggccacg

SEQ ID NO: 3108474 - RNA, 22 nt, Molluscum contagiosum virus
cgagcucuuccccgcgggccgc

SEQ ID NO: 3108475 - RNA, 14 nt, Molluscum contagiosum virus
cgagcugcggcgcg

SEQ ID NO: 3108476 - RNA, 15 nt, Molluscum contagiosum virus
cgagcugcgggcgcg

SEQ ID NO: 3108477 - RNA, 16 nt, Molluscum contagiosum virus
cgagcugcuagcggca

SEQ ID NO: 3108478 - RNA, 14 nt, Molluscum contagiosum virus
cgagcugcugcgcg

SEQ ID NO: 3108479 - RNA, 15 nt, Molluscum contagiosum virus
cgagcugcugcgcgc

SEQ ID NO: 3108480 - RNA, 16 nt, Molluscum contagiosum virus
cgagcugcuguacucg

SEQ ID NO: 3108481 - RNA, 11 nt, Molluscum contagiosum virus
cgagcugugcg

SEQ ID NO: 3108482 - RNA, 23 nt, Molluscum contagiosum virus
cgagcuuccucaaggcgcacgag

SEQ ID NO: 3108483 - RNA, 23 nt, Molluscum contagiosum virus
cgagcuuugugcgaccugcugcg

SEQ ID NO: 3108484 - RNA, 14 nt, Molluscum contagiosum virus
cgaggaaacgcagc

SEQ ID NO: 3108485 - RNA, 23 nt, Molluscum contagiosum virus
cgagcgcugccgcuucgugcgcg

SEQ ID NO: 3108486 - RNA, 15 nt, Molluscum contagiosum virus
cgagcgcuucuuccg

SEQ ID NO: 3108487 - RNA, 17 nt, Molluscum contagiosum virus
cgagcggagcgggcacg

SEQ ID NO: 3108488 - RNA, 14 nt, Molluscum contagiosum virus
cgagcggcgcgcgc

SEQ ID NO: 3108489 - RNA, 14 nt, Molluscum contagiosum virus
cgagcgcgggcgcc

SEQ ID NO: 3108490 - RNA, 14 nt, Molluscum contagiosum virus
cgagcgcgggcgcg

SEQ ID NO: 3108491 - RNA, 20 nt, Molluscum contagiosum virus
cgagcgcguccaugagcauc

SEQ ID NO: 3108492 - RNA, 13 nt, Molluscum contagiosum virus
cgagcgcgugcuc

SEQ ID NO: 3108493 - RNA, 18 nt, Molluscum contagiosum virus
cgaggaccucgcgcgccg

SEQ ID NO: 3108494 - RNA, 17 nt, Molluscum contagiosum virus
cgaggacgacgccgagc

SEQ ID NO: 3108495 - RNA, 20 nt, Molluscum contagiosum virus
cgaggacgagccccgcgccg

SEQ ID NO: 3108496 - RNA, 20 nt, Molluscum contagiosum virus
cgaggacgcgggcguguccg

SEQ ID NO: 3108497 - RNA, 17 nt, Molluscum contagiosum virus
cgagcuaaauggacgcg

SEQ ID NO: 3108498 - RNA, 14 nt, Molluscum contagiosum virus
cgagcuacugcgcg

SEQ ID NO: 3108499 - RNA, 15 nt, Molluscum contagiosum virus
cgagcuacugcgcgc

SEQ ID NO: 3108500 - RNA, 22 nt, Molluscum contagiosum virus
cgagcucgccuccuugcccgag

SEQ ID NO: 3108501 - RNA, 17 nt, Molluscum contagiosum virus
cgagcucgcgcgccagc

SEQ ID NO: 3108502 - RNA, 14 nt, Molluscum contagiosum virus
cgagcggcugcucg

SEQ ID NO: 3108503 - RNA, 22 nt, Molluscum contagiosum virus
cgagcgugaccagugcgugcuc

SEQ ID NO: 3108504 - RNA, 17 nt, Molluscum contagiosum virus
cgaggacuuccgcgcgc

SEQ ID NO: 3108505 - RNA, 14 nt, Molluscum contagiosum virus
cgaggcaccgcccg

SEQ ID NO: 3108506 - RNA, 20 nt, Molluscum contagiosum virus
cgaggcagccgcggcgcccg

SEQ ID NO: 3108507 - RNA, 16 nt, Molluscum contagiosum virus
cgaggccuacgugcug

SEQ ID NO: 3108508 - RNA, 23 nt, Molluscum contagiosum virus
cgaggccugcguggacagcaucc

SEQ ID NO: 3108509 - RNA, 17 nt, Molluscum contagiosum virus
cgaggccuucgcgcccg

SEQ ID NO: 3108510 - RNA, 13 nt, Molluscum contagiosum virus
cgaggcgcgcacg

SEQ ID NO: 3108511 - RNA, 22 nt, Molluscum contagiosum virus
cgcacgcuugccuuggcgcccg

SEQ ID NO: 3108512 - RNA, 16 nt, Molluscum contagiosum virus
cgcacgcuuguccgcg

SEQ ID NO: 3108513 - RNA, 20 nt, Molluscum contagiosum virus
cgcacgcuuguccgcggacg

SEQ ID NO: 3108514 - RNA, 15 nt, Molluscum contagiosum virus
cgcacggcagcggcg

SEQ ID NO: 3108515 - RNA, 16 nt, Molluscum contagiosum virus
cgcacggcagcggcga

SEQ ID NO: 3108516 - RNA, 14 nt, Molluscum contagiosum virus
cgcacggccugcgg

SEQ ID NO: 3108517 - RNA, 19 nt, Molluscum contagiosum virus
cgcacggcuaggcgcggcg

SEQ ID NO: 3108518 - RNA, 16 nt, Molluscum contagiosum virus
cgcacgggccugcgcg

SEQ ID NO: 3108519 - RNA, 12 nt, Molluscum contagiosum virus
cgcacgggcgca

SEQ ID NO: 3108520 - RNA, 20 nt, Molluscum contagiosum virus
cgcacgcgaacgccuacgcg

SEQ ID NO: 3108521 - RNA, 13 nt, Molluscum contagiosum virus
cgcacgcgagcac

SEQ ID NO: 3108522 - RNA, 16 nt, Molluscum contagiosum virus
cgcacgcgagcacgcc

SEQ ID NO: 3108523 - RNA, 11 nt, Molluscum contagiosum virus
cgcacgcgcac

SEQ ID NO: 3108524 - RNA, 12 nt, Molluscum contagiosum virus
cgcacgcgcccu

SEQ ID NO: 3108525 - RNA, 14 nt, Molluscum contagiosum virus
cgcacgcgcgagca

SEQ ID NO: 3108526 - RNA, 13 nt, Molluscum contagiosum virus
cgcacgcgggacg

SEQ ID NO: 3108527 - RNA, 20 nt, Molluscum contagiosum virus
cgcacgcuagcgagcgcccg

SEQ ID NO: 3108528 - RNA, 23 nt, Molluscum contagiosum virus
cgcacgagcugcugcccgccuuc

SEQ ID NO: 3108529 - RNA, 13 nt, Molluscum contagiosum virus
cgcacgaggagcc

SEQ ID NO: 3108530 - RNA, 15 nt, Molluscum contagiosum virus
cgcacgauguacucc

SEQ ID NO: 3108531 - RNA, 17 nt, Molluscum contagiosum virus
cgcacgcacggagcaca

SEQ ID NO: 3108532 - RNA, 14 nt, Molluscum contagiosum virus
cgcacgcagcaggc

SEQ ID NO: 3108533 - RNA, 22 nt, Molluscum contagiosum virus
cgcacgcagcaggcacgacgcc

SEQ ID NO: 3108534 - RNA, 19 nt, Molluscum contagiosum virus
cgaggaggcgcccucgcgc

SEQ ID NO: 3108535 - RNA, 15 nt, Molluscum contagiosum virus
cgaggagggcguccg

SEQ ID NO: 3108536 - RNA, 19 nt, Molluscum contagiosum virus
cgcaccuugacgccgcgcg

SEQ ID NO: 3108537 - RNA, 20 nt, Molluscum contagiosum virus
cgcacgaagacuacggcacu

SEQ ID NO: 3108538 - RNA, 19 nt, Molluscum contagiosum virus
cgcacgaccacgugcagga

SEQ ID NO: 3108539 - RNA, 19 nt, Molluscum contagiosum virus
cggacacguugcagcagca

SEQ ID NO: 3108540 - RNA, 16 nt, Molluscum contagiosum virus
cggacgaagagacgcc

SEQ ID NO: 3108541 - RNA, 17 nt, Molluscum contagiosum virus
cggacgccggcgcccgc

SEQ ID NO: 3108542 - RNA, 12 nt, Molluscum contagiosum virus
cggacgcgcagc

SEQ ID NO: 3108543 - RNA, 13 nt, Molluscum contagiosum virus
cggacgcgcagcu

SEQ ID NO: 3108544 - RNA, 23 nt, Molluscum contagiosum virus
cggacgcgcgagugugcgugucu

SEQ ID NO: 3108545 - RNA, 19 nt, Molluscum contagiosum virus
cggacgcggugaccggagc

SEQ ID NO: 3108546 - RNA, 15 nt, Molluscum contagiosum virus
cggacggcgcgcagc

SEQ ID NO: 3108547 - RNA, 17 nt, Molluscum contagiosum virus
cggacggcgcgcagcgc

SEQ ID NO: 3108548 - RNA, 16 nt, Molluscum contagiosum virus
cgcuuucgcccgccgc

SEQ ID NO: 3108549 - RNA, 16 nt, Molluscum contagiosum virus
cgcuuucguccgccgc

SEQ ID NO: 3108550 - RNA, 12 nt, Molluscum contagiosum virus
cgcuuugcgcgg

SEQ ID NO: 3108551 - RNA, 22 nt, Molluscum contagiosum virus
cggaaaaaaacugcgcacgcgg

SEQ ID NO: 3108552 - RNA, 16 nt, Molluscum contagiosum virus
cgcuucugccugcucc

SEQ ID NO: 3108553 - RNA, 19 nt, Molluscum contagiosum virus
cgcuugcccggagccggcg

SEQ ID NO: 3108554 - RNA, 19 nt, Molluscum contagiosum virus
cgcuugccuuggcgcccgu

SEQ ID NO: 3108555 - RNA, 14 nt, Molluscum contagiosum virus
cgcuugcucgaagu

SEQ ID NO: 3108556 - RNA, 15 nt, Molluscum contagiosum virus
cgcuuggcgagcgcu

SEQ ID NO: 3108557 - RNA, 15 nt, Molluscum contagiosum virus
cgcuuguccgcggac

SEQ ID NO: 3108558 - RNA, 14 nt, Molluscum contagiosum virus
cgcuucgagcacgc

SEQ ID NO: 3108559 - RNA, 15 nt, Molluscum contagiosum virus
cgcuucgggcucagc

SEQ ID NO: 3108560 - RNA, 16 nt, Molluscum contagiosum virus
cgcuucuagcucgcgc

SEQ ID NO: 3108561 - RNA, 16 nt, Molluscum contagiosum virus
cgcuuccggcggcucc

SEQ ID NO: 3108562 - RNA, 15 nt, Molluscum contagiosum virus
cgcuuagcacacgcg

SEQ ID NO: 3108563 - RNA, 21 nt, Molluscum contagiosum virus
cggacagcaccccgaagacgu

SEQ ID NO: 3108564 - RNA, 18 nt, Molluscum contagiosum virus
cggacagcagcucgccgu

SEQ ID NO: 3108565 - RNA, 20 nt, Molluscum contagiosum virus
cggacagugccuccgcggac

SEQ ID NO: 3108566 - RNA, 21 nt, Molluscum contagiosum virus
cggacagugccuccgcggacg

SEQ ID NO: 3108567 - RNA, 22 nt, Molluscum contagiosum virus
cggacagugccuccgcggacgc

SEQ ID NO: 3108568 - RNA, 13 nt, Molluscum contagiosum virus
cggaacucgaaga

SEQ ID NO: 3108569 - RNA, 13 nt, Molluscum contagiosum virus
cggaacuggacgc

SEQ ID NO: 3108570 - RNA, 18 nt, Molluscum contagiosum virus
cggaagacgcgagcggcu

SEQ ID NO: 3108571 - RNA, 14 nt, Molluscum contagiosum virus
cggaagcccgccuc

SEQ ID NO: 3108572 - RNA, 13 nt, Molluscum contagiosum virus
cggaagcgcccgu

SEQ ID NO: 3108573 - RNA, 17 nt, Molluscum contagiosum virus
cggaaacgaacgcugca

SEQ ID NO: 3108574 - RNA, 15 nt, Molluscum contagiosum virus
cggaaaacgcccgag

SEQ ID NO: 3108575 - RNA, 14 nt, Molluscum contagiosum virus
cggaaccguggugc

SEQ ID NO: 3108576 - RNA, 21 nt, Molluscum contagiosum virus
cggaacgcgugaggaggcggc

SEQ ID NO: 3108577 - RNA, 14 nt, Molluscum contagiosum virus
cggaaagagcgcgc

SEQ ID NO: 3108578 - RNA, 20 nt, Molluscum contagiosum virus
cggaaagagcgcgcgaagca

SEQ ID NO: 3108579 - RNA, 14 nt, Molluscum contagiosum virus
cgcguacagcgcgc

SEQ ID NO: 3108580 - RNA, 20 nt, Molluscum contagiosum virus
cgcguacagcgcgcgugccg

SEQ ID NO: 3108581 - RNA, 14 nt, Molluscum contagiosum virus
cgcguacauccgcg

SEQ ID NO: 3108582 - RNA, 17 nt, Molluscum contagiosum virus
cgcguacauccgcgagc

SEQ ID NO: 3108583 - RNA, 18 nt, Molluscum contagiosum virus
cgcguacauccgcgagca

SEQ ID NO: 3108584 - RNA, 15 nt, Molluscum contagiosum virus
cgcguaccagcgccu

SEQ ID NO: 3108585 - RNA, 18 nt, Molluscum contagiosum virus
cgcguaccuacucgccgu

SEQ ID NO: 3108586 - RNA, 13 nt, Molluscum contagiosum virus
cgcguacgaagag

SEQ ID NO: 3108587 - RNA, 16 nt, Molluscum contagiosum virus
cgcgguaacgcgcgcg

SEQ ID NO: 3108588 - RNA, 17 nt, Molluscum contagiosum virus
cgcgguugagcgccgug

SEQ ID NO: 3108589 - RNA, 16 nt, Molluscum contagiosum virus
cgcguaaagagcgucc

SEQ ID NO: 3108590 - RNA, 17 nt, Molluscum contagiosum virus
cgcguaguacgcuacgc

SEQ ID NO: 3108591 - RNA, 18 nt, Molluscum contagiosum virus
cgcgucaucgcugcacgc

SEQ ID NO: 3108592 - RNA, 20 nt, Molluscum contagiosum virus
cgcgucaucgcugcacgcga

SEQ ID NO: 3108593 - RNA, 22 nt, Molluscum contagiosum virus
cgcguccacgaacgacagcgcc

SEQ ID NO: 3108594 - RNA, 12 nt, Molluscum contagiosum virus
cgcguccacgca

SEQ ID NO: 3108595 - RNA, 22 nt, Molluscum contagiosum virus
cgcguccacggguagcagcgcc

SEQ ID NO: 3108596 - RNA, 13 nt, Molluscum contagiosum virus
cgcguccgcgcag

SEQ ID NO: 3108597 - RNA, 15 nt, Molluscum contagiosum virus
cgcguacucgcgccg

SEQ ID NO: 3108598 - RNA, 13 nt, Molluscum contagiosum virus
cgcguagcagcgc

SEQ ID NO: 3108599 - RNA, 14 nt, Molluscum contagiosum virus
cgcguagcagcgcc

SEQ ID NO: 3108600 - RNA, 16 nt, Molluscum contagiosum virus
cgcgugacacaccgcg

SEQ ID NO: 3108601 - RNA, 15 nt, Molluscum contagiosum virus
cgcgugagagccauu

SEQ ID NO: 3108602 - RNA, 23 nt, Molluscum contagiosum virus
cgcgugaggaggcggcacugcua

SEQ ID NO: 3108603 - RNA, 15 nt, Molluscum contagiosum virus
cgcgugaguccgcgg

SEQ ID NO: 3108604 - RNA, 17 nt, Molluscum contagiosum virus
cgcgugaguccgcggcg

SEQ ID NO: 3108605 - RNA, 19 nt, Molluscum contagiosum virus
cgcgucguagacgcgcccg

SEQ ID NO: 3108606 - RNA, 20 nt, Molluscum contagiosum virus
cgcgucguagacgcgcccgu

SEQ ID NO: 3108607 - RNA, 14 nt, Molluscum contagiosum virus
cgcgucgucgccgu

SEQ ID NO: 3108608 - RNA, 12 nt, Molluscum contagiosum virus
cgcgucgcgcag

SEQ ID NO: 3108609 - RNA, 14 nt, Molluscum contagiosum virus
cgcgucgcgcgccg

SEQ ID NO: 3108610 - RNA, 16 nt, Molluscum contagiosum virus
cgcgucgcgcgccgcg

SEQ ID NO: 3108611 - RNA, 12 nt, Molluscum contagiosum virus
cgcgucgcggag

SEQ ID NO: 3108612 - RNA, 14 nt, Molluscum contagiosum virus
cgcgucgcggaggg

SEQ ID NO: 3108613 - RNA, 19 nt, Molluscum contagiosum virus
cgcgucgcggucgcggagc

SEQ ID NO: 3108614 - RNA, 22 nt, Molluscum contagiosum virus
cgcgugccuguggcgcacacgc

SEQ ID NO: 3108615 - RNA, 21 nt, Molluscum contagiosum virus
cgcgugcgagcggcgcgcgcu

SEQ ID NO: 3108616 - RNA, 22 nt, Molluscum contagiosum virus
cgcgugcgccgccgcaggcccg

SEQ ID NO: 3108617 - RNA, 14 nt, Molluscum contagiosum virus
cgcgugcgcgccag

SEQ ID NO: 3108618 - RNA, 12 nt, Molluscum contagiosum virus
cgcgugcgcgug

SEQ ID NO: 3108619 - RNA, 20 nt, Molluscum contagiosum virus
cgcgugcggcggcgcgugcu

SEQ ID NO: 3108620 - RNA, 15 nt, Molluscum contagiosum virus
cgcgugcucgcgagc

SEQ ID NO: 3108621 - RNA, 23 nt, Molluscum contagiosum virus
cgcgugcucugcuccgcggaggc

SEQ ID NO: 3108622 - RNA, 15 nt, Molluscum contagiosum virus
cgcugucgcgcgucg

SEQ ID NO: 3108623 - RNA, 14 nt, Molluscum contagiosum virus
cgcgugcauggcac

SEQ ID NO: 3108624 - RNA, 18 nt, Molluscum contagiosum virus
cgcgugcauggcacgcga

SEQ ID NO: 3108625 - RNA, 19 nt, Molluscum contagiosum virus
cgcgugccagucgcgcgag

SEQ ID NO: 3108626 - RNA, 15 nt, Molluscum contagiosum virus
cgcgugccgcccgag

SEQ ID NO: 3108627 - RNA, 19 nt, Molluscum contagiosum virus
cgcgugccgcugcgcggag

SEQ ID NO: 3108628 - RNA, 18 nt, Molluscum contagiosum virus
cgcgugccucugccagcc

SEQ ID NO: 3108629 - RNA, 15 nt, Molluscum contagiosum virus
cgcagcccgagcgcg

SEQ ID NO: 3108630 - RNA, 21 nt, Molluscum contagiosum virus
cgcagcccgagcgcgcgugcg

SEQ ID NO: 3108631 - RNA, 16 nt, Molluscum contagiosum virus
cgccgacgugcgcgug

SEQ ID NO: 3108632 - RNA, 15 nt, Molluscum contagiosum virus
cgcagaucaggagca

SEQ ID NO: 3108633 - RNA, 20 nt, Molluscum contagiosum virus
cgcagcacaugcaggccgag

SEQ ID NO: 3108634 - RNA, 15 nt, Molluscum contagiosum virus
cgcacuucacggcgu

SEQ ID NO: 3108635 - RNA, 20 nt, Molluscum contagiosum virus
cgcagcaggugcacgugcug

SEQ ID NO: 3108636 - RNA, 18 nt, Molluscum contagiosum virus
cgcagcauucccggcgcg

SEQ ID NO: 3108637 - RNA, 18 nt, Molluscum contagiosum virus
cgcagcccacgugccagc

SEQ ID NO: 3108638 - RNA, 21 nt, Molluscum contagiosum virus
cgcacgcugcgcacgggcgcg

SEQ ID NO: 3108639 - RNA, 16 nt, Molluscum contagiosum virus
cgcacguaggggacgc

SEQ ID NO: 3108640 - RNA, 21 nt, Molluscum contagiosum virus
cgcacgucuucgccgugugcg

SEQ ID NO: 3108641 - RNA, 15 nt, Molluscum contagiosum virus
cgcacgugcgcgccg

SEQ ID NO: 3108642 - RNA, 18 nt, Molluscum contagiosum virus
cgcagacgcagcgcgagc

SEQ ID NO: 3108643 - RNA, 16 nt, Molluscum contagiosum virus
cgcagacgcgcguccg

SEQ ID NO: 3108644 - RNA, 15 nt, Molluscum contagiosum virus
cgcagagccagcgcg

SEQ ID NO: 3108645 - RNA, 22 nt, Molluscum contagiosum virus
cgcagagcuccccgcgcgcagc

SEQ ID NO: 3108646 - RNA, 22 nt, Molluscum contagiosum virus
cgcagaggcgcguccgcggccg

SEQ ID NO: 3108647 - RNA, 17 nt, Molluscum contagiosum virus
cgcagaacugcugcgcg

SEQ ID NO: 3108648 - RNA, 19 nt, Molluscum contagiosum virus
cgcagaacugcugcgcgcu

SEQ ID NO: 3108649 - RNA, 17 nt, Molluscum contagiosum virus
cgcagaaguggcgcugu

SEQ ID NO: 3108650 - RNA, 20 nt, Molluscum contagiosum virus
cgcagaaguggcgcugugcg

SEQ ID NO: 3108651 - RNA, 20 nt, Molluscum contagiosum virus
cgccgcgcaauagcgcccgu

SEQ ID NO: 3108652 - RNA, 21 nt, Molluscum contagiosum virus
cgccgccagcgucgcgcgccg

SEQ ID NO: 3108653 - RNA, 15 nt, Molluscum contagiosum virus
cgccgccagcuccgc

SEQ ID NO: 3108654 - RNA, 17 nt, Molluscum contagiosum virus
cgccgccaugcugcgcg

SEQ ID NO: 3108655 - RNA, 19 nt, Molluscum contagiosum virus
cgccgccaugcugcgcgag

SEQ ID NO: 3108656 - RNA, 13 nt, Molluscum contagiosum virus
cgccgccgcgccg

SEQ ID NO: 3108657 - RNA, 18 nt, Molluscum contagiosum virus
cgccgaucuccacgucga

SEQ ID NO: 3108658 - RNA, 23 nt, Molluscum contagiosum virus
cgccgaucuccacgucgaucagc

SEQ ID NO: 3108659 - RNA, 16 nt, Molluscum contagiosum virus
cgccgcaaauuccguc

SEQ ID NO: 3108660 - RNA, 13 nt, Molluscum contagiosum virus
cgccgagcccgag

SEQ ID NO: 3108661 - RNA, 23 nt, Molluscum contagiosum virus
cgccgaggacuaccuggcggcgc

SEQ ID NO: 3108662 - RNA, 14 nt, Molluscum contagiosum virus
cgccgacugccgcc

SEQ ID NO: 3108663 - RNA, 22 nt, Molluscum contagiosum virus
cgccgacugccgccgccgcgag

SEQ ID NO: 3108664 - RNA, 23 nt, Molluscum contagiosum virus
cgccgagauggagcucacgcuca

SEQ ID NO: 3108665 - RNA, 18 nt, Molluscum contagiosum virus
cgccgcucggaauuccuu

SEQ ID NO: 3108666 - RNA, 13 nt, Molluscum contagiosum virus
cgcgggccgccgc

SEQ ID NO: 3108667 - RNA, 17 nt, Molluscum contagiosum virus
cgcgggccuguccgcgg

SEQ ID NO: 3108668 - RNA, 22 nt, Molluscum contagiosum virus
cgcgggccuguccgcgggcgca

SEQ ID NO: 3108669 - RNA, 22 nt, Molluscum contagiosum virus
cgcgggccuguccgcgggcgcg

SEQ ID NO: 3108670 - RNA, 16 nt, Molluscum contagiosum virus
cgcggcgggggcagca

SEQ ID NO: 3108671 - RNA, 22 nt, Molluscum contagiosum virus
cgcggcgguugcccgccugccg

SEQ ID NO: 3108672 - RNA, 14 nt, Molluscum contagiosum virus
cgcggcgugcccgu

SEQ ID NO: 3108673 - RNA, 17 nt, Molluscum contagiosum virus
cgcggcgugugcgggcu

SEQ ID NO: 3108674 - RNA, 15 nt, Molluscum contagiosum virus
cgcggcguucccgcu

SEQ ID NO: 3108675 - RNA, 23 nt, Molluscum contagiosum virus
cgcggcuaccacgggcccgcgcg

SEQ ID NO: 3108676 - RNA, 12 nt, Molluscum contagiosum virus
cgcggcgcggcg

SEQ ID NO: 3108677 - RNA, 20 nt, Molluscum contagiosum virus
cgcggcgcguacucgcgccg

SEQ ID NO: 3108678 - RNA, 21 nt, Molluscum contagiosum virus
cgcggcgcuuucgcccgccgc

SEQ ID NO: 3108679 - RNA, 22 nt, Molluscum contagiosum virus
cgcggcggagaugacgggcacg

SEQ ID NO: 3108680 - RNA, 23 nt, Molluscum contagiosum virus
cgcggcggagaugacgggcacgc

SEQ ID NO: 3108681 - RNA, 14 nt, Molluscum contagiosum virus
cgccgcgcgccgcg

SEQ ID NO: 3108682 - RNA, 16 nt, Molluscum contagiosum virus
cgccgcgcgcgccagc

SEQ ID NO: 3108683 - RNA, 14 nt, Molluscum contagiosum virus
cgccgcgcgcgccg

SEQ ID NO: 3108684 - RNA, 14 nt, Molluscum contagiosum virus
cgccgcgcgcggcu

SEQ ID NO: 3108685 - RNA, 13 nt, Molluscum contagiosum virus
cgccgcgggcaca

SEQ ID NO: 3108686 - RNA, 15 nt, Molluscum contagiosum virus
cgccgcggccgcgag

SEQ ID NO: 3108687 - RNA, 16 nt, Molluscum contagiosum virus
cgccgcggcgguugcc

SEQ ID NO: 3108688 - RNA, 18 nt, Molluscum contagiosum virus
cgccgcguacaugcgugc

SEQ ID NO: 3108689 - RNA, 16 nt, Molluscum contagiosum virus
cgccgcguacgcgccg

SEQ ID NO: 3108690 - RNA, 17 nt, Molluscum contagiosum virus
cgccgcguacgcgccgg

SEQ ID NO: 3108691 - RNA, 14 nt, Molluscum contagiosum virus
cgccgcgugcccgu

SEQ ID NO: 3108692 - RNA, 18 nt, Molluscum contagiosum virus
cgccgcugcccgcgcacg

SEQ ID NO: 3108693 - RNA, 15 nt, Molluscum contagiosum virus
cgccgcugccgcgcg

SEQ ID NO: 3108694 - RNA, 12 nt, Molluscum contagiosum virus
cgccgcugcgcc

SEQ ID NO: 3108695 - RNA, 14 nt, Molluscum contagiosum virus
cgccgcugcgccgg

SEQ ID NO: 3108696 - RNA, 13 nt, Molluscum contagiosum virus
cgcggcgcgccgg

SEQ ID NO: 3108697 - RNA, 14 nt, Molluscum contagiosum virus
cgcggcgcgccggc

SEQ ID NO: 3108698 - RNA, 19 nt, Molluscum contagiosum virus
cgcgggcucaagucgcccu

SEQ ID NO: 3108699 - RNA, 17 nt, Molluscum contagiosum virus
cgcggcuuacacacgca

SEQ ID NO: 3108700 - RNA, 16 nt, Molluscum contagiosum virus
cgcgggcggcggcccg

SEQ ID NO: 3108701 - RNA, 17 nt, Molluscum contagiosum virus
cgcgggcguguccgcgg

SEQ ID NO: 3108702 - RNA, 19 nt, Molluscum contagiosum virus
cgcgggcguguccgcgggc

SEQ ID NO: 3108703 - RNA, 12 nt, Molluscum contagiosum virus
cgcgggcgcacg

SEQ ID NO: 3108704 - RNA, 13 nt, Molluscum contagiosum virus
cgcgggcgcagag

SEQ ID NO: 3108705 - RNA, 18 nt, Molluscum contagiosum virus
cgcgggcgccggcguccg

SEQ ID NO: 3108706 - RNA, 14 nt, Molluscum contagiosum virus
cgcgggcgcgcccg

SEQ ID NO: 3108707 - RNA, 14 nt, Molluscum contagiosum virus
cgcgggcgcgcgcg

SEQ ID NO: 3108708 - RNA, 13 nt, Molluscum contagiosum virus
cgcgggcgcggag

SEQ ID NO: 3108709 - RNA, 17 nt, Molluscum contagiosum virus
cgcgguccuguccgcgg

SEQ ID NO: 3108710 - RNA, 19 nt, Molluscum contagiosum virus
cgcgguccuguccgcggac

SEQ ID NO: 3108711 - RNA, 22 nt, Molluscum contagiosum virus
cgcggucgacgagugcgccgcg

SEQ ID NO: 3108712 - RNA, 16 nt, Molluscum contagiosum virus
cgcggucgcccgccga

SEQ ID NO: 3108713 - RNA, 17 nt, Molluscum contagiosum virus
cgcggucgcccgccgag

SEQ ID NO: 3108714 - RNA, 18 nt, Molluscum contagiosum virus
cgcggucgcccgccgagc

SEQ ID NO: 3108715 - RNA, 13 nt, Molluscum contagiosum virus
cgcggucgcggag

SEQ ID NO: 3108716 - RNA, 21 nt, Molluscum contagiosum virus
cgcggucgggccccugcgcga

SEQ ID NO: 3108717 - RNA, 18 nt, Molluscum contagiosum virus
cgcggugagugcgcgcac

SEQ ID NO: 3108718 - RNA, 19 nt, Molluscum contagiosum virus
cgcggugagugcgcgcacg

SEQ ID NO: 3108719 - RNA, 17 nt, Molluscum contagiosum virus
cgcggugcgcgcgugcg

SEQ ID NO: 3108720 - RNA, 15 nt, Molluscum contagiosum virus
cgcggugcgggcgcg

SEQ ID NO: 3108721 - RNA, 16 nt, Molluscum contagiosum virus
cgcggugcugcgccag

SEQ ID NO: 3108722 - RNA, 16 nt, Molluscum contagiosum virus
cgcgguggccgcgccg

SEQ ID NO: 3108723 - RNA, 17 nt, Molluscum contagiosum virus
cgcgguggccgcgccgg

SEQ ID NO: 3108724 - RNA, 22 nt, Molluscum contagiosum virus
aaaaacgcgcccccguccgugc

SEQ ID NO: 3108725 - RNA, 22 nt, Human
cuccgcuuucuacccagcgagc

SEQ ID NO: 3108726 - RNA, 21 nt, Human
cuccgcuuucuacccagcgag

SEQ ID NO: 3108727 - RNA, 20 nt, Human
cuccgcuuucuacccagcga

SEQ ID NO: 3108728 - RNA, 15 nt, Human
cucccucuuucccuc

SEQ ID NO: 3108729 - RNA, 16 nt, Human
cucccucccucuuucc

SEQ ID NO: 3108730 - RNA, 19 nt, Human
cucccucuuucccucccuu

SEQ ID NO: 3108731 - RNA, 14 nt, Human
cucccaccucagcc

SEQ ID NO: 3108732 - RNA, 16 nt, Human
cucccaccucagccuc

SEQ ID NO: 3108733 - RNA, 17 nt, Human
cucccaccucagccucc

SEQ ID NO: 3108734 - RNA, 13 nt, Human
cucccaccucagc

SEQ ID NO: 3108735 - RNA, 18 nt, Human
cuccaggugcacaagcuc

SEQ ID NO: 3108736 - RNA, 20 nt, Human
cuccaggugcacaagcucca

SEQ ID NO: 3108737 - RNA, 19 nt, Human
cuccaggugcacaagcucc

SEQ ID NO: 3108738 - RNA, 23 nt, Human
cuccaggcuguaucccaugagcc

SEQ ID NO: 3108739 - RNA, 22 nt, Human
cuccaggcuguaucccaugagc

SEQ ID NO: 3108740 - RNA, 21 nt, Human
cuccagaauuucccaaagcag

SEQ ID NO: 3108741 - RNA, 16 nt, Human
cucagaaucucaaaua

SEQ ID NO: 3108742 - RNA, 17 nt, Human
cucagaaucucaaauaa

SEQ ID NO: 3108743 - RNA, 11 nt, Human
cuccagacaca

SEQ ID NO: 3108744 - RNA, 22 nt, Human
cuccagaauuucccaaagcagu

SEQ ID NO: 3108745 - RNA, 16 nt, Human
cucugcacaagcugca

SEQ ID NO: 3108746 - RNA, 16 nt, Human
cucuccgaccagacac

SEQ ID NO: 3108747 - RNA, 20 nt, Human
cucuccuccuuuucacaguu

SEQ ID NO: 3108748 - RNA, 13 nt, Human
cucuccuccuuuu

SEQ ID NO: 3108749 - RNA, 13 nt, Human
cucucccuuggau

SEQ ID NO: 3108750 - RNA, 10 nt, Human
cucuccucug

SEQ ID NO: 3108751 - RNA, 23 nt, Human
cucgguguggagaagcggcuggc

SEQ ID NO: 3108752 - RNA, 11 nt, Human
cucggugccuu

SEQ ID NO: 3108753 - RNA, 24 nt, Human
cuccuuuucacaguucucuccuuc

SEQ ID NO: 3108754 - RNA, 23 nt, Human
cuccuuugugaggaagccgcugg

SEQ ID NO: 3108755 - RNA, 22 nt, Human
cuccuuuagcgcccaguugggu

SEQ ID NO: 3108756 - RNA, 16 nt, Human
cuccuuuagcgcccag

SEQ ID NO: 3108757 - RNA, 17 nt, Human
cuccuuuagcgcccagu

SEQ ID NO: 3108758 - RNA, 22 nt, Human
cuccuagccugugccucuggga

SEQ ID NO: 3108759 - RNA, 13 nt, Human
cugacacacagcu

SEQ ID NO: 3108760 - RNA, 15 nt, Human
cugacacacagcucu

SEQ ID NO: 3108761 - RNA, 16 nt, Human
cugacacacagcucug

SEQ ID NO: 3108762 - RNA, 17 nt, Human
cugacacacagcucugu

SEQ ID NO: 3108763 - RNA, 18 nt, Human
cugacacacagcucuguc

SEQ ID NO: 3108764 - RNA, 19 nt, Human
cugacacacagcucugucc

SEQ ID NO: 3108765 - RNA, 20 nt, Human
cugacacacagcucuguccu

SEQ ID NO: 3108766 - RNA, 21 nt, Human
cugacacacagcucuguccug

SEQ ID NO: 3108767 - RNA, 22 nt, Human
cugacacacagcucuguccugg

SEQ ID NO: 3108768 - RNA, 23 nt, Human
cugacacacagcucuguccuggg

SEQ ID NO: 3108769 - RNA, 14 nt, Human
cucuugagccuggg

SEQ ID NO: 3108770 - RNA, 13 nt, Human
cucuugagccugg

SEQ ID NO: 3108771 - RNA, 23 nt, Human
cucuugagccuugaacuuugacc

SEQ ID NO: 3108772 - RNA, 15 nt, Human
cucuugagccuggga

SEQ ID NO: 3108773 - RNA, 22 nt, Human
cucuugauucauaaugacuuaa

SEQ ID NO: 3108774 - RNA, 24 nt, Human
cucuugauucauaaugacuuaagc

SEQ ID NO: 3108775 - RNA, 18 nt, Human
cucugcacaagcugcacc

SEQ ID NO: 3108776 - RNA, 17 nt, Human
cucugcacaagcugcac

SEQ ID NO: 3108777 - RNA, 22 nt, Human
cugagcugggaugauuggaggg

SEQ ID NO: 3108778 - RNA, 12 nt, Human
cugagcugggau

SEQ ID NO: 3108779 - RNA, 19 nt, Human
cugacccugcuucaaauau

SEQ ID NO: 3108780 - RNA, 21 nt, Human
cugaggaauccagacccggcu

SEQ ID NO: 3108781 - RNA, 14 nt, Human
cugaggggccucuu

SEQ ID NO: 3108782 - RNA, 23 nt, Human
cugaggaauccagacccggcugc

SEQ ID NO: 3108783 - RNA, 12 nt, Human
cugaggugggag

SEQ ID NO: 3108784 - RNA, 13 nt, Human
cugaggugggagg

SEQ ID NO: 3108785 - RNA, 22 nt, Human
cugaggugggaggaucucuuga

SEQ ID NO: 3108786 - RNA, 14 nt, Human
cugaucucucguga

SEQ ID NO: 3108787 - RNA, 18 nt, Human
cugaucucucgugauuga

SEQ ID NO: 3108788 - RNA, 17 nt, Human
cugaucucucgugauug

SEQ ID NO: 3108789 - RNA, 16 nt, Human
cuauguugcccaggca

SEQ ID NO: 3108790 - RNA, 17 nt, Human
cuauguugcccaggcag

SEQ ID NO: 3108791 - RNA, 17 nt, Human
cucaaaaaaagaaaaag

SEQ ID NO: 3108792 - RNA, 18 nt, Human
cucaaaaaaagaaaaaga

SEQ ID NO: 3108793 - RNA, 14 nt, Human
cuauguugcccagg

SEQ ID NO: 3108794 - RNA, 15 nt, Human
cuauguugcccaggc

SEQ ID NO: 3108795 - RNA, 22 nt, Human
cuauguguagggcgggaggaug

SEQ ID NO: 3108796 - RNA, 16 nt, Human
cuauguaucaaugagu

SEQ ID NO: 3108797 - RNA, 17 nt, Human
cuaugugagcacaaagg

SEQ ID NO: 3108798 - RNA, 18 nt, Human
cuaucucccccagcccca

SEQ ID NO: 3108799 - RNA, 19 nt, Human
cuauguaucaaugaguaac

SEQ ID NO: 3108800 - RNA, 20 nt, Human
cuaucucccccagccccauc

SEQ ID NO: 3108801 - RNA, 12 nt, Human
cucaaauaacua

SEQ ID NO: 3108802 - RNA, 14 nt, Human
cucacaaaggaugc

SEQ ID NO: 3108803 - RNA, 21 nt, Human
cucacacaugagcaucaggcc

SEQ ID NO: 3108804 - RNA, 14 nt, Human
cucacacaugagca

SEQ ID NO: 3108805 - RNA, 13 nt, Human
cucaccucucccu

SEQ ID NO: 3108806 - RNA, 17 nt, Human
cucaccucucccuugga

SEQ ID NO: 3108807 - RNA, 16 nt, Human
cucaccucucccuugg

SEQ ID NO: 3108808 - RNA, 15 nt, Human
cucaccucucccuug

SEQ ID NO: 3108809 - RNA, 14 nt, Human
cucaccucucccuu

SEQ ID NO: 3108810 - RNA, 13 nt, Human
cucaccugccccu

SEQ ID NO: 3108811 - RNA, 18 nt, Human
cucaccugccccucaacu

SEQ ID NO: 3108812 - RNA, 16 nt, Human
cucaccugccccucaa

SEQ ID NO: 3108813 - RNA, 14 nt, Human
cucaccugccccuc

SEQ ID NO: 3108814 - RNA, 17 nt, Human
cuagccagaggagagag

SEQ ID NO: 3108815 - RNA, 19 nt, Human
cuagccagaggagagagga

SEQ ID NO: 3108816 - RNA, 13 nt, Human
cuaggccuggcca

SEQ ID NO: 3108817 - RNA, 13 nt, Human
cuaggccugggga

SEQ ID NO: 3108818 - RNA, 12 nt, Human
cuaggccugggg

SEQ ID NO: 3108819 - RNA, 14 nt, Human
cuaggccuggccag

SEQ ID NO: 3108820 - RNA, 15 nt, Human
cuaggccuggccaga

SEQ ID NO: 3108821 - RNA, 18 nt, Human
cuaggccuggccagaugc

SEQ ID NO: 3108822 - RNA, 19 nt, Human
cuaggccuggccagaugca

SEQ ID NO: 3108823 - RNA, 16 nt, Human
cuagcauacguacaca

SEQ ID NO: 3108824 - RNA, 18 nt, Human
cuagcauacguacacauu

SEQ ID NO: 3108825 - RNA, 19 nt, Human
cuagcauacguacacauuu

SEQ ID NO: 3108826 - RNA, 15 nt, Human
cuaguuugauuaaau

SEQ ID NO: 3108827 - RNA, 20 nt, Human
cuaguuugauuaaauucuug

SEQ ID NO: 3108828 - RNA, 17 nt, Human
cuaguuugauuaaauuc

SEQ ID NO: 3108829 - RNA, 19 nt, Human
cuaguuugauuaaauucuu

SEQ ID NO: 3108830 - RNA, 14 nt, Human
cuagggaagauaau

SEQ ID NO: 3108831 - RNA, 23 nt, Human
cuaccugaggggccucuuauggg

SEQ ID NO: 3108832 - RNA, 19 nt, Human
cuaccugaggggccucuua

SEQ ID NO: 3108833 - RNA, 16 nt, Human
cuaccugaggggccuc

SEQ ID NO: 3108834 - RNA, 15 nt, Human
cuaccugaggggccu

SEQ ID NO: 3108835 - RNA, 22 nt, Human
cuaaaguguauuuuuuuacuaa

SEQ ID NO: 3108836 - RNA, 17 nt, Human
cuaaaggcuaccuuugu

SEQ ID NO: 3108837 - RNA, 19 nt, Human
cuaaaggcuaccuuuguau

SEQ ID NO: 3108838 - RNA, 19 nt, Human
cuaaaguguauuuuuuuac

SEQ ID NO: 3108839 - RNA, 14 nt, Human
cuaaagcugccagc

SEQ ID NO: 3108840 - RNA, 15 nt, Human
cuaaaggcuaccuuu

SEQ ID NO: 3108841 - RNA, 16 nt, Human
cuaaaggcuaccuuug

SEQ ID NO: 3108842 - RNA, 15 nt, Human
cuaaagcugccagcc

SEQ ID NO: 3108843 - RNA, 13 nt, Human
cguuaaaauacca

SEQ ID NO: 3108844 - RNA, 13 nt, Human
cguacacauuuua

SEQ ID NO: 3108845 - RNA, 16 nt, Human
cgccuuaaggauguuc

SEQ ID NO: 3108846 - RNA, 18 nt, Human
cgcugccccuggcagccc

SEQ ID NO: 3108847 - RNA, 19 nt, Human
cgcuggaccuugaacuggg

SEQ ID NO: 3108848 - RNA, 23 nt, Human
cgcuggaccuugaacuggguacu

SEQ ID NO: 3108849 - RNA, 13 nt, Human
cgcugccccuggc

SEQ ID NO: 3108850 - RNA, 17 nt, Human
cgcugccccuggcagcc

SEQ ID NO: 3108851 - RNA, 16 nt, Human
cgcugccccuggcagc

SEQ ID NO: 3108852 - RNA, 17 nt, Human
cgcuggggccaguuggu

SEQ ID NO: 3108853 - RNA, 20 nt, Human
cgcuggggccaguugguccc

SEQ ID NO: 3108854 - RNA, 17 nt, Human
cggagaaaggaagggcu

SEQ ID NO: 3108855 - RNA, 18 nt, Human
ccaugaguccccuguuug

SEQ ID NO: 3108856 - RNA, 23 nt, Human
ccaugaggaacaaggcaaggcug

SEQ ID NO: 3108857 - RNA, 20 nt, Human
ccaugaggaacaaggcaagg

SEQ ID NO: 3108858 - RNA, 23 nt, Human
ccaguuggguggaugccuggugg

SEQ ID NO: 3108859 - RNA, 13 nt, Human
ccaguuggucccc

SEQ ID NO: 3108860 - RNA, 20 nt, Human
ccaguuggucccccuuccau

SEQ ID NO: 3108861 - RNA, 18 nt, Human
ccaguuggucccccuucc

SEQ ID NO: 3108862 - RNA, 18 nt, Human
ccauccagguucagcuug

SEQ ID NO: 3108863 - RNA, 19 nt, Human
ccauccagguucagcuugu

SEQ ID NO: 3108864 - RNA, 20 nt, Human
ccaucccauaugccugggca

SEQ ID NO: 3108865 - RNA, 19 nt, Human
ccaucccauaugccugggc

SEQ ID NO: 3108866 - RNA, 21 nt, Human
ccaucccauaugccugggcag

SEQ ID NO: 3108867 - RNA, 22 nt, Human
ccauccccuguagagugggagc

SEQ ID NO: 3108868 - RNA, 13 nt, Human
cccaagcucugcu

SEQ ID NO: 3108869 - RNA, 14 nt, Human
cccaagcucugcuc

SEQ ID NO: 3108870 - RNA, 12 nt, Human
cccaagcucugc

SEQ ID NO: 3108871 - RNA, 20 nt, Human
cccaacucaccccagcccca

SEQ ID NO: 3108872 - RNA, 17 nt, Human
cccaacucaccccagcc

SEQ ID NO: 3108873 - RNA, 12 nt, Human
cccacucccugc

SEQ ID NO: 3108874 - RNA, 13 nt, Human
cccacucccugca

SEQ ID NO: 3108875 - RNA, 23 nt, Human
cccacugcuuuuggucuguguga

SEQ ID NO: 3108876 - RNA, 22 nt, Human
cccacugcuuuuggucugugug

SEQ ID NO: 3108877 - RNA, 16 nt, Human
cccaacucaccccagc

SEQ ID NO: 3108878 - RNA, 15 nt, Human
cccaacucaccccag

SEQ ID NO: 3108879 - RNA, 17 nt, Human
ccagccccauccucugu

SEQ ID NO: 3108880 - RNA, 15 nt, Human
ccagccccauccucu

SEQ ID NO: 3108881 - RNA, 17 nt, Human
ccagccccagugcccac

SEQ ID NO: 3108882 - RNA, 14 nt, Human
ccagcagagcaccu

SEQ ID NO: 3108883 - RNA, 13 nt, Human
ccagcagagcacc

SEQ ID NO: 3108884 - RNA, 12 nt, Human
ccagcagagcac

SEQ ID NO: 3108885 - RNA, 24 nt, Human
ccagccccuucugacccaugcugc

SEQ ID NO: 3108886 - RNA, 23 nt, Human
ccagccccuucugacccaugcug

SEQ ID NO: 3108887 - RNA, 21 nt, Human
ccaggggaaaaucagccugcu

SEQ ID NO: 3108888 - RNA, 12 nt, Human
ccaggcuggcgu

SEQ ID NO: 3108889 - RNA, 23 nt, Human
ccaggcaggucuugaacuccugg

SEQ ID NO: 3108890 - RNA, 12 nt, Human
ccaggcaggucu

SEQ ID NO: 3108891 - RNA, 14 nt, Human
ccaggcaggucuug

SEQ ID NO: 3108892 - RNA, 23 nt, Human
cccagcaagugagagcugggugu

SEQ ID NO: 3108893 - RNA, 16 nt, Human
cccaggaaaggcucca

SEQ ID NO: 3108894 - RNA, 15 nt, Human
cccaggaaaggcucc

SEQ ID NO: 3108895 - RNA, 22 nt, Human
cccaggcuuagucacugagaca

SEQ ID NO: 3108896 - RNA, 20 nt, Human
cccaggcuuagucacugaga

SEQ ID NO: 3108897 - RNA, 18 nt, Human
cccaggaaaggcuccagg

SEQ ID NO: 3108898 - RNA, 17 nt, Human
cccaggaaaggcuccag

SEQ ID NO: 3108899 - RNA, 20 nt, Human
cccauccucuguacagagcc

SEQ ID NO: 3108900 - RNA, 22 nt, Human
cccauccucuguacagagccca

SEQ ID NO: 3108901 - RNA, 21 nt, Human
cccauccucuguacagagccc

SEQ ID NO: 3108902 - RNA, 15 nt, Human
ccccagauugcaaca

SEQ ID NO: 3108903 - RNA, 20 nt, Human
ccccagauugcaacaggcug

SEQ ID NO: 3108904 - RNA, 15 nt, Human
cccauuugcuccuuu

SEQ ID NO: 3108905 - RNA, 13 nt, Human
cccauucugccug

SEQ ID NO: 3108906 - RNA, 19 nt, Human
cccauucugccugcccagg

SEQ ID NO: 3108907 - RNA, 14 nt, Human
cccauucugccugc

SEQ ID NO: 3108908 - RNA, 15 nt, Human
cccauucugccugcc

SEQ ID NO: 3108909 - RNA, 23 nt, Human
ccccgaggccuucucugaaggac

SEQ ID NO: 3108910 - RNA, 14 nt, Human
ccccgcacugggcu

SEQ ID NO: 3108911 - RNA, 16 nt, Human
cccggccccugcuggu

SEQ ID NO: 3108912 - RNA, 15 nt, Human
cccggccccugcugg

SEQ ID NO: 3108913 - RNA, 12 nt, Human
cccgggaagggg

SEQ ID NO: 3108914 - RNA, 15 nt, Human
cccgggaagggggcu

SEQ ID NO: 3108915 - RNA, 13 nt, Human
ccccuucugaccc

SEQ ID NO: 3108916 - RNA, 14 nt, Human
ccccuucugaccca

SEQ ID NO: 3108917 - RNA, 16 nt, Human
cccgaauagcugggac

SEQ ID NO: 3108918 - RNA, 17 nt, Human
cccgaauagcugggacu

SEQ ID NO: 3108919 - RNA, 18 nt, Human
cccgaauagcugggacua

SEQ ID NO: 3108920 - RNA, 17 nt, Human
cccggccaccugcggug

SEQ ID NO: 3108921 - RNA, 16 nt, Human
cccucaacucuccucc

SEQ ID NO: 3108922 - RNA, 16 nt, Human
cccucaacaccucugc

SEQ ID NO: 3108923 - RNA, 21 nt, Human
cccgggaagggggcugggaca

SEQ ID NO: 3108924 - RNA, 18 nt, Human
cccgggaagggggcuggg

SEQ ID NO: 3108925 - RNA, 15 nt, Human
ccccugacaacacuc

SEQ ID NO: 3108926 - RNA, 14 nt, Human
ccccugccacccug

SEQ ID NO: 3108927 - RNA, 16 nt, Human
ccccugccacccuggg

SEQ ID NO: 3108928 - RNA, 16 nt, Human
ccucuuucccucccuu

SEQ ID NO: 3108929 - RNA, 19 nt, Human
ccucuuucccucccuuccu

SEQ ID NO: 3108930 - RNA, 15 nt, Human
ccucuuugagugaag

SEQ ID NO: 3108931 - RNA, 14 nt, Human
ccugcaggcagcca

SEQ ID NO: 3108932 - RNA, 13 nt, Human
ccugcaggcagcc

SEQ ID NO: 3108933 - RNA, 12 nt, Human
ccugcaggcagc

SEQ ID NO: 3108934 - RNA, 17 nt, Human
ccugcccaccuggccuc

SEQ ID NO: 3108935 - RNA, 15 nt, Human
ccugcccaccuggcc

SEQ ID NO: 3108936 - RNA, 16 nt, Human
ccugccucagccuccc

SEQ ID NO: 3108937 - RNA, 15 nt, Human
ccugccucagccucc

SEQ ID NO: 3108938 - RNA, 21 nt, Human
ccugcccaggccccugccacc

SEQ ID NO: 3108939 - RNA, 18 nt, Human
ccugcccaggccccugcc

SEQ ID NO: 3108940 - RNA, 19 nt, Human
ccugcccaggccccugcca

SEQ ID NO: 3108941 - RNA, 19 nt, Human
ccugcccaccuggccucug

SEQ ID NO: 3108942 - RNA, 18 nt, Human
ccugcccaccuggccucu

SEQ ID NO: 3108943 - RNA, 20 nt, Human
ccuggccugagcugggauga

SEQ ID NO: 3108944 - RNA, 22 nt, Human
ccuggccucaagugauucuccu

SEQ ID NO: 3108945 - RNA, 21 nt, Human
ccuggccccucagggucccug

SEQ ID NO: 3108946 - RNA, 20 nt, Human
ccuggccccucagggucccu

SEQ ID NO: 3108947 - RNA, 18 nt, Human
ccuggccccucagggucc

SEQ ID NO: 3108948 - RNA, 16 nt, Human
ccuggccccucagggu

SEQ ID NO: 3108949 - RNA, 18 nt, Human
ccuggauggggcugcacc

SEQ ID NO: 3108950 - RNA, 17 nt, Human
ccuggauggggcugcac

SEQ ID NO: 3108951 - RNA, 15 nt, Human
ccuggauggggcugc

SEQ ID NO: 3108952 - RNA, 15 nt, Human
ccuggggagaaagua

SEQ ID NO: 3108953 - RNA, 18 nt, Human
ccugguggcagugggagc

SEQ ID NO: 3108954 - RNA, 19 nt, Human
ccugguggcagugggagcu

SEQ ID NO: 3108955 - RNA, 20 nt, Human
ccugguggcagugggagcug

SEQ ID NO: 3108956 - RNA, 15 nt, Human
ccugguggcaguggg

SEQ ID NO: 3108957 - RNA, 13 nt, Human
ccugguguggaag

SEQ ID NO: 3108958 - RNA, 18 nt, Human
ccgcagcccugcagaggg

SEQ ID NO: 3108959 - RNA, 14 nt, Human
ccgcagcccugcag

SEQ ID NO: 3108960 - RNA, 14 nt, Human
cccuccuuucacca

SEQ ID NO: 3108961 - RNA, 21 nt, Human
cccugugaguacuacaguccu

SEQ ID NO: 3108962 - RNA, 15 nt, Human
cccugugauggggcc

SEQ ID NO: 3108963 - RNA, 23 nt, Human
cccugugaguacuacaguccucc

SEQ ID NO: 3108964 - RNA, 23 nt, Human
cccuuuuuuggcugcugaaggcu

SEQ ID NO: 3108965 - RNA, 22 nt, Human
cccuuuuuuggcugcugaaggc

SEQ ID NO: 3108966 - RNA, 21 nt, Human
cccuuuuuuggcugcugaagg

SEQ ID NO: 3108967 - RNA, 19 nt, Human
cccuucucuccagccccug

SEQ ID NO: 3108968 - RNA, 14 nt, Human
cccuucucuccagc

SEQ ID NO: 3108969 - RNA, 17 nt, Human
ccggccaccugcggugc

SEQ ID NO: 3108970 - RNA, 18 nt, Human
ccggccaccugcggugcu

SEQ ID NO: 3108971 - RNA, 22 nt, Human
ccuagccuuagaagucacacag

SEQ ID NO: 3108972 - RNA, 19 nt, Human
ccuagccuuagaagucaca

SEQ ID NO: 3108973 - RNA, 23 nt, Human
ccuagccugugccucugggacug

SEQ ID NO: 3108974 - RNA, 21 nt, Human
ccuagcauacguacacauuuu

SEQ ID NO: 3108975 - RNA, 12 nt, Human
ccucccaucacc

SEQ ID NO: 3108976 - RNA, 16 nt, Human
ccuccaagaccuucuc

SEQ ID NO: 3108977 - RNA, 19 nt, Human
ccuccaagaccuucuccuu

SEQ ID NO: 3108978 - RNA, 17 nt, Human
ccuccaagaccuucucc

SEQ ID NO: 3108979 - RNA, 17 nt, Human
ccucccaucacccgcua

SEQ ID NO: 3108980 - RNA, 23 nt, Human
ccucaagugauucuccugccuca

SEQ ID NO: 3108981 - RNA, 20 nt, Human
ccucaagugauucuccugcc

SEQ ID NO: 3108982 - RNA, 18 nt, Human
ccucaggcaggugggaug

SEQ ID NO: 3108983 - RNA, 12 nt, Human
ccucaggcaggu

SEQ ID NO: 3108984 - RNA, 18 nt, Human
ccucauuagcauuuugcu

SEQ ID NO: 3108985 - RNA, 15 nt, Human
ccucaaccuccuggg

SEQ ID NO: 3108986 - RNA, 19 nt, Human
ccucaacucuccuccagag

SEQ ID NO: 3108987 - RNA, 23 nt, Human
ccucaacucuccuccagagucag

SEQ ID NO: 3108988 - RNA, 21 nt, Human
ccucaacucuccuccagaguc

SEQ ID NO: 3108989 - RNA, 16 nt, Human
ccucaacaccucugca

SEQ ID NO: 3108990 - RNA, 20 nt, Human
ccuccuuugugaggaagccg

SEQ ID NO: 3108991 - RNA, 23 nt, Human
ccuccuuugugaggaagccgcug

SEQ ID NO: 3108992 - RNA, 18 nt, Human
ccuccuuuucacaguucu

SEQ ID NO: 3108993 - RNA, 13 nt, Human
ccuccgccucuug

SEQ ID NO: 3108994 - RNA, 14 nt, Human
ccuccgccucuugg

SEQ ID NO: 3108995 - RNA, 18 nt, Human
auugcuugagcucaggag

SEQ ID NO: 3108996 - RNA, 16 nt, Human
auuuaaugaaagacug

SEQ ID NO: 3108997 - RNA, 15 nt, Human
auuuaaugaaagacu

SEQ ID NO: 3108998 - RNA, 20 nt, Human
auuuaaugaaagacuguaca

SEQ ID NO: 3108999 - RNA, 21 nt, Human
auuuaaugaaagacuguacaa

SEQ ID NO: 3109000 - RNA, 14 nt, Human
auuucacucuccuu

SEQ ID NO: 3109001 - RNA, 17 nt, Human
auucuccuuguguuacu

SEQ ID NO: 3109002 - RNA, 18 nt, Human
auucuccuuguguuacua

SEQ ID NO: 3109003 - RNA, 19 nt, Human
auucuccuuguguuacuaa

SEQ ID NO: 3109004 - RNA, 21 nt, Human
auucuccuuguguuacuaagu

SEQ ID NO: 3109005 - RNA, 22 nt, Human
auucuccuuguguuacuaaguu

SEQ ID NO: 3109006 - RNA, 17 nt, Human
auucucuaguuugauua

SEQ ID NO: 3109007 - RNA, 18 nt, Human
auucucuaguuugauuaa

SEQ ID NO: 3109008 - RNA, 19 nt, Human
auucuucugcuucagccuc

SEQ ID NO: 3109009 - RNA, 20 nt, Human
auucuucugcuucagccucc

SEQ ID NO: 3109010 - RNA, 22 nt, Human
auucuucuguacgucugacagg

SEQ ID NO: 3109011 - RNA, 14 nt, Human
auucuucugcuuca

SEQ ID NO: 3109012 - RNA, 14 nt, Human
auucuugcaaagua

SEQ ID NO: 3109013 - RNA, 15 nt, Human
auucuugcaaaguau

SEQ ID NO: 3109014 - RNA, 16 nt, Human
auucuugcaaaguauc

SEQ ID NO: 3109015 - RNA, 18 nt, Human
auucaacagguuuuccug

SEQ ID NO: 3109016 - RNA, 19 nt, Human
auuaaaugcccagccccuu

SEQ ID NO: 3109017 - RNA, 17 nt, Human
auuaaaugcccagcccc

SEQ ID NO: 3109018 - RNA, 23 nt, Human
auuaugcaugaaguaauaugcac

SEQ ID NO: 3109019 - RNA, 18 nt, Human
caacucaccccagcccca

SEQ ID NO: 3109020 - RNA, 17 nt, Human
caacucaccccagcccc

SEQ ID NO: 3109021 - RNA, 22 nt, Human
caagaauugaagcaggacuaaa

SEQ ID NO: 3109022 - RNA, 14 nt, Human
caacucuccuccag

SEQ ID NO: 3109023 - RNA, 16 nt, Human
caagaccacguuucua

SEQ ID NO: 3109024 - RNA, 17 nt, Human
caagaccacguuucuaa

SEQ ID NO: 3109025 - RNA, 18 nt, Human
caagaccacguuucuaaa

SEQ ID NO: 3109026 - RNA, 21 nt, Human
caaaucugcuuuuuaaagaau

SEQ ID NO: 3109027 - RNA, 21 nt, Human
caaagcagugcaugcuguccc

SEQ ID NO: 3109028 - RNA, 18 nt, Human
caaagcagugcaugcugu

SEQ ID NO: 3109029 - RNA, 14 nt, Human
caaagauauuuugc

SEQ ID NO: 3109030 - RNA, 16 nt, Human
caaagauauuuugcuu

SEQ ID NO: 3109031 - RNA, 22 nt, Human
caaagcagugcaugcugucccu

SEQ ID NO: 3109032 - RNA, 19 nt, Human
caaaguaucccuacuguaa

SEQ ID NO: 3109033 - RNA, 21 nt, Human
caaaguaucccuacuguaauu

SEQ ID NO: 3109034 - RNA, 22 nt, Human
caaaguagaagucuuagaugua

SEQ ID NO: 3109035 - RNA, 19 nt, Human
caaaagcugggcagguugg

SEQ ID NO: 3109036 - RNA, 17 nt, Human
auuuuuuuuuccuucag

SEQ ID NO: 3109037 - RNA, 22 nt, Human
auuuuuuuuuccuucagugccu

SEQ ID NO: 3109038 - RNA, 20 nt, Human
auuuuuuuuuccuucagugc

SEQ ID NO: 3109039 - RNA, 16 nt, Human
auuuuuuugagacaga

SEQ ID NO: 3109040 - RNA, 18 nt, Human
auuuuuuuuuccuucagu

SEQ ID NO: 3109041 - RNA, 14 nt, Human
auuuuuagacagag

SEQ ID NO: 3109042 - RNA, 16 nt, Human
auuuuuaagugcugca

SEQ ID NO: 3109043 - RNA, 18 nt, Human
auuuuuaagugcugcauu

SEQ ID NO: 3109044 - RNA, 19 nt, Human
auuuuuaagugcugcauuu

SEQ ID NO: 3109045 - RNA, 16 nt, Human
caaggcaaggcuguca

SEQ ID NO: 3109046 - RNA, 17 nt, Human
caaggcaaggcugucaa

SEQ ID NO: 3109047 - RNA, 18 nt, Human
caaggcaaggcugucaau

SEQ ID NO: 3109048 - RNA, 21 nt, Human
caaggccaaaggaagcacaug

SEQ ID NO: 3109049 - RNA, 20 nt, Human
caaggccaaaggaagcacau

SEQ ID NO: 3109050 - RNA, 19 nt, Human
caaggccaaaggaagcaca

SEQ ID NO: 3109051 - RNA, 15 nt, Human
caaugggagcucaug

SEQ ID NO: 3109052 - RNA, 19 nt, Human
cacaagagcccaggccucc

SEQ ID NO: 3109053 - RNA, 18 nt, Human
cacaagagcccaggccuc

SEQ ID NO: 3109054 - RNA, 19 nt, Human
cacaagcuccaagcuccca

SEQ ID NO: 3109055 - RNA, 18 nt, Human
cacaagcuccaagcuccc

SEQ ID NO: 3109056 - RNA, 20 nt, Human
cacaagagcccaggccuccu

SEQ ID NO: 3109057 - RNA, 17 nt, Human
cacaagagcccaggccu

SEQ ID NO: 3109058 - RNA, 16 nt, Human
caauggcagccuuggc

SEQ ID NO: 3109059 - RNA, 12 nt, Human
caaugcuggcug

SEQ ID NO: 3109060 - RNA, 20 nt, Human
caaugcuggcuguuggcugg

SEQ ID NO: 3109061 - RNA, 21 nt, Human
caaugcuggcuguuggcuggg

SEQ ID NO: 3109062 - RNA, 13 nt, Human
caaugcuggcugu

SEQ ID NO: 3109063 - RNA, 20 nt, Human
cacaagcuccaagcucccag

SEQ ID NO: 3109064 - RNA, 16 nt, Human
cacccaggagccccga

SEQ ID NO: 3109065 - RNA, 18 nt, Human
cacccaccucagccuccc

SEQ ID NO: 3109066 - RNA, 13 nt, Human
caccagccccagu

SEQ ID NO: 3109067 - RNA, 17 nt, Human
cacccaccucagccucc

SEQ ID NO: 3109068 - RNA, 19 nt, Human
cacauuuuauuuuauuaug

SEQ ID NO: 3109069 - RNA, 20 nt, Human
cacauuuuauuuuauuaugc

SEQ ID NO: 3109070 - RNA, 17 nt, Human
cacauuuuauuuuauua

SEQ ID NO: 3109071 - RNA, 14 nt, Human
caccaacgucugug

SEQ ID NO: 3109072 - RNA, 14 nt, Human
cacagacccugccc

SEQ ID NO: 3109073 - RNA, 17 nt, Human
cacagacccugcccugu

SEQ ID NO: 3109074 - RNA, 16 nt, Human
cacagacccugcccug

SEQ ID NO: 3109075 - RNA, 11 nt, Human
cacagcucugu

SEQ ID NO: 3109076 - RNA, 14 nt, Human
cacagcucuguccu

SEQ ID NO: 3109077 - RNA, 17 nt, Human
cacagcucuucuccagg

SEQ ID NO: 3109078 - RNA, 14 nt, Human
cacagcucuucucc

SEQ ID NO: 3109079 - RNA, 15 nt, Human
cacagcucuucucca

SEQ ID NO: 3109080 - RNA, 15 nt, Human
cacagcucuguccug

SEQ ID NO: 3109081 - RNA, 16 nt, Human
cacagcucuguccugg

SEQ ID NO: 3109082 - RNA, 18 nt, Human
cacagcucuguccuggga

SEQ ID NO: 3109083 - RNA, 10 nt, Human
cacagcucuu

SEQ ID NO: 3109084 - RNA, 10 nt, Human
cacacauuuu

SEQ ID NO: 3109085 - RNA, 11 nt, Human
cacacauuuuu

SEQ ID NO: 3109086 - RNA, 12 nt, Human
cacacauuuuuu

SEQ ID NO: 3109087 - RNA, 16 nt, Human
cacacauuuuuuaaau

SEQ ID NO: 3109088 - RNA, 19 nt, Human
cacacauuuuuuaaaugca

SEQ ID NO: 3109089 - RNA, 20 nt, Human
cacacauuuuuuaaaugcac

SEQ ID NO: 3109090 - RNA, 14 nt, Human
caccuuucccaucu

SEQ ID NO: 3109091 - RNA, 17 nt, Human
caccuuuguccccaccg

SEQ ID NO: 3109092 - RNA, 18 nt, Human
caccuuggcugcagggag

SEQ ID NO: 3109093 - RNA, 15 nt, Human
caccuuggcugcagg

SEQ ID NO: 3109094 - RNA, 16 nt, Human
caccuuggcugcaggg

SEQ ID NO: 3109095 - RNA, 20 nt, Human
cacucuuauugcccacgcug

SEQ ID NO: 3109096 - RNA, 21 nt, Human
cacucuuauugcccacgcugg

SEQ ID NO: 3109097 - RNA, 22 nt, Human
cacucuuauugcccacgcugga

SEQ ID NO: 3109098 - RNA, 14 nt, Human
cacggcucacugca

SEQ ID NO: 3109099 - RNA, 17 nt, Human
cacggccaggccagagg

SEQ ID NO: 3109100 - RNA, 12 nt, Human
cacggccaggcc

SEQ ID NO: 3109101 - RNA, 13 nt, Human
cacggccaggcca

SEQ ID NO: 3109102 - RNA, 20 nt, Human
cacucugucgcccagucugg

SEQ ID NO: 3109103 - RNA, 13 nt, Human
cacuccagccugg

SEQ ID NO: 3109104 - RNA, 14 nt, Human
cacuccagccuggg

SEQ ID NO: 3109105 - RNA, 16 nt, Human
cacuacauucuguuaa

SEQ ID NO: 3109106 - RNA, 17 nt, Human
cacuacauucuguuaau

SEQ ID NO: 3109107 - RNA, 21 nt, Human
cacuacauucuguuaaucauu

SEQ ID NO: 3109108 - RNA, 13 nt, Human
cacuuucuagcca

SEQ ID NO: 3109109 - RNA, 17 nt, Human
cacuuucuagccagagg

SEQ ID NO: 3109110 - RNA, 16 nt, Human
cacuuucuagccagag

SEQ ID NO: 3109111 - RNA, 18 nt, Human
cacuuguguuaugaagca

SEQ ID NO: 3109112 - RNA, 17 nt, Human
cacugccaugccagcuu

SEQ ID NO: 3109113 - RNA, 20 nt, Human
cacugcagccucaaccuccu

SEQ ID NO: 3109114 - RNA, 21 nt, Human
cacugcagccucaaccuccug

SEQ ID NO: 3109115 - RNA, 22 nt, Human
cacugcagccucaaccuccugg

SEQ ID NO: 3109116 - RNA, 23 nt, Human
cacugcagccucaaccuccuggg

SEQ ID NO: 3109117 - RNA, 19 nt, Human
cacugcagccucaaccucc

SEQ ID NO: 3109118 - RNA, 14 nt, Human
cacugcagccucaa

SEQ ID NO: 3109119 - RNA, 17 nt, Human
cacuguugcccaggcug

SEQ ID NO: 3109120 - RNA, 23 nt, Human
cacuguugcccaggcuggcgugc

SEQ ID NO: 3109121 - RNA, 18 nt, Human
cacuguugcccaggcugg

SEQ ID NO: 3109122 - RNA, 19 nt, Human
cacuguugcccaggcuggc

SEQ ID NO: 3109123 - RNA, 16 nt, Human
cagaaauguacagcaa

SEQ ID NO: 3109124 - RNA, 16 nt, Human
cagaaguuucugccgc

SEQ ID NO: 3109125 - RNA, 14 nt, Human
cagaaguuucugcc

SEQ ID NO: 3109126 - RNA, 15 nt, Human
cagugccaaaaacaa

SEQ ID NO: 3109127 - RNA, 11 nt, Human
cagugggagcu

SEQ ID NO: 3109128 - RNA, 12 nt, Human
cagugcccacag

SEQ ID NO: 3109129 - RNA, 19 nt, Human
cagucugauucccaagcuc

SEQ ID NO: 3109130 - RNA, 20 nt, Human
cagucugauucccaagcucu

SEQ ID NO: 3109131 - RNA, 19 nt, Human
cagugcaugcugucccuua

SEQ ID NO: 3109132 - RNA, 23 nt, Human
cagugcaugcugucccuuacgug

SEQ ID NO: 3109133 - RNA, 22 nt, Human
cagugcaugcugucccuuacgu

SEQ ID NO: 3109134 - RNA, 21 nt, Human
cagggucucacucugucgccc

SEQ ID NO: 3109135 - RNA, 17 nt, Human
cagggucucacucuguc

SEQ ID NO: 3109136 - RNA, 18 nt, Human
cagggucucacucugucg

SEQ ID NO: 3109137 - RNA, 14 nt, Human
caggugcgaaagga

SEQ ID NO: 3109138 - RNA, 20 nt, Human
caggugcuaggaacacuccu

SEQ ID NO: 3109139 - RNA, 18 nt, Human
caggugcuaggaacacuc

SEQ ID NO: 3109140 - RNA, 14 nt, Human
cagguugguggggg

SEQ ID NO: 3109141 - RNA, 12 nt, Human
caggguuggccc

SEQ ID NO: 3109142 - RNA, 16 nt, Human
caggugauccacccac

SEQ ID NO: 3109143 - RNA, 17 nt, Human
caggugauccacccacc

SEQ ID NO: 3109144 - RNA, 22 nt, Human
caggugcacaagcuccaagcuc

SEQ ID NO: 3109145 - RNA, 19 nt, Human
cagucaccccggccaccug

SEQ ID NO: 3109146 - RNA, 20 nt, Human
cagucaccccggccaccugc

SEQ ID NO: 3109147 - RNA, 22 nt, Human
cagucaccccggccaccugcgg

SEQ ID NO: 3109148 - RNA, 16 nt, Human
cagguuuaagcuguua

SEQ ID NO: 3109149 - RNA, 18 nt, Human
cagguuuaagcuguuacu

SEQ ID NO: 3109150 - RNA, 22 nt, Human
cagggaguccgaaagggacuug

SEQ ID NO: 3109151 - RNA, 18 nt, Human
cagggaggugaccccagg

SEQ ID NO: 3109152 - RNA, 16 nt, Human
caggcugggcuucagu

SEQ ID NO: 3109153 - RNA, 15 nt, Human
caggcugggcuucag

SEQ ID NO: 3109154 - RNA, 17 nt, Human
caggcugggcuucagug

SEQ ID NO: 3109155 - RNA, 19 nt, Human
caggcugggcuucaguggc

SEQ ID NO: 3109156 - RNA, 16 nt, Human
caggccagagggagug

SEQ ID NO: 3109157 - RNA, 19 nt, Human
caggccagagggagugaca

SEQ ID NO: 3109158 - RNA, 21 nt, Human
caggccagagggagugacaga

SEQ ID NO: 3109159 - RNA, 16 nt, Human
caggaggccagccuug

SEQ ID NO: 3109160 - RNA, 15 nt, Human
caggaggccagccuu

SEQ ID NO: 3109161 - RNA, 14 nt, Human
caggaggccagccu

SEQ ID NO: 3109162 - RNA, 17 nt, Human
caggaggccagccuuga

SEQ ID NO: 3109163 - RNA, 22 nt, Human
caggcacccaccaucaugucug

SEQ ID NO: 3109164 - RNA, 23 nt, Human
caggcacccaccaucaugucugg

SEQ ID NO: 3109165 - RNA, 18 nt, Human
caggcacccaccaucaug

SEQ ID NO: 3109166 - RNA, 15 nt, Human
cagcggggacagcuc

SEQ ID NO: 3109167 - RNA, 14 nt, Human
cagcggggacagcu

SEQ ID NO: 3109168 - RNA, 16 nt, Human
cagcggggacagcucc

SEQ ID NO: 3109169 - RNA, 17 nt, Human
cagcggggacagcuccu

SEQ ID NO: 3109170 - RNA, 15 nt, Human
cagcccuuagcaggg

SEQ ID NO: 3109171 - RNA, 16 nt, Human
cagcccuuagcaggga

SEQ ID NO: 3109172 - RNA, 21 nt, Human
cagcccuuagcagggaaacag

SEQ ID NO: 3109173 - RNA, 21 nt, Human
cagccccuggaugcagccuca

SEQ ID NO: 3109174 - RNA, 19 nt, Human
cagccccuggaugcagccu

SEQ ID NO: 3109175 - RNA, 18 nt, Human
cagccccuggaugcagcc

SEQ ID NO: 3109176 - RNA, 17 nt, Human
cagccccuggaugcagc

SEQ ID NO: 3109177 - RNA, 14 nt, Human
cagccccuggaugc

SEQ ID NO: 3109178 - RNA, 13 nt, Human
cagccccuggaug

SEQ ID NO: 3109179 - RNA, 12 nt, Human
cagccccuggau

SEQ ID NO: 3109180 - RNA, 21 nt, Human
cagccgagauagccaaggcca

SEQ ID NO: 3109181 - RNA, 20 nt, Human
cagccgagauagccaaggcc

SEQ ID NO: 3109182 - RNA, 22 nt, Human
cagcuccagcucaccagcccca

SEQ ID NO: 3109183 - RNA, 16 nt, Human
cagcuccagcucacca

SEQ ID NO: 3109184 - RNA, 17 nt, Human
cagcuccagcucaccag

SEQ ID NO: 3109185 - RNA, 18 nt, Human
cagcuccagcucaccagc

SEQ ID NO: 3109186 - RNA, 20 nt, Human
cagcuccagcucaccagccc

SEQ ID NO: 3109187 - RNA, 13 nt, Human
cagcuccagcuca

SEQ ID NO: 3109188 - RNA, 14 nt, Human
cagcuccagcucac

SEQ ID NO: 3109189 - RNA, 15 nt, Human
cagcuccagcucacc

SEQ ID NO: 3109190 - RNA, 18 nt, Human
cagcugugcucuggacag

SEQ ID NO: 3109191 - RNA, 15 nt, Human
cagcuucauuuccug

SEQ ID NO: 3109192 - RNA, 18 nt, Human
cagcuucauuuccugugu

SEQ ID NO: 3109193 - RNA, 15 nt, Human
caggaaaggcuccag

SEQ ID NO: 3109194 - RNA, 14 nt, Human
caggaaaggcucca

SEQ ID NO: 3109195 - RNA, 20 nt, Human
cagagucagaaguuucugcc

SEQ ID NO: 3109196 - RNA, 20 nt, Human
cagaggggguggccucccaa

SEQ ID NO: 3109197 - RNA, 19 nt, Human
cagaggggguggccuccca

SEQ ID NO: 3109198 - RNA, 17 nt, Human
cagaggggguggccucc

SEQ ID NO: 3109199 - RNA, 18 nt, Human
cagaggggguggccuccc

SEQ ID NO: 3109200 - RNA, 22 nt, Human
cagagggccugcaagggaguga

SEQ ID NO: 3109201 - RNA, 18 nt, Human
cagagcugccaccugccu

SEQ ID NO: 3109202 - RNA, 16 nt, Human
cagagcugccaccugc

SEQ ID NO: 3109203 - RNA, 22 nt, Human
cagaaguuugagaucagccugg

SEQ ID NO: 3109204 - RNA, 23 nt, Human
cagaaguuucugccgcagcccug

SEQ ID NO: 3109205 - RNA, 20 nt, Human
cagaaguuugagaucagccu

SEQ ID NO: 3109206 - RNA, 13 nt, Human
cagccaggccaca

SEQ ID NO: 3109207 - RNA, 12 nt, Human
cagccaggccac

SEQ ID NO: 3109208 - RNA, 23 nt, Human
cagcauauucaggaagcucaggg

SEQ ID NO: 3109209 - RNA, 22 nt, Human
cagcauauucaggaagcucagg

SEQ ID NO: 3109210 - RNA, 19 nt, Human
cagcauauucaggaagcuc

SEQ ID NO: 3109211 - RNA, 15 nt, Human
cauauucaggaagcu

SEQ ID NO: 3109212 - RNA, 14 nt, Human
cauauucaggaagc

SEQ ID NO: 3109213 - RNA, 20 nt, Human
cauauucaggaagcucaggg

SEQ ID NO: 3109214 - RNA, 20 nt, Human
cauaugccugggcagaagga

SEQ ID NO: 3109215 - RNA, 15 nt, Human
cauaugccugggcag

SEQ ID NO: 3109216 - RNA, 13 nt, Human
cauaugccugggc

SEQ ID NO: 3109217 - RNA, 22 nt, Human
cauaugccugggcagaaggaag

SEQ ID NO: 3109218 - RNA, 19 nt, Human
cauagcagagaaugaaagg

SEQ ID NO: 3109219 - RNA, 22 nt, Human
cauagcagagaaugaaagggcc

SEQ ID NO: 3109220 - RNA, 14 nt, Human
cauccccuguagag

SEQ ID NO: 3109221 - RNA, 19 nt, Human
caucccauaugccugggca

SEQ ID NO: 3109222 - RNA, 15 nt, Human
caucaggccaggccc

SEQ ID NO: 3109223 - RNA, 19 nt, Human
caucaggccaggcccucug

SEQ ID NO: 3109224 - RNA, 16 nt, Human
caucaggccaggcccu

SEQ ID NO: 3109225 - RNA, 14 nt, Human
caucaggccaggcc

SEQ ID NO: 3109226 - RNA, 17 nt, Human
caucccagccccaauga

SEQ ID NO: 3109227 - RNA, 22 nt, Human
cauuaggugugacugaauuucu

SEQ ID NO: 3109228 - RNA, 23 nt, Human
cauuaucuagauacuguaucaug

SEQ ID NO: 3109229 - RNA, 12 nt, Human
cauguuggccag

SEQ ID NO: 3109230 - RNA, 13 nt, Human
cauguuggccagg

SEQ ID NO: 3109231 - RNA, 16 nt, Human
cauguccaagaagccc

SEQ ID NO: 3109232 - RNA, 18 nt, Human
cauguccaagaagcccag

SEQ ID NO: 3109233 - RNA, 20 nt, Human
cauguccaagaagcccagga

SEQ ID NO: 3109234 - RNA, 19 nt, Human
cauguccaagaagcccagg

SEQ ID NO: 3109235 - RNA, 12 nt, Human
cauuccuguucc

SEQ ID NO: 3109236 - RNA, 15 nt, Human
caugcugcccuguga

SEQ ID NO: 3109237 - RNA, 14 nt, Human
caugcugcccugug

SEQ ID NO: 3109238 - RNA, 23 nt, Human
caugacacgaauauugcugaugg

SEQ ID NO: 3109239 - RNA, 21 nt, Human
caugacacgaauauugcugau

SEQ ID NO: 3109240 - RNA, 15 nt, Human
caugaaguaauaugc

SEQ ID NO: 3109241 - RNA, 19 nt, Human
caugaaguaauaugcacac

SEQ ID NO: 3109242 - RNA, 22 nt, Human
caugaaguaauaugcacacauu

SEQ ID NO: 3109243 - RNA, 23 nt, Human
caugaaguaauaugcacacauuu

SEQ ID NO: 3109244 - RNA, 16 nt, Human
caugcacgugugugca

SEQ ID NO: 3109245 - RNA, 13 nt, Human
caugcuccuggcc

SEQ ID NO: 3109246 - RNA, 13 nt, Human
caugcugcccugu

SEQ ID NO: 3109247 - RNA, 12 nt, Human
caugcugcccug

SEQ ID NO: 3109248 - RNA, 23 nt, Human
caugauuaaccacuucagcugac

SEQ ID NO: 3109249 - RNA, 22 nt, Human
caugauuaaccacuucagcuga

SEQ ID NO: 3109250 - RNA, 24 nt, Human
caugauuaaccacuucagcugacu

SEQ ID NO: 3109251 - RNA, 22 nt, Human
ccacagagaaaguacuucucca

SEQ ID NO: 3109252 - RNA, 18 nt, Human
ccacgcuggaccuugaac

SEQ ID NO: 3109253 - RNA, 18 nt, Human
ccaccuuggcugcaggga

SEQ ID NO: 3109254 - RNA, 19 nt, Human
ccaccuuggcugcagggag

SEQ ID NO: 3109255 - RNA, 12 nt, Human
ccaccuuggcug

SEQ ID NO: 3109256 - RNA, 14 nt, Human
ccaccuuggcugca

SEQ ID NO: 3109257 - RNA, 15 nt, Human
ccaccuuggcugcag

SEQ ID NO: 3109258 - RNA, 16 nt, Human
ccaccuuggcugcagg

SEQ ID NO: 3109259 - RNA, 19 nt, Human
ccaccaucaugucuggcua

SEQ ID NO: 3109260 - RNA, 18 nt, Human
ccaccaucaccagacagg

SEQ ID NO: 3109261 - RNA, 18 nt, Human
ccaccaucaugucuggcu

SEQ ID NO: 3109262 - RNA, 12 nt, Human
ccaagcuggucc

SEQ ID NO: 3109263 - RNA, 19 nt, Human
ccaagcuggucccacucag

SEQ ID NO: 3109264 - RNA, 14 nt, Human
ccaagaagcccagg

SEQ ID NO: 3109265 - RNA, 15 nt, Human
ccaaggccaaaggaa

SEQ ID NO: 3109266 - RNA, 22 nt, Human
ccaaauggaaaugggcagagca

SEQ ID NO: 3109267 - RNA, 15 nt, Human
ccaacgucugugcca

SEQ ID NO: 3109268 - RNA, 13 nt, Human
ccaacgucugugc

SEQ ID NO: 3109269 - RNA, 13 nt, Human
ccaagaagcccag

SEQ ID NO: 3109270 - RNA, 16 nt, Human
ccaaggccaaaggaag

SEQ ID NO: 3109271 - RNA, 19 nt, Human
cauuuuuuaaaugcaccug

SEQ ID NO: 3109272 - RNA, 15 nt, Human
cauuuuuuaaaugca

SEQ ID NO: 3109273 - RNA, 16 nt, Human
cauuuuuuaaaugcac

SEQ ID NO: 3109274 - RNA, 14 nt, Human
cauuuauucugcuc

SEQ ID NO: 3109275 - RNA, 17 nt, Human
cauuugucacacacuuu

SEQ ID NO: 3109276 - RNA, 15 nt, Human
cauuuggauuggaug

SEQ ID NO: 3109277 - RNA, 22 nt, Human
ggcagccccuguucuggcagag

SEQ ID NO: 3109278 - RNA, 20 nt, Human
ggcaguggugguuuucuguu

SEQ ID NO: 3109279 - RNA, 21 nt, Human
ggcaguggugguuuucuguuc

SEQ ID NO: 3109280 - RNA, 19 nt, Human
ggcacagaaaauggaagac

SEQ ID NO: 3109281 - RNA, 21 nt, Human
ggcacagaaaauggaagacag

SEQ ID NO: 3109282 - RNA, 20 nt, Human
ggcacagaaaauggaagaca

SEQ ID NO: 3109283 - RNA, 23 nt, Human
ggcacagaaaauggaagacagcu

SEQ ID NO: 3109284 - RNA, 23 nt, Human
ggcacucagaagacacugauggg

SEQ ID NO: 3109285 - RNA, 20 nt, Human
ggcacucagaagacacugau

SEQ ID NO: 3109286 - RNA, 13 nt, Human
ggcacaucagcac

SEQ ID NO: 3109287 - RNA, 23 nt, Human
ggcagccccauucugccugccca

SEQ ID NO: 3109288 - RNA, 11 nt, Human
ggcagccccug

SEQ ID NO: 3109289 - RNA, 16 nt, Human
ggagagaagagaaugc

SEQ ID NO: 3109290 - RNA, 13 nt, Human
ggccccugcuggu

SEQ ID NO: 3109291 - RNA, 14 nt, Human
ggccccugcugguu

SEQ ID NO: 3109292 - RNA, 13 nt, Human
ggcccggcuccag

SEQ ID NO: 3109293 - RNA, 23 nt, Human
ggccccugcugguucaggguugg

SEQ ID NO: 3109294 - RNA, 15 nt, Human
ggcccggcuccaggc

SEQ ID NO: 3109295 - RNA, 21 nt, Human
ggcccuucucuccagccccug

SEQ ID NO: 3109296 - RNA, 20 nt, Human
ggcccuucucuccagccccu

SEQ ID NO: 3109297 - RNA, 19 nt, Human
ggcccuucucuccagcccc

SEQ ID NO: 3109298 - RNA, 23 nt, Human
ggcccuucucuccagccccugga

SEQ ID NO: 3109299 - RNA, 22 nt, Human
ggcccuucucuccagccccugg

SEQ ID NO: 3109300 - RNA, 23 nt, Human
ggccucaagugauucuccugccu

SEQ ID NO: 3109301 - RNA, 17 nt, Human
ggccaguuggucccccu

SEQ ID NO: 3109302 - RNA, 14 nt, Human
ggccaguugguccc

SEQ ID NO: 3109303 - RNA, 20 nt, Human
ggccagugugacaaggauug

SEQ ID NO: 3109304 - RNA, 18 nt, Human
ggcucagcggggacagcu

SEQ ID NO: 3109305 - RNA, 20 nt, Human
ggcucagguggggucacucu

SEQ ID NO: 3109306 - RNA, 19 nt, Human
ggcucagguggggucacuc

SEQ ID NO: 3109307 - RNA, 19 nt, Human
ggcucagcggggacagcuc

SEQ ID NO: 3109308 - RNA, 20 nt, Human
ggcucagcggggacagcucc

SEQ ID NO: 3109309 - RNA, 11 nt, Human
ggcucucaggc

SEQ ID NO: 3109310 - RNA, 13 nt, Human
ggcucucaggcca

SEQ ID NO: 3109311 - RNA, 12 nt, Human
ggcucuuccagg

SEQ ID NO: 3109312 - RNA, 22 nt, Human
ggcugcaugcgggcuuccuccu

SEQ ID NO: 3109313 - RNA, 20 nt, Human
ggcugccaaugggagcucau

SEQ ID NO: 3109314 - RNA, 19 nt, Human
ggcugccaaugggagcuca

SEQ ID NO: 3109315 - RNA, 22 nt, Human
ggcugcggaaugaaccacaucu

SEQ ID NO: 3109316 - RNA, 16 nt, Human
ggcugggagagccuuc

SEQ ID NO: 3109317 - RNA, 15 nt, Human
ggcugggagagccuu

SEQ ID NO: 3109318 - RNA, 14 nt, Human
ggcugggagagccu

SEQ ID NO: 3109319 - RNA, 13 nt, Human
ggcugggagagcc

SEQ ID NO: 3109320 - RNA, 21 nt, Human
ggcuuccuccugguguggaag

SEQ ID NO: 3109321 - RNA, 18 nt, Human
gggaagaagcucucuccu

SEQ ID NO: 3109322 - RNA, 12 nt, Human
gggacagcuccu

SEQ ID NO: 3109323 - RNA, 13 nt, Human
gggacagcuccuu

SEQ ID NO: 3109324 - RNA, 15 nt, Human
gggacagcuccuucu

SEQ ID NO: 3109325 - RNA, 15 nt, Human
ggcugggggccucag

SEQ ID NO: 3109326 - RNA, 16 nt, Human
ggcugggggccucagu

SEQ ID NO: 3109327 - RNA, 17 nt, Human
ggcugggggccucagug

SEQ ID NO: 3109328 - RNA, 19 nt, Human
ggcugggggccucagugcc

SEQ ID NO: 3109329 - RNA, 19 nt, Human
ggcuggguggcaccagcag

SEQ ID NO: 3109330 - RNA, 21 nt, Human
ggcuggguucuacccaggugc

SEQ ID NO: 3109331 - RNA, 19 nt, Human
ggcuggguucuacccaggu

SEQ ID NO: 3109332 - RNA, 18 nt, Human
ggcuucaguggcagcugc

SEQ ID NO: 3109333 - RNA, 17 nt, Human
ggcuucaguggcagcug

SEQ ID NO: 3109334 - RNA, 19 nt, Human
ggcuucaguggcagcugcu

SEQ ID NO: 3109335 - RNA, 20 nt, Human
ggcuucaguggcagcugcuu

SEQ ID NO: 3109336 - RNA, 18 nt, Human
ggcuguaucccaugagcc

SEQ ID NO: 3109337 - RNA, 16 nt, Human
ggcuuccucauaguau

SEQ ID NO: 3109338 - RNA, 18 nt, Human
ggcuucauccuccucaga

SEQ ID NO: 3109339 - RNA, 22 nt, Human
ggcuucauccuccucagaucuu

SEQ ID NO: 3109340 - RNA, 13 nt, Human
aaaacaugcuaca

SEQ ID NO: 3109341 - RNA, 14 nt, Human
aaaacaugcuacac

SEQ ID NO: 3109342 - RNA, 12 nt, Human
aaaacccaagug

SEQ ID NO: 3109343 - RNA, 20 nt, Human
gggaccagagcugccaccug

SEQ ID NO: 3109344 - RNA, 14 nt, Human
gggaccagagcugc

SEQ ID NO: 3109345 - RNA, 18 nt, Human
aaaacucuccucugcugc

SEQ ID NO: 3109346 - RNA, 23 nt, Human
gggagcaggcucgggcuccccag

SEQ ID NO: 3109347 - RNA, 19 nt, Human
gggagagccuuccaggggu

SEQ ID NO: 3109348 - RNA, 15 nt, Human
gggagagccuuccag

SEQ ID NO: 3109349 - RNA, 16 nt, Human
gggagggagggcucca

SEQ ID NO: 3109350 - RNA, 15 nt, Human
gggagggagggcucc

SEQ ID NO: 3109351 - RNA, 18 nt, Human
gggaggucaaggcugcag

SEQ ID NO: 3109352 - RNA, 21 nt, Human
gggagaaccaaaaagaggcua

SEQ ID NO: 3109353 - RNA, 15 nt, Human
gggacuuggaagcuc

SEQ ID NO: 3109354 - RNA, 17 nt, Human
gggacuuggaagcuccg

SEQ ID NO: 3109355 - RNA, 18 nt, Human
gggacuuggaagcuccgc

SEQ ID NO: 3109356 - RNA, 23 nt, Human
gggacuuggaagcuccgcuuucu

SEQ ID NO: 3109357 - RNA, 13 nt, Human
gguggaugccugg

SEQ ID NO: 3109358 - RNA, 12 nt, Human
ggugcaaugacc

SEQ ID NO: 3109359 - RNA, 13 nt, Human
ggugcaaugaccu

SEQ ID NO: 3109360 - RNA, 18 nt, Human
ggugauccacccaccuca

SEQ ID NO: 3109361 - RNA, 23 nt, Human
ggugauccacccaccucagccuc

SEQ ID NO: 3109362 - RNA, 24 nt, Human
ggugauccacccaccucagccucc

SEQ ID NO: 3109363 - RNA, 13 nt, Human
ggucgaggcagga

SEQ ID NO: 3109364 - RNA, 13 nt, Human
ggugaacagaaca

SEQ ID NO: 3109365 - RNA, 15 nt, Human
aaagcuuguuaagau

SEQ ID NO: 3109366 - RNA, 13 nt, Human
aaagcugcugaca

SEQ ID NO: 3109367 - RNA, 22 nt, Human
aaagcugccagccgagauagcc

SEQ ID NO: 3109368 - RNA, 22 nt, Human
aaaggaaagagggagguaagga

SEQ ID NO: 3109369 - RNA, 17 nt, Human
aaaggagauuggaagga

SEQ ID NO: 3109370 - RNA, 17 nt, Human
aaaggagagcuagcagc

SEQ ID NO: 3109371 - RNA, 21 nt, Human
aaaggagagcuagcagcaggg

SEQ ID NO: 3109372 - RNA, 22 nt, Human
aaagggacuuggaagcuccgcu

SEQ ID NO: 3109373 - RNA, 11 nt, Human
gguccugcugc

SEQ ID NO: 3109374 - RNA, 12 nt, Human
gguccugcugca

SEQ ID NO: 3109375 - RNA, 19 nt, Human
aaagaugcuucucacugcc

SEQ ID NO: 3109376 - RNA, 14 nt, Human
aaagaugcuucuca

SEQ ID NO: 3109377 - RNA, 17 nt, Human
aaagaugcuucucacug

SEQ ID NO: 3109378 - RNA, 23 nt, Human
aaagacugaguacguugugcauu

SEQ ID NO: 3109379 - RNA, 13 nt, Human
aaagacuguacaa

SEQ ID NO: 3109380 - RNA, 23 nt, Human
aaaccaagucaagugaaaaagga

SEQ ID NO: 3109381 - RNA, 15 nt, Human
aaacgggcucagcaa

SEQ ID NO: 3109382 - RNA, 19 nt, Human
ggguggcaccagcagccug

SEQ ID NO: 3109383 - RNA, 17 nt, Human
aaacuuaaucuaaaugg

SEQ ID NO: 3109384 - RNA, 18 nt, Human
aaacuuaaucuaaaugga

SEQ ID NO: 3109385 - RNA, 16 nt, Human
aaacuuaaucuaaaug

SEQ ID NO: 3109386 - RNA, 14 nt, Human
aaacuuaaucuaaa

SEQ ID NO: 3109387 - RNA, 11 nt, Human
aaacacauuuu

SEQ ID NO: 3109388 - RNA, 20 nt, Human
aaaauuuugauguuuuaagg

SEQ ID NO: 3109389 - RNA, 19 nt, Human
aaaauuuagaaauauaauu

SEQ ID NO: 3109390 - RNA, 13 nt, Human
gggaugagaaagg

SEQ ID NO: 3109391 - RNA, 18 nt, Human
ggggaauguuugccucug

SEQ ID NO: 3109392 - RNA, 22 nt, Human
ggggaauguuugccucugccuc

SEQ ID NO: 3109393 - RNA, 15 nt, Human
ggggaccagagcugc

SEQ ID NO: 3109394 - RNA, 16 nt, Human
ggggaccagagcugcc

SEQ ID NO: 3109395 - RNA, 12 nt, Human
gggggccucagu

SEQ ID NO: 3109396 - RNA, 15 nt, Human
gggggccucagugcc

SEQ ID NO: 3109397 - RNA, 17 nt, Human
gggggccucagugccac

SEQ ID NO: 3109398 - RNA, 18 nt, Human
gggggccucagugccacu

SEQ ID NO: 3109399 - RNA, 20 nt, Human
aaaguacacuguuucaaacu

SEQ ID NO: 3109400 - RNA, 19 nt, Human
aaaguacuucuccacccug

SEQ ID NO: 3109401 - RNA, 23 nt, Human
aaaguacuucuccacccugcucu

SEQ ID NO: 3109402 - RNA, 20 nt, Human
aaaguacuucuccacccugc

SEQ ID NO: 3109403 - RNA, 21 nt, Human
aaaguacuucuccacccugcu

SEQ ID NO: 3109404 - RNA, 18 nt, Human
aaaguaucccuacuguaa

SEQ ID NO: 3109405 - RNA, 14 nt, Human
aaauauaauugaca

SEQ ID NO: 3109406 - RNA, 18 nt, Human
aaauaccagccaguaaau

SEQ ID NO: 3109407 - RNA, 17 nt, Human
aaauacagauagauaua

SEQ ID NO: 3109408 - RNA, 14 nt, Human
guaauaugcacaca

SEQ ID NO: 3109409 - RNA, 16 nt, Human
guaauaugcacacauu

SEQ ID NO: 3109410 - RNA, 17 nt, Human
guaauaugcacacauuu

SEQ ID NO: 3109411 - RNA, 18 nt, Human
guaauaugcacacauuuu

SEQ ID NO: 3109412 - RNA, 22 nt, Human
guaauuugugauacaaugcugu

SEQ ID NO: 3109413 - RNA, 19 nt, Human
aaauauuaagaaagacuau

SEQ ID NO: 3109414 - RNA, 16 nt, Human
aaaucagcugcuacua

SEQ ID NO: 3109415 - RNA, 18 nt, Human
aaaucagccugcuccagc

SEQ ID NO: 3109416 - RNA, 12 nt, Human
aaaucagccugc

SEQ ID NO: 3109417 - RNA, 19 nt, Human
aaaucagccguguaaccau

SEQ ID NO: 3109418 - RNA, 19 nt, Human
guacauggaauaacaugua

SEQ ID NO: 3109419 - RNA, 17 nt, Human
guacaugaaaacacauu

SEQ ID NO: 3109420 - RNA, 18 nt, Human
guacaugaaaacacauuu

SEQ ID NO: 3109421 - RNA, 19 nt, Human
guacaugaaaacacauuuu

SEQ ID NO: 3109422 - RNA, 20 nt, Human
guacaugaaaacacauuuuu

SEQ ID NO: 3109423 - RNA, 14 nt, Human
guacaugaaaacac

SEQ ID NO: 3109424 - RNA, 15 nt, Human
guacaugaaaacaca

SEQ ID NO: 3109425 - RNA, 16 nt, Human
guacaugaaaacacau

SEQ ID NO: 3109426 - RNA, 12 nt, Human
guacccacugcu

SEQ ID NO: 3109427 - RNA, 18 nt, Human
guagaagcccuucuaccu

SEQ ID NO: 3109428 - RNA, 21 nt, Human
guagaagucuuagauguauau

SEQ ID NO: 3109429 - RNA, 20 nt, Human
guagaaauaucugaaaaugu

SEQ ID NO: 3109430 - RNA, 21 nt, Human
guagaaauaucugaaaaugua

SEQ ID NO: 3109431 - RNA, 23 nt, Human
guagaaauaucugaaaauguaug

SEQ ID NO: 3109432 - RNA, 11 nt, Human
guagagacagg

SEQ ID NO: 3109433 - RNA, 12 nt, Human
guagagacaggg

SEQ ID NO: 3109434 - RNA, 15 nt, Human
guagagccagggucu

SEQ ID NO: 3109435 - RNA, 13 nt, Human
guagagacagggu

SEQ ID NO: 3109436 - RNA, 10 nt, Human
guagagccag

SEQ ID NO: 3109437 - RNA, 11 nt, Human
guagagccagg

SEQ ID NO: 3109438 - RNA, 15 nt, Human
guacuauguaucaau

SEQ ID NO: 3109439 - RNA, 17 nt, Human
guacuauguaucaauga

SEQ ID NO: 3109440 - RNA, 17 nt, Human
guacuacaguccuccca

SEQ ID NO: 3109441 - RNA, 13 nt, Human
guacuauguauca

SEQ ID NO: 3109442 - RNA, 13 nt, Human
guacccacugcuc

SEQ ID NO: 3109443 - RNA, 14 nt, Human
guacccacugcucu

SEQ ID NO: 3109444 - RNA, 19 nt, Human
guacuacaguccucccauc

SEQ ID NO: 3109445 - RNA, 18 nt, Human
guacuacaguccucccau

SEQ ID NO: 3109446 - RNA, 16 nt, Human
guacuggagaaaaugg

SEQ ID NO: 3109447 - RNA, 15 nt, Human
ggaagccgcuggggc

SEQ ID NO: 3109448 - RNA, 22 nt, Human
ggaagcucagggccuggcucag

SEQ ID NO: 3109449 - RNA, 11 nt, Human
ggaagcuccgc

SEQ ID NO: 3109450 - RNA, 23 nt, Human
ggaagcucagggccuggcucagg

SEQ ID NO: 3109451 - RNA, 15 nt, Human
ggaagcucagggccu

SEQ ID NO: 3109452 - RNA, 16 nt, Human
ggaaggaaacccagcu

SEQ ID NO: 3109453 - RNA, 20 nt, Human
ggaaggaaacccagcucugg

SEQ ID NO: 3109454 - RNA, 19 nt, Human
ggaaggaaacccagcucug

SEQ ID NO: 3109455 - RNA, 17 nt, Human
ggacacuaaccacgcug

SEQ ID NO: 3109456 - RNA, 19 nt, Human
ggacagcuccuucuguccu

SEQ ID NO: 3109457 - RNA, 20 nt, Human
ggacagcuccuucuguccua

SEQ ID NO: 3109458 - RNA, 17 nt, Human
ggacagcuccuucuguc

SEQ ID NO: 3109459 - RNA, 14 nt, Human
ggacacagcucuuc

SEQ ID NO: 3109460 - RNA, 15 nt, Human
ggacacagcucuucu

SEQ ID NO: 3109461 - RNA, 18 nt, Human
ggacacagcucuucucca

SEQ ID NO: 3109462 - RNA, 16 nt, Human
ggaauccagacccggc

SEQ ID NO: 3109463 - RNA, 18 nt, Human
ggaauaacauguaauuaa

SEQ ID NO: 3109464 - RNA, 13 nt, Human
ggacaagagcagg

SEQ ID NO: 3109465 - RNA, 23 nt, Human
ggacaaggaugaucuaggaagac

SEQ ID NO: 3109466 - RNA, 22 nt, Human
ggacaaggaugaucuaggaaga

SEQ ID NO: 3109467 - RNA, 15 nt, Human
ggaagagaaaaaaua

SEQ ID NO: 3109468 - RNA, 18 nt, Human
ggaagacuuuggaaagag

SEQ ID NO: 3109469 - RNA, 13 nt, Human
ggaagagaaaaaa

SEQ ID NO: 3109470 - RNA, 22 nt, Human
ggaagacaaugugaaaagaaaa

SEQ ID NO: 3109471 - RNA, 14 nt, Human
ggaagacagcucuu

SEQ ID NO: 3109472 - RNA, 13 nt, Human
ggaagacagcucu

SEQ ID NO: 3109473 - RNA, 12 nt, Human
ggaagacuuugg

SEQ ID NO: 3109474 - RNA, 17 nt, Human
ggaagacuuuggaaaga

SEQ ID NO: 3109475 - RNA, 13 nt, Human
ggaagacuuugga

SEQ ID NO: 3109476 - RNA, 19 nt, Human
ggaacacuccuucacagau

SEQ ID NO: 3109477 - RNA, 14 nt, Human
ggaacacucugaga

SEQ ID NO: 3109478 - RNA, 12 nt, Human
ggaacacucuga

SEQ ID NO: 3109479 - RNA, 16 nt, Human
ggaacacucugagacu

SEQ ID NO: 3109480 - RNA, 15 nt, Human
ggaacacucugagac

SEQ ID NO: 3109481 - RNA, 12 nt, Human
ggacccccugaa

SEQ ID NO: 3109482 - RNA, 11 nt, Human
ggacccugagg

SEQ ID NO: 3109483 - RNA, 19 nt, Human
ggacccugaggcccagagg

SEQ ID NO: 3109484 - RNA, 13 nt, Human
ggacccugaggcc

SEQ ID NO: 3109485 - RNA, 12 nt, Human
ggacccugaggc

SEQ ID NO: 3109486 - RNA, 12 nt, Human
ggaccucaggcc

SEQ ID NO: 3109487 - RNA, 13 nt, Human
ggaccucaggccu

SEQ ID NO: 3109488 - RNA, 20 nt, Human
ggacguguuaugacuccaga

SEQ ID NO: 3109489 - RNA, 15 nt, Human
ggaccucaggccugg

SEQ ID NO: 3109490 - RNA, 14 nt, Human
ggaccucaggccug

SEQ ID NO: 3109491 - RNA, 20 nt, Human
ggacuaacuugucuuuggac

SEQ ID NO: 3109492 - RNA, 15 nt, Human
ggacucaaugcacug

SEQ ID NO: 3109493 - RNA, 14 nt, Human
ggacuacaggugug

SEQ ID NO: 3109494 - RNA, 24 nt, Human
ggacuaacuugucuuuggacccug

SEQ ID NO: 3109495 - RNA, 16 nt, Human
ggacucaaugcacuga

SEQ ID NO: 3109496 - RNA, 16 nt, Human
ggagaaaggaagggcu

SEQ ID NO: 3109497 - RNA, 14 nt, Human
ggacuuggaagcuc

SEQ ID NO: 3109498 - RNA, 23 nt, Human
gcuggguggcaccagcagccugg

SEQ ID NO: 3109499 - RNA, 22 nt, Human
gcuggguggcaccagcagccug

SEQ ID NO: 3109500 - RNA, 21 nt, Human
gcuggguggcaccagcagccu

SEQ ID NO: 3109501 - RNA, 15 nt, Human
gcuggcuguuggcug

SEQ ID NO: 3109502 - RNA, 16 nt, Human
gcuggcuguuggcugg

SEQ ID NO: 3109503 - RNA, 23 nt, Human
gcugggguggggaccucaggccu

SEQ ID NO: 3109504 - RNA, 20 nt, Human
gcuggcgugcaguggugcga

SEQ ID NO: 3109505 - RNA, 18 nt, Human
gcuggagugcagugagcc

SEQ ID NO: 3109506 - RNA, 17 nt, Human
gcuggagugcagugagc

SEQ ID NO: 3109507 - RNA, 22 nt, Human
gcuggagugcagugagccgaga

SEQ ID NO: 3109508 - RNA, 20 nt, Human
gcuggccuggccccucaggg

SEQ ID NO: 3109509 - RNA, 13 nt, Human
gcugcuggcuggu

SEQ ID NO: 3109510 - RNA, 16 nt, Human
gcucugguccauagag

SEQ ID NO: 3109511 - RNA, 15 nt, Human
gcucugguccauaga

SEQ ID NO: 3109512 - RNA, 15 nt, Human
gcugcugaaggcucg

SEQ ID NO: 3109513 - RNA, 14 nt, Human
gcugcugaaggcuc

SEQ ID NO: 3109514 - RNA, 13 nt, Human
gcugcugaaggcu

SEQ ID NO: 3109515 - RNA, 12 nt, Human
gcugcugaaggc

SEQ ID NO: 3109516 - RNA, 22 nt, Human
gcuuccucauaguaugguggcu

SEQ ID NO: 3109517 - RNA, 23 nt, Human
gcuucuucagagacuccugcagg

SEQ ID NO: 3109518 - RNA, 20 nt, Human
gcuuguaaauagcucaggug

SEQ ID NO: 3109519 - RNA, 14 nt, Human
gcuugagcucagga

SEQ ID NO: 3109520 - RNA, 22 nt, Human
gcuugaccuuuaagagaaauga

SEQ ID NO: 3109521 - RNA, 12 nt, Human
gcuuguacauaa

SEQ ID NO: 3109522 - RNA, 12 nt, Human
gcuucagccucc

SEQ ID NO: 3109523 - RNA, 18 nt, Human
gcuucacggaagagccuu

SEQ ID NO: 3109524 - RNA, 18 nt, Human
gcuucaaggauccugagc

SEQ ID NO: 3109525 - RNA, 19 nt, Human
gcuucaaggauccugagcc

SEQ ID NO: 3109526 - RNA, 21 nt, Human
gcuucaaggauccugagccag

SEQ ID NO: 3109527 - RNA, 20 nt, Human
gcuucaaggauccugagcca

SEQ ID NO: 3109528 - RNA, 15 nt, Human
gcuucacggaagagc

SEQ ID NO: 3109529 - RNA, 17 nt, Human
gcuucacggaagagccu

SEQ ID NO: 3109530 - RNA, 12 nt, Human
gcccccacuggu

SEQ ID NO: 3109531 - RNA, 17 nt, Human
gccccugccacccuggg

SEQ ID NO: 3109532 - RNA, 16 nt, Human
gccccugccacccugg

SEQ ID NO: 3109533 - RNA, 23 nt, Human
gcccgggcucugccucccaucac

SEQ ID NO: 3109534 - RNA, 16 nt, Human
gcccugcagagggcac

SEQ ID NO: 3109535 - RNA, 18 nt, Human
gcccugcagagggcacag

SEQ ID NO: 3109536 - RNA, 15 nt, Human
gcccugcccaccugg

SEQ ID NO: 3109537 - RNA, 11 nt, Human
gcccugccucc

SEQ ID NO: 3109538 - RNA, 22 nt, Human
gcccugcccaccuggccucugc

SEQ ID NO: 3109539 - RNA, 21 nt, Human
gcccugcccaccuggccucug

SEQ ID NO: 3109540 - RNA, 20 nt, Human
gcccugcccaccuggccucu

SEQ ID NO: 3109541 - RNA, 17 nt, Human
gcccugcccaccuggcc

SEQ ID NO: 3109542 - RNA, 19 nt, Human
gccgcagcccugcagaggg

SEQ ID NO: 3109543 - RNA, 20 nt, Human
gccgcagcccugcagagggc

SEQ ID NO: 3109544 - RNA, 22 nt, Human
gcccuuagcagggaaacagcua

SEQ ID NO: 3109545 - RNA, 13 nt, Human
gcccugccuccuu

SEQ ID NO: 3109546 - RNA, 12 nt, Human
gcccugccuccu

SEQ ID NO: 3109547 - RNA, 19 nt, Human
gcccuuagcagggaaacag

SEQ ID NO: 3109548 - RNA, 20 nt, Human
gcccuuagcagggaaacagc

SEQ ID NO: 3109549 - RNA, 20 nt, Human
gccuaggugacagagugaga

SEQ ID NO: 3109550 - RNA, 19 nt, Human
gccuagcauacguacacau

SEQ ID NO: 3109551 - RNA, 23 nt, Human
gccuagcauacguacacauuuua

SEQ ID NO: 3109552 - RNA, 21 nt, Human
gccuagcauacguacacauuu

SEQ ID NO: 3109553 - RNA, 22 nt, Human
gccuagcauacguacacauuuu

SEQ ID NO: 3109554 - RNA, 20 nt, Human
gccuagcauacguacacauu

SEQ ID NO: 3109555 - RNA, 13 nt, Human
gccuaggugacag

SEQ ID NO: 3109556 - RNA, 14 nt, Human
gccuaggugacaga

SEQ ID NO: 3109557 - RNA, 15 nt, Human
gccuaggugacagag

SEQ ID NO: 3109558 - RNA, 17 nt, Human
gccucgaacuggcugca

SEQ ID NO: 3109559 - RNA, 19 nt, Human
gccuccugugugugcgccu

SEQ ID NO: 3109560 - RNA, 23 nt, Human
gccuccugugugugcgccuacag

SEQ ID NO: 3109561 - RNA, 16 nt, Human
gccucccaaagugcug

SEQ ID NO: 3109562 - RNA, 13 nt, Human
gccuccugugugu

SEQ ID NO: 3109563 - RNA, 17 nt, Human
gccucccaaagugcugg

SEQ ID NO: 3109564 - RNA, 13 nt, Human
gccugcccaggcc

SEQ ID NO: 3109565 - RNA, 14 nt, Human
gccugcccaggccc

SEQ ID NO: 3109566 - RNA, 14 nt, Human
gccucuuggguuca

SEQ ID NO: 3109567 - RNA, 21 nt, Human
gccucuuaugggcuggguucu

SEQ ID NO: 3109568 - RNA, 16 nt, Human
gccucuuaugggcugg

SEQ ID NO: 3109569 - RNA, 18 nt, Human
gccucuuaugggcugggu

SEQ ID NO: 3109570 - RNA, 17 nt, Human
gccucuuaugggcuggg

SEQ ID NO: 3109571 - RNA, 20 nt, Human
gccucgaacuggcugcaaag

SEQ ID NO: 3109572 - RNA, 22 nt, Human
gccucgaacuggcugcaaaggg

SEQ ID NO: 3109573 - RNA, 22 nt, Human
gccugcccaggccccugccacc

SEQ ID NO: 3109574 - RNA, 12 nt, Human
gccugcccaggc

SEQ ID NO: 3109575 - RNA, 15 nt, Human
gccugcccaggcccc

SEQ ID NO: 3109576 - RNA, 20 nt, Human
gccugcccaggccccugcca

SEQ ID NO: 3109577 - RNA, 13 nt, Human
gccuggccugagc

SEQ ID NO: 3109578 - RNA, 18 nt, Human
gccuggccugagcuggga

SEQ ID NO: 3109579 - RNA, 14 nt, Human
gccuggccugagcu

SEQ ID NO: 3109580 - RNA, 20 nt, Human
gccuggccugagcugggaug

SEQ ID NO: 3109581 - RNA, 18 nt, Human
gccugugccucugggacu

SEQ ID NO: 3109582 - RNA, 13 nt, Human
gccuggcucaggu

SEQ ID NO: 3109583 - RNA, 16 nt, Human
gccugugccucuggga

SEQ ID NO: 3109584 - RNA, 17 nt, Human
gccugugccucugggac

SEQ ID NO: 3109585 - RNA, 14 nt, Human
gccuguugggccag

SEQ ID NO: 3109586 - RNA, 20 nt, Human
gccuguugggccaggagccu

SEQ ID NO: 3109587 - RNA, 18 nt, Human
gccuguugggccaggagc

SEQ ID NO: 3109588 - RNA, 16 nt, Human
gccuguugggccagga

SEQ ID NO: 3109589 - RNA, 15 nt, Human
gccuguugggccagg

SEQ ID NO: 3109590 - RNA, 22 nt, Human
gcgaucuggguucacugcaacc

SEQ ID NO: 3109591 - RNA, 17 nt, Human
gcgagcccugguggcag

SEQ ID NO: 3109592 - RNA, 15 nt, Human
gcgagcccugguggc

SEQ ID NO: 3109593 - RNA, 20 nt, Human
gccuugaccauucuccaccu

SEQ ID NO: 3109594 - RNA, 19 nt, Human
gccuugaccauucuccacc

SEQ ID NO: 3109595 - RNA, 17 nt, Human
gccuugaccauucucca

SEQ ID NO: 3109596 - RNA, 16 nt, Human
gccuugaccauucucc

SEQ ID NO: 3109597 - RNA, 20 nt, Human
gcuccagcucaccagcccca

SEQ ID NO: 3109598 - RNA, 21 nt, Human
gcuccagcucaccagccccag

SEQ ID NO: 3109599 - RNA, 17 nt, Human
gcuccagcucaccagcc

SEQ ID NO: 3109600 - RNA, 18 nt, Human
gcuccagcucaccagccc

SEQ ID NO: 3109601 - RNA, 15 nt, Human
gcuccuggcccacug

SEQ ID NO: 3109602 - RNA, 14 nt, Human
gcuccuggcccacu

SEQ ID NO: 3109603 - RNA, 20 nt, Human
gcuccuggcccacugcaucg

SEQ ID NO: 3109604 - RNA, 19 nt, Human
gcuccuggcccacugcauc

SEQ ID NO: 3109605 - RNA, 18 nt, Human
gcuccuggcccacugcau

SEQ ID NO: 3109606 - RNA, 23 nt, Human
gcucugaucauccacugugccau

SEQ ID NO: 3109607 - RNA, 17 nt, Human
gcucugaucauccacug

SEQ ID NO: 3109608 - RNA, 23 nt, Human
gcucugcaagaauugaagcagga

SEQ ID NO: 3109609 - RNA, 11 nt, Human
gcucugcccuu

SEQ ID NO: 3109610 - RNA, 16 nt, Human
gcuaggccuggccaga

SEQ ID NO: 3109611 - RNA, 17 nt, Human
gcuaggccuggccagau

SEQ ID NO: 3109612 - RNA, 23 nt, Human
gcuaggccuggccagaugcacca

SEQ ID NO: 3109613 - RNA, 19 nt, Human
gcuauucaguaauaacucu

SEQ ID NO: 3109614 - RNA, 13 nt, Human
gcuaugcauuuga

SEQ ID NO: 3109615 - RNA, 22 nt, Human
gcuagugugguguuuccuggca

SEQ ID NO: 3109616 - RNA, 21 nt, Human
gcuagugugguguuuccuggc

SEQ ID NO: 3109617 - RNA, 12 nt, Human
gcuaugcauuug

SEQ ID NO: 3109618 - RNA, 17 nt, Human
gcucacugcagccucaa

SEQ ID NO: 3109619 - RNA, 15 nt, Human
gcucacugcagccuc

SEQ ID NO: 3109620 - RNA, 16 nt, Human
gcucacugcagccuca

SEQ ID NO: 3109621 - RNA, 11 nt, Human
gcucacugcag

SEQ ID NO: 3109622 - RNA, 12 nt, Human
gcucacugcagc

SEQ ID NO: 3109623 - RNA, 13 nt, Human
gcucacugcagcc

SEQ ID NO: 3109624 - RNA, 14 nt, Human
gcucacugcagccu

SEQ ID NO: 3109625 - RNA, 18 nt, Human
gcuauucaguaauaacuc

SEQ ID NO: 3109626 - RNA, 20 nt, Human
gcuauucaguaauaacucua

SEQ ID NO: 3109627 - RNA, 16 nt, Human
gcucaggugucccugc

SEQ ID NO: 3109628 - RNA, 14 nt, Human
gcucaggugucccu

SEQ ID NO: 3109629 - RNA, 23 nt, Human
gcucagguggggucacucuggca

SEQ ID NO: 3109630 - RNA, 13 nt, Human
gcucagagagggu

SEQ ID NO: 3109631 - RNA, 14 nt, Human
gcucagagagggug

SEQ ID NO: 3109632 - RNA, 20 nt, Human
gcgggaggauguucugggac

SEQ ID NO: 3109633 - RNA, 20 nt, Human
gcgugcacacaccagagccc

SEQ ID NO: 3109634 - RNA, 21 nt, Human
gcgggaggauguucugggaca

SEQ ID NO: 3109635 - RNA, 22 nt, Human
gcgggaggauguucugggacac

SEQ ID NO: 3109636 - RNA, 19 nt, Human
gcgugcacacaccagagcc

SEQ ID NO: 3109637 - RNA, 23 nt, Human
gcgugcacacaccagagcccacc

SEQ ID NO: 3109638 - RNA, 18 nt, Human
gcguuucuaugacacaug

SEQ ID NO: 3109639 - RNA, 13 nt, Human
gcuaaugggacac

SEQ ID NO: 3109640 - RNA, 15 nt, Human
gcuaaugggacacua

SEQ ID NO: 3109641 - RNA, 23 nt, Human
gcuaagugauccucccaccucag

SEQ ID NO: 3109642 - RNA, 21 nt, Human
gaugaugaaaugaggucagag

SEQ ID NO: 3109643 - RNA, 14 nt, Human
gaugcuuguacaua

SEQ ID NO: 3109644 - RNA, 16 nt, Human
gaugcuuguacauaau

SEQ ID NO: 3109645 - RNA, 20 nt, Human
gaucuggguucacugcaacc

SEQ ID NO: 3109646 - RNA, 18 nt, Human
gaucuggguucacugcaa

SEQ ID NO: 3109647 - RNA, 19 nt, Human
gauucuccugccucagccu

SEQ ID NO: 3109648 - RNA, 20 nt, Human
gauucuccugccucagccuc

SEQ ID NO: 3109649 - RNA, 21 nt, Human
gauucuccugccucagccucc

SEQ ID NO: 3109650 - RNA, 20 nt, Human
gauuuaacagaaauguacag

SEQ ID NO: 3109651 - RNA, 23 nt, Human
gauuuaacagaaauguacagcaa

SEQ ID NO: 3109652 - RNA, 21 nt, Human
gauucuucugcuucagccucc

SEQ ID NO: 3109653 - RNA, 20 nt, Human
gauucuucugcuucagccuc

SEQ ID NO: 3109654 - RNA, 23 nt, Human
gauucuuauggacaaugacccag

SEQ ID NO: 3109655 - RNA, 22 nt, Human
gauuuuuuuuuccuucagugcc

SEQ ID NO: 3109656 - RNA, 23 nt, Human
gauuuuuuuuuccuucagugccu

SEQ ID NO: 3109657 - RNA, 16 nt, Human
gauuucacucuccuug

SEQ ID NO: 3109658 - RNA, 13 nt, Human
gauuucacucucc

SEQ ID NO: 3109659 - RNA, 19 nt, Human
gauuuaacagaaauguaca

SEQ ID NO: 3109660 - RNA, 18 nt, Human
gauuucacucuccuuggu

SEQ ID NO: 3109661 - RNA, 17 nt, Human
gauuucacucuccuugg

SEQ ID NO: 3109662 - RNA, 12 nt, Human
gcaccuccugcc

SEQ ID NO: 3109663 - RNA, 16 nt, Human
gcaccggcuggccugg

SEQ ID NO: 3109664 - RNA, 15 nt, Human
gcaccggcuggccug

SEQ ID NO: 3109665 - RNA, 17 nt, Human
gcaccggcuggccuggc

SEQ ID NO: 3109666 - RNA, 11 nt, Human
gcacacauuuu

SEQ ID NO: 3109667 - RNA, 12 nt, Human
gcacacauuuuu

SEQ ID NO: 3109668 - RNA, 20 nt, Human
gcacacaccagagcccaccu

SEQ ID NO: 3109669 - RNA, 15 nt, Human
gcacuccagccuggg

SEQ ID NO: 3109670 - RNA, 17 nt, Human
gcacuccagccugggug

SEQ ID NO: 3109671 - RNA, 22 nt, Human
gcacuauaauguaagcucuacu

SEQ ID NO: 3109672 - RNA, 22 nt, Human
gcacuauagccuaggugacaga

SEQ ID NO: 3109673 - RNA, 11 nt, Human
gcaauaaagca

SEQ ID NO: 3109674 - RNA, 23 nt, Human
gcaauaaggggagaguaacccug

SEQ ID NO: 3109675 - RNA, 12 nt, Human
gcacacaccaga

SEQ ID NO: 3109676 - RNA, 14 nt, Human
gcacacaccagagc

SEQ ID NO: 3109677 - RNA, 15 nt, Human
gcacacaccagagcc

SEQ ID NO: 3109678 - RNA, 16 nt, Human
gcacacaccagagccc

SEQ ID NO: 3109679 - RNA, 17 nt, Human
gcacacaccagagccca

SEQ ID NO: 3109680 - RNA, 18 nt, Human
gcacacaccagagcccac

SEQ ID NO: 3109681 - RNA, 19 nt, Human
gcacacaccagagcccacc

SEQ ID NO: 3109682 - RNA, 18 nt, Human
gcaaccuccgccucuugg

SEQ ID NO: 3109683 - RNA, 22 nt, Human
gcaacccuggugaccagcacca

SEQ ID NO: 3109684 - RNA, 17 nt, Human
gcaacccccagccugcu

SEQ ID NO: 3109685 - RNA, 16 nt, Human
gcaaaagaugcuucuc

SEQ ID NO: 3109686 - RNA, 18 nt, Human
gcaacccccagccugcua

SEQ ID NO: 3109687 - RNA, 15 nt, Human
gcaaaagaugcuucu

SEQ ID NO: 3109688 - RNA, 17 nt, Human
gcauccuggcacccggc

SEQ ID NO: 3109689 - RNA, 21 nt, Human
gcauccuggcacccggccccu

SEQ ID NO: 3109690 - RNA, 14 nt, Human
gcauccuggcaccc

SEQ ID NO: 3109691 - RNA, 22 nt, Human
gcauccuggcacccggccccug

SEQ ID NO: 3109692 - RNA, 23 nt, Human
gcauccuggcacccggccccugc

SEQ ID NO: 3109693 - RNA, 19 nt, Human
gcaugggaaugaaugucag

SEQ ID NO: 3109694 - RNA, 16 nt, Human
gcaugggaaugaaugu

SEQ ID NO: 3109695 - RNA, 13 nt, Human
gcaugggaaugaa

SEQ ID NO: 3109696 - RNA, 17 nt, Human
gcaugugaugagaggaa

SEQ ID NO: 3109697 - RNA, 14 nt, Human
gcauuugaaaauuu

SEQ ID NO: 3109698 - RNA, 16 nt, Human
gcauuugaaaauuuug

SEQ ID NO: 3109699 - RNA, 12 nt, Human
gcauuuaaaaga

SEQ ID NO: 3109700 - RNA, 15 nt, Human
gcauuuaaaagauac

SEQ ID NO: 3109701 - RNA, 18 nt, Human
gccaagaauucuuaaaua

SEQ ID NO: 3109702 - RNA, 14 nt, Human
gccaagaauucuua

SEQ ID NO: 3109703 - RNA, 11 nt, Human
gccaaggccaa

SEQ ID NO: 3109704 - RNA, 17 nt, Human
gccaaggccaaaggaag

SEQ ID NO: 3109705 - RNA, 15 nt, Human
gcauaccacuuuugu

SEQ ID NO: 3109706 - RNA, 15 nt, Human
gcauaaaaauuagcc

SEQ ID NO: 3109707 - RNA, 23 nt, Human
gcaguugccagucaccccggcca

SEQ ID NO: 3109708 - RNA, 14 nt, Human
gcaguugccaguca

SEQ ID NO: 3109709 - RNA, 19 nt, Human
gcagcugcgguccacccag

SEQ ID NO: 3109710 - RNA, 22 nt, Human
gcagcugcgguccacccaggag

SEQ ID NO: 3109711 - RNA, 23 nt, Human
gcagcugcgguccacccaggagc

SEQ ID NO: 3109712 - RNA, 13 nt, Human
gcagcugcuuuug

SEQ ID NO: 3109713 - RNA, 20 nt, Human
gcagcugcuuuugucuaugg

SEQ ID NO: 3109714 - RNA, 16 nt, Human
gcagcuugaggguugg

SEQ ID NO: 3109715 - RNA, 17 nt, Human
gcaggcucucaggccag

SEQ ID NO: 3109716 - RNA, 13 nt, Human
gcagggaaacagc

SEQ ID NO: 3109717 - RNA, 22 nt, Human
gcagggaaacagcuaaugggac

SEQ ID NO: 3109718 - RNA, 19 nt, Human
gcagcuugaggguugggcu

SEQ ID NO: 3109719 - RNA, 21 nt, Human
gcagcuugaggguugggcugg

SEQ ID NO: 3109720 - RNA, 12 nt, Human
gcaggcucucag

SEQ ID NO: 3109721 - RNA, 22 nt, Human
gcaggcucgggcuccccagccc

SEQ ID NO: 3109722 - RNA, 16 nt, Human
gcaggcucucaggcca

SEQ ID NO: 3109723 - RNA, 15 nt, Human
gcaggcucucaggcc

SEQ ID NO: 3109724 - RNA, 14 nt, Human
gcaggcucucaggc

SEQ ID NO: 3109725 - RNA, 13 nt, Human
gcaggcucucagg

SEQ ID NO: 3109726 - RNA, 16 nt, Human
gcacuuuguucuggcu

SEQ ID NO: 3109727 - RNA, 15 nt, Human
gagcugccuguucag

SEQ ID NO: 3109728 - RNA, 16 nt, Human
gagcugccuguucagc

SEQ ID NO: 3109729 - RNA, 19 nt, Human
gagcugccuguucagcucc

SEQ ID NO: 3109730 - RNA, 17 nt, Human
gagcaucaggccaggcc

SEQ ID NO: 3109731 - RNA, 13 nt, Human
gagccuuccaggg

SEQ ID NO: 3109732 - RNA, 12 nt, Human
gagccuuccagg

SEQ ID NO: 3109733 - RNA, 22 nt, Human
gagcaucaggccaggcccucug

SEQ ID NO: 3109734 - RNA, 20 nt, Human
gagcaucaggccaggcccuc

SEQ ID NO: 3109735 - RNA, 19 nt, Human
gaggccagagacacaagcc

SEQ ID NO: 3109736 - RNA, 20 nt, Human
gaggccagagacacaagccu

SEQ ID NO: 3109737 - RNA, 14 nt, Human
gaggcucugcccuu

SEQ ID NO: 3109738 - RNA, 13 nt, Human
gaggcucugcccu

SEQ ID NO: 3109739 - RNA, 12 nt, Human
gaggcucugccc

SEQ ID NO: 3109740 - RNA, 17 nt, Human
gaggcucugcccuuggu

SEQ ID NO: 3109741 - RNA, 15 nt, Human
gaggcucugcccuug

SEQ ID NO: 3109742 - RNA, 12 nt, Human
gaggggaacaga

SEQ ID NO: 3109743 - RNA, 15 nt, Human
gagggcuccagacac

SEQ ID NO: 3109744 - RNA, 14 nt, Human
gagggcuccagaca

SEQ ID NO: 3109745 - RNA, 13 nt, Human
gagggcuccagac

SEQ ID NO: 3109746 - RNA, 12 nt, Human
gagggcuccaga

SEQ ID NO: 3109747 - RNA, 13 nt, Human
gaggugggauccu

SEQ ID NO: 3109748 - RNA, 16 nt, Human
gaggugggauccucca

SEQ ID NO: 3109749 - RNA, 15 nt, Human
gaggugggauccucc

SEQ ID NO: 3109750 - RNA, 17 nt, Human
gaggugggauccuccag

SEQ ID NO: 3109751 - RNA, 21 nt, Human
gagucacuggaacacuaauga

SEQ ID NO: 3109752 - RNA, 14 nt, Human
gagucacuggaaca

SEQ ID NO: 3109753 - RNA, 19 nt, Human
gaguugauacuacaguuug

SEQ ID NO: 3109754 - RNA, 21 nt, Human
gaguugauagcacagacccug

SEQ ID NO: 3109755 - RNA, 22 nt, Human
gaguugauacuacaguuuguua

SEQ ID NO: 3109756 - RNA, 13 nt, Human
gagugcagugagc

SEQ ID NO: 3109757 - RNA, 18 nt, Human
gagugcagugagccgaga

SEQ ID NO: 3109758 - RNA, 18 nt, Human
gagucagaaguuucugcc

SEQ ID NO: 3109759 - RNA, 14 nt, Human
gagugagacucugu

SEQ ID NO: 3109760 - RNA, 18 nt, Human
gagugagacucugucuca

SEQ ID NO: 3109761 - RNA, 15 nt, Human
gaccaucccugaagg

SEQ ID NO: 3109762 - RNA, 14 nt, Human
gaccaucccugaag

SEQ ID NO: 3109763 - RNA, 16 nt, Human
gaccauucuccaccug

SEQ ID NO: 3109764 - RNA, 17 nt, Human
gaccaucccugaaggcc

SEQ ID NO: 3109765 - RNA, 16 nt, Human
gaccaucccugaaggc

SEQ ID NO: 3109766 - RNA, 12 nt, Human
gacccggcugcg

SEQ ID NO: 3109767 - RNA, 13 nt, Human
gacccggcugcgu

SEQ ID NO: 3109768 - RNA, 16 nt, Human
gacccuauugcugcuu

SEQ ID NO: 3109769 - RNA, 13 nt, Human
gacagcuccuucu

SEQ ID NO: 3109770 - RNA, 14 nt, Human
gacagcuccuucug

SEQ ID NO: 3109771 - RNA, 15 nt, Human
gacagcuccuucugu

SEQ ID NO: 3109772 - RNA, 21 nt, Human
gacuuuucuguccgagcuuug

SEQ ID NO: 3109773 - RNA, 20 nt, Human
gacuuuuccaacccucauca

SEQ ID NO: 3109774 - RNA, 22 nt, Human
gacuuuguuaguuucuccaagc

SEQ ID NO: 3109775 - RNA, 14 nt, Human
gacuuuggaaagag

SEQ ID NO: 3109776 - RNA, 14 nt, Human
gacuuuggaaagac

SEQ ID NO: 3109777 - RNA, 18 nt, Human
gacuguuuucucuugaga

SEQ ID NO: 3109778 - RNA, 16 nt, Human
gacuguuuucucuuga

SEQ ID NO: 3109779 - RNA, 22 nt, Human
gacuguacaaaguagaagucuu

SEQ ID NO: 3109780 - RNA, 17 nt, Human
gacucaaugcacugaca

SEQ ID NO: 3109781 - RNA, 14 nt, Human
gacucaaugcacug

SEQ ID NO: 3109782 - RNA, 16 nt, Human
gagaagcggcuggcag

SEQ ID NO: 3109783 - RNA, 17 nt, Human
gagaagcggcuggcagc

SEQ ID NO: 3109784 - RNA, 13 nt, Human
gacgcugugcugc

SEQ ID NO: 3109785 - RNA, 12 nt, Human
gacgcugugcug

SEQ ID NO: 3109786 - RNA, 18 nt, Human
gaaccaccacacccagcc

SEQ ID NO: 3109787 - RNA, 20 nt, Human
gaaccaccacacccagccca

SEQ ID NO: 3109788 - RNA, 21 nt, Human
gaaccaccacacccagcccac

SEQ ID NO: 3109789 - RNA, 22 nt, Human
gaaccaccacacccagcccacu

SEQ ID NO: 3109790 - RNA, 16 nt, Human
gaagacacugaugggc

SEQ ID NO: 3109791 - RNA, 21 nt, Human
gaagacacugaugggcaaccc

SEQ ID NO: 3109792 - RNA, 13 nt, Human
gaagacagcucuu

SEQ ID NO: 3109793 - RNA, 12 nt, Human
gaagacagcucu

SEQ ID NO: 3109794 - RNA, 15 nt, Human
gaagacagagcuaca

SEQ ID NO: 3109795 - RNA, 13 nt, Human
gaagacagagcua

SEQ ID NO: 3109796 - RNA, 15 nt, Human
gaagacagcucuuau

SEQ ID NO: 3109797 - RNA, 14 nt, Human
gaagacagcucuua

SEQ ID NO: 3109798 - RNA, 21 nt, Human
gaagcacaugccucucucagg

SEQ ID NO: 3109799 - RNA, 16 nt, Human
gaagcaccauaacuuu

SEQ ID NO: 3109800 - RNA, 13 nt, Human
gaagcacagcuuc

SEQ ID NO: 3109801 - RNA, 14 nt, Human
gaagcacagcuuca

SEQ ID NO: 3109802 - RNA, 22 nt, Human
gaagcacaugccucucucaggc

SEQ ID NO: 3109803 - RNA, 17 nt, Human
gaagacucauucuucug

SEQ ID NO: 3109804 - RNA, 18 nt, Human
gaagacucauucuucugu

SEQ ID NO: 3109805 - RNA, 16 nt, Human
gaagacucauucuucu

SEQ ID NO: 3109806 - RNA, 23 nt, Human
gaaccaccacacccagcccacuu

SEQ ID NO: 3109807 - RNA, 22 nt, Human
gaaccauggucggaaaacaugc

SEQ ID NO: 3109808 - RNA, 14 nt, Human
gaacuccuggccuc

SEQ ID NO: 3109809 - RNA, 13 nt, Human
gaacuccuggccu

SEQ ID NO: 3109810 - RNA, 15 nt, Human
gaaagggcccagaga

SEQ ID NO: 3109811 - RNA, 16 nt, Human
gaaagggcccagagag

SEQ ID NO: 3109812 - RNA, 13 nt, Human
gaaacuggauuaa

SEQ ID NO: 3109813 - RNA, 17 nt, Human
gaaacuggauuaaacuu

SEQ ID NO: 3109814 - RNA, 13 nt, Human
gaaagggcccaga

SEQ ID NO: 3109815 - RNA, 12 nt, Human
gaaaggcuccag

SEQ ID NO: 3109816 - RNA, 13 nt, Human
gaaaggcuccagg

SEQ ID NO: 3109817 - RNA, 15 nt, Human
gaaaggcuccaggag

SEQ ID NO: 3109818 - RNA, 14 nt, Human
gaaaggcuccagga

SEQ ID NO: 3109819 - RNA, 23 nt, Human
gaaaagaaaaaugagccuggcaa

SEQ ID NO: 3109820 - RNA, 20 nt, Human
cuuucacccuuuucuguuug

SEQ ID NO: 3109821 - RNA, 15 nt, Human
cuuucacccuuuucu

SEQ ID NO: 3109822 - RNA, 14 nt, Human
cuuucacccuuuuc

SEQ ID NO: 3109823 - RNA, 23 nt, Human
cuuuaaugucacaggcaggucca

SEQ ID NO: 3109824 - RNA, 22 nt, Human
cuugguagaagcccuucuaccu

SEQ ID NO: 3109825 - RNA, 14 nt, Human
cuugguccugcugc

SEQ ID NO: 3109826 - RNA, 18 nt, Human
cuugucuuuggacccuga

SEQ ID NO: 3109827 - RNA, 15 nt, Human
cuugucuuuggaccc

SEQ ID NO: 3109828 - RNA, 13 nt, Human
cuugucuuuggac

SEQ ID NO: 3109829 - RNA, 19 nt, Human
cuuggugucgggcaugaca

SEQ ID NO: 3109830 - RNA, 15 nt, Human
cuuucuacccagcga

SEQ ID NO: 3109831 - RNA, 16 nt, Human
cuuucuacccagcgag

SEQ ID NO: 3109832 - RNA, 17 nt, Human
cuuugacgccaucccag

SEQ ID NO: 3109833 - RNA, 16 nt, Human
cuuugacgccauccca

SEQ ID NO: 3109834 - RNA, 19 nt, Human
cuuuuauaaacuuuaccuu

SEQ ID NO: 3109835 - RNA, 22 nt, Human
cuuuguauucucuccuguaccu

SEQ ID NO: 3109836 - RNA, 20 nt, Human
cuuuuauaaacuuuaccuuu

SEQ ID NO: 3109837 - RNA, 21 nt, Human
cuuuuauaaacuuuaccuuuu

SEQ ID NO: 3109838 - RNA, 17 nt, Human
cuuuguauucucuccug

SEQ ID NO: 3109839 - RNA, 22 nt, Human
cuuggauuguccccgacccuug

SEQ ID NO: 3109840 - RNA, 24 nt, Human
cuuggauuguccccgacccuugcc

SEQ ID NO: 3109841 - RNA, 23 nt, Human
cuuggauuguccccgacccuugc

SEQ ID NO: 3109842 - RNA, 12 nt, Human
cuugcaaaguau

SEQ ID NO: 3109843 - RNA, 20 nt, Human
cuugacagggcacaccgggc

SEQ ID NO: 3109844 - RNA, 16 nt, Human
cuugacaucaacugca

SEQ ID NO: 3109845 - RNA, 23 nt, Human
cuugaaugaugccaugaggaaca

SEQ ID NO: 3109846 - RNA, 17 nt, Human
cuugauauccucuuuga

SEQ ID NO: 3109847 - RNA, 22 nt, Human
cuugauauccucuuugagugaa

SEQ ID NO: 3109848 - RNA, 18 nt, Human
cuugauguguuaucucuu

SEQ ID NO: 3109849 - RNA, 15 nt, Human
cuugauguguuaucu

SEQ ID NO: 3109850 - RNA, 13 nt, Human
cuuccuccuggug

SEQ ID NO: 3109851 - RNA, 22 nt, Human
cuuccucuuuccaucuacccuc

SEQ ID NO: 3109852 - RNA, 21 nt, Human
cuuccucuuuccaucuacccu

SEQ ID NO: 3109853 - RNA, 14 nt, Human
cuucuucagagacu

SEQ ID NO: 3109854 - RNA, 13 nt, Human
cuucuucagagac

SEQ ID NO: 3109855 - RNA, 23 nt, Human
cuucugaacuuggcgcugccccu

SEQ ID NO: 3109856 - RNA, 15 nt, Human
cugccucucccauca

SEQ ID NO: 3109857 - RNA, 22 nt, Human
cugccucucccaucacuucccu

SEQ ID NO: 3109858 - RNA, 23 nt, Human
cugccucucccaucacuucccua

SEQ ID NO: 3109859 - RNA, 17 nt, Human
cugccuguucagcucca

SEQ ID NO: 3109860 - RNA, 18 nt, Human
cugccuguucagcuccag

SEQ ID NO: 3109861 - RNA, 19 nt, Human
cugccuguucagcuccagc

SEQ ID NO: 3109862 - RNA, 20 nt, Human
cugccuguugggccaggagc

SEQ ID NO: 3109863 - RNA, 21 nt, Human
cugcugacuguuuucucuuga

SEQ ID NO: 3109864 - RNA, 18 nt, Human
cugcugacuguuuucucu

SEQ ID NO: 3109865 - RNA, 15 nt, Human
cugccuguucagcuc

SEQ ID NO: 3109866 - RNA, 22 nt, Human
cugccuguugggccaggagccu

SEQ ID NO: 3109867 - RNA, 21 nt, Human
cugccuguugggccaggagcc

SEQ ID NO: 3109868 - RNA, 19 nt, Human
cugcuuuugucuaugggac

SEQ ID NO: 3109869 - RNA, 21 nt, Human
cugcuuuugucuaugggacuc

SEQ ID NO: 3109870 - RNA, 14 nt, Human
cugcuucaaauauu

SEQ ID NO: 3109871 - RNA, 20 nt, Human
cugcuucaaggauccugagc

SEQ ID NO: 3109872 - RNA, 20 nt, Human
cugcuuuugucuaugggacu

SEQ ID NO: 3109873 - RNA, 23 nt, Human
cugcuucaaggauccugagccag

SEQ ID NO: 3109874 - RNA, 22 nt, Human
cugcuucaaggauccugagcca

SEQ ID NO: 3109875 - RNA, 21 nt, Human
cugcuucaaggauccugagcc

SEQ ID NO: 3109876 - RNA, 12 nt, Human
cugcuucaagga

SEQ ID NO: 3109877 - RNA, 19 nt, Human
cugcuucaaauauuucccu

SEQ ID NO: 3109878 - RNA, 15 nt, Human
cugggcagaaggaag

SEQ ID NO: 3109879 - RNA, 12 nt, Human
cugggcagaagg

SEQ ID NO: 3109880 - RNA, 14 nt, Human
cuggggagaaagua

SEQ ID NO: 3109881 - RNA, 18 nt, Human
cuggguucacugcaaccu

SEQ ID NO: 3109882 - RNA, 20 nt, Human
cuggguucacugcaaccucc

SEQ ID NO: 3109883 - RNA, 15 nt, Human
cuggguucacugcaa

SEQ ID NO: 3109884 - RNA, 22 nt, Human
cuggccccucagggucccuggu

SEQ ID NO: 3109885 - RNA, 18 nt, Human
cuggcagaguugaagaca

SEQ ID NO: 3109886 - RNA, 17 nt, Human
cuggcagaguugaagac

SEQ ID NO: 3109887 - RNA, 12 nt, Human
cuggcagccccu

SEQ ID NO: 3109888 - RNA, 11 nt, Human
cuggcagccca

SEQ ID NO: 3109889 - RNA, 12 nt, Human
cugugcugcccu

SEQ ID NO: 3109890 - RNA, 14 nt, Human
cugugcugcccugc

SEQ ID NO: 3109891 - RNA, 13 nt, Human
cugugcugcccug

SEQ ID NO: 3109892 - RNA, 18 nt, Human
cugugccucugggacugg

SEQ ID NO: 3109893 - RNA, 19 nt, Human
cugugucagcauagaagua

SEQ ID NO: 3109894 - RNA, 17 nt, Human
cugugucagcauagaag

SEQ ID NO: 3109895 - RNA, 19 nt, Human
cugugcugcccugcccacc

SEQ ID NO: 3109896 - RNA, 18 nt, Human
cugugcugcccugcccac

SEQ ID NO: 3109897 - RNA, 17 nt, Human
cugugcugcccugccca

SEQ ID NO: 3109898 - RNA, 15 nt, Human
cugugcugcccugcc

SEQ ID NO: 3109899 - RNA, 13 nt, Human
cuguagaguggga

SEQ ID NO: 3109900 - RNA, 15 nt, Human
cugucgcccagucug

SEQ ID NO: 3109901 - RNA, 16 nt, Human
cugucgcccagucugg

SEQ ID NO: 3109902 - RNA, 21 nt, Human
cuguccugggagugagcuggu

SEQ ID NO: 3109903 - RNA, 20 nt, Human
cugucaauuacaggaaguac

SEQ ID NO: 3109904 - RNA, 19 nt, Human
cugucaauuacaggaagua

SEQ ID NO: 3109905 - RNA, 23 nt, Human
cugucaauuacaggaaguacugg

SEQ ID NO: 3109906 - RNA, 14 nt, Human
cuuaaaacaacacu

SEQ ID NO: 3109907 - RNA, 15 nt, Human
cuuaccagcagagca

SEQ ID NO: 3109908 - RNA, 14 nt, Human
cuguuggcuggggg

SEQ ID NO: 3109909 - RNA, 15 nt, Human
cuguuggccagugug

SEQ ID NO: 3109910 - RNA, 19 nt, Human
cuguuggcugggggccuca

SEQ ID NO: 3109911 - RNA, 22 nt, Human
cuguuggcugggggccucagug

SEQ ID NO: 3109912 - RNA, 21 nt, Human
cuuagggaaggauacaaaagc

SEQ ID NO: 3109913 - RNA, 19 nt, Human
cuuagggaaggauacaaaa

SEQ ID NO: 3109914 - RNA, 21 nt, Human
cuuagcagggaaacagcuaau

SEQ ID NO: 3109915 - RNA, 16 nt, Human
cuuaccagcagagcac

SEQ ID NO: 3109916 - RNA, 22 nt, Human
cuuagcucauucuccuuguguu

SEQ ID NO: 3109917 - RNA, 23 nt, Human
cuuagcucauucuccuuguguua

SEQ ID NO: 3109918 - RNA, 15 nt, Human
auguauguguaagua

SEQ ID NO: 3109919 - RNA, 16 nt, Human
auguauguguaaguau

SEQ ID NO: 3109920 - RNA, 13 nt, Human
augucagugugac

SEQ ID NO: 3109921 - RNA, 12 nt, Human
augucaguguga

SEQ ID NO: 3109922 - RNA, 23 nt, Human
augugcacaugcacgugugugca

SEQ ID NO: 3109923 - RNA, 19 nt, Human
augugaugagaggaaauca

SEQ ID NO: 3109924 - RNA, 17 nt, Human
augugaugagaggaaau

SEQ ID NO: 3109925 - RNA, 16 nt, Human
augugaugagaggaaa

SEQ ID NO: 3109926 - RNA, 15 nt, Human
augugaugagaggaa

SEQ ID NO: 3109927 - RNA, 22 nt, Human
uuugauguucuuucacccuuuu

SEQ ID NO: 3109928 - RNA, 13 nt, Human
uuugauuaaauuc

SEQ ID NO: 3109929 - RNA, 18 nt, Human
uuugauuaaauucuugca

SEQ ID NO: 3109930 - RNA, 21 nt, Human
uuugauuaaauucuugcaaag

SEQ ID NO: 3109931 - RNA, 21 nt, Human
uuugauucagacagcugccug

SEQ ID NO: 3109932 - RNA, 18 nt, Human
uuugauucagacagcugc

SEQ ID NO: 3109933 - RNA, 20 nt, Human
uuugacgccaucccagcccc

SEQ ID NO: 3109934 - RNA, 19 nt, Human
uuugacgccaucccagccc

SEQ ID NO: 3109935 - RNA, 16 nt, Human
uuugacgccaucccag

SEQ ID NO: 3109936 - RNA, 14 nt, Human
uuugacgccauccc

SEQ ID NO: 3109937 - RNA, 13 nt, Human
uuugacgccaucc

SEQ ID NO: 3109938 - RNA, 22 nt, Human
uuugauucagacagcugccugg

SEQ ID NO: 3109939 - RNA, 15 nt, Human
uuugccguuauuaaa

SEQ ID NO: 3109940 - RNA, 13 nt, Human
uuugccucugccu

SEQ ID NO: 3109941 - RNA, 12 nt, Human
uuugaccucugc

SEQ ID NO: 3109942 - RNA, 19 nt, Human
uuucugcagccacuauugu

SEQ ID NO: 3109943 - RNA, 15 nt, Human
uuucuggcuaugcau

SEQ ID NO: 3109944 - RNA, 16 nt, Human
uuucuggcuaugcauu

SEQ ID NO: 3109945 - RNA, 18 nt, Human
uuucuggcuaugcauuug

SEQ ID NO: 3109946 - RNA, 19 nt, Human
uuucuggcuaugcauuuga

SEQ ID NO: 3109947 - RNA, 15 nt, Human
augggauccuggagu

SEQ ID NO: 3109948 - RNA, 15 nt, Human
augggggugcauuug

SEQ ID NO: 3109949 - RNA, 14 nt, Human
augggggugcauuu

SEQ ID NO: 3109950 - RNA, 24 nt, Human
auggggcugcaccggcuggccugg

SEQ ID NO: 3109951 - RNA, 12 nt, Human
auggggcugcac

SEQ ID NO: 3109952 - RNA, 18 nt, Human
augggccuccugugugug

SEQ ID NO: 3109953 - RNA, 17 nt, Human
augggccuccugugugu

SEQ ID NO: 3109954 - RNA, 20 nt, Human
augggcuggguucuacccag

SEQ ID NO: 3109955 - RNA, 20 nt, Human
auggugagggauacccaucc

SEQ ID NO: 3109956 - RNA, 15 nt, Human
augggugcuuggagg

SEQ ID NO: 3109957 - RNA, 15 nt, Human
auggugcaaugaccu

SEQ ID NO: 3109958 - RNA, 13 nt, Human
auggugcaaugac

SEQ ID NO: 3109959 - RNA, 12 nt, Human
auggugcaauga

SEQ ID NO: 3109960 - RNA, 17 nt, Human
auggugcaaugaccuuu

SEQ ID NO: 3109961 - RNA, 16 nt, Human
auggugcaaugaccuu

SEQ ID NO: 3109962 - RNA, 19 nt, Human
auggugcaaugaccuuuca

SEQ ID NO: 3109963 - RNA, 12 nt, Human
augguggcuggg

SEQ ID NO: 3109964 - RNA, 13 nt, Human
augguggcugggu

SEQ ID NO: 3109965 - RNA, 15 nt, Human
augguggcuggguug

SEQ ID NO: 3109966 - RNA, 17 nt, Human
augguggcuggguugga

SEQ ID NO: 3109967 - RNA, 14 nt, Human
augguuuucuugug

SEQ ID NO: 3109968 - RNA, 16 nt, Human
augguuuucaaaauaa

SEQ ID NO: 3109969 - RNA, 14 nt, Human
augguuuucaaaau

SEQ ID NO: 3109970 - RNA, 15 nt, Human
augguuuucaaaaua

SEQ ID NO: 3109971 - RNA, 11 nt, Human
augcccagccc

SEQ ID NO: 3109972 - RNA, 23 nt, Human
augcagugguaugaucacggcuc

SEQ ID NO: 3109973 - RNA, 13 nt, Human
augcagugcuucc

SEQ ID NO: 3109974 - RNA, 14 nt, Human
augcccagccccuu

SEQ ID NO: 3109975 - RNA, 13 nt, Human
augcccagccccu

SEQ ID NO: 3109976 - RNA, 12 nt, Human
augcccagcccc

SEQ ID NO: 3109977 - RNA, 19 nt, Human
uuuaauuuuuuugagacag

SEQ ID NO: 3109978 - RNA, 18 nt, Human
augcagccucacaguccu

SEQ ID NO: 3109979 - RNA, 17 nt, Human
augcagccucacagucc

SEQ ID NO: 3109980 - RNA, 22 nt, Human
augcaccagcccuuagcaggga

SEQ ID NO: 3109981 - RNA, 13 nt, Human
augcaccuggaau

SEQ ID NO: 3109982 - RNA, 14 nt, Human
augcaccagcccuu

SEQ ID NO: 3109983 - RNA, 16 nt, Human
augcacuuuguucugg

SEQ ID NO: 3109984 - RNA, 17 nt, Human
augcacuuuguucuggc

SEQ ID NO: 3109985 - RNA, 20 nt, Human
augcacuuuguucuggcucu

SEQ ID NO: 3109986 - RNA, 19 nt, Human
augcacuuuguucuggcuc

SEQ ID NO: 3109987 - RNA, 13 nt, Human
uuuaaagaaugcu

SEQ ID NO: 3109988 - RNA, 23 nt, Human
uuuaaaaauacagauagauauau

SEQ ID NO: 3109989 - RNA, 20 nt, Human
uuguucuugguuuguaaauu

SEQ ID NO: 3109990 - RNA, 13 nt, Human
uuguguuacuaag

SEQ ID NO: 3109991 - RNA, 15 nt, Human
uuguguuacuaaguu

SEQ ID NO: 3109992 - RNA, 20 nt, Human
uuguguuacuaaguuuuuau

SEQ ID NO: 3109993 - RNA, 21 nt, Human
uuguuccacaaguuaaauaaa

SEQ ID NO: 3109994 - RNA, 15 nt, Human
augaucuaggaagac

SEQ ID NO: 3109995 - RNA, 20 nt, Human
augaucuaggaagacuuugg

SEQ ID NO: 3109996 - RNA, 17 nt, Human
augaucuaggaagacuu

SEQ ID NO: 3109997 - RNA, 22 nt, Human
augcugugcccuaaaguguauu

SEQ ID NO: 3109998 - RNA, 13 nt, Human
augcuucucacug

SEQ ID NO: 3109999 - RNA, 15 nt, Human
uuucaaacuuuacua

SEQ ID NO: 3110000 - RNA, 22 nt, Human
uuucaaacuuuacuauggcccu

SEQ ID NO: 3110001 - RNA, 16 nt, Human
uuucaaacuuuacuau

SEQ ID NO: 3110002 - RNA, 15 nt, Human
augggagagaagaga

SEQ ID NO: 3110003 - RNA, 19 nt, Human
augggagagaagagaaugc

SEQ ID NO: 3110004 - RNA, 19 nt, Human
auggacuaacuugucuuug

SEQ ID NO: 3110005 - RNA, 12 nt, Human
auggacuuuguu

SEQ ID NO: 3110006 - RNA, 11 nt, Human
auggacuuugu

SEQ ID NO: 3110007 - RNA, 18 nt, Human
uuuccaugaguccccugu

SEQ ID NO: 3110008 - RNA, 17 nt, Human
uuuccaugaguccccug

SEQ ID NO: 3110009 - RNA, 19 nt, Human
aucaggugcugccauccag

SEQ ID NO: 3110010 - RNA, 21 nt, Human
uucuccuuguguuacuaaguu

SEQ ID NO: 3110011 - RNA, 15 nt, Human
uucucuaguuugauu

SEQ ID NO: 3110012 - RNA, 17 nt, Human
uucucuaguuugauuaa

SEQ ID NO: 3110013 - RNA, 17 nt, Human
uucuggcucuuccaggc

SEQ ID NO: 3110014 - RNA, 16 nt, Human
uucuggcucuuccagg

SEQ ID NO: 3110015 - RNA, 21 nt, Human
uucugccugcccaggccccug

SEQ ID NO: 3110016 - RNA, 15 nt, Human
uucuggcucuuccag

SEQ ID NO: 3110017 - RNA, 17 nt, Human
uucugccugcccaggcc

SEQ ID NO: 3110018 - RNA, 18 nt, Human
uucugccugcccaggccc

SEQ ID NO: 3110019 - RNA, 22 nt, Human
uucugaacuuggcgcugccccu

SEQ ID NO: 3110020 - RNA, 19 nt, Human
uucugaacuuggcgcugcc

SEQ ID NO: 3110021 - RNA, 15 nt, Human
uucugccauauucug

SEQ ID NO: 3110022 - RNA, 18 nt, Human
aucccauaugccugggca

SEQ ID NO: 3110023 - RNA, 12 nt, Human
aucccagcccca

SEQ ID NO: 3110024 - RNA, 20 nt, Human
aucccaaacccuucagugcc

SEQ ID NO: 3110025 - RNA, 19 nt, Human
aucccaaacccuucagugc

SEQ ID NO: 3110026 - RNA, 21 nt, Human
auccaguaucuugaagacuuu

SEQ ID NO: 3110027 - RNA, 18 nt, Human
auccaagcuggucccacu

SEQ ID NO: 3110028 - RNA, 13 nt, Human
auccacccaccuc

SEQ ID NO: 3110029 - RNA, 15 nt, Human
auccacccaccucag

SEQ ID NO: 3110030 - RNA, 16 nt, Human
auccaguaucuugaag

SEQ ID NO: 3110031 - RNA, 15 nt, Human
auccaguaucuugaa

SEQ ID NO: 3110032 - RNA, 12 nt, Human
auccuaagcuau

SEQ ID NO: 3110033 - RNA, 14 nt, Human
auccuccucagauc

SEQ ID NO: 3110034 - RNA, 16 nt, Human
auccuccucagaucuu

SEQ ID NO: 3110035 - RNA, 16 nt, Human
auccuaggcauuugcu

SEQ ID NO: 3110036 - RNA, 13 nt, Human
uucuucugcuuca

SEQ ID NO: 3110037 - RNA, 15 nt, Human
uucuucugcuucagc

SEQ ID NO: 3110038 - RNA, 14 nt, Human
uucuucucccucag

SEQ ID NO: 3110039 - RNA, 11 nt, Human
uucuucucccu

SEQ ID NO: 3110040 - RNA, 13 nt, Human
uucuucucccuca

SEQ ID NO: 3110041 - RNA, 24 nt, Human
aucccauaugccugggcagaagga

SEQ ID NO: 3110042 - RNA, 14 nt, Human
aucccucauccuca

SEQ ID NO: 3110043 - RNA, 23 nt, Human
aucccucauccucauacccaccc

SEQ ID NO: 3110044 - RNA, 21 nt, Human
aucccucauccucauacccac

SEQ ID NO: 3110045 - RNA, 13 nt, Human
aucccucauccuc

SEQ ID NO: 3110046 - RNA, 20 nt, Human
uucuucugcuucagccuccc

SEQ ID NO: 3110047 - RNA, 18 nt, Human
aucacggcucacugcagc

SEQ ID NO: 3110048 - RNA, 13 nt, Human
aucacgccacugc

SEQ ID NO: 3110049 - RNA, 15 nt, Human
aucacggcucacugc

SEQ ID NO: 3110050 - RNA, 14 nt, Human
aucaaugaguaaca

SEQ ID NO: 3110051 - RNA, 21 nt, Human
aucaagaugugacauguuuua

SEQ ID NO: 3110052 - RNA, 17 nt, Human
uuccuaauccucuagga

SEQ ID NO: 3110053 - RNA, 14 nt, Human
uuccugaaccgaug

SEQ ID NO: 3110054 - RNA, 17 nt, Human
uuccucuuuccaucuac

SEQ ID NO: 3110055 - RNA, 22 nt, Human
uuccucuuuccaucuacccucc

SEQ ID NO: 3110056 - RNA, 13 nt, Human
uuccucuuuccau

SEQ ID NO: 3110057 - RNA, 20 nt, Human
uucccucaccuuucccaucu

SEQ ID NO: 3110058 - RNA, 15 nt, Human
uucccuauuagagaa

SEQ ID NO: 3110059 - RNA, 14 nt, Human
uuccguuaaaauac

SEQ ID NO: 3110060 - RNA, 16 nt, Human
uuccguuaaaauacca

SEQ ID NO: 3110061 - RNA, 11 nt, Human
aucagaauucu

SEQ ID NO: 3110062 - RNA, 12 nt, Human
aucagaauucuc

SEQ ID NO: 3110063 - RNA, 18 nt, Human
aucaggccaggcccucug

SEQ ID NO: 3110064 - RNA, 16 nt, Human
aucaggccaggcccuc

SEQ ID NO: 3110065 - RNA, 15 nt, Human
aucaggccaggcccu

SEQ ID NO: 3110066 - RNA, 13 nt, Human
aucagcacgauuu

SEQ ID NO: 3110067 - RNA, 14 nt, Human
aucaggccaggccc

SEQ ID NO: 3110068 - RNA, 13 nt, Human
uucgcuccugugu

SEQ ID NO: 3110069 - RNA, 15 nt, Human
uucgcuccugugucu

SEQ ID NO: 3110070 - RNA, 19 nt, Human
uucgcuccugugucuugca

SEQ ID NO: 3110071 - RNA, 21 nt, Human
uucuaaaucuccaaaauaaaa

SEQ ID NO: 3110072 - RNA, 19 nt, Human
uucuaaaucuccaaaauaa

SEQ ID NO: 3110073 - RNA, 19 nt, Human
uucuaaaggcuaccuuugu

SEQ ID NO: 3110074 - RNA, 20 nt, Human
uucuaaaggcuaccuuugua

SEQ ID NO: 3110075 - RNA, 21 nt, Human
uucuaaaggcuaccuuuguau

SEQ ID NO: 3110076 - RNA, 16 nt, Human
uucuagcauggcugcc

SEQ ID NO: 3110077 - RNA, 18 nt, Human
uuggggaccagagcugcc

SEQ ID NO: 3110078 - RNA, 14 nt, Human
augaaaugagguca

SEQ ID NO: 3110079 - RNA, 19 nt, Human
augaaagggcccagagagg

SEQ ID NO: 3110080 - RNA, 15 nt, Human
augaaagggcccaga

SEQ ID NO: 3110081 - RNA, 18 nt, Human
augaaagggcccagagag

SEQ ID NO: 3110082 - RNA, 17 nt, Human
aucuuugcagacaggca

SEQ ID NO: 3110083 - RNA, 22 nt, Human
aucuuuucauuuaggugaggaa

SEQ ID NO: 3110084 - RNA, 23 nt, Human
uuggcuauuagagaucaaccccu

SEQ ID NO: 3110085 - RNA, 18 nt, Human
uuggccccugcccggcug

SEQ ID NO: 3110086 - RNA, 16 nt, Human
uuggagggugucccaa

SEQ ID NO: 3110087 - RNA, 22 nt, Human
aucugucauuugagcagggcuc

SEQ ID NO: 3110088 - RNA, 17 nt, Human
aucugugaaaggaaaga

SEQ ID NO: 3110089 - RNA, 10 nt, Human
aucuggugac

SEQ ID NO: 3110090 - RNA, 17 nt, Human
aucuggugacuuuccuc

SEQ ID NO: 3110091 - RNA, 16 nt, Human
aucuggugacuuuccu

SEQ ID NO: 3110092 - RNA, 18 nt, Human
aucugugaaaggaaagag

SEQ ID NO: 3110093 - RNA, 13 nt, Human
aucuugcucugcu

SEQ ID NO: 3110094 - RNA, 20 nt, Human
aucuuggucagauuugaacu

SEQ ID NO: 3110095 - RNA, 20 nt, Human
uugaguugauucagcucugc

SEQ ID NO: 3110096 - RNA, 20 nt, Human
uugagugaagcugggagaac

SEQ ID NO: 3110097 - RNA, 18 nt, Human
aucuaauauguaacaagc

SEQ ID NO: 3110098 - RNA, 12 nt, Human
uugagacagagu

SEQ ID NO: 3110099 - RNA, 15 nt, Human
uugagaucagccugg

SEQ ID NO: 3110100 - RNA, 16 nt, Human
uugagaucagccuggg

SEQ ID NO: 3110101 - RNA, 17 nt, Human
auccucuguacagagcc

SEQ ID NO: 3110102 - RNA, 16 nt, Human
auccucuguacagagc

SEQ ID NO: 3110103 - RNA, 17 nt, Human
aucuaaauggaaccacu

SEQ ID NO: 3110104 - RNA, 18 nt, Human
aucuaaauggaaccacuc

SEQ ID NO: 3110105 - RNA, 13 nt, Human
aucuaaauggaac

SEQ ID NO: 3110106 - RNA, 15 nt, Human
aucucuugagccugg

SEQ ID NO: 3110107 - RNA, 14 nt, Human
aucugaaaauguau

SEQ ID NO: 3110108 - RNA, 16 nt, Human
aucugaaaauguaugu

SEQ ID NO: 3110109 - RNA, 19 nt, Human
aucugaaaauguaugugua

SEQ ID NO: 3110110 - RNA, 20 nt, Human
aucugaaaauguauguguaa

SEQ ID NO: 3110111 - RNA, 22 nt, Human
aucugaaaauguauguguaagu

SEQ ID NO: 3110112 - RNA, 15 nt, Human
aucucccccagcccc

SEQ ID NO: 3110113 - RNA, 14 nt, Human
aucucccccagccc

SEQ ID NO: 3110114 - RNA, 17 nt, Human
aucucccccagccccau

SEQ ID NO: 3110115 - RNA, 16 nt, Human
aucucccccagcccca

SEQ ID NO: 3110116 - RNA, 16 nt, Human
aucucagggccugguc

SEQ ID NO: 3110117 - RNA, 14 nt, Human
aucucagggccugg

SEQ ID NO: 3110118 - RNA, 14 nt, Human
aucuccaaaauaaa

SEQ ID NO: 3110119 - RNA, 17 nt, Human
aucuccaaaauaaaacu

SEQ ID NO: 3110120 - RNA, 20 nt, Human
aucuccaaaauaaaacuuuu

SEQ ID NO: 3110121 - RNA, 21 nt, Human
aucuccaaaauaaaacuuuuu

SEQ ID NO: 3110122 - RNA, 13 nt, Human
aucuccaaaauaa

SEQ ID NO: 3110123 - RNA, 16 nt, Human
uugcaauggcagccuu

SEQ ID NO: 3110124 - RNA, 17 nt, Human
uugcaauggcagccuug

SEQ ID NO: 3110125 - RNA, 19 nt, Human
uugcaauggcagccuuggc

SEQ ID NO: 3110126 - RNA, 18 nt, Human
uugcaccacugcacucca

SEQ ID NO: 3110127 - RNA, 16 nt, Human
uugcaccacugcacuc

SEQ ID NO: 3110128 - RNA, 15 nt, Human
uugcaccacugcacu

SEQ ID NO: 3110129 - RNA, 14 nt, Human
uugcaccacugcac

SEQ ID NO: 3110130 - RNA, 12 nt, Human
aucugaaaaugu

SEQ ID NO: 3110131 - RNA, 23 nt, Human
aucugaaaauguauguguaagua

SEQ ID NO: 3110132 - RNA, 13 nt, Human
uugauuaaauucu

SEQ ID NO: 3110133 - RNA, 23 nt, Human
uugauguuuuaaggaugcuugua

SEQ ID NO: 3110134 - RNA, 14 nt, Human
uugauuaaauucuu

SEQ ID NO: 3110135 - RNA, 21 nt, Human
uugauuaaauucuugcaaagu

SEQ ID NO: 3110136 - RNA, 22 nt, Human
auuuuaaaaauacagauagaua

SEQ ID NO: 3110137 - RNA, 12 nt, Human
auuuauuuaaau

SEQ ID NO: 3110138 - RNA, 14 nt, Human
auuuauuuaaauuu

SEQ ID NO: 3110139 - RNA, 19 nt, Human
auuucccaaagcagugcau

SEQ ID NO: 3110140 - RNA, 23 nt, Human
auuucuuccacaagagcccaggc

SEQ ID NO: 3110141 - RNA, 20 nt, Human
auuucuuccacaagagccca

SEQ ID NO: 3110142 - RNA, 16 nt, Human
auuugaaaauuuugau

SEQ ID NO: 3110143 - RNA, 15 nt, Human
auuugaaaauuuuga

SEQ ID NO: 3110144 - RNA, 16 nt, Human
auuucuuccacaagag

SEQ ID NO: 3110145 - RNA, 17 nt, Human
auuuaaaagauacaguu

SEQ ID NO: 3110146 - RNA, 14 nt, Human
auuuaaaagauaca

SEQ ID NO: 3110147 - RNA, 16 nt, Human
auuuaaaagauacagu

SEQ ID NO: 3110148 - RNA, 13 nt, Human
auuuaaaagauac

SEQ ID NO: 3110149 - RNA, 21 nt, Human
auuguuuggggaugagaaagg

SEQ ID NO: 3110150 - RNA, 13 nt, Human
auugugggaaggg

SEQ ID NO: 3110151 - RNA, 14 nt, Human
auugugggaagggg

SEQ ID NO: 3110152 - RNA, 16 nt, Human
auugucaaagugguga

SEQ ID NO: 3110153 - RNA, 23 nt, Human
auugucaaaguggugagaggcau

SEQ ID NO: 3110154 - RNA, 21 nt, Human
auugauuuccguuaaaauacc

SEQ ID NO: 3110155 - RNA, 16 nt, Human
auuuuccugccaggca

SEQ ID NO: 3110156 - RNA, 19 nt, Human
auuuucccuauuagagaag

SEQ ID NO: 3110157 - RNA, 18 nt, Human
auuuugauccaagcuggu

SEQ ID NO: 3110158 - RNA, 19 nt, Human
auuuugauccaagcugguc

SEQ ID NO: 3110159 - RNA, 15 nt, Human
auuuugauguuuuaa

SEQ ID NO: 3110160 - RNA, 17 nt, Human
auuuugauguuuuaagg

SEQ ID NO: 3110161 - RNA, 20 nt, Human
auuuugcuaaaugugaauga

SEQ ID NO: 3110162 - RNA, 21 nt, Human
auuuugcugucccuuuuccuu

SEQ ID NO: 3110163 - RNA, 20 nt, Human
auuuuggaaaauaaauuauu

SEQ ID NO: 3110164 - RNA, 14 nt, Human
auuuuggaaaauaa

SEQ ID NO: 3110165 - RNA, 19 nt, Human
auuuuggaaaauaaauuau

SEQ ID NO: 3110166 - RNA, 18 nt, Human
auuuugcuuugugauuuu

SEQ ID NO: 3110167 - RNA, 20 nt, Human
auuuugcuuugugauuuuug

SEQ ID NO: 3110168 - RNA, 12 nt, Human
auuuugcuuugu

SEQ ID NO: 3110169 - RNA, 19 nt, Human
auuuugugcccccauguaa

SEQ ID NO: 3110170 - RNA, 23 nt, Human
auuuugucauauaagauucauau

SEQ ID NO: 3110171 - RNA, 13 nt, Human
auuuuuuaaaugc

SEQ ID NO: 3110172 - RNA, 14 nt, Human
auuuuuuaaaugca

SEQ ID NO: 3110173 - RNA, 19 nt, Human
auuuuuguagagccagggu

SEQ ID NO: 3110174 - RNA, 12 nt, Human
auuuuuguaauu

SEQ ID NO: 3110175 - RNA, 21 nt, Human
auuuuucuuagggaaggauac

SEQ ID NO: 3110176 - RNA, 22 nt, Human
auuuuucuuagggaaggauaca

SEQ ID NO: 3110177 - RNA, 17 nt, Human
auugaccugaggcccuu

SEQ ID NO: 3110178 - RNA, 14 nt, Human
auucuuaaauaugu

SEQ ID NO: 3110179 - RNA, 12 nt, Human
auugaaaucuuu

SEQ ID NO: 3110180 - RNA, 20 nt, Human
auugaaaucuuuuugcuuug

SEQ ID NO: 3110181 - RNA, 18 nt, Human
auugaaaucuuuuugcuu

SEQ ID NO: 3110182 - RNA, 17 nt, Human
auugaaaucuuuuugcu

SEQ ID NO: 3110183 - RNA, 18 nt, Human
auucugcucacauaucug

SEQ ID NO: 3110184 - RNA, 20 nt, Human
auucugccugcccaggcccc

SEQ ID NO: 3110185 - RNA, 21 nt, Human
auucugccugcccaggccccu

SEQ ID NO: 3110186 - RNA, 19 nt, Human
auucugcucacauaucugu

SEQ ID NO: 3110187 - RNA, 20 nt, Human
auucugcucacauaucuguc

SEQ ID NO: 3110188 - RNA, 21 nt, Human
auucugcucacauaucuguca

SEQ ID NO: 3110189 - RNA, 22 nt, Human
auucugcucacauaucugucau

SEQ ID NO: 3110190 - RNA, 19 nt, Human
auucuguuggccaguguga

SEQ ID NO: 3110191 - RNA, 21 nt, Human
auucuguuggccagugugaca

SEQ ID NO: 3110192 - RNA, 14 nt, Human
auucuguuggccag

SEQ ID NO: 3110193 - RNA, 11 nt, Human
auucugccugc

SEQ ID NO: 3110194 - RNA, 13 nt, Human
auucugccugccc

SEQ ID NO: 3110195 - RNA, 14 nt, Human
auucugccugccca

SEQ ID NO: 3110196 - RNA, 15 nt, Human
auucugccugcccag

SEQ ID NO: 3110197 - RNA, 16 nt, Human
auucugccugcccagg

SEQ ID NO: 3110198 - RNA, 17 nt, Human
auucugccugcccaggc

SEQ ID NO: 3110199 - RNA, 18 nt, Human
auucugccugcccaggcc

SEQ ID NO: 3110200 - RNA, 19 nt, Human
auucugccugcccaggccc

SEQ ID NO: 3110201 - RNA, 17 nt, Human
auucucauuugucacac

SEQ ID NO: 3110202 - RNA, 13 nt, Human
auucaggaagcuc

SEQ ID NO: 3110203 - RNA, 12 nt, Human
auucaggaagcu

SEQ ID NO: 3110204 - RNA, 18 nt, Human
auucagacagcugccugg

SEQ ID NO: 3110205 - RNA, 17 nt, Human
auucagacagcugccug

SEQ ID NO: 3110206 - RNA, 16 nt, Human
auucagacagcugccu

SEQ ID NO: 3110207 - RNA, 15 nt, Human
auucagacagcugcc

SEQ ID NO: 3110208 - RNA, 14 nt, Human
auucagacagcugc

SEQ ID NO: 3110209 - RNA, 13 nt, Human
auucagacagcug

SEQ ID NO: 3110210 - RNA, 12 nt, Human
auucagacagcu

SEQ ID NO: 3110211 - RNA, 11 nt, Human
auucagacagc

SEQ ID NO: 3110212 - RNA, 14 nt, Human
auuaucuagauacu

SEQ ID NO: 3110213 - RNA, 18 nt, Human
auuaucuagauacuguau

SEQ ID NO: 3110214 - RNA, 13 nt, Human
ugcgaaaggauga

SEQ ID NO: 3110215 - RNA, 19 nt, Human
ugcgaaaggaugaaaguga

SEQ ID NO: 3110216 - RNA, 18 nt, Human
ugcggacagccacggcca

SEQ ID NO: 3110217 - RNA, 17 nt, Human
ugcggacagccacggcc

SEQ ID NO: 3110218 - RNA, 15 nt, Human
ugccuguucagcucc

SEQ ID NO: 3110219 - RNA, 16 nt, Human
ugccuguucagcucca

SEQ ID NO: 3110220 - RNA, 22 nt, Human
ugccucugacacacagcucugu

SEQ ID NO: 3110221 - RNA, 19 nt, Human
agcugccugggaucccuca

SEQ ID NO: 3110222 - RNA, 13 nt, Human
agcugccugggau

SEQ ID NO: 3110223 - RNA, 21 nt, Human
agcugccugggaucccucauc

SEQ ID NO: 3110224 - RNA, 23 nt, Human
agcugggaugauuggagggggga

SEQ ID NO: 3110225 - RNA, 17 nt, Human
agcugggacuacaggug

SEQ ID NO: 3110226 - RNA, 19 nt, Human
agcugggacuacaggugug

SEQ ID NO: 3110227 - RNA, 14 nt, Human
agcugggcagguug

SEQ ID NO: 3110228 - RNA, 17 nt, Human
agcugcacccucaggca

SEQ ID NO: 3110229 - RNA, 13 nt, Human
agcugcacccuca

SEQ ID NO: 3110230 - RNA, 22 nt, Human
agcugcacccucaggcaggugg

SEQ ID NO: 3110231 - RNA, 20 nt, Human
agcugcacccucaggcaggu

SEQ ID NO: 3110232 - RNA, 19 nt, Human
agcugcacccucaggcagg

SEQ ID NO: 3110233 - RNA, 18 nt, Human
agcugcacccucaggcag

SEQ ID NO: 3110234 - RNA, 18 nt, Human
agcucuucuccaggcugu

SEQ ID NO: 3110235 - RNA, 17 nt, Human
agcucuucuccaggcug

SEQ ID NO: 3110236 - RNA, 12 nt, Human
agcucuguccug

SEQ ID NO: 3110237 - RNA, 12 nt, Human
agcucugcuccu

SEQ ID NO: 3110238 - RNA, 22 nt, Human
agcucugcuccucuccccagca

SEQ ID NO: 3110239 - RNA, 20 nt, Human
agcucugguccauagagagc

SEQ ID NO: 3110240 - RNA, 22 nt, Human
ugcccuccaagaccuucuccuu

SEQ ID NO: 3110241 - RNA, 20 nt, Human
ugcccuccaagaccuucucc

SEQ ID NO: 3110242 - RNA, 19 nt, Human
ugcccuccaagaccuucuc

SEQ ID NO: 3110243 - RNA, 13 nt, Human
agcugccaccugc

SEQ ID NO: 3110244 - RNA, 14 nt, Human
ugccucucucaggc

SEQ ID NO: 3110245 - RNA, 13 nt, Human
ugccucucucagg

SEQ ID NO: 3110246 - RNA, 19 nt, Human
ugccucccaucacccgcua

SEQ ID NO: 3110247 - RNA, 14 nt, Human
ugccucccaucacc

SEQ ID NO: 3110248 - RNA, 13 nt, Human
ugccucccaucac

SEQ ID NO: 3110249 - RNA, 15 nt, Human
ugccucucucaggcc

SEQ ID NO: 3110250 - RNA, 20 nt, Human
ugccucugacacacagcucu

SEQ ID NO: 3110251 - RNA, 21 nt, Human
ugccucugacacacagcucug

SEQ ID NO: 3110252 - RNA, 15 nt, Human
agcuuaucucagggg

SEQ ID NO: 3110253 - RNA, 14 nt, Human
agcuuaucucaggg

SEQ ID NO: 3110254 - RNA, 12 nt, Human
agcuuaucucag

SEQ ID NO: 3110255 - RNA, 20 nt, Human
ugcggacagccacggccagg

SEQ ID NO: 3110256 - RNA, 18 nt, Human
agcuuguaaauagcucag

SEQ ID NO: 3110257 - RNA, 19 nt, Human
agcuuguaaauagcucagg

SEQ ID NO: 3110258 - RNA, 20 nt, Human
agcuuguaaauagcucaggu

SEQ ID NO: 3110259 - RNA, 21 nt, Human
agcuuguaaauagcucaggug

SEQ ID NO: 3110260 - RNA, 13 nt, Human
aggaaagaggcuc

SEQ ID NO: 3110261 - RNA, 12 nt, Human
aggaaagaggcu

SEQ ID NO: 3110262 - RNA, 17 nt, Human
aggaaagcaaaggagau

SEQ ID NO: 3110263 - RNA, 16 nt, Human
aggaaagaggcucugg

SEQ ID NO: 3110264 - RNA, 19 nt, Human
agcuuugaaaauucagugg

SEQ ID NO: 3110265 - RNA, 18 nt, Human
agcuuugaaaauucagug

SEQ ID NO: 3110266 - RNA, 16 nt, Human
agcuuugaaaauucag

SEQ ID NO: 3110267 - RNA, 12 nt, Human
agcuuugaaaau

SEQ ID NO: 3110268 - RNA, 16 nt, Human
aggaaaagcugcugac

SEQ ID NO: 3110269 - RNA, 15 nt, Human
aggaaacccagcucu

SEQ ID NO: 3110270 - RNA, 17 nt, Human
aggaaacccagcucugg

SEQ ID NO: 3110271 - RNA, 16 nt, Human
aggaaacccagcucug

SEQ ID NO: 3110272 - RNA, 20 nt, Human
aggaaacccagcucuggucc

SEQ ID NO: 3110273 - RNA, 18 nt, Human
aggaaacccagcucuggu

SEQ ID NO: 3110274 - RNA, 21 nt, Human
aggaaacccagcucuggucca

SEQ ID NO: 3110275 - RNA, 19 nt, Human
aggaaagcaaaggagauug

SEQ ID NO: 3110276 - RNA, 16 nt, Human
ugcugacuguuuucuc

SEQ ID NO: 3110277 - RNA, 24 nt, Human
ugcugacuguuuucucuugagagg

SEQ ID NO: 3110278 - RNA, 21 nt, Human
ugcugacuguuuucucuugag

SEQ ID NO: 3110279 - RNA, 20 nt, Human
aggaaaggcuccaggagcag

SEQ ID NO: 3110280 - RNA, 18 nt, Human
aggaaaggcuccaggagc

SEQ ID NO: 3110281 - RNA, 16 nt, Human
aggaaaggcuccagga

SEQ ID NO: 3110282 - RNA, 22 nt, Human
aggaaaggcuccaggagcagcc

SEQ ID NO: 3110283 - RNA, 19 nt, Human
ugcucugaucauccacugu

SEQ ID NO: 3110284 - RNA, 22 nt, Human
ugcucugaucauccacugugcc

SEQ ID NO: 3110285 - RNA, 17 nt, Human
ugcucuggacaggcaug

SEQ ID NO: 3110286 - RNA, 15 nt, Human
ugcucugcauguuac

SEQ ID NO: 3110287 - RNA, 18 nt, Human
ugcucugcauguuacaua

SEQ ID NO: 3110288 - RNA, 17 nt, Human
ugcugacuguuuucucu

SEQ ID NO: 3110289 - RNA, 17 nt, Human
aggaagcucagggccug

SEQ ID NO: 3110290 - RNA, 22 nt, Human
aggaagcucagggccuggcuca

SEQ ID NO: 3110291 - RNA, 18 nt, Human
aggaagcucagggccugg

SEQ ID NO: 3110292 - RNA, 14 nt, Human
aggaagagaaaaaa

SEQ ID NO: 3110293 - RNA, 15 nt, Human
aggaagacuuuggaa

SEQ ID NO: 3110294 - RNA, 23 nt, Human
aggaauccagacccggcugcgug

SEQ ID NO: 3110295 - RNA, 20 nt, Human
aggaauccagacccggcugc

SEQ ID NO: 3110296 - RNA, 16 nt, Human
aggaagcucagggccu

SEQ ID NO: 3110297 - RNA, 21 nt, Human
ugcugccauccagguucagcu

SEQ ID NO: 3110298 - RNA, 22 nt, Human
ugcugccauccagguucagcuu

SEQ ID NO: 3110299 - RNA, 12 nt, Human
ugcugccaucca

SEQ ID NO: 3110300 - RNA, 13 nt, Human
ugcugccauccag

SEQ ID NO: 3110301 - RNA, 14 nt, Human
ugcugccauccagg

SEQ ID NO: 3110302 - RNA, 15 nt, Human
ugcugccauccaggu

SEQ ID NO: 3110303 - RNA, 11 nt, Human
ugcugccaucc

SEQ ID NO: 3110304 - RNA, 15 nt, Human
agccucaaccuccug

SEQ ID NO: 3110305 - RNA, 15 nt, Human
agccuaggugacaga

SEQ ID NO: 3110306 - RNA, 17 nt, Human
agccuaggugacagagu

SEQ ID NO: 3110307 - RNA, 19 nt, Human
ugcagacucuacagaggcc

SEQ ID NO: 3110308 - RNA, 20 nt, Human
ugcagacucuacagaggcca

SEQ ID NO: 3110309 - RNA, 18 nt, Human
ugcagacucuacagaggc

SEQ ID NO: 3110310 - RNA, 20 nt, Human
ugcacuuuguucuggcucuu

SEQ ID NO: 3110311 - RNA, 15 nt, Human
ugcacuccccugcug

SEQ ID NO: 3110312 - RNA, 22 nt, Human
ugcagacucuacagaggccaug

SEQ ID NO: 3110313 - RNA, 15 nt, Human
ugcacacaccagagc

SEQ ID NO: 3110314 - RNA, 16 nt, Human
ugcacaagcuccaagc

SEQ ID NO: 3110315 - RNA, 15 nt, Human
ugcacaagcuccaag

SEQ ID NO: 3110316 - RNA, 23 nt, Human
ugcacaagcuccaagcucccagg

SEQ ID NO: 3110317 - RNA, 22 nt, Human
ugcacaagcuccaagcucccag

SEQ ID NO: 3110318 - RNA, 20 nt, Human
ugcacaagcuccaagcuccc

SEQ ID NO: 3110319 - RNA, 18 nt, Human
ugcacaagcuccaagcuc

SEQ ID NO: 3110320 - RNA, 13 nt, Human
ugcacuccccugc

SEQ ID NO: 3110321 - RNA, 12 nt, Human
ugcacuccccug

SEQ ID NO: 3110322 - RNA, 14 nt, Human
ugcaccacugcacu

SEQ ID NO: 3110323 - RNA, 19 nt, Human
ugcacguacacacacauac

SEQ ID NO: 3110324 - RNA, 18 nt, Human
ugcagccucaaccuccug

SEQ ID NO: 3110325 - RNA, 19 nt, Human
ugcagccucaaccuccugg

SEQ ID NO: 3110326 - RNA, 17 nt, Human
agccucaaccuccuggg

SEQ ID NO: 3110327 - RNA, 18 nt, Human
agccucaaccuccugggc

SEQ ID NO: 3110328 - RNA, 13 nt, Human
agccucagcaucc

SEQ ID NO: 3110329 - RNA, 14 nt, Human
agccucagcauccu

SEQ ID NO: 3110330 - RNA, 15 nt, Human
agccucagcauccug

SEQ ID NO: 3110331 - RNA, 14 nt, Human
ugcagugagccgag

SEQ ID NO: 3110332 - RNA, 13 nt, Human
ugcaugcuguccc

SEQ ID NO: 3110333 - RNA, 15 nt, Human
ugcaugcugucccuu

SEQ ID NO: 3110334 - RNA, 14 nt, Human
ugcaugcugucccu

SEQ ID NO: 3110335 - RNA, 21 nt, Human
ugcaugaggcuaguguggugu

SEQ ID NO: 3110336 - RNA, 22 nt, Human
ugcaugaaguaauaugcacaca

SEQ ID NO: 3110337 - RNA, 20 nt, Human
ugcaugaaguaauaugcaca

SEQ ID NO: 3110338 - RNA, 21 nt, Human
ugcauaccacuuuuguucuug

SEQ ID NO: 3110339 - RNA, 22 nt, Human
ugcauaccacuuuuguucuugg

SEQ ID NO: 3110340 - RNA, 16 nt, Human
ugcaugcugucccuua

SEQ ID NO: 3110341 - RNA, 23 nt, Human
agccugcaguuauuaacacuaac

SEQ ID NO: 3110342 - RNA, 19 nt, Human
agccugccucuucucuacu

SEQ ID NO: 3110343 - RNA, 16 nt, Human
agccugccucuucucu

SEQ ID NO: 3110344 - RNA, 21 nt, Human
ugccauguuggccaggcuggu

SEQ ID NO: 3110345 - RNA, 20 nt, Human
ugccauguuggccaggcugg

SEQ ID NO: 3110346 - RNA, 17 nt, Human
ugccauguuggccaggc

SEQ ID NO: 3110347 - RNA, 17 nt, Human
agcucagggccuggcuc

SEQ ID NO: 3110348 - RNA, 18 nt, Human
ugccauguuggccaggcu

SEQ ID NO: 3110349 - RNA, 19 nt, Human
ugccauguuggccaggcug

SEQ ID NO: 3110350 - RNA, 16 nt, Human
agcucagggccuggcu

SEQ ID NO: 3110351 - RNA, 15 nt, Human
agcucagggccuggc

SEQ ID NO: 3110352 - RNA, 14 nt, Human
agcucagggccugg

SEQ ID NO: 3110353 - RNA, 12 nt, Human
ugcccaggcccc

SEQ ID NO: 3110354 - RNA, 20 nt, Human
ugcccaggccccugccaccc

SEQ ID NO: 3110355 - RNA, 22 nt, Human
ugcccaggccccugccacccug

SEQ ID NO: 3110356 - RNA, 16 nt, Human
ugcccaggcaggucuu

SEQ ID NO: 3110357 - RNA, 17 nt, Human
ugcccaggcaggucuug

SEQ ID NO: 3110358 - RNA, 20 nt, Human
ugcccaggcaggucuugaac

SEQ ID NO: 3110359 - RNA, 11 nt, Human
ugcccaggccc

SEQ ID NO: 3110360 - RNA, 14 nt, Human
ugcccacaggauca

SEQ ID NO: 3110361 - RNA, 15 nt, Human
ugcccaggcaggucu

SEQ ID NO: 3110362 - RNA, 23 nt, Human
ugccagucaccccggccaccugc

SEQ ID NO: 3110363 - RNA, 22 nt, Human
ugccagucaccccggccaccug

SEQ ID NO: 3110364 - RNA, 16 nt, Human
ugccauauucuguugg

SEQ ID NO: 3110365 - RNA, 17 nt, Human
ugccauauucuguuggc

SEQ ID NO: 3110366 - RNA, 15 nt, Human
ugccauauucuguug

SEQ ID NO: 3110367 - RNA, 20 nt, Human
ugccagucaccccggccacc

SEQ ID NO: 3110368 - RNA, 18 nt, Human
ugccagucaccccggcca

SEQ ID NO: 3110369 - RNA, 16 nt, Human
ugccagucaccccggc

SEQ ID NO: 3110370 - RNA, 15 nt, Human
ugccagucaccccgg

SEQ ID NO: 3110371 - RNA, 13 nt, Human
agcgugagccacu

SEQ ID NO: 3110372 - RNA, 15 nt, Human
agcgugagccacugc

SEQ ID NO: 3110373 - RNA, 16 nt, Human
agcggggacagcuccu

SEQ ID NO: 3110374 - RNA, 17 nt, Human
agcggggacagcuccuu

SEQ ID NO: 3110375 - RNA, 15 nt, Human
agcggggacagcucc

SEQ ID NO: 3110376 - RNA, 20 nt, Human
ugccauauucuguuggccag

SEQ ID NO: 3110377 - RNA, 21 nt, Human
ugccauauucuguuggccagu

SEQ ID NO: 3110378 - RNA, 16 nt, Human
agcgugagccacugca

SEQ ID NO: 3110379 - RNA, 17 nt, Human
agcgugagccacugcac

SEQ ID NO: 3110380 - RNA, 20 nt, Human
agcgugguggacaugcacag

SEQ ID NO: 3110381 - RNA, 23 nt, Human
agcgugguggacaugcacagcua

SEQ ID NO: 3110382 - RNA, 14 nt, Human
agcgcccaguuggg

SEQ ID NO: 3110383 - RNA, 22 nt, Human
agcgcccaguuggguggaugcc

SEQ ID NO: 3110384 - RNA, 19 nt, Human
ugcauuugaaaauuuugau

SEQ ID NO: 3110385 - RNA, 23 nt, Human
ugcauuugaaaauuuugauguuu

SEQ ID NO: 3110386 - RNA, 17 nt, Human
uggcuaauguacugcau

SEQ ID NO: 3110387 - RNA, 19 nt, Human
uggcuaauguacugcauau

SEQ ID NO: 3110388 - RNA, 14 nt, Human
uggcuaaauucaug

SEQ ID NO: 3110389 - RNA, 23 nt, Human
aggcuccaggagcagccacauuc

SEQ ID NO: 3110390 - RNA, 19 nt, Human
aggcuccaggagcagccac

SEQ ID NO: 3110391 - RNA, 18 nt, Human
aggcuccaggagcagcca

SEQ ID NO: 3110392 - RNA, 17 nt, Human
aggcuccaggagcagcc

SEQ ID NO: 3110393 - RNA, 13 nt, Human
uggcucacgccug

SEQ ID NO: 3110394 - RNA, 23 nt, Human
uggcuguuggcugggggccucag

SEQ ID NO: 3110395 - RNA, 14 nt, Human
uggcuucacggaag

SEQ ID NO: 3110396 - RNA, 16 nt, Human
uggcuguuggcugggg

SEQ ID NO: 3110397 - RNA, 18 nt, Human
uggcuguuggcugggggc

SEQ ID NO: 3110398 - RNA, 23 nt, Human
uggcugcaaaggguaucaggugc

SEQ ID NO: 3110399 - RNA, 15 nt, Human
uggcuuuugugcauu

SEQ ID NO: 3110400 - RNA, 16 nt, Human
uggcuuuugugcauua

SEQ ID NO: 3110401 - RNA, 20 nt, Human
uggcuucacggaagagccuu

SEQ ID NO: 3110402 - RNA, 17 nt, Human
uggcuucacggaagagc

SEQ ID NO: 3110403 - RNA, 21 nt, Human
uggcuuuugugcauuaucuag

SEQ ID NO: 3110404 - RNA, 13 nt, Human
aggcugggcuccc

SEQ ID NO: 3110405 - RNA, 18 nt, Human
aggcugggcucccuuccc

SEQ ID NO: 3110406 - RNA, 14 nt, Human
aggcugggcucccu

SEQ ID NO: 3110407 - RNA, 14 nt, Human
aggcugggcuucag

SEQ ID NO: 3110408 - RNA, 23 nt, Human
aggcugggcucccuucccaccuc

SEQ ID NO: 3110409 - RNA, 21 nt, Human
aggcugggcucccuucccacc

SEQ ID NO: 3110410 - RNA, 22 nt, Human
aggcugggagagccuuccaggg

SEQ ID NO: 3110411 - RNA, 21 nt, Human
aggcugggagagccuuccagg

SEQ ID NO: 3110412 - RNA, 20 nt, Human
aggcugggagagccuuccag

SEQ ID NO: 3110413 - RNA, 16 nt, Human
aggcugggagagccuu

SEQ ID NO: 3110414 - RNA, 19 nt, Human
aggcugggagagccuucca

SEQ ID NO: 3110415 - RNA, 17 nt, Human
aggcugggggaagaagc

SEQ ID NO: 3110416 - RNA, 22 nt, Human
aggcugggcuucaguggcagcu

SEQ ID NO: 3110417 - RNA, 23 nt, Human
aggcugggcuucaguggcagcug

SEQ ID NO: 3110418 - RNA, 18 nt, Human
aggcugggcuucaguggc

SEQ ID NO: 3110419 - RNA, 19 nt, Human
aggcugggcuucaguggca

SEQ ID NO: 3110420 - RNA, 20 nt, Human
aggcugggcuucaguggcag

SEQ ID NO: 3110421 - RNA, 21 nt, Human
aggcugggcuucaguggcagc

SEQ ID NO: 3110422 - RNA, 22 nt, Human
aggcugggggaagaagcucucu

SEQ ID NO: 3110423 - RNA, 17 nt, Human
aggcuggguucugaucc

SEQ ID NO: 3110424 - RNA, 14 nt, Human
aggcuggguucuga

SEQ ID NO: 3110425 - RNA, 23 nt, Human
aggcuuagucacugagacagccc

SEQ ID NO: 3110426 - RNA, 22 nt, Human
aggcuuagucacugagacagcc

SEQ ID NO: 3110427 - RNA, 21 nt, Human
aggcuuagucacugagacagc

SEQ ID NO: 3110428 - RNA, 12 nt, Human
agggcccagaga

SEQ ID NO: 3110429 - RNA, 13 nt, Human
agggcccagagag

SEQ ID NO: 3110430 - RNA, 23 nt, Human
agggaguccgaaagggacuugga

SEQ ID NO: 3110431 - RNA, 20 nt, Human
agggagugacagaggcagcc

SEQ ID NO: 3110432 - RNA, 20 nt, Human
agggagugaguugauagcac

SEQ ID NO: 3110433 - RNA, 20 nt, Human
agggaguccgaaagggacuu

SEQ ID NO: 3110434 - RNA, 22 nt, Human
agggagggcuccagacacaugu

SEQ ID NO: 3110435 - RNA, 17 nt, Human
agggagggagggcucca

SEQ ID NO: 3110436 - RNA, 12 nt, Human
agggagggcucc

SEQ ID NO: 3110437 - RNA, 19 nt, Human
agggagggcuccagacaca

SEQ ID NO: 3110438 - RNA, 17 nt, Human
agggagggcuccagaca

SEQ ID NO: 3110439 - RNA, 14 nt, Human
agggcccagagagg

SEQ ID NO: 3110440 - RNA, 15 nt, Human
agggcuccagacaca

SEQ ID NO: 3110441 - RNA, 20 nt, Human
agggcuccagacacaugucc

SEQ ID NO: 3110442 - RNA, 21 nt, Human
ugggcucccuucccaccucuc

SEQ ID NO: 3110443 - RNA, 14 nt, Human
ugggcucccuuccc

SEQ ID NO: 3110444 - RNA, 21 nt, Human
ugggaggauugcuugagcuca

SEQ ID NO: 3110445 - RNA, 18 nt, Human
ugggaggauugcuugagc

SEQ ID NO: 3110446 - RNA, 22 nt, Human
ugggaggauugcuugagcucag

SEQ ID NO: 3110447 - RNA, 22 nt, Human
ugggaggaucucuugagccugg

SEQ ID NO: 3110448 - RNA, 21 nt, Human
ugggagaaccaaaaagaggcu

SEQ ID NO: 3110449 - RNA, 13 nt, Human
ugggcagaaggaa

SEQ ID NO: 3110450 - RNA, 20 nt, Human
ugggcagaaggaagacuuca

SEQ ID NO: 3110451 - RNA, 16 nt, Human
ugggcagaaggaagac

SEQ ID NO: 3110452 - RNA, 21 nt, Human
ugggcaacccccagccugcua

SEQ ID NO: 3110453 - RNA, 18 nt, Human
agggacuuggaagcuccg

SEQ ID NO: 3110454 - RNA, 19 nt, Human
agggacuuggaagcuccgc

SEQ ID NO: 3110455 - RNA, 15 nt, Human
agggacuuggaagcu

SEQ ID NO: 3110456 - RNA, 20 nt, Human
agggacuuggaagcuccgcu

SEQ ID NO: 3110457 - RNA, 18 nt, Human
ugggacuacaggcaccca

SEQ ID NO: 3110458 - RNA, 16 nt, Human
ugggacuacaggugug

SEQ ID NO: 3110459 - RNA, 22 nt, Human
uggcaugggaaugaaugucagu

SEQ ID NO: 3110460 - RNA, 19 nt, Human
uggcccacgcacuucggga

SEQ ID NO: 3110461 - RNA, 13 nt, Human
uggcccacgcacu

SEQ ID NO: 3110462 - RNA, 14 nt, Human
uggcccacugcauc

SEQ ID NO: 3110463 - RNA, 13 nt, Human
uggcccacugcau

SEQ ID NO: 3110464 - RNA, 18 nt, Human
uggccugagcugggauga

SEQ ID NO: 3110465 - RNA, 20 nt, Human
uggccucugcacuccccugc

SEQ ID NO: 3110466 - RNA, 18 nt, Human
uggccucugcacuccccu

SEQ ID NO: 3110467 - RNA, 19 nt, Human
uggccucugcacuccccug

SEQ ID NO: 3110468 - RNA, 17 nt, Human
aggccuucucugaagga

SEQ ID NO: 3110469 - RNA, 18 nt, Human
aggccuucucugaaggac

SEQ ID NO: 3110470 - RNA, 13 nt, Human
aggcuccaggagc

SEQ ID NO: 3110471 - RNA, 16 nt, Human
aggcuccaggagcagc

SEQ ID NO: 3110472 - RNA, 14 nt, Human
aggcuccaggagca

SEQ ID NO: 3110473 - RNA, 15 nt, Human
uggcagcucagagag

SEQ ID NO: 3110474 - RNA, 14 nt, Human
uggcagcucagaga

SEQ ID NO: 3110475 - RNA, 18 nt, Human
aggccagagacacaagcc

SEQ ID NO: 3110476 - RNA, 13 nt, Human
aggccagagacac

SEQ ID NO: 3110477 - RNA, 16 nt, Human
uggcagcucagagagg

SEQ ID NO: 3110478 - RNA, 12 nt, Human
aggccagagaca

SEQ ID NO: 3110479 - RNA, 17 nt, Human
aggccaugggccuccug

SEQ ID NO: 3110480 - RNA, 18 nt, Human
aggccaugggccuccugu

SEQ ID NO: 3110481 - RNA, 23 nt, Human
aggccagagacacaagccuucgg

SEQ ID NO: 3110482 - RNA, 13 nt, Human
uggcagcucagag

SEQ ID NO: 3110483 - RNA, 16 nt, Human
aggcccagagggccug

SEQ ID NO: 3110484 - RNA, 15 nt, Human
aggcccagagggccu

SEQ ID NO: 3110485 - RNA, 17 nt, Human
uggcaccagcagccugg

SEQ ID NO: 3110486 - RNA, 16 nt, Human
uggcaccagcagccug

SEQ ID NO: 3110487 - RNA, 13 nt, Human
aggccccugccac

SEQ ID NO: 3110488 - RNA, 15 nt, Human
aggccccugccaccc

SEQ ID NO: 3110489 - RNA, 20 nt, Human
aggcccagagggccugcaag

SEQ ID NO: 3110490 - RNA, 19 nt, Human
aggcccagagggccugcaa

SEQ ID NO: 3110491 - RNA, 17 nt, Human
aggccccugccacccug

SEQ ID NO: 3110492 - RNA, 18 nt, Human
aggccccugccacccugg

SEQ ID NO: 3110493 - RNA, 12 nt, Human
aggccccugcca

SEQ ID NO: 3110494 - RNA, 21 nt, Human
aggccccugccacccugggga

SEQ ID NO: 3110495 - RNA, 14 nt, Human
aggcccggcuccag

SEQ ID NO: 3110496 - RNA, 15 nt, Human
aggcccggcuccagg

SEQ ID NO: 3110497 - RNA, 16 nt, Human
aggcccggcuccaggc

SEQ ID NO: 3110498 - RNA, 13 nt, Human
aggccuggccaga

SEQ ID NO: 3110499 - RNA, 12 nt, Human
aggccuggccag

SEQ ID NO: 3110500 - RNA, 19 nt, Human
aggcagggucucacucugu

SEQ ID NO: 3110501 - RNA, 18 nt, Human
aggcagggucucacucug

SEQ ID NO: 3110502 - RNA, 20 nt, Human
aggcagggucucacucuguc

SEQ ID NO: 3110503 - RNA, 21 nt, Human
aggcagggucucacucugucg

SEQ ID NO: 3110504 - RNA, 22 nt, Human
aggcagggucucacucugucgc

SEQ ID NO: 3110505 - RNA, 14 nt, Human
aggcagguccaggg

SEQ ID NO: 3110506 - RNA, 21 nt, Human
aggcaggucuugaacuccugg

SEQ ID NO: 3110507 - RNA, 22 nt, Human
aggcagccccauucugccugcc

SEQ ID NO: 3110508 - RNA, 19 nt, Human
aggcagccccauucugccu

SEQ ID NO: 3110509 - RNA, 20 nt, Human
aggcagccccauucugccug

SEQ ID NO: 3110510 - RNA, 21 nt, Human
aggcagccccauucugccugc

SEQ ID NO: 3110511 - RNA, 12 nt, Human
aggcaggauggc

SEQ ID NO: 3110512 - RNA, 22 nt, Human
uggacuuuguuaguuucuccaa

SEQ ID NO: 3110513 - RNA, 11 nt, Human
uggacuuuguu

SEQ ID NO: 3110514 - RNA, 24 nt, Human
uggacuuuguuaguuucuccaagc

SEQ ID NO: 3110515 - RNA, 15 nt, Human
aggcaaugcuggcug

SEQ ID NO: 3110516 - RNA, 16 nt, Human
aggcaaugcuggcugu

SEQ ID NO: 3110517 - RNA, 22 nt, Human
aggauugcuacuguccuaccca

SEQ ID NO: 3110518 - RNA, 18 nt, Human
aggaugcuuguacauaau

SEQ ID NO: 3110519 - RNA, 21 nt, Human
aggauccugagccagauuuca

SEQ ID NO: 3110520 - RNA, 15 nt, Human
aggaugcuuguacau

SEQ ID NO: 3110521 - RNA, 16 nt, Human
aggaugcuuguacaua

SEQ ID NO: 3110522 - RNA, 14 nt, Human
aggcaagcaccucc

SEQ ID NO: 3110523 - RNA, 19 nt, Human
aggcaacugcauuggcuuu

SEQ ID NO: 3110524 - RNA, 18 nt, Human
uggaaguacuauaauuua

SEQ ID NO: 3110525 - RNA, 20 nt, Human
uggaaguacuauaauuuacc

SEQ ID NO: 3110526 - RNA, 13 nt, Human
uggaagcuccgcu

SEQ ID NO: 3110527 - RNA, 12 nt, Human
uggaacacucug

SEQ ID NO: 3110528 - RNA, 10 nt, Human
ugcugcccug

SEQ ID NO: 3110529 - RNA, 15 nt, Human
aggaggccagccuug

SEQ ID NO: 3110530 - RNA, 21 nt, Human
aggaguuugagaccaaccugg

SEQ ID NO: 3110531 - RNA, 16 nt, Human
agugaggaugaaaaaa

SEQ ID NO: 3110532 - RNA, 13 nt, Human
agugaggcucugc

SEQ ID NO: 3110533 - RNA, 12 nt, Human
agugaggcucug

SEQ ID NO: 3110534 - RNA, 17 nt, Human
agugcagugagccgaga

SEQ ID NO: 3110535 - RNA, 16 nt, Human
agugcaugcugucccu

SEQ ID NO: 3110536 - RNA, 14 nt, Human
agugcaugcugucc

SEQ ID NO: 3110537 - RNA, 20 nt, Human
ugugcugcccugcccaccug

SEQ ID NO: 3110538 - RNA, 19 nt, Human
ugugcugcccugcccaccu

SEQ ID NO: 3110539 - RNA, 18 nt, Human
ugugcugcccugcccacc

SEQ ID NO: 3110540 - RNA, 23 nt, Human
agugagcugguuuuuagcggaga

SEQ ID NO: 3110541 - RNA, 22 nt, Human
uguggauuuaacagaaauguac

SEQ ID NO: 3110542 - RNA, 19 nt, Human
uguggauuuaacagaaaug

SEQ ID NO: 3110543 - RNA, 20 nt, Human
uguggauuuaacagaaaugu

SEQ ID NO: 3110544 - RNA, 14 nt, Human
uguggaugauaaaa

SEQ ID NO: 3110545 - RNA, 19 nt, Human
ugugcugagucugaaggcu

SEQ ID NO: 3110546 - RNA, 18 nt, Human
ugugcugagucugaaggc

SEQ ID NO: 3110547 - RNA, 11 nt, Human
ugugaggaagc

SEQ ID NO: 3110548 - RNA, 16 nt, Human
ugugacugaucucucg

SEQ ID NO: 3110549 - RNA, 17 nt, Human
agucucuugauucauaa

SEQ ID NO: 3110550 - RNA, 16 nt, Human
agucucuugauucaua

SEQ ID NO: 3110551 - RNA, 14 nt, Human
agucuuagauguau

SEQ ID NO: 3110552 - RNA, 16 nt, Human
agucuuagauguauau

SEQ ID NO: 3110553 - RNA, 13 nt, Human
agucuuagaugua

SEQ ID NO: 3110554 - RNA, 18 nt, Human
ugugaugagaggaaauca

SEQ ID NO: 3110555 - RNA, 19 nt, Human
ugugaugagaggaaaucac

SEQ ID NO: 3110556 - RNA, 22 nt, Human
ugugaugaugaaaugaggucag

SEQ ID NO: 3110557 - RNA, 12 nt, Human
agugagcugguu

SEQ ID NO: 3110558 - RNA, 14 nt, Human
agugagcacuaagg

SEQ ID NO: 3110559 - RNA, 21 nt, Human
agugacugauggcuaauguac

SEQ ID NO: 3110560 - RNA, 16 nt, Human
agugaacuugggccac

SEQ ID NO: 3110561 - RNA, 20 nt, Human
agugugacugaucucucgug

SEQ ID NO: 3110562 - RNA, 20 nt, Human
agugugccugaagucccaga

SEQ ID NO: 3110563 - RNA, 21 nt, Human
agugugccugaagucccagau

SEQ ID NO: 3110564 - RNA, 20 nt, Human
agugugguguuuccuggcac

SEQ ID NO: 3110565 - RNA, 13 nt, Human
uguuaugacucca

SEQ ID NO: 3110566 - RNA, 17 nt, Human
uguuaugacuccagaau

SEQ ID NO: 3110567 - RNA, 22 nt, Human
agugugguguuuccuggcacug

SEQ ID NO: 3110568 - RNA, 13 nt, Human
aguuacucagaau

SEQ ID NO: 3110569 - RNA, 19 nt, Human
aguguuguggauuuaacag

SEQ ID NO: 3110570 - RNA, 20 nt, Human
aguguuguggauuuaacaga

SEQ ID NO: 3110571 - RNA, 16 nt, Human
aguguuguggauuuaa

SEQ ID NO: 3110572 - RNA, 23 nt, Human
uguugcccaggcuggcgugcagu

SEQ ID NO: 3110573 - RNA, 20 nt, Human
uguugcccaggcuggcgugc

SEQ ID NO: 3110574 - RNA, 22 nt, Human
uguguuaucacccagaagaaaa

SEQ ID NO: 3110575 - RNA, 22 nt, Human
agugggcccaaugcacuuuguu

SEQ ID NO: 3110576 - RNA, 18 nt, Human
agugggggaucacagccu

SEQ ID NO: 3110577 - RNA, 22 nt, Human
ugugucucuugguccugcugca

SEQ ID NO: 3110578 - RNA, 20 nt, Human
ugugucagguggggcagcuu

SEQ ID NO: 3110579 - RNA, 16 nt, Human
uguaggguuauaauaa

SEQ ID NO: 3110580 - RNA, 17 nt, Human
uguaggguuauaauaau

SEQ ID NO: 3110581 - RNA, 18 nt, Human
uguauauauuuccuauau

SEQ ID NO: 3110582 - RNA, 22 nt, Human
uguauauauuuccuauauuguu

SEQ ID NO: 3110583 - RNA, 21 nt, Human
aguacacuguuucaaacuuua

SEQ ID NO: 3110584 - RNA, 20 nt, Human
aguacacuguuucaaacuuu

SEQ ID NO: 3110585 - RNA, 23 nt, Human
aguacacuguuucaaacuuuacu

SEQ ID NO: 3110586 - RNA, 21 nt, Human
uguacauggaauaacauguaa

SEQ ID NO: 3110587 - RNA, 20 nt, Human
uguacaugaaaacacauuuu

SEQ ID NO: 3110588 - RNA, 16 nt, Human
uguacaugaaaacaca

SEQ ID NO: 3110589 - RNA, 14 nt, Human
uguacaugaaaaca

SEQ ID NO: 3110590 - RNA, 20 nt, Human
uguaauuuuuuuaucgucac

SEQ ID NO: 3110591 - RNA, 19 nt, Human
uguacauaaugcgugcaua

SEQ ID NO: 3110592 - RNA, 20 nt, Human
uguacauaaugcgugcauac

SEQ ID NO: 3110593 - RNA, 20 nt, Human
agguuggcaaaaaggcagga

SEQ ID NO: 3110594 - RNA, 17 nt, Human
uguaauuaaguacuaug

SEQ ID NO: 3110595 - RNA, 18 nt, Human
uguaauuaaguacuaugu

SEQ ID NO: 3110596 - RNA, 19 nt, Human
uguaauuaaguacuaugua

SEQ ID NO: 3110597 - RNA, 21 nt, Human
uguaauuaaguacuauguauc

SEQ ID NO: 3110598 - RNA, 12 nt, Human
aggugggaggau

SEQ ID NO: 3110599 - RNA, 20 nt, Human
aggugugagucaccaagccc

SEQ ID NO: 3110600 - RNA, 16 nt, Human
aggugucccugcacuu

SEQ ID NO: 3110601 - RNA, 21 nt, Human
aggugugagucaccaagccca

SEQ ID NO: 3110602 - RNA, 22 nt, Human
aggugugagucaccaagcccag

SEQ ID NO: 3110603 - RNA, 14 nt, Human
agguugaagcacca

SEQ ID NO: 3110604 - RNA, 14 nt, Human
ugucccugcacuug

SEQ ID NO: 3110605 - RNA, 23 nt, Human
ugucccuuacgugaguccuggca

SEQ ID NO: 3110606 - RNA, 19 nt, Human
ugucccuuacgugaguccu

SEQ ID NO: 3110607 - RNA, 18 nt, Human
agucccaccuuggcugca

SEQ ID NO: 3110608 - RNA, 19 nt, Human
agucccaccuuggcugcag

SEQ ID NO: 3110609 - RNA, 15 nt, Human
agucccaccuuggcu

SEQ ID NO: 3110610 - RNA, 16 nt, Human
agucccaccuuggcug

SEQ ID NO: 3110611 - RNA, 23 nt, Human
agucucacuguugcccaggcugg

SEQ ID NO: 3110612 - RNA, 21 nt, Human
agucucacuguugcccaggcu

SEQ ID NO: 3110613 - RNA, 16 nt, Human
aguccucccaucucac

SEQ ID NO: 3110614 - RNA, 14 nt, Human
aguccucccaucuc

SEQ ID NO: 3110615 - RNA, 22 nt, Human
uguccaagaagcccaggaaagg

SEQ ID NO: 3110616 - RNA, 18 nt, Human
uguccaagaagcccagga

SEQ ID NO: 3110617 - RNA, 17 nt, Human
uguccaagaagcccagg

SEQ ID NO: 3110618 - RNA, 16 nt, Human
uguccaagaagcccag

SEQ ID NO: 3110619 - RNA, 20 nt, Human
ugucccugcacuugcagacu

SEQ ID NO: 3110620 - RNA, 22 nt, Human
ugucccugcacuugcagacucu

SEQ ID NO: 3110621 - RNA, 23 nt, Human
ugucccugcacuugcagacucua

SEQ ID NO: 3110622 - RNA, 16 nt, Human
ugucagguggggcagc

SEQ ID NO: 3110623 - RNA, 15 nt, Human
uguccaagaagccca

SEQ ID NO: 3110624 - RNA, 14 nt, Human
uguccaagaagccc

SEQ ID NO: 3110625 - RNA, 17 nt, Human
ugucagguggggcagcu

SEQ ID NO: 3110626 - RNA, 18 nt, Human
ugucagguggggcagcuu

SEQ ID NO: 3110627 - RNA, 20 nt, Human
ugucagguggggcagcuuga

SEQ ID NO: 3110628 - RNA, 20 nt, Human
ugucauuugagcagggcuca

SEQ ID NO: 3110629 - RNA, 21 nt, Human
ugucauuugagcagggcucag

SEQ ID NO: 3110630 - RNA, 22 nt, Human
ugucauuugagcagggcucagc

SEQ ID NO: 3110631 - RNA, 14 nt, Human
agucaccaagccca

SEQ ID NO: 3110632 - RNA, 15 nt, Human
agucaccaagcccag

SEQ ID NO: 3110633 - RNA, 17 nt, Human
agucaccccggccaccu

SEQ ID NO: 3110634 - RNA, 19 nt, Human
aguauucuuauuuaaugaa

SEQ ID NO: 3110635 - RNA, 11 nt, Human
auacucccauc

SEQ ID NO: 3110636 - RNA, 14 nt, Human
auacucccaucugu

SEQ ID NO: 3110637 - RNA, 16 nt, Human
auacucugcuuagaau

SEQ ID NO: 3110638 - RNA, 13 nt, Human
uuauuaugcauga

SEQ ID NO: 3110639 - RNA, 12 nt, Human
uuauuaugcaug

SEQ ID NO: 3110640 - RNA, 23 nt, Human
auagacaauuuauuauggcacau

SEQ ID NO: 3110641 - RNA, 16 nt, Human
auagacaauuuauuau

SEQ ID NO: 3110642 - RNA, 22 nt, Human
auagacaauuuauuauggcaca

SEQ ID NO: 3110643 - RNA, 14 nt, Human
auagagagagacca

SEQ ID NO: 3110644 - RNA, 11 nt, Human
uuaugacucca

SEQ ID NO: 3110645 - RNA, 17 nt, Human
uuaucacccagaagaaa

SEQ ID NO: 3110646 - RNA, 18 nt, Human
uuaucacccagaagaaaa

SEQ ID NO: 3110647 - RNA, 19 nt, Human
uuaucacccagaagaaaau

SEQ ID NO: 3110648 - RNA, 21 nt, Human
uuaucacccagaagaaaauag

SEQ ID NO: 3110649 - RNA, 22 nt, Human
uuaugggcuggguucuacccag

SEQ ID NO: 3110650 - RNA, 13 nt, Human
uuaugggcugggu

SEQ ID NO: 3110651 - RNA, 19 nt, Human
uuauggcuuuugugcauua

SEQ ID NO: 3110652 - RNA, 18 nt, Human
uuauggcuuuugugcauu

SEQ ID NO: 3110653 - RNA, 17 nt, Human
auacagaggcaacugca

SEQ ID NO: 3110654 - RNA, 16 nt, Human
auacagaggcaacugc

SEQ ID NO: 3110655 - RNA, 17 nt, Human
uuauaaacuuuaccuuu

SEQ ID NO: 3110656 - RNA, 18 nt, Human
uuauaaacuuuaccuuuu

SEQ ID NO: 3110657 - RNA, 20 nt, Human
auacauaaacaagaccacgu

SEQ ID NO: 3110658 - RNA, 20 nt, Human
auacaguuacucagaauucu

SEQ ID NO: 3110659 - RNA, 23 nt, Human
auacagauagauauaugcucugc

SEQ ID NO: 3110660 - RNA, 22 nt, Human
auacaggaaaagcugcugacag

SEQ ID NO: 3110661 - RNA, 23 nt, Human
auacaggaaaagcugcugacagu

SEQ ID NO: 3110662 - RNA, 18 nt, Human
auacaguuacucagaauu

SEQ ID NO: 3110663 - RNA, 13 nt, Human
auacuaaccagca

SEQ ID NO: 3110664 - RNA, 19 nt, Human
auacuaaccagcagaaaug

SEQ ID NO: 3110665 - RNA, 20 nt, Human
auacuaaccagcagaaaugc

SEQ ID NO: 3110666 - RNA, 14 nt, Human
auaccuuuuuuaga

SEQ ID NO: 3110667 - RNA, 17 nt, Human
auaccacuuuuguucuu

SEQ ID NO: 3110668 - RNA, 18 nt, Human
auaccacuuuuguucuug

SEQ ID NO: 3110669 - RNA, 14 nt, Human
auacguacacauuu

SEQ ID NO: 3110670 - RNA, 15 nt, Human
auacguacacauuuu

SEQ ID NO: 3110671 - RNA, 16 nt, Human
auacguacacauuuua

SEQ ID NO: 3110672 - RNA, 13 nt, Human
auacguacacauu

SEQ ID NO: 3110673 - RNA, 23 nt, Human
uuaacuuuuauaaacuuuaccuu

SEQ ID NO: 3110674 - RNA, 22 nt, Human
uuaacuuuuauaaacuuuaccu

SEQ ID NO: 3110675 - RNA, 18 nt, Human
uuaacuuuuauaaacuuu

SEQ ID NO: 3110676 - RNA, 15 nt, Human
uuaaucuaaauggaa

SEQ ID NO: 3110677 - RNA, 17 nt, Human
uuaaaaaucucaaauuu

SEQ ID NO: 3110678 - RNA, 20 nt, Human
uuaaaaaucucaaauuucua

SEQ ID NO: 3110679 - RNA, 19 nt, Human
uuaaaaaucucaaauuucu

SEQ ID NO: 3110680 - RNA, 12 nt, Human
uuaacagaaaug

SEQ ID NO: 3110681 - RNA, 13 nt, Human
uuaacagaaaugu

SEQ ID NO: 3110682 - RNA, 14 nt, Human
uuaacagaaaugua

SEQ ID NO: 3110683 - RNA, 14 nt, Human
aguuucucuuuuca

SEQ ID NO: 3110684 - RNA, 21 nt, Human
aguuucuccaagcaggacaug

SEQ ID NO: 3110685 - RNA, 15 nt, Human
aguuucugccgcagc

SEQ ID NO: 3110686 - RNA, 22 nt, Human
aguuuguuaguaugaggcauuu

SEQ ID NO: 3110687 - RNA, 19 nt, Human
aguuucugccgcagcccug

SEQ ID NO: 3110688 - RNA, 18 nt, Human
auaauuuaccugaagucu

SEQ ID NO: 3110689 - RNA, 22 nt, Human
auaagccaaaaaaugcuugcuu

SEQ ID NO: 3110690 - RNA, 21 nt, Human
auaagauucauauuuacuucu

SEQ ID NO: 3110691 - RNA, 21 nt, Human
uuaggugugacugaauuucuu

SEQ ID NO: 3110692 - RNA, 19 nt, Human
uuaggugugggggaagcac

SEQ ID NO: 3110693 - RNA, 13 nt, Human
uuaguagagacag

SEQ ID NO: 3110694 - RNA, 14 nt, Human
uuaguagagacagg

SEQ ID NO: 3110695 - RNA, 13 nt, Human
uuauaaacuuuac

SEQ ID NO: 3110696 - RNA, 14 nt, Human
uuacaggugugaac

SEQ ID NO: 3110697 - RNA, 19 nt, Human
uuaccagcagagcaccuua

SEQ ID NO: 3110698 - RNA, 14 nt, Human
uuaccagcagagca

SEQ ID NO: 3110699 - RNA, 14 nt, Human
auaagauucauauu

SEQ ID NO: 3110700 - RNA, 16 nt, Human
uuagaagucacacagu

SEQ ID NO: 3110701 - RNA, 15 nt, Human
uuacugcagcuuugu

SEQ ID NO: 3110702 - RNA, 13 nt, Human
uuacuguacauga

SEQ ID NO: 3110703 - RNA, 14 nt, Human
uuacuguacaugaa

SEQ ID NO: 3110704 - RNA, 22 nt, Human
uuacuguacaugaaaacacauu

SEQ ID NO: 3110705 - RNA, 23 nt, Human
uuacuguacaugaaaacacauuu

SEQ ID NO: 3110706 - RNA, 12 nt, Human
uuacuguacaug

SEQ ID NO: 3110707 - RNA, 11 nt, Human
agaaauguguu

SEQ ID NO: 3110708 - RNA, 17 nt, Human
agaaauguacagcaagg

SEQ ID NO: 3110709 - RNA, 16 nt, Human
agaaauguacagcaag

SEQ ID NO: 3110710 - RNA, 19 nt, Human
ucugacccugcuucaaaua

SEQ ID NO: 3110711 - RNA, 18 nt, Human
ucugauucccaagcucug

SEQ ID NO: 3110712 - RNA, 19 nt, Human
ucugauucccaagcucugc

SEQ ID NO: 3110713 - RNA, 20 nt, Human
ucugauucccaagcucugcu

SEQ ID NO: 3110714 - RNA, 21 nt, Human
ucugauucccaagcucugcuc

SEQ ID NO: 3110715 - RNA, 22 nt, Human
ucugcacuccccugcugggugu

SEQ ID NO: 3110716 - RNA, 23 nt, Human
ucugccgcagcccugcagagggc

SEQ ID NO: 3110717 - RNA, 14 nt, Human
ucugcccuccaaga

SEQ ID NO: 3110718 - RNA, 16 nt, Human
ucugcucacauaucug

SEQ ID NO: 3110719 - RNA, 16 nt, Human
agaagcggcuggcagc

SEQ ID NO: 3110720 - RNA, 15 nt, Human
agaagcggcuggcag

SEQ ID NO: 3110721 - RNA, 18 nt, Human
ucuggagguacgaaaaga

SEQ ID NO: 3110722 - RNA, 23 nt, Human
ucugcuuuuuaaagaaugcucuu

SEQ ID NO: 3110723 - RNA, 15 nt, Human
ucuggcagcucagag

SEQ ID NO: 3110724 - RNA, 14 nt, Human
ucuggcagcucaga

SEQ ID NO: 3110725 - RNA, 15 nt, Human
ucucuugagccuggg

SEQ ID NO: 3110726 - RNA, 14 nt, Human
ucucuugagccugg

SEQ ID NO: 3110727 - RNA, 13 nt, Human
ucucuugagccug

SEQ ID NO: 3110728 - RNA, 22 nt, Human
ucucuuuaaugucacaggcagg

SEQ ID NO: 3110729 - RNA, 18 nt, Human
agaaaaaggaugcacaga

SEQ ID NO: 3110730 - RNA, 17 nt, Human
ucucuccuguaccucuu

SEQ ID NO: 3110731 - RNA, 15 nt, Human
ucucuccagccccug

SEQ ID NO: 3110732 - RNA, 20 nt, Human
ucucuccuguaccucuugag

SEQ ID NO: 3110733 - RNA, 22 nt, Human
ucucuccuguaccucuugagcc

SEQ ID NO: 3110734 - RNA, 18 nt, Human
ucuccuucaccuuugucc

SEQ ID NO: 3110735 - RNA, 20 nt, Human
ucuccuucaccuuugucccc

SEQ ID NO: 3110736 - RNA, 14 nt, Human
ucucuccagccccu

SEQ ID NO: 3110737 - RNA, 13 nt, Human
ucucuccagcccc

SEQ ID NO: 3110738 - RNA, 14 nt, Human
ucucuugagagggu

SEQ ID NO: 3110739 - RNA, 12 nt, Human
ucuccucugcug

SEQ ID NO: 3110740 - RNA, 19 nt, Human
ucucccuuggauugucccc

SEQ ID NO: 3110741 - RNA, 14 nt, Human
ucuccucugcugcu

SEQ ID NO: 3110742 - RNA, 13 nt, Human
ucuccucugcugc

SEQ ID NO: 3110743 - RNA, 18 nt, Human
ucucccuuggauuguccc

SEQ ID NO: 3110744 - RNA, 11 nt, Human
ucucccuugga

SEQ ID NO: 3110745 - RNA, 23 nt, Human
acuuugaccucugcagcaauaaa

SEQ ID NO: 3110746 - RNA, 19 nt, Human
acuuugaccucugcagcaa

SEQ ID NO: 3110747 - RNA, 19 nt, Human
acuuuaccuuuuuuauaca

SEQ ID NO: 3110748 - RNA, 22 nt, Human
acuuuaccuuuuuuauacauaa

SEQ ID NO: 3110749 - RNA, 18 nt, Human
acuuuaccuuuuuuauac

SEQ ID NO: 3110750 - RNA, 12 nt, Human
acuuuggaaaga

SEQ ID NO: 3110751 - RNA, 14 nt, Human
acuuuggaaagacu

SEQ ID NO: 3110752 - RNA, 13 nt, Human
acuuuggaaagac

SEQ ID NO: 3110753 - RNA, 17 nt, Human
acuuuggaaagacuuuu

SEQ ID NO: 3110754 - RNA, 23 nt, Human
agacccuuguggucccaccccac

SEQ ID NO: 3110755 - RNA, 22 nt, Human
agacccuuguggucccacccca

SEQ ID NO: 3110756 - RNA, 20 nt, Human
agacccuuguggucccaccc

SEQ ID NO: 3110757 - RNA, 19 nt, Human
agacccuuguggucccacc

SEQ ID NO: 3110758 - RNA, 15 nt, Human
agacccuuguggucc

SEQ ID NO: 3110759 - RNA, 13 nt, Human
agacccuuguggu

SEQ ID NO: 3110760 - RNA, 23 nt, Human
agacccugcccugugggccccca

SEQ ID NO: 3110761 - RNA, 21 nt, Human
agacccugcccugugggcccc

SEQ ID NO: 3110762 - RNA, 19 nt, Human
agacccugcccugugggcc

SEQ ID NO: 3110763 - RNA, 16 nt, Human
agacccugcccugugg

SEQ ID NO: 3110764 - RNA, 12 nt, Human
agacccugcccu

SEQ ID NO: 3110765 - RNA, 14 nt, Human
agacccugcccugu

SEQ ID NO: 3110766 - RNA, 13 nt, Human
agacccugcccug

SEQ ID NO: 3110767 - RNA, 15 nt, Human
agacuaucuaaaugu

SEQ ID NO: 3110768 - RNA, 19 nt, Human
agacuaucuaaauguugaa

SEQ ID NO: 3110769 - RNA, 17 nt, Human
agacuaucuaaauguug

SEQ ID NO: 3110770 - RNA, 18 nt, Human
agacuaucuaaauguuga

SEQ ID NO: 3110771 - RNA, 18 nt, Human
agacucauucuucuguac

SEQ ID NO: 3110772 - RNA, 17 nt, Human
agacucauucuucugua

SEQ ID NO: 3110773 - RNA, 15 nt, Human
agacucauucuucug

SEQ ID NO: 3110774 - RNA, 17 nt, Human
ucuugcaauggcagccu

SEQ ID NO: 3110775 - RNA, 13 nt, Human
ucuugcaauggca

SEQ ID NO: 3110776 - RNA, 16 nt, Human
ucuugcaauggcagcc

SEQ ID NO: 3110777 - RNA, 18 nt, Human
agagaaugaaagggccca

SEQ ID NO: 3110778 - RNA, 14 nt, Human
agacuuuggaaaga

SEQ ID NO: 3110779 - RNA, 12 nt, Human
agacuuuggaaa

SEQ ID NO: 3110780 - RNA, 15 nt, Human
agagaccaucccuga

SEQ ID NO: 3110781 - RNA, 14 nt, Human
agagaccaucccug

SEQ ID NO: 3110782 - RNA, 13 nt, Human
agagaccaucccu

SEQ ID NO: 3110783 - RNA, 17 nt, Human
agacuucaucccucugg

SEQ ID NO: 3110784 - RNA, 14 nt, Human
agacuucaucccuc

SEQ ID NO: 3110785 - RNA, 19 nt, Human
agacucuacagaggccaug

SEQ ID NO: 3110786 - RNA, 17 nt, Human
agacucuacagaggcca

SEQ ID NO: 3110787 - RNA, 21 nt, Human
agacucgcgacaaugcaaacc

SEQ ID NO: 3110788 - RNA, 20 nt, Human
agacuccugcaggcagccag

SEQ ID NO: 3110789 - RNA, 19 nt, Human
agacuccugcaggcagcca

SEQ ID NO: 3110790 - RNA, 18 nt, Human
agacuccugcaggcagcc

SEQ ID NO: 3110791 - RNA, 17 nt, Human
agacuccugcaggcagc

SEQ ID NO: 3110792 - RNA, 16 nt, Human
agacuccugcaggcag

SEQ ID NO: 3110793 - RNA, 15 nt, Human
agacuccugcaggca

SEQ ID NO: 3110794 - RNA, 14 nt, Human
agacuccugcaggc

SEQ ID NO: 3110795 - RNA, 12 nt, Human
ucuuuccugagg

SEQ ID NO: 3110796 - RNA, 15 nt, Human
ucuuuccugaggcug

SEQ ID NO: 3110797 - RNA, 14 nt, Human
ucuuuccugaggcu

SEQ ID NO: 3110798 - RNA, 13 nt, Human
ucuuuccugaggc

SEQ ID NO: 3110799 - RNA, 15 nt, Human
ucuuuacuucaugga

SEQ ID NO: 3110800 - RNA, 22 nt, Human
ucuucccuacaguugaaaaaca

SEQ ID NO: 3110801 - RNA, 21 nt, Human
ucuuccaggcugggagagccu

SEQ ID NO: 3110802 - RNA, 22 nt, Human
ucuuccaggcugggagagccuu

SEQ ID NO: 3110803 - RNA, 14 nt, Human
ucuuauugcccacg

SEQ ID NO: 3110804 - RNA, 18 nt, Human
ucuuauugcccacgcugg

SEQ ID NO: 3110805 - RNA, 22 nt, Human
ucuuauugcccacgcuggagug

SEQ ID NO: 3110806 - RNA, 14 nt, Human
ucuuaugggcuggg

SEQ ID NO: 3110807 - RNA, 13 nt, Human
ucuuaugggcugg

SEQ ID NO: 3110808 - RNA, 16 nt, Human
ucuuaugggcuggguu

SEQ ID NO: 3110809 - RNA, 15 nt, Human
ucuuaugggcugggu

SEQ ID NO: 3110810 - RNA, 23 nt, Human
agacaggcaagcaccuccugccu

SEQ ID NO: 3110811 - RNA, 22 nt, Human
agacaggcaagcaccuccugcc

SEQ ID NO: 3110812 - RNA, 15 nt, Human
agacaggaccaggga

SEQ ID NO: 3110813 - RNA, 21 nt, Human
agacaggguuuugccauguug

SEQ ID NO: 3110814 - RNA, 15 nt, Human
agacagucccugcca

SEQ ID NO: 3110815 - RNA, 17 nt, Human
agacagucccugccaau

SEQ ID NO: 3110816 - RNA, 16 nt, Human
agacagucccugccaa

SEQ ID NO: 3110817 - RNA, 14 nt, Human
agacagucccugcc

SEQ ID NO: 3110818 - RNA, 11 nt, Human
ucuggggcugu

SEQ ID NO: 3110819 - RNA, 14 nt, Human
ucuggguucacugc

SEQ ID NO: 3110820 - RNA, 16 nt, Human
ucuggguucacugcaa

SEQ ID NO: 3110821 - RNA, 18 nt, Human
ucugguccauagagagca

SEQ ID NO: 3110822 - RNA, 20 nt, Human
ucugucauuugagcagggcu

SEQ ID NO: 3110823 - RNA, 23 nt, Human
ucugucauuugagcagggcucag

SEQ ID NO: 3110824 - RNA, 15 nt, Human
ucugucauuugagca

SEQ ID NO: 3110825 - RNA, 21 nt, Human
ucugugaaaggaaagagggag

SEQ ID NO: 3110826 - RNA, 15 nt, Human
ucugugaaaggaaag

SEQ ID NO: 3110827 - RNA, 18 nt, Human
ucuguuggccagugugac

SEQ ID NO: 3110828 - RNA, 19 nt, Human
ucuguuggccagugugaca

SEQ ID NO: 3110829 - RNA, 20 nt, Human
ucuguuggccagugugacaa

SEQ ID NO: 3110830 - RNA, 18 nt, Human
agaauuucccaaagcagu

SEQ ID NO: 3110831 - RNA, 17 nt, Human
agaauuucccaaagcag

SEQ ID NO: 3110832 - RNA, 23 nt, Human
agaauuucccaaagcagugcaug

SEQ ID NO: 3110833 - RNA, 22 nt, Human
agauauuuugcuuugugauuuu

SEQ ID NO: 3110834 - RNA, 19 nt, Human
agauacaggaaaagcugcu

SEQ ID NO: 3110835 - RNA, 14 nt, Human
agaucaaccccuuc

SEQ ID NO: 3110836 - RNA, 19 nt, Human
agaucaaccccuucgcucc

SEQ ID NO: 3110837 - RNA, 21 nt, Human
agaucaaccccuucgcuccug

SEQ ID NO: 3110838 - RNA, 17 nt, Human
agauaaggguaucuggu

SEQ ID NO: 3110839 - RNA, 19 nt, Human
agauaaggguaucugguga

SEQ ID NO: 3110840 - RNA, 19 nt, Human
agagugagacucugucuca

SEQ ID NO: 3110841 - RNA, 14 nt, Human
ugaaugucagugug

SEQ ID NO: 3110842 - RNA, 18 nt, Human
ugaaugucagugugacug

SEQ ID NO: 3110843 - RNA, 15 nt, Human
ugaaugucaguguga

SEQ ID NO: 3110844 - RNA, 20 nt, Human
agagucucacuguugcccag

SEQ ID NO: 3110845 - RNA, 15 nt, Human
agagugagacucugu

SEQ ID NO: 3110846 - RNA, 16 nt, Human
agagugagacucuguc

SEQ ID NO: 3110847 - RNA, 19 nt, Human
agagcugggugucaagagg

SEQ ID NO: 3110848 - RNA, 19 nt, Human
agaggaaagcaaaggagau

SEQ ID NO: 3110849 - RNA, 18 nt, Human
agaggaaagcaaaggaga

SEQ ID NO: 3110850 - RNA, 16 nt, Human
agaggaaagcaaagga

SEQ ID NO: 3110851 - RNA, 12 nt, Human
agaggaaagcaa

SEQ ID NO: 3110852 - RNA, 12 nt, Human
agaggaaaucac

SEQ ID NO: 3110853 - RNA, 11 nt, Human
agaggaaauca

SEQ ID NO: 3110854 - RNA, 18 nt, Human
agaggcaacugcauuggc

SEQ ID NO: 3110855 - RNA, 16 nt, Human
ugaacuuugaccucug

SEQ ID NO: 3110856 - RNA, 13 nt, Human
ugaagacaaugac

SEQ ID NO: 3110857 - RNA, 17 nt, Human
ugaagacaaugacuuac

SEQ ID NO: 3110858 - RNA, 11 nt, Human
ugaagacaaug

SEQ ID NO: 3110859 - RNA, 11 nt, Human
ugaacuuugac

SEQ ID NO: 3110860 - RNA, 21 nt, Human
ucuuuggucuacacugugcug

SEQ ID NO: 3110861 - RNA, 14 nt, Human
ucuuuggucuacac

SEQ ID NO: 3110862 - RNA, 20 nt, Human
agagggagggagggcuccag

SEQ ID NO: 3110863 - RNA, 21 nt, Human
agagggagggagggcuccaga

SEQ ID NO: 3110864 - RNA, 22 nt, Human
agagggagggagggcuccagac

SEQ ID NO: 3110865 - RNA, 16 nt, Human
agaugcuucucacugc

SEQ ID NO: 3110866 - RNA, 18 nt, Human
agaugcuucucacugcca

SEQ ID NO: 3110867 - RNA, 12 nt, Human
ugaccugaggcc

SEQ ID NO: 3110868 - RNA, 14 nt, Human
ugaccucugccuga

SEQ ID NO: 3110869 - RNA, 13 nt, Human
ugaccucugccug

SEQ ID NO: 3110870 - RNA, 15 nt, Human
ugaccugaggcccuu

SEQ ID NO: 3110871 - RNA, 14 nt, Human
ugaccugaggcccu

SEQ ID NO: 3110872 - RNA, 19 nt, Human
ugacuccagaauuucccaa

SEQ ID NO: 3110873 - RNA, 17 nt, Human
ugacuccagaauuuccc

SEQ ID NO: 3110874 - RNA, 23 nt, Human
ugacuccagaauuucccaaagca

SEQ ID NO: 3110875 - RNA, 20 nt, Human
ugacuccagaauuucccaaa

SEQ ID NO: 3110876 - RNA, 14 nt, Human
agauuucacucucc

SEQ ID NO: 3110877 - RNA, 13 nt, Human
agauuucacucuc

SEQ ID NO: 3110878 - RNA, 17 nt, Human
agauuugaacucuucaa

SEQ ID NO: 3110879 - RNA, 24 nt, Human
ugagcaucaggccaggcccucugc

SEQ ID NO: 3110880 - RNA, 22 nt, Human
ugagcaucaggccaggcccucu

SEQ ID NO: 3110881 - RNA, 21 nt, Human
ugagcaucaggccaggcccuc

SEQ ID NO: 3110882 - RNA, 21 nt, Human
ugagccacugcaccgggccac

SEQ ID NO: 3110883 - RNA, 18 nt, Human
ugagccacugcaccgggc

SEQ ID NO: 3110884 - RNA, 23 nt, Human
ugagccacugcaccgggccacag

SEQ ID NO: 3110885 - RNA, 13 nt, Human
ugagccagauuuc

SEQ ID NO: 3110886 - RNA, 16 nt, Human
ugagccagauuucacu

SEQ ID NO: 3110887 - RNA, 14 nt, Human
ugagccagauuuca

SEQ ID NO: 3110888 - RNA, 20 nt, Human
ugagcacuaaggugugcucu

SEQ ID NO: 3110889 - RNA, 21 nt, Human
ugagcacuaaggugugcucug

SEQ ID NO: 3110890 - RNA, 22 nt, Human
ugagcacuaaggugugcucuga

SEQ ID NO: 3110891 - RNA, 23 nt, Human
ugagcacuaaggugugcucugau

SEQ ID NO: 3110892 - RNA, 15 nt, Human
ugagcaauccugcaa

SEQ ID NO: 3110893 - RNA, 16 nt, Human
agcacagcuucauuuc

SEQ ID NO: 3110894 - RNA, 22 nt, Human
agcaccaaaagcuuaccaaggg

SEQ ID NO: 3110895 - RNA, 14 nt, Human
agcacaugccucuc

SEQ ID NO: 3110896 - RNA, 13 nt, Human
agcacaugccucu

SEQ ID NO: 3110897 - RNA, 22 nt, Human
agcaagugagagcuggguguca

SEQ ID NO: 3110898 - RNA, 18 nt, Human
agcaagugagagcugggu

SEQ ID NO: 3110899 - RNA, 14 nt, Human
agcaagugagagcu

SEQ ID NO: 3110900 - RNA, 20 nt, Human
agcaagugagacccugucuc

SEQ ID NO: 3110901 - RNA, 13 nt, Human
agcaagugagagc

SEQ ID NO: 3110902 - RNA, 21 nt, Human
ugagccagauuucacucuccu

SEQ ID NO: 3110903 - RNA, 22 nt, Human
ugagccagauuucacucuccuu

SEQ ID NO: 3110904 - RNA, 17 nt, Human
ugagccagauuucacuc

SEQ ID NO: 3110905 - RNA, 10 nt, Human
ugagccuggc

SEQ ID NO: 3110906 - RNA, 16 nt, Human
agcagagaccaucccu

SEQ ID NO: 3110907 - RNA, 15 nt, Human
agcagagaccauccc

SEQ ID NO: 3110908 - RNA, 22 nt, Human
agcagagaaugaaagggcccag

SEQ ID NO: 3110909 - RNA, 23 nt, Human
agcagagaaugaaagggcccaga

SEQ ID NO: 3110910 - RNA, 14 nt, Human
agcagagaauucuc

SEQ ID NO: 3110911 - RNA, 21 nt, Human
agcagagaauucucuuaucca

SEQ ID NO: 3110912 - RNA, 21 nt, Human
agcagagaaugaaagggccca

SEQ ID NO: 3110913 - RNA, 14 nt, Human
ugagccugggaggu

SEQ ID NO: 3110914 - RNA, 16 nt, Human
ugagccuggcaagaau

SEQ ID NO: 3110915 - RNA, 11 nt, Human
ugagccuggca

SEQ ID NO: 3110916 - RNA, 14 nt, Human
ugagccuugaacuu

SEQ ID NO: 3110917 - RNA, 22 nt, Human
ugagccugggaggucaaggcug

SEQ ID NO: 3110918 - RNA, 19 nt, Human
ugagccugggaggucaagg

SEQ ID NO: 3110919 - RNA, 15 nt, Human
ugagccuugaacuuu

SEQ ID NO: 3110920 - RNA, 17 nt, Human
ugagccuugaacuuuga

SEQ ID NO: 3110921 - RNA, 18 nt, Human
ugagccuugaacuuugac

SEQ ID NO: 3110922 - RNA, 19 nt, Human
ugagccuugaacuuugacc

SEQ ID NO: 3110923 - RNA, 22 nt, Human
agcaccuuagacagucccugcc

SEQ ID NO: 3110924 - RNA, 21 nt, Human
agcaccuuagacagucccugc

SEQ ID NO: 3110925 - RNA, 20 nt, Human
agcaccuuagacagucccug

SEQ ID NO: 3110926 - RNA, 19 nt, Human
agcaccuuagacagucccu

SEQ ID NO: 3110927 - RNA, 13 nt, Human
agcacgauuucug

SEQ ID NO: 3110928 - RNA, 23 nt, Human
agcaccuuagacagucccugcca

SEQ ID NO: 3110929 - RNA, 16 nt, Human
agcacgauuucuguuu

SEQ ID NO: 3110930 - RNA, 14 nt, Human
agcacgauuucugu

SEQ ID NO: 3110931 - RNA, 15 nt, Human
agcacgauuucuguu

SEQ ID NO: 3110932 - RNA, 22 nt, Human
agcacuuugggaggccaaggug

SEQ ID NO: 3110933 - RNA, 23 nt, Human
agcacuuugggaggccaaggugg

SEQ ID NO: 3110934 - RNA, 12 nt, Human
agcagaaaugcc

SEQ ID NO: 3110935 - RNA, 13 nt, Human
agcagaaaugccu

SEQ ID NO: 3110936 - RNA, 19 nt, Human
agcagaaaugccuuacccu

SEQ ID NO: 3110937 - RNA, 19 nt, Human
ugagggauacccaucccau

SEQ ID NO: 3110938 - RNA, 16 nt, Human
ugaggcccuucucucc

SEQ ID NO: 3110939 - RNA, 19 nt, Human
ugaggcccuucucuccagc

SEQ ID NO: 3110940 - RNA, 18 nt, Human
ugaggcccuucucuccag

SEQ ID NO: 3110941 - RNA, 24 nt, Human
ugaggcccuucucuccagccccug

SEQ ID NO: 3110942 - RNA, 23 nt, Human
ugaggcccuucucuccagccccu

SEQ ID NO: 3110943 - RNA, 22 nt, Human
ugaggcccuucucuccagcccc

SEQ ID NO: 3110944 - RNA, 20 nt, Human
ugaggcccuucucuccagcc

SEQ ID NO: 3110945 - RNA, 12 nt, Human
ugaggggccucu

SEQ ID NO: 3110946 - RNA, 13 nt, Human
ugaggggccucuu

SEQ ID NO: 3110947 - RNA, 17 nt, Human
agcagaggaaggagagg

SEQ ID NO: 3110948 - RNA, 19 nt, Human
agcagauggagaccccuug

SEQ ID NO: 3110949 - RNA, 20 nt, Human
agcagagaccaucccugaag

SEQ ID NO: 3110950 - RNA, 20 nt, Human
agcagagcaccuuagacagu

SEQ ID NO: 3110951 - RNA, 17 nt, Human
ugaggucagagccugca

SEQ ID NO: 3110952 - RNA, 17 nt, Human
agcagagaccaucccug

SEQ ID NO: 3110953 - RNA, 19 nt, Human
agcagagaccaucccugaa

SEQ ID NO: 3110954 - RNA, 18 nt, Human
agcagagaccaucccuga

SEQ ID NO: 3110955 - RNA, 14 nt, Human
ugaggucagagccu

SEQ ID NO: 3110956 - RNA, 16 nt, Human
ugaggucagagccugc

SEQ ID NO: 3110957 - RNA, 13 nt, Human
ugaggucagagcc

SEQ ID NO: 3110958 - RNA, 20 nt, Human
ugaggguugggcugguguca

SEQ ID NO: 3110959 - RNA, 13 nt, Human
ugaggcccagagg

SEQ ID NO: 3110960 - RNA, 12 nt, Human
ugaggcccagag

SEQ ID NO: 3110961 - RNA, 16 nt, Human
ugaggccagagacaca

SEQ ID NO: 3110962 - RNA, 14 nt, Human
ugaggccagagaca

SEQ ID NO: 3110963 - RNA, 20 nt, Human
ugaggccagagacacaagcc

SEQ ID NO: 3110964 - RNA, 20 nt, Human
ugaggcccagagggccugca

SEQ ID NO: 3110965 - RNA, 18 nt, Human
ugaggcccagagggccug

SEQ ID NO: 3110966 - RNA, 17 nt, Human
ugaggcccagagggccu

SEQ ID NO: 3110967 - RNA, 15 nt, Human
ugaggcccagagggc

SEQ ID NO: 3110968 - RNA, 22 nt, Human
ugaggcccagagggccugcaag

SEQ ID NO: 3110969 - RNA, 21 nt, Human
ugaggcccagagggccugcaa

SEQ ID NO: 3110970 - RNA, 23 nt, Human
ugaggcccagagggccugcaagg

SEQ ID NO: 3110971 - RNA, 21 nt, Human
ugaggaauccagacccggcug

SEQ ID NO: 3110972 - RNA, 22 nt, Human
ugaggaauccagacccggcugc

SEQ ID NO: 3110973 - RNA, 12 nt, Human
ugaggccagaga

SEQ ID NO: 3110974 - RNA, 23 nt, Human
ugaggcauuuguuugaacugaua

SEQ ID NO: 3110975 - RNA, 21 nt, Human
ugaggacacuaaccacgcugg

SEQ ID NO: 3110976 - RNA, 15 nt, Human
ugaggaagcaaaagc

SEQ ID NO: 3110977 - RNA, 18 nt, Human
ugaggaagccgcuggggc

SEQ ID NO: 3110978 - RNA, 17 nt, Human
ugaggaagccgcugggg

SEQ ID NO: 3110979 - RNA, 14 nt, Human
ugaggaagccgcug

SEQ ID NO: 3110980 - RNA, 22 nt, Human
ugaggaagcaaaagcaucuaug

SEQ ID NO: 3110981 - RNA, 21 nt, Human
ugaggaagccgcuggggccag

SEQ ID NO: 3110982 - RNA, 19 nt, Human
ugaggaagccgcuggggcc

SEQ ID NO: 3110983 - RNA, 11 nt, Human
uccaagcuggu

SEQ ID NO: 3110984 - RNA, 16 nt, Human
uccaagcucccaggca

SEQ ID NO: 3110985 - RNA, 15 nt, Human
uccaagcucccaggc

SEQ ID NO: 3110986 - RNA, 14 nt, Human
uccaagcucccagg

SEQ ID NO: 3110987 - RNA, 13 nt, Human
uccaagcucccag

SEQ ID NO: 3110988 - RNA, 12 nt, Human
uccaagcuccca

SEQ ID NO: 3110989 - RNA, 19 nt, Human
ucauuugagcagggcucag

SEQ ID NO: 3110990 - RNA, 14 nt, Human
accuggaauauaua

SEQ ID NO: 3110991 - RNA, 23 nt, Human
accugcggugcuaucucccccag

SEQ ID NO: 3110992 - RNA, 22 nt, Human
accugcggugcuaucuccccca

SEQ ID NO: 3110993 - RNA, 19 nt, Human
accugcggugcuaucuccc

SEQ ID NO: 3110994 - RNA, 22 nt, Human
accugaagucuuuguacagaca

SEQ ID NO: 3110995 - RNA, 15 nt, Human
accugaagucuuugu

SEQ ID NO: 3110996 - RNA, 18 nt, Human
accugcggugcuaucucc

SEQ ID NO: 3110997 - RNA, 21 nt, Human
ucauuugagcagggcucagcg

SEQ ID NO: 3110998 - RNA, 13 nt, Human
ucauuuuuuuuaa

SEQ ID NO: 3110999 - RNA, 14 nt, Human
uccagccccuggau

SEQ ID NO: 3111000 - RNA, 15 nt, Human
uccagccccuggaug

SEQ ID NO: 3111001 - RNA, 21 nt, Human
uccagccccuggaugcagccu

SEQ ID NO: 3111002 - RNA, 19 nt, Human
uccagccccuggaugcagc

SEQ ID NO: 3111003 - RNA, 17 nt, Human
uccagccccuggaugca

SEQ ID NO: 3111004 - RNA, 16 nt, Human
uccagccccuggaugc

SEQ ID NO: 3111005 - RNA, 11 nt, Human
uccagccuggg

SEQ ID NO: 3111006 - RNA, 22 nt, Human
uccagccccuggaugcagccuc

SEQ ID NO: 3111007 - RNA, 22 nt, Human
uccagaaguuugagaucagccu

SEQ ID NO: 3111008 - RNA, 23 nt, Human
accuuuguauucucuccuguacc

SEQ ID NO: 3111009 - RNA, 15 nt, Human
accuuuguauucucu

SEQ ID NO: 3111010 - RNA, 19 nt, Human
accuuuguauucucuccug

SEQ ID NO: 3111011 - RNA, 17 nt, Human
accuuagacagucccug

SEQ ID NO: 3111012 - RNA, 15 nt, Human
uccaccaucaagcca

SEQ ID NO: 3111013 - RNA, 15 nt, Human
accuugacagggcac

SEQ ID NO: 3111014 - RNA, 14 nt, Human
accuugacagggca

SEQ ID NO: 3111015 - RNA, 15 nt, Human
accuugaaugaugcc

SEQ ID NO: 3111016 - RNA, 13 nt, Human
accuucuccuuca

SEQ ID NO: 3111017 - RNA, 12 nt, Human
accuucuccuuc

SEQ ID NO: 3111018 - RNA, 13 nt, Human
accuagccuuaga

SEQ ID NO: 3111019 - RNA, 18 nt, Human
ucauccacugugccaugu

SEQ ID NO: 3111020 - RNA, 20 nt, Human
accuccgccucuuggguuca

SEQ ID NO: 3111021 - RNA, 17 nt, Human
accgcagacaggaccag

SEQ ID NO: 3111022 - RNA, 17 nt, Human
accgccaaggcuggggg

SEQ ID NO: 3111023 - RNA, 20 nt, Human
accgcagacaggaccaggga

SEQ ID NO: 3111024 - RNA, 20 nt, Human
ucauauuuacuucuuauaca

SEQ ID NO: 3111025 - RNA, 21 nt, Human
ucauauuuacuucuuauacau

SEQ ID NO: 3111026 - RNA, 22 nt, Human
ucauauuuacuucuuauacauu

SEQ ID NO: 3111027 - RNA, 16 nt, Human
ucauauuuacuucuua

SEQ ID NO: 3111028 - RNA, 10 nt, Human
acccuuuucu

SEQ ID NO: 3111029 - RNA, 19 nt, Human
ucaugacaaagacugagua

SEQ ID NO: 3111030 - RNA, 19 nt, Human
ucauccacugugccaugug

SEQ ID NO: 3111031 - RNA, 21 nt, Human
ucauccacugugccaugugcc

SEQ ID NO: 3111032 - RNA, 23 nt, Human
ucauccacugugccaugugccag

SEQ ID NO: 3111033 - RNA, 11 nt, Human
ucauguucuua

SEQ ID NO: 3111034 - RNA, 17 nt, Human
ucauguucuuaauucuu

SEQ ID NO: 3111035 - RNA, 13 nt, Human
ucaugucuggcua

SEQ ID NO: 3111036 - RNA, 19 nt, Human
ucauugaccugaggcccuu

SEQ ID NO: 3111037 - RNA, 21 nt, Human
ucauucuccuuguguuacuaa

SEQ ID NO: 3111038 - RNA, 22 nt, Human
ucauugaccugaggcccuucuc

SEQ ID NO: 3111039 - RNA, 17 nt, Human
accucggugccuuccuc

SEQ ID NO: 3111040 - RNA, 15 nt, Human
accucucccuuggau

SEQ ID NO: 3111041 - RNA, 14 nt, Human
accucucccuugga

SEQ ID NO: 3111042 - RNA, 13 nt, Human
accucucccuugg

SEQ ID NO: 3111043 - RNA, 19 nt, Human
accucucucacuccuugaa

SEQ ID NO: 3111044 - RNA, 14 nt, Human
accucucucacucc

SEQ ID NO: 3111045 - RNA, 23 nt, Human
accucucccuuggauuguccccg

SEQ ID NO: 3111046 - RNA, 12 nt, Human
accucugcacaa

SEQ ID NO: 3111047 - RNA, 15 nt, Human
acccagcucuggucc

SEQ ID NO: 3111048 - RNA, 13 nt, Human
acccagcucuggu

SEQ ID NO: 3111049 - RNA, 13 nt, Human
ucagaucuucugu

SEQ ID NO: 3111050 - RNA, 13 nt, Human
ucagaagacacug

SEQ ID NO: 3111051 - RNA, 12 nt, Human
ucagccugggca

SEQ ID NO: 3111052 - RNA, 10 nt, Human
ucagccuggg

SEQ ID NO: 3111053 - RNA, 15 nt, Human
acccccagccugcua

SEQ ID NO: 3111054 - RNA, 14 nt, Human
acccccagccugcu

SEQ ID NO: 3111055 - RNA, 20 nt, Human
ucaggaagcucagggccugg

SEQ ID NO: 3111056 - RNA, 19 nt, Human
ucaggaagcucagggccug

SEQ ID NO: 3111057 - RNA, 17 nt, Human
ucaggaagcucagggcc

SEQ ID NO: 3111058 - RNA, 16 nt, Human
ucaggaagcucagggc

SEQ ID NO: 3111059 - RNA, 23 nt, Human
ucaggccaaacucaccugccccu

SEQ ID NO: 3111060 - RNA, 20 nt, Human
ucaggccaaacucaccugcc

SEQ ID NO: 3111061 - RNA, 15 nt, Human
ucagcggggacagcu

SEQ ID NO: 3111062 - RNA, 16 nt, Human
ucagcggggacagcuc

SEQ ID NO: 3111063 - RNA, 17 nt, Human
ucagcggggacagcucc

SEQ ID NO: 3111064 - RNA, 13 nt, Human
ucagggucccugg

SEQ ID NO: 3111065 - RNA, 23 nt, Human
ucaggggugugcggccuuuggcu

SEQ ID NO: 3111066 - RNA, 18 nt, Human
ucagggucccugguggca

SEQ ID NO: 3111067 - RNA, 14 nt, Human
ucagggucccuggu

SEQ ID NO: 3111068 - RNA, 13 nt, Human
ucagguaacaggc

SEQ ID NO: 3111069 - RNA, 15 nt, Human
ucagguaacaggcag

SEQ ID NO: 3111070 - RNA, 16 nt, Human
ucagguaacaggcaga

SEQ ID NO: 3111071 - RNA, 19 nt, Human
accccuucgcuccuguguc

SEQ ID NO: 3111072 - RNA, 14 nt, Human
ucaggccagcugcu

SEQ ID NO: 3111073 - RNA, 11 nt, Human
ucaggccaggc

SEQ ID NO: 3111074 - RNA, 20 nt, Human
ucaggccagcugcuugggcu

SEQ ID NO: 3111075 - RNA, 15 nt, Human
ucaggccagcugcuu

SEQ ID NO: 3111076 - RNA, 14 nt, Human
acccucuuagaaaa

SEQ ID NO: 3111077 - RNA, 13 nt, Human
acccugcccugug

SEQ ID NO: 3111078 - RNA, 12 nt, Human
acccugcccugu

SEQ ID NO: 3111079 - RNA, 11 nt, Human
acccugcccug

SEQ ID NO: 3111080 - RNA, 15 nt, Human
acccuugugguccca

SEQ ID NO: 3111081 - RNA, 19 nt, Human
acccuuguggucccacccc

SEQ ID NO: 3111082 - RNA, 17 nt, Human
acccuuguggucccacc

SEQ ID NO: 3111083 - RNA, 16 nt, Human
acccuuguggucccac

SEQ ID NO: 3111084 - RNA, 23 nt, Human
ucaggguuggccccugcccggcu

SEQ ID NO: 3111085 - RNA, 20 nt, Human
accccuucgcuccugugucu

SEQ ID NO: 3111086 - RNA, 20 nt, Human
accacucuaucaaguauuau

SEQ ID NO: 3111087 - RNA, 20 nt, Human
accacaucuugcucugcuga

SEQ ID NO: 3111088 - RNA, 21 nt, Human
accacaucuugcucugcugac

SEQ ID NO: 3111089 - RNA, 24 nt, Human
accacaucuugcucugcugacaga

SEQ ID NO: 3111090 - RNA, 15 nt, Human
accacuucagcugac

SEQ ID NO: 3111091 - RNA, 14 nt, Human
accacuucagcuga

SEQ ID NO: 3111092 - RNA, 13 nt, Human
accacuucagcug

SEQ ID NO: 3111093 - RNA, 21 nt, Human
accacagacauacuaaccagc

SEQ ID NO: 3111094 - RNA, 22 nt, Human
accacagacauacuaaccagca

SEQ ID NO: 3111095 - RNA, 14 nt, Human
accacaucuugcuc

SEQ ID NO: 3111096 - RNA, 23 nt, Human
ucaccugaagacucauucuucug

SEQ ID NO: 3111097 - RNA, 16 nt, Human
ucaccugaagacucau

SEQ ID NO: 3111098 - RNA, 19 nt, Human
ucaccugaagacucauucu

SEQ ID NO: 3111099 - RNA, 19 nt, Human
accagagcccaccuuggcu

SEQ ID NO: 3111100 - RNA, 22 nt, Human
accagagcccaccuuggcucaa

SEQ ID NO: 3111101 - RNA, 17 nt, Human
accagagcccaccuugg

SEQ ID NO: 3111102 - RNA, 17 nt, Human
accagacaccuugacag

SEQ ID NO: 3111103 - RNA, 12 nt, Human
accacuuuuguu

SEQ ID NO: 3111104 - RNA, 22 nt, Human
accagacaccuugacagggcac

SEQ ID NO: 3111105 - RNA, 23 nt, Human
accagacaccuugacagggcaca

SEQ ID NO: 3111106 - RNA, 12 nt, Human
ucacugcagccu

SEQ ID NO: 3111107 - RNA, 16 nt, Human
ucacuguugcccaggc

SEQ ID NO: 3111108 - RNA, 13 nt, Human
ucacugagacagc

SEQ ID NO: 3111109 - RNA, 15 nt, Human
ucacugagacagccc

SEQ ID NO: 3111110 - RNA, 14 nt, Human
ucacugagacagcc

SEQ ID NO: 3111111 - RNA, 16 nt, Human
ucaccugccccucaac

SEQ ID NO: 3111112 - RNA, 17 nt, Human
ucacuguugcccaggcu

SEQ ID NO: 3111113 - RNA, 18 nt, Human
ucacuguugcccaggcug

SEQ ID NO: 3111114 - RNA, 21 nt, Human
accaguguuguggauuuaaca

SEQ ID NO: 3111115 - RNA, 18 nt, Human
accaguguuguggauuua

SEQ ID NO: 3111116 - RNA, 23 nt, Human
accaugauuaaccacuucagcug

SEQ ID NO: 3111117 - RNA, 22 nt, Human
accaugauuaaccacuucagcu

SEQ ID NO: 3111118 - RNA, 16 nt, Human
accauucuccaccugc

SEQ ID NO: 3111119 - RNA, 13 nt, Human
accauucuccacc

SEQ ID NO: 3111120 - RNA, 22 nt, Human
accauuuugggguacccacugc

SEQ ID NO: 3111121 - RNA, 23 nt, Human
accauuuugggguacccacugcu

SEQ ID NO: 3111122 - RNA, 16 nt, Human
acccagcccacuucug

SEQ ID NO: 3111123 - RNA, 17 nt, Human
acccagcccacuucugc

SEQ ID NO: 3111124 - RNA, 15 nt, Human
acccagcccacuucu

SEQ ID NO: 3111125 - RNA, 18 nt, Human
acccagcccacuucugcc

SEQ ID NO: 3111126 - RNA, 16 nt, Human
acccagaagaaaauag

SEQ ID NO: 3111127 - RNA, 19 nt, Human
uccuguucccaugagauga

SEQ ID NO: 3111128 - RNA, 18 nt, Human
uccugugugugcgccuac

SEQ ID NO: 3111129 - RNA, 13 nt, Human
uccugugugugcg

SEQ ID NO: 3111130 - RNA, 14 nt, Human
uccugugugugcgc

SEQ ID NO: 3111131 - RNA, 23 nt, Human
uccugugucuugcaauggcagcc

SEQ ID NO: 3111132 - RNA, 24 nt, Human
uccugugucuugcaauggcagccu

SEQ ID NO: 3111133 - RNA, 19 nt, Human
acugcagccucaaccuccu

SEQ ID NO: 3111134 - RNA, 21 nt, Human
acugcagccucaaccuccugg

SEQ ID NO: 3111135 - RNA, 22 nt, Human
acugcagccucaaccuccuggg

SEQ ID NO: 3111136 - RNA, 13 nt, Human
acugcacuguuuu

SEQ ID NO: 3111137 - RNA, 23 nt, Human
acugcagccucaaccuccugggc

SEQ ID NO: 3111138 - RNA, 13 nt, Human
uccugcugcaguu

SEQ ID NO: 3111139 - RNA, 17 nt, Human
uccugccucagccuccc

SEQ ID NO: 3111140 - RNA, 20 nt, Human
uccugccucgaacuggcugc

SEQ ID NO: 3111141 - RNA, 22 nt, Human
uccugcaggcagccaggccaca

SEQ ID NO: 3111142 - RNA, 19 nt, Human
uccugccucagccucccaa

SEQ ID NO: 3111143 - RNA, 20 nt, Human
uccugcaggcagccaggcca

SEQ ID NO: 3111144 - RNA, 19 nt, Human
uccugcaggcagccaggcc

SEQ ID NO: 3111145 - RNA, 17 nt, Human
uccugcaggcagccagg

SEQ ID NO: 3111146 - RNA, 16 nt, Human
uccugcaggcagccag

SEQ ID NO: 3111147 - RNA, 15 nt, Human
uccugcaggcagcca

SEQ ID NO: 3111148 - RNA, 22 nt, Human
acugaguacguugugcauuugg

SEQ ID NO: 3111149 - RNA, 23 nt, Human
acugaguacguugugcauuuggu

SEQ ID NO: 3111150 - RNA, 18 nt, Human
acugaguacguugugcau

SEQ ID NO: 3111151 - RNA, 19 nt, Human
acugaguacguugugcauu

SEQ ID NO: 3111152 - RNA, 21 nt, Human
acugaguacguugugcauuug

SEQ ID NO: 3111153 - RNA, 13 nt, Human
acugcaaccuccg

SEQ ID NO: 3111154 - RNA, 14 nt, Human
acugcaaccuccgc

SEQ ID NO: 3111155 - RNA, 16 nt, Human
acugcaaccuccgccu

SEQ ID NO: 3111156 - RNA, 22 nt, Human
acugcaaccuccgccucuuggg

SEQ ID NO: 3111157 - RNA, 15 nt, Human
uccucuccccagcaa

SEQ ID NO: 3111158 - RNA, 12 nt, Human
uccuucagugcc

SEQ ID NO: 3111159 - RNA, 11 nt, Human
uccuucagugc

SEQ ID NO: 3111160 - RNA, 22 nt, Human
uccuucagugccuuauggaaca

SEQ ID NO: 3111161 - RNA, 20 nt, Human
uccuucagugccuuauggaa

SEQ ID NO: 3111162 - RNA, 13 nt, Human
uccuucagugccu

SEQ ID NO: 3111163 - RNA, 22 nt, Human
acuggcugcaaaggguaucagg

SEQ ID NO: 3111164 - RNA, 23 nt, Human
acugcuuccagugaggcucugcc

SEQ ID NO: 3111165 - RNA, 22 nt, Human
acugcuuccagugaggcucugc

SEQ ID NO: 3111166 - RNA, 21 nt, Human
acugcuuccagugaggcucug

SEQ ID NO: 3111167 - RNA, 18 nt, Human
acugcuuccagugaggcu

SEQ ID NO: 3111168 - RNA, 22 nt, Human
acuggauuaaacuuaaucuaaa

SEQ ID NO: 3111169 - RNA, 17 nt, Human
acugcuuccagugaggc

SEQ ID NO: 3111170 - RNA, 15 nt, Human
uccuuucaccacaug

SEQ ID NO: 3111171 - RNA, 23 nt, Human
uccuuuagcgcccaguugggugg

SEQ ID NO: 3111172 - RNA, 15 nt, Human
ucgaacuggcugcaa

SEQ ID NO: 3111173 - RNA, 14 nt, Human
ucgaacuggcugca

SEQ ID NO: 3111174 - RNA, 13 nt, Human
ucgaacuggcugc

SEQ ID NO: 3111175 - RNA, 14 nt, Human
ucgaggacagggag

SEQ ID NO: 3111176 - RNA, 17 nt, Human
ucgaggacagggaggug

SEQ ID NO: 3111177 - RNA, 13 nt, Human
ucgcgacaaugca

SEQ ID NO: 3111178 - RNA, 13 nt, Human
ucgaggacaggga

SEQ ID NO: 3111179 - RNA, 14 nt, Human
ucgagcaugccugg

SEQ ID NO: 3111180 - RNA, 19 nt, Human
acuggguacuuguggacac

SEQ ID NO: 3111181 - RNA, 20 nt, Human
acuggguacuuguggacaca

SEQ ID NO: 3111182 - RNA, 23 nt, Human
acuggguacuuguggacacagcu

SEQ ID NO: 3111183 - RNA, 18 nt, Human
acuggguacuuguggaca

SEQ ID NO: 3111184 - RNA, 22 nt, Human
acugggcuuggggaccagagcu

SEQ ID NO: 3111185 - RNA, 12 nt, Human
ucgcuccugugu

SEQ ID NO: 3111186 - RNA, 13 nt, Human
ucgcuccuguguc

SEQ ID NO: 3111187 - RNA, 23 nt, Human
acuguacaugaaaacacauuuuu

SEQ ID NO: 3111188 - RNA, 13 nt, Human
acuguacaugaaa

SEQ ID NO: 3111189 - RNA, 14 nt, Human
acuguacaugaaaa

SEQ ID NO: 3111190 - RNA, 19 nt, Human
acuguaauuugugauacaa

SEQ ID NO: 3111191 - RNA, 13 nt, Human
acuguacaaagua

SEQ ID NO: 3111192 - RNA, 14 nt, Human
acuguacaaaguag

SEQ ID NO: 3111193 - RNA, 15 nt, Human
acuguacaaaguaga

SEQ ID NO: 3111194 - RNA, 18 nt, Human
uccucauacccaccccca

SEQ ID NO: 3111195 - RNA, 14 nt, Human
uccucauacccacc

SEQ ID NO: 3111196 - RNA, 12 nt, Human
uccucuccccag

SEQ ID NO: 3111197 - RNA, 19 nt, Human
uccucccucccucuuuccc

SEQ ID NO: 3111198 - RNA, 17 nt, Human
uccucccucccucuuuc

SEQ ID NO: 3111199 - RNA, 15 nt, Human
uccucccucccucuu

SEQ ID NO: 3111200 - RNA, 16 nt, Human
acucuuauugcccacg

SEQ ID NO: 3111201 - RNA, 19 nt, Human
acucuuauugcccacgcug

SEQ ID NO: 3111202 - RNA, 20 nt, Human
uccucagaucuucugugggu

SEQ ID NO: 3111203 - RNA, 17 nt, Human
acucgcgacaaugcaaa

SEQ ID NO: 3111204 - RNA, 23 nt, Human
acucgcgacaaugcaaaccauca

SEQ ID NO: 3111205 - RNA, 20 nt, Human
acucgcgacaaugcaaacca

SEQ ID NO: 3111206 - RNA, 19 nt, Human
uccuaggcauuugcugaau

SEQ ID NO: 3111207 - RNA, 18 nt, Human
acucgcgacaaugcaaac

SEQ ID NO: 3111208 - RNA, 17 nt, Human
acucuccucugcugcug

SEQ ID NO: 3111209 - RNA, 16 nt, Human
acucuccucugcugcu

SEQ ID NO: 3111210 - RNA, 19 nt, Human
acucuccucugcugcuggc

SEQ ID NO: 3111211 - RNA, 18 nt, Human
acucuccucugcugcugg

SEQ ID NO: 3111212 - RNA, 14 nt, Human
uccuaggcauuugc

SEQ ID NO: 3111213 - RNA, 21 nt, Human
ucccuuugacgccaucccagc

SEQ ID NO: 3111214 - RNA, 23 nt, Human
ucccuuugacgccaucccagccc

SEQ ID NO: 3111215 - RNA, 22 nt, Human
ucccuuugacgccaucccagcc

SEQ ID NO: 3111216 - RNA, 23 nt, Human
ucccugguggcagcucaccucuc

SEQ ID NO: 3111217 - RNA, 22 nt, Human
ucccuuacgugaguccuggcau

SEQ ID NO: 3111218 - RNA, 18 nt, Human
ucccuuacgugaguccug

SEQ ID NO: 3111219 - RNA, 22 nt, Human
ucccuuuccaaaugcccagcuu

SEQ ID NO: 3111220 - RNA, 22 nt, Human
acucauugaccugaggcccuuc

SEQ ID NO: 3111221 - RNA, 20 nt, Human
ucccucagucuggcccuucc

SEQ ID NO: 3111222 - RNA, 21 nt, Human
ucccucagucuggcccuuccu

SEQ ID NO: 3111223 - RNA, 22 nt, Human
ucccucauccucauacccaccc

SEQ ID NO: 3111224 - RNA, 16 nt, Human
ucccuauuagagaaga

SEQ ID NO: 3111225 - RNA, 18 nt, Human
ucccuauuagagaagaga

SEQ ID NO: 3111226 - RNA, 20 nt, Human
ucccgaguagcugggacuac

SEQ ID NO: 3111227 - RNA, 15 nt, Human
ucccgaauagcuggg

SEQ ID NO: 3111228 - RNA, 16 nt, Human
ucccgaauagcuggga

SEQ ID NO: 3111229 - RNA, 17 nt, Human
acuauagccuaggugac

SEQ ID NO: 3111230 - RNA, 21 nt, Human
acuauaauguaagcucuacug

SEQ ID NO: 3111231 - RNA, 23 nt, Human
acuauaauuuaccugaagucuuu

SEQ ID NO: 3111232 - RNA, 24 nt, Human
uccccaccgcagacaggaccaggg

SEQ ID NO: 3111233 - RNA, 23 nt, Human
uccccaggaggccagccuugacc

SEQ ID NO: 3111234 - RNA, 23 nt, Human
acuauguugcccaggcaggucuu

SEQ ID NO: 3111235 - RNA, 19 nt, Human
acuauguugcccaggcagg

SEQ ID NO: 3111236 - RNA, 20 nt, Human
acuauguugcccaggcaggu

SEQ ID NO: 3111237 - RNA, 17 nt, Human
acuauguugcccaggca

SEQ ID NO: 3111238 - RNA, 18 nt, Human
acuauguugcccaggcag

SEQ ID NO: 3111239 - RNA, 15 nt, Human
acuacaguccuccca

SEQ ID NO: 3111240 - RNA, 23 nt, Human
acuacaggugugagucaccaagc

SEQ ID NO: 3111241 - RNA, 17 nt, Human
acuaaccagcagaaaug

SEQ ID NO: 3111242 - RNA, 13 nt, Human
acuaaccacgcug

SEQ ID NO: 3111243 - RNA, 16 nt, Human
acuaaccagcagaaau

SEQ ID NO: 3111244 - RNA, 12 nt, Human
acuaaccacgcu

SEQ ID NO: 3111245 - RNA, 13 nt, Human
uccagccugggug

SEQ ID NO: 3111246 - RNA, 24 nt, Human
uccagccugggugacagagcaagu

SEQ ID NO: 3111247 - RNA, 14 nt, Human
uccagcucaccagc

SEQ ID NO: 3111248 - RNA, 12 nt, Human
acguuucuaaag

SEQ ID NO: 3111249 - RNA, 14 nt, Human
acguuucuaaaggc

SEQ ID NO: 3111250 - RNA, 22 nt, Human
uccccaccgcagacaggaccag

SEQ ID NO: 3111251 - RNA, 15 nt, Human
ucccauaugccuggg

SEQ ID NO: 3111252 - RNA, 13 nt, Human
ucccaucucacac

SEQ ID NO: 3111253 - RNA, 19 nt, Human
ucccaucucacacaugagc

SEQ ID NO: 3111254 - RNA, 14 nt, Human
ucccaucucacaca

SEQ ID NO: 3111255 - RNA, 16 nt, Human
acuacaguccucccau

SEQ ID NO: 3111256 - RNA, 22 nt, Human
ucccagugccgagaaggaagcc

SEQ ID NO: 3111257 - RNA, 19 nt, Human
ucccagugccgagaaggaa

SEQ ID NO: 3111258 - RNA, 18 nt, Human
uaaaccgccaaggcuggg

SEQ ID NO: 3111259 - RNA, 16 nt, Human
uaaaccgccaaggcug

SEQ ID NO: 3111260 - RNA, 19 nt, Human
uaaaggcuaccuuuguauu

SEQ ID NO: 3111261 - RNA, 21 nt, Human
uaaaggcuaccuuuguauucu

SEQ ID NO: 3111262 - RNA, 12 nt, Human
aaguuaaauaaa

SEQ ID NO: 3111263 - RNA, 14 nt, Human
aaguuaaauaaauc

SEQ ID NO: 3111264 - RNA, 13 nt, Human
uaaagucaggggu

SEQ ID NO: 3111265 - RNA, 14 nt, Human
uaaaguguauuuuu

SEQ ID NO: 3111266 - RNA, 15 nt, Human
uaaaguguauuuuuu

SEQ ID NO: 3111267 - RNA, 19 nt, Human
uaaaguguauuuuuuuacu

SEQ ID NO: 3111268 - RNA, 14 nt, Human
aauaaaguaauuau

SEQ ID NO: 3111269 - RNA, 15 nt, Human
aauaacuaaaaggua

SEQ ID NO: 3111270 - RNA, 12 nt, Human
aauaaauuauuu

SEQ ID NO: 3111271 - RNA, 12 nt, Human
aauaacauguaa

SEQ ID NO: 3111272 - RNA, 19 nt, Human
aauaacauguaauuaagua

SEQ ID NO: 3111273 - RNA, 16 nt, Human
aauacaccacuacauu

SEQ ID NO: 3111274 - RNA, 18 nt, Human
aauacaccacuacauucu

SEQ ID NO: 3111275 - RNA, 20 nt, Human
aauacaccacuacauucugu

SEQ ID NO: 3111276 - RNA, 15 nt, Human
aauacaccacuacau

SEQ ID NO: 3111277 - RNA, 19 nt, Human
uaaaucuccaaaauaaaac

SEQ ID NO: 3111278 - RNA, 13 nt, Human
uaacaagccaccc

SEQ ID NO: 3111279 - RNA, 18 nt, Human
uaaaucuccaaaauaaaa

SEQ ID NO: 3111280 - RNA, 20 nt, Human
uaaaucuccaaaauaaaacu

SEQ ID NO: 3111281 - RNA, 21 nt, Human
uaaaucuccaaaauaaaacuu

SEQ ID NO: 3111282 - RNA, 22 nt, Human
uaaauuaacuuuuauaaacuuu

SEQ ID NO: 3111283 - RNA, 14 nt, Human
guucucugaggaca

SEQ ID NO: 3111284 - RNA, 16 nt, Human
guucucugaggacacu

SEQ ID NO: 3111285 - RNA, 11 nt, Human
guucucugccc

SEQ ID NO: 3111286 - RNA, 12 nt, Human
guucucugcccu

SEQ ID NO: 3111287 - RNA, 22 nt, Human
guugauagcacagacccugccc

SEQ ID NO: 3111288 - RNA, 23 nt, Human
guugauagcacagacccugcccu

SEQ ID NO: 3111289 - RNA, 13 nt, Human
aagcucugcuccu

SEQ ID NO: 3111290 - RNA, 18 nt, Human
aagcuguuacugucuuca

SEQ ID NO: 3111291 - RNA, 21 nt, Human
aagcucuacugaggugcuaug

SEQ ID NO: 3111292 - RNA, 23 nt, Human
aagcucccaggcauuccccagga

SEQ ID NO: 3111293 - RNA, 22 nt, Human
aagcucccaggcauuccccagg

SEQ ID NO: 3111294 - RNA, 12 nt, Human
aagcucccaggc

SEQ ID NO: 3111295 - RNA, 11 nt, Human
aagcucccagg

SEQ ID NO: 3111296 - RNA, 13 nt, Human
guguuuauuguca

SEQ ID NO: 3111297 - RNA, 20 nt, Human
aaggaggaagagaaaaaaua

SEQ ID NO: 3111298 - RNA, 22 nt, Human
aaggauccugagccagauuuca

SEQ ID NO: 3111299 - RNA, 20 nt, Human
aaggauccugagccagauuu

SEQ ID NO: 3111300 - RNA, 12 nt, Human
aaggauccugag

SEQ ID NO: 3111301 - RNA, 11 nt, Human
aaggauccuga

SEQ ID NO: 3111302 - RNA, 18 nt, Human
aaggagauuuacaacugg

SEQ ID NO: 3111303 - RNA, 17 nt, Human
aaggagauuuacaacug

SEQ ID NO: 3111304 - RNA, 15 nt, Human
aaggaaacccagcuc

SEQ ID NO: 3111305 - RNA, 13 nt, Human
aaggcuaccuuug

SEQ ID NO: 3111306 - RNA, 14 nt, Human
guugcccaggcugg

SEQ ID NO: 3111307 - RNA, 15 nt, Human
aaggcuaccuuugua

SEQ ID NO: 3111308 - RNA, 19 nt, Human
aaggccccgcccaggcuua

SEQ ID NO: 3111309 - RNA, 16 nt, Human
aaggccccgcccaggc

SEQ ID NO: 3111310 - RNA, 14 nt, Human
aaggccccgcccag

SEQ ID NO: 3111311 - RNA, 24 nt, Human
aaggaugcacagaguuguuacauu

SEQ ID NO: 3111312 - RNA, 22 nt, Human
aaggaugcacagaguuguuaca

SEQ ID NO: 3111313 - RNA, 14 nt, Human
aaggaugcccaaag

SEQ ID NO: 3111314 - RNA, 16 nt, Human
guugcccaggcuggcg

SEQ ID NO: 3111315 - RNA, 15 nt, Human
guugcccaggcuggc

SEQ ID NO: 3111316 - RNA, 23 nt, Human
guuggcugggggccucagugcca

SEQ ID NO: 3111317 - RNA, 15 nt, Human
guugggcugguguca

SEQ ID NO: 3111318 - RNA, 17 nt, Human
guugggcuggugucacc

SEQ ID NO: 3111319 - RNA, 18 nt, Human
guuuuucuaggccugggg

SEQ ID NO: 3111320 - RNA, 18 nt, Human
aagucuuagauguauaua

SEQ ID NO: 3111321 - RNA, 19 nt, Human
aagucuuagauguauauau

SEQ ID NO: 3111322 - RNA, 17 nt, Human
aagucuuagauguauau

SEQ ID NO: 3111323 - RNA, 16 nt, Human
guuuuugucuuaaaaa

SEQ ID NO: 3111324 - RNA, 21 nt, Human
aagucaagugaaaaaggagga

SEQ ID NO: 3111325 - RNA, 24 nt, Human
aagucacacaguauuacuucugcu

SEQ ID NO: 3111326 - RNA, 18 nt, Human
aaguauucuuauuuaaug

SEQ ID NO: 3111327 - RNA, 13 nt, Human
aagucacacagug

SEQ ID NO: 3111328 - RNA, 21 nt, Human
aaguacuucuccacccugcuc

SEQ ID NO: 3111329 - RNA, 15 nt, Human
aaguacuggagaaaa

SEQ ID NO: 3111330 - RNA, 16 nt, Human
aaguacuauguaucaa

SEQ ID NO: 3111331 - RNA, 15 nt, Human
aaguacuauguauca

SEQ ID NO: 3111332 - RNA, 22 nt, Human
aaguacuucuccacccugcucu

SEQ ID NO: 3111333 - RNA, 23 nt, Human
aaguacuucuccacccugcucuc

SEQ ID NO: 3111334 - RNA, 20 nt, Human
aaguacuucuccacccugcu

SEQ ID NO: 3111335 - RNA, 14 nt, Human
guuuuaagaggcag

SEQ ID NO: 3111336 - RNA, 16 nt, Human
guuuuaagaggcaggg

SEQ ID NO: 3111337 - RNA, 15 nt, Human
guuuuacugcagcuu

SEQ ID NO: 3111338 - RNA, 18 nt, Human
guuuuacugcagcuuugu

SEQ ID NO: 3111339 - RNA, 16 nt, Human
guuuuacugcagcuuu

SEQ ID NO: 3111340 - RNA, 22 nt, Human
guuucugccgcagcccugcaga

SEQ ID NO: 3111341 - RNA, 18 nt, Human
guuucugccgcagcccug

SEQ ID NO: 3111342 - RNA, 17 nt, Human
guuugccucugccucug

SEQ ID NO: 3111343 - RNA, 13 nt, Human
guuugcuaaguga

SEQ ID NO: 3111344 - RNA, 17 nt, Human
aaggguaucaggugcug

SEQ ID NO: 3111345 - RNA, 14 nt, Human
aaggggcaguggug

SEQ ID NO: 3111346 - RNA, 19 nt, Human
aaggguaucaggugcugcc

SEQ ID NO: 3111347 - RNA, 16 nt, Human
aaggguaucuggugac

SEQ ID NO: 3111348 - RNA, 15 nt, Human
aagggcccagagagg

SEQ ID NO: 3111349 - RNA, 13 nt, Human
aagggcccagaga

SEQ ID NO: 3111350 - RNA, 23 nt, Human
aaccaucauugaaaucuuuuugc

SEQ ID NO: 3111351 - RNA, 13 nt, Human
aaccacaucuugc

SEQ ID NO: 3111352 - RNA, 19 nt, Human
gucucaaaaaaagaaaaag

SEQ ID NO: 3111353 - RNA, 22 nt, Human
gucucaaacucuugaccucagg

SEQ ID NO: 3111354 - RNA, 14 nt, Human
gucuaugggacuca

SEQ ID NO: 3111355 - RNA, 16 nt, Human
guccugcugcaguugc

SEQ ID NO: 3111356 - RNA, 13 nt, Human
guccugcugcagu

SEQ ID NO: 3111357 - RNA, 14 nt, Human
gucgaggacaggga

SEQ ID NO: 3111358 - RNA, 13 nt, Human
gucgcccagucug

SEQ ID NO: 3111359 - RNA, 14 nt, Human
gucgcccagucugg

SEQ ID NO: 3111360 - RNA, 20 nt, Human
gucuaccugaggggccucuu

SEQ ID NO: 3111361 - RNA, 23 nt, Human
gucgcccagucuggaaugcagug

SEQ ID NO: 3111362 - RNA, 23 nt, Human
guccccuguuuguuucugaaagg

SEQ ID NO: 3111363 - RNA, 16 nt, Human
guccccgcacugggcu

SEQ ID NO: 3111364 - RNA, 15 nt, Human
guccccgcacugggc

SEQ ID NO: 3111365 - RNA, 13 nt, Human
gucccccugacaa

SEQ ID NO: 3111366 - RNA, 22 nt, Human
guccgaaagggacuuggaagcu

SEQ ID NO: 3111367 - RNA, 21 nt, Human
guccgaaagggacuuggaagc

SEQ ID NO: 3111368 - RNA, 13 nt, Human
gucccuuuuccuu

SEQ ID NO: 3111369 - RNA, 19 nt, Human
gucccaccuuggcugcagg

SEQ ID NO: 3111370 - RNA, 17 nt, Human
gucccaccuuggcugca

SEQ ID NO: 3111371 - RNA, 18 nt, Human
gucccaccuuggcugcag

SEQ ID NO: 3111372 - RNA, 13 nt, Human
guccuacccaccc

SEQ ID NO: 3111373 - RNA, 20 nt, Human
aacagacuggaagcacagcu

SEQ ID NO: 3111374 - RNA, 22 nt, Human
aacauguuuuucuucucccuca

SEQ ID NO: 3111375 - RNA, 16 nt, Human
aacauacucccaucug

SEQ ID NO: 3111376 - RNA, 18 nt, Human
aacauacucccaucugug

SEQ ID NO: 3111377 - RNA, 20 nt, Human
aacauacucccaucugugaa

SEQ ID NO: 3111378 - RNA, 18 nt, Human
gucucuuuaaugucacag

SEQ ID NO: 3111379 - RNA, 19 nt, Human
gucucuuuaaugucacagg

SEQ ID NO: 3111380 - RNA, 20 nt, Human
gucucuuuaaugucacaggc

SEQ ID NO: 3111381 - RNA, 14 nt, Human
gucugaaggcuggg

SEQ ID NO: 3111382 - RNA, 19 nt, Human
gucugaaggcuggguucug

SEQ ID NO: 3111383 - RNA, 22 nt, Human
gucucuuuaaugucacaggcag

SEQ ID NO: 3111384 - RNA, 17 nt, Human
gucucuugguccugcug

SEQ ID NO: 3111385 - RNA, 19 nt, Human
gucucuugguccugcugca

SEQ ID NO: 3111386 - RNA, 18 nt, Human
gucucuugguccugcugc

SEQ ID NO: 3111387 - RNA, 20 nt, Human
gucucuugguccugcugcag

SEQ ID NO: 3111388 - RNA, 13 nt, Human
gucucuugguccu

SEQ ID NO: 3111389 - RNA, 18 nt, Human
gucuggaaugcaguggua

SEQ ID NO: 3111390 - RNA, 21 nt, Human
gucugacaggcaaugcuggcu

SEQ ID NO: 3111391 - RNA, 22 nt, Human
gucugacaggcaaugcuggcug

SEQ ID NO: 3111392 - RNA, 23 nt, Human
gucugacaggcaaugcuggcugu

SEQ ID NO: 3111393 - RNA, 18 nt, Human
aaccugauugugucucuu

SEQ ID NO: 3111394 - RNA, 19 nt, Human
aaccugauugugucucuug

SEQ ID NO: 3111395 - RNA, 12 nt, Human
aaccugugucuc

SEQ ID NO: 3111396 - RNA, 16 nt, Human
gucuuuguacagacaa

SEQ ID NO: 3111397 - RNA, 15 nt, Human
gucuuuguacagaca

SEQ ID NO: 3111398 - RNA, 16 nt, Human
gucuucaguaagccgu

SEQ ID NO: 3111399 - RNA, 23 nt, Human
aacguggcugcuucaaggauccu

SEQ ID NO: 3111400 - RNA, 18 nt, Human
gugaccauguuuuguuua

SEQ ID NO: 3111401 - RNA, 21 nt, Human
gugaccagcaccaucucuccu

SEQ ID NO: 3111402 - RNA, 18 nt, Human
gugaccagcaccaucucu

SEQ ID NO: 3111403 - RNA, 17 nt, Human
gugaccaaugaugguca

SEQ ID NO: 3111404 - RNA, 16 nt, Human
gugacagaggcagccc

SEQ ID NO: 3111405 - RNA, 18 nt, Human
gugacagaggcagcccca

SEQ ID NO: 3111406 - RNA, 19 nt, Human
gugacagaggcagccccau

SEQ ID NO: 3111407 - RNA, 23 nt, Human
gugaagacaaugacuuacuguac

SEQ ID NO: 3111408 - RNA, 14 nt, Human
gugaagugaagaca

SEQ ID NO: 3111409 - RNA, 20 nt, Human
gugaguccuggcaugggaau

SEQ ID NO: 3111410 - RNA, 17 nt, Human
gugaguccuggcauggg

SEQ ID NO: 3111411 - RNA, 19 nt, Human
gugaguacuacaguccucc

SEQ ID NO: 3111412 - RNA, 12 nt, Human
gugagagcuggg

SEQ ID NO: 3111413 - RNA, 12 nt, Human
gugaccccaggu

SEQ ID NO: 3111414 - RNA, 15 nt, Human
gugagcaauccugca

SEQ ID NO: 3111415 - RNA, 13 nt, Human
gugagagcugggu

SEQ ID NO: 3111416 - RNA, 16 nt, Human
gugagaggggaacaga

SEQ ID NO: 3111417 - RNA, 21 nt, Human
gugagcacuaaggugugcucu

SEQ ID NO: 3111418 - RNA, 17 nt, Human
gugaguacuacaguccu

SEQ ID NO: 3111419 - RNA, 22 nt, Human
aagauauuuugcuuugugauuu

SEQ ID NO: 3111420 - RNA, 17 nt, Human
aagauauuuugcuuugu

SEQ ID NO: 3111421 - RNA, 20 nt, Human
aagauauuuugcuuugugau

SEQ ID NO: 3111422 - RNA, 15 nt, Human
aagauauuuugcuuu

SEQ ID NO: 3111423 - RNA, 19 nt, Human
aagaguaggaagacuuugg

SEQ ID NO: 3111424 - RNA, 18 nt, Human
aagaguaggaagacuuug

SEQ ID NO: 3111425 - RNA, 16 nt, Human
aagaguaggaagacuu

SEQ ID NO: 3111426 - RNA, 19 nt, Human
gugguguuuccuggcacug

SEQ ID NO: 3111427 - RNA, 18 nt, Human
gugguuauggagagggug

SEQ ID NO: 3111428 - RNA, 14 nt, Human
aagaguaggaagac

SEQ ID NO: 3111429 - RNA, 21 nt, Human
gugucuugcaauggcagccuu

SEQ ID NO: 3111430 - RNA, 13 nt, Human
gugugagucacca

SEQ ID NO: 3111431 - RNA, 18 nt, Human
gugugagucaccaagccc

SEQ ID NO: 3111432 - RNA, 15 nt, Human
gugugguguuuccug

SEQ ID NO: 3111433 - RNA, 19 nt, Human
gugucuugcaauggcagcc

SEQ ID NO: 3111434 - RNA, 20 nt, Human
gugucccaaaaagaaaggag

SEQ ID NO: 3111435 - RNA, 19 nt, Human
gugugguguuuccuggcac

SEQ ID NO: 3111436 - RNA, 17 nt, Human
aagacucauucuucugu

SEQ ID NO: 3111437 - RNA, 22 nt, Human
aagacgcugugcugcccugccc

SEQ ID NO: 3111438 - RNA, 21 nt, Human
aagacgcugugcugcccugcc

SEQ ID NO: 3111439 - RNA, 20 nt, Human
aagacgcugugcugcccugc

SEQ ID NO: 3111440 - RNA, 23 nt, Human
aagacgcugugcugcccugccca

SEQ ID NO: 3111441 - RNA, 16 nt, Human
aagagcccaggccucc

SEQ ID NO: 3111442 - RNA, 14 nt, Human
aagagcccaggccu

SEQ ID NO: 3111443 - RNA, 12 nt, Human
aagagcccaggc

SEQ ID NO: 3111444 - RNA, 19 nt, Human
aagagauugugguuucauu

SEQ ID NO: 3111445 - RNA, 16 nt, Human
aagagauugugguuuc

SEQ ID NO: 3111446 - RNA, 12 nt, Human
gugggagcugag

SEQ ID NO: 3111447 - RNA, 18 nt, Human
gugggauccuccaggugc

SEQ ID NO: 3111448 - RNA, 15 nt, Human
gugggauccuccagg

SEQ ID NO: 3111449 - RNA, 13 nt, Human
gugggauccucca

SEQ ID NO: 3111450 - RNA, 14 nt, Human
guggccucccaacu

SEQ ID NO: 3111451 - RNA, 13 nt, Human
guggccucccaac

SEQ ID NO: 3111452 - RNA, 20 nt, Human
guggugguuuucuguucuuu

SEQ ID NO: 3111453 - RNA, 16 nt, Human
gugguguuuccuggca

SEQ ID NO: 3111454 - RNA, 15 nt, Human
gugguguuuccuggc

SEQ ID NO: 3111455 - RNA, 14 nt, Human
aacuuggcgcugcc

SEQ ID NO: 3111456 - RNA, 22 nt, Human
aacuugucuuuggacccugagg

SEQ ID NO: 3111457 - RNA, 23 nt, Human
aacuugguucccauuugcuccuu

SEQ ID NO: 3111458 - RNA, 14 nt, Human
gugccucugggacu

SEQ ID NO: 3111459 - RNA, 15 nt, Human
gugccucugggacug

SEQ ID NO: 3111460 - RNA, 23 nt, Human
gugcacaagcuccaagcucccag

SEQ ID NO: 3111461 - RNA, 17 nt, Human
gugcacacaccagagcc

SEQ ID NO: 3111462 - RNA, 18 nt, Human
gugcacguacacacacau

SEQ ID NO: 3111463 - RNA, 12 nt, Human
gugcacacacca

SEQ ID NO: 3111464 - RNA, 14 nt, Human
gugcacacaccaga

SEQ ID NO: 3111465 - RNA, 14 nt, Human
gugccaagcagagg

SEQ ID NO: 3111466 - RNA, 15 nt, Human
gugcauuuggugguu

SEQ ID NO: 3111467 - RNA, 20 nt, Human
gugcauuugaggucuguucu

SEQ ID NO: 3111468 - RNA, 21 nt, Human
gugcauuugaggucuguucuu

SEQ ID NO: 3111469 - RNA, 22 nt, Human
gugcauuugaggucuguucuuu

SEQ ID NO: 3111470 - RNA, 22 nt, Human
aagaaaaaggaugcacagaguu

SEQ ID NO: 3111471 - RNA, 19 nt, Human
aagaaaaaggaugcacaga

SEQ ID NO: 3111472 - RNA, 20 nt, Human
aagaaaaaggaugcacagag

SEQ ID NO: 3111473 - RNA, 15 nt, Human
aagaagcucucuccu

SEQ ID NO: 3111474 - RNA, 14 nt, Human
aagaagcucucucc

SEQ ID NO: 3111475 - RNA, 17 nt, Human
aagaagcccaggaaagg

SEQ ID NO: 3111476 - RNA, 16 nt, Human
aagaagcccaggaaag

SEQ ID NO: 3111477 - RNA, 21 nt, Human
guggauuuaacagaaauguac

SEQ ID NO: 3111478 - RNA, 20 nt, Human
guggauuuaacagaaaugua

SEQ ID NO: 3111479 - RNA, 23 nt, Human
guggauuuaacagaaauguacag

SEQ ID NO: 3111480 - RNA, 14 nt, Human
guggcagcugcggu

SEQ ID NO: 3111481 - RNA, 22 nt, Human
guggcagcucaccucucccuug

SEQ ID NO: 3111482 - RNA, 14 nt, Human
guggcaccagcagc

SEQ ID NO: 3111483 - RNA, 13 nt, Human
guggcaccagcag

SEQ ID NO: 3111484 - RNA, 17 nt, Human
guggcagcugcggucca

SEQ ID NO: 3111485 - RNA, 20 nt, Human
guggcagcucaccucucccu

SEQ ID NO: 3111486 - RNA, 18 nt, Human
gugcugcccugcccaccu

SEQ ID NO: 3111487 - RNA, 20 nt, Human
gugcugcccugcccaccugg

SEQ ID NO: 3111488 - RNA, 19 nt, Human
gugcugcccugcccaccug

SEQ ID NO: 3111489 - RNA, 21 nt, Human
gugcugcccugcccaccuggc

SEQ ID NO: 3111490 - RNA, 14 nt, Human
guggacacagcucu

SEQ ID NO: 3111491 - RNA, 15 nt, Human
guggacacagcucuu

SEQ ID NO: 3111492 - RNA, 24 nt, Human
guggacacagcucuucuccaggcu

SEQ ID NO: 3111493 - RNA, 21 nt, Human
uagucaggugccucaagagaa

SEQ ID NO: 3111494 - RNA, 23 nt, Human
acaagcugcacccucaggcaggu

SEQ ID NO: 3111495 - RNA, 22 nt, Human
acaagcugcacccucaggcagg

SEQ ID NO: 3111496 - RNA, 21 nt, Human
acaagcugcacccucaggcag

SEQ ID NO: 3111497 - RNA, 19 nt, Human
acaagcugcacccucaggc

SEQ ID NO: 3111498 - RNA, 20 nt, Human
uaguuccucauuagcauuuu

SEQ ID NO: 3111499 - RNA, 11 nt, Human
acacccuguga

SEQ ID NO: 3111500 - RNA, 18 nt, Human
acacccugugauggggcc

SEQ ID NO: 3111501 - RNA, 12 nt, Human
acacccugugau

SEQ ID NO: 3111502 - RNA, 19 nt, Human
acacccagcccacuucugc

SEQ ID NO: 3111503 - RNA, 20 nt, Human
acacccagcccacuucugcc

SEQ ID NO: 3111504 - RNA, 21 nt, Human
acacccagcccacuucugcca

SEQ ID NO: 3111505 - RNA, 21 nt, Human
acacaugcaaggucauuuuuu

SEQ ID NO: 3111506 - RNA, 18 nt, Human
acacaugcaaggucauuu

SEQ ID NO: 3111507 - RNA, 19 nt, Human
acacaugcaaggucauuuu

SEQ ID NO: 3111508 - RNA, 20 nt, Human
acacaugcaaggucauuuuu

SEQ ID NO: 3111509 - RNA, 13 nt, Human
uauacauaaacaa

SEQ ID NO: 3111510 - RNA, 14 nt, Human
uauacauaaacaag

SEQ ID NO: 3111511 - RNA, 14 nt, Human
uauacauuugauaa

SEQ ID NO: 3111512 - RNA, 21 nt, Human
uauaauuuaccugaagucuuu

SEQ ID NO: 3111513 - RNA, 18 nt, Human
uauagccuaggugacaga

SEQ ID NO: 3111514 - RNA, 20 nt, Human
uauagccuaggugacagagu

SEQ ID NO: 3111515 - RNA, 23 nt, Human
acacucauugaccugaggcccuu

SEQ ID NO: 3111516 - RNA, 21 nt, Human
acacucauugaccugaggccc

SEQ ID NO: 3111517 - RNA, 19 nt, Human
acacucauugaccugaggc

SEQ ID NO: 3111518 - RNA, 17 nt, Human
acagcuaacauggaagu

SEQ ID NO: 3111519 - RNA, 15 nt, Human
acagcuaacauggaa

SEQ ID NO: 3111520 - RNA, 14 nt, Human
acagcuaacaugga

SEQ ID NO: 3111521 - RNA, 10 nt, Human
uaugggagag

SEQ ID NO: 3111522 - RNA, 16 nt, Human
uauggcuuuugugcau

SEQ ID NO: 3111523 - RNA, 18 nt, Human
uaugcucugcauguuaca

SEQ ID NO: 3111524 - RNA, 14 nt, Human
uaugcucugcaugu

SEQ ID NO: 3111525 - RNA, 19 nt, Human
uaugcucugcauguuacau

SEQ ID NO: 3111526 - RNA, 22 nt, Human
uauggcccuggccuagcauacg

SEQ ID NO: 3111527 - RNA, 14 nt, Human
uaugaucacggcuc

SEQ ID NO: 3111528 - RNA, 21 nt, Human
uaugaucacggcucacugcag

SEQ ID NO: 3111529 - RNA, 23 nt, Human
uaugaucacggcucacugcagcc

SEQ ID NO: 3111530 - RNA, 15 nt, Human
uaucuugaagacuuu

SEQ ID NO: 3111531 - RNA, 23 nt, Human
uaugaggcauuuguuugaacuga

SEQ ID NO: 3111532 - RNA, 13 nt, Human
uaugaggcauuug

SEQ ID NO: 3111533 - RNA, 20 nt, Human
acagaguuuucacucuuauu

SEQ ID NO: 3111534 - RNA, 18 nt, Human
acagaguuuucacucuua

SEQ ID NO: 3111535 - RNA, 14 nt, Human
uaucuugaagacuu

SEQ ID NO: 3111536 - RNA, 22 nt, Human
acagacuggaagcacagcuuca

SEQ ID NO: 3111537 - RNA, 20 nt, Human
acagagcccacgcccccacu

SEQ ID NO: 3111538 - RNA, 16 nt, Human
acagagcuacacaggg

SEQ ID NO: 3111539 - RNA, 21 nt, Human
acagagugagacucugucuca

SEQ ID NO: 3111540 - RNA, 15 nt, Human
uaucuagauacugua

SEQ ID NO: 3111541 - RNA, 16 nt, Human
uaucuagauacuguau

SEQ ID NO: 3111542 - RNA, 17 nt, Human
uaucucccccagcccca

SEQ ID NO: 3111543 - RNA, 18 nt, Human
uaucucccccagccccau

SEQ ID NO: 3111544 - RNA, 16 nt, Human
uaucucccccagcccc

SEQ ID NO: 3111545 - RNA, 19 nt, Human
uaucuagauacuguaucau

SEQ ID NO: 3111546 - RNA, 18 nt, Human
uaucacccagaagaaaau

SEQ ID NO: 3111547 - RNA, 21 nt, Human
uaucaaguauuauaccuuuuu

SEQ ID NO: 3111548 - RNA, 18 nt, Human
uaucaaguauuauaccuu

SEQ ID NO: 3111549 - RNA, 23 nt, Human
acagacacaggcccggcuccagg

SEQ ID NO: 3111550 - RNA, 11 nt, Human
acacuccuuca

SEQ ID NO: 3111551 - RNA, 16 nt, Human
acagacccugcccugu

SEQ ID NO: 3111552 - RNA, 17 nt, Human
acagacccugcccugug

SEQ ID NO: 3111553 - RNA, 20 nt, Human
acagacccugcccugugggc

SEQ ID NO: 3111554 - RNA, 18 nt, Human
acagacccugcccugugg

SEQ ID NO: 3111555 - RNA, 14 nt, Human
acagacuggaagca

SEQ ID NO: 3111556 - RNA, 22 nt, Human
acagggcacaccgggcacucag

SEQ ID NO: 3111557 - RNA, 22 nt, Human
acagguuuuccugaagaauuga

SEQ ID NO: 3111558 - RNA, 12 nt, Human
acaggcugggcu

SEQ ID NO: 3111559 - RNA, 20 nt, Human
acagggcacaccgggcacuc

SEQ ID NO: 3111560 - RNA, 21 nt, Human
acaggcugggcuucaguggca

SEQ ID NO: 3111561 - RNA, 14 nt, Human
acaggcugggcuuc

SEQ ID NO: 3111562 - RNA, 17 nt, Human
acaggcugggcuucagu

SEQ ID NO: 3111563 - RNA, 17 nt, Human
acaguccucccaucuca

SEQ ID NO: 3111564 - RNA, 20 nt, Human
acaguccuuaccagcagagc

SEQ ID NO: 3111565 - RNA, 18 nt, Human
acaguccuuaccagcaga

SEQ ID NO: 3111566 - RNA, 15 nt, Human
acaguccucccaucu

SEQ ID NO: 3111567 - RNA, 14 nt, Human
acaguccucccauc

SEQ ID NO: 3111568 - RNA, 13 nt, Human
acaguccucccau

SEQ ID NO: 3111569 - RNA, 15 nt, Human
acagucccugccaau

SEQ ID NO: 3111570 - RNA, 15 nt, Human
acaguauuacuucug

SEQ ID NO: 3111571 - RNA, 16 nt, Human
acaguauuacuucugc

SEQ ID NO: 3111572 - RNA, 17 nt, Human
acaguauuacuucugcu

SEQ ID NO: 3111573 - RNA, 19 nt, Human
acaguauuacuucugcuac

SEQ ID NO: 3111574 - RNA, 13 nt, Human
acagucccugcca

SEQ ID NO: 3111575 - RNA, 12 nt, Human
acagucccugcc

SEQ ID NO: 3111576 - RNA, 15 nt, Human
acaguuaagagaaau

SEQ ID NO: 3111577 - RNA, 22 nt, Human
acaguccuuaccagcagagcac

SEQ ID NO: 3111578 - RNA, 21 nt, Human
acaguccuuaccagcagagca

SEQ ID NO: 3111579 - RNA, 12 nt, Human
uauuagagaaga

SEQ ID NO: 3111580 - RNA, 16 nt, Human
uauuaccacagacaua

SEQ ID NO: 3111581 - RNA, 16 nt, Human
uauucaggaagcucag

SEQ ID NO: 3111582 - RNA, 22 nt, Human
uauucaggaagcucagggccug

SEQ ID NO: 3111583 - RNA, 18 nt, Human
uauucaggaagcucaggg

SEQ ID NO: 3111584 - RNA, 23 nt, Human
uauuaaaaaucucaaauuucuaa

SEQ ID NO: 3111585 - RNA, 16 nt, Human
uauuaaaaaucucaaa

SEQ ID NO: 3111586 - RNA, 18 nt, Human
uauuaaaaaucucaaauu

SEQ ID NO: 3111587 - RNA, 20 nt, Human
uauuaaaaaucucaaauuuc

SEQ ID NO: 3111588 - RNA, 22 nt, Human
uauuaaaaaucucaaauuucua

SEQ ID NO: 3111589 - RNA, 17 nt, Human
uauguuuuaagaggcag

SEQ ID NO: 3111590 - RNA, 19 nt, Human
uauguuuuaagaggcaggg

SEQ ID NO: 3111591 - RNA, 15 nt, Human
uauuuaaugaaagac

SEQ ID NO: 3111592 - RNA, 21 nt, Human
uauuuaaugaaagacuguaca

SEQ ID NO: 3111593 - RNA, 17 nt, Human
uauugucaaagugguga

SEQ ID NO: 3111594 - RNA, 13 nt, Human
uauugucaaagug

SEQ ID NO: 3111595 - RNA, 14 nt, Human
uauuuauuuaaauu

SEQ ID NO: 3111596 - RNA, 13 nt, Human
uauuuauuuaaau

SEQ ID NO: 3111597 - RNA, 18 nt, Human
uauuuacuucuuauacau

SEQ ID NO: 3111598 - RNA, 23 nt, Human
uauuuaauuuuuuugagacagag

SEQ ID NO: 3111599 - RNA, 15 nt, Human
uauucuuauuuaaug

SEQ ID NO: 3111600 - RNA, 16 nt, Human
uauucuguuggccagu

SEQ ID NO: 3111601 - RNA, 17 nt, Human
acaguucucuccuucuu

SEQ ID NO: 3111602 - RNA, 18 nt, Human
uauucucuccuguaccuc

SEQ ID NO: 3111603 - RNA, 20 nt, Human
uauucucuccuguaccucuu

SEQ ID NO: 3111604 - RNA, 24 nt, Human
uauucucuccuguaccucuugagc

SEQ ID NO: 3111605 - RNA, 13 nt, Human
acaguuacucaga

SEQ ID NO: 3111606 - RNA, 20 nt, Human
acaguuacucagaauucucu

SEQ ID NO: 3111607 - RNA, 20 nt, Human
acaguucaauucucauuugu

SEQ ID NO: 3111608 - RNA, 16 nt, Human
acaguucucuccuucu

SEQ ID NO: 3111609 - RNA, 16 nt, Human
uacuauguaucaauga

SEQ ID NO: 3111610 - RNA, 16 nt, Human
uacuauaauuuaccug

SEQ ID NO: 3111611 - RNA, 13 nt, Human
uacguugugcauu

SEQ ID NO: 3111612 - RNA, 14 nt, Human
uacgucugacaggc

SEQ ID NO: 3111613 - RNA, 21 nt, Human
uacucugugucagguggggca

SEQ ID NO: 3111614 - RNA, 13 nt, Human
aauucuuaaauau

SEQ ID NO: 3111615 - RNA, 14 nt, Human
aauucuugcaaagu

SEQ ID NO: 3111616 - RNA, 20 nt, Human
aauucuugcaaaguaucccu

SEQ ID NO: 3111617 - RNA, 22 nt, Human
aauucuucuccacuuucuagcc

SEQ ID NO: 3111618 - RNA, 15 nt, Human
uacguacacauuuua

SEQ ID NO: 3111619 - RNA, 14 nt, Human
uacguacacauuuu

SEQ ID NO: 3111620 - RNA, 15 nt, Human
aauuuacauacucug

SEQ ID NO: 3111621 - RNA, 19 nt, Human
aauuuacauacucugcuua

SEQ ID NO: 3111622 - RNA, 13 nt, Human
aauuuaaaagucu

SEQ ID NO: 3111623 - RNA, 22 nt, Human
aauuguuuggggaugagaaagg

SEQ ID NO: 3111624 - RNA, 17 nt, Human
aauuuagaaauauaauu

SEQ ID NO: 3111625 - RNA, 13 nt, Human
aauuucuaaaucu

SEQ ID NO: 3111626 - RNA, 21 nt, Human
aauuucuaaaucuccaaaaua

SEQ ID NO: 3111627 - RNA, 22 nt, Human
uagauuuuagacccuauugcug

SEQ ID NO: 3111628 - RNA, 19 nt, Human
uagcacagacccugcccug

SEQ ID NO: 3111629 - RNA, 18 nt, Human
uagcacagacccugcccu

SEQ ID NO: 3111630 - RNA, 17 nt, Human
uagcacagacccugccc

SEQ ID NO: 3111631 - RNA, 16 nt, Human
uagcacagacccugcc

SEQ ID NO: 3111632 - RNA, 24 nt, Human
uagcacagacccugcccugugggc

SEQ ID NO: 3111633 - RNA, 12 nt, Human
acaacacucaca

SEQ ID NO: 3111634 - RNA, 15 nt, Human
acaacaacaaaauga

SEQ ID NO: 3111635 - RNA, 18 nt, Human
acaagcgugagccacugc

SEQ ID NO: 3111636 - RNA, 13 nt, Human
acaagcugcaccc

SEQ ID NO: 3111637 - RNA, 20 nt, Human
acaagcgugagccacugcac

SEQ ID NO: 3111638 - RNA, 21 nt, Human
acaagcgugagccacugcacc

SEQ ID NO: 3111639 - RNA, 12 nt, Human
acaagccacccc

SEQ ID NO: 3111640 - RNA, 17 nt, Human
acaagagcccaggccuc

SEQ ID NO: 3111641 - RNA, 21 nt, Human
uagacagagucucacuguugc

SEQ ID NO: 3111642 - RNA, 16 nt, Human
uagacaauuuauuaug

SEQ ID NO: 3111643 - RNA, 16 nt, Human
uagaagucacacagua

SEQ ID NO: 3111644 - RNA, 16 nt, Human
uagaagucuuagaugu

SEQ ID NO: 3111645 - RNA, 17 nt, Human
uagaagucuuagaugua

SEQ ID NO: 3111646 - RNA, 18 nt, Human
uagaagucuuagauguau

SEQ ID NO: 3111647 - RNA, 19 nt, Human
uagaagucuuagauguaua

SEQ ID NO: 3111648 - RNA, 15 nt, Human
uagaagucacacagu

SEQ ID NO: 3111649 - RNA, 14 nt, Human
uagacagucccugc

SEQ ID NO: 3111650 - RNA, 12 nt, Human
uagacagucccu

SEQ ID NO: 3111651 - RNA, 17 nt, Human
aauuuuuauuaaauuau

SEQ ID NO: 3111652 - RNA, 18 nt, Human
aauuuuuauuaaauuaug

SEQ ID NO: 3111653 - RNA, 22 nt, Human
aauuuuuuuaucgucacugcuu

SEQ ID NO: 3111654 - RNA, 17 nt, Human
aauuuuuuugagacaga

SEQ ID NO: 3111655 - RNA, 20 nt, Human
aauacaguaucucagggccu

SEQ ID NO: 3111656 - RNA, 23 nt, Human
uaauacaccacuacauucuguua

SEQ ID NO: 3111657 - RNA, 22 nt, Human
uaauacaccacuacauucuguu

SEQ ID NO: 3111658 - RNA, 21 nt, Human
uaauacaccacuacauucugu

SEQ ID NO: 3111659 - RNA, 21 nt, Human
uaauauugauaugcuuauaca

SEQ ID NO: 3111660 - RNA, 23 nt, Human
aaucuucugaacuuggcgcugcc

SEQ ID NO: 3111661 - RNA, 14 nt, Human
aaugaaugaaacau

SEQ ID NO: 3111662 - RNA, 14 nt, Human
aaugaaugucagug

SEQ ID NO: 3111663 - RNA, 15 nt, Human
aaugaaugucagugu

SEQ ID NO: 3111664 - RNA, 12 nt, Human
uaaugugaaacu

SEQ ID NO: 3111665 - RNA, 20 nt, Human
uaaugugaaacuggauuaaa

SEQ ID NO: 3111666 - RNA, 22 nt, Human
uaaugugaaacuggauuaaacu

SEQ ID NO: 3111667 - RNA, 23 nt, Human
uaaugugaaacuggauuaaacuu

SEQ ID NO: 3111668 - RNA, 16 nt, Human
uaaugucacaggcagg

SEQ ID NO: 3111669 - RNA, 17 nt, Human
uaaugucacaggcaggu

SEQ ID NO: 3111670 - RNA, 15 nt, Human
uaaugucacaggcag

SEQ ID NO: 3111671 - RNA, 16 nt, Human
uaauguaagcucuacu

SEQ ID NO: 3111672 - RNA, 17 nt, Human
uaauguaagcucuacug

SEQ ID NO: 3111673 - RNA, 23 nt, Human
uaauuaguuccucauuagcauuu

SEQ ID NO: 3111674 - RNA, 20 nt, Human
aaugcacuuuguucuggcuc

SEQ ID NO: 3111675 - RNA, 19 nt, Human
aaugcacuuuguucuggcu

SEQ ID NO: 3111676 - RNA, 16 nt, Human
aaugcacuuuguucug

SEQ ID NO: 3111677 - RNA, 13 nt, Human
aaugcacuuuguu

SEQ ID NO: 3111678 - RNA, 20 nt, Human
aaugcacaaacagaggccgc

SEQ ID NO: 3111679 - RNA, 19 nt, Human
aaugcacaaacagaggccg

SEQ ID NO: 3111680 - RNA, 23 nt, Human
aaugcaaaccaucauugaaaucu

SEQ ID NO: 3111681 - RNA, 22 nt, Human
aaugcaaaccaucauugaaauc

SEQ ID NO: 3111682 - RNA, 18 nt, Human
aaugcacaaacagaggcc

SEQ ID NO: 3111683 - RNA, 21 nt, Human
aaugaaugucagugugacuga

SEQ ID NO: 3111684 - RNA, 20 nt, Human
aaugaaugucagugugacug

SEQ ID NO: 3111685 - RNA, 16 nt, Human
aaugcaaaccaucauu

SEQ ID NO: 3111686 - RNA, 14 nt, Human
aaugcaaaccauca

SEQ ID NO: 3111687 - RNA, 14 nt, Human
aaugaccuuucaau

SEQ ID NO: 3111688 - RNA, 13 nt, Human
aaugaccuuucaa

SEQ ID NO: 3111689 - RNA, 16 nt, Human
uacaagcgugagccac

SEQ ID NO: 3111690 - RNA, 18 nt, Human
uacaagcgugagccacug

SEQ ID NO: 3111691 - RNA, 19 nt, Human
uacaagcgugagccacugc

SEQ ID NO: 3111692 - RNA, 20 nt, Human
uacaagcgugagccacugca

SEQ ID NO: 3111693 - RNA, 18 nt, Human
uaauuuaccugaagucuu

SEQ ID NO: 3111694 - RNA, 17 nt, Human
uaauuuaccugaagucu

SEQ ID NO: 3111695 - RNA, 20 nt, Human
uacccgggaagggggcuggg

SEQ ID NO: 3111696 - RNA, 15 nt, Human
uacccucauguucuu

SEQ ID NO: 3111697 - RNA, 16 nt, Human
uacccucauguucuua

SEQ ID NO: 3111698 - RNA, 20 nt, Human
uacccuggcacuauaaugua

SEQ ID NO: 3111699 - RNA, 22 nt, Human
uacccuggcacuauaauguaag

SEQ ID NO: 3111700 - RNA, 17 nt, Human
uaccacuuuuguucuug

SEQ ID NO: 3111701 - RNA, 17 nt, Human
uaccauccccuguagag

SEQ ID NO: 3111702 - RNA, 16 nt, Human
aauuaacuuuuauaaa

SEQ ID NO: 3111703 - RNA, 18 nt, Human
aauuaacuuuuauaaacu

SEQ ID NO: 3111704 - RNA, 20 nt, Human
aauuaacuuuuauaaacuuu

SEQ ID NO: 3111705 - RNA, 22 nt, Human
aauuaacuuuuauaaacuuuac

SEQ ID NO: 3111706 - RNA, 21 nt, Human
aauguacagcaaggagauuua

SEQ ID NO: 3111707 - RNA, 23 nt, Human
aauguacagcaaggagauuuaca

SEQ ID NO: 3111708 - RNA, 22 nt, Human
uacagcaaggagauuuacaacu

SEQ ID NO: 3111709 - RNA, 16 nt, Human
aaugguuuucuugugu

SEQ ID NO: 3111710 - RNA, 22 nt, Human
aaugguuuucuuguguguuuau

SEQ ID NO: 3111711 - RNA, 18 nt, Human
aaugguuuucuugugugu

SEQ ID NO: 3111712 - RNA, 17 nt, Human
aaugguuuucuugugug

SEQ ID NO: 3111713 - RNA, 13 nt, Human
aauguaagcucua

SEQ ID NO: 3111714 - RNA, 15 nt, Human
aauguaagcucuacu

SEQ ID NO: 3111715 - RNA, 18 nt, Human
uacaguccucccaucuca

SEQ ID NO: 3111716 - RNA, 17 nt, Human
uacaguccucccaucuc

SEQ ID NO: 3111717 - RNA, 15 nt, Human
uacaguccucccauc

SEQ ID NO: 3111718 - RNA, 12 nt, Human
uacaguccuccc

SEQ ID NO: 3111719 - RNA, 18 nt, Human
uacaguaucucagggccu

SEQ ID NO: 3111720 - RNA, 13 nt, Human
aaugucacaggca

SEQ ID NO: 3111721 - RNA, 14 nt, Human
aaugucacaggcag

SEQ ID NO: 3111722 - RNA, 22 nt, Human
aaugugaaacuggauuaaacuu

SEQ ID NO: 3111723 - RNA, 15 nt, Human
aaaaaauauuuuccu

SEQ ID NO: 3111724 - RNA, 16 nt, Human
aaaggcuccaggagca

SEQ ID NO: 3111725 - RNA, 15 nt, Human
aaaggcuccaggagc

SEQ ID NO: 3111726 - RNA, 20 nt, Human
aaaggcuccaggagcagcca

SEQ ID NO: 3111727 - RNA, 19 nt, Human
aaaggcuccaggagcagcc

SEQ ID NO: 3111728 - RNA, 13 nt, Human
aaaguggaaaaau

SEQ ID NO: 3111729 - RNA, 13 nt, Human
aaauaaaacuuuu

SEQ ID NO: 3111730 - RNA, 16 nt, Human
aaauaaaacuuuuuaa

SEQ ID NO: 3111731 - RNA, 19 nt, Human
aaauaaaacuuuuuaaaau

SEQ ID NO: 3111732 - RNA, 19 nt, Human
aaauaguggugugauuugg

SEQ ID NO: 3111733 - RNA, 24 nt, Human
aaauagcucaggugucccugcacu

SEQ ID NO: 3111734 - RNA, 18 nt, Human
aaaucugcuuuuuaaaga

SEQ ID NO: 3111735 - RNA, 15 nt, Human
aaaaagaaaggaggg

SEQ ID NO: 3111736 - RNA, 16 nt, Human
aaaauaaaacuuuuua

SEQ ID NO: 3111737 - RNA, 17 nt, Human
aaaauaaaacuuuuuaa

SEQ ID NO: 3111738 - RNA, 22 nt, Human
aaaaucccuuaccucggugccu

SEQ ID NO: 3111739 - RNA, 19 nt, Human
aaaaucucaaauuucuaaa

SEQ ID NO: 3111740 - RNA, 22 nt, Human
aaaaucucaaauuucuaaaucu

SEQ ID NO: 3111741 - RNA, 16 nt, Human
aaacacuguucucugc

SEQ ID NO: 3111742 - RNA, 13 nt, Human
aaacucuccucug

SEQ ID NO: 3111743 - RNA, 18 nt, Human
aaacucuccucugcugcu

SEQ ID NO: 3111744 - RNA, 18 nt, Human
aaaccaucauugaaaucu

SEQ ID NO: 3111745 - RNA, 12 nt, Human
aaagauauuuug

SEQ ID NO: 3111746 - RNA, 16 nt, Human
aaagauauuuugcuuu

SEQ ID NO: 3111747 - RNA, 17 nt, Human
aaagauauuuugcuuug

SEQ ID NO: 3111748 - RNA, 14 nt, Human
aaagaguaggaaga

SEQ ID NO: 3111749 - RNA, 14 nt, Human
aacugauaaagaug

SEQ ID NO: 3111750 - RNA, 19 nt, Human
aacuuaaauaaugugaaac

SEQ ID NO: 3111751 - RNA, 18 nt, Human
aacuuaaucuaaauggaa

SEQ ID NO: 3111752 - RNA, 15 nt, Human
aacuuaaucuaaaug

SEQ ID NO: 3111753 - RNA, 16 nt, Human
aacuuaaucuaaaugg

SEQ ID NO: 3111754 - RNA, 21 nt, Human
aaauucuugcaaaguaucccu

SEQ ID NO: 3111755 - RNA, 18 nt, Human
aaauucuugcaaaguauc

SEQ ID NO: 3111756 - RNA, 23 nt, Human
aaaugccuuacccucauguucuu

SEQ ID NO: 3111757 - RNA, 15 nt, Human
aaccacuucagcuga

SEQ ID NO: 3111758 - RNA, 13 nt, Human
aaccacgcuggac

SEQ ID NO: 3111759 - RNA, 22 nt, Human
aauacucuacccucuuagaaaa

SEQ ID NO: 3111760 - RNA, 20 nt, Human
aauacucuacccucuuagaa

SEQ ID NO: 3111761 - RNA, 13 nt, Human
aauagacaauuua

SEQ ID NO: 3111762 - RNA, 14 nt, Human
aaucaccgaaaacg

SEQ ID NO: 3111763 - RNA, 16 nt, Human
aaugauuaauuaaaac

SEQ ID NO: 3111764 - RNA, 17 nt, Human
aaucucaaauuucuaaa

SEQ ID NO: 3111765 - RNA, 18 nt, Human
aaucucaaauuucuaaau

SEQ ID NO: 3111766 - RNA, 19 nt, Human
aauccagacccggcugcgu

SEQ ID NO: 3111767 - RNA, 17 nt, Human
aauccagacccggcugc

SEQ ID NO: 3111768 - RNA, 16 nt, Human
aaucucaaauuucuaa

SEQ ID NO: 3111769 - RNA, 15 nt, Human
aaucucaaauuucua

SEQ ID NO: 3111770 - RNA, 23 nt, Human
aaugccuuacccucauguucuua

SEQ ID NO: 3111771 - RNA, 18 nt, Human
aaugcgugcauaccacuu

SEQ ID NO: 3111772 - RNA, 19 nt, Human
aaugcgugcauaccacuuu

SEQ ID NO: 3111773 - RNA, 15 nt, Human
aaugugaaaagaaaa

SEQ ID NO: 3111774 - RNA, 15 nt, Human
aauguuugccucugc

SEQ ID NO: 3111775 - RNA, 21 nt, Human
aaguggaaaaauagccugccu

SEQ ID NO: 3111776 - RNA, 19 nt, Human
aaguggaaaaauagccugc

SEQ ID NO: 3111777 - RNA, 18 nt, Human
aaggucauuuuuuuuaag

SEQ ID NO: 3111778 - RNA, 19 nt, Human
aaggucauuuuuuuuaaga

SEQ ID NO: 3111779 - RNA, 18 nt, Human
aaguccucuuuucugaga

SEQ ID NO: 3111780 - RNA, 22 nt, Human
aaguccucuuuucugagaggac

SEQ ID NO: 3111781 - RNA, 17 nt, Human
aaguaucccuacuguaa

SEQ ID NO: 3111782 - RNA, 18 nt, Human
aaguaucccuacuguaau

SEQ ID NO: 3111783 - RNA, 23 nt, Human
aaguaucccuacuguaauuugug

SEQ ID NO: 3111784 - RNA, 21 nt, Human
aaguagaagucuuagauguau

SEQ ID NO: 3111785 - RNA, 19 nt, Human
aaguagaagucuuagaugu

SEQ ID NO: 3111786 - RNA, 20 nt, Human
aaguagaagucuuagaugua

SEQ ID NO: 3111787 - RNA, 21 nt, Human
aagcgauucuucugcuucagc

SEQ ID NO: 3111788 - RNA, 17 nt, Human
aagcgauucuucugcuu

SEQ ID NO: 3111789 - RNA, 15 nt, Human
aaggauguucuagca

SEQ ID NO: 3111790 - RNA, 15 nt, Human
aaggauugcuacugu

SEQ ID NO: 3111791 - RNA, 13 nt, Human
aaggacacuagaa

SEQ ID NO: 3111792 - RNA, 15 nt, Human
aagcugggcagguug

SEQ ID NO: 3111793 - RNA, 18 nt, Human
aagcuggucccacucagu

SEQ ID NO: 3111794 - RNA, 21 nt, Human
aagcuggucccacucagucca

SEQ ID NO: 3111795 - RNA, 12 nt, Human
aagauaaaugug

SEQ ID NO: 3111796 - RNA, 23 nt, Human
aagauacaguuacucagaauucu

SEQ ID NO: 3111797 - RNA, 13 nt, Human
aagauaaaugugc

SEQ ID NO: 3111798 - RNA, 23 nt, Human
aagccagcaggcucucaggccag

SEQ ID NO: 3111799 - RNA, 20 nt, Human
aagccagcaggcucucaggc

SEQ ID NO: 3111800 - RNA, 21 nt, Human
aagcagcguuucuaugacaca

SEQ ID NO: 3111801 - RNA, 22 nt, Human
aagcagcguuucuaugacacau

SEQ ID NO: 3111802 - RNA, 19 nt, Human
aagccagcaggcucucagg

SEQ ID NO: 3111803 - RNA, 17 nt, Human
aagcagcguuucuauga

SEQ ID NO: 3111804 - RNA, 20 nt, Human
aagcagcguuucuaugacac

SEQ ID NO: 3111805 - RNA, 14 nt, Human
aagcagcguuucua

SEQ ID NO: 3111806 - RNA, 13 nt, Human
acucaaaagcugg

SEQ ID NO: 3111807 - RNA, 19 nt, Human
acucaguccauagcagaga

SEQ ID NO: 3111808 - RNA, 19 nt, Human
acucugucgcccagucugg

SEQ ID NO: 3111809 - RNA, 21 nt, Human
acucuaucaaguauuauaccu

SEQ ID NO: 3111810 - RNA, 23 nt, Human
acucuaucaaguauuauaccuuu

SEQ ID NO: 3111811 - RNA, 17 nt, Human
acucuagggaaaaacca

SEQ ID NO: 3111812 - RNA, 15 nt, Human
acucuagggaaaaac

SEQ ID NO: 3111813 - RNA, 11 nt, Human
acgugaguccu

SEQ ID NO: 3111814 - RNA, 13 nt, Human
acgucugacaggc

SEQ ID NO: 3111815 - RNA, 14 nt, Human
acgucugacaggca

SEQ ID NO: 3111816 - RNA, 11 nt, Human
acgcugugcug

SEQ ID NO: 3111817 - RNA, 14 nt, Human
acgcugugcugccc

SEQ ID NO: 3111818 - RNA, 12 nt, Human
acgcugugcugc

SEQ ID NO: 3111819 - RNA, 21 nt, Human
accucugcagcaauaaagcag

SEQ ID NO: 3111820 - RNA, 23 nt, Human
accucugccugaagucacacagu

SEQ ID NO: 3111821 - RNA, 18 nt, Human
accucugcagcaauaaag

SEQ ID NO: 3111822 - RNA, 20 nt, Human
accucugcagcaauaaagca

SEQ ID NO: 3111823 - RNA, 15 nt, Human
accucugcagcaaua

SEQ ID NO: 3111824 - RNA, 18 nt, Human
accuuggcugcagggagu

SEQ ID NO: 3111825 - RNA, 14 nt, Human
accuuggcugcagg

SEQ ID NO: 3111826 - RNA, 17 nt, Human
accuuggcugcagggag

SEQ ID NO: 3111827 - RNA, 13 nt, Human
accuuucccaucu

SEQ ID NO: 3111828 - RNA, 18 nt, Human
accuuucccaucuuccaa

SEQ ID NO: 3111829 - RNA, 15 nt, Human
accuuuaagagaaau

SEQ ID NO: 3111830 - RNA, 16 nt, Human
accugucccccugaca

SEQ ID NO: 3111831 - RNA, 15 nt, Human
accugucccccugac

SEQ ID NO: 3111832 - RNA, 12 nt, Human
accugucccccu

SEQ ID NO: 3111833 - RNA, 23 nt, Human
acuucacauauugauuuccguua

SEQ ID NO: 3111834 - RNA, 16 nt, Human
acuugguuuuuaaaaa

SEQ ID NO: 3111835 - RNA, 18 nt, Human
acuucuuauacauuugau

SEQ ID NO: 3111836 - RNA, 15 nt, Human
acuugggccacugug

SEQ ID NO: 3111837 - RNA, 14 nt, Human
acuugggccacugu

SEQ ID NO: 3111838 - RNA, 20 nt, Human
acugugcugagucugaaggc

SEQ ID NO: 3111839 - RNA, 16 nt, Human
acuggaagcacagcuu

SEQ ID NO: 3111840 - RNA, 19 nt, Human
acuggaagcacagcuucau

SEQ ID NO: 3111841 - RNA, 17 nt, Human
acuggaagcacagcuuc

SEQ ID NO: 3111842 - RNA, 15 nt, Human
acuggagaaaaugga

SEQ ID NO: 3111843 - RNA, 14 nt, Human
acuggagaaaaugg

SEQ ID NO: 3111844 - RNA, 18 nt, Human
acugguuccauggccucu

SEQ ID NO: 3111845 - RNA, 16 nt, Human
acugugaagagaacca

SEQ ID NO: 3111846 - RNA, 19 nt, Human
agaaaauaguggugugauu

SEQ ID NO: 3111847 - RNA, 14 nt, Human
acuuuucuuugugg

SEQ ID NO: 3111848 - RNA, 16 nt, Human
acuuuucuuucagcca

SEQ ID NO: 3111849 - RNA, 20 nt, Human
acuuuucauaaccuagccuu

SEQ ID NO: 3111850 - RNA, 19 nt, Human
acuuuguucuggcucuucc

SEQ ID NO: 3111851 - RNA, 13 nt, Human
acuuuuauaaacu

SEQ ID NO: 3111852 - RNA, 17 nt, Human
acuuuguucuggcucuu

SEQ ID NO: 3111853 - RNA, 16 nt, Human
acuuuguucuggcucu

SEQ ID NO: 3111854 - RNA, 22 nt, Human
agaaaguacuucuccacccugc

SEQ ID NO: 3111855 - RNA, 23 nt, Human
agaaaguacuucuccacccugcu

SEQ ID NO: 3111856 - RNA, 20 nt, Human
acacagcucuguccugggag

SEQ ID NO: 3111857 - RNA, 14 nt, Human
acacagcucugucc

SEQ ID NO: 3111858 - RNA, 19 nt, Human
acacagaggcugccucucc

SEQ ID NO: 3111859 - RNA, 21 nt, Human
acacauuuuauuuuauuaugc

SEQ ID NO: 3111860 - RNA, 22 nt, Human
acacauuuuauuuuauuaugca

SEQ ID NO: 3111861 - RNA, 11 nt, Human
acacagcucuu

SEQ ID NO: 3111862 - RNA, 13 nt, Human
acacagcucuucu

SEQ ID NO: 3111863 - RNA, 20 nt, Human
acacauuuuuuaaaugcacc

SEQ ID NO: 3111864 - RNA, 22 nt, Human
acacauuuuuuaaaugcaccug

SEQ ID NO: 3111865 - RNA, 19 nt, Human
acacauuuuuuaaaugcac

SEQ ID NO: 3111866 - RNA, 15 nt, Human
acacgcgugcacaca

SEQ ID NO: 3111867 - RNA, 17 nt, Human
acacgcgugcacacacc

SEQ ID NO: 3111868 - RNA, 20 nt, Human
acaaggcaaggcugucaauu

SEQ ID NO: 3111869 - RNA, 17 nt, Human
acaaggauugcuacugu

SEQ ID NO: 3111870 - RNA, 14 nt, Human
acaaggcaaggcug

SEQ ID NO: 3111871 - RNA, 12 nt, Human
acaaggcaaggc

SEQ ID NO: 3111872 - RNA, 22 nt, Human
acaaaauguaggguuauaauaa

SEQ ID NO: 3111873 - RNA, 20 nt, Human
acaaaauguaggguuauaau

SEQ ID NO: 3111874 - RNA, 16 nt, Human
aauuuugugcccccau

SEQ ID NO: 3111875 - RNA, 14 nt, Human
acacugcauguuug

SEQ ID NO: 3111876 - RNA, 15 nt, Human
acacugcauguuugu

SEQ ID NO: 3111877 - RNA, 19 nt, Human
acagaggcagccccauucu

SEQ ID NO: 3111878 - RNA, 23 nt, Human
acagaggccaugggccuccugug

SEQ ID NO: 3111879 - RNA, 13 nt, Human
acagacacaggcc

SEQ ID NO: 3111880 - RNA, 14 nt, Human
acagacacaggccc

SEQ ID NO: 3111881 - RNA, 14 nt, Human
acagaggcagcccc

SEQ ID NO: 3111882 - RNA, 15 nt, Human
acagaggcagcccca

SEQ ID NO: 3111883 - RNA, 15 nt, Human
acacuguacugcaau

SEQ ID NO: 3111884 - RNA, 11 nt, Human
acagacacagg

SEQ ID NO: 3111885 - RNA, 23 nt, Human
acagagucucacuguugcccagg

SEQ ID NO: 3111886 - RNA, 15 nt, Human
acagagugagacucu

SEQ ID NO: 3111887 - RNA, 19 nt, Human
acagagugagacucugucu

SEQ ID NO: 3111888 - RNA, 18 nt, Human
acagccacggccaggcca

SEQ ID NO: 3111889 - RNA, 16 nt, Human
acagccacggccaggc

SEQ ID NO: 3111890 - RNA, 17 nt, Human
acagccacggccaggcc

SEQ ID NO: 3111891 - RNA, 15 nt, Human
acagccacggccagg

SEQ ID NO: 3111892 - RNA, 17 nt, Human
acagcucuguccuggga

SEQ ID NO: 3111893 - RNA, 16 nt, Human
acagcucuucuccagg

SEQ ID NO: 3111894 - RNA, 17 nt, Human
acagcucuucuccaggc

SEQ ID NO: 3111895 - RNA, 15 nt, Human
acaggaucagucuga

SEQ ID NO: 3111896 - RNA, 18 nt, Human
acaggcaaugcuggcugu

SEQ ID NO: 3111897 - RNA, 12 nt, Human
acaggcaagcac

SEQ ID NO: 3111898 - RNA, 14 nt, Human
acaggauuauugga

SEQ ID NO: 3111899 - RNA, 16 nt, Human
acccaccucagccucc

SEQ ID NO: 3111900 - RNA, 11 nt, Human
acccccugaau

SEQ ID NO: 3111901 - RNA, 20 nt, Human
accauauuaccacagacaua

SEQ ID NO: 3111902 - RNA, 18 nt, Human
acccaagggccuggccug

SEQ ID NO: 3111903 - RNA, 22 nt, Human
acccaagggccuggccugagcu

SEQ ID NO: 3111904 - RNA, 19 nt, Human
acccaagggccuggccuga

SEQ ID NO: 3111905 - RNA, 13 nt, Human
acccaccucagcc

SEQ ID NO: 3111906 - RNA, 14 nt, Human
acccaccucagccu

SEQ ID NO: 3111907 - RNA, 15 nt, Human
acccaccucagccuc

SEQ ID NO: 3111908 - RNA, 14 nt, Human
accauauuaccaca

SEQ ID NO: 3111909 - RNA, 16 nt, Human
accauauuaccacaga

SEQ ID NO: 3111910 - RNA, 16 nt, Human
accccuccaugugggc

SEQ ID NO: 3111911 - RNA, 19 nt, Human
accccuccaugugggcuag

SEQ ID NO: 3111912 - RNA, 20 nt, Human
accccucaacaccucugcac

SEQ ID NO: 3111913 - RNA, 23 nt, Human
acauaaugcgugcauaccacuuu

SEQ ID NO: 3111914 - RNA, 22 nt, Human
acauaaugcgugcauaccacuu

SEQ ID NO: 3111915 - RNA, 21 nt, Human
acauaaugcgugcauaccacu

SEQ ID NO: 3111916 - RNA, 19 nt, Human
acaggguuuugccauguug

SEQ ID NO: 3111917 - RNA, 19 nt, Human
acaggcaaugcuggcuguu

SEQ ID NO: 3111918 - RNA, 23 nt, Human
acaggcaaugcuggcuguuggcu

SEQ ID NO: 3111919 - RNA, 19 nt, Human
acaugaucuucuuuauaau

SEQ ID NO: 3111920 - RNA, 18 nt, Human
acaucagcacgauuucug

SEQ ID NO: 3111921 - RNA, 15 nt, Human
acaucagcacgauuu

SEQ ID NO: 3111922 - RNA, 17 nt, Human
acaucagcacgauuucu

SEQ ID NO: 3111923 - RNA, 16 nt, Human
acaugugcacaugcac

SEQ ID NO: 3111924 - RNA, 18 nt, Human
acaugugcacaugcacgu

SEQ ID NO: 3111925 - RNA, 14 nt, Human
acauuuauucugcu

SEQ ID NO: 3111926 - RNA, 15 nt, Human
acauuuauucugcuc

SEQ ID NO: 3111927 - RNA, 13 nt, Human
accagcagaaaug

SEQ ID NO: 3111928 - RNA, 17 nt, Human
accagccaguaaauggg

SEQ ID NO: 3111929 - RNA, 19 nt, Human
accagagcugccaccugcc

SEQ ID NO: 3111930 - RNA, 23 nt, Human
agcugcgguccacccaggagccc

SEQ ID NO: 3111931 - RNA, 13 nt, Human
agcuccuucuguc

SEQ ID NO: 3111932 - RNA, 12 nt, Human
agcuccuucugu

SEQ ID NO: 3111933 - RNA, 20 nt, Human
agcuccgcuuucuacccagc

SEQ ID NO: 3111934 - RNA, 21 nt, Human
agcuccgcuuucuacccagcg

SEQ ID NO: 3111935 - RNA, 23 nt, Human
agcuccgcuuucuacccagcgag

SEQ ID NO: 3111936 - RNA, 21 nt, Human
agcugcgguccacccaggagc

SEQ ID NO: 3111937 - RNA, 17 nt, Human
aggaauccagacccggc

SEQ ID NO: 3111938 - RNA, 21 nt, Human
aggaaucaugugccaagcaga

SEQ ID NO: 3111939 - RNA, 14 nt, Human
aggauuauuggaaa

SEQ ID NO: 3111940 - RNA, 15 nt, Human
aggauguucugggac

SEQ ID NO: 3111941 - RNA, 16 nt, Human
aggauguucugggaca

SEQ ID NO: 3111942 - RNA, 22 nt, Human
aggauguucuagcauggcugcc

SEQ ID NO: 3111943 - RNA, 13 nt, Human
aggaccucaggug

SEQ ID NO: 3111944 - RNA, 21 nt, Human
aggaugcuuguacauaaugcg

SEQ ID NO: 3111945 - RNA, 23 nt, Human
aggaugcuuguacauaaugcgug

SEQ ID NO: 3111946 - RNA, 23 nt, Human
agggacagaggggguggccuccc

SEQ ID NO: 3111947 - RNA, 21 nt, Human
aggcugucaauuacaggaagu

SEQ ID NO: 3111948 - RNA, 22 nt, Human
agggacagaggggguggccucc

SEQ ID NO: 3111949 - RNA, 13 nt, Human
aggcuguauccca

SEQ ID NO: 3111950 - RNA, 18 nt, Human
aggcuguaucccaugagc

SEQ ID NO: 3111951 - RNA, 19 nt, Human
aggcugucaauuacaggaa

SEQ ID NO: 3111952 - RNA, 20 nt, Human
aggcugucaauuacaggaag

SEQ ID NO: 3111953 - RNA, 23 nt, Human
aggcccuucucuccagccccugg

SEQ ID NO: 3111954 - RNA, 22 nt, Human
aggcccuucucuccagccccug

SEQ ID NO: 3111955 - RNA, 21 nt, Human
aggcccuucucuccagccccu

SEQ ID NO: 3111956 - RNA, 20 nt, Human
aggcccuucucuccagcccc

SEQ ID NO: 3111957 - RNA, 11 nt, Human
agggucccugg

SEQ ID NO: 3111958 - RNA, 19 nt, Human
aggguaucaggugcugcca

SEQ ID NO: 3111959 - RNA, 18 nt, Human
aggguaucaggugcugcc

SEQ ID NO: 3111960 - RNA, 21 nt, Human
aggguaucaggugcugccauc

SEQ ID NO: 3111961 - RNA, 21 nt, Human
aggggccucuuaugggcuggg

SEQ ID NO: 3111962 - RNA, 20 nt, Human
aggggccucuuaugggcugg

SEQ ID NO: 3111963 - RNA, 19 nt, Human
aggggccucuuaugggcug

SEQ ID NO: 3111964 - RNA, 23 nt, Human
agguucccuuugacgccauccca

SEQ ID NO: 3111965 - RNA, 14 nt, Human
agguucaaagauau

SEQ ID NO: 3111966 - RNA, 13 nt, Human
agguucccuuuga

SEQ ID NO: 3111967 - RNA, 22 nt, Human
agguucccuuugacgccauccc

SEQ ID NO: 3111968 - RNA, 22 nt, Human
aggugcuaggaacacuccuuca

SEQ ID NO: 3111969 - RNA, 19 nt, Human
aggugcuaggaacacuccu

SEQ ID NO: 3111970 - RNA, 23 nt, Human
aggugcuaggaacacuccuucac

SEQ ID NO: 3111971 - RNA, 22 nt, Human
aggucuguucuuuccaaaguac

SEQ ID NO: 3111972 - RNA, 23 nt, Human
aggucuguucuuuccaaaguaca

SEQ ID NO: 3111973 - RNA, 18 nt, Human
aggucuguucuuuccaaa

SEQ ID NO: 3111974 - RNA, 23 nt, Human
aggguuuugccauguuggccagg

SEQ ID NO: 3111975 - RNA, 13 nt, Human
agccccauucugc

SEQ ID NO: 3111976 - RNA, 16 nt, Human
agccccauucugccug

SEQ ID NO: 3111977 - RNA, 21 nt, Human
agcccgggcucugccucccau

SEQ ID NO: 3111978 - RNA, 13 nt, Human
agccccagugccc

SEQ ID NO: 3111979 - RNA, 14 nt, Human
agccccagugccca

SEQ ID NO: 3111980 - RNA, 15 nt, Human
agccccagugcccac

SEQ ID NO: 3111981 - RNA, 20 nt, Human
agccagcaggcucucaggcc

SEQ ID NO: 3111982 - RNA, 17 nt, Human
agccagcaggcucucag

SEQ ID NO: 3111983 - RNA, 19 nt, Human
agccagcaggcucucaggc

SEQ ID NO: 3111984 - RNA, 18 nt, Human
agccagcaggcucucagg

SEQ ID NO: 3111985 - RNA, 22 nt, Human
agccucccacgacugcccggca

SEQ ID NO: 3111986 - RNA, 21 nt, Human
agccucccaaagugcugggau

SEQ ID NO: 3111987 - RNA, 20 nt, Human
agccucccaaagugcuggga

SEQ ID NO: 3111988 - RNA, 14 nt, Human
agccuccuccagcc

SEQ ID NO: 3111989 - RNA, 20 nt, Human
agccucccgaguagcuggga

SEQ ID NO: 3111990 - RNA, 18 nt, Human
agccucccgaguagcugg

SEQ ID NO: 3111991 - RNA, 19 nt, Human
agccucccgaguagcuggg

SEQ ID NO: 3111992 - RNA, 21 nt, Human
agccgccaugcuccuggccca

SEQ ID NO: 3111993 - RNA, 13 nt, Human
agccgcuggggcc

SEQ ID NO: 3111994 - RNA, 13 nt, Human
agcagcguuucua

SEQ ID NO: 3111995 - RNA, 20 nt, Human
agcagugcaugcugucccuu

SEQ ID NO: 3111996 - RNA, 19 nt, Human
agcagugcaugcugucccu

SEQ ID NO: 3111997 - RNA, 18 nt, Human
agcagugcaugcuguccc

SEQ ID NO: 3111998 - RNA, 23 nt, Human
agcacacuugacaucaacugcau

SEQ ID NO: 3111999 - RNA, 17 nt, Human
agcacagacccugcccu

SEQ ID NO: 3112000 - RNA, 20 nt, Human
agcacagacccugcccugug

SEQ ID NO: 3112001 - RNA, 19 nt, Human
agcacagacccugcccugu

SEQ ID NO: 3112002 - RNA, 18 nt, Human
agcacagacccugcccug

SEQ ID NO: 3112003 - RNA, 18 nt, Human
agcauccuggcacccggc

SEQ ID NO: 3112004 - RNA, 22 nt, Human
agcauccuggcacccggccccu

SEQ ID NO: 3112005 - RNA, 23 nt, Human
agcauccuggcacccggccccug

SEQ ID NO: 3112006 - RNA, 23 nt, Human
agcaugccuggauggggcugcac

SEQ ID NO: 3112007 - RNA, 20 nt, Human
agcaugccuggauggggcug

SEQ ID NO: 3112008 - RNA, 23 nt, Human
agccaagugugguagagugugcc

SEQ ID NO: 3112009 - RNA, 19 nt, Human
agacuggaagcacagcuuc

SEQ ID NO: 3112010 - RNA, 17 nt, Human
agacuggaagcacagcu

SEQ ID NO: 3112011 - RNA, 16 nt, Human
agacuggaagcacagc

SEQ ID NO: 3112012 - RNA, 19 nt, Human
agagcccaccuuggcucaa

SEQ ID NO: 3112013 - RNA, 13 nt, Human
agagcccacgccc

SEQ ID NO: 3112014 - RNA, 16 nt, Human
agagcccacgccccca

SEQ ID NO: 3112015 - RNA, 13 nt, Human
agagcccaccuug

SEQ ID NO: 3112016 - RNA, 22 nt, Human
agagaggguggugaccucugcc

SEQ ID NO: 3112017 - RNA, 20 nt, Human
agagaggguggugaccucug

SEQ ID NO: 3112018 - RNA, 21 nt, Human
agagaggguggugaccucugc

SEQ ID NO: 3112019 - RNA, 23 nt, Human
agagagcaagacgcugugcugcc

SEQ ID NO: 3112020 - RNA, 23 nt, Human
agacagagucucacuguugccca

SEQ ID NO: 3112021 - RNA, 15 nt, Human
agacagcccgggcuc

SEQ ID NO: 3112022 - RNA, 14 nt, Human
agacagcccgggcu

SEQ ID NO: 3112023 - RNA, 12 nt, Human
agacagcugccu

SEQ ID NO: 3112024 - RNA, 12 nt, Human
agacagcucuua

SEQ ID NO: 3112025 - RNA, 11 nt, Human
agacagcucuu

SEQ ID NO: 3112026 - RNA, 21 nt, Human
agacgcugugcugcccugccc

SEQ ID NO: 3112027 - RNA, 22 nt, Human
agacgcugugcugcccugccca

SEQ ID NO: 3112028 - RNA, 20 nt, Human
agacgcugugcugcccugcc

SEQ ID NO: 3112029 - RNA, 19 nt, Human
agauauaugcucugcaugu

SEQ ID NO: 3112030 - RNA, 14 nt, Human
agaucuucuguggg

SEQ ID NO: 3112031 - RNA, 14 nt, Human
agagcccaggccuc

SEQ ID NO: 3112032 - RNA, 13 nt, Human
agagcccaggccu

SEQ ID NO: 3112033 - RNA, 15 nt, Human
agagcccaggccucc

SEQ ID NO: 3112034 - RNA, 16 nt, Human
agaggaaggagaggag

SEQ ID NO: 3112035 - RNA, 21 nt, Human
agaggaaaucaccgaaaacgu

SEQ ID NO: 3112036 - RNA, 23 nt, Human
agaggacuuuucuuuguggcuuc

SEQ ID NO: 3112037 - RNA, 16 nt, Human
agaggagagaggaccc

SEQ ID NO: 3112038 - RNA, 15 nt, Human
agaggagagaggacc

SEQ ID NO: 3112039 - RNA, 11 nt, Human
agagugggagc

SEQ ID NO: 3112040 - RNA, 19 nt, Human
agaguggggauaugauuua

SEQ ID NO: 3112041 - RNA, 14 nt, Human
agagugugccugaa

SEQ ID NO: 3112042 - RNA, 19 nt, Human
agaggguggugaccucugc

SEQ ID NO: 3112043 - RNA, 20 nt, Human
agaggguggugaccucugcc

SEQ ID NO: 3112044 - RNA, 22 nt, Human
agaggguggugaccucugccug

SEQ ID NO: 3112045 - RNA, 12 nt, Human
agagggcacaga

SEQ ID NO: 3112046 - RNA, 23 nt, Human
augaccuuucaauaggaaaaacu

SEQ ID NO: 3112047 - RNA, 22 nt, Human
augaccuuucaauaggaaaaac

SEQ ID NO: 3112048 - RNA, 18 nt, Human
augaccuuucaauaggaa

SEQ ID NO: 3112049 - RNA, 21 nt, Human
augaccuuucaauaggaaaaa

SEQ ID NO: 3112050 - RNA, 13 nt, Human
augaaagacugua

SEQ ID NO: 3112051 - RNA, 16 nt, Human
augaaagacuguacaa

SEQ ID NO: 3112052 - RNA, 17 nt, Human
augaaagacuguacaaa

SEQ ID NO: 3112053 - RNA, 22 nt, Human
aucugcuuuuuaaagaaugcuc

SEQ ID NO: 3112054 - RNA, 21 nt, Human
aucucccccagccccauccuc

SEQ ID NO: 3112055 - RNA, 14 nt, Human
aucuucuuuauaau

SEQ ID NO: 3112056 - RNA, 18 nt, Human
aucuugaagacuuuucuu

SEQ ID NO: 3112057 - RNA, 22 nt, Human
aucuucugaacuuggcgcugcc

SEQ ID NO: 3112058 - RNA, 20 nt, Human
auccucccaccucagccucc

SEQ ID NO: 3112059 - RNA, 18 nt, Human
auccucccaccucagccu

SEQ ID NO: 3112060 - RNA, 19 nt, Human
auccucccaccucagccuc

SEQ ID NO: 3112061 - RNA, 15 nt, Human
auccccuguagagug

SEQ ID NO: 3112062 - RNA, 15 nt, Human
auccucccaccucag

SEQ ID NO: 3112063 - RNA, 23 nt, Human
auccuccaggugcacaagcucca

SEQ ID NO: 3112064 - RNA, 23 nt, Human
auccucauacccacccccaccca

SEQ ID NO: 3112065 - RNA, 11 nt, Human
auccuccaggu

SEQ ID NO: 3112066 - RNA, 15 nt, Human
aucccauuuaaaaaa

SEQ ID NO: 3112067 - RNA, 14 nt, Human
aucccauuuaaaaa

SEQ ID NO: 3112068 - RNA, 15 nt, Human
auccagacccggcug

SEQ ID NO: 3112069 - RNA, 13 nt, Human
aucacagccucug

SEQ ID NO: 3112070 - RNA, 21 nt, Human
aucacagccucugaaaaccaa

SEQ ID NO: 3112071 - RNA, 18 nt, Human
aucaccaacgucugugcc

SEQ ID NO: 3112072 - RNA, 23 nt, Human
aucacccgcuaagagggagggag

SEQ ID NO: 3112073 - RNA, 19 nt, Human
aucaccaacgucugugcca

SEQ ID NO: 3112074 - RNA, 23 nt, Human
aucagcacgauuucuguuuagau

SEQ ID NO: 3112075 - RNA, 19 nt, Human
aucagcacgauuucuguuu

SEQ ID NO: 3112076 - RNA, 20 nt, Human
aucagcacgauuucuguuua

SEQ ID NO: 3112077 - RNA, 14 nt, Human
aucaccgaaaacgu

SEQ ID NO: 3112078 - RNA, 21 nt, Human
aucaccgaaaacguggcugcu

SEQ ID NO: 3112079 - RNA, 19 nt, Human
aucaccgaaaacguggcug

SEQ ID NO: 3112080 - RNA, 18 nt, Human
aucagccugcuccagcug

SEQ ID NO: 3112081 - RNA, 17 nt, Human
aucagccugcuccagcu

SEQ ID NO: 3112082 - RNA, 19 nt, Human
aucagccugcuccagcugu

SEQ ID NO: 3112083 - RNA, 11 nt, Human
augcugcccug

SEQ ID NO: 3112084 - RNA, 16 nt, Human
augcucuuuacuucau

SEQ ID NO: 3112085 - RNA, 12 nt, Human
augcuuguacau

SEQ ID NO: 3112086 - RNA, 13 nt, Human
augcuuguacaua

SEQ ID NO: 3112087 - RNA, 14 nt, Human
augcuuguacauaa

SEQ ID NO: 3112088 - RNA, 15 nt, Human
auggauuuccagcca

SEQ ID NO: 3112089 - RNA, 15 nt, Human
augcacaaacagagg

SEQ ID NO: 3112090 - RNA, 24 nt, Human
augauguuuuccaugaguccccug

SEQ ID NO: 3112091 - RNA, 17 nt, Human
augaugccaugaggaac

SEQ ID NO: 3112092 - RNA, 16 nt, Human
augaugccaugaggaa

SEQ ID NO: 3112093 - RNA, 23 nt, Human
augcacacauuuuuuaaaugcac

SEQ ID NO: 3112094 - RNA, 16 nt, Human
augcacagaguuguua

SEQ ID NO: 3112095 - RNA, 17 nt, Human
augcacaaacagaggcc

SEQ ID NO: 3112096 - RNA, 16 nt, Human
augcacaaacagaggc

SEQ ID NO: 3112097 - RNA, 17 nt, Human
augcacagaguuguuac

SEQ ID NO: 3112098 - RNA, 19 nt, Human
augccucucucaggccaaa

SEQ ID NO: 3112099 - RNA, 16 nt, Human
augcaugaaguaauau

SEQ ID NO: 3112100 - RNA, 17 nt, Human
augccucucucaggcca

SEQ ID NO: 3112101 - RNA, 19 nt, Human
auggucaccaaaucagcug

SEQ ID NO: 3112102 - RNA, 15 nt, Human
auguaauuaaguacu

SEQ ID NO: 3112103 - RNA, 17 nt, Human
auguaauuaaguacuau

SEQ ID NO: 3112104 - RNA, 14 nt, Human
augucuuuucuugc

SEQ ID NO: 3112105 - RNA, 22 nt, Human
augugaaacuggauuaaacuua

SEQ ID NO: 3112106 - RNA, 11 nt, Human
auguucuggga

SEQ ID NO: 3112107 - RNA, 12 nt, Human
auguucugggac

SEQ ID NO: 3112108 - RNA, 19 nt, Human
auguuugccucugccucug

SEQ ID NO: 3112109 - RNA, 22 nt, Human
auguuugccucugccucugaca

SEQ ID NO: 3112110 - RNA, 18 nt, Human
auguuugccucugccucu

SEQ ID NO: 3112111 - RNA, 13 nt, Human
auguucugggaca

SEQ ID NO: 3112112 - RNA, 15 nt, Human
auaaaacuuuuuaaa

SEQ ID NO: 3112113 - RNA, 11 nt, Human
auaaaacuuuu

SEQ ID NO: 3112114 - RNA, 17 nt, Human
auaaaacuuuuuaaaau

SEQ ID NO: 3112115 - RNA, 21 nt, Human
auaaacuuuaccuuuuuuaua

SEQ ID NO: 3112116 - RNA, 16 nt, Human
auaaacuuuaccuuuu

SEQ ID NO: 3112117 - RNA, 24 nt, Human
auaaacuuuaccuuuuuuauacau

SEQ ID NO: 3112118 - RNA, 13 nt, Human
auaaagcagcguu

SEQ ID NO: 3112119 - RNA, 14 nt, Human
auaaagcagcguuu

SEQ ID NO: 3112120 - RNA, 18 nt, Human
auaaagcagcguuucuau

SEQ ID NO: 3112121 - RNA, 19 nt, Human
auaaagcagcguuucuaug

SEQ ID NO: 3112122 - RNA, 20 nt, Human
auaaagcagcguuucuauga

SEQ ID NO: 3112123 - RNA, 17 nt, Human
auaccugucccccugac

SEQ ID NO: 3112124 - RNA, 18 nt, Human
auaccugucccccugaca

SEQ ID NO: 3112125 - RNA, 11 nt, Human
auacccacccc

SEQ ID NO: 3112126 - RNA, 12 nt, Human
auacccaccccc

SEQ ID NO: 3112127 - RNA, 14 nt, Human
auaauguaagcucu

SEQ ID NO: 3112128 - RNA, 21 nt, Human
auaaugcgugcauaccacuuu

SEQ ID NO: 3112129 - RNA, 20 nt, Human
auaaugcgugcauaccacuu

SEQ ID NO: 3112130 - RNA, 21 nt, Human
auacaccacuacauucuguua

SEQ ID NO: 3112131 - RNA, 19 nt, Human
auacaccacuacauucugu

SEQ ID NO: 3112132 - RNA, 20 nt, Human
auacaccacuacauucuguu

SEQ ID NO: 3112133 - RNA, 18 nt, Human
auacaccacuacauucug

SEQ ID NO: 3112134 - RNA, 15 nt, Human
auaauguaagcucua

SEQ ID NO: 3112135 - RNA, 21 nt, Human
auagccaaggccaaaggaagc

SEQ ID NO: 3112136 - RNA, 15 nt, Human
auagccaaggccaaa

SEQ ID NO: 3112137 - RNA, 17 nt, Human
auaguaugguggcuggg

SEQ ID NO: 3112138 - RNA, 18 nt, Human
auaguaugguggcugggu

SEQ ID NO: 3112139 - RNA, 19 nt, Human
auauuaccacagacauacu

SEQ ID NO: 3112140 - RNA, 22 nt, Human
auauuaccacagacauacuaac

SEQ ID NO: 3112141 - RNA, 21 nt, Human
auaugcuuauacacuuacacu

SEQ ID NO: 3112142 - RNA, 19 nt, Human
auauuuacuucuuauacau

SEQ ID NO: 3112143 - RNA, 15 nt, Human
agugggagcugccug

SEQ ID NO: 3112144 - RNA, 14 nt, Human
agugggagcugccu

SEQ ID NO: 3112145 - RNA, 17 nt, Human
aguguauuuuuuuacua

SEQ ID NO: 3112146 - RNA, 18 nt, Human
aguguauuuuuuuacuaa

SEQ ID NO: 3112147 - RNA, 23 nt, Human
aguggcuuaaaacaacacucaca

SEQ ID NO: 3112148 - RNA, 12 nt, Human
aguuaaauaaau

SEQ ID NO: 3112149 - RNA, 18 nt, Human
aguuacacuaaaagguga

SEQ ID NO: 3112150 - RNA, 16 nt, Human
aguuacagacaaagcg

SEQ ID NO: 3112151 - RNA, 14 nt, Human
aguuacagacaaag

SEQ ID NO: 3112152 - RNA, 22 nt, Human
aguucaucuugaauuguaagga

SEQ ID NO: 3112153 - RNA, 20 nt, Human
aguucagguaacaggcagau

SEQ ID NO: 3112154 - RNA, 18 nt, Human
aguucagguaacaggcag

SEQ ID NO: 3112155 - RNA, 19 nt, Human
aguucagguaacaggcaga

SEQ ID NO: 3112156 - RNA, 20 nt, Human
aguuguuugauucagacagc

SEQ ID NO: 3112157 - RNA, 14 nt, Human
aguugaagacagag

SEQ ID NO: 3112158 - RNA, 15 nt, Human
aguaucucagggccu

SEQ ID NO: 3112159 - RNA, 15 nt, Human
aguaucuugaagacu

SEQ ID NO: 3112160 - RNA, 12 nt, Human
aguaucuugaag

SEQ ID NO: 3112161 - RNA, 11 nt, Human
aguaucuugaa

SEQ ID NO: 3112162 - RNA, 15 nt, Human
aguaugaggcauuug

SEQ ID NO: 3112163 - RNA, 16 nt, Human
aguaugaggcauuugu

SEQ ID NO: 3112164 - RNA, 14 nt, Human
agugaagacaauga

SEQ ID NO: 3112165 - RNA, 16 nt, Human
agugaagacaaugacu

SEQ ID NO: 3112166 - RNA, 16 nt, Human
agucugauucccaagc

SEQ ID NO: 3112167 - RNA, 18 nt, Human
agucugauucccaagcuc

SEQ ID NO: 3112168 - RNA, 17 nt, Human
agucuggaaugcagugg

SEQ ID NO: 3112169 - RNA, 20 nt, Human
agugaacuugggccacugug

SEQ ID NO: 3112170 - RNA, 22 nt, Human
aguccuggcaugggaaugaaug

SEQ ID NO: 3112171 - RNA, 21 nt, Human
aguccuggcaugggaaugaau

SEQ ID NO: 3112172 - RNA, 20 nt, Human
aguccuggcaugggaaugaa

SEQ ID NO: 3112173 - RNA, 15 nt, Human
agucugaaggcuggg

SEQ ID NO: 3112174 - RNA, 13 nt, Human
agucugaaggcug

SEQ ID NO: 3112175 - RNA, 16 nt, Human
agucugaaggcugggu

SEQ ID NO: 3112176 - RNA, 12 nt, Human
agucugaaggcu

SEQ ID NO: 3112177 - RNA, 17 nt, Human
caccccggccaccugcg

SEQ ID NO: 3112178 - RNA, 16 nt, Human
caccccggccaccugc

SEQ ID NO: 3112179 - RNA, 15 nt, Human
caccccggccaccug

SEQ ID NO: 3112180 - RNA, 14 nt, Human
caccccggccaccu

SEQ ID NO: 3112181 - RNA, 22 nt, Human
cacccccacccaagggccuggc

SEQ ID NO: 3112182 - RNA, 13 nt, Human
caccccagcccca

SEQ ID NO: 3112183 - RNA, 12 nt, Human
caccccagcccc

SEQ ID NO: 3112184 - RNA, 12 nt, Human
cacccaccucag

SEQ ID NO: 3112185 - RNA, 13 nt, Human
cacccaccucagc

SEQ ID NO: 3112186 - RNA, 14 nt, Human
cacccaccucagcc

SEQ ID NO: 3112187 - RNA, 16 nt, Human
cacccaccucagccuc

SEQ ID NO: 3112188 - RNA, 20 nt, Human
cacccaccaucaugucuggc

SEQ ID NO: 3112189 - RNA, 22 nt, Human
cacccaccaucaugucuggcua

SEQ ID NO: 3112190 - RNA, 23 nt, Human
cacccaagggccuggccugagcu

SEQ ID NO: 3112191 - RNA, 21 nt, Human
cacccaagggccuggccugag

SEQ ID NO: 3112192 - RNA, 20 nt, Human
cacccaagggccuggccuga

SEQ ID NO: 3112193 - RNA, 19 nt, Human
cacccaagggccuggccug

SEQ ID NO: 3112194 - RNA, 18 nt, Human
cacccaagggccuggccu

SEQ ID NO: 3112195 - RNA, 17 nt, Human
cacccaagggccuggcc

SEQ ID NO: 3112196 - RNA, 16 nt, Human
cacccaagggccuggc

SEQ ID NO: 3112197 - RNA, 21 nt, Human
cacacuugacaucaacugcau

SEQ ID NO: 3112198 - RNA, 22 nt, Human
cacagacccugcccugugggcc

SEQ ID NO: 3112199 - RNA, 16 nt, Human
cacagaguuguuacau

SEQ ID NO: 3112200 - RNA, 17 nt, Human
cacagaguuguuacauu

SEQ ID NO: 3112201 - RNA, 21 nt, Human
cacagagaaaguacuucucca

SEQ ID NO: 3112202 - RNA, 15 nt, Human
cacaccagagcccac

SEQ ID NO: 3112203 - RNA, 12 nt, Human
cacaccagagcc

SEQ ID NO: 3112204 - RNA, 13 nt, Human
cacaccagagccc

SEQ ID NO: 3112205 - RNA, 19 nt, Human
cacacagaggcugccucuc

SEQ ID NO: 3112206 - RNA, 12 nt, Human
cacacagcucug

SEQ ID NO: 3112207 - RNA, 14 nt, Human
cacacaccagagcc

SEQ ID NO: 3112208 - RNA, 18 nt, Human
caauaggaaaaacugauu

SEQ ID NO: 3112209 - RNA, 20 nt, Human
caauaggaaaaacugauuuu

SEQ ID NO: 3112210 - RNA, 21 nt, Human
caauaggaaaaacugauuuuu

SEQ ID NO: 3112211 - RNA, 18 nt, Human
caaugcaaaccaucauug

SEQ ID NO: 3112212 - RNA, 17 nt, Human
caaugcaaaccaucauu

SEQ ID NO: 3112213 - RNA, 14 nt, Human
caaugcaaaccauc

SEQ ID NO: 3112214 - RNA, 23 nt, Human
caaugcacuuuguucuggcucuu

SEQ ID NO: 3112215 - RNA, 22 nt, Human
caaugcacuuuguucuggcucu

SEQ ID NO: 3112216 - RNA, 19 nt, Human
caaugcaaaccaucauuga

SEQ ID NO: 3112217 - RNA, 16 nt, Human
cacaaaaguuucucuu

SEQ ID NO: 3112218 - RNA, 18 nt, Human
cacaaaaguuucucuuuu

SEQ ID NO: 3112219 - RNA, 20 nt, Human
cacagaguuguuacauuuuu

SEQ ID NO: 3112220 - RNA, 18 nt, Human
cacagaugggugcuugga

SEQ ID NO: 3112221 - RNA, 14 nt, Human
cacagaugggugcu

SEQ ID NO: 3112222 - RNA, 20 nt, Human
cacagaugggugcuuggagg

SEQ ID NO: 3112223 - RNA, 16 nt, Human
cacaggcccggcucca

SEQ ID NO: 3112224 - RNA, 17 nt, Human
cacaggcccggcuccag

SEQ ID NO: 3112225 - RNA, 18 nt, Human
cacaggcccggcuccagg

SEQ ID NO: 3112226 - RNA, 19 nt, Human
cacaggcccggcuccaggc

SEQ ID NO: 3112227 - RNA, 10 nt, Human
cacaggcagg

SEQ ID NO: 3112228 - RNA, 12 nt, Human
cacaggaucagu

SEQ ID NO: 3112229 - RNA, 15 nt, Human
cacaggaucagucug

SEQ ID NO: 3112230 - RNA, 16 nt, Human
cacaggaucagucuga

SEQ ID NO: 3112231 - RNA, 19 nt, Human
cacagugagucgaggacag

SEQ ID NO: 3112232 - RNA, 20 nt, Human
cacagugagucgaggacagg

SEQ ID NO: 3112233 - RNA, 18 nt, Human
cacagugagucgaggaca

SEQ ID NO: 3112234 - RNA, 20 nt, Human
cacaggcccggcuccaggcu

SEQ ID NO: 3112235 - RNA, 23 nt, Human
cacaggcccggcuccaggcuccu

SEQ ID NO: 3112236 - RNA, 17 nt, Human
cacauacacacacacgc

SEQ ID NO: 3112237 - RNA, 19 nt, Human
caccacaugugcacaugca

SEQ ID NO: 3112238 - RNA, 15 nt, Human
caccacaugugcaca

SEQ ID NO: 3112239 - RNA, 18 nt, Human
caccacaugugcacaugc

SEQ ID NO: 3112240 - RNA, 19 nt, Human
caccacuacauucuguuaa

SEQ ID NO: 3112241 - RNA, 20 nt, Human
caccacuacauucuguuaau

SEQ ID NO: 3112242 - RNA, 14 nt, Human
caccaccucuuugg

SEQ ID NO: 3112243 - RNA, 16 nt, Human
caccacuacauucugu

SEQ ID NO: 3112244 - RNA, 17 nt, Human
caccacuacauucuguu

SEQ ID NO: 3112245 - RNA, 18 nt, Human
caccacuacauucuguua

SEQ ID NO: 3112246 - RNA, 15 nt, Human
caccaagcccaguua

SEQ ID NO: 3112247 - RNA, 13 nt, Human
caccacacccagc

SEQ ID NO: 3112248 - RNA, 15 nt, Human
caccacacccagccc

SEQ ID NO: 3112249 - RNA, 16 nt, Human
cacauuccugaugcuu

SEQ ID NO: 3112250 - RNA, 17 nt, Human
cacaugugcacaugcac

SEQ ID NO: 3112251 - RNA, 14 nt, Human
cacaugugcacaug

SEQ ID NO: 3112252 - RNA, 15 nt, Human
cacaugugcacaugc

SEQ ID NO: 3112253 - RNA, 20 nt, Human
cacauauugauuuccguuaa

SEQ ID NO: 3112254 - RNA, 12 nt, Human
cacauaucuguc

SEQ ID NO: 3112255 - RNA, 18 nt, Human
cacaucagcacgauuucu

SEQ ID NO: 3112256 - RNA, 18 nt, Human
cacaugccucucucaggc

SEQ ID NO: 3112257 - RNA, 17 nt, Human
cacaugccucucucagg

SEQ ID NO: 3112258 - RNA, 13 nt, Human
cacaugccucucu

SEQ ID NO: 3112259 - RNA, 19 nt, Human
cacaugccucucucaggcc

SEQ ID NO: 3112260 - RNA, 23 nt, Human
cacauguccaagaagcccaggaa

SEQ ID NO: 3112261 - RNA, 22 nt, Human
caaauucugcuugcuugcuuuu

SEQ ID NO: 3112262 - RNA, 16 nt, Human
caaaucagcugcuacu

SEQ ID NO: 3112263 - RNA, 13 nt, Human
caaaucagcugcu

SEQ ID NO: 3112264 - RNA, 21 nt, Human
caaaggaugcccaaagaugca

SEQ ID NO: 3112265 - RNA, 16 nt, Human
caaagcuuguuaagau

SEQ ID NO: 3112266 - RNA, 16 nt, Human
caaagcuaggccuggc

SEQ ID NO: 3112267 - RNA, 17 nt, Human
caaagcuaggccuggcc

SEQ ID NO: 3112268 - RNA, 20 nt, Human
caaagccaaagcuaggccug

SEQ ID NO: 3112269 - RNA, 21 nt, Human
caaagccaaagcuaggccugg

SEQ ID NO: 3112270 - RNA, 15 nt, Human
caaagcuaggccugg

SEQ ID NO: 3112271 - RNA, 18 nt, Human
auuuuuuuacuaauagac

SEQ ID NO: 3112272 - RNA, 15 nt, Human
caaggauugcuacug

SEQ ID NO: 3112273 - RNA, 16 nt, Human
caagggccuggccuga

SEQ ID NO: 3112274 - RNA, 19 nt, Human
caagggccuggccugagcu

SEQ ID NO: 3112275 - RNA, 12 nt, Human
caaggugggagg

SEQ ID NO: 3112276 - RNA, 23 nt, Human
caaggugggaggauugcuugagc

SEQ ID NO: 3112277 - RNA, 22 nt, Human
caagugugguagagugugccug

SEQ ID NO: 3112278 - RNA, 22 nt, Human
caagugauucuccugccucagc

SEQ ID NO: 3112279 - RNA, 21 nt, Human
caagugauucuccugccucag

SEQ ID NO: 3112280 - RNA, 19 nt, Human
caagugaaaaaggaggaag

SEQ ID NO: 3112281 - RNA, 16 nt, Human
caagugauucuccugc

SEQ ID NO: 3112282 - RNA, 17 nt, Human
caagugauucuccugcc

SEQ ID NO: 3112283 - RNA, 17 nt, Human
caagcgugagccacugc

SEQ ID NO: 3112284 - RNA, 22 nt, Human
caaggauccugagccagauuuc

SEQ ID NO: 3112285 - RNA, 21 nt, Human
caaggaugaucuaggaagacu

SEQ ID NO: 3112286 - RNA, 13 nt, Human
caaggauccugag

SEQ ID NO: 3112287 - RNA, 16 nt, Human
caagcgugagccacug

SEQ ID NO: 3112288 - RNA, 21 nt, Human
caagccaccaacauacuccca

SEQ ID NO: 3112289 - RNA, 18 nt, Human
caagcaccuccugccucg

SEQ ID NO: 3112290 - RNA, 19 nt, Human
caacucuccuccagaguca

SEQ ID NO: 3112291 - RNA, 16 nt, Human
caaccugauugugucu

SEQ ID NO: 3112292 - RNA, 15 nt, Human
caacccucaucacca

SEQ ID NO: 3112293 - RNA, 12 nt, Human
caacccucauca

SEQ ID NO: 3112294 - RNA, 16 nt, Human
caacugcauuggcuuu

SEQ ID NO: 3112295 - RNA, 20 nt, Human
caacucuccuccagagucag

SEQ ID NO: 3112296 - RNA, 21 nt, Human
caaccccuucgcuccuguguc

SEQ ID NO: 3112297 - RNA, 18 nt, Human
caaccccuucgcuccugu

SEQ ID NO: 3112298 - RNA, 19 nt, Human
caaccccuucgcuccugug

SEQ ID NO: 3112299 - RNA, 22 nt, Human
caacaucuuggucagauuugaa

SEQ ID NO: 3112300 - RNA, 15 nt, Human
caacagguuuuccug

SEQ ID NO: 3112301 - RNA, 18 nt, Human
caacaggguuuuuuucca

SEQ ID NO: 3112302 - RNA, 19 nt, Human
caacagguuuuccugaaga

SEQ ID NO: 3112303 - RNA, 24 nt, Human
caacaggcugggcuucaguggcag

SEQ ID NO: 3112304 - RNA, 23 nt, Human
caacaggcugggcuucaguggca

SEQ ID NO: 3112305 - RNA, 23 nt, Human
uugcagacaggcaagcaccuccu

SEQ ID NO: 3112306 - RNA, 22 nt, Human
uugcagacaggcaagcaccucc

SEQ ID NO: 3112307 - RNA, 17 nt, Human
uugauucauaaugacuu

SEQ ID NO: 3112308 - RNA, 13 nt, Human
uugauucauaaug

SEQ ID NO: 3112309 - RNA, 16 nt, Human
uugccauguuggccag

SEQ ID NO: 3112310 - RNA, 17 nt, Human
uugccauguuggccagg

SEQ ID NO: 3112311 - RNA, 18 nt, Human
uugccauguuggccaggc

SEQ ID NO: 3112312 - RNA, 19 nt, Human
uugccauguuggccaggcu

SEQ ID NO: 3112313 - RNA, 19 nt, Human
uugagccuugaacuuugac

SEQ ID NO: 3112314 - RNA, 15 nt, Human
uugagccuugaacuu

SEQ ID NO: 3112315 - RNA, 16 nt, Human
uugagccuugaacuuu

SEQ ID NO: 3112316 - RNA, 14 nt, Human
uugagccuugaacu

SEQ ID NO: 3112317 - RNA, 14 nt, Human
uugagccugggagg

SEQ ID NO: 3112318 - RNA, 16 nt, Human
uugauaugcuuauaca

SEQ ID NO: 3112319 - RNA, 21 nt, Human
uugauucagacagcugccugg

SEQ ID NO: 3112320 - RNA, 17 nt, Human
uugauucagacagcugc

SEQ ID NO: 3112321 - RNA, 23 nt, Human
uugauucagacagcugccuggga

SEQ ID NO: 3112322 - RNA, 16 nt, Human
uugauucagcucugca

SEQ ID NO: 3112323 - RNA, 13 nt, Human
uucuucagagacu

SEQ ID NO: 3112324 - RNA, 17 nt, Human
uucuuagggaaggauac

SEQ ID NO: 3112325 - RNA, 20 nt, Human
uucuggcagaguugaagaca

SEQ ID NO: 3112326 - RNA, 13 nt, Human
uugaacuuugacc

SEQ ID NO: 3112327 - RNA, 17 nt, Human
uugaacuuugaccucug

SEQ ID NO: 3112328 - RNA, 18 nt, Human
uugaacuuugaccucugc

SEQ ID NO: 3112329 - RNA, 16 nt, Human
uugaaugaugccauga

SEQ ID NO: 3112330 - RNA, 12 nt, Human
uugaaugaugcc

SEQ ID NO: 3112331 - RNA, 21 nt, Human
uucuuuccugaggcugggcuc

SEQ ID NO: 3112332 - RNA, 15 nt, Human
uugaacuuugaccuc

SEQ ID NO: 3112333 - RNA, 20 nt, Human
uuguauuuuacuaauaaaau

SEQ ID NO: 3112334 - RNA, 14 nt, Human
uugucuaugggacu

SEQ ID NO: 3112335 - RNA, 22 nt, Human
uugucaaaguggugagaggcau

SEQ ID NO: 3112336 - RNA, 22 nt, Human
uugucuuaaaaaguggaaaaau

SEQ ID NO: 3112337 - RNA, 20 nt, Human
uugucuaugggacucaaugc

SEQ ID NO: 3112338 - RNA, 13 nt, Human
uugguccugcugc

SEQ ID NO: 3112339 - RNA, 20 nt, Human
uuggucugacccacugcuuu

SEQ ID NO: 3112340 - RNA, 23 nt, Human
uuggcuucacggaagagccuugc

SEQ ID NO: 3112341 - RNA, 16 nt, Human
uugcugcuugaggcaa

SEQ ID NO: 3112342 - RNA, 14 nt, Human
uugcugcuugaggc

SEQ ID NO: 3112343 - RNA, 16 nt, Human
uugcugucccuuuucc

SEQ ID NO: 3112344 - RNA, 18 nt, Human
uugcugucccuuuuccuu

SEQ ID NO: 3112345 - RNA, 20 nt, Human
uugccauguuggccaggcug

SEQ ID NO: 3112346 - RNA, 21 nt, Human
uugccauguuggccaggcugg

SEQ ID NO: 3112347 - RNA, 19 nt, Human
uuggaagcuccgcuuucua

SEQ ID NO: 3112348 - RNA, 21 nt, Human
uuggacccugaggcccagagg

SEQ ID NO: 3112349 - RNA, 19 nt, Human
uuggacccugaggcccaga

SEQ ID NO: 3112350 - RNA, 18 nt, Human
uuggacccugaggcccag

SEQ ID NO: 3112351 - RNA, 15 nt, Human
uuggacccugaggcc

SEQ ID NO: 3112352 - RNA, 15 nt, Human
uuggauuguccccga

SEQ ID NO: 3112353 - RNA, 14 nt, Human
uuggauuguccccg

SEQ ID NO: 3112354 - RNA, 17 nt, Human
uuucagccaagaauucu

SEQ ID NO: 3112355 - RNA, 16 nt, Human
uuucagccaagaauuc

SEQ ID NO: 3112356 - RNA, 22 nt, Human
uuucuacccagcgagcccuggu

SEQ ID NO: 3112357 - RNA, 15 nt, Human
uuucuacccagcgag

SEQ ID NO: 3112358 - RNA, 18 nt, Human
uuucuacccagcgagccc

SEQ ID NO: 3112359 - RNA, 23 nt, Human
uuuccuggcacugcuuccaguga

SEQ ID NO: 3112360 - RNA, 19 nt, Human
uuuccuggcacugcuucca

SEQ ID NO: 3112361 - RNA, 19 nt, Human
uuucuaaaucuccaaaaua

SEQ ID NO: 3112362 - RNA, 13 nt, Human
uuuggacccugag

SEQ ID NO: 3112363 - RNA, 19 nt, Human
uuuggacccugaggcccag

SEQ ID NO: 3112364 - RNA, 15 nt, Human
uuuggacccugaggc

SEQ ID NO: 3112365 - RNA, 19 nt, Human
uuucuuguguguuuauugu

SEQ ID NO: 3112366 - RNA, 17 nt, Human
uuugagaucagccuggg

SEQ ID NO: 3112367 - RNA, 16 nt, Human
uuugagaucagccugg

SEQ ID NO: 3112368 - RNA, 14 nt, Human
uuuaacagaaaugu

SEQ ID NO: 3112369 - RNA, 15 nt, Human
uuuaacagaaaugua

SEQ ID NO: 3112370 - RNA, 18 nt, Human
uuuauaaacuuuaccuuu

SEQ ID NO: 3112371 - RNA, 19 nt, Human
uuuagacccuauugcugcu

SEQ ID NO: 3112372 - RNA, 22 nt, Human
uuuagacccuauugcugcuuga

SEQ ID NO: 3112373 - RNA, 12 nt, Human
uuuauacauaaa

SEQ ID NO: 3112374 - RNA, 20 nt, Human
uuuauacauaaacaagacca

SEQ ID NO: 3112375 - RNA, 20 nt, Human
uuguuuggggaugagaaagg

SEQ ID NO: 3112376 - RNA, 24 nt, Human
uugucuuuggacccugaggcccag

SEQ ID NO: 3112377 - RNA, 20 nt, Human
uugucuuuggacccugaggc

SEQ ID NO: 3112378 - RNA, 15 nt, Human
uugucuuuggacccu

SEQ ID NO: 3112379 - RNA, 13 nt, Human
uuuaaaagauaca

SEQ ID NO: 3112380 - RNA, 13 nt, Human
uuuaacagaaaug

SEQ ID NO: 3112381 - RNA, 15 nt, Human
uuauugcccacgcug

SEQ ID NO: 3112382 - RNA, 11 nt, Human
uuauucugcuc

SEQ ID NO: 3112383 - RNA, 23 nt, Human
uuauuaaaaaucucaaauuucua

SEQ ID NO: 3112384 - RNA, 16 nt, Human
uuaugcaugaaguaau

SEQ ID NO: 3112385 - RNA, 22 nt, Human
uuaugcaugaaguaauaugcac

SEQ ID NO: 3112386 - RNA, 14 nt, Human
uuauggcacaucag

SEQ ID NO: 3112387 - RNA, 17 nt, Human
uuaucuagauacuguau

SEQ ID NO: 3112388 - RNA, 14 nt, Human
uuaucuagauacug

SEQ ID NO: 3112389 - RNA, 16 nt, Human
uuaucuagauacugua

SEQ ID NO: 3112390 - RNA, 14 nt, Human
uuaguuccuugagu

SEQ ID NO: 3112391 - RNA, 16 nt, Human
uuaguuccucauuagc

SEQ ID NO: 3112392 - RNA, 18 nt, Human
uucaauaggaaaaacuga

SEQ ID NO: 3112393 - RNA, 15 nt, Human
uucaauaggaaaaac

SEQ ID NO: 3112394 - RNA, 13 nt, Human
uucaauaggaaaa

SEQ ID NO: 3112395 - RNA, 18 nt, Human
uucacggaagagccuugc

SEQ ID NO: 3112396 - RNA, 15 nt, Human
uucacgugguccuaa

SEQ ID NO: 3112397 - RNA, 13 nt, Human
uucacucuccuug

SEQ ID NO: 3112398 - RNA, 19 nt, Human
uucagagacuccugcaggc

SEQ ID NO: 3112399 - RNA, 21 nt, Human
uucagacagcugccugggauc

SEQ ID NO: 3112400 - RNA, 17 nt, Human
uuauugucaaaguggug

SEQ ID NO: 3112401 - RNA, 18 nt, Human
uuauugucaaagugguga

SEQ ID NO: 3112402 - RNA, 17 nt, Human
uuauuuuaauucaguug

SEQ ID NO: 3112403 - RNA, 16 nt, Human
uuccccaggaggccag

SEQ ID NO: 3112404 - RNA, 15 nt, Human
uuccccaggaggcca

SEQ ID NO: 3112405 - RNA, 16 nt, Human
uucccauuugcuccuu

SEQ ID NO: 3112406 - RNA, 11 nt, Human
uucccucccuu

SEQ ID NO: 3112407 - RNA, 17 nt, Human
uucccucccuuccucuu

SEQ ID NO: 3112408 - RNA, 20 nt, Human
uucccucccuuccucuuucc

SEQ ID NO: 3112409 - RNA, 21 nt, Human
uuccccaggaggccagccuug

SEQ ID NO: 3112410 - RNA, 20 nt, Human
uuccccaggaggccagccuu

SEQ ID NO: 3112411 - RNA, 19 nt, Human
uuccccaggaggccagccu

SEQ ID NO: 3112412 - RNA, 18 nt, Human
uuccccaggaggccagcc

SEQ ID NO: 3112413 - RNA, 17 nt, Human
uuccccaggaggccagc

SEQ ID NO: 3112414 - RNA, 21 nt, Human
uucaucuugaauuguaaggaa

SEQ ID NO: 3112415 - RNA, 17 nt, Human
uucaucuugaauuguaa

SEQ ID NO: 3112416 - RNA, 13 nt, Human
uucaggaagcuca

SEQ ID NO: 3112417 - RNA, 11 nt, Human
uucaggaagcu

SEQ ID NO: 3112418 - RNA, 15 nt, Human
uucauuuccuguguc

SEQ ID NO: 3112419 - RNA, 16 nt, Human
uucauuuccugugucu

SEQ ID NO: 3112420 - RNA, 15 nt, Human
uuccaaauucugcuu

SEQ ID NO: 3112421 - RNA, 14 nt, Human
uuccuggcacugcu

SEQ ID NO: 3112422 - RNA, 17 nt, Human
uuccugccaggcauggu

SEQ ID NO: 3112423 - RNA, 15 nt, Human
uuccugaugcuucuu

SEQ ID NO: 3112424 - RNA, 19 nt, Human
uuccugaugcuucuucaga

SEQ ID NO: 3112425 - RNA, 18 nt, Human
uuccugaugcuucuucag

SEQ ID NO: 3112426 - RNA, 17 nt, Human
uucuaaagcugccagcc

SEQ ID NO: 3112427 - RNA, 13 nt, Human
uucuaaagcugcc

SEQ ID NO: 3112428 - RNA, 20 nt, Human
uucgggaggucgaggcagga

SEQ ID NO: 3112429 - RNA, 13 nt, Human
uuccucauuagca

SEQ ID NO: 3112430 - RNA, 22 nt, Human
uucccuuugacgccaucccagc

SEQ ID NO: 3112431 - RNA, 21 nt, Human
uucccuuugacgccaucccag

SEQ ID NO: 3112432 - RNA, 20 nt, Human
uucccuuugacgccauccca

SEQ ID NO: 3112433 - RNA, 17 nt, Human
uuacuuuaaaaggagcc

SEQ ID NO: 3112434 - RNA, 18 nt, Human
uuacuuuaaaaggagcca

SEQ ID NO: 3112435 - RNA, 14 nt, Human
uuacuuuguguuca

SEQ ID NO: 3112436 - RNA, 15 nt, Human
uuagacagucccugc

SEQ ID NO: 3112437 - RNA, 14 nt, Human
uuagacagucccug

SEQ ID NO: 3112438 - RNA, 18 nt, Human
uuagacagucccugccaa

SEQ ID NO: 3112439 - RNA, 17 nt, Human
uuagacagucccugcca

SEQ ID NO: 3112440 - RNA, 16 nt, Human
uuagacagucccugcc

SEQ ID NO: 3112441 - RNA, 13 nt, Human
uuacuaaguuuuu

SEQ ID NO: 3112442 - RNA, 14 nt, Human
uuacuaaguuuuua

SEQ ID NO: 3112443 - RNA, 16 nt, Human
uuacuaauagacaauu

SEQ ID NO: 3112444 - RNA, 18 nt, Human
uuacuuagguguggggga

SEQ ID NO: 3112445 - RNA, 11 nt, Human
uuacuucugcu

SEQ ID NO: 3112446 - RNA, 12 nt, Human
uuacuucugcua

SEQ ID NO: 3112447 - RNA, 23 nt, Human
uuacuucuuauacauuugauaaa

SEQ ID NO: 3112448 - RNA, 21 nt, Human
uuacuuaaaccgccaaggcug

SEQ ID NO: 3112449 - RNA, 22 nt, Human
uuagauaauacaccacuacauu

SEQ ID NO: 3112450 - RNA, 14 nt, Human
uuagcggagacgga

SEQ ID NO: 3112451 - RNA, 14 nt, Human
uuagaguugauacu

SEQ ID NO: 3112452 - RNA, 17 nt, Human
uuaguagagacaggguu

SEQ ID NO: 3112453 - RNA, 18 nt, Human
uuaguaugaggcauuugu

SEQ ID NO: 3112454 - RNA, 16 nt, Human
uuaguaugaggcauuu

SEQ ID NO: 3112455 - RNA, 21 nt, Human
uuacaagcgugagccacugca

SEQ ID NO: 3112456 - RNA, 20 nt, Human
uuacaagcgugagccacugc

SEQ ID NO: 3112457 - RNA, 17 nt, Human
uuaagcuguuacugucu

SEQ ID NO: 3112458 - RNA, 18 nt, Human
uuaauauugauaugcuua

SEQ ID NO: 3112459 - RNA, 22 nt, Human
uuaauauugauaugcuuauaca

SEQ ID NO: 3112460 - RNA, 15 nt, Human
uuaacuuuuauaaac

SEQ ID NO: 3112461 - RNA, 16 nt, Human
uuaacuucacauauug

SEQ ID NO: 3112462 - RNA, 16 nt, Human
uuaacuuuuauaaacu

SEQ ID NO: 3112463 - RNA, 17 nt, Human
uuaacuuuuauaaacuu

SEQ ID NO: 3112464 - RNA, 14 nt, Human
uuaacuuuuauaaa

SEQ ID NO: 3112465 - RNA, 17 nt, Human
uuaaccacuucagcuga

SEQ ID NO: 3112466 - RNA, 19 nt, Human
uguuuggggaugagaaagg

SEQ ID NO: 3112467 - RNA, 23 nt, Human
uguuuccuggcacugcuuccagu

SEQ ID NO: 3112468 - RNA, 13 nt, Human
uguuugugauuga

SEQ ID NO: 3112469 - RNA, 20 nt, Human
uguuuuaagaggcagggucu

SEQ ID NO: 3112470 - RNA, 15 nt, Human
uguuucaaacuuuac

SEQ ID NO: 3112471 - RNA, 16 nt, Human
uguuuagauaauacac

SEQ ID NO: 3112472 - RNA, 22 nt, Human
uguuuuaagaggcagggucuca

SEQ ID NO: 3112473 - RNA, 18 nt, Human
uguuuuaaggaugcuugu

SEQ ID NO: 3112474 - RNA, 14 nt, Human
uuaaaagauacagu

SEQ ID NO: 3112475 - RNA, 17 nt, Human
uuaaaagauacaguuac

SEQ ID NO: 3112476 - RNA, 21 nt, Human
uuaaaauaccagccaguaaau

SEQ ID NO: 3112477 - RNA, 21 nt, Human
uauguugcccaggcaggucuu

SEQ ID NO: 3112478 - RNA, 22 nt, Human
uauguucuuaguggauguucug

SEQ ID NO: 3112479 - RNA, 15 nt, Human
uauuaaaugcccagc

SEQ ID NO: 3112480 - RNA, 19 nt, Human
uauuaaaugcccagccccu

SEQ ID NO: 3112481 - RNA, 17 nt, Human
uauuaaaugcccagccc

SEQ ID NO: 3112482 - RNA, 16 nt, Human
uauuaagaaagacuau

SEQ ID NO: 3112483 - RNA, 12 nt, Human
uauuauaccuuu

SEQ ID NO: 3112484 - RNA, 13 nt, Human
uauuauaccuuuu

SEQ ID NO: 3112485 - RNA, 14 nt, Human
uauuaaggaagaca

SEQ ID NO: 3112486 - RNA, 14 nt, Human
uauuauaccuuuuu

SEQ ID NO: 3112487 - RNA, 20 nt, Human
uauugauaugcuuauacacu

SEQ ID NO: 3112488 - RNA, 22 nt, Human
uauugcugauggugcaaugacc

SEQ ID NO: 3112489 - RNA, 23 nt, Human
uauugcugauggugcaaugaccu

SEQ ID NO: 3112490 - RNA, 13 nt, Human
uauugcccacgcu

SEQ ID NO: 3112491 - RNA, 14 nt, Human
uauugcccacgcug

SEQ ID NO: 3112492 - RNA, 15 nt, Human
uauugcccacgcugg

SEQ ID NO: 3112493 - RNA, 17 nt, Human
uauuuaugggauccugg

SEQ ID NO: 3112494 - RNA, 22 nt, Human
uauuuauuaaaugcccagcccc

SEQ ID NO: 3112495 - RNA, 15 nt, Human
ucacacacuuuggcu

SEQ ID NO: 3112496 - RNA, 23 nt, Human
ucacacaugagcaucaggccagg

SEQ ID NO: 3112497 - RNA, 22 nt, Human
ucacacaugagcaucaggccag

SEQ ID NO: 3112498 - RNA, 23 nt, Human
ucaccgaaaacguggcugcuuca

SEQ ID NO: 3112499 - RNA, 22 nt, Human
ucaccgaaaacguggcugcuuc

SEQ ID NO: 3112500 - RNA, 21 nt, Human
ucaccgaaaacguggcugcuu

SEQ ID NO: 3112501 - RNA, 20 nt, Human
ucaccgaaaacguggcugcu

SEQ ID NO: 3112502 - RNA, 19 nt, Human
ucaccgaaaacguggcugc

SEQ ID NO: 3112503 - RNA, 15 nt, Human
ucaccgaaaacgugg

SEQ ID NO: 3112504 - RNA, 19 nt, Human
ucacccgcuaagagggagg

SEQ ID NO: 3112505 - RNA, 14 nt, Human
ucaccgaaaacgug

SEQ ID NO: 3112506 - RNA, 12 nt, Human
ucacccuuuucu

SEQ ID NO: 3112507 - RNA, 18 nt, Human
ucacccgcuaagagggag

SEQ ID NO: 3112508 - RNA, 16 nt, Human
ucaccacaugugcaca

SEQ ID NO: 3112509 - RNA, 13 nt, Human
ucaccaagcccag

SEQ ID NO: 3112510 - RNA, 14 nt, Human
ucacauuuauucug

SEQ ID NO: 3112511 - RNA, 21 nt, Human
ucaccaaaucagcugcuacua

SEQ ID NO: 3112512 - RNA, 18 nt, Human
ucaccaacgucugugcca

SEQ ID NO: 3112513 - RNA, 17 nt, Human
ucaccaacgucugugcc

SEQ ID NO: 3112514 - RNA, 17 nt, Human
ucaagcgauucuucugc

SEQ ID NO: 3112515 - RNA, 20 nt, Human
ucaagccaccaacauacucc

SEQ ID NO: 3112516 - RNA, 12 nt, Human
ucaagccaccaa

SEQ ID NO: 3112517 - RNA, 18 nt, Human
ucaagcgauucuucugcu

SEQ ID NO: 3112518 - RNA, 19 nt, Human
ucaagcgauucuucugcuu

SEQ ID NO: 3112519 - RNA, 14 nt, Human
ucaaggauccugag

SEQ ID NO: 3112520 - RNA, 13 nt, Human
ucaaggauccuga

SEQ ID NO: 3112521 - RNA, 16 nt, Human
ucaaggauccugagcc

SEQ ID NO: 3112522 - RNA, 15 nt, Human
ucaaggauccugagc

SEQ ID NO: 3112523 - RNA, 16 nt, Human
ucaaccuccugggcua

SEQ ID NO: 3112524 - RNA, 20 nt, Human
ucaaccccuucgcuccugug

SEQ ID NO: 3112525 - RNA, 15 nt, Human
ucaaccuccugggcu

SEQ ID NO: 3112526 - RNA, 18 nt, Human
ucaaccccuucgcuccug

SEQ ID NO: 3112527 - RNA, 19 nt, Human
ucaaccccuucgcuccugu

SEQ ID NO: 3112528 - RNA, 20 nt, Human
ucaacucuccuccagaguca

SEQ ID NO: 3112529 - RNA, 23 nt, Human
ucaaagagguuuuaaaaaaaucc

SEQ ID NO: 3112530 - RNA, 12 nt, Human
ucaaagagguuu

SEQ ID NO: 3112531 - RNA, 12 nt, Human
uaugacacaugc

SEQ ID NO: 3112532 - RNA, 22 nt, Human
uaugacacaugcaaggucauuu

SEQ ID NO: 3112533 - RNA, 20 nt, Human
uaucugucauuugagcaggg

SEQ ID NO: 3112534 - RNA, 21 nt, Human
uaucugucauuugagcagggc

SEQ ID NO: 3112535 - RNA, 23 nt, Human
uaucugucauuugagcagggcuc

SEQ ID NO: 3112536 - RNA, 21 nt, Human
uaucuaauauguaacaagcca

SEQ ID NO: 3112537 - RNA, 19 nt, Human
uauauguuuuaagaggcag

SEQ ID NO: 3112538 - RNA, 16 nt, Human
uaucuaaauguugaaa

SEQ ID NO: 3112539 - RNA, 17 nt, Human
uauggacaaugacccag

SEQ ID NO: 3112540 - RNA, 19 nt, Human
uauggaacacucugagacu

SEQ ID NO: 3112541 - RNA, 18 nt, Human
uauggaacacucugagac

SEQ ID NO: 3112542 - RNA, 17 nt, Human
uauggaacacucugaga

SEQ ID NO: 3112543 - RNA, 16 nt, Human
uauggaacacucugag

SEQ ID NO: 3112544 - RNA, 13 nt, Human
uauggaacacucu

SEQ ID NO: 3112545 - RNA, 13 nt, Human
uaugcaugaagua

SEQ ID NO: 3112546 - RNA, 22 nt, Human
uaugcuuauacacuuacacuuu

SEQ ID NO: 3112547 - RNA, 13 nt, Human
uaugcacacauuu

SEQ ID NO: 3112548 - RNA, 14 nt, Human
uaugcacacauuuu

SEQ ID NO: 3112549 - RNA, 18 nt, Human
uaugcaaucaaaucugcu

SEQ ID NO: 3112550 - RNA, 23 nt, Human
uaugacuccagaauuucccaaag

SEQ ID NO: 3112551 - RNA, 17 nt, Human
uaugacuccagaauuuc

SEQ ID NO: 3112552 - RNA, 16 nt, Human
uaugacuccagaauuu

SEQ ID NO: 3112553 - RNA, 11 nt, Human
uagggaaaaac

SEQ ID NO: 3112554 - RNA, 19 nt, Human
uagggaaaaaccagcgugu

SEQ ID NO: 3112555 - RNA, 21 nt, Human
uagggaaaaaccagcguguga

SEQ ID NO: 3112556 - RNA, 20 nt, Human
uagggaaaaaccagcgugug

SEQ ID NO: 3112557 - RNA, 18 nt, Human
uaggccuggccagaugca

SEQ ID NO: 3112558 - RNA, 15 nt, Human
uaggccuggccagau

SEQ ID NO: 3112559 - RNA, 23 nt, Human
uaggugacagagugagacucugu

SEQ ID NO: 3112560 - RNA, 20 nt, Human
uauaugcucugcauguuaca

SEQ ID NO: 3112561 - RNA, 21 nt, Human
uauaugcucugcauguuacau

SEQ ID NO: 3112562 - RNA, 18 nt, Human
uauaaacuuuaccuuuuu

SEQ ID NO: 3112563 - RNA, 21 nt, Human
uccugagccagauuucacucu

SEQ ID NO: 3112564 - RNA, 14 nt, Human
uccugccaggcaug

SEQ ID NO: 3112565 - RNA, 13 nt, Human
uccugccaggcau

SEQ ID NO: 3112566 - RNA, 20 nt, Human
uccugcccuuaccugccagg

SEQ ID NO: 3112567 - RNA, 17 nt, Human
uccugcccuuaccugcc

SEQ ID NO: 3112568 - RNA, 14 nt, Human
uccuggaguucugg

SEQ ID NO: 3112569 - RNA, 23 nt, Human
uccuggcacccggccccugcugg

SEQ ID NO: 3112570 - RNA, 22 nt, Human
uccuggcacccggccccugcug

SEQ ID NO: 3112571 - RNA, 16 nt, Human
uccuggcacugcuucc

SEQ ID NO: 3112572 - RNA, 13 nt, Human
uccuggcacugcu

SEQ ID NO: 3112573 - RNA, 12 nt, Human
uccuggccucaa

SEQ ID NO: 3112574 - RNA, 22 nt, Human
uccuguaccucuugagccuuga

SEQ ID NO: 3112575 - RNA, 11 nt, Human
uccuguagccc

SEQ ID NO: 3112576 - RNA, 13 nt, Human
uccuguagcccua

SEQ ID NO: 3112577 - RNA, 15 nt, Human
ucccccuuccaugga

SEQ ID NO: 3112578 - RNA, 15 nt, Human
ucccuuccucuuucc

SEQ ID NO: 3112579 - RNA, 16 nt, Human
ucccuuccucuuucca

SEQ ID NO: 3112580 - RNA, 14 nt, Human
uccgccucuugggu

SEQ ID NO: 3112581 - RNA, 16 nt, Human
uccgcuuucuacccag

SEQ ID NO: 3112582 - RNA, 18 nt, Human
uccgcuuucuacccagcg

SEQ ID NO: 3112583 - RNA, 20 nt, Human
uccgcuuucuacccagcgag

SEQ ID NO: 3112584 - RNA, 18 nt, Human
uccuaagcuauucaguaa

SEQ ID NO: 3112585 - RNA, 20 nt, Human
uccuaagcuauucaguaaua

SEQ ID NO: 3112586 - RNA, 21 nt, Human
uccuaagcuauucaguaauaa

SEQ ID NO: 3112587 - RNA, 17 nt, Human
uccucauuagcauuuug

SEQ ID NO: 3112588 - RNA, 18 nt, Human
uccucauuagcauuuugc

SEQ ID NO: 3112589 - RNA, 12 nt, Human
uccucccaccuc

SEQ ID NO: 3112590 - RNA, 10 nt, Human
uccuccaggu

SEQ ID NO: 3112591 - RNA, 23 nt, Human
uccuauauuguuuucaguguaca

SEQ ID NO: 3112592 - RNA, 21 nt, Human
uccuauauuguuuucagugua

SEQ ID NO: 3112593 - RNA, 16 nt, Human
ucucauacucaccuca

SEQ ID NO: 3112594 - RNA, 18 nt, Human
ucucauacucaccucacc

SEQ ID NO: 3112595 - RNA, 19 nt, Human
ucuaugggacucaaugcac

SEQ ID NO: 3112596 - RNA, 12 nt, Human
ucuaugggacuc

SEQ ID NO: 3112597 - RNA, 13 nt, Human
ucuaugggacuca

SEQ ID NO: 3112598 - RNA, 13 nt, Human
ucuccacccugcu

SEQ ID NO: 3112599 - RNA, 12 nt, Human
ucuccacccugc

SEQ ID NO: 3112600 - RNA, 17 nt, Human
ucuccacccugcucucc

SEQ ID NO: 3112601 - RNA, 14 nt, Human
ucuccacccugcuc

SEQ ID NO: 3112602 - RNA, 16 nt, Human
ucuccacccugcucuc

SEQ ID NO: 3112603 - RNA, 22 nt, Human
ucuccaccugccagggacagag

SEQ ID NO: 3112604 - RNA, 19 nt, Human
ucuccaccugccagggaca

SEQ ID NO: 3112605 - RNA, 17 nt, Human
ucuccaccugccaggga

SEQ ID NO: 3112606 - RNA, 16 nt, Human
ucuccaccugccaggg

SEQ ID NO: 3112607 - RNA, 15 nt, Human
ucuccaccugccagg

SEQ ID NO: 3112608 - RNA, 14 nt, Human
ucuccaccugccag

SEQ ID NO: 3112609 - RNA, 15 nt, Human
ucuccagccccugga

SEQ ID NO: 3112610 - RNA, 14 nt, Human
ucuccagccccugg

SEQ ID NO: 3112611 - RNA, 13 nt, Human
ucuccagccccug

SEQ ID NO: 3112612 - RNA, 12 nt, Human
ucuccagccccu

SEQ ID NO: 3112613 - RNA, 18 nt, Human
ucuccagccccuggaugc

SEQ ID NO: 3112614 - RNA, 16 nt, Human
ucuccagccccuggau

SEQ ID NO: 3112615 - RNA, 22 nt, Human
ucuccagccccuggaugcagcc

SEQ ID NO: 3112616 - RNA, 12 nt, Human
ucucccccagcc

SEQ ID NO: 3112617 - RNA, 18 nt, Human
ucucccucagucuggccc

SEQ ID NO: 3112618 - RNA, 23 nt, Human
ucucccucagucuggcccuuccu

SEQ ID NO: 3112619 - RNA, 13 nt, Human
ucgugacaacacu

SEQ ID NO: 3112620 - RNA, 18 nt, Human
ucuaaaggcuaccuuugu

SEQ ID NO: 3112621 - RNA, 17 nt, Human
ucuaaaggcuaccuuug

SEQ ID NO: 3112622 - RNA, 19 nt, Human
ucuaaaggcuaccuuugua

SEQ ID NO: 3112623 - RNA, 20 nt, Human
ucuaaaggcuaccuuuguau

SEQ ID NO: 3112624 - RNA, 16 nt, Human
ucuaggaagacuuugg

SEQ ID NO: 3112625 - RNA, 15 nt, Human
ucuaggaagacuuug

SEQ ID NO: 3112626 - RNA, 19 nt, Human
ucuaggaagacuuuggaaa

SEQ ID NO: 3112627 - RNA, 12 nt, Human
ucuaggaagacu

SEQ ID NO: 3112628 - RNA, 22 nt, Human
ucuaucaaguauuauaccuuuu

SEQ ID NO: 3112629 - RNA, 14 nt, Human
ucuaugacacaugc

SEQ ID NO: 3112630 - RNA, 17 nt, Human
ucuaugacacaugcaag

SEQ ID NO: 3112631 - RNA, 21 nt, Human
ucuacacugugcugagucuga

SEQ ID NO: 3112632 - RNA, 15 nt, Human
ucuacagaggccaug

SEQ ID NO: 3112633 - RNA, 14 nt, Human
ucuaccuuccugca

SEQ ID NO: 3112634 - RNA, 14 nt, Human
ucaucauccuaagc

SEQ ID NO: 3112635 - RNA, 20 nt, Human
ucaguguacauggaauaaca

SEQ ID NO: 3112636 - RNA, 11 nt, Human
ucaguguacau

SEQ ID NO: 3112637 - RNA, 14 nt, Human
ucauccacugugcc

SEQ ID NO: 3112638 - RNA, 17 nt, Human
ucauccacugugccaug

SEQ ID NO: 3112639 - RNA, 19 nt, Human
ucaucuugaauuguaagga

SEQ ID NO: 3112640 - RNA, 13 nt, Human
uccaaaguacacu

SEQ ID NO: 3112641 - RNA, 23 nt, Human
ucagcuccagcucaccagcccca

SEQ ID NO: 3112642 - RNA, 24 nt, Human
ucagcuccagcucaccagccccag

SEQ ID NO: 3112643 - RNA, 22 nt, Human
ucagcuccagcucaccagcccc

SEQ ID NO: 3112644 - RNA, 23 nt, Human
ucagcucugcaagaauugaagca

SEQ ID NO: 3112645 - RNA, 23 nt, Human
ucaggaagcucagggccuggcuc

SEQ ID NO: 3112646 - RNA, 21 nt, Human
ucaggccugggggcugggcag

SEQ ID NO: 3112647 - RNA, 16 nt, Human
ucaggugauccaccca

SEQ ID NO: 3112648 - RNA, 23 nt, Human
ucaggugagaagcagaggaagga

SEQ ID NO: 3112649 - RNA, 23 nt, Human
ucaggugauccacccaccucagc

SEQ ID NO: 3112650 - RNA, 17 nt, Human
ucagguggggcagcuug

SEQ ID NO: 3112651 - RNA, 18 nt, Human
ucagguggggcagcuuga

SEQ ID NO: 3112652 - RNA, 19 nt, Human
ucagguggggcagcuugag

SEQ ID NO: 3112653 - RNA, 20 nt, Human
ucagguggggcagcuugagg

SEQ ID NO: 3112654 - RNA, 19 nt, Human
ucagucugauucccaagcu

SEQ ID NO: 3112655 - RNA, 21 nt, Human
ucagucugauucccaagcucu

SEQ ID NO: 3112656 - RNA, 22 nt, Human
ucagucugauucccaagcucug

SEQ ID NO: 3112657 - RNA, 23 nt, Human
ucagucugauucccaagcucugc

SEQ ID NO: 3112658 - RNA, 13 nt, Human
ucccaccuuggcu

SEQ ID NO: 3112659 - RNA, 16 nt, Human
ucccaccuuggcugca

SEQ ID NO: 3112660 - RNA, 17 nt, Human
ucccaccuuggcugcag

SEQ ID NO: 3112661 - RNA, 20 nt, Human
ucccagcugugcucuggaca

SEQ ID NO: 3112662 - RNA, 22 nt, Human
ucccaccucucucacuccuuga

SEQ ID NO: 3112663 - RNA, 20 nt, Human
uccaugugggcuaguugggc

SEQ ID NO: 3112664 - RNA, 24 nt, Human
ucccaggcauuccccaggaggcca

SEQ ID NO: 3112665 - RNA, 23 nt, Human
ucccaggcauuccccaggaggcc

SEQ ID NO: 3112666 - RNA, 23 nt, Human
ucccagcugugcucuggacaggc

SEQ ID NO: 3112667 - RNA, 21 nt, Human
ucccagcugugcucuggacag

SEQ ID NO: 3112668 - RNA, 22 nt, Human
ucccagcugugcucuggacagg

SEQ ID NO: 3112669 - RNA, 15 nt, Human
ucccaucuuccaagg

SEQ ID NO: 3112670 - RNA, 21 nt, Human
ucccaucugugaaaggaaaga

SEQ ID NO: 3112671 - RNA, 18 nt, Human
ucccaugagccucagcau

SEQ ID NO: 3112672 - RNA, 19 nt, Human
ucccaugagccucagcauc

SEQ ID NO: 3112673 - RNA, 14 nt, Human
uccccaggaggcca

SEQ ID NO: 3112674 - RNA, 21 nt, Human
ucccccagccccauccucugu

SEQ ID NO: 3112675 - RNA, 20 nt, Human
ucccccagccccauccucug

SEQ ID NO: 3112676 - RNA, 16 nt, Human
uccccaggaggccagc

SEQ ID NO: 3112677 - RNA, 15 nt, Human
uccccaggaggccag

SEQ ID NO: 3112678 - RNA, 17 nt, Human
ucccccagccccauccu

SEQ ID NO: 3112679 - RNA, 13 nt, Human
uccccaggaggcc

SEQ ID NO: 3112680 - RNA, 19 nt, Human
uccccagauugcaacaggc

SEQ ID NO: 3112681 - RNA, 20 nt, Human
uccccagauugcaacaggcu

SEQ ID NO: 3112682 - RNA, 22 nt, Human
uccccagauugcaacaggcugg

SEQ ID NO: 3112683 - RNA, 23 nt, Human
uccccagauugcaacaggcuggg

SEQ ID NO: 3112684 - RNA, 20 nt, Human
uccccagcaagugagagcug

SEQ ID NO: 3112685 - RNA, 21 nt, Human
uccccagcaagugagagcugg

SEQ ID NO: 3112686 - RNA, 22 nt, Human
uccccagcaagugagagcuggg

SEQ ID NO: 3112687 - RNA, 17 nt, Human
ucccaugagccucagca

SEQ ID NO: 3112688 - RNA, 20 nt, Human
ucccaugagccucagcaucc

SEQ ID NO: 3112689 - RNA, 13 nt, Human
uccccagauugca

SEQ ID NO: 3112690 - RNA, 18 nt, Human
uccccagauugcaacagg

SEQ ID NO: 3112691 - RNA, 19 nt, Human
uccacuuucuagccagagg

SEQ ID NO: 3112692 - RNA, 21 nt, Human
uccacuuucuagccagaggag

SEQ ID NO: 3112693 - RNA, 20 nt, Human
uccacuuucuagccagagga

SEQ ID NO: 3112694 - RNA, 14 nt, Human
uccaaaguacacug

SEQ ID NO: 3112695 - RNA, 16 nt, Human
uccaaaguacacuguu

SEQ ID NO: 3112696 - RNA, 20 nt, Human
uccaggggugggacacccug

SEQ ID NO: 3112697 - RNA, 19 nt, Human
uccaggggugggacacccu

SEQ ID NO: 3112698 - RNA, 15 nt, Human
uccaggagcagccac

SEQ ID NO: 3112699 - RNA, 14 nt, Human
uccaggagcagcca

SEQ ID NO: 3112700 - RNA, 13 nt, Human
uccaggagcagcc

SEQ ID NO: 3112701 - RNA, 12 nt, Human
uccaggagcagc

SEQ ID NO: 3112702 - RNA, 18 nt, Human
uccagguuuaagcuguua

SEQ ID NO: 3112703 - RNA, 20 nt, Human
uccagguuuaagcuguuacu

SEQ ID NO: 3112704 - RNA, 14 nt, Human
uccauagagagcaa

SEQ ID NO: 3112705 - RNA, 19 nt, Human
ugagcagggcucagcgggg

SEQ ID NO: 3112706 - RNA, 16 nt, Human
ugagcagggcucagcg

SEQ ID NO: 3112707 - RNA, 17 nt, Human
ugagcagggcucagcgg

SEQ ID NO: 3112708 - RNA, 16 nt, Human
ugagcaucaggccagg

SEQ ID NO: 3112709 - RNA, 20 nt, Human
ugagcaucaggccaggcccu

SEQ ID NO: 3112710 - RNA, 19 nt, Human
ugagcaucaggccaggccc

SEQ ID NO: 3112711 - RNA, 18 nt, Human
ugagcaucaggccaggcc

SEQ ID NO: 3112712 - RNA, 22 nt, Human
ugagccucagcauccuggcacc

SEQ ID NO: 3112713 - RNA, 18 nt, Human
ugagccucagcauccugg

SEQ ID NO: 3112714 - RNA, 21 nt, Human
ugagccucagcauccuggcac

SEQ ID NO: 3112715 - RNA, 19 nt, Human
ugagccgagaucacgccac

SEQ ID NO: 3112716 - RNA, 21 nt, Human
ugagccgagaucacgccacug

SEQ ID NO: 3112717 - RNA, 17 nt, Human
ugagccucagcauccug

SEQ ID NO: 3112718 - RNA, 15 nt, Human
ugagccucagcaucc

SEQ ID NO: 3112719 - RNA, 12 nt, Human
ugagcagggcuc

SEQ ID NO: 3112720 - RNA, 13 nt, Human
ugagcagggcuca

SEQ ID NO: 3112721 - RNA, 14 nt, Human
ugagcagggcucag

SEQ ID NO: 3112722 - RNA, 15 nt, Human
ugagcagggcucagc

SEQ ID NO: 3112723 - RNA, 14 nt, Human
ugagaucagccugg

SEQ ID NO: 3112724 - RNA, 15 nt, Human
ugagaucaaaacggu

SEQ ID NO: 3112725 - RNA, 23 nt, Human
ugagacucgcgacaaugcaaacc

SEQ ID NO: 3112726 - RNA, 22 nt, Human
ugagacucgcgacaaugcaaac

SEQ ID NO: 3112727 - RNA, 21 nt, Human
ugagacucgcgacaaugcaaa

SEQ ID NO: 3112728 - RNA, 20 nt, Human
ugagacucgcgacaaugcaa

SEQ ID NO: 3112729 - RNA, 20 nt, Human
ugaccucaggugauccaccc

SEQ ID NO: 3112730 - RNA, 21 nt, Human
ugaccucaggugauccaccca

SEQ ID NO: 3112731 - RNA, 19 nt, Human
ugagacucgcgacaaugca

SEQ ID NO: 3112732 - RNA, 17 nt, Human
ugagggaacagagaggu

SEQ ID NO: 3112733 - RNA, 14 nt, Human
ugaggcucugcccu

SEQ ID NO: 3112734 - RNA, 13 nt, Human
ugaggcucugccc

SEQ ID NO: 3112735 - RNA, 13 nt, Human
ugaggugggagga

SEQ ID NO: 3112736 - RNA, 12 nt, Human
ugaggugggagg

SEQ ID NO: 3112737 - RNA, 12 nt, Human
ugaggcauuugu

SEQ ID NO: 3112738 - RNA, 19 nt, Human
ugaggcauuuguuugaacu

SEQ ID NO: 3112739 - RNA, 20 nt, Human
ugaggcauuuguuugaacug

SEQ ID NO: 3112740 - RNA, 23 nt, Human
ugaggcuagugugguguuuccug

SEQ ID NO: 3112741 - RNA, 17 nt, Human
ugaggcuaguguggugu

SEQ ID NO: 3112742 - RNA, 21 nt, Human
ugaggcauuuguuugaacuga

SEQ ID NO: 3112743 - RNA, 13 nt, Human
ugagcugggauga

SEQ ID NO: 3112744 - RNA, 19 nt, Human
ugaguccagaaguuugaga

SEQ ID NO: 3112745 - RNA, 13 nt, Human
ugaguccagaagu

SEQ ID NO: 3112746 - RNA, 18 nt, Human
ugagucgaggacagggag

SEQ ID NO: 3112747 - RNA, 19 nt, Human
ugagucgaggacagggagg

SEQ ID NO: 3112748 - RNA, 18 nt, Human
ugagucugaaggcugggu

SEQ ID NO: 3112749 - RNA, 17 nt, Human
ugagucugaaggcuggg

SEQ ID NO: 3112750 - RNA, 15 nt, Human
ugagucugaaggcug

SEQ ID NO: 3112751 - RNA, 13 nt, Human
ugagucugaaggc

SEQ ID NO: 3112752 - RNA, 20 nt, Human
ugaguugauagcacagaccc

SEQ ID NO: 3112753 - RNA, 16 nt, Human
ugaguugauagcacag

SEQ ID NO: 3112754 - RNA, 13 nt, Human
ugauagcacagac

SEQ ID NO: 3112755 - RNA, 13 nt, Human
ugauccaagcugg

SEQ ID NO: 3112756 - RNA, 14 nt, Human
ugauccaagcuggu

SEQ ID NO: 3112757 - RNA, 15 nt, Human
ugauccaagcugguc

SEQ ID NO: 3112758 - RNA, 16 nt, Human
ugauccacccaccuca

SEQ ID NO: 3112759 - RNA, 17 nt, Human
ugauccacccaccucag

SEQ ID NO: 3112760 - RNA, 18 nt, Human
ugauccacccaccucagc

SEQ ID NO: 3112761 - RNA, 20 nt, Human
ugaucuucuuuauaauucua

SEQ ID NO: 3112762 - RNA, 17 nt, Human
ugaugcuucuucagaga

SEQ ID NO: 3112763 - RNA, 16 nt, Human
ugaugcuucuucagag

SEQ ID NO: 3112764 - RNA, 16 nt, Human
ugauguguuaucucuu

SEQ ID NO: 3112765 - RNA, 16 nt, Human
ugaucuuugcagacag

SEQ ID NO: 3112766 - RNA, 21 nt, Human
ugauuggaggggggagguggg

SEQ ID NO: 3112767 - RNA, 13 nt, Human
ugauuggaggggg

SEQ ID NO: 3112768 - RNA, 16 nt, Human
ugauugugucucuugg

SEQ ID NO: 3112769 - RNA, 21 nt, Human
ugauucuccugccucagccuc

SEQ ID NO: 3112770 - RNA, 23 nt, Human
ugauucagacagcugccugggau

SEQ ID NO: 3112771 - RNA, 21 nt, Human
ugauucagacagcugccuggg

SEQ ID NO: 3112772 - RNA, 20 nt, Human
ugauucagacagcugccugg

SEQ ID NO: 3112773 - RNA, 19 nt, Human
ugauucagacagcugccug

SEQ ID NO: 3112774 - RNA, 18 nt, Human
ugauucagacagcugccu

SEQ ID NO: 3112775 - RNA, 16 nt, Human
ugauucagacagcugc

SEQ ID NO: 3112776 - RNA, 15 nt, Human
ugauucagacagcug

SEQ ID NO: 3112777 - RNA, 14 nt, Human
ugauucagacagcu

SEQ ID NO: 3112778 - RNA, 13 nt, Human
ugauucagacagc

SEQ ID NO: 3112779 - RNA, 20 nt, Human
ugauucaacagguuuuccug

SEQ ID NO: 3112780 - RNA, 20 nt, Human
ugauguucuuucacccuuuu

SEQ ID NO: 3112781 - RNA, 13 nt, Human
ugaaagggcccag

SEQ ID NO: 3112782 - RNA, 18 nt, Human
ugaaagggcccagagagg

SEQ ID NO: 3112783 - RNA, 18 nt, Human
ugaaagcccugagcuuuc

SEQ ID NO: 3112784 - RNA, 19 nt, Human
ugaaaauuuugauguuuua

SEQ ID NO: 3112785 - RNA, 21 nt, Human
ugaaaauuuugauguuuuaag

SEQ ID NO: 3112786 - RNA, 12 nt, Human
ugaaaauuuuga

SEQ ID NO: 3112787 - RNA, 13 nt, Human
ugaaaauuuugau

SEQ ID NO: 3112788 - RNA, 14 nt, Human
ugaaacauuuuguc

SEQ ID NO: 3112789 - RNA, 22 nt, Human
ugaaccaagaacuuuccaggaa

SEQ ID NO: 3112790 - RNA, 23 nt, Human
ugaaccacaucuugcucugcuga

SEQ ID NO: 3112791 - RNA, 17 nt, Human
ugaaccaccacacccag

SEQ ID NO: 3112792 - RNA, 20 nt, Human
ugaaccaccacacccagccc

SEQ ID NO: 3112793 - RNA, 16 nt, Human
ugaacuccuggccuca

SEQ ID NO: 3112794 - RNA, 13 nt, Human
ucuuuccaaagua

SEQ ID NO: 3112795 - RNA, 14 nt, Human
ucuuuccaaaguac

SEQ ID NO: 3112796 - RNA, 21 nt, Human
ucuuucagccaagaauucuua

SEQ ID NO: 3112797 - RNA, 20 nt, Human
ucuuucagccaagaauucuu

SEQ ID NO: 3112798 - RNA, 19 nt, Human
ucuuucagccaagaauucu

SEQ ID NO: 3112799 - RNA, 16 nt, Human
ucuuucagccaagaau

SEQ ID NO: 3112800 - RNA, 17 nt, Human
ucuuuggacacucacac

SEQ ID NO: 3112801 - RNA, 23 nt, Human
ucuugcaauggcagccuuggcaa

SEQ ID NO: 3112802 - RNA, 20 nt, Human
ucuccucugcugcuggcugg

SEQ ID NO: 3112803 - RNA, 16 nt, Human
ucucccuucauccuuc

SEQ ID NO: 3112804 - RNA, 21 nt, Human
ucuuguguguuuauugucaaa

SEQ ID NO: 3112805 - RNA, 16 nt, Human
ucuuguguguuuauug

SEQ ID NO: 3112806 - RNA, 23 nt, Human
ucuuucacccuuuucuguuugcu

SEQ ID NO: 3112807 - RNA, 17 nt, Human
ugaaggccccgcccagg

SEQ ID NO: 3112808 - RNA, 17 nt, Human
ugaacuccuggccucaa

SEQ ID NO: 3112809 - RNA, 16 nt, Human
ugaaggccccgcccag

SEQ ID NO: 3112810 - RNA, 15 nt, Human
ugaaggccccgccca

SEQ ID NO: 3112811 - RNA, 22 nt, Human
ugaaggacauugcggacagcca

SEQ ID NO: 3112812 - RNA, 19 nt, Human
ugaaggacauugcggacag

SEQ ID NO: 3112813 - RNA, 20 nt, Human
ugaaggacauugcggacagc

SEQ ID NO: 3112814 - RNA, 16 nt, Human
ugaccauucuccaccu

SEQ ID NO: 3112815 - RNA, 18 nt, Human
ugaccauucuccaccugc

SEQ ID NO: 3112816 - RNA, 17 nt, Human
ugaccauucuccaccug

SEQ ID NO: 3112817 - RNA, 20 nt, Human
ugaccgugaggccagagaca

SEQ ID NO: 3112818 - RNA, 16 nt, Human
ugaccgugaggccaga

SEQ ID NO: 3112819 - RNA, 14 nt, Human
ugaccgugaggcca

SEQ ID NO: 3112820 - RNA, 13 nt, Human
ugaccgugaggcc

SEQ ID NO: 3112821 - RNA, 14 nt, Human
ugaccauucuccac

SEQ ID NO: 3112822 - RNA, 13 nt, Human
ugacaugucuuuu

SEQ ID NO: 3112823 - RNA, 15 nt, Human
ugacaugucuuuucu

SEQ ID NO: 3112824 - RNA, 19 nt, Human
ugaccagcaccaucucucc

SEQ ID NO: 3112825 - RNA, 18 nt, Human
ugacaaggauugcuacug

SEQ ID NO: 3112826 - RNA, 13 nt, Human
ugacagaggcagc

SEQ ID NO: 3112827 - RNA, 20 nt, Human
ugacagacacaggcccggcu

SEQ ID NO: 3112828 - RNA, 23 nt, Human
ugacagacacaggcccggcucca

SEQ ID NO: 3112829 - RNA, 14 nt, Human
ugacagaggcagcc

SEQ ID NO: 3112830 - RNA, 15 nt, Human
ugacagaggcagccc

SEQ ID NO: 3112831 - RNA, 16 nt, Human
ugacagaggcagcccc

SEQ ID NO: 3112832 - RNA, 17 nt, Human
ugacagaggcagcccca

SEQ ID NO: 3112833 - RNA, 18 nt, Human
ugacagaggcagccccau

SEQ ID NO: 3112834 - RNA, 23 nt, Human
ugacagaggcagccccauucugc

SEQ ID NO: 3112835 - RNA, 14 nt, Human
ugacagagugagac

SEQ ID NO: 3112836 - RNA, 17 nt, Human
ugacagagugagacucu

SEQ ID NO: 3112837 - RNA, 19 nt, Human
ugacagagugagacucugu

SEQ ID NO: 3112838 - RNA, 23 nt, Human
uggacaggcauguucucugagga

SEQ ID NO: 3112839 - RNA, 15 nt, Human
uggcacuauaaugua

SEQ ID NO: 3112840 - RNA, 16 nt, Human
uggcacuauaauguaa

SEQ ID NO: 3112841 - RNA, 16 nt, Human
uggcaaaaaggcagga

SEQ ID NO: 3112842 - RNA, 12 nt, Human
uggcaaaaaggc

SEQ ID NO: 3112843 - RNA, 23 nt, Human
uggaggaaggaaacccagcucug

SEQ ID NO: 3112844 - RNA, 21 nt, Human
uggaggaaggaaacccagcuc

SEQ ID NO: 3112845 - RNA, 14 nt, Human
uggccccugcccgg

SEQ ID NO: 3112846 - RNA, 15 nt, Human
uggccccugcccggc

SEQ ID NO: 3112847 - RNA, 16 nt, Human
uggccccugcccggcu

SEQ ID NO: 3112848 - RNA, 13 nt, Human
uggccaggcuggu

SEQ ID NO: 3112849 - RNA, 17 nt, Human
uggccagaugcaccagc

SEQ ID NO: 3112850 - RNA, 18 nt, Human
uggccagaugcaccagcc

SEQ ID NO: 3112851 - RNA, 19 nt, Human
uggcagaguugaagacaga

SEQ ID NO: 3112852 - RNA, 17 nt, Human
uggcagaguugaagaca

SEQ ID NO: 3112853 - RNA, 21 nt, Human
uggcagaguggauucuugaac

SEQ ID NO: 3112854 - RNA, 15 nt, Human
uggcagaguugaaga

SEQ ID NO: 3112855 - RNA, 19 nt, Human
uggccagaugcaccagccc

SEQ ID NO: 3112856 - RNA, 23 nt, Human
uggccucccaacucaccccagcc

SEQ ID NO: 3112857 - RNA, 23 nt, Human
uggcgcagcauauucaggaagcu

SEQ ID NO: 3112858 - RNA, 22 nt, Human
uggcgcagcauauucaggaagc

SEQ ID NO: 3112859 - RNA, 16 nt, Human
uggcgcugccccuggc

SEQ ID NO: 3112860 - RNA, 23 nt, Human
uggcgcugccccuggcagccccu

SEQ ID NO: 3112861 - RNA, 15 nt, Human
uggcgcugccccugg

SEQ ID NO: 3112862 - RNA, 11 nt, Human
uggcugcuuca

SEQ ID NO: 3112863 - RNA, 15 nt, Human
uggcugggggccuca

SEQ ID NO: 3112864 - RNA, 15 nt, Human
uggcugcuucaagga

SEQ ID NO: 3112865 - RNA, 22 nt, Human
ugggcuucauccuccucagauc

SEQ ID NO: 3112866 - RNA, 20 nt, Human
uggggccaguuggucccccu

SEQ ID NO: 3112867 - RNA, 15 nt, Human
uggggaugagaaagg

SEQ ID NO: 3112868 - RNA, 23 nt, Human
uggggaugagaaagguugaagca

SEQ ID NO: 3112869 - RNA, 17 nt, Human
uggguacuuguggacac

SEQ ID NO: 3112870 - RNA, 18 nt, Human
uggguacuuguggacaca

SEQ ID NO: 3112871 - RNA, 16 nt, Human
ugggggaguggccaca

SEQ ID NO: 3112872 - RNA, 23 nt, Human
ugggcagagcagagaccaucccu

SEQ ID NO: 3112873 - RNA, 14 nt, Human
ugggccuggcuccc

SEQ ID NO: 3112874 - RNA, 13 nt, Human
ugggauccuccag

SEQ ID NO: 3112875 - RNA, 12 nt, Human
ugggauccucca

SEQ ID NO: 3112876 - RNA, 22 nt, Human
ugggauuacaagcgugagccac

SEQ ID NO: 3112877 - RNA, 18 nt, Human
ugggcagagcagagacca

SEQ ID NO: 3112878 - RNA, 22 nt, Human
ugggcagagcagagaccauccc

SEQ ID NO: 3112879 - RNA, 16 nt, Human
uggcugggggccucag

SEQ ID NO: 3112880 - RNA, 17 nt, Human
uggcugggggccucagu

SEQ ID NO: 3112881 - RNA, 20 nt, Human
uggcugggggccucagugcc

SEQ ID NO: 3112882 - RNA, 16 nt, Human
ugggagugggcccaau

SEQ ID NO: 3112883 - RNA, 14 nt, Human
ugggagugggccca

SEQ ID NO: 3112884 - RNA, 13 nt, Human
uggucccacucag

SEQ ID NO: 3112885 - RNA, 14 nt, Human
uggucccccuucca

SEQ ID NO: 3112886 - RNA, 18 nt, Human
ugguaugaucacggcuca

SEQ ID NO: 3112887 - RNA, 23 nt, Human
uggucccccuuccauggacuuug

SEQ ID NO: 3112888 - RNA, 18 nt, Human
uggucccccuuccaugga

SEQ ID NO: 3112889 - RNA, 16 nt, Human
uggucccccuuccaug

SEQ ID NO: 3112890 - RNA, 15 nt, Human
uggucccccuuccau

SEQ ID NO: 3112891 - RNA, 23 nt, Human
ugguccugcugcaguugccaguc

SEQ ID NO: 3112892 - RNA, 15 nt, Human
ugguccugcugcagu

SEQ ID NO: 3112893 - RNA, 13 nt, Human
ugguccugcugca

SEQ ID NO: 3112894 - RNA, 19 nt, Human
ugguccuaaucuucugaac

SEQ ID NO: 3112895 - RNA, 17 nt, Human
ugguccuaaucuucuga

SEQ ID NO: 3112896 - RNA, 14 nt, Human
uggucggaaaacau

SEQ ID NO: 3112897 - RNA, 17 nt, Human
uggucggaaaacaugcu

SEQ ID NO: 3112898 - RNA, 13 nt, Human
uggugaccucugc

SEQ ID NO: 3112899 - RNA, 14 nt, Human
uggugaccucugcc

SEQ ID NO: 3112900 - RNA, 18 nt, Human
uggucuacacugugcuga

SEQ ID NO: 3112901 - RNA, 17 nt, Human
uggucuacacugugcug

SEQ ID NO: 3112902 - RNA, 16 nt, Human
uggucuacacugugcu

SEQ ID NO: 3112903 - RNA, 15 nt, Human
uggucuacacugugc

SEQ ID NO: 3112904 - RNA, 20 nt, Human
uggugcaaugaccuuucaau

SEQ ID NO: 3112905 - RNA, 21 nt, Human
uggugcaaugaccuuucaaua

SEQ ID NO: 3112906 - RNA, 15 nt, Human
uggugaccucugccu

SEQ ID NO: 3112907 - RNA, 16 nt, Human
uggugaccucugccug

SEQ ID NO: 3112908 - RNA, 17 nt, Human
uggugaccucugccuga

SEQ ID NO: 3112909 - RNA, 22 nt, Human
uggugaccucugccugaaguca

SEQ ID NO: 3112910 - RNA, 19 nt, Human
uggugacuuuccucuuugg

SEQ ID NO: 3112911 - RNA, 17 nt, Human
ugcugggcuugucugua

SEQ ID NO: 3112912 - RNA, 13 nt, Human
ugcuggguguggc

SEQ ID NO: 3112913 - RNA, 12 nt, Human
ugcugcuugagg

SEQ ID NO: 3112914 - RNA, 20 nt, Human
ugcugggauuacagguguga

SEQ ID NO: 3112915 - RNA, 19 nt, Human
ugcugcuugaggcaacuca

SEQ ID NO: 3112916 - RNA, 14 nt, Human
ugcugcauuuaaaa

SEQ ID NO: 3112917 - RNA, 23 nt, Human
ugcugcauuuaaaagauacaguu

SEQ ID NO: 3112918 - RNA, 17 nt, Human
ugcugcauuuaaaagau

SEQ ID NO: 3112919 - RNA, 18 nt, Human
ugcugcauuuaaaagaua

SEQ ID NO: 3112920 - RNA, 19 nt, Human
ugcugcauuuaaaagauac

SEQ ID NO: 3112921 - RNA, 21 nt, Human
ugcuacuguccuacccacccu

SEQ ID NO: 3112922 - RNA, 22 nt, Human
ugcuacuguccuacccacccuc

SEQ ID NO: 3112923 - RNA, 22 nt, Human
ugcuaggaacacuccuucacag

SEQ ID NO: 3112924 - RNA, 20 nt, Human
ugcuaggaacacuccuucac

SEQ ID NO: 3112925 - RNA, 21 nt, Human
ugcuaggaacacuccuucaca

SEQ ID NO: 3112926 - RNA, 17 nt, Human
ugcucacauaucuguca

SEQ ID NO: 3112927 - RNA, 23 nt, Human
ugcucuccgaccagacaccuuga

SEQ ID NO: 3112928 - RNA, 14 nt, Human
ugcccugcccaccu

SEQ ID NO: 3112929 - RNA, 15 nt, Human
ugcccugcccaccug

SEQ ID NO: 3112930 - RNA, 20 nt, Human
ugcccugcccaccuggccuc

SEQ ID NO: 3112931 - RNA, 16 nt, Human
ugcccugcccaccugg

SEQ ID NO: 3112932 - RNA, 14 nt, Human
ugccucaagagaag

SEQ ID NO: 3112933 - RNA, 15 nt, Human
ugccucaagagaagg

SEQ ID NO: 3112934 - RNA, 16 nt, Human
ugccccuggcagcccc

SEQ ID NO: 3112935 - RNA, 12 nt, Human
ugcccggcugcg

SEQ ID NO: 3112936 - RNA, 14 nt, Human
ugcccggcugcgga

SEQ ID NO: 3112937 - RNA, 13 nt, Human
ugcccaggcuggc

SEQ ID NO: 3112938 - RNA, 20 nt, Human
ugcccaggcuggcgugcagu

SEQ ID NO: 3112939 - RNA, 18 nt, Human
ugcccaggcuggcgugca

SEQ ID NO: 3112940 - RNA, 19 nt, Human
ugcccaggcuggcgugcag

SEQ ID NO: 3112941 - RNA, 20 nt, Human
ugccacccuggggagaaagu

SEQ ID NO: 3112942 - RNA, 14 nt, Human
ugccaggcauggug

SEQ ID NO: 3112943 - RNA, 10 nt, Human
ugccaggcau

SEQ ID NO: 3112944 - RNA, 22 nt, Human
ugccaggaagccagcaggcucu

SEQ ID NO: 3112945 - RNA, 20 nt, Human
ugccaggaagccagcaggcu

SEQ ID NO: 3112946 - RNA, 23 nt, Human
ugcauuuggugguuucagaaaug

SEQ ID NO: 3112947 - RNA, 21 nt, Human
ugcauuuggugguuucagaaa

SEQ ID NO: 3112948 - RNA, 13 nt, Human
ugcagggaguccg

SEQ ID NO: 3112949 - RNA, 20 nt, Human
ugcaguggugcgaucugggu

SEQ ID NO: 3112950 - RNA, 21 nt, Human
ugcaguggugcgaucuggguu

SEQ ID NO: 3112951 - RNA, 21 nt, Human
ugcaguuacacuaaaagguga

SEQ ID NO: 3112952 - RNA, 15 nt, Human
ugcaguugccaguca

SEQ ID NO: 3112953 - RNA, 16 nt, Human
ugcaguugccagucac

SEQ ID NO: 3112954 - RNA, 19 nt, Human
ugcaucaagaugugacaug

SEQ ID NO: 3112955 - RNA, 11 nt, Human
gugaggaagcc

SEQ ID NO: 3112956 - RNA, 19 nt, Human
gugaggaagccgcuggggc

SEQ ID NO: 3112957 - RNA, 16 nt, Human
gugaggaagccgcugg

SEQ ID NO: 3112958 - RNA, 13 nt, Human
gugagccacugca

SEQ ID NO: 3112959 - RNA, 17 nt, Human
gugacugaucucucgug

SEQ ID NO: 3112960 - RNA, 15 nt, Human
gugaccucugccuga

SEQ ID NO: 3112961 - RNA, 16 nt, Human
gugacaacacuugugu

SEQ ID NO: 3112962 - RNA, 16 nt, Human
gugacugaauuucuuu

SEQ ID NO: 3112963 - RNA, 18 nt, Human
gugacugaauuucuuuug

SEQ ID NO: 3112964 - RNA, 15 nt, Human
gugacugaauuucuu

SEQ ID NO: 3112965 - RNA, 12 nt, Human
gugaaacuggau

SEQ ID NO: 3112966 - RNA, 23 nt, Human
gugaaaagaaaaaugagccuggc

SEQ ID NO: 3112967 - RNA, 14 nt, Human
gugaaaagaaaaau

SEQ ID NO: 3112968 - RNA, 19 nt, Human
gugaaaggaaagagggagg

SEQ ID NO: 3112969 - RNA, 20 nt, Human
gugccagguuuuuggucuga

SEQ ID NO: 3112970 - RNA, 22 nt, Human
gugccagguuuuuggucugacc

SEQ ID NO: 3112971 - RNA, 13 nt, Human
gugcauaccacuu

SEQ ID NO: 3112972 - RNA, 14 nt, Human
gugcauaccacuuu

SEQ ID NO: 3112973 - RNA, 19 nt, Human
gugcauaaguuaacuucca

SEQ ID NO: 3112974 - RNA, 20 nt, Human
gugcccacaggaucagucug

SEQ ID NO: 3112975 - RNA, 14 nt, Human
gugauucuccugcc

SEQ ID NO: 3112976 - RNA, 16 nt, Human
gugauucuccugccuc

SEQ ID NO: 3112977 - RNA, 17 nt, Human
gugauucuccugccuca

SEQ ID NO: 3112978 - RNA, 18 nt, Human
gugauucuccugccucag

SEQ ID NO: 3112979 - RNA, 19 nt, Human
gugauucuccugccucagc

SEQ ID NO: 3112980 - RNA, 20 nt, Human
gugauucuccugccucagcc

SEQ ID NO: 3112981 - RNA, 22 nt, Human
gugauucuccugccucagccuc

SEQ ID NO: 3112982 - RNA, 23 nt, Human
gugauucuccugccucagccucc

SEQ ID NO: 3112983 - RNA, 12 nt, Human
gugauuuucauu

SEQ ID NO: 3112984 - RNA, 20 nt, Human
gugauccucccaccucagcc

SEQ ID NO: 3112985 - RNA, 22 nt, Human
gugauccucccaccucagccuc

SEQ ID NO: 3112986 - RNA, 14 nt, Human
gugauccucccacc

SEQ ID NO: 3112987 - RNA, 15 nt, Human
gugauccucccaccu

SEQ ID NO: 3112988 - RNA, 18 nt, Human
gugauccucccaccucag

SEQ ID NO: 3112989 - RNA, 15 nt, Human
gugauccacccaccu

SEQ ID NO: 3112990 - RNA, 18 nt, Human
gugauccacccaccucag

SEQ ID NO: 3112991 - RNA, 20 nt, Human
gugauccacccaccucagcc

SEQ ID NO: 3112992 - RNA, 11 nt, Human
gugaggccaga

SEQ ID NO: 3112993 - RNA, 22 nt, Human
gugcugccauccagguucagcu

SEQ ID NO: 3112994 - RNA, 11 nt, Human
gugcugcccug

SEQ ID NO: 3112995 - RNA, 12 nt, Human
gugcuuggagga

SEQ ID NO: 3112996 - RNA, 15 nt, Human
gugcuuggaggaagg

SEQ ID NO: 3112997 - RNA, 13 nt, Human
gugcuuggaggaa

SEQ ID NO: 3112998 - RNA, 18 nt, Human
guggaaaaauagccugcc

SEQ ID NO: 3112999 - RNA, 12 nt, Human
gugcugcauuua

SEQ ID NO: 3113000 - RNA, 19 nt, Human
gugcugcauuuaaaagaua

SEQ ID NO: 3113001 - RNA, 20 nt, Human
gugcugcauuuaaaagauac

SEQ ID NO: 3113002 - RNA, 15 nt, Human
gugcugccauccagg

SEQ ID NO: 3113003 - RNA, 18 nt, Human
gugcugccauccagguuc

SEQ ID NO: 3113004 - RNA, 19 nt, Human
gugcugccauccagguuca

SEQ ID NO: 3113005 - RNA, 12 nt, Human
gugcugagucug

SEQ ID NO: 3113006 - RNA, 19 nt, Human
gugcugagucugaaggcug

SEQ ID NO: 3113007 - RNA, 18 nt, Human
gugcugagucugaaggcu

SEQ ID NO: 3113008 - RNA, 17 nt, Human
gugcugagucugaaggc

SEQ ID NO: 3113009 - RNA, 16 nt, Human
gugcugagucugaagg

SEQ ID NO: 3113010 - RNA, 17 nt, Human
gugcucuggacaggcau

SEQ ID NO: 3113011 - RNA, 18 nt, Human
gugcucuggacaggcaug

SEQ ID NO: 3113012 - RNA, 19 nt, Human
gugcugaaugguuuucaaa

SEQ ID NO: 3113013 - RNA, 20 nt, Human
gugcugaaugguuuucaaaa

SEQ ID NO: 3113014 - RNA, 23 nt, Human
gugcugaaugguuuucaaaauaa

SEQ ID NO: 3113015 - RNA, 21 nt, Human
gugccuuggggacaagagcag

SEQ ID NO: 3113016 - RNA, 15 nt, Human
gugcucuggacaggc

SEQ ID NO: 3113017 - RNA, 16 nt, Human
gugcucuggacaggca

SEQ ID NO: 3113018 - RNA, 20 nt, Human
guggagaagcggcuggcagc

SEQ ID NO: 3113019 - RNA, 16 nt, Human
guggaugccugguggc

SEQ ID NO: 3113020 - RNA, 18 nt, Human
guggaugccugguggcag

SEQ ID NO: 3113021 - RNA, 17 nt, Human
guggaguucaucuugaa

SEQ ID NO: 3113022 - RNA, 19 nt, Human
guggcagugggagcugccu

SEQ ID NO: 3113023 - RNA, 21 nt, Human
guggcagugggagcugccugu

SEQ ID NO: 3113024 - RNA, 19 nt, Human
guggcagcugcgguccacc

SEQ ID NO: 3113025 - RNA, 20 nt, Human
guggaugccugguggcagcu

SEQ ID NO: 3113026 - RNA, 21 nt, Human
guggcagcugcgguccaccca

SEQ ID NO: 3113027 - RNA, 22 nt, Human
guggcagcugcgguccacccag

SEQ ID NO: 3113028 - RNA, 23 nt, Human
guggcagcugcgguccacccagg

SEQ ID NO: 3113029 - RNA, 12 nt, Human
guggcagcugcu

SEQ ID NO: 3113030 - RNA, 13 nt, Human
guggcagcugcuu

SEQ ID NO: 3113031 - RNA, 19 nt, Human
guggcagcugcuuuugucu

SEQ ID NO: 3113032 - RNA, 16 nt, Human
guggcagugggagcug

SEQ ID NO: 3113033 - RNA, 17 nt, Human
guggcagugggagcugc

SEQ ID NO: 3113034 - RNA, 15 nt, Human
guggcagugggagcu

SEQ ID NO: 3113035 - RNA, 21 nt, Human
gucauauaagauucauauuua

SEQ ID NO: 3113036 - RNA, 14 nt, Human
guccacccaggagc

SEQ ID NO: 3113037 - RNA, 13 nt, Human
guccacccaggag

SEQ ID NO: 3113038 - RNA, 15 nt, Human
guccacccaggagcc

SEQ ID NO: 3113039 - RNA, 16 nt, Human
guccacccaggagccc

SEQ ID NO: 3113040 - RNA, 15 nt, Human
gucccacucagucca

SEQ ID NO: 3113041 - RNA, 14 nt, Human
gucccacucagucc

SEQ ID NO: 3113042 - RNA, 17 nt, Human
gucccagauacuugggg

SEQ ID NO: 3113043 - RNA, 16 nt, Human
gucaauuacaggaagu

SEQ ID NO: 3113044 - RNA, 15 nt, Human
gucaauuacaggaag

SEQ ID NO: 3113045 - RNA, 13 nt, Human
gucaauuacagga

SEQ ID NO: 3113046 - RNA, 13 nt, Human
gucaccccggcca

SEQ ID NO: 3113047 - RNA, 20 nt, Human
gucaccugaagacucauucu

SEQ ID NO: 3113048 - RNA, 18 nt, Human
gucaagagggucugagga

SEQ ID NO: 3113049 - RNA, 19 nt, Human
gucaagagggucugaggaa

SEQ ID NO: 3113050 - RNA, 19 nt, Human
gucaagugaaaaaggagga

SEQ ID NO: 3113051 - RNA, 18 nt, Human
gucaagugaaaaaggagg

SEQ ID NO: 3113052 - RNA, 16 nt, Human
gucaagugaaaaagga

SEQ ID NO: 3113053 - RNA, 13 nt, Human
guagagugggagc

SEQ ID NO: 3113054 - RNA, 15 nt, Human
guagagugggagcug

SEQ ID NO: 3113055 - RNA, 13 nt, Human
guauuacuucugc

SEQ ID NO: 3113056 - RNA, 14 nt, Human
guauuacuucugcu

SEQ ID NO: 3113057 - RNA, 15 nt, Human
guauuacuucugcua

SEQ ID NO: 3113058 - RNA, 14 nt, Human
guauuauaccuuuu

SEQ ID NO: 3113059 - RNA, 19 nt, Human
guccugggagugagcuggu

SEQ ID NO: 3113060 - RNA, 17 nt, Human
guccugggagugagcug

SEQ ID NO: 3113061 - RNA, 18 nt, Human
guccugggagugagcugg

SEQ ID NO: 3113062 - RNA, 15 nt, Human
guccugggagugagc

SEQ ID NO: 3113063 - RNA, 16 nt, Human
guccugggagugagcu

SEQ ID NO: 3113064 - RNA, 17 nt, Human
guccuggcaugggaaug

SEQ ID NO: 3113065 - RNA, 12 nt, Human
guccucccaucu

SEQ ID NO: 3113066 - RNA, 14 nt, Human
guccucccaucuca

SEQ ID NO: 3113067 - RNA, 13 nt, Human
guccucccaucuc

SEQ ID NO: 3113068 - RNA, 23 nt, Human
guccucccaucucacacaugagc

SEQ ID NO: 3113069 - RNA, 13 nt, Human
guccuacucugug

SEQ ID NO: 3113070 - RNA, 17 nt, Human
gucccugguggcagcuc

SEQ ID NO: 3113071 - RNA, 16 nt, Human
gucccugguggcagcu

SEQ ID NO: 3113072 - RNA, 15 nt, Human
guccuacucuguguc

SEQ ID NO: 3113073 - RNA, 23 nt, Human
guccuacucugugucaggugggg

SEQ ID NO: 3113074 - RNA, 23 nt, Human
guccuagaaauuccccacccuga

SEQ ID NO: 3113075 - RNA, 12 nt, Human
gucccagugccg

SEQ ID NO: 3113076 - RNA, 17 nt, Human
gucugauucccaagcuc

SEQ ID NO: 3113077 - RNA, 18 nt, Human
gucugauucccaagcucu

SEQ ID NO: 3113078 - RNA, 19 nt, Human
gucugauucccaagcucug

SEQ ID NO: 3113079 - RNA, 21 nt, Human
gucugaggaauccagacccgg

SEQ ID NO: 3113080 - RNA, 20 nt, Human
gucugauucccaagcucugc

SEQ ID NO: 3113081 - RNA, 21 nt, Human
gucugauucccaagcucugcu

SEQ ID NO: 3113082 - RNA, 13 nt, Human
gucugacccacug

SEQ ID NO: 3113083 - RNA, 14 nt, Human
gucugacccacugc

SEQ ID NO: 3113084 - RNA, 15 nt, Human
gucugacccacugcu

SEQ ID NO: 3113085 - RNA, 18 nt, Human
gucugaggaauccagacc

SEQ ID NO: 3113086 - RNA, 19 nt, Human
gucugaggaauccagaccc

SEQ ID NO: 3113087 - RNA, 20 nt, Human
gucucacuauguugcccagg

SEQ ID NO: 3113088 - RNA, 21 nt, Human
gucucacuauguugcccaggc

SEQ ID NO: 3113089 - RNA, 13 nt, Human
gucucacuguugc

SEQ ID NO: 3113090 - RNA, 23 nt, Human
gucucacuauguugcccaggcag

SEQ ID NO: 3113091 - RNA, 16 nt, Human
gucucacuguugccca

SEQ ID NO: 3113092 - RNA, 17 nt, Human
gucucacuguugcccag

SEQ ID NO: 3113093 - RNA, 18 nt, Human
gucucacuguugcccagg

SEQ ID NO: 3113094 - RNA, 19 nt, Human
gucucacuguugcccaggc

SEQ ID NO: 3113095 - RNA, 20 nt, Human
gucucacuguugcccaggcu

SEQ ID NO: 3113096 - RNA, 21 nt, Human
gucucacuguugcccaggcug

SEQ ID NO: 3113097 - RNA, 22 nt, Human
gucucacuguugcccaggcugg

SEQ ID NO: 3113098 - RNA, 23 nt, Human
gucucacuguugcccaggcuggc

SEQ ID NO: 3113099 - RNA, 15 nt, Human
guccuuaccagcaga

SEQ ID NO: 3113100 - RNA, 17 nt, Human
guccuuaccagcagagc

SEQ ID NO: 3113101 - RNA, 16 nt, Human
guccuuaccagcagag

SEQ ID NO: 3113102 - RNA, 15 nt, Human
gucuacacugugcug

SEQ ID NO: 3113103 - RNA, 14 nt, Human
gggcuucaguggca

SEQ ID NO: 3113104 - RNA, 14 nt, Human
gggcugcaccggcu

SEQ ID NO: 3113105 - RNA, 16 nt, Human
gggcugaggugggagg

SEQ ID NO: 3113106 - RNA, 13 nt, Human
gggcucugccucc

SEQ ID NO: 3113107 - RNA, 20 nt, Human
gggcucugccucccaucacc

SEQ ID NO: 3113108 - RNA, 17 nt, Human
gggcucugccucccauc

SEQ ID NO: 3113109 - RNA, 16 nt, Human
gggcucugccucccau

SEQ ID NO: 3113110 - RNA, 15 nt, Human
gggcucugccuccca

SEQ ID NO: 3113111 - RNA, 19 nt, Human
gggccuggccugagcuggg

SEQ ID NO: 3113112 - RNA, 12 nt, Human
gggccuggcuca

SEQ ID NO: 3113113 - RNA, 16 nt, Human
gggccuggcucaggug

SEQ ID NO: 3113114 - RNA, 14 nt, Human
gggccuggcucagg

SEQ ID NO: 3113115 - RNA, 18 nt, Human
gggccuggucguuuucaa

SEQ ID NO: 3113116 - RNA, 23 nt, Human
gggcucccuucccaccucucuca

SEQ ID NO: 3113117 - RNA, 18 nt, Human
gggcucccuucccaccuc

SEQ ID NO: 3113118 - RNA, 17 nt, Human
gggcucccuucccaccu

SEQ ID NO: 3113119 - RNA, 14 nt, Human
gggcucccuuccca

SEQ ID NO: 3113120 - RNA, 13 nt, Human
gggcucccuuccc

SEQ ID NO: 3113121 - RNA, 16 nt, Human
gggcgcgguggcucac

SEQ ID NO: 3113122 - RNA, 23 nt, Human
ggggcugcaccggcuggccuggc

SEQ ID NO: 3113123 - RNA, 17 nt, Human
ggggcugggcagaggaa

SEQ ID NO: 3113124 - RNA, 16 nt, Human
ggggcugggcagagga

SEQ ID NO: 3113125 - RNA, 13 nt, Human
ggggcugggacau

SEQ ID NO: 3113126 - RNA, 23 nt, Human
gggguucccuuuuuuggcugcug

SEQ ID NO: 3113127 - RNA, 19 nt, Human
ggguacuuguggacacagc

SEQ ID NO: 3113128 - RNA, 22 nt, Human
ggguacuuguggacacagcucu

SEQ ID NO: 3113129 - RNA, 23 nt, Human
ggguacuuguggacacagcucuu

SEQ ID NO: 3113130 - RNA, 23 nt, Human
ggguagagcggagaaaggaaggg

SEQ ID NO: 3113131 - RNA, 13 nt, Human
ggguacccacugc

SEQ ID NO: 3113132 - RNA, 15 nt, Human
ggguacccacugcuc

SEQ ID NO: 3113133 - RNA, 18 nt, Human
ggguacccacugcucugg

SEQ ID NO: 3113134 - RNA, 11 nt, Human
ggggagaaagu

SEQ ID NO: 3113135 - RNA, 21 nt, Human
gggcuuggggaccagagcugc

SEQ ID NO: 3113136 - RNA, 13 nt, Human
ggggaguggccac

SEQ ID NO: 3113137 - RNA, 17 nt, Human
ggggaucacagccucug

SEQ ID NO: 3113138 - RNA, 15 nt, Human
gggcuucaguggcag

SEQ ID NO: 3113139 - RNA, 16 nt, Human
gggcuucaguggcagc

SEQ ID NO: 3113140 - RNA, 17 nt, Human
gggcuucaguggcagcu

SEQ ID NO: 3113141 - RNA, 18 nt, Human
gggcuucaguggcagcug

SEQ ID NO: 3113142 - RNA, 19 nt, Human
gggcuucaguggcagcugc

SEQ ID NO: 3113143 - RNA, 20 nt, Human
gggcuucaguggcagcugcu

SEQ ID NO: 3113144 - RNA, 19 nt, Human
gggcuucauccuccucaga

SEQ ID NO: 3113145 - RNA, 20 nt, Human
gggcuuggggaccagagcug

SEQ ID NO: 3113146 - RNA, 20 nt, Human
gggcuucauccuccucagau

SEQ ID NO: 3113147 - RNA, 15 nt, Human
gguggcagcugcggu

SEQ ID NO: 3113148 - RNA, 23 nt, Human
gguggcagcugcgguccacccag

SEQ ID NO: 3113149 - RNA, 11 nt, Human
gguggcagcug

SEQ ID NO: 3113150 - RNA, 13 nt, Human
gguggcagcucac

SEQ ID NO: 3113151 - RNA, 12 nt, Human
gguggcagcugc

SEQ ID NO: 3113152 - RNA, 13 nt, Human
gguggcagcugcg

SEQ ID NO: 3113153 - RNA, 22 nt, Human
ggugcuaucucccccagcccca

SEQ ID NO: 3113154 - RNA, 21 nt, Human
ggugcuaucucccccagcccc

SEQ ID NO: 3113155 - RNA, 23 nt, Human
ggugcuaucucccccagccccau

SEQ ID NO: 3113156 - RNA, 15 nt, Human
ggugcgaucuggguu

SEQ ID NO: 3113157 - RNA, 16 nt, Human
ggugaccucugccuga

SEQ ID NO: 3113158 - RNA, 14 nt, Human
ggugaccucugccu

SEQ ID NO: 3113159 - RNA, 15 nt, Human
ggucugacccacugc

SEQ ID NO: 3113160 - RNA, 16 nt, Human
ggucugacccacugcu

SEQ ID NO: 3113161 - RNA, 21 nt, Human
ggucucacuauguugcccagg

SEQ ID NO: 3113162 - RNA, 12 nt, Human
ggucucacucug

SEQ ID NO: 3113163 - RNA, 19 nt, Human
ggucugaggaauccagacc

SEQ ID NO: 3113164 - RNA, 16 nt, Human
ggugaacuugguuccc

SEQ ID NO: 3113165 - RNA, 18 nt, Human
ggugaagugaagacaaug

SEQ ID NO: 3113166 - RNA, 22 nt, Human
ggucucacuauguugcccaggc

SEQ ID NO: 3113167 - RNA, 22 nt, Human
ggucccugguggcagcucaccu

SEQ ID NO: 3113168 - RNA, 14 nt, Human
ggucccugguggca

SEQ ID NO: 3113169 - RNA, 17 nt, Human
gguacccacugcucugg

SEQ ID NO: 3113170 - RNA, 16 nt, Human
gguacccacugcucug

SEQ ID NO: 3113171 - RNA, 15 nt, Human
ggguugggcuggugu

SEQ ID NO: 3113172 - RNA, 20 nt, Human
gguacuuguggacacagcuc

SEQ ID NO: 3113173 - RNA, 22 nt, Human
gguacuuguggacacagcucuu

SEQ ID NO: 3113174 - RNA, 21 nt, Human
gguacuuguggacacagcucu

SEQ ID NO: 3113175 - RNA, 23 nt, Human
ggguucccuuuuuuggcugcuga

SEQ ID NO: 3113176 - RNA, 22 nt, Human
ggguucuacccaggugcuagga

SEQ ID NO: 3113177 - RNA, 17 nt, Human
ggguucuacccaggugc

SEQ ID NO: 3113178 - RNA, 16 nt, Human
ggguuggccccugccc

SEQ ID NO: 3113179 - RNA, 19 nt, Human
ggguuggccccugcccggc

SEQ ID NO: 3113180 - RNA, 12 nt, Human
ggucacucuggc

SEQ ID NO: 3113181 - RNA, 12 nt, Human
ggucagagccug

SEQ ID NO: 3113182 - RNA, 22 nt, Human
ggucacucuggcagcucagaga

SEQ ID NO: 3113183 - RNA, 20 nt, Human
ggucacucuggcagcucaga

SEQ ID NO: 3113184 - RNA, 16 nt, Human
ggucacucuggcagcu

SEQ ID NO: 3113185 - RNA, 13 nt, Human
ggucagagccugc

SEQ ID NO: 3113186 - RNA, 14 nt, Human
ggucagagccugca

SEQ ID NO: 3113187 - RNA, 15 nt, Human
ggucagagccugcag

SEQ ID NO: 3113188 - RNA, 16 nt, Human
ggucagagccugcagu

SEQ ID NO: 3113189 - RNA, 13 nt, Human
ggucccccuucca

SEQ ID NO: 3113190 - RNA, 23 nt, Human
ggucccccuuccauggacuuugu

SEQ ID NO: 3113191 - RNA, 18 nt, Human
ggucccccuuccauggac

SEQ ID NO: 3113192 - RNA, 22 nt, Human
ggucccacucaguccauagcag

SEQ ID NO: 3113193 - RNA, 12 nt, Human
ggucccacucag

SEQ ID NO: 3113194 - RNA, 14 nt, Human
ggucccacucaguc

SEQ ID NO: 3113195 - RNA, 22 nt, Human
ggucccaccccacacacgccag

SEQ ID NO: 3113196 - RNA, 11 nt, Human
ggucagagccu

SEQ ID NO: 3113197 - RNA, 23 nt, Human
guaaauuaacuuuuauaaacuuu

SEQ ID NO: 3113198 - RNA, 18 nt, Human
guaaggaauaccuguccc

SEQ ID NO: 3113199 - RNA, 13 nt, Human
guaaggaaugauu

SEQ ID NO: 3113200 - RNA, 23 nt, Human
guaaggaauaccugucccccuga

SEQ ID NO: 3113201 - RNA, 21 nt, Human
guaaggaauaccugucccccu

SEQ ID NO: 3113202 - RNA, 20 nt, Human
guaaggaauaccuguccccc

SEQ ID NO: 3113203 - RNA, 22 nt, Human
guaaguauucuuauuuaaugaa

SEQ ID NO: 3113204 - RNA, 15 nt, Human
guaaauuaacuuuua

SEQ ID NO: 3113205 - RNA, 16 nt, Human
guaaauuaacuuuuau

SEQ ID NO: 3113206 - RNA, 17 nt, Human
guaaauuaacuuuuaua

SEQ ID NO: 3113207 - RNA, 21 nt, Human
guaaauuaacuuuuauaaacu

SEQ ID NO: 3113208 - RNA, 22 nt, Human
guaaauuaacuuuuauaaacuu

SEQ ID NO: 3113209 - RNA, 18 nt, Human
guaaaugggggugcauuu

SEQ ID NO: 3113210 - RNA, 19 nt, Human
guaaaugggggugcauuug

SEQ ID NO: 3113211 - RNA, 20 nt, Human
guaaaugggggugcauuuga

SEQ ID NO: 3113212 - RNA, 13 nt, Human
gguuggugggggc

SEQ ID NO: 3113213 - RNA, 13 nt, Human
gguuuaagcuguu

SEQ ID NO: 3113214 - RNA, 14 nt, Human
gguugggcuggugu

SEQ ID NO: 3113215 - RNA, 13 nt, Human
gguggccucccaa

SEQ ID NO: 3113216 - RNA, 21 nt, Human
gguucaagcgauucuucugcu

SEQ ID NO: 3113217 - RNA, 17 nt, Human
gguggccucccaacuca

SEQ ID NO: 3113218 - RNA, 20 nt, Human
gguucacugcaaccuccgcc

SEQ ID NO: 3113219 - RNA, 22 nt, Human
gguucaagcgauucuucugcuu

SEQ ID NO: 3113220 - RNA, 23 nt, Human
gguucaagcgauucuucugcuuc

SEQ ID NO: 3113221 - RNA, 14 nt, Human
gguugaagcaccaa

SEQ ID NO: 3113222 - RNA, 23 nt, Human
gguuuugccauguuggccaggcu

SEQ ID NO: 3113223 - RNA, 15 nt, Human
gguuuucuguucuuu

SEQ ID NO: 3113224 - RNA, 12 nt, Human
gguuuucuguuc

SEQ ID NO: 3113225 - RNA, 13 nt, Human
gguuuucuguucu

SEQ ID NO: 3113226 - RNA, 16 nt, Human
guacuucuccacccug

SEQ ID NO: 3113227 - RNA, 17 nt, Human
guacuucuccacccugc

SEQ ID NO: 3113228 - RNA, 18 nt, Human
guacuucuccacccugcu

SEQ ID NO: 3113229 - RNA, 19 nt, Human
guacuucuccacccugcuc

SEQ ID NO: 3113230 - RNA, 20 nt, Human
guacuucuccacccugcucu

SEQ ID NO: 3113231 - RNA, 21 nt, Human
guacuucuccacccugcucuc

SEQ ID NO: 3113232 - RNA, 16 nt, Human
guacuuguggacacag

SEQ ID NO: 3113233 - RNA, 20 nt, Human
guacuuguggacacagcucu

SEQ ID NO: 3113234 - RNA, 16 nt, Human
guagagcggagaaagg

SEQ ID NO: 3113235 - RNA, 18 nt, Human
guagagccagggucucac

SEQ ID NO: 3113236 - RNA, 21 nt, Human
guacuuguggacacagcucuu

SEQ ID NO: 3113237 - RNA, 13 nt, Human
guaccucuugagc

SEQ ID NO: 3113238 - RNA, 21 nt, Human
guaccucuugagccuugaacu

SEQ ID NO: 3113239 - RNA, 22 nt, Human
guaccucuugagccuugaacuu

SEQ ID NO: 3113240 - RNA, 16 nt, Human
guacccacugcucugg

SEQ ID NO: 3113241 - RNA, 14 nt, Human
guacuucuccaccc

SEQ ID NO: 3113242 - RNA, 15 nt, Human
guacuucuccacccu

SEQ ID NO: 3113243 - RNA, 17 nt, Human
guacguugugcauuugg

SEQ ID NO: 3113244 - RNA, 15 nt, Human
guacuaaggaaucuu

SEQ ID NO: 3113245 - RNA, 23 nt, Human
guacuaaggaaucuuucugcuuu

SEQ ID NO: 3113246 - RNA, 17 nt, Human
guacgucugacaggcaa

SEQ ID NO: 3113247 - RNA, 14 nt, Human
guacguugugcauu

SEQ ID NO: 3113248 - RNA, 15 nt, Human
guacguugugcauuu

SEQ ID NO: 3113249 - RNA, 16 nt, Human
guacguugugcauuug

SEQ ID NO: 3113250 - RNA, 14 nt, Human
guacgucugacagg

SEQ ID NO: 3113251 - RNA, 15 nt, Human
guacgucugacaggc

SEQ ID NO: 3113252 - RNA, 14 nt, Human
guaauuaaguacua

SEQ ID NO: 3113253 - RNA, 17 nt, Human
guaauuaaguacuaugu

SEQ ID NO: 3113254 - RNA, 20 nt, Human
guaauuaaguacuauguauc

SEQ ID NO: 3113255 - RNA, 21 nt, Human
guaauuaaguacuauguauca

SEQ ID NO: 3113256 - RNA, 18 nt, Human
guacacuguuucaaacuu

SEQ ID NO: 3113257 - RNA, 15 nt, Human
guacccacugcucug

SEQ ID NO: 3113258 - RNA, 20 nt, Human
guacauaaugcgugcauacc

SEQ ID NO: 3113259 - RNA, 20 nt, Human
guacagcaaggagauuuaca

SEQ ID NO: 3113260 - RNA, 22 nt, Human
guacagagcccacgcccccacu

SEQ ID NO: 3113261 - RNA, 18 nt, Human
guacagagcccacgcccc

SEQ ID NO: 3113262 - RNA, 12 nt, Human
guacagagccca

SEQ ID NO: 3113263 - RNA, 21 nt, Human
guacacuguuucaaacuuuac

SEQ ID NO: 3113264 - RNA, 19 nt, Human
guacacuguuucaaacuuu

SEQ ID NO: 3113265 - RNA, 20 nt, Human
guacacuguuucaaacuuua

SEQ ID NO: 3113266 - RNA, 16 nt, Human
guacagacaacaaacc

SEQ ID NO: 3113267 - RNA, 18 nt, Human
gcuugaggguugggcugg

SEQ ID NO: 3113268 - RNA, 20 nt, Human
gcuugaggguugggcuggug

SEQ ID NO: 3113269 - RNA, 15 nt, Human
gcuuugugauuuuug

SEQ ID NO: 3113270 - RNA, 21 nt, Human
gcuuuguuuguugucagcuga

SEQ ID NO: 3113271 - RNA, 18 nt, Human
ggaaaacaugcuacacac

SEQ ID NO: 3113272 - RNA, 18 nt, Human
ggaaaagcugcugacagu

SEQ ID NO: 3113273 - RNA, 20 nt, Human
ggaaaagcugcugacagugu

SEQ ID NO: 3113274 - RNA, 14 nt, Human
ggaaaagcugcuga

SEQ ID NO: 3113275 - RNA, 22 nt, Human
ggaaaggcuccaggagcagcca

SEQ ID NO: 3113276 - RNA, 21 nt, Human
ggaaaggcuccaggagcagcc

SEQ ID NO: 3113277 - RNA, 20 nt, Human
ggaaaggcuccaggagcagc

SEQ ID NO: 3113278 - RNA, 19 nt, Human
ggaaaggcuccaggagcag

SEQ ID NO: 3113279 - RNA, 17 nt, Human
ggaaaggcuccaggagc

SEQ ID NO: 3113280 - RNA, 12 nt, Human
ggaaaggcucca

SEQ ID NO: 3113281 - RNA, 14 nt, Human
ggaaaggcuccagg

SEQ ID NO: 3113282 - RNA, 13 nt, Human
ggaaaggcuccag

SEQ ID NO: 3113283 - RNA, 19 nt, Human
ggaaaaucagccugcucca

SEQ ID NO: 3113284 - RNA, 23 nt, Human
ggaaaaucagccugcuccagcug

SEQ ID NO: 3113285 - RNA, 21 nt, Human
ggaaaucaccgaaaacguggc

SEQ ID NO: 3113286 - RNA, 14 nt, Human
ggaaaucaccgaaa

SEQ ID NO: 3113287 - RNA, 15 nt, Human
gcugccaaugggagc

SEQ ID NO: 3113288 - RNA, 19 nt, Human
gcugccaaugggagcucau

SEQ ID NO: 3113289 - RNA, 16 nt, Human
gcugccaaugggagcu

SEQ ID NO: 3113290 - RNA, 13 nt, Human
gcuguucagcugg

SEQ ID NO: 3113291 - RNA, 14 nt, Human
gcuguucagcuggu

SEQ ID NO: 3113292 - RNA, 17 nt, Human
gcuuagucacugagaca

SEQ ID NO: 3113293 - RNA, 15 nt, Human
gcuuagucacugaga

SEQ ID NO: 3113294 - RNA, 20 nt, Human
gcuuagucacugagacagcc

SEQ ID NO: 3113295 - RNA, 19 nt, Human
gcuuagucacugagacagc

SEQ ID NO: 3113296 - RNA, 21 nt, Human
gcuuagucacugagacagccc

SEQ ID NO: 3113297 - RNA, 16 nt, Human
gcuugaggguugggcu

SEQ ID NO: 3113298 - RNA, 15 nt, Human
gcuuccagugaggcu

SEQ ID NO: 3113299 - RNA, 17 nt, Human
gcuucauuuccuguguc

SEQ ID NO: 3113300 - RNA, 16 nt, Human
gcuuccagugaggcuc

SEQ ID NO: 3113301 - RNA, 16 nt, Human
gcuucaguggcagcug

SEQ ID NO: 3113302 - RNA, 15 nt, Human
gcuucaguggcagcu

SEQ ID NO: 3113303 - RNA, 19 nt, Human
gcuuaucucaggggugugc

SEQ ID NO: 3113304 - RNA, 13 nt, Human
gcuuaucucaggg

SEQ ID NO: 3113305 - RNA, 12 nt, Human
gcuuauacacuu

SEQ ID NO: 3113306 - RNA, 13 nt, Human
gcuucauuuccug

SEQ ID NO: 3113307 - RNA, 16 nt, Human
gcuucauuuccugugu

SEQ ID NO: 3113308 - RNA, 15 nt, Human
gcuucauccuccuca

SEQ ID NO: 3113309 - RNA, 12 nt, Human
gcuucauccucc

SEQ ID NO: 3113310 - RNA, 17 nt, Human
gcuucaguggcagcugc

SEQ ID NO: 3113311 - RNA, 18 nt, Human
gcuucaguggcagcugcu

SEQ ID NO: 3113312 - RNA, 23 nt, Human
ggaaggggagauaaggguaucug

SEQ ID NO: 3113313 - RNA, 18 nt, Human
ggaaguacuggagaaaau

SEQ ID NO: 3113314 - RNA, 16 nt, Human
ggaaguacuggagaaa

SEQ ID NO: 3113315 - RNA, 12 nt, Human
ggaaguacugga

SEQ ID NO: 3113316 - RNA, 14 nt, Human
ggaaugauuaauua

SEQ ID NO: 3113317 - RNA, 19 nt, Human
ggaauguuugccucugccu

SEQ ID NO: 3113318 - RNA, 12 nt, Human
ggaaugcagugg

SEQ ID NO: 3113319 - RNA, 24 nt, Human
ggaaugauuaauuaaaacacaaca

SEQ ID NO: 3113320 - RNA, 22 nt, Human
ggacacuaaccacgcuggaccu

SEQ ID NO: 3113321 - RNA, 13 nt, Human
ggaccagagcugc

SEQ ID NO: 3113322 - RNA, 23 nt, Human
ggaccucaggugagaagcagagg

SEQ ID NO: 3113323 - RNA, 20 nt, Human
ggaccucaggccugggggcu

SEQ ID NO: 3113324 - RNA, 19 nt, Human
ggaccucaggugagaagca

SEQ ID NO: 3113325 - RNA, 15 nt, Human
ggaccuugaacuggg

SEQ ID NO: 3113326 - RNA, 17 nt, Human
ggaccuugaacugggua

SEQ ID NO: 3113327 - RNA, 17 nt, Human
ggacgcuacccgggaag

SEQ ID NO: 3113328 - RNA, 20 nt, Human
ggacgcuacccgggaagggg

SEQ ID NO: 3113329 - RNA, 19 nt, Human
ggacgcuacccgggaaggg

SEQ ID NO: 3113330 - RNA, 17 nt, Human
ggacacucaaaagcugg

SEQ ID NO: 3113331 - RNA, 20 nt, Human
ggacagaggggguggccucc

SEQ ID NO: 3113332 - RNA, 15 nt, Human
ggacagccacggcca

SEQ ID NO: 3113333 - RNA, 19 nt, Human
ggacagccacggccaggcc

SEQ ID NO: 3113334 - RNA, 20 nt, Human
ggacagccacggccaggcca

SEQ ID NO: 3113335 - RNA, 21 nt, Human
ggacagccacggccaggccag

SEQ ID NO: 3113336 - RNA, 14 nt, Human
ggacauggacaagg

SEQ ID NO: 3113337 - RNA, 20 nt, Human
ggacauugcggacagccacg

SEQ ID NO: 3113338 - RNA, 18 nt, Human
ggagaagcggcuggcagc

SEQ ID NO: 3113339 - RNA, 17 nt, Human
ggagaagcggcuggcag

SEQ ID NO: 3113340 - RNA, 16 nt, Human
ggcauuccccaggagg

SEQ ID NO: 3113341 - RNA, 19 nt, Human
ggcauuccccaggaggcca

SEQ ID NO: 3113342 - RNA, 18 nt, Human
ggcauuccccaggaggcc

SEQ ID NO: 3113343 - RNA, 18 nt, Human
ggcaugggaaugaauguc

SEQ ID NO: 3113344 - RNA, 17 nt, Human
ggcauuccccaggaggc

SEQ ID NO: 3113345 - RNA, 22 nt, Human
ggcaugggaaugaaugucagug

SEQ ID NO: 3113346 - RNA, 20 nt, Human
ggccagccuugaccauucuc

SEQ ID NO: 3113347 - RNA, 17 nt, Human
ggccagcugcuugggcu

SEQ ID NO: 3113348 - RNA, 22 nt, Human
ggccagccuugaccauucucca

SEQ ID NO: 3113349 - RNA, 18 nt, Human
ggccaggcccucugccca

SEQ ID NO: 3113350 - RNA, 23 nt, Human
ggccagcugcuugggcuucaucc

SEQ ID NO: 3113351 - RNA, 16 nt, Human
ggccaugggccuccug

SEQ ID NO: 3113352 - RNA, 18 nt, Human
ggcaugacacgaauauug

SEQ ID NO: 3113353 - RNA, 19 nt, Human
ggcagggucucacucuguc

SEQ ID NO: 3113354 - RNA, 20 nt, Human
ggcagggucucacucugucg

SEQ ID NO: 3113355 - RNA, 13 nt, Human
ggcagugggagcu

SEQ ID NO: 3113356 - RNA, 14 nt, Human
ggcagugggagcug

SEQ ID NO: 3113357 - RNA, 16 nt, Human
ggcagugggagcugcc

SEQ ID NO: 3113358 - RNA, 14 nt, Human
ggcagcucaccucu

SEQ ID NO: 3113359 - RNA, 12 nt, Human
ggcagcucaccu

SEQ ID NO: 3113360 - RNA, 22 nt, Human
ggcagcugcuuuugucuauggg

SEQ ID NO: 3113361 - RNA, 17 nt, Human
ggcagcuugaggguugg

SEQ ID NO: 3113362 - RNA, 21 nt, Human
ggcagcucagagaggguggga

SEQ ID NO: 3113363 - RNA, 13 nt, Human
ggcagcucagaga

SEQ ID NO: 3113364 - RNA, 20 nt, Human
ggcacccaccaucaugucug

SEQ ID NO: 3113365 - RNA, 23 nt, Human
ggcacccaccaucaugucuggcu

SEQ ID NO: 3113366 - RNA, 22 nt, Human
ggcacccggccccugcugguuc

SEQ ID NO: 3113367 - RNA, 14 nt, Human
ggcaaugcuggcug

SEQ ID NO: 3113368 - RNA, 15 nt, Human
ggcaaugcuggcugu

SEQ ID NO: 3113369 - RNA, 23 nt, Human
ggcaaugcuggcuguuggcuggg

SEQ ID NO: 3113370 - RNA, 18 nt, Human
ggcaacccccagccugcu

SEQ ID NO: 3113371 - RNA, 16 nt, Human
ggauucuuauggacaa

SEQ ID NO: 3113372 - RNA, 23 nt, Human
ggauuacaagcgugagccacugc

SEQ ID NO: 3113373 - RNA, 16 nt, Human
ggcaacccccagccug

SEQ ID NO: 3113374 - RNA, 17 nt, Human
ggcaacccccagccugc

SEQ ID NO: 3113375 - RNA, 17 nt, Human
ggauugcuacuguccua

SEQ ID NO: 3113376 - RNA, 18 nt, Human
ggauacaaaagcauguga

SEQ ID NO: 3113377 - RNA, 14 nt, Human
ggagugcagugagc

SEQ ID NO: 3113378 - RNA, 12 nt, Human
ggagugcaguga

SEQ ID NO: 3113379 - RNA, 23 nt, Human
ggagugaguugauagcacagacc

SEQ ID NO: 3113380 - RNA, 17 nt, Human
ggaucccucauccucau

SEQ ID NO: 3113381 - RNA, 13 nt, Human
ggaucccucaucc

SEQ ID NO: 3113382 - RNA, 22 nt, Human
ggaucccucauccucauaccca

SEQ ID NO: 3113383 - RNA, 17 nt, Human
ggaugcagccucacagu

SEQ ID NO: 3113384 - RNA, 16 nt, Human
ggaugcagccucacag

SEQ ID NO: 3113385 - RNA, 21 nt, Human
ggaugauuggaggggggaggu

SEQ ID NO: 3113386 - RNA, 23 nt, Human
ggaugcacagaguuguuacauuu

SEQ ID NO: 3113387 - RNA, 13 nt, Human
ggauccuccaggu

SEQ ID NO: 3113388 - RNA, 12 nt, Human
ggauccuccagg

SEQ ID NO: 3113389 - RNA, 15 nt, Human
ggaugcuuguacaua

SEQ ID NO: 3113390 - RNA, 19 nt, Human
ggauuacaagcgugagcca

SEQ ID NO: 3113391 - RNA, 19 nt, Human
ggaugcagccucacagucc

SEQ ID NO: 3113392 - RNA, 11 nt, Human
ggcccagagag

SEQ ID NO: 3113393 - RNA, 17 nt, Human
ggcccucugcccacucc

SEQ ID NO: 3113394 - RNA, 16 nt, Human
ggcccucugcccacuc

SEQ ID NO: 3113395 - RNA, 15 nt, Human
ggcccucugcccacu

SEQ ID NO: 3113396 - RNA, 13 nt, Human
ggcccucugccca

SEQ ID NO: 3113397 - RNA, 20 nt, Human
ggcccucugcccacucccug

SEQ ID NO: 3113398 - RNA, 19 nt, Human
ggcccucugcccacucccu

SEQ ID NO: 3113399 - RNA, 21 nt, Human
ggcccucugcccacucccugc

SEQ ID NO: 3113400 - RNA, 15 nt, Human
ggcccugccuccuuu

SEQ ID NO: 3113401 - RNA, 14 nt, Human
ggcccugccuccuu

SEQ ID NO: 3113402 - RNA, 13 nt, Human
ggcccugccuccu

SEQ ID NO: 3113403 - RNA, 17 nt, Human
ggccucuuaugggcugg

SEQ ID NO: 3113404 - RNA, 18 nt, Human
ggccucuuaugggcuggg

SEQ ID NO: 3113405 - RNA, 15 nt, Human
ggccucugcacuccc

SEQ ID NO: 3113406 - RNA, 14 nt, Human
ggccucugcacucc

SEQ ID NO: 3113407 - RNA, 13 nt, Human
ggccucugcacuc

SEQ ID NO: 3113408 - RNA, 23 nt, Human
ggccuagcauacguacacauuuu

SEQ ID NO: 3113409 - RNA, 22 nt, Human
ggcuagagguucaaagauauuu

SEQ ID NO: 3113410 - RNA, 17 nt, Human
ggcuagagguucaaaga

SEQ ID NO: 3113411 - RNA, 16 nt, Human
ggcuagagguucaaag

SEQ ID NO: 3113412 - RNA, 16 nt, Human
ggcuaggaccccucca

SEQ ID NO: 3113413 - RNA, 22 nt, Human
ggcuaggaccccuccauguggg

SEQ ID NO: 3113414 - RNA, 14 nt, Human
ggcuaugcauuuga

SEQ ID NO: 3113415 - RNA, 16 nt, Human
ggcuaguugggcuucc

SEQ ID NO: 3113416 - RNA, 15 nt, Human
ggcuaguugggcuuc

SEQ ID NO: 3113417 - RNA, 23 nt, Human
ggcuagugugguguuuccuggca

SEQ ID NO: 3113418 - RNA, 15 nt, Human
ggcuaugcauuugaa

SEQ ID NO: 3113419 - RNA, 15 nt, Human
ggcucaaguccucuu

SEQ ID NO: 3113420 - RNA, 21 nt, Human
ggcucaaguccucuuuucuga

SEQ ID NO: 3113421 - RNA, 12 nt, Human
ggcuccaggagc

SEQ ID NO: 3113422 - RNA, 19 nt, Human
ggcuccaggagcagccaca

SEQ ID NO: 3113423 - RNA, 16 nt, Human
ggcuccaggcuccuuu

SEQ ID NO: 3113424 - RNA, 18 nt, Human
ggcuccaggagcagccac

SEQ ID NO: 3113425 - RNA, 11 nt, Human
ggcuccaggcu

SEQ ID NO: 3113426 - RNA, 15 nt, Human
ggcuccaggcuccuu

SEQ ID NO: 3113427 - RNA, 23 nt, Human
ggcgcugccccuggcagccccug

SEQ ID NO: 3113428 - RNA, 21 nt, Human
ggcgcugccccuggcagcccc

SEQ ID NO: 3113429 - RNA, 19 nt, Human
ggcgcugccccuggcagcc

SEQ ID NO: 3113430 - RNA, 18 nt, Human
ggcgcugccccuggcagc

SEQ ID NO: 3113431 - RNA, 19 nt, Human
ggccuggccugagcuggga

SEQ ID NO: 3113432 - RNA, 22 nt, Human
ggccugggggcugggcagagga

SEQ ID NO: 3113433 - RNA, 20 nt, Human
ggccugggggcugggcagag

SEQ ID NO: 3113434 - RNA, 14 nt, Human
ggccugggggcugg

SEQ ID NO: 3113435 - RNA, 16 nt, Human
gccgagaucacgccac

SEQ ID NO: 3113436 - RNA, 18 nt, Human
gccgagaucacgccacug

SEQ ID NO: 3113437 - RNA, 17 nt, Human
gccgagauugcaccacu

SEQ ID NO: 3113438 - RNA, 18 nt, Human
gccgagauugcaccacug

SEQ ID NO: 3113439 - RNA, 22 nt, Human
gcccuucucuccagccccugga

SEQ ID NO: 3113440 - RNA, 21 nt, Human
gcccuucucuccagccccugg

SEQ ID NO: 3113441 - RNA, 19 nt, Human
gcccuucucuccagccccu

SEQ ID NO: 3113442 - RNA, 18 nt, Human
gcccuucucuccagcccc

SEQ ID NO: 3113443 - RNA, 14 nt, Human
gcccugguggcagu

SEQ ID NO: 3113444 - RNA, 17 nt, Human
gcccugguggcaguggg

SEQ ID NO: 3113445 - RNA, 18 nt, Human
gcccugguggcaguggga

SEQ ID NO: 3113446 - RNA, 19 nt, Human
gcccugguggcagugggag

SEQ ID NO: 3113447 - RNA, 20 nt, Human
gcccugguggcagugggagc

SEQ ID NO: 3113448 - RNA, 21 nt, Human
gcccugguggcagugggagcu

SEQ ID NO: 3113449 - RNA, 22 nt, Human
gcccugguggcagugggagcug

SEQ ID NO: 3113450 - RNA, 23 nt, Human
gcccugguggcagugggagcugc

SEQ ID NO: 3113451 - RNA, 15 nt, Human
gcccggcuccaggcu

SEQ ID NO: 3113452 - RNA, 16 nt, Human
gcccggcuccaggcuc

SEQ ID NO: 3113453 - RNA, 13 nt, Human
gccccugccaccc

SEQ ID NO: 3113454 - RNA, 14 nt, Human
gccccugccacccu

SEQ ID NO: 3113455 - RNA, 15 nt, Human
gccccugccacccug

SEQ ID NO: 3113456 - RNA, 17 nt, Human
gccccuguucuggcaga

SEQ ID NO: 3113457 - RNA, 21 nt, Human
gccccuguucuggcagaguug

SEQ ID NO: 3113458 - RNA, 15 nt, Human
gcagacucuacagag

SEQ ID NO: 3113459 - RNA, 17 nt, Human
gcccggcuccaggcucc

SEQ ID NO: 3113460 - RNA, 18 nt, Human
gcccggcuccaggcuccu

SEQ ID NO: 3113461 - RNA, 14 nt, Human
gcccugagcuuucu

SEQ ID NO: 3113462 - RNA, 16 nt, Human
gcccugagcuuucugc

SEQ ID NO: 3113463 - RNA, 12 nt, Human
gcccucugccca

SEQ ID NO: 3113464 - RNA, 15 nt, Human
gccugcuccagcugu

SEQ ID NO: 3113465 - RNA, 18 nt, Human
gccugcuccagcuguuca

SEQ ID NO: 3113466 - RNA, 16 nt, Human
gccugcuccagcuguu

SEQ ID NO: 3113467 - RNA, 22 nt, Human
gccugaagucacacagugaguc

SEQ ID NO: 3113468 - RNA, 18 nt, Human
gccucugccucugacaca

SEQ ID NO: 3113469 - RNA, 20 nt, Human
gccugggggcugggcagagg

SEQ ID NO: 3113470 - RNA, 17 nt, Human
gccugggcagaaggaag

SEQ ID NO: 3113471 - RNA, 16 nt, Human
gccugggcagaaggaa

SEQ ID NO: 3113472 - RNA, 14 nt, Human
gccuggauggggcu

SEQ ID NO: 3113473 - RNA, 15 nt, Human
gccuggauggggcug

SEQ ID NO: 3113474 - RNA, 15 nt, Human
gccugggcagaagga

SEQ ID NO: 3113475 - RNA, 14 nt, Human
gccuggccagaugc

SEQ ID NO: 3113476 - RNA, 15 nt, Human
gccuggccagaugca

SEQ ID NO: 3113477 - RNA, 22 nt, Human
gccuggccagaugcaccagccc

SEQ ID NO: 3113478 - RNA, 19 nt, Human
gccgagauagccaaggcca

SEQ ID NO: 3113479 - RNA, 14 nt, Human
gccucaaccuccug

SEQ ID NO: 3113480 - RNA, 16 nt, Human
gccucaaccuccuggg

SEQ ID NO: 3113481 - RNA, 19 nt, Human
gccucaagugauucuccug

SEQ ID NO: 3113482 - RNA, 20 nt, Human
gccucaagugauucuccugc

SEQ ID NO: 3113483 - RNA, 21 nt, Human
gccucaagugauucuccugcc

SEQ ID NO: 3113484 - RNA, 12 nt, Human
gccucagugcca

SEQ ID NO: 3113485 - RNA, 14 nt, Human
gccucagugccacu

SEQ ID NO: 3113486 - RNA, 23 nt, Human
gccucagccucccaaagugcugg

SEQ ID NO: 3113487 - RNA, 22 nt, Human
gccucagccucccaaagugcug

SEQ ID NO: 3113488 - RNA, 21 nt, Human
gccucacaguccuuaccagca

SEQ ID NO: 3113489 - RNA, 15 nt, Human
gccucagugccacua

SEQ ID NO: 3113490 - RNA, 21 nt, Human
gccucccaacucaccccagcc

SEQ ID NO: 3113491 - RNA, 23 nt, Human
gccucccaacucaccccagcccc

SEQ ID NO: 3113492 - RNA, 22 nt, Human
gccucccaacucaccccagccc

SEQ ID NO: 3113493 - RNA, 21 nt, Human
gccucccgaauagcugggacu

SEQ ID NO: 3113494 - RNA, 14 nt, Human
gccucccacgacug

SEQ ID NO: 3113495 - RNA, 21 nt, Human
gccucccacgacugcccggca

SEQ ID NO: 3113496 - RNA, 23 nt, Human
gccucccgaauagcugggacuac

SEQ ID NO: 3113497 - RNA, 15 nt, Human
gccucccgaguagcu

SEQ ID NO: 3113498 - RNA, 13 nt, Human
gcuccaagcuccc

SEQ ID NO: 3113499 - RNA, 15 nt, Human
gcuccaagcucccag

SEQ ID NO: 3113500 - RNA, 14 nt, Human
gcuccaagcuccca

SEQ ID NO: 3113501 - RNA, 21 nt, Human
gcuccaagcucccaggcauuc

SEQ ID NO: 3113502 - RNA, 19 nt, Human
gcuccaagcucccaggcau

SEQ ID NO: 3113503 - RNA, 18 nt, Human
gcuccaagcucccaggca

SEQ ID NO: 3113504 - RNA, 17 nt, Human
gcuccaagcucccaggc

SEQ ID NO: 3113505 - RNA, 16 nt, Human
gcuccaagcucccagg

SEQ ID NO: 3113506 - RNA, 13 nt, Human
gcuccaggcuccu

SEQ ID NO: 3113507 - RNA, 11 nt, Human
gcuccagcugu

SEQ ID NO: 3113508 - RNA, 16 nt, Human
gcuccaggcuccuuua

SEQ ID NO: 3113509 - RNA, 23 nt, Human
gcuccaggcuccuuuagcgccca

SEQ ID NO: 3113510 - RNA, 23 nt, Human
gcucagcaaaagaugcuucucac

SEQ ID NO: 3113511 - RNA, 22 nt, Human
gcucagcaaaagaugcuucuca

SEQ ID NO: 3113512 - RNA, 20 nt, Human
gcucagcaaaagaugcuucu

SEQ ID NO: 3113513 - RNA, 17 nt, Human
gcucagcaaaagaugcu

SEQ ID NO: 3113514 - RNA, 20 nt, Human
gcucaccagccccagugccc

SEQ ID NO: 3113515 - RNA, 23 nt, Human
gcucaccagccccagugcccaca

SEQ ID NO: 3113516 - RNA, 19 nt, Human
gcucaccagccccagugcc

SEQ ID NO: 3113517 - RNA, 18 nt, Human
gcucaccagccccagugc

SEQ ID NO: 3113518 - RNA, 21 nt, Human
gcucagcggggacagcuccuu

SEQ ID NO: 3113519 - RNA, 22 nt, Human
gcucagcggggacagcuccuuc

SEQ ID NO: 3113520 - RNA, 18 nt, Human
gcucaggugucccugcac

SEQ ID NO: 3113521 - RNA, 17 nt, Human
gcucaggugucccugca

SEQ ID NO: 3113522 - RNA, 20 nt, Human
gcucagcggggacagcuccu

SEQ ID NO: 3113523 - RNA, 19 nt, Human
gcucagcggggacagcucc

SEQ ID NO: 3113524 - RNA, 15 nt, Human
gcucagcggggacag

SEQ ID NO: 3113525 - RNA, 19 nt, Human
gcucaggugucccugcacu

SEQ ID NO: 3113526 - RNA, 15 nt, Human
gcuaucucccccagc

SEQ ID NO: 3113527 - RNA, 23 nt, Human
gcuaucucccccagccccauccu

SEQ ID NO: 3113528 - RNA, 22 nt, Human
gcuaucucccccagccccaucc

SEQ ID NO: 3113529 - RNA, 21 nt, Human
gcuaucucccccagccccauc

SEQ ID NO: 3113530 - RNA, 20 nt, Human
gcuaucucccccagccccau

SEQ ID NO: 3113531 - RNA, 19 nt, Human
gcuaucucccccagcccca

SEQ ID NO: 3113532 - RNA, 22 nt, Human
gcuagcagcagggagggcuucu

SEQ ID NO: 3113533 - RNA, 18 nt, Human
gcuaucucccccagcccc

SEQ ID NO: 3113534 - RNA, 17 nt, Human
gcuaucucccccagccc

SEQ ID NO: 3113535 - RNA, 16 nt, Human
gcuaucucccccagcc

SEQ ID NO: 3113536 - RNA, 20 nt, Human
gcuaccuuuguauucucucc

SEQ ID NO: 3113537 - RNA, 21 nt, Human
gcuacccgggaagggggcugg

SEQ ID NO: 3113538 - RNA, 19 nt, Human
gcuagagguucaaagauau

SEQ ID NO: 3113539 - RNA, 21 nt, Human
gcuagagguucaaagauauuu

SEQ ID NO: 3113540 - RNA, 18 nt, Human
gcuagagguucaaagaua

SEQ ID NO: 3113541 - RNA, 15 nt, Human
gcuacccgggaaggg

SEQ ID NO: 3113542 - RNA, 14 nt, Human
gcuacccgggaagg

SEQ ID NO: 3113543 - RNA, 23 nt, Human
gcuaagagggagggagggcucca

SEQ ID NO: 3113544 - RNA, 16 nt, Human
gcuaaaugugaaugau

SEQ ID NO: 3113545 - RNA, 13 nt, Human
gcuaaaugugaau

SEQ ID NO: 3113546 - RNA, 22 nt, Human
gcuaagagggagggagggcucc

SEQ ID NO: 3113547 - RNA, 21 nt, Human
gcuaagagggagggagggcuc

SEQ ID NO: 3113548 - RNA, 16 nt, Human
gcgugagccacugcac

SEQ ID NO: 3113549 - RNA, 18 nt, Human
gcgugagccacugcaccg

SEQ ID NO: 3113550 - RNA, 23 nt, Human
gcgugagccacugcaccgggcca

SEQ ID NO: 3113551 - RNA, 18 nt, Human
gcgguccacccaggagcc

SEQ ID NO: 3113552 - RNA, 19 nt, Human
gcgguccacccaggagccc

SEQ ID NO: 3113553 - RNA, 12 nt, Human
gcggggacagcu

SEQ ID NO: 3113554 - RNA, 15 nt, Human
gcgggcuuccuccug

SEQ ID NO: 3113555 - RNA, 13 nt, Human
gcggggacagcuc

SEQ ID NO: 3113556 - RNA, 16 nt, Human
gcgguccacccaggag

SEQ ID NO: 3113557 - RNA, 14 nt, Human
gcucuggacaggca

SEQ ID NO: 3113558 - RNA, 15 nt, Human
gcucuggacaggcau

SEQ ID NO: 3113559 - RNA, 16 nt, Human
gcucuggacaggcaug

SEQ ID NO: 3113560 - RNA, 21 nt, Human
gcucuggacaggcauguucuc

SEQ ID NO: 3113561 - RNA, 22 nt, Human
gcucuggacaggcauguucucu

SEQ ID NO: 3113562 - RNA, 19 nt, Human
gcucugcuccucuccccag

SEQ ID NO: 3113563 - RNA, 21 nt, Human
gcucugcuccucuccccagca

SEQ ID NO: 3113564 - RNA, 13 nt, Human
gcucugcugacag

SEQ ID NO: 3113565 - RNA, 14 nt, Human
gcucugcugacaga

SEQ ID NO: 3113566 - RNA, 18 nt, Human
gcucugcugacagacaca

SEQ ID NO: 3113567 - RNA, 19 nt, Human
gcucugcugacagacacag

SEQ ID NO: 3113568 - RNA, 20 nt, Human
gcucugcugacagacacagg

SEQ ID NO: 3113569 - RNA, 23 nt, Human
gcucugcugacagacacaggccc

SEQ ID NO: 3113570 - RNA, 13 nt, Human
gcucugcuccucu

SEQ ID NO: 3113571 - RNA, 14 nt, Human
gcucugcuccucuc

SEQ ID NO: 3113572 - RNA, 22 nt, Human
gcucugccucccaucacccgcu

SEQ ID NO: 3113573 - RNA, 15 nt, Human
gcucugccucccauc

SEQ ID NO: 3113574 - RNA, 14 nt, Human
gcucugccucccau

SEQ ID NO: 3113575 - RNA, 13 nt, Human
gcucugccuccca

SEQ ID NO: 3113576 - RNA, 14 nt, Human
gcucugcccuuggu

SEQ ID NO: 3113577 - RNA, 13 nt, Human
gcucugcccuugg

SEQ ID NO: 3113578 - RNA, 11 nt, Human
gcucugccucc

SEQ ID NO: 3113579 - RNA, 23 nt, Human
gcucugcccuugguuaggcauug

SEQ ID NO: 3113580 - RNA, 16 nt, Human
gcucgagcaugccugg

SEQ ID NO: 3113581 - RNA, 15 nt, Human
gcucccuucccaccu

SEQ ID NO: 3113582 - RNA, 18 nt, Human
gcucccuucccaccucuc

SEQ ID NO: 3113583 - RNA, 16 nt, Human
gcucccuucccaccuc

SEQ ID NO: 3113584 - RNA, 15 nt, Human
gcuccuucuguccua

SEQ ID NO: 3113585 - RNA, 21 nt, Human
gcuccuucuguccuacucugu

SEQ ID NO: 3113586 - RNA, 19 nt, Human
gcucuccgaccagacaccu

SEQ ID NO: 3113587 - RNA, 13 nt, Human
gcucuccgaccag

SEQ ID NO: 3113588 - RNA, 17 nt, Human
gcucuccgaccagacac

SEQ ID NO: 3113589 - RNA, 17 nt, Human
gcugcaguugccaguca

SEQ ID NO: 3113590 - RNA, 21 nt, Human
gcugcaguugccagucacccc

SEQ ID NO: 3113591 - RNA, 20 nt, Human
gcugcaguugccagucaccc

SEQ ID NO: 3113592 - RNA, 18 nt, Human
gcugcaguugccagucac

SEQ ID NO: 3113593 - RNA, 21 nt, Human
gcugauggugcaaugaccuuu

SEQ ID NO: 3113594 - RNA, 18 nt, Human
gcugauggugcaaugacc

SEQ ID NO: 3113595 - RNA, 23 nt, Human
gcugagugggggaucacagccuc

SEQ ID NO: 3113596 - RNA, 22 nt, Human
gcugagugggggaucacagccu

SEQ ID NO: 3113597 - RNA, 16 nt, Human
gcugauggugcaauga

SEQ ID NO: 3113598 - RNA, 15 nt, Human
gcugauggugcaaug

SEQ ID NO: 3113599 - RNA, 15 nt, Human
gcugagucugaaggc

SEQ ID NO: 3113600 - RNA, 18 nt, Human
gcugagucugaaggcugg

SEQ ID NO: 3113601 - RNA, 16 nt, Human
gcugagucugaaggcu

SEQ ID NO: 3113602 - RNA, 19 nt, Human
gcugagucugaaggcuggg

SEQ ID NO: 3113603 - RNA, 22 nt, Human
gcucuuccaggcugggagagcc

SEQ ID NO: 3113604 - RNA, 12 nt, Human
gcucuucuccag

SEQ ID NO: 3113605 - RNA, 18 nt, Human
gcucuuccaggcugggag

SEQ ID NO: 3113606 - RNA, 19 nt, Human
gcucuuccaggcugggaga

SEQ ID NO: 3113607 - RNA, 14 nt, Human
gcucuucuccaggc

SEQ ID NO: 3113608 - RNA, 16 nt, Human
gcucuucuccaggcug

SEQ ID NO: 3113609 - RNA, 21 nt, Human
gcugacagacacaggcccggc

SEQ ID NO: 3113610 - RNA, 20 nt, Human
gcugacagacacaggcccgg

SEQ ID NO: 3113611 - RNA, 14 nt, Human
gagccagggucuca

SEQ ID NO: 3113612 - RNA, 23 nt, Human
gagccagauuucacucuccuugg

SEQ ID NO: 3113613 - RNA, 19 nt, Human
gagccagggucucacuaug

SEQ ID NO: 3113614 - RNA, 18 nt, Human
gagcccugguggcagugg

SEQ ID NO: 3113615 - RNA, 16 nt, Human
gagcagagaauucucu

SEQ ID NO: 3113616 - RNA, 12 nt, Human
gagcagagacca

SEQ ID NO: 3113617 - RNA, 19 nt, Human
gagccaauuuaaagaaaac

SEQ ID NO: 3113618 - RNA, 20 nt, Human
gagccagauuucacucuccu

SEQ ID NO: 3113619 - RNA, 23 nt, Human
gagcaagacgcugugcugcccug

SEQ ID NO: 3113620 - RNA, 20 nt, Human
gagcaccuuagacagucccu

SEQ ID NO: 3113621 - RNA, 21 nt, Human
gagcacuaaggugugcucuga

SEQ ID NO: 3113622 - RNA, 19 nt, Human
gagcaccuuagacaguccc

SEQ ID NO: 3113623 - RNA, 15 nt, Human
gagcacuaaggugug

SEQ ID NO: 3113624 - RNA, 22 nt, Human
gagcaccuuagacagucccugc

SEQ ID NO: 3113625 - RNA, 21 nt, Human
gagcaccuuagacagucccug

SEQ ID NO: 3113626 - RNA, 19 nt, Human
gagaucacgccacugcacu

SEQ ID NO: 3113627 - RNA, 18 nt, Human
gagaucacgccacugcac

SEQ ID NO: 3113628 - RNA, 14 nt, Human
gagauagccaaggc

SEQ ID NO: 3113629 - RNA, 23 nt, Human
gagaucaaccccuucgcuccugu

SEQ ID NO: 3113630 - RNA, 16 nt, Human
gagauagccaaggcca

SEQ ID NO: 3113631 - RNA, 19 nt, Human
gagaggggaacagacugga

SEQ ID NO: 3113632 - RNA, 18 nt, Human
gagaggggaacagacugg

SEQ ID NO: 3113633 - RNA, 13 nt, Human
gagaggggcacag

SEQ ID NO: 3113634 - RNA, 16 nt, Human
gagagggugggagugg

SEQ ID NO: 3113635 - RNA, 14 nt, Human
gagagggugggagu

SEQ ID NO: 3113636 - RNA, 18 nt, Human
gagacuccugcaggcagc

SEQ ID NO: 3113637 - RNA, 19 nt, Human
gagacuccugcaggcagcc

SEQ ID NO: 3113638 - RNA, 21 nt, Human
gagacuccugcaggcagccag

SEQ ID NO: 3113639 - RNA, 20 nt, Human
gagacuccugcaggcagcca

SEQ ID NO: 3113640 - RNA, 18 nt, Human
gagacucgcgacaaugca

SEQ ID NO: 3113641 - RNA, 21 nt, Human
gagacucgcgacaaugcaaac

SEQ ID NO: 3113642 - RNA, 20 nt, Human
gagacucgcgacaaugcaaa

SEQ ID NO: 3113643 - RNA, 22 nt, Human
gagacaggguuuugccauguug

SEQ ID NO: 3113644 - RNA, 12 nt, Human
gagaccaucccu

SEQ ID NO: 3113645 - RNA, 14 nt, Human
gagaccaucccuga

SEQ ID NO: 3113646 - RNA, 21 nt, Human
gagaccaucccugaaggcccc

SEQ ID NO: 3113647 - RNA, 18 nt, Human
gagaccaucccugaaggc

SEQ ID NO: 3113648 - RNA, 22 nt, Human
gagaaugcacaaacagaggccg

SEQ ID NO: 3113649 - RNA, 23 nt, Human
gagaaugcacaaacagaggccgc

SEQ ID NO: 3113650 - RNA, 13 nt, Human
gacuacaggugug

SEQ ID NO: 3113651 - RNA, 18 nt, Human
gacuacaggugugaguca

SEQ ID NO: 3113652 - RNA, 21 nt, Human
gacuacaggugugagucacca

SEQ ID NO: 3113653 - RNA, 14 nt, Human
gacucauucuucug

SEQ ID NO: 3113654 - RNA, 15 nt, Human
gacucauucuucugu

SEQ ID NO: 3113655 - RNA, 13 nt, Human
gacucgcgacaau

SEQ ID NO: 3113656 - RNA, 21 nt, Human
gacuccugcaggcagccaggc

SEQ ID NO: 3113657 - RNA, 13 nt, Human
gacuccugcaggc

SEQ ID NO: 3113658 - RNA, 12 nt, Human
gacuccugcagg

SEQ ID NO: 3113659 - RNA, 14 nt, Human
gacuggaagcacag

SEQ ID NO: 3113660 - RNA, 15 nt, Human
gacuggaagcacagc

SEQ ID NO: 3113661 - RNA, 16 nt, Human
gacuggaagcacagcu

SEQ ID NO: 3113662 - RNA, 18 nt, Human
gacuggaagcacagcuuc

SEQ ID NO: 3113663 - RNA, 17 nt, Human
gacucgcgacaaugcaa

SEQ ID NO: 3113664 - RNA, 21 nt, Human
gacugaguacguugugcauuu

SEQ ID NO: 3113665 - RNA, 22 nt, Human
gacugaguacguugugcauuug

SEQ ID NO: 3113666 - RNA, 18 nt, Human
gacugaguacguugugca

SEQ ID NO: 3113667 - RNA, 13 nt, Human
gacugcccggcag

SEQ ID NO: 3113668 - RNA, 15 nt, Human
gacugcccggcaggg

SEQ ID NO: 3113669 - RNA, 23 nt, Human
gacugaguacguugugcauuugg

SEQ ID NO: 3113670 - RNA, 19 nt, Human
gacuuaagcacacuugaca

SEQ ID NO: 3113671 - RNA, 14 nt, Human
gagaagagaaugca

SEQ ID NO: 3113672 - RNA, 16 nt, Human
gagaagcagaggaagg

SEQ ID NO: 3113673 - RNA, 16 nt, Human
gagaagagaaugcaca

SEQ ID NO: 3113674 - RNA, 16 nt, Human
gagaaagguugaagca

SEQ ID NO: 3113675 - RNA, 14 nt, Human
gagaaaugagcuug

SEQ ID NO: 3113676 - RNA, 23 nt, Human
gacagggcacaccgggcacucag

SEQ ID NO: 3113677 - RNA, 16 nt, Human
gacagggaggugaccc

SEQ ID NO: 3113678 - RNA, 14 nt, Human
gacaguuaagagaa

SEQ ID NO: 3113679 - RNA, 24 nt, Human
gacagggcacaccgggcacucaga

SEQ ID NO: 3113680 - RNA, 14 nt, Human
gacaggaccaggga

SEQ ID NO: 3113681 - RNA, 23 nt, Human
gacaggaccagggauuuccauga

SEQ ID NO: 3113682 - RNA, 15 nt, Human
gacaggaccagggau

SEQ ID NO: 3113683 - RNA, 14 nt, Human
gacaugaucuucuu

SEQ ID NO: 3113684 - RNA, 14 nt, Human
gacaugggaaaggg

SEQ ID NO: 3113685 - RNA, 13 nt, Human
gacagccacggcc

SEQ ID NO: 3113686 - RNA, 13 nt, Human
gacagagggggug

SEQ ID NO: 3113687 - RNA, 20 nt, Human
gacagagugagacucugucu

SEQ ID NO: 3113688 - RNA, 22 nt, Human
gacagagugagacucugucuca

SEQ ID NO: 3113689 - RNA, 14 nt, Human
gacagccacggcca

SEQ ID NO: 3113690 - RNA, 17 nt, Human
gacagccacggccaggc

SEQ ID NO: 3113691 - RNA, 18 nt, Human
gacagccacggccaggcc

SEQ ID NO: 3113692 - RNA, 19 nt, Human
gacagccacggccaggcca

SEQ ID NO: 3113693 - RNA, 18 nt, Human
gacagcugccugggaucc

SEQ ID NO: 3113694 - RNA, 20 nt, Human
gacagccacggccaggccag

SEQ ID NO: 3113695 - RNA, 21 nt, Human
gacagccacggccaggccaga

SEQ ID NO: 3113696 - RNA, 17 nt, Human
gacagcugccugggauc

SEQ ID NO: 3113697 - RNA, 16 nt, Human
gacagcugccugggau

SEQ ID NO: 3113698 - RNA, 17 nt, Human
gacagaggcagccccau

SEQ ID NO: 3113699 - RNA, 15 nt, Human
gacagaggggguggc

SEQ ID NO: 3113700 - RNA, 19 nt, Human
gacagaggggguggccucc

SEQ ID NO: 3113701 - RNA, 18 nt, Human
gacagaggggguggccuc

SEQ ID NO: 3113702 - RNA, 23 nt, Human
gacagaggggguggccucccaac

SEQ ID NO: 3113703 - RNA, 19 nt, Human
gacagagugagacucuguc

SEQ ID NO: 3113704 - RNA, 22 nt, Human
gacagaggggguggccucccaa

SEQ ID NO: 3113705 - RNA, 21 nt, Human
gacagaggggguggccuccca

SEQ ID NO: 3113706 - RNA, 12 nt, Human
gacagaggcagc

SEQ ID NO: 3113707 - RNA, 14 nt, Human
gacagaggcagccc

SEQ ID NO: 3113708 - RNA, 16 nt, Human
gacagaggcagcccca

SEQ ID NO: 3113709 - RNA, 21 nt, Human
gacagagcaagugagacccug

SEQ ID NO: 3113710 - RNA, 12 nt, Human
gacccugucuca

SEQ ID NO: 3113711 - RNA, 20 nt, Human
gacccuuguggucccacccc

SEQ ID NO: 3113712 - RNA, 19 nt, Human
gacccuuguggucccaccc

SEQ ID NO: 3113713 - RNA, 21 nt, Human
gacccuuguggucccacccca

SEQ ID NO: 3113714 - RNA, 15 nt, Human
gacccuugugguccc

SEQ ID NO: 3113715 - RNA, 17 nt, Human
gaccgugaggccagaga

SEQ ID NO: 3113716 - RNA, 16 nt, Human
gaccgugaggccagag

SEQ ID NO: 3113717 - RNA, 18 nt, Human
gaccgugaggccagagac

SEQ ID NO: 3113718 - RNA, 15 nt, Human
gaccgugaggccaga

SEQ ID NO: 3113719 - RNA, 23 nt, Human
gacccugaggcccagagggccug

SEQ ID NO: 3113720 - RNA, 14 nt, Human
gaccccuccaugug

SEQ ID NO: 3113721 - RNA, 18 nt, Human
gaccccuccaugugggcu

SEQ ID NO: 3113722 - RNA, 21 nt, Human
gaccccuccaugugggcuagu

SEQ ID NO: 3113723 - RNA, 22 nt, Human
gacccugaggcccagagggccu

SEQ ID NO: 3113724 - RNA, 18 nt, Human
gacaugggaaaggggaag

SEQ ID NO: 3113725 - RNA, 24 nt, Human
gaccagacaccuugacagggcaca

SEQ ID NO: 3113726 - RNA, 11 nt, Human
gaccagagcug

SEQ ID NO: 3113727 - RNA, 14 nt, Human
gaccacguuucuaa

SEQ ID NO: 3113728 - RNA, 18 nt, Human
gaccagagcugccaccug

SEQ ID NO: 3113729 - RNA, 17 nt, Human
gaccagagcugccaccu

SEQ ID NO: 3113730 - RNA, 15 nt, Human
gaccagagcugccac

SEQ ID NO: 3113731 - RNA, 14 nt, Human
gaccagagcugcca

SEQ ID NO: 3113732 - RNA, 13 nt, Human
gaccagagcugcc

SEQ ID NO: 3113733 - RNA, 17 nt, Human
gaccauucuccaccugc

SEQ ID NO: 3113734 - RNA, 22 nt, Human
gaccauucuccaccugccaggg

SEQ ID NO: 3113735 - RNA, 21 nt, Human
gaccauucuccaccugccagg

SEQ ID NO: 3113736 - RNA, 20 nt, Human
gaccauucuccaccugccag

SEQ ID NO: 3113737 - RNA, 19 nt, Human
gaccauucuccaccugcca

SEQ ID NO: 3113738 - RNA, 23 nt, Human
gacacauguccaagaagcccagg

SEQ ID NO: 3113739 - RNA, 20 nt, Human
gacacauguccaagaagccc

SEQ ID NO: 3113740 - RNA, 15 nt, Human
gacacauguccaaga

SEQ ID NO: 3113741 - RNA, 19 nt, Human
gacacaugcaaggucauuu

SEQ ID NO: 3113742 - RNA, 14 nt, Human
gacacaugcaaggu

SEQ ID NO: 3113743 - RNA, 20 nt, Human
gacacaggcccggcuccagg

SEQ ID NO: 3113744 - RNA, 21 nt, Human
gacacaggcccggcuccaggc

SEQ ID NO: 3113745 - RNA, 16 nt, Human
gacacaagccuucggc

SEQ ID NO: 3113746 - RNA, 19 nt, Human
gacacaggcccggcuccag

SEQ ID NO: 3113747 - RNA, 20 nt, Human
gacaaugugaaaagaaaaau

SEQ ID NO: 3113748 - RNA, 19 nt, Human
gacaaugugaaaagaaaaa

SEQ ID NO: 3113749 - RNA, 22 nt, Human
gacaaugcaaaccaucauugaa

SEQ ID NO: 3113750 - RNA, 18 nt, Human
gacaaugugaaaagaaaa

SEQ ID NO: 3113751 - RNA, 12 nt, Human
gacaaugugaaa

SEQ ID NO: 3113752 - RNA, 18 nt, Human
gacaaggauugcuacugu

SEQ ID NO: 3113753 - RNA, 21 nt, Human
gacaaggaugaucuaggaaga

SEQ ID NO: 3113754 - RNA, 19 nt, Human
gacaaggauugcuacuguc

SEQ ID NO: 3113755 - RNA, 23 nt, Human
gacaacacucauugaccugaggc

SEQ ID NO: 3113756 - RNA, 22 nt, Human
gacaacacucauugaccugagg

SEQ ID NO: 3113757 - RNA, 22 nt, Human
gaauuucuuuugccguuauuaa

SEQ ID NO: 3113758 - RNA, 21 nt, Human
gaaugcacaaacagaggccgc

SEQ ID NO: 3113759 - RNA, 20 nt, Human
gaaugcacaaacagaggccg

SEQ ID NO: 3113760 - RNA, 21 nt, Human
gaaugaaagggcccagagagg

SEQ ID NO: 3113761 - RNA, 18 nt, Human
gaauccagacccggcugc

SEQ ID NO: 3113762 - RNA, 20 nt, Human
gaauccagacccggcugcgu

SEQ ID NO: 3113763 - RNA, 14 nt, Human
gaauugaagcagga

SEQ ID NO: 3113764 - RNA, 14 nt, Human
gagucugaaggcug

SEQ ID NO: 3113765 - RNA, 13 nt, Human
gagucugaaggcu

SEQ ID NO: 3113766 - RNA, 12 nt, Human
gagucugaaggc

SEQ ID NO: 3113767 - RNA, 14 nt, Human
gagugacagaggca

SEQ ID NO: 3113768 - RNA, 15 nt, Human
gagugacagaggcag

SEQ ID NO: 3113769 - RNA, 16 nt, Human
gagugacagaggcagc

SEQ ID NO: 3113770 - RNA, 17 nt, Human
gagugaagcugggagaa

SEQ ID NO: 3113771 - RNA, 15 nt, Human
gagucgaggacaggg

SEQ ID NO: 3113772 - RNA, 19 nt, Human
gaguccgaaagggacuugg

SEQ ID NO: 3113773 - RNA, 14 nt, Human
gagucgaggacagg

SEQ ID NO: 3113774 - RNA, 19 nt, Human
gaguaggaagacuuuggaa

SEQ ID NO: 3113775 - RNA, 18 nt, Human
gaguaggaagacuuugga

SEQ ID NO: 3113776 - RNA, 11 nt, Human
gaguauauguc

SEQ ID NO: 3113777 - RNA, 17 nt, Human
gaggucagagccugcag

SEQ ID NO: 3113778 - RNA, 20 nt, Human
gaggucagagccugcaguua

SEQ ID NO: 3113779 - RNA, 17 nt, Human
gagguugggaggccauu

SEQ ID NO: 3113780 - RNA, 15 nt, Human
gagguugggaggcca

SEQ ID NO: 3113781 - RNA, 16 nt, Human
gagguuucaaaccucc

SEQ ID NO: 3113782 - RNA, 19 nt, Human
gaguagcugggacuacagg

SEQ ID NO: 3113783 - RNA, 22 nt, Human
gaguagcugggacuacaggcac

SEQ ID NO: 3113784 - RNA, 12 nt, Human
gaguaggaagac

SEQ ID NO: 3113785 - RNA, 17 nt, Human
gaguaggaagacuuugg

SEQ ID NO: 3113786 - RNA, 13 nt, Human
gaguaggaagacu

SEQ ID NO: 3113787 - RNA, 23 nt, Human
gaguacuacaguccucccaucuc

SEQ ID NO: 3113788 - RNA, 21 nt, Human
gaguacuacaguccucccauc

SEQ ID NO: 3113789 - RNA, 20 nt, Human
gaguacuacaguccucccau

SEQ ID NO: 3113790 - RNA, 18 nt, Human
gaucacggcucacugcag

SEQ ID NO: 3113791 - RNA, 15 nt, Human
gaucacggcucacug

SEQ ID NO: 3113792 - RNA, 16 nt, Human
gaucacggcucacugc

SEQ ID NO: 3113793 - RNA, 15 nt, Human
gauagcacagacccu

SEQ ID NO: 3113794 - RNA, 14 nt, Human
gauagccaaggcca

SEQ ID NO: 3113795 - RNA, 22 nt, Human
gauagccaaggccaaaggaagc

SEQ ID NO: 3113796 - RNA, 20 nt, Human
gauacaggaaaagcugcuga

SEQ ID NO: 3113797 - RNA, 22 nt, Human
gauaagaaccuuuugagugccu

SEQ ID NO: 3113798 - RNA, 21 nt, Human
gauacaggaaaagcugcugac

SEQ ID NO: 3113799 - RNA, 19 nt, Human
gauacaggaaaagcugcug

SEQ ID NO: 3113800 - RNA, 14 nt, Human
gaguugaagacaga

SEQ ID NO: 3113801 - RNA, 21 nt, Human
gaguugaagacagagcuacac

SEQ ID NO: 3113802 - RNA, 17 nt, Human
gaguugaagacagagcu

SEQ ID NO: 3113803 - RNA, 15 nt, Human
gaguugaagacagag

SEQ ID NO: 3113804 - RNA, 20 nt, Human
gaguucauacccuguuacca

SEQ ID NO: 3113805 - RNA, 14 nt, Human
gaguucaucuugaa

SEQ ID NO: 3113806 - RNA, 19 nt, Human
gaguucaucuugaauugua

SEQ ID NO: 3113807 - RNA, 15 nt, Human
gaguuacagacaaag

SEQ ID NO: 3113808 - RNA, 13 nt, Human
gaguuacagacaa

SEQ ID NO: 3113809 - RNA, 12 nt, Human
gaguuacagaca

SEQ ID NO: 3113810 - RNA, 20 nt, Human
gagugugccugaagucccag

SEQ ID NO: 3113811 - RNA, 17 nt, Human
gagugugccugaagucc

SEQ ID NO: 3113812 - RNA, 13 nt, Human
gagugggugaaua

SEQ ID NO: 3113813 - RNA, 23 nt, Human
gagugggggaucacagccucuga

SEQ ID NO: 3113814 - RNA, 17 nt, Human
gagugacagaggcagcc

SEQ ID NO: 3113815 - RNA, 13 nt, Human
gaggaucucuuga

SEQ ID NO: 3113816 - RNA, 22 nt, Human
gaggaucucuugagccugggag

SEQ ID NO: 3113817 - RNA, 19 nt, Human
gaggaucucuugagccugg

SEQ ID NO: 3113818 - RNA, 16 nt, Human
gaggaucucuugagcc

SEQ ID NO: 3113819 - RNA, 20 nt, Human
gaggauugcuugagcucagg

SEQ ID NO: 3113820 - RNA, 16 nt, Human
gaggauugcuugagcu

SEQ ID NO: 3113821 - RNA, 14 nt, Human
gaggccaugggccu

SEQ ID NO: 3113822 - RNA, 17 nt, Human
gaggccaugggccuccu

SEQ ID NO: 3113823 - RNA, 18 nt, Human
gaggccaugggccuccug

SEQ ID NO: 3113824 - RNA, 20 nt, Human
gaggccaugggccuccugug

SEQ ID NO: 3113825 - RNA, 21 nt, Human
gaggccaugggccuccugugu

SEQ ID NO: 3113826 - RNA, 23 nt, Human
gaggccaugggccuccugugugu

SEQ ID NO: 3113827 - RNA, 19 nt, Human
gaggcagccccauucugcc

SEQ ID NO: 3113828 - RNA, 18 nt, Human
gaggcagccccauucugc

SEQ ID NO: 3113829 - RNA, 20 nt, Human
gaggcagccccauucugccu

SEQ ID NO: 3113830 - RNA, 9 nt, Human
gaggcaggg

SEQ ID NO: 3113831 - RNA, 14 nt, Human
gaggcccuucucuc

SEQ ID NO: 3113832 - RNA, 20 nt, Human
gaggcccuucucuccagccc

SEQ ID NO: 3113833 - RNA, 15 nt, Human
gaggcccuucucucc

SEQ ID NO: 3113834 - RNA, 21 nt, Human
gaggcccuucucuccagcccc

SEQ ID NO: 3113835 - RNA, 16 nt, Human
gaggcccagagggccu

SEQ ID NO: 3113836 - RNA, 15 nt, Human
gaggcccagagggcc

SEQ ID NO: 3113837 - RNA, 19 nt, Human
gaggcccagagggccugca

SEQ ID NO: 3113838 - RNA, 14 nt, Human
gaggcccagagggc

SEQ ID NO: 3113839 - RNA, 13 nt, Human
gaggcccagaggg

SEQ ID NO: 3113840 - RNA, 11 nt, Human
gaggcccagag

SEQ ID NO: 3113841 - RNA, 16 nt, Human
gaggcugggcucccuu

SEQ ID NO: 3113842 - RNA, 14 nt, Human
gaggcugccucucc

SEQ ID NO: 3113843 - RNA, 18 nt, Human
gaggccuucucugaagga

SEQ ID NO: 3113844 - RNA, 19 nt, Human
gaggccuucucugaaggac

SEQ ID NO: 3113845 - RNA, 16 nt, Human
gaggccuucucugaag

SEQ ID NO: 3113846 - RNA, 24 nt, Human
gagguaaggaauaccugucccccu

SEQ ID NO: 3113847 - RNA, 21 nt, Human
gagguaaggaauaccuguccc

SEQ ID NO: 3113848 - RNA, 15 nt, Human
gaggguugggcuggu

SEQ ID NO: 3113849 - RNA, 14 nt, Human
gaggguugggcugg

SEQ ID NO: 3113850 - RNA, 12 nt, Human
gaggucagagcc

SEQ ID NO: 3113851 - RNA, 13 nt, Human
gaggucagagccu

SEQ ID NO: 3113852 - RNA, 17 nt, Human
gaggucaaggcugcagu

SEQ ID NO: 3113853 - RNA, 12 nt, Human
gaggguggaaua

SEQ ID NO: 3113854 - RNA, 21 nt, Human
gagggugaagugaagacaaug

SEQ ID NO: 3113855 - RNA, 14 nt, Human
gaggguggugaccu

SEQ ID NO: 3113856 - RNA, 15 nt, Human
gagggugggaguggg

SEQ ID NO: 3113857 - RNA, 21 nt, Human
gaggguggugaccucugccug

SEQ ID NO: 3113858 - RNA, 22 nt, Human
gagggugucccaaaaagaaagg

SEQ ID NO: 3113859 - RNA, 13 nt, Human
gagggucugagga

SEQ ID NO: 3113860 - RNA, 14 nt, Human
gagggucugaggaa

SEQ ID NO: 3113861 - RNA, 21 nt, Human
gagggagugacagaggcagcc

SEQ ID NO: 3113862 - RNA, 22 nt, Human
gagggagugacagaggcagccc

SEQ ID NO: 3113863 - RNA, 18 nt, Human
gagggagugacagaggca

SEQ ID NO: 3113864 - RNA, 16 nt, Human
gagggagugacagagg

SEQ ID NO: 3113865 - RNA, 16 nt, Human
gagggagggcuccaga

SEQ ID NO: 3113866 - RNA, 20 nt, Human
gagggagggcuccagacaca

SEQ ID NO: 3113867 - RNA, 20 nt, Human
gaggcugggcucccuuccca

SEQ ID NO: 3113868 - RNA, 19 nt, Human
gagggagggcuccagacac

SEQ ID NO: 3113869 - RNA, 13 nt, Human
gaggguaaggcug

SEQ ID NO: 3113870 - RNA, 17 nt, Human
gaggggguggccuccca

SEQ ID NO: 3113871 - RNA, 15 nt, Human
gaggggguggccucc

SEQ ID NO: 3113872 - RNA, 18 nt, Human
gcagaaggaagacuucau

SEQ ID NO: 3113873 - RNA, 13 nt, Human
gcagacaggcaag

SEQ ID NO: 3113874 - RNA, 12 nt, Human
gcagacaggcaa

SEQ ID NO: 3113875 - RNA, 18 nt, Human
gcagacaggaccagggau

SEQ ID NO: 3113876 - RNA, 16 nt, Human
gcacgauuucuguuua

SEQ ID NO: 3113877 - RNA, 22 nt, Human
gcacugcuuccagugaggcucu

SEQ ID NO: 3113878 - RNA, 23 nt, Human
gcacugcuuccagugaggcucug

SEQ ID NO: 3113879 - RNA, 22 nt, Human
gcacagaguuguuacauuuuua

SEQ ID NO: 3113880 - RNA, 16 nt, Human
gcacagaguuguuaca

SEQ ID NO: 3113881 - RNA, 18 nt, Human
gcacagaguuguuacauu

SEQ ID NO: 3113882 - RNA, 19 nt, Human
gcacagaguuguuacauuu

SEQ ID NO: 3113883 - RNA, 21 nt, Human
gcacagaguuguuacauuuuu

SEQ ID NO: 3113884 - RNA, 19 nt, Human
gcaccuuagacagucccug

SEQ ID NO: 3113885 - RNA, 13 nt, Human
gcacgauuucugu

SEQ ID NO: 3113886 - RNA, 15 nt, Human
gcacgauuucuguuu

SEQ ID NO: 3113887 - RNA, 21 nt, Human
gcaccuuagacagucccugcc

SEQ ID NO: 3113888 - RNA, 20 nt, Human
gcaccuuagacagucccugc

SEQ ID NO: 3113889 - RNA, 12 nt, Human
gcaccauaacuu

SEQ ID NO: 3113890 - RNA, 23 nt, Human
gcacagaaaauggaagacagcuc

SEQ ID NO: 3113891 - RNA, 22 nt, Human
gcacagaaaauggaagacagcu

SEQ ID NO: 3113892 - RNA, 21 nt, Human
gcacagaaaauggaagacagc

SEQ ID NO: 3113893 - RNA, 17 nt, Human
gcacagacccugcccug

SEQ ID NO: 3113894 - RNA, 16 nt, Human
gcacagacccugcccu

SEQ ID NO: 3113895 - RNA, 15 nt, Human
gcacagacccugccc

SEQ ID NO: 3113896 - RNA, 14 nt, Human
gcacagacccugcc

SEQ ID NO: 3113897 - RNA, 21 nt, Human
gcacagacccugcccuguggg

SEQ ID NO: 3113898 - RNA, 20 nt, Human
gcacagacccugcccugugg

SEQ ID NO: 3113899 - RNA, 19 nt, Human
gcacagacccugcccugug

SEQ ID NO: 3113900 - RNA, 18 nt, Human
gcacagacccugcccugu

SEQ ID NO: 3113901 - RNA, 15 nt, Human
gcacagaguuguuac

SEQ ID NO: 3113902 - RNA, 22 nt, Human
gcacagacccugcccugugggc

SEQ ID NO: 3113903 - RNA, 20 nt, Human
gcacagaaaauggaagacag

SEQ ID NO: 3113904 - RNA, 20 nt, Human
gcacaccgggcacucagaag

SEQ ID NO: 3113905 - RNA, 17 nt, Human
gcacaagcuccaagcuc

SEQ ID NO: 3113906 - RNA, 15 nt, Human
gcacaagcuccaagc

SEQ ID NO: 3113907 - RNA, 18 nt, Human
gcacaagcuccaagcucc

SEQ ID NO: 3113908 - RNA, 16 nt, Human
gcacaaacagaggccg

SEQ ID NO: 3113909 - RNA, 15 nt, Human
gcacaaacagaggcc

SEQ ID NO: 3113910 - RNA, 14 nt, Human
gcacaaacagaggc

SEQ ID NO: 3113911 - RNA, 15 nt, Human
gcaauggcagccuug

SEQ ID NO: 3113912 - RNA, 14 nt, Human
gcaacucaucuuag

SEQ ID NO: 3113913 - RNA, 14 nt, Human
gcaaugugauaaaa

SEQ ID NO: 3113914 - RNA, 19 nt, Human
gaugcccaaagaugcagcc

SEQ ID NO: 3113915 - RNA, 20 nt, Human
gaugcccaaagaugcagccg

SEQ ID NO: 3113916 - RNA, 22 nt, Human
gauggccgggcgcgguggcuca

SEQ ID NO: 3113917 - RNA, 20 nt, Human
gaugggcaacccccagccug

SEQ ID NO: 3113918 - RNA, 21 nt, Human
gaugggcaacccccagccugc

SEQ ID NO: 3113919 - RNA, 24 nt, Human
gauggggcccugccuccuuuguga

SEQ ID NO: 3113920 - RNA, 13 nt, Human
gauggggcugcac

SEQ ID NO: 3113921 - RNA, 15 nt, Human
gauggggcugcaccg

SEQ ID NO: 3113922 - RNA, 19 nt, Human
gaugggugcuuggaggaag

SEQ ID NO: 3113923 - RNA, 14 nt, Human
gauggugcaaugac

SEQ ID NO: 3113924 - RNA, 12 nt, Human
gauggugcaaug

SEQ ID NO: 3113925 - RNA, 16 nt, Human
gauggugcaaugaccu

SEQ ID NO: 3113926 - RNA, 15 nt, Human
gauggugcaaugacc

SEQ ID NO: 3113927 - RNA, 17 nt, Human
gauggugcaaugaccuu

SEQ ID NO: 3113928 - RNA, 22 nt, Human
gauuacaagcgugagccacugc

SEQ ID NO: 3113929 - RNA, 15 nt, Human
gauuaaacuuaaucu

SEQ ID NO: 3113930 - RNA, 23 nt, Human
gauuacaagcgugagccacugca

SEQ ID NO: 3113931 - RNA, 19 nt, Human
gauuuugauccaagcuggu

SEQ ID NO: 3113932 - RNA, 21 nt, Human
gauuuugaaauuuuuauuaaa

SEQ ID NO: 3113933 - RNA, 12 nt, Human
gcaaaccaucau

SEQ ID NO: 3113934 - RNA, 18 nt, Human
gauuuccguuaaaauacc

SEQ ID NO: 3113935 - RNA, 15 nt, Human
gauuuaacagaaaug

SEQ ID NO: 3113936 - RNA, 22 nt, Human
gauuuccguuaaaauaccagcc

SEQ ID NO: 3113937 - RNA, 12 nt, Human
gauuuaaaucag

SEQ ID NO: 3113938 - RNA, 13 nt, Human
gauuuaacagaaa

SEQ ID NO: 3113939 - RNA, 14 nt, Human
gauuuaacagaaau

SEQ ID NO: 3113940 - RNA, 14 nt, Human
cuggccagaugcac

SEQ ID NO: 3113941 - RNA, 15 nt, Human
cuggcccacugcauc

SEQ ID NO: 3113942 - RNA, 18 nt, Human
cuggcacugcuuccagug

SEQ ID NO: 3113943 - RNA, 23 nt, Human
cuggcacugcuuccagugaggcu

SEQ ID NO: 3113944 - RNA, 20 nt, Human
cuggcacugcuuccagugag

SEQ ID NO: 3113945 - RNA, 19 nt, Human
cuggcacugcuuccaguga

SEQ ID NO: 3113946 - RNA, 20 nt, Human
cuggcacccggccccugcug

SEQ ID NO: 3113947 - RNA, 21 nt, Human
cuggcacccggccccugcugg

SEQ ID NO: 3113948 - RNA, 19 nt, Human
cuggcacccggccccugcu

SEQ ID NO: 3113949 - RNA, 20 nt, Human
cuggagugcagugagccgag

SEQ ID NO: 3113950 - RNA, 16 nt, Human
cuggccucugcacucc

SEQ ID NO: 3113951 - RNA, 21 nt, Human
cuggccucugcacuccccugc

SEQ ID NO: 3113952 - RNA, 20 nt, Human
cuggccucugcacuccccug

SEQ ID NO: 3113953 - RNA, 18 nt, Human
cuggccucugcacucccc

SEQ ID NO: 3113954 - RNA, 19 nt, Human
cuggccuggccccucaggg

SEQ ID NO: 3113955 - RNA, 24 nt, Human
cuggccuggccccucagggucccu

SEQ ID NO: 3113956 - RNA, 14 nt, Human
cuggcgugcagugg

SEQ ID NO: 3113957 - RNA, 15 nt, Human
cuggcgugcaguggu

SEQ ID NO: 3113958 - RNA, 22 nt, Human
cuggcucuuccaggcugggaga

SEQ ID NO: 3113959 - RNA, 21 nt, Human
cuggcucuuccaggcugggag

SEQ ID NO: 3113960 - RNA, 24 nt, Human
cuggcucuuccaggcugggagagc

SEQ ID NO: 3113961 - RNA, 20 nt, Human
cuggcucuuccaggcuggga

SEQ ID NO: 3113962 - RNA, 16 nt, Human
cuggaccuugaacugg

SEQ ID NO: 3113963 - RNA, 15 nt, Human
cuggacccuguggau

SEQ ID NO: 3113964 - RNA, 21 nt, Human
cuggaccuugaacuggguacu

SEQ ID NO: 3113965 - RNA, 17 nt, Human
cuggaccuugaacuggg

SEQ ID NO: 3113966 - RNA, 20 nt, Human
cuggaccuugaacuggguac

SEQ ID NO: 3113967 - RNA, 23 nt, Human
cuggacaggcauguucucugagg

SEQ ID NO: 3113968 - RNA, 14 nt, Human
cuggacaggcaugu

SEQ ID NO: 3113969 - RNA, 17 nt, Human
cuggacaggcauguucu

SEQ ID NO: 3113970 - RNA, 22 nt, Human
cuggagguacgaaaagagggga

SEQ ID NO: 3113971 - RNA, 17 nt, Human
cuggagguacgaaaaga

SEQ ID NO: 3113972 - RNA, 14 nt, Human
cuggagugcaguga

SEQ ID NO: 3113973 - RNA, 15 nt, Human
cuggagugcagugag

SEQ ID NO: 3113974 - RNA, 16 nt, Human
cuggagugcagugagc

SEQ ID NO: 3113975 - RNA, 17 nt, Human
cuggagugcagugagcc

SEQ ID NO: 3113976 - RNA, 12 nt, Human
cugcccuccaag

SEQ ID NO: 3113977 - RNA, 17 nt, Human
cucccuucccaccucuc

SEQ ID NO: 3113978 - RNA, 16 nt, Human
cucccuucccaccucu

SEQ ID NO: 3113979 - RNA, 15 nt, Human
cucccuucccaccuc

SEQ ID NO: 3113980 - RNA, 14 nt, Human
cucccuucccaccu

SEQ ID NO: 3113981 - RNA, 18 nt, Human
cugccgcagcccugcaga

SEQ ID NO: 3113982 - RNA, 17 nt, Human
cugccgcagcccugcag

SEQ ID NO: 3113983 - RNA, 15 nt, Human
cugccgcagcccugc

SEQ ID NO: 3113984 - RNA, 14 nt, Human
cugccgcagcccug

SEQ ID NO: 3113985 - RNA, 11 nt, Human
cugccucccau

SEQ ID NO: 3113986 - RNA, 19 nt, Human
cugccucccaucacccgcu

SEQ ID NO: 3113987 - RNA, 16 nt, Human
cugccucccaucaccc

SEQ ID NO: 3113988 - RNA, 14 nt, Human
cugccucccaucac

SEQ ID NO: 3113989 - RNA, 12 nt, Human
cugccucccauc

SEQ ID NO: 3113990 - RNA, 22 nt, Human
cugccucugacacacagcucug

SEQ ID NO: 3113991 - RNA, 23 nt, Human
cugccucugacacacagcucugu

SEQ ID NO: 3113992 - RNA, 20 nt, Human
cugccugcccaggccccugc

SEQ ID NO: 3113993 - RNA, 21 nt, Human
cugccugggaucccucauccu

SEQ ID NO: 3113994 - RNA, 15 nt, Human
cugccugaagucaca

SEQ ID NO: 3113995 - RNA, 15 nt, Human
cugccugcccaggcc

SEQ ID NO: 3113996 - RNA, 16 nt, Human
cugccugcccaggccc

SEQ ID NO: 3113997 - RNA, 17 nt, Human
cugccugcccaggcccc

SEQ ID NO: 3113998 - RNA, 14 nt, Human
cugccucuucucua

SEQ ID NO: 3113999 - RNA, 15 nt, Human
cugccucuucucuac

SEQ ID NO: 3114000 - RNA, 19 nt, Human
cugcgaccacaagaaggau

SEQ ID NO: 3114001 - RNA, 15 nt, Human
cugcuccagcuguuc

SEQ ID NO: 3114002 - RNA, 20 nt, Human
cugcuccagcuguucagcug

SEQ ID NO: 3114003 - RNA, 19 nt, Human
cugcuccagcuguucagcu

SEQ ID NO: 3114004 - RNA, 19 nt, Human
cugcucuccgaccagacac

SEQ ID NO: 3114005 - RNA, 15 nt, Human
cugcugcaguugcca

SEQ ID NO: 3114006 - RNA, 11 nt, Human
cugcugaaggc

SEQ ID NO: 3114007 - RNA, 15 nt, Human
cugcugcuggcuggu

SEQ ID NO: 3114008 - RNA, 14 nt, Human
cugcugcuggcugg

SEQ ID NO: 3114009 - RNA, 15 nt, Human
cugcuuccagugagg

SEQ ID NO: 3114010 - RNA, 18 nt, Human
cugcuuccagugaggcuc

SEQ ID NO: 3114011 - RNA, 16 nt, Human
cugcuuccagugaggc

SEQ ID NO: 3114012 - RNA, 23 nt, Human
cugcuuccagugaggcucugccc

SEQ ID NO: 3114013 - RNA, 21 nt, Human
cugcuuccagugaggcucugc

SEQ ID NO: 3114014 - RNA, 20 nt, Human
cugcuuccagugaggcucug

SEQ ID NO: 3114015 - RNA, 19 nt, Human
cugcuuccagugaggcucu

SEQ ID NO: 3114016 - RNA, 13 nt, Human
cugcugguucagg

SEQ ID NO: 3114017 - RNA, 15 nt, Human
cugcugguucagggu

SEQ ID NO: 3114018 - RNA, 23 nt, Human
cugcugguucaggguuggccccu

SEQ ID NO: 3114019 - RNA, 23 nt, Human
cuguaucccaugagccucagcau

SEQ ID NO: 3114020 - RNA, 22 nt, Human
cuguaucccaugagccucagca

SEQ ID NO: 3114021 - RNA, 13 nt, Human
cuguacagagccc

SEQ ID NO: 3114022 - RNA, 20 nt, Human
cugucccuuacgugaguccu

SEQ ID NO: 3114023 - RNA, 14 nt, Human
cuguccgagcuuug

SEQ ID NO: 3114024 - RNA, 22 nt, Human
cuguccccgcacugggcuuggg

SEQ ID NO: 3114025 - RNA, 19 nt, Human
cuguccccgcacugggcuu

SEQ ID NO: 3114026 - RNA, 18 nt, Human
cuguccccgcacugggcu

SEQ ID NO: 3114027 - RNA, 17 nt, Human
cuguccccgcacugggc

SEQ ID NO: 3114028 - RNA, 23 nt, Human
cugucucaaaaaaacacaaaagu

SEQ ID NO: 3114029 - RNA, 16 nt, Human
cugucucaaaaaaaga

SEQ ID NO: 3114030 - RNA, 18 nt, Human
cugucucaaaaaaagaaa

SEQ ID NO: 3114031 - RNA, 14 nt, Human
cuguccuacccacc

SEQ ID NO: 3114032 - RNA, 15 nt, Human
cuguccgagcuuuga

SEQ ID NO: 3114033 - RNA, 17 nt, Human
cuggguucuacccaggu

SEQ ID NO: 3114034 - RNA, 16 nt, Human
cuggguucuacccagg

SEQ ID NO: 3114035 - RNA, 15 nt, Human
cuggguucuacccag

SEQ ID NO: 3114036 - RNA, 14 nt, Human
cuggguucuaccca

SEQ ID NO: 3114037 - RNA, 20 nt, Human
cuggguaacuagggaagaua

SEQ ID NO: 3114038 - RNA, 22 nt, Human
cuggguaacuagggaagauaau

SEQ ID NO: 3114039 - RNA, 13 nt, Human
cugggggaagaag

SEQ ID NO: 3114040 - RNA, 23 nt, Human
cugggcuucaguggcagcugcuu

SEQ ID NO: 3114041 - RNA, 24 nt, Human
cugggcuucaguggcagcugcuuu

SEQ ID NO: 3114042 - RNA, 15 nt, Human
cugggggaagaagcu

SEQ ID NO: 3114043 - RNA, 19 nt, Human
cugggggcugggcagagga

SEQ ID NO: 3114044 - RNA, 18 nt, Human
cugggggcugggcagagg

SEQ ID NO: 3114045 - RNA, 23 nt, Human
cugguggcagcucaccucucccu

SEQ ID NO: 3114046 - RNA, 21 nt, Human
cugguggcagcucaccucucc

SEQ ID NO: 3114047 - RNA, 13 nt, Human
cugguggcagcug

SEQ ID NO: 3114048 - RNA, 14 nt, Human
cugguggcagcugc

SEQ ID NO: 3114049 - RNA, 19 nt, Human
cuguaauccuagcacuuug

SEQ ID NO: 3114050 - RNA, 20 nt, Human
cuguaauccuagcacuuugg

SEQ ID NO: 3114051 - RNA, 15 nt, Human
cuguacaaaguagaa

SEQ ID NO: 3114052 - RNA, 22 nt, Human
cuguaauuugugauacaaugcu

SEQ ID NO: 3114053 - RNA, 13 nt, Human
cuguacaaaguag

SEQ ID NO: 3114054 - RNA, 16 nt, Human
cugguuccauggccuc

SEQ ID NO: 3114055 - RNA, 17 nt, Human
cuguggaugauaaaaca

SEQ ID NO: 3114056 - RNA, 14 nt, Human
cugugggcccccaa

SEQ ID NO: 3114057 - RNA, 22 nt, Human
cugugcugcccugcccaccugg

SEQ ID NO: 3114058 - RNA, 17 nt, Human
cugugccucugggacug

SEQ ID NO: 3114059 - RNA, 21 nt, Human
cugugcugcccugcccaccug

SEQ ID NO: 3114060 - RNA, 14 nt, Human
cugugccucuggga

SEQ ID NO: 3114061 - RNA, 16 nt, Human
cugugccucugggacu

SEQ ID NO: 3114062 - RNA, 20 nt, Human
cugugauggggcccugccuc

SEQ ID NO: 3114063 - RNA, 19 nt, Human
cugugauggggcccugccu

SEQ ID NO: 3114064 - RNA, 14 nt, Human
cugugccauuuugu

SEQ ID NO: 3114065 - RNA, 16 nt, Human
cugugccaugugccag

SEQ ID NO: 3114066 - RNA, 18 nt, Human
cugugccaugugccaggu

SEQ ID NO: 3114067 - RNA, 23 nt, Human
cugugaguacuacaguccuccca

SEQ ID NO: 3114068 - RNA, 21 nt, Human
cugugaguacuacaguccucc

SEQ ID NO: 3114069 - RNA, 20 nt, Human
cugugaguacuacaguccuc

SEQ ID NO: 3114070 - RNA, 17 nt, Human
cugugauggggcccugc

SEQ ID NO: 3114071 - RNA, 18 nt, Human
cugugauggggcccugcc

SEQ ID NO: 3114072 - RNA, 18 nt, Human
cugucuccauguuugaug

SEQ ID NO: 3114073 - RNA, 13 nt, Human
cuguucucugccc

SEQ ID NO: 3114074 - RNA, 20 nt, Human
cuguucucugcccuccaaga

SEQ ID NO: 3114075 - RNA, 19 nt, Human
cuguucucugcccuccaag

SEQ ID NO: 3114076 - RNA, 18 nt, Human
cuguucucugcccuccaa

SEQ ID NO: 3114077 - RNA, 17 nt, Human
cuguucucugcccucca

SEQ ID NO: 3114078 - RNA, 16 nt, Human
cuguucucugcccucc

SEQ ID NO: 3114079 - RNA, 15 nt, Human
cuguucucugcccuc

SEQ ID NO: 3114080 - RNA, 14 nt, Human
cuguucucugcccu

SEQ ID NO: 3114081 - RNA, 21 nt, Human
cuguucagcugguugagguuu

SEQ ID NO: 3114082 - RNA, 19 nt, Human
cuguucagcugguugaggu

SEQ ID NO: 3114083 - RNA, 18 nt, Human
cuguucagcugguugagg

SEQ ID NO: 3114084 - RNA, 18 nt, Human
cugugugugcgccuacag

SEQ ID NO: 3114085 - RNA, 20 nt, Human
cugugugugcgccuacagga

SEQ ID NO: 3114086 - RNA, 21 nt, Human
cugugucuugcaauggcagcc

SEQ ID NO: 3114087 - RNA, 20 nt, Human
cugugucuugcaauggcagc

SEQ ID NO: 3114088 - RNA, 22 nt, Human
cugugucuugcaauggcagccu

SEQ ID NO: 3114089 - RNA, 16 nt, Human
cuuuccucuuuggucu

SEQ ID NO: 3114090 - RNA, 12 nt, Human
cuuuccugaggc

SEQ ID NO: 3114091 - RNA, 11 nt, Human
cuuucccuccc

SEQ ID NO: 3114092 - RNA, 13 nt, Human
cuuucccucccuu

SEQ ID NO: 3114093 - RNA, 14 nt, Human
cuuucccucccuuc

SEQ ID NO: 3114094 - RNA, 16 nt, Human
cuuucccucccuuccu

SEQ ID NO: 3114095 - RNA, 15 nt, Human
cuuuccaggaaggcu

SEQ ID NO: 3114096 - RNA, 15 nt, Human
cuuuccaucuacccu

SEQ ID NO: 3114097 - RNA, 17 nt, Human
cuuucuggcuaugcauu

SEQ ID NO: 3114098 - RNA, 18 nt, Human
cuuucuggcuaugcauuu

SEQ ID NO: 3114099 - RNA, 19 nt, Human
cuuucuggcuaugcauuug

SEQ ID NO: 3114100 - RNA, 20 nt, Human
cuuucuggcuaugcauuuga

SEQ ID NO: 3114101 - RNA, 15 nt, Human
cuuuccugaggcugg

SEQ ID NO: 3114102 - RNA, 13 nt, Human
cuuuccugaggcu

SEQ ID NO: 3114103 - RNA, 20 nt, Human
cuuugcagacaggcaagcac

SEQ ID NO: 3114104 - RNA, 16 nt, Human
cuuugcagacaggcaa

SEQ ID NO: 3114105 - RNA, 13 nt, Human
cuuugaccucugc

SEQ ID NO: 3114106 - RNA, 14 nt, Human
cuuugaccucugca

SEQ ID NO: 3114107 - RNA, 15 nt, Human
cuuugaccucugcag

SEQ ID NO: 3114108 - RNA, 17 nt, Human
cuuugaccucugcagca

SEQ ID NO: 3114109 - RNA, 18 nt, Human
cuuugaccucugcagcaa

SEQ ID NO: 3114110 - RNA, 20 nt, Human
cuuugaccucugcagcaaua

SEQ ID NO: 3114111 - RNA, 24 nt, Human
cuuugaccucugcagcaauaaagc

SEQ ID NO: 3114112 - RNA, 15 nt, Human
cuuuguccccaccgc

SEQ ID NO: 3114113 - RNA, 15 nt, Human
cuuugugaggaagcc

SEQ ID NO: 3114114 - RNA, 19 nt, Human
cuuugugauuuuuguaauu

SEQ ID NO: 3114115 - RNA, 14 nt, Human
cuuuguccccaccg

SEQ ID NO: 3114116 - RNA, 19 nt, Human
cuuuggcuauuagagauca

SEQ ID NO: 3114117 - RNA, 17 nt, Human
cuuguaaauagcucagg

SEQ ID NO: 3114118 - RNA, 18 nt, Human
cuuguaaauagcucaggu

SEQ ID NO: 3114119 - RNA, 15 nt, Human
cuuguacauaaugcg

SEQ ID NO: 3114120 - RNA, 12 nt, Human
cuuguacauaau

SEQ ID NO: 3114121 - RNA, 22 nt, Human
cuuguacauaaugcgugcauac

SEQ ID NO: 3114122 - RNA, 19 nt, Human
cuuguacauaaugcgugca

SEQ ID NO: 3114123 - RNA, 21 nt, Human
cuuguacauaaugcgugcaua

SEQ ID NO: 3114124 - RNA, 16 nt, Human
cuuguaaauagcucag

SEQ ID NO: 3114125 - RNA, 22 nt, Human
cuuggggggcugaggugggagg

SEQ ID NO: 3114126 - RNA, 23 nt, Human
cuuggggggcugaggugggagga

SEQ ID NO: 3114127 - RNA, 13 nt, Human
cuuuacuauggcc

SEQ ID NO: 3114128 - RNA, 22 nt, Human
cuuuaccuuuuuuauacauaaa

SEQ ID NO: 3114129 - RNA, 15 nt, Human
cuuuaugcacaaaau

SEQ ID NO: 3114130 - RNA, 14 nt, Human
cuuuagcgcccagu

SEQ ID NO: 3114131 - RNA, 13 nt, Human
cuuuauaauucua

SEQ ID NO: 3114132 - RNA, 19 nt, Human
cuuuauaauucuacuuuga

SEQ ID NO: 3114133 - RNA, 17 nt, Human
cuuuuuuggcugcugaa

SEQ ID NO: 3114134 - RNA, 22 nt, Human
cuuuuuuggcugcugaaggcuc

SEQ ID NO: 3114135 - RNA, 20 nt, Human
cuuuuuuggcugcugaaggc

SEQ ID NO: 3114136 - RNA, 16 nt, Human
cuuuuuuggcugcuga

SEQ ID NO: 3114137 - RNA, 15 nt, Human
gaaaaaggaggaaga

SEQ ID NO: 3114138 - RNA, 12 nt, Human
gaaaaaggagga

SEQ ID NO: 3114139 - RNA, 14 nt, Human
gaaaacacauuuuu

SEQ ID NO: 3114140 - RNA, 18 nt, Human
gaaaacacauuuuucuua

SEQ ID NO: 3114141 - RNA, 19 nt, Human
gaaaacacauuuuucuuag

SEQ ID NO: 3114142 - RNA, 11 nt, Human
cuuuuguucuu

SEQ ID NO: 3114143 - RNA, 12 nt, Human
cuuuuguucuug

SEQ ID NO: 3114144 - RNA, 18 nt, Human
cuuuguuaguuucuccaa

SEQ ID NO: 3114145 - RNA, 24 nt, Human
gaaaacacuguucucugcccucca

SEQ ID NO: 3114146 - RNA, 22 nt, Human
gaaaacacuguucucugcccuc

SEQ ID NO: 3114147 - RNA, 19 nt, Human
gaaaagcugcugacagugu

SEQ ID NO: 3114148 - RNA, 19 nt, Human
gaaaacguggcugcuucaa

SEQ ID NO: 3114149 - RNA, 22 nt, Human
gaaaacguggcugcuucaagga

SEQ ID NO: 3114150 - RNA, 20 nt, Human
gaaaacguggcugcuucaag

SEQ ID NO: 3114151 - RNA, 22 nt, Human
gaaaaucagccugcuccagcug

SEQ ID NO: 3114152 - RNA, 20 nt, Human
gaaaaucagccugcuccagc

SEQ ID NO: 3114153 - RNA, 23 nt, Human
gaaacccagcucugguccauaga

SEQ ID NO: 3114154 - RNA, 14 nt, Human
gaaacccagcucug

SEQ ID NO: 3114155 - RNA, 13 nt, Human
gaaacccagcucu

SEQ ID NO: 3114156 - RNA, 19 nt, Human
gaaacccagcucuggucca

SEQ ID NO: 3114157 - RNA, 18 nt, Human
gaaacccagcucuggucc

SEQ ID NO: 3114158 - RNA, 16 nt, Human
gaaacccagcucuggu

SEQ ID NO: 3114159 - RNA, 15 nt, Human
gaaacccagcucugg

SEQ ID NO: 3114160 - RNA, 17 nt, Human
gaaagcccugagcuuuc

SEQ ID NO: 3114161 - RNA, 22 nt, Human
gaaagcccugagcuuucugcua

SEQ ID NO: 3114162 - RNA, 21 nt, Human
gaaagcccugagcuuucugcu

SEQ ID NO: 3114163 - RNA, 17 nt, Human
gaaagacuguacaaagu

SEQ ID NO: 3114164 - RNA, 19 nt, Human
gaaagacuuuuccaacccu

SEQ ID NO: 3114165 - RNA, 15 nt, Human
gaaagaguaggaaga

SEQ ID NO: 3114166 - RNA, 12 nt, Human
cuucuccaggcu

SEQ ID NO: 3114167 - RNA, 13 nt, Human
cuucuccaggcug

SEQ ID NO: 3114168 - RNA, 20 nt, Human
cuucuccacuuucuagccag

SEQ ID NO: 3114169 - RNA, 11 nt, Human
cuucuccacuu

SEQ ID NO: 3114170 - RNA, 12 nt, Human
cuucucuccagc

SEQ ID NO: 3114171 - RNA, 19 nt, Human
cuucucuccagccccugga

SEQ ID NO: 3114172 - RNA, 17 nt, Human
cuucucuccagccccug

SEQ ID NO: 3114173 - RNA, 15 nt, Human
cuucucuccagcccc

SEQ ID NO: 3114174 - RNA, 13 nt, Human
cuucucuccagcc

SEQ ID NO: 3114175 - RNA, 13 nt, Human
cuucucugaagga

SEQ ID NO: 3114176 - RNA, 20 nt, Human
cuucugccauuucugagauc

SEQ ID NO: 3114177 - RNA, 21 nt, Human
cuucuguacgucugacaggca

SEQ ID NO: 3114178 - RNA, 14 nt, Human
cuucuguacgucug

SEQ ID NO: 3114179 - RNA, 15 nt, Human
cuucuguacgucuga

SEQ ID NO: 3114180 - RNA, 18 nt, Human
cuucuguacgucugacag

SEQ ID NO: 3114181 - RNA, 20 nt, Human
cuucuguacgucugacaggc

SEQ ID NO: 3114182 - RNA, 16 nt, Human
cuucuguccuacucug

SEQ ID NO: 3114183 - RNA, 17 nt, Human
cuucuguccuacucugu

SEQ ID NO: 3114184 - RNA, 18 nt, Human
cuucuguccuacucugug

SEQ ID NO: 3114185 - RNA, 19 nt, Human
cuucuguccuacucugugu

SEQ ID NO: 3114186 - RNA, 21 nt, Human
cuucuguccuacucuguguca

SEQ ID NO: 3114187 - RNA, 17 nt, Human
cuugaacuuugaccucu

SEQ ID NO: 3114188 - RNA, 21 nt, Human
cuugaacuuugaccucugcag

SEQ ID NO: 3114189 - RNA, 13 nt, Human
cuugaacuccugg

SEQ ID NO: 3114190 - RNA, 13 nt, Human
cuugaccucaggu

SEQ ID NO: 3114191 - RNA, 21 nt, Human
cuugaccgugaggccagagac

SEQ ID NO: 3114192 - RNA, 20 nt, Human
cuugaccgugaggccagaga

SEQ ID NO: 3114193 - RNA, 18 nt, Human
cuugaccgugaggccaga

SEQ ID NO: 3114194 - RNA, 23 nt, Human
cuugaccauucuccaccugccag

SEQ ID NO: 3114195 - RNA, 22 nt, Human
cuugaccauucuccaccugcca

SEQ ID NO: 3114196 - RNA, 17 nt, Human
cuugaccgugaggccag

SEQ ID NO: 3114197 - RNA, 16 nt, Human
cuugagccugggaggu

SEQ ID NO: 3114198 - RNA, 15 nt, Human
cuugagccuugaacu

SEQ ID NO: 3114199 - RNA, 17 nt, Human
cuugagccuugaacuuu

SEQ ID NO: 3114200 - RNA, 18 nt, Human
cuugagccuugaacuuug

SEQ ID NO: 3114201 - RNA, 13 nt, Human
cuugagcucagga

SEQ ID NO: 3114202 - RNA, 21 nt, Human
cuugaggguugggcugguguc

SEQ ID NO: 3114203 - RNA, 21 nt, Human
cuugaguugauucagcucugc

SEQ ID NO: 3114204 - RNA, 19 nt, Human
cuugaggguugggcuggug

SEQ ID NO: 3114205 - RNA, 20 nt, Human
cuugaggguugggcuggugu

SEQ ID NO: 3114206 - RNA, 13 nt, Human
cuucuguggguuu

SEQ ID NO: 3114207 - RNA, 21 nt, Human
cuucuguggguuucuaaagcu

SEQ ID NO: 3114208 - RNA, 14 nt, Human
cuucuguggguuuc

SEQ ID NO: 3114209 - RNA, 23 nt, Human
cuugaaaacacuguucucugccc

SEQ ID NO: 3114210 - RNA, 14 nt, Human
cuugaaaacacugu

SEQ ID NO: 3114211 - RNA, 14 nt, Human
cuuccaggcuggga

SEQ ID NO: 3114212 - RNA, 12 nt, Human
cuuccaggcugg

SEQ ID NO: 3114213 - RNA, 16 nt, Human
cuuccacaagagccca

SEQ ID NO: 3114214 - RNA, 17 nt, Human
cuuccacaagagcccag

SEQ ID NO: 3114215 - RNA, 21 nt, Human
cuuccacaagagcccaggccu

SEQ ID NO: 3114216 - RNA, 19 nt, Human
cuuccacaagagcccaggc

SEQ ID NO: 3114217 - RNA, 20 nt, Human
cuucauucaacccaccugcg

SEQ ID NO: 3114218 - RNA, 15 nt, Human
cuucaguaagccgug

SEQ ID NO: 3114219 - RNA, 22 nt, Human
cuucagugccuuauggaacacu

SEQ ID NO: 3114220 - RNA, 18 nt, Human
cuucagugccuuauggaa

SEQ ID NO: 3114221 - RNA, 13 nt, Human
cuucaguggcagc

SEQ ID NO: 3114222 - RNA, 14 nt, Human
cuucaguggcagcu

SEQ ID NO: 3114223 - RNA, 15 nt, Human
cuucaguggcagcug

SEQ ID NO: 3114224 - RNA, 16 nt, Human
cuucaguggcagcugc

SEQ ID NO: 3114225 - RNA, 23 nt, Human
cuucaguaagccgugauuuucau

SEQ ID NO: 3114226 - RNA, 16 nt, Human
cuucaguaagccguga

SEQ ID NO: 3114227 - RNA, 17 nt, Human
cuuccaggggugggaca

SEQ ID NO: 3114228 - RNA, 15 nt, Human
cuuccagggguggga

SEQ ID NO: 3114229 - RNA, 14 nt, Human
cuuccagggguggg

SEQ ID NO: 3114230 - RNA, 19 nt, Human
cuuccaggcugggagagcc

SEQ ID NO: 3114231 - RNA, 16 nt, Human
cuuccaggcugggaga

SEQ ID NO: 3114232 - RNA, 15 nt, Human
cuuccaggcugggag

SEQ ID NO: 3114233 - RNA, 17 nt, Human
cuuauuuaaugaaagac

SEQ ID NO: 3114234 - RNA, 18 nt, Human
cuuauuuaaugaaagacu

SEQ ID NO: 3114235 - RNA, 23 nt, Human
cuucacagaugggugcuuggagg

SEQ ID NO: 3114236 - RNA, 10 nt, Human
cuucaaggau

SEQ ID NO: 3114237 - RNA, 15 nt, Human
cuucaaggauccuga

SEQ ID NO: 3114238 - RNA, 13 nt, Human
cuucaaggauccu

SEQ ID NO: 3114239 - RNA, 14 nt, Human
cuuagucacugaga

SEQ ID NO: 3114240 - RNA, 19 nt, Human
cuuagucacugagacagcc

SEQ ID NO: 3114241 - RNA, 18 nt, Human
cuuagucacugagacagc

SEQ ID NO: 3114242 - RNA, 16 nt, Human
cuuagucacugagaca

SEQ ID NO: 3114243 - RNA, 13 nt, Human
cuuagauguauau

SEQ ID NO: 3114244 - RNA, 16 nt, Human
cuguucuggcagaguu

SEQ ID NO: 3114245 - RNA, 15 nt, Human
cuuauacauuugaua

SEQ ID NO: 3114246 - RNA, 19 nt, Human
ccgagcuuugaaaauucag

SEQ ID NO: 3114247 - RNA, 14 nt, Human
ccgaguagcuggga

SEQ ID NO: 3114248 - RNA, 19 nt, Human
ccgcacugggcuuggggac

SEQ ID NO: 3114249 - RNA, 23 nt, Human
ccgcacugggcuuggggaccaga

SEQ ID NO: 3114250 - RNA, 21 nt, Human
ccgagauugcaccacugcacu

SEQ ID NO: 3114251 - RNA, 19 nt, Human
ccgagauugcaccacugca

SEQ ID NO: 3114252 - RNA, 15 nt, Human
ccgagauugcaccac

SEQ ID NO: 3114253 - RNA, 15 nt, Human
ccggcuccaggcucc

SEQ ID NO: 3114254 - RNA, 16 nt, Human
ccggcuccaggcuccu

SEQ ID NO: 3114255 - RNA, 21 nt, Human
ccggcuccaggcuccuuuagc

SEQ ID NO: 3114256 - RNA, 20 nt, Human
ccgggcacucagaagacacu

SEQ ID NO: 3114257 - RNA, 22 nt, Human
ccgggcacucagaagacacuga

SEQ ID NO: 3114258 - RNA, 13 nt, Human
ccgggccacagag

SEQ ID NO: 3114259 - RNA, 15 nt, Human
ccgggcucugccucc

SEQ ID NO: 3114260 - RNA, 14 nt, Human
ccgggcucugccuc

SEQ ID NO: 3114261 - RNA, 13 nt, Human
ccgggcucugccu

SEQ ID NO: 3114262 - RNA, 18 nt, Human
ccgggcucugccucccau

SEQ ID NO: 3114263 - RNA, 18 nt, Human
ccgugaggccagagacac

SEQ ID NO: 3114264 - RNA, 11 nt, Human
ccgcuggggcc

SEQ ID NO: 3114265 - RNA, 14 nt, Human
ccgcuggggccagu

SEQ ID NO: 3114266 - RNA, 23 nt, Human
ccuaggcauuugcugaauacaga

SEQ ID NO: 3114267 - RNA, 18 nt, Human
ccuaggugacagagugag

SEQ ID NO: 3114268 - RNA, 18 nt, Human
ccuacaggagugagcacu

SEQ ID NO: 3114269 - RNA, 23 nt, Human
cccucccucuuucccucccuucc

SEQ ID NO: 3114270 - RNA, 12 nt, Human
cccucuuucccu

SEQ ID NO: 3114271 - RNA, 17 nt, Human
cccucuuucccucccuu

SEQ ID NO: 3114272 - RNA, 20 nt, Human
cccucuuucccucccuuccu

SEQ ID NO: 3114273 - RNA, 19 nt, Human
cccucugcccacucccugc

SEQ ID NO: 3114274 - RNA, 11 nt, Human
cccucugccca

SEQ ID NO: 3114275 - RNA, 18 nt, Human
cccucugcccacucccug

SEQ ID NO: 3114276 - RNA, 15 nt, Human
cccucugcccacucc

SEQ ID NO: 3114277 - RNA, 14 nt, Human
cccugguggcagug

SEQ ID NO: 3114278 - RNA, 21 nt, Human
cccuguagagugggagcugag

SEQ ID NO: 3114279 - RNA, 13 nt, Human
cccugguggcagu

SEQ ID NO: 3114280 - RNA, 21 nt, Human
cccugguggcagcucaccucu

SEQ ID NO: 3114281 - RNA, 21 nt, Human
cccuggugaccagcaccaucu

SEQ ID NO: 3114282 - RNA, 14 nt, Human
cccuguucuggcag

SEQ ID NO: 3114283 - RNA, 13 nt, Human
cccuguucuggca

SEQ ID NO: 3114284 - RNA, 16 nt, Human
cccuguuuguuucuga

SEQ ID NO: 3114285 - RNA, 19 nt, Human
cccuguuuguuucugaaag

SEQ ID NO: 3114286 - RNA, 19 nt, Human
cccuuaccucggugccuuc

SEQ ID NO: 3114287 - RNA, 17 nt, Human
cccuuaccugccaggaa

SEQ ID NO: 3114288 - RNA, 23 nt, Human
cccuuaccugccaggaagccagc

SEQ ID NO: 3114289 - RNA, 20 nt, Human
cccuuaccugccaggaagcc

SEQ ID NO: 3114290 - RNA, 23 nt, Human
cccuuagcagggaaacagcuaau

SEQ ID NO: 3114291 - RNA, 14 nt, Human
cccuuagcagggaa

SEQ ID NO: 3114292 - RNA, 17 nt, Human
cccuuacgugaguccug

SEQ ID NO: 3114293 - RNA, 15 nt, Human
cccuuacgugagucc

SEQ ID NO: 3114294 - RNA, 12 nt, Human
cccuuccaugga

SEQ ID NO: 3114295 - RNA, 22 nt, Human
cccuugccgucuaccugagggg

SEQ ID NO: 3114296 - RNA, 22 nt, Human
cccugcucuccgaccagacacc

SEQ ID NO: 3114297 - RNA, 21 nt, Human
cccugcucuccgaccagacac

SEQ ID NO: 3114298 - RNA, 11 nt, Human
cccugccuccu

SEQ ID NO: 3114299 - RNA, 21 nt, Human
cccugcccugugggcccccaa

SEQ ID NO: 3114300 - RNA, 12 nt, Human
cccugaggccca

SEQ ID NO: 3114301 - RNA, 20 nt, Human
cccugcagagggcacagaaa

SEQ ID NO: 3114302 - RNA, 23 nt, Human
cccgcuaagagggagggagggcu

SEQ ID NO: 3114303 - RNA, 22 nt, Human
cccgcuaagagggagggagggc

SEQ ID NO: 3114304 - RNA, 22 nt, Human
cccgcccaggcuuagucacuga

SEQ ID NO: 3114305 - RNA, 20 nt, Human
cccgcccaggcuuagucacu

SEQ ID NO: 3114306 - RNA, 22 nt, Human
cccgaauagcugggacuacagg

SEQ ID NO: 3114307 - RNA, 20 nt, Human
ccccuuccauggacuuuguu

SEQ ID NO: 3114308 - RNA, 13 nt, Human
ccccuuccaugga

SEQ ID NO: 3114309 - RNA, 15 nt, Human
ccccuggaugcagcc

SEQ ID NO: 3114310 - RNA, 19 nt, Human
ccccuggaugcagccucac

SEQ ID NO: 3114311 - RNA, 18 nt, Human
ccccuggaugcagccuca

SEQ ID NO: 3114312 - RNA, 17 nt, Human
ccccugcuggguguggc

SEQ ID NO: 3114313 - RNA, 14 nt, Human
ccccugcugggugu

SEQ ID NO: 3114314 - RNA, 11 nt, Human
ccccugcuggu

SEQ ID NO: 3114315 - RNA, 13 nt, Human
ccccugcugguuc

SEQ ID NO: 3114316 - RNA, 15 nt, Human
ccccugcugguucag

SEQ ID NO: 3114317 - RNA, 20 nt, Human
ccccugcugguucaggguug

SEQ ID NO: 3114318 - RNA, 17 nt, Human
ccccugcccggcugcgg

SEQ ID NO: 3114319 - RNA, 19 nt, Human
ccccugcccggcugcggaa

SEQ ID NO: 3114320 - RNA, 14 nt, Human
ccccagugcccaca

SEQ ID NO: 3114321 - RNA, 15 nt, Human
ccccagugcccacag

SEQ ID NO: 3114322 - RNA, 16 nt, Human
ccccagugcccacagg

SEQ ID NO: 3114323 - RNA, 20 nt, Human
ccccagugcccacaggauca

SEQ ID NO: 3114324 - RNA, 22 nt, Human
ccccaggugguuauggagaggg

SEQ ID NO: 3114325 - RNA, 13 nt, Human
cccccacugguga

SEQ ID NO: 3114326 - RNA, 11 nt, Human
cccccacuggu

SEQ ID NO: 3114327 - RNA, 15 nt, Human
cccccacuggugaca

SEQ ID NO: 3114328 - RNA, 24 nt, Human
cccccacccaagggccuggccuga

SEQ ID NO: 3114329 - RNA, 13 nt, Human
cccccacccaagg

SEQ ID NO: 3114330 - RNA, 14 nt, Human
ccccauccucugua

SEQ ID NO: 3114331 - RNA, 17 nt, Human
cccccugacaacacuca

SEQ ID NO: 3114332 - RNA, 19 nt, Human
cccccugacaacacucauu

SEQ ID NO: 3114333 - RNA, 12 nt, Human
cccccagccugc

SEQ ID NO: 3114334 - RNA, 23 nt, Human
ccccucaacucuccuccagaguc

SEQ ID NO: 3114335 - RNA, 16 nt, Human
ccccucaacaccucug

SEQ ID NO: 3114336 - RNA, 15 nt, Human
ccccucaacaccucu

SEQ ID NO: 3114337 - RNA, 12 nt, Human
ccccuccaugug

SEQ ID NO: 3114338 - RNA, 16 nt, Human
ccccucagggucccug

SEQ ID NO: 3114339 - RNA, 22 nt, Human
ccccucagggucccugguggca

SEQ ID NO: 3114340 - RNA, 14 nt, Human
ccccacuggugaca

SEQ ID NO: 3114341 - RNA, 19 nt, Human
ccccaccgcagacaggacc

SEQ ID NO: 3114342 - RNA, 15 nt, Human
ccccaccgcagacag

SEQ ID NO: 3114343 - RNA, 21 nt, Human
ccccacccaagggccuggccu

SEQ ID NO: 3114344 - RNA, 14 nt, Human
cccaugagccucag

SEQ ID NO: 3114345 - RNA, 22 nt, Human
cccaugagccucagcauccugg

SEQ ID NO: 3114346 - RNA, 18 nt, Human
cccaugcugcccugugag

SEQ ID NO: 3114347 - RNA, 19 nt, Human
cccaucucuacaaaaagca

SEQ ID NO: 3114348 - RNA, 14 nt, Human
cccaguugggugga

SEQ ID NO: 3114349 - RNA, 15 nt, Human
ccauucugccugccc

SEQ ID NO: 3114350 - RNA, 13 nt, Human
ccauuugcuccuu

SEQ ID NO: 3114351 - RNA, 18 nt, Human
ccauguuuuguuuacggu

SEQ ID NO: 3114352 - RNA, 16 nt, Human
cccaagggccuggccu

SEQ ID NO: 3114353 - RNA, 17 nt, Human
cccacaggaucagucug

SEQ ID NO: 3114354 - RNA, 13 nt, Human
cccacaggaucag

SEQ ID NO: 3114355 - RNA, 14 nt, Human
cccaagggccuggc

SEQ ID NO: 3114356 - RNA, 12 nt, Human
cccaagggccug

SEQ ID NO: 3114357 - RNA, 21 nt, Human
ccauuuuguauuuuacuaaua

SEQ ID NO: 3114358 - RNA, 20 nt, Human
ccauuuugcugucccuuuuc

SEQ ID NO: 3114359 - RNA, 12 nt, Human
cccaccucagcc

SEQ ID NO: 3114360 - RNA, 14 nt, Human
cccaccucagccuc

SEQ ID NO: 3114361 - RNA, 15 nt, Human
cccaccucagccucc

SEQ ID NO: 3114362 - RNA, 12 nt, Human
cccaccuuggcu

SEQ ID NO: 3114363 - RNA, 21 nt, Human
cccaccucagccucccaaagu

SEQ ID NO: 3114364 - RNA, 13 nt, Human
cccaccucucuca

SEQ ID NO: 3114365 - RNA, 17 nt, Human
cccaccucucucacucc

SEQ ID NO: 3114366 - RNA, 14 nt, Human
cccaccucucucac

SEQ ID NO: 3114367 - RNA, 19 nt, Human
cccacgcccccacugguga

SEQ ID NO: 3114368 - RNA, 17 nt, Human
cccacgcccccacuggu

SEQ ID NO: 3114369 - RNA, 15 nt, Human
cccacgcccccacug

SEQ ID NO: 3114370 - RNA, 15 nt, Human
cccaccuuggcucaa

SEQ ID NO: 3114371 - RNA, 22 nt, Human
cccaccuuggcucaaguccucu

SEQ ID NO: 3114372 - RNA, 14 nt, Human
cccaccuuggcugc

SEQ ID NO: 3114373 - RNA, 15 nt, Human
cccaccuuggcugca

SEQ ID NO: 3114374 - RNA, 21 nt, Human
cccacgcuggagugcagugag

SEQ ID NO: 3114375 - RNA, 12 nt, Human
ccaucaugucug

SEQ ID NO: 3114376 - RNA, 13 nt, Human
ccaucaugucugg

SEQ ID NO: 3114377 - RNA, 12 nt, Human
ccaucauugaaa

SEQ ID NO: 3114378 - RNA, 14 nt, Human
ccaucaagccacca

SEQ ID NO: 3114379 - RNA, 13 nt, Human
ccaucaagccacc

SEQ ID NO: 3114380 - RNA, 16 nt, Human
ccaucaagccaccaac

SEQ ID NO: 3114381 - RNA, 15 nt, Human
ccauaugccugggca

SEQ ID NO: 3114382 - RNA, 12 nt, Human
ccaucaagccac

SEQ ID NO: 3114383 - RNA, 13 nt, Human
ccauaugccuggg

SEQ ID NO: 3114384 - RNA, 14 nt, Human
ccagugugacaagg

SEQ ID NO: 3114385 - RNA, 23 nt, Human
ccagugugacaaggauugcuacu

SEQ ID NO: 3114386 - RNA, 15 nt, Human
ccaucucuccuccuu

SEQ ID NO: 3114387 - RNA, 21 nt, Human
ccaucucacacaugagcauca

SEQ ID NO: 3114388 - RNA, 20 nt, Human
ccaucucacacaugagcauc

SEQ ID NO: 3114389 - RNA, 18 nt, Human
ccaucucacacaugagca

SEQ ID NO: 3114390 - RNA, 17 nt, Human
ccaucucacacaugagc

SEQ ID NO: 3114391 - RNA, 15 nt, Human
ccaucucacacauga

SEQ ID NO: 3114392 - RNA, 14 nt, Human
ccaucucacacaug

SEQ ID NO: 3114393 - RNA, 13 nt, Human
ccaucuacccucc

SEQ ID NO: 3114394 - RNA, 17 nt, Human
ccaucauugaaaucuuu

SEQ ID NO: 3114395 - RNA, 16 nt, Human
ccaucauugaaaucuu

SEQ ID NO: 3114396 - RNA, 14 nt, Human
ccaucauugaaauc

SEQ ID NO: 3114397 - RNA, 16 nt, Human
ccagguuucuaugugu

SEQ ID NO: 3114398 - RNA, 13 nt, Human
ccagguuuaagcu

SEQ ID NO: 3114399 - RNA, 20 nt, Human
ccaguaaaugggggugcauu

SEQ ID NO: 3114400 - RNA, 21 nt, Human
ccaguaaaugggggugcauuu

SEQ ID NO: 3114401 - RNA, 22 nt, Human
ccaguaaaugggggugcauuug

SEQ ID NO: 3114402 - RNA, 21 nt, Human
ccaggugcuaggaacacuccu

SEQ ID NO: 3114403 - RNA, 21 nt, Human
ccaggcuuagucacugagaca

SEQ ID NO: 3114404 - RNA, 23 nt, Human
ccaggcuuagucacugagacagc

SEQ ID NO: 3114405 - RNA, 22 nt, Human
ccaggcuuagucacugagacag

SEQ ID NO: 3114406 - RNA, 23 nt, Human
ccaggcugggagagccuuccagg

SEQ ID NO: 3114407 - RNA, 15 nt, Human
ccaggcccucugccc

SEQ ID NO: 3114408 - RNA, 14 nt, Human
ccaggaggccagcc

SEQ ID NO: 3114409 - RNA, 18 nt, Human
ccaggaggccagccuuga

SEQ ID NO: 3114410 - RNA, 15 nt, Human
ccaggaggccagccu

SEQ ID NO: 3114411 - RNA, 20 nt, Human
ccaggaggccagccuugacc

SEQ ID NO: 3114412 - RNA, 21 nt, Human
ccaggccacaagacccuugug

SEQ ID NO: 3114413 - RNA, 14 nt, Human
ccaggccccugcca

SEQ ID NO: 3114414 - RNA, 15 nt, Human
ccaggccccugccac

SEQ ID NO: 3114415 - RNA, 16 nt, Human
ccaggccccugccacc

SEQ ID NO: 3114416 - RNA, 14 nt, Human
ccaggcccucugcc

SEQ ID NO: 3114417 - RNA, 13 nt, Human
ccaggcccucugc

SEQ ID NO: 3114418 - RNA, 15 nt, Human
ccaccugccagggac

SEQ ID NO: 3114419 - RNA, 12 nt, Human
ccaccugccagg

SEQ ID NO: 3114420 - RNA, 14 nt, Human
ccaccugccaggga

SEQ ID NO: 3114421 - RNA, 13 nt, Human
ccaccugccaggg

SEQ ID NO: 3114422 - RNA, 20 nt, Human
ccaccuggccucugcacucc

SEQ ID NO: 3114423 - RNA, 18 nt, Human
ccaccuggccucugcacu

SEQ ID NO: 3114424 - RNA, 13 nt, Human
ccaccuggccucu

SEQ ID NO: 3114425 - RNA, 20 nt, Human
ccaccucucucacuccuuga

SEQ ID NO: 3114426 - RNA, 19 nt, Human
ccaccucucucacuccuug

SEQ ID NO: 3114427 - RNA, 16 nt, Human
ccaccucucucacucc

SEQ ID NO: 3114428 - RNA, 14 nt, Human
ccaccucucucacu

SEQ ID NO: 3114429 - RNA, 11 nt, Human
ccacccugcuc

SEQ ID NO: 3114430 - RNA, 12 nt, Human
ccacccugcucu

SEQ ID NO: 3114431 - RNA, 14 nt, Human
ccacccuccuuuca

SEQ ID NO: 3114432 - RNA, 18 nt, Human
ccacccugaaagcccuga

SEQ ID NO: 3114433 - RNA, 19 nt, Human
ccaccccucaacaccucug

SEQ ID NO: 3114434 - RNA, 19 nt, Human
ccacccccacccaagggcc

SEQ ID NO: 3114435 - RNA, 14 nt, Human
ccagacccggcugc

SEQ ID NO: 3114436 - RNA, 15 nt, Human
ccagacccggcugcg

SEQ ID NO: 3114437 - RNA, 22 nt, Human
ccagacacauguccaagaagcc

SEQ ID NO: 3114438 - RNA, 20 nt, Human
ccagacacauguccaagaag

SEQ ID NO: 3114439 - RNA, 17 nt, Human
ccagacacauguccaag

SEQ ID NO: 3114440 - RNA, 15 nt, Human
ccacugugaagagaa

SEQ ID NO: 3114441 - RNA, 14 nt, Human
ccacugugaagaga

SEQ ID NO: 3114442 - RNA, 23 nt, Human
ccacuggugacaugucuuuucuu

SEQ ID NO: 3114443 - RNA, 22 nt, Human
ccacugcuuuuggucuguguga

SEQ ID NO: 3114444 - RNA, 20 nt, Human
ccacugcuuuuggucugugu

SEQ ID NO: 3114445 - RNA, 11 nt, Human
ccacugcucug

SEQ ID NO: 3114446 - RNA, 12 nt, Human
ccacugcucugg

SEQ ID NO: 3114447 - RNA, 13 nt, Human
ccacugcucuggu

SEQ ID NO: 3114448 - RNA, 15 nt, Human
ccacugcucugguua

SEQ ID NO: 3114449 - RNA, 23 nt, Human
ccacugcaucguuucaucuucca

SEQ ID NO: 3114450 - RNA, 21 nt, Human
ccacugcaucguuucaucuuc

SEQ ID NO: 3114451 - RNA, 22 nt, Human
ccacuuuuguucuugguuugua

SEQ ID NO: 3114452 - RNA, 19 nt, Human
ccacugugccaugugccag

SEQ ID NO: 3114453 - RNA, 15 nt, Human
ccacugugccaugug

SEQ ID NO: 3114454 - RNA, 16 nt, Human
ccacugugccaugugc

SEQ ID NO: 3114455 - RNA, 22 nt, Human
ccagaagaaaauagugguguga

SEQ ID NO: 3114456 - RNA, 17 nt, Human
ccagcaagugagagcug

SEQ ID NO: 3114457 - RNA, 18 nt, Human
ccagcaagugagagcugg

SEQ ID NO: 3114458 - RNA, 19 nt, Human
ccagcaagugagagcuggg

SEQ ID NO: 3114459 - RNA, 16 nt, Human
ccagcaagugagagcu

SEQ ID NO: 3114460 - RNA, 18 nt, Human
ccagcaccaucucuccuc

SEQ ID NO: 3114461 - RNA, 17 nt, Human
ccagcaccaucucuccu

SEQ ID NO: 3114462 - RNA, 16 nt, Human
ccagcaggcucucagg

SEQ ID NO: 3114463 - RNA, 18 nt, Human
ccagcaggcucucaggcc

SEQ ID NO: 3114464 - RNA, 17 nt, Human
ccagcaggcucucaggc

SEQ ID NO: 3114465 - RNA, 14 nt, Human
ccagauugcaacag

SEQ ID NO: 3114466 - RNA, 16 nt, Human
ccagauugcaacaggc

SEQ ID NO: 3114467 - RNA, 14 nt, Human
ccagagcccaccuu

SEQ ID NO: 3114468 - RNA, 23 nt, Human
ccagauugcaacaggcugggcuu

SEQ ID NO: 3114469 - RNA, 22 nt, Human
ccagauugcaacaggcugggcu

SEQ ID NO: 3114470 - RNA, 15 nt, Human
ccagauuucacucuc

SEQ ID NO: 3114471 - RNA, 19 nt, Human
ccagauuucacucuccuug

SEQ ID NO: 3114472 - RNA, 18 nt, Human
ccagauuucacucuccuu

SEQ ID NO: 3114473 - RNA, 13 nt, Human
ccagccuggguga

SEQ ID NO: 3114474 - RNA, 22 nt, Human
ccagccuugaccauucuccacc

SEQ ID NO: 3114475 - RNA, 23 nt, Human
ccagccuugaccauucuccaccu

SEQ ID NO: 3114476 - RNA, 16 nt, Human
ccagcccacuucugcc

SEQ ID NO: 3114477 - RNA, 17 nt, Human
ccagcccacuucugcca

SEQ ID NO: 3114478 - RNA, 23 nt, Human
ccagcaggcucucaggccagcug

SEQ ID NO: 3114479 - RNA, 21 nt, Human
ccagcaggcucucaggccagc

SEQ ID NO: 3114480 - RNA, 20 nt, Human
ccagcaggcucucaggccag

SEQ ID NO: 3114481 - RNA, 19 nt, Human
ccagcaggcucucaggcca

SEQ ID NO: 3114482 - RNA, 19 nt, Human
ccagccgccaugcuccugg

SEQ ID NO: 3114483 - RNA, 17 nt, Human
ccagccgagauagccaa

SEQ ID NO: 3114484 - RNA, 22 nt, Human
ccagccgagauagccaaggcca

SEQ ID NO: 3114485 - RNA, 20 nt, Human
ccagccgagauagccaaggc

SEQ ID NO: 3114486 - RNA, 19 nt, Human
ccagccccaaaacucuccu

SEQ ID NO: 3114487 - RNA, 22 nt, Human
ccugaagucuuuguacagacaa

SEQ ID NO: 3114488 - RNA, 20 nt, Human
ccugaagucacacagugagu

SEQ ID NO: 3114489 - RNA, 19 nt, Human
ccugaagucacacagugag

SEQ ID NO: 3114490 - RNA, 18 nt, Human
ccugagccagauuucacu

SEQ ID NO: 3114491 - RNA, 16 nt, Human
ccugagccagauuuca

SEQ ID NO: 3114492 - RNA, 12 nt, Human
ccugagccagau

SEQ ID NO: 3114493 - RNA, 15 nt, Human
ccugagccagauuuc

SEQ ID NO: 3114494 - RNA, 15 nt, Human
ccugaggcugggcuc

SEQ ID NO: 3114495 - RNA, 14 nt, Human
ccugaggcugggcu

SEQ ID NO: 3114496 - RNA, 13 nt, Human
ccugaggcugggc

SEQ ID NO: 3114497 - RNA, 12 nt, Human
ccugagcuggga

SEQ ID NO: 3114498 - RNA, 17 nt, Human
ccugaggcccagagggc

SEQ ID NO: 3114499 - RNA, 16 nt, Human
ccugaggcccagaggg

SEQ ID NO: 3114500 - RNA, 15 nt, Human
ccugaggcccagagg

SEQ ID NO: 3114501 - RNA, 19 nt, Human
ccugccaauggacuaacuu

SEQ ID NO: 3114502 - RNA, 16 nt, Human
ccugccacccugggga

SEQ ID NO: 3114503 - RNA, 22 nt, Human
ccugccacccuggggagaaagu

SEQ ID NO: 3114504 - RNA, 14 nt, Human
ccugccacccuggg

SEQ ID NO: 3114505 - RNA, 12 nt, Human
ccugccacccug

SEQ ID NO: 3114506 - RNA, 13 nt, Human
ccugccacccugg

SEQ ID NO: 3114507 - RNA, 15 nt, Human
ccugagcugggauga

SEQ ID NO: 3114508 - RNA, 14 nt, Human
ccugaaggccccgc

SEQ ID NO: 3114509 - RNA, 19 nt, Human
ccugaaggccccgcccagg

SEQ ID NO: 3114510 - RNA, 18 nt, Human
ccugaaggccccgcccag

SEQ ID NO: 3114511 - RNA, 21 nt, Human
ccugaaggccccgcccaggcu

SEQ ID NO: 3114512 - RNA, 20 nt, Human
ccugaaggccccgcccaggc

SEQ ID NO: 3114513 - RNA, 22 nt, Human
ccugaaggccccgcccaggcuu

SEQ ID NO: 3114514 - RNA, 14 nt, Human
ccugaaagcccuga

SEQ ID NO: 3114515 - RNA, 13 nt, Human
ccugaaagcccug

SEQ ID NO: 3114516 - RNA, 18 nt, Human
ccugaaagcccugagcuu

SEQ ID NO: 3114517 - RNA, 21 nt, Human
ccugaagacucauucuucugu

SEQ ID NO: 3114518 - RNA, 22 nt, Human
ccugccuguugggccaggagcc

SEQ ID NO: 3114519 - RNA, 22 nt, Human
ccugccagggacagagggggug

SEQ ID NO: 3114520 - RNA, 12 nt, Human
ccugccaggcau

SEQ ID NO: 3114521 - RNA, 14 nt, Human
ccugcccggcugcg

SEQ ID NO: 3114522 - RNA, 16 nt, Human
ccugcccggcugcgga

SEQ ID NO: 3114523 - RNA, 11 nt, Human
ccugcccugug

SEQ ID NO: 3114524 - RNA, 14 nt, Human
ccugcccugugggc

SEQ ID NO: 3114525 - RNA, 12 nt, Human
ccugcccugugg

SEQ ID NO: 3114526 - RNA, 13 nt, Human
ccugccucagccu

SEQ ID NO: 3114527 - RNA, 14 nt, Human
ccugccucagccuc

SEQ ID NO: 3114528 - RNA, 12 nt, Human
ccugccucagcc

SEQ ID NO: 3114529 - RNA, 11 nt, Human
ccugccucagc

SEQ ID NO: 3114530 - RNA, 14 nt, Human
ccugccuguugggc

SEQ ID NO: 3114531 - RNA, 22 nt, Human
ccugcccuuaccugccaggaag

SEQ ID NO: 3114532 - RNA, 21 nt, Human
ccugcccuuaccugccaggaa

SEQ ID NO: 3114533 - RNA, 19 nt, Human
ccugcccuuaccugccagg

SEQ ID NO: 3114534 - RNA, 15 nt, Human
ccugcccugugggcc

SEQ ID NO: 3114535 - RNA, 17 nt, Human
ccugcuaauuccccaga

SEQ ID NO: 3114536 - RNA, 21 nt, Human
ccugcuaauuccccagauugc

SEQ ID NO: 3114537 - RNA, 20 nt, Human
ccugccuguugggccaggag

SEQ ID NO: 3114538 - RNA, 19 nt, Human
ccugccuguugggccagga

SEQ ID NO: 3114539 - RNA, 18 nt, Human
ccugccuguugggccagg

SEQ ID NO: 3114540 - RNA, 19 nt, Human
ccuggcacccggccccugc

SEQ ID NO: 3114541 - RNA, 20 nt, Human
ccuggcacccggccccugcu

SEQ ID NO: 3114542 - RNA, 18 nt, Human
ccuggcacccggccccug

SEQ ID NO: 3114543 - RNA, 22 nt, Human
ccuggcacuauaauguaagcuc

SEQ ID NO: 3114544 - RNA, 12 nt, Human
ccuggcacugcu

SEQ ID NO: 3114545 - RNA, 14 nt, Human
ccuggcccacugca

SEQ ID NO: 3114546 - RNA, 13 nt, Human
ccuggcccacugc

SEQ ID NO: 3114547 - RNA, 21 nt, Human
ccuggccagaugcaccagccc

SEQ ID NO: 3114548 - RNA, 23 nt, Human
ccuggccagaugcaccagcccuu

SEQ ID NO: 3114549 - RNA, 20 nt, Human
ccuggccagaugcaccagcc

SEQ ID NO: 3114550 - RNA, 23 nt, Human
ccuggcaugggaaugaaugucag

SEQ ID NO: 3114551 - RNA, 13 nt, Human
ccuggcaugggaa

SEQ ID NO: 3114552 - RNA, 16 nt, Human
ccuggcacugcuucca

SEQ ID NO: 3114553 - RNA, 13 nt, Human
ccuggcacugcuu

SEQ ID NO: 3114554 - RNA, 16 nt, Human
ccuggcccacugcauc

SEQ ID NO: 3114555 - RNA, 16 nt, Human
ccugggagugagcugg

SEQ ID NO: 3114556 - RNA, 22 nt, Human
ccugggaggucaaggcugcagu

SEQ ID NO: 3114557 - RNA, 16 nt, Human
ccugggcagaaggaag

SEQ ID NO: 3114558 - RNA, 18 nt, Human
ccugggagugagcugguu

SEQ ID NO: 3114559 - RNA, 15 nt, Human
ccugggcagaaggaa

SEQ ID NO: 3114560 - RNA, 18 nt, Human
ccugggggcugggcagag

SEQ ID NO: 3114561 - RNA, 19 nt, Human
ccugggggcugggcagagg

SEQ ID NO: 3114562 - RNA, 21 nt, Human
ccugggggcugggcagaggaa

SEQ ID NO: 3114563 - RNA, 20 nt, Human
ccugggggcugggcagagga

SEQ ID NO: 3114564 - RNA, 10 nt, Human
ccuguaccuc

SEQ ID NO: 3114565 - RNA, 13 nt, Human
ccugguggcagug

SEQ ID NO: 3114566 - RNA, 14 nt, Human
ccugguggcagugg

SEQ ID NO: 3114567 - RNA, 16 nt, Human
ccuguagagugggagc

SEQ ID NO: 3114568 - RNA, 15 nt, Human
ccuguagagugggag

SEQ ID NO: 3114569 - RNA, 13 nt, Human
ccuguagcccuaa

SEQ ID NO: 3114570 - RNA, 12 nt, Human
ccugucccccug

SEQ ID NO: 3114571 - RNA, 15 nt, Human
ccugucccccugaca

SEQ ID NO: 3114572 - RNA, 14 nt, Human
ccugucccccugac

SEQ ID NO: 3114573 - RNA, 13 nt, Human
ccugucccccuga

SEQ ID NO: 3114574 - RNA, 14 nt, Human
ccugguggcagcug

SEQ ID NO: 3114575 - RNA, 22 nt, Human
ccugguggcagcucaccucucc

SEQ ID NO: 3114576 - RNA, 21 nt, Human
ccugguggcagcucaccucuc

SEQ ID NO: 3114577 - RNA, 19 nt, Human
ccugguggcagcucaccuc

SEQ ID NO: 3114578 - RNA, 15 nt, Human
ccugguggcagcugc

SEQ ID NO: 3114579 - RNA, 16 nt, Human
ccugguggcagcugcg

SEQ ID NO: 3114580 - RNA, 17 nt, Human
ccugguggcagcugcgg

SEQ ID NO: 3114581 - RNA, 18 nt, Human
ccugguggcagcugcggu

SEQ ID NO: 3114582 - RNA, 16 nt, Human
cgaggacagggaggug

SEQ ID NO: 3114583 - RNA, 18 nt, Human
cgagcccugguggcagug

SEQ ID NO: 3114584 - RNA, 14 nt, Human
cgaggacagggagg

SEQ ID NO: 3114585 - RNA, 19 nt, Human
cgagcccugguggcagugg

SEQ ID NO: 3114586 - RNA, 17 nt, Human
cgcacugggcuugggga

SEQ ID NO: 3114587 - RNA, 17 nt, Human
cgcagcccugcagaggg

SEQ ID NO: 3114588 - RNA, 15 nt, Human
cgcagcccugcagag

SEQ ID NO: 3114589 - RNA, 20 nt, Human
cgcagcauauucaggaagcu

SEQ ID NO: 3114590 - RNA, 19 nt, Human
cgcagcauauucaggaagc

SEQ ID NO: 3114591 - RNA, 13 nt, Human
cgcacugggcuug

SEQ ID NO: 3114592 - RNA, 12 nt, Human
cggccaggccag

SEQ ID NO: 3114593 - RNA, 20 nt, Human
cggccaggccagagggagug

SEQ ID NO: 3114594 - RNA, 11 nt, Human
cggccaggcca

SEQ ID NO: 3114595 - RNA, 14 nt, Human
cggcuggcagccca

SEQ ID NO: 3114596 - RNA, 13 nt, Human
cggcuggccuggc

SEQ ID NO: 3114597 - RNA, 23 nt, Human
cggcuggcagcccaccccucaac

SEQ ID NO: 3114598 - RNA, 16 nt, Human
cgggaagggggcuggg

SEQ ID NO: 3114599 - RNA, 20 nt, Human
cgggaagggggcugggacau

SEQ ID NO: 3114600 - RNA, 19 nt, Human
cgggaagggggcugggaca

SEQ ID NO: 3114601 - RNA, 18 nt, Human
cgcugugcugcccugccc

SEQ ID NO: 3114602 - RNA, 19 nt, Human
cgcugugcugcccugccca

SEQ ID NO: 3114603 - RNA, 23 nt, Human
cgcugugcugcccugcccaccug

SEQ ID NO: 3114604 - RNA, 21 nt, Human
cgcugugcugcccugcccacc

SEQ ID NO: 3114605 - RNA, 11 nt, Human
cgcugugcugc

SEQ ID NO: 3114606 - RNA, 14 nt, Human
cgcugugcugcccu

SEQ ID NO: 3114607 - RNA, 13 nt, Human
cgcugugcugccc

SEQ ID NO: 3114608 - RNA, 15 nt, Human
cggagaaaggaaggg

SEQ ID NO: 3114609 - RNA, 21 nt, Human
cggacagccacggccaggcca

SEQ ID NO: 3114610 - RNA, 22 nt, Human
cggacagccacggccaggccag

SEQ ID NO: 3114611 - RNA, 14 nt, Human
cgcuuucuacccag

SEQ ID NO: 3114612 - RNA, 16 nt, Human
cgcuuucuacccagcg

SEQ ID NO: 3114613 - RNA, 16 nt, Human
cggaauaguuggcuag

SEQ ID NO: 3114614 - RNA, 17 nt, Human
cggaauaguuggcuagg

SEQ ID NO: 3114615 - RNA, 14 nt, Human
cggaauaguuggcu

SEQ ID NO: 3114616 - RNA, 20 nt, Human
cggacagccacggccaggcc

SEQ ID NO: 3114617 - RNA, 19 nt, Human
cgcagcccugcagagggca

SEQ ID NO: 3114618 - RNA, 18 nt, Human
cgcagcccugcagagggc

SEQ ID NO: 3114619 - RNA, 13 nt, Human
cgcccagucugga

SEQ ID NO: 3114620 - RNA, 19 nt, Human
cgcccagucuggaaugcag

SEQ ID NO: 3114621 - RNA, 21 nt, Human
cgcccagucuggaaugcagug

SEQ ID NO: 3114622 - RNA, 12 nt, Human
cgcccagucugg

SEQ ID NO: 3114623 - RNA, 24 nt, Human
cgcuacccgggaagggggcuggga

SEQ ID NO: 3114624 - RNA, 21 nt, Human
cgcuacccgggaagggggcug

SEQ ID NO: 3114625 - RNA, 18 nt, Human
cgcuacccgggaaggggg

SEQ ID NO: 3114626 - RNA, 17 nt, Human
cgcuacccgggaagggg

SEQ ID NO: 3114627 - RNA, 14 nt, Human
cgcgacaaugcaaa

SEQ ID NO: 3114628 - RNA, 19 nt, Human
cgcgguggcucacgccugu

SEQ ID NO: 3114629 - RNA, 17 nt, Human
cgaauauugcugauggu

SEQ ID NO: 3114630 - RNA, 15 nt, Human
cgaauauugcugaug

SEQ ID NO: 3114631 - RNA, 15 nt, Human
cgaauagcugggacu

SEQ ID NO: 3114632 - RNA, 16 nt, Human
cgaauagcugggacua

SEQ ID NO: 3114633 - RNA, 11 nt, Human
cgaauauugcu

SEQ ID NO: 3114634 - RNA, 14 nt, Human
cgaauauugcugau

SEQ ID NO: 3114635 - RNA, 12 nt, Human
cgaauauugcug

SEQ ID NO: 3114636 - RNA, 23 nt, Human
cgaaagggacuuggaagcuccgc

SEQ ID NO: 3114637 - RNA, 22 nt, Human
ccuuuuuuggcugcugaaggcu

SEQ ID NO: 3114638 - RNA, 20 nt, Human
ccuuuuuuggcugcugaagg

SEQ ID NO: 3114639 - RNA, 18 nt, Human
ccuuuuuuggcugcugaa

SEQ ID NO: 3114640 - RNA, 17 nt, Human
ccuuuuuuggcugcuga

SEQ ID NO: 3114641 - RNA, 21 nt, Human
cgaacauguuuuucuucuccc

SEQ ID NO: 3114642 - RNA, 23 nt, Human
cgaacauguuuuucuucucccuc

SEQ ID NO: 3114643 - RNA, 14 nt, Human
ccuuugugaggaag

SEQ ID NO: 3114644 - RNA, 23 nt, Human
ccuuuguccccaccgcagacagg

SEQ ID NO: 3114645 - RNA, 22 nt, Human
ccuuuguccccaccgcagacag

SEQ ID NO: 3114646 - RNA, 23 nt, Human
ccuuugugaggaagccgcugggg

SEQ ID NO: 3114647 - RNA, 17 nt, Human
ccuuugugaggaagccg

SEQ ID NO: 3114648 - RNA, 16 nt, Human
ccuuugugaggaagcc

SEQ ID NO: 3114649 - RNA, 15 nt, Human
ccuuugugaggaagc

SEQ ID NO: 3114650 - RNA, 19 nt, Human
ccuuuuuuauacauaaaca

SEQ ID NO: 3114651 - RNA, 15 nt, Human
ccuuuuuuggcugcu

SEQ ID NO: 3114652 - RNA, 24 nt, Human
ccuuuguauucucuccuguaccuc

SEQ ID NO: 3114653 - RNA, 22 nt, Human
ccuuuguauucucuccuguacc

SEQ ID NO: 3114654 - RNA, 23 nt, Human
ccuuuguauucucuccuguaccu

SEQ ID NO: 3114655 - RNA, 18 nt, Human
ccuuuguccccaccgcag

SEQ ID NO: 3114656 - RNA, 16 nt, Human
ccuuuguccccaccgc

SEQ ID NO: 3114657 - RNA, 14 nt, Human
ccuuuguccccacc

SEQ ID NO: 3114658 - RNA, 20 nt, Human
ccuuggugucgggcaugaca

SEQ ID NO: 3114659 - RNA, 19 nt, Human
ccuuggugucgggcaugac

SEQ ID NO: 3114660 - RNA, 14 nt, Human
ccuuggcugcaggg

SEQ ID NO: 3114661 - RNA, 16 nt, Human
ccuuggcugcagggag

SEQ ID NO: 3114662 - RNA, 14 nt, Human
ccuuggggagcagg

SEQ ID NO: 3114663 - RNA, 18 nt, Human
ccuugacagggcacaccg

SEQ ID NO: 3114664 - RNA, 21 nt, Human
ccuugacagggcacaccgggc

SEQ ID NO: 3114665 - RNA, 18 nt, Human
ccuucucuccagccccug

SEQ ID NO: 3114666 - RNA, 17 nt, Human
ccuucucuccagccccu

SEQ ID NO: 3114667 - RNA, 22 nt, Human
ccuuggcucaaguccucuuuuc

SEQ ID NO: 3114668 - RNA, 15 nt, Human
ccuuggauugucccc

SEQ ID NO: 3114669 - RNA, 19 nt, Human
ccuucucuccagccccugg

SEQ ID NO: 3114670 - RNA, 16 nt, Human
ccuucucuccagcccc

SEQ ID NO: 3114671 - RNA, 15 nt, Human
ccuucucuccagccc

SEQ ID NO: 3114672 - RNA, 13 nt, Human
ccuucucuccagc

SEQ ID NO: 3114673 - RNA, 12 nt, Human
ccuucucuccag

SEQ ID NO: 3114674 - RNA, 13 nt, Human
ccuuccaggggug

SEQ ID NO: 3114675 - RNA, 22 nt, Human
ccuuccaggggugggacacccu

SEQ ID NO: 3114676 - RNA, 17 nt, Human
ccuuccauggacuuugu

SEQ ID NO: 3114677 - RNA, 20 nt, Human
ccugugggcccccaaaugga

SEQ ID NO: 3114678 - RNA, 20 nt, Human
ccuguggaugauaaaacaca

SEQ ID NO: 3114679 - RNA, 20 nt, Human
ccugugccucugggacugga

SEQ ID NO: 3114680 - RNA, 14 nt, Human
cuccagcucaccag

SEQ ID NO: 3114681 - RNA, 15 nt, Human
cuccagcucaccagc

SEQ ID NO: 3114682 - RNA, 16 nt, Human
cuccagcucaccagcc

SEQ ID NO: 3114683 - RNA, 18 nt, Human
cuccagcucaccagcccc

SEQ ID NO: 3114684 - RNA, 11 nt, Human
cuccagccccu

SEQ ID NO: 3114685 - RNA, 14 nt, Human
cuccagccccugga

SEQ ID NO: 3114686 - RNA, 13 nt, Human
cuccagccccugg

SEQ ID NO: 3114687 - RNA, 16 nt, Human
cuccagagucagaagu

SEQ ID NO: 3114688 - RNA, 18 nt, Human
cuccaaaauaaaacuuuu

SEQ ID NO: 3114689 - RNA, 17 nt, Human
cuccaagcucccaggca

SEQ ID NO: 3114690 - RNA, 21 nt, Human
cucauuugucacacacuuugg

SEQ ID NO: 3114691 - RNA, 18 nt, Human
cucauuugucacacacuu

SEQ ID NO: 3114692 - RNA, 21 nt, Human
cucauugaccugaggcccuuc

SEQ ID NO: 3114693 - RNA, 19 nt, Human
cucauugaccugaggcccu

SEQ ID NO: 3114694 - RNA, 18 nt, Human
cucauucuccuuguguua

SEQ ID NO: 3114695 - RNA, 22 nt, Human
cucauucuccuuguguuacuaa

SEQ ID NO: 3114696 - RNA, 17 nt, Human
cucauugaccugaggcc

SEQ ID NO: 3114697 - RNA, 14 nt, Human
cucccaucacccgc

SEQ ID NO: 3114698 - RNA, 16 nt, Human
cucccaucacuucccu

SEQ ID NO: 3114699 - RNA, 15 nt, Human
cucccacaaaggaga

SEQ ID NO: 3114700 - RNA, 15 nt, Human
cucccaacucacccc

SEQ ID NO: 3114701 - RNA, 14 nt, Human
cucccaacucaccc

SEQ ID NO: 3114702 - RNA, 16 nt, Human
cucccaaagugcuggg

SEQ ID NO: 3114703 - RNA, 23 nt, Human
cucccaaagugcugggauuacag

SEQ ID NO: 3114704 - RNA, 20 nt, Human
cucccgaauagcugggacua

SEQ ID NO: 3114705 - RNA, 23 nt, Human
cucccgaauagcugggacuacag

SEQ ID NO: 3114706 - RNA, 19 nt, Human
cucccgaauagcugggacu

SEQ ID NO: 3114707 - RNA, 15 nt, Human
cucccuucauccuuc

SEQ ID NO: 3114708 - RNA, 23 nt, Human
cuccccugcuggguguggcgcag

SEQ ID NO: 3114709 - RNA, 21 nt, Human
cuccccugcuggguguggcgc

SEQ ID NO: 3114710 - RNA, 14 nt, Human
cuccccugcugggu

SEQ ID NO: 3114711 - RNA, 18 nt, Human
cucagagagggugggagu

SEQ ID NO: 3114712 - RNA, 19 nt, Human
cucagagagggugggagug

SEQ ID NO: 3114713 - RNA, 23 nt, Human
cucagagagggugggagugggcc

SEQ ID NO: 3114714 - RNA, 16 nt, Human
cucacuguugcccagg

SEQ ID NO: 3114715 - RNA, 17 nt, Human
cucacuguugcccaggc

SEQ ID NO: 3114716 - RNA, 18 nt, Human
cucacuguugcccaggcu

SEQ ID NO: 3114717 - RNA, 19 nt, Human
cucacuguugcccaggcug

SEQ ID NO: 3114718 - RNA, 16 nt, Human
cucagaucuucugugg

SEQ ID NO: 3114719 - RNA, 14 nt, Human
cucacuguugccca

SEQ ID NO: 3114720 - RNA, 15 nt, Human
cucacuguugcccag

SEQ ID NO: 3114721 - RNA, 15 nt, Human
cucacugcagccuca

SEQ ID NO: 3114722 - RNA, 16 nt, Human
cucacugcagccucaa

SEQ ID NO: 3114723 - RNA, 14 nt, Human
cucacugcagccuc

SEQ ID NO: 3114724 - RNA, 13 nt, Human
cucagcggggaca

SEQ ID NO: 3114725 - RNA, 23 nt, Human
cucagcggggacagcuccuucug

SEQ ID NO: 3114726 - RNA, 14 nt, Human
cucagcggggacag

SEQ ID NO: 3114727 - RNA, 15 nt, Human
cucagcggggacagc

SEQ ID NO: 3114728 - RNA, 16 nt, Human
cucagcggggacagcu

SEQ ID NO: 3114729 - RNA, 18 nt, Human
cucagcggggacagcucc

SEQ ID NO: 3114730 - RNA, 19 nt, Human
cucagcggggacagcuccu

SEQ ID NO: 3114731 - RNA, 20 nt, Human
cucagcggggacagcuccuu

SEQ ID NO: 3114732 - RNA, 21 nt, Human
cucagcggggacagcuccuuc

SEQ ID NO: 3114733 - RNA, 13 nt, Human
cucagcauccugg

SEQ ID NO: 3114734 - RNA, 21 nt, Human
cucagcauccuggcacccggc

SEQ ID NO: 3114735 - RNA, 22 nt, Human
cucagcauccuggcacccggcc

SEQ ID NO: 3114736 - RNA, 16 nt, Human
cucagcaggggagggu

SEQ ID NO: 3114737 - RNA, 20 nt, Human
cucagcaaaagaugcuucuc

SEQ ID NO: 3114738 - RNA, 19 nt, Human
cucagcaaaagaugcuucu

SEQ ID NO: 3114739 - RNA, 18 nt, Human
cucagggucccugguggc

SEQ ID NO: 3114740 - RNA, 24 nt, Human
cucagggucccugguggcagcuca

SEQ ID NO: 3114741 - RNA, 22 nt, Human
cucagggucccugguggcagcu

SEQ ID NO: 3114742 - RNA, 21 nt, Human
cucagggucccugguggcagc

SEQ ID NO: 3114743 - RNA, 20 nt, Human
cucagggucccugguggcag

SEQ ID NO: 3114744 - RNA, 21 nt, Human
cucagguggggucacucuggc

SEQ ID NO: 3114745 - RNA, 20 nt, Human
cucagguggggucacucugg

SEQ ID NO: 3114746 - RNA, 19 nt, Human
cucagguggggucacucug

SEQ ID NO: 3114747 - RNA, 22 nt, Human
cucaggugauccacccaccuca

SEQ ID NO: 3114748 - RNA, 23 nt, Human
cucaggugauccacccaccucag

SEQ ID NO: 3114749 - RNA, 18 nt, Human
cucagggccuggcucagg

SEQ ID NO: 3114750 - RNA, 20 nt, Human
cucagggccuggcucaggug

SEQ ID NO: 3114751 - RNA, 19 nt, Human
cucagggccuggcucaggu

SEQ ID NO: 3114752 - RNA, 15 nt, Human
cucaggcagguggga

SEQ ID NO: 3114753 - RNA, 18 nt, Human
cucaggcaggugggaugg

SEQ ID NO: 3114754 - RNA, 20 nt, Human
cuacuguccuacccacccuc

SEQ ID NO: 3114755 - RNA, 17 nt, Human
cuagagguucaaagaua

SEQ ID NO: 3114756 - RNA, 18 nt, Human
cuagagguucaaagauau

SEQ ID NO: 3114757 - RNA, 21 nt, Human
cuagagguucaaagauauuuu

SEQ ID NO: 3114758 - RNA, 15 nt, Human
cuagagguucaaaga

SEQ ID NO: 3114759 - RNA, 15 nt, Human
cuacucgaguuacag

SEQ ID NO: 3114760 - RNA, 19 nt, Human
cuacucgaguuacagacaa

SEQ ID NO: 3114761 - RNA, 16 nt, Human
cuacucgaguuacaga

SEQ ID NO: 3114762 - RNA, 12 nt, Human
cuacucuguguc

SEQ ID NO: 3114763 - RNA, 19 nt, Human
cuacuguccuacccacccu

SEQ ID NO: 3114764 - RNA, 21 nt, Human
cuacuguaauuugugauacaa

SEQ ID NO: 3114765 - RNA, 24 nt, Human
cuagauacuguaucaugacaaaga

SEQ ID NO: 3114766 - RNA, 13 nt, Human
cuagauacuguau

SEQ ID NO: 3114767 - RNA, 16 nt, Human
cuagauacuguaucau

SEQ ID NO: 3114768 - RNA, 21 nt, Human
cuagccuuagaagucacacag

SEQ ID NO: 3114769 - RNA, 22 nt, Human
cuagccugugccucugggacug

SEQ ID NO: 3114770 - RNA, 21 nt, Human
cuagccugugccucugggacu

SEQ ID NO: 3114771 - RNA, 19 nt, Human
cuagccugugccucuggga

SEQ ID NO: 3114772 - RNA, 22 nt, Human
cuagccuuagaagucacacagu

SEQ ID NO: 3114773 - RNA, 23 nt, Human
cuagccuuagaagucacacagua

SEQ ID NO: 3114774 - RNA, 19 nt, Human
cuauagccuaggugacaga

SEQ ID NO: 3114775 - RNA, 18 nt, Human
cuauagccuaggugacag

SEQ ID NO: 3114776 - RNA, 20 nt, Human
cuauagccuaggugacagag

SEQ ID NO: 3114777 - RNA, 21 nt, Human
cuauagccuaggugacagagu

SEQ ID NO: 3114778 - RNA, 17 nt, Human
cuaggaagacuuuggaa

SEQ ID NO: 3114779 - RNA, 15 nt, Human
cuaggaagacuuugg

SEQ ID NO: 3114780 - RNA, 20 nt, Human
cuaggaacacuccuucacag

SEQ ID NO: 3114781 - RNA, 21 nt, Human
cuaugcauuugaaaauuuuga

SEQ ID NO: 3114782 - RNA, 23 nt, Human
cuauucaguaauaacucuacccu

SEQ ID NO: 3114783 - RNA, 13 nt, Human
cuauguaucaaug

SEQ ID NO: 3114784 - RNA, 17 nt, Human
cuauucaguaauaacuc

SEQ ID NO: 3114785 - RNA, 16 nt, Human
cuauugcugcuugagg

SEQ ID NO: 3114786 - RNA, 18 nt, Human
cuauuguuagucucuuga

SEQ ID NO: 3114787 - RNA, 18 nt, Human
cucaacucuccuccagag

SEQ ID NO: 3114788 - RNA, 16 nt, Human
cucaacucuccuccag

SEQ ID NO: 3114789 - RNA, 23 nt, Human
cucacacggacacucaaaagcug

SEQ ID NO: 3114790 - RNA, 14 nt, Human
cucaaauuucuaaa

SEQ ID NO: 3114791 - RNA, 14 nt, Human
cucaacucuccucc

SEQ ID NO: 3114792 - RNA, 15 nt, Human
cucaaauuucuaaau

SEQ ID NO: 3114793 - RNA, 17 nt, Human
cucaaauuucuaaaucu

SEQ ID NO: 3114794 - RNA, 13 nt, Human
cucaaauuucuaa

SEQ ID NO: 3114795 - RNA, 16 nt, Human
cuacaggugugaguca

SEQ ID NO: 3114796 - RNA, 14 nt, Human
cuacaggugugagu

SEQ ID NO: 3114797 - RNA, 13 nt, Human
cuacaguccuccc

SEQ ID NO: 3114798 - RNA, 18 nt, Human
cuacauggaguauauguc

SEQ ID NO: 3114799 - RNA, 20 nt, Human
cuacauggaguauaugucaa

SEQ ID NO: 3114800 - RNA, 15 nt, Human
cuacaggcacccacc

SEQ ID NO: 3114801 - RNA, 17 nt, Human
cuacaggcacccaccau

SEQ ID NO: 3114802 - RNA, 14 nt, Human
cuacaggagugagc

SEQ ID NO: 3114803 - RNA, 15 nt, Human
cuacaggagugagca

SEQ ID NO: 3114804 - RNA, 16 nt, Human
cuacaggagugagcac

SEQ ID NO: 3114805 - RNA, 23 nt, Human
cuacagcuugaccgugaggccag

SEQ ID NO: 3114806 - RNA, 22 nt, Human
cuacagcuugaccgugaggcca

SEQ ID NO: 3114807 - RNA, 19 nt, Human
cuacagcuugaccgugagg

SEQ ID NO: 3114808 - RNA, 22 nt, Human
cuacagaggccaugggccuccu

SEQ ID NO: 3114809 - RNA, 18 nt, Human
cuacagaggccaugggcc

SEQ ID NO: 3114810 - RNA, 20 nt, Human
cuacagaggccaugggccuc

SEQ ID NO: 3114811 - RNA, 17 nt, Human
cuacagaggccaugggc

SEQ ID NO: 3114812 - RNA, 17 nt, Human
cuacacugugcugaguc

SEQ ID NO: 3114813 - RNA, 14 nt, Human
cuacacugugcuga

SEQ ID NO: 3114814 - RNA, 13 nt, Human
cuacacugugcug

SEQ ID NO: 3114815 - RNA, 17 nt, Human
cuacccucuuagaaaaa

SEQ ID NO: 3114816 - RNA, 18 nt, Human
cuacccagcgagcccugg

SEQ ID NO: 3114817 - RNA, 13 nt, Human
cuacccaggugcu

SEQ ID NO: 3114818 - RNA, 12 nt, Human
cuacccaggugc

SEQ ID NO: 3114819 - RNA, 15 nt, Human
cuacccagcgagccc

SEQ ID NO: 3114820 - RNA, 17 nt, Human
cuacccagcgagcccug

SEQ ID NO: 3114821 - RNA, 18 nt, Human
cuaccauccccuguagag

SEQ ID NO: 3114822 - RNA, 13 nt, Human
cuacauucuguua

SEQ ID NO: 3114823 - RNA, 14 nt, Human
cuacauucuguuaa

SEQ ID NO: 3114824 - RNA, 22 nt, Human
cuacauuauaaaugucucuuua

SEQ ID NO: 3114825 - RNA, 12 nt, Human
cuaaugggacac

SEQ ID NO: 3114826 - RNA, 13 nt, Human
cuaaugggacacu

SEQ ID NO: 3114827 - RNA, 21 nt, Human
cuacacacugcauguuuguga

SEQ ID NO: 3114828 - RNA, 21 nt, Human
cuacacaggggaaaagaggag

SEQ ID NO: 3114829 - RNA, 17 nt, Human
cuaauagacaauuuauu

SEQ ID NO: 3114830 - RNA, 19 nt, Human
cuaauagacaauuuauuau

SEQ ID NO: 3114831 - RNA, 23 nt, Human
cuaauagacaauuuauuauggca

SEQ ID NO: 3114832 - RNA, 22 nt, Human
cuaagcuauucaguaauaacuc

SEQ ID NO: 3114833 - RNA, 22 nt, Human
cuaaaugaaaaucgugacaaca

SEQ ID NO: 3114834 - RNA, 21 nt, Human
cuaaaucuccaaaauaaaacu

SEQ ID NO: 3114835 - RNA, 20 nt, Human
cuaaaucuccaaaauaaaac

SEQ ID NO: 3114836 - RNA, 23 nt, Human
cgggaggauguucugggacacag

SEQ ID NO: 3114837 - RNA, 21 nt, Human
cgggaggauguucugggacac

SEQ ID NO: 3114838 - RNA, 13 nt, Human
cuaagagggaggg

SEQ ID NO: 3114839 - RNA, 22 nt, Human
cuaagagggagggagggcucca

SEQ ID NO: 3114840 - RNA, 15 nt, Human
cuaagagggagggag

SEQ ID NO: 3114841 - RNA, 23 nt, Human
cuaagagggagggagggcuccag

SEQ ID NO: 3114842 - RNA, 12 nt, Human
cuaaccacgcug

SEQ ID NO: 3114843 - RNA, 14 nt, Human
cuaaccacgcugga

SEQ ID NO: 3114844 - RNA, 16 nt, Human
cuaaauucaugcugcu

SEQ ID NO: 3114845 - RNA, 14 nt, Human
aaaaacacaaaagu

SEQ ID NO: 3114846 - RNA, 15 nt, Human
aaaaacugauuuuuu

SEQ ID NO: 3114847 - RNA, 13 nt, Human
aaaaacugauuuu

SEQ ID NO: 3114848 - RNA, 12 nt, Human
aaaaagaggcua

SEQ ID NO: 3114849 - RNA, 12 nt, Human
aaaacacauuuu

SEQ ID NO: 3114850 - RNA, 22 nt, Human
aucucucgugauugauaagaac

SEQ ID NO: 3114851 - RNA, 19 nt, Human
aucuuccaacucaaacucu

SEQ ID NO: 3114852 - RNA, 17 nt, Human
aucuucuuuauaauucu

SEQ ID NO: 3114853 - RNA, 17 nt, Human
aucuugaagacuuuucu

SEQ ID NO: 3114854 - RNA, 14 nt, Human
augagccuggcaag

SEQ ID NO: 3114855 - RNA, 13 nt, Human
augagccuggcaa

SEQ ID NO: 3114856 - RNA, 12 nt, Human
augacccagugg

SEQ ID NO: 3114857 - RNA, 12 nt, Human
augagccuggca

SEQ ID NO: 3114858 - RNA, 17 nt, Human
augacuccagaauuucc

SEQ ID NO: 3114859 - RNA, 16 nt, Human
augacuccagaauuuc

SEQ ID NO: 3114860 - RNA, 12 nt, Human
augacuccagaa

SEQ ID NO: 3114861 - RNA, 12 nt, Human
aucagcugcuac

SEQ ID NO: 3114862 - RNA, 21 nt, Human
aucagccugggcaaugugaua

SEQ ID NO: 3114863 - RNA, 20 nt, Human
aucagccugggcaaugugau

SEQ ID NO: 3114864 - RNA, 11 nt, Human
aucagccuggg

SEQ ID NO: 3114865 - RNA, 19 nt, Human
aucauggagguuugaagau

SEQ ID NO: 3114866 - RNA, 20 nt, Human
aucagccugcuccagcuguu

SEQ ID NO: 3114867 - RNA, 13 nt, Human
aucagcugcuacu

SEQ ID NO: 3114868 - RNA, 23 nt, Human
aucagcugcuacuacuccuguag

SEQ ID NO: 3114869 - RNA, 15 nt, Human
aucccuacuguaauu

SEQ ID NO: 3114870 - RNA, 22 nt, Human
auccucauacccacccccaccc

SEQ ID NO: 3114871 - RNA, 19 nt, Human
auccucauacccaccccca

SEQ ID NO: 3114872 - RNA, 18 nt, Human
auccucauacccaccccc

SEQ ID NO: 3114873 - RNA, 18 nt, Human
auccacccaccucagccu

SEQ ID NO: 3114874 - RNA, 20 nt, Human
auccacccaccucagccucc

SEQ ID NO: 3114875 - RNA, 16 nt, Human
auccacccaccucagc

SEQ ID NO: 3114876 - RNA, 11 nt, Human
auccuccucag

SEQ ID NO: 3114877 - RNA, 22 nt, Human
auccuccaggugcacaagcucc

SEQ ID NO: 3114878 - RNA, 19 nt, Human
auccuccaggugcacaagc

SEQ ID NO: 3114879 - RNA, 14 nt, Human
auccuccaggugca

SEQ ID NO: 3114880 - RNA, 13 nt, Human
auccuccaggugc

SEQ ID NO: 3114881 - RNA, 13 nt, Human
aucgaugcagugc

SEQ ID NO: 3114882 - RNA, 15 nt, Human
augucacaggcaggu

SEQ ID NO: 3114883 - RNA, 14 nt, Human
augucacaggcagg

SEQ ID NO: 3114884 - RNA, 16 nt, Human
augucacaggcagguc

SEQ ID NO: 3114885 - RNA, 17 nt, Human
auguaagcucuacugag

SEQ ID NO: 3114886 - RNA, 15 nt, Human
auggucggaaaacau

SEQ ID NO: 3114887 - RNA, 20 nt, Human
augugggcuaguugggcuuc

SEQ ID NO: 3114888 - RNA, 14 nt, Human
auguguaaguauuc

SEQ ID NO: 3114889 - RNA, 11 nt, Human
auuaaauuaug

SEQ ID NO: 3114890 - RNA, 16 nt, Human
auuaaaugcccagccc

SEQ ID NO: 3114891 - RNA, 13 nt, Human
auuaaauucuugc

SEQ ID NO: 3114892 - RNA, 15 nt, Human
auuaaaugcccagcc

SEQ ID NO: 3114893 - RNA, 14 nt, Human
auuaaaugcccagc

SEQ ID NO: 3114894 - RNA, 16 nt, Human
auguuuuaagaggcag

SEQ ID NO: 3114895 - RNA, 18 nt, Human
auguuuuaagaggcaggg

SEQ ID NO: 3114896 - RNA, 18 nt, Human
auguucucugaggacacu

SEQ ID NO: 3114897 - RNA, 17 nt, Human
auguucucugaggacac

SEQ ID NO: 3114898 - RNA, 15 nt, Human
auguucuuaauucuu

SEQ ID NO: 3114899 - RNA, 20 nt, Human
auguucuuaguggauguucu

SEQ ID NO: 3114900 - RNA, 22 nt, Human
auguucugacccugcuucaaau

SEQ ID NO: 3114901 - RNA, 14 nt, Human
auguucuuaauucu

SEQ ID NO: 3114902 - RNA, 20 nt, Human
auggaaaugggcagagcaga

SEQ ID NO: 3114903 - RNA, 19 nt, Human
auggaaaugggcagagcag

SEQ ID NO: 3114904 - RNA, 22 nt, Human
augcuucuucagagacuccugc

SEQ ID NO: 3114905 - RNA, 15 nt, Human
augggaaugaauguc

SEQ ID NO: 3114906 - RNA, 23 nt, Human
auggcugccaaugggagcucaug

SEQ ID NO: 3114907 - RNA, 21 nt, Human
augcacagcuaacauggaagu

SEQ ID NO: 3114908 - RNA, 14 nt, Human
augcacagcuaaca

SEQ ID NO: 3114909 - RNA, 23 nt, Human
augcacagaguuguuacauuuuu

SEQ ID NO: 3114910 - RNA, 17 nt, Human
augcacacauuuuuuaa

SEQ ID NO: 3114911 - RNA, 19 nt, Human
augcacacauuuuuuaaau

SEQ ID NO: 3114912 - RNA, 22 nt, Human
augcacacauuuuuuaaaugca

SEQ ID NO: 3114913 - RNA, 20 nt, Human
augcaugaaguaauaugcac

SEQ ID NO: 3114914 - RNA, 23 nt, Human
augcaugaaguaauaugcacaca

SEQ ID NO: 3114915 - RNA, 18 nt, Human
augcauuugaaaauuuug

SEQ ID NO: 3114916 - RNA, 10 nt, Human
augcauuuga

SEQ ID NO: 3114917 - RNA, 12 nt, Human
augcauuugaaa

SEQ ID NO: 3114918 - RNA, 15 nt, Human
augccugguggcagc

SEQ ID NO: 3114919 - RNA, 16 nt, Human
augccugguggcagcu

SEQ ID NO: 3114920 - RNA, 17 nt, Human
augccugguggcagcug

SEQ ID NO: 3114921 - RNA, 17 nt, Human
augccugggcagaagga

SEQ ID NO: 3114922 - RNA, 14 nt, Human
augccugguggcag

SEQ ID NO: 3114923 - RNA, 23 nt, Human
augccuggauggggcugcaccgg

SEQ ID NO: 3114924 - RNA, 21 nt, Human
augccuggauggggcugcacc

SEQ ID NO: 3114925 - RNA, 13 nt, Human
agugauccuccca

SEQ ID NO: 3114926 - RNA, 20 nt, Human
agucaagugaaaaaggagga

SEQ ID NO: 3114927 - RNA, 16 nt, Human
agucaagugaaaaagg

SEQ ID NO: 3114928 - RNA, 13 nt, Human
aguuguuacauuu

SEQ ID NO: 3114929 - RNA, 15 nt, Human
aguuguuacauuuuu

SEQ ID NO: 3114930 - RNA, 16 nt, Human
aguuguuacauuuuua

SEQ ID NO: 3114931 - RNA, 18 nt, Human
aguuacagacaaagcgug

SEQ ID NO: 3114932 - RNA, 17 nt, Human
aguuacagacaaagcgu

SEQ ID NO: 3114933 - RNA, 23 nt, Human
agugugacaaggauugcuacugu

SEQ ID NO: 3114934 - RNA, 12 nt, Human
auaccugucccc

SEQ ID NO: 3114935 - RNA, 19 nt, Human
auaaugugaaacuggauua

SEQ ID NO: 3114936 - RNA, 21 nt, Human
auaaugugaaacuggauuaaa

SEQ ID NO: 3114937 - RNA, 18 nt, Human
auaaugugaaacuggauu

SEQ ID NO: 3114938 - RNA, 13 nt, Human
auauucaggaagc

SEQ ID NO: 3114939 - RNA, 16 nt, Human
auauucaggaagcuca

SEQ ID NO: 3114940 - RNA, 14 nt, Human
auauucaggaagcu

SEQ ID NO: 3114941 - RNA, 19 nt, Human
auaugcuuauacacuuaca

SEQ ID NO: 3114942 - RNA, 14 nt, Human
auaugcuuauacac

SEQ ID NO: 3114943 - RNA, 16 nt, Human
auaugcuuauacacuu

SEQ ID NO: 3114944 - RNA, 22 nt, Human
auaugccugggcagaaggaaga

SEQ ID NO: 3114945 - RNA, 16 nt, Human
auauaggaacuuaaau

SEQ ID NO: 3114946 - RNA, 15 nt, Human
auaguaugguggcug

SEQ ID NO: 3114947 - RNA, 16 nt, Human
auaguaugguggcugg

SEQ ID NO: 3114948 - RNA, 17 nt, Human
agggacgcuacccggga

SEQ ID NO: 3114949 - RNA, 21 nt, Human
agggacgcuacccgggaaggg

SEQ ID NO: 3114950 - RNA, 20 nt, Human
agggacagaggggguggccu

SEQ ID NO: 3114951 - RNA, 13 nt, Human
agggacagagggg

SEQ ID NO: 3114952 - RNA, 12 nt, Human
agggacagaggg

SEQ ID NO: 3114953 - RNA, 18 nt, Human
aggcugccucucccauca

SEQ ID NO: 3114954 - RNA, 23 nt, Human
aggcuagugugguguuuccuggc

SEQ ID NO: 3114955 - RNA, 17 nt, Human
agggcacaccgggcacu

SEQ ID NO: 3114956 - RNA, 20 nt, Human
agggcacaccgggcacucag

SEQ ID NO: 3114957 - RNA, 21 nt, Human
agggcacaccgggcacucaga

SEQ ID NO: 3114958 - RNA, 22 nt, Human
agggcacagaaaauggaagaca

SEQ ID NO: 3114959 - RNA, 17 nt, Human
agggccuggccugagcu

SEQ ID NO: 3114960 - RNA, 16 nt, Human
agggccuggccugagc

SEQ ID NO: 3114961 - RNA, 15 nt, Human
agggccuggccugag

SEQ ID NO: 3114962 - RNA, 14 nt, Human
agggccuggccuga

SEQ ID NO: 3114963 - RNA, 19 nt, Human
agggcgggaggauguucug

SEQ ID NO: 3114964 - RNA, 16 nt, Human
aggggauagagagaga

SEQ ID NO: 3114965 - RNA, 21 nt, Human
aggggauagagagagaccacu

SEQ ID NO: 3114966 - RNA, 15 nt, Human
aggggcacagggucu

SEQ ID NO: 3114967 - RNA, 17 nt, Human
agguaaggaauaccugu

SEQ ID NO: 3114968 - RNA, 17 nt, Human
aggugcugccauccagg

SEQ ID NO: 3114969 - RNA, 16 nt, Human
aggugcugccauccag

SEQ ID NO: 3114970 - RNA, 14 nt, Human
aggucgaggcagga

SEQ ID NO: 3114971 - RNA, 13 nt, Human
agguucagcuugu

SEQ ID NO: 3114972 - RNA, 15 nt, Human
agguuaauaaaguaa

SEQ ID NO: 3114973 - RNA, 15 nt, Human
agguucaaagauauu

SEQ ID NO: 3114974 - RNA, 17 nt, Human
agguucaaagauauuuu

SEQ ID NO: 3114975 - RNA, 14 nt, Human
agguuaauguucau

SEQ ID NO: 3114976 - RNA, 17 nt, Human
agcugggugucaagagg

SEQ ID NO: 3114977 - RNA, 22 nt, Human
agcugggugucaagagggucug

SEQ ID NO: 3114978 - RNA, 21 nt, Human
agcuggucccacucaguccau

SEQ ID NO: 3114979 - RNA, 19 nt, Human
agcuggucccacucagucc

SEQ ID NO: 3114980 - RNA, 15 nt, Human
aggaaaaacugauuu

SEQ ID NO: 3114981 - RNA, 13 nt, Human
aggaaaaacugau

SEQ ID NO: 3114982 - RNA, 17 nt, Human
aggaggggauagagaga

SEQ ID NO: 3114983 - RNA, 18 nt, Human
aggauguucugggacaca

SEQ ID NO: 3114984 - RNA, 20 nt, Human
aggauguucugggacacagu

SEQ ID NO: 3114985 - RNA, 12 nt, Human
aggauucuuccu

SEQ ID NO: 3114986 - RNA, 18 nt, Human
aggagaggggcacagggu

SEQ ID NO: 3114987 - RNA, 16 nt, Human
aggagaggggcacagg

SEQ ID NO: 3114988 - RNA, 14 nt, Human
aggagaggggcaca

SEQ ID NO: 3114989 - RNA, 15 nt, Human
aggagagcuagcagc

SEQ ID NO: 3114990 - RNA, 20 nt, Human
aggaccucaggugagaagca

SEQ ID NO: 3114991 - RNA, 14 nt, Human
aggaccucagguga

SEQ ID NO: 3114992 - RNA, 20 nt, Human
aggaccccuccaugugggcu

SEQ ID NO: 3114993 - RNA, 23 nt, Human
agacugaguacguugugcauuug

SEQ ID NO: 3114994 - RNA, 23 nt, Human
agagaggguggugaccucugccu

SEQ ID NO: 3114995 - RNA, 21 nt, Human
agagaagagauugugguuuca

SEQ ID NO: 3114996 - RNA, 10 nt, Human
agagaagaga

SEQ ID NO: 3114997 - RNA, 13 nt, Human
agacaaugacuua

SEQ ID NO: 3114998 - RNA, 17 nt, Human
agacaaugacuuacugu

SEQ ID NO: 3114999 - RNA, 21 nt, Human
agacaauuuauuauggcacau

SEQ ID NO: 3115000 - RNA, 14 nt, Human
agacaauuuauuau

SEQ ID NO: 3115001 - RNA, 15 nt, Human
agacaauuuauuaug

SEQ ID NO: 3115002 - RNA, 19 nt, Human
agacggagucccaccuugg

SEQ ID NO: 3115003 - RNA, 18 nt, Human
agacggagucccaccuug

SEQ ID NO: 3115004 - RNA, 18 nt, Human
agacgggggcagagaggg

SEQ ID NO: 3115005 - RNA, 13 nt, Human
agaccaucccuga

SEQ ID NO: 3115006 - RNA, 21 nt, Human
agaccaucccugaaggccccg

SEQ ID NO: 3115007 - RNA, 18 nt, Human
agaccaucccugaaggcc

SEQ ID NO: 3115008 - RNA, 17 nt, Human
agaccaucccugaaggc

SEQ ID NO: 3115009 - RNA, 14 nt, Human
agaccaucccugaa

SEQ ID NO: 3115010 - RNA, 20 nt, Human
agacagcccgggcucugccu

SEQ ID NO: 3115011 - RNA, 18 nt, Human
agacagcccgggcucugc

SEQ ID NO: 3115012 - RNA, 17 nt, Human
agacagcccgggcucug

SEQ ID NO: 3115013 - RNA, 16 nt, Human
agacagcccgggcucu

SEQ ID NO: 3115014 - RNA, 13 nt, Human
agauagccaaggc

SEQ ID NO: 3115015 - RNA, 22 nt, Human
agauacuuggggggcugaggug

SEQ ID NO: 3115016 - RNA, 23 nt, Human
agaggguggugaccucugccuga

SEQ ID NO: 3115017 - RNA, 13 nt, Human
agaggagaggggc

SEQ ID NO: 3115018 - RNA, 16 nt, Human
agaggggaagagacuu

SEQ ID NO: 3115019 - RNA, 22 nt, Human
agaggggaacagacuggaagca

SEQ ID NO: 3115020 - RNA, 16 nt, Human
agauagccaaggccaa

SEQ ID NO: 3115021 - RNA, 15 nt, Human
agauagccaaggcca

SEQ ID NO: 3115022 - RNA, 16 nt, Human
agccccagugcccaca

SEQ ID NO: 3115023 - RNA, 11 nt, Human
agccccauccu

SEQ ID NO: 3115024 - RNA, 20 nt, Human
agccccaucccaaacccuuc

SEQ ID NO: 3115025 - RNA, 15 nt, Human
agcccugagcuuucu

SEQ ID NO: 3115026 - RNA, 19 nt, Human
agccgagaucacgccacug

SEQ ID NO: 3115027 - RNA, 20 nt, Human
agccgagaucacgccacugc

SEQ ID NO: 3115028 - RNA, 22 nt, Human
agccucccgaguagcugggacu

SEQ ID NO: 3115029 - RNA, 17 nt, Human
agccucccaaagugcug

SEQ ID NO: 3115030 - RNA, 18 nt, Human
agccucccgaauagcugg

SEQ ID NO: 3115031 - RNA, 19 nt, Human
agccucccgaauagcuggg

SEQ ID NO: 3115032 - RNA, 20 nt, Human
agccucccgaauagcuggga

SEQ ID NO: 3115033 - RNA, 22 nt, Human
agccucccgaauagcugggacu

SEQ ID NO: 3115034 - RNA, 17 nt, Human
agccucccgaguagcug

SEQ ID NO: 3115035 - RNA, 21 nt, Human
agccgagaucacgccacugca

SEQ ID NO: 3115036 - RNA, 19 nt, Human
agccgagauugcaccacug

SEQ ID NO: 3115037 - RNA, 20 nt, Human
agccgagauugcaccacugc

SEQ ID NO: 3115038 - RNA, 18 nt, Human
agccgagaucacgccacu

SEQ ID NO: 3115039 - RNA, 22 nt, Human
agccgcuggggccaguuggucc

SEQ ID NO: 3115040 - RNA, 14 nt, Human
agccgcuggggcca

SEQ ID NO: 3115041 - RNA, 18 nt, Human
agccucccaaagugcugg

SEQ ID NO: 3115042 - RNA, 19 nt, Human
agccucccaaagugcuggg

SEQ ID NO: 3115043 - RNA, 15 nt, Human
agcagccacauuccu

SEQ ID NO: 3115044 - RNA, 21 nt, Human
agcagccacauuccugaugcu

SEQ ID NO: 3115045 - RNA, 19 nt, Human
agcacuaaggugugcucug

SEQ ID NO: 3115046 - RNA, 20 nt, Human
agccaaggccaaaggaagca

SEQ ID NO: 3115047 - RNA, 22 nt, Human
agccaaggccaaaggaagcaca

SEQ ID NO: 3115048 - RNA, 23 nt, Human
agccaaggccaaaggaagcacau

SEQ ID NO: 3115049 - RNA, 20 nt, Human
agccagaggagagaggaccc

SEQ ID NO: 3115050 - RNA, 18 nt, Human
agccagaggagagaggac

SEQ ID NO: 3115051 - RNA, 22 nt, Human
agccagauuucacucuccuugg

SEQ ID NO: 3115052 - RNA, 18 nt, Human
agccaaagcuaggccugg

SEQ ID NO: 3115053 - RNA, 19 nt, Human
agccaaagcuaggccuggc

SEQ ID NO: 3115054 - RNA, 20 nt, Human
agccaaagcuaggccuggcc

SEQ ID NO: 3115055 - RNA, 23 nt, Human
agccaaagcuaggccuggccaga

SEQ ID NO: 3115056 - RNA, 12 nt, Human
agcaugccugga

SEQ ID NO: 3115057 - RNA, 22 nt, Human
accaucccugaaggccccgccc

SEQ ID NO: 3115058 - RNA, 21 nt, Human
accaucccugaaggccccgcc

SEQ ID NO: 3115059 - RNA, 16 nt, Human
accaucaugucuggcu

SEQ ID NO: 3115060 - RNA, 17 nt, Human
accaucaugucuggcua

SEQ ID NO: 3115061 - RNA, 16 nt, Human
accaucccugaaggcc

SEQ ID NO: 3115062 - RNA, 18 nt, Human
accaucccugaaggcccc

SEQ ID NO: 3115063 - RNA, 14 nt, Human
accaucaugucugg

SEQ ID NO: 3115064 - RNA, 16 nt, Human
acccaugcugcccugu

SEQ ID NO: 3115065 - RNA, 19 nt, Human
acccaugcugcccugugag

SEQ ID NO: 3115066 - RNA, 18 nt, Human
acccaugcugcccuguga

SEQ ID NO: 3115067 - RNA, 17 nt, Human
acccaugcugcccugug

SEQ ID NO: 3115068 - RNA, 23 nt, Human
acccaagggccuggccugagcug

SEQ ID NO: 3115069 - RNA, 16 nt, Human
acccaagggccuggcc

SEQ ID NO: 3115070 - RNA, 13 nt, Human
acccaagggccug

SEQ ID NO: 3115071 - RNA, 15 nt, Human
accccggccaccugc

SEQ ID NO: 3115072 - RNA, 19 nt, Human
acauguuuuucuucucccu

SEQ ID NO: 3115073 - RNA, 20 nt, Human
acaugcacagcuaacaugga

SEQ ID NO: 3115074 - RNA, 19 nt, Human
acaugcaaggucauuuuuu

SEQ ID NO: 3115075 - RNA, 18 nt, Human
acaugcaaggucauuuuu

SEQ ID NO: 3115076 - RNA, 21 nt, Human
acauguuuuucuucucccuca

SEQ ID NO: 3115077 - RNA, 19 nt, Human
acaucagcacgauuucugu

SEQ ID NO: 3115078 - RNA, 20 nt, Human
acaucagcacgauuucuguu

SEQ ID NO: 3115079 - RNA, 21 nt, Human
acaucagcacgauuucuguuu

SEQ ID NO: 3115080 - RNA, 22 nt, Human
acaucagcacgauuucuguuua

SEQ ID NO: 3115081 - RNA, 23 nt, Human
acauaaacaagaccacguuucua

SEQ ID NO: 3115082 - RNA, 21 nt, Human
accaacgucugugccauuuug

SEQ ID NO: 3115083 - RNA, 17 nt, Human
accagcagccuggaccc

SEQ ID NO: 3115084 - RNA, 14 nt, Human
accagcagccugga

SEQ ID NO: 3115085 - RNA, 13 nt, Human
accagcagccugg

SEQ ID NO: 3115086 - RNA, 15 nt, Human
accacguuucuaaag

SEQ ID NO: 3115087 - RNA, 19 nt, Human
accacguuucuaaaggcua

SEQ ID NO: 3115088 - RNA, 14 nt, Human
accacuacauucug

SEQ ID NO: 3115089 - RNA, 18 nt, Human
acacaaacgggcucagca

SEQ ID NO: 3115090 - RNA, 16 nt, Human
acaauuuauuauggca

SEQ ID NO: 3115091 - RNA, 14 nt, Human
acaauuuauuaugg

SEQ ID NO: 3115092 - RNA, 15 nt, Human
acaauuuauuauggc

SEQ ID NO: 3115093 - RNA, 15 nt, Human
acacggacacucaaa

SEQ ID NO: 3115094 - RNA, 14 nt, Human
acacuaaccacgcu

SEQ ID NO: 3115095 - RNA, 15 nt, Human
acacuaaccacgcug

SEQ ID NO: 3115096 - RNA, 11 nt, Human
acacagcucug

SEQ ID NO: 3115097 - RNA, 12 nt, Human
acacagcucugu

SEQ ID NO: 3115098 - RNA, 21 nt, Human
acaccacuacauucuguuaau

SEQ ID NO: 3115099 - RNA, 12 nt, Human
acaccagagccc

SEQ ID NO: 3115100 - RNA, 13 nt, Human
acaaagacugagu

SEQ ID NO: 3115101 - RNA, 21 nt, Human
acaaaccuguuucugcagcca

SEQ ID NO: 3115102 - RNA, 15 nt, Human
acaaacgggcucagc

SEQ ID NO: 3115103 - RNA, 12 nt, Human
acagcuccuucu

SEQ ID NO: 3115104 - RNA, 13 nt, Human
acagcuccuucug

SEQ ID NO: 3115105 - RNA, 14 nt, Human
acagcuccuucugu

SEQ ID NO: 3115106 - RNA, 23 nt, Human
acagcuccuucuguccuacucug

SEQ ID NO: 3115107 - RNA, 23 nt, Human
acagcugccugggaucccucauc

SEQ ID NO: 3115108 - RNA, 13 nt, Human
acagcugccuggg

SEQ ID NO: 3115109 - RNA, 14 nt, Human
acagcugccuggga

SEQ ID NO: 3115110 - RNA, 18 nt, Human
acaggcaagcaccuccug

SEQ ID NO: 3115111 - RNA, 15 nt, Human
acaggcaagcaccuc

SEQ ID NO: 3115112 - RNA, 16 nt, Human
acaggcaagcaccucc

SEQ ID NO: 3115113 - RNA, 20 nt, Human
acaggugugaaccaccacac

SEQ ID NO: 3115114 - RNA, 23 nt, Human
acaggugugaaccaccacaccca

SEQ ID NO: 3115115 - RNA, 15 nt, Human
acagccaugauucuu

SEQ ID NO: 3115116 - RNA, 19 nt, Human
acagccacggccaggccag

SEQ ID NO: 3115117 - RNA, 17 nt, Human
acagagucucacuguug

SEQ ID NO: 3115118 - RNA, 19 nt, Human
acagagucucacuguugcc

SEQ ID NO: 3115119 - RNA, 22 nt, Human
acagaggggguggccucccaac

SEQ ID NO: 3115120 - RNA, 12 nt, Human
acagagucucac

SEQ ID NO: 3115121 - RNA, 14 nt, Human
acagagucucacug

SEQ ID NO: 3115122 - RNA, 21 nt, Human
acagaggggguggccucccaa

SEQ ID NO: 3115123 - RNA, 20 nt, Human
accugccccucaacucuccu

SEQ ID NO: 3115124 - RNA, 23 nt, Human
accugccccucaacucuccucca

SEQ ID NO: 3115125 - RNA, 21 nt, Human
accucugcacaagcugcaccc

SEQ ID NO: 3115126 - RNA, 18 nt, Human
accucugcacaagcugca

SEQ ID NO: 3115127 - RNA, 16 nt, Human
accucugcacaagcug

SEQ ID NO: 3115128 - RNA, 23 nt, Human
accuuucaauaggaaaaacugau

SEQ ID NO: 3115129 - RNA, 21 nt, Human
accuuucaauaggaaaaacug

SEQ ID NO: 3115130 - RNA, 17 nt, Human
accuuucaauaggaaaa

SEQ ID NO: 3115131 - RNA, 16 nt, Human
accuuucaauaggaaa

SEQ ID NO: 3115132 - RNA, 12 nt, Human
accuuggcucaa

SEQ ID NO: 3115133 - RNA, 14 nt, Human
accuuggcucaagu

SEQ ID NO: 3115134 - RNA, 12 nt, Human
accuuggcugca

SEQ ID NO: 3115135 - RNA, 12 nt, Human
acgauuucuguu

SEQ ID NO: 3115136 - RNA, 13 nt, Human
acgauuucuguuu

SEQ ID NO: 3115137 - RNA, 18 nt, Human
acgccacugcacuauagc

SEQ ID NO: 3115138 - RNA, 14 nt, Human
acgauuucuguuua

SEQ ID NO: 3115139 - RNA, 17 nt, Human
acgauuucuguuuagau

SEQ ID NO: 3115140 - RNA, 15 nt, Human
acuaaguuuuuaugg

SEQ ID NO: 3115141 - RNA, 22 nt, Human
acuaaguuuuuauggcuuuugu

SEQ ID NO: 3115142 - RNA, 11 nt, Human
acguggcugcu

SEQ ID NO: 3115143 - RNA, 15 nt, Human
acguggcugcuucaa

SEQ ID NO: 3115144 - RNA, 14 nt, Human
acguggcugcuuca

SEQ ID NO: 3115145 - RNA, 13 nt, Human
acguggcugcuuc

SEQ ID NO: 3115146 - RNA, 18 nt, Human
acgcugugcugcccugcc

SEQ ID NO: 3115147 - RNA, 17 nt, Human
acgcugugcugcccugc

SEQ ID NO: 3115148 - RNA, 16 nt, Human
acgcugugcugcccug

SEQ ID NO: 3115149 - RNA, 15 nt, Human
acgcugugcugcccu

SEQ ID NO: 3115150 - RNA, 21 nt, Human
acucuacccucuuagaaaaac

SEQ ID NO: 3115151 - RNA, 18 nt, Human
acucuacccucuuagaaa

SEQ ID NO: 3115152 - RNA, 13 nt, Human
acucuacccucuu

SEQ ID NO: 3115153 - RNA, 14 nt, Human
acucuaucaaguau

SEQ ID NO: 3115154 - RNA, 16 nt, Human
acucuaucaaguauua

SEQ ID NO: 3115155 - RNA, 18 nt, Human
acucuuaaaacccaagug

SEQ ID NO: 3115156 - RNA, 11 nt, Human
acucuuaaaac

SEQ ID NO: 3115157 - RNA, 16 nt, Human
acucugugucaggugg

SEQ ID NO: 3115158 - RNA, 18 nt, Human
acucaaaagcugggcagg

SEQ ID NO: 3115159 - RNA, 16 nt, Human
acucaaacucuuaaaa

SEQ ID NO: 3115160 - RNA, 17 nt, Human
acucaaacucuuaaaac

SEQ ID NO: 3115161 - RNA, 17 nt, Human
acuccccugcugggugu

SEQ ID NO: 3115162 - RNA, 13 nt, Human
acuccccugcugg

SEQ ID NO: 3115163 - RNA, 14 nt, Human
acucccccaggugg

SEQ ID NO: 3115164 - RNA, 20 nt, Human
agaaaggaggggauagagag

SEQ ID NO: 3115165 - RNA, 23 nt, Human
agaaaggaggggauagagagaga

SEQ ID NO: 3115166 - RNA, 15 nt, Human
agaaauaaaguuucu

SEQ ID NO: 3115167 - RNA, 18 nt, Human
agaaauaaaguuucuguu

SEQ ID NO: 3115168 - RNA, 15 nt, Human
acuuuuauaaacuuu

SEQ ID NO: 3115169 - RNA, 19 nt, Human
acuuuuauaaacuuuaccu

SEQ ID NO: 3115170 - RNA, 22 nt, Human
acuuuuauaaacuuuaccuuuu

SEQ ID NO: 3115171 - RNA, 20 nt, Human
agaaaauggacguguuauga

SEQ ID NO: 3115172 - RNA, 15 nt, Human
agaaaauggacgugu

SEQ ID NO: 3115173 - RNA, 23 nt, Human
agaaaauggaagacagcucuuau

SEQ ID NO: 3115174 - RNA, 23 nt, Human
agaaaauggacguguuaugacuc

SEQ ID NO: 3115175 - RNA, 22 nt, Human
agaaaauggacguguuaugacu

SEQ ID NO: 3115176 - RNA, 23 nt, Human
acuuuguucuggcucuuccaggc

SEQ ID NO: 3115177 - RNA, 20 nt, Human
acuuuguucuggcucuucca

SEQ ID NO: 3115178 - RNA, 23 nt, Human
acuuuccuucauucaacccaccu

SEQ ID NO: 3115179 - RNA, 15 nt, Human
acuggaagcacagcu

SEQ ID NO: 3115180 - RNA, 14 nt, Human
acuggaagcacagc

SEQ ID NO: 3115181 - RNA, 12 nt, Human
acugucuucagu

SEQ ID NO: 3115182 - RNA, 18 nt, Human
acuucugccauauucugu

SEQ ID NO: 3115183 - RNA, 19 nt, Human
acuucacauauugauuucc

SEQ ID NO: 3115184 - RNA, 11 nt, Human
aaagagguuuu

SEQ ID NO: 3115185 - RNA, 22 nt, Human
aaacacuguucucugcccucca

SEQ ID NO: 3115186 - RNA, 19 nt, Human
aaacacuguucucugcccu

SEQ ID NO: 3115187 - RNA, 18 nt, Human
aaacacuguucucugccc

SEQ ID NO: 3115188 - RNA, 13 nt, Human
aaaauucagugga

SEQ ID NO: 3115189 - RNA, 13 nt, Human
aaaacacauuuuu

SEQ ID NO: 3115190 - RNA, 15 nt, Human
aaaacacauuuuucu

SEQ ID NO: 3115191 - RNA, 18 nt, Human
aaauggaagacagcucuu

SEQ ID NO: 3115192 - RNA, 16 nt, Human
aaauggaaaugggcag

SEQ ID NO: 3115193 - RNA, 20 nt, Human
aaauggacguguuaugacuc

SEQ ID NO: 3115194 - RNA, 22 nt, Human
aaauggacguguuaugacucca

SEQ ID NO: 3115195 - RNA, 21 nt, Human
aaauggacguguuaugacucc

SEQ ID NO: 3115196 - RNA, 14 nt, Human
aaagugcugggauu

SEQ ID NO: 3115197 - RNA, 11 nt, Human
aaagugcuggg

SEQ ID NO: 3115198 - RNA, 19 nt, Human
aacugauuuuuuuuuccuu

SEQ ID NO: 3115199 - RNA, 17 nt, Human
aacugauuuuuuuuucc

SEQ ID NO: 3115200 - RNA, 17 nt, Human
aacuuaaauaaugugaa

SEQ ID NO: 3115201 - RNA, 16 nt, Human
aacucaccugccccuc

SEQ ID NO: 3115202 - RNA, 15 nt, Human
aacucaccugccccu

SEQ ID NO: 3115203 - RNA, 12 nt, Human
aacucaccccag

SEQ ID NO: 3115204 - RNA, 16 nt, Human
aacuuuuauaaacuuu

SEQ ID NO: 3115205 - RNA, 19 nt, Human
aacuuuuauaaacuuuacc

SEQ ID NO: 3115206 - RNA, 13 nt, Human
aacuuugaccucu

SEQ ID NO: 3115207 - RNA, 14 nt, Human
aacuuugaccucug

SEQ ID NO: 3115208 - RNA, 17 nt, Human
aacuuugaccucugcag

SEQ ID NO: 3115209 - RNA, 12 nt, Human
aacuuuuauaaa

SEQ ID NO: 3115210 - RNA, 15 nt, Human
aacuuuuauaaacuu

SEQ ID NO: 3115211 - RNA, 19 nt, Human
aacuuugaccucugcagca

SEQ ID NO: 3115212 - RNA, 20 nt, Human
aacuuugaccucugcagcaa

SEQ ID NO: 3115213 - RNA, 14 nt, Human
aacccuggugacca

SEQ ID NO: 3115214 - RNA, 22 nt, Human
aaccacucuaucaaguauuaua

SEQ ID NO: 3115215 - RNA, 14 nt, Human
aacauguaauuaag

SEQ ID NO: 3115216 - RNA, 21 nt, Human
aacauguaauuaaguacuaug

SEQ ID NO: 3115217 - RNA, 14 nt, Human
aacaucaacaucuu

SEQ ID NO: 3115218 - RNA, 19 nt, Human
aacacauuuuucuuaggga

SEQ ID NO: 3115219 - RNA, 19 nt, Human
aacaccucugcacaagcug

SEQ ID NO: 3115220 - RNA, 18 nt, Human
aauauaggaacuuaaaua

SEQ ID NO: 3115221 - RNA, 20 nt, Human
aauauaggaacuuaaauaau

SEQ ID NO: 3115222 - RNA, 21 nt, Human
aauauaggaacuuaaauaaug

SEQ ID NO: 3115223 - RNA, 16 nt, Human
aauauaggaacuuaaa

SEQ ID NO: 3115224 - RNA, 19 nt, Human
aaugaugccaugaggaaca

SEQ ID NO: 3115225 - RNA, 22 nt, Human
aaucugcuuuuuaaagaaugcu

SEQ ID NO: 3115226 - RNA, 16 nt, Human
aaugaaccacaucuug

SEQ ID NO: 3115227 - RNA, 17 nt, Human
aaugaaccacaucuugc

SEQ ID NO: 3115228 - RNA, 23 nt, Human
aaugaaccacaucuugcucugcu

SEQ ID NO: 3115229 - RNA, 21 nt, Human
aaugaugauccuaggcauuug

SEQ ID NO: 3115230 - RNA, 14 nt, Human
aaucuccaaaauaa

SEQ ID NO: 3115231 - RNA, 13 nt, Human
aaucuccaaaaua

SEQ ID NO: 3115232 - RNA, 18 nt, Human
aauuaaaacacaacaucu

SEQ ID NO: 3115233 - RNA, 19 nt, Human
aauguuugccucugccucu

SEQ ID NO: 3115234 - RNA, 16 nt, Human
aauguuugccucugcc

SEQ ID NO: 3115235 - RNA, 18 nt, Human
aauguuugccucugccuc

SEQ ID NO: 3115236 - RNA, 13 nt, Human
aaugggcagagca

SEQ ID NO: 3115237 - RNA, 15 nt, Human
aaugggcagagcaga

SEQ ID NO: 3115238 - RNA, 22 nt, Human
aaugucuaguuguaacaccaug

SEQ ID NO: 3115239 - RNA, 21 nt, Human
aaugucagugugacugaucuc

SEQ ID NO: 3115240 - RNA, 17 nt, Human
aaugucagugugacuga

SEQ ID NO: 3115241 - RNA, 20 nt, Human
aaugucucuuuaaugucaca

SEQ ID NO: 3115242 - RNA, 16 nt, Human
aaugucagugugacug

SEQ ID NO: 3115243 - RNA, 15 nt, Human
aaugucagugugacu

SEQ ID NO: 3115244 - RNA, 13 nt, Human
aaugucaguguga

SEQ ID NO: 3115245 - RNA, 16 nt, Human
aaggcaaggcugucaa

SEQ ID NO: 3115246 - RNA, 18 nt, Human
aaggcaaggcugucaauu

SEQ ID NO: 3115247 - RNA, 17 nt, Human
aaggcaaggcugucaau

SEQ ID NO: 3115248 - RNA, 11 nt, Human
aagcugggcag

SEQ ID NO: 3115249 - RNA, 13 nt, Human
aagcugggcaggu

SEQ ID NO: 3115250 - RNA, 18 nt, Human
aaggacauugcggacagc

SEQ ID NO: 3115251 - RNA, 20 nt, Human
aagcugcacccucaggcagg

SEQ ID NO: 3115252 - RNA, 21 nt, Human
aagcugcacccucaggcaggu

SEQ ID NO: 3115253 - RNA, 22 nt, Human
aagcugcacccucaggcaggug

SEQ ID NO: 3115254 - RNA, 12 nt, Human
aagcguggugga

SEQ ID NO: 3115255 - RNA, 21 nt, Human
aagcgugagccacugcaccgg

SEQ ID NO: 3115256 - RNA, 18 nt, Human
aagccauaauuguucuua

SEQ ID NO: 3115257 - RNA, 14 nt, Human
aagcagaggaagga

SEQ ID NO: 3115258 - RNA, 22 nt, Human
aagugcugggauuacaggugug

SEQ ID NO: 3115259 - RNA, 22 nt, Human
aaguuguaggcauaaagucagg

SEQ ID NO: 3115260 - RNA, 20 nt, Human
aagguuaauguucaucaucc

SEQ ID NO: 3115261 - RNA, 15 nt, Human
aagguuaauaaagua

SEQ ID NO: 3115262 - RNA, 16 nt, Human
aagguuaauaaaguaa

SEQ ID NO: 3115263 - RNA, 11 nt, Human
aaggugggagg

SEQ ID NO: 3115264 - RNA, 16 nt, Human
aaguaucccuacugua

SEQ ID NO: 3115265 - RNA, 11 nt, Human
aaguacuucuu

SEQ ID NO: 3115266 - RNA, 16 nt, Human
aagucuuagauguaua

SEQ ID NO: 3115267 - RNA, 16 nt, Human
cuccucugcugcuggc

SEQ ID NO: 3115268 - RNA, 15 nt, Human
cuccucugcugcugg

SEQ ID NO: 3115269 - RNA, 18 nt, Human
cuccucugcugcuggcug

SEQ ID NO: 3115270 - RNA, 18 nt, Human
cuccuggcccacugcauc

SEQ ID NO: 3115271 - RNA, 16 nt, Human
cuccuggcccacugca

SEQ ID NO: 3115272 - RNA, 22 nt, Human
cucccccagccccauccucugu

SEQ ID NO: 3115273 - RNA, 20 nt, Human
cucccccagccccauccucu

SEQ ID NO: 3115274 - RNA, 15 nt, Human
cucccccagccccau

SEQ ID NO: 3115275 - RNA, 15 nt, Human
cucgaacuggcugca

SEQ ID NO: 3115276 - RNA, 13 nt, Human
cucgaacuggcug

SEQ ID NO: 3115277 - RNA, 14 nt, Human
cucgaacuggcugc

SEQ ID NO: 3115278 - RNA, 19 nt, Human
cuccacuuucuagccagag

SEQ ID NO: 3115279 - RNA, 16 nt, Human
cuccacuuucuagcca

SEQ ID NO: 3115280 - RNA, 21 nt, Human
cuccaagaccuucuccuucac

SEQ ID NO: 3115281 - RNA, 22 nt, Human
cuccaagaccuucuccuucacc

SEQ ID NO: 3115282 - RNA, 24 nt, Human
cuccaagcaggacauggacaagga

SEQ ID NO: 3115283 - RNA, 22 nt, Human
cuccaagcaggacauggacaag

SEQ ID NO: 3115284 - RNA, 14 nt, Human
cuccaagcaggaca

SEQ ID NO: 3115285 - RNA, 13 nt, Human
cuccaagcaggac

SEQ ID NO: 3115286 - RNA, 16 nt, Human
cuccaagcucccaggc

SEQ ID NO: 3115287 - RNA, 15 nt, Human
cuccaagcucccagg

SEQ ID NO: 3115288 - RNA, 14 nt, Human
cuccaagcucccag

SEQ ID NO: 3115289 - RNA, 13 nt, Human
cuccaagcuccca

SEQ ID NO: 3115290 - RNA, 14 nt, Human
cucuucaaucucuu

SEQ ID NO: 3115291 - RNA, 18 nt, Human
cucuucagaucucuaacu

SEQ ID NO: 3115292 - RNA, 19 nt, Human
cucuucagaucucuaacuu

SEQ ID NO: 3115293 - RNA, 14 nt, Human
cucuuauugcccac

SEQ ID NO: 3115294 - RNA, 15 nt, Human
cucuuauugcccacg

SEQ ID NO: 3115295 - RNA, 19 nt, Human
cucuuauugcccacgcugg

SEQ ID NO: 3115296 - RNA, 20 nt, Human
cucuuauugcccacgcugga

SEQ ID NO: 3115297 - RNA, 13 nt, Human
cucuuauugccca

SEQ ID NO: 3115298 - RNA, 13 nt, Human
cucugcugacaga

SEQ ID NO: 3115299 - RNA, 14 nt, Human
cucugcugacagac

SEQ ID NO: 3115300 - RNA, 16 nt, Human
cucugcugacagacac

SEQ ID NO: 3115301 - RNA, 14 nt, Human
cucugguccauaga

SEQ ID NO: 3115302 - RNA, 13 nt, Human
cucugcuccucuc

SEQ ID NO: 3115303 - RNA, 18 nt, Human
cucugcuccucuccccag

SEQ ID NO: 3115304 - RNA, 18 nt, Human
cucugcacuccccugcug

SEQ ID NO: 3115305 - RNA, 20 nt, Human
cucugcacuccccugcuggg

SEQ ID NO: 3115306 - RNA, 21 nt, Human
cucugcacuccccugcugggu

SEQ ID NO: 3115307 - RNA, 23 nt, Human
cugacaacacucauugaccugag

SEQ ID NO: 3115308 - RNA, 22 nt, Human
cugacaacacucauugaccuga

SEQ ID NO: 3115309 - RNA, 21 nt, Human
cugaaggccccgcccaggcuu

SEQ ID NO: 3115310 - RNA, 19 nt, Human
cugaaggccccgcccaggc

SEQ ID NO: 3115311 - RNA, 18 nt, Human
cugaaggccccgcccagg

SEQ ID NO: 3115312 - RNA, 23 nt, Human
cugaaggacauugcggacagcca

SEQ ID NO: 3115313 - RNA, 21 nt, Human
cugaaggacauugcggacagc

SEQ ID NO: 3115314 - RNA, 16 nt, Human
cucuugagccugggag

SEQ ID NO: 3115315 - RNA, 18 nt, Human
cucuugagccuugaacuu

SEQ ID NO: 3115316 - RNA, 16 nt, Human
cucuugagccuugaac

SEQ ID NO: 3115317 - RNA, 17 nt, Human
cucuugagccuugaacu

SEQ ID NO: 3115318 - RNA, 22 nt, Human
cugacccaugcugcccugugag

SEQ ID NO: 3115319 - RNA, 21 nt, Human
cugacccaugcugcccuguga

SEQ ID NO: 3115320 - RNA, 20 nt, Human
cugagacucgcgacaaugca

SEQ ID NO: 3115321 - RNA, 21 nt, Human
cugagacucgcgacaaugcaa

SEQ ID NO: 3115322 - RNA, 23 nt, Human
cugagacagcccgggcucugccu

SEQ ID NO: 3115323 - RNA, 22 nt, Human
cugagacucgcgacaaugcaaa

SEQ ID NO: 3115324 - RNA, 17 nt, Human
cugagaguagagucacu

SEQ ID NO: 3115325 - RNA, 21 nt, Human
cugagaggacuuuucuuugug

SEQ ID NO: 3115326 - RNA, 22 nt, Human
cugagaggacuuuucuuugugg

SEQ ID NO: 3115327 - RNA, 21 nt, Human
cugaguacguugugcauuugg

SEQ ID NO: 3115328 - RNA, 18 nt, Human
cugaguacguugugcauu

SEQ ID NO: 3115329 - RNA, 17 nt, Human
cugaguacguugugcau

SEQ ID NO: 3115330 - RNA, 19 nt, Human
cugaguacguugugcauuu

SEQ ID NO: 3115331 - RNA, 20 nt, Human
cugaguacguugugcauuug

SEQ ID NO: 3115332 - RNA, 23 nt, Human
cugaggacacuaaccacgcugga

SEQ ID NO: 3115333 - RNA, 20 nt, Human
cugaggacacuaaccacgcu

SEQ ID NO: 3115334 - RNA, 17 nt, Human
cugaggaauccagaccc

SEQ ID NO: 3115335 - RNA, 20 nt, Human
cugaggaauccagacccggc

SEQ ID NO: 3115336 - RNA, 14 nt, Human
cugaggaauccaga

SEQ ID NO: 3115337 - RNA, 15 nt, Human
cugagcuuucugcua

SEQ ID NO: 3115338 - RNA, 14 nt, Human
cugagcuuucugcu

SEQ ID NO: 3115339 - RNA, 21 nt, Human
cugagaucaaaacgguuuuac

SEQ ID NO: 3115340 - RNA, 17 nt, Human
cgacugcccggcagggu

SEQ ID NO: 3115341 - RNA, 20 nt, Human
cgacccuugccgucuaccug

SEQ ID NO: 3115342 - RNA, 19 nt, Human
cgacccuugccgucuaccu

SEQ ID NO: 3115343 - RNA, 13 nt, Human
cgacaaugcaaac

SEQ ID NO: 3115344 - RNA, 12 nt, Human
cgacaaugcaaa

SEQ ID NO: 3115345 - RNA, 18 nt, Human
ccuuucaauaggaaaaac

SEQ ID NO: 3115346 - RNA, 21 nt, Human
ccuuucaauaggaaaaacuga

SEQ ID NO: 3115347 - RNA, 17 nt, Human
ccuuuugagugccuuac

SEQ ID NO: 3115348 - RNA, 15 nt, Human
ccuuuugagugccuu

SEQ ID NO: 3115349 - RNA, 16 nt, Human
ccuugccgucuaccug

SEQ ID NO: 3115350 - RNA, 14 nt, Human
ccuuuaagagaaau

SEQ ID NO: 3115351 - RNA, 16 nt, Human
cgaguagcugggacua

SEQ ID NO: 3115352 - RNA, 14 nt, Human
cgauagugguggug

SEQ ID NO: 3115353 - RNA, 22 nt, Human
cgcaggauucuuccucccuccc

SEQ ID NO: 3115354 - RNA, 14 nt, Human
cgccuacaggagug

SEQ ID NO: 3115355 - RNA, 16 nt, Human
cggagucccaccuugg

SEQ ID NO: 3115356 - RNA, 12 nt, Human
cgggccacagag

SEQ ID NO: 3115357 - RNA, 14 nt, Human
cgggccacagagaa

SEQ ID NO: 3115358 - RNA, 13 nt, Human
cggcuccaggcuc

SEQ ID NO: 3115359 - RNA, 14 nt, Human
cggcuccaggcucc

SEQ ID NO: 3115360 - RNA, 15 nt, Human
cggcuccaggcuccu

SEQ ID NO: 3115361 - RNA, 16 nt, Human
cggcuccaggcuccuu

SEQ ID NO: 3115362 - RNA, 12 nt, Human
cggcuccaggcu

SEQ ID NO: 3115363 - RNA, 14 nt, Human
cggagucccaccuu

SEQ ID NO: 3115364 - RNA, 16 nt, Human
cggcucacugcagccu

SEQ ID NO: 3115365 - RNA, 18 nt, Human
cggagucccaccuuggcu

SEQ ID NO: 3115366 - RNA, 20 nt, Human
cggagucccaccuuggcugc

SEQ ID NO: 3115367 - RNA, 15 nt, Human
cggcucacugcagcc

SEQ ID NO: 3115368 - RNA, 14 nt, Human
cggcucacugcagc

SEQ ID NO: 3115369 - RNA, 15 nt, Human
cggggacagcuccuu

SEQ ID NO: 3115370 - RNA, 13 nt, Human
cgguguggagaag

SEQ ID NO: 3115371 - RNA, 18 nt, Human
cgguguggagaagcggcu

SEQ ID NO: 3115372 - RNA, 14 nt, Human
cggggacagcuccu

SEQ ID NO: 3115373 - RNA, 17 nt, Human
cgggcucugccucccau

SEQ ID NO: 3115374 - RNA, 13 nt, Human
cgggcucugccuc

SEQ ID NO: 3115375 - RNA, 15 nt, Human
cgggcucagcaaaag

SEQ ID NO: 3115376 - RNA, 16 nt, Human
cgggcucugccuccca

SEQ ID NO: 3115377 - RNA, 14 nt, Human
cgggcucugccucc

SEQ ID NO: 3115378 - RNA, 11 nt, Human
cgggcucagca

SEQ ID NO: 3115379 - RNA, 20 nt, Human
cguguaaccauggacccaau

SEQ ID NO: 3115380 - RNA, 16 nt, Human
cgugaggccagagaca

SEQ ID NO: 3115381 - RNA, 17 nt, Human
cgugaguccuggcaugg

SEQ ID NO: 3115382 - RNA, 16 nt, Human
cgugaguccuggcaug

SEQ ID NO: 3115383 - RNA, 17 nt, Human
cgugaggccagagacac

SEQ ID NO: 3115384 - RNA, 16 nt, Human
cgguuuuacugcagcu

SEQ ID NO: 3115385 - RNA, 20 nt, Human
cuagcauacguacacauuuu

SEQ ID NO: 3115386 - RNA, 21 nt, Human
cuagcauacguacacauuuua

SEQ ID NO: 3115387 - RNA, 23 nt, Human
cuagcauacguacacauuuuauu

SEQ ID NO: 3115388 - RNA, 22 nt, Human
cuagaagauuuugaaauuuuua

SEQ ID NO: 3115389 - RNA, 17 nt, Human
cuaccuuuguauucucu

SEQ ID NO: 3115390 - RNA, 18 nt, Human
cuacaguccucccaucuc

SEQ ID NO: 3115391 - RNA, 20 nt, Human
cuacaguccucccaucucac

SEQ ID NO: 3115392 - RNA, 21 nt, Human
cuacaguugaaaaacagcuga

SEQ ID NO: 3115393 - RNA, 19 nt, Human
cuacaguugaaaaacagcu

SEQ ID NO: 3115394 - RNA, 18 nt, Human
cuacauacaauuccaaac

SEQ ID NO: 3115395 - RNA, 22 nt, Human
cuacaguugaaaaacagcugag

SEQ ID NO: 3115396 - RNA, 19 nt, Human
cuacaguccucccaucuca

SEQ ID NO: 3115397 - RNA, 23 nt, Human
cuaagugauccucccaccucagc

SEQ ID NO: 3115398 - RNA, 21 nt, Human
cuaagugguacuaacuuuccu

SEQ ID NO: 3115399 - RNA, 20 nt, Human
cuaaguuuuuauggcuuuug

SEQ ID NO: 3115400 - RNA, 23 nt, Human
cuaaguuuuuauggcuuuugugc

SEQ ID NO: 3115401 - RNA, 17 nt, Human
cuaucucccccagcccc

SEQ ID NO: 3115402 - RNA, 16 nt, Human
cuaucucccccagccc

SEQ ID NO: 3115403 - RNA, 18 nt, Human
cucaaaagcugggcaggu

SEQ ID NO: 3115404 - RNA, 20 nt, Human
cucaaacucuugaccucagg

SEQ ID NO: 3115405 - RNA, 13 nt, Human
cucaaugcacuga

SEQ ID NO: 3115406 - RNA, 15 nt, Human
cucaaugcacugaca

SEQ ID NO: 3115407 - RNA, 14 nt, Human
cuaucucccccagc

SEQ ID NO: 3115408 - RNA, 15 nt, Human
cuaucucccccagcc

SEQ ID NO: 3115409 - RNA, 14 nt, Human
cuaucuaaauguug

SEQ ID NO: 3115410 - RNA, 21 nt, Human
cuaguuugauuaaauucuugc

SEQ ID NO: 3115411 - RNA, 22 nt, Human
cuaguuugauuaaauucuugca

SEQ ID NO: 3115412 - RNA, 23 nt, Human
cuaguuguuugauucagacagcu

SEQ ID NO: 3115413 - RNA, 22 nt, Human
cuaguuguuugauucagacagc

SEQ ID NO: 3115414 - RNA, 13 nt, Human
cuaguuugauuaa

SEQ ID NO: 3115415 - RNA, 15 nt, Human
cuagccagaggagag

SEQ ID NO: 3115416 - RNA, 13 nt, Human
cuagccagaggag

SEQ ID NO: 3115417 - RNA, 12 nt, Human
cuagccagagga

SEQ ID NO: 3115418 - RNA, 14 nt, Human
cccuucgcuccugu

SEQ ID NO: 3115419 - RNA, 15 nt, Human
cccuucgcuccugug

SEQ ID NO: 3115420 - RNA, 21 nt, Human
cccuucucuccagccccugga

SEQ ID NO: 3115421 - RNA, 23 nt, Human
ccgcagcccugcagagggcacag

SEQ ID NO: 3115422 - RNA, 22 nt, Human
cccuucucuccagccccuggau

SEQ ID NO: 3115423 - RNA, 13 nt, Human
ccggccccugcug

SEQ ID NO: 3115424 - RNA, 17 nt, Human
cccugugauggggcccu

SEQ ID NO: 3115425 - RNA, 13 nt, Human
cccuucgcuccug

SEQ ID NO: 3115426 - RNA, 20 nt, Human
cccugugauggggcccugcc

SEQ ID NO: 3115427 - RNA, 19 nt, Human
cccugugauggggcccugc

SEQ ID NO: 3115428 - RNA, 18 nt, Human
cccugugauggggcccug

SEQ ID NO: 3115429 - RNA, 13 nt, Human
cccugucuaauga

SEQ ID NO: 3115430 - RNA, 16 nt, Human
cccugucuaaugaaac

SEQ ID NO: 3115431 - RNA, 23 nt, Human
cccugucucaaaaaaagaaaaag

SEQ ID NO: 3115432 - RNA, 20 nt, Human
cccugucucaaaaaaagaaa

SEQ ID NO: 3115433 - RNA, 15 nt, Human
ccucccaccucagcc

SEQ ID NO: 3115434 - RNA, 16 nt, Human
ccucccaucucacaca

SEQ ID NO: 3115435 - RNA, 13 nt, Human
ccucccaucucac

SEQ ID NO: 3115436 - RNA, 14 nt, Human
ccggccccugcugg

SEQ ID NO: 3115437 - RNA, 13 nt, Human
ccugcccaggccc

SEQ ID NO: 3115438 - RNA, 13 nt, Human
ccugcccaccugg

SEQ ID NO: 3115439 - RNA, 20 nt, Human
ccugcccaccuggccucugc

SEQ ID NO: 3115440 - RNA, 14 nt, Human
ccugcccaccuggc

SEQ ID NO: 3115441 - RNA, 12 nt, Human
ccugcccaccug

SEQ ID NO: 3115442 - RNA, 20 nt, Human
ccugcugcaguugccaguca

SEQ ID NO: 3115443 - RNA, 19 nt, Human
ccugccucgaacuggcugc

SEQ ID NO: 3115444 - RNA, 21 nt, Human
ccugccucgaacuggcugcaa

SEQ ID NO: 3115445 - RNA, 23 nt, Human
ccugccucgaacuggcugcaaag

SEQ ID NO: 3115446 - RNA, 19 nt, Human
ccugcugcaguugccaguc

SEQ ID NO: 3115447 - RNA, 17 nt, Human
ccugcugcaguugccag

SEQ ID NO: 3115448 - RNA, 18 nt, Human
ccugcacuugcagacucu

SEQ ID NO: 3115449 - RNA, 14 nt, Human
ccugcagagggcac

SEQ ID NO: 3115450 - RNA, 16 nt, Human
ccugcacuugcagacu

SEQ ID NO: 3115451 - RNA, 17 nt, Human
ccugcacuugcagacuc

SEQ ID NO: 3115452 - RNA, 13 nt, Human
ccucuuucccucc

SEQ ID NO: 3115453 - RNA, 11 nt, Human
ccucuuucccu

SEQ ID NO: 3115454 - RNA, 22 nt, Human
ccuggccucugcacuccccugc

SEQ ID NO: 3115455 - RNA, 21 nt, Human
ccuggccucugcacuccccug

SEQ ID NO: 3115456 - RNA, 20 nt, Human
ccuggccucugcacuccccu

SEQ ID NO: 3115457 - RNA, 22 nt, Human
ccuggccuagcauacguacaca

SEQ ID NO: 3115458 - RNA, 16 nt, Human
ccuggccucugcacuc

SEQ ID NO: 3115459 - RNA, 15 nt, Human
ccugucuaaugaaac

SEQ ID NO: 3115460 - RNA, 22 nt, Human
ccugucuaaugaaaccuguguc

SEQ ID NO: 3115461 - RNA, 21 nt, Human
ccugguggcagugggagcugc

SEQ ID NO: 3115462 - RNA, 20 nt, Human
cccucaacucuccuccagag

SEQ ID NO: 3115463 - RNA, 17 nt, Human
ccccuucugacccaugc

SEQ ID NO: 3115464 - RNA, 16 nt, Human
ccccuucugacccaug

SEQ ID NO: 3115465 - RNA, 12 nt, Human
cccggcugcgga

SEQ ID NO: 3115466 - RNA, 15 nt, Human
ccccauucugccugc

SEQ ID NO: 3115467 - RNA, 13 nt, Human
ccccauucugccu

SEQ ID NO: 3115468 - RNA, 14 nt, Human
ccccauucugccug

SEQ ID NO: 3115469 - RNA, 19 nt, Human
ccccuucgcuccugugucu

SEQ ID NO: 3115470 - RNA, 14 nt, Human
ccccuucgcuccug

SEQ ID NO: 3115471 - RNA, 15 nt, Human
ccccuucgcuccugu

SEQ ID NO: 3115472 - RNA, 17 nt, Human
ccccuucgcuccugugu

SEQ ID NO: 3115473 - RNA, 21 nt, Human
ccccagauugcaacaggcugg

SEQ ID NO: 3115474 - RNA, 22 nt, Human
ccccagauugcaacaggcuggg

SEQ ID NO: 3115475 - RNA, 23 nt, Human
ccccagauugcaacaggcugggc

SEQ ID NO: 3115476 - RNA, 17 nt, Human
ccccagcaagugagagc

SEQ ID NO: 3115477 - RNA, 19 nt, Human
ccccagcaagugagagcug

SEQ ID NO: 3115478 - RNA, 20 nt, Human
ccccagcaagugagagcugg

SEQ ID NO: 3115479 - RNA, 17 nt, Human
ccccauccucuguacag

SEQ ID NO: 3115480 - RNA, 22 nt, Human
ccccauccucuguacagagccc

SEQ ID NO: 3115481 - RNA, 21 nt, Human
ccccauccucuguacagagcc

SEQ ID NO: 3115482 - RNA, 19 nt, Human
ccccauccucuguacagag

SEQ ID NO: 3115483 - RNA, 20 nt, Human
cccauucugccugcccaggc

SEQ ID NO: 3115484 - RNA, 21 nt, Human
cccauucugccugcccaggcc

SEQ ID NO: 3115485 - RNA, 22 nt, Human
cccauucugccugcccaggccc

SEQ ID NO: 3115486 - RNA, 14 nt, Human
cccagcccacuucu

SEQ ID NO: 3115487 - RNA, 23 nt, Human
cccaggaaaggcuccaggagcag

SEQ ID NO: 3115488 - RNA, 22 nt, Human
cccaggaaaggcuccaggagca

SEQ ID NO: 3115489 - RNA, 21 nt, Human
cccaggaaaggcuccaggagc

SEQ ID NO: 3115490 - RNA, 21 nt, Human
cccagcugugcucuggacagg

SEQ ID NO: 3115491 - RNA, 23 nt, Human
cccagcugugcucuggacaggca

SEQ ID NO: 3115492 - RNA, 19 nt, Human
cccaggaaaggcuccagga

SEQ ID NO: 3115493 - RNA, 15 nt, Human
cccaggcuuagucac

SEQ ID NO: 3115494 - RNA, 21 nt, Human
cccaggcuggcgugcaguggu

SEQ ID NO: 3115495 - RNA, 14 nt, Human
ccaugggccuccug

SEQ ID NO: 3115496 - RNA, 15 nt, Human
ccaugggccuccugu

SEQ ID NO: 3115497 - RNA, 20 nt, Human
ccaucccaaacccuucagug

SEQ ID NO: 3115498 - RNA, 23 nt, Human
ccaucccaaacccuucagugcca

SEQ ID NO: 3115499 - RNA, 12 nt, Human
ccaucccagccc

SEQ ID NO: 3115500 - RNA, 14 nt, Human
ccaugagccucagc

SEQ ID NO: 3115501 - RNA, 18 nt, Human
ccaugagccucagcaucc

SEQ ID NO: 3115502 - RNA, 19 nt, Human
ccaugagccucagcauccu

SEQ ID NO: 3115503 - RNA, 13 nt, Human
ccaugaguccccu

SEQ ID NO: 3115504 - RNA, 13 nt, Human
ccaugggccuccu

SEQ ID NO: 3115505 - RNA, 16 nt, Human
ccaugaguccccuguu

SEQ ID NO: 3115506 - RNA, 15 nt, Human
ccaugaguccccugu

SEQ ID NO: 3115507 - RNA, 14 nt, Human
ccaugaguccccug

SEQ ID NO: 3115508 - RNA, 16 nt, Human
ccauccccuguagagu

SEQ ID NO: 3115509 - RNA, 20 nt, Human
ccaucccugaaggccccgcc

SEQ ID NO: 3115510 - RNA, 13 nt, Human
ccaugagccucag

SEQ ID NO: 3115511 - RNA, 19 nt, Human
ccagcagagcaccuuagac

SEQ ID NO: 3115512 - RNA, 23 nt, Human
ccagcagagcaccuuagacaguc

SEQ ID NO: 3115513 - RNA, 16 nt, Human
ccagcuuaucucaggg

SEQ ID NO: 3115514 - RNA, 21 nt, Human
ccaggaaaggcuccaggagca

SEQ ID NO: 3115515 - RNA, 23 nt, Human
ccaggaaaggcuccaggagcagc

SEQ ID NO: 3115516 - RNA, 22 nt, Human
ccaggaaaggcuccaggagcag

SEQ ID NO: 3115517 - RNA, 21 nt, Human
ccagccccuggaugcagccuc

SEQ ID NO: 3115518 - RNA, 10 nt, Human
ccagccccuu

SEQ ID NO: 3115519 - RNA, 14 nt, Human
ccagcagccuggac

SEQ ID NO: 3115520 - RNA, 15 nt, Human
ccagcagccuggacc

SEQ ID NO: 3115521 - RNA, 18 nt, Human
ccagccccuggaugcagc

SEQ ID NO: 3115522 - RNA, 19 nt, Human
ccagcagccuggacccugu

SEQ ID NO: 3115523 - RNA, 14 nt, Human
ccaggcugggagag

SEQ ID NO: 3115524 - RNA, 13 nt, Human
ccaggcugggaga

SEQ ID NO: 3115525 - RNA, 21 nt, Human
ccaggcugggagagccuucca

SEQ ID NO: 3115526 - RNA, 18 nt, Human
ccaggcugggagagccuu

SEQ ID NO: 3115527 - RNA, 17 nt, Human
ccaggcugggagagccu

SEQ ID NO: 3115528 - RNA, 15 nt, Human
ccaggcugggagagc

SEQ ID NO: 3115529 - RNA, 22 nt, Human
ccaggcugggagagccuuccag

SEQ ID NO: 3115530 - RNA, 19 nt, Human
ccaggcuggcgugcagugg

SEQ ID NO: 3115531 - RNA, 19 nt, Human
ccagucaccccggccaccu

SEQ ID NO: 3115532 - RNA, 21 nt, Human
ccagucaccccggccaccugc

SEQ ID NO: 3115533 - RNA, 20 nt, Human
ccagucaccccggccaccug

SEQ ID NO: 3115534 - RNA, 12 nt, Human
ccagucaccccg

SEQ ID NO: 3115535 - RNA, 14 nt, Human
auuuaaugaaagac

SEQ ID NO: 3115536 - RNA, 14 nt, Human
auuucuguuuagau

SEQ ID NO: 3115537 - RNA, 16 nt, Human
auuucuguuuagauaa

SEQ ID NO: 3115538 - RNA, 12 nt, Human
auuucuguuuag

SEQ ID NO: 3115539 - RNA, 19 nt, Human
auuguucuuaguuugcagu

SEQ ID NO: 3115540 - RNA, 16 nt, Human
auuguaaggaaugauu

SEQ ID NO: 3115541 - RNA, 15 nt, Human
auuguaaggaaugau

SEQ ID NO: 3115542 - RNA, 20 nt, Human
auucauauuuacuucuuaua

SEQ ID NO: 3115543 - RNA, 18 nt, Human
auucauauuuacuucuua

SEQ ID NO: 3115544 - RNA, 19 nt, Human
auucauauuuacuucuuau

SEQ ID NO: 3115545 - RNA, 14 nt, Human
auuaaauucuugca

SEQ ID NO: 3115546 - RNA, 18 nt, Human
auuaaauucuugcaaagu

SEQ ID NO: 3115547 - RNA, 20 nt, Human
auuaaauucuugcaaaguau

SEQ ID NO: 3115548 - RNA, 22 nt, Human
auucuuuccugaggcugggcuc

SEQ ID NO: 3115549 - RNA, 17 nt, Human
auucuuuccugaggcug

SEQ ID NO: 3115550 - RNA, 13 nt, Human
auucuuuccugag

SEQ ID NO: 3115551 - RNA, 21 nt, Human
auuccugaugcuucuucagag

SEQ ID NO: 3115552 - RNA, 19 nt, Human
auucucuccuguaccucuu

SEQ ID NO: 3115553 - RNA, 21 nt, Human
auucucuccuguaccucuuga

SEQ ID NO: 3115554 - RNA, 16 nt, Human
auucucuccuguaccu

SEQ ID NO: 3115555 - RNA, 20 nt, Human
caacaccuuguuucccucuc

SEQ ID NO: 3115556 - RNA, 22 nt, Human
caacaccucugcacaagcugca

SEQ ID NO: 3115557 - RNA, 20 nt, Human
caacaccucugcacaagcug

SEQ ID NO: 3115558 - RNA, 13 nt, Human
caaagaugcagcc

SEQ ID NO: 3115559 - RNA, 21 nt, Human
caaaguacacuguuucaaacu

SEQ ID NO: 3115560 - RNA, 16 nt, Human
caaaguacacuguuuc

SEQ ID NO: 3115561 - RNA, 20 nt, Human
caaaguacacuguuucaaac

SEQ ID NO: 3115562 - RNA, 17 nt, Human
caaaucagcugcuacua

SEQ ID NO: 3115563 - RNA, 23 nt, Human
caacaaaccuguuucugcagcca

SEQ ID NO: 3115564 - RNA, 18 nt, Human
caaccacugcgaccacaa

SEQ ID NO: 3115565 - RNA, 15 nt, Human
caacucaccccagcc

SEQ ID NO: 3115566 - RNA, 13 nt, Human
caacucaccccag

SEQ ID NO: 3115567 - RNA, 16 nt, Human
caacucaccccagccc

SEQ ID NO: 3115568 - RNA, 22 nt, Human
caagacccuuguggucccaccc

SEQ ID NO: 3115569 - RNA, 19 nt, Human
caagacccuugugguccca

SEQ ID NO: 3115570 - RNA, 18 nt, Human
caagacccuugugguccc

SEQ ID NO: 3115571 - RNA, 15 nt, Human
caacccccagccugc

SEQ ID NO: 3115572 - RNA, 16 nt, Human
caacccccagccugcu

SEQ ID NO: 3115573 - RNA, 17 nt, Human
caacccccagccugcua

SEQ ID NO: 3115574 - RNA, 14 nt, Human
auuuguuugaacug

SEQ ID NO: 3115575 - RNA, 16 nt, Human
auuuguuugaacugau

SEQ ID NO: 3115576 - RNA, 13 nt, Human
auuuguuugaacu

SEQ ID NO: 3115577 - RNA, 15 nt, Human
caaaagcugggcagg

SEQ ID NO: 3115578 - RNA, 12 nt, Human
auuuuuuuuucc

SEQ ID NO: 3115579 - RNA, 16 nt, Human
auuuuuuuuuccuuca

SEQ ID NO: 3115580 - RNA, 13 nt, Human
auuuuuuuuuccu

SEQ ID NO: 3115581 - RNA, 13 nt, Human
auuuuuaagugcu

SEQ ID NO: 3115582 - RNA, 14 nt, Human
cacaagccuucggc

SEQ ID NO: 3115583 - RNA, 16 nt, Human
cacaagacccuugugg

SEQ ID NO: 3115584 - RNA, 14 nt, Human
cacaagacccuugu

SEQ ID NO: 3115585 - RNA, 22 nt, Human
caaugcugugcccuaaagugua

SEQ ID NO: 3115586 - RNA, 22 nt, Human
caaugcuggcuguuggcugggg

SEQ ID NO: 3115587 - RNA, 23 nt, Human
caaugcuggcuguuggcuggggg

SEQ ID NO: 3115588 - RNA, 16 nt, Human
cacaucuugcucugcu

SEQ ID NO: 3115589 - RNA, 17 nt, Human
cacaucuugcucugcug

SEQ ID NO: 3115590 - RNA, 22 nt, Human
cacaucagcacgauuucuguuu

SEQ ID NO: 3115591 - RNA, 19 nt, Human
cacaucagcacgauuucug

SEQ ID NO: 3115592 - RNA, 20 nt, Human
cacaucagcacgauuucugu

SEQ ID NO: 3115593 - RNA, 21 nt, Human
cacaucagcacgauuucuguu

SEQ ID NO: 3115594 - RNA, 18 nt, Human
cacaucuugcucugcuga

SEQ ID NO: 3115595 - RNA, 15 nt, Human
cacauuuuauuuuau

SEQ ID NO: 3115596 - RNA, 21 nt, Human
cacauuuuauuuuauuaugca

SEQ ID NO: 3115597 - RNA, 17 nt, Human
caccaacauacucccau

SEQ ID NO: 3115598 - RNA, 21 nt, Human
caccaacauacucccaucugu

SEQ ID NO: 3115599 - RNA, 20 nt, Human
caccaacauacucccaucug

SEQ ID NO: 3115600 - RNA, 13 nt, Human
cacauuuuucuua

SEQ ID NO: 3115601 - RNA, 14 nt, Human
cacauuuuucuuag

SEQ ID NO: 3115602 - RNA, 17 nt, Human
cacauuuuuuaaaugca

SEQ ID NO: 3115603 - RNA, 21 nt, Human
cacauuuuuuaaaugcaccug

SEQ ID NO: 3115604 - RNA, 24 nt, Human
cacccaggagccccgaggccuucu

SEQ ID NO: 3115605 - RNA, 19 nt, Human
cacccagcccacuucugcc

SEQ ID NO: 3115606 - RNA, 20 nt, Human
cacccaggagccccgaggcc

SEQ ID NO: 3115607 - RNA, 23 nt, Human
cacccaggagccccgaggccuuc

SEQ ID NO: 3115608 - RNA, 21 nt, Human
caccagcccuuagcagggaaa

SEQ ID NO: 3115609 - RNA, 15 nt, Human
caccagcagccugga

SEQ ID NO: 3115610 - RNA, 12 nt, Human
caccagcagccu

SEQ ID NO: 3115611 - RNA, 14 nt, Human
caccagcagccugg

SEQ ID NO: 3115612 - RNA, 23 nt, Human
caccaacauacucccaucuguga

SEQ ID NO: 3115613 - RNA, 16 nt, Human
cacccagcccacuucu

SEQ ID NO: 3115614 - RNA, 17 nt, Human
cacccagcccacuucug

SEQ ID NO: 3115615 - RNA, 22 nt, Human
cacagcuaacauggaaguacua

SEQ ID NO: 3115616 - RNA, 20 nt, Human
cacagcucuguccugggagu

SEQ ID NO: 3115617 - RNA, 23 nt, Human
cacagcucuguccugggagugag

SEQ ID NO: 3115618 - RNA, 19 nt, Human
cacagcucuguccugggag

SEQ ID NO: 3115619 - RNA, 18 nt, Human
cacagacccugcccugug

SEQ ID NO: 3115620 - RNA, 16 nt, Human
cacagcuaacauggaa

SEQ ID NO: 3115621 - RNA, 15 nt, Human
cacagcuaacaugga

SEQ ID NO: 3115622 - RNA, 19 nt, Human
cacagacccugcccugugg

SEQ ID NO: 3115623 - RNA, 21 nt, Human
cacagacccugcccugugggc

SEQ ID NO: 3115624 - RNA, 20 nt, Human
cacagacccugcccuguggg

SEQ ID NO: 3115625 - RNA, 16 nt, Human
cacaguauuacuucug

SEQ ID NO: 3115626 - RNA, 18 nt, Human
cacaguauuacuucugcu

SEQ ID NO: 3115627 - RNA, 19 nt, Human
cacuguuucaaacuuuacu

SEQ ID NO: 3115628 - RNA, 14 nt, Human
cacuguugcccagg

SEQ ID NO: 3115629 - RNA, 15 nt, Human
cacuguugcccaggc

SEQ ID NO: 3115630 - RNA, 16 nt, Human
cacuguugcccaggcu

SEQ ID NO: 3115631 - RNA, 17 nt, Human
cacuggugacaugucuu

SEQ ID NO: 3115632 - RNA, 20 nt, Human
cacugggcuuggggaccaga

SEQ ID NO: 3115633 - RNA, 22 nt, Human
cacugggcuuggggaccagagc

SEQ ID NO: 3115634 - RNA, 23 nt, Human
cacugggcuuggggaccagagcu

SEQ ID NO: 3115635 - RNA, 19 nt, Human
cagaaguuucugccgcagc

SEQ ID NO: 3115636 - RNA, 17 nt, Human
cagaaauguguuaucac

SEQ ID NO: 3115637 - RNA, 21 nt, Human
cagaaguuucugccgcagccc

SEQ ID NO: 3115638 - RNA, 20 nt, Human
cagaaguuucugccgcagcc

SEQ ID NO: 3115639 - RNA, 22 nt, Human
cagaaguuucugccgcagcccu

SEQ ID NO: 3115640 - RNA, 23 nt, Human
cagaaguuugagaucagccuggg

SEQ ID NO: 3115641 - RNA, 18 nt, Human
caccuugacagggcacac

SEQ ID NO: 3115642 - RNA, 19 nt, Human
caccuugacagggcacacc

SEQ ID NO: 3115643 - RNA, 17 nt, Human
caccugccagggacaga

SEQ ID NO: 3115644 - RNA, 13 nt, Human
caccuuggcucaa

SEQ ID NO: 3115645 - RNA, 14 nt, Human
caccuuugaagaag

SEQ ID NO: 3115646 - RNA, 15 nt, Human
caccuuuguccccac

SEQ ID NO: 3115647 - RNA, 14 nt, Human
caccuuugucccca

SEQ ID NO: 3115648 - RNA, 13 nt, Human
caccugccaggga

SEQ ID NO: 3115649 - RNA, 16 nt, Human
caccugccagggacag

SEQ ID NO: 3115650 - RNA, 14 nt, Human
caccugccagggac

SEQ ID NO: 3115651 - RNA, 20 nt, Human
cacggagggugacgggggug

SEQ ID NO: 3115652 - RNA, 14 nt, Human
cacggccaggccag

SEQ ID NO: 3115653 - RNA, 15 nt, Human
cacggccaggccaga

SEQ ID NO: 3115654 - RNA, 16 nt, Human
cacggccaggccagag

SEQ ID NO: 3115655 - RNA, 23 nt, Human
cacuacggaauaguuggcuagga

SEQ ID NO: 3115656 - RNA, 17 nt, Human
cacucuuauugcccacg

SEQ ID NO: 3115657 - RNA, 18 nt, Human
cacucuuauugcccacgc

SEQ ID NO: 3115658 - RNA, 19 nt, Human
cacucuuauugcccacgcu

SEQ ID NO: 3115659 - RNA, 18 nt, Human
cagcggggacagcuccuu

SEQ ID NO: 3115660 - RNA, 19 nt, Human
cagcggggacagcuccuuc

SEQ ID NO: 3115661 - RNA, 21 nt, Human
cagcggggacagcuccuucug

SEQ ID NO: 3115662 - RNA, 19 nt, Human
cagccugcuaauuccccag

SEQ ID NO: 3115663 - RNA, 12 nt, Human
cagccugcucca

SEQ ID NO: 3115664 - RNA, 19 nt, Human
cagccgagauagccaaggc

SEQ ID NO: 3115665 - RNA, 17 nt, Human
cagccucugaaaaccaa

SEQ ID NO: 3115666 - RNA, 18 nt, Human
caggaaaagcugcugaca

SEQ ID NO: 3115667 - RNA, 15 nt, Human
caggaaaagcugcug

SEQ ID NO: 3115668 - RNA, 16 nt, Human
caggaaaagcugcuga

SEQ ID NO: 3115669 - RNA, 19 nt, Human
cagcugagggugagugggu

SEQ ID NO: 3115670 - RNA, 12 nt, Human
cagcugccuggg

SEQ ID NO: 3115671 - RNA, 14 nt, Human
cagcugccugggau

SEQ ID NO: 3115672 - RNA, 13 nt, Human
cagcugccuggga

SEQ ID NO: 3115673 - RNA, 19 nt, Human
cagcugugcucuggacagg

SEQ ID NO: 3115674 - RNA, 20 nt, Human
cagcugugcucuggacaggc

SEQ ID NO: 3115675 - RNA, 24 nt, Human
cagcugugcucuggacaggcaugu

SEQ ID NO: 3115676 - RNA, 19 nt, Human
cagcuguucagcugguuga

SEQ ID NO: 3115677 - RNA, 19 nt, Human
cagauucuuuccugaggcu

SEQ ID NO: 3115678 - RNA, 18 nt, Human
cagauucuuuccugaggc

SEQ ID NO: 3115679 - RNA, 17 nt, Human
cagauucuuuccugagg

SEQ ID NO: 3115680 - RNA, 15 nt, Human
cagauucuuuccuga

SEQ ID NO: 3115681 - RNA, 23 nt, Human
cagaggggguggccucccaacuc

SEQ ID NO: 3115682 - RNA, 22 nt, Human
cagaggggguggccucccaacu

SEQ ID NO: 3115683 - RNA, 20 nt, Human
cagcaucauggagguuugaa

SEQ ID NO: 3115684 - RNA, 17 nt, Human
cagauugcaacaggcug

SEQ ID NO: 3115685 - RNA, 22 nt, Human
cagauucuuuccugaggcuggg

SEQ ID NO: 3115686 - RNA, 20 nt, Human
cagauucuuuccugaggcug

SEQ ID NO: 3115687 - RNA, 16 nt, Human
cagcacgauuucuguu

SEQ ID NO: 3115688 - RNA, 18 nt, Human
cagcacgauuucuguuua

SEQ ID NO: 3115689 - RNA, 19 nt, Human
cagcacgauuucuguuuag

SEQ ID NO: 3115690 - RNA, 14 nt, Human
cagugcaugcuguc

SEQ ID NO: 3115691 - RNA, 13 nt, Human
cagugcaugcugu

SEQ ID NO: 3115692 - RNA, 15 nt, Human
cagucuggaaugcag

SEQ ID NO: 3115693 - RNA, 17 nt, Human
cagucuggaaugcagug

SEQ ID NO: 3115694 - RNA, 13 nt, Human
cagugcccacagg

SEQ ID NO: 3115695 - RNA, 15 nt, Human
cagugcccacaggau

SEQ ID NO: 3115696 - RNA, 17 nt, Human
cagugcaugcugucccu

SEQ ID NO: 3115697 - RNA, 16 nt, Human
cagugcaugcuguccc

SEQ ID NO: 3115698 - RNA, 17 nt, Human
cagugcccacaggauca

SEQ ID NO: 3115699 - RNA, 20 nt, Human
cagugggagcugccuguuca

SEQ ID NO: 3115700 - RNA, 23 nt, Human
cagugggagcugccuguucagcu

SEQ ID NO: 3115701 - RNA, 20 nt, Human
caguggugcgaucuggguuc

SEQ ID NO: 3115702 - RNA, 21 nt, Human
caguggugcgaucuggguuca

SEQ ID NO: 3115703 - RNA, 18 nt, Human
caguggugguuuucuguu

SEQ ID NO: 3115704 - RNA, 15 nt, Human
caggugcacaagcuc

SEQ ID NO: 3115705 - RNA, 22 nt, Human
caggugauccacccaccucagc

SEQ ID NO: 3115706 - RNA, 23 nt, Human
caggugauccacccaccucagcc

SEQ ID NO: 3115707 - RNA, 20 nt, Human
caggugcacaagcuccaagc

SEQ ID NO: 3115708 - RNA, 19 nt, Human
caggugcacaagcuccaag

SEQ ID NO: 3115709 - RNA, 18 nt, Human
caggugcacaagcuccaa

SEQ ID NO: 3115710 - RNA, 17 nt, Human
caggugcacaagcucca

SEQ ID NO: 3115711 - RNA, 21 nt, Human
caggugauccacccaccucag

SEQ ID NO: 3115712 - RNA, 20 nt, Human
caggugauccacccaccuca

SEQ ID NO: 3115713 - RNA, 21 nt, Human
cagguuggugggggccucggu

SEQ ID NO: 3115714 - RNA, 21 nt, Human
caggugcacaagcuccaagcu

SEQ ID NO: 3115715 - RNA, 12 nt, Human
cagguuuuccug

SEQ ID NO: 3115716 - RNA, 14 nt, Human
cagguuuaagcugu

SEQ ID NO: 3115717 - RNA, 16 nt, Human
cagguuuuccugaaga

SEQ ID NO: 3115718 - RNA, 18 nt, Human
caggcagauacaggaaaa

SEQ ID NO: 3115719 - RNA, 13 nt, Human
caggccagaggga

SEQ ID NO: 3115720 - RNA, 15 nt, Human
caggccagagggagu

SEQ ID NO: 3115721 - RNA, 23 nt, Human
caggccagcugcuugggcuucau

SEQ ID NO: 3115722 - RNA, 21 nt, Human
caggccagcugcuugggcuuc

SEQ ID NO: 3115723 - RNA, 19 nt, Human
caggccagcugcuugggcu

SEQ ID NO: 3115724 - RNA, 17 nt, Human
caggccagcugcuuggg

SEQ ID NO: 3115725 - RNA, 18 nt, Human
caggccaggcccucugcc

SEQ ID NO: 3115726 - RNA, 17 nt, Human
caggccaggcccucugc

SEQ ID NO: 3115727 - RNA, 19 nt, Human
caggccaggcccucugccc

SEQ ID NO: 3115728 - RNA, 21 nt, Human
caggcugggcuucaguggcag

SEQ ID NO: 3115729 - RNA, 22 nt, Human
caggcugggcuucaguggcagc

SEQ ID NO: 3115730 - RNA, 20 nt, Human
caggcugggcuucaguggca

SEQ ID NO: 3115731 - RNA, 14 nt, Human
caggcugggagagc

SEQ ID NO: 3115732 - RNA, 12 nt, Human
caggcugggaga

SEQ ID NO: 3115733 - RNA, 21 nt, Human
cagggcucagcggggacagcu

SEQ ID NO: 3115734 - RNA, 23 nt, Human
cagggcucagcggggacagcucc

SEQ ID NO: 3115735 - RNA, 20 nt, Human
cagggcucagcggggacagc

SEQ ID NO: 3115736 - RNA, 20 nt, Human
caggggaaaaucagccugcu

SEQ ID NO: 3115737 - RNA, 17 nt, Human
caggggaaaaucagccu

SEQ ID NO: 3115738 - RNA, 19 nt, Human
caggggaaaaucagccugc

SEQ ID NO: 3115739 - RNA, 14 nt, Human
ccaccaucaagcca

SEQ ID NO: 3115740 - RNA, 13 nt, Human
ccaccaucaagcc

SEQ ID NO: 3115741 - RNA, 17 nt, Human
ccaccacacccagccca

SEQ ID NO: 3115742 - RNA, 13 nt, Human
ccacgcccccacu

SEQ ID NO: 3115743 - RNA, 19 nt, Human
ccacgcccccacuggugac

SEQ ID NO: 3115744 - RNA, 18 nt, Human
ccacgcccccacugguga

SEQ ID NO: 3115745 - RNA, 17 nt, Human
ccacgcccccacuggug

SEQ ID NO: 3115746 - RNA, 16 nt, Human
ccacgcccccacuggu

SEQ ID NO: 3115747 - RNA, 19 nt, Human
ccaccgcagacaggaccag

SEQ ID NO: 3115748 - RNA, 22 nt, Human
ccaccgcagacaggaccaggga

SEQ ID NO: 3115749 - RNA, 21 nt, Human
ccaccuuugaagaaguaagga

SEQ ID NO: 3115750 - RNA, 17 nt, Human
ccacucccugcaaccug

SEQ ID NO: 3115751 - RNA, 21 nt, Human
ccaaaacucuccucugcugcu

SEQ ID NO: 3115752 - RNA, 20 nt, Human
ccaaaacucuccucugcugc

SEQ ID NO: 3115753 - RNA, 17 nt, Human
ccaauauuuaccagacc

SEQ ID NO: 3115754 - RNA, 15 nt, Human
ccaaugauggucacc

SEQ ID NO: 3115755 - RNA, 14 nt, Human
ccaaugcacuuugu

SEQ ID NO: 3115756 - RNA, 18 nt, Human
ccaagcucugcuccucuc

SEQ ID NO: 3115757 - RNA, 12 nt, Human
ccaagcucugcu

SEQ ID NO: 3115758 - RNA, 17 nt, Human
ccaagcucugcuccucu

SEQ ID NO: 3115759 - RNA, 13 nt, Human
ccaagcucugcuc

SEQ ID NO: 3115760 - RNA, 18 nt, Human
ccaacucaccccagcccc

SEQ ID NO: 3115761 - RNA, 17 nt, Human
ccaacucaccccagccc

SEQ ID NO: 3115762 - RNA, 16 nt, Human
ccaacucaccccagcc

SEQ ID NO: 3115763 - RNA, 14 nt, Human
ccaacucaccccag

SEQ ID NO: 3115764 - RNA, 23 nt, Human
ccaaauggaaaugggcagagcag

SEQ ID NO: 3115765 - RNA, 14 nt, Human
ccaaugggagcuca

SEQ ID NO: 3115766 - RNA, 17 nt, Human
ccaaugggagcucaugg

SEQ ID NO: 3115767 - RNA, 22 nt, Human
cauccuggcacccggccccugc

SEQ ID NO: 3115768 - RNA, 21 nt, Human
cauccccuguagagugggagc

SEQ ID NO: 3115769 - RNA, 12 nt, Human
caucacuucccu

SEQ ID NO: 3115770 - RNA, 14 nt, Human
caucacuucccuac

SEQ ID NO: 3115771 - RNA, 15 nt, Human
cauccuggcacccgg

SEQ ID NO: 3115772 - RNA, 22 nt, Human
cauauucaggaagcucagggcc

SEQ ID NO: 3115773 - RNA, 17 nt, Human
cauauucuguuggccag

SEQ ID NO: 3115774 - RNA, 19 nt, Human
caguggugguuuucuguuc

SEQ ID NO: 3115775 - RNA, 20 nt, Human
caguggugguuuucuguucu

SEQ ID NO: 3115776 - RNA, 21 nt, Human
caguggugguuuucuguucuu

SEQ ID NO: 3115777 - RNA, 22 nt, Human
caguggugguuuucuguucuuu

SEQ ID NO: 3115778 - RNA, 13 nt, Human
cauucuccaccug

SEQ ID NO: 3115779 - RNA, 16 nt, Human
cauucuccaccugcca

SEQ ID NO: 3115780 - RNA, 14 nt, Human
cauucuccaccugc

SEQ ID NO: 3115781 - RNA, 19 nt, Human
cauguuggccaggcugguc

SEQ ID NO: 3115782 - RNA, 16 nt, Human
cauguuggccaggcug

SEQ ID NO: 3115783 - RNA, 14 nt, Human
cauguuggccaggc

SEQ ID NO: 3115784 - RNA, 15 nt, Human
cauguuggccaggcu

SEQ ID NO: 3115785 - RNA, 13 nt, Human
caugauguuuucc

SEQ ID NO: 3115786 - RNA, 14 nt, Human
caugcuacacacug

SEQ ID NO: 3115787 - RNA, 20 nt, Human
caugcuacacacugcauguu

SEQ ID NO: 3115788 - RNA, 23 nt, Human
caugcuacacacugcauguuugu

SEQ ID NO: 3115789 - RNA, 20 nt, Human
caugcuccuggcccacugca

SEQ ID NO: 3115790 - RNA, 17 nt, Human
caugggaaugaauguca

SEQ ID NO: 3115791 - RNA, 16 nt, Human
caugggaaugaauguc

SEQ ID NO: 3115792 - RNA, 15 nt, Human
caugggaaugaaugu

SEQ ID NO: 3115793 - RNA, 14 nt, Human
caugggaaugaaug

SEQ ID NO: 3115794 - RNA, 13 nt, Human
cugcccugugagu

SEQ ID NO: 3115795 - RNA, 24 nt, Human
cugcccugugaguacuacaguccu

SEQ ID NO: 3115796 - RNA, 23 nt, Human
cugcccuuaccugccaggaagcc

SEQ ID NO: 3115797 - RNA, 22 nt, Human
cugcccuuaccugccaggaagc

SEQ ID NO: 3115798 - RNA, 11 nt, Human
cugcccugugg

SEQ ID NO: 3115799 - RNA, 12 nt, Human
cugcccuguggg

SEQ ID NO: 3115800 - RNA, 19 nt, Human
cugcccuuaccugccagga

SEQ ID NO: 3115801 - RNA, 14 nt, Human
cugccuccuuugug

SEQ ID NO: 3115802 - RNA, 14 nt, Human
cugccucgaacugg

SEQ ID NO: 3115803 - RNA, 23 nt, Human
cugccuccuuugugaggaagccg

SEQ ID NO: 3115804 - RNA, 21 nt, Human
cugccuccuuugugaggaagc

SEQ ID NO: 3115805 - RNA, 17 nt, Human
cugccuccuuugugagg

SEQ ID NO: 3115806 - RNA, 19 nt, Human
cugccucgaacuggcugca

SEQ ID NO: 3115807 - RNA, 20 nt, Human
cugccucgaacuggcugcaa

SEQ ID NO: 3115808 - RNA, 20 nt, Human
cugccuguucagcuccagcu

SEQ ID NO: 3115809 - RNA, 23 nt, Human
cugccuguucagcuccagcucac

SEQ ID NO: 3115810 - RNA, 17 nt, Human
cugcuaucaaagagguu

SEQ ID NO: 3115811 - RNA, 18 nt, Human
cugcugaaggcucgagca

SEQ ID NO: 3115812 - RNA, 23 nt, Human
cugcugaaggcucgagcaugccu

SEQ ID NO: 3115813 - RNA, 24 nt, Human
cugcugaaggcucgagcaugccug

SEQ ID NO: 3115814 - RNA, 13 nt, Human
cuggcucuuccag

SEQ ID NO: 3115815 - RNA, 15 nt, Human
cuggcucuuccaggc

SEQ ID NO: 3115816 - RNA, 14 nt, Human
cuggcucuuccagg

SEQ ID NO: 3115817 - RNA, 16 nt, Human
cugggacuacaggcac

SEQ ID NO: 3115818 - RNA, 17 nt, Human
cugggacuacaggcacc

SEQ ID NO: 3115819 - RNA, 21 nt, Human
cugggacuacaggcacccacc

SEQ ID NO: 3115820 - RNA, 17 nt, Human
cugggacuacaggugug

SEQ ID NO: 3115821 - RNA, 16 nt, Human
cuggcagcucagagag

SEQ ID NO: 3115822 - RNA, 19 nt, Human
cuggcagcucagagagggu

SEQ ID NO: 3115823 - RNA, 17 nt, Human
cuggcagcucagagagg

SEQ ID NO: 3115824 - RNA, 15 nt, Human
cuggcagcucagaga

SEQ ID NO: 3115825 - RNA, 19 nt, Human
cuggcagaguugaagacag

SEQ ID NO: 3115826 - RNA, 21 nt, Human
cuggcagaguugaagacagag

SEQ ID NO: 3115827 - RNA, 20 nt, Human
cuggcagaguugaagacaga

SEQ ID NO: 3115828 - RNA, 23 nt, Human
cuggcagccccuguucuggcaga

SEQ ID NO: 3115829 - RNA, 22 nt, Human
cuggcagaguugaagacagagc

SEQ ID NO: 3115830 - RNA, 13 nt, Human
cuggcagccccug

SEQ ID NO: 3115831 - RNA, 23 nt, Human
cugcuucagccucccgaguagcu

SEQ ID NO: 3115832 - RNA, 14 nt, Human
cugcuuccagugag

SEQ ID NO: 3115833 - RNA, 16 nt, Human
cugcuucaaggauccu

SEQ ID NO: 3115834 - RNA, 14 nt, Human
cugcuucaaggauc

SEQ ID NO: 3115835 - RNA, 13 nt, Human
cugcuucaaggau

SEQ ID NO: 3115836 - RNA, 19 nt, Human
cugcuucaaggauccugag

SEQ ID NO: 3115837 - RNA, 21 nt, Human
cuggagaaaauggacguguua

SEQ ID NO: 3115838 - RNA, 14 nt, Human
cuggagaaaaugga

SEQ ID NO: 3115839 - RNA, 15 nt, Human
cuggaugcagccuca

SEQ ID NO: 3115840 - RNA, 18 nt, Human
cuggaugcagccucacag

SEQ ID NO: 3115841 - RNA, 17 nt, Human
cuggaugcagccucaca

SEQ ID NO: 3115842 - RNA, 16 nt, Human
cuggaugcagccucac

SEQ ID NO: 3115843 - RNA, 12 nt, Human
cuguucagcugg

SEQ ID NO: 3115844 - RNA, 16 nt, Human
cuguucagcuccagcu

SEQ ID NO: 3115845 - RNA, 18 nt, Human
cuguucagcuccagcuca

SEQ ID NO: 3115846 - RNA, 19 nt, Human
cuguucagcuccagcucac

SEQ ID NO: 3115847 - RNA, 22 nt, Human
cuguucagcuccagcucaccag

SEQ ID NO: 3115848 - RNA, 14 nt, Human
cuguucagcuccag

SEQ ID NO: 3115849 - RNA, 15 nt, Human
cuguucagcuccagc

SEQ ID NO: 3115850 - RNA, 18 nt, Human
cugugcucuggacaggca

SEQ ID NO: 3115851 - RNA, 22 nt, Human
cugugucagguggggcagcuug

SEQ ID NO: 3115852 - RNA, 17 nt, Human
cuguuacugucuucagu

SEQ ID NO: 3115853 - RNA, 13 nt, Human
cuguuacugucuu

SEQ ID NO: 3115854 - RNA, 17 nt, Human
cugugcucuggacaggc

SEQ ID NO: 3115855 - RNA, 15 nt, Human
cugugcucuggacag

SEQ ID NO: 3115856 - RNA, 18 nt, Human
cuguugcccaggcuggcg

SEQ ID NO: 3115857 - RNA, 12 nt, Human
cuguuggccagu

SEQ ID NO: 3115858 - RNA, 13 nt, Human
cuuaaauaaugug

SEQ ID NO: 3115859 - RNA, 14 nt, Human
cuuaaauaauguga

SEQ ID NO: 3115860 - RNA, 16 nt, Human
cuuaaauaaugugaaa

SEQ ID NO: 3115861 - RNA, 19 nt, Human
cuuaaauaaugugaaacug

SEQ ID NO: 3115862 - RNA, 22 nt, Human
cuggugacaugucuuuucuugc

SEQ ID NO: 3115863 - RNA, 15 nt, Human
cuguagagugggagc

SEQ ID NO: 3115864 - RNA, 22 nt, Human
cugucuaaugaaaccugugucu

SEQ ID NO: 3115865 - RNA, 20 nt, Human
cuguccugggagugagcugg

SEQ ID NO: 3115866 - RNA, 13 nt, Human
cuguccugggagu

SEQ ID NO: 3115867 - RNA, 14 nt, Human
cuguccugggagug

SEQ ID NO: 3115868 - RNA, 14 nt, Human
cugucauuugagca

SEQ ID NO: 3115869 - RNA, 18 nt, Human
cuuuugccguuauuaaaa

SEQ ID NO: 3115870 - RNA, 16 nt, Human
cuuuugccguuauuaa

SEQ ID NO: 3115871 - RNA, 15 nt, Human
cuuuuggucugugug

SEQ ID NO: 3115872 - RNA, 16 nt, Human
cuuuuggucuguguga

SEQ ID NO: 3115873 - RNA, 17 nt, Human
cuuuugucuaugggacu

SEQ ID NO: 3115874 - RNA, 14 nt, Human
cuuuugugcauuau

SEQ ID NO: 3115875 - RNA, 18 nt, Human
cuuuugugcauuaucuag

SEQ ID NO: 3115876 - RNA, 21 nt, Human
cuuuuuuuuuuuuuuugacaa

SEQ ID NO: 3115877 - RNA, 19 nt, Human
gaaaaaauauuuuccugcc

SEQ ID NO: 3115878 - RNA, 18 nt, Human
gaaaauuuugauguuuua

SEQ ID NO: 3115879 - RNA, 14 nt, Human
gaaaauuuuaaaaa

SEQ ID NO: 3115880 - RNA, 18 nt, Human
gaaagacuaucuaaaugu

SEQ ID NO: 3115881 - RNA, 16 nt, Human
gaaaggcuccaggagc

SEQ ID NO: 3115882 - RNA, 19 nt, Human
gaaaggcuccaggagcagc

SEQ ID NO: 3115883 - RNA, 18 nt, Human
gaaaggcuccaggagcag

SEQ ID NO: 3115884 - RNA, 17 nt, Human
gaaaggcuccaggagca

SEQ ID NO: 3115885 - RNA, 21 nt, Human
gaaaguacuucuccacccugc

SEQ ID NO: 3115886 - RNA, 18 nt, Human
gaaauuuuuauuaaauua

SEQ ID NO: 3115887 - RNA, 17 nt, Human
gaaaucaccgaaaacgu

SEQ ID NO: 3115888 - RNA, 19 nt, Human
gaaauuuuuauuaaauuau

SEQ ID NO: 3115889 - RNA, 21 nt, Human
gaacaaggcaaggcugucaau

SEQ ID NO: 3115890 - RNA, 18 nt, Human
gaacaaggcaaggcuguc

SEQ ID NO: 3115891 - RNA, 17 nt, Human
gaacaaggcaaggcugu

SEQ ID NO: 3115892 - RNA, 15 nt, Human
gaacaaggcaaggcu

SEQ ID NO: 3115893 - RNA, 14 nt, Human
gaacaaggcaaggc

SEQ ID NO: 3115894 - RNA, 12 nt, Human
cuugauucauaa

SEQ ID NO: 3115895 - RNA, 19 nt, Human
cuugauucauaaugacuua

SEQ ID NO: 3115896 - RNA, 18 nt, Human
cuugccgucuaccugagg

SEQ ID NO: 3115897 - RNA, 22 nt, Human
cuuggcgcugccccuggcagcc

SEQ ID NO: 3115898 - RNA, 21 nt, Human
cuuggcgcugccccuggcagc

SEQ ID NO: 3115899 - RNA, 23 nt, Human
cuuggcgcugccccuggcagccc

SEQ ID NO: 3115900 - RNA, 20 nt, Human
cuuggcgcugccccuggcag

SEQ ID NO: 3115901 - RNA, 14 nt, Human
cuuggauugucccc

SEQ ID NO: 3115902 - RNA, 20 nt, Human
cuuggauuguccccgacccu

SEQ ID NO: 3115903 - RNA, 18 nt, Human
cuuggauuguccccgacc

SEQ ID NO: 3115904 - RNA, 15 nt, Human
cuuggauuguccccg

SEQ ID NO: 3115905 - RNA, 15 nt, Human
cuugguccugcugca

SEQ ID NO: 3115906 - RNA, 20 nt, Human
cuugguccugcugcaguugc

SEQ ID NO: 3115907 - RNA, 18 nt, Human
cuugguccugcugcaguu

SEQ ID NO: 3115908 - RNA, 17 nt, Human
cuugguccugcugcagu

SEQ ID NO: 3115909 - RNA, 16 nt, Human
cuugguccugcugcag

SEQ ID NO: 3115910 - RNA, 13 nt, Human
cuugucuguagau

SEQ ID NO: 3115911 - RNA, 20 nt, Human
cuugucuuuggacccugagg

SEQ ID NO: 3115912 - RNA, 19 nt, Human
cuugucuuuggacccugag

SEQ ID NO: 3115913 - RNA, 20 nt, Human
cuuggugucgggcaugacac

SEQ ID NO: 3115914 - RNA, 22 nt, Human
cuugguccugcugcaguugcca

SEQ ID NO: 3115915 - RNA, 20 nt, Human
cuugguucccauuugcuccu

SEQ ID NO: 3115916 - RNA, 16 nt, Human
cuugguucccauuugc

SEQ ID NO: 3115917 - RNA, 17 nt, Human
cuuucaauaggaaaaac

SEQ ID NO: 3115918 - RNA, 22 nt, Human
cuugucuuuggacccugaggcc

SEQ ID NO: 3115919 - RNA, 21 nt, Human
cuugucuuuggacccugaggc

SEQ ID NO: 3115920 - RNA, 22 nt, Human
cuuuaaugucacaggcaggucc

SEQ ID NO: 3115921 - RNA, 15 nt, Human
cuuucaauaggaaaa

SEQ ID NO: 3115922 - RNA, 14 nt, Human
cuuucaauaggaaa

SEQ ID NO: 3115923 - RNA, 17 nt, Human
cuuuaaugucacaggca

SEQ ID NO: 3115924 - RNA, 18 nt, Human
cuuuaaugucacaggcag

SEQ ID NO: 3115925 - RNA, 19 nt, Human
cuuuaaugucacaggcagg

SEQ ID NO: 3115926 - RNA, 20 nt, Human
cuuuaaugucacaggcaggu

SEQ ID NO: 3115927 - RNA, 12 nt, Human
cuuccucccucc

SEQ ID NO: 3115928 - RNA, 13 nt, Human
cuuccucccuccc

SEQ ID NO: 3115929 - RNA, 14 nt, Human
cuuccucccucccu

SEQ ID NO: 3115930 - RNA, 19 nt, Human
cuucugaacuuggcgcugc

SEQ ID NO: 3115931 - RNA, 22 nt, Human
cuucugaacuuggcgcugcccc

SEQ ID NO: 3115932 - RNA, 15 nt, Human
cuucugacccaugcu

SEQ ID NO: 3115933 - RNA, 13 nt, Human
cuucuuauacauu

SEQ ID NO: 3115934 - RNA, 16 nt, Human
cuucuuauacauuuga

SEQ ID NO: 3115935 - RNA, 17 nt, Human
cuucugacccaugcugc

SEQ ID NO: 3115936 - RNA, 16 nt, Human
cuucugacccaugcug

SEQ ID NO: 3115937 - RNA, 18 nt, Human
cuucugacccaugcugcc

SEQ ID NO: 3115938 - RNA, 17 nt, Human
gacacagcucuucucca

SEQ ID NO: 3115939 - RNA, 21 nt, Human
gacacagcucuucuccaggcu

SEQ ID NO: 3115940 - RNA, 12 nt, Human
gacacagcucuu

SEQ ID NO: 3115941 - RNA, 19 nt, Human
gacacagcucuucuccagg

SEQ ID NO: 3115942 - RNA, 20 nt, Human
gacacagcucuucuccaggc

SEQ ID NO: 3115943 - RNA, 18 nt, Human
gaauguuugccucugccu

SEQ ID NO: 3115944 - RNA, 19 nt, Human
gaauguuugccucugccuc

SEQ ID NO: 3115945 - RNA, 14 nt, Human
gaaugauuaauuaa

SEQ ID NO: 3115946 - RNA, 14 nt, Human
gaaugaugccauga

SEQ ID NO: 3115947 - RNA, 20 nt, Human
gaaugaugauccuaggcauu

SEQ ID NO: 3115948 - RNA, 15 nt, Human
gaauguuugccucug

SEQ ID NO: 3115949 - RNA, 19 nt, Human
gaaugcacaaacagaggcc

SEQ ID NO: 3115950 - RNA, 16 nt, Human
gaauguuugccucugc

SEQ ID NO: 3115951 - RNA, 17 nt, Human
gaauguuugccucugcc

SEQ ID NO: 3115952 - RNA, 18 nt, Human
gaaugcacaaacagaggc

SEQ ID NO: 3115953 - RNA, 23 nt, Human
gaauauugcugauggugcaauga

SEQ ID NO: 3115954 - RNA, 22 nt, Human
gaauauugcugauggugcaaug

SEQ ID NO: 3115955 - RNA, 24 nt, Human
gaauauugcugauggugcaaugac

SEQ ID NO: 3115956 - RNA, 20 nt, Human
gaauauugcugauggugcaa

SEQ ID NO: 3115957 - RNA, 15 nt, Human
gaauauauaaccagu

SEQ ID NO: 3115958 - RNA, 11 nt, Human
gaauauugcug

SEQ ID NO: 3115959 - RNA, 13 nt, Human
gaauauugcugau

SEQ ID NO: 3115960 - RNA, 12 nt, Human
gaauauugcuga

SEQ ID NO: 3115961 - RNA, 15 nt, Human
gacgcugugcugccc

SEQ ID NO: 3115962 - RNA, 18 nt, Human
gacgcugugcugcccugc

SEQ ID NO: 3115963 - RNA, 17 nt, Human
gacgcugugcugcccug

SEQ ID NO: 3115964 - RNA, 16 nt, Human
gacgcugugcugcccu

SEQ ID NO: 3115965 - RNA, 23 nt, Human
gacgcuacccgggaagggggcug

SEQ ID NO: 3115966 - RNA, 22 nt, Human
gacgcuacccgggaagggggcu

SEQ ID NO: 3115967 - RNA, 21 nt, Human
gacgccaucccagccccaaug

SEQ ID NO: 3115968 - RNA, 19 nt, Human
gacgccaucccagccccaa

SEQ ID NO: 3115969 - RNA, 13 nt, Human
gacgccaucccag

SEQ ID NO: 3115970 - RNA, 12 nt, Human
gacgccauccca

SEQ ID NO: 3115971 - RNA, 16 nt, Human
gaccucugcagcaaua

SEQ ID NO: 3115972 - RNA, 18 nt, Human
gaccucugcagcaauaaa

SEQ ID NO: 3115973 - RNA, 22 nt, Human
gaccucugcagcaauaaagcag

SEQ ID NO: 3115974 - RNA, 13 nt, Human
gaccucaggccug

SEQ ID NO: 3115975 - RNA, 14 nt, Human
gaccucaggccugg

SEQ ID NO: 3115976 - RNA, 19 nt, Human
gaccucaggugauccaccc

SEQ ID NO: 3115977 - RNA, 21 nt, Human
gaccucaggugagaagcagag

SEQ ID NO: 3115978 - RNA, 20 nt, Human
gaccucaggugauccaccca

SEQ ID NO: 3115979 - RNA, 21 nt, Human
gaccucaggugauccacccac

SEQ ID NO: 3115980 - RNA, 19 nt, Human
gaccucaggccugggggcu

SEQ ID NO: 3115981 - RNA, 19 nt, Human
gaccucaggugagaagcag

SEQ ID NO: 3115982 - RNA, 18 nt, Human
gaccucaggugagaagca

SEQ ID NO: 3115983 - RNA, 16 nt, Human
gacagcuccuucuguc

SEQ ID NO: 3115984 - RNA, 16 nt, Human
gacagcccgggcucug

SEQ ID NO: 3115985 - RNA, 17 nt, Human
gacagcuccuucugucc

SEQ ID NO: 3115986 - RNA, 18 nt, Human
gacagcuccuucuguccu

SEQ ID NO: 3115987 - RNA, 14 nt, Human
gacagcccgggcuc

SEQ ID NO: 3115988 - RNA, 20 nt, Human
gacagucccugccaauggac

SEQ ID NO: 3115989 - RNA, 16 nt, Human
gacagucccugccaau

SEQ ID NO: 3115990 - RNA, 15 nt, Human
gacagucccugccaa

SEQ ID NO: 3115991 - RNA, 14 nt, Human
gacagucccugcca

SEQ ID NO: 3115992 - RNA, 12 nt, Human
gacagucccugc

SEQ ID NO: 3115993 - RNA, 11 nt, Human
gacagcucuua

SEQ ID NO: 3115994 - RNA, 10 nt, Human
gacagcucuu

SEQ ID NO: 3115995 - RNA, 19 nt, Human
gacagcuccuucuguccua

SEQ ID NO: 3115996 - RNA, 17 nt, Human
gacauugcggacagcca

SEQ ID NO: 3115997 - RNA, 23 nt, Human
gacauugcggacagccacggcca

SEQ ID NO: 3115998 - RNA, 14 nt, Human
gagggccugcaagg

SEQ ID NO: 3115999 - RNA, 21 nt, Human
gagggccugcaagggagugag

SEQ ID NO: 3116000 - RNA, 17 nt, Human
gagggccugcaagggag

SEQ ID NO: 3116001 - RNA, 21 nt, Human
gaggcauuuguuugaacugau

SEQ ID NO: 3116002 - RNA, 21 nt, Human
gaggcaugugaugagaggaaa

SEQ ID NO: 3116003 - RNA, 20 nt, Human
gaggcaugugaugagaggaa

SEQ ID NO: 3116004 - RNA, 22 nt, Human
gaggcaugugaugagaggaaau

SEQ ID NO: 3116005 - RNA, 19 nt, Human
gaggcauuuguuugaacug

SEQ ID NO: 3116006 - RNA, 20 nt, Human
gaggacuuuucuuuguggcu

SEQ ID NO: 3116007 - RNA, 23 nt, Human
gaggacuuuucuuuguggcuucc

SEQ ID NO: 3116008 - RNA, 16 nt, Human
gaggacuuuucuuugu

SEQ ID NO: 3116009 - RNA, 18 nt, Human
gaggcagggucucacucu

SEQ ID NO: 3116010 - RNA, 19 nt, Human
gaggcagggucucacucug

SEQ ID NO: 3116011 - RNA, 20 nt, Human
gaggcagggucucacucugu

SEQ ID NO: 3116012 - RNA, 12 nt, Human
gaggagagagga

SEQ ID NO: 3116013 - RNA, 15 nt, Human
gaggagagaggaccc

SEQ ID NO: 3116014 - RNA, 14 nt, Human
gaggagagaggacc

SEQ ID NO: 3116015 - RNA, 21 nt, Human
gagcagggcucagcggggaca

SEQ ID NO: 3116016 - RNA, 14 nt, Human
gagcaucaggccag

SEQ ID NO: 3116017 - RNA, 13 nt, Human
gagcaucaggcca

SEQ ID NO: 3116018 - RNA, 16 nt, Human
gagcaucaggccaggc

SEQ ID NO: 3116019 - RNA, 15 nt, Human
gagcaucaggccagg

SEQ ID NO: 3116020 - RNA, 13 nt, Human
gagcaugccugga

SEQ ID NO: 3116021 - RNA, 13 nt, Human
gagccccgaggcc

SEQ ID NO: 3116022 - RNA, 14 nt, Human
gagccccgaggccu

SEQ ID NO: 3116023 - RNA, 17 nt, Human
gagccccgaggccuucu

SEQ ID NO: 3116024 - RNA, 13 nt, Human
gagcccugguggc

SEQ ID NO: 3116025 - RNA, 14 nt, Human
gagcccugguggca

SEQ ID NO: 3116026 - RNA, 14 nt, Human
gagauuggaaggaa

SEQ ID NO: 3116027 - RNA, 21 nt, Human
gagauugcaccacugcacucc

SEQ ID NO: 3116028 - RNA, 12 nt, Human
gagaggaaauca

SEQ ID NO: 3116029 - RNA, 20 nt, Human
gagagcugggugucaagagg

SEQ ID NO: 3116030 - RNA, 15 nt, Human
gagaggacccccuga

SEQ ID NO: 3116031 - RNA, 13 nt, Human
gagagcugggugu

SEQ ID NO: 3116032 - RNA, 21 nt, Human
gagagcuagcagcagggaggg

SEQ ID NO: 3116033 - RNA, 15 nt, Human
gagagcuagcagcag

SEQ ID NO: 3116034 - RNA, 20 nt, Human
gagagccuuccagggguggg

SEQ ID NO: 3116035 - RNA, 18 nt, Human
gagagccuuccaggggug

SEQ ID NO: 3116036 - RNA, 16 nt, Human
gagagccuuccagggg

SEQ ID NO: 3116037 - RNA, 15 nt, Human
gagagccuuccaggg

SEQ ID NO: 3116038 - RNA, 14 nt, Human
gagagccuuccagg

SEQ ID NO: 3116039 - RNA, 13 nt, Human
gagacuccugcag

SEQ ID NO: 3116040 - RNA, 15 nt, Human
gagaaugaaagggcc

SEQ ID NO: 3116041 - RNA, 23 nt, Human
gagaaugaaagggcccagagagg

SEQ ID NO: 3116042 - RNA, 21 nt, Human
gagacccugucucaaaaaaag

SEQ ID NO: 3116043 - RNA, 18 nt, Human
gagacgggggcagagagg

SEQ ID NO: 3116044 - RNA, 16 nt, Human
gagacggagucccacc

SEQ ID NO: 3116045 - RNA, 19 nt, Human
gagacggagucccaccuug

SEQ ID NO: 3116046 - RNA, 14 nt, Human
gagacggaguccca

SEQ ID NO: 3116047 - RNA, 14 nt, Human
gacuuuuccaaccc

SEQ ID NO: 3116048 - RNA, 19 nt, Human
gacuuuuccaacccucauc

SEQ ID NO: 3116049 - RNA, 18 nt, Human
gcaagugagagcugggug

SEQ ID NO: 3116050 - RNA, 17 nt, Human
gcacucagaagacacug

SEQ ID NO: 3116051 - RNA, 20 nt, Human
gcacucagaagacacugaug

SEQ ID NO: 3116052 - RNA, 14 nt, Human
gcacuccagccugg

SEQ ID NO: 3116053 - RNA, 14 nt, Human
gcacuccccugcug

SEQ ID NO: 3116054 - RNA, 13 nt, Human
gcacuccccugcu

SEQ ID NO: 3116055 - RNA, 19 nt, Human
gcacuuuguucuggcucuu

SEQ ID NO: 3116056 - RNA, 18 nt, Human
gcacuuuguucuggcucu

SEQ ID NO: 3116057 - RNA, 15 nt, Human
gcacuccccugcugg

SEQ ID NO: 3116058 - RNA, 12 nt, Human
gcacuccccugc

SEQ ID NO: 3116059 - RNA, 22 nt, Human
gcacuuuguucuggcucuucca

SEQ ID NO: 3116060 - RNA, 23 nt, Human
gcagcauauucaggaagcucagg

SEQ ID NO: 3116061 - RNA, 19 nt, Human
gcagcauauucaggaagcu

SEQ ID NO: 3116062 - RNA, 18 nt, Human
gcagcauauucaggaagc

SEQ ID NO: 3116063 - RNA, 17 nt, Human
gcagcauauucaggaag

SEQ ID NO: 3116064 - RNA, 14 nt, Human
gcagagggcacaga

SEQ ID NO: 3116065 - RNA, 21 nt, Human
gcagaggaaagcaaaggagau

SEQ ID NO: 3116066 - RNA, 20 nt, Human
gcagaggaaagcaaaggaga

SEQ ID NO: 3116067 - RNA, 18 nt, Human
gcagaggaaagcaaagga

SEQ ID NO: 3116068 - RNA, 14 nt, Human
gcagaggaaagcaa

SEQ ID NO: 3116069 - RNA, 13 nt, Human
gcagaggaaagca

SEQ ID NO: 3116070 - RNA, 16 nt, Human
gcagccaggccacaag

SEQ ID NO: 3116071 - RNA, 18 nt, Human
gcauccaguaucuugaag

SEQ ID NO: 3116072 - RNA, 17 nt, Human
gcauccaguaucuugaa

SEQ ID NO: 3116073 - RNA, 14 nt, Human
gcauccaguaucuu

SEQ ID NO: 3116074 - RNA, 19 nt, Human
gcaugugaugagaggaaau

SEQ ID NO: 3116075 - RNA, 18 nt, Human
gcaugugaugagaggaaa

SEQ ID NO: 3116076 - RNA, 21 nt, Human
gcaugugaugagaggaaauca

SEQ ID NO: 3116077 - RNA, 15 nt, Human
gcauugugggaaggg

SEQ ID NO: 3116078 - RNA, 13 nt, Human
gcauugugggaag

SEQ ID NO: 3116079 - RNA, 15 nt, Human
gcauuuacuuugugu

SEQ ID NO: 3116080 - RNA, 18 nt, Human
gcauuuaaaagauacagu

SEQ ID NO: 3116081 - RNA, 22 nt, Human
gcauuuaaaagauacaguuacu

SEQ ID NO: 3116082 - RNA, 18 nt, Human
gcauugugggaaggggag

SEQ ID NO: 3116083 - RNA, 16 nt, Human
gcauugugggaagggg

SEQ ID NO: 3116084 - RNA, 16 nt, Human
gcauuuaaaagauaca

SEQ ID NO: 3116085 - RNA, 17 nt, Human
gcauuuaaaagauacag

SEQ ID NO: 3116086 - RNA, 21 nt, Human
gcauggcugccaaugggagcu

SEQ ID NO: 3116087 - RNA, 13 nt, Human
gcauccuggcacc

SEQ ID NO: 3116088 - RNA, 14 nt, Human
gcauacguacacau

SEQ ID NO: 3116089 - RNA, 15 nt, Human
gcauacguacacauu

SEQ ID NO: 3116090 - RNA, 16 nt, Human
gcauacguacacauuu

SEQ ID NO: 3116091 - RNA, 17 nt, Human
gcauacguacacauuuu

SEQ ID NO: 3116092 - RNA, 16 nt, Human
gauuuaacagaaaugu

SEQ ID NO: 3116093 - RNA, 17 nt, Human
gauuuaacagaaaugua

SEQ ID NO: 3116094 - RNA, 18 nt, Human
gauuuaacagaaauguac

SEQ ID NO: 3116095 - RNA, 12 nt, Human
gauucuucugcu

SEQ ID NO: 3116096 - RNA, 13 nt, Human
gauucuucugcuu

SEQ ID NO: 3116097 - RNA, 15 nt, Human
gauucuucugcuuca

SEQ ID NO: 3116098 - RNA, 11 nt, Human
gauuucacucu

SEQ ID NO: 3116099 - RNA, 18 nt, Human
gauuuuuuuuuccuucag

SEQ ID NO: 3116100 - RNA, 17 nt, Human
gauuuuuuuuuccuuca

SEQ ID NO: 3116101 - RNA, 12 nt, Human
gauuucacucuc

SEQ ID NO: 3116102 - RNA, 16 nt, Human
gauuuuuuuuuccuuc

SEQ ID NO: 3116103 - RNA, 17 nt, Human
gcaaaagaugcuucuca

SEQ ID NO: 3116104 - RNA, 22 nt, Human
gcaaaagaugcuucucacugcc

SEQ ID NO: 3116105 - RNA, 14 nt, Human
gcaaaaaggcagga

SEQ ID NO: 3116106 - RNA, 21 nt, Human
gauuuuuuuuuccuucagugc

SEQ ID NO: 3116107 - RNA, 20 nt, Human
gcaaccuccgccucuugggu

SEQ ID NO: 3116108 - RNA, 14 nt, Human
gcaacccccagccu

SEQ ID NO: 3116109 - RNA, 15 nt, Human
gcaacccccagccug

SEQ ID NO: 3116110 - RNA, 16 nt, Human
gcaacccccagccugc

SEQ ID NO: 3116111 - RNA, 19 nt, Human
gcaaccuccgccucuuggg

SEQ ID NO: 3116112 - RNA, 13 nt, Human
gcaaccaccacca

SEQ ID NO: 3116113 - RNA, 18 nt, Human
gcaaccaccaccaaccac

SEQ ID NO: 3116114 - RNA, 16 nt, Human
gcaaccaccaccaacc

SEQ ID NO: 3116115 - RNA, 16 nt, Human
gcaacaggcugggcuu

SEQ ID NO: 3116116 - RNA, 19 nt, Human
gcaacaggcugggcuucag

SEQ ID NO: 3116117 - RNA, 14 nt, Human
gcaacaggcugggc

SEQ ID NO: 3116118 - RNA, 15 nt, Human
gcaacaggcugggcu

SEQ ID NO: 3116119 - RNA, 13 nt, Human
gcaacaggcuggg

SEQ ID NO: 3116120 - RNA, 16 nt, Human
gcaagugagagcuggg

SEQ ID NO: 3116121 - RNA, 15 nt, Human
gcaagugagagcugg

SEQ ID NO: 3116122 - RNA, 16 nt, Human
gauacaguuacucaga

SEQ ID NO: 3116123 - RNA, 19 nt, Human
gauacaguuacucagaauu

SEQ ID NO: 3116124 - RNA, 23 nt, Human
gauacaguuacucagaauucucu

SEQ ID NO: 3116125 - RNA, 23 nt, Human
gauacaggaaaagcugcugacag

SEQ ID NO: 3116126 - RNA, 17 nt, Human
gauacuguaucaugaca

SEQ ID NO: 3116127 - RNA, 21 nt, Human
gauacuguaucaugacaaaga

SEQ ID NO: 3116128 - RNA, 12 nt, Human
gauccaagcugg

SEQ ID NO: 3116129 - RNA, 16 nt, Human
gauccaagcugguccc

SEQ ID NO: 3116130 - RNA, 17 nt, Human
gauccaagcugguccca

SEQ ID NO: 3116131 - RNA, 19 nt, Human
gauccaagcuggucccacu

SEQ ID NO: 3116132 - RNA, 22 nt, Human
gauccacccaccucagccuccc

SEQ ID NO: 3116133 - RNA, 20 nt, Human
gauccacccaccucagccuc

SEQ ID NO: 3116134 - RNA, 21 nt, Human
gauccacccaccucagccucc

SEQ ID NO: 3116135 - RNA, 21 nt, Human
gauccaagcuggucccacuca

SEQ ID NO: 3116136 - RNA, 18 nt, Human
gauccacccaccucagcc

SEQ ID NO: 3116137 - RNA, 19 nt, Human
gauccacccaccucagccu

SEQ ID NO: 3116138 - RNA, 23 nt, Human
gaucaaaagguuaauaaaguaau

SEQ ID NO: 3116139 - RNA, 17 nt, Human
gauauuuuuuucuuuuc

SEQ ID NO: 3116140 - RNA, 20 nt, Human
gaucaaaagguuaauaaagu

SEQ ID NO: 3116141 - RNA, 15 nt, Human
gaucucuaacuucac

SEQ ID NO: 3116142 - RNA, 19 nt, Human
gaucucuugagccugggag

SEQ ID NO: 3116143 - RNA, 18 nt, Human
gaucucuugagccuggga

SEQ ID NO: 3116144 - RNA, 13 nt, Human
gaugauccuaggc

SEQ ID NO: 3116145 - RNA, 22 nt, Human
gaugauuggaggggggaggugg

SEQ ID NO: 3116146 - RNA, 23 nt, Human
gaugcuucucacugccaugccag

SEQ ID NO: 3116147 - RNA, 21 nt, Human
gaugcuucuucagagacuccu

SEQ ID NO: 3116148 - RNA, 20 nt, Human
gaugcuucuucagagacucc

SEQ ID NO: 3116149 - RNA, 17 nt, Human
gaugcuucuucagagac

SEQ ID NO: 3116150 - RNA, 16 nt, Human
ggccugcaagggagug

SEQ ID NO: 3116151 - RNA, 12 nt, Human
ggccuggccaga

SEQ ID NO: 3116152 - RNA, 15 nt, Human
ggccuggccagaugc

SEQ ID NO: 3116153 - RNA, 20 nt, Human
ggcuaagugauccucccacc

SEQ ID NO: 3116154 - RNA, 16 nt, Human
ggcuaauguacugcau

SEQ ID NO: 3116155 - RNA, 13 nt, Human
ggcuaccuuugua

SEQ ID NO: 3116156 - RNA, 14 nt, Human
ggcuaccuuuguau

SEQ ID NO: 3116157 - RNA, 23 nt, Human
ggccucccaacucaccccagccc

SEQ ID NO: 3116158 - RNA, 22 nt, Human
ggccucccaacucaccccagcc

SEQ ID NO: 3116159 - RNA, 20 nt, Human
ggccucccaacucaccccag

SEQ ID NO: 3116160 - RNA, 13 nt, Human
ggccucagugcca

SEQ ID NO: 3116161 - RNA, 17 nt, Human
ggccucccaacucaccc

SEQ ID NO: 3116162 - RNA, 19 nt, Human
ggccucccaacucacccca

SEQ ID NO: 3116163 - RNA, 18 nt, Human
ggccucccaacucacccc

SEQ ID NO: 3116164 - RNA, 15 nt, Human
ggccagaugcaccag

SEQ ID NO: 3116165 - RNA, 16 nt, Human
ggccagaugcaccagc

SEQ ID NO: 3116166 - RNA, 13 nt, Human
ggcucacugcagc

SEQ ID NO: 3116167 - RNA, 14 nt, Human
ggcucacugcagcc

SEQ ID NO: 3116168 - RNA, 15 nt, Human
ggcucacugcagccu

SEQ ID NO: 3116169 - RNA, 13 nt, Human
ggcucccuuccca

SEQ ID NO: 3116170 - RNA, 14 nt, Human
ggcucuuccaggcu

SEQ ID NO: 3116171 - RNA, 15 nt, Human
ggcucuuccaggcug

SEQ ID NO: 3116172 - RNA, 18 nt, Human
ggcucuuccaggcuggga

SEQ ID NO: 3116173 - RNA, 17 nt, Human
ggcucuuccaggcuggg

SEQ ID NO: 3116174 - RNA, 22 nt, Human
aaaaaacugcugacuguuuucu

SEQ ID NO: 3116175 - RNA, 14 nt, Human
ggcuggguuggagg

SEQ ID NO: 3116176 - RNA, 22 nt, Human
ggcuggguucuacccaggugcu

SEQ ID NO: 3116177 - RNA, 21 nt, Human
aaaaaggaugcacagaguugu

SEQ ID NO: 3116178 - RNA, 12 nt, Human
aaaaaggcagga

SEQ ID NO: 3116179 - RNA, 14 nt, Human
aaaaaggaggaaga

SEQ ID NO: 3116180 - RNA, 13 nt, Human
ggcuggccuggcc

SEQ ID NO: 3116181 - RNA, 15 nt, Human
ggcuggccuggcccc

SEQ ID NO: 3116182 - RNA, 14 nt, Human
ggcuggccuggccc

SEQ ID NO: 3116183 - RNA, 15 nt, Human
ggcaaaaaggcagga

SEQ ID NO: 3116184 - RNA, 18 nt, Human
ggcacaccgggcacucag

SEQ ID NO: 3116185 - RNA, 18 nt, Human
ggcacaucagcacgauuu

SEQ ID NO: 3116186 - RNA, 16 nt, Human
ggcacugcuuccagug

SEQ ID NO: 3116187 - RNA, 16 nt, Human
ggcagccccauucugc

SEQ ID NO: 3116188 - RNA, 20 nt, Human
ggcagccccauucugccugc

SEQ ID NO: 3116189 - RNA, 21 nt, Human
ggcagccccauucugccugcc

SEQ ID NO: 3116190 - RNA, 22 nt, Human
ggcagccccauucugccugccc

SEQ ID NO: 3116191 - RNA, 13 nt, Human
ggcagccaggcca

SEQ ID NO: 3116192 - RNA, 20 nt, Human
ggcacugcuuccagugaggc

SEQ ID NO: 3116193 - RNA, 18 nt, Human
ggcaggaggaucacuuga

SEQ ID NO: 3116194 - RNA, 14 nt, Human
ggcauuugcugaau

SEQ ID NO: 3116195 - RNA, 19 nt, Human
ggccaaaggaagcacaugc

SEQ ID NO: 3116196 - RNA, 16 nt, Human
ggccaaaggaagcaca

SEQ ID NO: 3116197 - RNA, 14 nt, Human
ggccaaaggaagca

SEQ ID NO: 3116198 - RNA, 17 nt, Human
ggcauuuguuugaacug

SEQ ID NO: 3116199 - RNA, 13 nt, Human
ggccaaaggaagc

SEQ ID NO: 3116200 - RNA, 17 nt, Human
ggccagagggagugaca

SEQ ID NO: 3116201 - RNA, 19 nt, Human
ggccagagggagugacaga

SEQ ID NO: 3116202 - RNA, 18 nt, Human
ggccagagacacaagccu

SEQ ID NO: 3116203 - RNA, 17 nt, Human
ggccagagacacaagcc

SEQ ID NO: 3116204 - RNA, 22 nt, Human
ggagugggcccaaugcacuuug

SEQ ID NO: 3116205 - RNA, 12 nt, Human
ggagugggccca

SEQ ID NO: 3116206 - RNA, 16 nt, Human
ggaguggccacagaaa

SEQ ID NO: 3116207 - RNA, 15 nt, Human
ggaguggccacagaa

SEQ ID NO: 3116208 - RNA, 23 nt, Human
ggauccugagccagauuucacuc

SEQ ID NO: 3116209 - RNA, 20 nt, Human
ggauccugagccagauuuca

SEQ ID NO: 3116210 - RNA, 19 nt, Human
ggauccugagccagauuuc

SEQ ID NO: 3116211 - RNA, 18 nt, Human
ggauccugagccagauuu

SEQ ID NO: 3116212 - RNA, 16 nt, Human
ggauccugagccagau

SEQ ID NO: 3116213 - RNA, 15 nt, Human
ggauccugagccaga

SEQ ID NO: 3116214 - RNA, 16 nt, Human
ggaguucaucuugaau

SEQ ID NO: 3116215 - RNA, 12 nt, Human
ggauuuaacaga

SEQ ID NO: 3116216 - RNA, 20 nt, Human
ggauuguccccgacccuugc

SEQ ID NO: 3116217 - RNA, 16 nt, Human
ggauuguccccgaccc

SEQ ID NO: 3116218 - RNA, 22 nt, Human
ggauuuaacagaaauguacagc

SEQ ID NO: 3116219 - RNA, 16 nt, Human
ggauuuaacagaaaug

SEQ ID NO: 3116220 - RNA, 17 nt, Human
ggauuuaacagaaaugu

SEQ ID NO: 3116221 - RNA, 14 nt, Human
ggaugaaaaaauaa

SEQ ID NO: 3116222 - RNA, 13 nt, Human
ggauuguccccga

SEQ ID NO: 3116223 - RNA, 14 nt, Human
ggaggggggaggug

SEQ ID NO: 3116224 - RNA, 13 nt, Human
ggaggggggaggu

SEQ ID NO: 3116225 - RNA, 23 nt, Human
ggaggugggauccuccaggugca

SEQ ID NO: 3116226 - RNA, 22 nt, Human
ggaggugggauccuccaggugc

SEQ ID NO: 3116227 - RNA, 22 nt, Human
ggagguaaggaauaccuguccc

SEQ ID NO: 3116228 - RNA, 21 nt, Human
ggagggugacgggggugaacu

SEQ ID NO: 3116229 - RNA, 13 nt, Human
ggugugggggaag

SEQ ID NO: 3116230 - RNA, 11 nt, Human
gguguggggga

SEQ ID NO: 3116231 - RNA, 13 nt, Human
ggugggggccucg

SEQ ID NO: 3116232 - RNA, 23 nt, Human
gguguggagaagcggcuggcagc

SEQ ID NO: 3116233 - RNA, 14 nt, Human
gguguggagaagcg

SEQ ID NO: 3116234 - RNA, 12 nt, Human
gguguggagaag

SEQ ID NO: 3116235 - RNA, 22 nt, Human
gguucccuuugacgccauccca

SEQ ID NO: 3116236 - RNA, 23 nt, Human
gguucccuuugacgccaucccag

SEQ ID NO: 3116237 - RNA, 22 nt, Human
gguucccuuuuuuggcugcuga

SEQ ID NO: 3116238 - RNA, 19 nt, Human
gguguuuccuggcacugcu

SEQ ID NO: 3116239 - RNA, 17 nt, Human
gguguuuccuggcacug

SEQ ID NO: 3116240 - RNA, 17 nt, Human
gguucccauuugcuccu

SEQ ID NO: 3116241 - RNA, 14 nt, Human
aaaguguauuuuuu

SEQ ID NO: 3116242 - RNA, 21 nt, Human
aaaguguauuuuuuuacuaau

SEQ ID NO: 3116243 - RNA, 21 nt, Human
aaaguaucccuacuguaauuu

SEQ ID NO: 3116244 - RNA, 20 nt, Human
aaaguagaagucuuagaugu

SEQ ID NO: 3116245 - RNA, 22 nt, Human
aaaguagaagucuuagauguau

SEQ ID NO: 3116246 - RNA, 18 nt, Human
aaaguacacuguuucaaa

SEQ ID NO: 3116247 - RNA, 19 nt, Human
aaaguacacuguuucaaac

SEQ ID NO: 3116248 - RNA, 15 nt, Human
gguuucagaaaugug

SEQ ID NO: 3116249 - RNA, 16 nt, Human
gguuucuaaagcugcc

SEQ ID NO: 3116250 - RNA, 22 nt, Human
gguuucuaaagcugccagccga

SEQ ID NO: 3116251 - RNA, 20 nt, Human
gguuuguaaauuaacuuuua

SEQ ID NO: 3116252 - RNA, 20 nt, Human
gguggcaccagcagccugga

SEQ ID NO: 3116253 - RNA, 14 nt, Human
gguggcaccagcag

SEQ ID NO: 3116254 - RNA, 21 nt, Human
ggugcugccauccagguucag

SEQ ID NO: 3116255 - RNA, 14 nt, Human
aaagcuaggccugg

SEQ ID NO: 3116256 - RNA, 16 nt, Human
aaagcuaggccuggcc

SEQ ID NO: 3116257 - RNA, 13 nt, Human
aaagcagugcaug

SEQ ID NO: 3116258 - RNA, 13 nt, Human
aaagcugccagcc

SEQ ID NO: 3116259 - RNA, 12 nt, Human
aaagcugccagc

SEQ ID NO: 3116260 - RNA, 19 nt, Human
gguggggaccucaggccug

SEQ ID NO: 3116261 - RNA, 16 nt, Human
ggugggacacccugug

SEQ ID NO: 3116262 - RNA, 13 nt, Human
ggugggacacccu

SEQ ID NO: 3116263 - RNA, 17 nt, Human
ggugggacacccuguga

SEQ ID NO: 3116264 - RNA, 18 nt, Human
gguggcuggguuggaggg

SEQ ID NO: 3116265 - RNA, 12 nt, Human
gguggcuggguu

SEQ ID NO: 3116266 - RNA, 20 nt, Human
aaagggcccagagagggugg

SEQ ID NO: 3116267 - RNA, 23 nt, Human
guaauccuagcacuuugggaggc

SEQ ID NO: 3116268 - RNA, 15 nt, Human
guaauuugugauaca

SEQ ID NO: 3116269 - RNA, 17 nt, Human
guaauuugugauacaau

SEQ ID NO: 3116270 - RNA, 20 nt, Human
guaauuugugauacaaugcu

SEQ ID NO: 3116271 - RNA, 21 nt, Human
guaauuuuuuuaucgucacug

SEQ ID NO: 3116272 - RNA, 19 nt, Human
guaacaggaaaauuuuaaa

SEQ ID NO: 3116273 - RNA, 16 nt, Human
guaacaagccacccca

SEQ ID NO: 3116274 - RNA, 14 nt, Human
aaauaaugugaaac

SEQ ID NO: 3116275 - RNA, 22 nt, Human
aaauaaugugaaacuggauuaa

SEQ ID NO: 3116276 - RNA, 22 nt, Human
aaaguguauuuuuuuacuaaua

SEQ ID NO: 3116277 - RNA, 12 nt, Human
aaauaucugaaa

SEQ ID NO: 3116278 - RNA, 14 nt, Human
aaauaucugaaaau

SEQ ID NO: 3116279 - RNA, 17 nt, Human
aaauaucugaaaaugua

SEQ ID NO: 3116280 - RNA, 18 nt, Human
aaauaucugaaaauguau

SEQ ID NO: 3116281 - RNA, 19 nt, Human
aaauaucugaaaauguaug

SEQ ID NO: 3116282 - RNA, 21 nt, Human
aaauaucugaaaauguaugug

SEQ ID NO: 3116283 - RNA, 22 nt, Human
aaauaucugaaaauguaugugu

SEQ ID NO: 3116284 - RNA, 23 nt, Human
aaauaucugaaaauguaugugua

SEQ ID NO: 3116285 - RNA, 21 nt, Human
aaaucagccugcuccagcugu

SEQ ID NO: 3116286 - RNA, 19 nt, Human
aaaucagccugcuccagcu

SEQ ID NO: 3116287 - RNA, 23 nt, Human
aaaucagccugcuccagcuguuc

SEQ ID NO: 3116288 - RNA, 15 nt, Human
aaauauaggaacuua

SEQ ID NO: 3116289 - RNA, 16 nt, Human
guacacacacauacac

SEQ ID NO: 3116290 - RNA, 19 nt, Human
aaauaccagccaguaaaug

SEQ ID NO: 3116291 - RNA, 20 nt, Human
aaauaccagccaguaaaugg

SEQ ID NO: 3116292 - RNA, 21 nt, Human
aaauaccagccaguaaauggg

SEQ ID NO: 3116293 - RNA, 21 nt, Human
aaacguggcugcuucaaggau

SEQ ID NO: 3116294 - RNA, 20 nt, Human
aaacguggcugcuucaagga

SEQ ID NO: 3116295 - RNA, 19 nt, Human
aaacuguuaauaguucagg

SEQ ID NO: 3116296 - RNA, 14 nt, Human
ggguggccucccaa

SEQ ID NO: 3116297 - RNA, 18 nt, Human
gggugggacacccuguga

SEQ ID NO: 3116298 - RNA, 15 nt, Human
gggugggacacccug

SEQ ID NO: 3116299 - RNA, 19 nt, Human
aaacuuaaucuaaauggaa

SEQ ID NO: 3116300 - RNA, 23 nt, Human
ggguuuugccauguuggccaggc

SEQ ID NO: 3116301 - RNA, 20 nt, Human
ggguuuugccauguuggcca

SEQ ID NO: 3116302 - RNA, 12 nt, Human
ggguggugaccu

SEQ ID NO: 3116303 - RNA, 18 nt, Human
gguaacuagggaagauaa

SEQ ID NO: 3116304 - RNA, 19 nt, Human
gguaucaggugcugccauc

SEQ ID NO: 3116305 - RNA, 18 nt, Human
aaacuuuacuauggcccu

SEQ ID NO: 3116306 - RNA, 22 nt, Human
aaacuugauguguuaucucuua

SEQ ID NO: 3116307 - RNA, 20 nt, Human
gguaggguaagugagagagg

SEQ ID NO: 3116308 - RNA, 14 nt, Human
gguaucaggugcug

SEQ ID NO: 3116309 - RNA, 20 nt, Human
gguaaggaauaccugucccc

SEQ ID NO: 3116310 - RNA, 13 nt, Human
ggggaccagagcu

SEQ ID NO: 3116311 - RNA, 12 nt, Human
ggggaccagagc

SEQ ID NO: 3116312 - RNA, 18 nt, Human
aaaauguauguguaagua

SEQ ID NO: 3116313 - RNA, 14 nt, Human
ggggaccagagcug

SEQ ID NO: 3116314 - RNA, 19 nt, Human
ggggccaguuggucccccu

SEQ ID NO: 3116315 - RNA, 17 nt, Human
gggggaucacagccucu

SEQ ID NO: 3116316 - RNA, 11 nt, Human
gggggcuggga

SEQ ID NO: 3116317 - RNA, 21 nt, Human
ggggucacucuggcagcucag

SEQ ID NO: 3116318 - RNA, 13 nt, Human
ggggguggccucc

SEQ ID NO: 3116319 - RNA, 15 nt, Human
gggggcugggcagag

SEQ ID NO: 3116320 - RNA, 22 nt, Human
aaaccugugucucugagaguag

SEQ ID NO: 3116321 - RNA, 19 nt, Human
aaacauuuugucauauaag

SEQ ID NO: 3116322 - RNA, 20 nt, Human
gggucacucuggcagcucag

SEQ ID NO: 3116323 - RNA, 14 nt, Human
gggucacucuggca

SEQ ID NO: 3116324 - RNA, 14 nt, Human
gggccaggagccuc

SEQ ID NO: 3116325 - RNA, 13 nt, Human
gggccaggagccu

SEQ ID NO: 3116326 - RNA, 12 nt, Human
gggccaggagcc

SEQ ID NO: 3116327 - RNA, 21 nt, Human
gggcggugagaggggaacaga

SEQ ID NO: 3116328 - RNA, 13 nt, Human
gggccucagugcc

SEQ ID NO: 3116329 - RNA, 14 nt, Human
gggccucagugcca

SEQ ID NO: 3116330 - RNA, 18 nt, Human
gggccucuuaugggcugg

SEQ ID NO: 3116331 - RNA, 22 nt, Human
gggccucgguguggagaagcgg

SEQ ID NO: 3116332 - RNA, 19 nt, Human
gggcugcaccggcuggccu

SEQ ID NO: 3116333 - RNA, 17 nt, Human
gggcugcaccggcuggc

SEQ ID NO: 3116334 - RNA, 21 nt, Human
gggcucagcggggacagcucc

SEQ ID NO: 3116335 - RNA, 13 nt, Human
gggcuccagacac

SEQ ID NO: 3116336 - RNA, 10 nt, Human
gggcuccaga

SEQ ID NO: 3116337 - RNA, 22 nt, Human
gggcucagcaaaagaugcuucu

SEQ ID NO: 3116338 - RNA, 18 nt, Human
gggcucagcaaaagaugc

SEQ ID NO: 3116339 - RNA, 15 nt, Human
gggcuaguugggcuu

SEQ ID NO: 3116340 - RNA, 17 nt, Human
gggcucagcggggacag

SEQ ID NO: 3116341 - RNA, 19 nt, Human
gggcucagcggggacagcu

SEQ ID NO: 3116342 - RNA, 21 nt, Human
gggcugcaccggcuggccugg

SEQ ID NO: 3116343 - RNA, 20 nt, Human
gggcugcaccggcuggccug

SEQ ID NO: 3116344 - RNA, 15 nt, Human
gggcugggcagagga

SEQ ID NO: 3116345 - RNA, 12 nt, Human
gggcugggcaga

SEQ ID NO: 3116346 - RNA, 17 nt, Human
gggcuggguucuaccca

SEQ ID NO: 3116347 - RNA, 22 nt, Human
aaaaggagccaauuuaaagaaa

SEQ ID NO: 3116348 - RNA, 13 nt, Human
aaaaggaugcaca

SEQ ID NO: 3116349 - RNA, 14 nt, Human
aaaaggaugcacag

SEQ ID NO: 3116350 - RNA, 15 nt, Human
aaaaggaugcacaga

SEQ ID NO: 3116351 - RNA, 19 nt, Human
aaaaggaugcacagaguug

SEQ ID NO: 3116352 - RNA, 22 nt, Human
aaaaggaugcacagaguuguua

SEQ ID NO: 3116353 - RNA, 19 nt, Human
aaaagguaugcaaucaaau

SEQ ID NO: 3116354 - RNA, 11 nt, Human
aaaaggcagga

SEQ ID NO: 3116355 - RNA, 17 nt, Human
aaaagguuaauaaagua

SEQ ID NO: 3116356 - RNA, 16 nt, Human
aaaagguuaauaaagu

SEQ ID NO: 3116357 - RNA, 16 nt, Human
aaaauauuuuccugcc

SEQ ID NO: 3116358 - RNA, 16 nt, Human
gcggccuuuggcuuca

SEQ ID NO: 3116359 - RNA, 15 nt, Human
gcggcuggcagccca

SEQ ID NO: 3116360 - RNA, 21 nt, Human
gcgcagcauauucaggaagcu

SEQ ID NO: 3116361 - RNA, 20 nt, Human
gcgcagcauauucaggaagc

SEQ ID NO: 3116362 - RNA, 23 nt, Human
gcgauucuucugcuucagccucc

SEQ ID NO: 3116363 - RNA, 23 nt, Human
gccuugaccauucuccaccugcc

SEQ ID NO: 3116364 - RNA, 22 nt, Human
gcgauucuucugcuucagccuc

SEQ ID NO: 3116365 - RNA, 17 nt, Human
gcgauucuucugcuuca

SEQ ID NO: 3116366 - RNA, 23 nt, Human
gccuugaacuuugaccucugcag

SEQ ID NO: 3116367 - RNA, 22 nt, Human
gccuugaccauucuccaccugc

SEQ ID NO: 3116368 - RNA, 21 nt, Human
gccuugaccauucuccaccug

SEQ ID NO: 3116369 - RNA, 11 nt, Human
gccugggcaga

SEQ ID NO: 3116370 - RNA, 21 nt, Human
gccugggaucccucauccuca

SEQ ID NO: 3116371 - RNA, 23 nt, Human
gccugggaucccucauccucaua

SEQ ID NO: 3116372 - RNA, 19 nt, Human
gccugugccucugggacug

SEQ ID NO: 3116373 - RNA, 14 nt, Human
gccuugaacuuuga

SEQ ID NO: 3116374 - RNA, 15 nt, Human
gccuguucagcucca

SEQ ID NO: 3116375 - RNA, 14 nt, Human
gccuguucagcucc

SEQ ID NO: 3116376 - RNA, 16 nt, Human
gccuguucagcuccag

SEQ ID NO: 3116377 - RNA, 15 nt, Human
gccuucucugaagga

SEQ ID NO: 3116378 - RNA, 16 nt, Human
gccuucucugaaggac

SEQ ID NO: 3116379 - RNA, 20 nt, Human
gcucagggccuggcucaggu

SEQ ID NO: 3116380 - RNA, 17 nt, Human
gcucagggccuggcuca

SEQ ID NO: 3116381 - RNA, 13 nt, Human
gcucaggaguuug

SEQ ID NO: 3116382 - RNA, 19 nt, Human
gcucagggccuggcucagg

SEQ ID NO: 3116383 - RNA, 18 nt, Human
gcucagggccuggcucag

SEQ ID NO: 3116384 - RNA, 22 nt, Human
gcucagagagggugggaguggg

SEQ ID NO: 3116385 - RNA, 20 nt, Human
gcuaggaccccuccaugugg

SEQ ID NO: 3116386 - RNA, 14 nt, Human
gcuaguugggcuuc

SEQ ID NO: 3116387 - RNA, 16 nt, Human
gcuaguugggcuuccu

SEQ ID NO: 3116388 - RNA, 18 nt, Human
gcuaagugauccucccac

SEQ ID NO: 3116389 - RNA, 22 nt, Human
gcuaagugauccucccaccuca

SEQ ID NO: 3116390 - RNA, 18 nt, Human
gcccaggccccugccacc

SEQ ID NO: 3116391 - RNA, 20 nt, Human
gcccaggccccugccacccu

SEQ ID NO: 3116392 - RNA, 21 nt, Human
gcccaggccccugccacccug

SEQ ID NO: 3116393 - RNA, 11 nt, Human
gcccaggcccc

SEQ ID NO: 3116394 - RNA, 12 nt, Human
gcccaggccccu

SEQ ID NO: 3116395 - RNA, 16 nt, Human
gcccaggcaggucuug

SEQ ID NO: 3116396 - RNA, 11 nt, Human
gcccaggcagg

SEQ ID NO: 3116397 - RNA, 18 nt, Human
gcauuuacuuuguguuca

SEQ ID NO: 3116398 - RNA, 21 nt, Human
gcccacgcccccacuggugac

SEQ ID NO: 3116399 - RNA, 17 nt, Human
gcccacgcccccacugg

SEQ ID NO: 3116400 - RNA, 16 nt, Human
gcccacgcccccacug

SEQ ID NO: 3116401 - RNA, 15 nt, Human
gcccacgcccccacu

SEQ ID NO: 3116402 - RNA, 13 nt, Human
gcccacuucugcc

SEQ ID NO: 3116403 - RNA, 23 nt, Human
gcccaggaaaggcuccaggagca

SEQ ID NO: 3116404 - RNA, 22 nt, Human
gcccaggaaaggcuccaggagc

SEQ ID NO: 3116405 - RNA, 21 nt, Human
gcccaggaaaggcuccaggag

SEQ ID NO: 3116406 - RNA, 24 nt, Human
gcccaggaaaggcuccaggagcag

SEQ ID NO: 3116407 - RNA, 23 nt, Human
gcccacgcuggagugcagugagc

SEQ ID NO: 3116408 - RNA, 19 nt, Human
gcccacgcuggagugcagu

SEQ ID NO: 3116409 - RNA, 21 nt, Human
gcccacgcuggagugcaguga

SEQ ID NO: 3116410 - RNA, 20 nt, Human
gccccaaaacucuccucugc

SEQ ID NO: 3116411 - RNA, 19 nt, Human
gccccaaaacucuccucug

SEQ ID NO: 3116412 - RNA, 21 nt, Human
gccccaaaacucuccucugcu

SEQ ID NO: 3116413 - RNA, 12 nt, Human
gccccugcuggu

SEQ ID NO: 3116414 - RNA, 15 nt, Human
gccccugcugguuca

SEQ ID NO: 3116415 - RNA, 16 nt, Human
gccccugcugguucag

SEQ ID NO: 3116416 - RNA, 15 nt, Human
gccccuggcagcccc

SEQ ID NO: 3116417 - RNA, 12 nt, Human
gccccuggcagc

SEQ ID NO: 3116418 - RNA, 14 nt, Human
gccucugggacugg

SEQ ID NO: 3116419 - RNA, 16 nt, Human
gccucgaacuggcugc

SEQ ID NO: 3116420 - RNA, 13 nt, Human
gccucgaacuggc

SEQ ID NO: 3116421 - RNA, 22 nt, Human
gccuccuuugugaggaagccgc

SEQ ID NO: 3116422 - RNA, 12 nt, Human
gccuagcauacg

SEQ ID NO: 3116423 - RNA, 17 nt, Human
gccuacaggagugagca

SEQ ID NO: 3116424 - RNA, 17 nt, Human
gccccuggcagccccug

SEQ ID NO: 3116425 - RNA, 16 nt, Human
gccccuggcagccccu

SEQ ID NO: 3116426 - RNA, 14 nt, Human
gcccugcccaccug

SEQ ID NO: 3116427 - RNA, 23 nt, Human
gcccuuaccugccaggaagccag

SEQ ID NO: 3116428 - RNA, 22 nt, Human
gcccuuaccugccaggaagcca

SEQ ID NO: 3116429 - RNA, 21 nt, Human
gcccuuaccugccaggaagcc

SEQ ID NO: 3116430 - RNA, 17 nt, Human
gcccugugggcccccaa

SEQ ID NO: 3116431 - RNA, 16 nt, Human
gcccugugggccccca

SEQ ID NO: 3116432 - RNA, 16 nt, Human
gccuacaggagugagc

SEQ ID NO: 3116433 - RNA, 21 nt, Human
gcuggguucuacccaggugcu

SEQ ID NO: 3116434 - RNA, 20 nt, Human
gcuggguucuacccaggugc

SEQ ID NO: 3116435 - RNA, 17 nt, Human
gcuggguucuacccagg

SEQ ID NO: 3116436 - RNA, 18 nt, Human
gcuggguucuacccaggu

SEQ ID NO: 3116437 - RNA, 22 nt, Human
gcugggguggggaccucaggcc

SEQ ID NO: 3116438 - RNA, 19 nt, Human
gcugggguggggaccucag

SEQ ID NO: 3116439 - RNA, 17 nt, Human
gcugggguggggaccuc

SEQ ID NO: 3116440 - RNA, 17 nt, Human
gcuggcuguuggcuggg

SEQ ID NO: 3116441 - RNA, 20 nt, Human
gcuggcuguuggcugggggc

SEQ ID NO: 3116442 - RNA, 23 nt, Human
gcuggcuguuggcugggggccuc

SEQ ID NO: 3116443 - RNA, 14 nt, Human
gcugggcagguugg

SEQ ID NO: 3116444 - RNA, 14 nt, Human
gcuggcgugcagug

SEQ ID NO: 3116445 - RNA, 15 nt, Human
gcuggcgugcagugg

SEQ ID NO: 3116446 - RNA, 18 nt, Human
gcuggcgugcaguggugc

SEQ ID NO: 3116447 - RNA, 18 nt, Human
gcuggcuguuggcugggg

SEQ ID NO: 3116448 - RNA, 19 nt, Human
gcuggcuguuggcuggggg

SEQ ID NO: 3116449 - RNA, 17 nt, Human
gcuguaucccaugagcc

SEQ ID NO: 3116450 - RNA, 13 nt, Human
gcugugcucugga

SEQ ID NO: 3116451 - RNA, 14 nt, Human
gcugugcugcccug

SEQ ID NO: 3116452 - RNA, 15 nt, Human
gcugugcucuggaca

SEQ ID NO: 3116453 - RNA, 16 nt, Human
gcugugcucuggacag

SEQ ID NO: 3116454 - RNA, 14 nt, Human
gcuguuggcugggg

SEQ ID NO: 3116455 - RNA, 16 nt, Human
gcuguuggcugggggc

SEQ ID NO: 3116456 - RNA, 20 nt, Human
gcuguuggcugggggccuca

SEQ ID NO: 3116457 - RNA, 15 nt, Human
gcuguuggcuggggg

SEQ ID NO: 3116458 - RNA, 17 nt, Human
gcugugcugcccugccc

SEQ ID NO: 3116459 - RNA, 16 nt, Human
gcugugcugcccugcc

SEQ ID NO: 3116460 - RNA, 15 nt, Human
gcugugcugcccugc

SEQ ID NO: 3116461 - RNA, 23 nt, Human
gcugcaaaggguaucaggugcug

SEQ ID NO: 3116462 - RNA, 16 nt, Human
gcugcacccucaggca

SEQ ID NO: 3116463 - RNA, 13 nt, Human
gcugcaccggcug

SEQ ID NO: 3116464 - RNA, 19 nt, Human
gcugcacccucaggcaggu

SEQ ID NO: 3116465 - RNA, 18 nt, Human
gcugcacccucaggcagg

SEQ ID NO: 3116466 - RNA, 21 nt, Human
gcugccugggaucccucaucc

SEQ ID NO: 3116467 - RNA, 17 nt, Human
gcugccuguucagcucc

SEQ ID NO: 3116468 - RNA, 12 nt, Human
gcugccuguuca

SEQ ID NO: 3116469 - RNA, 13 nt, Human
gcugccuguucag

SEQ ID NO: 3116470 - RNA, 20 nt, Human
gcugccugggaucccucauc

SEQ ID NO: 3116471 - RNA, 16 nt, Human
gcugccucucccauca

SEQ ID NO: 3116472 - RNA, 19 nt, Human
gcugccccuggcagccccu

SEQ ID NO: 3116473 - RNA, 18 nt, Human
gcugccccuggcagcccc

SEQ ID NO: 3116474 - RNA, 20 nt, Human
gcugccccuggcagccccug

SEQ ID NO: 3116475 - RNA, 17 nt, Human
gcugccccuggcagccc

SEQ ID NO: 3116476 - RNA, 14 nt, Human
gcugaggugggagg

SEQ ID NO: 3116477 - RNA, 23 nt, Human
gcugagggugagugggugaauaa

SEQ ID NO: 3116478 - RNA, 18 nt, Human
gcugagggugagugggug

SEQ ID NO: 3116479 - RNA, 14 nt, Human
ggaaagaggcucug

SEQ ID NO: 3116480 - RNA, 20 nt, Human
ggaaagacuuuuccaacccu

SEQ ID NO: 3116481 - RNA, 17 nt, Human
ggaaagaguaggaagac

SEQ ID NO: 3116482 - RNA, 16 nt, Human
ggaaagaguaggaaga

SEQ ID NO: 3116483 - RNA, 19 nt, Human
ggaaagcaaaggagauugg

SEQ ID NO: 3116484 - RNA, 15 nt, Human
gcuuuuuaauauuga

SEQ ID NO: 3116485 - RNA, 12 nt, Human
gcuuuugugcau

SEQ ID NO: 3116486 - RNA, 13 nt, Human
gcuuuugugcauu

SEQ ID NO: 3116487 - RNA, 19 nt, Human
gcuuuugugcauuaucuag

SEQ ID NO: 3116488 - RNA, 20 nt, Human
ggaaacagcuaaugggacac

SEQ ID NO: 3116489 - RNA, 15 nt, Human
ggaaacccagcucug

SEQ ID NO: 3116490 - RNA, 19 nt, Human
gcuugggcuucauccuccu

SEQ ID NO: 3116491 - RNA, 22 nt, Human
gcuuggggaccagagcugccac

SEQ ID NO: 3116492 - RNA, 21 nt, Human
gcuuggggaccagagcugcca

SEQ ID NO: 3116493 - RNA, 20 nt, Human
gcuuggggaccagagcugcc

SEQ ID NO: 3116494 - RNA, 18 nt, Human
gcuuggggaccagagcug

SEQ ID NO: 3116495 - RNA, 17 nt, Human
gcuuggggaccagagcu

SEQ ID NO: 3116496 - RNA, 13 nt, Human
gcuuucuacccag

SEQ ID NO: 3116497 - RNA, 19 nt, Human
gcuuucuacccagcgagcc

SEQ ID NO: 3116498 - RNA, 22 nt, Human
gcuuucuacccagcgagcccug

SEQ ID NO: 3116499 - RNA, 14 nt, Human
gcuuaacuucacau

SEQ ID NO: 3116500 - RNA, 17 nt, Human
gcuuaacuucacauauu

SEQ ID NO: 3116501 - RNA, 16 nt, Human
gcuucuucagagacuc

SEQ ID NO: 3116502 - RNA, 16 nt, Human
gcuuaacuucacauau

SEQ ID NO: 3116503 - RNA, 16 nt, Human
gcuuggggaccagagc

SEQ ID NO: 3116504 - RNA, 23 nt, Human
gcuugggcuucauccuccucaga

SEQ ID NO: 3116505 - RNA, 19 nt, Human
gcuugaccgugaggccaga

SEQ ID NO: 3116506 - RNA, 18 nt, Human
gcuugaccgugaggccag

SEQ ID NO: 3116507 - RNA, 17 nt, Human
gcuugaccgugaggcca

SEQ ID NO: 3116508 - RNA, 16 nt, Human
gcuugaccgugaggcc

SEQ ID NO: 3116509 - RNA, 21 nt, Human
gcuucuucagagacuccugca

SEQ ID NO: 3116510 - RNA, 19 nt, Human
gcuucuucagagacuccug

SEQ ID NO: 3116511 - RNA, 13 nt, Human
ggacauggacaag

SEQ ID NO: 3116512 - RNA, 23 nt, Human
ggacaggcauguucucugaggac

SEQ ID NO: 3116513 - RNA, 17 nt, Human
ggacagggaggugaccc

SEQ ID NO: 3116514 - RNA, 23 nt, Human
ggacacccugugauggggcccug

SEQ ID NO: 3116515 - RNA, 13 nt, Human
ggacacccuguga

SEQ ID NO: 3116516 - RNA, 16 nt, Human
ggaauauauaaccagu

SEQ ID NO: 3116517 - RNA, 19 nt, Human
ggaauaccugucccccuga

SEQ ID NO: 3116518 - RNA, 16 nt, Human
ggaauaccuguccccc

SEQ ID NO: 3116519 - RNA, 15 nt, Human
ggaauaccugucccc

SEQ ID NO: 3116520 - RNA, 21 nt, Human
ggaagcucagggccuggcuca

SEQ ID NO: 3116521 - RNA, 17 nt, Human
ggaagcucagggccugg

SEQ ID NO: 3116522 - RNA, 16 nt, Human
ggaagcucagggccug

SEQ ID NO: 3116523 - RNA, 13 nt, Human
ggacacagcucuu

SEQ ID NO: 3116524 - RNA, 21 nt, Human
ggacacagcucuucuccaggc

SEQ ID NO: 3116525 - RNA, 12 nt, Human
ggacacccugug

SEQ ID NO: 3116526 - RNA, 12 nt, Human
ggacacagcucu

SEQ ID NO: 3116527 - RNA, 19 nt, Human
ggaaugaaugucaguguga

SEQ ID NO: 3116528 - RNA, 23 nt, Human
ggaaaucaccgaaaacguggcug

SEQ ID NO: 3116529 - RNA, 21 nt, Human
ggaagccagcaggcucucagg

SEQ ID NO: 3116530 - RNA, 23 nt, Human
ggaagccagcaggcucucaggcc

SEQ ID NO: 3116531 - RNA, 22 nt, Human
ggaagccagcaggcucucaggc

SEQ ID NO: 3116532 - RNA, 18 nt, Human
ggaagccgcuggggccag

SEQ ID NO: 3116533 - RNA, 18 nt, Human
aggccaaggugggaggau

SEQ ID NO: 3116534 - RNA, 20 nt, Human
aggccaaaggaagcacaugc

SEQ ID NO: 3116535 - RNA, 23 nt, Human
aggccaaaggaagcacaugccuc

SEQ ID NO: 3116536 - RNA, 20 nt, Human
aggccaaacucaccugcccc

SEQ ID NO: 3116537 - RNA, 14 nt, Human
aggccaaaggaagc

SEQ ID NO: 3116538 - RNA, 18 nt, Human
aggcauuuguuugaacug

SEQ ID NO: 3116539 - RNA, 16 nt, Human
aggccaaacucaccug

SEQ ID NO: 3116540 - RNA, 20 nt, Human
uggaccuugaacuggguacu

SEQ ID NO: 3116541 - RNA, 15 nt, Human
aggccacaagacccu

SEQ ID NO: 3116542 - RNA, 15 nt, Human
uggaugccugguggc

SEQ ID NO: 3116543 - RNA, 20 nt, Human
uggaguucaucuugaauugu

SEQ ID NO: 3116544 - RNA, 17 nt, Human
uggaguucaucuugaau

SEQ ID NO: 3116545 - RNA, 16 nt, Human
uggaguucaucuugaa

SEQ ID NO: 3116546 - RNA, 18 nt, Human
uggaugccugguggcagc

SEQ ID NO: 3116547 - RNA, 19 nt, Human
uggaugccugguggcagcu

SEQ ID NO: 3116548 - RNA, 22 nt, Human
uggcagaguugaagacagagcu

SEQ ID NO: 3116549 - RNA, 15 nt, Human
uggcacccggccccu

SEQ ID NO: 3116550 - RNA, 21 nt, Human
uggcagaguugaagacagagc

SEQ ID NO: 3116551 - RNA, 12 nt, Human
uggauguucuga

SEQ ID NO: 3116552 - RNA, 22 nt, Human
uggauuaaacuuaaucuaaaug

SEQ ID NO: 3116553 - RNA, 20 nt, Human
uggcacaucagcacgauuuc

SEQ ID NO: 3116554 - RNA, 18 nt, Human
uggcaccagcagccugga

SEQ ID NO: 3116555 - RNA, 12 nt, Human
uggcagccccug

SEQ ID NO: 3116556 - RNA, 20 nt, Human
aggccacaagacccuugugg

SEQ ID NO: 3116557 - RNA, 15 nt, Human
uggccaggcuggucu

SEQ ID NO: 3116558 - RNA, 17 nt, Human
uggccaggcuggucuca

SEQ ID NO: 3116559 - RNA, 15 nt, Human
uggcaugggaaugaa

SEQ ID NO: 3116560 - RNA, 12 nt, Human
uggcaugggaau

SEQ ID NO: 3116561 - RNA, 14 nt, Human
aggcccucugccca

SEQ ID NO: 3116562 - RNA, 13 nt, Human
aggcccucugccc

SEQ ID NO: 3116563 - RNA, 22 nt, Human
aggccuggccagaugcaccagc

SEQ ID NO: 3116564 - RNA, 23 nt, Human
aggccuggccagaugcaccagcc

SEQ ID NO: 3116565 - RNA, 23 nt, Human
aggccugggggcugggcagagga

SEQ ID NO: 3116566 - RNA, 15 nt, Human
aggccuggccagaug

SEQ ID NO: 3116567 - RNA, 16 nt, Human
aggccuggccagaugc

SEQ ID NO: 3116568 - RNA, 17 nt, Human
aggccuggccagaugca

SEQ ID NO: 3116569 - RNA, 21 nt, Human
aggccuggccagaugcaccag

SEQ ID NO: 3116570 - RNA, 13 nt, Human
uggccucugcacu

SEQ ID NO: 3116571 - RNA, 17 nt, Human
uggccucugcacucccc

SEQ ID NO: 3116572 - RNA, 15 nt, Human
uggccucugcacucc

SEQ ID NO: 3116573 - RNA, 14 nt, Human
uggccucugcacuc

SEQ ID NO: 3116574 - RNA, 21 nt, Human
uggccccugcccggcugcgga

SEQ ID NO: 3116575 - RNA, 20 nt, Human
uggccccugcccggcugcgg

SEQ ID NO: 3116576 - RNA, 16 nt, Human
ugggaaaggggaaguu

SEQ ID NO: 3116577 - RNA, 23 nt, Human
uggcuucacggaagagccuugcg

SEQ ID NO: 3116578 - RNA, 22 nt, Human
uggcuucacggaagagccuugc

SEQ ID NO: 3116579 - RNA, 13 nt, Human
uggcuguuggcug

SEQ ID NO: 3116580 - RNA, 14 nt, Human
uggcugugucuccc

SEQ ID NO: 3116581 - RNA, 15 nt, Human
uggcuguuggcuggg

SEQ ID NO: 3116582 - RNA, 17 nt, Human
uggcuuaaaacaacacu

SEQ ID NO: 3116583 - RNA, 15 nt, Human
uggcugcagggaguc

SEQ ID NO: 3116584 - RNA, 13 nt, Human
uggcugcagggag

SEQ ID NO: 3116585 - RNA, 14 nt, Human
uggcugcagggagu

SEQ ID NO: 3116586 - RNA, 20 nt, Human
uggcugccaaugggagcuca

SEQ ID NO: 3116587 - RNA, 18 nt, Human
uggcugccaaugggagcu

SEQ ID NO: 3116588 - RNA, 18 nt, Human
uggcucaaguccucuuuu

SEQ ID NO: 3116589 - RNA, 19 nt, Human
uggcucuuccaggcuggga

SEQ ID NO: 3116590 - RNA, 21 nt, Human
uggcucuuccaggcugggaga

SEQ ID NO: 3116591 - RNA, 20 nt, Human
uggcucuuccaggcugggag

SEQ ID NO: 3116592 - RNA, 12 nt, Human
uggcugcaaagg

SEQ ID NO: 3116593 - RNA, 14 nt, Human
aggcugggagagcc

SEQ ID NO: 3116594 - RNA, 22 nt, Human
uggcuagagguucaaagauauu

SEQ ID NO: 3116595 - RNA, 18 nt, Human
aggcuggcgugcaguggu

SEQ ID NO: 3116596 - RNA, 20 nt, Human
aggcuggcgugcaguggugc

SEQ ID NO: 3116597 - RNA, 15 nt, Human
uggcuaugcauuuga

SEQ ID NO: 3116598 - RNA, 17 nt, Human
uggcuaugcauuugaaa

SEQ ID NO: 3116599 - RNA, 14 nt, Human
uggcuaugcauuug

SEQ ID NO: 3116600 - RNA, 22 nt, Human
uggcuauuagagaucaaccccu

SEQ ID NO: 3116601 - RNA, 19 nt, Human
uggcuaugcauuugaaaau

SEQ ID NO: 3116602 - RNA, 21 nt, Human
aggcucucaggccagcugcuu

SEQ ID NO: 3116603 - RNA, 11 nt, Human
aggcucugccc

SEQ ID NO: 3116604 - RNA, 12 nt, Human
aggcucugcccu

SEQ ID NO: 3116605 - RNA, 13 nt, Human
aggcucugcccuu

SEQ ID NO: 3116606 - RNA, 15 nt, Human
aggcucugcccuugg

SEQ ID NO: 3116607 - RNA, 14 nt, Human
aggcucugcccuug

SEQ ID NO: 3116608 - RNA, 20 nt, Human
aggcucucaggccagcugcu

SEQ ID NO: 3116609 - RNA, 19 nt, Human
aggcucucaggccagcugc

SEQ ID NO: 3116610 - RNA, 18 nt, Human
aggcucucaggccagcug

SEQ ID NO: 3116611 - RNA, 16 nt, Human
aggcucucaggccagc

SEQ ID NO: 3116612 - RNA, 15 nt, Human
aggcucucaggccag

SEQ ID NO: 3116613 - RNA, 14 nt, Human
aggcucucaggcca

SEQ ID NO: 3116614 - RNA, 12 nt, Human
aggcucucaggc

SEQ ID NO: 3116615 - RNA, 11 nt, Human
aggcucucagg

SEQ ID NO: 3116616 - RNA, 21 nt, Human
aggcucgagcaugccuggaug

SEQ ID NO: 3116617 - RNA, 19 nt, Human
aggcucgagcaugccugga

SEQ ID NO: 3116618 - RNA, 18 nt, Human
aggcucgagcaugccugg

SEQ ID NO: 3116619 - RNA, 17 nt, Human
aggcucgagcaugccug

SEQ ID NO: 3116620 - RNA, 15 nt, Human
aggcucgagcaugcc

SEQ ID NO: 3116621 - RNA, 19 nt, Human
aggcuccuuuagcgcccag

SEQ ID NO: 3116622 - RNA, 12 nt, Human
aggcucgagcau

SEQ ID NO: 3116623 - RNA, 13 nt, Human
aggcuggcgugca

SEQ ID NO: 3116624 - RNA, 17 nt, Human
aggcuggcgugcagugg

SEQ ID NO: 3116625 - RNA, 16 nt, Human
aggcucugcccuuggu

SEQ ID NO: 3116626 - RNA, 16 nt, Human
ugcucugcugacagac

SEQ ID NO: 3116627 - RNA, 14 nt, Human
ugcugagucugaag

SEQ ID NO: 3116628 - RNA, 15 nt, Human
ugcugagucugaagg

SEQ ID NO: 3116629 - RNA, 21 nt, Human
ugcucugcugacagacacagg

SEQ ID NO: 3116630 - RNA, 22 nt, Human
ugcucugcugacagacacaggc

SEQ ID NO: 3116631 - RNA, 19 nt, Human
ugcuccagcuguucagcug

SEQ ID NO: 3116632 - RNA, 16 nt, Human
ugcuccagcuguucag

SEQ ID NO: 3116633 - RNA, 16 nt, Human
agcugggacuacaggc

SEQ ID NO: 3116634 - RNA, 18 nt, Human
agcugggacuacaggcac

SEQ ID NO: 3116635 - RNA, 22 nt, Human
aggaagcacaugccucucucag

SEQ ID NO: 3116636 - RNA, 15 nt, Human
aggaagccagcaggc

SEQ ID NO: 3116637 - RNA, 14 nt, Human
aggaagccagcagg

SEQ ID NO: 3116638 - RNA, 24 nt, Human
aggaagcacaugccucucucaggc

SEQ ID NO: 3116639 - RNA, 23 nt, Human
aggaagcacaugccucucucagg

SEQ ID NO: 3116640 - RNA, 14 nt, Human
aggaagacuuugga

SEQ ID NO: 3116641 - RNA, 13 nt, Human
aggaagacuuugg

SEQ ID NO: 3116642 - RNA, 19 nt, Human
aggaagacuucaucccucu

SEQ ID NO: 3116643 - RNA, 13 nt, Human
aggaagacuucau

SEQ ID NO: 3116644 - RNA, 22 nt, Human
ugcugagucugaaggcuggguu

SEQ ID NO: 3116645 - RNA, 21 nt, Human
ugcugagucugaaggcugggu

SEQ ID NO: 3116646 - RNA, 18 nt, Human
ugcugagucugaaggcug

SEQ ID NO: 3116647 - RNA, 17 nt, Human
ugcugagucugaaggcu

SEQ ID NO: 3116648 - RNA, 16 nt, Human
ugcugagucugaaggc

SEQ ID NO: 3116649 - RNA, 18 nt, Human
aggaaggaaacccagcuc

SEQ ID NO: 3116650 - RNA, 13 nt, Human
aggaagccagcag

SEQ ID NO: 3116651 - RNA, 17 nt, Human
aggaagccagcaggcuc

SEQ ID NO: 3116652 - RNA, 15 nt, Human
aggaaggagaggaga

SEQ ID NO: 3116653 - RNA, 19 nt, Human
aggaaggaaacccagcucu

SEQ ID NO: 3116654 - RNA, 16 nt, Human
ugcuggcugguuagag

SEQ ID NO: 3116655 - RNA, 12 nt, Human
ugcugcccugug

SEQ ID NO: 3116656 - RNA, 14 nt, Human
ugcugcccugugag

SEQ ID NO: 3116657 - RNA, 13 nt, Human
ugcugcccuguga

SEQ ID NO: 3116658 - RNA, 15 nt, Human
ugcugcccugugagu

SEQ ID NO: 3116659 - RNA, 13 nt, Human
ugcuuauacacuu

SEQ ID NO: 3116660 - RNA, 12 nt, Human
ugcuucaaggau

SEQ ID NO: 3116661 - RNA, 13 nt, Human
ugcuucagccucc

SEQ ID NO: 3116662 - RNA, 14 nt, Human
ugcuucagccuccc

SEQ ID NO: 3116663 - RNA, 19 nt, Human
ugcuucaaggauccugagc

SEQ ID NO: 3116664 - RNA, 18 nt, Human
ugcuucaaggauccugag

SEQ ID NO: 3116665 - RNA, 16 nt, Human
ugcuucaaggauccug

SEQ ID NO: 3116666 - RNA, 22 nt, Human
aggacagggaggugaccccagg

SEQ ID NO: 3116667 - RNA, 23 nt, Human
aggacacuaaccacgcuggaccu

SEQ ID NO: 3116668 - RNA, 19 nt, Human
aggacacuaaccacgcugg

SEQ ID NO: 3116669 - RNA, 16 nt, Human
aggauccugagccaga

SEQ ID NO: 3116670 - RNA, 15 nt, Human
aggauccugagccag

SEQ ID NO: 3116671 - RNA, 17 nt, Human
aggaugaucuaggaaga

SEQ ID NO: 3116672 - RNA, 16 nt, Human
aggaugaucuaggaag

SEQ ID NO: 3116673 - RNA, 18 nt, Human
aggauccugagccagauu

SEQ ID NO: 3116674 - RNA, 17 nt, Human
aggauccugagccagau

SEQ ID NO: 3116675 - RNA, 22 nt, Human
aggaucucuugagccugggagg

SEQ ID NO: 3116676 - RNA, 21 nt, Human
aggaucucuugagccugggag

SEQ ID NO: 3116677 - RNA, 20 nt, Human
uggaaauauuaagaaagacu

SEQ ID NO: 3116678 - RNA, 18 nt, Human
uggaaaugggcagagcag

SEQ ID NO: 3116679 - RNA, 23 nt, Human
uggaaaugggcagagcagagacc

SEQ ID NO: 3116680 - RNA, 13 nt, Human
uggacccugaggc

SEQ ID NO: 3116681 - RNA, 12 nt, Human
uggacccugagg

SEQ ID NO: 3116682 - RNA, 14 nt, Human
uggacccugaggcc

SEQ ID NO: 3116683 - RNA, 18 nt, Human
uggacacagcucuucucc

SEQ ID NO: 3116684 - RNA, 15 nt, Human
uggacacagcucuuc

SEQ ID NO: 3116685 - RNA, 16 nt, Human
uggacacagcucuucu

SEQ ID NO: 3116686 - RNA, 19 nt, Human
aggauuuugauccaagcug

SEQ ID NO: 3116687 - RNA, 19 nt, Human
aggaugcccaaagaugcag

SEQ ID NO: 3116688 - RNA, 14 nt, Human
aggaugcccaaaga

SEQ ID NO: 3116689 - RNA, 20 nt, Human
aggaugaucuaggaagacuu

SEQ ID NO: 3116690 - RNA, 17 nt, Human
aggcaacucaucuuagg

SEQ ID NO: 3116691 - RNA, 19 nt, Human
aggacauugcggacagcca

SEQ ID NO: 3116692 - RNA, 23 nt, Human
aggacauugcggacagccacggc

SEQ ID NO: 3116693 - RNA, 15 nt, Human
aggacauugcggaca

SEQ ID NO: 3116694 - RNA, 17 nt, Human
aggacauugcggacagc

SEQ ID NO: 3116695 - RNA, 18 nt, Human
aggacauugcggacagcc

SEQ ID NO: 3116696 - RNA, 17 nt, Human
aggagauuggaaggaac

SEQ ID NO: 3116697 - RNA, 23 nt, Human
aggacuuuucuuuguggcuuccu

SEQ ID NO: 3116698 - RNA, 14 nt, Human
aggagcagccacau

SEQ ID NO: 3116699 - RNA, 22 nt, Human
aggagccccgaggccuucucug

SEQ ID NO: 3116700 - RNA, 15 nt, Human
uggaaauauuaagaa

SEQ ID NO: 3116701 - RNA, 19 nt, Human
ugcuugggcuucauccucc

SEQ ID NO: 3116702 - RNA, 16 nt, Human
ugcuugggcuucaucc

SEQ ID NO: 3116703 - RNA, 12 nt, Human
ugcuugggcuuc

SEQ ID NO: 3116704 - RNA, 21 nt, Human
ugcuuggaggaaggaaaccca

SEQ ID NO: 3116705 - RNA, 17 nt, Human
aggagccuccugcccuu

SEQ ID NO: 3116706 - RNA, 13 nt, Human
agcuccagcucac

SEQ ID NO: 3116707 - RNA, 17 nt, Human
agcuccagcucaccagc

SEQ ID NO: 3116708 - RNA, 19 nt, Human
agcuccaagcucccaggca

SEQ ID NO: 3116709 - RNA, 18 nt, Human
agcuccaagcucccaggc

SEQ ID NO: 3116710 - RNA, 16 nt, Human
agcuccaagcucccag

SEQ ID NO: 3116711 - RNA, 17 nt, Human
agcuccaagcucccagg

SEQ ID NO: 3116712 - RNA, 19 nt, Human
ugcccuaaaguguauuuuu

SEQ ID NO: 3116713 - RNA, 22 nt, Human
agcuccuucuguccuacucugu

SEQ ID NO: 3116714 - RNA, 23 nt, Human
agcuccuucuguccuacucugug

SEQ ID NO: 3116715 - RNA, 21 nt, Human
agcuccagcucaccagcccca

SEQ ID NO: 3116716 - RNA, 18 nt, Human
agcuccagcucaccagcc

SEQ ID NO: 3116717 - RNA, 19 nt, Human
agcuccagcucaccagccc

SEQ ID NO: 3116718 - RNA, 23 nt, Human
agcucuguccugggagugagcug

SEQ ID NO: 3116719 - RNA, 17 nt, Human
ugccugcccaggccccu

SEQ ID NO: 3116720 - RNA, 18 nt, Human
ugccugcccaggccccug

SEQ ID NO: 3116721 - RNA, 19 nt, Human
ugccugcccaggccccugc

SEQ ID NO: 3116722 - RNA, 11 nt, Human
ugccucugccu

SEQ ID NO: 3116723 - RNA, 14 nt, Human
ugccucugacacac

SEQ ID NO: 3116724 - RNA, 16 nt, Human
ugccucugacacacag

SEQ ID NO: 3116725 - RNA, 13 nt, Human
agcugccuguuca

SEQ ID NO: 3116726 - RNA, 22 nt, Human
agcugcuuuugucuaugggacu

SEQ ID NO: 3116727 - RNA, 10 nt, Human
agcugccugu

SEQ ID NO: 3116728 - RNA, 15 nt, Human
agcugggacuacagg

SEQ ID NO: 3116729 - RNA, 23 nt, Human
agcugcuuuugucuaugggacuc

SEQ ID NO: 3116730 - RNA, 24 nt, Human
agcugcuuuugucuaugggacuca

SEQ ID NO: 3116731 - RNA, 22 nt, Human
ugcccuuaccugccaggaagcc

SEQ ID NO: 3116732 - RNA, 18 nt, Human
ugcccugugggcccccaa

SEQ ID NO: 3116733 - RNA, 15 nt, Human
ugcccugugggcccc

SEQ ID NO: 3116734 - RNA, 15 nt, Human
agcucuucuccaggc

SEQ ID NO: 3116735 - RNA, 16 nt, Human
agcucuucuccaggcu

SEQ ID NO: 3116736 - RNA, 23 nt, Human
ugcccugugaguacuacaguccu

SEQ ID NO: 3116737 - RNA, 19 nt, Human
ugcccuuaccugccaggaa

SEQ ID NO: 3116738 - RNA, 20 nt, Human
ugccgcagcccugcagaggg

SEQ ID NO: 3116739 - RNA, 14 nt, Human
ugccgcagcccugc

SEQ ID NO: 3116740 - RNA, 22 nt, Human
ugccucccaucacccgcuaaga

SEQ ID NO: 3116741 - RNA, 16 nt, Human
ugccucucucaggcca

SEQ ID NO: 3116742 - RNA, 17 nt, Human
ugccucucucaggccaa

SEQ ID NO: 3116743 - RNA, 20 nt, Human
ugcccaaagaugcagccggu

SEQ ID NO: 3116744 - RNA, 17 nt, Human
ugcccaaagaugcagcc

SEQ ID NO: 3116745 - RNA, 17 nt, Human
ugcccagccccuucuga

SEQ ID NO: 3116746 - RNA, 16 nt, Human
ugcccagccccuucug

SEQ ID NO: 3116747 - RNA, 12 nt, Human
ugcccagccccu

SEQ ID NO: 3116748 - RNA, 13 nt, Human
ugcccagccccuu

SEQ ID NO: 3116749 - RNA, 14 nt, Human
ugcccaggccccug

SEQ ID NO: 3116750 - RNA, 15 nt, Human
ugcccaggccccugc

SEQ ID NO: 3116751 - RNA, 17 nt, Human
ugcccaggccccugcca

SEQ ID NO: 3116752 - RNA, 18 nt, Human
ugcccaggccccugccac

SEQ ID NO: 3116753 - RNA, 23 nt, Human
ugccccgaacauguuuuucuucu

SEQ ID NO: 3116754 - RNA, 20 nt, Human
ugcccuaaaguguauuuuuu

SEQ ID NO: 3116755 - RNA, 19 nt, Human
agcuauucaguaauaacuc

SEQ ID NO: 3116756 - RNA, 13 nt, Human
agcucagggccug

SEQ ID NO: 3116757 - RNA, 12 nt, Human
agcucagggccu

SEQ ID NO: 3116758 - RNA, 19 nt, Human
agcucagggccuggcucag

SEQ ID NO: 3116759 - RNA, 18 nt, Human
agcucagggccuggcuca

SEQ ID NO: 3116760 - RNA, 20 nt, Human
agcucagggccuggcucagg

SEQ ID NO: 3116761 - RNA, 15 nt, Human
agcuccaagcuccca

SEQ ID NO: 3116762 - RNA, 21 nt, Human
agcuaggccuggccagaugca

SEQ ID NO: 3116763 - RNA, 16 nt, Human
agcuaggccuggccag

SEQ ID NO: 3116764 - RNA, 18 nt, Human
agccuuccagggguggga

SEQ ID NO: 3116765 - RNA, 15 nt, Human
agccuugaacuuuga

SEQ ID NO: 3116766 - RNA, 22 nt, Human
agcgauucuucugcuucagccu

SEQ ID NO: 3116767 - RNA, 23 nt, Human
agccuugaccauucuccaccugc

SEQ ID NO: 3116768 - RNA, 22 nt, Human
agccuugaccauucuccaccug

SEQ ID NO: 3116769 - RNA, 13 nt, Human
agccuugaacuuu

SEQ ID NO: 3116770 - RNA, 16 nt, Human
agccuugaacuuugac

SEQ ID NO: 3116771 - RNA, 22 nt, Human
agccuugaacuuugaccucugc

SEQ ID NO: 3116772 - RNA, 19 nt, Human
ugcauuugaggucuguucu

SEQ ID NO: 3116773 - RNA, 18 nt, Human
ugcauuugaggucuguuc

SEQ ID NO: 3116774 - RNA, 20 nt, Human
ugcauuuaaaagauacaguu

SEQ ID NO: 3116775 - RNA, 20 nt, Human
ugcauuugaggucuguucuu

SEQ ID NO: 3116776 - RNA, 21 nt, Human
ugcauuugaggucuguucuuu

SEQ ID NO: 3116777 - RNA, 22 nt, Human
agcggggacagcuccuucuguc

SEQ ID NO: 3116778 - RNA, 19 nt, Human
agcggggacagcuccuucu

SEQ ID NO: 3116779 - RNA, 20 nt, Human
agcggggacagcuccuucug

SEQ ID NO: 3116780 - RNA, 23 nt, Human
agcggcuggcagcccaccccuca

SEQ ID NO: 3116781 - RNA, 18 nt, Human
ugccagcuuaucucaggg

SEQ ID NO: 3116782 - RNA, 13 nt, Human
agcggcuggcagc

SEQ ID NO: 3116783 - RNA, 16 nt, Human
agcccuuagcagggaa

SEQ ID NO: 3116784 - RNA, 16 nt, Human
ugcagacucuacagag

SEQ ID NO: 3116785 - RNA, 17 nt, Human
ugcagacucuacagagg

SEQ ID NO: 3116786 - RNA, 21 nt, Human
agcccuuagcagggaaacagc

SEQ ID NO: 3116787 - RNA, 17 nt, Human
agccgagaucacgccac

SEQ ID NO: 3116788 - RNA, 21 nt, Human
agccgagauagccaaggccaa

SEQ ID NO: 3116789 - RNA, 20 nt, Human
agccgagauagccaaggcca

SEQ ID NO: 3116790 - RNA, 19 nt, Human
ugcacuccccugcugggug

SEQ ID NO: 3116791 - RNA, 17 nt, Human
ugcacuccccugcuggg

SEQ ID NO: 3116792 - RNA, 16 nt, Human
ugcacuccccugcugg

SEQ ID NO: 3116793 - RNA, 11 nt, Human
ugcacacauuu

SEQ ID NO: 3116794 - RNA, 12 nt, Human
ugcacacauuuu

SEQ ID NO: 3116795 - RNA, 13 nt, Human
ugcacacauuuuu

SEQ ID NO: 3116796 - RNA, 15 nt, Human
ugcacacauuuuuua

SEQ ID NO: 3116797 - RNA, 22 nt, Human
ugcagacaggcaagcaccuccu

SEQ ID NO: 3116798 - RNA, 22 nt, Human
ugcagccucaaccuccugggcu

SEQ ID NO: 3116799 - RNA, 20 nt, Human
ugcagccucaaccuccuggg

SEQ ID NO: 3116800 - RNA, 21 nt, Human
ugcagccucaaccuccugggc

SEQ ID NO: 3116801 - RNA, 23 nt, Human
agccucugaaaaccaauguucuc

SEQ ID NO: 3116802 - RNA, 18 nt, Human
agccucacaguccuuacc

SEQ ID NO: 3116803 - RNA, 17 nt, Human
agccucacaguccuuac

SEQ ID NO: 3116804 - RNA, 20 nt, Human
agccucaaccuccugggcua

SEQ ID NO: 3116805 - RNA, 19 nt, Human
agccucaaccuccugggcu

SEQ ID NO: 3116806 - RNA, 20 nt, Human
ugcaaaccaucauugaaauc

SEQ ID NO: 3116807 - RNA, 21 nt, Human
ugcaaaccaucauugaaaucu

SEQ ID NO: 3116808 - RNA, 21 nt, Human
agcccaggccuccuacagcuu

SEQ ID NO: 3116809 - RNA, 17 nt, Human
agccccaaaacucuccu

SEQ ID NO: 3116810 - RNA, 16 nt, Human
agccccaaaacucucc

SEQ ID NO: 3116811 - RNA, 20 nt, Human
agccccauucugccugccca

SEQ ID NO: 3116812 - RNA, 18 nt, Human
agccccaaaacucuccuc

SEQ ID NO: 3116813 - RNA, 21 nt, Human
agccccauucugccugcccag

SEQ ID NO: 3116814 - RNA, 22 nt, Human
agccccauucugccugcccagg

SEQ ID NO: 3116815 - RNA, 14 nt, Human
agcccugguggcag

SEQ ID NO: 3116816 - RNA, 15 nt, Human
agcccugguggcagu

SEQ ID NO: 3116817 - RNA, 16 nt, Human
agcccugguggcagug

SEQ ID NO: 3116818 - RNA, 21 nt, Human
ugcacacaccagagcccaccu

SEQ ID NO: 3116819 - RNA, 17 nt, Human
ugcacacaccagagccc

SEQ ID NO: 3116820 - RNA, 18 nt, Human
ugcacacaccagagccca

SEQ ID NO: 3116821 - RNA, 18 nt, Human
ugauuuccguuaaaauac

SEQ ID NO: 3116822 - RNA, 22 nt, Human
ugauuuccguuaaaauaccagc

SEQ ID NO: 3116823 - RNA, 17 nt, Human
ugauuuggggauauuuu

SEQ ID NO: 3116824 - RNA, 22 nt, Human
ugauucccaagcucugcuccuc

SEQ ID NO: 3116825 - RNA, 23 nt, Human
ugauucccaagcucugcuccucu

SEQ ID NO: 3116826 - RNA, 21 nt, Human
ugauucauaaugacuuaagca

SEQ ID NO: 3116827 - RNA, 16 nt, Human
ugauucauaaugacuu

SEQ ID NO: 3116828 - RNA, 15 nt, Human
ugauucauaaugacu

SEQ ID NO: 3116829 - RNA, 14 nt, Human
agcccaggaaaggc

SEQ ID NO: 3116830 - RNA, 21 nt, Human
agccaguaaaugggggugcau

SEQ ID NO: 3116831 - RNA, 13 nt, Human
agccaguaaaugg

SEQ ID NO: 3116832 - RNA, 13 nt, Human
agcccacuucugc

SEQ ID NO: 3116833 - RNA, 14 nt, Human
agcccacuucugcc

SEQ ID NO: 3116834 - RNA, 15 nt, Human
agcccacuucugcca

SEQ ID NO: 3116835 - RNA, 18 nt, Human
agccacugcaccgggcca

SEQ ID NO: 3116836 - RNA, 19 nt, Human
agccacugcaccgggccac

SEQ ID NO: 3116837 - RNA, 11 nt, Human
agccagaggag

SEQ ID NO: 3116838 - RNA, 10 nt, Human
agccagagga

SEQ ID NO: 3116839 - RNA, 13 nt, Human
ugauggugcaaug

SEQ ID NO: 3116840 - RNA, 19 nt, Human
ugauuaaauucuugcaaag

SEQ ID NO: 3116841 - RNA, 20 nt, Human
ugauuaaauucuugcaaagu

SEQ ID NO: 3116842 - RNA, 19 nt, Human
ugauuaaccacuucagcug

SEQ ID NO: 3116843 - RNA, 16 nt, Human
agccacugcaccgggc

SEQ ID NO: 3116844 - RNA, 22 nt, Human
ugauccucccaccucagccucc

SEQ ID NO: 3116845 - RNA, 21 nt, Human
ugauccucccaccucagccuc

SEQ ID NO: 3116846 - RNA, 15 nt, Human
ugauccucccaccuc

SEQ ID NO: 3116847 - RNA, 16 nt, Human
ugauccuaguuccacc

SEQ ID NO: 3116848 - RNA, 23 nt, Human
ugaugcuucuucagagacuccug

SEQ ID NO: 3116849 - RNA, 16 nt, Human
ugaugagaggaaauca

SEQ ID NO: 3116850 - RNA, 15 nt, Human
ugaugagaggaaauc

SEQ ID NO: 3116851 - RNA, 14 nt, Human
ugaugagaggaaau

SEQ ID NO: 3116852 - RNA, 13 nt, Human
ugaugagaggaaa

SEQ ID NO: 3116853 - RNA, 19 nt, Human
ugauggggcccugccuccu

SEQ ID NO: 3116854 - RNA, 16 nt, Human
ugauggggcccugccu

SEQ ID NO: 3116855 - RNA, 15 nt, Human
ugauggggcccugcc

SEQ ID NO: 3116856 - RNA, 14 nt, Human
ugauggggcccugc

SEQ ID NO: 3116857 - RNA, 23 nt, Human
agugaaaaaggaggaagagaaaa

SEQ ID NO: 3116858 - RNA, 20 nt, Human
agugaaaaaggaggaagaga

SEQ ID NO: 3116859 - RNA, 17 nt, Human
agugaaaaaggaggaag

SEQ ID NO: 3116860 - RNA, 11 nt, Human
agugaaaaagg

SEQ ID NO: 3116861 - RNA, 19 nt, Human
ugugagcacaaagguagcu

SEQ ID NO: 3116862 - RNA, 14 nt, Human
ugugaagagaacca

SEQ ID NO: 3116863 - RNA, 13 nt, Human
agugagacucugu

SEQ ID NO: 3116864 - RNA, 21 nt, Human
agugagacccugucucaaaaa

SEQ ID NO: 3116865 - RNA, 17 nt, Human
agugagacccugucuca

SEQ ID NO: 3116866 - RNA, 22 nt, Human
agugagacucugucucaaaaaa

SEQ ID NO: 3116867 - RNA, 16 nt, Human
agugagacucugucuc

SEQ ID NO: 3116868 - RNA, 17 nt, Human
agugagacucugucuca

SEQ ID NO: 3116869 - RNA, 16 nt, Human
ugugauggggcccugc

SEQ ID NO: 3116870 - RNA, 15 nt, Human
ugugauggggcccug

SEQ ID NO: 3116871 - RNA, 22 nt, Human
agugagcacuaaggugugcucu

SEQ ID NO: 3116872 - RNA, 14 nt, Human
agugagagcugggu

SEQ ID NO: 3116873 - RNA, 17 nt, Human
ugugauggggcccugcc

SEQ ID NO: 3116874 - RNA, 15 nt, Human
ugucuugcaauggca

SEQ ID NO: 3116875 - RNA, 17 nt, Human
ugucuugcaauggcagc

SEQ ID NO: 3116876 - RNA, 18 nt, Human
ugucuugcaauggcagcc

SEQ ID NO: 3116877 - RNA, 20 nt, Human
ugucuugcaauggcagccuu

SEQ ID NO: 3116878 - RNA, 21 nt, Human
ugucuugcaauggcagccuug

SEQ ID NO: 3116879 - RNA, 16 nt, Human
ugugaaccaccacacc

SEQ ID NO: 3116880 - RNA, 21 nt, Human
ugugaaccaccacacccagcc

SEQ ID NO: 3116881 - RNA, 22 nt, Human
ugugaaccaccacacccagccc

SEQ ID NO: 3116882 - RNA, 23 nt, Human
ugugaaccaccacacccagccca

SEQ ID NO: 3116883 - RNA, 15 nt, Human
ugugaaccaccacac

SEQ ID NO: 3116884 - RNA, 21 nt, Human
ugucucuugguccugcugcag

SEQ ID NO: 3116885 - RNA, 20 nt, Human
ugucucuugguccugcugca

SEQ ID NO: 3116886 - RNA, 19 nt, Human
ugucucuugguccugcugc

SEQ ID NO: 3116887 - RNA, 18 nt, Human
ugucucuugguccugcug

SEQ ID NO: 3116888 - RNA, 22 nt, Human
ugucucuuuaaugucacaggca

SEQ ID NO: 3116889 - RNA, 21 nt, Human
ugucucuuuaaugucacaggc

SEQ ID NO: 3116890 - RNA, 22 nt, Human
ugucucuugguccugcugcagu

SEQ ID NO: 3116891 - RNA, 16 nt, Human
agucccugccaaugga

SEQ ID NO: 3116892 - RNA, 14 nt, Human
agucccugccaaug

SEQ ID NO: 3116893 - RNA, 13 nt, Human
agucccugccaau

SEQ ID NO: 3116894 - RNA, 23 nt, Human
aguccccuguuuguuucugaaag

SEQ ID NO: 3116895 - RNA, 13 nt, Human
ugucucugagagu

SEQ ID NO: 3116896 - RNA, 16 nt, Human
ugucagccauuccugu

SEQ ID NO: 3116897 - RNA, 12 nt, Human
ugucccuuuucc

SEQ ID NO: 3116898 - RNA, 19 nt, Human
aguccccuguuuguuucug

SEQ ID NO: 3116899 - RNA, 14 nt, Human
aguccccuguuugu

SEQ ID NO: 3116900 - RNA, 21 nt, Human
agucccaccuuggcugcaggg

SEQ ID NO: 3116901 - RNA, 23 nt, Human
agucccaccuuggcugcagggag

SEQ ID NO: 3116902 - RNA, 20 nt, Human
agucccaccuuggcugcagg

SEQ ID NO: 3116903 - RNA, 19 nt, Human
agucagggguucccuuuuu

SEQ ID NO: 3116904 - RNA, 15 nt, Human
aguauuauaccuuuu

SEQ ID NO: 3116905 - RNA, 14 nt, Human
aguauuauaccuuu

SEQ ID NO: 3116906 - RNA, 19 nt, Human
aguagcugggacuacaggc

SEQ ID NO: 3116907 - RNA, 21 nt, Human
aguagcugggacuacaggcac

SEQ ID NO: 3116908 - RNA, 22 nt, Human
aguagcugggacuacaggcacc

SEQ ID NO: 3116909 - RNA, 16 nt, Human
agucacugagacagcc

SEQ ID NO: 3116910 - RNA, 15 nt, Human
agucacugagacagc

SEQ ID NO: 3116911 - RNA, 17 nt, Human
agucacugagacagccc

SEQ ID NO: 3116912 - RNA, 15 nt, Human
ugucagcauagaagu

SEQ ID NO: 3116913 - RNA, 14 nt, Human
uguauguguaagua

SEQ ID NO: 3116914 - RNA, 15 nt, Human
uguaucccaugagcc

SEQ ID NO: 3116915 - RNA, 12 nt, Human
uguagagccagg

SEQ ID NO: 3116916 - RNA, 15 nt, Human
uguagagccaggguc

SEQ ID NO: 3116917 - RNA, 19 nt, Human
ugucaaaguggugagaggc

SEQ ID NO: 3116918 - RNA, 16 nt, Human
ugucaaaguggugaga

SEQ ID NO: 3116919 - RNA, 13 nt, Human
aguagcugggacu

SEQ ID NO: 3116920 - RNA, 14 nt, Human
aguagcugggacua

SEQ ID NO: 3116921 - RNA, 15 nt, Human
ugucaaaguggugag

SEQ ID NO: 3116922 - RNA, 14 nt, Human
ugucaaagugguga

SEQ ID NO: 3116923 - RNA, 20 nt, Human
uggucaccaaaucagcugcu

SEQ ID NO: 3116924 - RNA, 23 nt, Human
uggucaccaaaucagcugcuacu

SEQ ID NO: 3116925 - RNA, 21 nt, Human
uggucaccaaaucagcugcua

SEQ ID NO: 3116926 - RNA, 16 nt, Human
ugguccauagagagca

SEQ ID NO: 3116927 - RNA, 15 nt, Human
ugguccauagagagc

SEQ ID NO: 3116928 - RNA, 23 nt, Human
uggguggaugccugguggcagcu

SEQ ID NO: 3116929 - RNA, 14 nt, Human
uggguggaugccug

SEQ ID NO: 3116930 - RNA, 19 nt, Human
aggguacuaaggaaucuuu

SEQ ID NO: 3116931 - RNA, 16 nt, Human
aggguaucaggugcug

SEQ ID NO: 3116932 - RNA, 13 nt, Human
agggggcugggac

SEQ ID NO: 3116933 - RNA, 13 nt, Human
aggguuggccccu

SEQ ID NO: 3116934 - RNA, 14 nt, Human
aggguuggccccug

SEQ ID NO: 3116935 - RNA, 13 nt, Human
aggguugggcugg

SEQ ID NO: 3116936 - RNA, 15 nt, Human
aggguugggcuggug

SEQ ID NO: 3116937 - RNA, 19 nt, Human
uggugaacagaacaaaagg

SEQ ID NO: 3116938 - RNA, 17 nt, Human
aggguggugaccucugc

SEQ ID NO: 3116939 - RNA, 18 nt, Human
aggguggugaccucugcc

SEQ ID NO: 3116940 - RNA, 19 nt, Human
aggguggugaccucugccu

SEQ ID NO: 3116941 - RNA, 19 nt, Human
ugguccauagagagcaaga

SEQ ID NO: 3116942 - RNA, 12 nt, Human
uggucuguguga

SEQ ID NO: 3116943 - RNA, 18 nt, Human
uggucugacccacugcuu

SEQ ID NO: 3116944 - RNA, 18 nt, Human
aggucuugaacuccuggc

SEQ ID NO: 3116945 - RNA, 20 nt, Human
aggucauuuuuuuuaagaaa

SEQ ID NO: 3116946 - RNA, 20 nt, Human
aggucuugaacuccuggccu

SEQ ID NO: 3116947 - RNA, 21 nt, Human
aggucuugaacuccuggccuc

SEQ ID NO: 3116948 - RNA, 22 nt, Human
aggucauuuuuuuuaagaaaaa

SEQ ID NO: 3116949 - RNA, 23 nt, Human
aggucauuuuuuuuaagaaaaag

SEQ ID NO: 3116950 - RNA, 21 nt, Human
aggucaaggcugcagugagcc

SEQ ID NO: 3116951 - RNA, 17 nt, Human
aggguugggcugguguc

SEQ ID NO: 3116952 - RNA, 21 nt, Human
aggugauccacccaccucagc

SEQ ID NO: 3116953 - RNA, 23 nt, Human
aggugauccacccaccucagccu

SEQ ID NO: 3116954 - RNA, 13 nt, Human
ugguuuucuguuc

SEQ ID NO: 3116955 - RNA, 15 nt, Human
ugguuuucuguucuu

SEQ ID NO: 3116956 - RNA, 14 nt, Human
ugguuucagaaaug

SEQ ID NO: 3116957 - RNA, 15 nt, Human
ugguuucagaaaugu

SEQ ID NO: 3116958 - RNA, 21 nt, Human
ugguuuguaaauuaacuuuua

SEQ ID NO: 3116959 - RNA, 12 nt, Human
ugguuuucuguu

SEQ ID NO: 3116960 - RNA, 23 nt, Human
ugguggcagcucaccucucccuu

SEQ ID NO: 3116961 - RNA, 20 nt, Human
ugguggcagcucaccucucc

SEQ ID NO: 3116962 - RNA, 19 nt, Human
ugguggcagcucaccucuc

SEQ ID NO: 3116963 - RNA, 16 nt, Human
ugguggcagcucaccu

SEQ ID NO: 3116964 - RNA, 12 nt, Human
ugguggcagcuc

SEQ ID NO: 3116965 - RNA, 15 nt, Human
ugguggcagagugga

SEQ ID NO: 3116966 - RNA, 12 nt, Human
ugguggcagcug

SEQ ID NO: 3116967 - RNA, 20 nt, Human
ugguucaggguuggccccug

SEQ ID NO: 3116968 - RNA, 22 nt, Human
ugguucaggguuggccccugcc

SEQ ID NO: 3116969 - RNA, 17 nt, Human
ugguguuuccuggcacu

SEQ ID NO: 3116970 - RNA, 15 nt, Human
ugguguuuccuggca

SEQ ID NO: 3116971 - RNA, 14 nt, Human
ugguuauggagagg

SEQ ID NO: 3116972 - RNA, 13 nt, Human
uguaaggaaugau

SEQ ID NO: 3116973 - RNA, 15 nt, Human
uguaaggaaugauua

SEQ ID NO: 3116974 - RNA, 14 nt, Human
uguaaggaaugauu

SEQ ID NO: 3116975 - RNA, 22 nt, Human
uguaagcucuacugaggugcua

SEQ ID NO: 3116976 - RNA, 14 nt, Human
agguggggcagcuu

SEQ ID NO: 3116977 - RNA, 23 nt, Human
agguggggucacucuggcagcuc

SEQ ID NO: 3116978 - RNA, 13 nt, Human
agguggggcagcu

SEQ ID NO: 3116979 - RNA, 23 nt, Human
aggugugaaccaccacacccagc

SEQ ID NO: 3116980 - RNA, 18 nt, Human
aggugugacugaauuucu

SEQ ID NO: 3116981 - RNA, 22 nt, Human
aggugugaaccaccacacccag

SEQ ID NO: 3116982 - RNA, 20 nt, Human
aggugugacugaauuucuuu

SEQ ID NO: 3116983 - RNA, 14 nt, Human
aggugugagucacc

SEQ ID NO: 3116984 - RNA, 19 nt, Human
uguacaaaguagaagucuu

SEQ ID NO: 3116985 - RNA, 23 nt, Human
uguacaaaguagaagucuuagau

SEQ ID NO: 3116986 - RNA, 17 nt, Human
uguaauuugugauacaa

SEQ ID NO: 3116987 - RNA, 21 nt, Human
uguaauuugugauacaaugcu

SEQ ID NO: 3116988 - RNA, 18 nt, Human
uguaaggaaugauuaauu

SEQ ID NO: 3116989 - RNA, 16 nt, Human
uguaauuugugauaca

SEQ ID NO: 3116990 - RNA, 19 nt, Human
uguacaugaaaacacauuu

SEQ ID NO: 3116991 - RNA, 17 nt, Human
uguacaugaaaacacau

SEQ ID NO: 3116992 - RNA, 18 nt, Human
uguacaugaaaacacauu

SEQ ID NO: 3116993 - RNA, 20 nt, Human
auaacauguaauuaaguacu

SEQ ID NO: 3116994 - RNA, 23 nt, Human
uuaccauuuugggguacccacug

SEQ ID NO: 3116995 - RNA, 22 nt, Human
uuacaggaaguacuggagaaaa

SEQ ID NO: 3116996 - RNA, 18 nt, Human
uuacaggaaguacuggag

SEQ ID NO: 3116997 - RNA, 16 nt, Human
uuacaggaaguacugg

SEQ ID NO: 3116998 - RNA, 15 nt, Human
uuacaggaaguacug

SEQ ID NO: 3116999 - RNA, 13 nt, Human
auaaacuuuaccu

SEQ ID NO: 3117000 - RNA, 15 nt, Human
auaaacuuuaccuuu

SEQ ID NO: 3117001 - RNA, 23 nt, Human
auaagaaccuuuugagugccuua

SEQ ID NO: 3117002 - RNA, 17 nt, Human
auaaguuaacuuccaau

SEQ ID NO: 3117003 - RNA, 22 nt, Human
auaagaaccuuuugagugccuu

SEQ ID NO: 3117004 - RNA, 23 nt, Human
auaauacaccacuacauucuguu

SEQ ID NO: 3117005 - RNA, 21 nt, Human
auaauacaccacuacauucug

SEQ ID NO: 3117006 - RNA, 22 nt, Human
auaaguuaacuuccaauuuaca

SEQ ID NO: 3117007 - RNA, 14 nt, Human
auaauucuacuuug

SEQ ID NO: 3117008 - RNA, 19 nt, Human
auaauacaguaucucaggg

SEQ ID NO: 3117009 - RNA, 13 nt, Human
uuauacauaaaca

SEQ ID NO: 3117010 - RNA, 12 nt, Human
auacaaaagcau

SEQ ID NO: 3117011 - RNA, 13 nt, Human
auacaaaagcaug

SEQ ID NO: 3117012 - RNA, 15 nt, Human
auacaaaagcaugug

SEQ ID NO: 3117013 - RNA, 16 nt, Human
auacauuugauaaagu

SEQ ID NO: 3117014 - RNA, 14 nt, Human
auacaggaaaagcu

SEQ ID NO: 3117015 - RNA, 19 nt, Human
auacaggaaaagcugcuga

SEQ ID NO: 3117016 - RNA, 20 nt, Human
auacaggaaaagcugcugac

SEQ ID NO: 3117017 - RNA, 13 nt, Human
auacuacaguuug

SEQ ID NO: 3117018 - RNA, 15 nt, Human
auacuacaguuuguu

SEQ ID NO: 3117019 - RNA, 16 nt, Human
auacuacaguuuguua

SEQ ID NO: 3117020 - RNA, 20 nt, Human
auacuacaguuuguuaguau

SEQ ID NO: 3117021 - RNA, 21 nt, Human
auacuaaccagcagaaaugcc

SEQ ID NO: 3117022 - RNA, 17 nt, Human
auaccagccaguaaaug

SEQ ID NO: 3117023 - RNA, 19 nt, Human
auaccagccaguaaauggg

SEQ ID NO: 3117024 - RNA, 20 nt, Human
agugggggaguggccacaga

SEQ ID NO: 3117025 - RNA, 19 nt, Human
agugggggaguggccacag

SEQ ID NO: 3117026 - RNA, 18 nt, Human
agugggugaauaauacag

SEQ ID NO: 3117027 - RNA, 13 nt, Human
agugggugaauaa

SEQ ID NO: 3117028 - RNA, 11 nt, Human
aguggcagcug

SEQ ID NO: 3117029 - RNA, 12 nt, Human
aguggcagcugc

SEQ ID NO: 3117030 - RNA, 13 nt, Human
aguggcagcugcu

SEQ ID NO: 3117031 - RNA, 14 nt, Human
aguggcagcugcuu

SEQ ID NO: 3117032 - RNA, 20 nt, Human
aguggcagcugcuuuugucu

SEQ ID NO: 3117033 - RNA, 19 nt, Human
agugggugaauaauacagu

SEQ ID NO: 3117034 - RNA, 21 nt, Human
agugguuccuaauccucuagg

SEQ ID NO: 3117035 - RNA, 21 nt, Human
aguguacauggaauaacaugu

SEQ ID NO: 3117036 - RNA, 22 nt, Human
aguguacauggaauaacaugua

SEQ ID NO: 3117037 - RNA, 23 nt, Human
aguguacauggaauaacauguaa

SEQ ID NO: 3117038 - RNA, 19 nt, Human
uguucuuucacccuuuucu

SEQ ID NO: 3117039 - RNA, 13 nt, Human
uguucuuuccaaa

SEQ ID NO: 3117040 - RNA, 14 nt, Human
uguucuuuccaaag

SEQ ID NO: 3117041 - RNA, 17 nt, Human
uguucuugguuuguaaa

SEQ ID NO: 3117042 - RNA, 18 nt, Human
uguucuugguuuguaaau

SEQ ID NO: 3117043 - RNA, 14 nt, Human
uguucugggacaca

SEQ ID NO: 3117044 - RNA, 15 nt, Human
uguucugggacacag

SEQ ID NO: 3117045 - RNA, 14 nt, Human
uguucuuaauucuu

SEQ ID NO: 3117046 - RNA, 16 nt, Human
uguucuuaauucuuag

SEQ ID NO: 3117047 - RNA, 12 nt, Human
uguucugggaca

SEQ ID NO: 3117048 - RNA, 13 nt, Human
uguucugggacac

SEQ ID NO: 3117049 - RNA, 13 nt, Human
uguugucagcuga

SEQ ID NO: 3117050 - RNA, 16 nt, Human
uguugggccaggagcc

SEQ ID NO: 3117051 - RNA, 13 nt, Human
uguugggccagga

SEQ ID NO: 3117052 - RNA, 21 nt, Human
aguuauuuuuauuuauuuaaa

SEQ ID NO: 3117053 - RNA, 18 nt, Human
uguucuuuccaaaguaca

SEQ ID NO: 3117054 - RNA, 14 nt, Human
aguugauagcacag

SEQ ID NO: 3117055 - RNA, 21 nt, Human
aguugauagcacagacccugc

SEQ ID NO: 3117056 - RNA, 20 nt, Human
aguugauagcacagacccug

SEQ ID NO: 3117057 - RNA, 19 nt, Human
aguugauagcacagacccu

SEQ ID NO: 3117058 - RNA, 15 nt, Human
aguugauagcacaga

SEQ ID NO: 3117059 - RNA, 13 nt, Human
aguugauucagcu

SEQ ID NO: 3117060 - RNA, 23 nt, Human
aguugauagcacagacccugccc

SEQ ID NO: 3117061 - RNA, 22 nt, Human
aguugauagcacagacccugcc

SEQ ID NO: 3117062 - RNA, 18 nt, Human
aguugauucagcucugca

SEQ ID NO: 3117063 - RNA, 17 nt, Human
aguugauucagcucugc

SEQ ID NO: 3117064 - RNA, 15 nt, Human
aguugauucagcucu

SEQ ID NO: 3117065 - RNA, 14 nt, Human
aguugauucagcuc

SEQ ID NO: 3117066 - RNA, 23 nt, Human
aguugauucagcucugcaagaau

SEQ ID NO: 3117067 - RNA, 15 nt, Human
uguuuggggaugaga

SEQ ID NO: 3117068 - RNA, 14 nt, Human
uguugucagcugaa

SEQ ID NO: 3117069 - RNA, 16 nt, Human
uguuugccucugccuc

SEQ ID NO: 3117070 - RNA, 14 nt, Human
uguuugccucugcc

SEQ ID NO: 3117071 - RNA, 15 nt, Human
uguuuucaguguaca

SEQ ID NO: 3117072 - RNA, 21 nt, Human
uguuuuauuuuaauucaguug

SEQ ID NO: 3117073 - RNA, 15 nt, Human
uguuuucucuugaga

SEQ ID NO: 3117074 - RNA, 12 nt, Human
aguucucuccuu

SEQ ID NO: 3117075 - RNA, 13 nt, Human
aguucucuccuuc

SEQ ID NO: 3117076 - RNA, 16 nt, Human
aguucucuccuucuuc

SEQ ID NO: 3117077 - RNA, 13 nt, Human
uuaaauaaaucau

SEQ ID NO: 3117078 - RNA, 15 nt, Human
uuaaauaaaucauaa

SEQ ID NO: 3117079 - RNA, 19 nt, Human
uuaaauaaugugaaacugg

SEQ ID NO: 3117080 - RNA, 22 nt, Human
uuaaauaaugugaaacuggauu

SEQ ID NO: 3117081 - RNA, 20 nt, Human
uuaaauaaugugaaacugga

SEQ ID NO: 3117082 - RNA, 21 nt, Human
uuaaauaaugugaaacuggau

SEQ ID NO: 3117083 - RNA, 17 nt, Human
uuaaaccgccaaggcug

SEQ ID NO: 3117084 - RNA, 18 nt, Human
uuaaaaaguggaaaaaua

SEQ ID NO: 3117085 - RNA, 17 nt, Human
uuaaaacaacacucaca

SEQ ID NO: 3117086 - RNA, 20 nt, Human
aguugccagucaccccggcc

SEQ ID NO: 3117087 - RNA, 22 nt, Human
aguuuucacucuuauugcccac

SEQ ID NO: 3117088 - RNA, 16 nt, Human
uuaaauucuugcaaag

SEQ ID NO: 3117089 - RNA, 13 nt, Human
uuaaauucuugca

SEQ ID NO: 3117090 - RNA, 15 nt, Human
aguuucuccaagcag

SEQ ID NO: 3117091 - RNA, 13 nt, Human
aguuucuccaagc

SEQ ID NO: 3117092 - RNA, 23 nt, Human
augaguccccuguuuguuucuga

SEQ ID NO: 3117093 - RNA, 22 nt, Human
augaggucagagccugcaguua

SEQ ID NO: 3117094 - RNA, 17 nt, Human
augagccucagcauccu

SEQ ID NO: 3117095 - RNA, 18 nt, Human
augagccucagcauccug

SEQ ID NO: 3117096 - RNA, 15 nt, Human
augauaaaacacaaa

SEQ ID NO: 3117097 - RNA, 18 nt, Human
uugucacacacuuuggcu

SEQ ID NO: 3117098 - RNA, 16 nt, Human
uuguccccgacccuug

SEQ ID NO: 3117099 - RNA, 15 nt, Human
augagcaucaggcca

SEQ ID NO: 3117100 - RNA, 17 nt, Human
augagcaucaggccagg

SEQ ID NO: 3117101 - RNA, 16 nt, Human
augagcaucaggccag

SEQ ID NO: 3117102 - RNA, 21 nt, Human
augagcaucaggccaggcccu

SEQ ID NO: 3117103 - RNA, 20 nt, Human
augagcaucaggccaggccc

SEQ ID NO: 3117104 - RNA, 19 nt, Human
augagcaucaggccaggcc

SEQ ID NO: 3117105 - RNA, 18 nt, Human
augagcaucaggccaggc

SEQ ID NO: 3117106 - RNA, 22 nt, Human
augagcaucaggccaggcccuc

SEQ ID NO: 3117107 - RNA, 12 nt, Human
augagccucagc

SEQ ID NO: 3117108 - RNA, 15 nt, Human
augagccucagcauc

SEQ ID NO: 3117109 - RNA, 16 nt, Human
augagccucagcaucc

SEQ ID NO: 3117110 - RNA, 16 nt, Human
augagaggaaaucacc

SEQ ID NO: 3117111 - RNA, 15 nt, Human
augagaggaaaucac

SEQ ID NO: 3117112 - RNA, 14 nt, Human
augagaggaaauca

SEQ ID NO: 3117113 - RNA, 13 nt, Human
augagaggaaauc

SEQ ID NO: 3117114 - RNA, 12 nt, Human
augagaggaaau

SEQ ID NO: 3117115 - RNA, 18 nt, Human
augaucacggcucacugc

SEQ ID NO: 3117116 - RNA, 19 nt, Human
augaucacggcucacugca

SEQ ID NO: 3117117 - RNA, 15 nt, Human
augaucacggcucac

SEQ ID NO: 3117118 - RNA, 23 nt, Human
augaucacggcucacugcagccu

SEQ ID NO: 3117119 - RNA, 16 nt, Human
augauccuaggcauuu

SEQ ID NO: 3117120 - RNA, 14 nt, Human
augaucuucuuuau

SEQ ID NO: 3117121 - RNA, 19 nt, Human
augcaccuggaauauauaa

SEQ ID NO: 3117122 - RNA, 22 nt, Human
augcaaaccaucauugaaaucu

SEQ ID NO: 3117123 - RNA, 21 nt, Human
augcaaaccaucauugaaauc

SEQ ID NO: 3117124 - RNA, 20 nt, Human
augcaaaccaucauugaaau

SEQ ID NO: 3117125 - RNA, 19 nt, Human
augcaaaccaucauugaaa

SEQ ID NO: 3117126 - RNA, 18 nt, Human
augcaaaccaucauugaa

SEQ ID NO: 3117127 - RNA, 16 nt, Human
augcaaaccaucauug

SEQ ID NO: 3117128 - RNA, 15 nt, Human
augaucuucuuuaua

SEQ ID NO: 3117129 - RNA, 22 nt, Human
augcaaggucauuuuuuuuaag

SEQ ID NO: 3117130 - RNA, 16 nt, Human
augcaccuggaauaua

SEQ ID NO: 3117131 - RNA, 14 nt, Human
augcaccuggaaua

SEQ ID NO: 3117132 - RNA, 14 nt, Human
augcaaggucauuu

SEQ ID NO: 3117133 - RNA, 16 nt, Human
augcaaggucauuuuu

SEQ ID NO: 3117134 - RNA, 20 nt, Human
augacacgaauauugcugau

SEQ ID NO: 3117135 - RNA, 19 nt, Human
augacacgaauauugcuga

SEQ ID NO: 3117136 - RNA, 20 nt, Human
uuguaaggaaugauuaauua

SEQ ID NO: 3117137 - RNA, 17 nt, Human
uugggguacccacugcu

SEQ ID NO: 3117138 - RNA, 19 nt, Human
uuggggaagaacgaagcca

SEQ ID NO: 3117139 - RNA, 13 nt, Human
augaaccacaucu

SEQ ID NO: 3117140 - RNA, 20 nt, Human
augaaccacaucuugcucug

SEQ ID NO: 3117141 - RNA, 22 nt, Human
uugggguacccacugcucuggu

SEQ ID NO: 3117142 - RNA, 19 nt, Human
uugguuaggcauuguggga

SEQ ID NO: 3117143 - RNA, 14 nt, Human
uuguaaggaaugau

SEQ ID NO: 3117144 - RNA, 20 nt, Human
augaaagacuguacaaagua

SEQ ID NO: 3117145 - RNA, 19 nt, Human
augaaagacuguacaaagu

SEQ ID NO: 3117146 - RNA, 18 nt, Human
uuggaaagaguaggaaga

SEQ ID NO: 3117147 - RNA, 21 nt, Human
uuggcuagagguucaaagaua

SEQ ID NO: 3117148 - RNA, 22 nt, Human
uuggcuaggaccccuccaugug

SEQ ID NO: 3117149 - RNA, 22 nt, Human
uuggcuagagguucaaagauau

SEQ ID NO: 3117150 - RNA, 13 nt, Human
uuggcugcaggga

SEQ ID NO: 3117151 - RNA, 14 nt, Human
uuggcugcagggag

SEQ ID NO: 3117152 - RNA, 15 nt, Human
uuggcugcugaaggc

SEQ ID NO: 3117153 - RNA, 11 nt, Human
uuggcugcuga

SEQ ID NO: 3117154 - RNA, 20 nt, Human
uugcuaagugaggaugaaaa

SEQ ID NO: 3117155 - RNA, 19 nt, Human
uugcugaauacagaggcaa

SEQ ID NO: 3117156 - RNA, 18 nt, Human
uugcugauggugcaauga

SEQ ID NO: 3117157 - RNA, 17 nt, Human
uugcugauggugcaaug

SEQ ID NO: 3117158 - RNA, 17 nt, Human
uuggaaagaguaggaag

SEQ ID NO: 3117159 - RNA, 11 nt, Human
uuuccuucagu

SEQ ID NO: 3117160 - RNA, 15 nt, Human
uuuccuucagugccu

SEQ ID NO: 3117161 - RNA, 12 nt, Human
uuuccuucagug

SEQ ID NO: 3117162 - RNA, 12 nt, Human
uuuccugugucu

SEQ ID NO: 3117163 - RNA, 23 nt, Human
uuuccuucauucaacccaccugc

SEQ ID NO: 3117164 - RNA, 21 nt, Human
uuuccuucagugccuuaugga

SEQ ID NO: 3117165 - RNA, 18 nt, Human
uuuccuucagugccuuau

SEQ ID NO: 3117166 - RNA, 22 nt, Human
uuuccuucagugccuuauggaa

SEQ ID NO: 3117167 - RNA, 21 nt, Human
uuuccuucauucaacccaccu

SEQ ID NO: 3117168 - RNA, 22 nt, Human
uuucgcaggauucuuccucccu

SEQ ID NO: 3117169 - RNA, 18 nt, Human
uuucgcaggauucuuccu

SEQ ID NO: 3117170 - RNA, 13 nt, Human
augggagcucaug

SEQ ID NO: 3117171 - RNA, 18 nt, Human
augggcaacccccagccu

SEQ ID NO: 3117172 - RNA, 19 nt, Human
augggcaacccccagccug

SEQ ID NO: 3117173 - RNA, 21 nt, Human
augggcaacccccagccugcu

SEQ ID NO: 3117174 - RNA, 15 nt, Human
augggccuccugugu

SEQ ID NO: 3117175 - RNA, 15 nt, Human
augggcagagcagag

SEQ ID NO: 3117176 - RNA, 14 nt, Human
augggcagagcaga

SEQ ID NO: 3117177 - RNA, 13 nt, Human
augggcagagcag

SEQ ID NO: 3117178 - RNA, 21 nt, Human
auggacccaauauuuaccaga

SEQ ID NO: 3117179 - RNA, 19 nt, Human
auggacaugaucuucuuua

SEQ ID NO: 3117180 - RNA, 18 nt, Human
auggccucuucagaucuc

SEQ ID NO: 3117181 - RNA, 16 nt, Human
uuucugccgcagcccu

SEQ ID NO: 3117182 - RNA, 14 nt, Human
uuucugccgcagcc

SEQ ID NO: 3117183 - RNA, 21 nt, Human
uuucugcagccacuauuguua

SEQ ID NO: 3117184 - RNA, 15 nt, Human
uuucuaugacacaug

SEQ ID NO: 3117185 - RNA, 21 nt, Human
uuucuaugacacaugcaaggu

SEQ ID NO: 3117186 - RNA, 13 nt, Human
uuucuuuguggcu

SEQ ID NO: 3117187 - RNA, 13 nt, Human
auggggcccugcc

SEQ ID NO: 3117188 - RNA, 14 nt, Human
auggggcccugccu

SEQ ID NO: 3117189 - RNA, 23 nt, Human
augggcuggguucuacccaggug

SEQ ID NO: 3117190 - RNA, 19 nt, Human
uuuccagguuuaagcuguu

SEQ ID NO: 3117191 - RNA, 24 nt, Human
uuucacucuuauugcccacgcugg

SEQ ID NO: 3117192 - RNA, 15 nt, Human
uuucacucuccuugg

SEQ ID NO: 3117193 - RNA, 14 nt, Human
uuucacucuccuug

SEQ ID NO: 3117194 - RNA, 17 nt, Human
auggaacacucugagac

SEQ ID NO: 3117195 - RNA, 18 nt, Human
auggaacacucugagacu

SEQ ID NO: 3117196 - RNA, 21 nt, Human
auggaaguacuauaauuuacc

SEQ ID NO: 3117197 - RNA, 14 nt, Human
auggaauaacaugu

SEQ ID NO: 3117198 - RNA, 15 nt, Human
auggaauaacaugua

SEQ ID NO: 3117199 - RNA, 19 nt, Human
augcugugcccuaaagugu

SEQ ID NO: 3117200 - RNA, 22 nt, Human
augcuggcuguuggcugggggc

SEQ ID NO: 3117201 - RNA, 14 nt, Human
uuuaccuuuuuuau

SEQ ID NO: 3117202 - RNA, 19 nt, Human
uuuaccuuuuuuauacaua

SEQ ID NO: 3117203 - RNA, 20 nt, Human
uuuaccuuuuuuauacauaa

SEQ ID NO: 3117204 - RNA, 17 nt, Human
augcuacacacugcaug

SEQ ID NO: 3117205 - RNA, 22 nt, Human
uuuaccugaagucuuuguacag

SEQ ID NO: 3117206 - RNA, 18 nt, Human
augcuacacacugcaugu

SEQ ID NO: 3117207 - RNA, 18 nt, Human
uuuacuaauagacaauuu

SEQ ID NO: 3117208 - RNA, 14 nt, Human
uuuacuaauagaca

SEQ ID NO: 3117209 - RNA, 17 nt, Human
uuuacuaauagacaauu

SEQ ID NO: 3117210 - RNA, 21 nt, Human
uuuaccuuuuuuauacauaaa

SEQ ID NO: 3117211 - RNA, 18 nt, Human
uuuagaguugauacuaca

SEQ ID NO: 3117212 - RNA, 13 nt, Human
uuuagauaauaca

SEQ ID NO: 3117213 - RNA, 15 nt, Human
uuuagauaauacacc

SEQ ID NO: 3117214 - RNA, 19 nt, Human
uuuauuaaaugcccagccc

SEQ ID NO: 3117215 - RNA, 21 nt, Human
auccugagccagauuucacuc

SEQ ID NO: 3117216 - RNA, 17 nt, Human
auccugagccagauuuc

SEQ ID NO: 3117217 - RNA, 15 nt, Human
auccugagccagauu

SEQ ID NO: 3117218 - RNA, 14 nt, Human
auccugagccagau

SEQ ID NO: 3117219 - RNA, 11 nt, Human
auccugagcca

SEQ ID NO: 3117220 - RNA, 13 nt, Human
auccugagccaga

SEQ ID NO: 3117221 - RNA, 12 nt, Human
auccugagccag

SEQ ID NO: 3117222 - RNA, 17 nt, Human
auccucuuugagugaag

SEQ ID NO: 3117223 - RNA, 20 nt, Human
auccucuguacagagcccac

SEQ ID NO: 3117224 - RNA, 18 nt, Human
auccucuguacagagccc

SEQ ID NO: 3117225 - RNA, 20 nt, Human
uucuuuugccguuauuaaaa

SEQ ID NO: 3117226 - RNA, 22 nt, Human
auccuggcacccggccccugcu

SEQ ID NO: 3117227 - RNA, 23 nt, Human
auccuggcacccggccccugcug

SEQ ID NO: 3117228 - RNA, 15 nt, Human
auccuggaguucugg

SEQ ID NO: 3117229 - RNA, 17 nt, Human
auccuggcacccggccc

SEQ ID NO: 3117230 - RNA, 19 nt, Human
auccuggcacccggccccu

SEQ ID NO: 3117231 - RNA, 20 nt, Human
auccuggcacccggccccug

SEQ ID NO: 3117232 - RNA, 21 nt, Human
auccuggcacccggccccugc

SEQ ID NO: 3117233 - RNA, 12 nt, Human
uugauaaaguaa

SEQ ID NO: 3117234 - RNA, 15 nt, Human
uugaggucuguucuu

SEQ ID NO: 3117235 - RNA, 16 nt, Human
uugaggucuguucuuu

SEQ ID NO: 3117236 - RNA, 17 nt, Human
uugaccauucuccaccu

SEQ ID NO: 3117237 - RNA, 19 nt, Human
uugaccauucuccaccugc

SEQ ID NO: 3117238 - RNA, 18 nt, Human
uugaccauucuccaccug

SEQ ID NO: 3117239 - RNA, 19 nt, Human
uugacagggcacaccgggc

SEQ ID NO: 3117240 - RNA, 24 nt, Human
uugaccauucuccaccugccaggg

SEQ ID NO: 3117241 - RNA, 14 nt, Human
aucgugacaacacu

SEQ ID NO: 3117242 - RNA, 15 nt, Human
aucgugacaacacuu

SEQ ID NO: 3117243 - RNA, 18 nt, Human
aucgucacugcuuaacuu

SEQ ID NO: 3117244 - RNA, 14 nt, Human
aucgucacugcuua

SEQ ID NO: 3117245 - RNA, 19 nt, Human
aucuaaauggaaccacucu

SEQ ID NO: 3117246 - RNA, 15 nt, Human
aucuaaauguugaaa

SEQ ID NO: 3117247 - RNA, 19 nt, Human
uucugcagccacuauuguu

SEQ ID NO: 3117248 - RNA, 20 nt, Human
uucucuaguuugauuaaauu

SEQ ID NO: 3117249 - RNA, 21 nt, Human
uucucuaguuugauuaaauuc

SEQ ID NO: 3117250 - RNA, 12 nt, Human
aucauugaaauc

SEQ ID NO: 3117251 - RNA, 23 nt, Human
aucauaguggcuuaaaacaacac

SEQ ID NO: 3117252 - RNA, 15 nt, Human
aucauaaaacuugau

SEQ ID NO: 3117253 - RNA, 21 nt, Human
aucauccacugugccaugugc

SEQ ID NO: 3117254 - RNA, 23 nt, Human
aucauccacugugccaugugcca

SEQ ID NO: 3117255 - RNA, 16 nt, Human
aucauuaggugugacu

SEQ ID NO: 3117256 - RNA, 17 nt, Human
aucaggugcugccaucc

SEQ ID NO: 3117257 - RNA, 15 nt, Human
aucaggugcugccau

SEQ ID NO: 3117258 - RNA, 14 nt, Human
aucaggugcugcca

SEQ ID NO: 3117259 - RNA, 19 nt, Human
aucagucugauucccaagc

SEQ ID NO: 3117260 - RNA, 22 nt, Human
aucccugaaggccccgcccagg

SEQ ID NO: 3117261 - RNA, 17 nt, Human
aucccugaaggccccgc

SEQ ID NO: 3117262 - RNA, 17 nt, Human
aucccaugagccucagc

SEQ ID NO: 3117263 - RNA, 18 nt, Human
aucccaugagccucagca

SEQ ID NO: 3117264 - RNA, 11 nt, Human
aucccagcccc

SEQ ID NO: 3117265 - RNA, 13 nt, Human
aucccaugagccu

SEQ ID NO: 3117266 - RNA, 16 nt, Human
aucccaugagccucag

SEQ ID NO: 3117267 - RNA, 17 nt, Human
auccagguucagcuugu

SEQ ID NO: 3117268 - RNA, 14 nt, Human
auccaguaucuuga

SEQ ID NO: 3117269 - RNA, 15 nt, Human
uucugccugcccagg

SEQ ID NO: 3117270 - RNA, 16 nt, Human
uucugccugcccaggc

SEQ ID NO: 3117271 - RNA, 22 nt, Human
uucuucuccacuuucuagccag

SEQ ID NO: 3117272 - RNA, 13 nt, Human
uucuugcaaagua

SEQ ID NO: 3117273 - RNA, 12 nt, Human
uucuuucuggcu

SEQ ID NO: 3117274 - RNA, 17 nt, Human
uucuuucuggcuaugca

SEQ ID NO: 3117275 - RNA, 20 nt, Human
uucuuucuggcuaugcauuu

SEQ ID NO: 3117276 - RNA, 21 nt, Human
uucuguuggccagugugacaa

SEQ ID NO: 3117277 - RNA, 13 nt, Human
uucuguuuagaua

SEQ ID NO: 3117278 - RNA, 18 nt, Human
uucuguuuagauaauaca

SEQ ID NO: 3117279 - RNA, 22 nt, Human
uuccuggcacugcuuccaguga

SEQ ID NO: 3117280 - RNA, 20 nt, Human
uuccuggcacugcuuccagu

SEQ ID NO: 3117281 - RNA, 19 nt, Human
uuccuggcacugcuuccag

SEQ ID NO: 3117282 - RNA, 22 nt, Human
uuccucuuuuuauuuaguuccu

SEQ ID NO: 3117283 - RNA, 20 nt, Human
uucccuuuuuuggcugcuga

SEQ ID NO: 3117284 - RNA, 14 nt, Human
aucacgccacugca

SEQ ID NO: 3117285 - RNA, 15 nt, Human
aucacgccacugcac

SEQ ID NO: 3117286 - RNA, 17 nt, Human
aucacgccacugcacua

SEQ ID NO: 3117287 - RNA, 21 nt, Human
aucaacugcaucaagauguga

SEQ ID NO: 3117288 - RNA, 17 nt, Human
auauuaccacagacaua

SEQ ID NO: 3117289 - RNA, 16 nt, Human
auauuaagaaagacua

SEQ ID NO: 3117290 - RNA, 15 nt, Human
auauuaagaaagacu

SEQ ID NO: 3117291 - RNA, 17 nt, Human
auauuaagaaagacuau

SEQ ID NO: 3117292 - RNA, 16 nt, Human
uuccagugaggcucug

SEQ ID NO: 3117293 - RNA, 15 nt, Human
uuccagugaggcucu

SEQ ID NO: 3117294 - RNA, 22 nt, Human
auauugcugauggugcaaugac

SEQ ID NO: 3117295 - RNA, 15 nt, Human
auauugauaugcuua

SEQ ID NO: 3117296 - RNA, 13 nt, Human
auauuguuuucag

SEQ ID NO: 3117297 - RNA, 17 nt, Human
uucagguaacaggcaga

SEQ ID NO: 3117298 - RNA, 14 nt, Human
uucaguaagccgug

SEQ ID NO: 3117299 - RNA, 21 nt, Human
auauauguuuuaagaggcagg

SEQ ID NO: 3117300 - RNA, 22 nt, Human
auauauguuuuaagaggcaggg

SEQ ID NO: 3117301 - RNA, 14 nt, Human
uucaggguuggccc

SEQ ID NO: 3117302 - RNA, 16 nt, Human
uucaggguuggccccu

SEQ ID NO: 3117303 - RNA, 17 nt, Human
uucaggguuggccccug

SEQ ID NO: 3117304 - RNA, 19 nt, Human
uucaggguuggccccugcc

SEQ ID NO: 3117305 - RNA, 22 nt, Human
uucaggguuggccccugcccgg

SEQ ID NO: 3117306 - RNA, 15 nt, Human
uucagguaacaggca

SEQ ID NO: 3117307 - RNA, 16 nt, Human
uucagguaacaggcag

SEQ ID NO: 3117308 - RNA, 16 nt, Human
uucagaaauguguuau

SEQ ID NO: 3117309 - RNA, 22 nt, Human
uuccaauuuacauacucugcuu

SEQ ID NO: 3117310 - RNA, 17 nt, Human
uuccagguuuaagcugu

SEQ ID NO: 3117311 - RNA, 18 nt, Human
uuccagguuuaagcuguu

SEQ ID NO: 3117312 - RNA, 17 nt, Human
uuccaggcugggagagc

SEQ ID NO: 3117313 - RNA, 15 nt, Human
uuccaggcugggaga

SEQ ID NO: 3117314 - RNA, 13 nt, Human
uuccaggcuggga

SEQ ID NO: 3117315 - RNA, 21 nt, Human
uuccacaagagcccaggccuc

SEQ ID NO: 3117316 - RNA, 21 nt, Human
auauguggaguucaucuugaa

SEQ ID NO: 3117317 - RNA, 20 nt, Human
auauguggaguucaucuuga

SEQ ID NO: 3117318 - RNA, 13 nt, Human
auuuauucugcuc

SEQ ID NO: 3117319 - RNA, 17 nt, Human
auuuccagccaaagccu

SEQ ID NO: 3117320 - RNA, 14 nt, Human
auuugaaaauuuug

SEQ ID NO: 3117321 - RNA, 15 nt, Human
auuuccguuaaaaua

SEQ ID NO: 3117322 - RNA, 16 nt, Human
auuuccguuaaaauac

SEQ ID NO: 3117323 - RNA, 14 nt, Human
auuuauucugcuca

SEQ ID NO: 3117324 - RNA, 12 nt, Human
auuuaacagaaa

SEQ ID NO: 3117325 - RNA, 14 nt, Human
auuuaacagaaaug

SEQ ID NO: 3117326 - RNA, 14 nt, Human
auuuacuucuuaua

SEQ ID NO: 3117327 - RNA, 16 nt, Human
auuuacuucuuauaca

SEQ ID NO: 3117328 - RNA, 15 nt, Human
auuuagaaauauaau

SEQ ID NO: 3117329 - RNA, 22 nt, Human
auuuauuaaaugcccagccccu

SEQ ID NO: 3117330 - RNA, 14 nt, Human
auugugucucuugg

SEQ ID NO: 3117331 - RNA, 14 nt, Human
auuuaaaaaaaauc

SEQ ID NO: 3117332 - RNA, 18 nt, Human
auugugucucuugguccu

SEQ ID NO: 3117333 - RNA, 20 nt, Human
auuguccccgacccuugccg

SEQ ID NO: 3117334 - RNA, 19 nt, Human
auuguccccgacccuugcc

SEQ ID NO: 3117335 - RNA, 17 nt, Human
auuguccccgacccuug

SEQ ID NO: 3117336 - RNA, 13 nt, Human
auucuuauuuaau

SEQ ID NO: 3117337 - RNA, 14 nt, Human
auucuuauuuaaug

SEQ ID NO: 3117338 - RNA, 18 nt, Human
auucuuauuuaaugaaag

SEQ ID NO: 3117339 - RNA, 13 nt, Human
auucuucuccacu

SEQ ID NO: 3117340 - RNA, 13 nt, Human
auucuuccucccu

SEQ ID NO: 3117341 - RNA, 22 nt, Human
auucuuccucccucccucuuuc

SEQ ID NO: 3117342 - RNA, 18 nt, Human
auugacaggauuauugga

SEQ ID NO: 3117343 - RNA, 15 nt, Human
auugaaaaaccauuu

SEQ ID NO: 3117344 - RNA, 21 nt, Human
auuuuacuuuaaaaggagcca

SEQ ID NO: 3117345 - RNA, 15 nt, Human
auuuuaauucaguug

SEQ ID NO: 3117346 - RNA, 14 nt, Human
auuugugauacaau

SEQ ID NO: 3117347 - RNA, 21 nt, Human
uuuuguuccacaaguuaaaua

SEQ ID NO: 3117348 - RNA, 15 nt, Human
uuuuguuccacaagu

SEQ ID NO: 3117349 - RNA, 17 nt, Human
uuuugugcauuaucuag

SEQ ID NO: 3117350 - RNA, 20 nt, Human
uuuugugcauuaucuagaua

SEQ ID NO: 3117351 - RNA, 22 nt, Human
uuuuuagacagagucucacugu

SEQ ID NO: 3117352 - RNA, 11 nt, Human
uuuuuacuaau

SEQ ID NO: 3117353 - RNA, 12 nt, Human
uuuuuauggcuu

SEQ ID NO: 3117354 - RNA, 20 nt, Human
uuuuuaucgucacugcuuaa

SEQ ID NO: 3117355 - RNA, 23 nt, Human
uuuugccauguuggccaggcugg

SEQ ID NO: 3117356 - RNA, 17 nt, Human
uuuugagugccuuacac

SEQ ID NO: 3117357 - RNA, 17 nt, Human
uuuugauccaagcuggu

SEQ ID NO: 3117358 - RNA, 14 nt, Human
auuaaguacuaugu

SEQ ID NO: 3117359 - RNA, 22 nt, Human
uuuuuauggcuuuugugcauua

SEQ ID NO: 3117360 - RNA, 20 nt, Human
uuuuuauggcuuuugugcau

SEQ ID NO: 3117361 - RNA, 21 nt, Human
uuuuuauggcuuuugugcauu

SEQ ID NO: 3117362 - RNA, 19 nt, Human
uuuuuguagagccaggguc

SEQ ID NO: 3117363 - RNA, 20 nt, Human
uuuuuguagagccagggucu

SEQ ID NO: 3117364 - RNA, 22 nt, Human
augugccagguuuuuggucuga

SEQ ID NO: 3117365 - RNA, 21 nt, Human
augugccagguuuuuggucug

SEQ ID NO: 3117366 - RNA, 20 nt, Human
auggggcccugccuccuuug

SEQ ID NO: 3117367 - RNA, 24 nt, Human
auguggaguucaucuugaauugua

SEQ ID NO: 3117368 - RNA, 20 nt, Human
auguggaguucaucuugaau

SEQ ID NO: 3117369 - RNA, 16 nt, Human
auguugcccaggcagg

SEQ ID NO: 3117370 - RNA, 17 nt, Human
auguugcccaggcaggu

SEQ ID NO: 3117371 - RNA, 12 nt, Human
auguugcccagg

SEQ ID NO: 3117372 - RNA, 20 nt, Human
auguugcccaggcaggucuu

SEQ ID NO: 3117373 - RNA, 14 nt, Human
uuuucaguguacau

SEQ ID NO: 3117374 - RNA, 11 nt, Human
uuuuauuuuau

SEQ ID NO: 3117375 - RNA, 13 nt, Human
uuuuauuaugcau

SEQ ID NO: 3117376 - RNA, 20 nt, Human
uuuucauuuaggugaggaag

SEQ ID NO: 3117377 - RNA, 15 nt, Human
auuaaaaaucucaaa

SEQ ID NO: 3117378 - RNA, 19 nt, Human
auuaaaaaucucaaauuuc

SEQ ID NO: 3117379 - RNA, 23 nt, Human
auuaaaacacaacaucuuuuucu

SEQ ID NO: 3117380 - RNA, 20 nt, Human
auuaaaaaucucaaauuucu

SEQ ID NO: 3117381 - RNA, 20 nt, Human
auucuccaccugccagggac

SEQ ID NO: 3117382 - RNA, 19 nt, Human
auucuccaccugccaggga

SEQ ID NO: 3117383 - RNA, 16 nt, Human
auucuccuuguguuac

SEQ ID NO: 3117384 - RNA, 20 nt, Human
auucuccugccucagccucc

SEQ ID NO: 3117385 - RNA, 19 nt, Human
auucuccugccucagccuc

SEQ ID NO: 3117386 - RNA, 15 nt, Human
auucuccugccucag

SEQ ID NO: 3117387 - RNA, 17 nt, Human
auucuccugccucagcc

SEQ ID NO: 3117388 - RNA, 11 nt, Human
auucuccugcc

SEQ ID NO: 3117389 - RNA, 14 nt, Human
auucuccugccuca

SEQ ID NO: 3117390 - RNA, 13 nt, Human
auucuccugccuc

SEQ ID NO: 3117391 - RNA, 21 nt, Human
auucuccaccugccagggaca

SEQ ID NO: 3117392 - RNA, 18 nt, Human
auucuccaccugccaggg

SEQ ID NO: 3117393 - RNA, 16 nt, Human
auucccaagcucugcu

SEQ ID NO: 3117394 - RNA, 14 nt, Human
auucccaagcucug

SEQ ID NO: 3117395 - RNA, 15 nt, Human
auucccaagcucugc

SEQ ID NO: 3117396 - RNA, 15 nt, Human
auucaguaauaacuc

SEQ ID NO: 3117397 - RNA, 19 nt, Human
auucaguaauaacucuacc

SEQ ID NO: 3117398 - RNA, 19 nt, Human
auucaggaagcucagggcc

SEQ ID NO: 3117399 - RNA, 17 nt, Human
auucaggaagcucaggg

SEQ ID NO: 3117400 - RNA, 19 nt, Human
auucagacagcugccuggg

SEQ ID NO: 3117401 - RNA, 14 nt, Human
auucaggaagcuca

SEQ ID NO: 3117402 - RNA, 21 nt, Human
ugacuguuuucucuugagagg

SEQ ID NO: 3117403 - RNA, 12 nt, Human
ugaccuuucaau

SEQ ID NO: 3117404 - RNA, 15 nt, Human
ugaccuuuaagagaa

SEQ ID NO: 3117405 - RNA, 17 nt, Human
agauuucacucuccuug

SEQ ID NO: 3117406 - RNA, 19 nt, Human
agauuucacucuccuuggu

SEQ ID NO: 3117407 - RNA, 13 nt, Human
agauucauauuua

SEQ ID NO: 3117408 - RNA, 16 nt, Human
agauucauauuuacuu

SEQ ID NO: 3117409 - RNA, 19 nt, Human
ugacuuacuguacaugaaa

SEQ ID NO: 3117410 - RNA, 12 nt, Human
ugacuuacugua

SEQ ID NO: 3117411 - RNA, 20 nt, Human
ugacuuacuguacaugaaaa

SEQ ID NO: 3117412 - RNA, 22 nt, Human
ugacagagugagacucugucuc

SEQ ID NO: 3117413 - RNA, 19 nt, Human
ugacacgaauauugcugau

SEQ ID NO: 3117414 - RNA, 16 nt, Human
ugacacgaauauugcu

SEQ ID NO: 3117415 - RNA, 13 nt, Human
ugacauguuuuau

SEQ ID NO: 3117416 - RNA, 17 nt, Human
ugacaggcaaugcuggc

SEQ ID NO: 3117417 - RNA, 19 nt, Human
ugacaggcaaugcuggcug

SEQ ID NO: 3117418 - RNA, 21 nt, Human
ugacagggcacaccgggcacu

SEQ ID NO: 3117419 - RNA, 22 nt, Human
ugacagggcacaccgggcacuc

SEQ ID NO: 3117420 - RNA, 20 nt, Human
ugagccagauuucacucucc

SEQ ID NO: 3117421 - RNA, 14 nt, Human
ugagccacugcacc

SEQ ID NO: 3117422 - RNA, 19 nt, Human
ugagccagauuucacucuc

SEQ ID NO: 3117423 - RNA, 18 nt, Human
ugagccagauuucacucu

SEQ ID NO: 3117424 - RNA, 12 nt, Human
ugagccacugca

SEQ ID NO: 3117425 - RNA, 13 nt, Human
ugagccacugcac

SEQ ID NO: 3117426 - RNA, 14 nt, Human
agcaaggagauuua

SEQ ID NO: 3117427 - RNA, 17 nt, Human
agcaaggagauuuacaa

SEQ ID NO: 3117428 - RNA, 19 nt, Human
agcaaggagauuuacaacu

SEQ ID NO: 3117429 - RNA, 16 nt, Human
agcaagugagacccug

SEQ ID NO: 3117430 - RNA, 15 nt, Human
agcaagugagagcug

SEQ ID NO: 3117431 - RNA, 16 nt, Human
agcaagugagagcugg

SEQ ID NO: 3117432 - RNA, 17 nt, Human
agcaagugagagcuggg

SEQ ID NO: 3117433 - RNA, 21 nt, Human
agcacagcuucauuuccugug

SEQ ID NO: 3117434 - RNA, 16 nt, Human
agcacaugccucucuc

SEQ ID NO: 3117435 - RNA, 18 nt, Human
agcacaugccucucucag

SEQ ID NO: 3117436 - RNA, 22 nt, Human
agcacaugccucucucaggcca

SEQ ID NO: 3117437 - RNA, 21 nt, Human
agcacaugccucucucaggcc

SEQ ID NO: 3117438 - RNA, 20 nt, Human
agcacaugccucucucaggc

SEQ ID NO: 3117439 - RNA, 19 nt, Human
agcacaugccucucucagg

SEQ ID NO: 3117440 - RNA, 23 nt, Human
agcacaugccucucucaggccaa

SEQ ID NO: 3117441 - RNA, 16 nt, Human
agcaccaucucuccuc

SEQ ID NO: 3117442 - RNA, 13 nt, Human
agcaccuccugcc

SEQ ID NO: 3117443 - RNA, 14 nt, Human
agcaccuccugccu

SEQ ID NO: 3117444 - RNA, 16 nt, Human
agcaccuccugccucg

SEQ ID NO: 3117445 - RNA, 20 nt, Human
ugagaagcagaggaaggaga

SEQ ID NO: 3117446 - RNA, 11 nt, Human
ugagacagagu

SEQ ID NO: 3117447 - RNA, 21 nt, Human
ugagacagaguuuucacucuu

SEQ ID NO: 3117448 - RNA, 13 nt, Human
ugagacagcccgg

SEQ ID NO: 3117449 - RNA, 20 nt, Human
ugagacucugucucaaaaaa

SEQ ID NO: 3117450 - RNA, 22 nt, Human
ugagacagcccgggcucugccu

SEQ ID NO: 3117451 - RNA, 20 nt, Human
ugagacagcccgggcucugc

SEQ ID NO: 3117452 - RNA, 19 nt, Human
ugagacagcccgggcucug

SEQ ID NO: 3117453 - RNA, 18 nt, Human
ugagacagcccgggcucu

SEQ ID NO: 3117454 - RNA, 17 nt, Human
ugagacagcccgggcuc

SEQ ID NO: 3117455 - RNA, 14 nt, Human
ugagaggaaaucac

SEQ ID NO: 3117456 - RNA, 13 nt, Human
ugagaggaaauca

SEQ ID NO: 3117457 - RNA, 12 nt, Human
ugagaggaaauc

SEQ ID NO: 3117458 - RNA, 11 nt, Human
ugagaggaaau

SEQ ID NO: 3117459 - RNA, 14 nt, Human
ugagagcugggugu

SEQ ID NO: 3117460 - RNA, 10 nt, Human
ugagaggaaa

SEQ ID NO: 3117461 - RNA, 23 nt, Human
ugagaggacuuuucuuuguggcu

SEQ ID NO: 3117462 - RNA, 17 nt, Human
ugagaggaaaucaccga

SEQ ID NO: 3117463 - RNA, 23 nt, Human
agagaccaucccugaaggccccg

SEQ ID NO: 3117464 - RNA, 22 nt, Human
agagaccaucccugaaggcccc

SEQ ID NO: 3117465 - RNA, 18 nt, Human
agagaccaucccugaagg

SEQ ID NO: 3117466 - RNA, 21 nt, Human
agagaccaucccugaaggccc

SEQ ID NO: 3117467 - RNA, 19 nt, Human
agagaccaucccugaaggc

SEQ ID NO: 3117468 - RNA, 22 nt, Human
ugaaagacuguacaaaguagaa

SEQ ID NO: 3117469 - RNA, 18 nt, Human
ugaaagacuguacaaagu

SEQ ID NO: 3117470 - RNA, 19 nt, Human
ugaaagacuguacaaagua

SEQ ID NO: 3117471 - RNA, 16 nt, Human
ugaaagacuguacaaa

SEQ ID NO: 3117472 - RNA, 11 nt, Human
agagacuccug

SEQ ID NO: 3117473 - RNA, 12 nt, Human
agagacuccugc

SEQ ID NO: 3117474 - RNA, 14 nt, Human
agagacuccugcag

SEQ ID NO: 3117475 - RNA, 13 nt, Human
agagacuccugca

SEQ ID NO: 3117476 - RNA, 14 nt, Human
ugaaaacacauuuu

SEQ ID NO: 3117477 - RNA, 12 nt, Human
ugaaaacacauu

SEQ ID NO: 3117478 - RNA, 13 nt, Human
ugaaaacacauuu

SEQ ID NO: 3117479 - RNA, 15 nt, Human
ugaaaacacauuuuu

SEQ ID NO: 3117480 - RNA, 17 nt, Human
ugaaaacacauuuuucu

SEQ ID NO: 3117481 - RNA, 19 nt, Human
ugaaaacacauuuuucuua

SEQ ID NO: 3117482 - RNA, 17 nt, Human
ugaaacuggauuaaacu

SEQ ID NO: 3117483 - RNA, 18 nt, Human
ugaaacuggauuaaacuu

SEQ ID NO: 3117484 - RNA, 13 nt, Human
agacuccugcagg

SEQ ID NO: 3117485 - RNA, 18 nt, Human
ucuuuaaugucacaggca

SEQ ID NO: 3117486 - RNA, 15 nt, Human
ucuuuaaugucacag

SEQ ID NO: 3117487 - RNA, 20 nt, Human
agacaggcaagcaccuccug

SEQ ID NO: 3117488 - RNA, 20 nt, Human
ucuuuguacagacaacaaac

SEQ ID NO: 3117489 - RNA, 15 nt, Human
ucuuuguacagacaa

SEQ ID NO: 3117490 - RNA, 14 nt, Human
ucuuuguacagaca

SEQ ID NO: 3117491 - RNA, 15 nt, Human
agacuuuggaaagac

SEQ ID NO: 3117492 - RNA, 15 nt, Human
agacuuuggaaagag

SEQ ID NO: 3117493 - RNA, 17 nt, Human
agacuuuggaaagacuu

SEQ ID NO: 3117494 - RNA, 20 nt, Human
agacugguuccauggccucu

SEQ ID NO: 3117495 - RNA, 15 nt, Human
agagacacaagccuu

SEQ ID NO: 3117496 - RNA, 19 nt, Human
agagacacaagccuucggc

SEQ ID NO: 3117497 - RNA, 16 nt, Human
agagacacaagccuuc

SEQ ID NO: 3117498 - RNA, 15 nt, Human
agacuuuuccaaccc

SEQ ID NO: 3117499 - RNA, 19 nt, Human
agacuuuggaaagaguagg

SEQ ID NO: 3117500 - RNA, 22 nt, Human
ugaagacaaugacuuacuguac

SEQ ID NO: 3117501 - RNA, 23 nt, Human
ugaagacaaugacuuacuguaca

SEQ ID NO: 3117502 - RNA, 21 nt, Human
ugaagacaaugacuuacugua

SEQ ID NO: 3117503 - RNA, 22 nt, Human
ugaaccaccacacccagcccac

SEQ ID NO: 3117504 - RNA, 21 nt, Human
ugaaccaccacacccagccca

SEQ ID NO: 3117505 - RNA, 19 nt, Human
ugaaauuuuuauuaaauua

SEQ ID NO: 3117506 - RNA, 20 nt, Human
ugaaauuuuuauuaaauuau

SEQ ID NO: 3117507 - RNA, 21 nt, Human
agaggcagccccauucugccu

SEQ ID NO: 3117508 - RNA, 22 nt, Human
agaggcagccccauucugccug

SEQ ID NO: 3117509 - RNA, 21 nt, Human
agaggcagggucucacucugu

SEQ ID NO: 3117510 - RNA, 23 nt, Human
agaggcagccccauucugccugc

SEQ ID NO: 3117511 - RNA, 15 nt, Human
agagggagguaagga

SEQ ID NO: 3117512 - RNA, 15 nt, Human
agagggagugacaga

SEQ ID NO: 3117513 - RNA, 20 nt, Human
agagggagugacagaggcag

SEQ ID NO: 3117514 - RNA, 13 nt, Human
agagguucaaaga

SEQ ID NO: 3117515 - RNA, 22 nt, Human
agaggcugccucucccaucacu

SEQ ID NO: 3117516 - RNA, 20 nt, Human
agagguucaaagauauuuug

SEQ ID NO: 3117517 - RNA, 16 nt, Human
agagguucaaagauau

SEQ ID NO: 3117518 - RNA, 19 nt, Human
agagguucaaagauauuuu

SEQ ID NO: 3117519 - RNA, 15 nt, Human
ugaaguaauaugcac

SEQ ID NO: 3117520 - RNA, 16 nt, Human
ugaaguaauaugcaca

SEQ ID NO: 3117521 - RNA, 20 nt, Human
ugaaguaauaugcacacauu

SEQ ID NO: 3117522 - RNA, 21 nt, Human
ugaaguaauaugcacacauuu

SEQ ID NO: 3117523 - RNA, 22 nt, Human
ugaaguaauaugcacacauuuu

SEQ ID NO: 3117524 - RNA, 13 nt, Human
ugaagucacacag

SEQ ID NO: 3117525 - RNA, 12 nt, Human
ugaauaauacag

SEQ ID NO: 3117526 - RNA, 13 nt, Human
ugaauaauacagu

SEQ ID NO: 3117527 - RNA, 21 nt, Human
ucugaaggacauugcggacag

SEQ ID NO: 3117528 - RNA, 15 nt, Human
ucugacacacagcuc

SEQ ID NO: 3117529 - RNA, 13 nt, Human
ucugacacacagc

SEQ ID NO: 3117530 - RNA, 14 nt, Human
ucugacacacagcu

SEQ ID NO: 3117531 - RNA, 12 nt, Human
ucugacacacag

SEQ ID NO: 3117532 - RNA, 21 nt, Human
ucugagacucgcgacaaugca

SEQ ID NO: 3117533 - RNA, 17 nt, Human
ucugaucauccacugug

SEQ ID NO: 3117534 - RNA, 21 nt, Human
ucugaucauccacugugccau

SEQ ID NO: 3117535 - RNA, 16 nt, Human
ucugcacuccccugcu

SEQ ID NO: 3117536 - RNA, 15 nt, Human
ucugcacuccccugc

SEQ ID NO: 3117537 - RNA, 14 nt, Human
ucugcacuccccug

SEQ ID NO: 3117538 - RNA, 13 nt, Human
ucugcacuccccu

SEQ ID NO: 3117539 - RNA, 17 nt, Human
ucugcagcaauaaagca

SEQ ID NO: 3117540 - RNA, 14 nt, Human
agaaauguacagca

SEQ ID NO: 3117541 - RNA, 15 nt, Human
agaaauguacagcaa

SEQ ID NO: 3117542 - RNA, 15 nt, Human
ucugccgcagcccug

SEQ ID NO: 3117543 - RNA, 14 nt, Human
ucugccgcagcccu

SEQ ID NO: 3117544 - RNA, 19 nt, Human
ucugcccuccaagaccuuc

SEQ ID NO: 3117545 - RNA, 18 nt, Human
ucugcccuccaagaccuu

SEQ ID NO: 3117546 - RNA, 21 nt, Human
ucugcccacucccugcaaccu

SEQ ID NO: 3117547 - RNA, 18 nt, Human
ucugcccacucccugcaa

SEQ ID NO: 3117548 - RNA, 21 nt, Human
ucugccugcccaggccccugc

SEQ ID NO: 3117549 - RNA, 22 nt, Human
ucugccugcccaggccccugcc

SEQ ID NO: 3117550 - RNA, 22 nt, Human
ucugccgcagcccugcagaggg

SEQ ID NO: 3117551 - RNA, 23 nt, Human
ucugcccuugguuaggcauugug

SEQ ID NO: 3117552 - RNA, 17 nt, Human
ucugcucacauaucugu

SEQ ID NO: 3117553 - RNA, 19 nt, Human
ucugcucacauaucuguca

SEQ ID NO: 3117554 - RNA, 20 nt, Human
ucugcucacauaucugucau

SEQ ID NO: 3117555 - RNA, 13 nt, Human
ucugcuucagccu

SEQ ID NO: 3117556 - RNA, 14 nt, Human
ucugcuucagccuc

SEQ ID NO: 3117557 - RNA, 15 nt, Human
ucugcuucagccucc

SEQ ID NO: 3117558 - RNA, 17 nt, Human
ucugcccacucccugca

SEQ ID NO: 3117559 - RNA, 16 nt, Human
ucugcccacucccugc

SEQ ID NO: 3117560 - RNA, 22 nt, Human
agaagcccaggaaaggcuccag

SEQ ID NO: 3117561 - RNA, 21 nt, Human
agaagcccaggaaaggcucca

SEQ ID NO: 3117562 - RNA, 20 nt, Human
agaagcccaggaaaggcucc

SEQ ID NO: 3117563 - RNA, 18 nt, Human
agaagcccaggaaaggcu

SEQ ID NO: 3117564 - RNA, 16 nt, Human
agaagcccaggaaagg

SEQ ID NO: 3117565 - RNA, 12 nt, Human
agaagcccagga

SEQ ID NO: 3117566 - RNA, 18 nt, Human
agaagauuuugaaauuuu

SEQ ID NO: 3117567 - RNA, 23 nt, Human
agaaguuucugccgcagcccugc

SEQ ID NO: 3117568 - RNA, 22 nt, Human
agaaguuucugccgcagcccug

SEQ ID NO: 3117569 - RNA, 21 nt, Human
agaaguuucugccgcagcccu

SEQ ID NO: 3117570 - RNA, 12 nt, Human
agacacaggccc

SEQ ID NO: 3117571 - RNA, 13 nt, Human
agacacaggcccg

SEQ ID NO: 3117572 - RNA, 16 nt, Human
agacaggaccagggau

SEQ ID NO: 3117573 - RNA, 17 nt, Human
agacaccuugacagggc

SEQ ID NO: 3117574 - RNA, 18 nt, Human
agacaccuugacagggca

SEQ ID NO: 3117575 - RNA, 16 nt, Human
agacacauguccaaga

SEQ ID NO: 3117576 - RNA, 12 nt, Human
ucuguuggccag

SEQ ID NO: 3117577 - RNA, 17 nt, Human
ucuguuggccaguguga

SEQ ID NO: 3117578 - RNA, 22 nt, Human
ucuguucuuuccaaaguacacu

SEQ ID NO: 3117579 - RNA, 13 nt, Human
ucuguucuuucca

SEQ ID NO: 3117580 - RNA, 22 nt, Human
ucugugaaaggaaagagggagg

SEQ ID NO: 3117581 - RNA, 23 nt, Human
ucuaugggacucaaugcacugac

SEQ ID NO: 3117582 - RNA, 17 nt, Human
ucucacuauguugccca

SEQ ID NO: 3117583 - RNA, 19 nt, Human
ucucacuauguugcccagg

SEQ ID NO: 3117584 - RNA, 16 nt, Human
ucucacuauguugccc

SEQ ID NO: 3117585 - RNA, 23 nt, Human
ucuaguuguuugauucagacagc

SEQ ID NO: 3117586 - RNA, 21 nt, Human
ucuaguuugauuaaauucuug

SEQ ID NO: 3117587 - RNA, 22 nt, Human
ucuaguuguuugauucagacag

SEQ ID NO: 3117588 - RNA, 18 nt, Human
ucuagcauggcugccaau

SEQ ID NO: 3117589 - RNA, 15 nt, Human
acuguucucugcccu

SEQ ID NO: 3117590 - RNA, 18 nt, Human
acuguucucugcccucca

SEQ ID NO: 3117591 - RNA, 17 nt, Human
acuguucucugcccucc

SEQ ID NO: 3117592 - RNA, 16 nt, Human
acuguucucugcccuc

SEQ ID NO: 3117593 - RNA, 21 nt, Human
ucuacccuggcacuauaaugu

SEQ ID NO: 3117594 - RNA, 20 nt, Human
ucuacccagcgagcccuggu

SEQ ID NO: 3117595 - RNA, 19 nt, Human
ucuacccuggcacuauaau

SEQ ID NO: 3117596 - RNA, 14 nt, Human
ucuacccuggcacu

SEQ ID NO: 3117597 - RNA, 21 nt, Human
ucuacagaggccaugggccuc

SEQ ID NO: 3117598 - RNA, 19 nt, Human
ucuacccagcgagcccugg

SEQ ID NO: 3117599 - RNA, 16 nt, Human
ucuacagaggccaugg

SEQ ID NO: 3117600 - RNA, 18 nt, Human
uccugggagugagcuggu

SEQ ID NO: 3117601 - RNA, 15 nt, Human
acuuagguguggggg

SEQ ID NO: 3117602 - RNA, 22 nt, Human
acuuacuguacaugaaaacaca

SEQ ID NO: 3117603 - RNA, 17 nt, Human
acuuacacuuuaugcac

SEQ ID NO: 3117604 - RNA, 21 nt, Human
acuuacuguacaugaaaacac

SEQ ID NO: 3117605 - RNA, 16 nt, Human
acuuacuguacaugaa

SEQ ID NO: 3117606 - RNA, 13 nt, Human
acuuaagcacacu

SEQ ID NO: 3117607 - RNA, 17 nt, Human
acuuaaucuaaauggaa

SEQ ID NO: 3117608 - RNA, 19 nt, Human
acuuaaucuaaauggaacc

SEQ ID NO: 3117609 - RNA, 22 nt, Human
acuuaaucuaaauggaaccacu

SEQ ID NO: 3117610 - RNA, 16 nt, Human
acuuacacuuuaugca

SEQ ID NO: 3117611 - RNA, 20 nt, Human
acuuaaauaaugugaaacug

SEQ ID NO: 3117612 - RNA, 15 nt, Human
ucuccuccagaguca

SEQ ID NO: 3117613 - RNA, 16 nt, Human
ucuccucugcugcugg

SEQ ID NO: 3117614 - RNA, 15 nt, Human
ucuccucugcugcug

SEQ ID NO: 3117615 - RNA, 18 nt, Human
ucuccucugcugcuggcu

SEQ ID NO: 3117616 - RNA, 17 nt, Human
ucuccucugcugcuggc

SEQ ID NO: 3117617 - RNA, 12 nt, Human
acuuuaccuuuu

SEQ ID NO: 3117618 - RNA, 19 nt, Human
ucuccaagcaggacaugga

SEQ ID NO: 3117619 - RNA, 18 nt, Human
ucuccaagcaggacaugg

SEQ ID NO: 3117620 - RNA, 23 nt, Human
ucuccccagcaagugagagcugg

SEQ ID NO: 3117621 - RNA, 21 nt, Human
ucucccuuggauuguccccga

SEQ ID NO: 3117622 - RNA, 17 nt, Human
ucuccgaccagacaccu

SEQ ID NO: 3117623 - RNA, 23 nt, Human
ucuccgaccagacaccuugacag

SEQ ID NO: 3117624 - RNA, 15 nt, Human
acuuuuguucuuggu

SEQ ID NO: 3117625 - RNA, 23 nt, Human
acuuuuguucuugguuuguaaau

SEQ ID NO: 3117626 - RNA, 17 nt, Human
agaaaaaauauuuuccc

SEQ ID NO: 3117627 - RNA, 15 nt, Human
ucuccuucaccuuug

SEQ ID NO: 3117628 - RNA, 14 nt, Human
ucuccuucaccuuu

SEQ ID NO: 3117629 - RNA, 16 nt, Human
ucuccuucaccuuugu

SEQ ID NO: 3117630 - RNA, 13 nt, Human
ucuccuuguguua

SEQ ID NO: 3117631 - RNA, 21 nt, Human
ucuccuuguguuacuaaguuu

SEQ ID NO: 3117632 - RNA, 18 nt, Human
acuuuguguucaccuugu

SEQ ID NO: 3117633 - RNA, 20 nt, Human
acuuuguuaguuucuccaag

SEQ ID NO: 3117634 - RNA, 14 nt, Human
acuuuguucuggcu

SEQ ID NO: 3117635 - RNA, 21 nt, Human
acuuuguuaguuucuccaagc

SEQ ID NO: 3117636 - RNA, 12 nt, Human
acuuuuguucuu

SEQ ID NO: 3117637 - RNA, 13 nt, Human
acuuuuguucuug

SEQ ID NO: 3117638 - RNA, 12 nt, Human
acuuugaccucu

SEQ ID NO: 3117639 - RNA, 13 nt, Human
acuuugaccucug

SEQ ID NO: 3117640 - RNA, 10 nt, Human
ucucaggcca

SEQ ID NO: 3117641 - RNA, 12 nt, Human
ucucaggccaaa

SEQ ID NO: 3117642 - RNA, 13 nt, Human
ucucaggccagcu

SEQ ID NO: 3117643 - RNA, 12 nt, Human
ucucaggccagc

SEQ ID NO: 3117644 - RNA, 21 nt, Human
ucucaggccagcugcuugggc

SEQ ID NO: 3117645 - RNA, 18 nt, Human
ucucaggccagcugcuug

SEQ ID NO: 3117646 - RNA, 17 nt, Human
ucucaggccagcugcuu

SEQ ID NO: 3117647 - RNA, 16 nt, Human
ucucauuugucacaca

SEQ ID NO: 3117648 - RNA, 16 nt, Human
ucuccaagcaggacau

SEQ ID NO: 3117649 - RNA, 15 nt, Human
ucuccaagcaggaca

SEQ ID NO: 3117650 - RNA, 14 nt, Human
ucucauuugucaca

SEQ ID NO: 3117651 - RNA, 20 nt, Human
ucucacuauguugcccaggc

SEQ ID NO: 3117652 - RNA, 21 nt, Human
ucucacuauguugcccaggca

SEQ ID NO: 3117653 - RNA, 22 nt, Human
ucucacuauguugcccaggcag

SEQ ID NO: 3117654 - RNA, 23 nt, Human
ucucacuauguugcccaggcagg

SEQ ID NO: 3117655 - RNA, 19 nt, Human
acuugcagacucuacagag

SEQ ID NO: 3117656 - RNA, 22 nt, Human
acuugcagacucuacagaggcc

SEQ ID NO: 3117657 - RNA, 23 nt, Human
acuugcagacucuacagaggcca

SEQ ID NO: 3117658 - RNA, 21 nt, Human
acuugucuuuggacccugagg

SEQ ID NO: 3117659 - RNA, 18 nt, Human
acuugucuuuggacccug

SEQ ID NO: 3117660 - RNA, 20 nt, Human
acuugucuuuggacccugag

SEQ ID NO: 3117661 - RNA, 19 nt, Human
acuuguggacacagcucuu

SEQ ID NO: 3117662 - RNA, 22 nt, Human
acuuguggacacagcucuucuc

SEQ ID NO: 3117663 - RNA, 22 nt, Human
acccugcccugugggcccccaa

SEQ ID NO: 3117664 - RNA, 17 nt, Human
acccugcccugugggcc

SEQ ID NO: 3117665 - RNA, 14 nt, Human
acccugcccugugg

SEQ ID NO: 3117666 - RNA, 15 nt, Human
acccugcccuguggg

SEQ ID NO: 3117667 - RNA, 16 nt, Human
acccugaggcccagag

SEQ ID NO: 3117668 - RNA, 15 nt, Human
acccugaggcccaga

SEQ ID NO: 3117669 - RNA, 15 nt, Human
accgaaaacguggcu

SEQ ID NO: 3117670 - RNA, 17 nt, Human
acccuugccgucuaccu

SEQ ID NO: 3117671 - RNA, 23 nt, Human
acccuuguggucccaccccacac

SEQ ID NO: 3117672 - RNA, 20 nt, Human
acccuuguggucccacccca

SEQ ID NO: 3117673 - RNA, 18 nt, Human
acccugaaagcccugagc

SEQ ID NO: 3117674 - RNA, 16 nt, Human
acccugaaagcccuga

SEQ ID NO: 3117675 - RNA, 14 nt, Human
acccugaggcccag

SEQ ID NO: 3117676 - RNA, 13 nt, Human
acccugaggccca

SEQ ID NO: 3117677 - RNA, 23 nt, Human
ucagguaacaggcagauacagga

SEQ ID NO: 3117678 - RNA, 21 nt, Human
ucagguaacaggcagauacag

SEQ ID NO: 3117679 - RNA, 22 nt, Human
ucagguaacaggcagauacagg

SEQ ID NO: 3117680 - RNA, 14 nt, Human
acccggccccugcu

SEQ ID NO: 3117681 - RNA, 15 nt, Human
acccggccccugcug

SEQ ID NO: 3117682 - RNA, 16 nt, Human
acccggccccugcugg

SEQ ID NO: 3117683 - RNA, 22 nt, Human
acccggccccugcugguucagg

SEQ ID NO: 3117684 - RNA, 17 nt, Human
acccggccccugcuggu

SEQ ID NO: 3117685 - RNA, 20 nt, Human
acccggccccugcugguuca

SEQ ID NO: 3117686 - RNA, 13 nt, Human
acccgggaagggg

SEQ ID NO: 3117687 - RNA, 12 nt, Human
acccgggaaggg

SEQ ID NO: 3117688 - RNA, 20 nt, Human
ucaggccaggcccucugccc

SEQ ID NO: 3117689 - RNA, 22 nt, Human
ucaggccaggcccucugcccac

SEQ ID NO: 3117690 - RNA, 21 nt, Human
ucaggccaggcccucugccca

SEQ ID NO: 3117691 - RNA, 14 nt, Human
ucagcuccagcuca

SEQ ID NO: 3117692 - RNA, 21 nt, Human
ucagcuuguaaauagcucagg

SEQ ID NO: 3117693 - RNA, 22 nt, Human
ucagcuuguaaauagcucaggu

SEQ ID NO: 3117694 - RNA, 23 nt, Human
ucaggccaggcccucugcccacu

SEQ ID NO: 3117695 - RNA, 16 nt, Human
ucaggguuggccccug

SEQ ID NO: 3117696 - RNA, 19 nt, Human
ucagggucccugguggcag

SEQ ID NO: 3117697 - RNA, 18 nt, Human
ucagcggggacagcuccu

SEQ ID NO: 3117698 - RNA, 19 nt, Human
ucagcggggacagcuccuu

SEQ ID NO: 3117699 - RNA, 20 nt, Human
ucagcggggacagcuccuuc

SEQ ID NO: 3117700 - RNA, 21 nt, Human
ucagcggggacagcuccuucu

SEQ ID NO: 3117701 - RNA, 23 nt, Human
ucagcggggacagcuccuucugu

SEQ ID NO: 3117702 - RNA, 12 nt, Human
ucagcuccagcu

SEQ ID NO: 3117703 - RNA, 18 nt, Human
accccaucucuacaaaaa

SEQ ID NO: 3117704 - RNA, 19 nt, Human
acccaggagccccgaggcc

SEQ ID NO: 3117705 - RNA, 23 nt, Human
acccaggagccccgaggccuucu

SEQ ID NO: 3117706 - RNA, 17 nt, Human
accccacacacgccaga

SEQ ID NO: 3117707 - RNA, 22 nt, Human
accccagccccaaaacucuccu

SEQ ID NO: 3117708 - RNA, 13 nt, Human
accccagccccaa

SEQ ID NO: 3117709 - RNA, 12 nt, Human
ucagauuugaac

SEQ ID NO: 3117710 - RNA, 21 nt, Human
ucagauuugaacucuucaauc

SEQ ID NO: 3117711 - RNA, 15 nt, Human
ucagcaaaagaugcu

SEQ ID NO: 3117712 - RNA, 15 nt, Human
ucauauuuacuucuu

SEQ ID NO: 3117713 - RNA, 23 nt, Human
ucauauuuacuucuuauacauuu

SEQ ID NO: 3117714 - RNA, 18 nt, Human
ucauauaagauucauauu

SEQ ID NO: 3117715 - RNA, 21 nt, Human
ucauaguaugguggcuggguu

SEQ ID NO: 3117716 - RNA, 15 nt, Human
ucauaguaugguggc

SEQ ID NO: 3117717 - RNA, 18 nt, Human
ucauaguaugguggcugg

SEQ ID NO: 3117718 - RNA, 19 nt, Human
ucauaguaugguggcuggg

SEQ ID NO: 3117719 - RNA, 14 nt, Human
ucauaaccuagccu

SEQ ID NO: 3117720 - RNA, 12 nt, Human
ucaguggcagcu

SEQ ID NO: 3117721 - RNA, 11 nt, Human
ucaguggcagc

SEQ ID NO: 3117722 - RNA, 16 nt, Human
ucagugccuuauggaa

SEQ ID NO: 3117723 - RNA, 10 nt, Human
ucagugccuu

SEQ ID NO: 3117724 - RNA, 9 nt, Human
ucagugccu

SEQ ID NO: 3117725 - RNA, 15 nt, Human
ucagugccuuaugga

SEQ ID NO: 3117726 - RNA, 14 nt, Human
ucagugccuuaugg

SEQ ID NO: 3117727 - RNA, 12 nt, Human
ucagugccuuau

SEQ ID NO: 3117728 - RNA, 11 nt, Human
ucagugccuua

SEQ ID NO: 3117729 - RNA, 19 nt, Human
accgaaaacguggcugcuu

SEQ ID NO: 3117730 - RNA, 17 nt, Human
accgaaaacguggcugc

SEQ ID NO: 3117731 - RNA, 12 nt, Human
ucagugccacua

SEQ ID NO: 3117732 - RNA, 16 nt, Human
ucagugccaaaaacaa

SEQ ID NO: 3117733 - RNA, 20 nt, Human
accucccacaaaggagagcu

SEQ ID NO: 3117734 - RNA, 16 nt, Human
accgcagacaggacca

SEQ ID NO: 3117735 - RNA, 12 nt, Human
accgcagacagg

SEQ ID NO: 3117736 - RNA, 10 nt, Human
ucacuugagu

SEQ ID NO: 3117737 - RNA, 15 nt, Human
accaguguuguggau

SEQ ID NO: 3117738 - RNA, 17 nt, Human
accaguguuguggauuu

SEQ ID NO: 3117739 - RNA, 23 nt, Human
ucacuguugcccaggcuggcgug

SEQ ID NO: 3117740 - RNA, 19 nt, Human
ucacuguugcccaggcugg

SEQ ID NO: 3117741 - RNA, 15 nt, Human
ucacugcagccucaa

SEQ ID NO: 3117742 - RNA, 13 nt, Human
ucacugcagccuc

SEQ ID NO: 3117743 - RNA, 16 nt, Human
ucacugagacagcccg

SEQ ID NO: 3117744 - RNA, 14 nt, Human
ucacugcagccuca

SEQ ID NO: 3117745 - RNA, 22 nt, Human
ucacugagacagcccgggcucu

SEQ ID NO: 3117746 - RNA, 21 nt, Human
ucacugagacagcccgggcuc

SEQ ID NO: 3117747 - RNA, 17 nt, Human
ucacugagacagcccgg

SEQ ID NO: 3117748 - RNA, 22 nt, Human
accagcgugugacuacuccccc

SEQ ID NO: 3117749 - RNA, 17 nt, Human
accacuacauucuguua

SEQ ID NO: 3117750 - RNA, 16 nt, Human
accacuacauucuguu

SEQ ID NO: 3117751 - RNA, 15 nt, Human
accacuacauucugu

SEQ ID NO: 3117752 - RNA, 17 nt, Human
accacaucuugcucugc

SEQ ID NO: 3117753 - RNA, 18 nt, Human
accacaucuugcucugcu

SEQ ID NO: 3117754 - RNA, 19 nt, Human
accacaucuugcucugcug

SEQ ID NO: 3117755 - RNA, 15 nt, Human
accaccacacccagc

SEQ ID NO: 3117756 - RNA, 20 nt, Human
accaccacacccagcccacu

SEQ ID NO: 3117757 - RNA, 18 nt, Human
accacaugugcacaugca

SEQ ID NO: 3117758 - RNA, 16 nt, Human
accacaucuugcucug

SEQ ID NO: 3117759 - RNA, 17 nt, Human
ucacaaaggaugcccaa

SEQ ID NO: 3117760 - RNA, 20 nt, Human
ucacagaugggugcuuggag

SEQ ID NO: 3117761 - RNA, 13 nt, Human
ucacagccucuga

SEQ ID NO: 3117762 - RNA, 20 nt, Human
ucacaguucucuccuucuuc

SEQ ID NO: 3117763 - RNA, 16 nt, Human
ucacaguucucuccuu

SEQ ID NO: 3117764 - RNA, 15 nt, Human
acauguccaagaagc

SEQ ID NO: 3117765 - RNA, 23 nt, Human
acauguaauuaaguacuauguau

SEQ ID NO: 3117766 - RNA, 14 nt, Human
acauuccugaugcu

SEQ ID NO: 3117767 - RNA, 13 nt, Human
ucaaauuucuaaa

SEQ ID NO: 3117768 - RNA, 20 nt, Human
ucaacugcaucaagauguga

SEQ ID NO: 3117769 - RNA, 14 nt, Human
ucaaccagcagaug

SEQ ID NO: 3117770 - RNA, 15 nt, Human
acauguaauuaagua

SEQ ID NO: 3117771 - RNA, 17 nt, Human
acauguaauuaaguacu

SEQ ID NO: 3117772 - RNA, 19 nt, Human
acauguaauuaaguacuau

SEQ ID NO: 3117773 - RNA, 21 nt, Human
acauguaauuaaguacuaugu

SEQ ID NO: 3117774 - RNA, 22 nt, Human
acauguaauuaaguacuaugua

SEQ ID NO: 3117775 - RNA, 15 nt, Human
acaugcuacacacug

SEQ ID NO: 3117776 - RNA, 21 nt, Human
acaugcuacacacugcauguu

SEQ ID NO: 3117777 - RNA, 17 nt, Human
acauuuuuuaaaugcac

SEQ ID NO: 3117778 - RNA, 14 nt, Human
acauuuuuuaaaug

SEQ ID NO: 3117779 - RNA, 16 nt, Human
acauuuuuuaaaugca

SEQ ID NO: 3117780 - RNA, 21 nt, Human
acauuuuuaagugcugcauuu

SEQ ID NO: 3117781 - RNA, 22 nt, Human
acauuuuuaagugcugcauuua

SEQ ID NO: 3117782 - RNA, 23 nt, Human
acauuuuuaagugcugcauuuaa

SEQ ID NO: 3117783 - RNA, 19 nt, Human
acauuuuuaagugcugcau

SEQ ID NO: 3117784 - RNA, 18 nt, Human
acauuuuauuuuauuaug

SEQ ID NO: 3117785 - RNA, 14 nt, Human
acauuuuauuuuau

SEQ ID NO: 3117786 - RNA, 19 nt, Human
acauuuuauuuuauuaugc

SEQ ID NO: 3117787 - RNA, 20 nt, Human
acauuuuauuuuauuaugca

SEQ ID NO: 3117788 - RNA, 22 nt, Human
ucaaguccucuuuucugagagg

SEQ ID NO: 3117789 - RNA, 13 nt, Human
acugauaaagaug

SEQ ID NO: 3117790 - RNA, 21 nt, Human
acugauaaagaugagugagca

SEQ ID NO: 3117791 - RNA, 14 nt, Human
acugcaccgggcca

SEQ ID NO: 3117792 - RNA, 16 nt, Human
acugcaccgggccaca

SEQ ID NO: 3117793 - RNA, 20 nt, Human
acugcacuauagccuaggug

SEQ ID NO: 3117794 - RNA, 21 nt, Human
acugcacuauagccuagguga

SEQ ID NO: 3117795 - RNA, 14 nt, Human
acugcacuccagcc

SEQ ID NO: 3117796 - RNA, 17 nt, Human
acugcacuccagccugg

SEQ ID NO: 3117797 - RNA, 18 nt, Human
acugcacuccagccuggg

SEQ ID NO: 3117798 - RNA, 20 nt, Human
acugcacuccagccugggug

SEQ ID NO: 3117799 - RNA, 19 nt, Human
acugcacuccagccugggu

SEQ ID NO: 3117800 - RNA, 19 nt, Human
uccugaugcuucuucagag

SEQ ID NO: 3117801 - RNA, 21 nt, Human
uccugaugcuucuucagagac

SEQ ID NO: 3117802 - RNA, 20 nt, Human
uccugaugcuucuucagaga

SEQ ID NO: 3117803 - RNA, 21 nt, Human
uccugccucgaacuggcugca

SEQ ID NO: 3117804 - RNA, 14 nt, Human
uccugcaggcagcc

SEQ ID NO: 3117805 - RNA, 13 nt, Human
uccugcaggcagc

SEQ ID NO: 3117806 - RNA, 12 nt, Human
uccugcaggcag

SEQ ID NO: 3117807 - RNA, 21 nt, Human
uccugcugcaguugccaguca

SEQ ID NO: 3117808 - RNA, 12 nt, Human
uccugggaguga

SEQ ID NO: 3117809 - RNA, 14 nt, Human
uccugggagugagc

SEQ ID NO: 3117810 - RNA, 17 nt, Human
uccugggagugagcugg

SEQ ID NO: 3117811 - RNA, 15 nt, Human
uccuggaaauauuaa

SEQ ID NO: 3117812 - RNA, 23 nt, Human
acugagacagcccgggcucugcc

SEQ ID NO: 3117813 - RNA, 22 nt, Human
acugagacagcccgggcucugc

SEQ ID NO: 3117814 - RNA, 21 nt, Human
acugagacagcccgggcucug

SEQ ID NO: 3117815 - RNA, 18 nt, Human
acugagacagcccgggcu

SEQ ID NO: 3117816 - RNA, 15 nt, Human
acugagacagcccgg

SEQ ID NO: 3117817 - RNA, 19 nt, Human
uccucuuuccaucuacccu

SEQ ID NO: 3117818 - RNA, 21 nt, Human
uccucuuuggucuacacugug

SEQ ID NO: 3117819 - RNA, 19 nt, Human
uccucuuuggucuacacug

SEQ ID NO: 3117820 - RNA, 11 nt, Human
uccucccuccc

SEQ ID NO: 3117821 - RNA, 14 nt, Human
uccucccucccucu

SEQ ID NO: 3117822 - RNA, 11 nt, Human
uccucuuucca

SEQ ID NO: 3117823 - RNA, 12 nt, Human
uccucuuuccau

SEQ ID NO: 3117824 - RNA, 22 nt, Human
uccucuuuggucuacacugugc

SEQ ID NO: 3117825 - RNA, 14 nt, Human
acuccugcaggcag

SEQ ID NO: 3117826 - RNA, 12 nt, Human
acuccugcaggc

SEQ ID NO: 3117827 - RNA, 22 nt, Human
acuccugcaggcagccaggcca

SEQ ID NO: 3117828 - RNA, 16 nt, Human
acuccugcaggcagcc

SEQ ID NO: 3117829 - RNA, 15 nt, Human
acuccugcaggcagc

SEQ ID NO: 3117830 - RNA, 11 nt, Human
acuccuggccu

SEQ ID NO: 3117831 - RNA, 17 nt, Human
ucccugguggcagcuca

SEQ ID NO: 3117832 - RNA, 16 nt, Human
ucccugguggcagcuc

SEQ ID NO: 3117833 - RNA, 21 nt, Human
ucccugguggcagcucaccuc

SEQ ID NO: 3117834 - RNA, 20 nt, Human
ucccugguggcagcucaccu

SEQ ID NO: 3117835 - RNA, 19 nt, Human
ucccugguggcagcucacc

SEQ ID NO: 3117836 - RNA, 18 nt, Human
ucccugguggcagcucac

SEQ ID NO: 3117837 - RNA, 13 nt, Human
acucaccccagcc

SEQ ID NO: 3117838 - RNA, 16 nt, Human
acucaccccagcccca

SEQ ID NO: 3117839 - RNA, 15 nt, Human
acucaccccagcccc

SEQ ID NO: 3117840 - RNA, 14 nt, Human
acucaccccagccc

SEQ ID NO: 3117841 - RNA, 12 nt, Human
acuccuggccuc

SEQ ID NO: 3117842 - RNA, 13 nt, Human
uccuaggcauuug

SEQ ID NO: 3117843 - RNA, 13 nt, Human
acuccuggccuca

SEQ ID NO: 3117844 - RNA, 14 nt, Human
acuccuggccucaa

SEQ ID NO: 3117845 - RNA, 15 nt, Human
uccuacucuguguca

SEQ ID NO: 3117846 - RNA, 12 nt, Human
uccuacucugug

SEQ ID NO: 3117847 - RNA, 13 nt, Human
uccuacucugugu

SEQ ID NO: 3117848 - RNA, 14 nt, Human
uccuacucuguguc

SEQ ID NO: 3117849 - RNA, 18 nt, Human
ucccuuugacgccauccc

SEQ ID NO: 3117850 - RNA, 16 nt, Human
ucccuuugacgccauc

SEQ ID NO: 3117851 - RNA, 20 nt, Human
ucccuuggauuguccccgac

SEQ ID NO: 3117852 - RNA, 19 nt, Human
ucccuuggauuguccccga

SEQ ID NO: 3117853 - RNA, 22 nt, Human
ucccugguggcagcucaccucu

SEQ ID NO: 3117854 - RNA, 19 nt, Human
ucccuuuuuuggcugcuga

SEQ ID NO: 3117855 - RNA, 17 nt, Human
ucccuuuuuuggcugcu

SEQ ID NO: 3117856 - RNA, 19 nt, Human
ucccuuugacgccauccca

SEQ ID NO: 3117857 - RNA, 22 nt, Human
ucccuuuuuuggcugcugaagg

SEQ ID NO: 3117858 - RNA, 20 nt, Human
ucccuuuuuuggcugcugaa

SEQ ID NO: 3117859 - RNA, 23 nt, Human
ucccuuuuuuggcugcugaaggc

SEQ ID NO: 3117860 - RNA, 22 nt, Human
acucugagacucgcgacaaugc

SEQ ID NO: 3117861 - RNA, 11 nt, Human
acucugagacu

SEQ ID NO: 3117862 - RNA, 23 nt, Human
acucuccuuggugucgggcauga

SEQ ID NO: 3117863 - RNA, 16 nt, Human
acucuccuuggugucg

SEQ ID NO: 3117864 - RNA, 15 nt, Human
acucuggcagcucag

SEQ ID NO: 3117865 - RNA, 13 nt, Human
acucuggcagcuc

SEQ ID NO: 3117866 - RNA, 12 nt, Human
acucuccucugc

SEQ ID NO: 3117867 - RNA, 14 nt, Human
acucuccucugcug

SEQ ID NO: 3117868 - RNA, 13 nt, Human
acucuccucugcu

SEQ ID NO: 3117869 - RNA, 21 nt, Human
acucuccucugcugcuggcug

SEQ ID NO: 3117870 - RNA, 15 nt, Human
acucuccuugguguc

SEQ ID NO: 3117871 - RNA, 18 nt, Human
acucuccuggaaauauua

SEQ ID NO: 3117872 - RNA, 17 nt, Human
acucuccuccagaguca

SEQ ID NO: 3117873 - RNA, 14 nt, Human
acucuccuccagag

SEQ ID NO: 3117874 - RNA, 24 nt, Human
acuccuugaaaacacuguucucug

SEQ ID NO: 3117875 - RNA, 23 nt, Human
acuccuugaaaacacuguucucu

SEQ ID NO: 3117876 - RNA, 23 nt, Human
uccucauacccacccccacccaa

SEQ ID NO: 3117877 - RNA, 22 nt, Human
uccucauaguaugguggcuggg

SEQ ID NO: 3117878 - RNA, 22 nt, Human
uccucauacccacccccaccca

SEQ ID NO: 3117879 - RNA, 15 nt, Human
acucuugaccucagg

SEQ ID NO: 3117880 - RNA, 16 nt, Human
acucuugaccucaggu

SEQ ID NO: 3117881 - RNA, 14 nt, Human
acucuugaccucag

SEQ ID NO: 3117882 - RNA, 16 nt, Human
ucccccagccccaucc

SEQ ID NO: 3117883 - RNA, 15 nt, Human
ucccccagccccauc

SEQ ID NO: 3117884 - RNA, 13 nt, Human
ucccccagcccca

SEQ ID NO: 3117885 - RNA, 11 nt, Human
ucccccagccc

SEQ ID NO: 3117886 - RNA, 21 nt, Human
uccccaggaggccagccuuga

SEQ ID NO: 3117887 - RNA, 20 nt, Human
uccccaggaggccagccuug

SEQ ID NO: 3117888 - RNA, 17 nt, Human
uccccaggaggccagcc

SEQ ID NO: 3117889 - RNA, 12 nt, Human
uccccacccuga

SEQ ID NO: 3117890 - RNA, 18 nt, Human
uccccaggaggccagccu

SEQ ID NO: 3117891 - RNA, 16 nt, Human
uccccaccgcagacag

SEQ ID NO: 3117892 - RNA, 15 nt, Human
uccccaccgcagaca

SEQ ID NO: 3117893 - RNA, 23 nt, Human
uccccacccugaaagcccugagc

SEQ ID NO: 3117894 - RNA, 14 nt, Human
acuauguugcccag

SEQ ID NO: 3117895 - RNA, 22 nt, Human
acuauggcccuggccuagcaua

SEQ ID NO: 3117896 - RNA, 15 nt, Human
acuauguugcccagg

SEQ ID NO: 3117897 - RNA, 16 nt, Human
acuauguugcccaggc

SEQ ID NO: 3117898 - RNA, 16 nt, Human
acucaaugcacugaca

SEQ ID NO: 3117899 - RNA, 20 nt, Human
acuauagccuaggugacaga

SEQ ID NO: 3117900 - RNA, 22 nt, Human
acuauagccuaggugacagagu

SEQ ID NO: 3117901 - RNA, 18 nt, Human
acuauagccuaggugaca

SEQ ID NO: 3117902 - RNA, 16 nt, Human
acuaucuaaauguuga

SEQ ID NO: 3117903 - RNA, 21 nt, Human
acuaucuaaauguugaaagau

SEQ ID NO: 3117904 - RNA, 21 nt, Human
acguggcugcuucaaggaucc

SEQ ID NO: 3117905 - RNA, 19 nt, Human
acguggcugcuucaaggau

SEQ ID NO: 3117906 - RNA, 18 nt, Human
acguggcugcuucaagga

SEQ ID NO: 3117907 - RNA, 17 nt, Human
acguggcugcuucaagg

SEQ ID NO: 3117908 - RNA, 15 nt, Human
acguuucuaaaggcu

SEQ ID NO: 3117909 - RNA, 16 nt, Human
acguuucuaaaggcua

SEQ ID NO: 3117910 - RNA, 14 nt, Human
acguugugcauuug

SEQ ID NO: 3117911 - RNA, 15 nt, Human
acguugugcauuugg

SEQ ID NO: 3117912 - RNA, 13 nt, Human
acguugugcauuu

SEQ ID NO: 3117913 - RNA, 17 nt, Human
acgguuuuacugcagcu

SEQ ID NO: 3117914 - RNA, 18 nt, Human
ucccagauacuugggggg

SEQ ID NO: 3117915 - RNA, 12 nt, Human
ucccagccccaa

SEQ ID NO: 3117916 - RNA, 16 nt, Human
ucccagauacuugggg

SEQ ID NO: 3117917 - RNA, 22 nt, Human
acguuucuaaaggcuaccuuug

SEQ ID NO: 3117918 - RNA, 18 nt, Human
uccaguaucuugaagacu

SEQ ID NO: 3117919 - RNA, 16 nt, Human
uccaguaucuugaaga

SEQ ID NO: 3117920 - RNA, 23 nt, Human
uccagugaggcucugcccuuggu

SEQ ID NO: 3117921 - RNA, 22 nt, Human
uccagugaggcucugcccuugg

SEQ ID NO: 3117922 - RNA, 16 nt, Human
uccagugaggcucugc

SEQ ID NO: 3117923 - RNA, 15 nt, Human
uccagugaggcucug

SEQ ID NO: 3117924 - RNA, 15 nt, Human
uccaguaucuugaag

SEQ ID NO: 3117925 - RNA, 14 nt, Human
uccaguaucuugaa

SEQ ID NO: 3117926 - RNA, 18 nt, Human
acggcuuuuacuuaaacc

SEQ ID NO: 3117927 - RNA, 16 nt, Human
acggcucacugcagcc

SEQ ID NO: 3117928 - RNA, 15 nt, Human
acggcucacugcagc

SEQ ID NO: 3117929 - RNA, 17 nt, Human
acggcucacugcagccu

SEQ ID NO: 3117930 - RNA, 18 nt, Human
acggcucacugcagccuc

SEQ ID NO: 3117931 - RNA, 12 nt, Human
acggccaggcca

SEQ ID NO: 3117932 - RNA, 18 nt, Human
acgcuacccgggaagggg

SEQ ID NO: 3117933 - RNA, 21 nt, Human
acgcuacccgggaagggggcu

SEQ ID NO: 3117934 - RNA, 14 nt, Human
acgaauauugcuga

SEQ ID NO: 3117935 - RNA, 21 nt, Human
acgaauauugcugauggugca

SEQ ID NO: 3117936 - RNA, 23 nt, Human
acggagucccaccuuggcugcag

SEQ ID NO: 3117937 - RNA, 21 nt, Human
acggagucccaccuuggcugc

SEQ ID NO: 3117938 - RNA, 17 nt, Human
acgcuggagugcaguga

SEQ ID NO: 3117939 - RNA, 20 nt, Human
acgcuggaccuugaacuggg

SEQ ID NO: 3117940 - RNA, 23 nt, Human
acgcuggaccuugaacuggguac

SEQ ID NO: 3117941 - RNA, 15 nt, Human
acgcuggagugcagu

SEQ ID NO: 3117942 - RNA, 16 nt, Human
acgcuggagugcagug

SEQ ID NO: 3117943 - RNA, 13 nt, Human
acgcuggaccuug

SEQ ID NO: 3117944 - RNA, 18 nt, Human
acgaauauugcugauggu

SEQ ID NO: 3117945 - RNA, 15 nt, Human
acgaauauugcugau

SEQ ID NO: 3117946 - RNA, 22 nt, Human
accuuuuuuauacauaaacaag

SEQ ID NO: 3117947 - RNA, 23 nt, Human
uccaggcugggagagccuuccag

SEQ ID NO: 3117948 - RNA, 10 nt, Human
uccaggcucc

SEQ ID NO: 3117949 - RNA, 12 nt, Human
uccaggcuccuu

SEQ ID NO: 3117950 - RNA, 21 nt, Human
uccaggcugggagagccuucc

SEQ ID NO: 3117951 - RNA, 20 nt, Human
uccaggcugggagagccuuc

SEQ ID NO: 3117952 - RNA, 13 nt, Human
uccagacacaugu

SEQ ID NO: 3117953 - RNA, 15 nt, Human
uccagaauuucccaa

SEQ ID NO: 3117954 - RNA, 14 nt, Human
uccagaauuuccca

SEQ ID NO: 3117955 - RNA, 22 nt, Human
uccaggagcagccacauuccug

SEQ ID NO: 3117956 - RNA, 20 nt, Human
accuugaacuggguacuugu

SEQ ID NO: 3117957 - RNA, 17 nt, Human
accuuuguccccaccgc

SEQ ID NO: 3117958 - RNA, 18 nt, Human
accuuuguccccaccgca

SEQ ID NO: 3117959 - RNA, 21 nt, Human
uccacugugccaugugccagg

SEQ ID NO: 3117960 - RNA, 13 nt, Human
accuuuuuuauac

SEQ ID NO: 3117961 - RNA, 22 nt, Human
aauaugcacacauuuuuuaaau

SEQ ID NO: 3117962 - RNA, 15 nt, Human
aauaugcacacauuu

SEQ ID NO: 3117963 - RNA, 16 nt, Human
aauaugcacacauuuu

SEQ ID NO: 3117964 - RNA, 17 nt, Human
aauaugcacacauuuuu

SEQ ID NO: 3117965 - RNA, 15 nt, Human
uaagagaaaugagcu

SEQ ID NO: 3117966 - RNA, 18 nt, Human
uaagcacacuugacauca

SEQ ID NO: 3117967 - RNA, 22 nt, Human
uaagcuguuacugucuucagua

SEQ ID NO: 3117968 - RNA, 13 nt, Human
uaacuucacauau

SEQ ID NO: 3117969 - RNA, 21 nt, Human
uaacuucacauauugauuucc

SEQ ID NO: 3117970 - RNA, 14 nt, Human
uaacuucaccauau

SEQ ID NO: 3117971 - RNA, 17 nt, Human
uaacuuccaauuuacau

SEQ ID NO: 3117972 - RNA, 16 nt, Human
uaacauggaaguacua

SEQ ID NO: 3117973 - RNA, 18 nt, Human
uaacauggacaugaucuu

SEQ ID NO: 3117974 - RNA, 23 nt, Human
uaacauggacaugaucuucuuua

SEQ ID NO: 3117975 - RNA, 22 nt, Human
aauaguggugugauuuggggau

SEQ ID NO: 3117976 - RNA, 16 nt, Human
aauaguggugugauuu

SEQ ID NO: 3117977 - RNA, 21 nt, Human
aauaguucagguaacaggcag

SEQ ID NO: 3117978 - RNA, 13 nt, Human
aauaguuggcuag

SEQ ID NO: 3117979 - RNA, 15 nt, Human
aaucauuagguguga

SEQ ID NO: 3117980 - RNA, 17 nt, Human
aaucauuaggugugacu

SEQ ID NO: 3117981 - RNA, 23 nt, Human
aaucauuaggugugacugaauuu

SEQ ID NO: 3117982 - RNA, 17 nt, Human
uaaguacuauguaucaa

SEQ ID NO: 3117983 - RNA, 13 nt, Human
uaaguacuaugua

SEQ ID NO: 3117984 - RNA, 16 nt, Human
uaaguacuauguauca

SEQ ID NO: 3117985 - RNA, 20 nt, Human
uaaguauucuuauuuaauga

SEQ ID NO: 3117986 - RNA, 19 nt, Human
uaaguauucuuauuuaaug

SEQ ID NO: 3117987 - RNA, 15 nt, Human
aaugaccuuucaaua

SEQ ID NO: 3117988 - RNA, 22 nt, Human
aaugaaugucagugugacugau

SEQ ID NO: 3117989 - RNA, 13 nt, Human
aaugaaugucagu

SEQ ID NO: 3117990 - RNA, 17 nt, Human
aaugaaacauuuuguca

SEQ ID NO: 3117991 - RNA, 16 nt, Human
aaugaaagacuguaca

SEQ ID NO: 3117992 - RNA, 17 nt, Human
aaugaaagacuguacaa

SEQ ID NO: 3117993 - RNA, 17 nt, Human
aaugaaaccugugucuc

SEQ ID NO: 3117994 - RNA, 18 nt, Human
uaaugucacaggcagguc

SEQ ID NO: 3117995 - RNA, 13 nt, Human
uaauguacugcau

SEQ ID NO: 3117996 - RNA, 17 nt, Human
uaaugaaugaaacauuu

SEQ ID NO: 3117997 - RNA, 18 nt, Human
uaauacaccacuacauuc

SEQ ID NO: 3117998 - RNA, 19 nt, Human
uaauacaccacuacauucu

SEQ ID NO: 3117999 - RNA, 14 nt, Human
uaauagacaauuua

SEQ ID NO: 3118000 - RNA, 16 nt, Human
uaauagacaauuuauu

SEQ ID NO: 3118001 - RNA, 16 nt, Human
uaauacaccacuacau

SEQ ID NO: 3118002 - RNA, 14 nt, Human
uaauacaccacuac

SEQ ID NO: 3118003 - RNA, 18 nt, Human
uaauagacaauuuauuau

SEQ ID NO: 3118004 - RNA, 22 nt, Human
uaauagacaauuuauuauggca

SEQ ID NO: 3118005 - RNA, 13 nt, Human
uacauucuguuaa

SEQ ID NO: 3118006 - RNA, 12 nt, Human
uacauucuguua

SEQ ID NO: 3118007 - RNA, 21 nt, Human
aauguucucucuucuccaccu

SEQ ID NO: 3118008 - RNA, 19 nt, Human
aauguauguguaaguauuc

SEQ ID NO: 3118009 - RNA, 20 nt, Human
aauguauguguaaguauucu

SEQ ID NO: 3118010 - RNA, 17 nt, Human
aaugugaaaagaaaaau

SEQ ID NO: 3118011 - RNA, 15 nt, Human
aaugugaaacuggau

SEQ ID NO: 3118012 - RNA, 14 nt, Human
aaugugaaacugga

SEQ ID NO: 3118013 - RNA, 19 nt, Human
aaugugaaaagaaaaauga

SEQ ID NO: 3118014 - RNA, 24 nt, Human
uacauaaugcgugcauaccacuuu

SEQ ID NO: 3118015 - RNA, 21 nt, Human
uacauaaugcgugcauaccac

SEQ ID NO: 3118016 - RNA, 23 nt, Human
uacauaaugcgugcauaccacuu

SEQ ID NO: 3118017 - RNA, 16 nt, Human
uacaggugugagucac

SEQ ID NO: 3118018 - RNA, 12 nt, Human
aauggcagccuu

SEQ ID NO: 3118019 - RNA, 16 nt, Human
aauggcagccuuggca

SEQ ID NO: 3118020 - RNA, 18 nt, Human
uacagaggccaugggccu

SEQ ID NO: 3118021 - RNA, 19 nt, Human
uacagacaaagcguggugg

SEQ ID NO: 3118022 - RNA, 22 nt, Human
uacagacaacaaaccuguuucu

SEQ ID NO: 3118023 - RNA, 19 nt, Human
uacacauuuuauuuuauua

SEQ ID NO: 3118024 - RNA, 21 nt, Human
uacacauuuuauuuuauuaug

SEQ ID NO: 3118025 - RNA, 22 nt, Human
uacacauuuuauuuuauuaugc

SEQ ID NO: 3118026 - RNA, 15 nt, Human
uacacuaaaagguga

SEQ ID NO: 3118027 - RNA, 21 nt, Human
aaugcacuuuguucuggcucu

SEQ ID NO: 3118028 - RNA, 17 nt, Human
aaugaccuuucaauagg

SEQ ID NO: 3118029 - RNA, 16 nt, Human
aaugaccuuucaauag

SEQ ID NO: 3118030 - RNA, 18 nt, Human
aaugaccuuucaauagga

SEQ ID NO: 3118031 - RNA, 21 nt, Human
uacaaugcugugcccuaaagu

SEQ ID NO: 3118032 - RNA, 22 nt, Human
aaugcacuuuguucuggcucuu

SEQ ID NO: 3118033 - RNA, 12 nt, Human
aaugcccagccc

SEQ ID NO: 3118034 - RNA, 11 nt, Human
aaugcccagcc

SEQ ID NO: 3118035 - RNA, 21 nt, Human
aauggacguguuaugacucca

SEQ ID NO: 3118036 - RNA, 14 nt, Human
aauggaaccacucu

SEQ ID NO: 3118037 - RNA, 20 nt, Human
aauggacuaacuugucuuug

SEQ ID NO: 3118038 - RNA, 23 nt, Human
aauggacguguuaugacuccaga

SEQ ID NO: 3118039 - RNA, 21 nt, Human
aauggaaaugggcagagcaga

SEQ ID NO: 3118040 - RNA, 20 nt, Human
aauggaaaugggcagagcag

SEQ ID NO: 3118041 - RNA, 13 nt, Human
uacuacuccugua

SEQ ID NO: 3118042 - RNA, 17 nt, Human
uacuacuccuguaggaa

SEQ ID NO: 3118043 - RNA, 23 nt, Human
uacuauggcccuggccuagcaua

SEQ ID NO: 3118044 - RNA, 12 nt, Human
uacuauguauca

SEQ ID NO: 3118045 - RNA, 13 nt, Human
uacuauguaucaa

SEQ ID NO: 3118046 - RNA, 14 nt, Human
uacuauguaucaau

SEQ ID NO: 3118047 - RNA, 22 nt, Human
uacucuccuggaaauauuaaga

SEQ ID NO: 3118048 - RNA, 23 nt, Human
uacucuccuggaaauauuaagaa

SEQ ID NO: 3118049 - RNA, 18 nt, Human
uacgggaggguaaggcug

SEQ ID NO: 3118050 - RNA, 12 nt, Human
uacguacacauu

SEQ ID NO: 3118051 - RNA, 14 nt, Human
uacguugugcauuu

SEQ ID NO: 3118052 - RNA, 13 nt, Human
uacguacacauuu

SEQ ID NO: 3118053 - RNA, 15 nt, Human
uacguugugcauuug

SEQ ID NO: 3118054 - RNA, 16 nt, Human
uacguugugcauuugg

SEQ ID NO: 3118055 - RNA, 22 nt, Human
uacgccaggggaaaaucagccu

SEQ ID NO: 3118056 - RNA, 18 nt, Human
uacuguacaugaaaacac

SEQ ID NO: 3118057 - RNA, 22 nt, Human
uacuguacaugaaaacacauuu

SEQ ID NO: 3118058 - RNA, 21 nt, Human
uacuguacaugaaaacacauu

SEQ ID NO: 3118059 - RNA, 12 nt, Human
uacucuguguca

SEQ ID NO: 3118060 - RNA, 16 nt, Human
uacuggagaaaaugga

SEQ ID NO: 3118061 - RNA, 19 nt, Human
uacuguaauuugugauaca

SEQ ID NO: 3118062 - RNA, 20 nt, Human
uacuguaauuugugauacaa

SEQ ID NO: 3118063 - RNA, 18 nt, Human
uacuguaauuugugauac

SEQ ID NO: 3118064 - RNA, 11 nt, Human
aauuacaggaa

SEQ ID NO: 3118065 - RNA, 15 nt, Human
aauuagccaagugug

SEQ ID NO: 3118066 - RNA, 10 nt, Human
uaccuguccc

SEQ ID NO: 3118067 - RNA, 17 nt, Human
uaccugucccccugaca

SEQ ID NO: 3118068 - RNA, 16 nt, Human
uaccugucccccugac

SEQ ID NO: 3118069 - RNA, 14 nt, Human
uaccugucccccug

SEQ ID NO: 3118070 - RNA, 13 nt, Human
uaccugucccccu

SEQ ID NO: 3118071 - RNA, 23 nt, Human
uaccugccaggaagccagcaggc

SEQ ID NO: 3118072 - RNA, 20 nt, Human
uaccugccaggaagccagca

SEQ ID NO: 3118073 - RNA, 18 nt, Human
uaccugccaggaagccag

SEQ ID NO: 3118074 - RNA, 12 nt, Human
aauuccccagau

SEQ ID NO: 3118075 - RNA, 14 nt, Human
aauuccccacccug

SEQ ID NO: 3118076 - RNA, 20 nt, Human
acacuaaccacgcuggaccu

SEQ ID NO: 3118077 - RNA, 16 nt, Human
acaccgggcacucaga

SEQ ID NO: 3118078 - RNA, 19 nt, Human
acacccugugauggggccc

SEQ ID NO: 3118079 - RNA, 21 nt, Human
acaccucugcacaagcugcac

SEQ ID NO: 3118080 - RNA, 19 nt, Human
acaccucugcacaagcugc

SEQ ID NO: 3118081 - RNA, 15 nt, Human
acacucaaaagcugg

SEQ ID NO: 3118082 - RNA, 20 nt, Human
acacucacauuuauucugcu

SEQ ID NO: 3118083 - RNA, 21 nt, Human
acacaugagcaucaggccagg

SEQ ID NO: 3118084 - RNA, 13 nt, Human
acacauuuuauuu

SEQ ID NO: 3118085 - RNA, 14 nt, Human
acacauuuuauuuu

SEQ ID NO: 3118086 - RNA, 19 nt, Human
acacauuuuauuuuauuau

SEQ ID NO: 3118087 - RNA, 20 nt, Human
acacauuuuauuuuauuaug

SEQ ID NO: 3118088 - RNA, 18 nt, Human
uaguucagguaacaggca

SEQ ID NO: 3118089 - RNA, 20 nt, Human
uaguuccaccaucaagccac

SEQ ID NO: 3118090 - RNA, 13 nt, Human
acacagugagucg

SEQ ID NO: 3118091 - RNA, 19 nt, Human
acacaguauuacuucugcu

SEQ ID NO: 3118092 - RNA, 18 nt, Human
acacaguauuacuucugc

SEQ ID NO: 3118093 - RNA, 16 nt, Human
acacaguauuacuucu

SEQ ID NO: 3118094 - RNA, 14 nt, Human
acacaccagagccc

SEQ ID NO: 3118095 - RNA, 15 nt, Human
acacaccagagccca

SEQ ID NO: 3118096 - RNA, 20 nt, Human
acacaccagagcccaccuug

SEQ ID NO: 3118097 - RNA, 21 nt, Human
acacacgcgugcacacaccag

SEQ ID NO: 3118098 - RNA, 21 nt, Human
acacacugcauguuugugauu

SEQ ID NO: 3118099 - RNA, 17 nt, Human
acacacagcucuguccu

SEQ ID NO: 3118100 - RNA, 13 nt, Human
acacacagcucug

SEQ ID NO: 3118101 - RNA, 14 nt, Human
acacacagcucugu

SEQ ID NO: 3118102 - RNA, 17 nt, Human
acaaugugaaaagaaaa

SEQ ID NO: 3118103 - RNA, 19 nt, Human
acaaugugaaaagaaaaau

SEQ ID NO: 3118104 - RNA, 14 nt, Human
acacacacauacac

SEQ ID NO: 3118105 - RNA, 21 nt, Human
acaaugcugugcccuaaagug

SEQ ID NO: 3118106 - RNA, 22 nt, Human
acaaugcugugcccuaaagugu

SEQ ID NO: 3118107 - RNA, 23 nt, Human
acaaugcugugcccuaaagugua

SEQ ID NO: 3118108 - RNA, 24 nt, Human
acaaugcugugcccuaaaguguau

SEQ ID NO: 3118109 - RNA, 22 nt, Human
acaaaggaugcccaaagaugca

SEQ ID NO: 3118110 - RNA, 11 nt, Human
acaaaagcaug

SEQ ID NO: 3118111 - RNA, 22 nt, Human
acaaaagcaugugagacugguu

SEQ ID NO: 3118112 - RNA, 19 nt, Human
uagauauaugcucugcaug

SEQ ID NO: 3118113 - RNA, 15 nt, Human
uagauauaugcucug

SEQ ID NO: 3118114 - RNA, 19 nt, Human
acaagaccacguuucuaaa

SEQ ID NO: 3118115 - RNA, 19 nt, Human
acaagacccuugugguccc

SEQ ID NO: 3118116 - RNA, 21 nt, Human
acaacacucauugaccugagg

SEQ ID NO: 3118117 - RNA, 23 nt, Human
acaacacucauugaccugaggcc

SEQ ID NO: 3118118 - RNA, 15 nt, Human
uagccagaggagaga

SEQ ID NO: 3118119 - RNA, 11 nt, Human
uagccagagga

SEQ ID NO: 3118120 - RNA, 16 nt, Human
uagcauuuugcuaaau

SEQ ID NO: 3118121 - RNA, 14 nt, Human
uagccaaggccaaa

SEQ ID NO: 3118122 - RNA, 22 nt, Human
uagcauuuugcuaaaugugaau

SEQ ID NO: 3118123 - RNA, 21 nt, Human
uagccaaggccaaaggaagca

SEQ ID NO: 3118124 - RNA, 19 nt, Human
uagcauggcugccaauggg

SEQ ID NO: 3118125 - RNA, 18 nt, Human
acaagaccacguuucuaa

SEQ ID NO: 3118126 - RNA, 12 nt, Human
acaaugacuuac

SEQ ID NO: 3118127 - RNA, 17 nt, Human
acaaugacuuacuguac

SEQ ID NO: 3118128 - RNA, 18 nt, Human
acaaugacuuacuguaca

SEQ ID NO: 3118129 - RNA, 21 nt, Human
uagggaaggauacaaaagcau

SEQ ID NO: 3118130 - RNA, 14 nt, Human
uaggcauuguggga

SEQ ID NO: 3118131 - RNA, 20 nt, Human
uaggcauuugcugaauacag

SEQ ID NO: 3118132 - RNA, 16 nt, Human
uaggcauuugcugaau

SEQ ID NO: 3118133 - RNA, 23 nt, Human
acaggcugggcuucaguggcagc

SEQ ID NO: 3118134 - RNA, 22 nt, Human
acaggcugggcuucaguggcag

SEQ ID NO: 3118135 - RNA, 12 nt, Human
acagggcacacc

SEQ ID NO: 3118136 - RNA, 13 nt, Human
uauuacuucugcu

SEQ ID NO: 3118137 - RNA, 14 nt, Human
uauuacuucugcua

SEQ ID NO: 3118138 - RNA, 20 nt, Human
uauucaguaauaacucuacc

SEQ ID NO: 3118139 - RNA, 14 nt, Human
uauucaggaagcuc

SEQ ID NO: 3118140 - RNA, 14 nt, Human
acaggcauguucuc

SEQ ID NO: 3118141 - RNA, 14 nt, Human
acaggcagguccag

SEQ ID NO: 3118142 - RNA, 16 nt, Human
acaggcagguccaggg

SEQ ID NO: 3118143 - RNA, 16 nt, Human
acaggagugagcacua

SEQ ID NO: 3118144 - RNA, 14 nt, Human
acaggaucagucug

SEQ ID NO: 3118145 - RNA, 13 nt, Human
acaggcaggucca

SEQ ID NO: 3118146 - RNA, 23 nt, Human
acaggaccagggauuuccaugau

SEQ ID NO: 3118147 - RNA, 13 nt, Human
acaggaaguacug

SEQ ID NO: 3118148 - RNA, 15 nt, Human
acaggaaaagcugcu

SEQ ID NO: 3118149 - RNA, 16 nt, Human
acaggaaaagcugcug

SEQ ID NO: 3118150 - RNA, 17 nt, Human
acaggaaaagcugcuga

SEQ ID NO: 3118151 - RNA, 13 nt, Human
acagcuaacaugg

SEQ ID NO: 3118152 - RNA, 20 nt, Human
uauguggaguucaucuugaa

SEQ ID NO: 3118153 - RNA, 15 nt, Human
acaggcauguucucu

SEQ ID NO: 3118154 - RNA, 18 nt, Human
acaggcauguucucugag

SEQ ID NO: 3118155 - RNA, 19 nt, Human
acaggcauguucucugagg

SEQ ID NO: 3118156 - RNA, 20 nt, Human
acaggcauguucucugagga

SEQ ID NO: 3118157 - RNA, 22 nt, Human
acaggcauguucucugaggaca

SEQ ID NO: 3118158 - RNA, 17 nt, Human
acagaaauguacagcaa

SEQ ID NO: 3118159 - RNA, 14 nt, Human
acagaaauguacag

SEQ ID NO: 3118160 - RNA, 16 nt, Human
acagaaauguacagca

SEQ ID NO: 3118161 - RNA, 17 nt, Human
acagaaaauucuucucc

SEQ ID NO: 3118162 - RNA, 13 nt, Human
acagaaauguaca

SEQ ID NO: 3118163 - RNA, 20 nt, Human
acagaaaauggaagacagcu

SEQ ID NO: 3118164 - RNA, 15 nt, Human
acagacccugcccug

SEQ ID NO: 3118165 - RNA, 14 nt, Human
acagacccugcccu

SEQ ID NO: 3118166 - RNA, 13 nt, Human
acagacccugccc

SEQ ID NO: 3118167 - RNA, 11 nt, Human
acagagaaagu

SEQ ID NO: 3118168 - RNA, 18 nt, Human
acagagaaaguacuucuc

SEQ ID NO: 3118169 - RNA, 13 nt, Human
uaucucccccagc

SEQ ID NO: 3118170 - RNA, 14 nt, Human
uaucucccccagcc

SEQ ID NO: 3118171 - RNA, 11 nt, Human
uaugcauuuga

SEQ ID NO: 3118172 - RNA, 23 nt, Human
uaugcauuugaaaauuuugaugu

SEQ ID NO: 3118173 - RNA, 24 nt, Human
uaugcauuugaaaauuuugauguu

SEQ ID NO: 3118174 - RNA, 17 nt, Human
uaugccugggcagaagg

SEQ ID NO: 3118175 - RNA, 15 nt, Human
uaugcuuauacacuu

SEQ ID NO: 3118176 - RNA, 18 nt, Human
uauggcuuuugugcauua

SEQ ID NO: 3118177 - RNA, 21 nt, Human
uauggcuuuugugcauuaucu

SEQ ID NO: 3118178 - RNA, 17 nt, Human
uauggcuuuugugcauu

SEQ ID NO: 3118179 - RNA, 16 nt, Human
acagcaaggagauuua

SEQ ID NO: 3118180 - RNA, 21 nt, Human
acagcaaggagauuuacaacu

SEQ ID NO: 3118181 - RNA, 17 nt, Human
acagcccgggcucugcc

SEQ ID NO: 3118182 - RNA, 19 nt, Human
acagcccgggcucugccuc

SEQ ID NO: 3118183 - RNA, 18 nt, Human
acagcccgggcucugccu

SEQ ID NO: 3118184 - RNA, 14 nt, Human
acagagcccacgcc

SEQ ID NO: 3118185 - RNA, 15 nt, Human
acagagcccacgccc

SEQ ID NO: 3118186 - RNA, 19 nt, Human
acagagcccacgcccccac

SEQ ID NO: 3118187 - RNA, 18 nt, Human
acagagcccacgccccca

SEQ ID NO: 3118188 - RNA, 17 nt, Human
acagcaaggagauuuac

SEQ ID NO: 3118189 - RNA, 14 nt, Human
guucuuaauucuua

SEQ ID NO: 3118190 - RNA, 17 nt, Human
guucuuaauucuuagcu

SEQ ID NO: 3118191 - RNA, 18 nt, Human
guucucugcccuccaaga

SEQ ID NO: 3118192 - RNA, 17 nt, Human
guucucugcccuccaag

SEQ ID NO: 3118193 - RNA, 13 nt, Human
guucuuaauucuu

SEQ ID NO: 3118194 - RNA, 12 nt, Human
guucucugagga

SEQ ID NO: 3118195 - RNA, 15 nt, Human
guucucucuucucca

SEQ ID NO: 3118196 - RNA, 15 nt, Human
guucucugcccucca

SEQ ID NO: 3118197 - RNA, 13 nt, Human
guucucugcccuc

SEQ ID NO: 3118198 - RNA, 13 nt, Human
guucucuccuucu

SEQ ID NO: 3118199 - RNA, 19 nt, Human
guucuagcauggcugccaa

SEQ ID NO: 3118200 - RNA, 15 nt, Human
guucuugguuuguaa

SEQ ID NO: 3118201 - RNA, 18 nt, Human
guucuugguuuguaaauu

SEQ ID NO: 3118202 - RNA, 14 nt, Human
guucuugguuugua

SEQ ID NO: 3118203 - RNA, 19 nt, Human
guugauagcacagacccug

SEQ ID NO: 3118204 - RNA, 14 nt, Human
guugauagcacaga

SEQ ID NO: 3118205 - RNA, 17 nt, Human
aagcucugcuccucucc

SEQ ID NO: 3118206 - RNA, 22 nt, Human
guucccuuugacgccaucccag

SEQ ID NO: 3118207 - RNA, 22 nt, Human
guucccuuuuuuggcugcugaa

SEQ ID NO: 3118208 - RNA, 21 nt, Human
guucccuuuuuuggcugcuga

SEQ ID NO: 3118209 - RNA, 22 nt, Human
aagcuaggccuggccagaugca

SEQ ID NO: 3118210 - RNA, 16 nt, Human
aagccucccacgacug

SEQ ID NO: 3118211 - RNA, 15 nt, Human
aagccuccuccagcc

SEQ ID NO: 3118212 - RNA, 21 nt, Human
aagccgugauuuucauugcug

SEQ ID NO: 3118213 - RNA, 17 nt, Human
guucagguaacaggcag

SEQ ID NO: 3118214 - RNA, 18 nt, Human
guucagguaacaggcaga

SEQ ID NO: 3118215 - RNA, 20 nt, Human
guucaggguuggccccugcc

SEQ ID NO: 3118216 - RNA, 21 nt, Human
guucaggguuggccccugccc

SEQ ID NO: 3118217 - RNA, 22 nt, Human
guucaggguuggccccugcccg

SEQ ID NO: 3118218 - RNA, 23 nt, Human
guucagcuuguaaauagcucagg

SEQ ID NO: 3118219 - RNA, 19 nt, Human
guuagagguucccuuugac

SEQ ID NO: 3118220 - RNA, 17 nt, Human
aagccaaagcuaggccu

SEQ ID NO: 3118221 - RNA, 18 nt, Human
aagccaaagcuaggccug

SEQ ID NO: 3118222 - RNA, 12 nt, Human
aagcaugugaga

SEQ ID NO: 3118223 - RNA, 14 nt, Human
aagcacaugccucu

SEQ ID NO: 3118224 - RNA, 20 nt, Human
aagcacaugccucucucagg

SEQ ID NO: 3118225 - RNA, 19 nt, Human
aagcacaugccucucucag

SEQ ID NO: 3118226 - RNA, 16 nt, Human
aagcacaugccucucu

SEQ ID NO: 3118227 - RNA, 15 nt, Human
aagcacaugccucuc

SEQ ID NO: 3118228 - RNA, 16 nt, Human
aagcacacuugacauc

SEQ ID NO: 3118229 - RNA, 21 nt, Human
aagcacaugccucucucaggc

SEQ ID NO: 3118230 - RNA, 13 nt, Human
aagcaccuccugc

SEQ ID NO: 3118231 - RNA, 14 nt, Human
aagcaccuccugcc

SEQ ID NO: 3118232 - RNA, 15 nt, Human
aagcaccuccugccu

SEQ ID NO: 3118233 - RNA, 16 nt, Human
aagcaccuccugccuc

SEQ ID NO: 3118234 - RNA, 17 nt, Human
aagcaccuccugccucg

SEQ ID NO: 3118235 - RNA, 22 nt, Human
gugucaccugaagacucauucu

SEQ ID NO: 3118236 - RNA, 14 nt, Human
gugucagguggggc

SEQ ID NO: 3118237 - RNA, 18 nt, Human
gugucagguggggcagcu

SEQ ID NO: 3118238 - RNA, 14 nt, Human
gugucaccugaaga

SEQ ID NO: 3118239 - RNA, 23 nt, Human
gugugaaccaccacacccagccc

SEQ ID NO: 3118240 - RNA, 19 nt, Human
gugucagguggggcagcuu

SEQ ID NO: 3118241 - RNA, 23 nt, Human
aagaucaaaagguuaauaaagua

SEQ ID NO: 3118242 - RNA, 20 nt, Human
aagaucaaaagguuaauaaa

SEQ ID NO: 3118243 - RNA, 23 nt, Human
gugcugcccugcccaccuggccu

SEQ ID NO: 3118244 - RNA, 15 nt, Human
gugguuucagaaaug

SEQ ID NO: 3118245 - RNA, 14 nt, Human
aagaggcagggucu

SEQ ID NO: 3118246 - RNA, 11 nt, Human
aagaggcaggg

SEQ ID NO: 3118247 - RNA, 22 nt, Human
aagagggagggagggcuccaga

SEQ ID NO: 3118248 - RNA, 21 nt, Human
aagagggagggagggcuccag

SEQ ID NO: 3118249 - RNA, 22 nt, Human
aagagggucugaggaauccaga

SEQ ID NO: 3118250 - RNA, 23 nt, Human
aagugauccucccaccucagccu

SEQ ID NO: 3118251 - RNA, 20 nt, Human
aagugauucuccugccucag

SEQ ID NO: 3118252 - RNA, 13 nt, Human
aagugauccuccc

SEQ ID NO: 3118253 - RNA, 19 nt, Human
aagugauccucccaccuca

SEQ ID NO: 3118254 - RNA, 20 nt, Human
aagugauccucccaccucag

SEQ ID NO: 3118255 - RNA, 13 nt, Human
uaaaagucuugug

SEQ ID NO: 3118256 - RNA, 19 nt, Human
uaaaaggugaccaaugaug

SEQ ID NO: 3118257 - RNA, 13 nt, Human
uaaaacccaagug

SEQ ID NO: 3118258 - RNA, 12 nt, Human
uaaaacuuuuua

SEQ ID NO: 3118259 - RNA, 15 nt, Human
uaaaacuuuuuaaaa

SEQ ID NO: 3118260 - RNA, 22 nt, Human
uaaaaaugagguacucuccugg

SEQ ID NO: 3118261 - RNA, 15 nt, Human
uaaaaaugagguacu

SEQ ID NO: 3118262 - RNA, 23 nt, Human
uaaaaaucucaaauuucuaaauc

SEQ ID NO: 3118263 - RNA, 23 nt, Human
aaguguauuuuuuuacuaauaga

SEQ ID NO: 3118264 - RNA, 13 nt, Human
aagugugguagag

SEQ ID NO: 3118265 - RNA, 21 nt, Human
aaguuucugccgcagcccugc

SEQ ID NO: 3118266 - RNA, 19 nt, Human
aaguuucugccgcagcccu

SEQ ID NO: 3118267 - RNA, 20 nt, Human
aaguuugagaucagccuggg

SEQ ID NO: 3118268 - RNA, 14 nt, Human
aaguacuauaauuu

SEQ ID NO: 3118269 - RNA, 17 nt, Human
aaguacuauaauuuacc

SEQ ID NO: 3118270 - RNA, 13 nt, Human
aaguacuauguau

SEQ ID NO: 3118271 - RNA, 19 nt, Human
aaguacuucuccacccugc

SEQ ID NO: 3118272 - RNA, 18 nt, Human
aaguacuucuccacccug

SEQ ID NO: 3118273 - RNA, 15 nt, Human
aaguauuauaccuuu

SEQ ID NO: 3118274 - RNA, 23 nt, Human
aaguauucuuauuuaaugaaaga

SEQ ID NO: 3118275 - RNA, 21 nt, Human
aaguauucuuauuuaaugaaa

SEQ ID NO: 3118276 - RNA, 19 nt, Human
aaguauucuuauuuaauga

SEQ ID NO: 3118277 - RNA, 16 nt, Human
aaguauuauaccuuuu

SEQ ID NO: 3118278 - RNA, 19 nt, Human
aaguauuauaccuuuuuua

SEQ ID NO: 3118279 - RNA, 12 nt, Human
guuuucuguucu

SEQ ID NO: 3118280 - RNA, 14 nt, Human
guuuucuguucuuu

SEQ ID NO: 3118281 - RNA, 15 nt, Human
guuuucuguucuuuc

SEQ ID NO: 3118282 - RNA, 16 nt, Human
guuuucuguucuuucu

SEQ ID NO: 3118283 - RNA, 18 nt, Human
guuuuaaggaugcuugua

SEQ ID NO: 3118284 - RNA, 22 nt, Human
guuuuaaggaugcuuguacaua

SEQ ID NO: 3118285 - RNA, 21 nt, Human
aaguaauaugcacacauuuuu

SEQ ID NO: 3118286 - RNA, 18 nt, Human
aaguaauaugcacacauu

SEQ ID NO: 3118287 - RNA, 20 nt, Human
aaguaauaugcacacauuuu

SEQ ID NO: 3118288 - RNA, 17 nt, Human
aaguaauaugcacacau

SEQ ID NO: 3118289 - RNA, 16 nt, Human
aaggaaacccagcucu

SEQ ID NO: 3118290 - RNA, 20 nt, Human
guuguuugauucagacagcu

SEQ ID NO: 3118291 - RNA, 23 nt, Human
guuguuugauucagacagcugcc

SEQ ID NO: 3118292 - RNA, 22 nt, Human
aaggaaacccagcucuggucca

SEQ ID NO: 3118293 - RNA, 17 nt, Human
aaggaaacccagcucug

SEQ ID NO: 3118294 - RNA, 21 nt, Human
guuuaagugacugauggcuaa

SEQ ID NO: 3118295 - RNA, 17 nt, Human
guuucaaacuuuacuau

SEQ ID NO: 3118296 - RNA, 20 nt, Human
aaggcugucaauuacaggaa

SEQ ID NO: 3118297 - RNA, 22 nt, Human
aaggcugggggaagaagcucuc

SEQ ID NO: 3118298 - RNA, 19 nt, Human
aaggcugggggaagaagcu

SEQ ID NO: 3118299 - RNA, 11 nt, Human
guuucagaaau

SEQ ID NO: 3118300 - RNA, 13 nt, Human
guuucagaaaugu

SEQ ID NO: 3118301 - RNA, 14 nt, Human
aaggcugggggaag

SEQ ID NO: 3118302 - RNA, 16 nt, Human
aaggcugggggaagaa

SEQ ID NO: 3118303 - RNA, 13 nt, Human
aaggggagaguaa

SEQ ID NO: 3118304 - RNA, 23 nt, Human
aagggggcugggacaugggaaag

SEQ ID NO: 3118305 - RNA, 12 nt, Human
aagggggcuggg

SEQ ID NO: 3118306 - RNA, 15 nt, Human
aagaaaauaguggug

SEQ ID NO: 3118307 - RNA, 21 nt, Human
aagaaaauaguggugugauuu

SEQ ID NO: 3118308 - RNA, 22 nt, Human
aagaaaauaguggugugauuug

SEQ ID NO: 3118309 - RNA, 21 nt, Human
aacuuuaccuuuuuuauacau

SEQ ID NO: 3118310 - RNA, 22 nt, Human
aacuuuaccuuuuuuauacaua

SEQ ID NO: 3118311 - RNA, 23 nt, Human
aacuuuaccuuuuuuauacauaa

SEQ ID NO: 3118312 - RNA, 19 nt, Human
aagaaaaaauauuuucccu

SEQ ID NO: 3118313 - RNA, 13 nt, Human
aagaaaaagaaaa

SEQ ID NO: 3118314 - RNA, 17 nt, Human
aagaaaaaugagccugg

SEQ ID NO: 3118315 - RNA, 18 nt, Human
aagaaaaaugagccuggc

SEQ ID NO: 3118316 - RNA, 18 nt, Human
gugcuaucucccccagcc

SEQ ID NO: 3118317 - RNA, 15 nt, Human
gugcuaucuccccca

SEQ ID NO: 3118318 - RNA, 15 nt, Human
gugcugcccugccca

SEQ ID NO: 3118319 - RNA, 14 nt, Human
gugcugcccugccc

SEQ ID NO: 3118320 - RNA, 13 nt, Human
gugcugcccugcc

SEQ ID NO: 3118321 - RNA, 12 nt, Human
gugcugcccugc

SEQ ID NO: 3118322 - RNA, 13 nt, Human
gugcucuggacag

SEQ ID NO: 3118323 - RNA, 14 nt, Human
gugcucuggacagg

SEQ ID NO: 3118324 - RNA, 16 nt, Human
gugcucugaucaucca

SEQ ID NO: 3118325 - RNA, 21 nt, Human
gugcacaugcacgugugugca

SEQ ID NO: 3118326 - RNA, 21 nt, Human
gugcacaagcuccaagcuccc

SEQ ID NO: 3118327 - RNA, 16 nt, Human
gugcacaagcuccaag

SEQ ID NO: 3118328 - RNA, 13 nt, Human
gugcacaagcucc

SEQ ID NO: 3118329 - RNA, 18 nt, Human
gugcaaugaccuuucaau

SEQ ID NO: 3118330 - RNA, 23 nt, Human
gugccaaaaacaacaacaaaaug

SEQ ID NO: 3118331 - RNA, 21 nt, Human
gugcauuuggugguuucagaa

SEQ ID NO: 3118332 - RNA, 17 nt, Human
gugcauuugaggucugu

SEQ ID NO: 3118333 - RNA, 19 nt, Human
gugcauuugaggucuguuc

SEQ ID NO: 3118334 - RNA, 23 nt, Human
gugauccucccaccucagccucc

SEQ ID NO: 3118335 - RNA, 14 nt, Human
aacuucacauauug

SEQ ID NO: 3118336 - RNA, 13 nt, Human
aacuucacauauu

SEQ ID NO: 3118337 - RNA, 22 nt, Human
aacuucacauauugauuuccgu

SEQ ID NO: 3118338 - RNA, 22 nt, Human
aacuucaccauauuaccacaga

SEQ ID NO: 3118339 - RNA, 16 nt, Human
aacugcauuggcuuug

SEQ ID NO: 3118340 - RNA, 23 nt, Human
aacugauuuuuuuuuccuucagu

SEQ ID NO: 3118341 - RNA, 22 nt, Human
aacugauuuuuuuuuccuucag

SEQ ID NO: 3118342 - RNA, 21 nt, Human
aacugauuuuuuuuuccuuca

SEQ ID NO: 3118343 - RNA, 20 nt, Human
aacugauuuuuuuuuccuuc

SEQ ID NO: 3118344 - RNA, 23 nt, Human
aacucuccucugcugcuggcugg

SEQ ID NO: 3118345 - RNA, 22 nt, Human
aacucuccucugcugcuggcug

SEQ ID NO: 3118346 - RNA, 18 nt, Human
gugaggcucugcccuugg

SEQ ID NO: 3118347 - RNA, 17 nt, Human
gugagucaccaagccca

SEQ ID NO: 3118348 - RNA, 23 nt, Human
gugaguacuacaguccucccauc

SEQ ID NO: 3118349 - RNA, 19 nt, Human
gugagucaccaagcccagu

SEQ ID NO: 3118350 - RNA, 17 nt, Human
aacucuccucugcugcu

SEQ ID NO: 3118351 - RNA, 21 nt, Human
gugaguacuacaguccuccca

SEQ ID NO: 3118352 - RNA, 21 nt, Human
aacucuccucugcugcuggcu

SEQ ID NO: 3118353 - RNA, 19 nt, Human
aacucuccucugcugcugg

SEQ ID NO: 3118354 - RNA, 18 nt, Human
gugagacucugucucaaa

SEQ ID NO: 3118355 - RNA, 13 nt, Human
gugaggcucugcc

SEQ ID NO: 3118356 - RNA, 12 nt, Human
gugaggcucugc

SEQ ID NO: 3118357 - RNA, 17 nt, Human
gugaggcucugcccuug

SEQ ID NO: 3118358 - RNA, 16 nt, Human
gugaggcucugcccuu

SEQ ID NO: 3118359 - RNA, 15 nt, Human
gugaggcucugcccu

SEQ ID NO: 3118360 - RNA, 14 nt, Human
gugaggcucugccc

SEQ ID NO: 3118361 - RNA, 22 nt, Human
gugagacccugucucaaaaaaa

SEQ ID NO: 3118362 - RNA, 14 nt, Human
gugagacucugucu

SEQ ID NO: 3118363 - RNA, 16 nt, Human
gugagacucugucuca

SEQ ID NO: 3118364 - RNA, 19 nt, Human
gugacaugucuuuucuugc

SEQ ID NO: 3118365 - RNA, 14 nt, Human
gugacaugucuuuu

SEQ ID NO: 3118366 - RNA, 23 nt, Human
gugacagaggcagccccauucug

SEQ ID NO: 3118367 - RNA, 20 nt, Human
gugacagagugagacucugu

SEQ ID NO: 3118368 - RNA, 22 nt, Human
gugacagagugagacucugucu

SEQ ID NO: 3118369 - RNA, 23 nt, Human
gugaauaauacaguaucucaggg

SEQ ID NO: 3118370 - RNA, 14 nt, Human
gucucaaaaaaaca

SEQ ID NO: 3118371 - RNA, 17 nt, Human
gucucaaaaaaagaaaa

SEQ ID NO: 3118372 - RNA, 23 nt, Human
gucucuuuaaugucacaggcagg

SEQ ID NO: 3118373 - RNA, 20 nt, Human
gucugacaggcaaugcuggc

SEQ ID NO: 3118374 - RNA, 15 nt, Human
gucugacaggcaaug

SEQ ID NO: 3118375 - RNA, 18 nt, Human
gucugacaggcaaugcug

SEQ ID NO: 3118376 - RNA, 12 nt, Human
gucugacaggca

SEQ ID NO: 3118377 - RNA, 13 nt, Human
gucugacaggcaa

SEQ ID NO: 3118378 - RNA, 14 nt, Human
gucugacaggcaau

SEQ ID NO: 3118379 - RNA, 15 nt, Human
gucuggaaugcagug

SEQ ID NO: 3118380 - RNA, 16 nt, Human
gucuggaaugcagugg

SEQ ID NO: 3118381 - RNA, 13 nt, Human
aacgucugugcca

SEQ ID NO: 3118382 - RNA, 13 nt, Human
aacguggcugcuu

SEQ ID NO: 3118383 - RNA, 12 nt, Human
aacguggcugcu

SEQ ID NO: 3118384 - RNA, 17 nt, Human
aacuagggaagauaaua

SEQ ID NO: 3118385 - RNA, 19 nt, Human
gucccuuacgugaguccug

SEQ ID NO: 3118386 - RNA, 18 nt, Human
gucccuuacgugaguccu

SEQ ID NO: 3118387 - RNA, 18 nt, Human
gucccugguggcagcuca

SEQ ID NO: 3118388 - RNA, 19 nt, Human
gucccugguggcagcucac

SEQ ID NO: 3118389 - RNA, 18 nt, Human
guccccuguuuguuucug

SEQ ID NO: 3118390 - RNA, 22 nt, Human
guccccuguuuguuucugaaag

SEQ ID NO: 3118391 - RNA, 15 nt, Human
gucccaccccacaca

SEQ ID NO: 3118392 - RNA, 17 nt, Human
guccccaccgcagacag

SEQ ID NO: 3118393 - RNA, 18 nt, Human
guccccaccgcagacagg

SEQ ID NO: 3118394 - RNA, 22 nt, Human
guccccaccgcagacaggacca

SEQ ID NO: 3118395 - RNA, 19 nt, Human
aacacaaacgggcucagca

SEQ ID NO: 3118396 - RNA, 19 nt, Human
aaauuucuaaaucuccaaa

SEQ ID NO: 3118397 - RNA, 16 nt, Human
aacacuguucucugcc

SEQ ID NO: 3118398 - RNA, 18 nt, Human
aacacuguucucugcccu

SEQ ID NO: 3118399 - RNA, 17 nt, Human
aacacuguucucugccc

SEQ ID NO: 3118400 - RNA, 17 nt, Human
gucauuugagcagggcu

SEQ ID NO: 3118401 - RNA, 19 nt, Human
aacacuguucucugcccuc

SEQ ID NO: 3118402 - RNA, 21 nt, Human
aacacucacauuuauucugcu

SEQ ID NO: 3118403 - RNA, 23 nt, Human
aacauguaauuaaguacuaugua

SEQ ID NO: 3118404 - RNA, 14 nt, Human
guccucuuuucuga

SEQ ID NO: 3118405 - RNA, 16 nt, Human
guccuggcaugggaau

SEQ ID NO: 3118406 - RNA, 17 nt, Human
guccugcugcaguugcc

SEQ ID NO: 3118407 - RNA, 19 nt, Human
guccugcugcaguugccag

SEQ ID NO: 3118408 - RNA, 12 nt, Human
gucgaggcagga

SEQ ID NO: 3118409 - RNA, 16 nt, Human
gucgaggacagggagg

SEQ ID NO: 3118410 - RNA, 15 nt, Human
gucuaugggacucaa

SEQ ID NO: 3118411 - RNA, 22 nt, Human
gucuaugggacucaaugcacug

SEQ ID NO: 3118412 - RNA, 16 nt, Human
gucuaccugaggggcc

SEQ ID NO: 3118413 - RNA, 15 nt, Human
gucuaccugaggggc

SEQ ID NO: 3118414 - RNA, 13 nt, Human
gucuaccugaggg

SEQ ID NO: 3118415 - RNA, 14 nt, Human
gucuaccugagggg

SEQ ID NO: 3118416 - RNA, 21 nt, Human
gucagaaguuucugccgcagc

SEQ ID NO: 3118417 - RNA, 15 nt, Human
gucacugcuuaacuu

SEQ ID NO: 3118418 - RNA, 21 nt, Human
gucacugcuuaacuucacaua

SEQ ID NO: 3118419 - RNA, 16 nt, Human
gucagguggggcagcu

SEQ ID NO: 3118420 - RNA, 17 nt, Human
gucagguggggcagcuu

SEQ ID NO: 3118421 - RNA, 18 nt, Human
gucagguggggcagcuug

SEQ ID NO: 3118422 - RNA, 22 nt, Human
gucagguggggcagcuugaggg

SEQ ID NO: 3118423 - RNA, 12 nt, Human
aaauuucuaaau

SEQ ID NO: 3118424 - RNA, 13 nt, Human
aaauuucuaaauc

SEQ ID NO: 3118425 - RNA, 15 nt, Human
aaauuucuaaaucuc

SEQ ID NO: 3118426 - RNA, 22 nt, Human
gucaccaaaucagcugcuacua

SEQ ID NO: 3118427 - RNA, 22 nt, Human
gucaauuacaggaaguacugga

SEQ ID NO: 3118428 - RNA, 12 nt, Human
gucaccaagccc

SEQ ID NO: 3118429 - RNA, 15 nt, Human
gucaccaagcccagu

SEQ ID NO: 3118430 - RNA, 23 nt, Human
gucacucuggcagcucagagagg

SEQ ID NO: 3118431 - RNA, 16 nt, Human
gucacugagacagccc

SEQ ID NO: 3118432 - RNA, 15 nt, Human
gucacugagacagcc

SEQ ID NO: 3118433 - RNA, 14 nt, Human
gucacugagacagc

SEQ ID NO: 3118434 - RNA, 22 nt, Human
gucacucuggcagcucagagag

SEQ ID NO: 3118435 - RNA, 23 nt, Human
gucacugagacagcccgggcucu

SEQ ID NO: 3118436 - RNA, 21 nt, Human
gucacugagacagcccgggcu

SEQ ID NO: 3118437 - RNA, 18 nt, Human
gucacugagacagcccgg

SEQ ID NO: 3118438 - RNA, 17 nt, Human
gucacugagacagcccg

SEQ ID NO: 3118439 - RNA, 10 nt, Human
gucacugcuu

SEQ ID NO: 3118440 - RNA, 24 nt, Human
aaaugucuaguuguaacaccauga

SEQ ID NO: 3118441 - RNA, 21 nt, Human
aaaugucucuuuaaugucaca

SEQ ID NO: 3118442 - RNA, 18 nt, Human
guauucucuccuguaccu

SEQ ID NO: 3118443 - RNA, 14 nt, Human
cacaguucucuccu

SEQ ID NO: 3118444 - RNA, 15 nt, Human
cacaguucucuccuu

SEQ ID NO: 3118445 - RNA, 22 nt, Human
cacagugagucgaggacaggga

SEQ ID NO: 3118446 - RNA, 21 nt, Human
cacagugagucgaggacaggg

SEQ ID NO: 3118447 - RNA, 22 nt, Human
cacaguccuuaccagcagagca

SEQ ID NO: 3118448 - RNA, 21 nt, Human
cacaguccuuaccagcagagc

SEQ ID NO: 3118449 - RNA, 15 nt, Human
cacaguccuuaccag

SEQ ID NO: 3118450 - RNA, 13 nt, Human
cacaguccuuacc

SEQ ID NO: 3118451 - RNA, 11 nt, Human
cacaggcaggu

SEQ ID NO: 3118452 - RNA, 14 nt, Human
cacaggcaggucca

SEQ ID NO: 3118453 - RNA, 15 nt, Human
cacaggcagguccag

SEQ ID NO: 3118454 - RNA, 23 nt, Human
cacagcugggguggggaccucag

SEQ ID NO: 3118455 - RNA, 22 nt, Human
cacagcugggguggggaccuca

SEQ ID NO: 3118456 - RNA, 21 nt, Human
cacagcuucauuuccuguguc

SEQ ID NO: 3118457 - RNA, 22 nt, Human
cacagcuucauuuccugugucu

SEQ ID NO: 3118458 - RNA, 14 nt, Human
cacauaucugucau

SEQ ID NO: 3118459 - RNA, 21 nt, Human
caaggcugucaauuacaggaa

SEQ ID NO: 3118460 - RNA, 23 nt, Human
caaggcugucaauuacaggaagu

SEQ ID NO: 3118461 - RNA, 12 nt, Human
caaggcugcagu

SEQ ID NO: 3118462 - RNA, 18 nt, Human
caaggggcccaaauucuu

SEQ ID NO: 3118463 - RNA, 17 nt, Human
caaggggcccaaauucu

SEQ ID NO: 3118464 - RNA, 13 nt, Human
caaggucauuuuu

SEQ ID NO: 3118465 - RNA, 14 nt, Human
caaggucauuuuuu

SEQ ID NO: 3118466 - RNA, 20 nt, Human
caaggucauuuuuuuuaaga

SEQ ID NO: 3118467 - RNA, 14 nt, Human
caaguccucuuuuc

SEQ ID NO: 3118468 - RNA, 14 nt, Human
caaguuaaauaaau

SEQ ID NO: 3118469 - RNA, 18 nt, Human
caagugagagcugggugu

SEQ ID NO: 3118470 - RNA, 19 nt, Human
caagugagacccugucuca

SEQ ID NO: 3118471 - RNA, 21 nt, Human
caaguccucuuuucugagagg

SEQ ID NO: 3118472 - RNA, 14 nt, Human
caagugagagcugg

SEQ ID NO: 3118473 - RNA, 15 nt, Human
caagugagagcuggg

SEQ ID NO: 3118474 - RNA, 17 nt, Human
caagugagagcugggug

SEQ ID NO: 3118475 - RNA, 20 nt, Human
caagcgauucuucugcuuca

SEQ ID NO: 3118476 - RNA, 22 nt, Human
caagcgauucuucugcuucagc

SEQ ID NO: 3118477 - RNA, 19 nt, Human
caagcgauucuucugcuuc

SEQ ID NO: 3118478 - RNA, 18 nt, Human
caagcaggacauggacaa

SEQ ID NO: 3118479 - RNA, 14 nt, Human
caagcaggacaugg

SEQ ID NO: 3118480 - RNA, 14 nt, Human
caagcaccuccugc

SEQ ID NO: 3118481 - RNA, 22 nt, Human
caagccaccaacauacucccau

SEQ ID NO: 3118482 - RNA, 17 nt, Human
caagcuggucccacuca

SEQ ID NO: 3118483 - RNA, 19 nt, Human
caagcuggucccacucagu

SEQ ID NO: 3118484 - RNA, 14 nt, Human
caacgucugugcca

SEQ ID NO: 3118485 - RNA, 13 nt, Human
caacgucugugcc

SEQ ID NO: 3118486 - RNA, 15 nt, Human
caaccuccugggcua

SEQ ID NO: 3118487 - RNA, 14 nt, Human
caaccuccugggcu

SEQ ID NO: 3118488 - RNA, 22 nt, Human
caacacucacauuuauucugcu

SEQ ID NO: 3118489 - RNA, 18 nt, Human
caacacucauugaccuga

SEQ ID NO: 3118490 - RNA, 22 nt, Human
caacacucauugaccugaggcc

SEQ ID NO: 3118491 - RNA, 20 nt, Human
caacacucauugaccugagg

SEQ ID NO: 3118492 - RNA, 22 nt, Human
caaccccuucgcuccugugucu

SEQ ID NO: 3118493 - RNA, 20 nt, Human
caagaacuuuccaggaaggc

SEQ ID NO: 3118494 - RNA, 16 nt, Human
caagaccuucuccuuc

SEQ ID NO: 3118495 - RNA, 14 nt, Human
caagaccuucuccu

SEQ ID NO: 3118496 - RNA, 17 nt, Human
caagacgcugugcugcc

SEQ ID NO: 3118497 - RNA, 16 nt, Human
caagacgcugugcugc

SEQ ID NO: 3118498 - RNA, 18 nt, Human
caagaccuucuccuucac

SEQ ID NO: 3118499 - RNA, 17 nt, Human
caagaccuucuccuuca

SEQ ID NO: 3118500 - RNA, 18 nt, Human
caagacgcugugcugccc

SEQ ID NO: 3118501 - RNA, 15 nt, Human
caagacgcugugcug

SEQ ID NO: 3118502 - RNA, 23 nt, Human
caagacgcugugcugcccugccc

SEQ ID NO: 3118503 - RNA, 15 nt, Human
caagagcccaggccu

SEQ ID NO: 3118504 - RNA, 14 nt, Human
caagagcccaggcc

SEQ ID NO: 3118505 - RNA, 13 nt, Human
caagagcccaggc

SEQ ID NO: 3118506 - RNA, 18 nt, Human
caagacucuuuggacacu

SEQ ID NO: 3118507 - RNA, 15 nt, Human
caagcaccuccugcc

SEQ ID NO: 3118508 - RNA, 16 nt, Human
caagcaccuccugccu

SEQ ID NO: 3118509 - RNA, 17 nt, Human
caagcaccuccugccuc

SEQ ID NO: 3118510 - RNA, 16 nt, Human
caagagcccaggccuc

SEQ ID NO: 3118511 - RNA, 13 nt, Human
caauaggaaaaac

SEQ ID NO: 3118512 - RNA, 12 nt, Human
caauaggaaaaa

SEQ ID NO: 3118513 - RNA, 23 nt, Human
caaugaccuuucaauaggaaaaa

SEQ ID NO: 3118514 - RNA, 17 nt, Human
caaugacuuacuguaca

SEQ ID NO: 3118515 - RNA, 18 nt, Human
caaugacuuacuguacau

SEQ ID NO: 3118516 - RNA, 15 nt, Human
caaugacuuacugua

SEQ ID NO: 3118517 - RNA, 21 nt, Human
caaugaccuuucaauaggaaa

SEQ ID NO: 3118518 - RNA, 17 nt, Human
caauauucgcuguguca

SEQ ID NO: 3118519 - RNA, 23 nt, Human
caauucucauuugucacacacuu

SEQ ID NO: 3118520 - RNA, 16 nt, Human
caauuacaggaaguac

SEQ ID NO: 3118521 - RNA, 17 nt, Human
caaugugauaaaacccc

SEQ ID NO: 3118522 - RNA, 15 nt, Human
caaugugauaaaacc

SEQ ID NO: 3118523 - RNA, 17 nt, Human
caaugcacuuuguucug

SEQ ID NO: 3118524 - RNA, 21 nt, Human
caaugcacuuuguucuggcuc

SEQ ID NO: 3118525 - RNA, 20 nt, Human
caaugcacuuuguucuggcu

SEQ ID NO: 3118526 - RNA, 13 nt, Human
caaaaaggcagga

SEQ ID NO: 3118527 - RNA, 22 nt, Human
auuuugggguacccacugcucu

SEQ ID NO: 3118528 - RNA, 23 nt, Human
auuuugggguacccacugcucug

SEQ ID NO: 3118529 - RNA, 16 nt, Human
caaaaaaugcuugcuu

SEQ ID NO: 3118530 - RNA, 21 nt, Human
auuuugggguacccacugcuc

SEQ ID NO: 3118531 - RNA, 22 nt, Human
caaaacucuccucugcugcugg

SEQ ID NO: 3118532 - RNA, 21 nt, Human
caaaacucuccucugcugcug

SEQ ID NO: 3118533 - RNA, 20 nt, Human
caaaacucuccucugcugcu

SEQ ID NO: 3118534 - RNA, 17 nt, Human
caaaauaaaaaugaggu

SEQ ID NO: 3118535 - RNA, 19 nt, Human
caaaacucuccucugcugc

SEQ ID NO: 3118536 - RNA, 23 nt, Human
caaagugcugggauuacaggugu

SEQ ID NO: 3118537 - RNA, 19 nt, Human
caaagugcugggauuacag

SEQ ID NO: 3118538 - RNA, 19 nt, Human
caaaggguaucaggugcug

SEQ ID NO: 3118539 - RNA, 11 nt, Human
caaauuucuaa

SEQ ID NO: 3118540 - RNA, 12 nt, Human
caaauuucuaaa

SEQ ID NO: 3118541 - RNA, 14 nt, Human
caaauuucuaaauc

SEQ ID NO: 3118542 - RNA, 20 nt, Human
caaacccuucagugccaaaa

SEQ ID NO: 3118543 - RNA, 14 nt, Human
caaacccuucagug

SEQ ID NO: 3118544 - RNA, 15 nt, Human
caaacacauacagga

SEQ ID NO: 3118545 - RNA, 12 nt, Human
caaaauaaaacu

SEQ ID NO: 3118546 - RNA, 15 nt, Human
caaaauguaggguua

SEQ ID NO: 3118547 - RNA, 14 nt, Human
caaaggaagcacau

SEQ ID NO: 3118548 - RNA, 16 nt, Human
caaaggguaucaggug

SEQ ID NO: 3118549 - RNA, 18 nt, Human
caaaggguaucaggugcu

SEQ ID NO: 3118550 - RNA, 13 nt, Human
caaagcuaggccu

SEQ ID NO: 3118551 - RNA, 14 nt, Human
caaagcuaggccug

SEQ ID NO: 3118552 - RNA, 19 nt, Human
caaagcuaggccuggccag

SEQ ID NO: 3118553 - RNA, 18 nt, Human
caaagcuaggccuggcca

SEQ ID NO: 3118554 - RNA, 13 nt, Human
caaaggaagcaca

SEQ ID NO: 3118555 - RNA, 12 nt, Human
caaaggaagcac

SEQ ID NO: 3118556 - RNA, 17 nt, Human
caaacucaccugccccu

SEQ ID NO: 3118557 - RNA, 22 nt, Human
caaagccaaagcuaggccuggc

SEQ ID NO: 3118558 - RNA, 18 nt, Human
caaagccuccuccagccg

SEQ ID NO: 3118559 - RNA, 17 nt, Human
caaagccuccuccagcc

SEQ ID NO: 3118560 - RNA, 22 nt, Human
uauuggaaauuuguuauaauga

SEQ ID NO: 3118561 - RNA, 17 nt, Human
uauugcugauggugcaa

SEQ ID NO: 3118562 - RNA, 17 nt, Human
uauucucuccuguaccu

SEQ ID NO: 3118563 - RNA, 21 nt, Human
uauugauaugcuuauacacuu

SEQ ID NO: 3118564 - RNA, 12 nt, Human
uauuguuuucag

SEQ ID NO: 3118565 - RNA, 22 nt, Human
uauuguuuucaguguacaugga

SEQ ID NO: 3118566 - RNA, 18 nt, Human
uauuguuuucaguguaca

SEQ ID NO: 3118567 - RNA, 20 nt, Human
uauuguuuucaguguacaug

SEQ ID NO: 3118568 - RNA, 15 nt, Human
gggaguggccacaga

SEQ ID NO: 3118569 - RNA, 13 nt, Human
gggaguggccaca

SEQ ID NO: 3118570 - RNA, 16 nt, Human
uauguugcccaggcag

SEQ ID NO: 3118571 - RNA, 19 nt, Human
uauguugcccaggcagguc

SEQ ID NO: 3118572 - RNA, 13 nt, Human
uauguugcccagg

SEQ ID NO: 3118573 - RNA, 20 nt, Human
uauguugcccaggcaggucu

SEQ ID NO: 3118574 - RNA, 24 nt, Human
uauuaagaaagacuaucuaaaugu

SEQ ID NO: 3118575 - RNA, 12 nt, Human
uauuaaauuaug

SEQ ID NO: 3118576 - RNA, 18 nt, Human
ucaagugauucuccugcc

SEQ ID NO: 3118577 - RNA, 20 nt, Human
ucaagugauucuccugccuc

SEQ ID NO: 3118578 - RNA, 23 nt, Human
ucaauuacaggaaguacuggaga

SEQ ID NO: 3118579 - RNA, 21 nt, Human
ucaauuacaggaaguacugga

SEQ ID NO: 3118580 - RNA, 18 nt, Human
ucacauuuauucugcuca

SEQ ID NO: 3118581 - RNA, 19 nt, Human
ucacauuuauucugcucac

SEQ ID NO: 3118582 - RNA, 17 nt, Human
ucacauuuauucugcuc

SEQ ID NO: 3118583 - RNA, 19 nt, Human
ucaccaaaucagcugcuac

SEQ ID NO: 3118584 - RNA, 20 nt, Human
ucaccaaaucagcugcuacu

SEQ ID NO: 3118585 - RNA, 16 nt, Human
ucacaggcagguccag

SEQ ID NO: 3118586 - RNA, 17 nt, Human
ucacaggcagguccagg

SEQ ID NO: 3118587 - RNA, 18 nt, Human
ucacaggcagguccaggg

SEQ ID NO: 3118588 - RNA, 19 nt, Human
ucacaguccuuaccagcag

SEQ ID NO: 3118589 - RNA, 23 nt, Human
ucacaguccuuaccagcagagca

SEQ ID NO: 3118590 - RNA, 22 nt, Human
ucacaguccuuaccagcagagc

SEQ ID NO: 3118591 - RNA, 20 nt, Human
ucaauuacaggaaguacugg

SEQ ID NO: 3118592 - RNA, 23 nt, Human
ucaaccccuucgcuccugugucu

SEQ ID NO: 3118593 - RNA, 14 nt, Human
uauuuuauuaugca

SEQ ID NO: 3118594 - RNA, 17 nt, Human
uauuuuauuaugcauga

SEQ ID NO: 3118595 - RNA, 22 nt, Human
uauuuucccuauuagagaagag

SEQ ID NO: 3118596 - RNA, 15 nt, Human
ucaaaaaaagaaaaa

SEQ ID NO: 3118597 - RNA, 14 nt, Human
ucaaaaaaagaaaa

SEQ ID NO: 3118598 - RNA, 17 nt, Human
uauuuuuuucuuuucuu

SEQ ID NO: 3118599 - RNA, 14 nt, Human
uauuuuuuuacuaa

SEQ ID NO: 3118600 - RNA, 16 nt, Human
ucagggccuggcucag

SEQ ID NO: 3118601 - RNA, 14 nt, Human
ucagggccuggcuc

SEQ ID NO: 3118602 - RNA, 16 nt, Human
ucaggugagaagcaga

SEQ ID NO: 3118603 - RNA, 15 nt, Human
ucaggugagaagcag

SEQ ID NO: 3118604 - RNA, 20 nt, Human
ucagccucccgaguagcugg

SEQ ID NO: 3118605 - RNA, 18 nt, Human
ucagccucccgaguagcu

SEQ ID NO: 3118606 - RNA, 21 nt, Human
ucagccucccgaauagcuggg

SEQ ID NO: 3118607 - RNA, 22 nt, Human
ucagccucccgaauagcuggga

SEQ ID NO: 3118608 - RNA, 13 nt, Human
ucagccucccaaa

SEQ ID NO: 3118609 - RNA, 14 nt, Human
ucagccucccaaag

SEQ ID NO: 3118610 - RNA, 19 nt, Human
ucagccucccaaagugcug

SEQ ID NO: 3118611 - RNA, 21 nt, Human
ucagccucccaaagugcuggg

SEQ ID NO: 3118612 - RNA, 19 nt, Human
ucagccugcuccagcuguu

SEQ ID NO: 3118613 - RNA, 18 nt, Human
ucagccugcuccagcugu

SEQ ID NO: 3118614 - RNA, 21 nt, Human
ucagccucccgaguagcuggg

SEQ ID NO: 3118615 - RNA, 22 nt, Human
ucagccucccgaguagcuggga

SEQ ID NO: 3118616 - RNA, 16 nt, Human
ucagcugaaccugggu

SEQ ID NO: 3118617 - RNA, 15 nt, Human
ucagcugaaccuggg

SEQ ID NO: 3118618 - RNA, 10 nt, Human
ucagaaaugu

SEQ ID NO: 3118619 - RNA, 23 nt, Human
ucagaauucucuaguuugauuaa

SEQ ID NO: 3118620 - RNA, 15 nt, Human
ucagaaauguguuau

SEQ ID NO: 3118621 - RNA, 16 nt, Human
ucagaauucucuaguu

SEQ ID NO: 3118622 - RNA, 13 nt, Human
ucagacagcugcc

SEQ ID NO: 3118623 - RNA, 20 nt, Human
ucacugcuuaacuucacaua

SEQ ID NO: 3118624 - RNA, 14 nt, Human
ucacugcuuaacuu

SEQ ID NO: 3118625 - RNA, 17 nt, Human
ucacucuuauugcccac

SEQ ID NO: 3118626 - RNA, 22 nt, Human
ucacucugucgcccagucugga

SEQ ID NO: 3118627 - RNA, 13 nt, Human
ucaccagccccag

SEQ ID NO: 3118628 - RNA, 22 nt, Human
ucaccccggccaccugcggugc

SEQ ID NO: 3118629 - RNA, 20 nt, Human
ucacucuuauugcccacgcu

SEQ ID NO: 3118630 - RNA, 18 nt, Human
ucacugccaugccagcuu

SEQ ID NO: 3118631 - RNA, 21 nt, Human
uccaccugccagggacagagg

SEQ ID NO: 3118632 - RNA, 18 nt, Human
uccaccugccagggacag

SEQ ID NO: 3118633 - RNA, 15 nt, Human
uccaccugccaggga

SEQ ID NO: 3118634 - RNA, 17 nt, Human
uccaccugccagggaca

SEQ ID NO: 3118635 - RNA, 12 nt, Human
uccacccugcuc

SEQ ID NO: 3118636 - RNA, 17 nt, Human
uccacaaguuaaauaaa

SEQ ID NO: 3118637 - RNA, 18 nt, Human
uccacaaguuaaauaaau

SEQ ID NO: 3118638 - RNA, 15 nt, Human
uccacaagagcccag

SEQ ID NO: 3118639 - RNA, 18 nt, Human
uccacaagagcccaggcc

SEQ ID NO: 3118640 - RNA, 17 nt, Human
uccacaagagcccaggc

SEQ ID NO: 3118641 - RNA, 16 nt, Human
uccacaagagcccagg

SEQ ID NO: 3118642 - RNA, 17 nt, Human
uccaauuuacauacucu

SEQ ID NO: 3118643 - RNA, 18 nt, Human
uccaauuuacauacucug

SEQ ID NO: 3118644 - RNA, 20 nt, Human
uccaaaauaaaacuuuuuaa

SEQ ID NO: 3118645 - RNA, 18 nt, Human
uccaaaauaaaacuuuuu

SEQ ID NO: 3118646 - RNA, 16 nt, Human
uccaggagcagccaca

SEQ ID NO: 3118647 - RNA, 17 nt, Human
uccagcuguucagcugg

SEQ ID NO: 3118648 - RNA, 15 nt, Human
uccagcucaccagcc

SEQ ID NO: 3118649 - RNA, 18 nt, Human
uccagcucaccagcccca

SEQ ID NO: 3118650 - RNA, 16 nt, Human
uccagcucaccagccc

SEQ ID NO: 3118651 - RNA, 17 nt, Human
uccagcucaccagcccc

SEQ ID NO: 3118652 - RNA, 23 nt, Human
uccagccaaagccuccuccagcc

SEQ ID NO: 3118653 - RNA, 22 nt, Human
uccaggggugggacacccugug

SEQ ID NO: 3118654 - RNA, 18 nt, Human
uccaggagcagccacauu

SEQ ID NO: 3118655 - RNA, 17 nt, Human
uccaggagcagccacau

SEQ ID NO: 3118656 - RNA, 15 nt, Human
uccaggugcacaagc

SEQ ID NO: 3118657 - RNA, 23 nt, Human
uccaggggugggacacccuguga

SEQ ID NO: 3118658 - RNA, 22 nt, Human
uccaggugcacaagcuccaagc

SEQ ID NO: 3118659 - RNA, 21 nt, Human
uccaggugcacaagcuccaag

SEQ ID NO: 3118660 - RNA, 20 nt, Human
uccaggugcacaagcuccaa

SEQ ID NO: 3118661 - RNA, 18 nt, Human
uccaggugcacaagcucc

SEQ ID NO: 3118662 - RNA, 15 nt, Human
uccagguucagcuug

SEQ ID NO: 3118663 - RNA, 16 nt, Human
uccagguucagcuugu

SEQ ID NO: 3118664 - RNA, 21 nt, Human
ucaucaccaacgucugugcca

SEQ ID NO: 3118665 - RNA, 20 nt, Human
ucaucaccaacgucugugcc

SEQ ID NO: 3118666 - RNA, 19 nt, Human
ucaucaccaacgucugugc

SEQ ID NO: 3118667 - RNA, 13 nt, Human
ucaggugcugcca

SEQ ID NO: 3118668 - RNA, 14 nt, Human
ucaggugcugccau

SEQ ID NO: 3118669 - RNA, 23 nt, Human
ucaggugccucaagagaaggcaa

SEQ ID NO: 3118670 - RNA, 21 nt, Human
ucaggugagaagcagaggaag

SEQ ID NO: 3118671 - RNA, 21 nt, Human
ucauacccacccccacccaag

SEQ ID NO: 3118672 - RNA, 23 nt, Human
ucaucuuagguuggcaaaaaggc

SEQ ID NO: 3118673 - RNA, 13 nt, Human
ucauuuccugugu

SEQ ID NO: 3118674 - RNA, 16 nt, Human
ucauuuccugugucuu

SEQ ID NO: 3118675 - RNA, 22 nt, Human
ucauuaggugugacugaauuuc

SEQ ID NO: 3118676 - RNA, 21 nt, Human
ucauucaacccaccugcgucu

SEQ ID NO: 3118677 - RNA, 21 nt, Human
ucuggacaggcauguucucug

SEQ ID NO: 3118678 - RNA, 14 nt, Human
ucuggacaggcaug

SEQ ID NO: 3118679 - RNA, 15 nt, Human
ucuggaaugcagugg

SEQ ID NO: 3118680 - RNA, 19 nt, Human
ucuggaauaaggagaauga

SEQ ID NO: 3118681 - RNA, 19 nt, Human
ucugcugacagacacaggc

SEQ ID NO: 3118682 - RNA, 20 nt, Human
ucugcugacagacacaggcc

SEQ ID NO: 3118683 - RNA, 21 nt, Human
ucugcugacagacacaggccc

SEQ ID NO: 3118684 - RNA, 22 nt, Human
ucugcugacagacacaggcccg

SEQ ID NO: 3118685 - RNA, 15 nt, Human
ucugccugcccaggc

SEQ ID NO: 3118686 - RNA, 18 nt, Human
ucugcuccucuccccagc

SEQ ID NO: 3118687 - RNA, 18 nt, Human
ucugcugacagacacagg

SEQ ID NO: 3118688 - RNA, 17 nt, Human
ucugcugacagacacag

SEQ ID NO: 3118689 - RNA, 14 nt, Human
ucugccugcccagg

SEQ ID NO: 3118690 - RNA, 13 nt, Human
ucugccugcccag

SEQ ID NO: 3118691 - RNA, 14 nt, Human
ucugggacacaguu

SEQ ID NO: 3118692 - RNA, 13 nt, Human
ucugggacacagu

SEQ ID NO: 3118693 - RNA, 23 nt, Human
ucuggugacuuuccucuuugguc

SEQ ID NO: 3118694 - RNA, 23 nt, Human
ucuggcucuuccaggcugggaga

SEQ ID NO: 3118695 - RNA, 18 nt, Human
ucuggcucuuccaggcug

SEQ ID NO: 3118696 - RNA, 19 nt, Human
ucuggcuaugcauuugaaa

SEQ ID NO: 3118697 - RNA, 22 nt, Human
ucuggcuaugcauuugaaaauu

SEQ ID NO: 3118698 - RNA, 17 nt, Human
ucuggcuaugcauuuga

SEQ ID NO: 3118699 - RNA, 14 nt, Human
ucuguccuacucug

SEQ ID NO: 3118700 - RNA, 21 nt, Human
ucuguccugggagugagcugg

SEQ ID NO: 3118701 - RNA, 15 nt, Human
ucuguccuacucugu

SEQ ID NO: 3118702 - RNA, 19 nt, Human
ucuguccuacucuguguca

SEQ ID NO: 3118703 - RNA, 14 nt, Human
ucugucgcccaguc

SEQ ID NO: 3118704 - RNA, 15 nt, Human
ucuucagaucucuaa

SEQ ID NO: 3118705 - RNA, 18 nt, Human
ucuucagaucucuaacuu

SEQ ID NO: 3118706 - RNA, 23 nt, Human
ucuucagaucucuaacuucacca

SEQ ID NO: 3118707 - RNA, 15 nt, Human
ucuucuccaggcugu

SEQ ID NO: 3118708 - RNA, 12 nt, Human
ucuugaacuccu

SEQ ID NO: 3118709 - RNA, 22 nt, Human
ucuuaaauauguggaguucauc

SEQ ID NO: 3118710 - RNA, 20 nt, Human
ucugcaagaauugaagcagg

SEQ ID NO: 3118711 - RNA, 14 nt, Human
ucugacccacugcu

SEQ ID NO: 3118712 - RNA, 23 nt, Human
ucugaggaauccagacccggcug

SEQ ID NO: 3118713 - RNA, 16 nt, Human
ucugacacacagcucu

SEQ ID NO: 3118714 - RNA, 17 nt, Human
ucugacacacagcucug

SEQ ID NO: 3118715 - RNA, 18 nt, Human
ucugacacacagcucugu

SEQ ID NO: 3118716 - RNA, 19 nt, Human
ucugacacacagcucuguc

SEQ ID NO: 3118717 - RNA, 12 nt, Human
ucugacaggcaa

SEQ ID NO: 3118718 - RNA, 21 nt, Human
ucugacaggcaaugcuggcug

SEQ ID NO: 3118719 - RNA, 22 nt, Human
ucugacaggcaaugcuggcugu

SEQ ID NO: 3118720 - RNA, 13 nt, Human
ucugacccacugc

SEQ ID NO: 3118721 - RNA, 13 nt, Human
ucugaaaauguau

SEQ ID NO: 3118722 - RNA, 19 nt, Human
ucucuaacuucaccauauu

SEQ ID NO: 3118723 - RNA, 12 nt, Human
ucucuaacuuca

SEQ ID NO: 3118724 - RNA, 22 nt, Human
ucucgugauugauaagaaccuu

SEQ ID NO: 3118725 - RNA, 14 nt, Human
ucucgugauugaua

SEQ ID NO: 3118726 - RNA, 13 nt, Human
ucuccuguaccuc

SEQ ID NO: 3118727 - RNA, 16 nt, Human
ucuccuguaccucuug

SEQ ID NO: 3118728 - RNA, 17 nt, Human
ucuccuguaccucuuga

SEQ ID NO: 3118729 - RNA, 17 nt, Human
ucuccugccucagccuc

SEQ ID NO: 3118730 - RNA, 15 nt, Human
ucuccugccucagcc

SEQ ID NO: 3118731 - RNA, 15 nt, Human
ucuccuguaccucuu

SEQ ID NO: 3118732 - RNA, 21 nt, Human
ucuccuggaaauauuaagaaa

SEQ ID NO: 3118733 - RNA, 15 nt, Human
ucucuaguuugauua

SEQ ID NO: 3118734 - RNA, 14 nt, Human
ucucugaggacacu

SEQ ID NO: 3118735 - RNA, 17 nt, Human
ucucugaggacacuaac

SEQ ID NO: 3118736 - RNA, 17 nt, Human
uccagguuuaagcuguu

SEQ ID NO: 3118737 - RNA, 20 nt, Human
uccccuguuuguuucugaaa

SEQ ID NO: 3118738 - RNA, 18 nt, Human
uccccuguuuguuucuga

SEQ ID NO: 3118739 - RNA, 21 nt, Human
uccccuguuuguuucugaaag

SEQ ID NO: 3118740 - RNA, 14 nt, Human
ucccugcacuugca

SEQ ID NO: 3118741 - RNA, 13 nt, Human
ucccugcacuugc

SEQ ID NO: 3118742 - RNA, 13 nt, Human
ucccuucccaccu

SEQ ID NO: 3118743 - RNA, 19 nt, Human
uccuccuuuucacaguucu

SEQ ID NO: 3118744 - RNA, 14 nt, Human
uccucuaggagguc

SEQ ID NO: 3118745 - RNA, 15 nt, Human
uccucuguacagagc

SEQ ID NO: 3118746 - RNA, 18 nt, Human
uccucuguacagagccca

SEQ ID NO: 3118747 - RNA, 17 nt, Human
uccucuguacagagccc

SEQ ID NO: 3118748 - RNA, 16 nt, Human
uccucuguacagagcc

SEQ ID NO: 3118749 - RNA, 16 nt, Human
uccucugcugcuggcu

SEQ ID NO: 3118750 - RNA, 15 nt, Human
uccucugcugcuggc

SEQ ID NO: 3118751 - RNA, 14 nt, Human
uccucugcugcugg

SEQ ID NO: 3118752 - RNA, 12 nt, Human
uccucugcugcu

SEQ ID NO: 3118753 - RNA, 22 nt, Human
uccuaguuccaccaucaagcca

SEQ ID NO: 3118754 - RNA, 18 nt, Human
uccuauauuguuuucagu

SEQ ID NO: 3118755 - RNA, 18 nt, Human
uccuacccacccuccuuu

SEQ ID NO: 3118756 - RNA, 13 nt, Human
uccgaccagacac

SEQ ID NO: 3118757 - RNA, 16 nt, Human
uccuaaucuucugaac

SEQ ID NO: 3118758 - RNA, 19 nt, Human
uccuucacagaugggugcu

SEQ ID NO: 3118759 - RNA, 20 nt, Human
uccuucaccuuuguccccac

SEQ ID NO: 3118760 - RNA, 18 nt, Human
uccuucaccuuugucccc

SEQ ID NO: 3118761 - RNA, 18 nt, Human
uccuucacagaugggugc

SEQ ID NO: 3118762 - RNA, 18 nt, Human
uccuuaccagcagagcac

SEQ ID NO: 3118763 - RNA, 17 nt, Human
uccuuaccagcagagca

SEQ ID NO: 3118764 - RNA, 16 nt, Human
uccuuaccagcagagc

SEQ ID NO: 3118765 - RNA, 22 nt, Human
uccuucaccuuuguccccaccg

SEQ ID NO: 3118766 - RNA, 21 nt, Human
uccuucaccuuuguccccacc

SEQ ID NO: 3118767 - RNA, 23 nt, Human
uccuuuucacaguucucuccuuc

SEQ ID NO: 3118768 - RNA, 16 nt, Human
uccugccucagccucc

SEQ ID NO: 3118769 - RNA, 13 nt, Human
uccugccucagcc

SEQ ID NO: 3118770 - RNA, 15 nt, Human
uccugccucagccuc

SEQ ID NO: 3118771 - RNA, 16 nt, Human
uccuggcacccggccc

SEQ ID NO: 3118772 - RNA, 19 nt, Human
uccuggcacccggccccug

SEQ ID NO: 3118773 - RNA, 14 nt, Human
uccuggcacccggc

SEQ ID NO: 3118774 - RNA, 13 nt, Human
uccugagccagau

SEQ ID NO: 3118775 - RNA, 14 nt, Human
uccugccucagccu

SEQ ID NO: 3118776 - RNA, 20 nt, Human
uccuggcacccggccccugc

SEQ ID NO: 3118777 - RNA, 21 nt, Human
uccuggcacccggccccugcu

SEQ ID NO: 3118778 - RNA, 17 nt, Human
uccuggcacugcuucca

SEQ ID NO: 3118779 - RNA, 22 nt, Human
uccuggcacugcuuccagugag

SEQ ID NO: 3118780 - RNA, 18 nt, Human
uccuggcacugcuuccag

SEQ ID NO: 3118781 - RNA, 20 nt, Human
uccuguaccucuugagccuu

SEQ ID NO: 3118782 - RNA, 14 nt, Human
uccuuaccagcaga

SEQ ID NO: 3118783 - RNA, 16 nt, Human
ucgugauugauaagaa

SEQ ID NO: 3118784 - RNA, 21 nt, Human
ucuaaaucuccaaaauaaaac

SEQ ID NO: 3118785 - RNA, 21 nt, Human
ucuaggaagacuuuggaaaga

SEQ ID NO: 3118786 - RNA, 15 nt, Human
ucuaucaaguauuau

SEQ ID NO: 3118787 - RNA, 21 nt, Human
ucuaucaaguauuauaccuuu

SEQ ID NO: 3118788 - RNA, 17 nt, Human
ucucaaauaacuaaaag

SEQ ID NO: 3118789 - RNA, 15 nt, Human
ugauuuucauugcug

SEQ ID NO: 3118790 - RNA, 13 nt, Human
ugauuuucauugc

SEQ ID NO: 3118791 - RNA, 23 nt, Human
ugauuuuuuuuuccuucagugcc

SEQ ID NO: 3118792 - RNA, 22 nt, Human
ugauuuuuuuuuccuucagugc

SEQ ID NO: 3118793 - RNA, 20 nt, Human
ugauuuuuuuuuccuucagu

SEQ ID NO: 3118794 - RNA, 19 nt, Human
ugauuuuuuuuuccuucag

SEQ ID NO: 3118795 - RNA, 17 nt, Human
ugauuuuuuuuuccuuc

SEQ ID NO: 3118796 - RNA, 16 nt, Human
ugauuuuuuuuuccuu

SEQ ID NO: 3118797 - RNA, 14 nt, Human
ugcaacaggcuggg

SEQ ID NO: 3118798 - RNA, 15 nt, Human
ugcaacaggcugggc

SEQ ID NO: 3118799 - RNA, 16 nt, Human
ugcaacaggcugggcu

SEQ ID NO: 3118800 - RNA, 17 nt, Human
ugcaacaggcugggcuu

SEQ ID NO: 3118801 - RNA, 19 nt, Human
ugcaacaggcugggcuuca

SEQ ID NO: 3118802 - RNA, 20 nt, Human
ugcaacaggcugggcuucag

SEQ ID NO: 3118803 - RNA, 13 nt, Human
ugcaaccuccgcc

SEQ ID NO: 3118804 - RNA, 14 nt, Human
ugcaaccuccgccu

SEQ ID NO: 3118805 - RNA, 20 nt, Human
ugcaaccugauugugucucu

SEQ ID NO: 3118806 - RNA, 19 nt, Human
ugcaaccugauugugucuc

SEQ ID NO: 3118807 - RNA, 18 nt, Human
ugcaaccuccgccucuug

SEQ ID NO: 3118808 - RNA, 20 nt, Human
ugcaaccuccgccucuuggg

SEQ ID NO: 3118809 - RNA, 21 nt, Human
ugcaaccuccgccucuugggu

SEQ ID NO: 3118810 - RNA, 22 nt, Human
ugcaaccugauugugucucuug

SEQ ID NO: 3118811 - RNA, 21 nt, Human
ugcaccggcuggccuggcccc

SEQ ID NO: 3118812 - RNA, 17 nt, Human
ugcaccuggaauauaua

SEQ ID NO: 3118813 - RNA, 20 nt, Human
ugcaccuggaauauauaacc

SEQ ID NO: 3118814 - RNA, 22 nt, Human
ugcaccuggaauauauaaccag

SEQ ID NO: 3118815 - RNA, 18 nt, Human
ugcaccggcuggccuggc

SEQ ID NO: 3118816 - RNA, 20 nt, Human
ugcaccggcuggccuggccc

SEQ ID NO: 3118817 - RNA, 19 nt, Human
ugcaccggcuggccuggcc

SEQ ID NO: 3118818 - RNA, 18 nt, Human
ugcacugacauuguuggc

SEQ ID NO: 3118819 - RNA, 21 nt, Human
ugcacugacauuguuggccaa

SEQ ID NO: 3118820 - RNA, 17 nt, Human
ugcacagaguuguuaca

SEQ ID NO: 3118821 - RNA, 18 nt, Human
ugcacagaguuguuacau

SEQ ID NO: 3118822 - RNA, 19 nt, Human
ugcacagaguuguuacauu

SEQ ID NO: 3118823 - RNA, 20 nt, Human
ugcacaaacagaggccgcca

SEQ ID NO: 3118824 - RNA, 19 nt, Human
ugcacaaacagaggccgcc

SEQ ID NO: 3118825 - RNA, 17 nt, Human
ugcacaaacagaggccg

SEQ ID NO: 3118826 - RNA, 16 nt, Human
ugcacaaacagaggcc

SEQ ID NO: 3118827 - RNA, 15 nt, Human
ugcacaaacagaggc

SEQ ID NO: 3118828 - RNA, 16 nt, Human
ugcaaugaccuuucaa

SEQ ID NO: 3118829 - RNA, 13 nt, Human
ugcaaugaccuuu

SEQ ID NO: 3118830 - RNA, 23 nt, Human
ugcaaugaccuuucaauaggaaa

SEQ ID NO: 3118831 - RNA, 22 nt, Human
ugcaaugaccuuucaauaggaa

SEQ ID NO: 3118832 - RNA, 19 nt, Human
ugcaaugaccuuucaauag

SEQ ID NO: 3118833 - RNA, 17 nt, Human
ugcaaugaccuuucaau

SEQ ID NO: 3118834 - RNA, 13 nt, Human
ugcaauggcagcc

SEQ ID NO: 3118835 - RNA, 14 nt, Human
ugcaauggcagccu

SEQ ID NO: 3118836 - RNA, 15 nt, Human
ugcaauggcagccuu

SEQ ID NO: 3118837 - RNA, 16 nt, Human
ugcaauggcagccuug

SEQ ID NO: 3118838 - RNA, 19 nt, Human
ugccgucuaccugaggggc

SEQ ID NO: 3118839 - RNA, 17 nt, Human
ugccgucuaccugaggg

SEQ ID NO: 3118840 - RNA, 16 nt, Human
ugccgucuaccugagg

SEQ ID NO: 3118841 - RNA, 15 nt, Human
ugccgucuaccugag

SEQ ID NO: 3118842 - RNA, 21 nt, Human
ugcccugcccaccuggccucu

SEQ ID NO: 3118843 - RNA, 23 nt, Human
ugcccugcccaccuggccucugc

SEQ ID NO: 3118844 - RNA, 22 nt, Human
ugcccugcccaccuggccucug

SEQ ID NO: 3118845 - RNA, 17 nt, Human
ugcccuaaaguguauuu

SEQ ID NO: 3118846 - RNA, 13 nt, Human
ugccucugggacu

SEQ ID NO: 3118847 - RNA, 22 nt, Human
ugccuccuuugugaggaagccg

SEQ ID NO: 3118848 - RNA, 20 nt, Human
ugccuccuuugugaggaagc

SEQ ID NO: 3118849 - RNA, 21 nt, Human
ugccuccuuugugaggaagcc

SEQ ID NO: 3118850 - RNA, 21 nt, Human
ugccucuucucuacucuaggg

SEQ ID NO: 3118851 - RNA, 17 nt, Human
ugccugguggcagcugc

SEQ ID NO: 3118852 - RNA, 18 nt, Human
ugccugguggcagcugcg

SEQ ID NO: 3118853 - RNA, 19 nt, Human
ugccugguggcagcugcgg

SEQ ID NO: 3118854 - RNA, 15 nt, Human
ugccauguuggccag

SEQ ID NO: 3118855 - RNA, 12 nt, Human
ugccauguuggc

SEQ ID NO: 3118856 - RNA, 16 nt, Human
ugccauguuggccagg

SEQ ID NO: 3118857 - RNA, 20 nt, Human
ugcccaccuggccucugcac

SEQ ID NO: 3118858 - RNA, 18 nt, Human
ugcccacgcuggagugca

SEQ ID NO: 3118859 - RNA, 19 nt, Human
ugcccaccuggccucugca

SEQ ID NO: 3118860 - RNA, 21 nt, Human
ugcccacucccugcaaccuga

SEQ ID NO: 3118861 - RNA, 15 nt, Human
ugccaugugccaggu

SEQ ID NO: 3118862 - RNA, 14 nt, Human
ugccaugugccagg

SEQ ID NO: 3118863 - RNA, 23 nt, Human
ugccaugaggaacaaggcaaggc

SEQ ID NO: 3118864 - RNA, 20 nt, Human
ugccaugaggaacaaggcaa

SEQ ID NO: 3118865 - RNA, 19 nt, Human
ugccaggaagccagcaggc

SEQ ID NO: 3118866 - RNA, 18 nt, Human
ugccaggaagccagcagg

SEQ ID NO: 3118867 - RNA, 16 nt, Human
ugccaggaagccagca

SEQ ID NO: 3118868 - RNA, 12 nt, Human
ugccaggaagcc

SEQ ID NO: 3118869 - RNA, 17 nt, Human
ugccagguuuuuggucu

SEQ ID NO: 3118870 - RNA, 15 nt, Human
ugccauccagguuca

SEQ ID NO: 3118871 - RNA, 12 nt, Human
ugccauccaggu

SEQ ID NO: 3118872 - RNA, 15 nt, Human
ugcauguuugugauu

SEQ ID NO: 3118873 - RNA, 12 nt, Human
ugcauuaucuag

SEQ ID NO: 3118874 - RNA, 17 nt, Human
ugcauuaucuagauacu

SEQ ID NO: 3118875 - RNA, 20 nt, Human
ugacgccaucccagccccaa

SEQ ID NO: 3118876 - RNA, 19 nt, Human
ugacgccaucccagcccca

SEQ ID NO: 3118877 - RNA, 18 nt, Human
ugacgccaucccagcccc

SEQ ID NO: 3118878 - RNA, 17 nt, Human
ugacgccaucccagccc

SEQ ID NO: 3118879 - RNA, 22 nt, Human
ugaccuuucaauaggaaaaacu

SEQ ID NO: 3118880 - RNA, 18 nt, Human
ugaccuuucaauaggaaa

SEQ ID NO: 3118881 - RNA, 16 nt, Human
ugacgccaucccagcc

SEQ ID NO: 3118882 - RNA, 15 nt, Human
ugacgccaucccagc

SEQ ID NO: 3118883 - RNA, 14 nt, Human
ugacgccaucccag

SEQ ID NO: 3118884 - RNA, 13 nt, Human
ugacgccauccca

SEQ ID NO: 3118885 - RNA, 14 nt, Human
ugacugaauuucuu

SEQ ID NO: 3118886 - RNA, 15 nt, Human
ugacugaauuucuuu

SEQ ID NO: 3118887 - RNA, 13 nt, Human
ugacugaauuucu

SEQ ID NO: 3118888 - RNA, 13 nt, Human
ugaccucugcagc

SEQ ID NO: 3118889 - RNA, 16 nt, Human
ugaccucugcagcaau

SEQ ID NO: 3118890 - RNA, 22 nt, Human
ugaccucaggugauccacccac

SEQ ID NO: 3118891 - RNA, 13 nt, Human
ugaccuuucaaua

SEQ ID NO: 3118892 - RNA, 14 nt, Human
ugaccuuucaauag

SEQ ID NO: 3118893 - RNA, 16 nt, Human
ugaccuuucaauagga

SEQ ID NO: 3118894 - RNA, 15 nt, Human
ugaccuuucaauagg

SEQ ID NO: 3118895 - RNA, 12 nt, Human
ugaccucugccu

SEQ ID NO: 3118896 - RNA, 23 nt, Human
ugaccucugcagcaauaaagcag

SEQ ID NO: 3118897 - RNA, 18 nt, Human
ugaccucugcagcaauaa

SEQ ID NO: 3118898 - RNA, 21 nt, Human
ugaccucugcagcaauaaagc

SEQ ID NO: 3118899 - RNA, 19 nt, Human
ugaccauucuccaccugcc

SEQ ID NO: 3118900 - RNA, 22 nt, Human
ugaccauucuccaccugccagg

SEQ ID NO: 3118901 - RNA, 21 nt, Human
ugaccauucuccaccugccag

SEQ ID NO: 3118902 - RNA, 20 nt, Human
ugaccauucuccaccugcca

SEQ ID NO: 3118903 - RNA, 15 nt, Human
ucuugaacuccuggc

SEQ ID NO: 3118904 - RNA, 13 nt, Human
ugagccucagcau

SEQ ID NO: 3118905 - RNA, 15 nt, Human
ugagcaucaggccag

SEQ ID NO: 3118906 - RNA, 14 nt, Human
ugagcaucaggcca

SEQ ID NO: 3118907 - RNA, 13 nt, Human
ugagcaucaggcc

SEQ ID NO: 3118908 - RNA, 12 nt, Human
ugagacucuguc

SEQ ID NO: 3118909 - RNA, 13 nt, Human
ugagacucugucu

SEQ ID NO: 3118910 - RNA, 14 nt, Human
ugagacucugucuc

SEQ ID NO: 3118911 - RNA, 22 nt, Human
ugagaggcauccaguaucuuga

SEQ ID NO: 3118912 - RNA, 23 nt, Human
ugagaggcauccaguaucuugaa

SEQ ID NO: 3118913 - RNA, 15 nt, Human
ugagaucagccuggg

SEQ ID NO: 3118914 - RNA, 19 nt, Human
ugagaggggaacagacugg

SEQ ID NO: 3118915 - RNA, 17 nt, Human
ugagaguagagucacug

SEQ ID NO: 3118916 - RNA, 12 nt, Human
ugagacccuguc

SEQ ID NO: 3118917 - RNA, 20 nt, Human
ugaggucuguucuuuccaaa

SEQ ID NO: 3118918 - RNA, 14 nt, Human
ugaggucuguucuu

SEQ ID NO: 3118919 - RNA, 15 nt, Human
ugaggucuguucuuu

SEQ ID NO: 3118920 - RNA, 11 nt, Human
ugaggcugggc

SEQ ID NO: 3118921 - RNA, 20 nt, Human
ugaguccccuguuuguuucu

SEQ ID NO: 3118922 - RNA, 18 nt, Human
ugaguccuggcaugggaa

SEQ ID NO: 3118923 - RNA, 11 nt, Human
ugaguccuggc

SEQ ID NO: 3118924 - RNA, 14 nt, Human
ugagucgaggacag

SEQ ID NO: 3118925 - RNA, 22 nt, Human
ugaguccuggcaugggaaugaa

SEQ ID NO: 3118926 - RNA, 19 nt, Human
ugaguccuggcaugggaau

SEQ ID NO: 3118927 - RNA, 21 nt, Human
ugaguccccuguuuguuucug

SEQ ID NO: 3118928 - RNA, 19 nt, Human
ugagguuucaaaccucccu

SEQ ID NO: 3118929 - RNA, 16 nt, Human
ugaggugcuauguucu

SEQ ID NO: 3118930 - RNA, 15 nt, Human
ugaggugcuauguuc

SEQ ID NO: 3118931 - RNA, 23 nt, Human
ugauagcacagacccugcccugu

SEQ ID NO: 3118932 - RNA, 22 nt, Human
ugauagcacagacccugcccug

SEQ ID NO: 3118933 - RNA, 16 nt, Human
ugauagcacagacccu

SEQ ID NO: 3118934 - RNA, 15 nt, Human
ugauagcacagaccc

SEQ ID NO: 3118935 - RNA, 14 nt, Human
ugauagcacagacc

SEQ ID NO: 3118936 - RNA, 21 nt, Human
ugauagcacagacccugcccu

SEQ ID NO: 3118937 - RNA, 20 nt, Human
ugauagcacagacccugccc

SEQ ID NO: 3118938 - RNA, 18 nt, Human
ugauagcacagacccugc

SEQ ID NO: 3118939 - RNA, 17 nt, Human
ugauagcacagacccug

SEQ ID NO: 3118940 - RNA, 15 nt, Human
ugagucgaggacagg

SEQ ID NO: 3118941 - RNA, 16 nt, Human
ugagucgaggacaggg

SEQ ID NO: 3118942 - RNA, 23 nt, Human
ugaguugauagcacagacccugc

SEQ ID NO: 3118943 - RNA, 21 nt, Human
ugaguugauagcacagacccu

SEQ ID NO: 3118944 - RNA, 19 nt, Human
ugaguugauucagcucugc

SEQ ID NO: 3118945 - RNA, 16 nt, Human
ugaguugauucagcuc

SEQ ID NO: 3118946 - RNA, 21 nt, Human
ugauccacccaccucagccuc

SEQ ID NO: 3118947 - RNA, 22 nt, Human
ugauccacccaccucagccucc

SEQ ID NO: 3118948 - RNA, 21 nt, Human
ugaucuaggaagacuuuggaa

SEQ ID NO: 3118949 - RNA, 19 nt, Human
ugaucuaggaagacuuugg

SEQ ID NO: 3118950 - RNA, 17 nt, Human
ugaucucucgugauuga

SEQ ID NO: 3118951 - RNA, 15 nt, Human
ugaucuaggaagacu

SEQ ID NO: 3118952 - RNA, 13 nt, Human
ugaucauccacug

SEQ ID NO: 3118953 - RNA, 24 nt, Human
ugaucauccacugugccaugugcc

SEQ ID NO: 3118954 - RNA, 17 nt, Human
ugauccaagcugguccc

SEQ ID NO: 3118955 - RNA, 21 nt, Human
ugauccaagcuggucccacuc

SEQ ID NO: 3118956 - RNA, 15 nt, Human
ugauccacccaccuc

SEQ ID NO: 3118957 - RNA, 20 nt, Human
ugauccacccaccucagccu

SEQ ID NO: 3118958 - RNA, 19 nt, Human
ugauccacccaccucagcc

SEQ ID NO: 3118959 - RNA, 22 nt, Human
ugaucacggcucacugcagccu

SEQ ID NO: 3118960 - RNA, 18 nt, Human
ugaucuuugcagacaggc

SEQ ID NO: 3118961 - RNA, 21 nt, Human
ugaucuuugcagacaggcaag

SEQ ID NO: 3118962 - RNA, 23 nt, Human
ugaucuuugcagacaggcaagca

SEQ ID NO: 3118963 - RNA, 19 nt, Human
ugaucuuugcagacaggca

SEQ ID NO: 3118964 - RNA, 20 nt, Human
ugaucuuugcagacaggcaa

SEQ ID NO: 3118965 - RNA, 14 nt, Human
ugaugccaugagga

SEQ ID NO: 3118966 - RNA, 23 nt, Human
ugaugaucuuugcagacaggcaa

SEQ ID NO: 3118967 - RNA, 20 nt, Human
ugaugaugaaaugaggucag

SEQ ID NO: 3118968 - RNA, 22 nt, Human
ugaugaucuuugcagacaggca

SEQ ID NO: 3118969 - RNA, 22 nt, Human
ugaugcuucuucagagacuccu

SEQ ID NO: 3118970 - RNA, 21 nt, Human
ugaugcuucuucagagacucc

SEQ ID NO: 3118971 - RNA, 19 nt, Human
ugaugcuucuucagagacu

SEQ ID NO: 3118972 - RNA, 18 nt, Human
ugaugcuucuucagagac

SEQ ID NO: 3118973 - RNA, 16 nt, Human
ugucuuuucuugcaug

SEQ ID NO: 3118974 - RNA, 23 nt, Human
ugucuuuggacccugaggcccag

SEQ ID NO: 3118975 - RNA, 14 nt, Human
ugucuaugggacuc

SEQ ID NO: 3118976 - RNA, 15 nt, Human
ugucuaugggacuca

SEQ ID NO: 3118977 - RNA, 16 nt, Human
ugucuaugggacucaa

SEQ ID NO: 3118978 - RNA, 23 nt, Human
ugucuaguuguuugauucagaca

SEQ ID NO: 3118979 - RNA, 15 nt, Human
ugucuaguuguuuga

SEQ ID NO: 3118980 - RNA, 21 nt, Human
ugucucaaaaaaagaaaaaga

SEQ ID NO: 3118981 - RNA, 19 nt, Human
uguccccgcacugggcuug

SEQ ID NO: 3118982 - RNA, 17 nt, Human
uguccccgcacugggcu

SEQ ID NO: 3118983 - RNA, 14 nt, Human
ugucuaaugaaacc

SEQ ID NO: 3118984 - RNA, 12 nt, Human
uguccugggagu

SEQ ID NO: 3118985 - RNA, 19 nt, Human
uguccugggagugagcugg

SEQ ID NO: 3118986 - RNA, 20 nt, Human
uguccugggagugagcuggu

SEQ ID NO: 3118987 - RNA, 14 nt, Human
ugucagugugacug

SEQ ID NO: 3118988 - RNA, 15 nt, Human
ugucagugugacuga

SEQ ID NO: 3118989 - RNA, 19 nt, Human
ugucagugugacugaucuc

SEQ ID NO: 3118990 - RNA, 16 nt, Human
ugucagugugacugau

SEQ ID NO: 3118991 - RNA, 13 nt, Human
ugucacaggcagg

SEQ ID NO: 3118992 - RNA, 15 nt, Human
ugucacaggcagguc

SEQ ID NO: 3118993 - RNA, 16 nt, Human
ugucacaggcaggucc

SEQ ID NO: 3118994 - RNA, 17 nt, Human
ugucacaggcaggucca

SEQ ID NO: 3118995 - RNA, 21 nt, Human
ugucacaggcagguccagggu

SEQ ID NO: 3118996 - RNA, 21 nt, Human
ugucaauuacaggaaguacug

SEQ ID NO: 3118997 - RNA, 14 nt, Human
ugucacaggcaggu

SEQ ID NO: 3118998 - RNA, 19 nt, Human
ugucaauuacaggaaguac

SEQ ID NO: 3118999 - RNA, 13 nt, Human
uguaucugagcag

SEQ ID NO: 3119000 - RNA, 22 nt, Human
uguacagcaaggagauuuacaa

SEQ ID NO: 3119001 - RNA, 12 nt, Human
uguacagagccc

SEQ ID NO: 3119002 - RNA, 21 nt, Human
uguacagagcccacgccccca

SEQ ID NO: 3119003 - RNA, 23 nt, Human
uguacagcaaggagauuuacaac

SEQ ID NO: 3119004 - RNA, 19 nt, Human
uggugguuuucuguucuuu

SEQ ID NO: 3119005 - RNA, 17 nt, Human
uggugguuucagaaaug

SEQ ID NO: 3119006 - RNA, 18 nt, Human
uggugguuucagaaaugu

SEQ ID NO: 3119007 - RNA, 18 nt, Human
uggugggggccucggugu

SEQ ID NO: 3119008 - RNA, 16 nt, Human
uggugggggccucggu

SEQ ID NO: 3119009 - RNA, 13 nt, Human
ugguggcuggguu

SEQ ID NO: 3119010 - RNA, 12 nt, Human
ugguggcagugg

SEQ ID NO: 3119011 - RNA, 19 nt, Human
uggugcaaugaccuuucaa

SEQ ID NO: 3119012 - RNA, 14 nt, Human
uggugcaaugaccu

SEQ ID NO: 3119013 - RNA, 20 nt, Human
ugguggcagugggagcugcc

SEQ ID NO: 3119014 - RNA, 13 nt, Human
ugguggcaguggg

SEQ ID NO: 3119015 - RNA, 18 nt, Human
ugguggcagugggagcug

SEQ ID NO: 3119016 - RNA, 14 nt, Human
uggugagaggcauc

SEQ ID NO: 3119017 - RNA, 20 nt, Human
uggguacuuguggacacagc

SEQ ID NO: 3119018 - RNA, 23 nt, Human
uggguacuuguggacacagcucu

SEQ ID NO: 3119019 - RNA, 18 nt, Human
ugguugaugaucuuugca

SEQ ID NO: 3119020 - RNA, 16 nt, Human
uggugucaccugaaga

SEQ ID NO: 3119021 - RNA, 15 nt, Human
uggugucgggcauga

SEQ ID NO: 3119022 - RNA, 18 nt, Human
uggugucgggcaugacac

SEQ ID NO: 3119023 - RNA, 23 nt, Human
ugguucaggguuggccccugccc

SEQ ID NO: 3119024 - RNA, 19 nt, Human
ugguuuucuuguguguuua

SEQ ID NO: 3119025 - RNA, 21 nt, Human
ugguuuuuaaaaaacugcuga

SEQ ID NO: 3119026 - RNA, 23 nt, Human
ugguuuuuaaaaaacugcugacu

SEQ ID NO: 3119027 - RNA, 16 nt, Human
ugguuuucuguucuuu

SEQ ID NO: 3119028 - RNA, 11 nt, Human
uguacagagcc

SEQ ID NO: 3119029 - RNA, 14 nt, Human
uguacagacaacaa

SEQ ID NO: 3119030 - RNA, 17 nt, Human
uguaacaagccacccca

SEQ ID NO: 3119031 - RNA, 14 nt, Human
uguaacaagccacc

SEQ ID NO: 3119032 - RNA, 22 nt, Human
uggccucccaacucaccccagc

SEQ ID NO: 3119033 - RNA, 21 nt, Human
uggccucccaacucaccccag

SEQ ID NO: 3119034 - RNA, 20 nt, Human
uggccucccaacucacccca

SEQ ID NO: 3119035 - RNA, 19 nt, Human
uggccucccaacucacccc

SEQ ID NO: 3119036 - RNA, 14 nt, Human
uggccucccaacuc

SEQ ID NO: 3119037 - RNA, 11 nt, Human
uggccucccaa

SEQ ID NO: 3119038 - RNA, 18 nt, Human
uggccucaagugauucuc

SEQ ID NO: 3119039 - RNA, 23 nt, Human
uggccucaagugauucuccugcc

SEQ ID NO: 3119040 - RNA, 23 nt, Human
uggccuagcauacguacacauuu

SEQ ID NO: 3119041 - RNA, 17 nt, Human
uggcagcugcgguccac

SEQ ID NO: 3119042 - RNA, 20 nt, Human
uggccccucagggucccugg

SEQ ID NO: 3119043 - RNA, 13 nt, Human
uggccccucaggg

SEQ ID NO: 3119044 - RNA, 22 nt, Human
uggccccucagggucccuggug

SEQ ID NO: 3119045 - RNA, 21 nt, Human
uggccccucagggucccuggu

SEQ ID NO: 3119046 - RNA, 20 nt, Human
uggccuagcauacguacaca

SEQ ID NO: 3119047 - RNA, 16 nt, Human
uggcugcugaaggcuc

SEQ ID NO: 3119048 - RNA, 14 nt, Human
uggcugcugaaggc

SEQ ID NO: 3119049 - RNA, 13 nt, Human
uggcugcugaagg

SEQ ID NO: 3119050 - RNA, 11 nt, Human
uggcugcugaa

SEQ ID NO: 3119051 - RNA, 13 nt, Human
ugggcagagcaga

SEQ ID NO: 3119052 - RNA, 14 nt, Human
ugggcagagcagag

SEQ ID NO: 3119053 - RNA, 17 nt, Human
ugggcagagcagagacc

SEQ ID NO: 3119054 - RNA, 15 nt, Human
ugggcagagcagaga

SEQ ID NO: 3119055 - RNA, 15 nt, Human
ugggacacccuguga

SEQ ID NO: 3119056 - RNA, 14 nt, Human
ugggacacccugug

SEQ ID NO: 3119057 - RNA, 13 nt, Human
ugggacacccugu

SEQ ID NO: 3119058 - RNA, 16 nt, Human
ugggaaugaaugucag

SEQ ID NO: 3119059 - RNA, 16 nt, Human
ugggaggaucucuuga

SEQ ID NO: 3119060 - RNA, 18 nt, Human
ugggaugauuggaggggg

SEQ ID NO: 3119061 - RNA, 22 nt, Human
ugggcuucaguggcagcugcuu

SEQ ID NO: 3119062 - RNA, 21 nt, Human
ugggcuucaguggcagcugcu

SEQ ID NO: 3119063 - RNA, 15 nt, Human
ugggcuucauccucc

SEQ ID NO: 3119064 - RNA, 22 nt, Human
ugggcuuggggaccagagcugc

SEQ ID NO: 3119065 - RNA, 21 nt, Human
ugggcuugucuguagauuuua

SEQ ID NO: 3119066 - RNA, 23 nt, Human
ugggcuuggggaccagagcugcc

SEQ ID NO: 3119067 - RNA, 17 nt, Human
ugggcuugucuguagau

SEQ ID NO: 3119068 - RNA, 19 nt, Human
ugggggcugggcagaggaa

SEQ ID NO: 3119069 - RNA, 19 nt, Human
uggggggcugaggugggag

SEQ ID NO: 3119070 - RNA, 16 nt, Human
ugggggccucagugcc

SEQ ID NO: 3119071 - RNA, 12 nt, Human
ugcuucucacug

SEQ ID NO: 3119072 - RNA, 21 nt, Human
ugcuuccagugaggcucugcc

SEQ ID NO: 3119073 - RNA, 23 nt, Human
ugcuuccagugaggcucugcccu

SEQ ID NO: 3119074 - RNA, 22 nt, Human
ugcuuccagugaggcucugccc

SEQ ID NO: 3119075 - RNA, 19 nt, Human
ugcuuaacuucacauauug

SEQ ID NO: 3119076 - RNA, 13 nt, Human
ugcuuaacuucac

SEQ ID NO: 3119077 - RNA, 14 nt, Human
ugcuuaacuucaca

SEQ ID NO: 3119078 - RNA, 17 nt, Human
ugcuuaacuucacauau

SEQ ID NO: 3119079 - RNA, 18 nt, Human
ugcuuaacuucacauauu

SEQ ID NO: 3119080 - RNA, 14 nt, Human
uggaacacucugag

SEQ ID NO: 3119081 - RNA, 17 nt, Human
uggaacacucugagacu

SEQ ID NO: 3119082 - RNA, 15 nt, Human
uggaacacucugaga

SEQ ID NO: 3119083 - RNA, 13 nt, Human
ugcuucuucagag

SEQ ID NO: 3119084 - RNA, 18 nt, Human
ugcuugugaaaggaaaga

SEQ ID NO: 3119085 - RNA, 15 nt, Human
uggauuuaacagaaa

SEQ ID NO: 3119086 - RNA, 21 nt, Human
uggcacuauaauguaagcucu

SEQ ID NO: 3119087 - RNA, 22 nt, Human
uggcacuauaauguaagcucua

SEQ ID NO: 3119088 - RNA, 19 nt, Human
uggcacugcuuccagugag

SEQ ID NO: 3119089 - RNA, 22 nt, Human
uggcacugcuuccagugaggcu

SEQ ID NO: 3119090 - RNA, 18 nt, Human
uggcagcucagagagggu

SEQ ID NO: 3119091 - RNA, 23 nt, Human
uggaggggggaggugggauccuc

SEQ ID NO: 3119092 - RNA, 21 nt, Human
uggauuguccccgacccuugc

SEQ ID NO: 3119093 - RNA, 22 nt, Human
uggaugcagccucacaguccuu

SEQ ID NO: 3119094 - RNA, 21 nt, Human
uggaugcagccucacaguccu

SEQ ID NO: 3119095 - RNA, 13 nt, Human
uggaugcagccuc

SEQ ID NO: 3119096 - RNA, 17 nt, Human
uggacaggcauguucuc

SEQ ID NO: 3119097 - RNA, 18 nt, Human
uggacaggcauguucucu

SEQ ID NO: 3119098 - RNA, 22 nt, Human
uggacaggcauguucucugagg

SEQ ID NO: 3119099 - RNA, 23 nt, Human
uggacguguuaugacuccagaau

SEQ ID NO: 3119100 - RNA, 19 nt, Human
uggacguguuaugacucca

SEQ ID NO: 3119101 - RNA, 20 nt, Human
uggacuaacuugucuuugga

SEQ ID NO: 3119102 - RNA, 19 nt, Human
uggacuaacuugucuuugg

SEQ ID NO: 3119103 - RNA, 13 nt, Human
uuuauuaugcaug

SEQ ID NO: 3119104 - RNA, 13 nt, Human
uuuauuauggcac

SEQ ID NO: 3119105 - RNA, 14 nt, Human
uuuauggcuuuugu

SEQ ID NO: 3119106 - RNA, 16 nt, Human
uuuauggcuuuugugc

SEQ ID NO: 3119107 - RNA, 14 nt, Human
uuucaauaggaaaa

SEQ ID NO: 3119108 - RNA, 12 nt, Human
uuucaauaggaa

SEQ ID NO: 3119109 - RNA, 17 nt, Human
uuucaauaggaaaaacu

SEQ ID NO: 3119110 - RNA, 13 nt, Human
uuucaguguacau

SEQ ID NO: 3119111 - RNA, 14 nt, Human
uuucaguguacaug

SEQ ID NO: 3119112 - RNA, 14 nt, Human
uuucauuuagguga

SEQ ID NO: 3119113 - RNA, 18 nt, Human
uuucauuuaggugaggaa

SEQ ID NO: 3119114 - RNA, 19 nt, Human
uuuaagugcugcauuuaaa

SEQ ID NO: 3119115 - RNA, 22 nt, Human
uuuaagaaaaaggaugcacaga

SEQ ID NO: 3119116 - RNA, 18 nt, Human
uuuaagaaaaaggaugca

SEQ ID NO: 3119117 - RNA, 18 nt, Human
uuuaacagaaauguacag

SEQ ID NO: 3119118 - RNA, 15 nt, Human
uuuacuucuuauaca

SEQ ID NO: 3119119 - RNA, 19 nt, Human
uuuacuucuuauacauuug

SEQ ID NO: 3119120 - RNA, 22 nt, Human
uuuacuucuuauacauuugaua

SEQ ID NO: 3119121 - RNA, 14 nt, Human
uuuagaaauauaau

SEQ ID NO: 3119122 - RNA, 12 nt, Human
uuuagacagagu

SEQ ID NO: 3119123 - RNA, 20 nt, Human
uuguuagugugucuuagugu

SEQ ID NO: 3119124 - RNA, 22 nt, Human
uuguuaguaugaggcauuuguu

SEQ ID NO: 3119125 - RNA, 14 nt, Human
uuguuacauuuuua

SEQ ID NO: 3119126 - RNA, 19 nt, Human
uuguuaguaugaggcauuu

SEQ ID NO: 3119127 - RNA, 21 nt, Human
uuguuaguaugaggcauuugu

SEQ ID NO: 3119128 - RNA, 17 nt, Human
uugugcauuaucuagau

SEQ ID NO: 3119129 - RNA, 12 nt, Human
uugugcauuugg

SEQ ID NO: 3119130 - RNA, 22 nt, Human
uugugcauuaucuagauacugu

SEQ ID NO: 3119131 - RNA, 23 nt, Human
uugugcauuaucuagauacugua

SEQ ID NO: 3119132 - RNA, 20 nt, Human
uuguggauuuaacagaaaug

SEQ ID NO: 3119133 - RNA, 21 nt, Human
uuguggauuuaacagaaaugu

SEQ ID NO: 3119134 - RNA, 17 nt, Human
uuguggacacagcucuu

SEQ ID NO: 3119135 - RNA, 16 nt, Human
uuguggacacagcucu

SEQ ID NO: 3119136 - RNA, 13 nt, Human
uuguguucaccuu

SEQ ID NO: 3119137 - RNA, 22 nt, Human
uuguggauuuaacagaaaugua

SEQ ID NO: 3119138 - RNA, 23 nt, Human
uuguggauuuaacagaaauguac

SEQ ID NO: 3119139 - RNA, 21 nt, Human
uuguguuuauauauaagccaa

SEQ ID NO: 3119140 - RNA, 13 nt, Human
uuggucuguguga

SEQ ID NO: 3119141 - RNA, 22 nt, Human
uuggguucaagcgauucuucug

SEQ ID NO: 3119142 - RNA, 18 nt, Human
uuguacauaaugcgugca

SEQ ID NO: 3119143 - RNA, 14 nt, Human
uuguacauaaugcg

SEQ ID NO: 3119144 - RNA, 15 nt, Human
uuguaaauuaacuuu

SEQ ID NO: 3119145 - RNA, 16 nt, Human
uuguaaauuaacuuuu

SEQ ID NO: 3119146 - RNA, 18 nt, Human
uuguaaauuaacuuuuau

SEQ ID NO: 3119147 - RNA, 23 nt, Human
uuguaaauuaacuuuuauaaacu

SEQ ID NO: 3119148 - RNA, 17 nt, Human
uuguaaauagcucaggu

SEQ ID NO: 3119149 - RNA, 20 nt, Human
uugugaaaggaaagaggcuc

SEQ ID NO: 3119150 - RNA, 12 nt, Human
uugugauuuuug

SEQ ID NO: 3119151 - RNA, 16 nt, Human
uugugauuuuuguaau

SEQ ID NO: 3119152 - RNA, 17 nt, Human
uugugauuuuuguaauu

SEQ ID NO: 3119153 - RNA, 15 nt, Human
uugucuuaaaaagug

SEQ ID NO: 3119154 - RNA, 19 nt, Human
uuguauucucuccuguacc

SEQ ID NO: 3119155 - RNA, 15 nt, Human
uuguauucucuccug

SEQ ID NO: 3119156 - RNA, 16 nt, Human
uuguauucucuccugu

SEQ ID NO: 3119157 - RNA, 19 nt, Human
uucuguccuacucuguguc

SEQ ID NO: 3119158 - RNA, 18 nt, Human
uucuguauuuuguuuuug

SEQ ID NO: 3119159 - RNA, 14 nt, Human
uucugcuucagccu

SEQ ID NO: 3119160 - RNA, 15 nt, Human
uucugcuucagccuc

SEQ ID NO: 3119161 - RNA, 16 nt, Human
uucugcuucagccucc

SEQ ID NO: 3119162 - RNA, 19 nt, Human
uucugcuucagccucccga

SEQ ID NO: 3119163 - RNA, 21 nt, Human
uucuuuccaaaguacacuguu

SEQ ID NO: 3119164 - RNA, 20 nt, Human
uugaaaaaccauuuugcugu

SEQ ID NO: 3119165 - RNA, 23 nt, Human
uugaaaacacuguucucugcccu

SEQ ID NO: 3119166 - RNA, 22 nt, Human
uugaaaacacuguucucugccc

SEQ ID NO: 3119167 - RNA, 15 nt, Human
uugaacuccuggccu

SEQ ID NO: 3119168 - RNA, 16 nt, Human
uugaacuccuggccuc

SEQ ID NO: 3119169 - RNA, 12 nt, Human
uucuuucagcca

SEQ ID NO: 3119170 - RNA, 14 nt, Human
uucuuuccaaagua

SEQ ID NO: 3119171 - RNA, 21 nt, Human
uucuuguguguuuauugucaa

SEQ ID NO: 3119172 - RNA, 13 nt, Human
uucuuccucccuc

SEQ ID NO: 3119173 - RNA, 14 nt, Human
uucuuguguguuua

SEQ ID NO: 3119174 - RNA, 21 nt, Human
uucuuccacaagagcccaggc

SEQ ID NO: 3119175 - RNA, 21 nt, Human
uucuuauacauuugauaaagu

SEQ ID NO: 3119176 - RNA, 16 nt, Human
uugaugaucuuugcag

SEQ ID NO: 3119177 - RNA, 21 nt, Human
uugcaaaguaucccuacugua

SEQ ID NO: 3119178 - RNA, 13 nt, Human
uugaggguugggc

SEQ ID NO: 3119179 - RNA, 16 nt, Human
uugaggguugggcugg

SEQ ID NO: 3119180 - RNA, 11 nt, Human
uugagccuggg

SEQ ID NO: 3119181 - RNA, 23 nt, Human
uugauagcacagacccugcccug

SEQ ID NO: 3119182 - RNA, 23 nt, Human
uugauauccucuuugagugaagc

SEQ ID NO: 3119183 - RNA, 15 nt, Human
uugacgccaucccag

SEQ ID NO: 3119184 - RNA, 19 nt, Human
uugacgccaucccagcccc

SEQ ID NO: 3119185 - RNA, 18 nt, Human
uugacgccaucccagccc

SEQ ID NO: 3119186 - RNA, 17 nt, Human
uugacgccaucccagcc

SEQ ID NO: 3119187 - RNA, 21 nt, Human
uugaccucaggugauccaccc

SEQ ID NO: 3119188 - RNA, 14 nt, Human
uugaccucugcagc

SEQ ID NO: 3119189 - RNA, 15 nt, Human
uugaccucugcagca

SEQ ID NO: 3119190 - RNA, 17 nt, Human
uugaccgugaggccaga

SEQ ID NO: 3119191 - RNA, 18 nt, Human
uugaacuggguacuugug

SEQ ID NO: 3119192 - RNA, 14 nt, Human
uugaauuguaagga

SEQ ID NO: 3119193 - RNA, 21 nt, Human
uuccuugaguugauucagcuc

SEQ ID NO: 3119194 - RNA, 20 nt, Human
uuccuugaguugauucagcu

SEQ ID NO: 3119195 - RNA, 18 nt, Human
uuccugaagaauugaaaa

SEQ ID NO: 3119196 - RNA, 16 nt, Human
uuccauggccucuuca

SEQ ID NO: 3119197 - RNA, 12 nt, Human
uuccauggccuc

SEQ ID NO: 3119198 - RNA, 23 nt, Human
uuccugaugcuucuucagagacu

SEQ ID NO: 3119199 - RNA, 15 nt, Human
uuccugaggcugggc

SEQ ID NO: 3119200 - RNA, 20 nt, Human
uuccugaggcugggcucccu

SEQ ID NO: 3119201 - RNA, 12 nt, Human
uucuacccagcg

SEQ ID NO: 3119202 - RNA, 19 nt, Human
uucuacccagcgagcccug

SEQ ID NO: 3119203 - RNA, 13 nt, Human
uucuacgccaggg

SEQ ID NO: 3119204 - RNA, 20 nt, Human
uucuacccagcgagcccugg

SEQ ID NO: 3119205 - RNA, 21 nt, Human
uucuacccagcgagcccuggu

SEQ ID NO: 3119206 - RNA, 14 nt, Human
uucuacccaggugc

SEQ ID NO: 3119207 - RNA, 22 nt, Human
uucuacucgaguuacagacaaa

SEQ ID NO: 3119208 - RNA, 16 nt, Human
uucuccacccugcucu

SEQ ID NO: 3119209 - RNA, 20 nt, Human
uucuccaccugccagggaca

SEQ ID NO: 3119210 - RNA, 18 nt, Human
uucuccaccugccaggga

SEQ ID NO: 3119211 - RNA, 16 nt, Human
uucuccaccugccagg

SEQ ID NO: 3119212 - RNA, 15 nt, Human
uucuccaccugccag

SEQ ID NO: 3119213 - RNA, 14 nt, Human
uucuccaccugcca

SEQ ID NO: 3119214 - RNA, 12 nt, Human
uucuccaccugc

SEQ ID NO: 3119215 - RNA, 21 nt, Human
uucuccaccucccacaaagga

SEQ ID NO: 3119216 - RNA, 19 nt, Human
uucucuccuguaccucuug

SEQ ID NO: 3119217 - RNA, 14 nt, Human
uucucugaggacac

SEQ ID NO: 3119218 - RNA, 12 nt, Human
uucucugcccuc

SEQ ID NO: 3119219 - RNA, 11 nt, Human
uucucugcccu

SEQ ID NO: 3119220 - RNA, 14 nt, Human
uucucuccagcccc

SEQ ID NO: 3119221 - RNA, 13 nt, Human
uucucuccagccc

SEQ ID NO: 3119222 - RNA, 15 nt, Human
uucucuccagccccu

SEQ ID NO: 3119223 - RNA, 14 nt, Human
uucucuccuguacc

SEQ ID NO: 3119224 - RNA, 18 nt, Human
uucucuccuguaccucuu

SEQ ID NO: 3119225 - RNA, 19 nt, Human
uucugauccuaguuccacc

SEQ ID NO: 3119226 - RNA, 19 nt, Human
uucugcucacauaucuguc

SEQ ID NO: 3119227 - RNA, 18 nt, Human
uucugacccugcuucaaa

SEQ ID NO: 3119228 - RNA, 22 nt, Human
uucugacccaugcugcccugug

SEQ ID NO: 3119229 - RNA, 23 nt, Human
uucugacccaugcugcccuguga

SEQ ID NO: 3119230 - RNA, 16 nt, Human
uucucugcccuccaag

SEQ ID NO: 3119231 - RNA, 15 nt, Human
uuccauggacuuugu

SEQ ID NO: 3119232 - RNA, 14 nt, Human
uuccauggacuuug

SEQ ID NO: 3119233 - RNA, 19 nt, Human
uuccaacccucaucaccaa

SEQ ID NO: 3119234 - RNA, 16 nt, Human
uuccaaaguacacugu

SEQ ID NO: 3119235 - RNA, 13 nt, Human
uuccaaaguacac

SEQ ID NO: 3119236 - RNA, 15 nt, Human
uucauaaccuagccu

SEQ ID NO: 3119237 - RNA, 19 nt, Human
uucauccuccucagaucuu

SEQ ID NO: 3119238 - RNA, 15 nt, Human
uucauccuccucaga

SEQ ID NO: 3119239 - RNA, 13 nt, Human
uucaguguacaug

SEQ ID NO: 3119240 - RNA, 12 nt, Human
uucaguguacau

SEQ ID NO: 3119241 - RNA, 17 nt, Human
uucaguggcagcugcuu

SEQ ID NO: 3119242 - RNA, 15 nt, Human
uucaguggcagcugc

SEQ ID NO: 3119243 - RNA, 16 nt, Human
uucaguggcagcugcu

SEQ ID NO: 3119244 - RNA, 21 nt, Human
uucagcugguugagguuucaa

SEQ ID NO: 3119245 - RNA, 12 nt, Human
uucagcuccagc

SEQ ID NO: 3119246 - RNA, 15 nt, Human
uucagcuccagcuca

SEQ ID NO: 3119247 - RNA, 22 nt, Human
uucagcuuguaaauagcucagg

SEQ ID NO: 3119248 - RNA, 14 nt, Human
uucaguggcagcug

SEQ ID NO: 3119249 - RNA, 13 nt, Human
uucaguggcagcu

SEQ ID NO: 3119250 - RNA, 13 nt, Human
uucacggaagagc

SEQ ID NO: 3119251 - RNA, 22 nt, Human
uucaccuuuguccccaccgcag

SEQ ID NO: 3119252 - RNA, 16 nt, Human
uucagacagcugccug

SEQ ID NO: 3119253 - RNA, 15 nt, Human
uucagacagcugccu

SEQ ID NO: 3119254 - RNA, 14 nt, Human
uucagacagcugcc

SEQ ID NO: 3119255 - RNA, 17 nt, Human
uucacggaagagccuug

SEQ ID NO: 3119256 - RNA, 17 nt, Human
uucagacagcugccugg

SEQ ID NO: 3119257 - RNA, 13 nt, Human
uucacccuuuucu

SEQ ID NO: 3119258 - RNA, 14 nt, Human
uucaccuuuguccc

SEQ ID NO: 3119259 - RNA, 20 nt, Human
uucaccuuuguccccaccgc

SEQ ID NO: 3119260 - RNA, 19 nt, Human
uucaccuuuguccccaccg

SEQ ID NO: 3119261 - RNA, 21 nt, Human
uucaauaggaaaaacugauuu

SEQ ID NO: 3119262 - RNA, 22 nt, Human
uucaauaggaaaaacugauuuu

SEQ ID NO: 3119263 - RNA, 20 nt, Human
uucaauaggaaaaacugauu

SEQ ID NO: 3119264 - RNA, 22 nt, Human
uuauuuuggaaaauaaauuauu

SEQ ID NO: 3119265 - RNA, 21 nt, Human
uucaacagguuuuccugaaga

SEQ ID NO: 3119266 - RNA, 18 nt, Human
uuauuuuauuaugcauga

SEQ ID NO: 3119267 - RNA, 21 nt, Human
uuauuaaaugcccagccccuu

SEQ ID NO: 3119268 - RNA, 19 nt, Human
uuauuaaaugcccagcccc

SEQ ID NO: 3119269 - RNA, 17 nt, Human
uuauggaacacucugag

SEQ ID NO: 3119270 - RNA, 16 nt, Human
uuauggaacacucuga

SEQ ID NO: 3119271 - RNA, 21 nt, Human
uuauggacaaugacccagugg

SEQ ID NO: 3119272 - RNA, 20 nt, Human
uuauggaacacucugagacu

SEQ ID NO: 3119273 - RNA, 18 nt, Human
uuauggaacacucugaga

SEQ ID NO: 3119274 - RNA, 16 nt, Human
uuauggcuuuugugca

SEQ ID NO: 3119275 - RNA, 17 nt, Human
uuauggcuuuugugcau

SEQ ID NO: 3119276 - RNA, 11 nt, Human
uuauacauaaa

SEQ ID NO: 3119277 - RNA, 17 nt, Human
ugugaaaagaaaaauga

SEQ ID NO: 3119278 - RNA, 15 nt, Human
ugugaaaagaaaaau

SEQ ID NO: 3119279 - RNA, 13 nt, Human
ugugaaaagaaaa

SEQ ID NO: 3119280 - RNA, 18 nt, Human
uuauaauaauguuaacau

SEQ ID NO: 3119281 - RNA, 15 nt, Human
uuauaauaauguuaa

SEQ ID NO: 3119282 - RNA, 15 nt, Human
uuauaaugaaugaaa

SEQ ID NO: 3119283 - RNA, 13 nt, Human
uuuuuuuugacaa

SEQ ID NO: 3119284 - RNA, 15 nt, Human
uuuuacuaauagaca

SEQ ID NO: 3119285 - RNA, 13 nt, Human
uuuuauacauaaa

SEQ ID NO: 3119286 - RNA, 21 nt, Human
uuuuauacauaaacaagacca

SEQ ID NO: 3119287 - RNA, 19 nt, Human
uuuuaucgucacugcuuaa

SEQ ID NO: 3119288 - RNA, 17 nt, Human
uuuucaaaauaaaaaug

SEQ ID NO: 3119289 - RNA, 18 nt, Human
uuuuauuuuuagacagag

SEQ ID NO: 3119290 - RNA, 22 nt, Human
uuuucccuauuagagaagagau

SEQ ID NO: 3119291 - RNA, 18 nt, Human
uuuucccuauuagagaag

SEQ ID NO: 3119292 - RNA, 16 nt, Human
uuuucuuucagccaag

SEQ ID NO: 3119293 - RNA, 13 nt, Human
uuuucuucucccu

SEQ ID NO: 3119294 - RNA, 22 nt, Human
uuuucuuguguguuuauuguca

SEQ ID NO: 3119295 - RNA, 13 nt, Human
uuuucuacucgag

SEQ ID NO: 3119296 - RNA, 22 nt, Human
uuuucuacucgaguuacagaca

SEQ ID NO: 3119297 - RNA, 20 nt, Human
uuuucuacucgaguuacaga

SEQ ID NO: 3119298 - RNA, 17 nt, Human
uuuccguuaaaauacca

SEQ ID NO: 3119299 - RNA, 13 nt, Human
uuugagugccuua

SEQ ID NO: 3119300 - RNA, 15 nt, Human
uuuccguuaaaauac

SEQ ID NO: 3119301 - RNA, 21 nt, Human
uuugagugccuuacacaaugg

SEQ ID NO: 3119302 - RNA, 12 nt, Human
uuuggaaaauaa

SEQ ID NO: 3119303 - RNA, 15 nt, Human
uuuguugucagcuga

SEQ ID NO: 3119304 - RNA, 22 nt, Human
uuuguuaguaugaggcauuugu

SEQ ID NO: 3119305 - RNA, 15 nt, Human
uuuguauucucuccu

SEQ ID NO: 3119306 - RNA, 11 nt, Human
uuuuuuuacua

SEQ ID NO: 3119307 - RNA, 12 nt, Human
uuuuuuuuaaga

SEQ ID NO: 3119308 - RNA, 12 nt, Human
uuuuuaagaaaa

SEQ ID NO: 3119309 - RNA, 16 nt, Human
uuuuuaagugcugcau

SEQ ID NO: 3119310 - RNA, 17 nt, Human
uuuuuaagugcugcauu

SEQ ID NO: 3119311 - RNA, 18 nt, Human
uuuuuaagugcugcauuu

SEQ ID NO: 3119312 - RNA, 19 nt, Human
uuuuuaagugcugcauuua

SEQ ID NO: 3119313 - RNA, 22 nt, Human
uuuuuaagugcugcauuuaaaa

SEQ ID NO: 3119314 - RNA, 23 nt, Human
uuuuuaagugcugcauuuaaaag

SEQ ID NO: 3119315 - RNA, 11 nt, Human
uuuuuaaaugc

SEQ ID NO: 3119316 - RNA, 17 nt, Human
cauuugaaaauuuugau

SEQ ID NO: 3119317 - RNA, 19 nt, Human
cauuugaaaauuuugaugu

SEQ ID NO: 3119318 - RNA, 18 nt, Human
cauugaccugaggcccuu

SEQ ID NO: 3119319 - RNA, 14 nt, Human
cauugaccugaggc

SEQ ID NO: 3119320 - RNA, 17 nt, Human
cauugaccugaggcccu

SEQ ID NO: 3119321 - RNA, 15 nt, Human
cauugaccugaggcc

SEQ ID NO: 3119322 - RNA, 15 nt, Human
cauuuaaaaaaaauc

SEQ ID NO: 3119323 - RNA, 15 nt, Human
cauugugggaagggg

SEQ ID NO: 3119324 - RNA, 13 nt, Human
cauugugggaagg

SEQ ID NO: 3119325 - RNA, 21 nt, Human
cauuuuuaagugcugcauuua

SEQ ID NO: 3119326 - RNA, 17 nt, Human
cauuuuuaguagagaca

SEQ ID NO: 3119327 - RNA, 22 nt, Human
cauuugaggucuguucuuucca

SEQ ID NO: 3119328 - RNA, 13 nt, Human
cauuugcugaaua

SEQ ID NO: 3119329 - RNA, 22 nt, Human
cauuuuauuuuauuaugcauga

SEQ ID NO: 3119330 - RNA, 23 nt, Human
cauuuuauuuuauuaugcaugaa

SEQ ID NO: 3119331 - RNA, 23 nt, Human
cauucuucuguacgucugacagg

SEQ ID NO: 3119332 - RNA, 23 nt, Human
cauuccugaugcuucuucagaga

SEQ ID NO: 3119333 - RNA, 22 nt, Human
cauuccugaugcuucuucagag

SEQ ID NO: 3119334 - RNA, 19 nt, Human
cauuccugaugcuucuuca

SEQ ID NO: 3119335 - RNA, 16 nt, Human
cauuccugaugcuucu

SEQ ID NO: 3119336 - RNA, 14 nt, Human
cauuccugaugcuu

SEQ ID NO: 3119337 - RNA, 12 nt, Human
cauucugccugc

SEQ ID NO: 3119338 - RNA, 13 nt, Human
cauucugccugcc

SEQ ID NO: 3119339 - RNA, 15 nt, Human
cauucugccugccca

SEQ ID NO: 3119340 - RNA, 16 nt, Human
cauucugccugcccag

SEQ ID NO: 3119341 - RNA, 17 nt, Human
cauucugccugcccagg

SEQ ID NO: 3119342 - RNA, 18 nt, Human
cauucugccugcccaggc

SEQ ID NO: 3119343 - RNA, 19 nt, Human
cauucugccugcccaggcc

SEQ ID NO: 3119344 - RNA, 20 nt, Human
cauucugccugcccaggccc

SEQ ID NO: 3119345 - RNA, 17 nt, Human
cauucuguuaaucauua

SEQ ID NO: 3119346 - RNA, 20 nt, Human
cauuccccaggaggccagcc

SEQ ID NO: 3119347 - RNA, 19 nt, Human
cauuccccaggaggccagc

SEQ ID NO: 3119348 - RNA, 18 nt, Human
cauuccccaggaggccag

SEQ ID NO: 3119349 - RNA, 13 nt, Human
cauuccccaggag

SEQ ID NO: 3119350 - RNA, 17 nt, Human
cauuccccaggaggcca

SEQ ID NO: 3119351 - RNA, 15 nt, Human
cauuccccaggaggc

SEQ ID NO: 3119352 - RNA, 23 nt, Human
cauggucggaaaacaugcuacac

SEQ ID NO: 3119353 - RNA, 17 nt, Human
cauggucggaaaacaug

SEQ ID NO: 3119354 - RNA, 19 nt, Human
cauggucggaaaacaugcu

SEQ ID NO: 3119355 - RNA, 22 nt, Human
caugugccagguuuuuggucug

SEQ ID NO: 3119356 - RNA, 14 nt, Human
caugugcacaugca

SEQ ID NO: 3119357 - RNA, 15 nt, Human
caugugaugagagga

SEQ ID NO: 3119358 - RNA, 17 nt, Human
caugugaugagaggaaa

SEQ ID NO: 3119359 - RNA, 16 nt, Human
caugugaugagaggaa

SEQ ID NO: 3119360 - RNA, 20 nt, Human
caugugaugagaggaaauca

SEQ ID NO: 3119361 - RNA, 18 nt, Human
caugugaugagaggaaau

SEQ ID NO: 3119362 - RNA, 21 nt, Human
caugugaugagaggaaaucac

SEQ ID NO: 3119363 - RNA, 12 nt, Human
caugucuggcua

SEQ ID NO: 3119364 - RNA, 23 nt, Human
cauguuugauguaucugagcagg

SEQ ID NO: 3119365 - RNA, 12 nt, Human
cauguuugugau

SEQ ID NO: 3119366 - RNA, 14 nt, Human
cauguuugugauug

SEQ ID NO: 3119367 - RNA, 19 nt, Human
cauguuuuucuucucccuc

SEQ ID NO: 3119368 - RNA, 20 nt, Human
cauguuuuucuucucccuca

SEQ ID NO: 3119369 - RNA, 18 nt, Human
cauguuuuucuucucccu

SEQ ID NO: 3119370 - RNA, 15 nt, Human
cauggacuuccacug

SEQ ID NO: 3119371 - RNA, 15 nt, Human
caugcugucccuuac

SEQ ID NO: 3119372 - RNA, 13 nt, Human
caugcugucccuu

SEQ ID NO: 3119373 - RNA, 18 nt, Human
caugggccuccugugugu

SEQ ID NO: 3119374 - RNA, 14 nt, Human
cauccacugugcca

SEQ ID NO: 3119375 - RNA, 17 nt, Human
cauccacugugccaugu

SEQ ID NO: 3119376 - RNA, 23 nt, Human
cauccacugugccaugugccagg

SEQ ID NO: 3119377 - RNA, 17 nt, Human
cauccagguucagcuug

SEQ ID NO: 3119378 - RNA, 22 nt, Human
caucccugaaggccccgcccag

SEQ ID NO: 3119379 - RNA, 15 nt, Human
caucccucuggggcu

SEQ ID NO: 3119380 - RNA, 12 nt, Human
caucacccgcua

SEQ ID NO: 3119381 - RNA, 20 nt, Human
caucaccaacgucugugcca

SEQ ID NO: 3119382 - RNA, 16 nt, Human
caucauccuaagcuau

SEQ ID NO: 3119383 - RNA, 13 nt, Human
caucaugucuggc

SEQ ID NO: 3119384 - RNA, 14 nt, Human
caucaugucuggcu

SEQ ID NO: 3119385 - RNA, 15 nt, Human
caucaugucuggcua

SEQ ID NO: 3119386 - RNA, 14 nt, Human
caucaacaucuugg

SEQ ID NO: 3119387 - RNA, 16 nt, Human
cauaguaugguggcug

SEQ ID NO: 3119388 - RNA, 15 nt, Human
cauaguaugguggcu

SEQ ID NO: 3119389 - RNA, 23 nt, Human
cauauaagauucauauuuacuuc

SEQ ID NO: 3119390 - RNA, 23 nt, Human
cauauauauguuuuaagaggcag

SEQ ID NO: 3119391 - RNA, 21 nt, Human
cauauugauuuccguuaaaau

SEQ ID NO: 3119392 - RNA, 22 nt, Human
cauauucuguuggccaguguga

SEQ ID NO: 3119393 - RNA, 18 nt, Human
cauauucuguuggccagu

SEQ ID NO: 3119394 - RNA, 17 nt, Human
cauauugauuuccguua

SEQ ID NO: 3119395 - RNA, 13 nt, Human
caugaaaacacau

SEQ ID NO: 3119396 - RNA, 14 nt, Human
caugaaaacacauu

SEQ ID NO: 3119397 - RNA, 15 nt, Human
caugaaaacacauuu

SEQ ID NO: 3119398 - RNA, 16 nt, Human
caugaaaacacauuuu

SEQ ID NO: 3119399 - RNA, 17 nt, Human
caugaaaacacauuuuu

SEQ ID NO: 3119400 - RNA, 19 nt, Human
caugaaaacacauuuuucu

SEQ ID NO: 3119401 - RNA, 21 nt, Human
caugaaaacacauuuuucuua

SEQ ID NO: 3119402 - RNA, 22 nt, Human
caugagccucagcauccuggca

SEQ ID NO: 3119403 - RNA, 23 nt, Human
caugagccucagcauccuggcac

SEQ ID NO: 3119404 - RNA, 21 nt, Human
caugaggaacaaggcaaggcu

SEQ ID NO: 3119405 - RNA, 20 nt, Human
caugaggaacaaggcaaggc

SEQ ID NO: 3119406 - RNA, 17 nt, Human
caugaggaacaaggcaa

SEQ ID NO: 3119407 - RNA, 16 nt, Human
caugaggaacaaggca

SEQ ID NO: 3119408 - RNA, 23 nt, Human
caugaggaacaaggcaaggcugu

SEQ ID NO: 3119409 - RNA, 23 nt, Human
caugaguccccuguuuguuucug

SEQ ID NO: 3119410 - RNA, 15 nt, Human
caugaguccccuguu

SEQ ID NO: 3119411 - RNA, 14 nt, Human
caugaguccccugu

SEQ ID NO: 3119412 - RNA, 13 nt, Human
caugaguccccug

SEQ ID NO: 3119413 - RNA, 12 nt, Human
caugagccucag

SEQ ID NO: 3119414 - RNA, 15 nt, Human
caugagccucagcau

SEQ ID NO: 3119415 - RNA, 17 nt, Human
caugagccucagcaucc

SEQ ID NO: 3119416 - RNA, 18 nt, Human
caugagccucagcauccu

SEQ ID NO: 3119417 - RNA, 19 nt, Human
caugagccucagcauccug

SEQ ID NO: 3119418 - RNA, 20 nt, Human
caugagccucagcauccugg

SEQ ID NO: 3119419 - RNA, 21 nt, Human
caugagccucagcauccuggc

SEQ ID NO: 3119420 - RNA, 23 nt, Human
caugagcaucaggccaggcccuc

SEQ ID NO: 3119421 - RNA, 22 nt, Human
caugagcaucaggccaggcccu

SEQ ID NO: 3119422 - RNA, 21 nt, Human
caugagcaucaggccaggccc

SEQ ID NO: 3119423 - RNA, 20 nt, Human
caugagcaucaggccaggcc

SEQ ID NO: 3119424 - RNA, 18 nt, Human
caugagcaucaggccagg

SEQ ID NO: 3119425 - RNA, 17 nt, Human
caugagcaucaggccag

SEQ ID NO: 3119426 - RNA, 16 nt, Human
caugagcaucaggcca

SEQ ID NO: 3119427 - RNA, 15 nt, Human
caugagcaucaggcc

SEQ ID NO: 3119428 - RNA, 13 nt, Human
caugagcaucagg

SEQ ID NO: 3119429 - RNA, 21 nt, Human
caucuugaauuguaaggaaug

SEQ ID NO: 3119430 - RNA, 16 nt, Human
caucuugaauuguaag

SEQ ID NO: 3119431 - RNA, 15 nt, Human
caucuugcucugcug

SEQ ID NO: 3119432 - RNA, 16 nt, Human
caucuugcucugcuga

SEQ ID NO: 3119433 - RNA, 17 nt, Human
caucuugcucugcugac

SEQ ID NO: 3119434 - RNA, 16 nt, Human
caucucuacaaaaagc

SEQ ID NO: 3119435 - RNA, 15 nt, Human
caucucuccuccuuu

SEQ ID NO: 3119436 - RNA, 15 nt, Human
ccagcaagugagagc

SEQ ID NO: 3119437 - RNA, 14 nt, Human
ccagauuucacucu

SEQ ID NO: 3119438 - RNA, 20 nt, Human
ccagcaagugagagcugggu

SEQ ID NO: 3119439 - RNA, 21 nt, Human
ccagcaagugagagcugggug

SEQ ID NO: 3119440 - RNA, 22 nt, Human
ccagcaagugagagcugggugu

SEQ ID NO: 3119441 - RNA, 13 nt, Human
ccagccccagugc

SEQ ID NO: 3119442 - RNA, 15 nt, Human
ccagccccagugccc

SEQ ID NO: 3119443 - RNA, 23 nt, Human
ccagccccaaaacucuccucugc

SEQ ID NO: 3119444 - RNA, 16 nt, Human
ccagccccagugccca

SEQ ID NO: 3119445 - RNA, 16 nt, Human
ccagcccuuagcaggg

SEQ ID NO: 3119446 - RNA, 17 nt, Human
ccagcccuuagcaggga

SEQ ID NO: 3119447 - RNA, 23 nt, Human
ccagccgagauagccaaggccaa

SEQ ID NO: 3119448 - RNA, 14 nt, Human
ccagccgccaugcu

SEQ ID NO: 3119449 - RNA, 18 nt, Human
ccagccgccaugcuccug

SEQ ID NO: 3119450 - RNA, 19 nt, Human
ccagccaaagccuccucca

SEQ ID NO: 3119451 - RNA, 18 nt, Human
ccagccaaagccuccucc

SEQ ID NO: 3119452 - RNA, 15 nt, Human
ccagccaaagccucc

SEQ ID NO: 3119453 - RNA, 11 nt, Human
ccagagcugcc

SEQ ID NO: 3119454 - RNA, 13 nt, Human
ccagagcugccac

SEQ ID NO: 3119455 - RNA, 12 nt, Human
ccagagcugcca

SEQ ID NO: 3119456 - RNA, 19 nt, Human
ccagagcugccaccugccu

SEQ ID NO: 3119457 - RNA, 16 nt, Human
ccagagcugccaccug

SEQ ID NO: 3119458 - RNA, 15 nt, Human
ccagagcugccaccu

SEQ ID NO: 3119459 - RNA, 14 nt, Human
ccagagcugccacc

SEQ ID NO: 3119460 - RNA, 16 nt, Human
ccagagggagugacag

SEQ ID NO: 3119461 - RNA, 17 nt, Human
ccagagggagugacaga

SEQ ID NO: 3119462 - RNA, 18 nt, Human
ccagagggagugacagag

SEQ ID NO: 3119463 - RNA, 19 nt, Human
ccagagggagugacagagg

SEQ ID NO: 3119464 - RNA, 20 nt, Human
ccagagggagugacagaggc

SEQ ID NO: 3119465 - RNA, 21 nt, Human
ccagagggagugacagaggca

SEQ ID NO: 3119466 - RNA, 21 nt, Human
ccagaggagagaggacccccu

SEQ ID NO: 3119467 - RNA, 22 nt, Human
ccagaggagagaggacccccug

SEQ ID NO: 3119468 - RNA, 21 nt, Human
ccagagaggguggugaccucu

SEQ ID NO: 3119469 - RNA, 23 nt, Human
ccagagaggguggugaccucugc

SEQ ID NO: 3119470 - RNA, 14 nt, Human
ccagagaggguggu

SEQ ID NO: 3119471 - RNA, 13 nt, Human
ccagagagggugg

SEQ ID NO: 3119472 - RNA, 17 nt, Human
ccagacaccuugacagg

SEQ ID NO: 3119473 - RNA, 19 nt, Human
ccagacaccuugacagggc

SEQ ID NO: 3119474 - RNA, 18 nt, Human
ccagauucuuuccugagg

SEQ ID NO: 3119475 - RNA, 22 nt, Human
ccagauucuuuccugaggcugg

SEQ ID NO: 3119476 - RNA, 21 nt, Human
ccagauucuuuccugaggcug

SEQ ID NO: 3119477 - RNA, 20 nt, Human
ccagauucuuuccugaggcu

SEQ ID NO: 3119478 - RNA, 19 nt, Human
ccagauucuuuccugaggc

SEQ ID NO: 3119479 - RNA, 13 nt, Human
ccagagggccugc

SEQ ID NO: 3119480 - RNA, 22 nt, Human
ccagagggagugacagaggcag

SEQ ID NO: 3119481 - RNA, 23 nt, Human
ccagagggagugacagaggcagc

SEQ ID NO: 3119482 - RNA, 23 nt, Human
ccagaugcaccagcccuuagcag

SEQ ID NO: 3119483 - RNA, 16 nt, Human
ccagagggccugcaag

SEQ ID NO: 3119484 - RNA, 15 nt, Human
ccagagggccugcaa

SEQ ID NO: 3119485 - RNA, 19 nt, Human
ccagauugcaacaggcugg

SEQ ID NO: 3119486 - RNA, 20 nt, Human
ccagauugcaacaggcuggg

SEQ ID NO: 3119487 - RNA, 23 nt, Human
ccagauucuuuccugaggcuggg

SEQ ID NO: 3119488 - RNA, 18 nt, Human
ccagauugcaacaggcug

SEQ ID NO: 3119489 - RNA, 12 nt, Human
ccagauuucacu

SEQ ID NO: 3119490 - RNA, 21 nt, Human
ccagauugcaacaggcugggc

SEQ ID NO: 3119491 - RNA, 13 nt, Human
ccacguuucuaaa

SEQ ID NO: 3119492 - RNA, 18 nt, Human
ccacugcacuccagccug

SEQ ID NO: 3119493 - RNA, 15 nt, Human
ccacucccugcaacc

SEQ ID NO: 3119494 - RNA, 19 nt, Human
ccacugcacuccagccugg

SEQ ID NO: 3119495 - RNA, 20 nt, Human
ccacugcacuccagccuggg

SEQ ID NO: 3119496 - RNA, 16 nt, Human
ccacugcgaccacaag

SEQ ID NO: 3119497 - RNA, 23 nt, Human
ccacuacggaauaguuggcuagg

SEQ ID NO: 3119498 - RNA, 22 nt, Human
ccacuacggaauaguuggcuag

SEQ ID NO: 3119499 - RNA, 18 nt, Human
ccacuacauucuguuaau

SEQ ID NO: 3119500 - RNA, 13 nt, Human
ccacucccugcaa

SEQ ID NO: 3119501 - RNA, 12 nt, Human
ccacucccugca

SEQ ID NO: 3119502 - RNA, 18 nt, Human
ccacucaguccauagcag

SEQ ID NO: 3119503 - RNA, 16 nt, Human
ccaccuggccucugca

SEQ ID NO: 3119504 - RNA, 15 nt, Human
ccaccuggccucugc

SEQ ID NO: 3119505 - RNA, 22 nt, Human
ccaccugcggugcuaucucccc

SEQ ID NO: 3119506 - RNA, 14 nt, Human
ccaccuggccucug

SEQ ID NO: 3119507 - RNA, 17 nt, Human
ccaccuggccucugcac

SEQ ID NO: 3119508 - RNA, 12 nt, Human
ccacggccaggc

SEQ ID NO: 3119509 - RNA, 13 nt, Human
ccacggccaggcc

SEQ ID NO: 3119510 - RNA, 14 nt, Human
ccacggccaggcca

SEQ ID NO: 3119511 - RNA, 15 nt, Human
ccacggccaggccag

SEQ ID NO: 3119512 - RNA, 16 nt, Human
ccaccugccagggaca

SEQ ID NO: 3119513 - RNA, 20 nt, Human
ccaccugccuguugggccag

SEQ ID NO: 3119514 - RNA, 17 nt, Human
ccaccugccuguugggc

SEQ ID NO: 3119515 - RNA, 17 nt, Human
ccaccucccacaaagga

SEQ ID NO: 3119516 - RNA, 12 nt, Human
ccacccaggagc

SEQ ID NO: 3119517 - RNA, 14 nt, Human
ccacccaggagccc

SEQ ID NO: 3119518 - RNA, 12 nt, Human
ccaccucagccu

SEQ ID NO: 3119519 - RNA, 17 nt, Human
ccacccugaaagcccug

SEQ ID NO: 3119520 - RNA, 16 nt, Human
ccacccugaaagcccu

SEQ ID NO: 3119521 - RNA, 13 nt, Human
ccaccucagccuc

SEQ ID NO: 3119522 - RNA, 14 nt, Human
ccaccucagccucc

SEQ ID NO: 3119523 - RNA, 15 nt, Human
ccaccucagccuccc

SEQ ID NO: 3119524 - RNA, 13 nt, Human
ccacacccagccc

SEQ ID NO: 3119525 - RNA, 14 nt, Human
ccacacccagccca

SEQ ID NO: 3119526 - RNA, 12 nt, Human
ccacacccagcc

SEQ ID NO: 3119527 - RNA, 16 nt, Human
ccacccaccucagccu

SEQ ID NO: 3119528 - RNA, 14 nt, Human
ccacccaccucagc

SEQ ID NO: 3119529 - RNA, 15 nt, Human
ccacccaccucagcc

SEQ ID NO: 3119530 - RNA, 13 nt, Human
ccacccaccucag

SEQ ID NO: 3119531 - RNA, 22 nt, Human
ccacccaagggccuggccugag

SEQ ID NO: 3119532 - RNA, 21 nt, Human
ccacccaagggccuggccuga

SEQ ID NO: 3119533 - RNA, 20 nt, Human
ccacccaagggccuggccug

SEQ ID NO: 3119534 - RNA, 16 nt, Human
ccacccaagggccugg

SEQ ID NO: 3119535 - RNA, 19 nt, Human
ccacccaagggccuggccu

SEQ ID NO: 3119536 - RNA, 17 nt, Human
ccacccaagggccuggc

SEQ ID NO: 3119537 - RNA, 14 nt, Human
ccaccacacccagc

SEQ ID NO: 3119538 - RNA, 16 nt, Human
ccaccacacccagccc

SEQ ID NO: 3119539 - RNA, 20 nt, Human
ccaccaacauacucccaucu

SEQ ID NO: 3119540 - RNA, 18 nt, Human
ccaccaacauacucccau

SEQ ID NO: 3119541 - RNA, 14 nt, Human
ccaccaacauacuc

SEQ ID NO: 3119542 - RNA, 16 nt, Human
ccacaucuugcucugc

SEQ ID NO: 3119543 - RNA, 20 nt, Human
ccacaucuugcucugcugac

SEQ ID NO: 3119544 - RNA, 22 nt, Human
ccacaucuugcucugcugacag

SEQ ID NO: 3119545 - RNA, 23 nt, Human
ccacaucuugcucugcugacaga

SEQ ID NO: 3119546 - RNA, 14 nt, Human
ccacaucuugcucu

SEQ ID NO: 3119547 - RNA, 18 nt, Human
ccauucuccaccugccag

SEQ ID NO: 3119548 - RNA, 17 nt, Human
ccauguuggccaggcug

SEQ ID NO: 3119549 - RNA, 16 nt, Human
ccauguuggccaggcu

SEQ ID NO: 3119550 - RNA, 19 nt, Human
ccauauucuguuggccagu

SEQ ID NO: 3119551 - RNA, 22 nt, Human
cccaaauggaaaugggcagagc

SEQ ID NO: 3119552 - RNA, 18 nt, Human
cccaaauggaaaugggca

SEQ ID NO: 3119553 - RNA, 16 nt, Human
cccaaagugcugggau

SEQ ID NO: 3119554 - RNA, 20 nt, Human
ccauucuccaccugccaggg

SEQ ID NO: 3119555 - RNA, 19 nt, Human
ccauucuccaccugccagg

SEQ ID NO: 3119556 - RNA, 14 nt, Human
ccauuuguguuuau

SEQ ID NO: 3119557 - RNA, 13 nt, Human
cccaaagugcugg

SEQ ID NO: 3119558 - RNA, 15 nt, Human
cccaaagugcuggga

SEQ ID NO: 3119559 - RNA, 18 nt, Human
cccaaaacucuccucugc

SEQ ID NO: 3119560 - RNA, 16 nt, Human
cccaaaacucuccucu

SEQ ID NO: 3119561 - RNA, 22 nt, Human
ccaguguuguggauuuaacaga

SEQ ID NO: 3119562 - RNA, 23 nt, Human
ccauauucuguuggccaguguga

SEQ ID NO: 3119563 - RNA, 23 nt, Human
ccagugcccacaggaucagucug

SEQ ID NO: 3119564 - RNA, 16 nt, Human
ccagugaggcucugcc

SEQ ID NO: 3119565 - RNA, 15 nt, Human
ccagugaggcucugc

SEQ ID NO: 3119566 - RNA, 14 nt, Human
ccagugaggcucug

SEQ ID NO: 3119567 - RNA, 22 nt, Human
ccagugguuccuaauccucuag

SEQ ID NO: 3119568 - RNA, 20 nt, Human
ccagugccgagaaggaagcc

SEQ ID NO: 3119569 - RNA, 15 nt, Human
ccagguucagcuugu

SEQ ID NO: 3119570 - RNA, 24 nt, Human
ccaggugcacaagcuccaagcucc

SEQ ID NO: 3119571 - RNA, 17 nt, Human
ccagguuuuuggucuga

SEQ ID NO: 3119572 - RNA, 19 nt, Human
ccagucuggaaugcagugg

SEQ ID NO: 3119573 - RNA, 20 nt, Human
ccagucuggaaugcaguggu

SEQ ID NO: 3119574 - RNA, 13 nt, Human
ccagugaggcucu

SEQ ID NO: 3119575 - RNA, 18 nt, Human
ccagucuggaaugcagug

SEQ ID NO: 3119576 - RNA, 18 nt, Human
ccaggugcacaagcucca

SEQ ID NO: 3119577 - RNA, 20 nt, Human
ccaggugcacaagcuccaag

SEQ ID NO: 3119578 - RNA, 19 nt, Human
ccaggugcacaagcuccaa

SEQ ID NO: 3119579 - RNA, 21 nt, Human
ccagggacagaggggguggcc

SEQ ID NO: 3119580 - RNA, 15 nt, Human
ccagggacagagggg

SEQ ID NO: 3119581 - RNA, 14 nt, Human
ccagggacagaggg

SEQ ID NO: 3119582 - RNA, 20 nt, Human
ccaggcuuagucacugagac

SEQ ID NO: 3119583 - RNA, 22 nt, Human
ccagggacagaggggguggccu

SEQ ID NO: 3119584 - RNA, 21 nt, Human
ccaggcauuccccaggaggcc

SEQ ID NO: 3119585 - RNA, 19 nt, Human
ccaggcauuccccaggagg

SEQ ID NO: 3119586 - RNA, 18 nt, Human
ccaggcauuccccaggag

SEQ ID NO: 3119587 - RNA, 17 nt, Human
ccaggcauuccccagga

SEQ ID NO: 3119588 - RNA, 19 nt, Human
ccaggagccuccugcccuu

SEQ ID NO: 3119589 - RNA, 20 nt, Human
ccaggagccccgaggccuuc

SEQ ID NO: 3119590 - RNA, 16 nt, Human
ccaggagccccgaggc

SEQ ID NO: 3119591 - RNA, 19 nt, Human
ccaggagccccgaggccuu

SEQ ID NO: 3119592 - RNA, 24 nt, Human
ccaggcuguaucccaugagccuca

SEQ ID NO: 3119593 - RNA, 17 nt, Human
ccaggcuuagucacuga

SEQ ID NO: 3119594 - RNA, 23 nt, Human
ccaggcccucugcccacucccug

SEQ ID NO: 3119595 - RNA, 22 nt, Human
ccaggcccucugcccacucccu

SEQ ID NO: 3119596 - RNA, 21 nt, Human
ccaggcccucugcccacuccc

SEQ ID NO: 3119597 - RNA, 20 nt, Human
ccaggcccucugcccacucc

SEQ ID NO: 3119598 - RNA, 15 nt, Human
ccuggccagaugcac

SEQ ID NO: 3119599 - RNA, 22 nt, Human
ccuggcacccggccccugcugg

SEQ ID NO: 3119600 - RNA, 21 nt, Human
ccuggcacccggccccugcug

SEQ ID NO: 3119601 - RNA, 23 nt, Human
ccuggcacccggccccugcuggu

SEQ ID NO: 3119602 - RNA, 13 nt, Human
ccuggcagccccu

SEQ ID NO: 3119603 - RNA, 12 nt, Human
ccuggcagcccc

SEQ ID NO: 3119604 - RNA, 18 nt, Human
ccuggaauauauaaccag

SEQ ID NO: 3119605 - RNA, 21 nt, Human
ccugcucuccgaccagacacc

SEQ ID NO: 3119606 - RNA, 22 nt, Human
ccugcggugcuaucucccccag

SEQ ID NO: 3119607 - RNA, 22 nt, Human
ccugcucuccgaccagacaccu

SEQ ID NO: 3119608 - RNA, 14 nt, Human
ccugcuucaaauau

SEQ ID NO: 3119609 - RNA, 17 nt, Human
ccugcggugcuaucucc

SEQ ID NO: 3119610 - RNA, 16 nt, Human
ccugcggugcuaucuc

SEQ ID NO: 3119611 - RNA, 22 nt, Human
ccugccccucaacucuccucca

SEQ ID NO: 3119612 - RNA, 23 nt, Human
ccugccuguugggccaggagccu

SEQ ID NO: 3119613 - RNA, 15 nt, Human
ccugauugugucucu

SEQ ID NO: 3119614 - RNA, 22 nt, Human
ccugaugcuucuucagagacuc

SEQ ID NO: 3119615 - RNA, 21 nt, Human
ccugaugcuucuucagagacu

SEQ ID NO: 3119616 - RNA, 20 nt, Human
ccugaugcuucuucagagac

SEQ ID NO: 3119617 - RNA, 19 nt, Human
ccugaugcuucuucagaga

SEQ ID NO: 3119618 - RNA, 12 nt, Human
ccugaggcccuu

SEQ ID NO: 3119619 - RNA, 11 nt, Human
ccugaggcccu

SEQ ID NO: 3119620 - RNA, 19 nt, Human
ccugauugugucucuuggu

SEQ ID NO: 3119621 - RNA, 17 nt, Human
ccugauugugucucuug

SEQ ID NO: 3119622 - RNA, 21 nt, Human
ccugcaaccugauugugucuc

SEQ ID NO: 3119623 - RNA, 22 nt, Human
ccugcaaccugauugugucucu

SEQ ID NO: 3119624 - RNA, 14 nt, Human
ccugcaagaacaag

SEQ ID NO: 3119625 - RNA, 23 nt, Human
ccugcaggcagccaggccacaag

SEQ ID NO: 3119626 - RNA, 16 nt, Human
ccugccagggacagag

SEQ ID NO: 3119627 - RNA, 15 nt, Human
ccugccagggacaga

SEQ ID NO: 3119628 - RNA, 14 nt, Human
ccugccagggacag

SEQ ID NO: 3119629 - RNA, 13 nt, Human
ccugccagggaca

SEQ ID NO: 3119630 - RNA, 12 nt, Human
ccugccagggac

SEQ ID NO: 3119631 - RNA, 22 nt, Human
ccugccaggaagccagcaggcu

SEQ ID NO: 3119632 - RNA, 21 nt, Human
ccugccaggaagccagcaggc

SEQ ID NO: 3119633 - RNA, 19 nt, Human
ccugccaggaagccagcag

SEQ ID NO: 3119634 - RNA, 18 nt, Human
ccugccaggaagccagca

SEQ ID NO: 3119635 - RNA, 11 nt, Human
ccugccaggga

SEQ ID NO: 3119636 - RNA, 16 nt, Human
ccugccaggcauggug

SEQ ID NO: 3119637 - RNA, 23 nt, Human
ccugccaggaagccagcaggcuc

SEQ ID NO: 3119638 - RNA, 15 nt, Human
ccugccaggcauggu

SEQ ID NO: 3119639 - RNA, 17 nt, Human
ccugccaggaagccagc

SEQ ID NO: 3119640 - RNA, 15 nt, Human
ccugccaggaagcca

SEQ ID NO: 3119641 - RNA, 14 nt, Human
ccugccaggaagcc

SEQ ID NO: 3119642 - RNA, 13 nt, Human
ccugccaggaagc

SEQ ID NO: 3119643 - RNA, 23 nt, Human
ccugacaacacucauugaccuga

SEQ ID NO: 3119644 - RNA, 20 nt, Human
ccugagccagauuucacucu

SEQ ID NO: 3119645 - RNA, 14 nt, Human
ccugagcuuucugc

SEQ ID NO: 3119646 - RNA, 18 nt, Human
ccugaggcccagagggcc

SEQ ID NO: 3119647 - RNA, 21 nt, Human
ccugaggcccagagggccugc

SEQ ID NO: 3119648 - RNA, 16 nt, Human
ccugagcuuucugcua

SEQ ID NO: 3119649 - RNA, 15 nt, Human
cgagcccugguggca

SEQ ID NO: 3119650 - RNA, 16 nt, Human
cgagcccugguggcag

SEQ ID NO: 3119651 - RNA, 18 nt, Human
cgagcaugccuggauggg

SEQ ID NO: 3119652 - RNA, 20 nt, Human
cgauuucuguuuagauaaua

SEQ ID NO: 3119653 - RNA, 14 nt, Human
cgcagcccugcaga

SEQ ID NO: 3119654 - RNA, 16 nt, Human
cgcagacaggaccagg

SEQ ID NO: 3119655 - RNA, 15 nt, Human
cgcagacaggaccag

SEQ ID NO: 3119656 - RNA, 22 nt, Human
cgccaggggaaaaucagccugc

SEQ ID NO: 3119657 - RNA, 21 nt, Human
cgccagauucuuuccugaggc

SEQ ID NO: 3119658 - RNA, 20 nt, Human
cgccagauucuuuccugagg

SEQ ID NO: 3119659 - RNA, 19 nt, Human
cgccagauucuuuccugag

SEQ ID NO: 3119660 - RNA, 17 nt, Human
cgccagauucuuuccug

SEQ ID NO: 3119661 - RNA, 17 nt, Human
cgccaugcuccuggccc

SEQ ID NO: 3119662 - RNA, 13 nt, Human
cgaauagcuggga

SEQ ID NO: 3119663 - RNA, 14 nt, Human
cgaauagcugggac

SEQ ID NO: 3119664 - RNA, 17 nt, Human
cgagaucacgccacugc

SEQ ID NO: 3119665 - RNA, 18 nt, Human
cgagauagccaaggccaa

SEQ ID NO: 3119666 - RNA, 20 nt, Human
cgagcaggcuucuucccccc

SEQ ID NO: 3119667 - RNA, 17 nt, Human
cgagcaugccuggaugg

SEQ ID NO: 3119668 - RNA, 16 nt, Human
cgagcaugccuggaug

SEQ ID NO: 3119669 - RNA, 13 nt, Human
cgagcaugccugg

SEQ ID NO: 3119670 - RNA, 14 nt, Human
cgagcaugccugga

SEQ ID NO: 3119671 - RNA, 20 nt, Human
cgagauugcaccacugcacu

SEQ ID NO: 3119672 - RNA, 18 nt, Human
cgagaucacgccacugca

SEQ ID NO: 3119673 - RNA, 20 nt, Human
cgagaucacgccacugcacu

SEQ ID NO: 3119674 - RNA, 22 nt, Human
ccuuugacgccaucccagcccc

SEQ ID NO: 3119675 - RNA, 21 nt, Human
ccuuugacgccaucccagccc

SEQ ID NO: 3119676 - RNA, 20 nt, Human
ccuuugacgccaucccagcc

SEQ ID NO: 3119677 - RNA, 20 nt, Human
cgaaaacguggcugcuucaa

SEQ ID NO: 3119678 - RNA, 15 nt, Human
cgaaaacguggcugc

SEQ ID NO: 3119679 - RNA, 19 nt, Human
cgaaaacguggcugcuuca

SEQ ID NO: 3119680 - RNA, 18 nt, Human
cgaaaacguggcugcuuc

SEQ ID NO: 3119681 - RNA, 19 nt, Human
cgaaagggacuuggaagcu

SEQ ID NO: 3119682 - RNA, 20 nt, Human
cgaaaggaugaaagugacca

SEQ ID NO: 3119683 - RNA, 22 nt, Human
cgaaagggacuuggaagcuccg

SEQ ID NO: 3119684 - RNA, 12 nt, Human
cgaacuggcugc

SEQ ID NO: 3119685 - RNA, 14 nt, Human
cgaacuggcugcaa

SEQ ID NO: 3119686 - RNA, 21 nt, Human
ccuuggugucgggcaugacac

SEQ ID NO: 3119687 - RNA, 22 nt, Human
ccuuggugucgggcaugacacg

SEQ ID NO: 3119688 - RNA, 22 nt, Human
ccuugguuaggcauugugggaa

SEQ ID NO: 3119689 - RNA, 21 nt, Human
ccuugguuaggcauuguggga

SEQ ID NO: 3119690 - RNA, 18 nt, Human
ccuuugacgccaucccag

SEQ ID NO: 3119691 - RNA, 17 nt, Human
ccuuugacgccauccca

SEQ ID NO: 3119692 - RNA, 16 nt, Human
ccuuugacgccauccc

SEQ ID NO: 3119693 - RNA, 15 nt, Human
ccuucggcgccuuaa

SEQ ID NO: 3119694 - RNA, 19 nt, Human
ccuucuccuucaccuuugu

SEQ ID NO: 3119695 - RNA, 15 nt, Human
ccuucuccuucaccu

SEQ ID NO: 3119696 - RNA, 23 nt, Human
ccuugaccauucuccaccugcca

SEQ ID NO: 3119697 - RNA, 22 nt, Human
ccuugaccauucuccaccugcc

SEQ ID NO: 3119698 - RNA, 13 nt, Human
ccuugacucuuuc

SEQ ID NO: 3119699 - RNA, 19 nt, Human
ccuugaacuuugaccucug

SEQ ID NO: 3119700 - RNA, 17 nt, Human
ccuucacagaugggugc

SEQ ID NO: 3119701 - RNA, 20 nt, Human
ccuucaccuuuguccccacc

SEQ ID NO: 3119702 - RNA, 19 nt, Human
ccuucaccuuuguccccac

SEQ ID NO: 3119703 - RNA, 21 nt, Human
ccuucaccuuuguccccaccg

SEQ ID NO: 3119704 - RNA, 10 nt, Human
ccuucagugc

SEQ ID NO: 3119705 - RNA, 11 nt, Human
ccuucagugcc

SEQ ID NO: 3119706 - RNA, 14 nt, Human
ccuucagugccaaa

SEQ ID NO: 3119707 - RNA, 19 nt, Human
ccuucauuuggcauucccc

SEQ ID NO: 3119708 - RNA, 22 nt, Human
ccuucauuuggcauuccccacu

SEQ ID NO: 3119709 - RNA, 17 nt, Human
ccuuagaagucacacag

SEQ ID NO: 3119710 - RNA, 18 nt, Human
ccuuagaagucacacagu

SEQ ID NO: 3119711 - RNA, 19 nt, Human
ccuuaccugccaggaagcc

SEQ ID NO: 3119712 - RNA, 14 nt, Human
ccuuaccugccagg

SEQ ID NO: 3119713 - RNA, 15 nt, Human
ccuuacccucauguu

SEQ ID NO: 3119714 - RNA, 20 nt, Human
ccuuaccagcagagcaccuu

SEQ ID NO: 3119715 - RNA, 17 nt, Human
ccuuaccagcagagcac

SEQ ID NO: 3119716 - RNA, 13 nt, Human
ccuuaccagcaga

SEQ ID NO: 3119717 - RNA, 20 nt, Human
ccuuacacaaugguuuucuu

SEQ ID NO: 3119718 - RNA, 14 nt, Human
ccuuacacaauggu

SEQ ID NO: 3119719 - RNA, 17 nt, Human
ccugugucuugcaaugg

SEQ ID NO: 3119720 - RNA, 19 nt, Human
ccugugucuugcaauggca

SEQ ID NO: 3119721 - RNA, 21 nt, Human
ccugugucuugcaauggcagc

SEQ ID NO: 3119722 - RNA, 22 nt, Human
ccugugucuugcaauggcagcc

SEQ ID NO: 3119723 - RNA, 20 nt, Human
ccugugugugcgccuacagg

SEQ ID NO: 3119724 - RNA, 21 nt, Human
ccugugugugcgccuacagga

SEQ ID NO: 3119725 - RNA, 16 nt, Human
ccuguuucugcagcca

SEQ ID NO: 3119726 - RNA, 18 nt, Human
ccuguuuguuucugaaag

SEQ ID NO: 3119727 - RNA, 14 nt, Human
ccuguuuguuucug

SEQ ID NO: 3119728 - RNA, 23 nt, Human
ccuguugggccaggagccuccug

SEQ ID NO: 3119729 - RNA, 12 nt, Human
ccgcuuucuacc

SEQ ID NO: 3119730 - RNA, 19 nt, Human
ccgcuuucuacccagcgag

SEQ ID NO: 3119731 - RNA, 15 nt, Human
ccggcuggccuggcc

SEQ ID NO: 3119732 - RNA, 18 nt, Human
ccggcuggccuggccccu

SEQ ID NO: 3119733 - RNA, 17 nt, Human
ccggcuggccuggcccc

SEQ ID NO: 3119734 - RNA, 20 nt, Human
ccgggaagggggcugggaca

SEQ ID NO: 3119735 - RNA, 22 nt, Human
ccgggcucugccucccaucacc

SEQ ID NO: 3119736 - RNA, 20 nt, Human
ccgggcgcgguggcucacgc

SEQ ID NO: 3119737 - RNA, 21 nt, Human
ccgcuaagagggagggagggc

SEQ ID NO: 3119738 - RNA, 23 nt, Human
ccgcuaagagggagggagggcuc

SEQ ID NO: 3119739 - RNA, 14 nt, Human
ccgcacugggcuug

SEQ ID NO: 3119740 - RNA, 20 nt, Human
ccgaguagcugggacuacag

SEQ ID NO: 3119741 - RNA, 16 nt, Human
ccgaguagcugggacu

SEQ ID NO: 3119742 - RNA, 17 nt, Human
ccgaguagcugggacua

SEQ ID NO: 3119743 - RNA, 20 nt, Human
cccugguggcagcucaccuc

SEQ ID NO: 3119744 - RNA, 14 nt, Human
ccgaggccuucucu

SEQ ID NO: 3119745 - RNA, 22 nt, Human
ccuauauuguuuucaguguaca

SEQ ID NO: 3119746 - RNA, 18 nt, Human
ccuauauuguuuucagug

SEQ ID NO: 3119747 - RNA, 23 nt, Human
ccuaguuccaccaucaagccacc

SEQ ID NO: 3119748 - RNA, 21 nt, Human
ccuaguuccaccaucaagcca

SEQ ID NO: 3119749 - RNA, 13 nt, Human
ccuaguuccacca

SEQ ID NO: 3119750 - RNA, 14 nt, Human
ccuaaaguguauuu

SEQ ID NO: 3119751 - RNA, 17 nt, Human
ccucccgaauagcuggg

SEQ ID NO: 3119752 - RNA, 13 nt, Human
ccuccugccucga

SEQ ID NO: 3119753 - RNA, 23 nt, Human
ccuccugccucgaacuggcugca

SEQ ID NO: 3119754 - RNA, 14 nt, Human
ccuccugggcuaag

SEQ ID NO: 3119755 - RNA, 19 nt, Human
ccucccgaguagcugggac

SEQ ID NO: 3119756 - RNA, 20 nt, Human
ccucccgaguagcugggacu

SEQ ID NO: 3119757 - RNA, 21 nt, Human
ccucccgaguagcugggacua

SEQ ID NO: 3119758 - RNA, 14 nt, Human
ccuccucagaucuu

SEQ ID NO: 3119759 - RNA, 10 nt, Human
ccucccuccc

SEQ ID NO: 3119760 - RNA, 14 nt, Human
ccucgguguggaga

SEQ ID NO: 3119761 - RNA, 16 nt, Human
ccucggugccuuccuc

SEQ ID NO: 3119762 - RNA, 16 nt, Human
ccucuaggaggucucu

SEQ ID NO: 3119763 - RNA, 16 nt, Human
ccucccaaagugcugg

SEQ ID NO: 3119764 - RNA, 23 nt, Human
ccuccaugugggcuaguugggcu

SEQ ID NO: 3119765 - RNA, 15 nt, Human
ccucccaaagugcug

SEQ ID NO: 3119766 - RNA, 22 nt, Human
ccuccaggugcacaagcuccaa

SEQ ID NO: 3119767 - RNA, 21 nt, Human
ccuccaggugcacaagcucca

SEQ ID NO: 3119768 - RNA, 19 nt, Human
ccuccaggugcacaagcuc

SEQ ID NO: 3119769 - RNA, 19 nt, Human
ccucagucuggcccuuccu

SEQ ID NO: 3119770 - RNA, 11 nt, Human
ccucagugcca

SEQ ID NO: 3119771 - RNA, 12 nt, Human
ccucauacccac

SEQ ID NO: 3119772 - RNA, 20 nt, Human
ccucagucuggcccuuccuu

SEQ ID NO: 3119773 - RNA, 20 nt, Human
ccucauaguaugguggcugg

SEQ ID NO: 3119774 - RNA, 13 nt, Human
ccucauacccacc

SEQ ID NO: 3119775 - RNA, 21 nt, Human
ccucauaguaugguggcuggg

SEQ ID NO: 3119776 - RNA, 22 nt, Human
ccucauaguaugguggcugggu

SEQ ID NO: 3119777 - RNA, 14 nt, Human
ccucaucaccaacg

SEQ ID NO: 3119778 - RNA, 13 nt, Human
ccucaucaccaac

SEQ ID NO: 3119779 - RNA, 20 nt, Human
ccucauccucauacccaccc

SEQ ID NO: 3119780 - RNA, 13 nt, Human
ccucauccucaua

SEQ ID NO: 3119781 - RNA, 12 nt, Human
cccgggcucugc

SEQ ID NO: 3119782 - RNA, 15 nt, Human
cccgggcucugccuc

SEQ ID NO: 3119783 - RNA, 14 nt, Human
cccgggcucugccu

SEQ ID NO: 3119784 - RNA, 22 nt, Human
cccgaguagcugggacuacagg

SEQ ID NO: 3119785 - RNA, 20 nt, Human
cccgcugucagccauuccug

SEQ ID NO: 3119786 - RNA, 19 nt, Human
cccgcugucagccauuccu

SEQ ID NO: 3119787 - RNA, 14 nt, Human
cccagagggccugc

SEQ ID NO: 3119788 - RNA, 21 nt, Human
cccgaggccuucucugaagga

SEQ ID NO: 3119789 - RNA, 15 nt, Human
cccagagggccugca

SEQ ID NO: 3119790 - RNA, 13 nt, Human
cccgaguagcugg

SEQ ID NO: 3119791 - RNA, 14 nt, Human
cccgaguagcuggg

SEQ ID NO: 3119792 - RNA, 15 nt, Human
cccgaguagcuggga

SEQ ID NO: 3119793 - RNA, 16 nt, Human
cccgaguagcugggac

SEQ ID NO: 3119794 - RNA, 17 nt, Human
cccgaguagcugggacu

SEQ ID NO: 3119795 - RNA, 18 nt, Human
cccgaguagcugggacua

SEQ ID NO: 3119796 - RNA, 21 nt, Human
cccgaguagcugggacuacag

SEQ ID NO: 3119797 - RNA, 16 nt, Human
cccgggcucugccucc

SEQ ID NO: 3119798 - RNA, 20 nt, Human
cccuacaguugaaaaacagc

SEQ ID NO: 3119799 - RNA, 12 nt, Human
cccugcacuugc

SEQ ID NO: 3119800 - RNA, 19 nt, Human
cccugcacuugcagacucu

SEQ ID NO: 3119801 - RNA, 15 nt, Human
cccugaaagcccuga

SEQ ID NO: 3119802 - RNA, 13 nt, Human
cccugaggcccag

SEQ ID NO: 3119803 - RNA, 16 nt, Human
cccucuggggcuguuc

SEQ ID NO: 3119804 - RNA, 23 nt, Human
cccugaggcccagagggccugca

SEQ ID NO: 3119805 - RNA, 20 nt, Human
cccugaggcccagagggccu

SEQ ID NO: 3119806 - RNA, 19 nt, Human
cccugaggcccagagggcc

SEQ ID NO: 3119807 - RNA, 18 nt, Human
cccugaggcccagagggc

SEQ ID NO: 3119808 - RNA, 17 nt, Human
cccugaggcccagaggg

SEQ ID NO: 3119809 - RNA, 16 nt, Human
cccugaggcccagagg

SEQ ID NO: 3119810 - RNA, 15 nt, Human
cccugaggcccagag

SEQ ID NO: 3119811 - RNA, 14 nt, Human
cccugaggcccaga

SEQ ID NO: 3119812 - RNA, 12 nt, Human
cccucuggggcu

SEQ ID NO: 3119813 - RNA, 21 nt, Human
cccugcuggguguggcgcagc

SEQ ID NO: 3119814 - RNA, 16 nt, Human
cccugcuggguguggc

SEQ ID NO: 3119815 - RNA, 18 nt, Human
cccugcccaccuggccuc

SEQ ID NO: 3119816 - RNA, 17 nt, Human
cccugcccaccuggccu

SEQ ID NO: 3119817 - RNA, 14 nt, Human
cccugcccaccugg

SEQ ID NO: 3119818 - RNA, 13 nt, Human
cccugcccaccug

SEQ ID NO: 3119819 - RNA, 15 nt, Human
cccugguggcagcuc

SEQ ID NO: 3119820 - RNA, 17 nt, Human
cccugguggcagcucac

SEQ ID NO: 3119821 - RNA, 16 nt, Human
cccugguggcagcuca

SEQ ID NO: 3119822 - RNA, 21 nt, Human
cccacaaaggagagcuagcag

SEQ ID NO: 3119823 - RNA, 20 nt, Human
cccaaugcacuuuguucugg

SEQ ID NO: 3119824 - RNA, 16 nt, Human
cccaaugcacuuuguu

SEQ ID NO: 3119825 - RNA, 17 nt, Human
cccaccuggccucugca

SEQ ID NO: 3119826 - RNA, 21 nt, Human
cccaccuggccucugcacucc

SEQ ID NO: 3119827 - RNA, 19 nt, Human
cccaccuggccucugcacu

SEQ ID NO: 3119828 - RNA, 16 nt, Human
cccaccuggccucugc

SEQ ID NO: 3119829 - RNA, 20 nt, Human
cccaccuuggcugcagggag

SEQ ID NO: 3119830 - RNA, 21 nt, Human
cccacgacugcccggcagggu

SEQ ID NO: 3119831 - RNA, 20 nt, Human
cccacgacugcccggcaggg

SEQ ID NO: 3119832 - RNA, 12 nt, Human
cccacuucugcc

SEQ ID NO: 3119833 - RNA, 23 nt, Human
cccacuugagaauuacccuuuug

SEQ ID NO: 3119834 - RNA, 14 nt, Human
cccacgcuggagug

SEQ ID NO: 3119835 - RNA, 19 nt, Human
cccacgcuggagugcagug

SEQ ID NO: 3119836 - RNA, 20 nt, Human
cccacgcuggagugcaguga

SEQ ID NO: 3119837 - RNA, 17 nt, Human
cccaccucagccucccg

SEQ ID NO: 3119838 - RNA, 22 nt, Human
cccaccucucucacuccuugaa

SEQ ID NO: 3119839 - RNA, 19 nt, Human
cccaccucucucacuccuu

SEQ ID NO: 3119840 - RNA, 19 nt, Human
cccaccgcagacaggacca

SEQ ID NO: 3119841 - RNA, 20 nt, Human
cccaccgcagacaggaccag

SEQ ID NO: 3119842 - RNA, 20 nt, Human
cuguauuuuguuuuugucuu

SEQ ID NO: 3119843 - RNA, 13 nt, Human
cugucaauuacag

SEQ ID NO: 3119844 - RNA, 16 nt, Human
cugucaauuacaggaa

SEQ ID NO: 3119845 - RNA, 15 nt, Human
cugucaauuacagga

SEQ ID NO: 3119846 - RNA, 21 nt, Human
cuguaucccaugagccucagc

SEQ ID NO: 3119847 - RNA, 20 nt, Human
cuguaucccaugagccucag

SEQ ID NO: 3119848 - RNA, 19 nt, Human
cuguaucccaugagccuca

SEQ ID NO: 3119849 - RNA, 19 nt, Human
cuguacgucugacaggcaa

SEQ ID NO: 3119850 - RNA, 20 nt, Human
cuguacgucugacaggcaau

SEQ ID NO: 3119851 - RNA, 17 nt, Human
cuguacaugaaaacaca

SEQ ID NO: 3119852 - RNA, 20 nt, Human
cuguacaugaaaacacauuu

SEQ ID NO: 3119853 - RNA, 21 nt, Human
cuguacaugaaaacacauuuu

SEQ ID NO: 3119854 - RNA, 14 nt, Human
cuguacgucugaca

SEQ ID NO: 3119855 - RNA, 15 nt, Human
cuguacgucugacag

SEQ ID NO: 3119856 - RNA, 16 nt, Human
cuguacgucugacagg

SEQ ID NO: 3119857 - RNA, 18 nt, Human
cuguacgucugacaggca

SEQ ID NO: 3119858 - RNA, 14 nt, Human
cuguaauuugugau

SEQ ID NO: 3119859 - RNA, 15 nt, Human
cuguaauuugugaua

SEQ ID NO: 3119860 - RNA, 22 nt, Human
cuguacagagcccacgccccca

SEQ ID NO: 3119861 - RNA, 18 nt, Human
cuguacagagcccacgcc

SEQ ID NO: 3119862 - RNA, 15 nt, Human
cuguacagagcccac

SEQ ID NO: 3119863 - RNA, 14 nt, Human
cuguacagagccca

SEQ ID NO: 3119864 - RNA, 22 nt, Human
cugguuagagguucccuuugac

SEQ ID NO: 3119865 - RNA, 21 nt, Human
cugguuagagguucccuuuga

SEQ ID NO: 3119866 - RNA, 16 nt, Human
cugguggcagcucacc

SEQ ID NO: 3119867 - RNA, 18 nt, Human
cugguggcagcucaccuc

SEQ ID NO: 3119868 - RNA, 17 nt, Human
cugguggcagcucaccu

SEQ ID NO: 3119869 - RNA, 15 nt, Human
cugguggcagcugcg

SEQ ID NO: 3119870 - RNA, 20 nt, Human
cugguggcagcucaccucuc

SEQ ID NO: 3119871 - RNA, 14 nt, Human
cugguggcaguggg

SEQ ID NO: 3119872 - RNA, 18 nt, Human
cugguggcagugggagcu

SEQ ID NO: 3119873 - RNA, 21 nt, Human
cugggauuacaagcgugagcc

SEQ ID NO: 3119874 - RNA, 15 nt, Human
cugggcuucaguggc

SEQ ID NO: 3119875 - RNA, 22 nt, Human
cugggcuuggggaccagagcug

SEQ ID NO: 3119876 - RNA, 18 nt, Human
cugggcuugucuguagau

SEQ ID NO: 3119877 - RNA, 14 nt, Human
cugggggcugggca

SEQ ID NO: 3119878 - RNA, 18 nt, Human
cugggggccucagugcca

SEQ ID NO: 3119879 - RNA, 21 nt, Human
cuguggguuucuaaagcugcc

SEQ ID NO: 3119880 - RNA, 22 nt, Human
cuguggguuucuaaagcugcca

SEQ ID NO: 3119881 - RNA, 23 nt, Human
cugugucuugcaauggcagccuu

SEQ ID NO: 3119882 - RNA, 20 nt, Human
cugugucuuuuuucacuaca

SEQ ID NO: 3119883 - RNA, 14 nt, Human
cugugccaugugcc

SEQ ID NO: 3119884 - RNA, 19 nt, Human
cugugcccuaaaguguauu

SEQ ID NO: 3119885 - RNA, 15 nt, Human
cugugccaugugcca

SEQ ID NO: 3119886 - RNA, 22 nt, Human
cugugccauuuuguauuuuacu

SEQ ID NO: 3119887 - RNA, 23 nt, Human
cugugauggggcccugccuccuu

SEQ ID NO: 3119888 - RNA, 21 nt, Human
cugugauggggcccugccucc

SEQ ID NO: 3119889 - RNA, 16 nt, Human
cugugauggggcccug

SEQ ID NO: 3119890 - RNA, 15 nt, Human
cugugauggggcccu

SEQ ID NO: 3119891 - RNA, 22 nt, Human
cugugaaaggaaagagggaggu

SEQ ID NO: 3119892 - RNA, 16 nt, Human
cugugaaaggaaagag

SEQ ID NO: 3119893 - RNA, 21 nt, Human
cugucauuugagcagggcuca

SEQ ID NO: 3119894 - RNA, 22 nt, Human
cugucauuugagcagggcucag

SEQ ID NO: 3119895 - RNA, 20 nt, Human
cugucauuugagcagggcuc

SEQ ID NO: 3119896 - RNA, 18 nt, Human
cugucaauuacaggaagu

SEQ ID NO: 3119897 - RNA, 18 nt, Human
cugucuucaguaagccgu

SEQ ID NO: 3119898 - RNA, 15 nt, Human
cugugaaaggaaaga

SEQ ID NO: 3119899 - RNA, 19 nt, Human
cuucgggaggucgaggcag

SEQ ID NO: 3119900 - RNA, 16 nt, Human
cuucucacugccaugc

SEQ ID NO: 3119901 - RNA, 21 nt, Human
cuucucacugccaugccagcu

SEQ ID NO: 3119902 - RNA, 16 nt, Human
cuucgcuccugugucu

SEQ ID NO: 3119903 - RNA, 17 nt, Human
cuucgcuccugugucuu

SEQ ID NO: 3119904 - RNA, 17 nt, Human
cuucccuacaguugaaa

SEQ ID NO: 3119905 - RNA, 16 nt, Human
cuucaaggauccugag

SEQ ID NO: 3119906 - RNA, 20 nt, Human
cuucaaggauccugagccag

SEQ ID NO: 3119907 - RNA, 19 nt, Human
cuucaaggauccugagcca

SEQ ID NO: 3119908 - RNA, 18 nt, Human
cuucaaggauccugagcc

SEQ ID NO: 3119909 - RNA, 17 nt, Human
cuucaaggauccugagc

SEQ ID NO: 3119910 - RNA, 15 nt, Human
cuucaaauauuuccc

SEQ ID NO: 3119911 - RNA, 22 nt, Human
cuuagucacugagacagcccgg

SEQ ID NO: 3119912 - RNA, 20 nt, Human
cuuagucacugagacagccc

SEQ ID NO: 3119913 - RNA, 21 nt, Human
cuuagucacugagacagcccg

SEQ ID NO: 3119914 - RNA, 24 nt, Human
cuucagagacuccugcaggcagcc

SEQ ID NO: 3119915 - RNA, 14 nt, Human
cuucacauauugau

SEQ ID NO: 3119916 - RNA, 23 nt, Human
cuucacauauugauuuccguuaa

SEQ ID NO: 3119917 - RNA, 23 nt, Human
cuucaaggauccugagccagauu

SEQ ID NO: 3119918 - RNA, 22 nt, Human
cuucaaggauccugagccagau

SEQ ID NO: 3119919 - RNA, 21 nt, Human
cuucaaggauccugagccaga

SEQ ID NO: 3119920 - RNA, 19 nt, Human
cuucagcugacuuuucugu

SEQ ID NO: 3119921 - RNA, 15 nt, Human
cuucagcugacuuuu

SEQ ID NO: 3119922 - RNA, 14 nt, Human
cuucaguaagccgu

SEQ ID NO: 3119923 - RNA, 14 nt, Human
cuucagccucccga

SEQ ID NO: 3119924 - RNA, 16 nt, Human
cuucagccucccgagu

SEQ ID NO: 3119925 - RNA, 20 nt, Human
cuucagccucccgaguagcu

SEQ ID NO: 3119926 - RNA, 14 nt, Human
cuucagugccaaaa

SEQ ID NO: 3119927 - RNA, 13 nt, Human
cuuccacaagagc

SEQ ID NO: 3119928 - RNA, 15 nt, Human
cuuccacaagagccc

SEQ ID NO: 3119929 - RNA, 14 nt, Human
cuuccacaagagcc

SEQ ID NO: 3119930 - RNA, 21 nt, Human
cuguuuuauuuuaauucaguu

SEQ ID NO: 3119931 - RNA, 17 nt, Human
cuuaaaaaguggaaaaa

SEQ ID NO: 3119932 - RNA, 16 nt, Human
cuuaaaaaguggaaaa

SEQ ID NO: 3119933 - RNA, 17 nt, Human
cuguugcccaggcuggc

SEQ ID NO: 3119934 - RNA, 14 nt, Human
cuguuuagauaaua

SEQ ID NO: 3119935 - RNA, 17 nt, Human
cuguuuagauaauacac

SEQ ID NO: 3119936 - RNA, 15 nt, Human
cuguuucaaacuuua

SEQ ID NO: 3119937 - RNA, 17 nt, Human
cuguuucaaacuuuacu

SEQ ID NO: 3119938 - RNA, 18 nt, Human
cuguuuagauaauacacc

SEQ ID NO: 3119939 - RNA, 19 nt, Human
cuguuugcuaagugaggau

SEQ ID NO: 3119940 - RNA, 17 nt, Human
cuguuugcuaagugagg

SEQ ID NO: 3119941 - RNA, 16 nt, Human
cuguuaauaguucagg

SEQ ID NO: 3119942 - RNA, 15 nt, Human
cuguucuuuccaaag

SEQ ID NO: 3119943 - RNA, 16 nt, Human
cuguucuuuccaaagu

SEQ ID NO: 3119944 - RNA, 19 nt, Human
cuguucuuuccaaaguaca

SEQ ID NO: 3119945 - RNA, 21 nt, Human
cuguucuuuccaaaguacacu

SEQ ID NO: 3119946 - RNA, 13 nt, Human
cuguucuuucugg

SEQ ID NO: 3119947 - RNA, 14 nt, Human
cuguucuuucuggc

SEQ ID NO: 3119948 - RNA, 21 nt, Human
cuguucuuucuggcuaugcau

SEQ ID NO: 3119949 - RNA, 12 nt, Human
cuguugcccagg

SEQ ID NO: 3119950 - RNA, 13 nt, Human
cuguugcccaggc

SEQ ID NO: 3119951 - RNA, 14 nt, Human
cuguugcccaggcu

SEQ ID NO: 3119952 - RNA, 15 nt, Human
cuguugcccaggcug

SEQ ID NO: 3119953 - RNA, 16 nt, Human
cuguugcccaggcugg

SEQ ID NO: 3119954 - RNA, 23 nt, Human
cuguucuuucuggcuaugcauuu

SEQ ID NO: 3119955 - RNA, 21 nt, Human
cuuagguuggcaaaaaggcag

SEQ ID NO: 3119956 - RNA, 23 nt, Human
cuuagguuggcaaaaaggcagga

SEQ ID NO: 3119957 - RNA, 20 nt, Human
cuuaccugccaggaagccag

SEQ ID NO: 3119958 - RNA, 13 nt, Human
cuuaccugccagg

SEQ ID NO: 3119959 - RNA, 20 nt, Human
cuuagaaaaaccaccaccau

SEQ ID NO: 3119960 - RNA, 17 nt, Human
cuuagaagucacacagu

SEQ ID NO: 3119961 - RNA, 20 nt, Human
cuuagaagucacacaguauu

SEQ ID NO: 3119962 - RNA, 20 nt, Human
cuuaauucuuagcucauucu

SEQ ID NO: 3119963 - RNA, 16 nt, Human
cuuaaucuaaauggaa

SEQ ID NO: 3119964 - RNA, 16 nt, Human
gaaggccccgcccagg

SEQ ID NO: 3119965 - RNA, 15 nt, Human
gaaggccccgcccag

SEQ ID NO: 3119966 - RNA, 14 nt, Human
gaaggccccgccca

SEQ ID NO: 3119967 - RNA, 12 nt, Human
gaaggauacaaa

SEQ ID NO: 3119968 - RNA, 19 nt, Human
gaaggauacaaaagcaugu

SEQ ID NO: 3119969 - RNA, 21 nt, Human
gaaggauacaaaagcauguga

SEQ ID NO: 3119970 - RNA, 17 nt, Human
gaaggaaacccagcucu

SEQ ID NO: 3119971 - RNA, 14 nt, Human
gaaggaaacccagc

SEQ ID NO: 3119972 - RNA, 18 nt, Human
gaaggaaacccagcucug

SEQ ID NO: 3119973 - RNA, 19 nt, Human
gaagacucauucuucugua

SEQ ID NO: 3119974 - RNA, 21 nt, Human
gaagacucauucuucuguacg

SEQ ID NO: 3119975 - RNA, 16 nt, Human
gaagccagcaggcucu

SEQ ID NO: 3119976 - RNA, 15 nt, Human
gaagccagcaggcuc

SEQ ID NO: 3119977 - RNA, 23 nt, Human
gaagccagcaggcucucaggcca

SEQ ID NO: 3119978 - RNA, 21 nt, Human
gaagccgcuggggccaguugg

SEQ ID NO: 3119979 - RNA, 22 nt, Human
gaagcccaggaaaggcuccagg

SEQ ID NO: 3119980 - RNA, 21 nt, Human
gaagcccaggaaaggcuccag

SEQ ID NO: 3119981 - RNA, 20 nt, Human
gaagcccaggaaaggcucca

SEQ ID NO: 3119982 - RNA, 12 nt, Human
gaaguuucugcc

SEQ ID NO: 3119983 - RNA, 14 nt, Human
gaauaacauguaau

SEQ ID NO: 3119984 - RNA, 15 nt, Human
gaauagcugggacua

SEQ ID NO: 3119985 - RNA, 14 nt, Human
gaauagcugggacu

SEQ ID NO: 3119986 - RNA, 16 nt, Human
gaaucucaaauaacua

SEQ ID NO: 3119987 - RNA, 14 nt, Human
gaaugaaagggccc

SEQ ID NO: 3119988 - RNA, 19 nt, Human
gaaugaaagggcccagaga

SEQ ID NO: 3119989 - RNA, 20 nt, Human
gaaauaucugaaaauguaug

SEQ ID NO: 3119990 - RNA, 13 nt, Human
gaaauauaauuga

SEQ ID NO: 3119991 - RNA, 21 nt, Human
gaaauaucugaaaauguaugu

SEQ ID NO: 3119992 - RNA, 14 nt, Human
gaaaugggcagagc

SEQ ID NO: 3119993 - RNA, 20 nt, Human
gaaaugggcagagcagagac

SEQ ID NO: 3119994 - RNA, 17 nt, Human
gaaauuuguuauaauga

SEQ ID NO: 3119995 - RNA, 16 nt, Human
gaaccaccacacccag

SEQ ID NO: 3119996 - RNA, 17 nt, Human
gaaccaccacacccagc

SEQ ID NO: 3119997 - RNA, 15 nt, Human
gaacagacuggaagc

SEQ ID NO: 3119998 - RNA, 16 nt, Human
gaacagacuggaagca

SEQ ID NO: 3119999 - RNA, 20 nt, Human
gaaccacaucuugcucugcu

SEQ ID NO: 3120000 - RNA, 21 nt, Human
gaaccacaucuugcucugcug

SEQ ID NO: 3120001 - RNA, 22 nt, Human
gaacuggguacuuguggacaca

SEQ ID NO: 3120002 - RNA, 13 nt, Human
gaacuuggcgcug

SEQ ID NO: 3120003 - RNA, 16 nt, Human
gaacuuggcgcugccc

SEQ ID NO: 3120004 - RNA, 15 nt, Human
gaacuuggcgcugcc

SEQ ID NO: 3120005 - RNA, 12 nt, Human
gaacuugguucc

SEQ ID NO: 3120006 - RNA, 23 nt, Human
gaacuugguucccauuugcuccu

SEQ ID NO: 3120007 - RNA, 22 nt, Human
cuuuccaaaugcccagcuuaaa

SEQ ID NO: 3120008 - RNA, 19 nt, Human
cuuuccaaaugcccagcuu

SEQ ID NO: 3120009 - RNA, 18 nt, Human
cuuuccaaaugcccagcu

SEQ ID NO: 3120010 - RNA, 16 nt, Human
cuuuccaaaugcccag

SEQ ID NO: 3120011 - RNA, 20 nt, Human
cuuguguguuuauugucaaa

SEQ ID NO: 3120012 - RNA, 21 nt, Human
cuuguguguuuauugucaaag

SEQ ID NO: 3120013 - RNA, 16 nt, Human
cuugcucugcugacag

SEQ ID NO: 3120014 - RNA, 13 nt, Human
cuuggaagcuccg

SEQ ID NO: 3120015 - RNA, 13 nt, Human
cuuggaggaagga

SEQ ID NO: 3120016 - RNA, 16 nt, Human
cuuggaaaugggagac

SEQ ID NO: 3120017 - RNA, 17 nt, Human
cuucuccacccugcucu

SEQ ID NO: 3120018 - RNA, 18 nt, Human
cuucuccacccugcucuc

SEQ ID NO: 3120019 - RNA, 16 nt, Human
cuucuccacccugcuc

SEQ ID NO: 3120020 - RNA, 21 nt, Human
cuucuccacccugcucuccga

SEQ ID NO: 3120021 - RNA, 13 nt, Human
cuugcucugcuga

SEQ ID NO: 3120022 - RNA, 14 nt, Human
cuugcucugcugac

SEQ ID NO: 3120023 - RNA, 22 nt, Human
cuuggggaccagagcugccacc

SEQ ID NO: 3120024 - RNA, 15 nt, Human
cuuggggggcugagg

SEQ ID NO: 3120025 - RNA, 16 nt, Human
cuuggggggcugaggu

SEQ ID NO: 3120026 - RNA, 13 nt, Human
cuugggcuucauc

SEQ ID NO: 3120027 - RNA, 14 nt, Human
cuugggccacugug

SEQ ID NO: 3120028 - RNA, 21 nt, Human
cuuggggaccagagcugccac

SEQ ID NO: 3120029 - RNA, 20 nt, Human
cuuggggaccagagcugcca

SEQ ID NO: 3120030 - RNA, 22 nt, Human
cuugggcuucauccuccucaga

SEQ ID NO: 3120031 - RNA, 14 nt, Human
cuuggcugcaggga

SEQ ID NO: 3120032 - RNA, 17 nt, Human
cuuggcugcagggaguc

SEQ ID NO: 3120033 - RNA, 22 nt, Human
cuuggaggaaggaaacccagcu

SEQ ID NO: 3120034 - RNA, 16 nt, Human
cuuggcugcagggagu

SEQ ID NO: 3120035 - RNA, 14 nt, Human
gaaaaucagccugc

SEQ ID NO: 3120036 - RNA, 18 nt, Human
gaaaaucagccugcucca

SEQ ID NO: 3120037 - RNA, 16 nt, Human
gaaaaucagccugcuc

SEQ ID NO: 3120038 - RNA, 13 nt, Human
gaaaagcugcuga

SEQ ID NO: 3120039 - RNA, 17 nt, Human
gaaaagcugcugacagu

SEQ ID NO: 3120040 - RNA, 18 nt, Human
gaaacagcuaaugggaca

SEQ ID NO: 3120041 - RNA, 14 nt, Human
gaaaacguggcugc

SEQ ID NO: 3120042 - RNA, 18 nt, Human
gaaaacguggcugcuuca

SEQ ID NO: 3120043 - RNA, 16 nt, Human
gaaaacguggcugcuu

SEQ ID NO: 3120044 - RNA, 15 nt, Human
gaaaacguggcugcu

SEQ ID NO: 3120045 - RNA, 12 nt, Human
gaaaacaugcua

SEQ ID NO: 3120046 - RNA, 14 nt, Human
gaaaacaugcuaca

SEQ ID NO: 3120047 - RNA, 15 nt, Human
gaaaacaugcuacac

SEQ ID NO: 3120048 - RNA, 13 nt, Human
gaaaacacauuuu

SEQ ID NO: 3120049 - RNA, 23 nt, Human
gaaaaaggaugcacagaguuguu

SEQ ID NO: 3120050 - RNA, 17 nt, Human
gaaaaaggaugcacaga

SEQ ID NO: 3120051 - RNA, 15 nt, Human
cuuuuuuggcugcug

SEQ ID NO: 3120052 - RNA, 14 nt, Human
cuuuuuuggcugcu

SEQ ID NO: 3120053 - RNA, 21 nt, Human
cuuuugagugccuuacacaau

SEQ ID NO: 3120054 - RNA, 16 nt, Human
cuuuugagcauuuaga

SEQ ID NO: 3120055 - RNA, 15 nt, Human
cuuuuuucacuacau

SEQ ID NO: 3120056 - RNA, 14 nt, Human
cuuugugauuuuug

SEQ ID NO: 3120057 - RNA, 22 nt, Human
cuuuguccccaccgcagacagg

SEQ ID NO: 3120058 - RNA, 18 nt, Human
cuuuguccccaccgcaga

SEQ ID NO: 3120059 - RNA, 13 nt, Human
cuuugggaggcca

SEQ ID NO: 3120060 - RNA, 14 nt, Human
cuuuguucuggcuc

SEQ ID NO: 3120061 - RNA, 17 nt, Human
cuuugugauuuuuguaa

SEQ ID NO: 3120062 - RNA, 18 nt, Human
cuuugugauuuuuguaau

SEQ ID NO: 3120063 - RNA, 16 nt, Human
cuuucccaucuuccaa

SEQ ID NO: 3120064 - RNA, 16 nt, Human
cuuuggacccugaggc

SEQ ID NO: 3120065 - RNA, 15 nt, Human
cuuuggacccugagg

SEQ ID NO: 3120066 - RNA, 18 nt, Human
cuuuggacccugaggccc

SEQ ID NO: 3120067 - RNA, 17 nt, Human
cuuuggacccugaggcc

SEQ ID NO: 3120068 - RNA, 19 nt, Human
cuuuggacccugaggccca

SEQ ID NO: 3120069 - RNA, 23 nt, Human
cuuuucuugcaugaggcuagugu

SEQ ID NO: 3120070 - RNA, 18 nt, Human
cuuuucuugcaugaggcu

SEQ ID NO: 3120071 - RNA, 18 nt, Human
cuuuucuguccgagcuuu

SEQ ID NO: 3120072 - RNA, 22 nt, Human
cuuuucauaaccuagccuuaga

SEQ ID NO: 3120073 - RNA, 20 nt, Human
cuuuucauaaccuagccuua

SEQ ID NO: 3120074 - RNA, 20 nt, Human
cuuuguuuguugucagcuga

SEQ ID NO: 3120075 - RNA, 18 nt, Human
cuuuguuuguugucagcu

SEQ ID NO: 3120076 - RNA, 18 nt, Human
cuccugccucgaacuggc

SEQ ID NO: 3120077 - RNA, 20 nt, Human
cuccugccucgaacuggcug

SEQ ID NO: 3120078 - RNA, 21 nt, Human
cuccugccucgaacuggcugc

SEQ ID NO: 3120079 - RNA, 17 nt, Human
cuccugccucagccucc

SEQ ID NO: 3120080 - RNA, 16 nt, Human
cuccugccucagccuc

SEQ ID NO: 3120081 - RNA, 12 nt, Human
cuccugccucag

SEQ ID NO: 3120082 - RNA, 11 nt, Human
cuccugccuca

SEQ ID NO: 3120083 - RNA, 13 nt, Human
cuccucuccccag

SEQ ID NO: 3120084 - RNA, 15 nt, Human
cuccucuccccagca

SEQ ID NO: 3120085 - RNA, 14 nt, Human
cuccuggaaauauu

SEQ ID NO: 3120086 - RNA, 21 nt, Human
cuccugugugugcgccuacag

SEQ ID NO: 3120087 - RNA, 23 nt, Human
cuccugugugugcgccuacagga

SEQ ID NO: 3120088 - RNA, 24 nt, Human
cuccugugugugcgccuacaggag

SEQ ID NO: 3120089 - RNA, 20 nt, Human
cuccugugugugcgccuaca

SEQ ID NO: 3120090 - RNA, 22 nt, Human
cucgagcaugccuggauggggc

SEQ ID NO: 3120091 - RNA, 23 nt, Human
cuccuuggugucgggcaugacac

SEQ ID NO: 3120092 - RNA, 19 nt, Human
cucgagcaugccuggaugg

SEQ ID NO: 3120093 - RNA, 16 nt, Human
cucgagcaugccugga

SEQ ID NO: 3120094 - RNA, 15 nt, Human
cucgagcaugccugg

SEQ ID NO: 3120095 - RNA, 13 nt, Human
cucgagcaugccu

SEQ ID NO: 3120096 - RNA, 18 nt, Human
cucccgaguagcugggac

SEQ ID NO: 3120097 - RNA, 19 nt, Human
cucccgaguagcugggacu

SEQ ID NO: 3120098 - RNA, 20 nt, Human
cucccgaguagcugggacua

SEQ ID NO: 3120099 - RNA, 21 nt, Human
cuccccagcaagugagagcug

SEQ ID NO: 3120100 - RNA, 22 nt, Human
cuccccagcaagugagagcugg

SEQ ID NO: 3120101 - RNA, 23 nt, Human
cuccccagcaagugagagcuggg

SEQ ID NO: 3120102 - RNA, 18 nt, Human
cuccucagaucuucugug

SEQ ID NO: 3120103 - RNA, 20 nt, Human
cucccuuggauuguccccga

SEQ ID NO: 3120104 - RNA, 15 nt, Human
cuccgaccagacacc

SEQ ID NO: 3120105 - RNA, 15 nt, Human
cuccuccagagucag

SEQ ID NO: 3120106 - RNA, 13 nt, Human
cuccuccagaguc

SEQ ID NO: 3120107 - RNA, 15 nt, Human
cuccuccagccgcca

SEQ ID NO: 3120108 - RNA, 21 nt, Human
cucauaguaugguggcugggu

SEQ ID NO: 3120109 - RNA, 15 nt, Human
cucauacccaccccc

SEQ ID NO: 3120110 - RNA, 14 nt, Human
cucauacucaccuc

SEQ ID NO: 3120111 - RNA, 22 nt, Human
cucauacucaccucaccccacu

SEQ ID NO: 3120112 - RNA, 20 nt, Human
cucaggugauccacccaccu

SEQ ID NO: 3120113 - RNA, 14 nt, Human
cucagggucccugg

SEQ ID NO: 3120114 - RNA, 18 nt, Human
cucaggugauccacccac

SEQ ID NO: 3120115 - RNA, 19 nt, Human
cucaggugauccacccacc

SEQ ID NO: 3120116 - RNA, 21 nt, Human
cucauacccacccccacccaa

SEQ ID NO: 3120117 - RNA, 19 nt, Human
cucauacccacccccaccc

SEQ ID NO: 3120118 - RNA, 18 nt, Human
cucauacccacccccacc

SEQ ID NO: 3120119 - RNA, 16 nt, Human
cucauacccaccccca

SEQ ID NO: 3120120 - RNA, 22 nt, Human
cucaucaccaacgucugugcca

SEQ ID NO: 3120121 - RNA, 20 nt, Human
cucauaguaugguggcuggg

SEQ ID NO: 3120122 - RNA, 23 nt, Human
cucauaguaugguggcuggguug

SEQ ID NO: 3120123 - RNA, 21 nt, Human
cucaucaccaacgucugugcc

SEQ ID NO: 3120124 - RNA, 15 nt, Human
cucauccucauaccc

SEQ ID NO: 3120125 - RNA, 15 nt, Human
cucagcauccuggca

SEQ ID NO: 3120126 - RNA, 18 nt, Human
cucagcauccuggcaccc

SEQ ID NO: 3120127 - RNA, 23 nt, Human
cucaggaguuugagaccaaccug

SEQ ID NO: 3120128 - RNA, 18 nt, Human
cucaggaguuugagacca

SEQ ID NO: 3120129 - RNA, 13 nt, Human
cucagggccuggc

SEQ ID NO: 3120130 - RNA, 15 nt, Human
cucagggccuggcuc

SEQ ID NO: 3120131 - RNA, 14 nt, Human
cucagggccuggcu

SEQ ID NO: 3120132 - RNA, 16 nt, Human
cucagggccuggcuca

SEQ ID NO: 3120133 - RNA, 15 nt, Human
cucagggccuggucg

SEQ ID NO: 3120134 - RNA, 14 nt, Human
cucagggccugguc

SEQ ID NO: 3120135 - RNA, 17 nt, Human
cucagggucccuggugg

SEQ ID NO: 3120136 - RNA, 16 nt, Human
cucagggucccuggug

SEQ ID NO: 3120137 - RNA, 15 nt, Human
cucagggucccuggu

SEQ ID NO: 3120138 - RNA, 20 nt, Human
cucaggugagaagcagagga

SEQ ID NO: 3120139 - RNA, 19 nt, Human
cucaggugagaagcagagg

SEQ ID NO: 3120140 - RNA, 14 nt, Human
cucaggugagaagc

SEQ ID NO: 3120141 - RNA, 16 nt, Human
cucaggugagaagcag

SEQ ID NO: 3120142 - RNA, 13 nt, Human
cuccaggagcagc

SEQ ID NO: 3120143 - RNA, 11 nt, Human
cuccaggagca

SEQ ID NO: 3120144 - RNA, 17 nt, Human
cuccaggagcagccaca

SEQ ID NO: 3120145 - RNA, 16 nt, Human
cuccaggagcagccac

SEQ ID NO: 3120146 - RNA, 15 nt, Human
cuccaggagcagcca

SEQ ID NO: 3120147 - RNA, 14 nt, Human
cuccaggagcagcc

SEQ ID NO: 3120148 - RNA, 23 nt, Human
cuccaggagcagccacauuccug

SEQ ID NO: 3120149 - RNA, 18 nt, Human
cuccaggagcagccacau

SEQ ID NO: 3120150 - RNA, 12 nt, Human
cuccagccuggg

SEQ ID NO: 3120151 - RNA, 17 nt, Human
cuccagccccuggaugc

SEQ ID NO: 3120152 - RNA, 16 nt, Human
cuccagccccuggaug

SEQ ID NO: 3120153 - RNA, 20 nt, Human
cuccagccccuggaugcagc

SEQ ID NO: 3120154 - RNA, 14 nt, Human
cuccaccugccagg

SEQ ID NO: 3120155 - RNA, 13 nt, Human
cuccaccugccag

SEQ ID NO: 3120156 - RNA, 12 nt, Human
cuccaccugcca

SEQ ID NO: 3120157 - RNA, 15 nt, Human
cuccagccccuggau

SEQ ID NO: 3120158 - RNA, 17 nt, Human
cucauuugucacacacu

SEQ ID NO: 3120159 - RNA, 15 nt, Human
cuccaaaauaaaacu

SEQ ID NO: 3120160 - RNA, 16 nt, Human
cuccaaaauaaaacuu

SEQ ID NO: 3120161 - RNA, 15 nt, Human
cuccacccugcucuc

SEQ ID NO: 3120162 - RNA, 13 nt, Human
cuccacccugcuc

SEQ ID NO: 3120163 - RNA, 24 nt, Human
cuaggugacagagugagacucugu

SEQ ID NO: 3120164 - RNA, 14 nt, Human
cuaggugacagagu

SEQ ID NO: 3120165 - RNA, 18 nt, Human
cuaggugacagagugaga

SEQ ID NO: 3120166 - RNA, 22 nt, Human
cgcccaguuggguggaugccug

SEQ ID NO: 3120167 - RNA, 17 nt, Human
cgccaucccagccccaa

SEQ ID NO: 3120168 - RNA, 20 nt, Human
cgccaucccagccccaauga

SEQ ID NO: 3120169 - RNA, 15 nt, Human
cgccaugcuccuggc

SEQ ID NO: 3120170 - RNA, 23 nt, Human
cgcccaguuggguggaugccugg

SEQ ID NO: 3120171 - RNA, 17 nt, Human
cuauagccuaggugaca

SEQ ID NO: 3120172 - RNA, 16 nt, Human
cuauaauguaagcucu

SEQ ID NO: 3120173 - RNA, 22 nt, Human
cuauaauuuaccugaagucuuu

SEQ ID NO: 3120174 - RNA, 21 nt, Human
cuauaauguaagcucuacuga

SEQ ID NO: 3120175 - RNA, 18 nt, Human
cuaugggacucaaugcac

SEQ ID NO: 3120176 - RNA, 22 nt, Human
cuaugggacucaaugcacugac

SEQ ID NO: 3120177 - RNA, 23 nt, Human
cuaugggacucaaugcacugaca

SEQ ID NO: 3120178 - RNA, 15 nt, Human
cuauuagagaagaga

SEQ ID NO: 3120179 - RNA, 16 nt, Human
cucagcauccuggcac

SEQ ID NO: 3120180 - RNA, 17 nt, Human
cucagcauccuggcacc

SEQ ID NO: 3120181 - RNA, 15 nt, Human
cucagaucuucugug

SEQ ID NO: 3120182 - RNA, 21 nt, Human
cucagcaaaagaugcuucuca

SEQ ID NO: 3120183 - RNA, 20 nt, Human
cucacuguugcccaggcugg

SEQ ID NO: 3120184 - RNA, 22 nt, Human
cucacugccaugccagcuuauc

SEQ ID NO: 3120185 - RNA, 19 nt, Human
cucacugccaugccagcuu

SEQ ID NO: 3120186 - RNA, 21 nt, Human
cucacuguugcccaggcuggc

SEQ ID NO: 3120187 - RNA, 22 nt, Human
cucacuguugcccaggcuggcg

SEQ ID NO: 3120188 - RNA, 14 nt, Human
cucagagagggugg

SEQ ID NO: 3120189 - RNA, 23 nt, Human
cucacuauguugcccaggcaggu

SEQ ID NO: 3120190 - RNA, 21 nt, Human
cucacuauguugcccaggcag

SEQ ID NO: 3120191 - RNA, 22 nt, Human
cucacuauguugcccaggcagg

SEQ ID NO: 3120192 - RNA, 14 nt, Human
cucaccccagcccc

SEQ ID NO: 3120193 - RNA, 15 nt, Human
cucaccccagcccca

SEQ ID NO: 3120194 - RNA, 19 nt, Human
cucacuauguugcccaggc

SEQ ID NO: 3120195 - RNA, 20 nt, Human
cucacuauguugcccaggca

SEQ ID NO: 3120196 - RNA, 11 nt, Human
cucacucuguc

SEQ ID NO: 3120197 - RNA, 12 nt, Human
cucacucugucg

SEQ ID NO: 3120198 - RNA, 13 nt, Human
cucacuccuugaa

SEQ ID NO: 3120199 - RNA, 13 nt, Human
cucacugcagccu

SEQ ID NO: 3120200 - RNA, 12 nt, Human
cucacugcagcc

SEQ ID NO: 3120201 - RNA, 22 nt, Human
cucacucugucgcccagucugg

SEQ ID NO: 3120202 - RNA, 13 nt, Human
cucacucugucgc

SEQ ID NO: 3120203 - RNA, 21 nt, Human
cucacucugucgcccagucug

SEQ ID NO: 3120204 - RNA, 21 nt, Human
cucaacaccucugcacaagcu

SEQ ID NO: 3120205 - RNA, 13 nt, Human
cucaaccuccugg

SEQ ID NO: 3120206 - RNA, 15 nt, Human
cucaaccuccugggc

SEQ ID NO: 3120207 - RNA, 17 nt, Human
cucaaccuccugggcua

SEQ ID NO: 3120208 - RNA, 17 nt, Human
cucaagugauucuccug

SEQ ID NO: 3120209 - RNA, 21 nt, Human
cucaaguccucuuuucugaga

SEQ ID NO: 3120210 - RNA, 14 nt, Human
cucaaguccucuuu

SEQ ID NO: 3120211 - RNA, 15 nt, Human
cucacaguccuuacc

SEQ ID NO: 3120212 - RNA, 24 nt, Human
cucacacaugagcaucaggccagg

SEQ ID NO: 3120213 - RNA, 22 nt, Human
cucacacaugagcaucaggcca

SEQ ID NO: 3120214 - RNA, 13 nt, Human
cucaccagcccca

SEQ ID NO: 3120215 - RNA, 14 nt, Human
cucaccagccccag

SEQ ID NO: 3120216 - RNA, 15 nt, Human
cucaccagccccagu

SEQ ID NO: 3120217 - RNA, 17 nt, Human
cucaccagccccagugc

SEQ ID NO: 3120218 - RNA, 18 nt, Human
cucaccagccccagugcc

SEQ ID NO: 3120219 - RNA, 15 nt, Human
cucacauuuauucug

SEQ ID NO: 3120220 - RNA, 19 nt, Human
cucacauuuauucugcuca

SEQ ID NO: 3120221 - RNA, 22 nt, Human
cucacauuuauucugcucacau

SEQ ID NO: 3120222 - RNA, 19 nt, Human
cucacaguccuuaccagca

SEQ ID NO: 3120223 - RNA, 17 nt, Human
cucacaguccuuaccag

SEQ ID NO: 3120224 - RNA, 22 nt, Human
cucacaguccuuaccagcagag

SEQ ID NO: 3120225 - RNA, 22 nt, Human
cucugaaggacauugcggacag

SEQ ID NO: 3120226 - RNA, 14 nt, Human
cucugacacacagc

SEQ ID NO: 3120227 - RNA, 15 nt, Human
cucugacacacagcu

SEQ ID NO: 3120228 - RNA, 16 nt, Human
cucugacacacagcuc

SEQ ID NO: 3120229 - RNA, 17 nt, Human
cucugacacacagcucu

SEQ ID NO: 3120230 - RNA, 18 nt, Human
cucugacacacagcucug

SEQ ID NO: 3120231 - RNA, 19 nt, Human
cucugacacacagcucugu

SEQ ID NO: 3120232 - RNA, 23 nt, Human
cucugacagaagaaccccagggu

SEQ ID NO: 3120233 - RNA, 21 nt, Human
cucugagacucgcgacaaugc

SEQ ID NO: 3120234 - RNA, 23 nt, Human
cucugagacucgcgacaaugcaa

SEQ ID NO: 3120235 - RNA, 20 nt, Human
cucugagacucgcgacaaug

SEQ ID NO: 3120236 - RNA, 12 nt, Human
cucugaggacac

SEQ ID NO: 3120237 - RNA, 14 nt, Human
cucugaggacacua

SEQ ID NO: 3120238 - RNA, 17 nt, Human
cucugccucccaucacc

SEQ ID NO: 3120239 - RNA, 16 nt, Human
cucugccucccaucac

SEQ ID NO: 3120240 - RNA, 14 nt, Human
cucugccucccauc

SEQ ID NO: 3120241 - RNA, 13 nt, Human
cucugccucccau

SEQ ID NO: 3120242 - RNA, 12 nt, Human
cucugcccuugg

SEQ ID NO: 3120243 - RNA, 17 nt, Human
cucugcccacucccugc

SEQ ID NO: 3120244 - RNA, 16 nt, Human
cucugcccacucccug

SEQ ID NO: 3120245 - RNA, 15 nt, Human
cucugcccacucccu

SEQ ID NO: 3120246 - RNA, 13 nt, Human
cucugcccacucc

SEQ ID NO: 3120247 - RNA, 20 nt, Human
cucugcccacucccugcaac

SEQ ID NO: 3120248 - RNA, 18 nt, Human
cucugcccacucccugca

SEQ ID NO: 3120249 - RNA, 13 nt, Human
cucugcacaagcu

SEQ ID NO: 3120250 - RNA, 10 nt, Human
cucugcacaa

SEQ ID NO: 3120251 - RNA, 15 nt, Human
cucugcacaagcugc

SEQ ID NO: 3120252 - RNA, 14 nt, Human
cucugcacaagcug

SEQ ID NO: 3120253 - RNA, 19 nt, Human
cucugugucagguggggca

SEQ ID NO: 3120254 - RNA, 20 nt, Human
cucugugucagguggggcag

SEQ ID NO: 3120255 - RNA, 21 nt, Human
cucugugucagguggggcagc

SEQ ID NO: 3120256 - RNA, 22 nt, Human
cucugugucagguggggcagcu

SEQ ID NO: 3120257 - RNA, 23 nt, Human
cucugugucagguggggcagcuu

SEQ ID NO: 3120258 - RNA, 15 nt, Human
cucuucuccaggcug

SEQ ID NO: 3120259 - RNA, 13 nt, Human
cucuucuccaggc

SEQ ID NO: 3120260 - RNA, 14 nt, Human
cucuguccugggag

SEQ ID NO: 3120261 - RNA, 13 nt, Human
cucuguccuggga

SEQ ID NO: 3120262 - RNA, 15 nt, Human
cucuguccugggagu

SEQ ID NO: 3120263 - RNA, 22 nt, Human
cucuguccugggagugagcugg

SEQ ID NO: 3120264 - RNA, 18 nt, Human
cucugucgcccagucugg

SEQ ID NO: 3120265 - RNA, 19 nt, Human
cucugucgcccagucugga

SEQ ID NO: 3120266 - RNA, 17 nt, Human
cucugucgcccagucug

SEQ ID NO: 3120267 - RNA, 13 nt, Human
cucugucgcccag

SEQ ID NO: 3120268 - RNA, 20 nt, Human
cucuggcagcucagagaggg

SEQ ID NO: 3120269 - RNA, 23 nt, Human
cucuggcagcucagagagggugg

SEQ ID NO: 3120270 - RNA, 16 nt, Human
cucugccucugacaca

SEQ ID NO: 3120271 - RNA, 21 nt, Human
cucugccucccaucacccgcu

SEQ ID NO: 3120272 - RNA, 19 nt, Human
cucugccucugacacacag

SEQ ID NO: 3120273 - RNA, 20 nt, Human
cucugccucugacacacagc

SEQ ID NO: 3120274 - RNA, 16 nt, Human
cucuucuccaggcugu

SEQ ID NO: 3120275 - RNA, 23 nt, Human
cucuuuggucuacacugugcuga

SEQ ID NO: 3120276 - RNA, 22 nt, Human
cucuuuggucuacacugugcug

SEQ ID NO: 3120277 - RNA, 14 nt, Human
cucuuuucaaaaca

SEQ ID NO: 3120278 - RNA, 23 nt, Human
cugaaagggacgcuacccgggaa

SEQ ID NO: 3120279 - RNA, 20 nt, Human
cugaagucuuuguacagaca

SEQ ID NO: 3120280 - RNA, 17 nt, Human
cugaagucuuuguacag

SEQ ID NO: 3120281 - RNA, 22 nt, Human
cugaagucccagauacuugggg

SEQ ID NO: 3120282 - RNA, 16 nt, Human
cugaagucacacagug

SEQ ID NO: 3120283 - RNA, 21 nt, Human
cugaagucacacagugagucg

SEQ ID NO: 3120284 - RNA, 18 nt, Human
cugaagucacacagugag

SEQ ID NO: 3120285 - RNA, 19 nt, Human
cugaagucacacagugagu

SEQ ID NO: 3120286 - RNA, 17 nt, Human
cugaagucacacaguga

SEQ ID NO: 3120287 - RNA, 19 nt, Human
cugaaugguuuucaaaaua

SEQ ID NO: 3120288 - RNA, 20 nt, Human
cugaaugguuuucaaaauaa

SEQ ID NO: 3120289 - RNA, 12 nt, Human
cugaauuucuuu

SEQ ID NO: 3120290 - RNA, 16 nt, Human
cugacagacacaggcc

SEQ ID NO: 3120291 - RNA, 14 nt, Human
cugaauuucuuuug

SEQ ID NO: 3120292 - RNA, 15 nt, Human
cugacagacacaggc

SEQ ID NO: 3120293 - RNA, 17 nt, Human
cugacagacacaggccc

SEQ ID NO: 3120294 - RNA, 18 nt, Human
cugacagacacaggcccg

SEQ ID NO: 3120295 - RNA, 19 nt, Human
cugagacagcccgggcucu

SEQ ID NO: 3120296 - RNA, 20 nt, Human
cugagacagcccgggcucug

SEQ ID NO: 3120297 - RNA, 22 nt, Human
cugagacagcccgggcucugcc

SEQ ID NO: 3120298 - RNA, 21 nt, Human
cugagacagcccgggcucugc

SEQ ID NO: 3120299 - RNA, 14 nt, Human
cugagccagauuuc

SEQ ID NO: 3120300 - RNA, 13 nt, Human
cugagccagauuu

SEQ ID NO: 3120301 - RNA, 19 nt, Human
cugcgguccacccaggagc

SEQ ID NO: 3120302 - RNA, 20 nt, Human
cugcgguccacccaggagcc

SEQ ID NO: 3120303 - RNA, 17 nt, Human
cugcgguccacccagga

SEQ ID NO: 3120304 - RNA, 18 nt, Human
cugcgguccacccaggag

SEQ ID NO: 3120305 - RNA, 21 nt, Human
cugccugcccaggccccugcc

SEQ ID NO: 3120306 - RNA, 22 nt, Human
cugccugcccaggccccugcca

SEQ ID NO: 3120307 - RNA, 17 nt, Human
cugccucugacacacag

SEQ ID NO: 3120308 - RNA, 15 nt, Human
cugccucugacacac

SEQ ID NO: 3120309 - RNA, 18 nt, Human
cugccucugacacacagc

SEQ ID NO: 3120310 - RNA, 21 nt, Human
cugccucugacacacagcucu

SEQ ID NO: 3120311 - RNA, 13 nt, Human
cugccgcagcccu

SEQ ID NO: 3120312 - RNA, 12 nt, Human
cugccgcagccc

SEQ ID NO: 3120313 - RNA, 23 nt, Human
cugccgcagcccugcagagggca

SEQ ID NO: 3120314 - RNA, 22 nt, Human
cugccgcagcccugcagagggc

SEQ ID NO: 3120315 - RNA, 21 nt, Human
cugccgcagcccugcagaggg

SEQ ID NO: 3120316 - RNA, 20 nt, Human
cugccgcagcccugcagagg

SEQ ID NO: 3120317 - RNA, 19 nt, Human
cugccgcagcccugcagag

SEQ ID NO: 3120318 - RNA, 19 nt, Human
cugccucagccucccaaag

SEQ ID NO: 3120319 - RNA, 15 nt, Human
cugccucagccuccc

SEQ ID NO: 3120320 - RNA, 14 nt, Human
cugccucagccucc

SEQ ID NO: 3120321 - RNA, 22 nt, Human
cugcaugcgggcuuccuccugg

SEQ ID NO: 3120322 - RNA, 18 nt, Human
cugcaugcgggcuuccuc

SEQ ID NO: 3120323 - RNA, 19 nt, Human
cugccaaugggagcucaug

SEQ ID NO: 3120324 - RNA, 18 nt, Human
cugccaaugggagcucau

SEQ ID NO: 3120325 - RNA, 17 nt, Human
cugccaaugggagcuca

SEQ ID NO: 3120326 - RNA, 22 nt, Human
cugcaucguuucaucuuccaac

SEQ ID NO: 3120327 - RNA, 16 nt, Human
cugcaucguuucaucu

SEQ ID NO: 3120328 - RNA, 23 nt, Human
cugcacuugcagacucuacagag

SEQ ID NO: 3120329 - RNA, 19 nt, Human
cugcaguugccagucaccc

SEQ ID NO: 3120330 - RNA, 17 nt, Human
cugcaguugccagucac

SEQ ID NO: 3120331 - RNA, 22 nt, Human
cugcaguugccagucaccccgg

SEQ ID NO: 3120332 - RNA, 21 nt, Human
cugcaguugccagucaccccg

SEQ ID NO: 3120333 - RNA, 18 nt, Human
cugcccacucccugcaac

SEQ ID NO: 3120334 - RNA, 16 nt, Human
cugcccacucccugca

SEQ ID NO: 3120335 - RNA, 15 nt, Human
cugcccacucccugc

SEQ ID NO: 3120336 - RNA, 14 nt, Human
cugcccacucccug

SEQ ID NO: 3120337 - RNA, 22 nt, Human
cugcccaccuggccucugcacu

SEQ ID NO: 3120338 - RNA, 20 nt, Human
cugcccaccuggccucugca

SEQ ID NO: 3120339 - RNA, 19 nt, Human
cugcccaccuggccucugc

SEQ ID NO: 3120340 - RNA, 18 nt, Human
cugcccaccuggccucug

SEQ ID NO: 3120341 - RNA, 17 nt, Human
cugcccaccuggccucu

SEQ ID NO: 3120342 - RNA, 14 nt, Human
cugccaugccagcu

SEQ ID NO: 3120343 - RNA, 13 nt, Human
cugcccaccuggc

SEQ ID NO: 3120344 - RNA, 15 nt, Human
cugcccaccuggccu

SEQ ID NO: 3120345 - RNA, 14 nt, Human
cugcccaccuggcc

SEQ ID NO: 3120346 - RNA, 13 nt, Human
cugccaggcaugg

SEQ ID NO: 3120347 - RNA, 11 nt, Human
cugccaggcau

SEQ ID NO: 3120348 - RNA, 13 nt, Human
cugaggcugggcu

SEQ ID NO: 3120349 - RNA, 22 nt, Human
cugaggcugggcucccuuccca

SEQ ID NO: 3120350 - RNA, 17 nt, Human
cugaggcugggcucccu

SEQ ID NO: 3120351 - RNA, 16 nt, Human
cugaggcugggcuccc

SEQ ID NO: 3120352 - RNA, 15 nt, Human
cugaggcugggcucc

SEQ ID NO: 3120353 - RNA, 24 nt, Human
cugaggcccuucucuccagccccu

SEQ ID NO: 3120354 - RNA, 14 nt, Human
cugauggugcaaug

SEQ ID NO: 3120355 - RNA, 16 nt, Human
cugauggugcaaugac

SEQ ID NO: 3120356 - RNA, 15 nt, Human
cugauggugcaauga

SEQ ID NO: 3120357 - RNA, 21 nt, Human
cugauccuaguuccaccauca

SEQ ID NO: 3120358 - RNA, 20 nt, Human
cugauccuaguuccaccauc

SEQ ID NO: 3120359 - RNA, 21 nt, Human
cugauaaagaugagugagcau

SEQ ID NO: 3120360 - RNA, 17 nt, Human
cugagucugaaggcugg

SEQ ID NO: 3120361 - RNA, 19 nt, Human
cugagucugaaggcugggu

SEQ ID NO: 3120362 - RNA, 18 nt, Human
cugagucugaaggcuggg

SEQ ID NO: 3120363 - RNA, 22 nt, Human
cugagugggggaucacagccuc

SEQ ID NO: 3120364 - RNA, 12 nt, Human
cugcaccgggcc

SEQ ID NO: 3120365 - RNA, 23 nt, Human
cugcaccggcuggccuggccccu

SEQ ID NO: 3120366 - RNA, 15 nt, Human
cugcacuccccugcu

SEQ ID NO: 3120367 - RNA, 14 nt, Human
cugcacuccccugc

SEQ ID NO: 3120368 - RNA, 22 nt, Human
cugcaccggcuggccuggcccc

SEQ ID NO: 3120369 - RNA, 20 nt, Human
cugcaccggcuggccuggcc

SEQ ID NO: 3120370 - RNA, 14 nt, Human
cugcacccucaggc

SEQ ID NO: 3120371 - RNA, 13 nt, Human
cugcacccucagg

SEQ ID NO: 3120372 - RNA, 18 nt, Human
cugcacuugcagacucua

SEQ ID NO: 3120373 - RNA, 17 nt, Human
cugcacuccccugcugg

SEQ ID NO: 3120374 - RNA, 16 nt, Human
cugcacuccccugcug

SEQ ID NO: 3120375 - RNA, 18 nt, Human
cugcacaagcugcacccu

SEQ ID NO: 3120376 - RNA, 22 nt, Human
cugcacaagcugcacccucagg

SEQ ID NO: 3120377 - RNA, 18 nt, Human
cugcaauaaggggagagu

SEQ ID NO: 3120378 - RNA, 23 nt, Human
cugauuuuuuuuuccuucagugc

SEQ ID NO: 3120379 - RNA, 22 nt, Human
cugauuuuuuuuuccuucagug

SEQ ID NO: 3120380 - RNA, 21 nt, Human
cugauuuuuuuuuccuucagu

SEQ ID NO: 3120381 - RNA, 20 nt, Human
cugauuuuuuuuuccuucag

SEQ ID NO: 3120382 - RNA, 19 nt, Human
cugauuuuuuuuuccuuca

SEQ ID NO: 3120383 - RNA, 18 nt, Human
cugauuuuuuuuuccuuc

SEQ ID NO: 3120384 - RNA, 16 nt, Human
cugauuuuuuuuuccu

SEQ ID NO: 3120385 - RNA, 21 nt, Human
cugauugugucucuugguccu

SEQ ID NO: 3120386 - RNA, 21 nt, Human
cugauggugcaaugaccuuuc

SEQ ID NO: 3120387 - RNA, 20 nt, Human
cugauggugcaaugaccuuu

SEQ ID NO: 3120388 - RNA, 19 nt, Human
cugauggugcaaugaccuu

SEQ ID NO: 3120389 - RNA, 17 nt, Human
cugauggugcaaugacc

SEQ ID NO: 3120390 - RNA, 17 nt, Human
cugauugugucucuugg

SEQ ID NO: 3120391 - RNA, 12 nt, Human
gaguccccuguu

SEQ ID NO: 3120392 - RNA, 23 nt, Human
gaguccccuguuuguuucugaaa

SEQ ID NO: 3120393 - RNA, 14 nt, Human
gaguccccuguuug

SEQ ID NO: 3120394 - RNA, 12 nt, Human
gaguagcuggga

SEQ ID NO: 3120395 - RNA, 14 nt, Human
gaguagcugggacu

SEQ ID NO: 3120396 - RNA, 21 nt, Human
gagucccaccuuggcugcagg

SEQ ID NO: 3120397 - RNA, 21 nt, Human
gagucugaaggcuggguucug

SEQ ID NO: 3120398 - RNA, 22 nt, Human
gagucucacuguugcccaggcu

SEQ ID NO: 3120399 - RNA, 23 nt, Human
gagucucacuguugcccaggcug

SEQ ID NO: 3120400 - RNA, 19 nt, Human
gagucucacuguugcccag

SEQ ID NO: 3120401 - RNA, 20 nt, Human
gagucucacuguugcccagg

SEQ ID NO: 3120402 - RNA, 21 nt, Human
gagucucacuguugcccaggc

SEQ ID NO: 3120403 - RNA, 16 nt, Human
gagucgaggacaggga

SEQ ID NO: 3120404 - RNA, 17 nt, Human
gagucgaggacagggag

SEQ ID NO: 3120405 - RNA, 22 nt, Human
gaggggggaggugggauccucc

SEQ ID NO: 3120406 - RNA, 15 nt, Human
gaggggggagguggg

SEQ ID NO: 3120407 - RNA, 18 nt, Human
gaggugggauccuccagg

SEQ ID NO: 3120408 - RNA, 22 nt, Human
gaggugggauccuccaggugca

SEQ ID NO: 3120409 - RNA, 21 nt, Human
gaggugggauccuccaggugc

SEQ ID NO: 3120410 - RNA, 19 nt, Human
gaguacuacaguccuccca

SEQ ID NO: 3120411 - RNA, 18 nt, Human
gaguacuacaguccuccc

SEQ ID NO: 3120412 - RNA, 17 nt, Human
gaguacguugugcauuu

SEQ ID NO: 3120413 - RNA, 18 nt, Human
gaguacguugugcauuug

SEQ ID NO: 3120414 - RNA, 15 nt, Human
gaguacuacaguccu

SEQ ID NO: 3120415 - RNA, 20 nt, Human
gaguacguugugcauuuggu

SEQ ID NO: 3120416 - RNA, 19 nt, Human
gagguuuuaaaaaaauccc

SEQ ID NO: 3120417 - RNA, 16 nt, Human
gaguacguugugcauu

SEQ ID NO: 3120418 - RNA, 19 nt, Human
gagguucaaagauauuuug

SEQ ID NO: 3120419 - RNA, 14 nt, Human
gagguucccuuuga

SEQ ID NO: 3120420 - RNA, 13 nt, Human
gauacaaugcugu

SEQ ID NO: 3120421 - RNA, 18 nt, Human
gauacaaugcugugcccu

SEQ ID NO: 3120422 - RNA, 18 nt, Human
gauagcacagacccugcc

SEQ ID NO: 3120423 - RNA, 17 nt, Human
gauagcacagacccugc

SEQ ID NO: 3120424 - RNA, 17 nt, Human
gauacaaaagcauguga

SEQ ID NO: 3120425 - RNA, 23 nt, Human
gauauaugcucugcauguuacau

SEQ ID NO: 3120426 - RNA, 21 nt, Human
gaucaaccccuucgcuccugu

SEQ ID NO: 3120427 - RNA, 22 nt, Human
gaucaaccccuucgcuccugug

SEQ ID NO: 3120428 - RNA, 19 nt, Human
gauagcacagacccugccc

SEQ ID NO: 3120429 - RNA, 12 nt, Human
gauagccaaggc

SEQ ID NO: 3120430 - RNA, 16 nt, Human
gauagcacagacccug

SEQ ID NO: 3120431 - RNA, 13 nt, Human
gauagccaaggcc

SEQ ID NO: 3120432 - RNA, 12 nt, Human
gagugggcccaa

SEQ ID NO: 3120433 - RNA, 15 nt, Human
gagucugaaggcugg

SEQ ID NO: 3120434 - RNA, 20 nt, Human
gaguucaucuugaauuguaa

SEQ ID NO: 3120435 - RNA, 23 nt, Human
gaguucaucuugaauuguaagga

SEQ ID NO: 3120436 - RNA, 13 nt, Human
gaguucugguucc

SEQ ID NO: 3120437 - RNA, 23 nt, Human
gaucaaccccuucgcuccugugu

SEQ ID NO: 3120438 - RNA, 13 nt, Human
gaucacgccacug

SEQ ID NO: 3120439 - RNA, 14 nt, Human
gaucacgccacugc

SEQ ID NO: 3120440 - RNA, 15 nt, Human
gaucacgccacugca

SEQ ID NO: 3120441 - RNA, 18 nt, Human
gauccuaguuccaccauc

SEQ ID NO: 3120442 - RNA, 18 nt, Human
gauccuaggcauuugcug

SEQ ID NO: 3120443 - RNA, 11 nt, Human
gauccuccagg

SEQ ID NO: 3120444 - RNA, 19 nt, Human
gauccucccaccucagccu

SEQ ID NO: 3120445 - RNA, 12 nt, Human
gauccuccaggu

SEQ ID NO: 3120446 - RNA, 20 nt, Human
gauccucccaccucagccuc

SEQ ID NO: 3120447 - RNA, 19 nt, Human
gauccugagccagauuuca

SEQ ID NO: 3120448 - RNA, 15 nt, Human
gauccugagccagau

SEQ ID NO: 3120449 - RNA, 14 nt, Human
gauccugagccaga

SEQ ID NO: 3120450 - RNA, 13 nt, Human
gauccugagccag

SEQ ID NO: 3120451 - RNA, 15 nt, Human
gaugaaaaaauaaca

SEQ ID NO: 3120452 - RNA, 16 nt, Human
gaucuuugcagacagg

SEQ ID NO: 3120453 - RNA, 18 nt, Human
gauccucccaccucagcc

SEQ ID NO: 3120454 - RNA, 22 nt, Human
gaugggcaacccccagccugcu

SEQ ID NO: 3120455 - RNA, 22 nt, Human
gaugagaaagguugaagcacca

SEQ ID NO: 3120456 - RNA, 11 nt, Human
gaugagaaagg

SEQ ID NO: 3120457 - RNA, 20 nt, Human
gaugaccuugaaugaugcca

SEQ ID NO: 3120458 - RNA, 20 nt, Human
gauuguccccgacccuugcc

SEQ ID NO: 3120459 - RNA, 15 nt, Human
gauuguccccgaccc

SEQ ID NO: 3120460 - RNA, 18 nt, Human
gauugcuugagcucagga

SEQ ID NO: 3120461 - RNA, 23 nt, Human
gauugacgggacuguugguauug

SEQ ID NO: 3120462 - RNA, 21 nt, Human
gauucccaagcucugcuccuc

SEQ ID NO: 3120463 - RNA, 22 nt, Human
gauucccaagcucugcuccucu

SEQ ID NO: 3120464 - RNA, 12 nt, Human
gauucagacagc

SEQ ID NO: 3120465 - RNA, 20 nt, Human
gauggugcaaugaccuuuca

SEQ ID NO: 3120466 - RNA, 23 nt, Human
gauggugcaaugaccuuucaaua

SEQ ID NO: 3120467 - RNA, 14 nt, Human
gauguucugggaca

SEQ ID NO: 3120468 - RNA, 16 nt, Human
gauguucugggacaca

SEQ ID NO: 3120469 - RNA, 21 nt, Human
gauguucuuucacccuuuucu

SEQ ID NO: 3120470 - RNA, 21 nt, Human
gauguuuuaaggaugcuugua

SEQ ID NO: 3120471 - RNA, 14 nt, Human
gauguuuuccauga

SEQ ID NO: 3120472 - RNA, 23 nt, Human
gauguuuuccaugaguccccugu

SEQ ID NO: 3120473 - RNA, 15 nt, Human
gauguuuuccaugag

SEQ ID NO: 3120474 - RNA, 12 nt, Human
gauuaaauucuu

SEQ ID NO: 3120475 - RNA, 19 nt, Human
gauuaaauucuugcaaagu

SEQ ID NO: 3120476 - RNA, 18 nt, Human
gauuaaccacuucagcug

SEQ ID NO: 3120477 - RNA, 21 nt, Human
gauuaaccacuucagcugacu

SEQ ID NO: 3120478 - RNA, 19 nt, Human
gauuaaccacuucagcuga

SEQ ID NO: 3120479 - RNA, 19 nt, Human
gauucaacagguuuuccug

SEQ ID NO: 3120480 - RNA, 13 nt, Human
gagcugccaccug

SEQ ID NO: 3120481 - RNA, 16 nt, Human
gagcugccaccugccu

SEQ ID NO: 3120482 - RNA, 15 nt, Human
gagcugccaccugcc

SEQ ID NO: 3120483 - RNA, 23 nt, Human
gagcuacacaggggaaaagagga

SEQ ID NO: 3120484 - RNA, 15 nt, Human
gagccuggcaagaau

SEQ ID NO: 3120485 - RNA, 10 nt, Human
gagccuggca

SEQ ID NO: 3120486 - RNA, 21 nt, Human
gagccugggaggucaaggcug

SEQ ID NO: 3120487 - RNA, 13 nt, Human
gagccugggaggu

SEQ ID NO: 3120488 - RNA, 20 nt, Human
gagccucagcauccuggcac

SEQ ID NO: 3120489 - RNA, 21 nt, Human
gagccucagcauccuggcacc

SEQ ID NO: 3120490 - RNA, 14 nt, Human
gagccuccugcccu

SEQ ID NO: 3120491 - RNA, 15 nt, Human
gagcccugguggcag

SEQ ID NO: 3120492 - RNA, 16 nt, Human
gagcccugguggcagu

SEQ ID NO: 3120493 - RNA, 19 nt, Human
gagccucagcauccuggca

SEQ ID NO: 3120494 - RNA, 17 nt, Human
gagcccugguggcagug

SEQ ID NO: 3120495 - RNA, 22 nt, Human
gagccuccugcccuuaccugcc

SEQ ID NO: 3120496 - RNA, 20 nt, Human
gagccuccugcccuuaccug

SEQ ID NO: 3120497 - RNA, 22 nt, Human
gagccacugcaccgggccacag

SEQ ID NO: 3120498 - RNA, 11 nt, Human
gagcccacgcc

SEQ ID NO: 3120499 - RNA, 14 nt, Human
gagcccaggccucc

SEQ ID NO: 3120500 - RNA, 13 nt, Human
gagcccaggccuc

SEQ ID NO: 3120501 - RNA, 12 nt, Human
gagcccaggccu

SEQ ID NO: 3120502 - RNA, 16 nt, Human
gagcccacgcccccac

SEQ ID NO: 3120503 - RNA, 15 nt, Human
gagcccacgccccca

SEQ ID NO: 3120504 - RNA, 12 nt, Human
gagcccacgccc

SEQ ID NO: 3120505 - RNA, 18 nt, Human
gagcagccacauuccuga

SEQ ID NO: 3120506 - RNA, 20 nt, Human
gagccacugcaccgggccac

SEQ ID NO: 3120507 - RNA, 13 nt, Human
gagaucagccugg

SEQ ID NO: 3120508 - RNA, 16 nt, Human
gagaucagccugggca

SEQ ID NO: 3120509 - RNA, 14 nt, Human
gagaucagccuggg

SEQ ID NO: 3120510 - RNA, 20 nt, Human
gagaucaaccccuucgcucc

SEQ ID NO: 3120511 - RNA, 17 nt, Human
gagcaccuuagacaguc

SEQ ID NO: 3120512 - RNA, 22 nt, Human
gagcaagacgcugugcugcccu

SEQ ID NO: 3120513 - RNA, 18 nt, Human
gagcaagacgcugugcug

SEQ ID NO: 3120514 - RNA, 21 nt, Human
gagcaagacgcugugcugccc

SEQ ID NO: 3120515 - RNA, 19 nt, Human
gagcaaaaucgaugcagug

SEQ ID NO: 3120516 - RNA, 12 nt, Human
gaggggccucuu

SEQ ID NO: 3120517 - RNA, 22 nt, Human
gaggggccucuuaugggcuggg

SEQ ID NO: 3120518 - RNA, 23 nt, Human
gagggcacagaaaauggaagaca

SEQ ID NO: 3120519 - RNA, 22 nt, Human
gagggcacagaaaauggaagac

SEQ ID NO: 3120520 - RNA, 14 nt, Human
gagggcacagaaaa

SEQ ID NO: 3120521 - RNA, 13 nt, Human
gagggagugacag

SEQ ID NO: 3120522 - RNA, 14 nt, Human
gagggagguaagga

SEQ ID NO: 3120523 - RNA, 14 nt, Human
gagggagugacaga

SEQ ID NO: 3120524 - RNA, 14 nt, Human
gagggagggagggc

SEQ ID NO: 3120525 - RNA, 15 nt, Human
gagggagggcuccag

SEQ ID NO: 3120526 - RNA, 15 nt, Human
gagggagggagggcu

SEQ ID NO: 3120527 - RNA, 15 nt, Human
gaggcugggcucccu

SEQ ID NO: 3120528 - RNA, 14 nt, Human
gaggcugggcuccc

SEQ ID NO: 3120529 - RNA, 13 nt, Human
gaggcugggcucc

SEQ ID NO: 3120530 - RNA, 14 nt, Human
gaggccuucucuga

SEQ ID NO: 3120531 - RNA, 22 nt, Human
gaggcccuucucuccagccccu

SEQ ID NO: 3120532 - RNA, 24 nt, Human
gaggcccuucucuccagccccugg

SEQ ID NO: 3120533 - RNA, 23 nt, Human
gaggcccuucucuccagccccug

SEQ ID NO: 3120534 - RNA, 14 nt, Human
gaggaauccagacc

SEQ ID NO: 3120535 - RNA, 22 nt, Human
gaggaaggaaacccagcucugg

SEQ ID NO: 3120536 - RNA, 15 nt, Human
gaggaauccagaccc

SEQ ID NO: 3120537 - RNA, 13 nt, Human
gaggacagggagg

SEQ ID NO: 3120538 - RNA, 22 nt, Human
gaggacagggaggugaccccag

SEQ ID NO: 3120539 - RNA, 23 nt, Human
gaggacagggaggugaccccagg

SEQ ID NO: 3120540 - RNA, 12 nt, Human
gaggccagccuu

SEQ ID NO: 3120541 - RNA, 13 nt, Human
gaggccagccuug

SEQ ID NO: 3120542 - RNA, 23 nt, Human
gaggcagccccauucugccugcc

SEQ ID NO: 3120543 - RNA, 21 nt, Human
gaggcagccccauucugccug

SEQ ID NO: 3120544 - RNA, 22 nt, Human
gaggcagccccauucugccugc

SEQ ID NO: 3120545 - RNA, 13 nt, Human
gaggcagccccau

SEQ ID NO: 3120546 - RNA, 23 nt, Human
gaggaguuugggguaugggagag

SEQ ID NO: 3120547 - RNA, 17 nt, Human
gaggauguucugggaca

SEQ ID NO: 3120548 - RNA, 20 nt, Human
gaggauguucugggacacag

SEQ ID NO: 3120549 - RNA, 12 nt, Human
gaggauguucug

SEQ ID NO: 3120550 - RNA, 21 nt, Human
gccagagggagugacagaggc

SEQ ID NO: 3120551 - RNA, 22 nt, Human
gccagagggagugacagaggca

SEQ ID NO: 3120552 - RNA, 22 nt, Human
gccagaggagagaggacccccu

SEQ ID NO: 3120553 - RNA, 19 nt, Human
gccagaggagagaggaccc

SEQ ID NO: 3120554 - RNA, 17 nt, Human
gccagaggagagaggac

SEQ ID NO: 3120555 - RNA, 15 nt, Human
gccagaggagagagg

SEQ ID NO: 3120556 - RNA, 13 nt, Human
gccagaggagaga

SEQ ID NO: 3120557 - RNA, 12 nt, Human
gccagaggagag

SEQ ID NO: 3120558 - RNA, 23 nt, Human
gccagagggagugacagaggcag

SEQ ID NO: 3120559 - RNA, 16 nt, Human
gccagaugcaccagcc

SEQ ID NO: 3120560 - RNA, 17 nt, Human
gccagaugcaccagccc

SEQ ID NO: 3120561 - RNA, 18 nt, Human
gccagaugcaccagcccu

SEQ ID NO: 3120562 - RNA, 16 nt, Human
gccagagacacaagcc

SEQ ID NO: 3120563 - RNA, 19 nt, Human
gccagagacacaagccuuc

SEQ ID NO: 3120564 - RNA, 17 nt, Human
gccagagacacaagccu

SEQ ID NO: 3120565 - RNA, 10 nt, Human
gccagaggag

SEQ ID NO: 3120566 - RNA, 20 nt, Human
gccagagacacaagccuucg

SEQ ID NO: 3120567 - RNA, 17 nt, Human
gccaccugccuguuggg

SEQ ID NO: 3120568 - RNA, 18 nt, Human
gccacggccaggccagag

SEQ ID NO: 3120569 - RNA, 17 nt, Human
gccacggccaggccaga

SEQ ID NO: 3120570 - RNA, 19 nt, Human
gccacggccaggccagagg

SEQ ID NO: 3120571 - RNA, 22 nt, Human
gccaccugcggugcuaucuccc

SEQ ID NO: 3120572 - RNA, 20 nt, Human
gccaccugcggugcuaucuc

SEQ ID NO: 3120573 - RNA, 14 nt, Human
gccaccugcggugc

SEQ ID NO: 3120574 - RNA, 15 nt, Human
gccaaggugggagga

SEQ ID NO: 3120575 - RNA, 14 nt, Human
gccaaggugggagg

SEQ ID NO: 3120576 - RNA, 23 nt, Human
gccaaggugggaggauugcuuga

SEQ ID NO: 3120577 - RNA, 21 nt, Human
gccaaggcugggggaagaagc

SEQ ID NO: 3120578 - RNA, 19 nt, Human
gcauuugaggucuguucuu

SEQ ID NO: 3120579 - RNA, 20 nt, Human
gcauuugaggucuguucuuu

SEQ ID NO: 3120580 - RNA, 22 nt, Human
gcauuuggugguuucagaaaug

SEQ ID NO: 3120581 - RNA, 23 nt, Human
gcauuuggugguuucagaaaugu

SEQ ID NO: 3120582 - RNA, 23 nt, Human
gccacagagaaaguacuucucca

SEQ ID NO: 3120583 - RNA, 13 nt, Human
gccacagagaaag

SEQ ID NO: 3120584 - RNA, 14 nt, Human
gccacagagaaagu

SEQ ID NO: 3120585 - RNA, 20 nt, Human
gccacagagaaaguacuucu

SEQ ID NO: 3120586 - RNA, 22 nt, Human
gccacaagacccuugugguccc

SEQ ID NO: 3120587 - RNA, 16 nt, Human
gccacaagacccuugu

SEQ ID NO: 3120588 - RNA, 24 nt, Human
gcccagccccuucugacccaugcu

SEQ ID NO: 3120589 - RNA, 20 nt, Human
gcccagccccuucugaccca

SEQ ID NO: 3120590 - RNA, 17 nt, Human
gcccagccccuucugac

SEQ ID NO: 3120591 - RNA, 16 nt, Human
gcccagccccuucuga

SEQ ID NO: 3120592 - RNA, 14 nt, Human
gcccagccccuucu

SEQ ID NO: 3120593 - RNA, 13 nt, Human
gcccagccccuuc

SEQ ID NO: 3120594 - RNA, 15 nt, Human
gcccaguugggugga

SEQ ID NO: 3120595 - RNA, 19 nt, Human
gcccagucuggaaugcagu

SEQ ID NO: 3120596 - RNA, 23 nt, Human
gcccaggcuuagucacugagaca

SEQ ID NO: 3120597 - RNA, 21 nt, Human
gcccaggcuuagucacugaga

SEQ ID NO: 3120598 - RNA, 19 nt, Human
gcccaggcuuagucacuga

SEQ ID NO: 3120599 - RNA, 22 nt, Human
gcccaggcuggcgugcaguggu

SEQ ID NO: 3120600 - RNA, 19 nt, Human
gcccaggcuggcgugcagu

SEQ ID NO: 3120601 - RNA, 20 nt, Human
gcccaggcuggcgugcagug

SEQ ID NO: 3120602 - RNA, 20 nt, Human
gcccaggaaaggcuccagga

SEQ ID NO: 3120603 - RNA, 19 nt, Human
gcccaggaaaggcuccagg

SEQ ID NO: 3120604 - RNA, 18 nt, Human
gcccaggaaaggcuccag

SEQ ID NO: 3120605 - RNA, 21 nt, Human
gcccaaugcacuuuguucugg

SEQ ID NO: 3120606 - RNA, 12 nt, Human
gcccagagggcc

SEQ ID NO: 3120607 - RNA, 19 nt, Human
gcccagagggccugcaagg

SEQ ID NO: 3120608 - RNA, 18 nt, Human
gcccagagggccugcaag

SEQ ID NO: 3120609 - RNA, 15 nt, Human
gcccagagggccugc

SEQ ID NO: 3120610 - RNA, 14 nt, Human
gcccagagggccug

SEQ ID NO: 3120611 - RNA, 9 nt, Human
gcccagccc

SEQ ID NO: 3120612 - RNA, 12 nt, Human
gcccagccccuu

SEQ ID NO: 3120613 - RNA, 11 nt, Human
gcccagccccu

SEQ ID NO: 3120614 - RNA, 22 nt, Human
gcccagagggccugcaagggag

SEQ ID NO: 3120615 - RNA, 21 nt, Human
gcccagagggccugcaaggga

SEQ ID NO: 3120616 - RNA, 20 nt, Human
gcccagagggccugcaaggg

SEQ ID NO: 3120617 - RNA, 24 nt, Human
gccaugcuccuggcccacugcauc

SEQ ID NO: 3120618 - RNA, 19 nt, Human
gccaugccagcuuaucuca

SEQ ID NO: 3120619 - RNA, 18 nt, Human
gccaugccagcuuaucuc

SEQ ID NO: 3120620 - RNA, 13 nt, Human
gccaugccagcuu

SEQ ID NO: 3120621 - RNA, 18 nt, Human
gccaugaggaacaaggca

SEQ ID NO: 3120622 - RNA, 16 nt, Human
gccauuuguguuuaua

SEQ ID NO: 3120623 - RNA, 17 nt, Human
gccagguuuuuggucug

SEQ ID NO: 3120624 - RNA, 20 nt, Human
gccagucaccccggccaccu

SEQ ID NO: 3120625 - RNA, 18 nt, Human
gccagucaccccggccac

SEQ ID NO: 3120626 - RNA, 17 nt, Human
gccagucaccccggcca

SEQ ID NO: 3120627 - RNA, 13 nt, Human
gccagggacagag

SEQ ID NO: 3120628 - RNA, 18 nt, Human
gccagggacagagggggu

SEQ ID NO: 3120629 - RNA, 16 nt, Human
gccagggacagagggg

SEQ ID NO: 3120630 - RNA, 15 nt, Human
gccaggcuggucuca

SEQ ID NO: 3120631 - RNA, 23 nt, Human
gccagggacagaggggguggccu

SEQ ID NO: 3120632 - RNA, 21 nt, Human
gccagauuucacucuccuugg

SEQ ID NO: 3120633 - RNA, 18 nt, Human
gccagauuucacucuccu

SEQ ID NO: 3120634 - RNA, 16 nt, Human
gccagauuucacucuc

SEQ ID NO: 3120635 - RNA, 15 nt, Human
gccagaugcaccagc

SEQ ID NO: 3120636 - RNA, 17 nt, Human
gcaggcagccaggccac

SEQ ID NO: 3120637 - RNA, 18 nt, Human
gcaggcagccaggccaca

SEQ ID NO: 3120638 - RNA, 22 nt, Human
gcagggcucagcggggacagcu

SEQ ID NO: 3120639 - RNA, 16 nt, Human
gcagggucucacucug

SEQ ID NO: 3120640 - RNA, 19 nt, Human
gcaggguccuagaaauucc

SEQ ID NO: 3120641 - RNA, 18 nt, Human
gcauacguacacauuuua

SEQ ID NO: 3120642 - RNA, 19 nt, Human
gcauacguacacauuuuau

SEQ ID NO: 3120643 - RNA, 22 nt, Human
gcaguggugcgaucuggguuca

SEQ ID NO: 3120644 - RNA, 19 nt, Human
gcaguggugguuuucuguu

SEQ ID NO: 3120645 - RNA, 20 nt, Human
gcaguggugcgaucuggguu

SEQ ID NO: 3120646 - RNA, 21 nt, Human
gcaguggugcgaucuggguuc

SEQ ID NO: 3120647 - RNA, 20 nt, Human
gcaguggugguuuucuguuc

SEQ ID NO: 3120648 - RNA, 21 nt, Human
gcaguggugguuuucuguucu

SEQ ID NO: 3120649 - RNA, 18 nt, Human
gcaguggugcgaucuggg

SEQ ID NO: 3120650 - RNA, 19 nt, Human
gcaguggugcgaucugggu

SEQ ID NO: 3120651 - RNA, 11 nt, Human
gcagugggagc

SEQ ID NO: 3120652 - RNA, 18 nt, Human
gcauuugaggucuguucu

SEQ ID NO: 3120653 - RNA, 22 nt, Human
gcauuccccaggaggccagccu

SEQ ID NO: 3120654 - RNA, 21 nt, Human
gcauuccccaggaggccagcc

SEQ ID NO: 3120655 - RNA, 20 nt, Human
gcauuccccaggaggccagc

SEQ ID NO: 3120656 - RNA, 19 nt, Human
gcauuccccaggaggccag

SEQ ID NO: 3120657 - RNA, 18 nt, Human
gcauuccccaggaggcca

SEQ ID NO: 3120658 - RNA, 17 nt, Human
gcauuccccaggaggcc

SEQ ID NO: 3120659 - RNA, 16 nt, Human
gcauuccccaggaggc

SEQ ID NO: 3120660 - RNA, 15 nt, Human
gcauuccccaggagg

SEQ ID NO: 3120661 - RNA, 14 nt, Human
gcauuccccaggag

SEQ ID NO: 3120662 - RNA, 12 nt, Human
gcauuccccagg

SEQ ID NO: 3120663 - RNA, 19 nt, Human
gcauuaucuagauacugua

SEQ ID NO: 3120664 - RNA, 22 nt, Human
gcauuaucuagauacuguauca

SEQ ID NO: 3120665 - RNA, 24 nt, Human
gcauuaucuagauacuguaucaug

SEQ ID NO: 3120666 - RNA, 14 nt, Human
gcaugccuggaugg

SEQ ID NO: 3120667 - RNA, 13 nt, Human
gcauguuacauaa

SEQ ID NO: 3120668 - RNA, 20 nt, Human
gcaugaaguaauaugcacac

SEQ ID NO: 3120669 - RNA, 21 nt, Human
gcaugaaguaauaugcacaca

SEQ ID NO: 3120670 - RNA, 22 nt, Human
gcaugaaguaauaugcacacau

SEQ ID NO: 3120671 - RNA, 22 nt, Human
gcaugacacgaauauugcugau

SEQ ID NO: 3120672 - RNA, 18 nt, Human
gcaugaaguaauaugcac

SEQ ID NO: 3120673 - RNA, 21 nt, Human
gcaugacacgaauauugcuga

SEQ ID NO: 3120674 - RNA, 20 nt, Human
gcaugacacgaauauugcug

SEQ ID NO: 3120675 - RNA, 12 nt, Human
gcaucaggccag

SEQ ID NO: 3120676 - RNA, 23 nt, Human
gcaucaggccaggcccucugccc

SEQ ID NO: 3120677 - RNA, 18 nt, Human
gcaucaggccaggcccuc

SEQ ID NO: 3120678 - RNA, 22 nt, Human
gcacuucgggaggucgaggcag

SEQ ID NO: 3120679 - RNA, 14 nt, Human
gcacuugcagacuc

SEQ ID NO: 3120680 - RNA, 17 nt, Human
gcagacucuacagaggc

SEQ ID NO: 3120681 - RNA, 18 nt, Human
gcagacucuacagaggcc

SEQ ID NO: 3120682 - RNA, 19 nt, Human
gcagacucuacagaggcca

SEQ ID NO: 3120683 - RNA, 22 nt, Human
gcagacucuacagaggccaugg

SEQ ID NO: 3120684 - RNA, 19 nt, Human
gcagagaccaucccugaag

SEQ ID NO: 3120685 - RNA, 21 nt, Human
gcagagaccaucccugaaggc

SEQ ID NO: 3120686 - RNA, 20 nt, Human
gcagagaccaucccugaagg

SEQ ID NO: 3120687 - RNA, 22 nt, Human
gcagagaccaucccugaaggcc

SEQ ID NO: 3120688 - RNA, 18 nt, Human
gcagauggagaccccuug

SEQ ID NO: 3120689 - RNA, 17 nt, Human
gcagccucacaguccuu

SEQ ID NO: 3120690 - RNA, 15 nt, Human
gcagccucacagucc

SEQ ID NO: 3120691 - RNA, 19 nt, Human
gcagccucacaguccuuac

SEQ ID NO: 3120692 - RNA, 19 nt, Human
gcagcagggagggcuucug

SEQ ID NO: 3120693 - RNA, 18 nt, Human
gcagcagggagggcuucu

SEQ ID NO: 3120694 - RNA, 16 nt, Human
gcagcucaccucuccc

SEQ ID NO: 3120695 - RNA, 14 nt, Human
gcagcucagagagg

SEQ ID NO: 3120696 - RNA, 21 nt, Human
gcagcucaccucucccuugga

SEQ ID NO: 3120697 - RNA, 20 nt, Human
gcagcucaccucucccuugg

SEQ ID NO: 3120698 - RNA, 17 nt, Human
gcagcucaccucucccu

SEQ ID NO: 3120699 - RNA, 19 nt, Human
gcagcucagagaggguggg

SEQ ID NO: 3120700 - RNA, 18 nt, Human
gcagcucagagagggugg

SEQ ID NO: 3120701 - RNA, 20 nt, Human
gcacuauaauguaagcucua

SEQ ID NO: 3120702 - RNA, 14 nt, Human
gcacuauaauguaa

SEQ ID NO: 3120703 - RNA, 15 nt, Human
gcacuauaauguaag

SEQ ID NO: 3120704 - RNA, 15 nt, Human
gcacugcuuccagug

SEQ ID NO: 3120705 - RNA, 14 nt, Human
gcacugcuuccagu

SEQ ID NO: 3120706 - RNA, 13 nt, Human
gcacugcuuccag

SEQ ID NO: 3120707 - RNA, 12 nt, Human
gcacugcuucca

SEQ ID NO: 3120708 - RNA, 12 nt, Human
gcacugggcuug

SEQ ID NO: 3120709 - RNA, 19 nt, Human
gcacuguuuuauuuuaauu

SEQ ID NO: 3120710 - RNA, 19 nt, Human
gcacccucaggcagguggg

SEQ ID NO: 3120711 - RNA, 16 nt, Human
gcacccucaggcaggu

SEQ ID NO: 3120712 - RNA, 19 nt, Human
gcacuaaggugugcucuga

SEQ ID NO: 3120713 - RNA, 20 nt, Human
gcacuaaggugugcucugau

SEQ ID NO: 3120714 - RNA, 14 nt, Human
gcacgugugugcac

SEQ ID NO: 3120715 - RNA, 23 nt, Human
gcacagcuucauuuccugugucu

SEQ ID NO: 3120716 - RNA, 21 nt, Human
gcacagcuucauuuccugugu

SEQ ID NO: 3120717 - RNA, 20 nt, Human
gauugugucucuugguccug

SEQ ID NO: 3120718 - RNA, 13 nt, Human
gcaccagcagccu

SEQ ID NO: 3120719 - RNA, 15 nt, Human
gcaccaucucuccuc

SEQ ID NO: 3120720 - RNA, 14 nt, Human
gcaccaucucuccu

SEQ ID NO: 3120721 - RNA, 17 nt, Human
gcaccaucucuccuccu

SEQ ID NO: 3120722 - RNA, 15 nt, Human
gcuggccuggccccu

SEQ ID NO: 3120723 - RNA, 14 nt, Human
gcuggccuggcccc

SEQ ID NO: 3120724 - RNA, 12 nt, Human
gcuggccuggcc

SEQ ID NO: 3120725 - RNA, 13 nt, Human
gcuggccuggccc

SEQ ID NO: 3120726 - RNA, 21 nt, Human
gcugggcucccuucccaccuc

SEQ ID NO: 3120727 - RNA, 19 nt, Human
gcugggaugauuggagggg

SEQ ID NO: 3120728 - RNA, 20 nt, Human
gcugggcuucaguggcagcu

SEQ ID NO: 3120729 - RNA, 21 nt, Human
gcugggcuucaguggcagcug

SEQ ID NO: 3120730 - RNA, 22 nt, Human
gcugggcuucaguggcagcugc

SEQ ID NO: 3120731 - RNA, 19 nt, Human
gcugggcuucaguggcagc

SEQ ID NO: 3120732 - RNA, 18 nt, Human
gcugggggccucagugcc

SEQ ID NO: 3120733 - RNA, 13 nt, Human
gcugggggccuca

SEQ ID NO: 3120734 - RNA, 14 nt, Human
gcugggggccucag

SEQ ID NO: 3120735 - RNA, 15 nt, Human
gcugggggccucagu

SEQ ID NO: 3120736 - RNA, 16 nt, Human
gcugucccuuuuccuu

SEQ ID NO: 3120737 - RNA, 22 nt, Human
gcugucccuuacgugaguccug

SEQ ID NO: 3120738 - RNA, 23 nt, Human
gcugucccuuacgugaguccugg

SEQ ID NO: 3120739 - RNA, 17 nt, Human
gcugucagccauuccug

SEQ ID NO: 3120740 - RNA, 14 nt, Human
gcuggugucaccug

SEQ ID NO: 3120741 - RNA, 15 nt, Human
gcuggugucaccuga

SEQ ID NO: 3120742 - RNA, 15 nt, Human
gcugugucucccuuc

SEQ ID NO: 3120743 - RNA, 17 nt, Human
gcuucucacugccaugc

SEQ ID NO: 3120744 - RNA, 22 nt, Human
gcuucucacugccaugccagcu

SEQ ID NO: 3120745 - RNA, 18 nt, Human
gcuucauuuccugugucu

SEQ ID NO: 3120746 - RNA, 20 nt, Human
gcuuauacacuuacacuuua

SEQ ID NO: 3120747 - RNA, 19 nt, Human
gcuucaguggcagcugcuu

SEQ ID NO: 3120748 - RNA, 20 nt, Human
gcuucaguggcagcugcuuu

SEQ ID NO: 3120749 - RNA, 21 nt, Human
gcuucauccuccucagaucuu

SEQ ID NO: 3120750 - RNA, 22 nt, Human
gcugcuuuugucuaugggacuc

SEQ ID NO: 3120751 - RNA, 22 nt, Human
gcugcuugggcuucauccuccu

SEQ ID NO: 3120752 - RNA, 15 nt, Human
gcuggaccuugaacu

SEQ ID NO: 3120753 - RNA, 24 nt, Human
gcugcccugcccaccuggccucug

SEQ ID NO: 3120754 - RNA, 23 nt, Human
gcugcccugcccaccuggccucu

SEQ ID NO: 3120755 - RNA, 22 nt, Human
gcugcccugcccaccuggccuc

SEQ ID NO: 3120756 - RNA, 21 nt, Human
gcugcccugcccaccuggccu

SEQ ID NO: 3120757 - RNA, 20 nt, Human
gcugcccugcccaccuggcc

SEQ ID NO: 3120758 - RNA, 18 nt, Human
gcugcccugcccaccugg

SEQ ID NO: 3120759 - RNA, 16 nt, Human
gcugcccugcccaccu

SEQ ID NO: 3120760 - RNA, 12 nt, Human
gcugcccugccc

SEQ ID NO: 3120761 - RNA, 14 nt, Human
gcugcccugcccac

SEQ ID NO: 3120762 - RNA, 13 nt, Human
gcugcccugccca

SEQ ID NO: 3120763 - RNA, 20 nt, Human
gcugccuguucagcuccagc

SEQ ID NO: 3120764 - RNA, 22 nt, Human
gcugccuguucagcuccagcuc

SEQ ID NO: 3120765 - RNA, 18 nt, Human
gcugccuguucagcucca

SEQ ID NO: 3120766 - RNA, 19 nt, Human
gcugccuguucagcuccag

SEQ ID NO: 3120767 - RNA, 14 nt, Human
gcugcgguccaccc

SEQ ID NO: 3120768 - RNA, 15 nt, Human
gcugcgguccaccca

SEQ ID NO: 3120769 - RNA, 19 nt, Human
gcugcgguccacccaggag

SEQ ID NO: 3120770 - RNA, 21 nt, Human
gcugcgguccacccaggagcc

SEQ ID NO: 3120771 - RNA, 22 nt, Human
gcugcgguccacccaggagccc

SEQ ID NO: 3120772 - RNA, 14 nt, Human
gcugcaguugccag

SEQ ID NO: 3120773 - RNA, 13 nt, Human
gcugcaguugcca

SEQ ID NO: 3120774 - RNA, 19 nt, Human
gcugcauuuaaaagauaca

SEQ ID NO: 3120775 - RNA, 17 nt, Human
gcugcauuuaaaagaua

SEQ ID NO: 3120776 - RNA, 18 nt, Human
gcugcauuuaaaagauac

SEQ ID NO: 3120777 - RNA, 20 nt, Human
gcugccaaugggagcucaug

SEQ ID NO: 3120778 - RNA, 12 nt, Human
gcugccaccugc

SEQ ID NO: 3120779 - RNA, 22 nt, Human
gcugcaaaggguaucaggugcu

SEQ ID NO: 3120780 - RNA, 22 nt, Human
gcugacuguuuucucuugagag

SEQ ID NO: 3120781 - RNA, 17 nt, Human
gcugacagacacaggcc

SEQ ID NO: 3120782 - RNA, 18 nt, Human
gcugacagacacaggccc

SEQ ID NO: 3120783 - RNA, 19 nt, Human
gcugacagacacaggcccg

SEQ ID NO: 3120784 - RNA, 20 nt, Human
gcucucaggccagcugcuug

SEQ ID NO: 3120785 - RNA, 21 nt, Human
gcucucaggccagcugcuugg

SEQ ID NO: 3120786 - RNA, 24 nt, Human
gcuccgcuuucuacccagcgagcc

SEQ ID NO: 3120787 - RNA, 13 nt, Human
gcuccuucugucc

SEQ ID NO: 3120788 - RNA, 17 nt, Human
gcuccuuuagcgcccag

SEQ ID NO: 3120789 - RNA, 17 nt, Human
gcucgagcaugccugga

SEQ ID NO: 3120790 - RNA, 21 nt, Human
gcucgagcaugccuggauggg

SEQ ID NO: 3120791 - RNA, 19 nt, Human
gcucgagcaugccuggaug

SEQ ID NO: 3120792 - RNA, 12 nt, Human
gcuccugugucu

SEQ ID NO: 3120793 - RNA, 13 nt, Human
gcuccugugucuu

SEQ ID NO: 3120794 - RNA, 20 nt, Human
gcucccuucccaccucucuc

SEQ ID NO: 3120795 - RNA, 18 nt, Human
gcuccgcuuucuacccag

SEQ ID NO: 3120796 - RNA, 21 nt, Human
gcuccgcuuucuacccagcga

SEQ ID NO: 3120797 - RNA, 22 nt, Human
gcuccgcuuucuacccagcgag

SEQ ID NO: 3120798 - RNA, 23 nt, Human
gcuccgcuuucuacccagcgagc

SEQ ID NO: 3120799 - RNA, 19 nt, Human
gcucccuucccaccucucu

SEQ ID NO: 3120800 - RNA, 20 nt, Human
gcuccagcuguucagcuggu

SEQ ID NO: 3120801 - RNA, 21 nt, Human
gcuccagcuguucagcugguu

SEQ ID NO: 3120802 - RNA, 11 nt, Human
gcuccaggagc

SEQ ID NO: 3120803 - RNA, 14 nt, Human
gcuccaggagcagc

SEQ ID NO: 3120804 - RNA, 12 nt, Human
gcuccaggagca

SEQ ID NO: 3120805 - RNA, 18 nt, Human
gcuccaggagcagccaca

SEQ ID NO: 3120806 - RNA, 17 nt, Human
gcuccaggagcagccac

SEQ ID NO: 3120807 - RNA, 16 nt, Human
gcuccaggagcagcca

SEQ ID NO: 3120808 - RNA, 15 nt, Human
gcuccaggagcagcc

SEQ ID NO: 3120809 - RNA, 12 nt, Human
gcuccaggcucc

SEQ ID NO: 3120810 - RNA, 24 nt, Human
gcuccaggcuccuuuagcgcccag

SEQ ID NO: 3120811 - RNA, 21 nt, Human
gcuaguugggcuuccucauag

SEQ ID NO: 3120812 - RNA, 22 nt, Human
gcggugcuaucucccccagccc

SEQ ID NO: 3120813 - RNA, 19 nt, Human
gcggugcuaucucccccag

SEQ ID NO: 3120814 - RNA, 19 nt, Human
gcucaaguccucuuuucug

SEQ ID NO: 3120815 - RNA, 22 nt, Human
gcucaaguccucuuuucugaga

SEQ ID NO: 3120816 - RNA, 14 nt, Human
gcuaucucccccag

SEQ ID NO: 3120817 - RNA, 18 nt, Human
gcucaaguccucuuuucu

SEQ ID NO: 3120818 - RNA, 13 nt, Human
gcuaucuccccca

SEQ ID NO: 3120819 - RNA, 18 nt, Human
gcucaccucucccuugga

SEQ ID NO: 3120820 - RNA, 17 nt, Human
gcucaccucucccuugg

SEQ ID NO: 3120821 - RNA, 16 nt, Human
gcucaccucucccuug

SEQ ID NO: 3120822 - RNA, 14 nt, Human
gcucaccucucccu

SEQ ID NO: 3120823 - RNA, 16 nt, Human
gcucacauaucuguca

SEQ ID NO: 3120824 - RNA, 12 nt, Human
gcucaccagccc

SEQ ID NO: 3120825 - RNA, 13 nt, Human
gcucaccagcccc

SEQ ID NO: 3120826 - RNA, 14 nt, Human
gcucaccagcccca

SEQ ID NO: 3120827 - RNA, 15 nt, Human
gcucaccagccccag

SEQ ID NO: 3120828 - RNA, 16 nt, Human
gcucagcggggacagc

SEQ ID NO: 3120829 - RNA, 17 nt, Human
gcucagcggggacagcu

SEQ ID NO: 3120830 - RNA, 18 nt, Human
gcucagcggggacagcuc

SEQ ID NO: 3120831 - RNA, 23 nt, Human
gcucagcggggacagcuccuucu

SEQ ID NO: 3120832 - RNA, 20 nt, Human
gccuggccagaugcaccagc

SEQ ID NO: 3120833 - RNA, 16 nt, Human
gccuggccagaugcac

SEQ ID NO: 3120834 - RNA, 21 nt, Human
gccuggccagaugcaccagcc

SEQ ID NO: 3120835 - RNA, 14 nt, Human
gccuggccccucag

SEQ ID NO: 3120836 - RNA, 13 nt, Human
gccuggccccuca

SEQ ID NO: 3120837 - RNA, 18 nt, Human
gccugggcagaaggaaga

SEQ ID NO: 3120838 - RNA, 20 nt, Human
gccuguaauccuagcacuuu

SEQ ID NO: 3120839 - RNA, 15 nt, Human
gccuguaauccuagc

SEQ ID NO: 3120840 - RNA, 12 nt, Human
gccugagcuggg

SEQ ID NO: 3120841 - RNA, 19 nt, Human
gcccaguuggguggaugcc

SEQ ID NO: 3120842 - RNA, 21 nt, Human
gcccaguuggguggaugccug

SEQ ID NO: 3120843 - RNA, 15 nt, Human
gccugaagucacaca

SEQ ID NO: 3120844 - RNA, 16 nt, Human
gccugaagucacacag

SEQ ID NO: 3120845 - RNA, 17 nt, Human
gccugaagucacacagu

SEQ ID NO: 3120846 - RNA, 18 nt, Human
gccugaagucacacagug

SEQ ID NO: 3120847 - RNA, 20 nt, Human
gccuggauggggcugcaccg

SEQ ID NO: 3120848 - RNA, 18 nt, Human
gccuggauggggcugcac

SEQ ID NO: 3120849 - RNA, 16 nt, Human
gccuggauggggcugc

SEQ ID NO: 3120850 - RNA, 15 nt, Human
gcggggacagcuccu

SEQ ID NO: 3120851 - RNA, 17 nt, Human
gcggggacagcuccuuc

SEQ ID NO: 3120852 - RNA, 19 nt, Human
gcggugagaggggaacaga

SEQ ID NO: 3120853 - RNA, 13 nt, Human
gcgguccacccag

SEQ ID NO: 3120854 - RNA, 14 nt, Human
gcgguccacccagg

SEQ ID NO: 3120855 - RNA, 21 nt, Human
gcgcugccccuggcagccccu

SEQ ID NO: 3120856 - RNA, 18 nt, Human
gcgcugccccuggcagcc

SEQ ID NO: 3120857 - RNA, 17 nt, Human
gcgcugccccuggcagc

SEQ ID NO: 3120858 - RNA, 16 nt, Human
gcggagaaaggaaggg

SEQ ID NO: 3120859 - RNA, 19 nt, Human
gcggagacggagucccacc

SEQ ID NO: 3120860 - RNA, 14 nt, Human
gcggggacagcucc

SEQ ID NO: 3120861 - RNA, 21 nt, Human
gcgccuuaaggauguucuagc

SEQ ID NO: 3120862 - RNA, 23 nt, Human
gcgcccaguuggguggaugccug

SEQ ID NO: 3120863 - RNA, 21 nt, Human
gcgacaaugcaaaccaucauu

SEQ ID NO: 3120864 - RNA, 20 nt, Human
gcgacaaugcaaaccaucau

SEQ ID NO: 3120865 - RNA, 13 nt, Human
gcgacaaugcaaa

SEQ ID NO: 3120866 - RNA, 12 nt, Human
gcgacaaugcaa

SEQ ID NO: 3120867 - RNA, 15 nt, Human
gccuuacacaauggu

SEQ ID NO: 3120868 - RNA, 22 nt, Human
ggacagccacggccaggccaga

SEQ ID NO: 3120869 - RNA, 11 nt, Human
ggacagcuccu

SEQ ID NO: 3120870 - RNA, 15 nt, Human
ggacagcuccuucug

SEQ ID NO: 3120871 - RNA, 16 nt, Human
ggacagcuccuucugu

SEQ ID NO: 3120872 - RNA, 14 nt, Human
ggaccagagcugcc

SEQ ID NO: 3120873 - RNA, 19 nt, Human
ggaccagagcugccaccug

SEQ ID NO: 3120874 - RNA, 16 nt, Human
ggacagaggggguggc

SEQ ID NO: 3120875 - RNA, 22 nt, Human
ggacacucaaaagcugggcagg

SEQ ID NO: 3120876 - RNA, 18 nt, Human
ggaccuugaacuggguac

SEQ ID NO: 3120877 - RNA, 15 nt, Human
ggagccuccugcccu

SEQ ID NO: 3120878 - RNA, 14 nt, Human
ggagccuccugccc

SEQ ID NO: 3120879 - RNA, 21 nt, Human
ggagucccaccuuggcugcag

SEQ ID NO: 3120880 - RNA, 22 nt, Human
ggagucccaccuuggcugcagg

SEQ ID NO: 3120881 - RNA, 15 nt, Human
ggaggauguucuggg

SEQ ID NO: 3120882 - RNA, 18 nt, Human
ggaggauguucugggaca

SEQ ID NO: 3120883 - RNA, 21 nt, Human
ggaggauguucugggacacag

SEQ ID NO: 3120884 - RNA, 16 nt, Human
ggagggagggcuccag

SEQ ID NO: 3120885 - RNA, 13 nt, Human
ggagggagggcuc

SEQ ID NO: 3120886 - RNA, 17 nt, Human
ggagggagggcuccaga

SEQ ID NO: 3120887 - RNA, 22 nt, Human
ggcaugacacgaauauugcuga

SEQ ID NO: 3120888 - RNA, 23 nt, Human
ggcaugugaugagaggaaaucac

SEQ ID NO: 3120889 - RNA, 18 nt, Human
ggcaugugaugagaggaa

SEQ ID NO: 3120890 - RNA, 17 nt, Human
ggcagggucucacucug

SEQ ID NO: 3120891 - RNA, 18 nt, Human
ggcagggucucacucugu

SEQ ID NO: 3120892 - RNA, 17 nt, Human
ggcagguuggugggggc

SEQ ID NO: 3120893 - RNA, 23 nt, Human
ggcagcugcgguccacccaggag

SEQ ID NO: 3120894 - RNA, 24 nt, Human
ggcagcugcgguccacccaggagc

SEQ ID NO: 3120895 - RNA, 12 nt, Human
ggcaggguccua

SEQ ID NO: 3120896 - RNA, 21 nt, Human
ggcagcugcgguccacccagg

SEQ ID NO: 3120897 - RNA, 17 nt, Human
ggcagaguugaagacag

SEQ ID NO: 3120898 - RNA, 19 nt, Human
ggcagaguugaagacagag

SEQ ID NO: 3120899 - RNA, 20 nt, Human
ggcauguucucugaggacac

SEQ ID NO: 3120900 - RNA, 22 nt, Human
ggccacagaaaauucuucucca

SEQ ID NO: 3120901 - RNA, 20 nt, Human
ggccacugugaagagaacca

SEQ ID NO: 3120902 - RNA, 11 nt, Human
ggccaggagcc

SEQ ID NO: 3120903 - RNA, 14 nt, Human
ggccaggcccucug

SEQ ID NO: 3120904 - RNA, 13 nt, Human
ggccaggagccuc

SEQ ID NO: 3120905 - RNA, 17 nt, Human
ggccaggcccucugccc

SEQ ID NO: 3120906 - RNA, 16 nt, Human
ggccaggcccucugcc

SEQ ID NO: 3120907 - RNA, 15 nt, Human
ggccaggcccucugc

SEQ ID NO: 3120908 - RNA, 12 nt, Human
ggcccagagagg

SEQ ID NO: 3120909 - RNA, 17 nt, Human
ggcaagcaccuccugcc

SEQ ID NO: 3120910 - RNA, 21 nt, Human
ggauucuuccucccucccucu

SEQ ID NO: 3120911 - RNA, 16 nt, Human
ggauucuuccucccuc

SEQ ID NO: 3120912 - RNA, 18 nt, Human
ggcaagcaccuccugccu

SEQ ID NO: 3120913 - RNA, 19 nt, Human
ggcaagcaccuccugccuc

SEQ ID NO: 3120914 - RNA, 17 nt, Human
ggcaccagcagccugga

SEQ ID NO: 3120915 - RNA, 18 nt, Human
ggcacccggccccugcug

SEQ ID NO: 3120916 - RNA, 19 nt, Human
ggcacccggccccugcugg

SEQ ID NO: 3120917 - RNA, 20 nt, Human
ggcacccggccccugcuggu

SEQ ID NO: 3120918 - RNA, 17 nt, Human
ggcacccggccccugcu

SEQ ID NO: 3120919 - RNA, 18 nt, Human
ggcacucagaagacacug

SEQ ID NO: 3120920 - RNA, 19 nt, Human
ggcacucagaagacacuga

SEQ ID NO: 3120921 - RNA, 22 nt, Human
ggcagagcagagaccaucccug

SEQ ID NO: 3120922 - RNA, 18 nt, Human
ggaugccugguggcagcu

SEQ ID NO: 3120923 - RNA, 19 nt, Human
ggaugccugguggcagcug

SEQ ID NO: 3120924 - RNA, 20 nt, Human
ggaugccugguggcagcugc

SEQ ID NO: 3120925 - RNA, 21 nt, Human
ggaugccugguggcagcugcg

SEQ ID NO: 3120926 - RNA, 16 nt, Human
ggaugaucuaggaaga

SEQ ID NO: 3120927 - RNA, 22 nt, Human
ggaugaucuaggaagacuuugg

SEQ ID NO: 3120928 - RNA, 18 nt, Human
ggaugaucuaggaagacu

SEQ ID NO: 3120929 - RNA, 23 nt, Human
ggagucccaccuuggcugcaggg

SEQ ID NO: 3120930 - RNA, 19 nt, Human
ggaugcccaaagaugcagc

SEQ ID NO: 3120931 - RNA, 13 nt, Human
ggaugccuggugg

SEQ ID NO: 3120932 - RNA, 17 nt, Human
ggaugccugguggcagc

SEQ ID NO: 3120933 - RNA, 18 nt, Human
ggaugcccaaagaugcag

SEQ ID NO: 3120934 - RNA, 14 nt, Human
ggcuuagucacuga

SEQ ID NO: 3120935 - RNA, 20 nt, Human
ggcuucacggaagagccuug

SEQ ID NO: 3120936 - RNA, 21 nt, Human
ggcuucacggaagagccuugc

SEQ ID NO: 3120937 - RNA, 18 nt, Human
ggcuuggggaccagagcu

SEQ ID NO: 3120938 - RNA, 17 nt, Human
ggcuuggggaccagagc

SEQ ID NO: 3120939 - RNA, 16 nt, Human
ggcuguuggcuggggg

SEQ ID NO: 3120940 - RNA, 20 nt, Human
ggcuguuggcugggggccuc

SEQ ID NO: 3120941 - RNA, 14 nt, Human
ggcuguuggcuggg

SEQ ID NO: 3120942 - RNA, 15 nt, Human
ggcuguuggcugggg

SEQ ID NO: 3120943 - RNA, 16 nt, Human
ggcugggggaagaagc

SEQ ID NO: 3120944 - RNA, 14 nt, Human
ggcugggggccuca

SEQ ID NO: 3120945 - RNA, 11 nt, Human
ggcugggcuuc

SEQ ID NO: 3120946 - RNA, 21 nt, Human
ggcugggcuucaguggcagcu

SEQ ID NO: 3120947 - RNA, 22 nt, Human
ggcugggcuucaguggcagcug

SEQ ID NO: 3120948 - RNA, 18 nt, Human
ggcugggcuucaguggca

SEQ ID NO: 3120949 - RNA, 18 nt, Human
ggcugggcucccuuccca

SEQ ID NO: 3120950 - RNA, 21 nt, Human
ggcugggcucccuucccaccu

SEQ ID NO: 3120951 - RNA, 20 nt, Human
ggcugggcucccuucccacc

SEQ ID NO: 3120952 - RNA, 20 nt, Human
ggcugcuucaaggauccuga

SEQ ID NO: 3120953 - RNA, 19 nt, Human
ggcugcuucaaggauccug

SEQ ID NO: 3120954 - RNA, 15 nt, Human
ggcugcuucaaggau

SEQ ID NO: 3120955 - RNA, 13 nt, Human
gggagcugccugu

SEQ ID NO: 3120956 - RNA, 21 nt, Human
gggagcugccuguucagcucc

SEQ ID NO: 3120957 - RNA, 22 nt, Human
gggagcugccuguucagcucca

SEQ ID NO: 3120958 - RNA, 20 nt, Human
gggaggugggauccuccagg

SEQ ID NO: 3120959 - RNA, 23 nt, Human
gggaggauugcuugagcucagga

SEQ ID NO: 3120960 - RNA, 21 nt, Human
gggagugaguugauagcacag

SEQ ID NO: 3120961 - RNA, 22 nt, Human
gggaggauguucugggacacag

SEQ ID NO: 3120962 - RNA, 21 nt, Human
gggaggauugcuugagcucag

SEQ ID NO: 3120963 - RNA, 23 nt, Human
gggaggaucucuugagccuggga

SEQ ID NO: 3120964 - RNA, 19 nt, Human
gggaauguuugccucugcc

SEQ ID NO: 3120965 - RNA, 21 nt, Human
gggaauguuugccucugccuc

SEQ ID NO: 3120966 - RNA, 14 nt, Human
gggacacccuguga

SEQ ID NO: 3120967 - RNA, 17 nt, Human
gggacucaaugcacuga

SEQ ID NO: 3120968 - RNA, 19 nt, Human
gggacucaaugcacugaca

SEQ ID NO: 3120969 - RNA, 16 nt, Human
gggacucaaugcacug

SEQ ID NO: 3120970 - RNA, 23 nt, Human
gggacucaaugcacugacauugu

SEQ ID NO: 3120971 - RNA, 24 nt, Human
ggcgcagcauauucaggaagcuca

SEQ ID NO: 3120972 - RNA, 23 nt, Human
ggcgcagcauauucaggaagcuc

SEQ ID NO: 3120973 - RNA, 23 nt, Human
ggccugggggcugggcagaggaa

SEQ ID NO: 3120974 - RNA, 16 nt, Human
ggccuggccugagcug

SEQ ID NO: 3120975 - RNA, 15 nt, Human
ggccuggccugagcu

SEQ ID NO: 3120976 - RNA, 14 nt, Human
ggccuggccugagc

SEQ ID NO: 3120977 - RNA, 13 nt, Human
ggccuggccugag

SEQ ID NO: 3120978 - RNA, 10 nt, Human
ggccuggccu

SEQ ID NO: 3120979 - RNA, 23 nt, Human
ggccuggccccucagggucccug

SEQ ID NO: 3120980 - RNA, 18 nt, Human
ggccuggccccucagggu

SEQ ID NO: 3120981 - RNA, 17 nt, Human
ggccuggccccucaggg

SEQ ID NO: 3120982 - RNA, 15 nt, Human
ggccuggccccucag

SEQ ID NO: 3120983 - RNA, 14 nt, Human
ggccuggccccuca

SEQ ID NO: 3120984 - RNA, 13 nt, Human
ggccuggccccuc

SEQ ID NO: 3120985 - RNA, 19 nt, Human
ggccucugcacuccccugc

SEQ ID NO: 3120986 - RNA, 18 nt, Human
ggccucugcacuccccug

SEQ ID NO: 3120987 - RNA, 22 nt, Human
ggccucugcacuccccugcugg

SEQ ID NO: 3120988 - RNA, 20 nt, Human
ggcccagagggccugcaagg

SEQ ID NO: 3120989 - RNA, 19 nt, Human
ggcccagagggccugcaag

SEQ ID NO: 3120990 - RNA, 17 nt, Human
ggcccagagggccugca

SEQ ID NO: 3120991 - RNA, 14 nt, Human
ggcccagagggccu

SEQ ID NO: 3120992 - RNA, 14 nt, Human
ggccucaagugauu

SEQ ID NO: 3120993 - RNA, 22 nt, Human
ggccucaagugauucuccugcc

SEQ ID NO: 3120994 - RNA, 20 nt, Human
ggccuagcauacguacacau

SEQ ID NO: 3120995 - RNA, 22 nt, Human
ggccuagcauacguacacauuu

SEQ ID NO: 3120996 - RNA, 20 nt, Human
ggccucgguguggagaagcg

SEQ ID NO: 3120997 - RNA, 14 nt, Human
ggccuccugugugu

SEQ ID NO: 3120998 - RNA, 16 nt, Human
ggccucugcacucccc

SEQ ID NO: 3120999 - RNA, 15 nt, Human
ggcgcgguggcucac

SEQ ID NO: 3121000 - RNA, 17 nt, Human
ggcgcugccccuggcag

SEQ ID NO: 3121001 - RNA, 11 nt, Human
ggcgcugcccc

SEQ ID NO: 3121002 - RNA, 12 nt, Human
ggcuccaggcuc

SEQ ID NO: 3121003 - RNA, 13 nt, Human
ggcuccaggcucc

SEQ ID NO: 3121004 - RNA, 13 nt, Human
ggcuccaggagca

SEQ ID NO: 3121005 - RNA, 17 nt, Human
ggcuccaggagcagcca

SEQ ID NO: 3121006 - RNA, 16 nt, Human
ggcuccaggagcagcc

SEQ ID NO: 3121007 - RNA, 14 nt, Human
ggcuccaggagcag

SEQ ID NO: 3121008 - RNA, 10 nt, Human
ggcuccagac

SEQ ID NO: 3121009 - RNA, 12 nt, Human
ggcuaugcauuu

SEQ ID NO: 3121010 - RNA, 13 nt, Human
ggcuaugcauuug

SEQ ID NO: 3121011 - RNA, 9 nt, Human
ggcuccaga

SEQ ID NO: 3121012 - RNA, 14 nt, Human
ggcuccaggcuccu

SEQ ID NO: 3121013 - RNA, 16 nt, Human
ggcucucaggccagcu

SEQ ID NO: 3121014 - RNA, 15 nt, Human
ggcucucaggccagc

SEQ ID NO: 3121015 - RNA, 20 nt, Human
ggcucucaggccagcugcuu

SEQ ID NO: 3121016 - RNA, 19 nt, Human
ggcucucaggccagcugcu

SEQ ID NO: 3121017 - RNA, 18 nt, Human
ggcucucaggccagcugc

SEQ ID NO: 3121018 - RNA, 17 nt, Human
ggcucucaggccagcug

SEQ ID NO: 3121019 - RNA, 14 nt, Human
ggcucucaggccag

SEQ ID NO: 3121020 - RNA, 12 nt, Human
ggcucugcccuu

SEQ ID NO: 3121021 - RNA, 15 nt, Human
ggcucugccucccau

SEQ ID NO: 3121022 - RNA, 13 nt, Human
ggcucugccuccc

SEQ ID NO: 3121023 - RNA, 15 nt, Human
ggcucugcccuuggu

SEQ ID NO: 3121024 - RNA, 14 nt, Human
ggcucugcccuugg

SEQ ID NO: 3121025 - RNA, 16 nt, Human
ggcucugccucccauc

SEQ ID NO: 3121026 - RNA, 14 nt, Human
cacucuggcagcuc

SEQ ID NO: 3121027 - RNA, 13 nt, Human
cacucuggcagcu

SEQ ID NO: 3121028 - RNA, 12 nt, Human
cacucuggcagc

SEQ ID NO: 3121029 - RNA, 12 nt, Human
cacucuccuugg

SEQ ID NO: 3121030 - RNA, 23 nt, Human
cacucugagacucgcgacaaugc

SEQ ID NO: 3121031 - RNA, 12 nt, Human
cacucugagacu

SEQ ID NO: 3121032 - RNA, 15 nt, Human
cacuccccugcuggg

SEQ ID NO: 3121033 - RNA, 12 nt, Human
cacucccugcaa

SEQ ID NO: 3121034 - RNA, 16 nt, Human
cacucccugcaaccug

SEQ ID NO: 3121035 - RNA, 13 nt, Human
cacucccugcaac

SEQ ID NO: 3121036 - RNA, 22 nt, Human
cacucauugaccugaggcccuu

SEQ ID NO: 3121037 - RNA, 20 nt, Human
cacucauugaccugaggccc

SEQ ID NO: 3121038 - RNA, 19 nt, Human
cacucauugaccugaggcc

SEQ ID NO: 3121039 - RNA, 18 nt, Human
cacucauugaccugaggc

SEQ ID NO: 3121040 - RNA, 16 nt, Human
cacucaguccauagca

SEQ ID NO: 3121041 - RNA, 15 nt, Human
cacucauugaccuga

SEQ ID NO: 3121042 - RNA, 17 nt, Human
cacucccugcaaccuga

SEQ ID NO: 3121043 - RNA, 21 nt, Human
cacuccuucacagaugggugc

SEQ ID NO: 3121044 - RNA, 14 nt, Human
cacuccuucacaga

SEQ ID NO: 3121045 - RNA, 12 nt, Human
cacucagaagac

SEQ ID NO: 3121046 - RNA, 16 nt, Human
cacucagaagacacug

SEQ ID NO: 3121047 - RNA, 17 nt, Human
cacucagaagacacuga

SEQ ID NO: 3121048 - RNA, 19 nt, Human
cacucacauuuauucugcu

SEQ ID NO: 3121049 - RNA, 20 nt, Human
cacucacauuuauucugcuc

SEQ ID NO: 3121050 - RNA, 22 nt, Human
cacucagaagacacugaugggc

SEQ ID NO: 3121051 - RNA, 18 nt, Human
cacucagaagacacugau

SEQ ID NO: 3121052 - RNA, 19 nt, Human
cacucagaagacacugaug

SEQ ID NO: 3121053 - RNA, 20 nt, Human
cacuauguugcccaggcagg

SEQ ID NO: 3121054 - RNA, 21 nt, Human
cacuauguugcccaggcaggu

SEQ ID NO: 3121055 - RNA, 19 nt, Human
cacucaaaagcugggcagg

SEQ ID NO: 3121056 - RNA, 18 nt, Human
cacucaaaagcugggcag

SEQ ID NO: 3121057 - RNA, 17 nt, Human
cacucaaaagcugggca

SEQ ID NO: 3121058 - RNA, 15 nt, Human
cacucaaaagcuggg

SEQ ID NO: 3121059 - RNA, 20 nt, Human
cacucaaaagcugggcaggu

SEQ ID NO: 3121060 - RNA, 15 nt, Human
cacuauguugcccag

SEQ ID NO: 3121061 - RNA, 16 nt, Human
cacuauguugcccagg

SEQ ID NO: 3121062 - RNA, 17 nt, Human
cacuauguugcccaggc

SEQ ID NO: 3121063 - RNA, 18 nt, Human
cacuauguugcccaggca

SEQ ID NO: 3121064 - RNA, 19 nt, Human
cacuauguugcccaggcag

SEQ ID NO: 3121065 - RNA, 14 nt, Human
cacuauagccuagg

SEQ ID NO: 3121066 - RNA, 18 nt, Human
cacuauaauguaagcucu

SEQ ID NO: 3121067 - RNA, 21 nt, Human
cacuauagccuaggugacaga

SEQ ID NO: 3121068 - RNA, 14 nt, Human
cacuauaauguaag

SEQ ID NO: 3121069 - RNA, 17 nt, Human
cacuaaggugugcucug

SEQ ID NO: 3121070 - RNA, 18 nt, Human
cacuaaggugugcucuga

SEQ ID NO: 3121071 - RNA, 18 nt, Human
cacuaaccacgcuggacc

SEQ ID NO: 3121072 - RNA, 14 nt, Human
cacuaaccacgcug

SEQ ID NO: 3121073 - RNA, 15 nt, Human
cacuaaccacgcugg

SEQ ID NO: 3121074 - RNA, 16 nt, Human
cacuaaccacgcugga

SEQ ID NO: 3121075 - RNA, 17 nt, Human
cacgcacuucgggaggu

SEQ ID NO: 3121076 - RNA, 16 nt, Human
cacgauuucuguuuag

SEQ ID NO: 3121077 - RNA, 12 nt, Human
cacgauuucugu

SEQ ID NO: 3121078 - RNA, 14 nt, Human
cacgauuucuguuu

SEQ ID NO: 3121079 - RNA, 18 nt, Human
cacgcccccacuggugac

SEQ ID NO: 3121080 - RNA, 17 nt, Human
cacgcccccacugguga

SEQ ID NO: 3121081 - RNA, 23 nt, Human
cacgccagauucuuuccugaggc

SEQ ID NO: 3121082 - RNA, 15 nt, Human
cacgcccccacuggu

SEQ ID NO: 3121083 - RNA, 13 nt, Human
cacgcccccacug

SEQ ID NO: 3121084 - RNA, 13 nt, Human
cacgccacugcac

SEQ ID NO: 3121085 - RNA, 15 nt, Human
cacgccacugcacua

SEQ ID NO: 3121086 - RNA, 19 nt, Human
cacgccagauucuuuccug

SEQ ID NO: 3121087 - RNA, 22 nt, Human
cacgccagauucuuuccugagg

SEQ ID NO: 3121088 - RNA, 20 nt, Human
cacgccagauucuuuccuga

SEQ ID NO: 3121089 - RNA, 15 nt, Human
caccuugacagggca

SEQ ID NO: 3121090 - RNA, 16 nt, Human
caccuugacagggcac

SEQ ID NO: 3121091 - RNA, 13 nt, Human
caccuugacaggg

SEQ ID NO: 3121092 - RNA, 17 nt, Human
cacgacugcccggcagg

SEQ ID NO: 3121093 - RNA, 16 nt, Human
cacgacugcccggcag

SEQ ID NO: 3121094 - RNA, 22 nt, Human
cacgaauauugcugauggugca

SEQ ID NO: 3121095 - RNA, 19 nt, Human
cacgaauauugcugauggu

SEQ ID NO: 3121096 - RNA, 16 nt, Human
cacgaauauugcugau

SEQ ID NO: 3121097 - RNA, 23 nt, Human
caccuuagacagucccugccaau

SEQ ID NO: 3121098 - RNA, 21 nt, Human
caccuuagacagucccugcca

SEQ ID NO: 3121099 - RNA, 19 nt, Human
caccuuagacagucccugc

SEQ ID NO: 3121100 - RNA, 18 nt, Human
caccuuagacagucccug

SEQ ID NO: 3121101 - RNA, 16 nt, Human
caccuuagacaguccc

SEQ ID NO: 3121102 - RNA, 14 nt, Human
caccuuagacaguc

SEQ ID NO: 3121103 - RNA, 20 nt, Human
cacgccuguaauccuagcac

SEQ ID NO: 3121104 - RNA, 19 nt, Human
cacgccuguaauccuagca

SEQ ID NO: 3121105 - RNA, 15 nt, Human
cacgcgugcacacac

SEQ ID NO: 3121106 - RNA, 16 nt, Human
cacgcgugcacacacc

SEQ ID NO: 3121107 - RNA, 21 nt, Human
cacgcgugcacacaccagagc

SEQ ID NO: 3121108 - RNA, 23 nt, Human
cacgcgugcacacaccagagccc

SEQ ID NO: 3121109 - RNA, 15 nt, Human
cacggcucacugcag

SEQ ID NO: 3121110 - RNA, 20 nt, Human
cacgcuggaccuugaacugg

SEQ ID NO: 3121111 - RNA, 17 nt, Human
cacgcuggaccuugaac

SEQ ID NO: 3121112 - RNA, 16 nt, Human
cacggcucacugcagc

SEQ ID NO: 3121113 - RNA, 17 nt, Human
cacggcucacugcagcc

SEQ ID NO: 3121114 - RNA, 19 nt, Human
cacggcucacugcagccuc

SEQ ID NO: 3121115 - RNA, 20 nt, Human
cacggcucacugcagccuca

SEQ ID NO: 3121116 - RNA, 18 nt, Human
cacguacacacacauaca

SEQ ID NO: 3121117 - RNA, 19 nt, Human
cacguacacacacauacac

SEQ ID NO: 3121118 - RNA, 14 nt, Human
cacguacacacaca

SEQ ID NO: 3121119 - RNA, 19 nt, Human
cacgugguccuaaucuucu

SEQ ID NO: 3121120 - RNA, 16 nt, Human
cacgugguccuaaucu

SEQ ID NO: 3121121 - RNA, 23 nt, Human
cacguuucuaaaggcuaccuuug

SEQ ID NO: 3121122 - RNA, 12 nt, Human
cacguuucuaaa

SEQ ID NO: 3121123 - RNA, 14 nt, Human
cacguuucuaaagg

SEQ ID NO: 3121124 - RNA, 21 nt, Human
cacuucagcugacuuuucugu

SEQ ID NO: 3121125 - RNA, 12 nt, Human
cacuucagcuga

SEQ ID NO: 3121126 - RNA, 16 nt, Human
cacuucccuacaugga

SEQ ID NO: 3121127 - RNA, 23 nt, Human
cacuucgggaggucgaggcagga

SEQ ID NO: 3121128 - RNA, 21 nt, Human
cacuucgggaggucgaggcag

SEQ ID NO: 3121129 - RNA, 22 nt, Human
cacuucugccauauucuguugg

SEQ ID NO: 3121130 - RNA, 20 nt, Human
cacuugagaauuacccuuuu

SEQ ID NO: 3121131 - RNA, 19 nt, Human
cacuugacaucaacugcau

SEQ ID NO: 3121132 - RNA, 17 nt, Human
cacuugagaauuacccu

SEQ ID NO: 3121133 - RNA, 13 nt, Human
cacuugaguccag

SEQ ID NO: 3121134 - RNA, 13 nt, Human
cacuugcagacuc

SEQ ID NO: 3121135 - RNA, 16 nt, Human
cacuugacaucaacug

SEQ ID NO: 3121136 - RNA, 18 nt, Human
cacuuucuagccagagga

SEQ ID NO: 3121137 - RNA, 20 nt, Human
cacuuucuagccagaggaga

SEQ ID NO: 3121138 - RNA, 19 nt, Human
cacuuucuagccagaggag

SEQ ID NO: 3121139 - RNA, 14 nt, Human
cacuugcagacucu

SEQ ID NO: 3121140 - RNA, 18 nt, Human
cacuugcagacucuacag

SEQ ID NO: 3121141 - RNA, 19 nt, Human
cacuugcagacucuacaga

SEQ ID NO: 3121142 - RNA, 22 nt, Human
cacuugcagacucuacagaggc

SEQ ID NO: 3121143 - RNA, 24 nt, Human
cacuugcagacucuacagaggcca

SEQ ID NO: 3121144 - RNA, 22 nt, Human
cacuguucucugcccuccaaga

SEQ ID NO: 3121145 - RNA, 21 nt, Human
cacuguucucugcccuccaag

SEQ ID NO: 3121146 - RNA, 19 nt, Human
cacuguucucugcccucca

SEQ ID NO: 3121147 - RNA, 17 nt, Human
cacuguucucugcccuc

SEQ ID NO: 3121148 - RNA, 16 nt, Human
cacuguucucugcccu

SEQ ID NO: 3121149 - RNA, 15 nt, Human
cacuguucucugccc

SEQ ID NO: 3121150 - RNA, 14 nt, Human
cacuguucucugcc

SEQ ID NO: 3121151 - RNA, 13 nt, Human
cacuguucucugc

SEQ ID NO: 3121152 - RNA, 15 nt, Human
cacugugcugagucu

SEQ ID NO: 3121153 - RNA, 13 nt, Human
cacugugcugagu

SEQ ID NO: 3121154 - RNA, 18 nt, Human
cacugugccaugugccag

SEQ ID NO: 3121155 - RNA, 15 nt, Human
cacugugccaugugc

SEQ ID NO: 3121156 - RNA, 16 nt, Human
cacugugccaugugcc

SEQ ID NO: 3121157 - RNA, 22 nt, Human
cacugugcugagucugaaggcu

SEQ ID NO: 3121158 - RNA, 21 nt, Human
cacugugcugagucugaaggc

SEQ ID NO: 3121159 - RNA, 20 nt, Human
cacugugcugagucugaagg

SEQ ID NO: 3121160 - RNA, 17 nt, Human
cacugugcugagucuga

SEQ ID NO: 3121161 - RNA, 13 nt, Human
cacugugaagaga

SEQ ID NO: 3121162 - RNA, 14 nt, Human
cacugugccaugug

SEQ ID NO: 3121163 - RNA, 21 nt, Human
cacugcuuuuggucuguguga

SEQ ID NO: 3121164 - RNA, 17 nt, Human
cacuggaacacuaauga

SEQ ID NO: 3121165 - RNA, 16 nt, Human
cacugcuuccagugag

SEQ ID NO: 3121166 - RNA, 15 nt, Human
cacugcuuccaguga

SEQ ID NO: 3121167 - RNA, 14 nt, Human
cacugcuuccagug

SEQ ID NO: 3121168 - RNA, 13 nt, Human
cacugcuuaacuu

SEQ ID NO: 3121169 - RNA, 20 nt, Human
cacugcuuuuggucugugug

SEQ ID NO: 3121170 - RNA, 22 nt, Human
cacugcuuccagugaggcucug

SEQ ID NO: 3121171 - RNA, 21 nt, Human
cacugcuuccagugaggcucu

SEQ ID NO: 3121172 - RNA, 20 nt, Human
cacugcuuccagugaggcuc

SEQ ID NO: 3121173 - RNA, 19 nt, Human
cacugcuuccagugaggcu

SEQ ID NO: 3121174 - RNA, 18 nt, Human
cacugcuuccagugaggc

SEQ ID NO: 3121175 - RNA, 14 nt, Human
cacugcaccgggcc

SEQ ID NO: 3121176 - RNA, 15 nt, Human
cacugcaccgggcca

SEQ ID NO: 3121177 - RNA, 16 nt, Human
cacugcaccgggccac

SEQ ID NO: 3121178 - RNA, 18 nt, Human
cacugcaccgggccacag

SEQ ID NO: 3121179 - RNA, 19 nt, Human
cacugcaccgggccacaga

SEQ ID NO: 3121180 - RNA, 18 nt, Human
cacugcacuauagccuag

SEQ ID NO: 3121181 - RNA, 12 nt, Human
cacugcucuggu

SEQ ID NO: 3121182 - RNA, 13 nt, Human
cacugagacagcc

SEQ ID NO: 3121183 - RNA, 12 nt, Human
cacugagacagc

SEQ ID NO: 3121184 - RNA, 22 nt, Human
cacugagacagcccgggcucug

SEQ ID NO: 3121185 - RNA, 19 nt, Human
cacugagacagcccgggcu

SEQ ID NO: 3121186 - RNA, 17 nt, Human
cacugagacagcccggg

SEQ ID NO: 3121187 - RNA, 14 nt, Human
cacugagacagccc

SEQ ID NO: 3121188 - RNA, 23 nt, Human
cacucuggcagcucagagagggu

SEQ ID NO: 3121189 - RNA, 21 nt, Human
cacucuggcagcucagagagg

SEQ ID NO: 3121190 - RNA, 20 nt, Human
cacucuggcagcucagagag

SEQ ID NO: 3121191 - RNA, 19 nt, Human
cacucuggcagcucagaga

SEQ ID NO: 3121192 - RNA, 17 nt, Human
cacucuggcagcucaga

SEQ ID NO: 3121193 - RNA, 16 nt, Human
cacucuggcagcucag

SEQ ID NO: 3121194 - RNA, 15 nt, Human
cacucuggcagcuca

SEQ ID NO: 3121195 - RNA, 15 nt, Human
cacucugucgcccag

SEQ ID NO: 3121196 - RNA, 16 nt, Human
cacucugucgcccagu

SEQ ID NO: 3121197 - RNA, 19 nt, Human
cacucugucgcccagucug

SEQ ID NO: 3121198 - RNA, 23 nt, Human
cacugacauuguuggccaaagcc

SEQ ID NO: 3121199 - RNA, 14 nt, Human
cacugcaaccuccg

SEQ ID NO: 3121200 - RNA, 16 nt, Human
cacugcaaccuccgcc

SEQ ID NO: 3121201 - RNA, 23 nt, Human
cacugcaaccuccgccucuuggg

SEQ ID NO: 3121202 - RNA, 13 nt, Human
cacugcaaccucc

SEQ ID NO: 3121203 - RNA, 23 nt, Human
cacugagacagcccgggcucugc

SEQ ID NO: 3121204 - RNA, 14 nt, Human
cacugaugggcaac

SEQ ID NO: 3121205 - RNA, 18 nt, Human
cacugaugggcaaccccc

SEQ ID NO: 3121206 - RNA, 24 nt, Human
cacugaugggcaacccccagccug

SEQ ID NO: 3121207 - RNA, 16 nt, Human
cacgccagauucuuuc

SEQ ID NO: 3121208 - RNA, 12 nt, Human
cacccggccccu

SEQ ID NO: 3121209 - RNA, 19 nt, Human
cacccgcuaagagggaggg

SEQ ID NO: 3121210 - RNA, 13 nt, Human
cacccggccccug

SEQ ID NO: 3121211 - RNA, 14 nt, Human
cacccggccccugc

SEQ ID NO: 3121212 - RNA, 16 nt, Human
cacccggccccugcug

SEQ ID NO: 3121213 - RNA, 17 nt, Human
cacccggccccugcugg

SEQ ID NO: 3121214 - RNA, 18 nt, Human
cacccggccccugcuggu

SEQ ID NO: 3121215 - RNA, 21 nt, Human
cacccggccccugcugguuca

SEQ ID NO: 3121216 - RNA, 13 nt, Human
cacauauugauuu

SEQ ID NO: 3121217 - RNA, 20 nt, Human
caccccucaacaccucugca

SEQ ID NO: 3121218 - RNA, 13 nt, Human
caccgcagacagg

SEQ ID NO: 3121219 - RNA, 12 nt, Human
caccgcagacag

SEQ ID NO: 3121220 - RNA, 18 nt, Human
caccgcagacaggaccag

SEQ ID NO: 3121221 - RNA, 17 nt, Human
caccgcagacaggacca

SEQ ID NO: 3121222 - RNA, 15 nt, Human
caccgcagacaggac

SEQ ID NO: 3121223 - RNA, 14 nt, Human
caccgcagacagga

SEQ ID NO: 3121224 - RNA, 22 nt, Human
caccgaaaacguggcugcuuca

SEQ ID NO: 3121225 - RNA, 21 nt, Human
caccgaaaacguggcugcuuc

SEQ ID NO: 3121226 - RNA, 19 nt, Human
caccgaaaacguggcugcu

SEQ ID NO: 3121227 - RNA, 18 nt, Human
caccgaaaacguggcugc

SEQ ID NO: 3121228 - RNA, 15 nt, Human
caccgaaaacguggc

SEQ ID NO: 3121229 - RNA, 23 nt, Human
cacccugugauggggcccugccu

SEQ ID NO: 3121230 - RNA, 22 nt, Human
cacccugugauggggcccugcc

SEQ ID NO: 3121231 - RNA, 21 nt, Human
cacccugugauggggcccugc

SEQ ID NO: 3121232 - RNA, 20 nt, Human
cacccugugauggggcccug

SEQ ID NO: 3121233 - RNA, 18 nt, Human
cacccugugauggggccc

SEQ ID NO: 3121234 - RNA, 15 nt, Human
cacccugugaugggg

SEQ ID NO: 3121235 - RNA, 12 nt, Human
cacccugugaug

SEQ ID NO: 3121236 - RNA, 11 nt, Human
cacccugugau

SEQ ID NO: 3121237 - RNA, 20 nt, Human
caccugcggugcuaucuccc

SEQ ID NO: 3121238 - RNA, 23 nt, Human
caccugcggugcuaucuccccca

SEQ ID NO: 3121239 - RNA, 20 nt, Human
caccuggaauauauaaccag

SEQ ID NO: 3121240 - RNA, 19 nt, Human
caccucugcacaagcugca

SEQ ID NO: 3121241 - RNA, 18 nt, Human
caccucugcacaagcugc

SEQ ID NO: 3121242 - RNA, 19 nt, Human
caccucucucacuccuuga

SEQ ID NO: 3121243 - RNA, 18 nt, Human
caccucucucacuccuug

SEQ ID NO: 3121244 - RNA, 17 nt, Human
caccucucucacuccuu

SEQ ID NO: 3121245 - RNA, 15 nt, Human
caccucucucacucc

SEQ ID NO: 3121246 - RNA, 14 nt, Human
caccugaagacuca

SEQ ID NO: 3121247 - RNA, 15 nt, Human
caccugaagacucau

SEQ ID NO: 3121248 - RNA, 23 nt, Human
caccugaagacucauucuucugu

SEQ ID NO: 3121249 - RNA, 23 nt, Human
caccuggccucugcacuccccug

SEQ ID NO: 3121250 - RNA, 20 nt, Human
caccuggccucugcacuccc

SEQ ID NO: 3121251 - RNA, 19 nt, Human
caccuggccucugcacucc

SEQ ID NO: 3121252 - RNA, 18 nt, Human
caccuggccucugcacuc

SEQ ID NO: 3121253 - RNA, 17 nt, Human
caccuggccucugcacu

SEQ ID NO: 3121254 - RNA, 15 nt, Human
caccuggccucugca

SEQ ID NO: 3121255 - RNA, 14 nt, Human
caccuggccucugc

SEQ ID NO: 3121256 - RNA, 13 nt, Human
caccuggccucug

SEQ ID NO: 3121257 - RNA, 12 nt, Human
caccuggccucu

SEQ ID NO: 3121258 - RNA, 17 nt, Human
caccucucccuuggauu

SEQ ID NO: 3121259 - RNA, 14 nt, Human
caccucucccuugg

SEQ ID NO: 3121260 - RNA, 13 nt, Human
caccucucccuug

SEQ ID NO: 3121261 - RNA, 14 nt, Human
caccuccugccucg

SEQ ID NO: 3121262 - RNA, 13 nt, Human
caccuccugccuc

SEQ ID NO: 3121263 - RNA, 11 nt, Human
caccuccugcc

SEQ ID NO: 3121264 - RNA, 15 nt, Human
caccgggcacucaga

SEQ ID NO: 3121265 - RNA, 22 nt, Human
caccgggcacucagaagacacu

SEQ ID NO: 3121266 - RNA, 15 nt, Human
caccgggccacagag

SEQ ID NO: 3121267 - RNA, 18 nt, Human
caccgggccacagagaaa

SEQ ID NO: 3121268 - RNA, 14 nt, Human
caccgggcacucag

SEQ ID NO: 3121269 - RNA, 20 nt, Human
caccggcuggccuggccccu

SEQ ID NO: 3121270 - RNA, 18 nt, Human
caccggcuggccuggccc

SEQ ID NO: 3121271 - RNA, 17 nt, Human
caccggcuggccuggcc

SEQ ID NO: 3121272 - RNA, 14 nt, Human
caccggcuggccug

SEQ ID NO: 3121273 - RNA, 16 nt, Human
caccggcuggccuggc

SEQ ID NO: 3121274 - RNA, 15 nt, Human
caccggcuggccugg

SEQ ID NO: 3121275 - RNA, 21 nt, Human
caccgcagacaggaccaggga

SEQ ID NO: 3121276 - RNA, 19 nt, Human
cagagaaaguacuucucca

SEQ ID NO: 3121277 - RNA, 23 nt, Human
cagagaaaguacuucuccacccu

SEQ ID NO: 3121278 - RNA, 16 nt, Human
cagacccggcugcgug

SEQ ID NO: 3121279 - RNA, 12 nt, Human
cagacccugccc

SEQ ID NO: 3121280 - RNA, 14 nt, Human
cagacccugcccug

SEQ ID NO: 3121281 - RNA, 13 nt, Human
cagacccugcccu

SEQ ID NO: 3121282 - RNA, 12 nt, Human
cagacccggcug

SEQ ID NO: 3121283 - RNA, 14 nt, Human
cagacccggcugcg

SEQ ID NO: 3121284 - RNA, 21 nt, Human
cagacccugcccugugggccc

SEQ ID NO: 3121285 - RNA, 17 nt, Human
cagacccugcccugugg

SEQ ID NO: 3121286 - RNA, 16 nt, Human
cagacccugcccugug

SEQ ID NO: 3121287 - RNA, 15 nt, Human
cagacccugcccugu

SEQ ID NO: 3121288 - RNA, 22 nt, Human
cagacccugcccugugggcccc

SEQ ID NO: 3121289 - RNA, 20 nt, Human
cagaccacaaaacuuuucua

SEQ ID NO: 3121290 - RNA, 14 nt, Human
cagaccacaaaacu

SEQ ID NO: 3121291 - RNA, 20 nt, Human
cagacaguuaagagaaauga

SEQ ID NO: 3121292 - RNA, 19 nt, Human
cagacaccuugacagggca

SEQ ID NO: 3121293 - RNA, 20 nt, Human
cagacaccuugacagggcac

SEQ ID NO: 3121294 - RNA, 22 nt, Human
cagacaccuugacagggcacac

SEQ ID NO: 3121295 - RNA, 19 nt, Human
cagacauacuaaccagcag

SEQ ID NO: 3121296 - RNA, 13 nt, Human
cagacacaggccc

SEQ ID NO: 3121297 - RNA, 14 nt, Human
cagacacaggcccg

SEQ ID NO: 3121298 - RNA, 15 nt, Human
cagacacaggcccgg

SEQ ID NO: 3121299 - RNA, 17 nt, Human
cagacacaggcccggcu

SEQ ID NO: 3121300 - RNA, 18 nt, Human
cagacacaggcccggcuc

SEQ ID NO: 3121301 - RNA, 21 nt, Human
cagacacaggcccggcuccag

SEQ ID NO: 3121302 - RNA, 22 nt, Human
cagacacaggcccggcuccagg

SEQ ID NO: 3121303 - RNA, 23 nt, Human
cagacacaggcccggcuccaggc

SEQ ID NO: 3121304 - RNA, 23 nt, Human
cagacacauguccaagaagccca

SEQ ID NO: 3121305 - RNA, 22 nt, Human
cagacacauguccaagaagccc

SEQ ID NO: 3121306 - RNA, 21 nt, Human
cagacacauguccaagaagcc

SEQ ID NO: 3121307 - RNA, 17 nt, Human
cagacacauguccaaga

SEQ ID NO: 3121308 - RNA, 14 nt, Human
cagacacaugucca

SEQ ID NO: 3121309 - RNA, 22 nt, Human
cagacaaagcgugguggacaug

SEQ ID NO: 3121310 - RNA, 16 nt, Human
cagacaacaaaccugu

SEQ ID NO: 3121311 - RNA, 20 nt, Human
cagacaacaaaccuguuucu

SEQ ID NO: 3121312 - RNA, 12 nt, Human
cagacaaagcgu

SEQ ID NO: 3121313 - RNA, 24 nt, Human
cagaauuucccaaagcagugcaug

SEQ ID NO: 3121314 - RNA, 20 nt, Human
cagaauuucccaaagcagug

SEQ ID NO: 3121315 - RNA, 19 nt, Human
cagaauuucccaaagcagu

SEQ ID NO: 3121316 - RNA, 18 nt, Human
cagaauuucccaaagcag

SEQ ID NO: 3121317 - RNA, 17 nt, Human
cagaauuucccaaagca

SEQ ID NO: 3121318 - RNA, 11 nt, Human
cagaauucuca

SEQ ID NO: 3121319 - RNA, 15 nt, Human
cagaauucucuaguu

SEQ ID NO: 3121320 - RNA, 18 nt, Human
cagaauucucuaguuuga

SEQ ID NO: 3121321 - RNA, 14 nt, Human
cagaauuucccaaa

SEQ ID NO: 3121322 - RNA, 22 nt, Human
cagaaaauggaagacagcucuu

SEQ ID NO: 3121323 - RNA, 21 nt, Human
cagaaaauggaagacagcucu

SEQ ID NO: 3121324 - RNA, 20 nt, Human
cagaaaauggaagacagcuc

SEQ ID NO: 3121325 - RNA, 16 nt, Human
cagaaaauggaagaca

SEQ ID NO: 3121326 - RNA, 23 nt, Human
cagaaaauggaagacagcucuua

SEQ ID NO: 3121327 - RNA, 22 nt, Human
cacuuuuguucuugguuuguaa

SEQ ID NO: 3121328 - RNA, 14 nt, Human
cacuuuuguucuug

SEQ ID NO: 3121329 - RNA, 16 nt, Human
cacuuugggaggccaa

SEQ ID NO: 3121330 - RNA, 13 nt, Human
cacuuugggaggc

SEQ ID NO: 3121331 - RNA, 12 nt, Human
cacuuugggagg

SEQ ID NO: 3121332 - RNA, 23 nt, Human
cacuuuguucuggcucuuccagg

SEQ ID NO: 3121333 - RNA, 16 nt, Human
cacuuuguucuggcuc

SEQ ID NO: 3121334 - RNA, 14 nt, Human
cacuuuguucuggc

SEQ ID NO: 3121335 - RNA, 13 nt, Human
cacuuuguucugg

SEQ ID NO: 3121336 - RNA, 22 nt, Human
cacuuucuagccagaggagaga

SEQ ID NO: 3121337 - RNA, 17 nt, Human
cagaaucucaaauaacu

SEQ ID NO: 3121338 - RNA, 18 nt, Human
cagaaucucaaauaacua

SEQ ID NO: 3121339 - RNA, 18 nt, Human
cagaaggaagacuucauc

SEQ ID NO: 3121340 - RNA, 17 nt, Human
cagaaggaagacuucau

SEQ ID NO: 3121341 - RNA, 16 nt, Human
cagaaggaagacuuca

SEQ ID NO: 3121342 - RNA, 19 nt, Human
cagaaggaagacuucaucc

SEQ ID NO: 3121343 - RNA, 21 nt, Human
cagaagacacugaugggcaac

SEQ ID NO: 3121344 - RNA, 19 nt, Human
cagagugagacucugucuc

SEQ ID NO: 3121345 - RNA, 20 nt, Human
cagagugagacucugucuca

SEQ ID NO: 3121346 - RNA, 22 nt, Human
cagagucucacuguugcccagg

SEQ ID NO: 3121347 - RNA, 23 nt, Human
cagagucucacuguugcccaggc

SEQ ID NO: 3121348 - RNA, 16 nt, Human
cagagugagacucugu

SEQ ID NO: 3121349 - RNA, 17 nt, Human
cagagugagacucuguc

SEQ ID NO: 3121350 - RNA, 18 nt, Human
cagagugagacucugucu

SEQ ID NO: 3121351 - RNA, 19 nt, Human
cagagggccugcaagggag

SEQ ID NO: 3121352 - RNA, 15 nt, Human
cagagggccugcaag

SEQ ID NO: 3121353 - RNA, 20 nt, Human
cagagggagugacagaggca

SEQ ID NO: 3121354 - RNA, 21 nt, Human
cagagggagugacagaggcag

SEQ ID NO: 3121355 - RNA, 22 nt, Human
cagagggagugacagaggcagc

SEQ ID NO: 3121356 - RNA, 23 nt, Human
cagagggagugacagaggcagcc

SEQ ID NO: 3121357 - RNA, 17 nt, Human
cagagucucacuguugc

SEQ ID NO: 3121358 - RNA, 19 nt, Human
cagagucucacuguugccc

SEQ ID NO: 3121359 - RNA, 20 nt, Human
cagagucucacuguugccca

SEQ ID NO: 3121360 - RNA, 21 nt, Human
cagagucucacuguugcccag

SEQ ID NO: 3121361 - RNA, 13 nt, Human
cagagucucacug

SEQ ID NO: 3121362 - RNA, 20 nt, Human
cagaggccaugggccuccug

SEQ ID NO: 3121363 - RNA, 21 nt, Human
cagaggccaugggccuccugu

SEQ ID NO: 3121364 - RNA, 23 nt, Human
cagaggcagccccauucugccug

SEQ ID NO: 3121365 - RNA, 19 nt, Human
cagaggccaugggccuccu

SEQ ID NO: 3121366 - RNA, 16 nt, Human
cagaggccaugggccu

SEQ ID NO: 3121367 - RNA, 12 nt, Human
cagaggcagccc

SEQ ID NO: 3121368 - RNA, 13 nt, Human
cagaggcagcccc

SEQ ID NO: 3121369 - RNA, 14 nt, Human
cagaggcagcccca

SEQ ID NO: 3121370 - RNA, 15 nt, Human
cagaggcagccccau

SEQ ID NO: 3121371 - RNA, 18 nt, Human
cagaggcagccccauucu

SEQ ID NO: 3121372 - RNA, 19 nt, Human
cagaggcagccccauucug

SEQ ID NO: 3121373 - RNA, 20 nt, Human
cagaggcagccccauucugc

SEQ ID NO: 3121374 - RNA, 22 nt, Human
cagaggcagccccauucugccu

SEQ ID NO: 3121375 - RNA, 23 nt, Human
cagaggcugccucucccaucacu

SEQ ID NO: 3121376 - RNA, 14 nt, Human
cagagggagugaca

SEQ ID NO: 3121377 - RNA, 16 nt, Human
cagagggagugacaga

SEQ ID NO: 3121378 - RNA, 18 nt, Human
cagagggagugacagagg

SEQ ID NO: 3121379 - RNA, 19 nt, Human
cagagggagugacagaggc

SEQ ID NO: 3121380 - RNA, 13 nt, Human
cagaggcugccuc

SEQ ID NO: 3121381 - RNA, 20 nt, Human
cagauacaggaaaagcugcu

SEQ ID NO: 3121382 - RNA, 21 nt, Human
cagauacaggaaaagcugcug

SEQ ID NO: 3121383 - RNA, 22 nt, Human
cagauacaggaaaagcugcuga

SEQ ID NO: 3121384 - RNA, 20 nt, Human
cagaucucuaacuucaccau

SEQ ID NO: 3121385 - RNA, 13 nt, Human
cagaugcaccagc

SEQ ID NO: 3121386 - RNA, 14 nt, Human
cagaugcaccagcc

SEQ ID NO: 3121387 - RNA, 16 nt, Human
cagaugcaccagcccu

SEQ ID NO: 3121388 - RNA, 17 nt, Human
cagaugcaccagcccuu

SEQ ID NO: 3121389 - RNA, 22 nt, Human
cagaugcaccagcccuuagcag

SEQ ID NO: 3121390 - RNA, 22 nt, Human
cagaguugaagacagagcuaca

SEQ ID NO: 3121391 - RNA, 14 nt, Human
cagaguuguuacau

SEQ ID NO: 3121392 - RNA, 20 nt, Human
cagaguugaagacagagcua

SEQ ID NO: 3121393 - RNA, 19 nt, Human
cagaguugaagacagagcu

SEQ ID NO: 3121394 - RNA, 18 nt, Human
cagaguugaagacagagc

SEQ ID NO: 3121395 - RNA, 17 nt, Human
cagaguugaagacagag

SEQ ID NO: 3121396 - RNA, 14 nt, Human
cagaguugaagaca

SEQ ID NO: 3121397 - RNA, 16 nt, Human
cagaguugaagacaga

SEQ ID NO: 3121398 - RNA, 15 nt, Human
cagaguugaagacag

SEQ ID NO: 3121399 - RNA, 19 nt, Human
cagaguuguuacauuuuua

SEQ ID NO: 3121400 - RNA, 15 nt, Human
cagaguuguuacauu

SEQ ID NO: 3121401 - RNA, 18 nt, Human
cagaguuguuacauuuuu

SEQ ID NO: 3121402 - RNA, 16 nt, Human
cagagcaccuuagaca

SEQ ID NO: 3121403 - RNA, 20 nt, Human
cagagcaagugagacccugu

SEQ ID NO: 3121404 - RNA, 14 nt, Human
cagagcaagugaga

SEQ ID NO: 3121405 - RNA, 21 nt, Human
cagagaccaucccugaaggcc

SEQ ID NO: 3121406 - RNA, 20 nt, Human
cagagaccaucccugaaggc

SEQ ID NO: 3121407 - RNA, 19 nt, Human
cagagaccaucccugaagg

SEQ ID NO: 3121408 - RNA, 18 nt, Human
cagagaccaucccugaag

SEQ ID NO: 3121409 - RNA, 17 nt, Human
cagagaccaucccugaa

SEQ ID NO: 3121410 - RNA, 13 nt, Human
cagagacuccugc

SEQ ID NO: 3121411 - RNA, 15 nt, Human
cagagacuccugcag

SEQ ID NO: 3121412 - RNA, 14 nt, Human
cagagacuccugca

SEQ ID NO: 3121413 - RNA, 18 nt, Human
cagagacuccugcaggca

SEQ ID NO: 3121414 - RNA, 17 nt, Human
cagagacuccugcaggc

SEQ ID NO: 3121415 - RNA, 16 nt, Human
cagagacuccugcagg

SEQ ID NO: 3121416 - RNA, 19 nt, Human
cagagaaugaaagggccca

SEQ ID NO: 3121417 - RNA, 15 nt, Human
cagagaauucucuua

SEQ ID NO: 3121418 - RNA, 20 nt, Human
cagagaaugaaagggcccag

SEQ ID NO: 3121419 - RNA, 21 nt, Human
cagagaaugaaagggcccaga

SEQ ID NO: 3121420 - RNA, 13 nt, Human
cagagaccauccc

SEQ ID NO: 3121421 - RNA, 16 nt, Human
cagagaccaucccuga

SEQ ID NO: 3121422 - RNA, 14 nt, Human
cagagaccaucccu

SEQ ID NO: 3121423 - RNA, 15 nt, Human
cagagacacaagccu

SEQ ID NO: 3121424 - RNA, 14 nt, Human
cagagacacaagcc

SEQ ID NO: 3121425 - RNA, 17 nt, Human
cagagacacaagccuuc

SEQ ID NO: 3121426 - RNA, 16 nt, Human
cagagacacaagccuu

SEQ ID NO: 3121427 - RNA, 23 nt, Human
cagagcaccuuagacagucccug

SEQ ID NO: 3121428 - RNA, 12 nt, Human
cagagcagagac

SEQ ID NO: 3121429 - RNA, 11 nt, Human
cagagcagaga

SEQ ID NO: 3121430 - RNA, 22 nt, Human
cagagcaccuuagacagucccu

SEQ ID NO: 3121431 - RNA, 21 nt, Human
cagagcaccuuagacaguccc

SEQ ID NO: 3121432 - RNA, 19 nt, Human
cagagcaccuuagacaguc

SEQ ID NO: 3121433 - RNA, 18 nt, Human
cagagcaccuuagacagu

SEQ ID NO: 3121434 - RNA, 21 nt, Human
cagagcagagaccaucccuga

SEQ ID NO: 3121435 - RNA, 19 nt, Human
cagagcagagaccaucccu

SEQ ID NO: 3121436 - RNA, 18 nt, Human
cagagcagagaccauccc

SEQ ID NO: 3121437 - RNA, 17 nt, Human
cagagcagagaccaucc

SEQ ID NO: 3121438 - RNA, 15 nt, Human
cagagcagagaccau

SEQ ID NO: 3121439 - RNA, 14 nt, Human
cagagcagagacca

SEQ ID NO: 3121440 - RNA, 13 nt, Human
cagagcagagacc

SEQ ID NO: 3121441 - RNA, 15 nt, Human
cagagcccaccuugg

SEQ ID NO: 3121442 - RNA, 17 nt, Human
cagagcccaccuuggcu

SEQ ID NO: 3121443 - RNA, 19 nt, Human
cagagcccaccuuggcuca

SEQ ID NO: 3121444 - RNA, 20 nt, Human
cagagcccaccuuggcucaa

SEQ ID NO: 3121445 - RNA, 16 nt, Human
cagagcccacgccccc

SEQ ID NO: 3121446 - RNA, 12 nt, Human
cagagccugcag

SEQ ID NO: 3121447 - RNA, 13 nt, Human
cagaggaaggaga

SEQ ID NO: 3121448 - RNA, 13 nt, Human
cagagccugcagu

SEQ ID NO: 3121449 - RNA, 20 nt, Human
cagaggaaagcaaaggagau

SEQ ID NO: 3121450 - RNA, 21 nt, Human
cagagcccacgcccccacugg

SEQ ID NO: 3121451 - RNA, 20 nt, Human
cagagcccacgcccccacug

SEQ ID NO: 3121452 - RNA, 19 nt, Human
cagagcccacgcccccacu

SEQ ID NO: 3121453 - RNA, 17 nt, Human
cagagcccacgccccca

SEQ ID NO: 3121454 - RNA, 23 nt, Human
cagagcccacgcccccacuggug

SEQ ID NO: 3121455 - RNA, 11 nt, Human
cagaggcagcc

SEQ ID NO: 3121456 - RNA, 20 nt, Human
cagaggagagaggacccccu

SEQ ID NO: 3121457 - RNA, 13 nt, Human
cagaggagagagg

SEQ ID NO: 3121458 - RNA, 19 nt, Human
cagaggagagaggaccccc

SEQ ID NO: 3121459 - RNA, 15 nt, Human
cagaggagagaggac

SEQ ID NO: 3121460 - RNA, 20 nt, Human
cagccucacaguccuuacca

SEQ ID NO: 3121461 - RNA, 15 nt, Human
cagccucacaguccu

SEQ ID NO: 3121462 - RNA, 14 nt, Human
cagccucacagucc

SEQ ID NO: 3121463 - RNA, 19 nt, Human
cagccucaaccuccugggc

SEQ ID NO: 3121464 - RNA, 20 nt, Human
cagccucaaccuccugggcu

SEQ ID NO: 3121465 - RNA, 21 nt, Human
cagccucaaccuccugggcua

SEQ ID NO: 3121466 - RNA, 17 nt, Human
cagccucaaccuccugg

SEQ ID NO: 3121467 - RNA, 18 nt, Human
cagccucaaccuccuggg

SEQ ID NO: 3121468 - RNA, 20 nt, Human
cagccucccgaauagcuggg

SEQ ID NO: 3121469 - RNA, 21 nt, Human
cagccucccgaauagcuggga

SEQ ID NO: 3121470 - RNA, 22 nt, Human
cagccucccgaauagcugggac

SEQ ID NO: 3121471 - RNA, 19 nt, Human
cagccucccaaagugcugg

SEQ ID NO: 3121472 - RNA, 20 nt, Human
cagccucccaaagugcuggg

SEQ ID NO: 3121473 - RNA, 21 nt, Human
cagccucccaaagugcuggga

SEQ ID NO: 3121474 - RNA, 23 nt, Human
cagccucccaaagugcugggauu

SEQ ID NO: 3121475 - RNA, 21 nt, Human
cagccguguaaccauggaccc

SEQ ID NO: 3121476 - RNA, 16 nt, Human
cagcccugcagagggc

SEQ ID NO: 3121477 - RNA, 15 nt, Human
cagcccugcagaggg

SEQ ID NO: 3121478 - RNA, 14 nt, Human
cagcccugcagagg

SEQ ID NO: 3121479 - RNA, 13 nt, Human
cagcccugcagag

SEQ ID NO: 3121480 - RNA, 20 nt, Human
cagcccugcagagggcacag

SEQ ID NO: 3121481 - RNA, 18 nt, Human
cagcccugcagagggcac

SEQ ID NO: 3121482 - RNA, 13 nt, Human
cagccccagugcc

SEQ ID NO: 3121483 - RNA, 14 nt, Human
cagccccagugccc

SEQ ID NO: 3121484 - RNA, 15 nt, Human
cagccccagugccca

SEQ ID NO: 3121485 - RNA, 16 nt, Human
cagccccagugcccac

SEQ ID NO: 3121486 - RNA, 17 nt, Human
cagccccagugcccaca

SEQ ID NO: 3121487 - RNA, 18 nt, Human
cagccccagugcccacag

SEQ ID NO: 3121488 - RNA, 21 nt, Human
cagccccaucccaaacccuuc

SEQ ID NO: 3121489 - RNA, 11 nt, Human
cagccccaucc

SEQ ID NO: 3121490 - RNA, 21 nt, Human
cagccccuguucuggcagagu

SEQ ID NO: 3121491 - RNA, 22 nt, Human
cagccccuggaugcagccucac

SEQ ID NO: 3121492 - RNA, 20 nt, Human
cagccccuguucuggcagag

SEQ ID NO: 3121493 - RNA, 16 nt, Human
cagccccauucugccu

SEQ ID NO: 3121494 - RNA, 17 nt, Human
cagccccauucugccug

SEQ ID NO: 3121495 - RNA, 18 nt, Human
cagccccauucugccugc

SEQ ID NO: 3121496 - RNA, 23 nt, Human
cagccccuggaugcagccucaca

SEQ ID NO: 3121497 - RNA, 13 nt, Human
cagccccauucug

SEQ ID NO: 3121498 - RNA, 14 nt, Human
cagccccauucugc

SEQ ID NO: 3121499 - RNA, 22 nt, Human
cagccccauccucuguacagag

SEQ ID NO: 3121500 - RNA, 16 nt, Human
cagccccauccucugu

SEQ ID NO: 3121501 - RNA, 14 nt, Human
cagccccauccucu

SEQ ID NO: 3121502 - RNA, 13 nt, Human
cagccccauccuc

SEQ ID NO: 3121503 - RNA, 12 nt, Human
cagccccauccu

SEQ ID NO: 3121504 - RNA, 22 nt, Human
cagccccaucccaaacccuuca

SEQ ID NO: 3121505 - RNA, 16 nt, Human
cagcccgggcucugcc

SEQ ID NO: 3121506 - RNA, 15 nt, Human
cagcccgggcucugc

SEQ ID NO: 3121507 - RNA, 14 nt, Human
cagcccgggcucug

SEQ ID NO: 3121508 - RNA, 13 nt, Human
cagcccgggcucu

SEQ ID NO: 3121509 - RNA, 24 nt, Human
cagccccuucugacccaugcugcc

SEQ ID NO: 3121510 - RNA, 23 nt, Human
cagccccuucugacccaugcugc

SEQ ID NO: 3121511 - RNA, 22 nt, Human
cagccccuucugacccaugcug

SEQ ID NO: 3121512 - RNA, 21 nt, Human
cagccccuucugacccaugcu

SEQ ID NO: 3121513 - RNA, 19 nt, Human
cagccccuucugacccaug

SEQ ID NO: 3121514 - RNA, 17 nt, Human
cagccccuucugaccca

SEQ ID NO: 3121515 - RNA, 16 nt, Human
cagccccuucugaccc

SEQ ID NO: 3121516 - RNA, 22 nt, Human
cagcccgggcucugccucccau

SEQ ID NO: 3121517 - RNA, 21 nt, Human
cagcccgggcucugccuccca

SEQ ID NO: 3121518 - RNA, 20 nt, Human
cagcccgggcucugccuccc

SEQ ID NO: 3121519 - RNA, 19 nt, Human
cagcccgggcucugccucc

SEQ ID NO: 3121520 - RNA, 18 nt, Human
cagcccgggcucugccuc

SEQ ID NO: 3121521 - RNA, 17 nt, Human
cagcccgggcucugccu

SEQ ID NO: 3121522 - RNA, 12 nt, Human
cagcucagagag

SEQ ID NO: 3121523 - RNA, 20 nt, Human
cagcucaccucucccuugga

SEQ ID NO: 3121524 - RNA, 19 nt, Human
cagcucaccucucccuugg

SEQ ID NO: 3121525 - RNA, 22 nt, Human
cagcucaccagccccagugccc

SEQ ID NO: 3121526 - RNA, 14 nt, Human
cagcucaccagccc

SEQ ID NO: 3121527 - RNA, 20 nt, Human
cagcucaccagccccagugc

SEQ ID NO: 3121528 - RNA, 21 nt, Human
cagcucaccagccccagugcc

SEQ ID NO: 3121529 - RNA, 17 nt, Human
cagcucaccucucccuu

SEQ ID NO: 3121530 - RNA, 16 nt, Human
cagcucaccucucccu

SEQ ID NO: 3121531 - RNA, 15 nt, Human
cagcucaccucuccc

SEQ ID NO: 3121532 - RNA, 13 nt, Human
cagcucaccucuc

SEQ ID NO: 3121533 - RNA, 13 nt, Human
cagcucaccagcc

SEQ ID NO: 3121534 - RNA, 15 nt, Human
cagcucaccagcccc

SEQ ID NO: 3121535 - RNA, 16 nt, Human
cagcucaccagcccca

SEQ ID NO: 3121536 - RNA, 17 nt, Human
cagcucaccagccccag

SEQ ID NO: 3121537 - RNA, 19 nt, Human
cagcucaccagccccagug

SEQ ID NO: 3121538 - RNA, 21 nt, Human
cagcgagcccugguggcagug

SEQ ID NO: 3121539 - RNA, 18 nt, Human
cagcuaacauggaaguac

SEQ ID NO: 3121540 - RNA, 19 nt, Human
cagcuaacauggaaguacu

SEQ ID NO: 3121541 - RNA, 13 nt, Human
cagcgagcccugg

SEQ ID NO: 3121542 - RNA, 16 nt, Human
cagcgagcccuggugg

SEQ ID NO: 3121543 - RNA, 17 nt, Human
cagcgagcccugguggc

SEQ ID NO: 3121544 - RNA, 19 nt, Human
cagcgagcccugguggcag

SEQ ID NO: 3121545 - RNA, 20 nt, Human
cagcgagcccugguggcagu

SEQ ID NO: 3121546 - RNA, 20 nt, Human
cagcuaacauggaaguacua

SEQ ID NO: 3121547 - RNA, 15 nt, Human
cagcuaaugggacac

SEQ ID NO: 3121548 - RNA, 16 nt, Human
cagcuaaugggacacu

SEQ ID NO: 3121549 - RNA, 19 nt, Human
cagccugggcaaugugaua

SEQ ID NO: 3121550 - RNA, 16 nt, Human
cagccugggcaaugug

SEQ ID NO: 3121551 - RNA, 24 nt, Human
cagccuugaccauucuccaccugc

SEQ ID NO: 3121552 - RNA, 23 nt, Human
cagccuugaccauucuccaccug

SEQ ID NO: 3121553 - RNA, 22 nt, Human
cagccuugaccauucuccaccu

SEQ ID NO: 3121554 - RNA, 17 nt, Human
cagccuugaccauucuc

SEQ ID NO: 3121555 - RNA, 21 nt, Human
cagccuugaccauucuccacc

SEQ ID NO: 3121556 - RNA, 20 nt, Human
cagccuugaccauucuccac

SEQ ID NO: 3121557 - RNA, 20 nt, Human
cagccugcuccagcuguuca

SEQ ID NO: 3121558 - RNA, 23 nt, Human
cagccucccgaauagcugggacu

SEQ ID NO: 3121559 - RNA, 19 nt, Human
cagccucccgaguagcugg

SEQ ID NO: 3121560 - RNA, 20 nt, Human
cagccucccgaguagcuggg

SEQ ID NO: 3121561 - RNA, 21 nt, Human
cagccucccgaguagcuggga

SEQ ID NO: 3121562 - RNA, 22 nt, Human
cagccucccgaguagcugggac

SEQ ID NO: 3121563 - RNA, 23 nt, Human
cagccucccgaguagcugggacu

SEQ ID NO: 3121564 - RNA, 19 nt, Human
cagccuggacccuguggau

SEQ ID NO: 3121565 - RNA, 15 nt, Human
cagccuggacccugu

SEQ ID NO: 3121566 - RNA, 23 nt, Human
cagcuuuguuuguugucagcuga

SEQ ID NO: 3121567 - RNA, 22 nt, Human
cagcuuuguuuguugucagcug

SEQ ID NO: 3121568 - RNA, 21 nt, Human
cagcuuuguuuguugucagcu

SEQ ID NO: 3121569 - RNA, 12 nt, Human
cagcuuuguuug

SEQ ID NO: 3121570 - RNA, 18 nt, Human
cagcuuguaaauagcuca

SEQ ID NO: 3121571 - RNA, 19 nt, Human
cagcuuguaaauagcucag

SEQ ID NO: 3121572 - RNA, 20 nt, Human
cagcuuguaaauagcucagg

SEQ ID NO: 3121573 - RNA, 21 nt, Human
cagcuuguaaauagcucaggu

SEQ ID NO: 3121574 - RNA, 22 nt, Human
cagcuuguaaauagcucaggug

SEQ ID NO: 3121575 - RNA, 14 nt, Human
cagcuugaggguug

SEQ ID NO: 3121576 - RNA, 15 nt, Human
cagcuugaggguugg

SEQ ID NO: 3121577 - RNA, 21 nt, Human
cagcuugaccgugaggccaga

SEQ ID NO: 3121578 - RNA, 20 nt, Human
cagcuugaccgugaggccag

SEQ ID NO: 3121579 - RNA, 19 nt, Human
cagcuugaccgugaggcca

SEQ ID NO: 3121580 - RNA, 18 nt, Human
cagcuugaccgugaggcc

SEQ ID NO: 3121581 - RNA, 18 nt, Human
cagcuugaggguugggcu

SEQ ID NO: 3121582 - RNA, 19 nt, Human
cagcuugaggguugggcug

SEQ ID NO: 3121583 - RNA, 20 nt, Human
cagcuugaggguugggcugg

SEQ ID NO: 3121584 - RNA, 21 nt, Human
cagcuugaggguugggcuggu

SEQ ID NO: 3121585 - RNA, 19 nt, Human
cagcuucauuuccuguguc

SEQ ID NO: 3121586 - RNA, 20 nt, Human
cagcuucauuuccugugucu

SEQ ID NO: 3121587 - RNA, 21 nt, Human
cagcuucauuuccugugucuu

SEQ ID NO: 3121588 - RNA, 20 nt, Human
caggaaguacuggagaaaau

SEQ ID NO: 3121589 - RNA, 18 nt, Human
caggaaguacuggagaaa

SEQ ID NO: 3121590 - RNA, 17 nt, Human
caggaaguacuggagaa

SEQ ID NO: 3121591 - RNA, 12 nt, Human
caggaaguacug

SEQ ID NO: 3121592 - RNA, 16 nt, Human
caggaaguacuggaga

SEQ ID NO: 3121593 - RNA, 14 nt, Human
caggaaguacugga

SEQ ID NO: 3121594 - RNA, 15 nt, Human
caggaaggcuaaagg

SEQ ID NO: 3121595 - RNA, 23 nt, Human
caggaagcucagggccuggcuca

SEQ ID NO: 3121596 - RNA, 22 nt, Human
caggaagcucagggccuggcuc

SEQ ID NO: 3121597 - RNA, 21 nt, Human
caggaagcucagggccuggcu

SEQ ID NO: 3121598 - RNA, 20 nt, Human
caggaagcucagggccuggc

SEQ ID NO: 3121599 - RNA, 13 nt, Human
caggaagcucagg

SEQ ID NO: 3121600 - RNA, 15 nt, Human
caggaagcucagggc

SEQ ID NO: 3121601 - RNA, 14 nt, Human
caggaagcucaggg

SEQ ID NO: 3121602 - RNA, 19 nt, Human
caggaagcucagggccugg

SEQ ID NO: 3121603 - RNA, 18 nt, Human
caggaagcucagggccug

SEQ ID NO: 3121604 - RNA, 17 nt, Human
caggaagcucagggccu

SEQ ID NO: 3121605 - RNA, 16 nt, Human
caggaagcucagggcc

SEQ ID NO: 3121606 - RNA, 22 nt, Human
caggaagccagcaggcucucag

SEQ ID NO: 3121607 - RNA, 21 nt, Human
caggaagccagcaggcucuca

SEQ ID NO: 3121608 - RNA, 19 nt, Human
caggaagccagcaggcucu

SEQ ID NO: 3121609 - RNA, 18 nt, Human
caggaagccagcaggcuc

SEQ ID NO: 3121610 - RNA, 17 nt, Human
caggaagccagcaggcu

SEQ ID NO: 3121611 - RNA, 16 nt, Human
caggaagccagcaggc

SEQ ID NO: 3121612 - RNA, 14 nt, Human
caggaagccagcag

SEQ ID NO: 3121613 - RNA, 16 nt, Human
cagcucugcaagaauu

SEQ ID NO: 3121614 - RNA, 15 nt, Human
cagcucugcaagaau

SEQ ID NO: 3121615 - RNA, 21 nt, Human
cagcucugcaagaauugaagc

SEQ ID NO: 3121616 - RNA, 20 nt, Human
cagcucagagagggugggag

SEQ ID NO: 3121617 - RNA, 19 nt, Human
cagcucagagaggguggga

SEQ ID NO: 3121618 - RNA, 17 nt, Human
cagcucagagagggugg

SEQ ID NO: 3121619 - RNA, 13 nt, Human
cagcucagagagg

SEQ ID NO: 3121620 - RNA, 16 nt, Human
cagcuccuucuguccu

SEQ ID NO: 3121621 - RNA, 17 nt, Human
cagcuccuucuguccua

SEQ ID NO: 3121622 - RNA, 21 nt, Human
cagcuccuucuguccuacucu

SEQ ID NO: 3121623 - RNA, 23 nt, Human
cagcuccuucuguccuacucugu

SEQ ID NO: 3121624 - RNA, 13 nt, Human
cagcucuggucca

SEQ ID NO: 3121625 - RNA, 10 nt, Human
cagcucuggu

SEQ ID NO: 3121626 - RNA, 21 nt, Human
cagcucugguccauagagagc

SEQ ID NO: 3121627 - RNA, 18 nt, Human
cagcucugguccauagag

SEQ ID NO: 3121628 - RNA, 17 nt, Human
cagcucugguccauaga

SEQ ID NO: 3121629 - RNA, 16 nt, Human
cagcucugguccauag

SEQ ID NO: 3121630 - RNA, 12 nt, Human
cagcucuguccu

SEQ ID NO: 3121631 - RNA, 13 nt, Human
cagcucuguccug

SEQ ID NO: 3121632 - RNA, 23 nt, Human
cagcucugguccauagagagcaa

SEQ ID NO: 3121633 - RNA, 22 nt, Human
cagcucugguccauagagagca

SEQ ID NO: 3121634 - RNA, 14 nt, Human
cagcucuguccugg

SEQ ID NO: 3121635 - RNA, 16 nt, Human
cagcucuguccuggga

SEQ ID NO: 3121636 - RNA, 17 nt, Human
cagcucuguccugggag

SEQ ID NO: 3121637 - RNA, 18 nt, Human
cagcucuguccugggagu

SEQ ID NO: 3121638 - RNA, 23 nt, Human
cagcucuguccugggagugagcu

SEQ ID NO: 3121639 - RNA, 21 nt, Human
cagcucuuauauugccauuuc

SEQ ID NO: 3121640 - RNA, 10 nt, Human
cagcucuuau

SEQ ID NO: 3121641 - RNA, 13 nt, Human
cagcucuucucca

SEQ ID NO: 3121642 - RNA, 14 nt, Human
cagcucuucuccag

SEQ ID NO: 3121643 - RNA, 15 nt, Human
cagcucuucuccagg

SEQ ID NO: 3121644 - RNA, 16 nt, Human
cagcucuucuccaggc

SEQ ID NO: 3121645 - RNA, 17 nt, Human
cagcucuucuccaggcu

SEQ ID NO: 3121646 - RNA, 18 nt, Human
cagcucuucuccaggcug

SEQ ID NO: 3121647 - RNA, 19 nt, Human
cagcucuucuccaggcugu

SEQ ID NO: 3121648 - RNA, 23 nt, Human
cagcucuucuccaggcuguaucc

SEQ ID NO: 3121649 - RNA, 18 nt, Human
cagcugcgguccacccag

SEQ ID NO: 3121650 - RNA, 15 nt, Human
cagcugccugggauc

SEQ ID NO: 3121651 - RNA, 19 nt, Human
cagcugcgguccacccagg

SEQ ID NO: 3121652 - RNA, 20 nt, Human
cagcugcgguccacccagga

SEQ ID NO: 3121653 - RNA, 21 nt, Human
cagcugcgguccacccaggag

SEQ ID NO: 3121654 - RNA, 22 nt, Human
cagcugcgguccacccaggagc

SEQ ID NO: 3121655 - RNA, 23 nt, Human
cagcugcgguccacccaggagcc

SEQ ID NO: 3121656 - RNA, 24 nt, Human
cagcugcgguccacccaggagccc

SEQ ID NO: 3121657 - RNA, 23 nt, Human
cagcugccugggaucccucaucc

SEQ ID NO: 3121658 - RNA, 18 nt, Human
cagcugccugggaucccu

SEQ ID NO: 3121659 - RNA, 17 nt, Human
cagcugcuacuacuccu

SEQ ID NO: 3121660 - RNA, 22 nt, Human
cagcugcuugggcuucauccuc

SEQ ID NO: 3121661 - RNA, 21 nt, Human
cagcugcuugggcuucauccu

SEQ ID NO: 3121662 - RNA, 19 nt, Human
cagcugcuugggcuucauc

SEQ ID NO: 3121663 - RNA, 18 nt, Human
cagcugcuugggcuucau

SEQ ID NO: 3121664 - RNA, 16 nt, Human
cagcugcuugggcuuc

SEQ ID NO: 3121665 - RNA, 15 nt, Human
cagcugcuugggcuu

SEQ ID NO: 3121666 - RNA, 14 nt, Human
cagcugcuugggcu

SEQ ID NO: 3121667 - RNA, 13 nt, Human
cagcugcuugggc

SEQ ID NO: 3121668 - RNA, 18 nt, Human
cagcugguugagguuuca

SEQ ID NO: 3121669 - RNA, 23 nt, Human
cagcugggguggggaccucaggc

SEQ ID NO: 3121670 - RNA, 22 nt, Human
cagcugggguggggaccucagg

SEQ ID NO: 3121671 - RNA, 21 nt, Human
cagcugggguggggaccucag

SEQ ID NO: 3121672 - RNA, 23 nt, Human
cagcugcuuuugucuaugggacu

SEQ ID NO: 3121673 - RNA, 22 nt, Human
cagcugcuuuugucuaugggac

SEQ ID NO: 3121674 - RNA, 14 nt, Human
cagcauccuggcac

SEQ ID NO: 3121675 - RNA, 15 nt, Human
cagcauccuggcacc

SEQ ID NO: 3121676 - RNA, 16 nt, Human
cagcauccuggcaccc

SEQ ID NO: 3121677 - RNA, 17 nt, Human
cagcauccuggcacccg

SEQ ID NO: 3121678 - RNA, 20 nt, Human
cagcagggagggcuucugcc

SEQ ID NO: 3121679 - RNA, 19 nt, Human
cagcaggcucucaggccag

SEQ ID NO: 3121680 - RNA, 18 nt, Human
cagcaggcucucaggcca

SEQ ID NO: 3121681 - RNA, 17 nt, Human
cagcaggcucucaggcc

SEQ ID NO: 3121682 - RNA, 16 nt, Human
cagcaggcucucaggc

SEQ ID NO: 3121683 - RNA, 22 nt, Human
cagcaggcucucaggccagcug

SEQ ID NO: 3121684 - RNA, 20 nt, Human
cagcaggcucucaggccagc

SEQ ID NO: 3121685 - RNA, 18 nt, Human
cagcagggagggcuucug

SEQ ID NO: 3121686 - RNA, 12 nt, Human
cagcaggcucuc

SEQ ID NO: 3121687 - RNA, 15 nt, Human
cagcaggcucucagg

SEQ ID NO: 3121688 - RNA, 14 nt, Human
cagcaggcucucag

SEQ ID NO: 3121689 - RNA, 22 nt, Human
cagcagccuggacccuguggau

SEQ ID NO: 3121690 - RNA, 19 nt, Human
cagcagccuggacccugug

SEQ ID NO: 3121691 - RNA, 18 nt, Human
cagcagccuggacccugu

SEQ ID NO: 3121692 - RNA, 15 nt, Human
cagcagccuggaccc

SEQ ID NO: 3121693 - RNA, 14 nt, Human
cagcagccuggacc

SEQ ID NO: 3121694 - RNA, 12 nt, Human
cagcagccugga

SEQ ID NO: 3121695 - RNA, 21 nt, Human
cagcauccuggcacccggccc

SEQ ID NO: 3121696 - RNA, 19 nt, Human
cagcauccuggcacccggc

SEQ ID NO: 3121697 - RNA, 20 nt, Human
cagcauccuggcacccggcc

SEQ ID NO: 3121698 - RNA, 16 nt, Human
cagccaaagccuccuc

SEQ ID NO: 3121699 - RNA, 15 nt, Human
cagccaaagccuccu

SEQ ID NO: 3121700 - RNA, 21 nt, Human
cagccaaagccuccuccagcc

SEQ ID NO: 3121701 - RNA, 18 nt, Human
cagccaaagccuccucca

SEQ ID NO: 3121702 - RNA, 23 nt, Human
cagccacggccaggccagaggga

SEQ ID NO: 3121703 - RNA, 22 nt, Human
cagccaguaaaugggggugcau

SEQ ID NO: 3121704 - RNA, 13 nt, Human
cagccaguaaaug

SEQ ID NO: 3121705 - RNA, 14 nt, Human
cagccacggccagg

SEQ ID NO: 3121706 - RNA, 15 nt, Human
cagccacggccaggc

SEQ ID NO: 3121707 - RNA, 16 nt, Human
cagccacggccaggcc

SEQ ID NO: 3121708 - RNA, 17 nt, Human
cagccacggccaggcca

SEQ ID NO: 3121709 - RNA, 18 nt, Human
cagccacggccaggccag

SEQ ID NO: 3121710 - RNA, 19 nt, Human
cagccacggccaggccaga

SEQ ID NO: 3121711 - RNA, 21 nt, Human
cagccacggccaggccagagg

SEQ ID NO: 3121712 - RNA, 22 nt, Human
cagccacggccaggccagaggg

SEQ ID NO: 3121713 - RNA, 19 nt, Human
cagccacauuccugaugcu

SEQ ID NO: 3121714 - RNA, 17 nt, Human
cagccacauuccugaug

SEQ ID NO: 3121715 - RNA, 15 nt, Human
cagccacauuccuga

SEQ ID NO: 3121716 - RNA, 14 nt, Human
cagccacauuccug

SEQ ID NO: 3121717 - RNA, 18 nt, Human
cagcccacuucugccaua

SEQ ID NO: 3121718 - RNA, 22 nt, Human
cagccccaaaacucuccucugc

SEQ ID NO: 3121719 - RNA, 21 nt, Human
cagccccaaaacucuccucug

SEQ ID NO: 3121720 - RNA, 20 nt, Human
cagccccaaaacucuccucu

SEQ ID NO: 3121721 - RNA, 15 nt, Human
cagcccaccccucaa

SEQ ID NO: 3121722 - RNA, 15 nt, Human
cagcccacuucugcc

SEQ ID NO: 3121723 - RNA, 22 nt, Human
cagcaauaaagcagcguuucua

SEQ ID NO: 3121724 - RNA, 19 nt, Human
cagcaagugagagcugggu

SEQ ID NO: 3121725 - RNA, 21 nt, Human
cagcaagugagagcugggugu

SEQ ID NO: 3121726 - RNA, 13 nt, Human
cagcaauaaagca

SEQ ID NO: 3121727 - RNA, 21 nt, Human
cagcaauaaagcagcguuucu

SEQ ID NO: 3121728 - RNA, 17 nt, Human
cagcaaggagauuuaca

SEQ ID NO: 3121729 - RNA, 18 nt, Human
cagcaaggagauuuacaa

SEQ ID NO: 3121730 - RNA, 14 nt, Human
cagcaagugagagc

SEQ ID NO: 3121731 - RNA, 15 nt, Human
cagcaagugagagcu

SEQ ID NO: 3121732 - RNA, 16 nt, Human
cagcaagugagagcug

SEQ ID NO: 3121733 - RNA, 17 nt, Human
cagcaagugagagcugg

SEQ ID NO: 3121734 - RNA, 12 nt, Human
cagcaagugaga

SEQ ID NO: 3121735 - RNA, 15 nt, Human
cagcagaaaugccuu

SEQ ID NO: 3121736 - RNA, 17 nt, Human
cagcagaaaugccuuac

SEQ ID NO: 3121737 - RNA, 19 nt, Human
cagcagaaaugccuuaccc

SEQ ID NO: 3121738 - RNA, 22 nt, Human
cagcagaaaugccuuacccuca

SEQ ID NO: 3121739 - RNA, 13 nt, Human
cagcagagcaccu

SEQ ID NO: 3121740 - RNA, 11 nt, Human
cagcagagcac

SEQ ID NO: 3121741 - RNA, 18 nt, Human
cagcaaaagaugcuucuc

SEQ ID NO: 3121742 - RNA, 14 nt, Human
cagauucuuuccug

SEQ ID NO: 3121743 - RNA, 23 nt, Human
cagaugggugcuuggaggaagga

SEQ ID NO: 3121744 - RNA, 18 nt, Human
cagaugggugcuuggagg

SEQ ID NO: 3121745 - RNA, 12 nt, Human
caggagugagca

SEQ ID NO: 3121746 - RNA, 20 nt, Human
caggagccuccugcccuuac

SEQ ID NO: 3121747 - RNA, 17 nt, Human
caggagccuccugcccu

SEQ ID NO: 3121748 - RNA, 14 nt, Human
caggagccuccugc

SEQ ID NO: 3121749 - RNA, 15 nt, Human
caggagccccgaggc

SEQ ID NO: 3121750 - RNA, 16 nt, Human
caggagccccgaggcc

SEQ ID NO: 3121751 - RNA, 18 nt, Human
caggagccccgaggccuu

SEQ ID NO: 3121752 - RNA, 19 nt, Human
caggagcagccacauuccu

SEQ ID NO: 3121753 - RNA, 14 nt, Human
caggagcagccaca

SEQ ID NO: 3121754 - RNA, 13 nt, Human
caggagcagccac

SEQ ID NO: 3121755 - RNA, 12 nt, Human
caggagcagcca

SEQ ID NO: 3121756 - RNA, 20 nt, Human
caggagccccgaggccuucu

SEQ ID NO: 3121757 - RNA, 22 nt, Human
caggagccccgaggccuucucu

SEQ ID NO: 3121758 - RNA, 23 nt, Human
caggagccccgaggccuucucug

SEQ ID NO: 3121759 - RNA, 23 nt, Human
caggaguuugagaccaaccuggg

SEQ ID NO: 3121760 - RNA, 22 nt, Human
caggaguuugagaccaaccugg

SEQ ID NO: 3121761 - RNA, 21 nt, Human
caggaguuugagaccaaccug

SEQ ID NO: 3121762 - RNA, 17 nt, Human
caggcagccaggccaca

SEQ ID NO: 3121763 - RNA, 16 nt, Human
caggcagccaggccac

SEQ ID NO: 3121764 - RNA, 13 nt, Human
caggcagguccag

SEQ ID NO: 3121765 - RNA, 14 nt, Human
caggcaagcaccuc

SEQ ID NO: 3121766 - RNA, 15 nt, Human
caggcaagcaccucc

SEQ ID NO: 3121767 - RNA, 16 nt, Human
caggcaagcaccuccu

SEQ ID NO: 3121768 - RNA, 21 nt, Human
caggcaagcaccuccugccuc

SEQ ID NO: 3121769 - RNA, 15 nt, Human
caggcagccaggcca

SEQ ID NO: 3121770 - RNA, 14 nt, Human
caggcagccaggcc

SEQ ID NO: 3121771 - RNA, 20 nt, Human
caggauucuuccucccuccc

SEQ ID NO: 3121772 - RNA, 24 nt, Human
caggcauuccccaggaggccagcc

SEQ ID NO: 3121773 - RNA, 23 nt, Human
caggcauuccccaggaggccagc

SEQ ID NO: 3121774 - RNA, 22 nt, Human
caggcauuccccaggaggccag

SEQ ID NO: 3121775 - RNA, 21 nt, Human
caggcauuccccaggaggcca

SEQ ID NO: 3121776 - RNA, 20 nt, Human
caggcauuccccaggaggcc

SEQ ID NO: 3121777 - RNA, 19 nt, Human
caggcauuccccaggaggc

SEQ ID NO: 3121778 - RNA, 18 nt, Human
caggcauuccccaggagg

SEQ ID NO: 3121779 - RNA, 15 nt, Human
caggcauguucucug

SEQ ID NO: 3121780 - RNA, 18 nt, Human
caggcauguucucugagg

SEQ ID NO: 3121781 - RNA, 19 nt, Human
caggcauguucucugagga

SEQ ID NO: 3121782 - RNA, 20 nt, Human
caggcauguucucugaggac

SEQ ID NO: 3121783 - RNA, 17 nt, Human
caggcauuccccaggag

SEQ ID NO: 3121784 - RNA, 16 nt, Human
caggcauuccccagga

SEQ ID NO: 3121785 - RNA, 15 nt, Human
caggcauuccccagg

SEQ ID NO: 3121786 - RNA, 13 nt, Human
caggcauucccca

SEQ ID NO: 3121787 - RNA, 23 nt, Human
caggcaggucuugaacuccuggc

SEQ ID NO: 3121788 - RNA, 15 nt, Human
caggcaggugggaug

SEQ ID NO: 3121789 - RNA, 13 nt, Human
caggcaggucuug

SEQ ID NO: 3121790 - RNA, 22 nt, Human
caggcaggucuugaacuccugg

SEQ ID NO: 3121791 - RNA, 14 nt, Human
caggcagguccagg

SEQ ID NO: 3121792 - RNA, 15 nt, Human
caggcagguccaggg

SEQ ID NO: 3121793 - RNA, 19 nt, Human
caggcagguccaggguuug

SEQ ID NO: 3121794 - RNA, 12 nt, Human
caggcaggucuu

SEQ ID NO: 3121795 - RNA, 17 nt, Human
caggcaugguggcccac

SEQ ID NO: 3121796 - RNA, 14 nt, Human
caggaucagucuga

SEQ ID NO: 3121797 - RNA, 13 nt, Human
caggaucagucug

SEQ ID NO: 3121798 - RNA, 17 nt, Human
caggauucuuccucccu

SEQ ID NO: 3121799 - RNA, 18 nt, Human
caggauucuuccucccuc

SEQ ID NO: 3121800 - RNA, 23 nt, Human
caggauggccgggcgcgguggcu

SEQ ID NO: 3121801 - RNA, 13 nt, Human
caggcccggcucc

SEQ ID NO: 3121802 - RNA, 14 nt, Human
caggcccggcucca

SEQ ID NO: 3121803 - RNA, 15 nt, Human
caggcccggcuccag

SEQ ID NO: 3121804 - RNA, 15 nt, Human
caggccccugccacc

SEQ ID NO: 3121805 - RNA, 17 nt, Human
caggccccugccacccu

SEQ ID NO: 3121806 - RNA, 19 nt, Human
caggccccugccacccugg

SEQ ID NO: 3121807 - RNA, 20 nt, Human
caggccccugccacccuggg

SEQ ID NO: 3121808 - RNA, 13 nt, Human
caggccccugcca

SEQ ID NO: 3121809 - RNA, 23 nt, Human
caggccaaacucaccugccccuc

SEQ ID NO: 3121810 - RNA, 18 nt, Human
caggccaaacucaccugc

SEQ ID NO: 3121811 - RNA, 13 nt, Human
caggccacaagac

SEQ ID NO: 3121812 - RNA, 18 nt, Human
caggccacaagacccuug

SEQ ID NO: 3121813 - RNA, 17 nt, Human
caggccacaagacccuu

SEQ ID NO: 3121814 - RNA, 20 nt, Human
caggccacaagacccuugug

SEQ ID NO: 3121815 - RNA, 22 nt, Human
caggccaggcccucugcccacu

SEQ ID NO: 3121816 - RNA, 21 nt, Human
caggccaggcccucugcccac

SEQ ID NO: 3121817 - RNA, 20 nt, Human
caggccaggcccucugccca

SEQ ID NO: 3121818 - RNA, 22 nt, Human
caggcccucugcccacucccug

SEQ ID NO: 3121819 - RNA, 21 nt, Human
caggcccucugcccacucccu

SEQ ID NO: 3121820 - RNA, 20 nt, Human
caggcccucugcccacuccc

SEQ ID NO: 3121821 - RNA, 19 nt, Human
caggcccucugcccacucc

SEQ ID NO: 3121822 - RNA, 17 nt, Human
caggcccucugcccacu

SEQ ID NO: 3121823 - RNA, 16 nt, Human
caggcccucugcccac

SEQ ID NO: 3121824 - RNA, 22 nt, Human
caggcccggcuccaggcuccuu

SEQ ID NO: 3121825 - RNA, 20 nt, Human
caggcccggcuccaggcucc

SEQ ID NO: 3121826 - RNA, 21 nt, Human
caggcccggcuccaggcuccu

SEQ ID NO: 3121827 - RNA, 15 nt, Human
caggcccucugccca

SEQ ID NO: 3121828 - RNA, 14 nt, Human
caggcccucugccc

SEQ ID NO: 3121829 - RNA, 13 nt, Human
caggcccucugcc

SEQ ID NO: 3121830 - RNA, 17 nt, Human
caggcccggcuccaggc

SEQ ID NO: 3121831 - RNA, 16 nt, Human
caggcccggcuccagg

SEQ ID NO: 3121832 - RNA, 18 nt, Human
caggcccggcuccaggcu

SEQ ID NO: 3121833 - RNA, 19 nt, Human
caggcccggcuccaggcuc

SEQ ID NO: 3121834 - RNA, 23 nt, Human
caggcucucaggccagcugcuug

SEQ ID NO: 3121835 - RNA, 21 nt, Human
caggcucucaggccagcugcu

SEQ ID NO: 3121836 - RNA, 20 nt, Human
caggcucucaggccagcugc

SEQ ID NO: 3121837 - RNA, 19 nt, Human
caggcucucaggccagcug

SEQ ID NO: 3121838 - RNA, 18 nt, Human
caggcucucaggccagcu

SEQ ID NO: 3121839 - RNA, 17 nt, Human
caggcucucaggccagc

SEQ ID NO: 3121840 - RNA, 21 nt, Human
caggcuccuuuagcgcccagu

SEQ ID NO: 3121841 - RNA, 12 nt, Human
caggcucucagg

SEQ ID NO: 3121842 - RNA, 20 nt, Human
caggcucgggcuccccagcc

SEQ ID NO: 3121843 - RNA, 16 nt, Human
caggcucucaggccag

SEQ ID NO: 3121844 - RNA, 15 nt, Human
caggcucucaggcca

SEQ ID NO: 3121845 - RNA, 14 nt, Human
caggcucucaggcc

SEQ ID NO: 3121846 - RNA, 13 nt, Human
caggcucucaggc

SEQ ID NO: 3121847 - RNA, 14 nt, Human
caggcuccuuuagc

SEQ ID NO: 3121848 - RNA, 19 nt, Human
caggcuccuuuagcgccca

SEQ ID NO: 3121849 - RNA, 20 nt, Human
caggcuccuuuagcgcccag

SEQ ID NO: 3121850 - RNA, 12 nt, Human
caggcuggucuc

SEQ ID NO: 3121851 - RNA, 19 nt, Human
caggcuggucucaaacucu

SEQ ID NO: 3121852 - RNA, 14 nt, Human
caggcuguauccca

SEQ ID NO: 3121853 - RNA, 20 nt, Human
caggcuguaucccaugagcc

SEQ ID NO: 3121854 - RNA, 21 nt, Human
caggcuguaucccaugagccu

SEQ ID NO: 3121855 - RNA, 22 nt, Human
caggcuguaucccaugagccuc

SEQ ID NO: 3121856 - RNA, 23 nt, Human
caggcuguaucccaugagccuca

SEQ ID NO: 3121857 - RNA, 21 nt, Human
caggcuuagucacugagacag

SEQ ID NO: 3121858 - RNA, 20 nt, Human
caggcuuagucacugagaca

SEQ ID NO: 3121859 - RNA, 17 nt, Human
caggcuuagucacugag

SEQ ID NO: 3121860 - RNA, 16 nt, Human
caggcuuagucacuga

SEQ ID NO: 3121861 - RNA, 23 nt, Human
caggcuuagucacugagacagcc

SEQ ID NO: 3121862 - RNA, 22 nt, Human
caggcuuagucacugagacagc

SEQ ID NO: 3121863 - RNA, 23 nt, Human
caggcugggcuucaguggcagcu

SEQ ID NO: 3121864 - RNA, 16 nt, Human
cagggaaacagcuaau

SEQ ID NO: 3121865 - RNA, 22 nt, Human
cagggaaacagcuaaugggaca

SEQ ID NO: 3121866 - RNA, 13 nt, Human
cagggacagaggg

SEQ ID NO: 3121867 - RNA, 20 nt, Human
cagggacagaggggguggcc

SEQ ID NO: 3121868 - RNA, 14 nt, Human
cagggacagagggg

SEQ ID NO: 3121869 - RNA, 22 nt, Human
cagggcacaccgggcacucaga

SEQ ID NO: 3121870 - RNA, 23 nt, Human
cagggcacaccgggcacucagaa

SEQ ID NO: 3121871 - RNA, 15 nt, Human
cagggcacaccgggc

SEQ ID NO: 3121872 - RNA, 17 nt, Human
cagggcacaccgggcac

SEQ ID NO: 3121873 - RNA, 19 nt, Human
cagggcacaccgggcacuc

SEQ ID NO: 3121874 - RNA, 21 nt, Human
cagggcacaccgggcacucag

SEQ ID NO: 3121875 - RNA, 14 nt, Human
cagggcacaccggg

SEQ ID NO: 3121876 - RNA, 23 nt, Human
cagggacagaggggguggccucc

SEQ ID NO: 3121877 - RNA, 19 nt, Human
cagggccuggcucaggugg

SEQ ID NO: 3121878 - RNA, 16 nt, Human
cagggccuggcucagg

SEQ ID NO: 3121879 - RNA, 13 nt, Human
cagggccuggcuc

SEQ ID NO: 3121880 - RNA, 15 nt, Human
cagggccuggcucag

SEQ ID NO: 3121881 - RNA, 14 nt, Human
cagggccuggcuca

SEQ ID NO: 3121882 - RNA, 19 nt, Human
caggggaggguagagcgga

SEQ ID NO: 3121883 - RNA, 23 nt, Human
cagugccuuauggaacacucuga

SEQ ID NO: 3121884 - RNA, 13 nt, Human
cagugccuuaugg

SEQ ID NO: 3121885 - RNA, 11 nt, Human
cagugccuuau

SEQ ID NO: 3121886 - RNA, 18 nt, Human
cagugccgagaaggaagc

SEQ ID NO: 3121887 - RNA, 15 nt, Human
cagugccgagaagga

SEQ ID NO: 3121888 - RNA, 22 nt, Human
cagugccuuauggaacacucug

SEQ ID NO: 3121889 - RNA, 21 nt, Human
cagugccuuauggaacacucu

SEQ ID NO: 3121890 - RNA, 20 nt, Human
cagugccuuauggaacacuc

SEQ ID NO: 3121891 - RNA, 19 nt, Human
cagugccuuauggaacacu

SEQ ID NO: 3121892 - RNA, 18 nt, Human
cagugccuuauggaacac

SEQ ID NO: 3121893 - RNA, 17 nt, Human
cagugccuuauggaaca

SEQ ID NO: 3121894 - RNA, 16 nt, Human
cagugccuuauggaac

SEQ ID NO: 3121895 - RNA, 15 nt, Human
cagugccuuauggaa

SEQ ID NO: 3121896 - RNA, 19 nt, Human
cagugagucgaggacaggg

SEQ ID NO: 3121897 - RNA, 20 nt, Human
cagugagucgaggacaggga

SEQ ID NO: 3121898 - RNA, 22 nt, Human
cagugagucgaggacagggagg

SEQ ID NO: 3121899 - RNA, 23 nt, Human
cagugagucgaggacagggaggu

SEQ ID NO: 3121900 - RNA, 24 nt, Human
cagugagccgagauugcaccacug

SEQ ID NO: 3121901 - RNA, 12 nt, Human
cagugaggcucu

SEQ ID NO: 3121902 - RNA, 16 nt, Human
cagugaggcucugccc

SEQ ID NO: 3121903 - RNA, 15 nt, Human
cagugaggcucugcc

SEQ ID NO: 3121904 - RNA, 14 nt, Human
cagugaggcucugc

SEQ ID NO: 3121905 - RNA, 13 nt, Human
cagugaggcucug

SEQ ID NO: 3121906 - RNA, 21 nt, Human
cagugaggcucugcccuuggu

SEQ ID NO: 3121907 - RNA, 17 nt, Human
cagugagucgaggacag

SEQ ID NO: 3121908 - RNA, 18 nt, Human
cagugagucgaggacagg

SEQ ID NO: 3121909 - RNA, 20 nt, Human
cagugaggcucugcccuugg

SEQ ID NO: 3121910 - RNA, 19 nt, Human
cagugaggcucugcccuug

SEQ ID NO: 3121911 - RNA, 18 nt, Human
cagugaggcucugcccuu

SEQ ID NO: 3121912 - RNA, 17 nt, Human
cagugaggcucugcccu

SEQ ID NO: 3121913 - RNA, 17 nt, Human
caguccucccaucucac

SEQ ID NO: 3121914 - RNA, 16 nt, Human
caguccucccaucuca

SEQ ID NO: 3121915 - RNA, 18 nt, Human
cagucuggaaugcagugg

SEQ ID NO: 3121916 - RNA, 21 nt, Human
caguccuuaccagcagagcac

SEQ ID NO: 3121917 - RNA, 20 nt, Human
caguccuuaccagcagagca

SEQ ID NO: 3121918 - RNA, 19 nt, Human
caguccuuaccagcagagc

SEQ ID NO: 3121919 - RNA, 18 nt, Human
caguccuuaccagcagag

SEQ ID NO: 3121920 - RNA, 15 nt, Human
caguccuuaccagca

SEQ ID NO: 3121921 - RNA, 19 nt, Human
cagucuggaaugcaguggu

SEQ ID NO: 3121922 - RNA, 17 nt, Human
cagucccugccaaugga

SEQ ID NO: 3121923 - RNA, 15 nt, Human
caguccucccaucuc

SEQ ID NO: 3121924 - RNA, 14 nt, Human
caguccucccaucu

SEQ ID NO: 3121925 - RNA, 13 nt, Human
caguccucccauc

SEQ ID NO: 3121926 - RNA, 12 nt, Human
caguccucccau

SEQ ID NO: 3121927 - RNA, 16 nt, Human
cagucccugccaaugg

SEQ ID NO: 3121928 - RNA, 15 nt, Human
cagucccugccaaug

SEQ ID NO: 3121929 - RNA, 14 nt, Human
cagucccugccaau

SEQ ID NO: 3121930 - RNA, 13 nt, Human
cagucccugccaa

SEQ ID NO: 3121931 - RNA, 12 nt, Human
cagucccugcca

SEQ ID NO: 3121932 - RNA, 13 nt, Human
caguaucucaggg

SEQ ID NO: 3121933 - RNA, 21 nt, Human
caguaucuugaagacuuuucu

SEQ ID NO: 3121934 - RNA, 18 nt, Human
caguaucuugaagacuuu

SEQ ID NO: 3121935 - RNA, 12 nt, Human
caguaucuugaa

SEQ ID NO: 3121936 - RNA, 15 nt, Human
caguaucucagggcc

SEQ ID NO: 3121937 - RNA, 16 nt, Human
caguccauagcagaga

SEQ ID NO: 3121938 - RNA, 18 nt, Human
caguauuacuucugcuac

SEQ ID NO: 3121939 - RNA, 16 nt, Human
caguauuacuucugcu

SEQ ID NO: 3121940 - RNA, 21 nt, Human
caggggugggacacccuguga

SEQ ID NO: 3121941 - RNA, 20 nt, Human
caggggugggacacccugug

SEQ ID NO: 3121942 - RNA, 15 nt, Human
caggggugggacacc

SEQ ID NO: 3121943 - RNA, 14 nt, Human
caggggugggacac

SEQ ID NO: 3121944 - RNA, 21 nt, Human
caggguauuccagagugggga

SEQ ID NO: 3121945 - RNA, 20 nt, Human
caggguauuccagagugggg

SEQ ID NO: 3121946 - RNA, 12 nt, Human
cagggucccugg

SEQ ID NO: 3121947 - RNA, 14 nt, Human
cagggucccuggug

SEQ ID NO: 3121948 - RNA, 22 nt, Human
cagggucccugguggcagcuca

SEQ ID NO: 3121949 - RNA, 19 nt, Human
cagggucccugguggcagc

SEQ ID NO: 3121950 - RNA, 18 nt, Human
cagggucccugguggcag

SEQ ID NO: 3121951 - RNA, 15 nt, Human
cagggucccuggugg

SEQ ID NO: 3121952 - RNA, 14 nt, Human
cagguaacaggcag

SEQ ID NO: 3121953 - RNA, 15 nt, Human
cagguaacaggcaga

SEQ ID NO: 3121954 - RNA, 16 nt, Human
cagguaacaggcagau

SEQ ID NO: 3121955 - RNA, 17 nt, Human
cagguaacaggcagaua

SEQ ID NO: 3121956 - RNA, 16 nt, Human
caggguuuugccaugu

SEQ ID NO: 3121957 - RNA, 16 nt, Human
cagggucucacucugu

SEQ ID NO: 3121958 - RNA, 21 nt, Human
cagggucucacuauguugccc

SEQ ID NO: 3121959 - RNA, 22 nt, Human
cagggucucacuauguugccca

SEQ ID NO: 3121960 - RNA, 23 nt, Human
cagggucucacuauguugcccag

SEQ ID NO: 3121961 - RNA, 15 nt, Human
cagggucucacucug

SEQ ID NO: 3121962 - RNA, 18 nt, Human
caggguccuguagcccua

SEQ ID NO: 3121963 - RNA, 23 nt, Human
cagggucccugguggcagcucac

SEQ ID NO: 3121964 - RNA, 21 nt, Human
caggugagaagcagaggaagg

SEQ ID NO: 3121965 - RNA, 20 nt, Human
caggugagaagcagaggaag

SEQ ID NO: 3121966 - RNA, 13 nt, Human
caggugagaagca

SEQ ID NO: 3121967 - RNA, 18 nt, Human
caggucuugaacuccugg

SEQ ID NO: 3121968 - RNA, 19 nt, Human
caggucuugaacuccuggc

SEQ ID NO: 3121969 - RNA, 20 nt, Human
caggucuugaacuccuggcc

SEQ ID NO: 3121970 - RNA, 21 nt, Human
caggucuugaacuccuggccu

SEQ ID NO: 3121971 - RNA, 22 nt, Human
caggucuugaacuccuggccuc

SEQ ID NO: 3121972 - RNA, 23 nt, Human
caggucuugaacuccuggccuca

SEQ ID NO: 3121973 - RNA, 20 nt, Human
cagguaacaggcagauacag

SEQ ID NO: 3121974 - RNA, 21 nt, Human
cagguaacaggcagauacagg

SEQ ID NO: 3121975 - RNA, 20 nt, Human
caggugguuauggagagggu

SEQ ID NO: 3121976 - RNA, 11 nt, Human
caggugucccu

SEQ ID NO: 3121977 - RNA, 14 nt, Human
caggugucccugca

SEQ ID NO: 3121978 - RNA, 18 nt, Human
caggugguuauggagagg

SEQ ID NO: 3121979 - RNA, 23 nt, Human
cagguggggucacucuggcagcu

SEQ ID NO: 3121980 - RNA, 22 nt, Human
cagguggggucacucuggcagc

SEQ ID NO: 3121981 - RNA, 21 nt, Human
cagguggggucacucuggcag

SEQ ID NO: 3121982 - RNA, 20 nt, Human
cagguggggucacucuggca

SEQ ID NO: 3121983 - RNA, 19 nt, Human
cagguggggucacucuggc

SEQ ID NO: 3121984 - RNA, 13 nt, Human
cagguggggcagc

SEQ ID NO: 3121985 - RNA, 14 nt, Human
cagguggggcagcu

SEQ ID NO: 3121986 - RNA, 15 nt, Human
cagguggggcagcuu

SEQ ID NO: 3121987 - RNA, 16 nt, Human
cagguggggcagcuug

SEQ ID NO: 3121988 - RNA, 17 nt, Human
cagguggggcagcuuga

SEQ ID NO: 3121989 - RNA, 18 nt, Human
cagguggggucacucugg

SEQ ID NO: 3121990 - RNA, 12 nt, Human
caguaauaacuc

SEQ ID NO: 3121991 - RNA, 13 nt, Human
caguaauaacucu

SEQ ID NO: 3121992 - RNA, 22 nt, Human
caguaaaugggggugcauuuga

SEQ ID NO: 3121993 - RNA, 20 nt, Human
caguaaaugggggugcauuu

SEQ ID NO: 3121994 - RNA, 21 nt, Human
caguaaaugggggugcauuug

SEQ ID NO: 3121995 - RNA, 13 nt, Human
cagguucagcuug

SEQ ID NO: 3121996 - RNA, 12 nt, Human
cagguucagcuu

SEQ ID NO: 3121997 - RNA, 15 nt, Human
caggugucccugcac

SEQ ID NO: 3121998 - RNA, 16 nt, Human
caggugucccugcacu

SEQ ID NO: 3121999 - RNA, 18 nt, Human
caggugucccugcacuug

SEQ ID NO: 3122000 - RNA, 19 nt, Human
caggugucccugcacuugc

SEQ ID NO: 3122001 - RNA, 12 nt, Human
caggugugaacc

SEQ ID NO: 3122002 - RNA, 16 nt, Human
caggugugaaccacca

SEQ ID NO: 3122003 - RNA, 19 nt, Human
caggugugaaccaccacac

SEQ ID NO: 3122004 - RNA, 22 nt, Human
caggugugaaccaccacaccca

SEQ ID NO: 3122005 - RNA, 23 nt, Human
caggugugaaccaccacacccag

SEQ ID NO: 3122006 - RNA, 20 nt, Human
caggugugagucaccaagcc

SEQ ID NO: 3122007 - RNA, 21 nt, Human
caggugugagucaccaagccc

SEQ ID NO: 3122008 - RNA, 16 nt, Human
caggugugagucacca

SEQ ID NO: 3122009 - RNA, 22 nt, Human
caggugugagucaccaagccca

SEQ ID NO: 3122010 - RNA, 23 nt, Human
caggugugagucaccaagcccag

SEQ ID NO: 3122011 - RNA, 23 nt, Human
cuccgcuuucuacccagcgagcc

SEQ ID NO: 3122012 - RNA, 16 nt, Human
cuccuguaccucuuga

SEQ ID NO: 3122013 - RNA, 15 nt, Human
cuccuuucaccacau

SEQ ID NO: 3122014 - RNA, 14 nt, Human
cuccuuguguuacu

SEQ ID NO: 3122015 - RNA, 19 nt, Human
cuccuggccucaagugauu

SEQ ID NO: 3122016 - RNA, 18 nt, Human
cuccugggcuaagugauc

SEQ ID NO: 3122017 - RNA, 19 nt, Human
cuccuggcccacugcaucg

SEQ ID NO: 3122018 - RNA, 14 nt, Human
cuccucugcugcug

SEQ ID NO: 3122019 - RNA, 13 nt, Human
cuccucugcugcu

SEQ ID NO: 3122020 - RNA, 23 nt, Human
cuccaggugcacaagcuccaagc

SEQ ID NO: 3122021 - RNA, 15 nt, Human
cuccaggcuccuuua

SEQ ID NO: 3122022 - RNA, 23 nt, Human
cuccaggcuccuuuagcgcccag

SEQ ID NO: 3122023 - RNA, 20 nt, Human
cuccaggcuguaucccauga

SEQ ID NO: 3122024 - RNA, 22 nt, Human
cuccaggugcacaagcuccaag

SEQ ID NO: 3122025 - RNA, 20 nt, Human
cucccucuuucccucccuuc

SEQ ID NO: 3122026 - RNA, 19 nt, Human
cucugcacaagcugcaccc

SEQ ID NO: 3122027 - RNA, 21 nt, Human
cucugcacaagcugcacccuc

SEQ ID NO: 3122028 - RNA, 20 nt, Human
cucugcacaagcugcacccu

SEQ ID NO: 3122029 - RNA, 14 nt, Human
cucugcacuccccu

SEQ ID NO: 3122030 - RNA, 16 nt, Human
cucugcacuccccugc

SEQ ID NO: 3122031 - RNA, 15 nt, Human
cucugcacuccccug

SEQ ID NO: 3122032 - RNA, 13 nt, Human
cucuguacagagc

SEQ ID NO: 3122033 - RNA, 15 nt, Human
cucuguacagagccc

SEQ ID NO: 3122034 - RNA, 14 nt, Human
cucuguacagagcc

SEQ ID NO: 3122035 - RNA, 16 nt, Human
cucugcugcuggcugg

SEQ ID NO: 3122036 - RNA, 15 nt, Human
cucugcugcuggcug

SEQ ID NO: 3122037 - RNA, 14 nt, Human
cucugcugcuggcu

SEQ ID NO: 3122038 - RNA, 16 nt, Human
cucuguacagagccca

SEQ ID NO: 3122039 - RNA, 21 nt, Human
cucugcugacagacacaggcc

SEQ ID NO: 3122040 - RNA, 22 nt, Human
cucugcugacagacacaggccc

SEQ ID NO: 3122041 - RNA, 20 nt, Human
cucugcugacagacacaggc

SEQ ID NO: 3122042 - RNA, 13 nt, Human
cucugcugcuggc

SEQ ID NO: 3122043 - RNA, 23 nt, Human
cucugcugacagacacaggcccg

SEQ ID NO: 3122044 - RNA, 20 nt, Human
cucugcuccucuccccagca

SEQ ID NO: 3122045 - RNA, 21 nt, Human
cucugcuccucuccccagcaa

SEQ ID NO: 3122046 - RNA, 17 nt, Human
cucugcacuccccugcu

SEQ ID NO: 3122047 - RNA, 12 nt, Human
cucuccuccaga

SEQ ID NO: 3122048 - RNA, 15 nt, Human
cucuccuccagaguc

SEQ ID NO: 3122049 - RNA, 13 nt, Human
cucuccuccagag

SEQ ID NO: 3122050 - RNA, 16 nt, Human
cucuccuccagaguca

SEQ ID NO: 3122051 - RNA, 18 nt, Human
cuccuuugugaggaagcc

SEQ ID NO: 3122052 - RNA, 17 nt, Human
cuccuuugugaggaagc

SEQ ID NO: 3122053 - RNA, 16 nt, Human
cucgguguggagaagc

SEQ ID NO: 3122054 - RNA, 17 nt, Human
cucgguguggagaagcg

SEQ ID NO: 3122055 - RNA, 18 nt, Human
cuauguugcccaggcagg

SEQ ID NO: 3122056 - RNA, 19 nt, Human
cuauguugcccaggcaggu

SEQ ID NO: 3122057 - RNA, 21 nt, Human
cuauguugcccaggcaggucu

SEQ ID NO: 3122058 - RNA, 22 nt, Human
cuauguugcccaggcaggucuu

SEQ ID NO: 3122059 - RNA, 14 nt, Human
cuaugugagaccau

SEQ ID NO: 3122060 - RNA, 13 nt, Human
cuaucucccccag

SEQ ID NO: 3122061 - RNA, 21 nt, Human
cucaagugauucuccugccuc

SEQ ID NO: 3122062 - RNA, 23 nt, Human
cucaauuauuuugcauuuuuucu

SEQ ID NO: 3122063 - RNA, 13 nt, Human
cucagaagacacu

SEQ ID NO: 3122064 - RNA, 15 nt, Human
cucagaagacacuga

SEQ ID NO: 3122065 - RNA, 17 nt, Human
cucagaagacacugaug

SEQ ID NO: 3122066 - RNA, 20 nt, Human
cucagaagacacugaugggc

SEQ ID NO: 3122067 - RNA, 22 nt, Human
cucagaagacacugaugggcaa

SEQ ID NO: 3122068 - RNA, 17 nt, Human
cucaccuuucccaucuu

SEQ ID NO: 3122069 - RNA, 23 nt, Human
cucagaagacacugaugggcaac

SEQ ID NO: 3122070 - RNA, 19 nt, Human
cucagccucccgaauagcu

SEQ ID NO: 3122071 - RNA, 21 nt, Human
cucagccucccgaauagcugg

SEQ ID NO: 3122072 - RNA, 22 nt, Human
cucagccucccgaauagcuggg

SEQ ID NO: 3122073 - RNA, 15 nt, Human
cucaggccagcugcu

SEQ ID NO: 3122074 - RNA, 21 nt, Human
cucaggccaaacucaccugcc

SEQ ID NO: 3122075 - RNA, 20 nt, Human
cucaggccaaacucaccugc

SEQ ID NO: 3122076 - RNA, 19 nt, Human
cucaggccaaacucaccug

SEQ ID NO: 3122077 - RNA, 17 nt, Human
cucaggccagcugcuug

SEQ ID NO: 3122078 - RNA, 16 nt, Human
cucaggccagcugcuu

SEQ ID NO: 3122079 - RNA, 18 nt, Human
cucaggccagcugcuugg

SEQ ID NO: 3122080 - RNA, 11 nt, Human
cucaggccugg

SEQ ID NO: 3122081 - RNA, 22 nt, Human
cucaggccugggggcugggcag

SEQ ID NO: 3122082 - RNA, 23 nt, Human
cucaggugucccugcacuugcag

SEQ ID NO: 3122083 - RNA, 15 nt, Human
cucaguccauagcag

SEQ ID NO: 3122084 - RNA, 17 nt, Human
cucaguccauagcagag

SEQ ID NO: 3122085 - RNA, 20 nt, Human
cucagucuggcccuuccuuu

SEQ ID NO: 3122086 - RNA, 22 nt, Human
cucagucuggcccuuccuuuuc

SEQ ID NO: 3122087 - RNA, 22 nt, Human
cuaacuugucuuuggacccuga

SEQ ID NO: 3122088 - RNA, 14 nt, Human
cuaacuugucuuug

SEQ ID NO: 3122089 - RNA, 15 nt, Human
cguguuaugacucca

SEQ ID NO: 3122090 - RNA, 19 nt, Human
cguguuaugacuccagaau

SEQ ID NO: 3122091 - RNA, 18 nt, Human
cgugaguccuggcauggg

SEQ ID NO: 3122092 - RNA, 19 nt, Human
cgugaguccuggcauggga

SEQ ID NO: 3122093 - RNA, 11 nt, Human
cuaaagcugcc

SEQ ID NO: 3122094 - RNA, 22 nt, Human
cgugagccacugcaccgggcca

SEQ ID NO: 3122095 - RNA, 14 nt, Human
cgugaggccagaga

SEQ ID NO: 3122096 - RNA, 14 nt, Human
cgugagccacugca

SEQ ID NO: 3122097 - RNA, 15 nt, Human
cgugagccacugcac

SEQ ID NO: 3122098 - RNA, 20 nt, Human
cgugagccacugcaccgggc

SEQ ID NO: 3122099 - RNA, 14 nt, Human
cgugacaacacuug

SEQ ID NO: 3122100 - RNA, 15 nt, Human
cgugacaacacuugu

SEQ ID NO: 3122101 - RNA, 12 nt, Human
cgugacaacacu

SEQ ID NO: 3122102 - RNA, 14 nt, Human
cuaaguuuuuaugg

SEQ ID NO: 3122103 - RNA, 19 nt, Human
cuacaaaaagcauaaaaau

SEQ ID NO: 3122104 - RNA, 20 nt, Human
cgcugccccuggcagccccu

SEQ ID NO: 3122105 - RNA, 19 nt, Human
cgcugccccuggcagcccc

SEQ ID NO: 3122106 - RNA, 17 nt, Human
cgcuggagugcagugag

SEQ ID NO: 3122107 - RNA, 18 nt, Human
cgcuggagugcagugagc

SEQ ID NO: 3122108 - RNA, 23 nt, Human
cgccaaggcugggggaagaagcu

SEQ ID NO: 3122109 - RNA, 23 nt, Human
cggagucccaccuuggcugcagg

SEQ ID NO: 3122110 - RNA, 21 nt, Human
cggagucccaccuuggcugca

SEQ ID NO: 3122111 - RNA, 22 nt, Human
cggagucccaccuuggcugcag

SEQ ID NO: 3122112 - RNA, 15 nt, Human
cggagacggaguccc

SEQ ID NO: 3122113 - RNA, 20 nt, Human
cggagacggagucccaccuu

SEQ ID NO: 3122114 - RNA, 17 nt, Human
cggagacggagucccac

SEQ ID NO: 3122115 - RNA, 22 nt, Human
cguacacauuuuauuuuauuau

SEQ ID NO: 3122116 - RNA, 16 nt, Human
cguacacauuuuauuu

SEQ ID NO: 3122117 - RNA, 20 nt, Human
cgguggcucacgccuguaau

SEQ ID NO: 3122118 - RNA, 17 nt, Human
cgggccacagagaaagu

SEQ ID NO: 3122119 - RNA, 19 nt, Human
cgggcucagcaaaagaugc

SEQ ID NO: 3122120 - RNA, 12 nt, Human
cgggcucugccu

SEQ ID NO: 3122121 - RNA, 18 nt, Human
ccuguucccaugagauga

SEQ ID NO: 3122122 - RNA, 17 nt, Human
ccuguucuggcagaguu

SEQ ID NO: 3122123 - RNA, 12 nt, Human
ccuguucuggca

SEQ ID NO: 3122124 - RNA, 23 nt, Human
ccuguucagcuccagcucaccag

SEQ ID NO: 3122125 - RNA, 20 nt, Human
ccuguucagcuccagcucac

SEQ ID NO: 3122126 - RNA, 21 nt, Human
ccuguucagcuccagcucacc

SEQ ID NO: 3122127 - RNA, 14 nt, Human
ccuguucagcucca

SEQ ID NO: 3122128 - RNA, 15 nt, Human
ccuguucagcuccag

SEQ ID NO: 3122129 - RNA, 16 nt, Human
ccuguucagcuccagc

SEQ ID NO: 3122130 - RNA, 19 nt, Human
ccuguucagcuccagcuca

SEQ ID NO: 3122131 - RNA, 16 nt, Human
ccuguugggccaggag

SEQ ID NO: 3122132 - RNA, 20 nt, Human
ccuguugggccaggagccuc

SEQ ID NO: 3122133 - RNA, 19 nt, Human
ccuguugggccaggagccu

SEQ ID NO: 3122134 - RNA, 18 nt, Human
ccuguugggccaggagcc

SEQ ID NO: 3122135 - RNA, 17 nt, Human
ccuguugggccaggagc

SEQ ID NO: 3122136 - RNA, 16 nt, Human
ccuuagcaaauucugu

SEQ ID NO: 3122137 - RNA, 19 nt, Human
ccuuagcagggaaacagcu

SEQ ID NO: 3122138 - RNA, 20 nt, Human
ccuuagcagggaaacagcua

SEQ ID NO: 3122139 - RNA, 12 nt, Human
ccuucccaccuc

SEQ ID NO: 3122140 - RNA, 19 nt, Human
ccuucccaccucucucacu

SEQ ID NO: 3122141 - RNA, 14 nt, Human
ccuucccaccucuc

SEQ ID NO: 3122142 - RNA, 18 nt, Human
ccuuauggaacacucuga

SEQ ID NO: 3122143 - RNA, 17 nt, Human
ccuuauggaacacucug

SEQ ID NO: 3122144 - RNA, 16 nt, Human
ccuuauggaacacucu

SEQ ID NO: 3122145 - RNA, 14 nt, Human
ccuuauggaacacu

SEQ ID NO: 3122146 - RNA, 20 nt, Human
ccuuauggaacacucugaga

SEQ ID NO: 3122147 - RNA, 19 nt, Human
ccuuauggaacacucugag

SEQ ID NO: 3122148 - RNA, 22 nt, Human
ccuuauggaacacucugagacu

SEQ ID NO: 3122149 - RNA, 12 nt, Human
ccuuauggaaca

SEQ ID NO: 3122150 - RNA, 13 nt, Human
ccuguucagcucc

SEQ ID NO: 3122151 - RNA, 22 nt, Human
ccuucuguccuacucuguguca

SEQ ID NO: 3122152 - RNA, 20 nt, Human
ccuucuguccuacucugugu

SEQ ID NO: 3122153 - RNA, 21 nt, Human
ccuucuguccuacucuguguc

SEQ ID NO: 3122154 - RNA, 23 nt, Human
ccuucucuccagccccuggaugc

SEQ ID NO: 3122155 - RNA, 21 nt, Human
ccuucucuccagccccuggau

SEQ ID NO: 3122156 - RNA, 14 nt, Human
ccuucucugaagga

SEQ ID NO: 3122157 - RNA, 16 nt, Human
ccuucucugaaggaca

SEQ ID NO: 3122158 - RNA, 20 nt, Human
ccuucucuccagccccugga

SEQ ID NO: 3122159 - RNA, 17 nt, Human
ccuuucaauaggaaaaa

SEQ ID NO: 3122160 - RNA, 15 nt, Human
ccuuucaauaggaaa

SEQ ID NO: 3122161 - RNA, 19 nt, Human
ccucuuuggucuacacugu

SEQ ID NO: 3122162 - RNA, 16 nt, Human
ccucuuugagugaagc

SEQ ID NO: 3122163 - RNA, 12 nt, Human
ccugaggggccu

SEQ ID NO: 3122164 - RNA, 16 nt, Human
ccugaggggccucuua

SEQ ID NO: 3122165 - RNA, 21 nt, Human
ccugaggcugggcucccuucc

SEQ ID NO: 3122166 - RNA, 19 nt, Human
ccugaggcugggcucccuu

SEQ ID NO: 3122167 - RNA, 17 nt, Human
ccugaggcugggcuccc

SEQ ID NO: 3122168 - RNA, 16 nt, Human
ccugaggcugggcucc

SEQ ID NO: 3122169 - RNA, 21 nt, Human
ccugcaggcagccaggccaca

SEQ ID NO: 3122170 - RNA, 20 nt, Human
ccugcaggcagccaggccac

SEQ ID NO: 3122171 - RNA, 19 nt, Human
ccugcaggcagccaggcca

SEQ ID NO: 3122172 - RNA, 18 nt, Human
ccugcaggcagccaggcc

SEQ ID NO: 3122173 - RNA, 17 nt, Human
ccugcaggcagccaggc

SEQ ID NO: 3122174 - RNA, 16 nt, Human
ccugcaggcagccagg

SEQ ID NO: 3122175 - RNA, 12 nt, Human
ccugcagagggc

SEQ ID NO: 3122176 - RNA, 15 nt, Human
ccugcaggcagccag

SEQ ID NO: 3122177 - RNA, 21 nt, Human
ccugcugcaguugccagucac

SEQ ID NO: 3122178 - RNA, 22 nt, Human
ccugcugcaguugccagucacc

SEQ ID NO: 3122179 - RNA, 11 nt, Human
ccugcugcagu

SEQ ID NO: 3122180 - RNA, 16 nt, Human
ccugcugcaguugcca

SEQ ID NO: 3122181 - RNA, 12 nt, Human
ccugcugcaguu

SEQ ID NO: 3122182 - RNA, 15 nt, Human
ccugccucuucucua

SEQ ID NO: 3122183 - RNA, 20 nt, Human
ccugccuccuuugugaggaa

SEQ ID NO: 3122184 - RNA, 19 nt, Human
ccugccuccuuugugagga

SEQ ID NO: 3122185 - RNA, 15 nt, Human
ccugccuccuuugug

SEQ ID NO: 3122186 - RNA, 13 nt, Human
ccugccuccuuug

SEQ ID NO: 3122187 - RNA, 22 nt, Human
ccugccuccuuugugaggaagc

SEQ ID NO: 3122188 - RNA, 21 nt, Human
ccugccuccuuugugaggaag

SEQ ID NO: 3122189 - RNA, 23 nt, Human
ccugccuccuuugugaggaagcc

SEQ ID NO: 3122190 - RNA, 11 nt, Human
ccucaggcagg

SEQ ID NO: 3122191 - RNA, 17 nt, Human
ccucccaccucagccuc

SEQ ID NO: 3122192 - RNA, 21 nt, Human
ccucccaacucaccccagccc

SEQ ID NO: 3122193 - RNA, 20 nt, Human
ccucccaacucaccccagcc

SEQ ID NO: 3122194 - RNA, 17 nt, Human
ccucccaacucacccca

SEQ ID NO: 3122195 - RNA, 16 nt, Human
ccucgaacuggcugca

SEQ ID NO: 3122196 - RNA, 15 nt, Human
ccucgaacuggcugc

SEQ ID NO: 3122197 - RNA, 18 nt, Human
ccuccuuugugaggaagc

SEQ ID NO: 3122198 - RNA, 19 nt, Human
ccuccuuugugaggaagcc

SEQ ID NO: 3122199 - RNA, 20 nt, Human
ccucugccucugacacacag

SEQ ID NO: 3122200 - RNA, 21 nt, Human
ccucugccucugacacacagc

SEQ ID NO: 3122201 - RNA, 23 nt, Human
ccucugccucugacacacagcuc

SEQ ID NO: 3122202 - RNA, 11 nt, Human
ccucugccuga

SEQ ID NO: 3122203 - RNA, 20 nt, Human
ccucugccugaagucacaca

SEQ ID NO: 3122204 - RNA, 18 nt, Human
ccggcaggguccuagaaa

SEQ ID NO: 3122205 - RNA, 15 nt, Human
ccggccccugcuggu

SEQ ID NO: 3122206 - RNA, 16 nt, Human
ccggccaccugcggug

SEQ ID NO: 3122207 - RNA, 19 nt, Human
ccuagcauacguacacauu

SEQ ID NO: 3122208 - RNA, 17 nt, Human
ccuagcacuuugggagg

SEQ ID NO: 3122209 - RNA, 20 nt, Human
ccuagccugugccucuggga

SEQ ID NO: 3122210 - RNA, 14 nt, Human
ccuaaucuucugaa

SEQ ID NO: 3122211 - RNA, 12 nt, Human
ccggcuccaggc

SEQ ID NO: 3122212 - RNA, 13 nt, Human
ccggcuccaggcu

SEQ ID NO: 3122213 - RNA, 14 nt, Human
ccggcuccaggcuc

SEQ ID NO: 3122214 - RNA, 15 nt, Human
ccgucuaccugaggg

SEQ ID NO: 3122215 - RNA, 14 nt, Human
ccgucuaccugagg

SEQ ID NO: 3122216 - RNA, 16 nt, Human
ccgugaggccagagac

SEQ ID NO: 3122217 - RNA, 14 nt, Human
ccgugaggccagag

SEQ ID NO: 3122218 - RNA, 13 nt, Human
ccgugaggccaga

SEQ ID NO: 3122219 - RNA, 12 nt, Human
ccgugaggccag

SEQ ID NO: 3122220 - RNA, 17 nt, Human
ccgucuaccugaggggc

SEQ ID NO: 3122221 - RNA, 23 nt, Human
cccugugauggggcccugccucc

SEQ ID NO: 3122222 - RNA, 22 nt, Human
cccugugauggggcccugccuc

SEQ ID NO: 3122223 - RNA, 21 nt, Human
cccugugauggggcccugccu

SEQ ID NO: 3122224 - RNA, 12 nt, Human
ccgcccaggcuu

SEQ ID NO: 3122225 - RNA, 17 nt, Human
ccgcagacaggaccagg

SEQ ID NO: 3122226 - RNA, 16 nt, Human
ccgcagacaggaccag

SEQ ID NO: 3122227 - RNA, 15 nt, Human
cccuuccucuuucca

SEQ ID NO: 3122228 - RNA, 19 nt, Human
ccgaaagggacuuggaagc

SEQ ID NO: 3122229 - RNA, 17 nt, Human
ccgaaaacguggcugcu

SEQ ID NO: 3122230 - RNA, 16 nt, Human
ccgaaaacguggcugc

SEQ ID NO: 3122231 - RNA, 15 nt, Human
ccgcagacaggacca

SEQ ID NO: 3122232 - RNA, 13 nt, Human
ccgaccagacacc

SEQ ID NO: 3122233 - RNA, 17 nt, Human
ccgaccagacaccuuga

SEQ ID NO: 3122234 - RNA, 16 nt, Human
ccgaauagcugggacu

SEQ ID NO: 3122235 - RNA, 13 nt, Human
cccuggaugcagc

SEQ ID NO: 3122236 - RNA, 21 nt, Human
cccuggaugcagccucacagu

SEQ ID NO: 3122237 - RNA, 17 nt, Human
cccuggaugcagccuca

SEQ ID NO: 3122238 - RNA, 22 nt, Human
cccugcccaccuggccucugca

SEQ ID NO: 3122239 - RNA, 14 nt, Human
cccugcccggcugc

SEQ ID NO: 3122240 - RNA, 17 nt, Human
cccugcccggcugcgga

SEQ ID NO: 3122241 - RNA, 20 nt, Human
cccugcccaccuggccucug

SEQ ID NO: 3122242 - RNA, 16 nt, Human
cccugagcuuucugcu

SEQ ID NO: 3122243 - RNA, 18 nt, Human
cccugaaagcccugagcu

SEQ ID NO: 3122244 - RNA, 14 nt, Human
cccugacaacacuc

SEQ ID NO: 3122245 - RNA, 22 nt, Human
cccugaaggccccgcccaggcu

SEQ ID NO: 3122246 - RNA, 20 nt, Human
cccugaaggccccgcccagg

SEQ ID NO: 3122247 - RNA, 22 nt, Human
cccugacaacacucauugaccu

SEQ ID NO: 3122248 - RNA, 16 nt, Human
cccugacaacacucau

SEQ ID NO: 3122249 - RNA, 19 nt, Human
cccugaaggccccgcccag

SEQ ID NO: 3122250 - RNA, 16 nt, Human
cccugaaggccccgcc

SEQ ID NO: 3122251 - RNA, 14 nt, Human
cccugaaggccccg

SEQ ID NO: 3122252 - RNA, 13 nt, Human
cccugaaggcccc

SEQ ID NO: 3122253 - RNA, 16 nt, Human
cccugaaagcccugag

SEQ ID NO: 3122254 - RNA, 12 nt, Human
cccugaaggccc

SEQ ID NO: 3122255 - RNA, 23 nt, Human
cccauucugccugcccaggcccc

SEQ ID NO: 3122256 - RNA, 12 nt, Human
ccccagccccaa

SEQ ID NO: 3122257 - RNA, 10 nt, Human
ccccagcccc

SEQ ID NO: 3122258 - RNA, 21 nt, Human
ccccauucugccugcccaggc

SEQ ID NO: 3122259 - RNA, 14 nt, Human
ccccagccccaaaa

SEQ ID NO: 3122260 - RNA, 14 nt, Human
ccccagccccaucc

SEQ ID NO: 3122261 - RNA, 20 nt, Human
ccccaaaacucuccucugcu

SEQ ID NO: 3122262 - RNA, 18 nt, Human
ccccaaaacucuccucug

SEQ ID NO: 3122263 - RNA, 14 nt, Human
ccccgcccaggcuu

SEQ ID NO: 3122264 - RNA, 18 nt, Human
ccccggccaccugcggug

SEQ ID NO: 3122265 - RNA, 14 nt, Human
ccccggccaccugc

SEQ ID NO: 3122266 - RNA, 13 nt, Human
ccccggccaccug

SEQ ID NO: 3122267 - RNA, 12 nt, Human
ccccgcccaggc

SEQ ID NO: 3122268 - RNA, 14 nt, Human
cccccuuccaugga

SEQ ID NO: 3122269 - RNA, 19 nt, Human
cccauccucuguacagagc

SEQ ID NO: 3122270 - RNA, 15 nt, Human
cccauccucuguaca

SEQ ID NO: 3122271 - RNA, 14 nt, Human
cccauccucuguac

SEQ ID NO: 3122272 - RNA, 19 nt, Human
cccaggcuggcgugcagug

SEQ ID NO: 3122273 - RNA, 20 nt, Human
cccaggcuggcgugcagugg

SEQ ID NO: 3122274 - RNA, 18 nt, Human
cccaggcuggcgugcagu

SEQ ID NO: 3122275 - RNA, 17 nt, Human
cccagcccacuucugcc

SEQ ID NO: 3122276 - RNA, 19 nt, Human
cccagcccacuucugccau

SEQ ID NO: 3122277 - RNA, 21 nt, Human
cccagccccaaaacucuccuc

SEQ ID NO: 3122278 - RNA, 23 nt, Human
cccagccccaaaacucuccucug

SEQ ID NO: 3122279 - RNA, 17 nt, Human
ccaugggccuccugugu

SEQ ID NO: 3122280 - RNA, 18 nt, Human
ccaugaggaacaaggcaa

SEQ ID NO: 3122281 - RNA, 17 nt, Human
ccaugaggaacaaggca

SEQ ID NO: 3122282 - RNA, 16 nt, Human
ccaugaggaacaaggc

SEQ ID NO: 3122283 - RNA, 18 nt, Human
cccaccgcagacaggacc

SEQ ID NO: 3122284 - RNA, 15 nt, Human
cccaccgcagacagg

SEQ ID NO: 3122285 - RNA, 18 nt, Human
cccaccaucaugucuggc

SEQ ID NO: 3122286 - RNA, 15 nt, Human
cccacccaagggccu

SEQ ID NO: 3122287 - RNA, 15 nt, Human
cccaagcucugcucc

SEQ ID NO: 3122288 - RNA, 17 nt, Human
cccaagcucugcuccuc

SEQ ID NO: 3122289 - RNA, 13 nt, Human
ccagucaccccgg

SEQ ID NO: 3122290 - RNA, 18 nt, Human
ccagucaccccggccacc

SEQ ID NO: 3122291 - RNA, 17 nt, Human
ccagucaccccggccac

SEQ ID NO: 3122292 - RNA, 16 nt, Human
ccagucaccccggcca

SEQ ID NO: 3122293 - RNA, 22 nt, Human
ccaguaucuugaagacuuuucu

SEQ ID NO: 3122294 - RNA, 19 nt, Human
ccaguaucuugaagacuuu

SEQ ID NO: 3122295 - RNA, 13 nt, Human
ccaguaucuugaa

SEQ ID NO: 3122296 - RNA, 22 nt, Human
ccaggggugggacacccuguga

SEQ ID NO: 3122297 - RNA, 21 nt, Human
ccaggggugggacacccugug

SEQ ID NO: 3122298 - RNA, 20 nt, Human
ccaggggugggacacccugu

SEQ ID NO: 3122299 - RNA, 19 nt, Human
ccaggggugggacacccug

SEQ ID NO: 3122300 - RNA, 17 nt, Human
ccaggaaaggcuccagg

SEQ ID NO: 3122301 - RNA, 19 nt, Human
ccaggaaaggcuccaggag

SEQ ID NO: 3122302 - RNA, 18 nt, Human
ccaggaaaggcuccagga

SEQ ID NO: 3122303 - RNA, 20 nt, Human
ccaggaaaggcuccaggagc

SEQ ID NO: 3122304 - RNA, 21 nt, Human
ccagcgagcccugguggcagu

SEQ ID NO: 3122305 - RNA, 18 nt, Human
ccagccccuucugaccca

SEQ ID NO: 3122306 - RNA, 17 nt, Human
ccagccccuucugaccc

SEQ ID NO: 3122307 - RNA, 16 nt, Human
ccagccccuucugacc

SEQ ID NO: 3122308 - RNA, 15 nt, Human
ccagccccuucugac

SEQ ID NO: 3122309 - RNA, 18 nt, Human
ccagccccauccucugua

SEQ ID NO: 3122310 - RNA, 23 nt, Human
ccagccccauccucuguacagag

SEQ ID NO: 3122311 - RNA, 13 nt, Human
ccagcagccugga

SEQ ID NO: 3122312 - RNA, 15 nt, Human
ccagccccuggaugc

SEQ ID NO: 3122313 - RNA, 14 nt, Human
ccagccccuggaug

SEQ ID NO: 3122314 - RNA, 13 nt, Human
ccagccccuggau

SEQ ID NO: 3122315 - RNA, 12 nt, Human
ccagcagaaaug

SEQ ID NO: 3122316 - RNA, 12 nt, Human
ccagcagccugg

SEQ ID NO: 3122317 - RNA, 11 nt, Human
ccagcagccug

SEQ ID NO: 3122318 - RNA, 16 nt, Human
ccagcagaaaugccuu

SEQ ID NO: 3122319 - RNA, 17 nt, Human
ccagcagaaaugccuua

SEQ ID NO: 3122320 - RNA, 22 nt, Human
ccagcagaaaugccuuacccuc

SEQ ID NO: 3122321 - RNA, 20 nt, Human
ccagagggccugcaagggag

SEQ ID NO: 3122322 - RNA, 13 nt, Human
ccagaugcaccag

SEQ ID NO: 3122323 - RNA, 14 nt, Human
ccagaugcaccagc

SEQ ID NO: 3122324 - RNA, 18 nt, Human
ccagagacacaagccuuc

SEQ ID NO: 3122325 - RNA, 16 nt, Human
ccagagacacaagccu

SEQ ID NO: 3122326 - RNA, 19 nt, Human
ccacugcacuauagccuag

SEQ ID NO: 3122327 - RNA, 20 nt, Human
ccacugcacuauagccuagg

SEQ ID NO: 3122328 - RNA, 13 nt, Human
ccacugcaccggg

SEQ ID NO: 3122329 - RNA, 14 nt, Human
ccacugcaccgggc

SEQ ID NO: 3122330 - RNA, 17 nt, Human
ccacugcaccgggccac

SEQ ID NO: 3122331 - RNA, 19 nt, Human
ccacugcaccgggccacag

SEQ ID NO: 3122332 - RNA, 13 nt, Human
ccacuuucuagcc

SEQ ID NO: 3122333 - RNA, 19 nt, Human
ccacuuucuagccagagga

SEQ ID NO: 3122334 - RNA, 18 nt, Human
ccacuuucuagccagagg

SEQ ID NO: 3122335 - RNA, 20 nt, Human
ccacuuucuagccagaggag

SEQ ID NO: 3122336 - RNA, 17 nt, Human
ccagacccggcugcgug

SEQ ID NO: 3122337 - RNA, 16 nt, Human
ccagacccggcugcgu

SEQ ID NO: 3122338 - RNA, 14 nt, Human
ccacuuuuguucuu

SEQ ID NO: 3122339 - RNA, 15 nt, Human
ccacuuuuguucuug

SEQ ID NO: 3122340 - RNA, 21 nt, Human
ccacuuuuguucuugguuugu

SEQ ID NO: 3122341 - RNA, 16 nt, Human
caaaccaucauugaaa

SEQ ID NO: 3122342 - RNA, 14 nt, Human
caaaccaucauuga

SEQ ID NO: 3122343 - RNA, 17 nt, Human
caaaccaucauugaaau

SEQ ID NO: 3122344 - RNA, 20 nt, Human
caaaagguuaauaaaguaau

SEQ ID NO: 3122345 - RNA, 19 nt, Human
caaaagcaucuaugugaga

SEQ ID NO: 3122346 - RNA, 13 nt, Human
caaaagcauguga

SEQ ID NO: 3122347 - RNA, 21 nt, Human
auuuuguuuuugucuuaaaaa

SEQ ID NO: 3122348 - RNA, 22 nt, Human
auuuuguuuuugucuuaaaaag

SEQ ID NO: 3122349 - RNA, 16 nt, Human
auuuuuauuaaauuau

SEQ ID NO: 3122350 - RNA, 14 nt, Human
auuuguuauaauga

SEQ ID NO: 3122351 - RNA, 20 nt, Human
auuucuguuuagauaauaca

SEQ ID NO: 3122352 - RNA, 19 nt, Human
auuucuguuuagauaauac

SEQ ID NO: 3122353 - RNA, 21 nt, Human
auuucuguuuagauaauacac

SEQ ID NO: 3122354 - RNA, 12 nt, Human
auuucacucucc

SEQ ID NO: 3122355 - RNA, 22 nt, Human
auuacaagcgugagccacugca

SEQ ID NO: 3122356 - RNA, 20 nt, Human
auucucuaguuugauuaaau

SEQ ID NO: 3122357 - RNA, 19 nt, Human
auucucuaguuugauuaaa

SEQ ID NO: 3122358 - RNA, 23 nt, Human
auucucuaguuugauuaaauucu

SEQ ID NO: 3122359 - RNA, 12 nt, Human
auucucuuaucc

SEQ ID NO: 3122360 - RNA, 14 nt, Human
auucucuuauccaa

SEQ ID NO: 3122361 - RNA, 15 nt, Human
auucucuuauccaac

SEQ ID NO: 3122362 - RNA, 14 nt, Human
auucauauuuacuu

SEQ ID NO: 3122363 - RNA, 12 nt, Human
cacccagcccac

SEQ ID NO: 3122364 - RNA, 23 nt, Human
cacaucuugcucugcugacagac

SEQ ID NO: 3122365 - RNA, 19 nt, Human
cacaucuugcucugcugac

SEQ ID NO: 3122366 - RNA, 17 nt, Human
cacauuuauucugcuca

SEQ ID NO: 3122367 - RNA, 18 nt, Human
cacauuuauucugcucac

SEQ ID NO: 3122368 - RNA, 17 nt, Human
caccagccccagugccc

SEQ ID NO: 3122369 - RNA, 18 nt, Human
caccagccccagugccca

SEQ ID NO: 3122370 - RNA, 21 nt, Human
caccagccccagugcccacag

SEQ ID NO: 3122371 - RNA, 22 nt, Human
caccagccccagugcccacagg

SEQ ID NO: 3122372 - RNA, 16 nt, Human
caccagccccagugcc

SEQ ID NO: 3122373 - RNA, 19 nt, Human
caccagcccuuagcaggga

SEQ ID NO: 3122374 - RNA, 13 nt, Human
cacaucuugcucu

SEQ ID NO: 3122375 - RNA, 14 nt, Human
cacaucuugcucug

SEQ ID NO: 3122376 - RNA, 15 nt, Human
cacaucuugcucugc

SEQ ID NO: 3122377 - RNA, 20 nt, Human
cacaucuugcucugcugaca

SEQ ID NO: 3122378 - RNA, 21 nt, Human
cacaucuugcucugcugacag

SEQ ID NO: 3122379 - RNA, 22 nt, Human
cacaucuugcucugcugacaga

SEQ ID NO: 3122380 - RNA, 15 nt, Human
cacuacauucuguua

SEQ ID NO: 3122381 - RNA, 22 nt, Human
cacggaagagccuugcggaagg

SEQ ID NO: 3122382 - RNA, 16 nt, Human
cacggaagagccuugc

SEQ ID NO: 3122383 - RNA, 21 nt, Human
cacuacauuauaaaugucucu

SEQ ID NO: 3122384 - RNA, 13 nt, Human
cacuacauucugu

SEQ ID NO: 3122385 - RNA, 14 nt, Human
cacuacauucuguu

SEQ ID NO: 3122386 - RNA, 21 nt, Human
cacgcuggagugcagugagcc

SEQ ID NO: 3122387 - RNA, 16 nt, Human
cacgcuggagugcagu

SEQ ID NO: 3122388 - RNA, 17 nt, Human
cacgcuggagugcagug

SEQ ID NO: 3122389 - RNA, 18 nt, Human
cacgcuggagugcaguga

SEQ ID NO: 3122390 - RNA, 20 nt, Human
cacgcuggagugcagugagc

SEQ ID NO: 3122391 - RNA, 15 nt, Human
cacgcuggagugcag

SEQ ID NO: 3122392 - RNA, 16 nt, Human
caccugcggugcuauc

SEQ ID NO: 3122393 - RNA, 19 nt, Human
caccugcggugcuaucucc

SEQ ID NO: 3122394 - RNA, 17 nt, Human
caccugcggugcuaucu

SEQ ID NO: 3122395 - RNA, 12 nt, Human
cacccugcucuc

SEQ ID NO: 3122396 - RNA, 12 nt, Human
cacccuccuuuc

SEQ ID NO: 3122397 - RNA, 12 nt, Human
caccugccaggg

SEQ ID NO: 3122398 - RNA, 11 nt, Human
caccugccagg

SEQ ID NO: 3122399 - RNA, 21 nt, Human
caccugccccucaacucuccu

SEQ ID NO: 3122400 - RNA, 18 nt, Human
caccugccccucaacucu

SEQ ID NO: 3122401 - RNA, 16 nt, Human
caccugccccucaacu

SEQ ID NO: 3122402 - RNA, 17 nt, Human
cacccuggggagaaagu

SEQ ID NO: 3122403 - RNA, 20 nt, Human
caauuuauuauggcacauca

SEQ ID NO: 3122404 - RNA, 13 nt, Human
caauuuauuaugg

SEQ ID NO: 3122405 - RNA, 13 nt, Human
caauggcagccuu

SEQ ID NO: 3122406 - RNA, 14 nt, Human
caauggcagccuug

SEQ ID NO: 3122407 - RNA, 15 nt, Human
caauggcagccuugg

SEQ ID NO: 3122408 - RNA, 14 nt, Human
caaucaaaucugcu

SEQ ID NO: 3122409 - RNA, 15 nt, Human
caagcucugcuccuc

SEQ ID NO: 3122410 - RNA, 16 nt, Human
caagcucugcuccucu

SEQ ID NO: 3122411 - RNA, 17 nt, Human
caagcucccaggcauuc

SEQ ID NO: 3122412 - RNA, 15 nt, Human
caagcucccaggcau

SEQ ID NO: 3122413 - RNA, 14 nt, Human
caagcucccaggca

SEQ ID NO: 3122414 - RNA, 12 nt, Human
caagcucccagg

SEQ ID NO: 3122415 - RNA, 21 nt, Human
caagcuccaagcucccaggca

SEQ ID NO: 3122416 - RNA, 19 nt, Human
caagcuccaagcucccagg

SEQ ID NO: 3122417 - RNA, 18 nt, Human
caagcuccaagcucccag

SEQ ID NO: 3122418 - RNA, 17 nt, Human
caagcuccaagcuccca

SEQ ID NO: 3122419 - RNA, 13 nt, Human
caaguauuauacc

SEQ ID NO: 3122420 - RNA, 17 nt, Human
caaguauuauaccuuuu

SEQ ID NO: 3122421 - RNA, 22 nt, Human
caaguauuauaccuuuuuuaga

SEQ ID NO: 3122422 - RNA, 14 nt, Human
caaggcaaggcugu

SEQ ID NO: 3122423 - RNA, 19 nt, Human
caaggauugcuacuguccu

SEQ ID NO: 3122424 - RNA, 20 nt, Human
caaggauugcuacuguccua

SEQ ID NO: 3122425 - RNA, 13 nt, Human
caagcaccuccug

SEQ ID NO: 3122426 - RNA, 14 nt, Human
caagaccacguuuc

SEQ ID NO: 3122427 - RNA, 17 nt, Human
caagaaggaugauucaa

SEQ ID NO: 3122428 - RNA, 18 nt, Human
caagaagcccaggaaagg

SEQ ID NO: 3122429 - RNA, 15 nt, Human
caagaagcccaggaa

SEQ ID NO: 3122430 - RNA, 14 nt, Human
caagaagcccagga

SEQ ID NO: 3122431 - RNA, 14 nt, Human
caacccccagccug

SEQ ID NO: 3122432 - RNA, 17 nt, Human
caaccccuucgcuccug

SEQ ID NO: 3122433 - RNA, 14 nt, Human
caaccccuucgcuc

SEQ ID NO: 3122434 - RNA, 16 nt, Human
caaccccuucgcuccu

SEQ ID NO: 3122435 - RNA, 15 nt, Human
cagccugcuccagcu

SEQ ID NO: 3122436 - RNA, 19 nt, Human
cagccugcuccagcuguuc

SEQ ID NO: 3122437 - RNA, 17 nt, Human
cagccugcuccagcugu

SEQ ID NO: 3122438 - RNA, 16 nt, Human
cagccugcuccagcug

SEQ ID NO: 3122439 - RNA, 19 nt, Human
cagcguuucuaugacacau

SEQ ID NO: 3122440 - RNA, 15 nt, Human
cagcuaacauggaag

SEQ ID NO: 3122441 - RNA, 21 nt, Human
cagcugacuuuucuguccgag

SEQ ID NO: 3122442 - RNA, 19 nt, Human
caggaaaggcuccaggagc

SEQ ID NO: 3122443 - RNA, 17 nt, Human
caggaaaggcuccagga

SEQ ID NO: 3122444 - RNA, 16 nt, Human
caggaaaggcuccagg

SEQ ID NO: 3122445 - RNA, 12 nt, Human
caggccaggccc

SEQ ID NO: 3122446 - RNA, 11 nt, Human
caggccaggcc

SEQ ID NO: 3122447 - RNA, 19 nt, Human
caggaggaucacuugaguc

SEQ ID NO: 3122448 - RNA, 22 nt, Human
caggaggccagccuugaccauu

SEQ ID NO: 3122449 - RNA, 19 nt, Human
caggaggccagccuugacc

SEQ ID NO: 3122450 - RNA, 18 nt, Human
caggaggccagccuugac

SEQ ID NO: 3122451 - RNA, 14 nt, Human
caggcaaugcuggc

SEQ ID NO: 3122452 - RNA, 15 nt, Human
caggcaaugcuggcu

SEQ ID NO: 3122453 - RNA, 16 nt, Human
caggcaaugcuggcug

SEQ ID NO: 3122454 - RNA, 23 nt, Human
caggaccucaggugagaagcaga

SEQ ID NO: 3122455 - RNA, 16 nt, Human
caggaccucaggugag

SEQ ID NO: 3122456 - RNA, 21 nt, Human
caggaccagggauuuccauga

SEQ ID NO: 3122457 - RNA, 23 nt, Human
caggcugggagagccuuccaggg

SEQ ID NO: 3122458 - RNA, 22 nt, Human
caggcugggagagccuuccagg

SEQ ID NO: 3122459 - RNA, 16 nt, Human
caggggaaaagaggag

SEQ ID NO: 3122460 - RNA, 14 nt, Human
caggggaaaagagg

SEQ ID NO: 3122461 - RNA, 20 nt, Human
caggcugggagagccuucca

SEQ ID NO: 3122462 - RNA, 21 nt, Human
caggcugggagagccuuccag

SEQ ID NO: 3122463 - RNA, 14 nt, Human
caggccuccuacag

SEQ ID NO: 3122464 - RNA, 12 nt, Human
caggccuccuac

SEQ ID NO: 3122465 - RNA, 20 nt, Human
cagacuggaagcacagcuuc

SEQ ID NO: 3122466 - RNA, 21 nt, Human
cagacuggaagcacagcuuca

SEQ ID NO: 3122467 - RNA, 13 nt, Human
cagacuggaagca

SEQ ID NO: 3122468 - RNA, 14 nt, Human
cagacuggaagcac

SEQ ID NO: 3122469 - RNA, 16 nt, Human
cagacuggaagcacag

SEQ ID NO: 3122470 - RNA, 17 nt, Human
cagacuggaagcacagc

SEQ ID NO: 3122471 - RNA, 18 nt, Human
cagacuggaagcacagcu

SEQ ID NO: 3122472 - RNA, 23 nt, Human
cagacucuacagaggccaugggc

SEQ ID NO: 3122473 - RNA, 18 nt, Human
cagacucuacagaggcca

SEQ ID NO: 3122474 - RNA, 19 nt, Human
cagacucuacagaggccau

SEQ ID NO: 3122475 - RNA, 20 nt, Human
cagacucuacagaggccaug

SEQ ID NO: 3122476 - RNA, 21 nt, Human
cagacucuacagaggccaugg

SEQ ID NO: 3122477 - RNA, 17 nt, Human
cagacucuacagaggcc

SEQ ID NO: 3122478 - RNA, 22 nt, Human
cagacaggcaagcaccuccugc

SEQ ID NO: 3122479 - RNA, 23 nt, Human
cagacaggcaagcaccuccugcc

SEQ ID NO: 3122480 - RNA, 11 nt, Human
cagacaggcaa

SEQ ID NO: 3122481 - RNA, 24 nt, Human
cagacaggaccagggauuuccaug

SEQ ID NO: 3122482 - RNA, 17 nt, Human
cagacaggaccagggau

SEQ ID NO: 3122483 - RNA, 13 nt, Human
cagacaggcaagc

SEQ ID NO: 3122484 - RNA, 18 nt, Human
cagacaggcaagcaccuc

SEQ ID NO: 3122485 - RNA, 20 nt, Human
cagacaggcaagcaccuccu

SEQ ID NO: 3122486 - RNA, 21 nt, Human
cagacaggcaagcaccuccug

SEQ ID NO: 3122487 - RNA, 18 nt, Human
cagacagcugccugggau

SEQ ID NO: 3122488 - RNA, 17 nt, Human
cagacagcugccuggga

SEQ ID NO: 3122489 - RNA, 16 nt, Human
cagacagcugccuggg

SEQ ID NO: 3122490 - RNA, 15 nt, Human
cagacagcugccugg

SEQ ID NO: 3122491 - RNA, 16 nt, Human
cagacaggaccaggga

SEQ ID NO: 3122492 - RNA, 15 nt, Human
cagacaggaccaggg

SEQ ID NO: 3122493 - RNA, 13 nt, Human
cagacaggaccag

SEQ ID NO: 3122494 - RNA, 14 nt, Human
cagacagcugccug

SEQ ID NO: 3122495 - RNA, 13 nt, Human
cagacagcugccu

SEQ ID NO: 3122496 - RNA, 19 nt, Human
cagauagauauaugcucug

SEQ ID NO: 3122497 - RNA, 19 nt, Human
cagauacuuggggggcuga

SEQ ID NO: 3122498 - RNA, 16 nt, Human
cagaggggguggccuc

SEQ ID NO: 3122499 - RNA, 14 nt, Human
cagaggggguggcc

SEQ ID NO: 3122500 - RNA, 23 nt, Human
cagagagggugggagugggccca

SEQ ID NO: 3122501 - RNA, 23 nt, Human
cagagaggguggugaccucugcc

SEQ ID NO: 3122502 - RNA, 20 nt, Human
cagagagguuaaggugggua

SEQ ID NO: 3122503 - RNA, 13 nt, Human
cagagcugccacc

SEQ ID NO: 3122504 - RNA, 13 nt, Human
cagaggggguggc

SEQ ID NO: 3122505 - RNA, 19 nt, Human
cagaggaaagcaaaggaga

SEQ ID NO: 3122506 - RNA, 17 nt, Human
cagaggaaagcaaagga

SEQ ID NO: 3122507 - RNA, 23 nt, Human
cagagacuccugcaggcagccag

SEQ ID NO: 3122508 - RNA, 20 nt, Human
cagagaggguggugaccucu

SEQ ID NO: 3122509 - RNA, 22 nt, Human
cagagaggguggugaccucugc

SEQ ID NO: 3122510 - RNA, 17 nt, Human
cagagaggguggugacc

SEQ ID NO: 3122511 - RNA, 12 nt, Human
cagagagggugg

SEQ ID NO: 3122512 - RNA, 22 nt, Human
cagccaggccacaagacccuug

SEQ ID NO: 3122513 - RNA, 14 nt, Human
cagcacgauuucug

SEQ ID NO: 3122514 - RNA, 15 nt, Human
cagcacgauuucugu

SEQ ID NO: 3122515 - RNA, 20 nt, Human
cagcacgauuucuguuuaga

SEQ ID NO: 3122516 - RNA, 18 nt, Human
cagauugcaacaggcugg

SEQ ID NO: 3122517 - RNA, 19 nt, Human
cagauuucacucuccuugg

SEQ ID NO: 3122518 - RNA, 17 nt, Human
cagcaccaucucuccuc

SEQ ID NO: 3122519 - RNA, 19 nt, Human
cagcaccaucucuccuccu

SEQ ID NO: 3122520 - RNA, 19 nt, Human
cagauugcaacaggcuggg

SEQ ID NO: 3122521 - RNA, 20 nt, Human
cagauugcaacaggcugggc

SEQ ID NO: 3122522 - RNA, 20 nt, Human
cagauuucacucuccuuggu

SEQ ID NO: 3122523 - RNA, 23 nt, Human
cauuuuuuuuaagaaaaaggaug

SEQ ID NO: 3122524 - RNA, 22 nt, Human
cauuuuuuuuaagaaaaaggau

SEQ ID NO: 3122525 - RNA, 18 nt, Human
cauuuaggugaggaagca

SEQ ID NO: 3122526 - RNA, 16 nt, Human
cauuuaggugaggaag

SEQ ID NO: 3122527 - RNA, 22 nt, Human
ccaaaguacacuguuucaaacu

SEQ ID NO: 3122528 - RNA, 20 nt, Human
ccaaaguacacuguuucaaa

SEQ ID NO: 3122529 - RNA, 16 nt, Human
ccaagcucugcuccuc

SEQ ID NO: 3122530 - RNA, 14 nt, Human
ccaagcucugcucc

SEQ ID NO: 3122531 - RNA, 15 nt, Human
ccaagcucugcuccu

SEQ ID NO: 3122532 - RNA, 21 nt, Human
ccaacucaccccagccccaaa

SEQ ID NO: 3122533 - RNA, 15 nt, Human
ccaaaucagcugcua

SEQ ID NO: 3122534 - RNA, 23 nt, Human
ccaaaucagcugcuacuacuccu

SEQ ID NO: 3122535 - RNA, 13 nt, Human
ccaacucacccca

SEQ ID NO: 3122536 - RNA, 23 nt, Human
ccaauggacuaacuugucuuugg

SEQ ID NO: 3122537 - RNA, 19 nt, Human
cauucuccaccugccaggg

SEQ ID NO: 3122538 - RNA, 18 nt, Human
cauucuccaccugccagg

SEQ ID NO: 3122539 - RNA, 17 nt, Human
cauucuccaccugccag

SEQ ID NO: 3122540 - RNA, 20 nt, Human
cauucuccuuguguuacuaa

SEQ ID NO: 3122541 - RNA, 18 nt, Human
cauguucuuaauucuuag

SEQ ID NO: 3122542 - RNA, 18 nt, Human
cauguuggccaggcuggu

SEQ ID NO: 3122543 - RNA, 17 nt, Human
cauguuggccaggcugg

SEQ ID NO: 3122544 - RNA, 21 nt, Human
cauguuacauaagauaaaugu

SEQ ID NO: 3122545 - RNA, 13 nt, Human
cauguucuuaauu

SEQ ID NO: 3122546 - RNA, 16 nt, Human
cauguucuuaauucuu

SEQ ID NO: 3122547 - RNA, 15 nt, Human
cauguccaagaagcc

SEQ ID NO: 3122548 - RNA, 16 nt, Human
cauguuacauaagaua

SEQ ID NO: 3122549 - RNA, 17 nt, Human
cauguuacauaagauaa

SEQ ID NO: 3122550 - RNA, 17 nt, Human
caugcuccuggcccacu

SEQ ID NO: 3122551 - RNA, 16 nt, Human
caugcuccuggcccac

SEQ ID NO: 3122552 - RNA, 14 nt, Human
caugcuccuggccc

SEQ ID NO: 3122553 - RNA, 18 nt, Human
caugggaaaggggaaguu

SEQ ID NO: 3122554 - RNA, 21 nt, Human
cauggccucuucagaucucua

SEQ ID NO: 3122555 - RNA, 12 nt, Human
caugcaagguca

SEQ ID NO: 3122556 - RNA, 13 nt, Human
caugacaaagacu

SEQ ID NO: 3122557 - RNA, 21 nt, Human
cagucugauucccaagcucug

SEQ ID NO: 3122558 - RNA, 22 nt, Human
cagucugauucccaagcucugc

SEQ ID NO: 3122559 - RNA, 16 nt, Human
cagugggagcugccug

SEQ ID NO: 3122560 - RNA, 15 nt, Human
cagugggagcugccu

SEQ ID NO: 3122561 - RNA, 17 nt, Human
cagugggagcugccugu

SEQ ID NO: 3122562 - RNA, 18 nt, Human
cagugggagcugccuguu

SEQ ID NO: 3122563 - RNA, 20 nt, Human
cagugguaugaucacggcuc

SEQ ID NO: 3122564 - RNA, 21 nt, Human
cagugcccacaggaucagucu

SEQ ID NO: 3122565 - RNA, 18 nt, Human
cagugcccacaggaucag

SEQ ID NO: 3122566 - RNA, 22 nt, Human
cagugcccacaggaucagucug

SEQ ID NO: 3122567 - RNA, 23 nt, Human
cagucugauucccaagcucugcu

SEQ ID NO: 3122568 - RNA, 20 nt, Human
caguuacucagaauucucua

SEQ ID NO: 3122569 - RNA, 21 nt, Human
cagugguaugaucacggcuca

SEQ ID NO: 3122570 - RNA, 14 nt, Human
caguuacucagaau

SEQ ID NO: 3122571 - RNA, 19 nt, Human
caguggugcgaucuggguu

SEQ ID NO: 3122572 - RNA, 21 nt, Human
caucagcacgauuucuguuua

SEQ ID NO: 3122573 - RNA, 19 nt, Human
caucagcacgauuucuguu

SEQ ID NO: 3122574 - RNA, 19 nt, Human
caucccaaacccuucagug

SEQ ID NO: 3122575 - RNA, 22 nt, Human
cauccucuguacagagcccacg

SEQ ID NO: 3122576 - RNA, 21 nt, Human
cauccucuguacagagcccac

SEQ ID NO: 3122577 - RNA, 20 nt, Human
caucccaaacccuucagugc

SEQ ID NO: 3122578 - RNA, 11 nt, Human
caucccagccc

SEQ ID NO: 3122579 - RNA, 23 nt, Human
cauagcagagaaugaaagggccc

SEQ ID NO: 3122580 - RNA, 22 nt, Human
cauauuaccacagacauacuaa

SEQ ID NO: 3122581 - RNA, 23 nt, Human
cauaaugcgugcauaccacuuuu

SEQ ID NO: 3122582 - RNA, 23 nt, Human
cauacaggaagguagaaauaucu

SEQ ID NO: 3122583 - RNA, 21 nt, Human
caguuuguuaguaugaggcau

SEQ ID NO: 3122584 - RNA, 23 nt, Human
caguuuguuaguaugaggcauuu

SEQ ID NO: 3122585 - RNA, 22 nt, Human
caguuguuagugugucuuagug

SEQ ID NO: 3122586 - RNA, 18 nt, Human
caguuguuagugugucuu

SEQ ID NO: 3122587 - RNA, 14 nt, Human
gcugacagacacag

SEQ ID NO: 3122588 - RNA, 15 nt, Human
gcugacagacacagg

SEQ ID NO: 3122589 - RNA, 16 nt, Human
gcugacagacacaggc

SEQ ID NO: 3122590 - RNA, 20 nt, Human
gcugaaggcucgagcaugcc

SEQ ID NO: 3122591 - RNA, 12 nt, Human
gcugaaggcucg

SEQ ID NO: 3122592 - RNA, 17 nt, Human
gcugaaugguuuucaaa

SEQ ID NO: 3122593 - RNA, 22 nt, Human
gcugaauacagaggcaacugca

SEQ ID NO: 3122594 - RNA, 12 nt, Human
gcucuuccaggc

SEQ ID NO: 3122595 - RNA, 16 nt, Human
gcucuuccaggcuggg

SEQ ID NO: 3122596 - RNA, 15 nt, Human
gcucuuccaggcugg

SEQ ID NO: 3122597 - RNA, 15 nt, Human
gcucuguccugggag

SEQ ID NO: 3122598 - RNA, 14 nt, Human
gcucuguccuggga

SEQ ID NO: 3122599 - RNA, 16 nt, Human
gcucuguccugggagu

SEQ ID NO: 3122600 - RNA, 21 nt, Human
gcucccaggcauuccccagga

SEQ ID NO: 3122601 - RNA, 20 nt, Human
gcucccaggcauuccccagg

SEQ ID NO: 3122602 - RNA, 17 nt, Human
gcucccaggcauucccc

SEQ ID NO: 3122603 - RNA, 22 nt, Human
gcucccaggcauuccccaggag

SEQ ID NO: 3122604 - RNA, 14 nt, Human
gcuccccagcccca

SEQ ID NO: 3122605 - RNA, 16 nt, Human
gcucucaggccagcug

SEQ ID NO: 3122606 - RNA, 15 nt, Human
gcucucaggccagcu

SEQ ID NO: 3122607 - RNA, 14 nt, Human
gcucucaggccagc

SEQ ID NO: 3122608 - RNA, 13 nt, Human
gcucucaggccag

SEQ ID NO: 3122609 - RNA, 16 nt, Human
gcuaggaacacuccuu

SEQ ID NO: 3122610 - RNA, 18 nt, Human
gcuaggaacacuccuuca

SEQ ID NO: 3122611 - RNA, 21 nt, Human
gcuaggaacacuccuucacag

SEQ ID NO: 3122612 - RNA, 19 nt, Human
gcuaggaacacuccuucac

SEQ ID NO: 3122613 - RNA, 22 nt, Human
gcuaggaccccuccaugugggc

SEQ ID NO: 3122614 - RNA, 14 nt, Human
gcuaggccuggcca

SEQ ID NO: 3122615 - RNA, 15 nt, Human
gcuaggccuggccag

SEQ ID NO: 3122616 - RNA, 20 nt, Human
gccuguucagcuccagcuca

SEQ ID NO: 3122617 - RNA, 17 nt, Human
gccuguucagcuccagc

SEQ ID NO: 3122618 - RNA, 19 nt, Human
gccuguucagcuccagcuc

SEQ ID NO: 3122619 - RNA, 22 nt, Human
gcucagguggggucacucuggc

SEQ ID NO: 3122620 - RNA, 21 nt, Human
gcucagguggggucacucugg

SEQ ID NO: 3122621 - RNA, 15 nt, Human
gcucagagagggugg

SEQ ID NO: 3122622 - RNA, 20 nt, Human
gcucagagagggugggagug

SEQ ID NO: 3122623 - RNA, 18 nt, Human
gcucagagagggugggag

SEQ ID NO: 3122624 - RNA, 16 nt, Human
gcucagggccuggcuc

SEQ ID NO: 3122625 - RNA, 13 nt, Human
gcucagggccugg

SEQ ID NO: 3122626 - RNA, 12 nt, Human
gcucagggccug

SEQ ID NO: 3122627 - RNA, 14 nt, Human
gcuuguacauaaug

SEQ ID NO: 3122628 - RNA, 16 nt, Human
gcuuguacauaaugcg

SEQ ID NO: 3122629 - RNA, 20 nt, Human
gcuguaucccaugagccuca

SEQ ID NO: 3122630 - RNA, 23 nt, Human
gcuguaucccaugagccucagca

SEQ ID NO: 3122631 - RNA, 19 nt, Human
gcuguaucccaugagccuc

SEQ ID NO: 3122632 - RNA, 14 nt, Human
gcuggguuggaggg

SEQ ID NO: 3122633 - RNA, 21 nt, Human
gcuggguuggaggguguccca

SEQ ID NO: 3122634 - RNA, 15 nt, Human
gcuggguucugaucc

SEQ ID NO: 3122635 - RNA, 15 nt, Human
gcuggguucuaccca

SEQ ID NO: 3122636 - RNA, 20 nt, Human
gcuucacggaagagccuugc

SEQ ID NO: 3122637 - RNA, 19 nt, Human
gcuucacggaagagccuug

SEQ ID NO: 3122638 - RNA, 22 nt, Human
gcuucaaggauccugagccaga

SEQ ID NO: 3122639 - RNA, 18 nt, Human
gcugugcucuggacaggc

SEQ ID NO: 3122640 - RNA, 13 nt, Human
gcugugcugcccu

SEQ ID NO: 3122641 - RNA, 21 nt, Human
gcugugcucuggacaggcaug

SEQ ID NO: 3122642 - RNA, 12 nt, Human
gcugugcugccc

SEQ ID NO: 3122643 - RNA, 21 nt, Human
gcuguuggcugggggccucag

SEQ ID NO: 3122644 - RNA, 22 nt, Human
gcuguuggcugggggccucagu

SEQ ID NO: 3122645 - RNA, 22 nt, Human
gcugugcugcccugcccaccug

SEQ ID NO: 3122646 - RNA, 19 nt, Human
gcugugcugcccugcccac

SEQ ID NO: 3122647 - RNA, 22 nt, Human
gcuggaccuugaacuggguacu

SEQ ID NO: 3122648 - RNA, 12 nt, Human
gcuggagugcag

SEQ ID NO: 3122649 - RNA, 19 nt, Human
gcugggauuacagguguga

SEQ ID NO: 3122650 - RNA, 18 nt, Human
gcugggauuacaggugug

SEQ ID NO: 3122651 - RNA, 13 nt, Human
gcugggcagagga

SEQ ID NO: 3122652 - RNA, 15 nt, Human
gcugggcagaggaaa

SEQ ID NO: 3122653 - RNA, 14 nt, Human
gcugggcagaggaa

SEQ ID NO: 3122654 - RNA, 14 nt, Human
gcuggagugcagug

SEQ ID NO: 3122655 - RNA, 15 nt, Human
gcuggagugcaguga

SEQ ID NO: 3122656 - RNA, 17 nt, Human
gcuggccuggccccuca

SEQ ID NO: 3122657 - RNA, 16 nt, Human
gcuggccuggccccuc

SEQ ID NO: 3122658 - RNA, 16 nt, Human
gcugggauuacaggug

SEQ ID NO: 3122659 - RNA, 19 nt, Human
gcuggccuggccccucagg

SEQ ID NO: 3122660 - RNA, 18 nt, Human
gcuggccuggccccucag

SEQ ID NO: 3122661 - RNA, 20 nt, Human
gcugggcucccuucccaccu

SEQ ID NO: 3122662 - RNA, 17 nt, Human
gcugggcucccuuccca

SEQ ID NO: 3122663 - RNA, 16 nt, Human
gcugggcucccuuccc

SEQ ID NO: 3122664 - RNA, 12 nt, Human
gcugggcucccu

SEQ ID NO: 3122665 - RNA, 17 nt, Human
gcugggcagaggaaagc

SEQ ID NO: 3122666 - RNA, 16 nt, Human
gcugggcagaggaaag

SEQ ID NO: 3122667 - RNA, 19 nt, Human
gcugggcagaggaaagcaa

SEQ ID NO: 3122668 - RNA, 15 nt, Human
gcuggguguggcgca

SEQ ID NO: 3122669 - RNA, 14 nt, Human
gcugcaccggcugg

SEQ ID NO: 3122670 - RNA, 17 nt, Human
gcugcaccggcuggccu

SEQ ID NO: 3122671 - RNA, 16 nt, Human
gcugcaccggcuggcc

SEQ ID NO: 3122672 - RNA, 22 nt, Human
gcugcaccggcuggccuggccc

SEQ ID NO: 3122673 - RNA, 19 nt, Human
gcugcaccggcuggccugg

SEQ ID NO: 3122674 - RNA, 18 nt, Human
gcugcaccggcuggccug

SEQ ID NO: 3122675 - RNA, 21 nt, Human
gcugccauccagguucagcuu

SEQ ID NO: 3122676 - RNA, 23 nt, Human
gcugccauccagguucagcuugu

SEQ ID NO: 3122677 - RNA, 21 nt, Human
gcugccagccgagauagccaa

SEQ ID NO: 3122678 - RNA, 19 nt, Human
gcugccagccgagauagcc

SEQ ID NO: 3122679 - RNA, 13 nt, Human
gcugccaccugcc

SEQ ID NO: 3122680 - RNA, 18 nt, Human
gcugccugggaucccuca

SEQ ID NO: 3122681 - RNA, 16 nt, Human
gcugccugggaucccu

SEQ ID NO: 3122682 - RNA, 19 nt, Human
gcugccugggaucccucau

SEQ ID NO: 3122683 - RNA, 13 nt, Human
gcugccugggauc

SEQ ID NO: 3122684 - RNA, 22 nt, Human
gccaccaacauacucccaucug

SEQ ID NO: 3122685 - RNA, 19 nt, Human
gccaccaacauacucccau

SEQ ID NO: 3122686 - RNA, 21 nt, Human
gccaccaacauacucccaucu

SEQ ID NO: 3122687 - RNA, 20 nt, Human
gccaccaacauacucccauc

SEQ ID NO: 3122688 - RNA, 20 nt, Human
gccacauuccugaugcuucu

SEQ ID NO: 3122689 - RNA, 16 nt, Human
gccacauuccugaugc

SEQ ID NO: 3122690 - RNA, 22 nt, Human
gccacugcaccgggccacagag

SEQ ID NO: 3122691 - RNA, 21 nt, Human
gccacugcacuauagccuagg

SEQ ID NO: 3122692 - RNA, 13 nt, Human
gccacccugggga

SEQ ID NO: 3122693 - RNA, 19 nt, Human
gccacccuggggagaaagu

SEQ ID NO: 3122694 - RNA, 23 nt, Human
gccacugcaccgggccacagaga

SEQ ID NO: 3122695 - RNA, 18 nt, Human
gccacugugaagagaacc

SEQ ID NO: 3122696 - RNA, 19 nt, Human
gccacugugaagagaacca

SEQ ID NO: 3122697 - RNA, 23 nt, Human
gccaggccacaagacccuugugg

SEQ ID NO: 3122698 - RNA, 12 nt, Human
gccaggccagag

SEQ ID NO: 3122699 - RNA, 21 nt, Human
gccaggcccucugcccacucc

SEQ ID NO: 3122700 - RNA, 20 nt, Human
gccaggcccucugcccacuc

SEQ ID NO: 3122701 - RNA, 19 nt, Human
gccaggcccucugcccacu

SEQ ID NO: 3122702 - RNA, 17 nt, Human
gccaggcccucugccca

SEQ ID NO: 3122703 - RNA, 16 nt, Human
gccaggcccucugccc

SEQ ID NO: 3122704 - RNA, 13 nt, Human
gccaggccagagg

SEQ ID NO: 3122705 - RNA, 15 nt, Human
gccaggcccucugcc

SEQ ID NO: 3122706 - RNA, 16 nt, Human
gccagcaggcucucag

SEQ ID NO: 3122707 - RNA, 13 nt, Human
gccagcaggcucu

SEQ ID NO: 3122708 - RNA, 21 nt, Human
gccagcaggcucucaggccag

SEQ ID NO: 3122709 - RNA, 20 nt, Human
gccagcaggcucucaggcca

SEQ ID NO: 3122710 - RNA, 19 nt, Human
gccagcaggcucucaggcc

SEQ ID NO: 3122711 - RNA, 18 nt, Human
gccagcaggcucucaggc

SEQ ID NO: 3122712 - RNA, 17 nt, Human
gccagcaggcucucagg

SEQ ID NO: 3122713 - RNA, 19 nt, Human
gccauauucuguuggccag

SEQ ID NO: 3122714 - RNA, 20 nt, Human
gccauauucuguuggccagu

SEQ ID NO: 3122715 - RNA, 14 nt, Human
gccauguuggccag

SEQ ID NO: 3122716 - RNA, 15 nt, Human
gccauguuggccagg

SEQ ID NO: 3122717 - RNA, 16 nt, Human
gccauguuggccaggc

SEQ ID NO: 3122718 - RNA, 17 nt, Human
gccauguuggccaggcu

SEQ ID NO: 3122719 - RNA, 18 nt, Human
gccauguuggccaggcug

SEQ ID NO: 3122720 - RNA, 15 nt, Human
gcccacgcuggagug

SEQ ID NO: 3122721 - RNA, 16 nt, Human
gcccacgcuggagugc

SEQ ID NO: 3122722 - RNA, 17 nt, Human
gcccacgcuggagugca

SEQ ID NO: 3122723 - RNA, 17 nt, Human
gcccaccuuggcucaag

SEQ ID NO: 3122724 - RNA, 18 nt, Human
gcccaccuuggcucaagu

SEQ ID NO: 3122725 - RNA, 14 nt, Human
gcccacgcccccac

SEQ ID NO: 3122726 - RNA, 13 nt, Human
gcccacgccccca

SEQ ID NO: 3122727 - RNA, 19 nt, Human
gccauguuggccaggcugg

SEQ ID NO: 3122728 - RNA, 20 nt, Human
gccauguuggccaggcuggu

SEQ ID NO: 3122729 - RNA, 22 nt, Human
gccauguuggccaggcuggucu

SEQ ID NO: 3122730 - RNA, 24 nt, Human
gccauguuggccaggcuggucuca

SEQ ID NO: 3122731 - RNA, 13 nt, Human
gccuccuccagcc

SEQ ID NO: 3122732 - RNA, 18 nt, Human
gccuccugcccuuaccug

SEQ ID NO: 3122733 - RNA, 12 nt, Human
gccucugggacu

SEQ ID NO: 3122734 - RNA, 17 nt, Human
gccugcccaggccccug

SEQ ID NO: 3122735 - RNA, 18 nt, Human
gccugcccaggccccugc

SEQ ID NO: 3122736 - RNA, 19 nt, Human
gccugcccaggccccugcc

SEQ ID NO: 3122737 - RNA, 23 nt, Human
gccucuucucuacucuagggaaa

SEQ ID NO: 3122738 - RNA, 12 nt, Human
gccucuucucua

SEQ ID NO: 3122739 - RNA, 15 nt, Human
gccuggccccucagg

SEQ ID NO: 3122740 - RNA, 17 nt, Human
gccuggccccucagggu

SEQ ID NO: 3122741 - RNA, 16 nt, Human
gccuggccccucaggg

SEQ ID NO: 3122742 - RNA, 22 nt, Human
gccuggccccucagggucccug

SEQ ID NO: 3122743 - RNA, 20 nt, Human
gccuggccccucaggguccc

SEQ ID NO: 3122744 - RNA, 10 nt, Human
gccuggccug

SEQ ID NO: 3122745 - RNA, 21 nt, Human
gccugggaggucaaggcugca

SEQ ID NO: 3122746 - RNA, 14 nt, Human
gccugggaucccuc

SEQ ID NO: 3122747 - RNA, 22 nt, Human
gccugggaggucaaggcugcag

SEQ ID NO: 3122748 - RNA, 18 nt, Human
gccugggaucccucaucc

SEQ ID NO: 3122749 - RNA, 16 nt, Human
gccugccucuucucua

SEQ ID NO: 3122750 - RNA, 22 nt, Human
gcccuaaaguguauuuuuuuac

SEQ ID NO: 3122751 - RNA, 22 nt, Human
gccccuggaugcagccucacag

SEQ ID NO: 3122752 - RNA, 18 nt, Human
gccccuggaugcagccuc

SEQ ID NO: 3122753 - RNA, 16 nt, Human
gccccuggaugcagcc

SEQ ID NO: 3122754 - RNA, 15 nt, Human
gccccuggaugcagc

SEQ ID NO: 3122755 - RNA, 13 nt, Human
gccccugcccggc

SEQ ID NO: 3122756 - RNA, 14 nt, Human
gccccugcccggcu

SEQ ID NO: 3122757 - RNA, 18 nt, Human
gccccaaaacucuccucu

SEQ ID NO: 3122758 - RNA, 13 nt, Human
gcccacucccugc

SEQ ID NO: 3122759 - RNA, 19 nt, Human
gcccacucccugcaaccug

SEQ ID NO: 3122760 - RNA, 15 nt, Human
gcccacucccugcaa

SEQ ID NO: 3122761 - RNA, 14 nt, Human
gcccacucccugca

SEQ ID NO: 3122762 - RNA, 14 nt, Human
gcccugccuccuuu

SEQ ID NO: 3122763 - RNA, 22 nt, Human
gcccugccuccuuugugaggaa

SEQ ID NO: 3122764 - RNA, 16 nt, Human
gcccugccuccuuugu

SEQ ID NO: 3122765 - RNA, 21 nt, Human
gcccugugggcccccaaaugg

SEQ ID NO: 3122766 - RNA, 16 nt, Human
gccgccaugcuccugg

SEQ ID NO: 3122767 - RNA, 20 nt, Human
gcccuuaccugccaggaagc

SEQ ID NO: 3122768 - RNA, 16 nt, Human
gcccuuaccugccagg

SEQ ID NO: 3122769 - RNA, 15 nt, Human
gccgccaugcuccug

SEQ ID NO: 3122770 - RNA, 16 nt, Human
ggcucccuucccaccu

SEQ ID NO: 3122771 - RNA, 18 nt, Human
ggcucccuucccaccucu

SEQ ID NO: 3122772 - RNA, 17 nt, Human
ggcucccuucccaccuc

SEQ ID NO: 3122773 - RNA, 22 nt, Human
ggcucccuucccaccucucuca

SEQ ID NO: 3122774 - RNA, 20 nt, Human
ggcucccuucccaccucucu

SEQ ID NO: 3122775 - RNA, 21 nt, Human
ggcugccaaugggagcucaug

SEQ ID NO: 3122776 - RNA, 20 nt, Human
ggcugcaugcgggcuuccuc

SEQ ID NO: 3122777 - RNA, 17 nt, Human
ggcugcagggaguccga

SEQ ID NO: 3122778 - RNA, 18 nt, Human
ggcucgagcaugccugga

SEQ ID NO: 3122779 - RNA, 24 nt, Human
ggcucuuccaggcugggagagccu

SEQ ID NO: 3122780 - RNA, 23 nt, Human
ggcucuuccaggcugggagagcc

SEQ ID NO: 3122781 - RNA, 20 nt, Human
ggcucuuccaggcugggaga

SEQ ID NO: 3122782 - RNA, 14 nt, Human
ggcuggcgugcagu

SEQ ID NO: 3122783 - RNA, 16 nt, Human
ggcuggcgugcagugg

SEQ ID NO: 3122784 - RNA, 20 nt, Human
ggcuggcgugcaguggugcg

SEQ ID NO: 3122785 - RNA, 22 nt, Human
ggcuggccuggccccucagggu

SEQ ID NO: 3122786 - RNA, 17 nt, Human
ggcuggccuggccccuc

SEQ ID NO: 3122787 - RNA, 13 nt, Human
aaaaaaacacaaa

SEQ ID NO: 3122788 - RNA, 15 nt, Human
ggcuucaguggcagc

SEQ ID NO: 3122789 - RNA, 20 nt, Human
ggcuguaucccaugagccuc

SEQ ID NO: 3122790 - RNA, 22 nt, Human
ggcuguaucccaugagccucag

SEQ ID NO: 3122791 - RNA, 23 nt, Human
ggcuguaucccaugagccucagc

SEQ ID NO: 3122792 - RNA, 15 nt, Human
ggcugucaauuacag

SEQ ID NO: 3122793 - RNA, 19 nt, Human
ggcuguaucccaugagccu

SEQ ID NO: 3122794 - RNA, 16 nt, Human
ggcuggugucaccuga

SEQ ID NO: 3122795 - RNA, 16 nt, Human
ggcuucaguggcagcu

SEQ ID NO: 3122796 - RNA, 13 nt, Human
gggaaaaucagcc

SEQ ID NO: 3122797 - RNA, 23 nt, Human
gggaaaaucagccugcuccagcu

SEQ ID NO: 3122798 - RNA, 23 nt, Human
gggcagagcagagaccaucccug

SEQ ID NO: 3122799 - RNA, 15 nt, Human
gggauuuccaugaug

SEQ ID NO: 3122800 - RNA, 18 nt, Human
gggagggcuccagacaca

SEQ ID NO: 3122801 - RNA, 15 nt, Human
aaaauaccagccagu

SEQ ID NO: 3122802 - RNA, 14 nt, Human
aaaauaccagccag

SEQ ID NO: 3122803 - RNA, 12 nt, Human
aaaauaaauuau

SEQ ID NO: 3122804 - RNA, 18 nt, Human
aaaauaguggugugauuu

SEQ ID NO: 3122805 - RNA, 12 nt, Human
aaaauagccugc

SEQ ID NO: 3122806 - RNA, 13 nt, Human
gggagggcuccag

SEQ ID NO: 3122807 - RNA, 11 nt, Human
gggagggcucc

SEQ ID NO: 3122808 - RNA, 22 nt, Human
aaaacuugauguguuaucucuu

SEQ ID NO: 3122809 - RNA, 14 nt, Human
aaaagcugggcagg

SEQ ID NO: 3122810 - RNA, 14 nt, Human
gggaacagacugga

SEQ ID NO: 3122811 - RNA, 22 nt, Human
gggaacagacuggaagcacagc

SEQ ID NO: 3122812 - RNA, 17 nt, Human
aaaaaucucaaauuucu

SEQ ID NO: 3122813 - RNA, 19 nt, Human
aaaaaucucaaauuucuaa

SEQ ID NO: 3122814 - RNA, 20 nt, Human
aaaaaucucaaauuucuaaa

SEQ ID NO: 3122815 - RNA, 15 nt, Human
aaaaccaauguucuc

SEQ ID NO: 3122816 - RNA, 18 nt, Human
aaaacguggcugcuucaa

SEQ ID NO: 3122817 - RNA, 17 nt, Human
aaaacguggcugcuuca

SEQ ID NO: 3122818 - RNA, 16 nt, Human
aaaacguggcugcuuc

SEQ ID NO: 3122819 - RNA, 14 nt, Human
aaaacguggcugcu

SEQ ID NO: 3122820 - RNA, 21 nt, Human
aaaacguggcugcuucaagga

SEQ ID NO: 3122821 - RNA, 22 nt, Human
aaaacugauuuuuuuuuccuuc

SEQ ID NO: 3122822 - RNA, 18 nt, Human
aaaacugauuuuuuuuuc

SEQ ID NO: 3122823 - RNA, 22 nt, Human
gggucacucuggcagcucagag

SEQ ID NO: 3122824 - RNA, 20 nt, Human
ggguaucaggugcugccauc

SEQ ID NO: 3122825 - RNA, 22 nt, Human
gggucucacuauguugcccagg

SEQ ID NO: 3122826 - RNA, 23 nt, Human
gggucucacuauguugcccaggc

SEQ ID NO: 3122827 - RNA, 16 nt, Human
aaacuggauuaaacuu

SEQ ID NO: 3122828 - RNA, 17 nt, Human
aaacguggcugcuucaa

SEQ ID NO: 3122829 - RNA, 16 nt, Human
aaacguggcugcuuca

SEQ ID NO: 3122830 - RNA, 21 nt, Human
aaaauguaggguuauaauaau

SEQ ID NO: 3122831 - RNA, 21 nt, Human
aaaauggacguguuaugacuc

SEQ ID NO: 3122832 - RNA, 20 nt, Human
aaaauggaagacagcucuua

SEQ ID NO: 3122833 - RNA, 19 nt, Human
aaacacaaacgggcucagc

SEQ ID NO: 3122834 - RNA, 22 nt, Human
aaacaugcuacacacugcaugu

SEQ ID NO: 3122835 - RNA, 16 nt, Human
aaacaugcuacacacu

SEQ ID NO: 3122836 - RNA, 24 nt, Human
ggggaaaaucagccugcuccagcu

SEQ ID NO: 3122837 - RNA, 17 nt, Human
ggggaccucaggccugg

SEQ ID NO: 3122838 - RNA, 16 nt, Human
ggggaccucaggccug

SEQ ID NO: 3122839 - RNA, 15 nt, Human
ggggaccucaggccu

SEQ ID NO: 3122840 - RNA, 13 nt, Human
ggggaccucaggc

SEQ ID NO: 3122841 - RNA, 23 nt, Human
ggggcccugccuccuuugugagg

SEQ ID NO: 3122842 - RNA, 19 nt, Human
ggggcccugccuccuuugu

SEQ ID NO: 3122843 - RNA, 15 nt, Human
ggggcccugccuccu

SEQ ID NO: 3122844 - RNA, 16 nt, Human
ggggcccugccuccuu

SEQ ID NO: 3122845 - RNA, 17 nt, Human
ggggccaguuggucccc

SEQ ID NO: 3122846 - RNA, 15 nt, Human
aaagacuguacaaag

SEQ ID NO: 3122847 - RNA, 14 nt, Human
aaagacuguacaaa

SEQ ID NO: 3122848 - RNA, 19 nt, Human
aaagacuuuuccaacccuc

SEQ ID NO: 3122849 - RNA, 15 nt, Human
aaagaugagugagca

SEQ ID NO: 3122850 - RNA, 18 nt, Human
aaagaggcuaugugagca

SEQ ID NO: 3122851 - RNA, 13 nt, Human
aaagaggcuaugu

SEQ ID NO: 3122852 - RNA, 20 nt, Human
gguccacccaggagccccga

SEQ ID NO: 3122853 - RNA, 22 nt, Human
gguccacccaggagccccgagg

SEQ ID NO: 3122854 - RNA, 12 nt, Human
ggucccacccca

SEQ ID NO: 3122855 - RNA, 14 nt, Human
aaacuuuaccuuuu

SEQ ID NO: 3122856 - RNA, 19 nt, Human
gguccacccaggagccccg

SEQ ID NO: 3122857 - RNA, 23 nt, Human
gguauuggcuagagguucaaaga

SEQ ID NO: 3122858 - RNA, 22 nt, Human
ggugcacaagcuccaagcuccc

SEQ ID NO: 3122859 - RNA, 16 nt, Human
ggugcacaagcuccaa

SEQ ID NO: 3122860 - RNA, 12 nt, Human
ggucuguucuuu

SEQ ID NO: 3122861 - RNA, 21 nt, Human
ggucuugaacuccuggccuca

SEQ ID NO: 3122862 - RNA, 22 nt, Human
ggucuugaacuccuggccucaa

SEQ ID NO: 3122863 - RNA, 17 nt, Human
ggucuguucuuuccaaa

SEQ ID NO: 3122864 - RNA, 19 nt, Human
ggucuguucuuuccaaagu

SEQ ID NO: 3122865 - RNA, 17 nt, Human
aaagcagugcaugcugu

SEQ ID NO: 3122866 - RNA, 17 nt, Human
aaagcuaggccuggcca

SEQ ID NO: 3122867 - RNA, 18 nt, Human
aaagcuaggccuggccag

SEQ ID NO: 3122868 - RNA, 22 nt, Human
aaagcagugcaugcugucccuu

SEQ ID NO: 3122869 - RNA, 21 nt, Human
aaagcagugcaugcugucccu

SEQ ID NO: 3122870 - RNA, 16 nt, Human
aaagcagugcaugcug

SEQ ID NO: 3122871 - RNA, 11 nt, Human
aaaggaaagag

SEQ ID NO: 3122872 - RNA, 18 nt, Human
ggaggucgaggcaggagg

SEQ ID NO: 3122873 - RNA, 14 nt, Human
ggaggucgaggcag

SEQ ID NO: 3122874 - RNA, 16 nt, Human
ggaggucgaggcagga

SEQ ID NO: 3122875 - RNA, 15 nt, Human
ggaggucgaggcagg

SEQ ID NO: 3122876 - RNA, 22 nt, Human
ggagcugccuguucagcuccag

SEQ ID NO: 3122877 - RNA, 12 nt, Human
ggaggaagagaa

SEQ ID NO: 3122878 - RNA, 21 nt, Human
ggaggcaugugaugagaggaa

SEQ ID NO: 3122879 - RNA, 13 nt, Human
ggaggccagccuu

SEQ ID NO: 3122880 - RNA, 18 nt, Human
ggaggccaaggugggagg

SEQ ID NO: 3122881 - RNA, 12 nt, Human
ggaggccagccu

SEQ ID NO: 3122882 - RNA, 21 nt, Human
ggagcagccacauuccugaug

SEQ ID NO: 3122883 - RNA, 13 nt, Human
ggagcagccacau

SEQ ID NO: 3122884 - RNA, 19 nt, Human
gcuuguacauaaugcgugc

SEQ ID NO: 3122885 - RNA, 14 nt, Human
ggacccugaggccc

SEQ ID NO: 3122886 - RNA, 18 nt, Human
ggacccugaggcccagag

SEQ ID NO: 3122887 - RNA, 15 nt, Human
ggacccugaggccca

SEQ ID NO: 3122888 - RNA, 15 nt, Human
ggagagcuagcagca

SEQ ID NO: 3122889 - RNA, 16 nt, Human
ggagagccuuccaggg

SEQ ID NO: 3122890 - RNA, 13 nt, Human
ggagagccuucca

SEQ ID NO: 3122891 - RNA, 18 nt, Human
ggagagccuuccaggggu

SEQ ID NO: 3122892 - RNA, 17 nt, Human
ggagagccuuccagggg

SEQ ID NO: 3122893 - RNA, 22 nt, Human
ggagagccuuccagggguggga

SEQ ID NO: 3122894 - RNA, 18 nt, Human
ggacucaaugcacugaca

SEQ ID NO: 3122895 - RNA, 22 nt, Human
ggacucaaugcacugacauugu

SEQ ID NO: 3122896 - RNA, 20 nt, Human
ggacuacaggugugagucac

SEQ ID NO: 3122897 - RNA, 22 nt, Human
ggagaaccaaaaagaggcuaug

SEQ ID NO: 3122898 - RNA, 9 nt, Human
ggacuuugu

SEQ ID NO: 3122899 - RNA, 19 nt, Human
ggagaaaauggacguguua

SEQ ID NO: 3122900 - RNA, 15 nt, Human
ggacuuggaagcucc

SEQ ID NO: 3122901 - RNA, 17 nt, Human
ggacuuggaagcuccgc

SEQ ID NO: 3122902 - RNA, 21 nt, Human
ggccaaaggaagcacaugccu

SEQ ID NO: 3122903 - RNA, 15 nt, Human
ggccaaagccaaagc

SEQ ID NO: 3122904 - RNA, 12 nt, Human
ggccaaaggaag

SEQ ID NO: 3122905 - RNA, 21 nt, Human
ggccaaacucaccugccccuc

SEQ ID NO: 3122906 - RNA, 12 nt, Human
ggcauuguggga

SEQ ID NO: 3122907 - RNA, 13 nt, Human
ggccaagguggga

SEQ ID NO: 3122908 - RNA, 22 nt, Human
ggccagagggagugacagaggc

SEQ ID NO: 3122909 - RNA, 23 nt, Human
ggccagagggagugacagaggca

SEQ ID NO: 3122910 - RNA, 17 nt, Human
ggccagaugcaccagcc

SEQ ID NO: 3122911 - RNA, 19 nt, Human
ggccagaugcaccagcccu

SEQ ID NO: 3122912 - RNA, 20 nt, Human
ggccagaugcaccagcccuu

SEQ ID NO: 3122913 - RNA, 14 nt, Human
ggccucccaacuca

SEQ ID NO: 3122914 - RNA, 13 nt, Human
ggccucccaacuc

SEQ ID NO: 3122915 - RNA, 21 nt, Human
ggaugaauuccaaauucugcu

SEQ ID NO: 3122916 - RNA, 12 nt, Human
ggaugagaaagg

SEQ ID NO: 3122917 - RNA, 22 nt, Human
ggaugagaaagguugaagcacc

SEQ ID NO: 3122918 - RNA, 21 nt, Human
ggauuuugauccaagcugguc

SEQ ID NO: 3122919 - RNA, 23 nt, Human
ggauuaaacuuaaucuaaaugga

SEQ ID NO: 3122920 - RNA, 12 nt, Human
ggcagaaggaag

SEQ ID NO: 3122921 - RNA, 17 nt, Human
ggcagccaggccacaag

SEQ ID NO: 3122922 - RNA, 15 nt, Human
ggcagccaggccaca

SEQ ID NO: 3122923 - RNA, 10 nt, Human
ggcagagcag

SEQ ID NO: 3122924 - RNA, 14 nt, Human
ggcagccaggccac

SEQ ID NO: 3122925 - RNA, 14 nt, Human
cugcauuuaaaaga

SEQ ID NO: 3122926 - RNA, 13 nt, Human
cugcauuggcuuu

SEQ ID NO: 3122927 - RNA, 19 nt, Human
cugcccugugggcccccaa

SEQ ID NO: 3122928 - RNA, 12 nt, Human
cugcccuuaccu

SEQ ID NO: 3122929 - RNA, 17 nt, Human
cugcccuuaccugccag

SEQ ID NO: 3122930 - RNA, 16 nt, Human
cugcccuuaccugcca

SEQ ID NO: 3122931 - RNA, 12 nt, Human
cugccauccagg

SEQ ID NO: 3122932 - RNA, 16 nt, Human
cugccauauucuguug

SEQ ID NO: 3122933 - RNA, 16 nt, Human
cugccauccagguuca

SEQ ID NO: 3122934 - RNA, 18 nt, Human
cugccauccagguucagc

SEQ ID NO: 3122935 - RNA, 19 nt, Human
cugccauccagguucagcu

SEQ ID NO: 3122936 - RNA, 23 nt, Human
cugccagggacagaggggguggc

SEQ ID NO: 3122937 - RNA, 22 nt, Human
cugccagggacagagggggugg

SEQ ID NO: 3122938 - RNA, 20 nt, Human
cugccagggacagagggggu

SEQ ID NO: 3122939 - RNA, 17 nt, Human
cugcauuuaaaagauac

SEQ ID NO: 3122940 - RNA, 20 nt, Human
cugcaggcagccaggccaca

SEQ ID NO: 3122941 - RNA, 19 nt, Human
cugcaggcagccaggccac

SEQ ID NO: 3122942 - RNA, 18 nt, Human
cugcaggcagccaggcca

SEQ ID NO: 3122943 - RNA, 17 nt, Human
cugcaggcagccaggcc

SEQ ID NO: 3122944 - RNA, 16 nt, Human
cugcaggcagccaggc

SEQ ID NO: 3122945 - RNA, 15 nt, Human
cugcaggcagccagg

SEQ ID NO: 3122946 - RNA, 14 nt, Human
cugcaggcagccag

SEQ ID NO: 3122947 - RNA, 13 nt, Human
cugcaggcagcca

SEQ ID NO: 3122948 - RNA, 12 nt, Human
cugcagcuuugu

SEQ ID NO: 3122949 - RNA, 23 nt, Human
cugcagccucaaccuccugggcu

SEQ ID NO: 3122950 - RNA, 24 nt, Human
cugcagccucaaccuccugggcua

SEQ ID NO: 3122951 - RNA, 18 nt, Human
cugcacuccagccugggu

SEQ ID NO: 3122952 - RNA, 16 nt, Human
cugcacuccagccugg

SEQ ID NO: 3122953 - RNA, 17 nt, Human
cugcacuccagccuggg

SEQ ID NO: 3122954 - RNA, 16 nt, Human
cugcacuauagccuag

SEQ ID NO: 3122955 - RNA, 17 nt, Human
cugcacuauagccuagg

SEQ ID NO: 3122956 - RNA, 18 nt, Human
cugcacuauagccuaggu

SEQ ID NO: 3122957 - RNA, 20 nt, Human
cugcacuauagccuagguga

SEQ ID NO: 3122958 - RNA, 22 nt, Human
cugcacuauagccuaggugaca

SEQ ID NO: 3122959 - RNA, 23 nt, Human
cugcacuauagccuaggugacag

SEQ ID NO: 3122960 - RNA, 13 nt, Human
cugcacuccagcc

SEQ ID NO: 3122961 - RNA, 15 nt, Human
cugcacuccagccug

SEQ ID NO: 3122962 - RNA, 24 nt, Human
cugaugggcaacccccagccugcu

SEQ ID NO: 3122963 - RNA, 22 nt, Human
cugaugggcaacccccagccug

SEQ ID NO: 3122964 - RNA, 23 nt, Human
cugaugggcaacccccagccugc

SEQ ID NO: 3122965 - RNA, 21 nt, Human
cugcaaaggguaucaggugcu

SEQ ID NO: 3122966 - RNA, 22 nt, Human
cugcaaaggguaucaggugcug

SEQ ID NO: 3122967 - RNA, 20 nt, Human
cugaugcuucuucagagacu

SEQ ID NO: 3122968 - RNA, 19 nt, Human
cugaugcuucuucagagac

SEQ ID NO: 3122969 - RNA, 18 nt, Human
cugaugcuucuucagaga

SEQ ID NO: 3122970 - RNA, 18 nt, Human
cugaugggcaacccccag

SEQ ID NO: 3122971 - RNA, 21 nt, Human
cugaugggcaacccccagccu

SEQ ID NO: 3122972 - RNA, 15 nt, Human
cucuuaugggcuggg

SEQ ID NO: 3122973 - RNA, 14 nt, Human
cucuuaugggcugg

SEQ ID NO: 3122974 - RNA, 17 nt, Human
cugaugcuucuucagag

SEQ ID NO: 3122975 - RNA, 16 nt, Human
cugaugcuucuucaga

SEQ ID NO: 3122976 - RNA, 12 nt, Human
cugcaagggagu

SEQ ID NO: 3122977 - RNA, 20 nt, Human
cugcaagaauugaagcagga

SEQ ID NO: 3122978 - RNA, 20 nt, Human
cugcaccgggccacagagaa

SEQ ID NO: 3122979 - RNA, 23 nt, Human
cugcaccgggccacagagaaagu

SEQ ID NO: 3122980 - RNA, 22 nt, Human
cugcaaccugauugugucucuu

SEQ ID NO: 3122981 - RNA, 18 nt, Human
cugcaagaauugaagcag

SEQ ID NO: 3122982 - RNA, 22 nt, Human
cugcaaccuccgccucuugggu

SEQ ID NO: 3122983 - RNA, 14 nt, Human
cugcaaccugauug

SEQ ID NO: 3122984 - RNA, 21 nt, Human
cugcaaccugauugugucucu

SEQ ID NO: 3122985 - RNA, 19 nt, Human
cugcaaccugauugugucu

SEQ ID NO: 3122986 - RNA, 20 nt, Human
cugcaaccuccgccucuugg

SEQ ID NO: 3122987 - RNA, 22 nt, Human
cuggaugcagccucacaguccu

SEQ ID NO: 3122988 - RNA, 15 nt, Human
cuggaguucugguuc

SEQ ID NO: 3122989 - RNA, 17 nt, Human
cuggaguucugguuccu

SEQ ID NO: 3122990 - RNA, 16 nt, Human
cuggaguucugguucc

SEQ ID NO: 3122991 - RNA, 20 nt, Human
cugcuuaacuucacauauug

SEQ ID NO: 3122992 - RNA, 12 nt, Human
cugcugaaggcu

SEQ ID NO: 3122993 - RNA, 16 nt, Human
cugcucacauaucugu

SEQ ID NO: 3122994 - RNA, 19 nt, Human
cugcucacauaucugucau

SEQ ID NO: 3122995 - RNA, 14 nt, Human
cugcucacauaucu

SEQ ID NO: 3122996 - RNA, 13 nt, Human
cugcugacagugu

SEQ ID NO: 3122997 - RNA, 15 nt, Human
cugcugacaguguug

SEQ ID NO: 3122998 - RNA, 11 nt, Human
cugcugacagu

SEQ ID NO: 3122999 - RNA, 12 nt, Human
cugcugacagug

SEQ ID NO: 3123000 - RNA, 15 nt, Human
cugcugaaggcucga

SEQ ID NO: 3123001 - RNA, 14 nt, Human
cugcugaaggcucg

SEQ ID NO: 3123002 - RNA, 13 nt, Human
cugcugaaggcuc

SEQ ID NO: 3123003 - RNA, 13 nt, Human
cuggcuaugcauu

SEQ ID NO: 3123004 - RNA, 14 nt, Human
cuggcuaugcauuu

SEQ ID NO: 3123005 - RNA, 22 nt, Human
cuggcuaugcauuugaaaauuu

SEQ ID NO: 3123006 - RNA, 15 nt, Human
cuggcuaugcauuug

SEQ ID NO: 3123007 - RNA, 16 nt, Human
cuggcuaugcauuuga

SEQ ID NO: 3123008 - RNA, 12 nt, Human
cuggcccuuccu

SEQ ID NO: 3123009 - RNA, 14 nt, Human
cugggacaugggaa

SEQ ID NO: 3123010 - RNA, 22 nt, Human
cugggacaugggaaaggggaag

SEQ ID NO: 3123011 - RNA, 18 nt, Human
cugggacaugggaaaggg

SEQ ID NO: 3123012 - RNA, 13 nt, Human
cugggacuacagg

SEQ ID NO: 3123013 - RNA, 15 nt, Human
cugggacuacaggca

SEQ ID NO: 3123014 - RNA, 22 nt, Human
cugggagaaccaaaaagaggcu

SEQ ID NO: 3123015 - RNA, 12 nt, Human
cugggcagagga

SEQ ID NO: 3123016 - RNA, 16 nt, Human
cugggcagaggaaagc

SEQ ID NO: 3123017 - RNA, 13 nt, Human
cugggcagaggaa

SEQ ID NO: 3123018 - RNA, 20 nt, Human
cugggcagaggaaagcaaag

SEQ ID NO: 3123019 - RNA, 20 nt, Human
cugggcagguuggugggggc

SEQ ID NO: 3123020 - RNA, 20 nt, Human
cuggguggcaccagcagccu

SEQ ID NO: 3123021 - RNA, 18 nt, Human
cuggguggcaccagcagc

SEQ ID NO: 3123022 - RNA, 13 nt, Human
cuggggagaaagu

SEQ ID NO: 3123023 - RNA, 15 nt, Human
cuggguguggcgcag

SEQ ID NO: 3123024 - RNA, 21 nt, Human
cuggguggcaccagcagccug

SEQ ID NO: 3123025 - RNA, 14 nt, Human
cuggguguggcgca

SEQ ID NO: 3123026 - RNA, 17 nt, Human
cuuccauggacuuuguu

SEQ ID NO: 3123027 - RNA, 16 nt, Human
cuuccauggacuuugu

SEQ ID NO: 3123028 - RNA, 20 nt, Human
cuuccagugaggcucugccc

SEQ ID NO: 3123029 - RNA, 19 nt, Human
cuuccagugaggcucugcc

SEQ ID NO: 3123030 - RNA, 17 nt, Human
cuuccagugaggcucug

SEQ ID NO: 3123031 - RNA, 18 nt, Human
cuuccagugaggcucugc

SEQ ID NO: 3123032 - RNA, 14 nt, Human
cuucaccuuugucc

SEQ ID NO: 3123033 - RNA, 18 nt, Human
cuuauugcccacgcugga

SEQ ID NO: 3123034 - RNA, 20 nt, Human
cuucaccuuuguccccaccg

SEQ ID NO: 3123035 - RNA, 17 nt, Human
cuucaccuuugucccca

SEQ ID NO: 3123036 - RNA, 22 nt, Human
cuucagagacuccugcaggcag

SEQ ID NO: 3123037 - RNA, 21 nt, Human
cuucagagacuccugcaggca

SEQ ID NO: 3123038 - RNA, 16 nt, Human
cuucagagacuccugc

SEQ ID NO: 3123039 - RNA, 15 nt, Human
cuucauccuccucag

SEQ ID NO: 3123040 - RNA, 13 nt, Human
cuucaucccucug

SEQ ID NO: 3123041 - RNA, 18 nt, Human
cuucaguggcagcugcuu

SEQ ID NO: 3123042 - RNA, 17 nt, Human
cuucaguggcagcugcu

SEQ ID NO: 3123043 - RNA, 23 nt, Human
cuucagagacuccugcaggcagc

SEQ ID NO: 3123044 - RNA, 16 nt, Human
cuucauccuccucaga

SEQ ID NO: 3123045 - RNA, 18 nt, Human
cuuagcagggaaacagcu

SEQ ID NO: 3123046 - RNA, 21 nt, Human
cuuauggaacacucugagacu

SEQ ID NO: 3123047 - RNA, 21 nt, Human
cuuaugggcuggguucuaccc

SEQ ID NO: 3123048 - RNA, 14 nt, Human
cuuaugggcugggu

SEQ ID NO: 3123049 - RNA, 23 nt, Human
cuuaugggcuggguucuacccag

SEQ ID NO: 3123050 - RNA, 22 nt, Human
cuuaugggcuggguucuaccca

SEQ ID NO: 3123051 - RNA, 12 nt, Human
cuuauugcccac

SEQ ID NO: 3123052 - RNA, 13 nt, Human
cuuauugcccacg

SEQ ID NO: 3123053 - RNA, 19 nt, Human
cugugucagguggggcagc

SEQ ID NO: 3123054 - RNA, 20 nt, Human
cugugucagcauagaaguaa

SEQ ID NO: 3123055 - RNA, 21 nt, Human
cugugucagguggggcagcuu

SEQ ID NO: 3123056 - RNA, 14 nt, Human
cugugucuugcaau

SEQ ID NO: 3123057 - RNA, 19 nt, Human
cugugucucccuucauccu

SEQ ID NO: 3123058 - RNA, 14 nt, Human
cugugucucccuuc

SEQ ID NO: 3123059 - RNA, 19 nt, Human
cugugcugagucugaaggc

SEQ ID NO: 3123060 - RNA, 11 nt, Human
cugugcugccc

SEQ ID NO: 3123061 - RNA, 22 nt, Human
cugugcugagucugaaggcugg

SEQ ID NO: 3123062 - RNA, 20 nt, Human
cugugcugagucugaaggcu

SEQ ID NO: 3123063 - RNA, 13 nt, Human
cuguucagcucca

SEQ ID NO: 3123064 - RNA, 16 nt, Human
cugugucuugcaaugg

SEQ ID NO: 3123065 - RNA, 19 nt, Human
cugugucuugcaauggcag

SEQ ID NO: 3123066 - RNA, 19 nt, Human
cuuagauguauauauuucc

SEQ ID NO: 3123067 - RNA, 21 nt, Human
cuuaccucggugccuuccucu

SEQ ID NO: 3123068 - RNA, 19 nt, Human
cuuaccucggugccuuccu

SEQ ID NO: 3123069 - RNA, 13 nt, Human
cuuaccucggugc

SEQ ID NO: 3123070 - RNA, 17 nt, Human
cuuacccucauguucuu

SEQ ID NO: 3123071 - RNA, 18 nt, Human
cuuacccucauguucuua

SEQ ID NO: 3123072 - RNA, 19 nt, Human
cuuacccucauguucuuaa

SEQ ID NO: 3123073 - RNA, 16 nt, Human
cuguugggccaggagc

SEQ ID NO: 3123074 - RNA, 20 nt, Human
cuguugggccaggagccucc

SEQ ID NO: 3123075 - RNA, 17 nt, Human
cuguugggccaggagcc

SEQ ID NO: 3123076 - RNA, 13 nt, Human
cuuacacaauggu

SEQ ID NO: 3123077 - RNA, 22 nt, Human
cuuugacgccaucccagcccca

SEQ ID NO: 3123078 - RNA, 21 nt, Human
cuuugacgccaucccagcccc

SEQ ID NO: 3123079 - RNA, 19 nt, Human
cuuugacgccaucccagcc

SEQ ID NO: 3123080 - RNA, 18 nt, Human
cuuugacgccaucccagc

SEQ ID NO: 3123081 - RNA, 15 nt, Human
cuuuucaaaacauuu

SEQ ID NO: 3123082 - RNA, 20 nt, Human
cuuuggucuacacugugcug

SEQ ID NO: 3123083 - RNA, 16 nt, Human
cuuuggucuacacugu

SEQ ID NO: 3123084 - RNA, 14 nt, Human
cuuuuauaaacuuu

SEQ ID NO: 3123085 - RNA, 16 nt, Human
cuuuuauaaacuuuac

SEQ ID NO: 3123086 - RNA, 18 nt, Human
cuuuuauaaacuuuaccu

SEQ ID NO: 3123087 - RNA, 15 nt, Human
cuuuuauaaacuuua

SEQ ID NO: 3123088 - RNA, 13 nt, Human
cuuguggacacag

SEQ ID NO: 3123089 - RNA, 14 nt, Human
cuuguggacacagc

SEQ ID NO: 3123090 - RNA, 15 nt, Human
cuuguggacacagcu

SEQ ID NO: 3123091 - RNA, 22 nt, Human
cuuucaauaggaaaaacugauu

SEQ ID NO: 3123092 - RNA, 21 nt, Human
cuuucaauaggaaaaacugau

SEQ ID NO: 3123093 - RNA, 20 nt, Human
cuuucaauaggaaaaacuga

SEQ ID NO: 3123094 - RNA, 18 nt, Human
cuuucaauaggaaaaacu

SEQ ID NO: 3123095 - RNA, 12 nt, Human
cuugcucugcug

SEQ ID NO: 3123096 - RNA, 23 nt, Human
cuugccgucuaccugaggggccu

SEQ ID NO: 3123097 - RNA, 19 nt, Human
cuugccgucuaccugaggg

SEQ ID NO: 3123098 - RNA, 12 nt, Human
cuugacagggca

SEQ ID NO: 3123099 - RNA, 20 nt, Human
cuugccgucuaccugagggg

SEQ ID NO: 3123100 - RNA, 20 nt, Human
cuugaaugaugccaugagga

SEQ ID NO: 3123101 - RNA, 18 nt, Human
cuucuucagagacuccug

SEQ ID NO: 3123102 - RNA, 22 nt, Human
cuucuucagagacuccugcagg

SEQ ID NO: 3123103 - RNA, 23 nt, Human
cuucugacccaugcugcccugug

SEQ ID NO: 3123104 - RNA, 21 nt, Human
cuucuucagagacuccugcag

SEQ ID NO: 3123105 - RNA, 20 nt, Human
cuucuucagagacuccugca

SEQ ID NO: 3123106 - RNA, 16 nt, Human
gaugagugagcaugcc

SEQ ID NO: 3123107 - RNA, 15 nt, Human
gaugaucuaggaaga

SEQ ID NO: 3123108 - RNA, 21 nt, Human
gaugaucuaggaagacuuugg

SEQ ID NO: 3123109 - RNA, 14 nt, Human
gaugauccuaggca

SEQ ID NO: 3123110 - RNA, 17 nt, Human
gauucuuccucccuccc

SEQ ID NO: 3123111 - RNA, 18 nt, Human
gauucuuccucccucccu

SEQ ID NO: 3123112 - RNA, 15 nt, Human
gauucuccugccuca

SEQ ID NO: 3123113 - RNA, 17 nt, Human
gauucuccugccucagc

SEQ ID NO: 3123114 - RNA, 18 nt, Human
gauucuccugccucagcc

SEQ ID NO: 3123115 - RNA, 14 nt, Human
gauucuccugccuc

SEQ ID NO: 3123116 - RNA, 12 nt, Human
gauuauuggaaa

SEQ ID NO: 3123117 - RNA, 19 nt, Human
gcaagugagagcugggugu

SEQ ID NO: 3123118 - RNA, 14 nt, Human
gcacacauuuuuua

SEQ ID NO: 3123119 - RNA, 14 nt, Human
gcacaccgggcacu

SEQ ID NO: 3123120 - RNA, 22 nt, Human
gcacaagcugcacccucaggca

SEQ ID NO: 3123121 - RNA, 14 nt, Human
gcaccgggccacag

SEQ ID NO: 3123122 - RNA, 22 nt, Human
gcacaucagcacgauuucuguu

SEQ ID NO: 3123123 - RNA, 23 nt, Human
gcacaucagcacgauuucuguuu

SEQ ID NO: 3123124 - RNA, 23 nt, Human
gcaccgggccacagagaaaguac

SEQ ID NO: 3123125 - RNA, 16 nt, Human
gcacuugcagacucua

SEQ ID NO: 3123126 - RNA, 16 nt, Human
gcacuccccugcuggg

SEQ ID NO: 3123127 - RNA, 22 nt, Human
gcacuccccugcuggguguggc

SEQ ID NO: 3123128 - RNA, 13 nt, Human
gcacucagaagac

SEQ ID NO: 3123129 - RNA, 16 nt, Human
gcacucagaagacacu

SEQ ID NO: 3123130 - RNA, 17 nt, Human
gcacuccccugcugggu

SEQ ID NO: 3123131 - RNA, 15 nt, Human
gaggucgaggcagga

SEQ ID NO: 3123132 - RNA, 23 nt, Human
gaggugaccccagguuucuaugu

SEQ ID NO: 3123133 - RNA, 20 nt, Human
gagugacagaggcagcccca

SEQ ID NO: 3123134 - RNA, 22 nt, Human
gaguugauagcacagacccugc

SEQ ID NO: 3123135 - RNA, 17 nt, Human
gaguugauucagcucug

SEQ ID NO: 3123136 - RNA, 16 nt, Human
gaguugauucagcucu

SEQ ID NO: 3123137 - RNA, 15 nt, Human
gaguugauucagcuc

SEQ ID NO: 3123138 - RNA, 12 nt, Human
gagucccaccuu

SEQ ID NO: 3123139 - RNA, 18 nt, Human
gagugacagaggcagccc

SEQ ID NO: 3123140 - RNA, 22 nt, Human
gagucagaaguuucugccgcag

SEQ ID NO: 3123141 - RNA, 15 nt, Human
gagucaccaagccca

SEQ ID NO: 3123142 - RNA, 16 nt, Human
gagucaccaagcccag

SEQ ID NO: 3123143 - RNA, 17 nt, Human
gagucaccaagcccagu

SEQ ID NO: 3123144 - RNA, 18 nt, Human
gaguugauucagcucugc

SEQ ID NO: 3123145 - RNA, 22 nt, Human
gaguuguuacauuuuuaagugc

SEQ ID NO: 3123146 - RNA, 14 nt, Human
gaggcagggucuca

SEQ ID NO: 3123147 - RNA, 22 nt, Human
gaggccaaggugggaggauugc

SEQ ID NO: 3123148 - RNA, 17 nt, Human
gaggccaaggugggagg

SEQ ID NO: 3123149 - RNA, 15 nt, Human
gaggcagggucucac

SEQ ID NO: 3123150 - RNA, 22 nt, Human
gaggcagggucucacucugucg

SEQ ID NO: 3123151 - RNA, 22 nt, Human
gaggcuagugugguguuuccug

SEQ ID NO: 3123152 - RNA, 14 nt, Human
gaggccagagacac

SEQ ID NO: 3123153 - RNA, 13 nt, Human
gaggccagagaca

SEQ ID NO: 3123154 - RNA, 20 nt, Human
gagccuuccaggggugggac

SEQ ID NO: 3123155 - RNA, 23 nt, Human
gagccuuccaggggugggacacc

SEQ ID NO: 3123156 - RNA, 13 nt, Human
gagccuugaacuu

SEQ ID NO: 3123157 - RNA, 19 nt, Human
gacauuguuggccaaagcc

SEQ ID NO: 3123158 - RNA, 14 nt, Human
gacauugcggacag

SEQ ID NO: 3123159 - RNA, 15 nt, Human
gacauugcggacagc

SEQ ID NO: 3123160 - RNA, 19 nt, Human
gacagcccgggcucugccu

SEQ ID NO: 3123161 - RNA, 18 nt, Human
gacagcccgggcucugcc

SEQ ID NO: 3123162 - RNA, 18 nt, Human
gaccagggauuuccauga

SEQ ID NO: 3123163 - RNA, 20 nt, Human
gaccagggauuuccaugaug

SEQ ID NO: 3123164 - RNA, 19 nt, Human
gaccaucccugaaggcccc

SEQ ID NO: 3123165 - RNA, 18 nt, Human
gaccaucccugaaggccc

SEQ ID NO: 3123166 - RNA, 13 nt, Human
gaccaucccugaa

SEQ ID NO: 3123167 - RNA, 12 nt, Human
gaccaucccuga

SEQ ID NO: 3123168 - RNA, 17 nt, Human
gacagcccgggcucugc

SEQ ID NO: 3123169 - RNA, 13 nt, Human
gacacagcucuuc

SEQ ID NO: 3123170 - RNA, 14 nt, Human
gacacagcucuucu

SEQ ID NO: 3123171 - RNA, 16 nt, Human
gacacagcucuucucc

SEQ ID NO: 3123172 - RNA, 22 nt, Human
gacacagcucuucuccaggcug

SEQ ID NO: 3123173 - RNA, 23 nt, Human
gacacagcucuucuccaggcugu

SEQ ID NO: 3123174 - RNA, 19 nt, Human
gacucugucucaaaaaaac

SEQ ID NO: 3123175 - RNA, 14 nt, Human
gacugaauuucuuu

SEQ ID NO: 3123176 - RNA, 15 nt, Human
gacgccaucccagcc

SEQ ID NO: 3123177 - RNA, 18 nt, Human
gacgccaucccagcccca

SEQ ID NO: 3123178 - RNA, 17 nt, Human
gacgccaucccagcccc

SEQ ID NO: 3123179 - RNA, 19 nt, Human
gacgcuacccgggaagggg

SEQ ID NO: 3123180 - RNA, 18 nt, Human
gacgcuacccgggaaggg

SEQ ID NO: 3123181 - RNA, 16 nt, Human
gacgcuacccgggaag

SEQ ID NO: 3123182 - RNA, 16 nt, Human
gacgccaucccagccc

SEQ ID NO: 3123183 - RNA, 13 nt, Human
gaccugaggcccu

SEQ ID NO: 3123184 - RNA, 11 nt, Human
gaccugaggcc

SEQ ID NO: 3123185 - RNA, 20 nt, Human
gaccaucccugaaggccccg

SEQ ID NO: 3123186 - RNA, 13 nt, Human
gaccucugccuga

SEQ ID NO: 3123187 - RNA, 14 nt, Human
gaccucugcagcaa

SEQ ID NO: 3123188 - RNA, 15 nt, Human
gaacuccuggccuca

SEQ ID NO: 3123189 - RNA, 11 nt, Human
gaacuggcugc

SEQ ID NO: 3123190 - RNA, 12 nt, Human
gaacuggcugca

SEQ ID NO: 3123191 - RNA, 15 nt, Human
gaagcagaggaagga

SEQ ID NO: 3123192 - RNA, 14 nt, Human
gaagcacaugccuc

SEQ ID NO: 3123193 - RNA, 16 nt, Human
gaagacaaugacuuac

SEQ ID NO: 3123194 - RNA, 22 nt, Human
gaagacaaugacuuacuguaca

SEQ ID NO: 3123195 - RNA, 23 nt, Human
gaagacaaugugaaaagaaaaau

SEQ ID NO: 3123196 - RNA, 23 nt, Human
gaagauuuugaaauuuuuauuaa

SEQ ID NO: 3123197 - RNA, 15 nt, Human
gaagcacaugccucu

SEQ ID NO: 3123198 - RNA, 20 nt, Human
gaagcacaugccucucucag

SEQ ID NO: 3123199 - RNA, 17 nt, Human
gaagcacaugccucucu

SEQ ID NO: 3123200 - RNA, 19 nt, Human
gaauauugcugauggugca

SEQ ID NO: 3123201 - RNA, 15 nt, Human
gaauauugcugaugg

SEQ ID NO: 3123202 - RNA, 14 nt, Human
gaauauugcugaug

SEQ ID NO: 3123203 - RNA, 22 nt, Human
gaaggggagauaaggguaucug

SEQ ID NO: 3123204 - RNA, 19 nt, Human
gaagcuccgcuuucuaccc

SEQ ID NO: 3123205 - RNA, 22 nt, Human
gaagcuccgcuuucuacccagc

SEQ ID NO: 3123206 - RNA, 17 nt, Human
gaaggccccgcccaggc

SEQ ID NO: 3123207 - RNA, 22 nt, Human
gaaggcuggguucugauccuag

SEQ ID NO: 3123208 - RNA, 20 nt, Human
gaaggcuggguucugauccu

SEQ ID NO: 3123209 - RNA, 21 nt, Human
gaaggcucgagcaugccugga

SEQ ID NO: 3123210 - RNA, 19 nt, Human
gaaggccccgcccaggcuu

SEQ ID NO: 3123211 - RNA, 18 nt, Human
gaaggccccgcccaggcu

SEQ ID NO: 3123212 - RNA, 19 nt, Human
gaaggcucgagcaugccug

SEQ ID NO: 3123213 - RNA, 19 nt, Human
gaaggcuggguucugaucc

SEQ ID NO: 3123214 - RNA, 15 nt, Human
gaaggcuggguucug

SEQ ID NO: 3123215 - RNA, 18 nt, Human
uuuaccugaagucuuugu

SEQ ID NO: 3123216 - RNA, 11 nt, Human
uuuacuuaaac

SEQ ID NO: 3123217 - RNA, 16 nt, Human
uuuacugcagcuuugu

SEQ ID NO: 3123218 - RNA, 14 nt, Human
uuuacuucuuauac

SEQ ID NO: 3123219 - RNA, 13 nt, Human
uuuacuucuuaua

SEQ ID NO: 3123220 - RNA, 17 nt, Human
augcccagccccuucug

SEQ ID NO: 3123221 - RNA, 15 nt, Human
augcccagccccuuc

SEQ ID NO: 3123222 - RNA, 16 nt, Human
augcccagccccuucu

SEQ ID NO: 3123223 - RNA, 21 nt, Human
augccaugaggaacaaggcaa

SEQ ID NO: 3123224 - RNA, 21 nt, Human
uuuaaugaaagacuguacaaa

SEQ ID NO: 3123225 - RNA, 23 nt, Human
uuuaaugaaagacuguacaaagu

SEQ ID NO: 3123226 - RNA, 14 nt, Human
augccucucucagg

SEQ ID NO: 3123227 - RNA, 13 nt, Human
augccucucucag

SEQ ID NO: 3123228 - RNA, 15 nt, Human
augccucucucaggc

SEQ ID NO: 3123229 - RNA, 20 nt, Human
augcgugcauaccacuuuug

SEQ ID NO: 3123230 - RNA, 22 nt, Human
augcgugcauaccacuuuuguu

SEQ ID NO: 3123231 - RNA, 14 nt, Human
uuuaucagaauucu

SEQ ID NO: 3123232 - RNA, 14 nt, Human
augcuccuggccca

SEQ ID NO: 3123233 - RNA, 18 nt, Human
augcuggcuguuggcugg

SEQ ID NO: 3123234 - RNA, 19 nt, Human
augcuggcuguuggcuggg

SEQ ID NO: 3123235 - RNA, 20 nt, Human
augcuggcuguuggcugggg

SEQ ID NO: 3123236 - RNA, 18 nt, Human
auggaagacagcucuuau

SEQ ID NO: 3123237 - RNA, 17 nt, Human
auggaagacagcucuua

SEQ ID NO: 3123238 - RNA, 20 nt, Human
augcuucucacugccaugcc

SEQ ID NO: 3123239 - RNA, 16 nt, Human
augcuucucacugcca

SEQ ID NO: 3123240 - RNA, 16 nt, Human
uuucccuauuagagaa

SEQ ID NO: 3123241 - RNA, 11 nt, Human
uuucagaaaug

SEQ ID NO: 3123242 - RNA, 12 nt, Human
uuucagaaaugu

SEQ ID NO: 3123243 - RNA, 12 nt, Human
uuucaaacuuua

SEQ ID NO: 3123244 - RNA, 19 nt, Human
augaggucagagccugcag

SEQ ID NO: 3123245 - RNA, 20 nt, Human
augaggucagagccugcagu

SEQ ID NO: 3123246 - RNA, 15 nt, Human
augaggucagagccu

SEQ ID NO: 3123247 - RNA, 16 nt, Human
augaggucagagccug

SEQ ID NO: 3123248 - RNA, 18 nt, Human
augaggucagagccugca

SEQ ID NO: 3123249 - RNA, 21 nt, Human
uugucauauaagauucauauu

SEQ ID NO: 3123250 - RNA, 17 nt, Human
uugucacacacuuuggc

SEQ ID NO: 3123251 - RNA, 13 nt, Human
augaguccccugu

SEQ ID NO: 3123252 - RNA, 15 nt, Human
uuguccccgacccuu

SEQ ID NO: 3123253 - RNA, 20 nt, Human
uuguccccaccgcagacagg

SEQ ID NO: 3123254 - RNA, 18 nt, Human
uuguccccaccgcagaca

SEQ ID NO: 3123255 - RNA, 13 nt, Human
uugugaggaagcc

SEQ ID NO: 3123256 - RNA, 19 nt, Human
uugugauacaaugcugugc

SEQ ID NO: 3123257 - RNA, 20 nt, Human
uugugauacaaugcugugcc

SEQ ID NO: 3123258 - RNA, 18 nt, Human
uugugaggaagccgcugg

SEQ ID NO: 3123259 - RNA, 17 nt, Human
uugugaggaagccgcug

SEQ ID NO: 3123260 - RNA, 17 nt, Human
uuguucuugguuuguaa

SEQ ID NO: 3123261 - RNA, 19 nt, Human
uuguucuugguuuguaaau

SEQ ID NO: 3123262 - RNA, 21 nt, Human
augcacuuuguucuggcucuu

SEQ ID NO: 3123263 - RNA, 23 nt, Human
augcacuuuguucuggcucuucc

SEQ ID NO: 3123264 - RNA, 11 nt, Human
uuuaaaugcac

SEQ ID NO: 3123265 - RNA, 16 nt, Human
uuuaaugaaagacugu

SEQ ID NO: 3123266 - RNA, 22 nt, Human
uuuaaggaugcuuguacauaau

SEQ ID NO: 3123267 - RNA, 20 nt, Human
uuuaaggaugcuuguacaua

SEQ ID NO: 3123268 - RNA, 21 nt, Human
uuuaaggaugcuuguacauaa

SEQ ID NO: 3123269 - RNA, 19 nt, Human
uuuaaggaugcuuguacau

SEQ ID NO: 3123270 - RNA, 21 nt, Human
uuuaagcuguuacugucuuca

SEQ ID NO: 3123271 - RNA, 12 nt, Human
uuuaagagaaau

SEQ ID NO: 3123272 - RNA, 20 nt, Human
uugcuuugugauuuuuguaa

SEQ ID NO: 3123273 - RNA, 17 nt, Human
uuggaaaauaaauuauu

SEQ ID NO: 3123274 - RNA, 15 nt, Human
uugcuuugugauuuu

SEQ ID NO: 3123275 - RNA, 14 nt, Human
aucuugcucugcug

SEQ ID NO: 3123276 - RNA, 15 nt, Human
aucuugcucugcuga

SEQ ID NO: 3123277 - RNA, 16 nt, Human
aucuugcucugcugac

SEQ ID NO: 3123278 - RNA, 12 nt, Human
aucugucauuug

SEQ ID NO: 3123279 - RNA, 17 nt, Human
aucugucauuugagcag

SEQ ID NO: 3123280 - RNA, 18 nt, Human
uuggugguuucagaaaug

SEQ ID NO: 3123281 - RNA, 19 nt, Human
uuggugguuucagaaaugu

SEQ ID NO: 3123282 - RNA, 18 nt, Human
augaaugucagugugacu

SEQ ID NO: 3123283 - RNA, 16 nt, Human
augaaugucaguguga

SEQ ID NO: 3123284 - RNA, 17 nt, Human
uuggugucgggcaugac

SEQ ID NO: 3123285 - RNA, 19 nt, Human
uuggugucgggcaugacac

SEQ ID NO: 3123286 - RNA, 18 nt, Human
uuggugucgggcaugaca

SEQ ID NO: 3123287 - RNA, 14 nt, Human
uugguuuguaaauu

SEQ ID NO: 3123288 - RNA, 17 nt, Human
augaaugaaacauuuug

SEQ ID NO: 3123289 - RNA, 23 nt, Human
augaaccacaucuugcucugcug

SEQ ID NO: 3123290 - RNA, 22 nt, Human
augaaccacaucuugcucugcu

SEQ ID NO: 3123291 - RNA, 19 nt, Human
uugacaggauuauuggaaa

SEQ ID NO: 3123292 - RNA, 10 nt, Human
uugacagggc

SEQ ID NO: 3123293 - RNA, 12 nt, Human
uugacagggcac

SEQ ID NO: 3123294 - RNA, 16 nt, Human
uugacaucaacugcau

SEQ ID NO: 3123295 - RNA, 13 nt, Human
uugacaucaacug

SEQ ID NO: 3123296 - RNA, 11 nt, Human
uugagacagag

SEQ ID NO: 3123297 - RNA, 12 nt, Human
uugagcagggcu

SEQ ID NO: 3123298 - RNA, 16 nt, Human
uugagcagggcucagc

SEQ ID NO: 3123299 - RNA, 11 nt, Human
uugagugccuu

SEQ ID NO: 3123300 - RNA, 21 nt, Human
uugagugcugucuccauguuu

SEQ ID NO: 3123301 - RNA, 15 nt, Human
uugauacuacaguuu

SEQ ID NO: 3123302 - RNA, 17 nt, Human
uugauacuacaguuugu

SEQ ID NO: 3123303 - RNA, 20 nt, Human
aucuaauauguaacaagcca

SEQ ID NO: 3123304 - RNA, 23 nt, Human
aucuaauauguaacaagccaccc

SEQ ID NO: 3123305 - RNA, 18 nt, Human
aucuagauacuguaucau

SEQ ID NO: 3123306 - RNA, 19 nt, Human
aucuagauacuguaucaug

SEQ ID NO: 3123307 - RNA, 19 nt, Human
aucuaggaagacuuuggaa

SEQ ID NO: 3123308 - RNA, 18 nt, Human
aucuaggaagacuuugga

SEQ ID NO: 3123309 - RNA, 17 nt, Human
aucuaggaagacuuugg

SEQ ID NO: 3123310 - RNA, 14 nt, Human
aucucaaauuucua

SEQ ID NO: 3123311 - RNA, 23 nt, Human
aucucaaauaacuaaaagguaug

SEQ ID NO: 3123312 - RNA, 14 nt, Human
aucucaaauaacua

SEQ ID NO: 3123313 - RNA, 21 nt, Human
aucucaaauaacuaaaaggua

SEQ ID NO: 3123314 - RNA, 13 nt, Human
uugcccaggcagg

SEQ ID NO: 3123315 - RNA, 14 nt, Human
uugcccaggcaggu

SEQ ID NO: 3123316 - RNA, 16 nt, Human
uugcccaggcaggucu

SEQ ID NO: 3123317 - RNA, 18 nt, Human
uugcccaggcaggucuug

SEQ ID NO: 3123318 - RNA, 11 nt, Human
uugcccaggcu

SEQ ID NO: 3123319 - RNA, 12 nt, Human
uugcccaggcug

SEQ ID NO: 3123320 - RNA, 14 nt, Human
uugcccaggcuggc

SEQ ID NO: 3123321 - RNA, 23 nt, Human
uugcccaggcuggcgugcagugg

SEQ ID NO: 3123322 - RNA, 11 nt, Human
uugcccaggca

SEQ ID NO: 3123323 - RNA, 21 nt, Human
uugcaccacugcacuccagcc

SEQ ID NO: 3123324 - RNA, 14 nt, Human
uugcaauggcagcc

SEQ ID NO: 3123325 - RNA, 12 nt, Human
uugcaugaggcu

SEQ ID NO: 3123326 - RNA, 14 nt, Human
uugcaugaggcuag

SEQ ID NO: 3123327 - RNA, 18 nt, Human
aucucuugagccugggag

SEQ ID NO: 3123328 - RNA, 23 nt, Human
aucucacacaugagcaucaggcc

SEQ ID NO: 3123329 - RNA, 16 nt, Human
aucucaaauuucuaaa

SEQ ID NO: 3123330 - RNA, 17 nt, Human
aucucaaauuucuaaau

SEQ ID NO: 3123331 - RNA, 23 nt, Human
uugauguucuuucacccuuuucu

SEQ ID NO: 3123332 - RNA, 15 nt, Human
uugauuaaauucuug

SEQ ID NO: 3123333 - RNA, 16 nt, Human
uugauuaaauucuugc

SEQ ID NO: 3123334 - RNA, 20 nt, Human
uugauuaaauucuugcaaag

SEQ ID NO: 3123335 - RNA, 23 nt, Human
uucucagaaucucaaauaacuaa

SEQ ID NO: 3123336 - RNA, 13 nt, Human
uucucagaaucuc

SEQ ID NO: 3123337 - RNA, 19 nt, Human
uucucagaaucucaaauaa

SEQ ID NO: 3123338 - RNA, 22 nt, Human
uucucagaaucucaaauaacua

SEQ ID NO: 3123339 - RNA, 13 nt, Human
uucuaggccuggg

SEQ ID NO: 3123340 - RNA, 13 nt, Human
aucauugaaaucu

SEQ ID NO: 3123341 - RNA, 15 nt, Human
aucauugaaaucuuu

SEQ ID NO: 3123342 - RNA, 14 nt, Human
aucauugaaaucuu

SEQ ID NO: 3123343 - RNA, 15 nt, Human
aucagcacgauuucu

SEQ ID NO: 3123344 - RNA, 16 nt, Human
aucagcacgauuucug

SEQ ID NO: 3123345 - RNA, 17 nt, Human
aucagcacgauuucugu

SEQ ID NO: 3123346 - RNA, 18 nt, Human
aucagcacgauuucuguu

SEQ ID NO: 3123347 - RNA, 10 nt, Human
uucugggaca

SEQ ID NO: 3123348 - RNA, 11 nt, Human
uucugggacac

SEQ ID NO: 3123349 - RNA, 22 nt, Human
uucugggacacaguucaauucu

SEQ ID NO: 3123350 - RNA, 16 nt, Human
uucugccgcagcccug

SEQ ID NO: 3123351 - RNA, 23 nt, Human
uucugccgcagcccugcagaggg

SEQ ID NO: 3123352 - RNA, 23 nt, Human
uucugaacuuggcgcugccccug

SEQ ID NO: 3123353 - RNA, 19 nt, Human
aucauugaaaucuuuuugc

SEQ ID NO: 3123354 - RNA, 15 nt, Human
uucugaaagggacgc

SEQ ID NO: 3123355 - RNA, 16 nt, Human
aucccauaugccuggg

SEQ ID NO: 3123356 - RNA, 17 nt, Human
aucccauaugccugggc

SEQ ID NO: 3123357 - RNA, 15 nt, Human
auccagguucagcuu

SEQ ID NO: 3123358 - RNA, 16 nt, Human
auccagguucagcuug

SEQ ID NO: 3123359 - RNA, 14 nt, Human
uuccuucagugccu

SEQ ID NO: 3123360 - RNA, 11 nt, Human
uuccuucagug

SEQ ID NO: 3123361 - RNA, 17 nt, Human
uuccuguucccaugaga

SEQ ID NO: 3123362 - RNA, 11 nt, Human
uuccugugucu

SEQ ID NO: 3123363 - RNA, 11 nt, Human
uuccucuuucc

SEQ ID NO: 3123364 - RNA, 15 nt, Human
uuccuaauccucuag

SEQ ID NO: 3123365 - RNA, 13 nt, Human
uuccuaauccucu

SEQ ID NO: 3123366 - RNA, 13 nt, Human
aucaaguauuaua

SEQ ID NO: 3123367 - RNA, 14 nt, Human
aucaaguauuauac

SEQ ID NO: 3123368 - RNA, 18 nt, Human
aucaaguauuauaccuuu

SEQ ID NO: 3123369 - RNA, 22 nt, Human
aucacggcucacugcagccuca

SEQ ID NO: 3123370 - RNA, 19 nt, Human
aucacggcucacugcagcc

SEQ ID NO: 3123371 - RNA, 22 nt, Human
auauuaagaaagacuaucuaaa

SEQ ID NO: 3123372 - RNA, 24 nt, Human
auauuaagaaagacuaucuaaaug

SEQ ID NO: 3123373 - RNA, 22 nt, Human
auauuaaggaagacaaugugaa

SEQ ID NO: 3123374 - RNA, 20 nt, Human
auauguuuuaagaggcaggg

SEQ ID NO: 3123375 - RNA, 18 nt, Human
auauguuuuaagaggcag

SEQ ID NO: 3123376 - RNA, 16 nt, Human
auauucuguuggccag

SEQ ID NO: 3123377 - RNA, 19 nt, Human
auauugauuuccguuaaaa

SEQ ID NO: 3123378 - RNA, 21 nt, Human
auauugauuuccguuaaaaua

SEQ ID NO: 3123379 - RNA, 22 nt, Human
auauugauuuccguuaaaauac

SEQ ID NO: 3123380 - RNA, 17 nt, Human
auauuguuuucagugua

SEQ ID NO: 3123381 - RNA, 20 nt, Human
auauuguuuucaguguacau

SEQ ID NO: 3123382 - RNA, 21 nt, Human
auauugcugauggugcaauga

SEQ ID NO: 3123383 - RNA, 17 nt, Human
auauugcugauggugca

SEQ ID NO: 3123384 - RNA, 14 nt, Human
auaugucaagccau

SEQ ID NO: 3123385 - RNA, 20 nt, Human
auaugauuuaaaucagccgu

SEQ ID NO: 3123386 - RNA, 22 nt, Human
auaucugaaaauguauguguaa

SEQ ID NO: 3123387 - RNA, 16 nt, Human
uucauauuuacuucuu

SEQ ID NO: 3123388 - RNA, 21 nt, Human
uucauauuuacuucuuauaca

SEQ ID NO: 3123389 - RNA, 14 nt, Human
uucaguaauaacuc

SEQ ID NO: 3123390 - RNA, 18 nt, Human
uucaucauccuaagcuau

SEQ ID NO: 3123391 - RNA, 21 nt, Human
uucaucauccuaagcuauuca

SEQ ID NO: 3123392 - RNA, 19 nt, Human
uucagccaagaauucuuaa

SEQ ID NO: 3123393 - RNA, 14 nt, Human
uucagccaagaauu

SEQ ID NO: 3123394 - RNA, 17 nt, Human
uucagaucucuaacuuc

SEQ ID NO: 3123395 - RNA, 17 nt, Human
auagcugggacuacagg

SEQ ID NO: 3123396 - RNA, 14 nt, Human
uuauuuaaauuuua

SEQ ID NO: 3123397 - RNA, 18 nt, Human
uuauuuaaugaaagacug

SEQ ID NO: 3123398 - RNA, 22 nt, Human
uuauuuaaugaaagacuguaca

SEQ ID NO: 3123399 - RNA, 16 nt, Human
uuauuuaguuccuuga

SEQ ID NO: 3123400 - RNA, 22 nt, Human
auagcucaggugucccugcacu

SEQ ID NO: 3123401 - RNA, 20 nt, Human
auagcucaggugucccugca

SEQ ID NO: 3123402 - RNA, 21 nt, Human
auagcucaggugucccugcac

SEQ ID NO: 3123403 - RNA, 12 nt, Human
auagcugggacu

SEQ ID NO: 3123404 - RNA, 19 nt, Human
auagcucaggugucccugc

SEQ ID NO: 3123405 - RNA, 13 nt, Human
auaagauaaaugu

SEQ ID NO: 3123406 - RNA, 17 nt, Human
auaagauaaaugugcug

SEQ ID NO: 3123407 - RNA, 18 nt, Human
auagccugccucuucucu

SEQ ID NO: 3123408 - RNA, 22 nt, Human
uucaccacaugugcacaugcac

SEQ ID NO: 3123409 - RNA, 17 nt, Human
uucacauauugauuucc

SEQ ID NO: 3123410 - RNA, 19 nt, Human
auaggaacuuaaauaaugu

SEQ ID NO: 3123411 - RNA, 21 nt, Human
uucaaggauccugagccagau

SEQ ID NO: 3123412 - RNA, 19 nt, Human
uucaaggauccugagccag

SEQ ID NO: 3123413 - RNA, 18 nt, Human
uucaaggauccugagcca

SEQ ID NO: 3123414 - RNA, 16 nt, Human
uucaaggauccugagc

SEQ ID NO: 3123415 - RNA, 15 nt, Human
uucaaggauccugag

SEQ ID NO: 3123416 - RNA, 17 nt, Human
uucaaaauaaaaaugag

SEQ ID NO: 3123417 - RNA, 23 nt, Human
uuucccucccuuccucuuuccau

SEQ ID NO: 3123418 - RNA, 19 nt, Human
uuugaccucugcagcaaua

SEQ ID NO: 3123419 - RNA, 21 nt, Human
uuugaccucugcagcaauaaa

SEQ ID NO: 3123420 - RNA, 14 nt, Human
uuugacaaggggca

SEQ ID NO: 3123421 - RNA, 15 nt, Human
uuugauucagacagc

SEQ ID NO: 3123422 - RNA, 23 nt, Human
uuugauuaaauucuugcaaagua

SEQ ID NO: 3123423 - RNA, 15 nt, Human
uuugauccaagcugg

SEQ ID NO: 3123424 - RNA, 14 nt, Human
uuugauccaagcug

SEQ ID NO: 3123425 - RNA, 13 nt, Human
uuugagacagagu

SEQ ID NO: 3123426 - RNA, 18 nt, Human
uuugaccucugcagcaau

SEQ ID NO: 3123427 - RNA, 22 nt, Human
uuuggauuggaugaauuccaaa

SEQ ID NO: 3123428 - RNA, 13 nt, Human
uuuggcugcugaa

SEQ ID NO: 3123429 - RNA, 12 nt, Human
uuuggcugcuga

SEQ ID NO: 3123430 - RNA, 22 nt, Human
uuugggguacccacugcucugg

SEQ ID NO: 3123431 - RNA, 21 nt, Human
uuugggguacccacugcucug

SEQ ID NO: 3123432 - RNA, 16 nt, Human
uuuguuucugaaaggg

SEQ ID NO: 3123433 - RNA, 14 nt, Human
uuuguuucugaaag

SEQ ID NO: 3123434 - RNA, 22 nt, Human
uuugugcauuaucuagauacug

SEQ ID NO: 3123435 - RNA, 15 nt, Human
uuugugauacaaugc

SEQ ID NO: 3123436 - RNA, 22 nt, Human
uuugugauacaaugcugugccc

SEQ ID NO: 3123437 - RNA, 19 nt, Human
uuugugcauuaucuagaua

SEQ ID NO: 3123438 - RNA, 14 nt, Human
uuugucuuaaaaag

SEQ ID NO: 3123439 - RNA, 13 nt, Human
uuugucuuaaaaa

SEQ ID NO: 3123440 - RNA, 16 nt, Human
uuugugauacaaugcu

SEQ ID NO: 3123441 - RNA, 23 nt, Human
uuugucuuaaaaaguggaaaaau

SEQ ID NO: 3123442 - RNA, 16 nt, Human
uuuguaauuuuuuuau

SEQ ID NO: 3123443 - RNA, 14 nt, Human
uuuguacagacaac

SEQ ID NO: 3123444 - RNA, 17 nt, Human
auguccaagaagcccag

SEQ ID NO: 3123445 - RNA, 16 nt, Human
auguccaagaagccca

SEQ ID NO: 3123446 - RNA, 12 nt, Human
auguaucaauga

SEQ ID NO: 3123447 - RNA, 14 nt, Human
augugagacugguu

SEQ ID NO: 3123448 - RNA, 13 nt, Human
augugagaccauu

SEQ ID NO: 3123449 - RNA, 15 nt, Human
uuuuaguagagacag

SEQ ID NO: 3123450 - RNA, 18 nt, Human
uuuuauggcuuuugugca

SEQ ID NO: 3123451 - RNA, 19 nt, Human
uuuuauggcuuuugugcau

SEQ ID NO: 3123452 - RNA, 12 nt, Human
uuuuauuaaauu

SEQ ID NO: 3123453 - RNA, 21 nt, Human
uuuuauggcuuuugugcauua

SEQ ID NO: 3123454 - RNA, 23 nt, Human
uuuucuacucgaguuacagacaa

SEQ ID NO: 3123455 - RNA, 17 nt, Human
auguuggccaggcuggu

SEQ ID NO: 3123456 - RNA, 16 nt, Human
auguuggccaggcugg

SEQ ID NO: 3123457 - RNA, 13 nt, Human
uuuucuguucuuu

SEQ ID NO: 3123458 - RNA, 19 nt, Human
auuaaaacacaacaucuuu

SEQ ID NO: 3123459 - RNA, 22 nt, Human
auuaaaaaucucaaauuucuaa

SEQ ID NO: 3123460 - RNA, 23 nt, Human
auuaaaaaucucaaauuucuaaa

SEQ ID NO: 3123461 - RNA, 18 nt, Human
uuuuaaaaaacugcugac

SEQ ID NO: 3123462 - RNA, 17 nt, Human
uuuuagaguugauacua

SEQ ID NO: 3123463 - RNA, 21 nt, Human
uuuuagacccuauugcugcuu

SEQ ID NO: 3123464 - RNA, 12 nt, Human
auguugaaagau

SEQ ID NO: 3123465 - RNA, 20 nt, Human
auguucuuucacccuuuucu

SEQ ID NO: 3123466 - RNA, 13 nt, Human
auguugcccaggc

SEQ ID NO: 3123467 - RNA, 18 nt, Human
auguugaaagaucaaaag

SEQ ID NO: 3123468 - RNA, 14 nt, Human
auguugcccaggca

SEQ ID NO: 3123469 - RNA, 15 nt, Human
auguugcccaggcag

SEQ ID NO: 3123470 - RNA, 20 nt, Human
auguuacauaagauaaaugu

SEQ ID NO: 3123471 - RNA, 19 nt, Human
auguuacauaagauaaaug

SEQ ID NO: 3123472 - RNA, 14 nt, Human
auuacuucugcuac

SEQ ID NO: 3123473 - RNA, 12 nt, Human
auuacuucugcu

SEQ ID NO: 3123474 - RNA, 13 nt, Human
auuacuucugcua

SEQ ID NO: 3123475 - RNA, 23 nt, Human
uuuugugcauuaucuagauacug

SEQ ID NO: 3123476 - RNA, 23 nt, Human
uuuuuauacauaaacaagaccac

SEQ ID NO: 3123477 - RNA, 16 nt, Human
uuuuguuuuugucuua

SEQ ID NO: 3123478 - RNA, 18 nt, Human
auuaaguacuauguauca

SEQ ID NO: 3123479 - RNA, 16 nt, Human
auuaaguacuauguau

SEQ ID NO: 3123480 - RNA, 19 nt, Human
auuaaguacuauguaucaa

SEQ ID NO: 3123481 - RNA, 13 nt, Human
auuaaggaagaca

SEQ ID NO: 3123482 - RNA, 22 nt, Human
auuccccaggaggccagccuug

SEQ ID NO: 3123483 - RNA, 20 nt, Human
auuccccaggaggccagccu

SEQ ID NO: 3123484 - RNA, 19 nt, Human
auuccccaggaggccagcc

SEQ ID NO: 3123485 - RNA, 18 nt, Human
auucccaagcucugcucc

SEQ ID NO: 3123486 - RNA, 19 nt, Human
auucccaagcucugcuccu

SEQ ID NO: 3123487 - RNA, 17 nt, Human
auucccaagcucugcuc

SEQ ID NO: 3123488 - RNA, 19 nt, Human
auuggcuagagguucaaag

SEQ ID NO: 3123489 - RNA, 20 nt, Human
auuggcuagagguucaaaga

SEQ ID NO: 3123490 - RNA, 22 nt, Human
auuggcuagagguucaaagaua

SEQ ID NO: 3123491 - RNA, 23 nt, Human
auuggcuagagguucaaagauau

SEQ ID NO: 3123492 - RNA, 16 nt, Human
auugcaacaggcuggg

SEQ ID NO: 3123493 - RNA, 19 nt, Human
auugcaacaggcugggcuu

SEQ ID NO: 3123494 - RNA, 12 nt, Human
auugcaccacug

SEQ ID NO: 3123495 - RNA, 17 nt, Human
auugcaacaggcugggc

SEQ ID NO: 3123496 - RNA, 18 nt, Human
auugcaacaggcugggcu

SEQ ID NO: 3123497 - RNA, 21 nt, Human
auuuggugguuucagaaaugu

SEQ ID NO: 3123498 - RNA, 21 nt, Human
auuugaggucuguucuuucca

SEQ ID NO: 3123499 - RNA, 15 nt, Human
auuugagcagggcuc

SEQ ID NO: 3123500 - RNA, 15 nt, Human
auuugaggucuguuc

SEQ ID NO: 3123501 - RNA, 17 nt, Human
auuugaggucuguucuu

SEQ ID NO: 3123502 - RNA, 18 nt, Human
auuugaggucuguucuuu

SEQ ID NO: 3123503 - RNA, 16 nt, Human
auuucccaaagcagug

SEQ ID NO: 3123504 - RNA, 14 nt, Human
auuucccaaagcag

SEQ ID NO: 3123505 - RNA, 17 nt, Human
auuuccguuaaaauacc

SEQ ID NO: 3123506 - RNA, 19 nt, Human
auuuacuucuuauacauuu

SEQ ID NO: 3123507 - RNA, 20 nt, Human
auuuacuucuuauacauuug

SEQ ID NO: 3123508 - RNA, 18 nt, Human
auuguuuucaguguacau

SEQ ID NO: 3123509 - RNA, 19 nt, Human
auuguuuucaguguacaug

SEQ ID NO: 3123510 - RNA, 17 nt, Human
auuguuuucaguguaca

SEQ ID NO: 3123511 - RNA, 17 nt, Human
auuuacuucuuauacau

SEQ ID NO: 3123512 - RNA, 22 nt, Human
auuuacaacugggggaggguga

SEQ ID NO: 3123513 - RNA, 22 nt, Human
agcauuuugcuaaaugugaaug

SEQ ID NO: 3123514 - RNA, 15 nt, Human
agcauuuugcuaaau

SEQ ID NO: 3123515 - RNA, 19 nt, Human
agcauggcugccaauggga

SEQ ID NO: 3123516 - RNA, 23 nt, Human
agcaucaggccaggcccucugcc

SEQ ID NO: 3123517 - RNA, 21 nt, Human
agcaucaggccaggcccucug

SEQ ID NO: 3123518 - RNA, 22 nt, Human
agcaucaggccaggcccucugc

SEQ ID NO: 3123519 - RNA, 16 nt, Human
agcauauucaggaagc

SEQ ID NO: 3123520 - RNA, 13 nt, Human
agcauggcugcca

SEQ ID NO: 3123521 - RNA, 15 nt, Human
ugaucacggcucacu

SEQ ID NO: 3123522 - RNA, 13 nt, Human
ugaucacggcuca

SEQ ID NO: 3123523 - RNA, 14 nt, Human
ugaucacggcucac

SEQ ID NO: 3123524 - RNA, 19 nt, Human
agcauauucaggaagcuca

SEQ ID NO: 3123525 - RNA, 17 nt, Human
agcauauucaggaagcu

SEQ ID NO: 3123526 - RNA, 21 nt, Human
agcauauucaggaagcucagg

SEQ ID NO: 3123527 - RNA, 16 nt, Human
ugauccucccaccuca

SEQ ID NO: 3123528 - RNA, 13 nt, Human
ugaucuaggaaga

SEQ ID NO: 3123529 - RNA, 19 nt, Human
ugauccucccaccucagcc

SEQ ID NO: 3123530 - RNA, 20 nt, Human
ugauccucccaccucagccu

SEQ ID NO: 3123531 - RNA, 18 nt, Human
ugauccucccaccucagc

SEQ ID NO: 3123532 - RNA, 20 nt, Human
ugauuaaccacuucagcuga

SEQ ID NO: 3123533 - RNA, 17 nt, Human
ugauuaaauucuugcaa

SEQ ID NO: 3123534 - RNA, 13 nt, Human
ugauuaaauucuu

SEQ ID NO: 3123535 - RNA, 16 nt, Human
ugauuaaauucuugca

SEQ ID NO: 3123536 - RNA, 16 nt, Human
agccacggccaggcca

SEQ ID NO: 3123537 - RNA, 19 nt, Human
ugauguuuuccaugagucc

SEQ ID NO: 3123538 - RNA, 18 nt, Human
ugauguuuuaaggaugcu

SEQ ID NO: 3123539 - RNA, 17 nt, Human
ugauguuuuccaugagu

SEQ ID NO: 3123540 - RNA, 21 nt, Human
ugauguuuuaaggaugcuugu

SEQ ID NO: 3123541 - RNA, 22 nt, Human
ugauggggcccugccuccuuug

SEQ ID NO: 3123542 - RNA, 21 nt, Human
ugaugggcaacccccagccug

SEQ ID NO: 3123543 - RNA, 22 nt, Human
ugaugggcaacccccagccugc

SEQ ID NO: 3123544 - RNA, 13 nt, Human
ugauggggcccug

SEQ ID NO: 3123545 - RNA, 21 nt, Human
ugaugaucuuugcagacaggc

SEQ ID NO: 3123546 - RNA, 19 nt, Human
ugaugaucuuugcagacag

SEQ ID NO: 3123547 - RNA, 20 nt, Human
ugaugaucuuugcagacagg

SEQ ID NO: 3123548 - RNA, 23 nt, Human
ugaugaaaugaggucagagccug

SEQ ID NO: 3123549 - RNA, 14 nt, Human
ugaucuaggaagac

SEQ ID NO: 3123550 - RNA, 22 nt, Human
ugaugaaaugaggucagagccu

SEQ ID NO: 3123551 - RNA, 13 nt, Human
agcaggacaugga

SEQ ID NO: 3123552 - RNA, 11 nt, Human
agcagccacau

SEQ ID NO: 3123553 - RNA, 16 nt, Human
agcagcagggagggcu

SEQ ID NO: 3123554 - RNA, 17 nt, Human
ugacccaugcugcccug

SEQ ID NO: 3123555 - RNA, 19 nt, Human
ugacccaugcugcccugug

SEQ ID NO: 3123556 - RNA, 18 nt, Human
ugacccaugcugcccugu

SEQ ID NO: 3123557 - RNA, 20 nt, Human
ugacccaugcugcccuguga

SEQ ID NO: 3123558 - RNA, 13 nt, Human
agcagggaaacag

SEQ ID NO: 3123559 - RNA, 14 nt, Human
agcagggaaacagc

SEQ ID NO: 3123560 - RNA, 15 nt, Human
agcagggaaacagcu

SEQ ID NO: 3123561 - RNA, 23 nt, Human
agcaggcucucaggccagcugcu

SEQ ID NO: 3123562 - RNA, 22 nt, Human
agcaggcucucaggccagcugc

SEQ ID NO: 3123563 - RNA, 21 nt, Human
agcaggcucucaggccagcug

SEQ ID NO: 3123564 - RNA, 19 nt, Human
agcaggcucucaggccagc

SEQ ID NO: 3123565 - RNA, 18 nt, Human
agcaggcucucaggccag

SEQ ID NO: 3123566 - RNA, 17 nt, Human
agcaggcucucaggcca

SEQ ID NO: 3123567 - RNA, 16 nt, Human
agcaggcucucaggcc

SEQ ID NO: 3123568 - RNA, 15 nt, Human
agcaggcucucaggc

SEQ ID NO: 3123569 - RNA, 14 nt, Human
agcaggcucucagg

SEQ ID NO: 3123570 - RNA, 13 nt, Human
agcaggcucucag

SEQ ID NO: 3123571 - RNA, 17 nt, Human
agcaggcucgggcuccc

SEQ ID NO: 3123572 - RNA, 13 nt, Human
agcagggcucagc

SEQ ID NO: 3123573 - RNA, 14 nt, Human
agcagggcucagcg

SEQ ID NO: 3123574 - RNA, 15 nt, Human
agcagggcucagcgg

SEQ ID NO: 3123575 - RNA, 20 nt, Human
agcagggagggcuucugcca

SEQ ID NO: 3123576 - RNA, 22 nt, Human
agcagggcucagcggggacagc

SEQ ID NO: 3123577 - RNA, 19 nt, Human
agcauaaaaauuagccaag

SEQ ID NO: 3123578 - RNA, 16 nt, Human
ugaguacguugugcau

SEQ ID NO: 3123579 - RNA, 17 nt, Human
ugaguacguugugcauu

SEQ ID NO: 3123580 - RNA, 18 nt, Human
ugaguacguugugcauuu

SEQ ID NO: 3123581 - RNA, 19 nt, Human
ugaguacguugugcauuug

SEQ ID NO: 3123582 - RNA, 23 nt, Human
agcauaaaaauuagccaagugug

SEQ ID NO: 3123583 - RNA, 18 nt, Human
ugagucaccaagcccagu

SEQ ID NO: 3123584 - RNA, 20 nt, Human
ugaguacguugugcauuugg

SEQ ID NO: 3123585 - RNA, 14 nt, Human
ugagugagcaugcc

SEQ ID NO: 3123586 - RNA, 14 nt, Human
ugagugccuuacac

SEQ ID NO: 3123587 - RNA, 13 nt, Human
ugagugccuuaca

SEQ ID NO: 3123588 - RNA, 17 nt, Human
ugagugcagcucuggag

SEQ ID NO: 3123589 - RNA, 21 nt, Human
ugagugggggaucacagccuc

SEQ ID NO: 3123590 - RNA, 18 nt, Human
ugaguucauacccuguua

SEQ ID NO: 3123591 - RNA, 14 nt, Human
ugauacaaugcugu

SEQ ID NO: 3123592 - RNA, 15 nt, Human
ugauacaaugcugug

SEQ ID NO: 3123593 - RNA, 18 nt, Human
ugcaaaccaucauugaaa

SEQ ID NO: 3123594 - RNA, 21 nt, Human
ugcaaaggguaucaggugcug

SEQ ID NO: 3123595 - RNA, 20 nt, Human
ugcaaaguaucccuacugua

SEQ ID NO: 3123596 - RNA, 17 nt, Human
agccacggccaggccag

SEQ ID NO: 3123597 - RNA, 18 nt, Human
agccacggccaggccaga

SEQ ID NO: 3123598 - RNA, 13 nt, Human
ugcaaaccaucau

SEQ ID NO: 3123599 - RNA, 12 nt, Human
ugcaaaccauca

SEQ ID NO: 3123600 - RNA, 12 nt, Human
agcccaggccuc

SEQ ID NO: 3123601 - RNA, 15 nt, Human
ugcaaggucauuuuu

SEQ ID NO: 3123602 - RNA, 13 nt, Human
ugcaacaggcugg

SEQ ID NO: 3123603 - RNA, 22 nt, Human
agccccuggaugcagccucaca

SEQ ID NO: 3123604 - RNA, 19 nt, Human
agcccaggccuccuacagc

SEQ ID NO: 3123605 - RNA, 14 nt, Human
agcccaggccuccu

SEQ ID NO: 3123606 - RNA, 14 nt, Human
agccccgaggccuu

SEQ ID NO: 3123607 - RNA, 14 nt, Human
agccccuucugacc

SEQ ID NO: 3123608 - RNA, 16 nt, Human
agccccuucugaccca

SEQ ID NO: 3123609 - RNA, 15 nt, Human
agccccuucugaccc

SEQ ID NO: 3123610 - RNA, 15 nt, Human
agcccgggcucugcc

SEQ ID NO: 3123611 - RNA, 14 nt, Human
agcccgggcucugc

SEQ ID NO: 3123612 - RNA, 13 nt, Human
agcccgggcucug

SEQ ID NO: 3123613 - RNA, 19 nt, Human
agccccuucugacccaugc

SEQ ID NO: 3123614 - RNA, 19 nt, Human
agcccugcagagggcacag

SEQ ID NO: 3123615 - RNA, 16 nt, Human
agcccugcagagggca

SEQ ID NO: 3123616 - RNA, 15 nt, Human
agcccugcagagggc

SEQ ID NO: 3123617 - RNA, 14 nt, Human
agcccugcagaggg

SEQ ID NO: 3123618 - RNA, 16 nt, Human
agcccgggcucugccu

SEQ ID NO: 3123619 - RNA, 15 nt, Human
ugcaccggcuggccu

SEQ ID NO: 3123620 - RNA, 14 nt, Human
ugcaccggcuggcc

SEQ ID NO: 3123621 - RNA, 16 nt, Human
ugcaccggcuggccug

SEQ ID NO: 3123622 - RNA, 14 nt, Human
ugcacuccagccug

SEQ ID NO: 3123623 - RNA, 16 nt, Human
ugcacuccagccuggg

SEQ ID NO: 3123624 - RNA, 15 nt, Human
ugcacuccagccugg

SEQ ID NO: 3123625 - RNA, 15 nt, Human
ugcaccacugcacuc

SEQ ID NO: 3123626 - RNA, 13 nt, Human
ugcaccagcccuu

SEQ ID NO: 3123627 - RNA, 21 nt, Human
ugcaccacugcacuccagccu

SEQ ID NO: 3123628 - RNA, 13 nt, Human
agccuccugcccu

SEQ ID NO: 3123629 - RNA, 18 nt, Human
agccuccugcccuuaccu

SEQ ID NO: 3123630 - RNA, 14 nt, Human
agccuccugcccuu

SEQ ID NO: 3123631 - RNA, 12 nt, Human
ugcagacaggca

SEQ ID NO: 3123632 - RNA, 13 nt, Human
ugcagacaggcaa

SEQ ID NO: 3123633 - RNA, 21 nt, Human
ugcagacaggcaagcaccucc

SEQ ID NO: 3123634 - RNA, 18 nt, Human
ugcagccucacaguccuu

SEQ ID NO: 3123635 - RNA, 21 nt, Human
ugcagccucacaguccuuacc

SEQ ID NO: 3123636 - RNA, 17 nt, Human
ugcagccucacaguccu

SEQ ID NO: 3123637 - RNA, 17 nt, Human
ugcaucguuucaucuuc

SEQ ID NO: 3123638 - RNA, 18 nt, Human
ugcaugcugucccuuacg

SEQ ID NO: 3123639 - RNA, 21 nt, Human
ugcaugcugucccuuacguga

SEQ ID NO: 3123640 - RNA, 19 nt, Human
ugcaugcugucccuuacgu

SEQ ID NO: 3123641 - RNA, 16 nt, Human
ugcauaccacuuuugu

SEQ ID NO: 3123642 - RNA, 18 nt, Human
ugcauaccacuuuuguuc

SEQ ID NO: 3123643 - RNA, 20 nt, Human
ugcauaccacuuuuguucuu

SEQ ID NO: 3123644 - RNA, 14 nt, Human
ugcauaccacuuuu

SEQ ID NO: 3123645 - RNA, 14 nt, Human
ugccaaugggagcu

SEQ ID NO: 3123646 - RNA, 13 nt, Human
ugccaauggacua

SEQ ID NO: 3123647 - RNA, 16 nt, Human
ugcauuuaaaagauac

SEQ ID NO: 3123648 - RNA, 22 nt, Human
ugccagccgagauagccaaggc

SEQ ID NO: 3123649 - RNA, 17 nt, Human
ugccagccgagauagcc

SEQ ID NO: 3123650 - RNA, 17 nt, Human
agccugugccucuggga

SEQ ID NO: 3123651 - RNA, 18 nt, Human
agccugugccucugggac

SEQ ID NO: 3123652 - RNA, 19 nt, Human
agccuugaccauucuccac

SEQ ID NO: 3123653 - RNA, 18 nt, Human
agccuugaccauucucca

SEQ ID NO: 3123654 - RNA, 21 nt, Human
agccuugaccauucuccaccu

SEQ ID NO: 3123655 - RNA, 19 nt, Human
agccuugcggaagguucua

SEQ ID NO: 3123656 - RNA, 23 nt, Human
agccuugaacuuugaccucugca

SEQ ID NO: 3123657 - RNA, 20 nt, Human
agccuuagaagucacacagu

SEQ ID NO: 3123658 - RNA, 14 nt, Human
ugcgguccacccag

SEQ ID NO: 3123659 - RNA, 15 nt, Human
ugcgguccacccagg

SEQ ID NO: 3123660 - RNA, 20 nt, Human
agcuuaaaggggcuagagug

SEQ ID NO: 3123661 - RNA, 11 nt, Human
ugcuacacacu

SEQ ID NO: 3123662 - RNA, 19 nt, Human
agcuugaccgugaggccag

SEQ ID NO: 3123663 - RNA, 22 nt, Human
agcuugaccgugaggccagaga

SEQ ID NO: 3123664 - RNA, 20 nt, Human
agcuugaccgugaggccaga

SEQ ID NO: 3123665 - RNA, 22 nt, Human
agcuugaggguugggcuggugu

SEQ ID NO: 3123666 - RNA, 23 nt, Human
agcuugaccgugaggccagagac

SEQ ID NO: 3123667 - RNA, 14 nt, Human
aggaaaagcugcug

SEQ ID NO: 3123668 - RNA, 15 nt, Human
aggaagcucagggcc

SEQ ID NO: 3123669 - RNA, 12 nt, Human
aggaagcucagg

SEQ ID NO: 3123670 - RNA, 14 nt, Human
aggaagcucagggc

SEQ ID NO: 3123671 - RNA, 13 nt, Human
aggaagcucaggg

SEQ ID NO: 3123672 - RNA, 23 nt, Human
aggaaaggcuccaggagcagcca

SEQ ID NO: 3123673 - RNA, 14 nt, Human
ugcucugcugacag

SEQ ID NO: 3123674 - RNA, 15 nt, Human
ugcucugcugacaga

SEQ ID NO: 3123675 - RNA, 20 nt, Human
ugcuccagcuguucagcugg

SEQ ID NO: 3123676 - RNA, 21 nt, Human
ugcuccagcuguucagcuggu

SEQ ID NO: 3123677 - RNA, 13 nt, Human
ugcuaucuccccc

SEQ ID NO: 3123678 - RNA, 17 nt, Human
ugcuaucucccccagcc

SEQ ID NO: 3123679 - RNA, 14 nt, Human
ugcuaucuccccca

SEQ ID NO: 3123680 - RNA, 16 nt, Human
agcucuguccugggag

SEQ ID NO: 3123681 - RNA, 21 nt, Human
agcucuguccugggagugagc

SEQ ID NO: 3123682 - RNA, 14 nt, Human
agcugccagccgag

SEQ ID NO: 3123683 - RNA, 20 nt, Human
agcugccagccgagauagcc

SEQ ID NO: 3123684 - RNA, 18 nt, Human
ugcccuuaccugccagga

SEQ ID NO: 3123685 - RNA, 12 nt, Human
ugccucagccuc

SEQ ID NO: 3123686 - RNA, 13 nt, Human
ugccucagccucc

SEQ ID NO: 3123687 - RNA, 12 nt, Human
ugccgcagcccu

SEQ ID NO: 3123688 - RNA, 16 nt, Human
agcuccuucuguccua

SEQ ID NO: 3123689 - RNA, 21 nt, Human
agcuccuucuguccuacucug

SEQ ID NO: 3123690 - RNA, 16 nt, Human
agcucucuccucccuu

SEQ ID NO: 3123691 - RNA, 14 nt, Human
agcucuguccuggg

SEQ ID NO: 3123692 - RNA, 17 nt, Human
agcucugguccauagag

SEQ ID NO: 3123693 - RNA, 12 nt, Human
agcucuggucca

SEQ ID NO: 3123694 - RNA, 13 nt, Human
agcucccaggcau

SEQ ID NO: 3123695 - RNA, 15 nt, Human
agcuccuucuguccu

SEQ ID NO: 3123696 - RNA, 23 nt, Human
agcucccaggcauuccccaggag

SEQ ID NO: 3123697 - RNA, 20 nt, Human
agcugggacuacaggcaccc

SEQ ID NO: 3123698 - RNA, 23 nt, Human
agcugggacuacaggcacccacc

SEQ ID NO: 3123699 - RNA, 16 nt, Human
agcugggacuacaggu

SEQ ID NO: 3123700 - RNA, 20 nt, Human
agcugggguggggaccucag

SEQ ID NO: 3123701 - RNA, 23 nt, Human
agcugggguggggaccucaggcc

SEQ ID NO: 3123702 - RNA, 22 nt, Human
agcugggguggggaccucaggc

SEQ ID NO: 3123703 - RNA, 19 nt, Human
agcugggacuacaggcacc

SEQ ID NO: 3123704 - RNA, 17 nt, Human
agcugugcucuggacag

SEQ ID NO: 3123705 - RNA, 18 nt, Human
agcugugcucuggacagg

SEQ ID NO: 3123706 - RNA, 23 nt, Human
agcugugcucuggacaggcaugu

SEQ ID NO: 3123707 - RNA, 14 nt, Human
agcuguuacugucu

SEQ ID NO: 3123708 - RNA, 18 nt, Human
agcuguuacugucuucag

SEQ ID NO: 3123709 - RNA, 21 nt, Human
ugccuuacccucauguucuua

SEQ ID NO: 3123710 - RNA, 16 nt, Human
ugccuuggggacaaga

SEQ ID NO: 3123711 - RNA, 20 nt, Human
ugccuuacccucauguucuu

SEQ ID NO: 3123712 - RNA, 17 nt, Human
ugccuguugggccagga

SEQ ID NO: 3123713 - RNA, 16 nt, Human
ugccuguugggccagg

SEQ ID NO: 3123714 - RNA, 19 nt, Human
agcuguuacugucuucagu

SEQ ID NO: 3123715 - RNA, 16 nt, Human
agcugcuugggcuuca

SEQ ID NO: 3123716 - RNA, 18 nt, Human
agcugccuguucagcucc

SEQ ID NO: 3123717 - RNA, 14 nt, Human
agcugccuguucag

SEQ ID NO: 3123718 - RNA, 16 nt, Human
agcugccuguucagcu

SEQ ID NO: 3123719 - RNA, 20 nt, Human
ugccuggauggggcugcacc

SEQ ID NO: 3123720 - RNA, 17 nt, Human
ugccuggauggggcugc

SEQ ID NO: 3123721 - RNA, 16 nt, Human
ugccuggauggggcug

SEQ ID NO: 3123722 - RNA, 14 nt, Human
ugccucagccuccc

SEQ ID NO: 3123723 - RNA, 18 nt, Human
ugccucugccucugacac

SEQ ID NO: 3123724 - RNA, 20 nt, Human
ugccucugccucugacacac

SEQ ID NO: 3123725 - RNA, 17 nt, Human
ugccucugccucugaca

SEQ ID NO: 3123726 - RNA, 20 nt, Human
ugccugcccaggccccugcc

SEQ ID NO: 3123727 - RNA, 22 nt, Human
ugccugcccaggccccugccac

SEQ ID NO: 3123728 - RNA, 23 nt, Human
ugccugcccaggccccugccacc

SEQ ID NO: 3123729 - RNA, 22 nt, Human
aggcaggucuugaacuccuggc

SEQ ID NO: 3123730 - RNA, 12 nt, Human
aggcagggucuc

SEQ ID NO: 3123731 - RNA, 15 nt, Human
aggcauaaagucagg

SEQ ID NO: 3123732 - RNA, 17 nt, Human
aggcaggugggauggau

SEQ ID NO: 3123733 - RNA, 18 nt, Human
aggcauugugggaagggg

SEQ ID NO: 3123734 - RNA, 22 nt, Human
aggcauaaagucagggguuccc

SEQ ID NO: 3123735 - RNA, 16 nt, Human
aggcaaggcugucaau

SEQ ID NO: 3123736 - RNA, 18 nt, Human
aggcaagcaccuccugcc

SEQ ID NO: 3123737 - RNA, 19 nt, Human
aggcaagcaccuccugccu

SEQ ID NO: 3123738 - RNA, 20 nt, Human
aggcaagcaccuccugccuc

SEQ ID NO: 3123739 - RNA, 17 nt, Human
aggcaagcaccuccugc

SEQ ID NO: 3123740 - RNA, 14 nt, Human
uggagaaaauggac

SEQ ID NO: 3123741 - RNA, 15 nt, Human
aggauugcuacuguc

SEQ ID NO: 3123742 - RNA, 17 nt, Human
aggauugcuacuguccu

SEQ ID NO: 3123743 - RNA, 18 nt, Human
aggauugcuacuguccua

SEQ ID NO: 3123744 - RNA, 16 nt, Human
uggcacccggccccug

SEQ ID NO: 3123745 - RNA, 18 nt, Human
uggcacccggccccugcu

SEQ ID NO: 3123746 - RNA, 19 nt, Human
uggcacccggccccugcug

SEQ ID NO: 3123747 - RNA, 20 nt, Human
uggcacccggccccugcugg

SEQ ID NO: 3123748 - RNA, 22 nt, Human
uggcagcucaccucucccuugg

SEQ ID NO: 3123749 - RNA, 21 nt, Human
uggcagcucaccucucccuug

SEQ ID NO: 3123750 - RNA, 23 nt, Human
uggcagcucaccucucccuugga

SEQ ID NO: 3123751 - RNA, 15 nt, Human
aggccagccuugacc

SEQ ID NO: 3123752 - RNA, 13 nt, Human
aggccagccuuga

SEQ ID NO: 3123753 - RNA, 13 nt, Human
aggcccagagggc

SEQ ID NO: 3123754 - RNA, 13 nt, Human
aggcccggcucca

SEQ ID NO: 3123755 - RNA, 17 nt, Human
aggcccggcuccaggcu

SEQ ID NO: 3123756 - RNA, 14 nt, Human
aggccccgcccagg

SEQ ID NO: 3123757 - RNA, 20 nt, Human
uggaugccugguggcagcug

SEQ ID NO: 3123758 - RNA, 21 nt, Human
uggaugccugguggcagcugc

SEQ ID NO: 3123759 - RNA, 23 nt, Human
uggaugccugguggcagcugcgg

SEQ ID NO: 3123760 - RNA, 23 nt, Human
uggcacaucagcacgauuucugu

SEQ ID NO: 3123761 - RNA, 21 nt, Human
uggcacaucagcacgauuucu

SEQ ID NO: 3123762 - RNA, 20 nt, Human
uggagguacgaaaagagggg

SEQ ID NO: 3123763 - RNA, 20 nt, Human
aggcauuugcugaauacaga

SEQ ID NO: 3123764 - RNA, 16 nt, Human
aggcauuugcugaaua

SEQ ID NO: 3123765 - RNA, 14 nt, Human
uggagugcagugag

SEQ ID NO: 3123766 - RNA, 17 nt, Human
aggacuuuucuuugugg

SEQ ID NO: 3123767 - RNA, 19 nt, Human
aggacuuuucuuuguggcu

SEQ ID NO: 3123768 - RNA, 22 nt, Human
aggacuuuucuuuguggcuucc

SEQ ID NO: 3123769 - RNA, 16 nt, Human
aggagccuccugcccu

SEQ ID NO: 3123770 - RNA, 17 nt, Human
aggagccccgaggccuu

SEQ ID NO: 3123771 - RNA, 13 nt, Human
aggagcagccaca

SEQ ID NO: 3123772 - RNA, 12 nt, Human
aggagcagccac

SEQ ID NO: 3123773 - RNA, 16 nt, Human
uggaagcacagcuuca

SEQ ID NO: 3123774 - RNA, 16 nt, Human
aggauucuuccucccu

SEQ ID NO: 3123775 - RNA, 22 nt, Human
aggaugcacagaguuguuacau

SEQ ID NO: 3123776 - RNA, 23 nt, Human
aggaugaucuaggaagacuuugg

SEQ ID NO: 3123777 - RNA, 22 nt, Human
aggaugaucuaggaagacuuug

SEQ ID NO: 3123778 - RNA, 17 nt, Human
aggauucuuccucccuc

SEQ ID NO: 3123779 - RNA, 19 nt, Human
aggauucuuccucccuccc

SEQ ID NO: 3123780 - RNA, 13 nt, Human
aggaucagucuga

SEQ ID NO: 3123781 - RNA, 12 nt, Human
aggaucagucug

SEQ ID NO: 3123782 - RNA, 15 nt, Human
ugcuugagcucagga

SEQ ID NO: 3123783 - RNA, 17 nt, Human
ugcuuugugauuuuugu

SEQ ID NO: 3123784 - RNA, 22 nt, Human
ugcuuugugauuuuuguaauuu

SEQ ID NO: 3123785 - RNA, 20 nt, Human
ugcuuuugucuaugggacuc

SEQ ID NO: 3123786 - RNA, 23 nt, Human
ugcuuuuuaauauugauaugcuu

SEQ ID NO: 3123787 - RNA, 18 nt, Human
ugcuuuuggucuguguga

SEQ ID NO: 3123788 - RNA, 21 nt, Human
uggaaauuuguuauaaugaau

SEQ ID NO: 3123789 - RNA, 23 nt, Human
uggaaauuuguuauaaugaauga

SEQ ID NO: 3123790 - RNA, 15 nt, Human
uggaagacagcucuu

SEQ ID NO: 3123791 - RNA, 16 nt, Human
uggaagacagcucuua

SEQ ID NO: 3123792 - RNA, 14 nt, Human
aguaauaugcacac

SEQ ID NO: 3123793 - RNA, 15 nt, Human
aguaauaugcacaca

SEQ ID NO: 3123794 - RNA, 16 nt, Human
uguagagccagggucu

SEQ ID NO: 3123795 - RNA, 18 nt, Human
uguagagccagggucuca

SEQ ID NO: 3123796 - RNA, 11 nt, Human
aguagagacag

SEQ ID NO: 3123797 - RNA, 20 nt, Human
uguaggcauaaagucagggg

SEQ ID NO: 3123798 - RNA, 17 nt, Human
uguaggcauaaagucag

SEQ ID NO: 3123799 - RNA, 17 nt, Human
aguagaagucuuagaug

SEQ ID NO: 3123800 - RNA, 21 nt, Human
aguagaagucuuagauguaua

SEQ ID NO: 3123801 - RNA, 19 nt, Human
aguagaagucuuagaugua

SEQ ID NO: 3123802 - RNA, 20 nt, Human
aguagaagucuuagauguau

SEQ ID NO: 3123803 - RNA, 14 nt, Human
aguaugguggcugg

SEQ ID NO: 3123804 - RNA, 23 nt, Human
agucacacaguauuacuucugcu

SEQ ID NO: 3123805 - RNA, 19 nt, Human
agucaccccggccaccugc

SEQ ID NO: 3123806 - RNA, 15 nt, Human
agucacacagugagu

SEQ ID NO: 3123807 - RNA, 23 nt, Human
agucacacagugagucgaggaca

SEQ ID NO: 3123808 - RNA, 15 nt, Human
aguauuacuucugcu

SEQ ID NO: 3123809 - RNA, 17 nt, Human
aguaugguggcuggguu

SEQ ID NO: 3123810 - RNA, 18 nt, Human
aguauuacuucugcuaca

SEQ ID NO: 3123811 - RNA, 15 nt, Human
aguaugguggcuggg

SEQ ID NO: 3123812 - RNA, 16 nt, Human
aguaugguggcugggu

SEQ ID NO: 3123813 - RNA, 15 nt, Human
ugucaauuacaggaa

SEQ ID NO: 3123814 - RNA, 14 nt, Human
ugucaauuacagga

SEQ ID NO: 3123815 - RNA, 17 nt, Human
ugucaauuacaggaagu

SEQ ID NO: 3123816 - RNA, 17 nt, Human
uguaucaaugaguaaca

SEQ ID NO: 3123817 - RNA, 19 nt, Human
uguauucucuccuguaccu

SEQ ID NO: 3123818 - RNA, 16 nt, Human
uguauuuuuuuacuaa

SEQ ID NO: 3123819 - RNA, 20 nt, Human
ugguuaggcauugugggaag

SEQ ID NO: 3123820 - RNA, 18 nt, Human
ugguuaggcauuguggga

SEQ ID NO: 3123821 - RNA, 14 nt, Human
ugguggcagcugcg

SEQ ID NO: 3123822 - RNA, 13 nt, Human
ugguggcagcugc

SEQ ID NO: 3123823 - RNA, 15 nt, Human
ugguggcagcugcgg

SEQ ID NO: 3123824 - RNA, 19 nt, Human
uggugucgggcaugacacg

SEQ ID NO: 3123825 - RNA, 16 nt, Human
uggugcgaucuggguu

SEQ ID NO: 3123826 - RNA, 17 nt, Human
uggugcgaucuggguuc

SEQ ID NO: 3123827 - RNA, 22 nt, Human
aggugacagagugagacucugu

SEQ ID NO: 3123828 - RNA, 13 nt, Human
aggugaccccagg

SEQ ID NO: 3123829 - RNA, 17 nt, Human
aggucuugaacuccugg

SEQ ID NO: 3123830 - RNA, 13 nt, Human
aggugacagagug

SEQ ID NO: 3123831 - RNA, 15 nt, Human
aggugacagagugag

SEQ ID NO: 3123832 - RNA, 23 nt, Human
aggugagaagcagaggaaggaga

SEQ ID NO: 3123833 - RNA, 21 nt, Human
aggugagaagcagaggaagga

SEQ ID NO: 3123834 - RNA, 16 nt, Human
aggugagaagcagagg

SEQ ID NO: 3123835 - RNA, 16 nt, Human
aggucuugaacuccug

SEQ ID NO: 3123836 - RNA, 14 nt, Human
aggucagagccugc

SEQ ID NO: 3123837 - RNA, 15 nt, Human
aggucagagccugca

SEQ ID NO: 3123838 - RNA, 17 nt, Human
aggucagagccugcagu

SEQ ID NO: 3123839 - RNA, 18 nt, Human
aggucagagccugcaguu

SEQ ID NO: 3123840 - RNA, 13 nt, Human
aggucagagccug

SEQ ID NO: 3123841 - RNA, 16 nt, Human
uggucagauuugaacu

SEQ ID NO: 3123842 - RNA, 15 nt, Human
uggucagauuugaac

SEQ ID NO: 3123843 - RNA, 15 nt, Human
ugguuuguaaauuaa

SEQ ID NO: 3123844 - RNA, 14 nt, Human
ugguuuucaaaaua

SEQ ID NO: 3123845 - RNA, 15 nt, Human
ugguuuucaaaauaa

SEQ ID NO: 3123846 - RNA, 17 nt, Human
ugguuuucaaaauaaaa

SEQ ID NO: 3123847 - RNA, 15 nt, Human
uguaaauagcucagg

SEQ ID NO: 3123848 - RNA, 16 nt, Human
uguaaauagcucaggu

SEQ ID NO: 3123849 - RNA, 12 nt, Human
aggugugcucug

SEQ ID NO: 3123850 - RNA, 14 nt, Human
agguuuaagcuguu

SEQ ID NO: 3123851 - RNA, 20 nt, Human
aggugucccugcacuugcag

SEQ ID NO: 3123852 - RNA, 19 nt, Human
agguggggucacucuggca

SEQ ID NO: 3123853 - RNA, 17 nt, Human
aggugugaaccaccaca

SEQ ID NO: 3123854 - RNA, 15 nt, Human
aggugugcucugauc

SEQ ID NO: 3123855 - RNA, 20 nt, Human
aggugugcucugaucaucca

SEQ ID NO: 3123856 - RNA, 15 nt, Human
aggugggauccucca

SEQ ID NO: 3123857 - RNA, 18 nt, Human
aggugccucaagagaagg

SEQ ID NO: 3123858 - RNA, 16 nt, Human
agguggggcagcuuga

SEQ ID NO: 3123859 - RNA, 23 nt, Human
agguggggcagcuugaggguugg

SEQ ID NO: 3123860 - RNA, 17 nt, Human
aggugggauccuccagg

SEQ ID NO: 3123861 - RNA, 16 nt, Human
aggugggauccuccag

SEQ ID NO: 3123862 - RNA, 14 nt, Human
aggugauccaccca

SEQ ID NO: 3123863 - RNA, 20 nt, Human
aggugauccacccaccucag

SEQ ID NO: 3123864 - RNA, 22 nt, Human
agggaaggauacaaaagcaugu

SEQ ID NO: 3123865 - RNA, 21 nt, Human
aggcccggcuccaggcuccuu

SEQ ID NO: 3123866 - RNA, 18 nt, Human
aggcccggcuccaggcuc

SEQ ID NO: 3123867 - RNA, 20 nt, Human
aggcccggcuccaggcuccu

SEQ ID NO: 3123868 - RNA, 14 nt, Human
ugggacuacaggca

SEQ ID NO: 3123869 - RNA, 15 nt, Human
ugggacuacaggcac

SEQ ID NO: 3123870 - RNA, 16 nt, Human
ugggacuacaggcacc

SEQ ID NO: 3123871 - RNA, 16 nt, Human
ugggagagccuuccag

SEQ ID NO: 3123872 - RNA, 18 nt, Human
ugggaggaucucuugagc

SEQ ID NO: 3123873 - RNA, 21 nt, Human
ugggagagaagagaaugcaca

SEQ ID NO: 3123874 - RNA, 19 nt, Human
ugggagagaagagaaugca

SEQ ID NO: 3123875 - RNA, 20 nt, Human
ugggacucaaugcacugaca

SEQ ID NO: 3123876 - RNA, 18 nt, Human
ugggacucaaugcacuga

SEQ ID NO: 3123877 - RNA, 22 nt, Human
ugggagaaccaaaaagaggcua

SEQ ID NO: 3123878 - RNA, 19 nt, Human
agggcucagcggggacagc

SEQ ID NO: 3123879 - RNA, 20 nt, Human
agggcucagcggggacagcu

SEQ ID NO: 3123880 - RNA, 22 nt, Human
agggcucagcggggacagcucc

SEQ ID NO: 3123881 - RNA, 23 nt, Human
agggcucagcggggacagcuccu

SEQ ID NO: 3123882 - RNA, 16 nt, Human
agggagggcuccagac

SEQ ID NO: 3123883 - RNA, 15 nt, Human
agggagggcuccaga

SEQ ID NO: 3123884 - RNA, 14 nt, Human
agggagggcuccag

SEQ ID NO: 3123885 - RNA, 20 nt, Human
ugggaggccaaggugggagg

SEQ ID NO: 3123886 - RNA, 19 nt, Human
ugggaggccaaggugggag

SEQ ID NO: 3123887 - RNA, 21 nt, Human
ugggaggaucucuugagccug

SEQ ID NO: 3123888 - RNA, 20 nt, Human
ugggaggaucucuugagccu

SEQ ID NO: 3123889 - RNA, 23 nt, Human
ugggcagaaggaagacuucaucc

SEQ ID NO: 3123890 - RNA, 12 nt, Human
ugggcagaagga

SEQ ID NO: 3123891 - RNA, 18 nt, Human
ugggccaggagccuccug

SEQ ID NO: 3123892 - RNA, 12 nt, Human
ugggcagagcag

SEQ ID NO: 3123893 - RNA, 11 nt, Human
ugggcagagca

SEQ ID NO: 3123894 - RNA, 16 nt, Human
ugggcccccaaaugga

SEQ ID NO: 3123895 - RNA, 21 nt, Human
ugggcccccaaauggaaaugg

SEQ ID NO: 3123896 - RNA, 13 nt, Human
agggagggcucca

SEQ ID NO: 3123897 - RNA, 15 nt, Human
agggagggagggcuc

SEQ ID NO: 3123898 - RNA, 13 nt, Human
aggggaaaagagg

SEQ ID NO: 3123899 - RNA, 14 nt, Human
aggggaacagacug

SEQ ID NO: 3123900 - RNA, 22 nt, Human
aggggaaaaucagccugcucca

SEQ ID NO: 3123901 - RNA, 18 nt, Human
aggggaaaaucagccugc

SEQ ID NO: 3123902 - RNA, 13 nt, Human
aggggaauguuug

SEQ ID NO: 3123903 - RNA, 17 nt, Human
ugggguacccacugcuc

SEQ ID NO: 3123904 - RNA, 18 nt, Human
ugggguacccacugcucu

SEQ ID NO: 3123905 - RNA, 19 nt, Human
ugggguacccacugcucug

SEQ ID NO: 3123906 - RNA, 15 nt, Human
ugggguaugggagag

SEQ ID NO: 3123907 - RNA, 14 nt, Human
uggggucacucugg

SEQ ID NO: 3123908 - RNA, 13 nt, Human
uggggucacucug

SEQ ID NO: 3123909 - RNA, 20 nt, Human
uggggucacucuggcagcuc

SEQ ID NO: 3123910 - RNA, 16 nt, Human
uggggucacucuggca

SEQ ID NO: 3123911 - RNA, 22 nt, Human
uggggucacucuggcagcucag

SEQ ID NO: 3123912 - RNA, 15 nt, Human
uggggaccucaggcc

SEQ ID NO: 3123913 - RNA, 14 nt, Human
uggggaccucaggc

SEQ ID NO: 3123914 - RNA, 12 nt, Human
agggcuccagac

SEQ ID NO: 3123915 - RNA, 17 nt, Human
uggggaccucaggccug

SEQ ID NO: 3123916 - RNA, 16 nt, Human
uggggaccucaggccu

SEQ ID NO: 3123917 - RNA, 12 nt, Human
uggggcccugcc

SEQ ID NO: 3123918 - RNA, 21 nt, Human
uggggccaguuggucccccuu

SEQ ID NO: 3123919 - RNA, 23 nt, Human
uggggcugcaccggcuggccugg

SEQ ID NO: 3123920 - RNA, 22 nt, Human
uggggcugcaccggcuggccug

SEQ ID NO: 3123921 - RNA, 20 nt, Human
aggggguggccucccaacuc

SEQ ID NO: 3123922 - RNA, 15 nt, Human
aggguaaggcugugg

SEQ ID NO: 3123923 - RNA, 14 nt, Human
agggucucacucug

SEQ ID NO: 3123924 - RNA, 15 nt, Human
agggucucacucugu

SEQ ID NO: 3123925 - RNA, 16 nt, Human
agggucucacucuguc

SEQ ID NO: 3123926 - RNA, 21 nt, Human
aggggaauguuugccucugcc

SEQ ID NO: 3123927 - RNA, 19 nt, Human
aggggaauguuugccucug

SEQ ID NO: 3123928 - RNA, 20 nt, Human
aggggaauguuugccucugc

SEQ ID NO: 3123929 - RNA, 21 nt, Human
uggguggcaccagcagccugg

SEQ ID NO: 3123930 - RNA, 20 nt, Human
uggguggcaccagcagccug

SEQ ID NO: 3123931 - RNA, 17 nt, Human
uggguggcaccagcagc

SEQ ID NO: 3123932 - RNA, 20 nt, Human
ugguagagugugccugaagu

SEQ ID NO: 3123933 - RNA, 16 nt, Human
aggguggugaccucug

SEQ ID NO: 3123934 - RNA, 15 nt, Human
agggugggagugggc

SEQ ID NO: 3123935 - RNA, 16 nt, Human
aguuggcuaggacccc

SEQ ID NO: 3123936 - RNA, 17 nt, Human
aguuggguggaugccug

SEQ ID NO: 3123937 - RNA, 21 nt, Human
aguuggguggaugccuggugg

SEQ ID NO: 3123938 - RNA, 18 nt, Human
aguuggucccccuuccau

SEQ ID NO: 3123939 - RNA, 23 nt, Human
aguuguuugauucagacagcugc

SEQ ID NO: 3123940 - RNA, 21 nt, Human
aguuguuugauucagacagcu

SEQ ID NO: 3123941 - RNA, 20 nt, Human
uuaaauucuugcaaaguauc

SEQ ID NO: 3123942 - RNA, 14 nt, Human
aguucugguuccua

SEQ ID NO: 3123943 - RNA, 17 nt, Human
uguuuucaguguacaug

SEQ ID NO: 3123944 - RNA, 20 nt, Human
uguuuuccaugaguccccug

SEQ ID NO: 3123945 - RNA, 22 nt, Human
uguuugauucagacagcugccu

SEQ ID NO: 3123946 - RNA, 17 nt, Human
uguuugauucagacagc

SEQ ID NO: 3123947 - RNA, 19 nt, Human
uguuuauugucaaaguggu

SEQ ID NO: 3123948 - RNA, 17 nt, Human
uguuuauugucaaagug

SEQ ID NO: 3123949 - RNA, 19 nt, Human
uguugcccaggcaggucuu

SEQ ID NO: 3123950 - RNA, 16 nt, Human
auaacuaaaagguaug

SEQ ID NO: 3123951 - RNA, 14 nt, Human
uuacaggaaguacu

SEQ ID NO: 3123952 - RNA, 20 nt, Human
uuacauaagauaaaugugcu

SEQ ID NO: 3123953 - RNA, 19 nt, Human
uuacuauggcccuggccua

SEQ ID NO: 3123954 - RNA, 18 nt, Human
uuacucagaauucucuag

SEQ ID NO: 3123955 - RNA, 23 nt, Human
uuacucagaauucucuaguuuga

SEQ ID NO: 3123956 - RNA, 11 nt, Human
uuagaaauaua

SEQ ID NO: 3123957 - RNA, 12 nt, Human
uuagaaauauaa

SEQ ID NO: 3123958 - RNA, 14 nt, Human
uuagaaauauaauu

SEQ ID NO: 3123959 - RNA, 11 nt, Human
uuagacagagu

SEQ ID NO: 3123960 - RNA, 23 nt, Human
uuaaugaaagacuguacaaagua

SEQ ID NO: 3123961 - RNA, 20 nt, Human
uuaaugaaagacuguacaaa

SEQ ID NO: 3123962 - RNA, 15 nt, Human
uuaauucuuagcuca

SEQ ID NO: 3123963 - RNA, 19 nt, Human
uuaauuuuuuugagacaga

SEQ ID NO: 3123964 - RNA, 23 nt, Human
auaaacaagaccacguuucuaaa

SEQ ID NO: 3123965 - RNA, 15 nt, Human
auaaacaagaccacg

SEQ ID NO: 3123966 - RNA, 22 nt, Human
auaaacaagaccacguuucuaa

SEQ ID NO: 3123967 - RNA, 22 nt, Human
uuaagugcugcauuuaaaagau

SEQ ID NO: 3123968 - RNA, 17 nt, Human
uuaaguacuauguauca

SEQ ID NO: 3123969 - RNA, 13 nt, Human
uuaagaggcaggg

SEQ ID NO: 3123970 - RNA, 15 nt, Human
uuaagaggcaggguc

SEQ ID NO: 3123971 - RNA, 16 nt, Human
uuaagaggcagggucu

SEQ ID NO: 3123972 - RNA, 16 nt, Human
ugugacugaauuucuu

SEQ ID NO: 3123973 - RNA, 15 nt, Human
ugugacugaauuucu

SEQ ID NO: 3123974 - RNA, 23 nt, Human
agucuuagauguauauauuuccu

SEQ ID NO: 3123975 - RNA, 14 nt, Human
agucuuuguacaga

SEQ ID NO: 3123976 - RNA, 17 nt, Human
ugugaaccaccacaccc

SEQ ID NO: 3123977 - RNA, 20 nt, Human
ugugaaccaccacacccagc

SEQ ID NO: 3123978 - RNA, 19 nt, Human
ugugaaccaccacacccag

SEQ ID NO: 3123979 - RNA, 15 nt, Human
ugugaaaggaaagag

SEQ ID NO: 3123980 - RNA, 21 nt, Human
ugugaaaggaaagagggaggu

SEQ ID NO: 3123981 - RNA, 18 nt, Human
ugugaaaggaaagaggcu

SEQ ID NO: 3123982 - RNA, 15 nt, Human
agugagucgaggaca

SEQ ID NO: 3123983 - RNA, 21 nt, Human
agugaguugauagcacagacc

SEQ ID NO: 3123984 - RNA, 21 nt, Human
agugaggcucugcccuugguu

SEQ ID NO: 3123985 - RNA, 20 nt, Human
agugaggcucugcccuuggu

SEQ ID NO: 3123986 - RNA, 19 nt, Human
agugaggcucugcccuugg

SEQ ID NO: 3123987 - RNA, 17 nt, Human
agugaggcucugcccuu

SEQ ID NO: 3123988 - RNA, 16 nt, Human
agugaggcucugcccu

SEQ ID NO: 3123989 - RNA, 14 nt, Human
agugaggcucugcc

SEQ ID NO: 3123990 - RNA, 15 nt, Human
agugaggcucugccc

SEQ ID NO: 3123991 - RNA, 21 nt, Human
ugugcugcccugcccaccugg

SEQ ID NO: 3123992 - RNA, 21 nt, Human
ugugcccccauguaagcaccc

SEQ ID NO: 3123993 - RNA, 17 nt, Human
uguggaguucaucuuga

SEQ ID NO: 3123994 - RNA, 21 nt, Human
uguggaguucaucuugaauug

SEQ ID NO: 3123995 - RNA, 12 nt, Human
ugugccaugugc

SEQ ID NO: 3123996 - RNA, 16 nt, Human
ugugccaugugccagg

SEQ ID NO: 3123997 - RNA, 20 nt, Human
ugugccagguuuuuggucug

SEQ ID NO: 3123998 - RNA, 23 nt, Human
ugugcauuuggugguuucagaaa

SEQ ID NO: 3123999 - RNA, 18 nt, Human
ugugauggggcccugccu

SEQ ID NO: 3124000 - RNA, 20 nt, Human
ugugauggggcccugccucc

SEQ ID NO: 3124001 - RNA, 19 nt, Human
ugugauggggcccugccuc

SEQ ID NO: 3124002 - RNA, 20 nt, Human
agugcugggauuacaggugu

SEQ ID NO: 3124003 - RNA, 19 nt, Human
agugcugcauuuaaaagau

SEQ ID NO: 3124004 - RNA, 16 nt, Human
agugcugcauuuaaaa

SEQ ID NO: 3124005 - RNA, 17 nt, Human
agugcugcauuuaaaag

SEQ ID NO: 3124006 - RNA, 21 nt, Human
agugcugggauuacaggugug

SEQ ID NO: 3124007 - RNA, 12 nt, Human
agugcugcauuu

SEQ ID NO: 3124008 - RNA, 13 nt, Human
agugcugcauuua

SEQ ID NO: 3124009 - RNA, 23 nt, Human
agugaguugauagcacagacccu

SEQ ID NO: 3124010 - RNA, 22 nt, Human
agugaguugauagcacagaccc

SEQ ID NO: 3124011 - RNA, 15 nt, Human
uguggucccacccca

SEQ ID NO: 3124012 - RNA, 13 nt, Human
uguggucccaccc

SEQ ID NO: 3124013 - RNA, 16 nt, Human
ugugguguuuccuggc

SEQ ID NO: 3124014 - RNA, 14 nt, Human
ugugguguuuccug

SEQ ID NO: 3124015 - RNA, 21 nt, Human
uguggguuucuaaagcugcca

SEQ ID NO: 3124016 - RNA, 23 nt, Human
uguggguuucuaaagcugccagc

SEQ ID NO: 3124017 - RNA, 16 nt, Human
ugugucucuugguccu

SEQ ID NO: 3124018 - RNA, 21 nt, Human
ugugucuugcaauggcagccu

SEQ ID NO: 3124019 - RNA, 20 nt, Human
ugugucuugcaauggcagcc

SEQ ID NO: 3124020 - RNA, 21 nt, Human
ugugucucuugguccugcugc

SEQ ID NO: 3124021 - RNA, 20 nt, Human
ugugucucuugguccugcug

SEQ ID NO: 3124022 - RNA, 17 nt, Human
ugugucucuugguccug

SEQ ID NO: 3124023 - RNA, 11 nt, Human
uguguguuuau

SEQ ID NO: 3124024 - RNA, 23 nt, Human
uguguguuuauugucaaaguggu

SEQ ID NO: 3124025 - RNA, 19 nt, Human
uguguguuuauugucaaag

SEQ ID NO: 3124026 - RNA, 16 nt, Human
aguggugcgaucuggg

SEQ ID NO: 3124027 - RNA, 17 nt, Human
aguggugcgaucugggu

SEQ ID NO: 3124028 - RNA, 21 nt, Human
agugguggugaacagaacaaa

SEQ ID NO: 3124029 - RNA, 17 nt, Human
aguggugguuuucuguu

SEQ ID NO: 3124030 - RNA, 18 nt, Human
aguggugguuuucuguuc

SEQ ID NO: 3124031 - RNA, 19 nt, Human
aguggugguuuucuguucu

SEQ ID NO: 3124032 - RNA, 20 nt, Human
aguggugguuuucuguucuu

SEQ ID NO: 3124033 - RNA, 21 nt, Human
aguggugguuuucuguucuuu

SEQ ID NO: 3124034 - RNA, 23 nt, Human
aguggugguuuucuguucuuucu

SEQ ID NO: 3124035 - RNA, 17 nt, Human
agugugguguuuccugg

SEQ ID NO: 3124036 - RNA, 19 nt, Human
agugugguguuuccuggca

SEQ ID NO: 3124037 - RNA, 16 nt, Human
agugugguguuuccug

SEQ ID NO: 3124038 - RNA, 13 nt, Human
uguugcccaggca

SEQ ID NO: 3124039 - RNA, 12 nt, Human
uguugcccaggc

SEQ ID NO: 3124040 - RNA, 15 nt, Human
uguugcccaggcagg

SEQ ID NO: 3124041 - RNA, 16 nt, Human
uguugcccaggcaggu

SEQ ID NO: 3124042 - RNA, 17 nt, Human
uguugcccaggcagguc

SEQ ID NO: 3124043 - RNA, 18 nt, Human
uguugcccaggcaggucu

SEQ ID NO: 3124044 - RNA, 16 nt, Human
uguucugggacacagu

SEQ ID NO: 3124045 - RNA, 19 nt, Human
uguuccacaaguuaaauaa

SEQ ID NO: 3124046 - RNA, 20 nt, Human
uguuccacaaguuaaauaaa

SEQ ID NO: 3124047 - RNA, 20 nt, Human
agugugucuuagugugugca

SEQ ID NO: 3124048 - RNA, 18 nt, Human
ucagaaucucaaauaacu

SEQ ID NO: 3124049 - RNA, 19 nt, Human
ucagaaucucaaauaacua

SEQ ID NO: 3124050 - RNA, 16 nt, Human
ucagagacuccugcag

SEQ ID NO: 3124051 - RNA, 21 nt, Human
ucagagacuccugcaggcagc

SEQ ID NO: 3124052 - RNA, 20 nt, Human
ucagagacuccugcaggcag

SEQ ID NO: 3124053 - RNA, 17 nt, Human
ucagagacuccugcagg

SEQ ID NO: 3124054 - RNA, 12 nt, Human
ucagagccugca

SEQ ID NO: 3124055 - RNA, 23 nt, Human
ucagagagggugggagugggccc

SEQ ID NO: 3124056 - RNA, 21 nt, Human
ucagagagggugggagugggc

SEQ ID NO: 3124057 - RNA, 16 nt, Human
ucagagagggugggag

SEQ ID NO: 3124058 - RNA, 13 nt, Human
ucagagccugcag

SEQ ID NO: 3124059 - RNA, 14 nt, Human
ucagagccugcagu

SEQ ID NO: 3124060 - RNA, 15 nt, Human
ucagagccugcaguu

SEQ ID NO: 3124061 - RNA, 18 nt, Human
ucagagccugcaguuauu

SEQ ID NO: 3124062 - RNA, 14 nt, Human
ucagaagacacuga

SEQ ID NO: 3124063 - RNA, 22 nt, Human
ucagaaguuucugccgcagccc

SEQ ID NO: 3124064 - RNA, 19 nt, Human
ucagaaguuucugccgcag

SEQ ID NO: 3124065 - RNA, 13 nt, Human
acccacugcucug

SEQ ID NO: 3124066 - RNA, 14 nt, Human
acccacugcucugg

SEQ ID NO: 3124067 - RNA, 15 nt, Human
acccacugcucuggu

SEQ ID NO: 3124068 - RNA, 11 nt, Human
acccacugcuu

SEQ ID NO: 3124069 - RNA, 10 nt, Human
acccacugcu

SEQ ID NO: 3124070 - RNA, 11 nt, Human
acccacugcuc

SEQ ID NO: 3124071 - RNA, 22 nt, Human
accauggucggaaaacaugcua

SEQ ID NO: 3124072 - RNA, 21 nt, Human
ucacucuuauugcccacgcug

SEQ ID NO: 3124073 - RNA, 23 nt, Human
ucacucuuauugcccacgcugga

SEQ ID NO: 3124074 - RNA, 16 nt, Human
accccuucgcuccugu

SEQ ID NO: 3124075 - RNA, 14 nt, Human
accccuucgcuccu

SEQ ID NO: 3124076 - RNA, 15 nt, Human
accccuucgcuccug

SEQ ID NO: 3124077 - RNA, 12 nt, Human
acccccacccaa

SEQ ID NO: 3124078 - RNA, 14 nt, Human
ucagcggggacagc

SEQ ID NO: 3124079 - RNA, 20 nt, Human
ucagcuuguaaauagcucag

SEQ ID NO: 3124080 - RNA, 24 nt, Human
acccagcgagcccugguggcagug

SEQ ID NO: 3124081 - RNA, 22 nt, Human
ucagccaagaauucuuaaauau

SEQ ID NO: 3124082 - RNA, 19 nt, Human
acccagcgagcccuggugg

SEQ ID NO: 3124083 - RNA, 23 nt, Human
acccagcgagcccugguggcagu

SEQ ID NO: 3124084 - RNA, 23 nt, Human
ucagccguguaaccauggaccca

SEQ ID NO: 3124085 - RNA, 15 nt, Human
ucaccugccccucaa

SEQ ID NO: 3124086 - RNA, 13 nt, Human
ucaccugccccuc

SEQ ID NO: 3124087 - RNA, 15 nt, Human
ucaccucucccuugg

SEQ ID NO: 3124088 - RNA, 18 nt, Human
ucacuauguugcccaggc

SEQ ID NO: 3124089 - RNA, 17 nt, Human
ucacuauguugcccagg

SEQ ID NO: 3124090 - RNA, 19 nt, Human
ucacuauguugcccaggca

SEQ ID NO: 3124091 - RNA, 21 nt, Human
accacugcacuccagccuggg

SEQ ID NO: 3124092 - RNA, 18 nt, Human
ucaccccggccaccugcg

SEQ ID NO: 3124093 - RNA, 17 nt, Human
ucaccccggccaccugc

SEQ ID NO: 3124094 - RNA, 20 nt, Human
accacugcacuccagccugg

SEQ ID NO: 3124095 - RNA, 17 nt, Human
accacugcacuccagcc

SEQ ID NO: 3124096 - RNA, 15 nt, Human
accacuuuuguucuu

SEQ ID NO: 3124097 - RNA, 16 nt, Human
accacuuuuguucuug

SEQ ID NO: 3124098 - RNA, 21 nt, Human
accacuuuuguucuugguuug

SEQ ID NO: 3124099 - RNA, 14 nt, Human
accagacaccuuga

SEQ ID NO: 3124100 - RNA, 11 nt, Human
accagacaggu

SEQ ID NO: 3124101 - RNA, 12 nt, Human
accagagcccac

SEQ ID NO: 3124102 - RNA, 14 nt, Human
accagagcccaccu

SEQ ID NO: 3124103 - RNA, 16 nt, Human
accagagcccaccuug

SEQ ID NO: 3124104 - RNA, 22 nt, Human
accacuuuuguucuugguuugu

SEQ ID NO: 3124105 - RNA, 13 nt, Human
ucaccccagcccc

SEQ ID NO: 3124106 - RNA, 20 nt, Human
ucaccccagccccaaaacuc

SEQ ID NO: 3124107 - RNA, 14 nt, Human
ucaccccagcccca

SEQ ID NO: 3124108 - RNA, 15 nt, Human
ucaccccggccaccu

SEQ ID NO: 3124109 - RNA, 12 nt, Human
ucacauaucugu

SEQ ID NO: 3124110 - RNA, 15 nt, Human
ucacauaucugucau

SEQ ID NO: 3124111 - RNA, 15 nt, Human
ucacaguucucuccu

SEQ ID NO: 3124112 - RNA, 15 nt, Human
accaauguucucucu

SEQ ID NO: 3124113 - RNA, 15 nt, Human
ucaagugaaaaagga

SEQ ID NO: 3124114 - RNA, 23 nt, Human
ucaagugaaaaaggaggaagaga

SEQ ID NO: 3124115 - RNA, 22 nt, Human
accaacauacucccaucuguga

SEQ ID NO: 3124116 - RNA, 21 nt, Human
accaacauacucccaucugug

SEQ ID NO: 3124117 - RNA, 19 nt, Human
accaacauacucccaucug

SEQ ID NO: 3124118 - RNA, 17 nt, Human
accaacauacucccauc

SEQ ID NO: 3124119 - RNA, 11 nt, Human
ucaaguauuau

SEQ ID NO: 3124120 - RNA, 15 nt, Human
ucaaguauuauaccu

SEQ ID NO: 3124121 - RNA, 23 nt, Human
ucaaguauuauaccuuuuuuaga

SEQ ID NO: 3124122 - RNA, 16 nt, Human
ucaaguauuauaccuu

SEQ ID NO: 3124123 - RNA, 21 nt, Human
ucaaguauuauaccuuuuuua

SEQ ID NO: 3124124 - RNA, 19 nt, Human
acauguccaagaagcccag

SEQ ID NO: 3124125 - RNA, 21 nt, Human
acauguccaagaagcccagga

SEQ ID NO: 3124126 - RNA, 12 nt, Human
acauucuguuaa

SEQ ID NO: 3124127 - RNA, 15 nt, Human
ucaaauuucuaaauc

SEQ ID NO: 3124128 - RNA, 16 nt, Human
ucaaauuucuaaaucu

SEQ ID NO: 3124129 - RNA, 15 nt, Human
acauucuguuaauca

SEQ ID NO: 3124130 - RNA, 14 nt, Human
ucaaauuucuaaau

SEQ ID NO: 3124131 - RNA, 17 nt, Human
ucaaauuucuaaaucuc

SEQ ID NO: 3124132 - RNA, 16 nt, Human
ucaacagguuuuccug

SEQ ID NO: 3124133 - RNA, 18 nt, Human
ucaaauaacuaaaaggua

SEQ ID NO: 3124134 - RNA, 22 nt, Human
acaugcuacacacugcauguuu

SEQ ID NO: 3124135 - RNA, 15 nt, Human
acaugaucuucuuua

SEQ ID NO: 3124136 - RNA, 17 nt, Human
acaugaucuucuuuaua

SEQ ID NO: 3124137 - RNA, 19 nt, Human
acaugagcaucaggccagg

SEQ ID NO: 3124138 - RNA, 18 nt, Human
acaugagcaucaggccag

SEQ ID NO: 3124139 - RNA, 17 nt, Human
acaugagcaucaggcca

SEQ ID NO: 3124140 - RNA, 17 nt, Human
acauacucccaucugug

SEQ ID NO: 3124141 - RNA, 14 nt, Human
acauacucugcuua

SEQ ID NO: 3124142 - RNA, 13 nt, Human
acauacuaaccag

SEQ ID NO: 3124143 - RNA, 21 nt, Human
acauacuaaccagcagaaaug

SEQ ID NO: 3124144 - RNA, 22 nt, Human
acauacuaaccagcagaaaugc

SEQ ID NO: 3124145 - RNA, 13 nt, Human
acauacucccauc

SEQ ID NO: 3124146 - RNA, 16 nt, Human
acaguuuguuaguaug

SEQ ID NO: 3124147 - RNA, 20 nt, Human
acaguuuguuaguaugaggc

SEQ ID NO: 3124148 - RNA, 20 nt, Human
acaguugaaaaacagcugag

SEQ ID NO: 3124149 - RNA, 16 nt, Human
acaguugaaaaacagc

SEQ ID NO: 3124150 - RNA, 15 nt, Human
acaguugaaaaacag

SEQ ID NO: 3124151 - RNA, 23 nt, Human
uauuuccuauauuguuuucagug

SEQ ID NO: 3124152 - RNA, 22 nt, Human
uauuucccucaccuuucccauc

SEQ ID NO: 3124153 - RNA, 13 nt, Human
acaucuugcucug

SEQ ID NO: 3124154 - RNA, 16 nt, Human
acaugaaaacacauuu

SEQ ID NO: 3124155 - RNA, 18 nt, Human
acaugaaaacacauuuuu

SEQ ID NO: 3124156 - RNA, 19 nt, Human
acaugaaaacacauuuuuc

SEQ ID NO: 3124157 - RNA, 21 nt, Human
acaucuugcucugcugacaga

SEQ ID NO: 3124158 - RNA, 17 nt, Human
acaugaaaacacauuuu

SEQ ID NO: 3124159 - RNA, 18 nt, Human
acaucuugcucugcugac

SEQ ID NO: 3124160 - RNA, 19 nt, Human
acaucuugcucugcugaca

SEQ ID NO: 3124161 - RNA, 16 nt, Human
acaucaacaucuuggu

SEQ ID NO: 3124162 - RNA, 18 nt, Human
acaucaacaucuugguca

SEQ ID NO: 3124163 - RNA, 14 nt, Human
acauauugauuucc

SEQ ID NO: 3124164 - RNA, 16 nt, Human
acauauugauuuccgu

SEQ ID NO: 3124165 - RNA, 23 nt, Human
acauauugauuuccguuaaaaua

SEQ ID NO: 3124166 - RNA, 18 nt, Human
acauauugauuuccguua

SEQ ID NO: 3124167 - RNA, 22 nt, Human
acauauugauuuccguuaaaau

SEQ ID NO: 3124168 - RNA, 19 nt, Human
uccagacccggcugcgugg

SEQ ID NO: 3124169 - RNA, 15 nt, Human
uccagacccggcugc

SEQ ID NO: 3124170 - RNA, 18 nt, Human
uccagacccggcugcgug

SEQ ID NO: 3124171 - RNA, 16 nt, Human
uccagaauuucccaaa

SEQ ID NO: 3124172 - RNA, 22 nt, Human
uccagaauuucccaaagcagug

SEQ ID NO: 3124173 - RNA, 20 nt, Human
uccagaauuucccaaagcag

SEQ ID NO: 3124174 - RNA, 14 nt, Human
uccagacccggcug

SEQ ID NO: 3124175 - RNA, 14 nt, Human
accuuuugagugcc

SEQ ID NO: 3124176 - RNA, 20 nt, Human
accuuuugagugccuuacac

SEQ ID NO: 3124177 - RNA, 17 nt, Human
accuuuugagugccuua

SEQ ID NO: 3124178 - RNA, 16 nt, Human
acgagcaggcuucuuc

SEQ ID NO: 3124179 - RNA, 17 nt, Human
acgccagauucuuuccu

SEQ ID NO: 3124180 - RNA, 19 nt, Human
acgccagauucuuuccuga

SEQ ID NO: 3124181 - RNA, 21 nt, Human
uccaggcuguaucccaugagc

SEQ ID NO: 3124182 - RNA, 19 nt, Human
accuuuuuuauacauaaac

SEQ ID NO: 3124183 - RNA, 20 nt, Human
accuuuuuuauacauaaaca

SEQ ID NO: 3124184 - RNA, 21 nt, Human
accuuuuuuauacauaaacaa

SEQ ID NO: 3124185 - RNA, 13 nt, Human
uccagccccugga

SEQ ID NO: 3124186 - RNA, 12 nt, Human
uccagccccugg

SEQ ID NO: 3124187 - RNA, 14 nt, Human
uccaggcuguaucc

SEQ ID NO: 3124188 - RNA, 17 nt, Human
uccacccaccucagccu

SEQ ID NO: 3124189 - RNA, 18 nt, Human
uccacccaccucagccuc

SEQ ID NO: 3124190 - RNA, 19 nt, Human
uccacccaccucagccucc

SEQ ID NO: 3124191 - RNA, 12 nt, Human
uccacccaggag

SEQ ID NO: 3124192 - RNA, 14 nt, Human
uccacccaggagcc

SEQ ID NO: 3124193 - RNA, 15 nt, Human
uccacccaggagccc

SEQ ID NO: 3124194 - RNA, 14 nt, Human
accuggccucugca

SEQ ID NO: 3124195 - RNA, 17 nt, Human
accuggccucugcacuc

SEQ ID NO: 3124196 - RNA, 16 nt, Human
accuggccucugcacu

SEQ ID NO: 3124197 - RNA, 20 nt, Human
accuggccucugcacucccc

SEQ ID NO: 3124198 - RNA, 18 nt, Human
accuggccucugcacucc

SEQ ID NO: 3124199 - RNA, 23 nt, Human
accuggccucugcacuccccugc

SEQ ID NO: 3124200 - RNA, 19 nt, Human
accuguuucugcagccacu

SEQ ID NO: 3124201 - RNA, 18 nt, Human
accuuagacagucccugc

SEQ ID NO: 3124202 - RNA, 20 nt, Human
accuuagacagucccugcca

SEQ ID NO: 3124203 - RNA, 19 nt, Human
accuuagacagucccugcc

SEQ ID NO: 3124204 - RNA, 21 nt, Human
uccaagcuggucccacucagu

SEQ ID NO: 3124205 - RNA, 18 nt, Human
uccaaggguacuaaggaa

SEQ ID NO: 3124206 - RNA, 16 nt, Human
uccaagcuggucccac

SEQ ID NO: 3124207 - RNA, 20 nt, Human
uccaagcuggucccacucag

SEQ ID NO: 3124208 - RNA, 14 nt, Human
accugccaggaagc

SEQ ID NO: 3124209 - RNA, 12 nt, Human
accugccaggaa

SEQ ID NO: 3124210 - RNA, 14 nt, Human
uccaacccucauca

SEQ ID NO: 3124211 - RNA, 17 nt, Human
uccaacccucaucacca

SEQ ID NO: 3124212 - RNA, 16 nt, Human
uccaacccucaucacc

SEQ ID NO: 3124213 - RNA, 23 nt, Human
uccaacccucaucaccaacgucu

SEQ ID NO: 3124214 - RNA, 12 nt, Human
ucauucuucugu

SEQ ID NO: 3124215 - RNA, 13 nt, Human
ucauugaaaucuu

SEQ ID NO: 3124216 - RNA, 12 nt, Human
ucauugaaaucu

SEQ ID NO: 3124217 - RNA, 15 nt, Human
ucauugaccugaggc

SEQ ID NO: 3124218 - RNA, 14 nt, Human
ucauugaccugagg

SEQ ID NO: 3124219 - RNA, 12 nt, Human
ucauugaccuga

SEQ ID NO: 3124220 - RNA, 22 nt, Human
ucauugaaaucuuuuugcuuug

SEQ ID NO: 3124221 - RNA, 13 nt, Human
accuccugggcua

SEQ ID NO: 3124222 - RNA, 19 nt, Human
accucggugccuuccucuu

SEQ ID NO: 3124223 - RNA, 14 nt, Human
accugauugugucu

SEQ ID NO: 3124224 - RNA, 18 nt, Human
accugauugugucucuug

SEQ ID NO: 3124225 - RNA, 17 nt, Human
accugauugugucucuu

SEQ ID NO: 3124226 - RNA, 15 nt, Human
accugauugugucuc

SEQ ID NO: 3124227 - RNA, 16 nt, Human
accugaggggccucuu

SEQ ID NO: 3124228 - RNA, 22 nt, Human
accugaggcccuucucuccagc

SEQ ID NO: 3124229 - RNA, 21 nt, Human
accugaggcccuucucuccag

SEQ ID NO: 3124230 - RNA, 20 nt, Human
accugaggcccuucucucca

SEQ ID NO: 3124231 - RNA, 16 nt, Human
accugaggcccuucuc

SEQ ID NO: 3124232 - RNA, 15 nt, Human
accugaggcccuucu

SEQ ID NO: 3124233 - RNA, 21 nt, Human
accucuugagccuugaacuuu

SEQ ID NO: 3124234 - RNA, 14 nt, Human
accugaggcccuuc

SEQ ID NO: 3124235 - RNA, 15 nt, Human
ucaggaagcucaggg

SEQ ID NO: 3124236 - RNA, 14 nt, Human
ucaggaagcucagg

SEQ ID NO: 3124237 - RNA, 13 nt, Human
ucaggaagcucag

SEQ ID NO: 3124238 - RNA, 12 nt, Human
ucaggaagcuca

SEQ ID NO: 3124239 - RNA, 23 nt, Human
accuccugccucgaacuggcugc

SEQ ID NO: 3124240 - RNA, 15 nt, Human
ucauccuaagcuauu

SEQ ID NO: 3124241 - RNA, 13 nt, Human
accuccugccucg

SEQ ID NO: 3124242 - RNA, 12 nt, Human
accuccugccuc

SEQ ID NO: 3124243 - RNA, 14 nt, Human
ucauccuucuggaa

SEQ ID NO: 3124244 - RNA, 18 nt, Human
ucauccucauacccaccc

SEQ ID NO: 3124245 - RNA, 19 nt, Human
ucauccuccucagaucuuc

SEQ ID NO: 3124246 - RNA, 13 nt, Human
ucauccuccucag

SEQ ID NO: 3124247 - RNA, 22 nt, Human
ucauccuucuggaauaaggaga

SEQ ID NO: 3124248 - RNA, 17 nt, Human
acuccagaauuucccaa

SEQ ID NO: 3124249 - RNA, 15 nt, Human
acuccagaauuuccc

SEQ ID NO: 3124250 - RNA, 15 nt, Human
acucauugaccugag

SEQ ID NO: 3124251 - RNA, 15 nt, Human
acucauucuucugua

SEQ ID NO: 3124252 - RNA, 14 nt, Human
acucauugaccuga

SEQ ID NO: 3124253 - RNA, 17 nt, Human
acuccugcaggcagcca

SEQ ID NO: 3124254 - RNA, 19 nt, Human
acuccugcaggcagccagg

SEQ ID NO: 3124255 - RNA, 18 nt, Human
acuccugcaggcagccag

SEQ ID NO: 3124256 - RNA, 23 nt, Human
acuccagaauuucccaaagcagu

SEQ ID NO: 3124257 - RNA, 12 nt, Human
acuccagccugg

SEQ ID NO: 3124258 - RNA, 13 nt, Human
acuccagccuggg

SEQ ID NO: 3124259 - RNA, 17 nt, Human
ucccuuacgugaguccu

SEQ ID NO: 3124260 - RNA, 15 nt, Human
ucccugguggcagcu

SEQ ID NO: 3124261 - RNA, 12 nt, Human
ucccugucccag

SEQ ID NO: 3124262 - RNA, 21 nt, Human
acuccugcaggcagccaggcc

SEQ ID NO: 3124263 - RNA, 12 nt, Human
ucccuuuuccuu

SEQ ID NO: 3124264 - RNA, 16 nt, Human
uccuagaaauucccca

SEQ ID NO: 3124265 - RNA, 17 nt, Human
uccggucccugucccag

SEQ ID NO: 3124266 - RNA, 14 nt, Human
ucccucuuucccuc

SEQ ID NO: 3124267 - RNA, 18 nt, Human
ucccucuuucccucccuu

SEQ ID NO: 3124268 - RNA, 20 nt, Human
ucccucuuucccucccuucc

SEQ ID NO: 3124269 - RNA, 15 nt, Human
ucccugaaggccccg

SEQ ID NO: 3124270 - RNA, 11 nt, Human
ucccugaaggc

SEQ ID NO: 3124271 - RNA, 16 nt, Human
ucccugaaggccccgc

SEQ ID NO: 3124272 - RNA, 20 nt, Human
ucccgaauagcugggacuac

SEQ ID NO: 3124273 - RNA, 18 nt, Human
ucccgaauagcugggacu

SEQ ID NO: 3124274 - RNA, 15 nt, Human
ucccgaguagcuggg

SEQ ID NO: 3124275 - RNA, 18 nt, Human
ucccgaguagcugggacu

SEQ ID NO: 3124276 - RNA, 16 nt, Human
ucccgaguagcuggga

SEQ ID NO: 3124277 - RNA, 17 nt, Human
ucccgaguagcugggac

SEQ ID NO: 3124278 - RNA, 12 nt, Human
acucaccccagc

SEQ ID NO: 3124279 - RNA, 21 nt, Human
acucacauuuauucugcucac

SEQ ID NO: 3124280 - RNA, 17 nt, Human
acuacucccccaggugg

SEQ ID NO: 3124281 - RNA, 11 nt, Human
acuacaggcac

SEQ ID NO: 3124282 - RNA, 15 nt, Human
acuacaggcacccac

SEQ ID NO: 3124283 - RNA, 17 nt, Human
acuacaguccucccauc

SEQ ID NO: 3124284 - RNA, 13 nt, Human
acuacaguuuguu

SEQ ID NO: 3124285 - RNA, 14 nt, Human
acuacaguuuguua

SEQ ID NO: 3124286 - RNA, 14 nt, Human
acuacauucuguua

SEQ ID NO: 3124287 - RNA, 15 nt, Human
acuacaguuuguuag

SEQ ID NO: 3124288 - RNA, 11 nt, Human
acuacauucug

SEQ ID NO: 3124289 - RNA, 12 nt, Human
acuacauucugu

SEQ ID NO: 3124290 - RNA, 13 nt, Human
acuacauucuguu

SEQ ID NO: 3124291 - RNA, 17 nt, Human
ucccagcugugcucugg

SEQ ID NO: 3124292 - RNA, 15 nt, Human
acuacauucuguuaa

SEQ ID NO: 3124293 - RNA, 17 nt, Human
uccccaccgcagacagg

SEQ ID NO: 3124294 - RNA, 21 nt, Human
uccccaccgcagacaggacca

SEQ ID NO: 3124295 - RNA, 18 nt, Human
uccccaccgcagacagga

SEQ ID NO: 3124296 - RNA, 22 nt, Human
ucccauaugccugggcagaagg

SEQ ID NO: 3124297 - RNA, 16 nt, Human
ucccauaugccugggc

SEQ ID NO: 3124298 - RNA, 15 nt, Human
ucccaucacccgcua

SEQ ID NO: 3124299 - RNA, 16 nt, Human
ucccaaagcagugcau

SEQ ID NO: 3124300 - RNA, 18 nt, Human
ucccaaacccuucagugc

SEQ ID NO: 3124301 - RNA, 13 nt, Human
ucccaaagugcug

SEQ ID NO: 3124302 - RNA, 14 nt, Human
ucccaaagugcugg

SEQ ID NO: 3124303 - RNA, 18 nt, Human
ucccaaagcagugcaugc

SEQ ID NO: 3124304 - RNA, 17 nt, Human
ucccaaagcagugcaug

SEQ ID NO: 3124305 - RNA, 21 nt, Human
ucccaaagcagugcaugcugu

SEQ ID NO: 3124306 - RNA, 23 nt, Human
acgccagauucuuuccugaggcu

SEQ ID NO: 3124307 - RNA, 22 nt, Human
acgccagauucuuuccugaggc

SEQ ID NO: 3124308 - RNA, 20 nt, Human
acgggaggguaaggcugugg

SEQ ID NO: 3124309 - RNA, 16 nt, Human
ucccacaaaggagagc

SEQ ID NO: 3124310 - RNA, 20 nt, Human
ucccaccccacacacgccag

SEQ ID NO: 3124311 - RNA, 15 nt, Human
ucccaccccacacac

SEQ ID NO: 3124312 - RNA, 23 nt, Human
acguggcugcuucaaggauccug

SEQ ID NO: 3124313 - RNA, 15 nt, Human
acgguuuuacugcag

SEQ ID NO: 3124314 - RNA, 14 nt, Human
acguacacauuuua

SEQ ID NO: 3124315 - RNA, 23 nt, Human
ucucacacaugagcaucaggcca

SEQ ID NO: 3124316 - RNA, 16 nt, Human
acuucagcugacuuuu

SEQ ID NO: 3124317 - RNA, 11 nt, Human
acuucagcuga

SEQ ID NO: 3124318 - RNA, 11 nt, Human
ucucacuccuu

SEQ ID NO: 3124319 - RNA, 22 nt, Human
acuucgggaggucgaggcagga

SEQ ID NO: 3124320 - RNA, 13 nt, Human
ucucacuccuuga

SEQ ID NO: 3124321 - RNA, 12 nt, Human
ucucacucuguc

SEQ ID NO: 3124322 - RNA, 14 nt, Human
acuucuccacccug

SEQ ID NO: 3124323 - RNA, 19 nt, Human
acuugagaauuacccuuuu

SEQ ID NO: 3124324 - RNA, 19 nt, Human
acuugagcccagagugaac

SEQ ID NO: 3124325 - RNA, 15 nt, Human
acuucuccacccugc

SEQ ID NO: 3124326 - RNA, 16 nt, Human
acuucuccacccugcu

SEQ ID NO: 3124327 - RNA, 17 nt, Human
acuuguggacacagcuc

SEQ ID NO: 3124328 - RNA, 18 nt, Human
acuuguggacacagcucu

SEQ ID NO: 3124329 - RNA, 16 nt, Human
acuuguggacacagcu

SEQ ID NO: 3124330 - RNA, 21 nt, Human
ucuccuccuuuucacaguucu

SEQ ID NO: 3124331 - RNA, 14 nt, Human
acuuugaccucugc

SEQ ID NO: 3124332 - RNA, 17 nt, Human
acuuucuagccagagga

SEQ ID NO: 3124333 - RNA, 16 nt, Human
acuuucuagccagagg

SEQ ID NO: 3124334 - RNA, 16 nt, Human
ucuccauguuugaugu

SEQ ID NO: 3124335 - RNA, 11 nt, Human
ucuccaggcug

SEQ ID NO: 3124336 - RNA, 17 nt, Human
ucuccaaaauaaaacuu

SEQ ID NO: 3124337 - RNA, 19 nt, Human
ucuccaaaauaaaacuuuu

SEQ ID NO: 3124338 - RNA, 22 nt, Human
ucuccaaaauaaaacuuuuuaa

SEQ ID NO: 3124339 - RNA, 13 nt, Human
ucuccaaaauaaa

SEQ ID NO: 3124340 - RNA, 16 nt, Human
ucuccaggcuguaucc

SEQ ID NO: 3124341 - RNA, 13 nt, Human
ucucagggccugg

SEQ ID NO: 3124342 - RNA, 12 nt, Human
ucucagggccug

SEQ ID NO: 3124343 - RNA, 15 nt, Human
acuuguggacacagc

SEQ ID NO: 3124344 - RNA, 19 nt, Human
ucucagggccuggucguuu

SEQ ID NO: 3124345 - RNA, 15 nt, Human
ucucagggccugguc

SEQ ID NO: 3124346 - RNA, 14 nt, Human
ucucagggccuggu

SEQ ID NO: 3124347 - RNA, 17 nt, Human
ucugcacuccccugcug

SEQ ID NO: 3124348 - RNA, 19 nt, Human
ucugcacuccccugcuggg

SEQ ID NO: 3124349 - RNA, 18 nt, Human
ucugcacuccccugcugg

SEQ ID NO: 3124350 - RNA, 23 nt, Human
ucugagacucgcgacaaugcaaa

SEQ ID NO: 3124351 - RNA, 22 nt, Human
ucugagacucgcgacaaugcaa

SEQ ID NO: 3124352 - RNA, 18 nt, Human
ucugcagcaauaaagcag

SEQ ID NO: 3124353 - RNA, 20 nt, Human
ucugcacuccccugcugggu

SEQ ID NO: 3124354 - RNA, 14 nt, Human
agaaauauaauuga

SEQ ID NO: 3124355 - RNA, 19 nt, Human
agaaauaucugaaaaugua

SEQ ID NO: 3124356 - RNA, 20 nt, Human
agaaauaucugaaaauguau

SEQ ID NO: 3124357 - RNA, 21 nt, Human
ucugaacuuggcgcugccccu

SEQ ID NO: 3124358 - RNA, 13 nt, Human
agaaaaagaaaaa

SEQ ID NO: 3124359 - RNA, 20 nt, Human
ucucuuuaaugucacaggca

SEQ ID NO: 3124360 - RNA, 21 nt, Human
ucucuuuaaugucacaggcag

SEQ ID NO: 3124361 - RNA, 18 nt, Human
ucucuugagccugggagg

SEQ ID NO: 3124362 - RNA, 16 nt, Human
ucucuugauucauaau

SEQ ID NO: 3124363 - RNA, 14 nt, Human
ucucuugauucaua

SEQ ID NO: 3124364 - RNA, 17 nt, Human
ucucuugagccugggag

SEQ ID NO: 3124365 - RNA, 17 nt, Human
agaaaaaggaugcacag

SEQ ID NO: 3124366 - RNA, 19 nt, Human
ucucuccagccccuggaug

SEQ ID NO: 3124367 - RNA, 18 nt, Human
ucucuccagccccuggau

SEQ ID NO: 3124368 - RNA, 16 nt, Human
ucucuccagccccugg

SEQ ID NO: 3124369 - RNA, 17 nt, Human
ucucuccagccccugga

SEQ ID NO: 3124370 - RNA, 21 nt, Human
ucucucaggccaaacucaccu

SEQ ID NO: 3124371 - RNA, 15 nt, Human
ucucucacuccuuga

SEQ ID NO: 3124372 - RNA, 13 nt, Human
ucucucacuccuu

SEQ ID NO: 3124373 - RNA, 18 nt, Human
acuuugaccucugcagca

SEQ ID NO: 3124374 - RNA, 15 nt, Human
acuuugaccucugca

SEQ ID NO: 3124375 - RNA, 16 nt, Human
acuuugaccucugcag

SEQ ID NO: 3124376 - RNA, 16 nt, Human
ucucuccuguaccucu

SEQ ID NO: 3124377 - RNA, 14 nt, Human
ucucuccuguaccu

SEQ ID NO: 3124378 - RNA, 17 nt, Human
ucucugcccuccaagac

SEQ ID NO: 3124379 - RNA, 16 nt, Human
ucucugcccuccaaga

SEQ ID NO: 3124380 - RNA, 15 nt, Human
ucucugcccuccaag

SEQ ID NO: 3124381 - RNA, 11 nt, Human
ucucugcccuc

SEQ ID NO: 3124382 - RNA, 19 nt, Human
ucgcgacaaugcaaaccau

SEQ ID NO: 3124383 - RNA, 14 nt, Human
ucgcgacaaugcaa

SEQ ID NO: 3124384 - RNA, 16 nt, Human
ucgcgacaaugcaaac

SEQ ID NO: 3124385 - RNA, 15 nt, Human
ucgagcaugccugga

SEQ ID NO: 3124386 - RNA, 18 nt, Human
ucgagcaugccuggaugg

SEQ ID NO: 3124387 - RNA, 16 nt, Human
ucgagcaugccuggau

SEQ ID NO: 3124388 - RNA, 22 nt, Human
uccuuuagcgcccaguugggug

SEQ ID NO: 3124389 - RNA, 15 nt, Human
uccuuuagcgcccag

SEQ ID NO: 3124390 - RNA, 19 nt, Human
uccuuuagcgcccaguugg

SEQ ID NO: 3124391 - RNA, 14 nt, Human
uccuuguguuacua

SEQ ID NO: 3124392 - RNA, 23 nt, Human
uccuuguguuacuaaguuuuuau

SEQ ID NO: 3124393 - RNA, 22 nt, Human
uccuuggugucgggcaugacac

SEQ ID NO: 3124394 - RNA, 17 nt, Human
uccuucagugccuuaug

SEQ ID NO: 3124395 - RNA, 16 nt, Human
uccuucagugccuuau

SEQ ID NO: 3124396 - RNA, 15 nt, Human
uccuucagugccuua

SEQ ID NO: 3124397 - RNA, 14 nt, Human
uccuucagugccuu

SEQ ID NO: 3124398 - RNA, 22 nt, Human
acugcaucaagaugugacaugu

SEQ ID NO: 3124399 - RNA, 20 nt, Human
acugcaucaagaugugacau

SEQ ID NO: 3124400 - RNA, 15 nt, Human
acugcauguuuguga

SEQ ID NO: 3124401 - RNA, 16 nt, Human
acugcauguuugugau

SEQ ID NO: 3124402 - RNA, 22 nt, Human
uccuagaaauuccccacccuga

SEQ ID NO: 3124403 - RNA, 21 nt, Human
uccuagaaauuccccacccug

SEQ ID NO: 3124404 - RNA, 16 nt, Human
acugcauaugaaagga

SEQ ID NO: 3124405 - RNA, 20 nt, Human
acugcuuaacuucacauauu

SEQ ID NO: 3124406 - RNA, 21 nt, Human
acugcuugugaaaggaaagag

SEQ ID NO: 3124407 - RNA, 15 nt, Human
acuggauuaaacuua

SEQ ID NO: 3124408 - RNA, 18 nt, Human
acugcuuaacuucacaua

SEQ ID NO: 3124409 - RNA, 13 nt, Human
acuuaaucuaaau

SEQ ID NO: 3124410 - RNA, 15 nt, Human
acuuaaucuaaaugg

SEQ ID NO: 3124411 - RNA, 16 nt, Human
acuuaaucuaaaugga

SEQ ID NO: 3124412 - RNA, 17 nt, Human
acuguugcccaggcugg

SEQ ID NO: 3124413 - RNA, 18 nt, Human
acuguugcccaggcuggc

SEQ ID NO: 3124414 - RNA, 12 nt, Human
acuguugcccag

SEQ ID NO: 3124415 - RNA, 13 nt, Human
acuguugcccagg

SEQ ID NO: 3124416 - RNA, 14 nt, Human
acuguugcccaggc

SEQ ID NO: 3124417 - RNA, 17 nt, Human
acuuaaauaaugugaaa

SEQ ID NO: 3124418 - RNA, 18 nt, Human
acuuaaauaaugugaaac

SEQ ID NO: 3124419 - RNA, 16 nt, Human
acuuaaauaaugugaa

SEQ ID NO: 3124420 - RNA, 15 nt, Human
acuuaaauaauguga

SEQ ID NO: 3124421 - RNA, 15 nt, Human
ucuaaagcugccagc

SEQ ID NO: 3124422 - RNA, 14 nt, Human
ucuaaagcugccag

SEQ ID NO: 3124423 - RNA, 13 nt, Human
ucuaaagcugcca

SEQ ID NO: 3124424 - RNA, 19 nt, Human
acuguucucugcccuccaa

SEQ ID NO: 3124425 - RNA, 21 nt, Human
acuguucucugcccuccaaga

SEQ ID NO: 3124426 - RNA, 20 nt, Human
acuguucucugcccuccaag

SEQ ID NO: 3124427 - RNA, 14 nt, Human
acuguucucugccc

SEQ ID NO: 3124428 - RNA, 17 nt, Human
ucgggaggucgaggcag

SEQ ID NO: 3124429 - RNA, 21 nt, Human
ucgggaggucgaggcaggagg

SEQ ID NO: 3124430 - RNA, 19 nt, Human
ucgggaggucgaggcagga

SEQ ID NO: 3124431 - RNA, 12 nt, Human
ucgggcaugaca

SEQ ID NO: 3124432 - RNA, 11 nt, Human
ucgggcaugac

SEQ ID NO: 3124433 - RNA, 22 nt, Human
acugugcugagucugaaggcug

SEQ ID NO: 3124434 - RNA, 18 nt, Human
acuguccuacccacccuc

SEQ ID NO: 3124435 - RNA, 17 nt, Human
acuguccuacccacccu

SEQ ID NO: 3124436 - RNA, 24 nt, Human
agaggcagccccauucugccugcc

SEQ ID NO: 3124437 - RNA, 13 nt, Human
agaggcagcccca

SEQ ID NO: 3124438 - RNA, 19 nt, Human
agaggcagccccauucugc

SEQ ID NO: 3124439 - RNA, 10 nt, Human
agaggcaggg

SEQ ID NO: 3124440 - RNA, 13 nt, Human
agaggcagggucu

SEQ ID NO: 3124441 - RNA, 17 nt, Human
agaggcuaugugagcac

SEQ ID NO: 3124442 - RNA, 19 nt, Human
agaggccaugggccuccug

SEQ ID NO: 3124443 - RNA, 19 nt, Human
ugaacuuugaccucugcag

SEQ ID NO: 3124444 - RNA, 20 nt, Human
ugaacuuugaccucugcagc

SEQ ID NO: 3124445 - RNA, 17 nt, Human
ugaacuuugaccucugc

SEQ ID NO: 3124446 - RNA, 22 nt, Human
ugaacuuugaccucugcagcaa

SEQ ID NO: 3124447 - RNA, 22 nt, Human
ugaaccgaugagaaauaaaguu

SEQ ID NO: 3124448 - RNA, 15 nt, Human
ugaaauuuuuauuaa

SEQ ID NO: 3124449 - RNA, 14 nt, Human
ugaacuccuggccu

SEQ ID NO: 3124450 - RNA, 15 nt, Human
ugaacuccuggccuc

SEQ ID NO: 3124451 - RNA, 11 nt, Human
ugaacuccugg

SEQ ID NO: 3124452 - RNA, 12 nt, Human
ugaacuccuggc

SEQ ID NO: 3124453 - RNA, 16 nt, Human
agagauugugguuuca

SEQ ID NO: 3124454 - RNA, 16 nt, Human
ucuuuggacccugagg

SEQ ID NO: 3124455 - RNA, 21 nt, Human
ucuuuggacccugaggcccag

SEQ ID NO: 3124456 - RNA, 17 nt, Human
ucuuuggacccugaggc

SEQ ID NO: 3124457 - RNA, 12 nt, Human
agagcagagacc

SEQ ID NO: 3124458 - RNA, 20 nt, Human
agagcagagaccaucccuga

SEQ ID NO: 3124459 - RNA, 18 nt, Human
agagcagagaccaucccu

SEQ ID NO: 3124460 - RNA, 17 nt, Human
agagcagagaccauccc

SEQ ID NO: 3124461 - RNA, 11 nt, Human
agagccuugcg

SEQ ID NO: 3124462 - RNA, 21 nt, Human
agagccuugcggaagguucua

SEQ ID NO: 3124463 - RNA, 18 nt, Human
agagcugccaccugccug

SEQ ID NO: 3124464 - RNA, 19 nt, Human
ugaaugucagugugacuga

SEQ ID NO: 3124465 - RNA, 20 nt, Human
ugaaugguuuucaaaauaaa

SEQ ID NO: 3124466 - RNA, 22 nt, Human
agagucagaaguuucugccgca

SEQ ID NO: 3124467 - RNA, 17 nt, Human
agaguugauacuacagu

SEQ ID NO: 3124468 - RNA, 20 nt, Human
agaguugauacuacaguuug

SEQ ID NO: 3124469 - RNA, 22 nt, Human
agaguugauacuacaguuuguu

SEQ ID NO: 3124470 - RNA, 22 nt, Human
agagucucacuguugcccaggc

SEQ ID NO: 3124471 - RNA, 21 nt, Human
agaguuguuacauuuuuaagu

SEQ ID NO: 3124472 - RNA, 12 nt, Human
agaguuguuaca

SEQ ID NO: 3124473 - RNA, 20 nt, Human
ugacacacagcucuguccug

SEQ ID NO: 3124474 - RNA, 15 nt, Human
ugaauuucuuuugcc

SEQ ID NO: 3124475 - RNA, 17 nt, Human
agaucacgccacugcac

SEQ ID NO: 3124476 - RNA, 18 nt, Human
agaucacgccacugcacu

SEQ ID NO: 3124477 - RNA, 14 nt, Human
agaucacgccacug

SEQ ID NO: 3124478 - RNA, 15 nt, Human
agaucacgccacugc

SEQ ID NO: 3124479 - RNA, 16 nt, Human
agaucacgccacugca

SEQ ID NO: 3124480 - RNA, 12 nt, Human
agauaaaugugc

SEQ ID NO: 3124481 - RNA, 14 nt, Human
agaugcaccagccc

SEQ ID NO: 3124482 - RNA, 15 nt, Human
agaugcaccagcccu

SEQ ID NO: 3124483 - RNA, 12 nt, Human
ugacccacugcu

SEQ ID NO: 3124484 - RNA, 13 nt, Human
ugacccacugcuu

SEQ ID NO: 3124485 - RNA, 23 nt, Human
ugaccauucuccaccugccaggg

SEQ ID NO: 3124486 - RNA, 15 nt, Human
agaugcuucucacug

SEQ ID NO: 3124487 - RNA, 15 nt, Human
agaucagccugggca

SEQ ID NO: 3124488 - RNA, 13 nt, Human
agaucagccuggg

SEQ ID NO: 3124489 - RNA, 18 nt, Human
ugaccaaugauggucacc

SEQ ID NO: 3124490 - RNA, 20 nt, Human
ugacauuguuggccaaagcc

SEQ ID NO: 3124491 - RNA, 21 nt, Human
ugacauuguuggccaaagcca

SEQ ID NO: 3124492 - RNA, 20 nt, Human
ugacaggcaaugcuggcugu

SEQ ID NO: 3124493 - RNA, 21 nt, Human
ugacacacagcucuguccugg

SEQ ID NO: 3124494 - RNA, 11 nt, Human
ugacagggcac

SEQ ID NO: 3124495 - RNA, 16 nt, Human
ugacagggcacaccgg

SEQ ID NO: 3124496 - RNA, 20 nt, Human
ugacagggcacaccgggcac

SEQ ID NO: 3124497 - RNA, 23 nt, Human
agacuccugcaggcagccaggcc

SEQ ID NO: 3124498 - RNA, 19 nt, Human
agacucgcgacaaugcaaa

SEQ ID NO: 3124499 - RNA, 18 nt, Human
agacucgcgacaaugcaa

SEQ ID NO: 3124500 - RNA, 17 nt, Human
agacucgcgacaaugca

SEQ ID NO: 3124501 - RNA, 15 nt, Human
agacucgcgacaaug

SEQ ID NO: 3124502 - RNA, 13 nt, Human
ucuuucugcuuug

SEQ ID NO: 3124503 - RNA, 20 nt, Human
ucuuuauaauucuacuuuga

SEQ ID NO: 3124504 - RNA, 18 nt, Human
ucuuucuggcuaugcauu

SEQ ID NO: 3124505 - RNA, 16 nt, Human
ucuugguuuguaaauu

SEQ ID NO: 3124506 - RNA, 20 nt, Human
ucuuuaaugucacaggcagg

SEQ ID NO: 3124507 - RNA, 19 nt, Human
ucuuuaaugucacaggcag

SEQ ID NO: 3124508 - RNA, 22 nt, Human
ucuuuaaugucacaggcagguc

SEQ ID NO: 3124509 - RNA, 14 nt, Human
ucuugguuuguaaa

SEQ ID NO: 3124510 - RNA, 22 nt, Human
agagaaaaaauauuuuccugcc

SEQ ID NO: 3124511 - RNA, 19 nt, Human
agacuuuucuuucagccaa

SEQ ID NO: 3124512 - RNA, 20 nt, Human
agacucgcgacaaugcaaac

SEQ ID NO: 3124513 - RNA, 14 nt, Human
agacuguacaaagu

SEQ ID NO: 3124514 - RNA, 15 nt, Human
agacuguacaaagua

SEQ ID NO: 3124515 - RNA, 16 nt, Human
agacuguacaaaguag

SEQ ID NO: 3124516 - RNA, 18 nt, Human
ucuugagccuugaacuuu

SEQ ID NO: 3124517 - RNA, 19 nt, Human
ucuugagccuugaacuuug

SEQ ID NO: 3124518 - RNA, 17 nt, Human
ucuugagccuugaacuu

SEQ ID NO: 3124519 - RNA, 16 nt, Human
ucuugagccuugaacu

SEQ ID NO: 3124520 - RNA, 14 nt, Human
agacccggcugcgu

SEQ ID NO: 3124521 - RNA, 22 nt, Human
ucuucugcuucagccucccgag

SEQ ID NO: 3124522 - RNA, 19 nt, Human
ucuucugcuucagccuccc

SEQ ID NO: 3124523 - RNA, 21 nt, Human
ucuucuguacgucugacaggc

SEQ ID NO: 3124524 - RNA, 22 nt, Human
ucuucuguacgucugacaggca

SEQ ID NO: 3124525 - RNA, 17 nt, Human
ucuuauuuaaugaaaga

SEQ ID NO: 3124526 - RNA, 20 nt, Human
ucuucuguacgucugacagg

SEQ ID NO: 3124527 - RNA, 23 nt, Human
agacauacuaaccagcagaaaug

SEQ ID NO: 3124528 - RNA, 19 nt, Human
agacagucccugccaaugg

SEQ ID NO: 3124529 - RNA, 13 nt, Human
agacagucccugc

SEQ ID NO: 3124530 - RNA, 16 nt, Human
agacagcugccuggga

SEQ ID NO: 3124531 - RNA, 15 nt, Human
agacagcugccuggg

SEQ ID NO: 3124532 - RNA, 12 nt, Human
agacagucccug

SEQ ID NO: 3124533 - RNA, 18 nt, Human
ucuuaugggcuggguucu

SEQ ID NO: 3124534 - RNA, 12 nt, Human
ucuuagauguau

SEQ ID NO: 3124535 - RNA, 19 nt, Human
agacacaggcccggcucca

SEQ ID NO: 3124536 - RNA, 20 nt, Human
agacacaggcccggcuccag

SEQ ID NO: 3124537 - RNA, 21 nt, Human
agacacaggcccggcuccagg

SEQ ID NO: 3124538 - RNA, 22 nt, Human
agacacaggcccggcuccaggc

SEQ ID NO: 3124539 - RNA, 17 nt, Human
agacacaggcccggcuc

SEQ ID NO: 3124540 - RNA, 17 nt, Human
agaauucucuuauccaa

SEQ ID NO: 3124541 - RNA, 18 nt, Human
agaauucucuaguuugau

SEQ ID NO: 3124542 - RNA, 19 nt, Human
agaauucucuaguuugauu

SEQ ID NO: 3124543 - RNA, 14 nt, Human
agacacaagccuuc

SEQ ID NO: 3124544 - RNA, 13 nt, Human
agacacaagccuu

SEQ ID NO: 3124545 - RNA, 20 nt, Human
agacacauguccaagaagcc

SEQ ID NO: 3124546 - RNA, 22 nt, Human
agacaccuugacagggcacacc

SEQ ID NO: 3124547 - RNA, 19 nt, Human
agacaccuugacagggcac

SEQ ID NO: 3124548 - RNA, 24 nt, Human
agacacauguccaagaagcccagg

SEQ ID NO: 3124549 - RNA, 23 nt, Human
agacacaggcccggcuccaggcu

SEQ ID NO: 3124550 - RNA, 16 nt, Human
agacacaggcccggcu

SEQ ID NO: 3124551 - RNA, 22 nt, Human
agacacauguccaagaagccca

SEQ ID NO: 3124552 - RNA, 21 nt, Human
agacacauguccaagaagccc

SEQ ID NO: 3124553 - RNA, 14 nt, Human
agacagcugccugg

SEQ ID NO: 3124554 - RNA, 13 nt, Human
agacagcugccug

SEQ ID NO: 3124555 - RNA, 18 nt, Human
ucuguacgucugacaggc

SEQ ID NO: 3124556 - RNA, 13 nt, Human
ucuguuuagauaa

SEQ ID NO: 3124557 - RNA, 23 nt, Human
ucuguuuagauaauacaccacua

SEQ ID NO: 3124558 - RNA, 16 nt, Human
ucuguuuagauaauac

SEQ ID NO: 3124559 - RNA, 19 nt, Human
ucuguuuagauaauacacc

SEQ ID NO: 3124560 - RNA, 20 nt, Human
agaauucucagaaucucaaa

SEQ ID NO: 3124561 - RNA, 20 nt, Human
agaauuauaauuaguuccuc

SEQ ID NO: 3124562 - RNA, 14 nt, Human
agaauucucuaguu

SEQ ID NO: 3124563 - RNA, 23 nt, Human
agaaccccaggguccuguagccc

SEQ ID NO: 3124564 - RNA, 21 nt, Human
agaauguguuuaaacuugguu

SEQ ID NO: 3124565 - RNA, 21 nt, Human
aacacuguucucugcccucca

SEQ ID NO: 3124566 - RNA, 21 nt, Human
gucauuugagcagggcucagc

SEQ ID NO: 3124567 - RNA, 22 nt, Human
gucauuugagcagggcucagcg

SEQ ID NO: 3124568 - RNA, 19 nt, Human
gucauuugagcagggcuca

SEQ ID NO: 3124569 - RNA, 14 nt, Human
aacacucugagacu

SEQ ID NO: 3124570 - RNA, 13 nt, Human
aacacucugagac

SEQ ID NO: 3124571 - RNA, 12 nt, Human
aacacucugaga

SEQ ID NO: 3124572 - RNA, 11 nt, Human
aacacucugag

SEQ ID NO: 3124573 - RNA, 12 nt, Human
aacacuccuuca

SEQ ID NO: 3124574 - RNA, 21 nt, Human
aacacucauugaccugaggcc

SEQ ID NO: 3124575 - RNA, 17 nt, Human
aacacucauugaccuga

SEQ ID NO: 3124576 - RNA, 20 nt, Human
aacacuguucucugcccucc

SEQ ID NO: 3124577 - RNA, 15 nt, Human
aacacuguucucugc

SEQ ID NO: 3124578 - RNA, 19 nt, Human
aacaagaccacguuucuaa

SEQ ID NO: 3124579 - RNA, 16 nt, Human
aacaagaccacguuuc

SEQ ID NO: 3124580 - RNA, 17 nt, Human
aacaagaccacguuucu

SEQ ID NO: 3124581 - RNA, 12 nt, Human
gucacaggcagg

SEQ ID NO: 3124582 - RNA, 16 nt, Human
gucacaggcaggucca

SEQ ID NO: 3124583 - RNA, 13 nt, Human
gucacaggcaggu

SEQ ID NO: 3124584 - RNA, 15 nt, Human
gucacaggcaggucc

SEQ ID NO: 3124585 - RNA, 23 nt, Human
aacaaggcaaggcugucaauuac

SEQ ID NO: 3124586 - RNA, 19 nt, Human
aacagguuuuccugaagaa

SEQ ID NO: 3124587 - RNA, 23 nt, Human
aacaggcugggcuucaguggcag

SEQ ID NO: 3124588 - RNA, 19 nt, Human
aacagacuggaagcacagc

SEQ ID NO: 3124589 - RNA, 22 nt, Human
aacaggcugggcuucaguggca

SEQ ID NO: 3124590 - RNA, 13 nt, Human
aacaggcugggcu

SEQ ID NO: 3124591 - RNA, 13 nt, Human
guccgagcuuuga

SEQ ID NO: 3124592 - RNA, 21 nt, Human
guccggucccugucccagugc

SEQ ID NO: 3124593 - RNA, 21 nt, Human
aacagaaauguacagcaagga

SEQ ID NO: 3124594 - RNA, 10 nt, Human
aacagaaaug

SEQ ID NO: 3124595 - RNA, 15 nt, Human
aacagaaauguacag

SEQ ID NO: 3124596 - RNA, 15 nt, Human
aacauacucccaucu

SEQ ID NO: 3124597 - RNA, 14 nt, Human
aacauacucccauc

SEQ ID NO: 3124598 - RNA, 15 nt, Human
aacguggcugcuuca

SEQ ID NO: 3124599 - RNA, 19 nt, Human
aacguggcugcuucaagga

SEQ ID NO: 3124600 - RNA, 16 nt, Human
aacguggcugcuucaa

SEQ ID NO: 3124601 - RNA, 22 nt, Human
aacguggcugcuucaaggaucc

SEQ ID NO: 3124602 - RNA, 19 nt, Human
gugaaccaccacacccagc

SEQ ID NO: 3124603 - RNA, 15 nt, Human
gucuuagauguauau

SEQ ID NO: 3124604 - RNA, 24 nt, Human
gucuuuucuugcaugaggcuagug

SEQ ID NO: 3124605 - RNA, 19 nt, Human
gucuuuucuugcaugaggc

SEQ ID NO: 3124606 - RNA, 14 nt, Human
gucuuuucuugcau

SEQ ID NO: 3124607 - RNA, 17 nt, Human
gucuuuggacccugagg

SEQ ID NO: 3124608 - RNA, 15 nt, Human
gucuuuggacccuga

SEQ ID NO: 3124609 - RNA, 14 nt, Human
gucuuuggacccug

SEQ ID NO: 3124610 - RNA, 13 nt, Human
gucuccauguuug

SEQ ID NO: 3124611 - RNA, 16 nt, Human
aacauuuugucauaua

SEQ ID NO: 3124612 - RNA, 20 nt, Human
aaccacaucuugcucugcug

SEQ ID NO: 3124613 - RNA, 22 nt, Human
aaccacaucuugcucugcugac

SEQ ID NO: 3124614 - RNA, 20 nt, Human
aaccaucauugaaaucuuuu

SEQ ID NO: 3124615 - RNA, 19 nt, Human
aaccaucauugaaaucuuu

SEQ ID NO: 3124616 - RNA, 21 nt, Human
aaccaucauugaaaucuuuuu

SEQ ID NO: 3124617 - RNA, 18 nt, Human
aaccacaucuugcucugc

SEQ ID NO: 3124618 - RNA, 17 nt, Human
aacccagcucuggucca

SEQ ID NO: 3124619 - RNA, 11 nt, Human
aacccagcucu

SEQ ID NO: 3124620 - RNA, 14 nt, Human
aacccagcucuggu

SEQ ID NO: 3124621 - RNA, 13 nt, Human
aacccagcucugg

SEQ ID NO: 3124622 - RNA, 23 nt, Human
aaccauuuugcugucccuuuucc

SEQ ID NO: 3124623 - RNA, 17 nt, Human
aaccuccgccucuuggg

SEQ ID NO: 3124624 - RNA, 14 nt, Human
aaccuccugggcua

SEQ ID NO: 3124625 - RNA, 13 nt, Human
aacccccagccug

SEQ ID NO: 3124626 - RNA, 14 nt, Human
aacccccagccugc

SEQ ID NO: 3124627 - RNA, 15 nt, Human
aacccccagccugcu

SEQ ID NO: 3124628 - RNA, 15 nt, Human
guaucccuacuguaa

SEQ ID NO: 3124629 - RNA, 22 nt, Human
guaugaucacggcucacugcag

SEQ ID NO: 3124630 - RNA, 21 nt, Human
guaucccaugagccucagcau

SEQ ID NO: 3124631 - RNA, 14 nt, Human
guaugggagagaag

SEQ ID NO: 3124632 - RNA, 15 nt, Human
guauucuuauuuaau

SEQ ID NO: 3124633 - RNA, 21 nt, Human
guauucucuccuguaccucuu

SEQ ID NO: 3124634 - RNA, 15 nt, Human
guaugggagagaaga

SEQ ID NO: 3124635 - RNA, 17 nt, Human
aaaugggggugcauuug

SEQ ID NO: 3124636 - RNA, 18 nt, Human
aaaugggggugcauuuga

SEQ ID NO: 3124637 - RNA, 15 nt, Human
aaaugggggugcauu

SEQ ID NO: 3124638 - RNA, 16 nt, Human
aaaugggggugcauuu

SEQ ID NO: 3124639 - RNA, 19 nt, Human
aaauuaacuuuuauaaacu

SEQ ID NO: 3124640 - RNA, 21 nt, Human
aaauuaacuuuuauaaacuuu

SEQ ID NO: 3124641 - RNA, 22 nt, Human
aaauuaacuuuuauaaacuuua

SEQ ID NO: 3124642 - RNA, 23 nt, Human
aaauuaacuuuuauaaacuuuac

SEQ ID NO: 3124643 - RNA, 22 nt, Human
guauuggcuagagguucaaaga

SEQ ID NO: 3124644 - RNA, 16 nt, Human
aaauuccccacccuga

SEQ ID NO: 3124645 - RNA, 14 nt, Human
aaauucaugcugcu

SEQ ID NO: 3124646 - RNA, 16 nt, Human
gucacacacuuuggcu

SEQ ID NO: 3124647 - RNA, 20 nt, Human
gucacacaguauuacuucug

SEQ ID NO: 3124648 - RNA, 17 nt, Human
guauuuuuuuacuaaua

SEQ ID NO: 3124649 - RNA, 21 nt, Human
guauuuuuuuacuaauagaca

SEQ ID NO: 3124650 - RNA, 18 nt, Human
gucaaaguggugagaggc

SEQ ID NO: 3124651 - RNA, 19 nt, Human
gucaaaguggugagaggca

SEQ ID NO: 3124652 - RNA, 14 nt, Human
guauuuuuuuacua

SEQ ID NO: 3124653 - RNA, 15 nt, Human
guauuuuuuuacuaa

SEQ ID NO: 3124654 - RNA, 13 nt, Human
aaaucgaugcagu

SEQ ID NO: 3124655 - RNA, 18 nt, Human
aaaucccuuaccucggug

SEQ ID NO: 3124656 - RNA, 15 nt, Human
aaaucccauuuaaaa

SEQ ID NO: 3124657 - RNA, 15 nt, Human
aaaucucaaauuucu

SEQ ID NO: 3124658 - RNA, 16 nt, Human
aaaucucaaauuucua

SEQ ID NO: 3124659 - RNA, 17 nt, Human
aaaucucaaauuucuaa

SEQ ID NO: 3124660 - RNA, 17 nt, Human
aaaugaaaaucgugaca

SEQ ID NO: 3124661 - RNA, 22 nt, Human
guagcucuaggagggcuggcaa

SEQ ID NO: 3124662 - RNA, 12 nt, Human
guagcugggacu

SEQ ID NO: 3124663 - RNA, 18 nt, Human
guagcugggacuacaggc

SEQ ID NO: 3124664 - RNA, 19 nt, Human
guagcugggacuacaggca

SEQ ID NO: 3124665 - RNA, 21 nt, Human
guagcugggacuacaggcacc

SEQ ID NO: 3124666 - RNA, 18 nt, Human
guaggaagguuaauguuc

SEQ ID NO: 3124667 - RNA, 15 nt, Human
guaggaagacuuugg

SEQ ID NO: 3124668 - RNA, 17 nt, Human
aaaugaggucagagccu

SEQ ID NO: 3124669 - RNA, 19 nt, Human
aaaugaggucagagccugc

SEQ ID NO: 3124670 - RNA, 16 nt, Human
aaaugagguacucucc

SEQ ID NO: 3124671 - RNA, 23 nt, Human
aaaugagguacucuccuggaaau

SEQ ID NO: 3124672 - RNA, 19 nt, Human
aaaugagccuggcaagaau

SEQ ID NO: 3124673 - RNA, 13 nt, Human
aaaugagccuggc

SEQ ID NO: 3124674 - RNA, 15 nt, Human
aaaugggcagagcag

SEQ ID NO: 3124675 - RNA, 20 nt, Human
aaaugggcagagcagagacc

SEQ ID NO: 3124676 - RNA, 18 nt, Human
aaaugggcagagcagaga

SEQ ID NO: 3124677 - RNA, 15 nt, Human
aaaugcccagccccu

SEQ ID NO: 3124678 - RNA, 14 nt, Human
aaaugcccagcccc

SEQ ID NO: 3124679 - RNA, 18 nt, Human
aaaugcccagccccuucu

SEQ ID NO: 3124680 - RNA, 13 nt, Human
aaaugcccagcuu

SEQ ID NO: 3124681 - RNA, 13 nt, Human
aaaugcccagccc

SEQ ID NO: 3124682 - RNA, 14 nt, Human
aaaugcaccuggaa

SEQ ID NO: 3124683 - RNA, 18 nt, Human
aaaugcaccuggaauaua

SEQ ID NO: 3124684 - RNA, 22 nt, Human
aaaugcaccuggaauauauaac

SEQ ID NO: 3124685 - RNA, 16 nt, Human
guggcagcucaccucu

SEQ ID NO: 3124686 - RNA, 14 nt, Human
guggcagcucaccu

SEQ ID NO: 3124687 - RNA, 19 nt, Human
guggcaccagcagccugga

SEQ ID NO: 3124688 - RNA, 18 nt, Human
guggauuuaacagaaaug

SEQ ID NO: 3124689 - RNA, 19 nt, Human
guggauuuaacagaaaugu

SEQ ID NO: 3124690 - RNA, 18 nt, Human
guggcaccagcagccugg

SEQ ID NO: 3124691 - RNA, 16 nt, Human
aagaauugaagcagga

SEQ ID NO: 3124692 - RNA, 21 nt, Human
guggaugccugguggcagcug

SEQ ID NO: 3124693 - RNA, 18 nt, Human
guggacacagcucuucuc

SEQ ID NO: 3124694 - RNA, 22 nt, Human
guggacacagcucuucuccagg

SEQ ID NO: 3124695 - RNA, 23 nt, Human
guggacacagcucuucuccaggc

SEQ ID NO: 3124696 - RNA, 17 nt, Human
guggacacagcucuucu

SEQ ID NO: 3124697 - RNA, 21 nt, Human
gugcugggauuacaagcguga

SEQ ID NO: 3124698 - RNA, 22 nt, Human
gugcugggauuacaagcgugag

SEQ ID NO: 3124699 - RNA, 20 nt, Human
gugcugggauuacaggugug

SEQ ID NO: 3124700 - RNA, 22 nt, Human
gugcuaucucccccagccccau

SEQ ID NO: 3124701 - RNA, 19 nt, Human
gugcuaucucccccagccc

SEQ ID NO: 3124702 - RNA, 12 nt, Human
gugcuauguucu

SEQ ID NO: 3124703 - RNA, 18 nt, Human
gugcuaggaacacuccuu

SEQ ID NO: 3124704 - RNA, 17 nt, Human
gugcuaggaacacuccu

SEQ ID NO: 3124705 - RNA, 22 nt, Human
gugcuaggaacacuccuucaca

SEQ ID NO: 3124706 - RNA, 21 nt, Human
gugcuaucucccccagcccca

SEQ ID NO: 3124707 - RNA, 15 nt, Human
aagaaaaaggaugca

SEQ ID NO: 3124708 - RNA, 17 nt, Human
aagaaaaaggaugcaca

SEQ ID NO: 3124709 - RNA, 18 nt, Human
aagaaaaagaaaaagaaa

SEQ ID NO: 3124710 - RNA, 18 nt, Human
aagaaaaaggaugcacag

SEQ ID NO: 3124711 - RNA, 20 nt, Human
aagaaagacuaucuaaaugu

SEQ ID NO: 3124712 - RNA, 22 nt, Human
aagaaagacuaucuaaauguug

SEQ ID NO: 3124713 - RNA, 15 nt, Human
gugccucaagagaag

SEQ ID NO: 3124714 - RNA, 21 nt, Human
gugaaccaccacacccagccc

SEQ ID NO: 3124715 - RNA, 22 nt, Human
gugccgagaaggaagccuccca

SEQ ID NO: 3124716 - RNA, 12 nt, Human
gugccucuggga

SEQ ID NO: 3124717 - RNA, 13 nt, Human
gugccucugggac

SEQ ID NO: 3124718 - RNA, 14 nt, Human
gugccuuauggaac

SEQ ID NO: 3124719 - RNA, 23 nt, Human
gugccuuauggaacacucugaga

SEQ ID NO: 3124720 - RNA, 21 nt, Human
gugccuuauggaacacucuga

SEQ ID NO: 3124721 - RNA, 13 nt, Human
aacuuuaccuuuu

SEQ ID NO: 3124722 - RNA, 17 nt, Human
aacuuggcgcugccccu

SEQ ID NO: 3124723 - RNA, 11 nt, Human
gugccuuaugg

SEQ ID NO: 3124724 - RNA, 18 nt, Human
aacuugucuuuggacccu

SEQ ID NO: 3124725 - RNA, 22 nt, Human
aagacccuuguggucccacccc

SEQ ID NO: 3124726 - RNA, 21 nt, Human
aagacccuuguggucccaccc

SEQ ID NO: 3124727 - RNA, 18 nt, Human
aagacccuugugguccca

SEQ ID NO: 3124728 - RNA, 16 nt, Human
aagacuaucuaaaugu

SEQ ID NO: 3124729 - RNA, 17 nt, Human
aagacuaucuaaauguu

SEQ ID NO: 3124730 - RNA, 18 nt, Human
aagacuaucuaaauguug

SEQ ID NO: 3124731 - RNA, 17 nt, Human
aagacugaguacguugu

SEQ ID NO: 3124732 - RNA, 17 nt, Human
aagacuguacaaaguag

SEQ ID NO: 3124733 - RNA, 21 nt, Human
aagacugaguacguugugcau

SEQ ID NO: 3124734 - RNA, 16 nt, Human
aagacuguacaaagua

SEQ ID NO: 3124735 - RNA, 14 nt, Human
guggguacgggagg

SEQ ID NO: 3124736 - RNA, 20 nt, Human
gugggggaucacagccucug

SEQ ID NO: 3124737 - RNA, 16 nt, Human
gugguuucagaaaugu

SEQ ID NO: 3124738 - RNA, 14 nt, Human
guggugguuuucug

SEQ ID NO: 3124739 - RNA, 23 nt, Human
guggcgcagcauauucaggaagc

SEQ ID NO: 3124740 - RNA, 22 nt, Human
guggcgcagcauauucaggaag

SEQ ID NO: 3124741 - RNA, 22 nt, Human
gugggacacccugugauggggc

SEQ ID NO: 3124742 - RNA, 23 nt, Human
gugggaggaucucuugagccugg

SEQ ID NO: 3124743 - RNA, 14 nt, Human
gugggagugggccc

SEQ ID NO: 3124744 - RNA, 13 nt, Human
gugggagugggcc

SEQ ID NO: 3124745 - RNA, 18 nt, Human
aagaugugacauguuuua

SEQ ID NO: 3124746 - RNA, 14 nt, Human
aagaugugacaugu

SEQ ID NO: 3124747 - RNA, 13 nt, Human
aagcaaaggagau

SEQ ID NO: 3124748 - RNA, 12 nt, Human
aagcaaaggaga

SEQ ID NO: 3124749 - RNA, 12 nt, Human
aagaugcagccg

SEQ ID NO: 3124750 - RNA, 18 nt, Human
aagagguuuuaaaaaaau

SEQ ID NO: 3124751 - RNA, 17 nt, Human
gugguuuucuguucuuu

SEQ ID NO: 3124752 - RNA, 18 nt, Human
gugucuuuuuucacuaca

SEQ ID NO: 3124753 - RNA, 17 nt, Human
gugugacuacuccccca

SEQ ID NO: 3124754 - RNA, 17 nt, Human
gugucuugcaauggcag

SEQ ID NO: 3124755 - RNA, 18 nt, Human
gugucuugcaauggcagc

SEQ ID NO: 3124756 - RNA, 23 nt, Human
guguuuccuggcacugcuuccag

SEQ ID NO: 3124757 - RNA, 20 nt, Human
guuaguaugaggcauuuguu

SEQ ID NO: 3124758 - RNA, 17 nt, Human
guuaguaugaggcauuu

SEQ ID NO: 3124759 - RNA, 18 nt, Human
guuaaugauagcuacugu

SEQ ID NO: 3124760 - RNA, 18 nt, Human
guuaaucauuagguguga

SEQ ID NO: 3124761 - RNA, 17 nt, Human
aagcuaggccuggccag

SEQ ID NO: 3124762 - RNA, 18 nt, Human
aagcuaggccuggccaga

SEQ ID NO: 3124763 - RNA, 16 nt, Human
aagcuaggccuggcca

SEQ ID NO: 3124764 - RNA, 19 nt, Human
aagccuccuccagccgcca

SEQ ID NO: 3124765 - RNA, 15 nt, Human
guucagcuccagcuc

SEQ ID NO: 3124766 - RNA, 18 nt, Human
guucagcuccagcucacc

SEQ ID NO: 3124767 - RNA, 16 nt, Human
guucagcuccagcuca

SEQ ID NO: 3124768 - RNA, 17 nt, Human
guucagcuccagcucac

SEQ ID NO: 3124769 - RNA, 17 nt, Human
guucaggguuggccccu

SEQ ID NO: 3124770 - RNA, 18 nt, Human
guucaggguuggccccug

SEQ ID NO: 3124771 - RNA, 19 nt, Human
guucaggguuggccccugc

SEQ ID NO: 3124772 - RNA, 21 nt, Human
guucuugguuuguaaauuaac

SEQ ID NO: 3124773 - RNA, 17 nt, Human
guucuuaguuugcaguu

SEQ ID NO: 3124774 - RNA, 22 nt, Human
guugaugaucuuugcagacagg

SEQ ID NO: 3124775 - RNA, 23 nt, Human
guucugggacacaguucaauucu

SEQ ID NO: 3124776 - RNA, 16 nt, Human
guucuacccaggugcu

SEQ ID NO: 3124777 - RNA, 21 nt, Human
guucccuuugacgccauccca

SEQ ID NO: 3124778 - RNA, 20 nt, Human
guucccuuugacgccauccc

SEQ ID NO: 3124779 - RNA, 20 nt, Human
guuccauggccucuucagau

SEQ ID NO: 3124780 - RNA, 16 nt, Human
guucccauuugcuccu

SEQ ID NO: 3124781 - RNA, 20 nt, Human
guucccauuugcuccuuucu

SEQ ID NO: 3124782 - RNA, 22 nt, Human
aagcuauucaguaauaacucua

SEQ ID NO: 3124783 - RNA, 13 nt, Human
aagggccuggccu

SEQ ID NO: 3124784 - RNA, 17 nt, Human
aagggccuggccugagc

SEQ ID NO: 3124785 - RNA, 14 nt, Human
aagggccuggccug

SEQ ID NO: 3124786 - RNA, 19 nt, Human
aagggccuggccugagcug

SEQ ID NO: 3124787 - RNA, 22 nt, Human
aaggggaauguuugccucugcc

SEQ ID NO: 3124788 - RNA, 23 nt, Human
aaggggaauguuugccucugccu

SEQ ID NO: 3124789 - RNA, 16 nt, Human
aaggguaucaggugcu

SEQ ID NO: 3124790 - RNA, 15 nt, Human
aaguaauaugcacac

SEQ ID NO: 3124791 - RNA, 16 nt, Human
aaguaauaugcacaca

SEQ ID NO: 3124792 - RNA, 20 nt, Human
guuucuaaagcugccagccg

SEQ ID NO: 3124793 - RNA, 19 nt, Human
guuucuaaaggcuaccuuu

SEQ ID NO: 3124794 - RNA, 12 nt, Human
aaguaauaugca

SEQ ID NO: 3124795 - RNA, 22 nt, Human
guuugauucagacagcugccug

SEQ ID NO: 3124796 - RNA, 21 nt, Human
guuugauucagacagcugccu

SEQ ID NO: 3124797 - RNA, 22 nt, Human
guuucuaaaggcuaccuuugua

SEQ ID NO: 3124798 - RNA, 23 nt, Human
guuucuaaaggcuaccuuuguau

SEQ ID NO: 3124799 - RNA, 13 nt, Human
guuugccucugcc

SEQ ID NO: 3124800 - RNA, 16 nt, Human
guuugccucugccucu

SEQ ID NO: 3124801 - RNA, 11 nt, Human
guuuucuguuc

SEQ ID NO: 3124802 - RNA, 19 nt, Human
guuuucuguucuuucuggc

SEQ ID NO: 3124803 - RNA, 17 nt, Human
aaggaugcuuguacaua

SEQ ID NO: 3124804 - RNA, 19 nt, Human
aaggaugcuuguacauaau

SEQ ID NO: 3124805 - RNA, 18 nt, Human
aaggaugcacagaguugu

SEQ ID NO: 3124806 - RNA, 19 nt, Human
aaggaugcccaaagaugca

SEQ ID NO: 3124807 - RNA, 15 nt, Human
aaggaugcuuguaca

SEQ ID NO: 3124808 - RNA, 16 nt, Human
aaggaugcuuguacau

SEQ ID NO: 3124809 - RNA, 23 nt, Human
guugaugaucuuugcagacaggc

SEQ ID NO: 3124810 - RNA, 13 nt, Human
aaggauccugagc

SEQ ID NO: 3124811 - RNA, 14 nt, Human
aaggauccugagcc

SEQ ID NO: 3124812 - RNA, 23 nt, Human
aaggaugaucuaggaagacuuug

SEQ ID NO: 3124813 - RNA, 18 nt, Human
aaggaugaucuaggaaga

SEQ ID NO: 3124814 - RNA, 17 nt, Human
aaggauccugagccaga

SEQ ID NO: 3124815 - RNA, 15 nt, Human
aaggauccugagcca

SEQ ID NO: 3124816 - RNA, 17 nt, Human
guugcccaggcaggucu

SEQ ID NO: 3124817 - RNA, 14 nt, Human
aaggcuccaggagc

SEQ ID NO: 3124818 - RNA, 18 nt, Human
guugcccaggcaggucuu

SEQ ID NO: 3124819 - RNA, 21 nt, Human
guugcccaggcuggcgugcag

SEQ ID NO: 3124820 - RNA, 15 nt, Human
guugcccaggcaggu

SEQ ID NO: 3124821 - RNA, 17 nt, Human
guugcccaggcuggcgu

SEQ ID NO: 3124822 - RNA, 18 nt, Human
aaggccaaaggaagcaca

SEQ ID NO: 3124823 - RNA, 16 nt, Human
aaggccaaaggaagca

SEQ ID NO: 3124824 - RNA, 19 nt, Human
aaggcuaccuuuguauucu

SEQ ID NO: 3124825 - RNA, 13 nt, Human
guuggguggaugc

SEQ ID NO: 3124826 - RNA, 18 nt, Human
guuggucccccuuccaug

SEQ ID NO: 3124827 - RNA, 22 nt, Human
uauaaccaguguuguggauuua

SEQ ID NO: 3124828 - RNA, 20 nt, Human
uauaaccaguguuguggauu

SEQ ID NO: 3124829 - RNA, 16 nt, Human
acacuaaccacgcugg

SEQ ID NO: 3124830 - RNA, 17 nt, Human
acacuaaccacgcugga

SEQ ID NO: 3124831 - RNA, 19 nt, Human
acacuaaccacgcuggacc

SEQ ID NO: 3124832 - RNA, 14 nt, Human
acaccuugacaggg

SEQ ID NO: 3124833 - RNA, 15 nt, Human
acaccuugacagggc

SEQ ID NO: 3124834 - RNA, 16 nt, Human
acaccuugacagggca

SEQ ID NO: 3124835 - RNA, 18 nt, Human
acaccucugcacaagcug

SEQ ID NO: 3124836 - RNA, 12 nt, Human
acacccagccca

SEQ ID NO: 3124837 - RNA, 13 nt, Human
acacccagcccac

SEQ ID NO: 3124838 - RNA, 22 nt, Human
acacauguccaagaagcccagg

SEQ ID NO: 3124839 - RNA, 21 nt, Human
acacauguccaagaagcccag

SEQ ID NO: 3124840 - RNA, 13 nt, Human
acacauguccaag

SEQ ID NO: 3124841 - RNA, 19 nt, Human
acacauguccaagaagccc

SEQ ID NO: 3124842 - RNA, 18 nt, Human
acacauguccaagaagcc

SEQ ID NO: 3124843 - RNA, 11 nt, Human
acacacagcuc

SEQ ID NO: 3124844 - RNA, 12 nt, Human
acacacagcucu

SEQ ID NO: 3124845 - RNA, 19 nt, Human
acacacagcucuguccugg

SEQ ID NO: 3124846 - RNA, 15 nt, Human
acaaugguuuucuug

SEQ ID NO: 3124847 - RNA, 21 nt, Human
acaaugguuuucuuguguguu

SEQ ID NO: 3124848 - RNA, 22 nt, Human
acacaguauuacuucugcuaca

SEQ ID NO: 3124849 - RNA, 11 nt, Human
acacagugagu

SEQ ID NO: 3124850 - RNA, 22 nt, Human
acacagcucuucuccaggcugu

SEQ ID NO: 3124851 - RNA, 21 nt, Human
uagguuggcaaaaaggcagga

SEQ ID NO: 3124852 - RNA, 13 nt, Human
uaguagagacagg

SEQ ID NO: 3124853 - RNA, 15 nt, Human
uaucucagggccugg

SEQ ID NO: 3124854 - RNA, 13 nt, Human
uaucucagggccu

SEQ ID NO: 3124855 - RNA, 19 nt, Human
uaucccuacuguaauuugu

SEQ ID NO: 3124856 - RNA, 20 nt, Human
uaucccuacuguaauuugug

SEQ ID NO: 3124857 - RNA, 16 nt, Human
acagaguuguuacauu

SEQ ID NO: 3124858 - RNA, 17 nt, Human
acagaguuguuacauuu

SEQ ID NO: 3124859 - RNA, 18 nt, Human
acagaguuguuacauuuu

SEQ ID NO: 3124860 - RNA, 19 nt, Human
acagaguuguuacauuuuu

SEQ ID NO: 3124861 - RNA, 20 nt, Human
acagaguuguuacauuuuua

SEQ ID NO: 3124862 - RNA, 18 nt, Human
acagagcuacacagggga

SEQ ID NO: 3124863 - RNA, 21 nt, Human
acagagcaagugagacccugu

SEQ ID NO: 3124864 - RNA, 23 nt, Human
acagaugggugcuuggaggaagg

SEQ ID NO: 3124865 - RNA, 20 nt, Human
acagauagauauaugcucug

SEQ ID NO: 3124866 - RNA, 21 nt, Human
acagaguuguuacauuuuuaa

SEQ ID NO: 3124867 - RNA, 22 nt, Human
acagaguuguuacauuuuuaag

SEQ ID NO: 3124868 - RNA, 15 nt, Human
acagaguuguuacau

SEQ ID NO: 3124869 - RNA, 20 nt, Human
acagcccgggcucugccucc

SEQ ID NO: 3124870 - RNA, 22 nt, Human
acagcccgggcucugccuccca

SEQ ID NO: 3124871 - RNA, 21 nt, Human
acagcccgggcucugccuccc

SEQ ID NO: 3124872 - RNA, 23 nt, Human
acagcccgggcucugccucccau

SEQ ID NO: 3124873 - RNA, 23 nt, Human
acacuguuucaaacuuuacuaug

SEQ ID NO: 3124874 - RNA, 15 nt, Human
acacuguuucaaacu

SEQ ID NO: 3124875 - RNA, 18 nt, Human
acagaaaauucuucucca

SEQ ID NO: 3124876 - RNA, 21 nt, Human
acagacuggaagcacagcuuc

SEQ ID NO: 3124877 - RNA, 17 nt, Human
acagacuggaagcacag

SEQ ID NO: 3124878 - RNA, 19 nt, Human
acagacuggaagcacagcu

SEQ ID NO: 3124879 - RNA, 18 nt, Human
acagacacaggcccggcu

SEQ ID NO: 3124880 - RNA, 22 nt, Human
acagacacaggcccggcuccag

SEQ ID NO: 3124881 - RNA, 17 nt, Human
acagacacaggcccggc

SEQ ID NO: 3124882 - RNA, 15 nt, Human
acagacacaggcccg

SEQ ID NO: 3124883 - RNA, 15 nt, Human
acacuguucucugcc

SEQ ID NO: 3124884 - RNA, 14 nt, Human
acacuguucucugc

SEQ ID NO: 3124885 - RNA, 20 nt, Human
acacuguucucugcccucca

SEQ ID NO: 3124886 - RNA, 18 nt, Human
acacuguucucugcccuc

SEQ ID NO: 3124887 - RNA, 17 nt, Human
acacuguucucugcccu

SEQ ID NO: 3124888 - RNA, 16 nt, Human
acacuguucucugccc

SEQ ID NO: 3124889 - RNA, 23 nt, Human
acacuguucucugcccuccaaga

SEQ ID NO: 3124890 - RNA, 22 nt, Human
acacuguucucugcccuccaag

SEQ ID NO: 3124891 - RNA, 13 nt, Human
acacucugagacu

SEQ ID NO: 3124892 - RNA, 11 nt, Human
acacucugaga

SEQ ID NO: 3124893 - RNA, 13 nt, Human
acacuccuucaca

SEQ ID NO: 3124894 - RNA, 22 nt, Human
acacucacauuuauucugcuca

SEQ ID NO: 3124895 - RNA, 17 nt, Human
acaagcgugagccacug

SEQ ID NO: 3124896 - RNA, 13 nt, Human
acaagcuccaagc

SEQ ID NO: 3124897 - RNA, 16 nt, Human
acaagaccacguuucu

SEQ ID NO: 3124898 - RNA, 17 nt, Human
acaagaccacguuucua

SEQ ID NO: 3124899 - RNA, 18 nt, Human
acaagagcccaggccucc

SEQ ID NO: 3124900 - RNA, 22 nt, Human
acaagagcccaggccuccuaca

SEQ ID NO: 3124901 - RNA, 17 nt, Human
acaacaucuuuuucuac

SEQ ID NO: 3124902 - RNA, 22 nt, Human
acaagcuccaagcucccaggca

SEQ ID NO: 3124903 - RNA, 19 nt, Human
acaagcuccaagcucccag

SEQ ID NO: 3124904 - RNA, 17 nt, Human
acaagcuccaagcuccc

SEQ ID NO: 3124905 - RNA, 16 nt, Human
acaagcuccaagcucc

SEQ ID NO: 3124906 - RNA, 15 nt, Human
acaagcuccaagcuc

SEQ ID NO: 3124907 - RNA, 16 nt, Human
uagcucaggugucccu

SEQ ID NO: 3124908 - RNA, 21 nt, Human
acaaagcgugguggacaugca

SEQ ID NO: 3124909 - RNA, 14 nt, Human
acaaaacuuuucua

SEQ ID NO: 3124910 - RNA, 18 nt, Human
aauuugggggaaaauuua

SEQ ID NO: 3124911 - RNA, 16 nt, Human
aauuuguuauaaugaa

SEQ ID NO: 3124912 - RNA, 20 nt, Human
aauuugugauacaaugcugu

SEQ ID NO: 3124913 - RNA, 13 nt, Human
uacuucuccaccc

SEQ ID NO: 3124914 - RNA, 18 nt, Human
uacuucuccacccugcuc

SEQ ID NO: 3124915 - RNA, 20 nt, Human
uacuucuccacccugcucuc

SEQ ID NO: 3124916 - RNA, 15 nt, Human
uacuucugcuacaua

SEQ ID NO: 3124917 - RNA, 14 nt, Human
uacuucuuauacau

SEQ ID NO: 3124918 - RNA, 15 nt, Human
uacuucuuauacauu

SEQ ID NO: 3124919 - RNA, 16 nt, Human
uacuucuuauacauuu

SEQ ID NO: 3124920 - RNA, 17 nt, Human
aauuuaccugaagucuu

SEQ ID NO: 3124921 - RNA, 15 nt, Human
aauuuaccugaaguc

SEQ ID NO: 3124922 - RNA, 13 nt, Human
aauuuauuauggc

SEQ ID NO: 3124923 - RNA, 14 nt, Human
aauuuauuauggca

SEQ ID NO: 3124924 - RNA, 15 nt, Human
uacgucugacaggca

SEQ ID NO: 3124925 - RNA, 16 nt, Human
uacgucugacaggcaa

SEQ ID NO: 3124926 - RNA, 13 nt, Human
uacgugaguccug

SEQ ID NO: 3124927 - RNA, 22 nt, Human
uacucuacccucuuagaaaaac

SEQ ID NO: 3124928 - RNA, 16 nt, Human
uacucuacccucuuag

SEQ ID NO: 3124929 - RNA, 15 nt, Human
uacuguaauuuguga

SEQ ID NO: 3124930 - RNA, 16 nt, Human
uacuguaauuugugau

SEQ ID NO: 3124931 - RNA, 17 nt, Human
uacuguaauuugugaua

SEQ ID NO: 3124932 - RNA, 23 nt, Human
uacuguaauuugugauacaaugc

SEQ ID NO: 3124933 - RNA, 20 nt, Human
aaguuuuuauggcuuuugug

SEQ ID NO: 3124934 - RNA, 18 nt, Human
aauaaaacuuuuuaaaau

SEQ ID NO: 3124935 - RNA, 12 nt, Human
aauaaaacuuuu

SEQ ID NO: 3124936 - RNA, 14 nt, Human
aauaaaacuuuuua

SEQ ID NO: 3124937 - RNA, 15 nt, Human
aauaaaacuuuuuaa

SEQ ID NO: 3124938 - RNA, 16 nt, Human
aauaaaucauaaaacu

SEQ ID NO: 3124939 - RNA, 22 nt, Human
aauaacauguaauuaaguacua

SEQ ID NO: 3124940 - RNA, 19 nt, Human
uaaauaaugugaaacugga

SEQ ID NO: 3124941 - RNA, 14 nt, Human
uaaaucuccaaaau

SEQ ID NO: 3124942 - RNA, 15 nt, Human
uaaaucuccaaaaua

SEQ ID NO: 3124943 - RNA, 22 nt, Human
uaaaucuccaaaauaaaacuuu

SEQ ID NO: 3124944 - RNA, 23 nt, Human
uaaaugcaccuggaauauauaac

SEQ ID NO: 3124945 - RNA, 15 nt, Human
uaaauguugaaagau

SEQ ID NO: 3124946 - RNA, 20 nt, Human
uaaauguugaaagaucaaaa

SEQ ID NO: 3124947 - RNA, 15 nt, Human
uaaauuaacuuuuau

SEQ ID NO: 3124948 - RNA, 16 nt, Human
uaaauuaacuuuuaua

SEQ ID NO: 3124949 - RNA, 17 nt, Human
uaaauuaacuuuuauaa

SEQ ID NO: 3124950 - RNA, 12 nt, Human
uaaauuaacuuu

SEQ ID NO: 3124951 - RNA, 14 nt, Human
uaaauuaacuuuua

SEQ ID NO: 3124952 - RNA, 17 nt, Human
aauauugauaugcuuau

SEQ ID NO: 3124953 - RNA, 18 nt, Human
aauauugauaugcuuaua

SEQ ID NO: 3124954 - RNA, 22 nt, Human
aauauugcugauggugcaauga

SEQ ID NO: 3124955 - RNA, 21 nt, Human
aauauugcugauggugcaaug

SEQ ID NO: 3124956 - RNA, 18 nt, Human
aauauugcugauggugca

SEQ ID NO: 3124957 - RNA, 15 nt, Human
aauauugcugauggu

SEQ ID NO: 3124958 - RNA, 13 nt, Human
aauauugcugaug

SEQ ID NO: 3124959 - RNA, 12 nt, Human
aauauugcugau

SEQ ID NO: 3124960 - RNA, 11 nt, Human
aauauugcuga

SEQ ID NO: 3124961 - RNA, 16 nt, Human
aauaucugaaaaugua

SEQ ID NO: 3124962 - RNA, 17 nt, Human
aauaucugaaaauguau

SEQ ID NO: 3124963 - RNA, 18 nt, Human
aauaucugaaaauguaug

SEQ ID NO: 3124964 - RNA, 19 nt, Human
aauaucugaaaauguaugu

SEQ ID NO: 3124965 - RNA, 20 nt, Human
aauaucugaaaauguaugug

SEQ ID NO: 3124966 - RNA, 15 nt, Human
uaacuuuuauaaacu

SEQ ID NO: 3124967 - RNA, 17 nt, Human
uaacuuuuauaaacuuu

SEQ ID NO: 3124968 - RNA, 18 nt, Human
uaacuuuuauaaacuuua

SEQ ID NO: 3124969 - RNA, 19 nt, Human
aauaggaaaaacugauuuu

SEQ ID NO: 3124970 - RNA, 18 nt, Human
aauaggaaaaacugauuu

SEQ ID NO: 3124971 - RNA, 17 nt, Human
aauaggaaaaacugauu

SEQ ID NO: 3124972 - RNA, 16 nt, Human
aauaggaaaaacugau

SEQ ID NO: 3124973 - RNA, 15 nt, Human
aauaggaaaaacuga

SEQ ID NO: 3124974 - RNA, 13 nt, Human
aauagcugggacu

SEQ ID NO: 3124975 - RNA, 14 nt, Human
aauagcugggacua

SEQ ID NO: 3124976 - RNA, 23 nt, Human
aauagacaauuuauuauggcaca

SEQ ID NO: 3124977 - RNA, 18 nt, Human
aauagacaauuuauuaug

SEQ ID NO: 3124978 - RNA, 15 nt, Human
uaacauggaaguacu

SEQ ID NO: 3124979 - RNA, 15 nt, Human
uaacuaaaagguaug

SEQ ID NO: 3124980 - RNA, 14 nt, Human
uaacuaaaagguau

SEQ ID NO: 3124981 - RNA, 14 nt, Human
uaacauggaaguac

SEQ ID NO: 3124982 - RNA, 18 nt, Human
aaucuaaauggaaccacu

SEQ ID NO: 3124983 - RNA, 13 nt, Human
aaucuaaauggaa

SEQ ID NO: 3124984 - RNA, 15 nt, Human
aaucuaaauggaacc

SEQ ID NO: 3124985 - RNA, 12 nt, Human
aaucuaaaugga

SEQ ID NO: 3124986 - RNA, 13 nt, Human
aaucucaaauaac

SEQ ID NO: 3124987 - RNA, 14 nt, Human
aaucucaaauuucu

SEQ ID NO: 3124988 - RNA, 12 nt, Human
aaucucaaauuu

SEQ ID NO: 3124989 - RNA, 15 nt, Human
aaucucaaauaacua

SEQ ID NO: 3124990 - RNA, 20 nt, Human
uaaguuuuuauggcuuuugu

SEQ ID NO: 3124991 - RNA, 19 nt, Human
uaaguacuauguaucaaug

SEQ ID NO: 3124992 - RNA, 20 nt, Human
aaucuucugaacuuggcgcu

SEQ ID NO: 3124993 - RNA, 13 nt, Human
aaucuucugaacu

SEQ ID NO: 3124994 - RNA, 14 nt, Human
uaaugaaagacugu

SEQ ID NO: 3124995 - RNA, 17 nt, Human
uaaugaaagacuguaca

SEQ ID NO: 3124996 - RNA, 18 nt, Human
uaaugaaagacuguacaa

SEQ ID NO: 3124997 - RNA, 19 nt, Human
uaaugaaagacuguacaaa

SEQ ID NO: 3124998 - RNA, 21 nt, Human
uaaugacuuaagcacacuuga

SEQ ID NO: 3124999 - RNA, 15 nt, Human
uaaugacuuaagcac

SEQ ID NO: 3125000 - RNA, 22 nt, Human
uaaugaaagacuguacaaagua

SEQ ID NO: 3125001 - RNA, 23 nt, Human
uaaugaaagacuguacaaaguag

SEQ ID NO: 3125002 - RNA, 13 nt, Human
uaaugaggaaacu

SEQ ID NO: 3125003 - RNA, 18 nt, Human
aaugacuuacuguacaug

SEQ ID NO: 3125004 - RNA, 14 nt, Human
aaugacuuacugua

SEQ ID NO: 3125005 - RNA, 17 nt, Human
aaugacuuacuguacau

SEQ ID NO: 3125006 - RNA, 15 nt, Human
aaugagccuggcaag

SEQ ID NO: 3125007 - RNA, 12 nt, Human
aauguaugugua

SEQ ID NO: 3125008 - RNA, 14 nt, Human
aauguauguguaag

SEQ ID NO: 3125009 - RNA, 14 nt, Human
aauguacugcauau

SEQ ID NO: 3125010 - RNA, 18 nt, Human
aauguacugcauaugaaa

SEQ ID NO: 3125011 - RNA, 15 nt, Human
uacauaaugcgugca

SEQ ID NO: 3125012 - RNA, 19 nt, Human
uacauaaugcgugcauacc

SEQ ID NO: 3125013 - RNA, 20 nt, Human
uacauaaugcgugcauacca

SEQ ID NO: 3125014 - RNA, 17 nt, Human
uacauaaugcgugcaua

SEQ ID NO: 3125015 - RNA, 15 nt, Human
uacaguaucucaggg

SEQ ID NO: 3125016 - RNA, 12 nt, Human
aauguacugcau

SEQ ID NO: 3125017 - RNA, 23 nt, Human
uacagagcccacgcccccacugg

SEQ ID NO: 3125018 - RNA, 19 nt, Human
uacaccacuacauucuguu

SEQ ID NO: 3125019 - RNA, 20 nt, Human
uacaccacuacauucuguua

SEQ ID NO: 3125020 - RNA, 15 nt, Human
uacaccacuacauuc

SEQ ID NO: 3125021 - RNA, 16 nt, Human
uacaccacuacauucu

SEQ ID NO: 3125022 - RNA, 17 nt, Human
uacaccacuacauucug

SEQ ID NO: 3125023 - RNA, 18 nt, Human
uacaccacuacauucugu

SEQ ID NO: 3125024 - RNA, 23 nt, Human
uacacauuuuauuuuauuaugca

SEQ ID NO: 3125025 - RNA, 21 nt, Human
uacaagcgugagccacugcac

SEQ ID NO: 3125026 - RNA, 13 nt, Human
aaugcccagcccc

SEQ ID NO: 3125027 - RNA, 15 nt, Human
aaugcccagccccuu

SEQ ID NO: 3125028 - RNA, 14 nt, Human
aaugcccagccccu

SEQ ID NO: 3125029 - RNA, 18 nt, Human
aauggaagacagcucuua

SEQ ID NO: 3125030 - RNA, 16 nt, Human
aauggacguguuauga

SEQ ID NO: 3125031 - RNA, 13 nt, Human
aaugcugugcccu

SEQ ID NO: 3125032 - RNA, 20 nt, Human
aaugcugugcccuaaagugu

SEQ ID NO: 3125033 - RNA, 21 nt, Human
aaugcugugcccuaaagugua

SEQ ID NO: 3125034 - RNA, 24 nt, Human
aaugcccagccccuucugacccau

SEQ ID NO: 3125035 - RNA, 23 nt, Human
aaugcccagccccuucugaccca

SEQ ID NO: 3125036 - RNA, 22 nt, Human
aaugcccagccccuucugaccc

SEQ ID NO: 3125037 - RNA, 20 nt, Human
aaugcccagccccuucugac

SEQ ID NO: 3125038 - RNA, 15 nt, Human
uacaaaagcauguga

SEQ ID NO: 3125039 - RNA, 20 nt, Human
uacaaaaagcauaaaaauua

SEQ ID NO: 3125040 - RNA, 15 nt, Human
uacaaaaagcauaaa

SEQ ID NO: 3125041 - RNA, 14 nt, Human
aaugagccuggcaa

SEQ ID NO: 3125042 - RNA, 17 nt, Human
aaaacacauuuuucuua

SEQ ID NO: 3125043 - RNA, 19 nt, Human
aaaacacuguucucugccc

SEQ ID NO: 3125044 - RNA, 11 nt, Human
aaaagaaaaag

SEQ ID NO: 3125045 - RNA, 21 nt, Human
aaaaucagccugcuccagcug

SEQ ID NO: 3125046 - RNA, 17 nt, Human
aaaaucagccugcucca

SEQ ID NO: 3125047 - RNA, 13 nt, Human
aaaaucagccugc

SEQ ID NO: 3125048 - RNA, 14 nt, Human
aaaauaaaacuuuu

SEQ ID NO: 3125049 - RNA, 23 nt, Human
aaacugauuuuuuuuuccuucag

SEQ ID NO: 3125050 - RNA, 22 nt, Human
aaacugauuuuuuuuuccuuca

SEQ ID NO: 3125051 - RNA, 23 nt, Human
aaacucuuaaaacccaagugccu

SEQ ID NO: 3125052 - RNA, 12 nt, Human
aaacucuuaaaa

SEQ ID NO: 3125053 - RNA, 16 nt, Human
aaacccagcucugguc

SEQ ID NO: 3125054 - RNA, 12 nt, Human
aaacccagcucu

SEQ ID NO: 3125055 - RNA, 16 nt, Human
aaaccgccaaggcugg

SEQ ID NO: 3125056 - RNA, 15 nt, Human
aaaccgccaaggcug

SEQ ID NO: 3125057 - RNA, 15 nt, Human
aaaaucucaaauuuc

SEQ ID NO: 3125058 - RNA, 16 nt, Human
aaaaucucaaauuucu

SEQ ID NO: 3125059 - RNA, 18 nt, Human
aaaaucucaaauuucuaa

SEQ ID NO: 3125060 - RNA, 20 nt, Human
aaagauauuuugcuuuguga

SEQ ID NO: 3125061 - RNA, 16 nt, Human
aaagccuccuccagcc

SEQ ID NO: 3125062 - RNA, 23 nt, Human
aaauucuucuccacuuucuagcc

SEQ ID NO: 3125063 - RNA, 15 nt, Human
aaauucuugcaaagu

SEQ ID NO: 3125064 - RNA, 11 nt, Human
aacaggcagau

SEQ ID NO: 3125065 - RNA, 23 nt, Human
aaccuuuugagugccuuacacaa

SEQ ID NO: 3125066 - RNA, 16 nt, Human
aaccuuuugagugccu

SEQ ID NO: 3125067 - RNA, 20 nt, Human
aaaggaugcccaaagaugca

SEQ ID NO: 3125068 - RNA, 14 nt, Human
aaaggaugcacaga

SEQ ID NO: 3125069 - RNA, 14 nt, Human
aaaucuuuuugcuu

SEQ ID NO: 3125070 - RNA, 13 nt, Human
aaaucuuuuugcu

SEQ ID NO: 3125071 - RNA, 19 nt, Human
aaaucucaaauuucuaaau

SEQ ID NO: 3125072 - RNA, 15 nt, Human
aaggcaaggcuguca

SEQ ID NO: 3125073 - RNA, 13 nt, Human
aaggcaaggcugu

SEQ ID NO: 3125074 - RNA, 19 nt, Human
aagcugcacccucaggcag

SEQ ID NO: 3125075 - RNA, 13 nt, Human
aagcugcacccuc

SEQ ID NO: 3125076 - RNA, 14 nt, Human
aagauaaaugugcu

SEQ ID NO: 3125077 - RNA, 21 nt, Human
aagauaauauuaaggaagaca

SEQ ID NO: 3125078 - RNA, 19 nt, Human
aagauaauauuaaggaaga

SEQ ID NO: 3125079 - RNA, 17 nt, Human
aagauacaguuacucag

SEQ ID NO: 3125080 - RNA, 14 nt, Human
aagcggcuggcagc

SEQ ID NO: 3125081 - RNA, 15 nt, Human
aagcgugagccacug

SEQ ID NO: 3125082 - RNA, 15 nt, Human
aagaccacguuucua

SEQ ID NO: 3125083 - RNA, 17 nt, Human
aagaccacguuucuaaa

SEQ ID NO: 3125084 - RNA, 12 nt, Human
aagacuuuucuu

SEQ ID NO: 3125085 - RNA, 21 nt, Human
aagacuuuuccaacccucauc

SEQ ID NO: 3125086 - RNA, 19 nt, Human
aagacuuuucuuucagcca

SEQ ID NO: 3125087 - RNA, 13 nt, Human
aagagaaaaaaua

SEQ ID NO: 3125088 - RNA, 17 nt, Human
aagacuuuuccaacccu

SEQ ID NO: 3125089 - RNA, 22 nt, Human
aagacaaugacuuacuguacau

SEQ ID NO: 3125090 - RNA, 19 nt, Human
aagacaaugugaaaagaaa

SEQ ID NO: 3125091 - RNA, 20 nt, Human
aagacaaugugaaaagaaaa

SEQ ID NO: 3125092 - RNA, 20 nt, Human
aagaguaggaagacuuugga

SEQ ID NO: 3125093 - RNA, 17 nt, Human
aauaaugugaaacugga

SEQ ID NO: 3125094 - RNA, 22 nt, Human
aauaaugugaaacuggauuaaa

SEQ ID NO: 3125095 - RNA, 14 nt, Human
aauaaagcagcguu

SEQ ID NO: 3125096 - RNA, 16 nt, Human
aauaaugugaaacugg

SEQ ID NO: 3125097 - RNA, 12 nt, Human
aagugcugggau

SEQ ID NO: 3125098 - RNA, 14 nt, Human
aagugcugcauuua

SEQ ID NO: 3125099 - RNA, 22 nt, Human
aagugcugcauuuaaaagauac

SEQ ID NO: 3125100 - RNA, 21 nt, Human
aaucaccgaaaacguggcugc

SEQ ID NO: 3125101 - RNA, 23 nt, Human
aaucaccgaaaacguggcugcuu

SEQ ID NO: 3125102 - RNA, 15 nt, Human
aaucaccgaaaacgu

SEQ ID NO: 3125103 - RNA, 23 nt, Human
aauauguggaguucaucuugaau

SEQ ID NO: 3125104 - RNA, 13 nt, Human
aauauuaagaaag

SEQ ID NO: 3125105 - RNA, 20 nt, Human
aaugaugccaugaggaacaa

SEQ ID NO: 3125106 - RNA, 21 nt, Human
aaugaaagacuguacaaagua

SEQ ID NO: 3125107 - RNA, 18 nt, Human
aaugaaagacuguacaaa

SEQ ID NO: 3125108 - RNA, 20 nt, Human
aaugaaagacuguacaaagu

SEQ ID NO: 3125109 - RNA, 23 nt, Human
acugaugggcaacccccagccug

SEQ ID NO: 3125110 - RNA, 16 nt, Human
acugauuuuuuuuucc

SEQ ID NO: 3125111 - RNA, 20 nt, Human
acugauuuuuuuuuccuuca

SEQ ID NO: 3125112 - RNA, 19 nt, Human
acugauuuuuuuuuccuuc

SEQ ID NO: 3125113 - RNA, 18 nt, Human
acugauuuuuuuuuccuu

SEQ ID NO: 3125114 - RNA, 17 nt, Human
acugauuuuuuuuuccu

SEQ ID NO: 3125115 - RNA, 12 nt, Human
acugaauuucuu

SEQ ID NO: 3125116 - RNA, 23 nt, Human
acugaauuucuuuugccguuauu

SEQ ID NO: 3125117 - RNA, 17 nt, Human
acugacauuguuggcca

SEQ ID NO: 3125118 - RNA, 18 nt, Human
acugacauuguuggccaa

SEQ ID NO: 3125119 - RNA, 15 nt, Human
acucuacagaggcca

SEQ ID NO: 3125120 - RNA, 22 nt, Human
acucccaucugugaaaggaaag

SEQ ID NO: 3125121 - RNA, 14 nt, Human
acugccaugccagc

SEQ ID NO: 3125122 - RNA, 17 nt, Human
acugugccaugugccag

SEQ ID NO: 3125123 - RNA, 18 nt, Human
acugugccaugugccagg

SEQ ID NO: 3125124 - RNA, 16 nt, Human
acugugccaugugcca

SEQ ID NO: 3125125 - RNA, 19 nt, Human
acuguuucaaacuuuacua

SEQ ID NO: 3125126 - RNA, 13 nt, Human
acuguuucaaacu

SEQ ID NO: 3125127 - RNA, 15 nt, Human
acuguuucaaacuuu

SEQ ID NO: 3125128 - RNA, 18 nt, Human
acuguuucaaacuuuacu

SEQ ID NO: 3125129 - RNA, 23 nt, Human
acuuggggggcugaggugggagg

SEQ ID NO: 3125130 - RNA, 20 nt, Human
acgauuucuguuuagauaau

SEQ ID NO: 3125131 - RNA, 23 nt, Human
acgauuucuguuuagauaauaca

SEQ ID NO: 3125132 - RNA, 19 nt, Human
acgauuucuguuuagauaa

SEQ ID NO: 3125133 - RNA, 17 nt, Human
acggacacucaaaagcu

SEQ ID NO: 3125134 - RNA, 19 nt, Human
acggaauaguuggcuagga

SEQ ID NO: 3125135 - RNA, 15 nt, Human
acggaauaguuggcu

SEQ ID NO: 3125136 - RNA, 13 nt, Human
acgucugugccau

SEQ ID NO: 3125137 - RNA, 12 nt, Human
acgucugugcca

SEQ ID NO: 3125138 - RNA, 19 nt, Human
acgcugugcugcccugccc

SEQ ID NO: 3125139 - RNA, 22 nt, Human
acgcugugcugcccugcccacc

SEQ ID NO: 3125140 - RNA, 18 nt, Human
acuaauggggcggugaga

SEQ ID NO: 3125141 - RNA, 15 nt, Human
accugccccucaacu

SEQ ID NO: 3125142 - RNA, 12 nt, Human
accugccccuca

SEQ ID NO: 3125143 - RNA, 22 nt, Human
accugccaggaagccagcaggc

SEQ ID NO: 3125144 - RNA, 21 nt, Human
accugccaggaagccagcagg

SEQ ID NO: 3125145 - RNA, 23 nt, Human
accugccaggaagccagcaggcu

SEQ ID NO: 3125146 - RNA, 19 nt, Human
accugccaggaagccagca

SEQ ID NO: 3125147 - RNA, 20 nt, Human
accucugccugaagucacac

SEQ ID NO: 3125148 - RNA, 12 nt, Human
accucugccuga

SEQ ID NO: 3125149 - RNA, 13 nt, Human
acccuauugcugc

SEQ ID NO: 3125150 - RNA, 19 nt, Human
acccuauugcugcuugagg

SEQ ID NO: 3125151 - RNA, 14 nt, Human
acccuauugcugcu

SEQ ID NO: 3125152 - RNA, 16 nt, Human
acccuggggagaaagu

SEQ ID NO: 3125153 - RNA, 16 nt, Human
acccugugauggggcc

SEQ ID NO: 3125154 - RNA, 14 nt, Human
acccucaggcaggu

SEQ ID NO: 3125155 - RNA, 13 nt, Human
acccucaggcagg

SEQ ID NO: 3125156 - RNA, 13 nt, Human
acccucaucacca

SEQ ID NO: 3125157 - RNA, 16 nt, Human
acccucaggcaggugg

SEQ ID NO: 3125158 - RNA, 15 nt, Human
acccucaggcaggug

SEQ ID NO: 3125159 - RNA, 23 nt, Human
acccuggcacuauaauguaagcu

SEQ ID NO: 3125160 - RNA, 23 nt, Human
acccucaucaccaacgucugugc

SEQ ID NO: 3125161 - RNA, 11 nt, Human
accucaggccu

SEQ ID NO: 3125162 - RNA, 20 nt, Human
accucaggugauccacccac

SEQ ID NO: 3125163 - RNA, 21 nt, Human
accucaggugauccacccacc

SEQ ID NO: 3125164 - RNA, 12 nt, Human
accgggcacuca

SEQ ID NO: 3125165 - RNA, 14 nt, Human
accgggcacucaga

SEQ ID NO: 3125166 - RNA, 20 nt, Human
accgggccacagagaaagua

SEQ ID NO: 3125167 - RNA, 16 nt, Human
accgggcacucagaag

SEQ ID NO: 3125168 - RNA, 21 nt, Human
acccugugauggggcccugcc

SEQ ID NO: 3125169 - RNA, 20 nt, Human
acccugugauggggcccugc

SEQ ID NO: 3125170 - RNA, 19 nt, Human
acccugugauggggcccug

SEQ ID NO: 3125171 - RNA, 17 nt, Human
acccugugauggggccc

SEQ ID NO: 3125172 - RNA, 23 nt, Human
accgugaggccagagacacaagc

SEQ ID NO: 3125173 - RNA, 12 nt, Human
accucagccucc

SEQ ID NO: 3125174 - RNA, 11 nt, Human
accucagccuc

SEQ ID NO: 3125175 - RNA, 18 nt, Human
accgugaggccagagaca

SEQ ID NO: 3125176 - RNA, 19 nt, Human
accggcuggccuggccccu

SEQ ID NO: 3125177 - RNA, 23 nt, Human
acaggcacccaccaucaugucug

SEQ ID NO: 3125178 - RNA, 19 nt, Human
acagcucuucuccaggcug

SEQ ID NO: 3125179 - RNA, 20 nt, Human
acagcucuucuccaggcugu

SEQ ID NO: 3125180 - RNA, 18 nt, Human
acagcucuucuccaggcu

SEQ ID NO: 3125181 - RNA, 15 nt, Human
acaggcaaugcuggc

SEQ ID NO: 3125182 - RNA, 16 nt, Human
acaggcaaugcuggcu

SEQ ID NO: 3125183 - RNA, 14 nt, Human
acaggcacccacca

SEQ ID NO: 3125184 - RNA, 17 nt, Human
acaggcaaugcuggcug

SEQ ID NO: 3125185 - RNA, 14 nt, Human
acaggcaaugcugg

SEQ ID NO: 3125186 - RNA, 23 nt, Human
acaugcacagcuaacauggaagu

SEQ ID NO: 3125187 - RNA, 13 nt, Human
acaugcacgugug

SEQ ID NO: 3125188 - RNA, 20 nt, Human
acaugccucucucaggccaa

SEQ ID NO: 3125189 - RNA, 20 nt, Human
acauacaggaagguagaaau

SEQ ID NO: 3125190 - RNA, 16 nt, Human
acauacaauuccaaac

SEQ ID NO: 3125191 - RNA, 12 nt, Human
accagagcugcc

SEQ ID NO: 3125192 - RNA, 13 nt, Human
accagagcugcca

SEQ ID NO: 3125193 - RNA, 16 nt, Human
accagagcugccaccu

SEQ ID NO: 3125194 - RNA, 14 nt, Human
accagagcugccac

SEQ ID NO: 3125195 - RNA, 17 nt, Human
accaacgucugugccau

SEQ ID NO: 3125196 - RNA, 14 nt, Human
accaacgucugugc

SEQ ID NO: 3125197 - RNA, 13 nt, Human
accacguuucuaa

SEQ ID NO: 3125198 - RNA, 14 nt, Human
accacguuucuaaa

SEQ ID NO: 3125199 - RNA, 18 nt, Human
accacgcuggaccuugaa

SEQ ID NO: 3125200 - RNA, 14 nt, Human
accacgcuggaccu

SEQ ID NO: 3125201 - RNA, 16 nt, Human
accacgcuggaccuug

SEQ ID NO: 3125202 - RNA, 12 nt, Human
accaagcccagu

SEQ ID NO: 3125203 - RNA, 15 nt, Human
acaaguuaaauaaau

SEQ ID NO: 3125204 - RNA, 15 nt, Human
acaaggcaaggcugu

SEQ ID NO: 3125205 - RNA, 19 nt, Human
acaaggcaaggcugucaau

SEQ ID NO: 3125206 - RNA, 17 nt, Human
acaaggcaaggcuguca

SEQ ID NO: 3125207 - RNA, 16 nt, Human
acaaggcaaggcuguc

SEQ ID NO: 3125208 - RNA, 18 nt, Human
acacagcucuucuccagg

SEQ ID NO: 3125209 - RNA, 18 nt, Human
acaccagagcccaccuug

SEQ ID NO: 3125210 - RNA, 23 nt, Human
acaccagagcccaccuuggcuca

SEQ ID NO: 3125211 - RNA, 13 nt, Human
acaccagagccca

SEQ ID NO: 3125212 - RNA, 14 nt, Human
acacagcucuucuc

SEQ ID NO: 3125213 - RNA, 16 nt, Human
acacagcucuucucca

SEQ ID NO: 3125214 - RNA, 17 nt, Human
aauuucccaaagcagug

SEQ ID NO: 3125215 - RNA, 15 nt, Human
aauuucccaaagcag

SEQ ID NO: 3125216 - RNA, 22 nt, Human
aauuguaaggaaugauuaauua

SEQ ID NO: 3125217 - RNA, 16 nt, Human
aauuguaaggaaugau

SEQ ID NO: 3125218 - RNA, 18 nt, Human
aauucuguuuuucuaggc

SEQ ID NO: 3125219 - RNA, 14 nt, Human
aauucuguuuuucu

SEQ ID NO: 3125220 - RNA, 21 nt, Human
aauucucauuugucacacacu

SEQ ID NO: 3125221 - RNA, 15 nt, Human
aauucucuuauccaa

SEQ ID NO: 3125222 - RNA, 15 nt, Human
aauucucuaguuuga

SEQ ID NO: 3125223 - RNA, 17 nt, Human
aauucucuaguuugauu

SEQ ID NO: 3125224 - RNA, 14 nt, Human
aauucuacuuugag

SEQ ID NO: 3125225 - RNA, 19 nt, Human
aauucucagaaucucaaau

SEQ ID NO: 3125226 - RNA, 19 nt, Human
aauuaugaguuauuuuuau

SEQ ID NO: 3125227 - RNA, 14 nt, Human
agaagucacacagu

SEQ ID NO: 3125228 - RNA, 17 nt, Human
agaagucuuagauguau

SEQ ID NO: 3125229 - RNA, 19 nt, Human
agaagucuuagauguauau

SEQ ID NO: 3125230 - RNA, 15 nt, Human
agaagagaaugcaca

SEQ ID NO: 3125231 - RNA, 21 nt, Human
agaaccaaaaagaggcuaugu

SEQ ID NO: 3125232 - RNA, 17 nt, Human
agaaucucaaauaacua

SEQ ID NO: 3125233 - RNA, 18 nt, Human
agaaugcucuuuacuuca

SEQ ID NO: 3125234 - RNA, 22 nt, Human
agaaugcacaaacagaggccgc

SEQ ID NO: 3125235 - RNA, 23 nt, Human
agaaugcacaaacagaggccgcc

SEQ ID NO: 3125236 - RNA, 18 nt, Human
agaaccaaaaagaggcua

SEQ ID NO: 3125237 - RNA, 17 nt, Human
agaaccaaaaagaggcu

SEQ ID NO: 3125238 - RNA, 16 nt, Human
agacucuuuggacacu

SEQ ID NO: 3125239 - RNA, 18 nt, Human
agagaaaguacuucucca

SEQ ID NO: 3125240 - RNA, 17 nt, Human
agagcccacgcccccac

SEQ ID NO: 3125241 - RNA, 19 nt, Human
agagagcaagacgcugugc

SEQ ID NO: 3125242 - RNA, 11 nt, Human
agagagcaaga

SEQ ID NO: 3125243 - RNA, 18 nt, Human
agagcccacgcccccacu

SEQ ID NO: 3125244 - RNA, 20 nt, Human
agacaaugugaaaagaaaaa

SEQ ID NO: 3125245 - RNA, 23 nt, Human
agacaaugacuuacuguacauga

SEQ ID NO: 3125246 - RNA, 17 nt, Human
agacgcugugcugcccu

SEQ ID NO: 3125247 - RNA, 19 nt, Human
agacgcugugcugcccugc

SEQ ID NO: 3125248 - RNA, 18 nt, Human
agacgcugugcugcccug

SEQ ID NO: 3125249 - RNA, 23 nt, Human
agacagcccgggcucugccuccc

SEQ ID NO: 3125250 - RNA, 22 nt, Human
agacagcccgggcucugccucc

SEQ ID NO: 3125251 - RNA, 21 nt, Human
agacagcccgggcucugccuc

SEQ ID NO: 3125252 - RNA, 23 nt, Human
agaccaucccugaaggccccgcc

SEQ ID NO: 3125253 - RNA, 14 nt, Human
agaccacguuucua

SEQ ID NO: 3125254 - RNA, 21 nt, Human
agcacagacccugcccugugg

SEQ ID NO: 3125255 - RNA, 20 nt, Human
agcacuaaggugugcucuga

SEQ ID NO: 3125256 - RNA, 20 nt, Human
agcagccuggacccugugga

SEQ ID NO: 3125257 - RNA, 18 nt, Human
agcagcguuucuaugaca

SEQ ID NO: 3125258 - RNA, 19 nt, Human
agcagcguuucuaugacac

SEQ ID NO: 3125259 - RNA, 16 nt, Human
agcagugcaugcuguc

SEQ ID NO: 3125260 - RNA, 13 nt, Human
agcagugcaugcu

SEQ ID NO: 3125261 - RNA, 16 nt, Human
agcagccuggacccug

SEQ ID NO: 3125262 - RNA, 17 nt, Human
agcagugcaugcugucc

SEQ ID NO: 3125263 - RNA, 16 nt, Human
agcaucuaugugagac

SEQ ID NO: 3125264 - RNA, 13 nt, Human
agcccaccuuggc

SEQ ID NO: 3125265 - RNA, 23 nt, Human
agcccaccccucaacaccucugc

SEQ ID NO: 3125266 - RNA, 19 nt, Human
agcccacgcccccacuggu

SEQ ID NO: 3125267 - RNA, 15 nt, Human
agcccacgcccccac

SEQ ID NO: 3125268 - RNA, 18 nt, Human
agcccacgcccccacugg

SEQ ID NO: 3125269 - RNA, 17 nt, Human
agcccacgcccccacug

SEQ ID NO: 3125270 - RNA, 23 nt, Human
agccagcaggcucucaggccagc

SEQ ID NO: 3125271 - RNA, 21 nt, Human
agccagcaggcucucaggcca

SEQ ID NO: 3125272 - RNA, 22 nt, Human
agccagcaggcucucaggccag

SEQ ID NO: 3125273 - RNA, 20 nt, Human
agccagauuucacucuccuu

SEQ ID NO: 3125274 - RNA, 17 nt, Human
agccagauuucacucuc

SEQ ID NO: 3125275 - RNA, 14 nt, Human
agccagauuucacu

SEQ ID NO: 3125276 - RNA, 15 nt, Human
agaguugaagacaga

SEQ ID NO: 3125277 - RNA, 14 nt, Human
agaguugaagacag

SEQ ID NO: 3125278 - RNA, 13 nt, Human
agaguugaagaca

SEQ ID NO: 3125279 - RNA, 20 nt, Human
agauagccaaggccaaagga

SEQ ID NO: 3125280 - RNA, 23 nt, Human
agaggggguggccucccaacuca

SEQ ID NO: 3125281 - RNA, 20 nt, Human
agagggucugaggaauccag

SEQ ID NO: 3125282 - RNA, 14 nt, Human
agauucuuuccuga

SEQ ID NO: 3125283 - RNA, 22 nt, Human
agaugggugcuuggaggaagga

SEQ ID NO: 3125284 - RNA, 20 nt, Human
agaugggugcuuggaggaag

SEQ ID NO: 3125285 - RNA, 18 nt, Human
agaugacaucugucuagg

SEQ ID NO: 3125286 - RNA, 18 nt, Human
agaucucuaacuucacca

SEQ ID NO: 3125287 - RNA, 16 nt, Human
agauucuuuccugagg

SEQ ID NO: 3125288 - RNA, 15 nt, Human
agauucuuuccugag

SEQ ID NO: 3125289 - RNA, 16 nt, Human
agauugcaacaggcug

SEQ ID NO: 3125290 - RNA, 17 nt, Human
agauugcaacaggcugg

SEQ ID NO: 3125291 - RNA, 16 nt, Human
agauugcaccacugca

SEQ ID NO: 3125292 - RNA, 19 nt, Human
agcaaauucuguuuuucua

SEQ ID NO: 3125293 - RNA, 20 nt, Human
aggcccucugcccacucccu

SEQ ID NO: 3125294 - RNA, 19 nt, Human
aggcccucugcccacuccc

SEQ ID NO: 3125295 - RNA, 23 nt, Human
aggcuguaucccaugagccucag

SEQ ID NO: 3125296 - RNA, 19 nt, Human
aggcugcagugagccgaga

SEQ ID NO: 3125297 - RNA, 17 nt, Human
aggcugcagugagccga

SEQ ID NO: 3125298 - RNA, 12 nt, Human
aggcugucaauu

SEQ ID NO: 3125299 - RNA, 24 nt, Human
aggcuguaucccaugagccucagc

SEQ ID NO: 3125300 - RNA, 18 nt, Human
agggccuggcucaggugg

SEQ ID NO: 3125301 - RNA, 14 nt, Human
agggccuggcucag

SEQ ID NO: 3125302 - RNA, 13 nt, Human
agggccuggcuca

SEQ ID NO: 3125303 - RNA, 18 nt, Human
agggccuggccugagcug

SEQ ID NO: 3125304 - RNA, 12 nt, Human
aggccagcugcu

SEQ ID NO: 3125305 - RNA, 23 nt, Human
aggcauuccccaggaggccagcc

SEQ ID NO: 3125306 - RNA, 22 nt, Human
aggcauuccccaggaggccagc

SEQ ID NO: 3125307 - RNA, 21 nt, Human
aggcauuccccaggaggccag

SEQ ID NO: 3125308 - RNA, 20 nt, Human
aggcauguucucugaggaca

SEQ ID NO: 3125309 - RNA, 22 nt, Human
aggcauguucucugaggacacu

SEQ ID NO: 3125310 - RNA, 24 nt, Human
aggcaugugaugagaggaaaucac

SEQ ID NO: 3125311 - RNA, 23 nt, Human
aggcaugugaugagaggaaauca

SEQ ID NO: 3125312 - RNA, 23 nt, Human
aggccaggcccucugcccacucc

SEQ ID NO: 3125313 - RNA, 19 nt, Human
aggccaggcccucugccca

SEQ ID NO: 3125314 - RNA, 18 nt, Human
aggccaggcccucugccc

SEQ ID NO: 3125315 - RNA, 17 nt, Human
aggccaggcccucugcc

SEQ ID NO: 3125316 - RNA, 16 nt, Human
aggccaggcccucugc

SEQ ID NO: 3125317 - RNA, 16 nt, Human
aggccagcugcuuggg

SEQ ID NO: 3125318 - RNA, 14 nt, Human
aggccagcugcuug

SEQ ID NO: 3125319 - RNA, 13 nt, Human
aggccagcugcuu

SEQ ID NO: 3125320 - RNA, 14 nt, Human
aggccaugggccuc

SEQ ID NO: 3125321 - RNA, 16 nt, Human
aggccaugggccuccu

SEQ ID NO: 3125322 - RNA, 15 nt, Human
aggcccucugcccac

SEQ ID NO: 3125323 - RNA, 17 nt, Human
aggcccucugcccacuc

SEQ ID NO: 3125324 - RNA, 14 nt, Human
aggcagccaggcca

SEQ ID NO: 3125325 - RNA, 16 nt, Human
aggcagccaggccaca

SEQ ID NO: 3125326 - RNA, 15 nt, Human
aggcagccaggccac

SEQ ID NO: 3125327 - RNA, 13 nt, Human
aggcagauacagg

SEQ ID NO: 3125328 - RNA, 19 nt, Human
aggaaguacuggagaaaau

SEQ ID NO: 3125329 - RNA, 14 nt, Human
aggaggucucuaag

SEQ ID NO: 3125330 - RNA, 15 nt, Human
aggaggucucuaaga

SEQ ID NO: 3125331 - RNA, 12 nt, Human
aggagugagcac

SEQ ID NO: 3125332 - RNA, 14 nt, Human
aggagugagcacua

SEQ ID NO: 3125333 - RNA, 13 nt, Human
agcucaccagccc

SEQ ID NO: 3125334 - RNA, 14 nt, Human
agcucaccagcccc

SEQ ID NO: 3125335 - RNA, 21 nt, Human
agcucaccagccccagugccc

SEQ ID NO: 3125336 - RNA, 13 nt, Human
agcuaaugggaca

SEQ ID NO: 3125337 - RNA, 14 nt, Human
agcuaaugggacac

SEQ ID NO: 3125338 - RNA, 15 nt, Human
agcuaaugggacacu

SEQ ID NO: 3125339 - RNA, 20 nt, Human
agcuaacauggaaguacuau

SEQ ID NO: 3125340 - RNA, 19 nt, Human
agcuaacauggaaguacua

SEQ ID NO: 3125341 - RNA, 17 nt, Human
agcgauucuucugcuuc

SEQ ID NO: 3125342 - RNA, 19 nt, Human
agcgauucuucugcuucag

SEQ ID NO: 3125343 - RNA, 15 nt, Human
agcgauucuucugcu

SEQ ID NO: 3125344 - RNA, 20 nt, Human
agccugggaggucaaggcug

SEQ ID NO: 3125345 - RNA, 18 nt, Human
agccugggcaaugugaua

SEQ ID NO: 3125346 - RNA, 14 nt, Human
agccuggacccugu

SEQ ID NO: 3125347 - RNA, 22 nt, Human
agcucaccagccccagugccca

SEQ ID NO: 3125348 - RNA, 23 nt, Human
agcucaccagccccagugcccac

SEQ ID NO: 3125349 - RNA, 21 nt, Human
agcugacuuuucuguccgagc

SEQ ID NO: 3125350 - RNA, 15 nt, Human
agcugacuuuucugu

SEQ ID NO: 3125351 - RNA, 15 nt, Human
agcuggucccacuca

SEQ ID NO: 3125352 - RNA, 22 nt, Human
agcugccuguucagcuccagcu

SEQ ID NO: 3125353 - RNA, 15 nt, Human
aggaaguacuggaga

SEQ ID NO: 3125354 - RNA, 11 nt, Human
aggaaguacug

SEQ ID NO: 3125355 - RNA, 14 nt, Human
aggaagguagaaau

SEQ ID NO: 3125356 - RNA, 23 nt, Human
aggaacaaggcaaggcugucaau

SEQ ID NO: 3125357 - RNA, 12 nt, Human
aggaacacuccu

SEQ ID NO: 3125358 - RNA, 23 nt, Human
aggaacuuaaauaaugugaaacu

SEQ ID NO: 3125359 - RNA, 15 nt, Human
aggaacacuccuuca

SEQ ID NO: 3125360 - RNA, 21 nt, Human
agcuuuguuuguugucagcug

SEQ ID NO: 3125361 - RNA, 21 nt, Human
augccugguggcagcugcggu

SEQ ID NO: 3125362 - RNA, 11 nt, Human
augccuggugg

SEQ ID NO: 3125363 - RNA, 12 nt, Human
augccugguggc

SEQ ID NO: 3125364 - RNA, 13 nt, Human
augccugguggca

SEQ ID NO: 3125365 - RNA, 19 nt, Human
augccugguggcagcugcg

SEQ ID NO: 3125366 - RNA, 18 nt, Human
augccugguggcagcugc

SEQ ID NO: 3125367 - RNA, 18 nt, Human
auggcuuuugugcauuau

SEQ ID NO: 3125368 - RNA, 21 nt, Human
augggaaugaaugucagugug

SEQ ID NO: 3125369 - RNA, 15 nt, Human
augcucugcauguua

SEQ ID NO: 3125370 - RNA, 18 nt, Human
augcucugcauguuacau

SEQ ID NO: 3125371 - RNA, 19 nt, Human
augcucugcauguuacaua

SEQ ID NO: 3125372 - RNA, 20 nt, Human
augcuucuucagagacuccu

SEQ ID NO: 3125373 - RNA, 17 nt, Human
augcuucuucagagacu

SEQ ID NO: 3125374 - RNA, 14 nt, Human
augcuucuucagag

SEQ ID NO: 3125375 - RNA, 16 nt, Human
augcuuugaucccuuc

SEQ ID NO: 3125376 - RNA, 23 nt, Human
aucuaggaagacuuuggaaagag

SEQ ID NO: 3125377 - RNA, 23 nt, Human
augaaguaauaugcacacauuuu

SEQ ID NO: 3125378 - RNA, 14 nt, Human
augaaguaauaugc

SEQ ID NO: 3125379 - RNA, 21 nt, Human
augaaguaauaugcacacauu

SEQ ID NO: 3125380 - RNA, 23 nt, Human
augaagcauuuacuuuguguuca

SEQ ID NO: 3125381 - RNA, 12 nt, Human
augaaagacugu

SEQ ID NO: 3125382 - RNA, 21 nt, Human
augagccucagcauccuggca

SEQ ID NO: 3125383 - RNA, 19 nt, Human
augagccucagcauccugg

SEQ ID NO: 3125384 - RNA, 11 nt, Human
augagccuggc

SEQ ID NO: 3125385 - RNA, 13 nt, Human
augaccuuucaau

SEQ ID NO: 3125386 - RNA, 15 nt, Human
augaccuuucaauag

SEQ ID NO: 3125387 - RNA, 22 nt, Human
augaggcauuuguuugaacuga

SEQ ID NO: 3125388 - RNA, 22 nt, Human
aucuaggaagacuuuggaaaga

SEQ ID NO: 3125389 - RNA, 20 nt, Human
aucaugacaaagacugagua

SEQ ID NO: 3125390 - RNA, 15 nt, Human
aucauccuaagcuau

SEQ ID NO: 3125391 - RNA, 21 nt, Human
auccacugugccaugugccag

SEQ ID NO: 3125392 - RNA, 14 nt, Human
auagcacagacccu

SEQ ID NO: 3125393 - RNA, 18 nt, Human
auauuuuuuucuuuucuu

SEQ ID NO: 3125394 - RNA, 20 nt, Human
aucaaaagguuaauaaagua

SEQ ID NO: 3125395 - RNA, 19 nt, Human
aucaaagagguuuuaaaaa

SEQ ID NO: 3125396 - RNA, 11 nt, Human
aguuugcaguu

SEQ ID NO: 3125397 - RNA, 14 nt, Human
aguuugauuaaauu

SEQ ID NO: 3125398 - RNA, 17 nt, Human
aguugaaaaacagcuga

SEQ ID NO: 3125399 - RNA, 17 nt, Human
aguugaagacagagcua

SEQ ID NO: 3125400 - RNA, 16 nt, Human
aguugaagacagagcu

SEQ ID NO: 3125401 - RNA, 18 nt, Human
aguugaaaaacagcugag

SEQ ID NO: 3125402 - RNA, 21 nt, Human
aguuccaccaucaagccacca

SEQ ID NO: 3125403 - RNA, 18 nt, Human
aguuccaccaucaagcca

SEQ ID NO: 3125404 - RNA, 14 nt, Human
aguucauacccugu

SEQ ID NO: 3125405 - RNA, 22 nt, Human
aguuguuagugugucuuagugu

SEQ ID NO: 3125406 - RNA, 17 nt, Human
aguuguuagugugucuu

SEQ ID NO: 3125407 - RNA, 17 nt, Human
auacaccacuacauucu

SEQ ID NO: 3125408 - RNA, 21 nt, Human
auaaagaugagugagcaugcc

SEQ ID NO: 3125409 - RNA, 12 nt, Human
auaauguuaaca

SEQ ID NO: 3125410 - RNA, 23 nt, Human
auacaaugcugugcccuaaagug

SEQ ID NO: 3125411 - RNA, 17 nt, Human
auacaaugcugugcccu

SEQ ID NO: 3125412 - RNA, 15 nt, Human
auacaccacuacauu

SEQ ID NO: 3125413 - RNA, 17 nt, Human
aguaacuuacuuaggug

SEQ ID NO: 3125414 - RNA, 21 nt, Human
aguaaaugggggugcauuuga

SEQ ID NO: 3125415 - RNA, 19 nt, Human
aguaaaugggggugcauuu

SEQ ID NO: 3125416 - RNA, 20 nt, Human
aguaaaugggggugcauuug

SEQ ID NO: 3125417 - RNA, 18 nt, Human
aguaaaugggggugcauu

SEQ ID NO: 3125418 - RNA, 15 nt, Human
aguacuggagaaaau

SEQ ID NO: 3125419 - RNA, 20 nt, Human
aguacuucuccacccugcuc

SEQ ID NO: 3125420 - RNA, 19 nt, Human
aguacuucuccacccugcu

SEQ ID NO: 3125421 - RNA, 21 nt, Human
aguacuucuccacccugcucu

SEQ ID NO: 3125422 - RNA, 18 nt, Human
agucuggcccuuccuuuu

SEQ ID NO: 3125423 - RNA, 21 nt, Human
agucugauucccaagcucugc

SEQ ID NO: 3125424 - RNA, 22 nt, Human
agucugauucccaagcucugcu

SEQ ID NO: 3125425 - RNA, 20 nt, Human
agucugauucccaagcucug

SEQ ID NO: 3125426 - RNA, 18 nt, Human
agucuggaaugcaguggu

SEQ ID NO: 3125427 - RNA, 16 nt, Human
agucgaggacagggag

SEQ ID NO: 3125428 - RNA, 14 nt, Human
aguccucuuuucug

SEQ ID NO: 3125429 - RNA, 18 nt, Human
aguccuuaccagcagagc

SEQ ID NO: 3125430 - RNA, 16 nt, Human
aguccuuaccagcaga

SEQ ID NO: 3125431 - RNA, 19 nt, Human
agugauccucccaccucag

SEQ ID NO: 3125432 - RNA, 20 nt, Human
agugauccucccaccucagc

SEQ ID NO: 3125433 - RNA, 22 nt, Human
agugauccucccaccucagccu

SEQ ID NO: 3125434 - RNA, 19 nt, Human
agugauucuccugccucag

SEQ ID NO: 3125435 - RNA, 18 nt, Human
agugauucuccugccuca

SEQ ID NO: 3125436 - RNA, 20 nt, Human
agugauucuccugccucagc

SEQ ID NO: 3125437 - RNA, 18 nt, Human
agugccuuauggaacacu

SEQ ID NO: 3125438 - RNA, 22 nt, Human
agugccuuauggaacacucuga

SEQ ID NO: 3125439 - RNA, 21 nt, Human
agugccuuauggaacacucug

SEQ ID NO: 3125440 - RNA, 20 nt, Human
agugccuuauggaacacucu

SEQ ID NO: 3125441 - RNA, 19 nt, Human
agugccuuauggaacacuc

SEQ ID NO: 3125442 - RNA, 16 nt, Human
agugacagaggcagcc

SEQ ID NO: 3125443 - RNA, 19 nt, Human
agugacagaggcagcccca

SEQ ID NO: 3125444 - RNA, 14 nt, Human
agugacagaggcag

SEQ ID NO: 3125445 - RNA, 20 nt, Human
caaaggguaucaggugcugc

SEQ ID NO: 3125446 - RNA, 21 nt, Human
caaaggguaucaggugcugcc

SEQ ID NO: 3125447 - RNA, 23 nt, Human
caaaggguaucaggugcugccau

SEQ ID NO: 3125448 - RNA, 17 nt, Human
caaaguggugagaggca

SEQ ID NO: 3125449 - RNA, 16 nt, Human
caaaguggugagaggc

SEQ ID NO: 3125450 - RNA, 20 nt, Human
caaaggagauuggaaggaac

SEQ ID NO: 3125451 - RNA, 14 nt, Human
caaaggagauugga

SEQ ID NO: 3125452 - RNA, 21 nt, Human
caaagagguuuuaaaaaaauc

SEQ ID NO: 3125453 - RNA, 14 nt, Human
caaagagguuuuaa

SEQ ID NO: 3125454 - RNA, 20 nt, Human
caacaggcugggcuucagug

SEQ ID NO: 3125455 - RNA, 17 nt, Human
caacugcaucaagaugu

SEQ ID NO: 3125456 - RNA, 23 nt, Human
caacugcaucaagaugugacaug

SEQ ID NO: 3125457 - RNA, 20 nt, Human
caacugcaucaagaugugac

SEQ ID NO: 3125458 - RNA, 17 nt, Human
caaccugauugugucuc

SEQ ID NO: 3125459 - RNA, 21 nt, Human
caaccugauugugucucuugg

SEQ ID NO: 3125460 - RNA, 19 nt, Human
caaccugauugugucucuu

SEQ ID NO: 3125461 - RNA, 15 nt, Human
caacauacucccauc

SEQ ID NO: 3125462 - RNA, 14 nt, Human
caacauacucccau

SEQ ID NO: 3125463 - RNA, 16 nt, Human
caacauacucccaucu

SEQ ID NO: 3125464 - RNA, 13 nt, Human
caacaggcugggc

SEQ ID NO: 3125465 - RNA, 17 nt, Human
caacaggcugggcuuca

SEQ ID NO: 3125466 - RNA, 14 nt, Human
caacaggcugggcu

SEQ ID NO: 3125467 - RNA, 14 nt, Human
caagugagacccug

SEQ ID NO: 3125468 - RNA, 23 nt, Human
caagugaaaaaggaggaagagaa

SEQ ID NO: 3125469 - RNA, 22 nt, Human
caagugaaaaaggaggaagaga

SEQ ID NO: 3125470 - RNA, 19 nt, Human
caagugauucuccugccuc

SEQ ID NO: 3125471 - RNA, 18 nt, Human
caagugauucuccugccu

SEQ ID NO: 3125472 - RNA, 15 nt, Human
caagugagacccugu

SEQ ID NO: 3125473 - RNA, 20 nt, Human
caagugauucuccugccuca

SEQ ID NO: 3125474 - RNA, 21 nt, Human
caaggggaauguuugccucug

SEQ ID NO: 3125475 - RNA, 15 nt, Human
caagggccuggccug

SEQ ID NO: 3125476 - RNA, 14 nt, Human
caagggccuggccu

SEQ ID NO: 3125477 - RNA, 13 nt, Human
caagggccuggcc

SEQ ID NO: 3125478 - RNA, 23 nt, Human
caaggggaauguuugccucugcc

SEQ ID NO: 3125479 - RNA, 23 nt, Human
caagacccuuguggucccacccc

SEQ ID NO: 3125480 - RNA, 22 nt, Human
caagacgcugugcugcccugcc

SEQ ID NO: 3125481 - RNA, 21 nt, Human
caagacgcugugcugcccugc

SEQ ID NO: 3125482 - RNA, 20 nt, Human
caagacgcugugcugcccug

SEQ ID NO: 3125483 - RNA, 19 nt, Human
caagacgcugugcugcccu

SEQ ID NO: 3125484 - RNA, 13 nt, Human
caagaccuucucc

SEQ ID NO: 3125485 - RNA, 12 nt, Human
caagagggucug

SEQ ID NO: 3125486 - RNA, 16 nt, Human
caagagggucugagga

SEQ ID NO: 3125487 - RNA, 17 nt, Human
caagagggucugaggaa

SEQ ID NO: 3125488 - RNA, 17 nt, Human
caagagcccaggccucc

SEQ ID NO: 3125489 - RNA, 14 nt, Human
caaggcugucaauu

SEQ ID NO: 3125490 - RNA, 13 nt, Human
caaggcugucaau

SEQ ID NO: 3125491 - RNA, 21 nt, Human
caaggcugggggaagaagcuc

SEQ ID NO: 3125492 - RNA, 18 nt, Human
caaggcugggggaagaag

SEQ ID NO: 3125493 - RNA, 16 nt, Human
caaggauccugagcca

SEQ ID NO: 3125494 - RNA, 15 nt, Human
caaggauccugagcc

SEQ ID NO: 3125495 - RNA, 14 nt, Human
caaggauccugagc

SEQ ID NO: 3125496 - RNA, 20 nt, Human
caaugcaaaccaucauugaa

SEQ ID NO: 3125497 - RNA, 23 nt, Human
caaugcaaaccaucauugaaauc

SEQ ID NO: 3125498 - RNA, 14 nt, Human
caaugcacugacau

SEQ ID NO: 3125499 - RNA, 13 nt, Human
caaugcacuuugu

SEQ ID NO: 3125500 - RNA, 14 nt, Human
caaugauggucacc

SEQ ID NO: 3125501 - RNA, 22 nt, Human
caaugcaaaccaucauugaaau

SEQ ID NO: 3125502 - RNA, 21 nt, Human
caaugcaaaccaucauugaaa

SEQ ID NO: 3125503 - RNA, 13 nt, Human
caaugaccuuuca

SEQ ID NO: 3125504 - RNA, 14 nt, Human
caaugaccuuucaa

SEQ ID NO: 3125505 - RNA, 13 nt, Human
caaugauggucac

SEQ ID NO: 3125506 - RNA, 16 nt, Human
caaugaccuuucaaua

SEQ ID NO: 3125507 - RNA, 15 nt, Human
caaugaccuuucaau

SEQ ID NO: 3125508 - RNA, 17 nt, Human
cacaaagguagcuuuuc

SEQ ID NO: 3125509 - RNA, 17 nt, Human
cacaaacgggcucagca

SEQ ID NO: 3125510 - RNA, 15 nt, Human
cacaaacagaggccg

SEQ ID NO: 3125511 - RNA, 14 nt, Human
caaugcacuuuguu

SEQ ID NO: 3125512 - RNA, 18 nt, Human
caaugguuuucuugugug

SEQ ID NO: 3125513 - RNA, 17 nt, Human
cacaccgggcacucaga

SEQ ID NO: 3125514 - RNA, 14 nt, Human
cacacccagcccac

SEQ ID NO: 3125515 - RNA, 20 nt, Human
cacacccagcccacuucugc

SEQ ID NO: 3125516 - RNA, 13 nt, Human
cacacagcucugu

SEQ ID NO: 3125517 - RNA, 14 nt, Human
cacacagcucuguc

SEQ ID NO: 3125518 - RNA, 15 nt, Human
cacacagcucugucc

SEQ ID NO: 3125519 - RNA, 21 nt, Human
cacaccagagcccaccuuggc

SEQ ID NO: 3125520 - RNA, 22 nt, Human
cacaccagagcccaccuuggcu

SEQ ID NO: 3125521 - RNA, 13 nt, Human
cacacccagccca

SEQ ID NO: 3125522 - RNA, 15 nt, Human
cacacaccagagccc

SEQ ID NO: 3125523 - RNA, 16 nt, Human
cacacaccagagccca

SEQ ID NO: 3125524 - RNA, 20 nt, Human
cacacaccagagcccaccuu

SEQ ID NO: 3125525 - RNA, 21 nt, Human
cacacagaggcugccucuccc

SEQ ID NO: 3125526 - RNA, 14 nt, Human
cacacacuuuggcu

SEQ ID NO: 3125527 - RNA, 13 nt, Human
cacccaagggccu

SEQ ID NO: 3125528 - RNA, 21 nt, Human
cacaugccucucucaggccaa

SEQ ID NO: 3125529 - RNA, 20 nt, Human
cacaugccucucucaggcca

SEQ ID NO: 3125530 - RNA, 17 nt, Human
cacauguccaagaagcc

SEQ ID NO: 3125531 - RNA, 16 nt, Human
cacauguccaagaagc

SEQ ID NO: 3125532 - RNA, 18 nt, Human
cacaugcacgugugugca

SEQ ID NO: 3125533 - RNA, 20 nt, Human
cacaugcaaggucauuuuuu

SEQ ID NO: 3125534 - RNA, 17 nt, Human
cacaugcaaggucauuu

SEQ ID NO: 3125535 - RNA, 19 nt, Human
cacaugcaaggucauuuuu

SEQ ID NO: 3125536 - RNA, 21 nt, Human
cacaugagcaucaggccaggc

SEQ ID NO: 3125537 - RNA, 20 nt, Human
cacaugagcaucaggccagg

SEQ ID NO: 3125538 - RNA, 19 nt, Human
cacaugagcaucaggccag

SEQ ID NO: 3125539 - RNA, 18 nt, Human
cacaugagcaucaggcca

SEQ ID NO: 3125540 - RNA, 17 nt, Human
cacaugagcaucaggcc

SEQ ID NO: 3125541 - RNA, 13 nt, Human
cacaugagcauca

SEQ ID NO: 3125542 - RNA, 17 nt, Human
cacaggaucagucugau

SEQ ID NO: 3125543 - RNA, 19 nt, Human
cacagcucuucuccaggcu

SEQ ID NO: 3125544 - RNA, 20 nt, Human
cacagcucuucuccaggcug

SEQ ID NO: 3125545 - RNA, 14 nt, Human
cacaggcccggcuc

SEQ ID NO: 3125546 - RNA, 23 nt, Human
cacaguccuuaccagcagagcac

SEQ ID NO: 3125547 - RNA, 19 nt, Human
cacaggcagguccaggguu

SEQ ID NO: 3125548 - RNA, 18 nt, Human
cacagcucuucuccaggc

SEQ ID NO: 3125549 - RNA, 22 nt, Human
cacacggacacucaaaagcugg

SEQ ID NO: 3125550 - RNA, 18 nt, Human
caccaucaugucuggcua

SEQ ID NO: 3125551 - RNA, 15 nt, Human
caccaucaugucugg

SEQ ID NO: 3125552 - RNA, 17 nt, Human
caccaucaugucuggcu

SEQ ID NO: 3125553 - RNA, 24 nt, Human
caccaucaagccaccaacauacuc

SEQ ID NO: 3125554 - RNA, 19 nt, Human
caccaucaagccaccaaca

SEQ ID NO: 3125555 - RNA, 17 nt, Human
caccaucaagccaccaa

SEQ ID NO: 3125556 - RNA, 16 nt, Human
caccaucaagccacca

SEQ ID NO: 3125557 - RNA, 13 nt, Human
caccaucaagcca

SEQ ID NO: 3125558 - RNA, 15 nt, Human
caccaucaagccacc

SEQ ID NO: 3125559 - RNA, 14 nt, Human
caccaucaagccac

SEQ ID NO: 3125560 - RNA, 21 nt, Human
caccauauuaccacagacaua

SEQ ID NO: 3125561 - RNA, 12 nt, Human
caccaagcccag

SEQ ID NO: 3125562 - RNA, 13 nt, Human
caccaagcccagu

SEQ ID NO: 3125563 - RNA, 17 nt, Human
caccaacgucugugcca

SEQ ID NO: 3125564 - RNA, 16 nt, Human
caccaacgucugugcc

SEQ ID NO: 3125565 - RNA, 22 nt, Human
cacauguccaagaagcccagga

SEQ ID NO: 3125566 - RNA, 21 nt, Human
cacauguccaagaagcccagg

SEQ ID NO: 3125567 - RNA, 19 nt, Human
cacauguccaagaagccca

SEQ ID NO: 3125568 - RNA, 18 nt, Human
cacauguccaagaagccc

SEQ ID NO: 3125569 - RNA, 17 nt, Human
caccagagcccaccuug

SEQ ID NO: 3125570 - RNA, 18 nt, Human
caccagagcccaccuugg

SEQ ID NO: 3125571 - RNA, 20 nt, Human
caccagagcccaccuuggcu

SEQ ID NO: 3125572 - RNA, 22 nt, Human
caccagagcccaccuuggcuca

SEQ ID NO: 3125573 - RNA, 15 nt, Human
caccagagcccaccu

SEQ ID NO: 3125574 - RNA, 19 nt, Human
caccacacccagcccacuu

SEQ ID NO: 3125575 - RNA, 17 nt, Human
caccacacccagcccac

SEQ ID NO: 3125576 - RNA, 15 nt, Human
ucccucccucuuucc

SEQ ID NO: 3125577 - RNA, 17 nt, Human
ucccucccucuuucccu

SEQ ID NO: 3125578 - RNA, 15 nt, Human
ucccuacuguaauuu

SEQ ID NO: 3125579 - RNA, 19 nt, Human
uccccuguagagugggagc

SEQ ID NO: 3125580 - RNA, 24 nt, Human
uccccugcuggguguggcgcagca

SEQ ID NO: 3125581 - RNA, 23 nt, Human
uccccuguccccgcacugggcuu

SEQ ID NO: 3125582 - RNA, 22 nt, Human
uccccuguagagugggagcuga

SEQ ID NO: 3125583 - RNA, 21 nt, Human
uccccugcuggguguggcgca

SEQ ID NO: 3125584 - RNA, 20 nt, Human
uccccugcuggguguggcgc

SEQ ID NO: 3125585 - RNA, 15 nt, Human
uccccugcugggugu

SEQ ID NO: 3125586 - RNA, 14 nt, Human
uccccugcugggug

SEQ ID NO: 3125587 - RNA, 21 nt, Human
ucccccuuccauggacuuugu

SEQ ID NO: 3125588 - RNA, 20 nt, Human
uccccgcacugggcuugggg

SEQ ID NO: 3125589 - RNA, 22 nt, Human
ucccccagccccauccucugua

SEQ ID NO: 3125590 - RNA, 23 nt, Human
uccagcucaccagccccagugcc

SEQ ID NO: 3125591 - RNA, 21 nt, Human
ucccaaagugcugggauuaca

SEQ ID NO: 3125592 - RNA, 15 nt, Human
uccauggacuuuguu

SEQ ID NO: 3125593 - RNA, 14 nt, Human
uccauggacuuugu

SEQ ID NO: 3125594 - RNA, 13 nt, Human
uccauggacuuug

SEQ ID NO: 3125595 - RNA, 17 nt, Human
ucccaagcucugcuccu

SEQ ID NO: 3125596 - RNA, 12 nt, Human
ucccaagcucug

SEQ ID NO: 3125597 - RNA, 13 nt, Human
ucccaagcucugc

SEQ ID NO: 3125598 - RNA, 14 nt, Human
ucccaagcucugcu

SEQ ID NO: 3125599 - RNA, 15 nt, Human
ucccaagcucugcuc

SEQ ID NO: 3125600 - RNA, 16 nt, Human
ucccaacucaccccag

SEQ ID NO: 3125601 - RNA, 15 nt, Human
ucccaacucacccca

SEQ ID NO: 3125602 - RNA, 14 nt, Human
ucccaacucacccc

SEQ ID NO: 3125603 - RNA, 13 nt, Human
ucccaacucaccc

SEQ ID NO: 3125604 - RNA, 13 nt, Human
ucccaccucagcc

SEQ ID NO: 3125605 - RNA, 14 nt, Human
ucccaccucagccu

SEQ ID NO: 3125606 - RNA, 15 nt, Human
ucccaccucagccuc

SEQ ID NO: 3125607 - RNA, 21 nt, Human
ucccaggcauuccccaggagg

SEQ ID NO: 3125608 - RNA, 20 nt, Human
ucccaggcauuccccaggag

SEQ ID NO: 3125609 - RNA, 19 nt, Human
ucccaggcauuccccagga

SEQ ID NO: 3125610 - RNA, 22 nt, Human
ucccaggcauuccccaggaggc

SEQ ID NO: 3125611 - RNA, 23 nt, Human
ucccaucucacacaugagcauca

SEQ ID NO: 3125612 - RNA, 20 nt, Human
ucccaucucacacaugagca

SEQ ID NO: 3125613 - RNA, 22 nt, Human
uccccacuugagaauuacccuu

SEQ ID NO: 3125614 - RNA, 13 nt, Human
uccaccugccagg

SEQ ID NO: 3125615 - RNA, 14 nt, Human
uccacaagagccca

SEQ ID NO: 3125616 - RNA, 22 nt, Human
uccaagcaggacauggacaagg

SEQ ID NO: 3125617 - RNA, 12 nt, Human
uccaccugccag

SEQ ID NO: 3125618 - RNA, 17 nt, Human
uccaaaauaaaacuuuu

SEQ ID NO: 3125619 - RNA, 16 nt, Human
uccaaaauaaaacuuu

SEQ ID NO: 3125620 - RNA, 19 nt, Human
uccaagaagcccaggaaag

SEQ ID NO: 3125621 - RNA, 22 nt, Human
uccaagaagcccaggaaaggcu

SEQ ID NO: 3125622 - RNA, 20 nt, Human
uccaagaagcccaggaaagg

SEQ ID NO: 3125623 - RNA, 15 nt, Human
ucauacccaccccca

SEQ ID NO: 3125624 - RNA, 14 nt, Human
ucauacccaccccc

SEQ ID NO: 3125625 - RNA, 20 nt, Human
ucauacccacccccacccaa

SEQ ID NO: 3125626 - RNA, 16 nt, Human
ucauuaggugugacug

SEQ ID NO: 3125627 - RNA, 18 nt, Human
ucauuaggugugacugaa

SEQ ID NO: 3125628 - RNA, 21 nt, Human
ucauuaggugugacugaauuu

SEQ ID NO: 3125629 - RNA, 24 nt, Human
ucagucugauucccaagcucugcu

SEQ ID NO: 3125630 - RNA, 15 nt, Human
ucagucuggcccuuc

SEQ ID NO: 3125631 - RNA, 23 nt, Human
ucagugguuggcaauuguuucaa

SEQ ID NO: 3125632 - RNA, 13 nt, Human
ucagugugacuga

SEQ ID NO: 3125633 - RNA, 17 nt, Human
ucagugugacugaucuc

SEQ ID NO: 3125634 - RNA, 13 nt, Human
ucauacccacccc

SEQ ID NO: 3125635 - RNA, 13 nt, Human
ucauaaugacuua

SEQ ID NO: 3125636 - RNA, 14 nt, Human
ucacggaagagccu

SEQ ID NO: 3125637 - RNA, 17 nt, Human
ucacggaagagccuugc

SEQ ID NO: 3125638 - RNA, 16 nt, Human
ucacggaagagccuug

SEQ ID NO: 3125639 - RNA, 13 nt, Human
ucacggcucacug

SEQ ID NO: 3125640 - RNA, 15 nt, Human
ucacggcucacugca

SEQ ID NO: 3125641 - RNA, 20 nt, Human
ucacggcucacugcagccuc

SEQ ID NO: 3125642 - RNA, 13 nt, Human
ucacuccuugaaa

SEQ ID NO: 3125643 - RNA, 23 nt, Human
ucacucuccuuggugucgggcau

SEQ ID NO: 3125644 - RNA, 13 nt, Human
ucacucuggcagc

SEQ ID NO: 3125645 - RNA, 12 nt, Human
ucacucuggcag

SEQ ID NO: 3125646 - RNA, 14 nt, Human
ucacucuccuuggu

SEQ ID NO: 3125647 - RNA, 12 nt, Human
ucacucuccuug

SEQ ID NO: 3125648 - RNA, 22 nt, Human
ucacucuggcagcucagagagg

SEQ ID NO: 3125649 - RNA, 20 nt, Human
ucacucuggcagcucagaga

SEQ ID NO: 3125650 - RNA, 19 nt, Human
ucacucuggcagcucagag

SEQ ID NO: 3125651 - RNA, 18 nt, Human
ucacucuggcagcucaga

SEQ ID NO: 3125652 - RNA, 17 nt, Human
ucacucuggcagcucag

SEQ ID NO: 3125653 - RNA, 16 nt, Human
ucacucuggcagcuca

SEQ ID NO: 3125654 - RNA, 15 nt, Human
ucacucuggcagcuc

SEQ ID NO: 3125655 - RNA, 14 nt, Human
ucacucuggcagcu

SEQ ID NO: 3125656 - RNA, 12 nt, Human
ucaccuuugucc

SEQ ID NO: 3125657 - RNA, 14 nt, Human
ucaccuuucccauc

SEQ ID NO: 3125658 - RNA, 19 nt, Human
ucacaggcagguccagggu

SEQ ID NO: 3125659 - RNA, 12 nt, Human
ucacaggcaggu

SEQ ID NO: 3125660 - RNA, 15 nt, Human
ucacaggcaggucca

SEQ ID NO: 3125661 - RNA, 22 nt, Human
ucaccuuuguccccaccgcaga

SEQ ID NO: 3125662 - RNA, 18 nt, Human
ucaccuuuguccccaccg

SEQ ID NO: 3125663 - RNA, 17 nt, Human
ucaccuuuguccccacc

SEQ ID NO: 3125664 - RNA, 15 nt, Human
ucaccuuugucccca

SEQ ID NO: 3125665 - RNA, 14 nt, Human
ucaccuuugucccc

SEQ ID NO: 3125666 - RNA, 19 nt, Human
ucacgccuguaauccuagc

SEQ ID NO: 3125667 - RNA, 20 nt, Human
ucacgccuguaauccuagca

SEQ ID NO: 3125668 - RNA, 13 nt, Human
ucacgccacugca

SEQ ID NO: 3125669 - RNA, 14 nt, Human
ucacgccacugcac

SEQ ID NO: 3125670 - RNA, 16 nt, Human
ucacgccacugcacua

SEQ ID NO: 3125671 - RNA, 14 nt, Human
ucagacagcugccu

SEQ ID NO: 3125672 - RNA, 20 nt, Human
ucagacagcugccugggauc

SEQ ID NO: 3125673 - RNA, 19 nt, Human
ucagacagcugccugggau

SEQ ID NO: 3125674 - RNA, 18 nt, Human
ucagacagcugccuggga

SEQ ID NO: 3125675 - RNA, 17 nt, Human
ucagacagcugccuggg

SEQ ID NO: 3125676 - RNA, 16 nt, Human
ucagacagcugccugg

SEQ ID NO: 3125677 - RNA, 15 nt, Human
ucagacagcugccug

SEQ ID NO: 3125678 - RNA, 18 nt, Human
ucagcacgauuucuguuu

SEQ ID NO: 3125679 - RNA, 19 nt, Human
ucagcacgauuucuguuua

SEQ ID NO: 3125680 - RNA, 19 nt, Human
ucacucugucgcccagucu

SEQ ID NO: 3125681 - RNA, 12 nt, Human
ucacucugucgc

SEQ ID NO: 3125682 - RNA, 16 nt, Human
ucacucugucgcccag

SEQ ID NO: 3125683 - RNA, 15 nt, Human
ucacugcuuaacuuc

SEQ ID NO: 3125684 - RNA, 17 nt, Human
ucacugcuuaacuucac

SEQ ID NO: 3125685 - RNA, 18 nt, Human
ucacugcuuaacuucaca

SEQ ID NO: 3125686 - RNA, 19 nt, Human
ucaauuacaggaaguacug

SEQ ID NO: 3125687 - RNA, 21 nt, Human
ucacacaguauuacuucugcu

SEQ ID NO: 3125688 - RNA, 22 nt, Human
ucacacaguauuacuucugcua

SEQ ID NO: 3125689 - RNA, 13 nt, Human
ucacacagugagu

SEQ ID NO: 3125690 - RNA, 21 nt, Human
ucacacaugagcaucaggcca

SEQ ID NO: 3125691 - RNA, 22 nt, Human
ucacacagugagucgaggacag

SEQ ID NO: 3125692 - RNA, 23 nt, Human
ucacacagugagucgaggacagg

SEQ ID NO: 3125693 - RNA, 11 nt, Human
ucacaggcagg

SEQ ID NO: 3125694 - RNA, 13 nt, Human
ucaauaggaaaaa

SEQ ID NO: 3125695 - RNA, 14 nt, Human
ucaaugcacugaca

SEQ ID NO: 3125696 - RNA, 14 nt, Human
ucaauaggaaaaac

SEQ ID NO: 3125697 - RNA, 18 nt, Human
ucaaugcacugacauugu

SEQ ID NO: 3125698 - RNA, 18 nt, Human
ucaauuacaggaaguacu

SEQ ID NO: 3125699 - RNA, 13 nt, Human
ucaauuacaggaa

SEQ ID NO: 3125700 - RNA, 19 nt, Human
ucaaggauccugagccaga

SEQ ID NO: 3125701 - RNA, 18 nt, Human
ucaaggauccugagccag

SEQ ID NO: 3125702 - RNA, 22 nt, Human
ucaagugauucuccugccucag

SEQ ID NO: 3125703 - RNA, 17 nt, Human
ucaaggauccugagcca

SEQ ID NO: 3125704 - RNA, 21 nt, Human
ucaagugauucuccugccuca

SEQ ID NO: 3125705 - RNA, 20 nt, Human
ucaaggauccugagccagau

SEQ ID NO: 3125706 - RNA, 16 nt, Human
ucaagcgauucuucug

SEQ ID NO: 3125707 - RNA, 21 nt, Human
ucaagcgauucuucugcuuca

SEQ ID NO: 3125708 - RNA, 13 nt, Human
ucaaccuccuggg

SEQ ID NO: 3125709 - RNA, 14 nt, Human
ucaaccuccugggc

SEQ ID NO: 3125710 - RNA, 22 nt, Human
ucaaacucuugaccucagguga

SEQ ID NO: 3125711 - RNA, 15 nt, Human
ucaaacuuuacuaug

SEQ ID NO: 3125712 - RNA, 13 nt, Human
ucaaacuuuacua

SEQ ID NO: 3125713 - RNA, 16 nt, Human
ucaaacuuuacuaugg

SEQ ID NO: 3125714 - RNA, 20 nt, Human
uaucugaaaauguaugugua

SEQ ID NO: 3125715 - RNA, 14 nt, Human
uaucugaaaaugua

SEQ ID NO: 3125716 - RNA, 15 nt, Human
uaucugaaaauguau

SEQ ID NO: 3125717 - RNA, 23 nt, Human
uauuuauuaaaugcccagccccu

SEQ ID NO: 3125718 - RNA, 14 nt, Human
ucaaacucuuaaaa

SEQ ID NO: 3125719 - RNA, 22 nt, Human
ucaaaacgguuuuacugcagcu

SEQ ID NO: 3125720 - RNA, 15 nt, Human
uauuuuuuuacuaau

SEQ ID NO: 3125721 - RNA, 23 nt, Human
ucgcugugucagcauagaaguaa

SEQ ID NO: 3125722 - RNA, 17 nt, Human
ucgaguuacagacaaag

SEQ ID NO: 3125723 - RNA, 15 nt, Human
ucgaguuacagacaa

SEQ ID NO: 3125724 - RNA, 15 nt, Human
uccugguguggaaga

SEQ ID NO: 3125725 - RNA, 17 nt, Human
uccuggcccacugcauc

SEQ ID NO: 3125726 - RNA, 22 nt, Human
uccuggcaugggaaugaauguc

SEQ ID NO: 3125727 - RNA, 10 nt, Human
ucccucccuu

SEQ ID NO: 3125728 - RNA, 12 nt, Human
uccuucuguccu

SEQ ID NO: 3125729 - RNA, 19 nt, Human
uccuucuguccuacucugu

SEQ ID NO: 3125730 - RNA, 19 nt, Human
ucuagggaaaaaccagcgu

SEQ ID NO: 3125731 - RNA, 22 nt, Human
ucuagggaaaaaccagcgugug

SEQ ID NO: 3125732 - RNA, 22 nt, Human
ucuacugaggugcuauguucuu

SEQ ID NO: 3125733 - RNA, 15 nt, Human
ucuacacugugcuga

SEQ ID NO: 3125734 - RNA, 18 nt, Human
ucuacugaggugcuaugu

SEQ ID NO: 3125735 - RNA, 19 nt, Human
ucuacugaggugcuauguu

SEQ ID NO: 3125736 - RNA, 14 nt, Human
ucuacacugugcug

SEQ ID NO: 3125737 - RNA, 12 nt, Human
ucuacacugugc

SEQ ID NO: 3125738 - RNA, 15 nt, Human
ucuaacuucaccaua

SEQ ID NO: 3125739 - RNA, 16 nt, Human
ucuaacuucaccauau

SEQ ID NO: 3125740 - RNA, 22 nt, Human
ucuaaaucuccaaaauaaaacu

SEQ ID NO: 3125741 - RNA, 17 nt, Human
ucucacuguugcccagg

SEQ ID NO: 3125742 - RNA, 17 nt, Human
ucucagaaucucaaaua

SEQ ID NO: 3125743 - RNA, 21 nt, Human
ucucagaaucucaaauaacua

SEQ ID NO: 3125744 - RNA, 18 nt, Human
ucucacuguugcccaggc

SEQ ID NO: 3125745 - RNA, 19 nt, Human
ucucacuguugcccaggcu

SEQ ID NO: 3125746 - RNA, 20 nt, Human
ucucacuguugcccaggcug

SEQ ID NO: 3125747 - RNA, 21 nt, Human
ucucacuguugcccaggcugg

SEQ ID NO: 3125748 - RNA, 18 nt, Human
ucucacucugucgcccag

SEQ ID NO: 3125749 - RNA, 16 nt, Human
ucucacucugucgccc

SEQ ID NO: 3125750 - RNA, 17 nt, Human
ucucacucugucgccca

SEQ ID NO: 3125751 - RNA, 22 nt, Human
ucucaaacucuugaccucaggu

SEQ ID NO: 3125752 - RNA, 13 nt, Human
ucucaaacucuug

SEQ ID NO: 3125753 - RNA, 21 nt, Human
ucucaaacucuugaccucagg

SEQ ID NO: 3125754 - RNA, 14 nt, Human
ucugacccaugcug

SEQ ID NO: 3125755 - RNA, 15 nt, Human
ucugacccacugcuu

SEQ ID NO: 3125756 - RNA, 20 nt, Human
ucugaacuuggcgcugcccc

SEQ ID NO: 3125757 - RNA, 24 nt, Human
ucugagaucaaaacgguuuuacug

SEQ ID NO: 3125758 - RNA, 18 nt, Human
ucugacccaugcugcccu

SEQ ID NO: 3125759 - RNA, 17 nt, Human
ucugacccaugcugccc

SEQ ID NO: 3125760 - RNA, 16 nt, Human
ucugacccaugcugcc

SEQ ID NO: 3125761 - RNA, 15 nt, Human
ucugacccaugcugc

SEQ ID NO: 3125762 - RNA, 19 nt, Human
ucugcacaagcugcacccu

SEQ ID NO: 3125763 - RNA, 14 nt, Human
ucugcacaagcugc

SEQ ID NO: 3125764 - RNA, 23 nt, Human
ucugauucccaagcucugcuccu

SEQ ID NO: 3125765 - RNA, 16 nt, Human
ucugaggaauccagac

SEQ ID NO: 3125766 - RNA, 17 nt, Human
ucugaggaauccagacc

SEQ ID NO: 3125767 - RNA, 20 nt, Human
ucugaggacacuaaccacgc

SEQ ID NO: 3125768 - RNA, 23 nt, Human
ucugaggacacuaaccacgcugg

SEQ ID NO: 3125769 - RNA, 16 nt, Human
ucugaaaauguaugug

SEQ ID NO: 3125770 - RNA, 15 nt, Human
ucucuuuucaaaaca

SEQ ID NO: 3125771 - RNA, 16 nt, Human
ucucuuuucaaaacau

SEQ ID NO: 3125772 - RNA, 14 nt, Human
ucugaaaauguaug

SEQ ID NO: 3125773 - RNA, 23 nt, Human
ucugaaaauguauguguaaguau

SEQ ID NO: 3125774 - RNA, 13 nt, Human
ucugaaagggacg

SEQ ID NO: 3125775 - RNA, 15 nt, Human
ucucuacaaaaagca

SEQ ID NO: 3125776 - RNA, 16 nt, Human
ucucuaguuugauuaa

SEQ ID NO: 3125777 - RNA, 18 nt, Human
ucucuaguuugauuaaau

SEQ ID NO: 3125778 - RNA, 19 nt, Human
ucucuaguuugauuaaauu

SEQ ID NO: 3125779 - RNA, 13 nt, Human
ucucugaggacac

SEQ ID NO: 3125780 - RNA, 22 nt, Human
ucuccugccucagccucccaaa

SEQ ID NO: 3125781 - RNA, 19 nt, Human
ucuccugccucagccuccc

SEQ ID NO: 3125782 - RNA, 20 nt, Human
ucucccccagccccauccuc

SEQ ID NO: 3125783 - RNA, 18 nt, Human
ucucccccagccccaucc

SEQ ID NO: 3125784 - RNA, 13 nt, Human
ucucccccagccc

SEQ ID NO: 3125785 - RNA, 22 nt, Human
ucucccccagccccauccucug

SEQ ID NO: 3125786 - RNA, 14 nt, Human
ucucccccagcccc

SEQ ID NO: 3125787 - RNA, 17 nt, Human
ucucccccagccccauc

SEQ ID NO: 3125788 - RNA, 15 nt, Human
ucucccccagcccca

SEQ ID NO: 3125789 - RNA, 16 nt, Human
ucuuuuugcuuugcuu

SEQ ID NO: 3125790 - RNA, 17 nt, Human
ucuuuugccguuauuaa

SEQ ID NO: 3125791 - RNA, 19 nt, Human
ucuuuugccguuauuaaaa

SEQ ID NO: 3125792 - RNA, 12 nt, Human
ugaaaggaaaga

SEQ ID NO: 3125793 - RNA, 17 nt, Human
ugaaaggaaagaggcuc

SEQ ID NO: 3125794 - RNA, 19 nt, Human
ugaaaugaggucagagccu

SEQ ID NO: 3125795 - RNA, 20 nt, Human
ugaaaugaggucagagccug

SEQ ID NO: 3125796 - RNA, 23 nt, Human
ugaaaugaggucagagccugcag

SEQ ID NO: 3125797 - RNA, 21 nt, Human
ugaaaugaggucagagccugc

SEQ ID NO: 3125798 - RNA, 22 nt, Human
ugaaaugaggucagagccugca

SEQ ID NO: 3125799 - RNA, 15 nt, Human
ugaaagggcccagag

SEQ ID NO: 3125800 - RNA, 16 nt, Human
ugaaagggcccagaga

SEQ ID NO: 3125801 - RNA, 17 nt, Human
ugaaagggcccagagag

SEQ ID NO: 3125802 - RNA, 17 nt, Human
ugaaaucuuuuugcuuu

SEQ ID NO: 3125803 - RNA, 20 nt, Human
ugaaggcucgagcaugccug

SEQ ID NO: 3125804 - RNA, 21 nt, Human
ugaaggcucgagcaugccugg

SEQ ID NO: 3125805 - RNA, 14 nt, Human
ugaagacuuuucuu

SEQ ID NO: 3125806 - RNA, 22 nt, Human
ugaagacuuuucuuucagccaa

SEQ ID NO: 3125807 - RNA, 17 nt, Human
ugaagacuuuucuuuca

SEQ ID NO: 3125808 - RNA, 19 nt, Human
ugaacuggguacuugugga

SEQ ID NO: 3125809 - RNA, 12 nt, Human
ugaacuugguuc

SEQ ID NO: 3125810 - RNA, 14 nt, Human
ugaacuuggcgcug

SEQ ID NO: 3125811 - RNA, 13 nt, Human
ugaagacagagcu

SEQ ID NO: 3125812 - RNA, 16 nt, Human
ugaagacagagcuaca

SEQ ID NO: 3125813 - RNA, 14 nt, Human
ugaagacagagcua

SEQ ID NO: 3125814 - RNA, 19 nt, Human
ugaaccacaucuugcucug

SEQ ID NO: 3125815 - RNA, 18 nt, Human
ugaacucuucaaucucuu

SEQ ID NO: 3125816 - RNA, 20 nt, Human
ugaaccacaucuugcucugc

SEQ ID NO: 3125817 - RNA, 21 nt, Human
ugaaccacaucuugcucugcu

SEQ ID NO: 3125818 - RNA, 22 nt, Human
ugaaccacaucuugcucugcug

SEQ ID NO: 3125819 - RNA, 15 nt, Human
ugaacucuucaaucu

SEQ ID NO: 3125820 - RNA, 13 nt, Human
ugaacugauaaag

SEQ ID NO: 3125821 - RNA, 15 nt, Human
ugaacugauaaagau

SEQ ID NO: 3125822 - RNA, 15 nt, Human
ucuucaguaagccgu

SEQ ID NO: 3125823 - RNA, 13 nt, Human
ucuuaaaaagugg

SEQ ID NO: 3125824 - RNA, 14 nt, Human
ucuuagugugugca

SEQ ID NO: 3125825 - RNA, 16 nt, Human
ucuuaguggauguucu

SEQ ID NO: 3125826 - RNA, 15 nt, Human
ucuuauacauuugau

SEQ ID NO: 3125827 - RNA, 14 nt, Human
ucuuauacauuuga

SEQ ID NO: 3125828 - RNA, 21 nt, Human
ucuucuccacuuucuagccag

SEQ ID NO: 3125829 - RNA, 19 nt, Human
ucuucuccacuuucuagcc

SEQ ID NO: 3125830 - RNA, 14 nt, Human
ucuuccaggcuggg

SEQ ID NO: 3125831 - RNA, 21 nt, Human
ucuuccacaagagcccaggcc

SEQ ID NO: 3125832 - RNA, 16 nt, Human
ucuucaguaagccgug

SEQ ID NO: 3125833 - RNA, 12 nt, Human
ucuugcucugcu

SEQ ID NO: 3125834 - RNA, 13 nt, Human
ucuugcucugcug

SEQ ID NO: 3125835 - RNA, 11 nt, Human
ucuugcucugc

SEQ ID NO: 3125836 - RNA, 16 nt, Human
ucuugaacuccuggcc

SEQ ID NO: 3125837 - RNA, 17 nt, Human
ucuugaacuccuggccu

SEQ ID NO: 3125838 - RNA, 18 nt, Human
ucuugaacuccuggccuc

SEQ ID NO: 3125839 - RNA, 13 nt, Human
ucuucuccaggcu

SEQ ID NO: 3125840 - RNA, 14 nt, Human
ucuucuccaggcug

SEQ ID NO: 3125841 - RNA, 12 nt, Human
ucuucuccaggc

SEQ ID NO: 3125842 - RNA, 21 nt, Human
ucuugaauuguaaggaaugau

SEQ ID NO: 3125843 - RNA, 17 nt, Human
ucuugaauuguaaggaa

SEQ ID NO: 3125844 - RNA, 23 nt, Human
ucuguacagagcccacgccccca

SEQ ID NO: 3125845 - RNA, 17 nt, Human
ucuggcucuuccaggcu

SEQ ID NO: 3125846 - RNA, 16 nt, Human
ucuggcucuuccaggc

SEQ ID NO: 3125847 - RNA, 15 nt, Human
ucuggcucuuccagg

SEQ ID NO: 3125848 - RNA, 12 nt, Human
ucugggacacag

SEQ ID NO: 3125849 - RNA, 14 nt, Human
ucuggcuaugcauu

SEQ ID NO: 3125850 - RNA, 19 nt, Human
ucuguccgagcuuugaaaa

SEQ ID NO: 3125851 - RNA, 22 nt, Human
ucuguggguuucuaaagcugcc

SEQ ID NO: 3125852 - RNA, 17 nt, Human
ucuguacgucugacagg

SEQ ID NO: 3125853 - RNA, 22 nt, Human
ucugugucagguggggcagcuu

SEQ ID NO: 3125854 - RNA, 23 nt, Human
ucuguggguuucuaaagcugcca

SEQ ID NO: 3125855 - RNA, 18 nt, Human
ucuuaaaaaguggaaaaa

SEQ ID NO: 3125856 - RNA, 15 nt, Human
uagaaauauaauuga

SEQ ID NO: 3125857 - RNA, 20 nt, Human
uagaaauaucugaaaaugua

SEQ ID NO: 3125858 - RNA, 21 nt, Human
uagaaauaucugaaaauguau

SEQ ID NO: 3125859 - RNA, 23 nt, Human
uagaaauaucugaaaauguaugu

SEQ ID NO: 3125860 - RNA, 21 nt, Human
uacuguaucaugacaaagacu

SEQ ID NO: 3125861 - RNA, 19 nt, Human
uacuuguggacacagcucu

SEQ ID NO: 3125862 - RNA, 15 nt, Human
uacuuguggacacag

SEQ ID NO: 3125863 - RNA, 18 nt, Human
uacuuguggacacagcuc

SEQ ID NO: 3125864 - RNA, 14 nt, Human
uacuuguggacaca

SEQ ID NO: 3125865 - RNA, 17 nt, Human
uacucccaucugugaaa

SEQ ID NO: 3125866 - RNA, 16 nt, Human
uacucccaucugugaa

SEQ ID NO: 3125867 - RNA, 14 nt, Human
uacucccaucugug

SEQ ID NO: 3125868 - RNA, 12 nt, Human
uacucccaucug

SEQ ID NO: 3125869 - RNA, 15 nt, Human
uacugaggugcuaug

SEQ ID NO: 3125870 - RNA, 16 nt, Human
uacucagaauucucua

SEQ ID NO: 3125871 - RNA, 22 nt, Human
uacucagaauucucuaguuuga

SEQ ID NO: 3125872 - RNA, 12 nt, Human
uacucaccucac

SEQ ID NO: 3125873 - RNA, 14 nt, Human
uacucaccucaccc

SEQ ID NO: 3125874 - RNA, 20 nt, Human
uacuacaguuuguuaguaug

SEQ ID NO: 3125875 - RNA, 17 nt, Human
uacuacaguccucccau

SEQ ID NO: 3125876 - RNA, 12 nt, Human
uacuacaguccu

SEQ ID NO: 3125877 - RNA, 15 nt, Human
uacuaauagacaauu

SEQ ID NO: 3125878 - RNA, 17 nt, Human
uacuaauagacaauuua

SEQ ID NO: 3125879 - RNA, 22 nt, Human
uacuaauaaaauuuaaaagucu

SEQ ID NO: 3125880 - RNA, 19 nt, Human
uacuaaccagcagaaaugc

SEQ ID NO: 3125881 - RNA, 18 nt, Human
uacuaaccagcagaaaug

SEQ ID NO: 3125882 - RNA, 17 nt, Human
uacuaaccagcagaaau

SEQ ID NO: 3125883 - RNA, 22 nt, Human
uacccaucccauaugccugggc

SEQ ID NO: 3125884 - RNA, 18 nt, Human
uaccuuuuuuauacauaa

SEQ ID NO: 3125885 - RNA, 19 nt, Human
uaccuuuuuuauacauaaa

SEQ ID NO: 3125886 - RNA, 20 nt, Human
uaccuuuuuuauacauaaac

SEQ ID NO: 3125887 - RNA, 20 nt, Human
uaccuuuguauucucuccug

SEQ ID NO: 3125888 - RNA, 22 nt, Human
uacacacugcauguuugugauu

SEQ ID NO: 3125889 - RNA, 16 nt, Human
uacacugugcugaguc

SEQ ID NO: 3125890 - RNA, 14 nt, Human
uacacuguuucaaa

SEQ ID NO: 3125891 - RNA, 17 nt, Human
uacacaaugguuuucuu

SEQ ID NO: 3125892 - RNA, 21 nt, Human
uacacaaugguuuucuugugu

SEQ ID NO: 3125893 - RNA, 21 nt, Human
uacacacacacgcgugcacac

SEQ ID NO: 3125894 - RNA, 15 nt, Human
uacacacacauacac

SEQ ID NO: 3125895 - RNA, 17 nt, Human
uacacacugcauguuug

SEQ ID NO: 3125896 - RNA, 17 nt, Human
uacacuguuucaaacuu

SEQ ID NO: 3125897 - RNA, 18 nt, Human
uacacuguuucaaacuuu

SEQ ID NO: 3125898 - RNA, 13 nt, Human
uacacuuuaugca

SEQ ID NO: 3125899 - RNA, 24 nt, Human
uacagcaaggagauuuacaacugg

SEQ ID NO: 3125900 - RNA, 19 nt, Human
uacaggaaaagcugcugac

SEQ ID NO: 3125901 - RNA, 16 nt, Human
uacaggcacccaccau

SEQ ID NO: 3125902 - RNA, 23 nt, Human
uacagcuugaccgugaggccaga

SEQ ID NO: 3125903 - RNA, 17 nt, Human
uacaggaaaagcugcug

SEQ ID NO: 3125904 - RNA, 18 nt, Human
uacaggaaaagcugcuga

SEQ ID NO: 3125905 - RNA, 22 nt, Human
uacagcuugaccgugaggccag

SEQ ID NO: 3125906 - RNA, 21 nt, Human
uacagcuugaccgugaggcca

SEQ ID NO: 3125907 - RNA, 13 nt, Human
uaccacagacaua

SEQ ID NO: 3125908 - RNA, 23 nt, Human
uaccauuuugggguacccacugc

SEQ ID NO: 3125909 - RNA, 15 nt, Human
uacccacccccaccc

SEQ ID NO: 3125910 - RNA, 12 nt, Human
uacccaccccca

SEQ ID NO: 3125911 - RNA, 23 nt, Human
uacccacccccacccaagggccu

SEQ ID NO: 3125912 - RNA, 19 nt, Human
uacccacccccacccaagg

SEQ ID NO: 3125913 - RNA, 17 nt, Human
uacccacccccacccaa

SEQ ID NO: 3125914 - RNA, 11 nt, Human
uacccacugcu

SEQ ID NO: 3125915 - RNA, 12 nt, Human
uacccacugcuc

SEQ ID NO: 3125916 - RNA, 13 nt, Human
uacccacugcucu

SEQ ID NO: 3125917 - RNA, 14 nt, Human
uacccacugcucug

SEQ ID NO: 3125918 - RNA, 16 nt, Human
uacccagcgagcccug

SEQ ID NO: 3125919 - RNA, 18 nt, Human
uacccagcgagcccuggu

SEQ ID NO: 3125920 - RNA, 22 nt, Human
uacccaggugcuaggaacacuc

SEQ ID NO: 3125921 - RNA, 22 nt, Human
uacauaagauaaaugugcugaa

SEQ ID NO: 3125922 - RNA, 18 nt, Human
uacauaagauaaaugugc

SEQ ID NO: 3125923 - RNA, 19 nt, Human
uacauaagauaaaugugcu

SEQ ID NO: 3125924 - RNA, 23 nt, Human
uacaguuacucagaauucucuag

SEQ ID NO: 3125925 - RNA, 19 nt, Human
uacaguuacucagaauucu

SEQ ID NO: 3125926 - RNA, 13 nt, Human
uaguuucuccaag

SEQ ID NO: 3125927 - RNA, 23 nt, Human
uaguuugauuaaauucuugcaaa

SEQ ID NO: 3125928 - RNA, 12 nt, Human
uaguuugcaguu

SEQ ID NO: 3125929 - RNA, 15 nt, Human
uaguggauguucuga

SEQ ID NO: 3125930 - RNA, 18 nt, Human
uauaaugaaugaaacauu

SEQ ID NO: 3125931 - RNA, 20 nt, Human
uauaaugaaugaaacauuuu

SEQ ID NO: 3125932 - RNA, 21 nt, Human
uaguuugauuaaauucuugca

SEQ ID NO: 3125933 - RNA, 14 nt, Human
uauaauguaagcuc

SEQ ID NO: 3125934 - RNA, 19 nt, Human
uauaauguaagcucuacug

SEQ ID NO: 3125935 - RNA, 20 nt, Human
uauaauguaagcucuacuga

SEQ ID NO: 3125936 - RNA, 17 nt, Human
uauaauucuacuuugag

SEQ ID NO: 3125937 - RNA, 16 nt, Human
uaucaugacaaagacu

SEQ ID NO: 3125938 - RNA, 19 nt, Human
uaucgucacugcuuaacuu

SEQ ID NO: 3125939 - RNA, 16 nt, Human
uaucgucacugcuuaa

SEQ ID NO: 3125940 - RNA, 15 nt, Human
uaucuaaauguugaa

SEQ ID NO: 3125941 - RNA, 11 nt, Human
uagagacaggg

SEQ ID NO: 3125942 - RNA, 21 nt, Human
uagagguucaaagauauuuug

SEQ ID NO: 3125943 - RNA, 19 nt, Human
uagagguucaaagauauuu

SEQ ID NO: 3125944 - RNA, 16 nt, Human
uagagguucaaagaua

SEQ ID NO: 3125945 - RNA, 16 nt, Human
uagagagagaccacuu

SEQ ID NO: 3125946 - RNA, 19 nt, Human
uagcagagaaugaaagggc

SEQ ID NO: 3125947 - RNA, 23 nt, Human
uagcagagaaugaaagggcccag

SEQ ID NO: 3125948 - RNA, 16 nt, Human
uagcacuuugggaggc

SEQ ID NO: 3125949 - RNA, 12 nt, Human
uagauguauaua

SEQ ID NO: 3125950 - RNA, 18 nt, Human
uagauaauacaccacuac

SEQ ID NO: 3125951 - RNA, 11 nt, Human
uagcugggacu

SEQ ID NO: 3125952 - RNA, 18 nt, Human
uagcugggacuacaggug

SEQ ID NO: 3125953 - RNA, 20 nt, Human
uagcugggacuacaggcacc

SEQ ID NO: 3125954 - RNA, 19 nt, Human
uagcugggacuacaggcac

SEQ ID NO: 3125955 - RNA, 22 nt, Human
uagcucauucuccuuguguuac

SEQ ID NO: 3125956 - RNA, 17 nt, Human
uagccugccucuucucu

SEQ ID NO: 3125957 - RNA, 21 nt, Human
uagcucuaggagggcuggcaa

SEQ ID NO: 3125958 - RNA, 14 nt, Human
uagcccaaaaccaa

SEQ ID NO: 3125959 - RNA, 16 nt, Human
uagccuaggugacaga

SEQ ID NO: 3125960 - RNA, 13 nt, Human
uaggccuggccag

SEQ ID NO: 3125961 - RNA, 14 nt, Human
uaggccuggccaga

SEQ ID NO: 3125962 - RNA, 15 nt, Human
uaggaagguuaaugu

SEQ ID NO: 3125963 - RNA, 13 nt, Human
uaggaagacuuug

SEQ ID NO: 3125964 - RNA, 15 nt, Human
uaggaagacuuugga

SEQ ID NO: 3125965 - RNA, 14 nt, Human
uaggaagacuuugg

SEQ ID NO: 3125966 - RNA, 17 nt, Human
uaggaagacuuuggaaa

SEQ ID NO: 3125967 - RNA, 16 nt, Human
uaggaagacuuuggaa

SEQ ID NO: 3125968 - RNA, 14 nt, Human
uaggaacacuccuu

SEQ ID NO: 3125969 - RNA, 13 nt, Human
uaggaacacuccu

SEQ ID NO: 3125970 - RNA, 17 nt, Human
uaggaacacuccuucac

SEQ ID NO: 3125971 - RNA, 21 nt, Human
uaggaacuuaaauaaugugaa

SEQ ID NO: 3125972 - RNA, 19 nt, Human
uaacaggcagauacaggaa

SEQ ID NO: 3125973 - RNA, 16 nt, Human
uaaccagcagaaaugc

SEQ ID NO: 3125974 - RNA, 19 nt, Human
uaaccagcagaaaugccuu

SEQ ID NO: 3125975 - RNA, 14 nt, Human
uaaccagcagaaau

SEQ ID NO: 3125976 - RNA, 20 nt, Human
uaacuuuuauaaacuuuacc

SEQ ID NO: 3125977 - RNA, 12 nt, Human
uaacagaaaugu

SEQ ID NO: 3125978 - RNA, 14 nt, Human
uaacagaaauguac

SEQ ID NO: 3125979 - RNA, 15 nt, Human
uaacagaaauguaca

SEQ ID NO: 3125980 - RNA, 13 nt, Human
uaacagaaaugua

SEQ ID NO: 3125981 - RNA, 22 nt, Human
uaagaggcagggucucacucug

SEQ ID NO: 3125982 - RNA, 22 nt, Human
uaagaaccuuuugagugccuua

SEQ ID NO: 3125983 - RNA, 21 nt, Human
uaacuuuuauaaacuuuaccu

SEQ ID NO: 3125984 - RNA, 22 nt, Human
uaacuuuuauaaacuuuaccuu

SEQ ID NO: 3125985 - RNA, 19 nt, Human
uaacuuuuauaaacuuuac

SEQ ID NO: 3125986 - RNA, 24 nt, Human
uaagaaagacuaucuaaauguuga

SEQ ID NO: 3125987 - RNA, 16 nt, Human
uaagauaaaugugcug

SEQ ID NO: 3125988 - RNA, 17 nt, Human
uaagauaaaugugcuga

SEQ ID NO: 3125989 - RNA, 14 nt, Human
uaagauaaaugugc

SEQ ID NO: 3125990 - RNA, 23 nt, Human
uaagagggagggagggcuccaga

SEQ ID NO: 3125991 - RNA, 22 nt, Human
uaagagggagggagggcuccag

SEQ ID NO: 3125992 - RNA, 12 nt, Human
uaagagggaggg

SEQ ID NO: 3125993 - RNA, 19 nt, Human
uaaggaugcuuguacauaa

SEQ ID NO: 3125994 - RNA, 20 nt, Human
uaaggaugcuuguacauaau

SEQ ID NO: 3125995 - RNA, 21 nt, Human
uaaggaugcuuguacauaaug

SEQ ID NO: 3125996 - RNA, 22 nt, Human
uaaggaugcuuguacauaaugc

SEQ ID NO: 3125997 - RNA, 23 nt, Human
uaaggaugcuuguacauaaugcg

SEQ ID NO: 3125998 - RNA, 18 nt, Human
uaaggaugcuuguacaua

SEQ ID NO: 3125999 - RNA, 21 nt, Human
uaauaguucagguaacaggca

SEQ ID NO: 3126000 - RNA, 20 nt, Human
uaauccucuaggaggucucu

SEQ ID NO: 3126001 - RNA, 11 nt, Human
uaaucuaaaug

SEQ ID NO: 3126002 - RNA, 18 nt, Human
uaauucuuagcucauucu

SEQ ID NO: 3126003 - RNA, 22 nt, Human
uaauugacaggauuauuggaaa

SEQ ID NO: 3126004 - RNA, 20 nt, Human
uaauugacaggauuauugga

SEQ ID NO: 3126005 - RNA, 14 nt, Human
uaaugcgugcauac

SEQ ID NO: 3126006 - RNA, 20 nt, Human
uaauuaaguacuauguauca

SEQ ID NO: 3126007 - RNA, 17 nt, Human
uaauuaaaacacaacau

SEQ ID NO: 3126008 - RNA, 14 nt, Human
uaauuugugauaca

SEQ ID NO: 3126009 - RNA, 15 nt, Human
uaauuugugauacaa

SEQ ID NO: 3126010 - RNA, 18 nt, Human
uaauuugugauacaaugc

SEQ ID NO: 3126011 - RNA, 19 nt, Human
uaauuugugauacaaugcu

SEQ ID NO: 3126012 - RNA, 22 nt, Human
uaauuugugauacaaugcugug

SEQ ID NO: 3126013 - RNA, 22 nt, Human
guuugauuaaauucuugcaaag

SEQ ID NO: 3126014 - RNA, 17 nt, Human
guuugauuaaauucuug

SEQ ID NO: 3126015 - RNA, 19 nt, Human
guuugauuaaauucuugca

SEQ ID NO: 3126016 - RNA, 17 nt, Human
guuuguaaauuaacuuu

SEQ ID NO: 3126017 - RNA, 19 nt, Human
guuuguaaauuaacuuuua

SEQ ID NO: 3126018 - RNA, 16 nt, Human
guuucuaaagcugcca

SEQ ID NO: 3126019 - RNA, 15 nt, Human
guuucuaaagcugcc

SEQ ID NO: 3126020 - RNA, 14 nt, Human
guuucuaaagcugc

SEQ ID NO: 3126021 - RNA, 18 nt, Human
guuugagaucagccuggg

SEQ ID NO: 3126022 - RNA, 16 nt, Human
guuugaaccaagaacu

SEQ ID NO: 3126023 - RNA, 14 nt, Human
guuucagaaaugug

SEQ ID NO: 3126024 - RNA, 18 nt, Human
guuucagaaauguguuau

SEQ ID NO: 3126025 - RNA, 20 nt, Human
guuuccuggcacugcuucca

SEQ ID NO: 3126026 - RNA, 16 nt, Human
guuuccuggcacugcu

SEQ ID NO: 3126027 - RNA, 22 nt, Human
guuuccuggcacugcuuccagu

SEQ ID NO: 3126028 - RNA, 21 nt, Human
guuuccuggcacugcuuccag

SEQ ID NO: 3126029 - RNA, 18 nt, Human
gguuggcaaaaaggcagg

SEQ ID NO: 3126030 - RNA, 21 nt, Human
gguuggccccugcccggcugc

SEQ ID NO: 3126031 - RNA, 15 nt, Human
guuuagauaauacac

SEQ ID NO: 3126032 - RNA, 19 nt, Human
guuuucucuugagagggug

SEQ ID NO: 3126033 - RNA, 12 nt, Human
guuuucucuuga

SEQ ID NO: 3126034 - RNA, 19 nt, Human
guuuuuauggcuuuugugc

SEQ ID NO: 3126035 - RNA, 22 nt, Human
guuuuuauggcuuuugugcauu

SEQ ID NO: 3126036 - RNA, 23 nt, Human
guuuuuauggcuuuugugcauua

SEQ ID NO: 3126037 - RNA, 13 nt, Human
guuuuccugaaga

SEQ ID NO: 3126038 - RNA, 17 nt, Human
guuuucaguguacaugg

SEQ ID NO: 3126039 - RNA, 16 nt, Human
guuuucaguguacaug

SEQ ID NO: 3126040 - RNA, 23 nt, Human
uaaaaaacugcugacuguuuucu

SEQ ID NO: 3126041 - RNA, 20 nt, Human
uaaaaaacugcugacuguuu

SEQ ID NO: 3126042 - RNA, 21 nt, Human
uaaaguguauuuuuuuacuaa

SEQ ID NO: 3126043 - RNA, 22 nt, Human
uaaaguguauuuuuuuacuaau

SEQ ID NO: 3126044 - RNA, 23 nt, Human
uaaaguguauuuuuuuacuaaua

SEQ ID NO: 3126045 - RNA, 20 nt, Human
uaaaguguauuuuuuuacua

SEQ ID NO: 3126046 - RNA, 13 nt, Human
uaaaguuucuguu

SEQ ID NO: 3126047 - RNA, 19 nt, Human
uaaaucagccguguaacca

SEQ ID NO: 3126048 - RNA, 16 nt, Human
uaaacuuuaccuuuuu

SEQ ID NO: 3126049 - RNA, 22 nt, Human
uaaacuuuaccuuuuuuauaca

SEQ ID NO: 3126050 - RNA, 14 nt, Human
uaaacuuaaucuaa

SEQ ID NO: 3126051 - RNA, 13 nt, Human
uaaacuuaaucua

SEQ ID NO: 3126052 - RNA, 18 nt, Human
uaaacuuaaucuaaaugg

SEQ ID NO: 3126053 - RNA, 19 nt, Human
uaaacuuaaucuaaaugga

SEQ ID NO: 3126054 - RNA, 18 nt, Human
uaaacaagaccacguuuc

SEQ ID NO: 3126055 - RNA, 23 nt, Human
uaaacaagaccacguuucuaaag

SEQ ID NO: 3126056 - RNA, 18 nt, Human
ugcuuccagugaggcucu

SEQ ID NO: 3126057 - RNA, 20 nt, Human
ugcuuccagugaggcucugc

SEQ ID NO: 3126058 - RNA, 19 nt, Human
ugcuuccagugaggcucug

SEQ ID NO: 3126059 - RNA, 16 nt, Human
ugcuucuucagagacu

SEQ ID NO: 3126060 - RNA, 15 nt, Human
uggaaaauaaauuau

SEQ ID NO: 3126061 - RNA, 16 nt, Human
uggaaaauaaauuauu

SEQ ID NO: 3126062 - RNA, 12 nt, Human
uggaagacagcu

SEQ ID NO: 3126063 - RNA, 11 nt, Human
uggaagacagc

SEQ ID NO: 3126064 - RNA, 14 nt, Human
uggaagacagcucu

SEQ ID NO: 3126065 - RNA, 20 nt, Human
uggcagugggagcugccugu

SEQ ID NO: 3126066 - RNA, 13 nt, Human
uggcagugggagc

SEQ ID NO: 3126067 - RNA, 14 nt, Human
uggcagugggagcu

SEQ ID NO: 3126068 - RNA, 15 nt, Human
uggcagugggagcug

SEQ ID NO: 3126069 - RNA, 16 nt, Human
uggcagugggagcugc

SEQ ID NO: 3126070 - RNA, 19 nt, Human
uggcagugggagcugccug

SEQ ID NO: 3126071 - RNA, 18 nt, Human
uggcacugcuuccaguga

SEQ ID NO: 3126072 - RNA, 16 nt, Human
uggcacugcuuccagu

SEQ ID NO: 3126073 - RNA, 14 nt, Human
uggcacugcuucca

SEQ ID NO: 3126074 - RNA, 14 nt, Human
uggaugccuggugg

SEQ ID NO: 3126075 - RNA, 19 nt, Human
uggcagcugcgguccaccc

SEQ ID NO: 3126076 - RNA, 21 nt, Human
uggcagcugcgguccacccag

SEQ ID NO: 3126077 - RNA, 22 nt, Human
uggcagcugcgguccacccagg

SEQ ID NO: 3126078 - RNA, 22 nt, Human
uggaggcaugugaugagaggaa

SEQ ID NO: 3126079 - RNA, 12 nt, Human
uggacaggcaug

SEQ ID NO: 3126080 - RNA, 16 nt, Human
uggacaggcauguucu

SEQ ID NO: 3126081 - RNA, 14 nt, Human
uggcugggggccuc

SEQ ID NO: 3126082 - RNA, 22 nt, Human
uggcugguuagagguucccuuu

SEQ ID NO: 3126083 - RNA, 22 nt, Human
ugggaaugaaugucagugugac

SEQ ID NO: 3126084 - RNA, 21 nt, Human
ugggaaugaaugucaguguga

SEQ ID NO: 3126085 - RNA, 23 nt, Human
ugggagcugccuguucagcucca

SEQ ID NO: 3126086 - RNA, 16 nt, Human
ugggacaugggaaagg

SEQ ID NO: 3126087 - RNA, 22 nt, Human
uggcucagguggggucacucug

SEQ ID NO: 3126088 - RNA, 20 nt, Human
uggcucagguggggucacuc

SEQ ID NO: 3126089 - RNA, 16 nt, Human
uggcucuuccaggcug

SEQ ID NO: 3126090 - RNA, 12 nt, Human
uggcugggggcc

SEQ ID NO: 3126091 - RNA, 15 nt, Human
uggcucuuccaggcu

SEQ ID NO: 3126092 - RNA, 13 nt, Human
uggcucuuccagg

SEQ ID NO: 3126093 - RNA, 22 nt, Human
uggcgugcaguggugcgaucug

SEQ ID NO: 3126094 - RNA, 14 nt, Human
uggcgcugccccug

SEQ ID NO: 3126095 - RNA, 15 nt, Human
uggccagaugcacca

SEQ ID NO: 3126096 - RNA, 14 nt, Human
ugggccuccugugu

SEQ ID NO: 3126097 - RNA, 16 nt, Human
ugggccuccugugugu

SEQ ID NO: 3126098 - RNA, 22 nt, Human
ugggccuccugugugugcgccu

SEQ ID NO: 3126099 - RNA, 24 nt, Human
ugggagcugccuguucagcuccag

SEQ ID NO: 3126100 - RNA, 20 nt, Human
ugggcuucaguggcagcugc

SEQ ID NO: 3126101 - RNA, 19 nt, Human
ugggcuuggggaccagagc

SEQ ID NO: 3126102 - RNA, 16 nt, Human
uggggcagcuugaggg

SEQ ID NO: 3126103 - RNA, 21 nt, Human
ugggcuuggggaccagagcug

SEQ ID NO: 3126104 - RNA, 13 nt, Human
uggggcagcuuga

SEQ ID NO: 3126105 - RNA, 18 nt, Human
ugggcuucaguggcagcu

SEQ ID NO: 3126106 - RNA, 19 nt, Human
ugggcuucaguggcagcug

SEQ ID NO: 3126107 - RNA, 23 nt, Human
uggguucaagcgauucuucugcu

SEQ ID NO: 3126108 - RNA, 16 nt, Human
uggguucacugcaacc

SEQ ID NO: 3126109 - RNA, 21 nt, Human
ugggugucaagagggucugag

SEQ ID NO: 3126110 - RNA, 23 nt, Human
ugggugucaagagggucugagga

SEQ ID NO: 3126111 - RNA, 17 nt, Human
ugggguggggaccucag

SEQ ID NO: 3126112 - RNA, 19 nt, Human
ugcauguuacauaagauaa

SEQ ID NO: 3126113 - RNA, 15 nt, Human
ugcaucguuucaucu

SEQ ID NO: 3126114 - RNA, 16 nt, Human
ugcaggcagccaggcc

SEQ ID NO: 3126115 - RNA, 18 nt, Human
ugcaggcagccaggccac

SEQ ID NO: 3126116 - RNA, 17 nt, Human
ugcaggcagccaggcca

SEQ ID NO: 3126117 - RNA, 22 nt, Human
ugccagggacagaggggguggc

SEQ ID NO: 3126118 - RNA, 11 nt, Human
ugccagggaca

SEQ ID NO: 3126119 - RNA, 24 nt, Human
ugccagguuuuuggucugacccac

SEQ ID NO: 3126120 - RNA, 14 nt, Human
ugccagucaccccg

SEQ ID NO: 3126121 - RNA, 10 nt, Human
ugcccagccc

SEQ ID NO: 3126122 - RNA, 14 nt, Human
ugcccaccuggccu

SEQ ID NO: 3126123 - RNA, 18 nt, Human
ugcccaccuggccucugc

SEQ ID NO: 3126124 - RNA, 17 nt, Human
ugcccaccuggccucug

SEQ ID NO: 3126125 - RNA, 15 nt, Human
ugcccaccuggccuc

SEQ ID NO: 3126126 - RNA, 23 nt, Human
ugcacagcuaacauggaaguacu

SEQ ID NO: 3126127 - RNA, 20 nt, Human
ugcacagcuaacauggaagu

SEQ ID NO: 3126128 - RNA, 18 nt, Human
ugcacagcuaacauggaa

SEQ ID NO: 3126129 - RNA, 22 nt, Human
ugaagucuuuguacagacaaca

SEQ ID NO: 3126130 - RNA, 20 nt, Human
ugaagucuuuguacagacaa

SEQ ID NO: 3126131 - RNA, 17 nt, Human
ugaagucuuuguacaga

SEQ ID NO: 3126132 - RNA, 17 nt, Human
ugcacagcuaacaugga

SEQ ID NO: 3126133 - RNA, 23 nt, Human
ugcacagaguuguuacauuuuua

SEQ ID NO: 3126134 - RNA, 21 nt, Human
ugcacagaguuguuacauuuu

SEQ ID NO: 3126135 - RNA, 22 nt, Human
ugcacagaguuguuacauuuuu

SEQ ID NO: 3126136 - RNA, 20 nt, Human
ugcacagaguuguuacauuu

SEQ ID NO: 3126137 - RNA, 21 nt, Human
ugcacuugcagacucuacaga

SEQ ID NO: 3126138 - RNA, 16 nt, Human
ugcacuugcagacucu

SEQ ID NO: 3126139 - RNA, 16 nt, Human
ugcacguacacacaca

SEQ ID NO: 3126140 - RNA, 19 nt, Human
ugcacuuuguucuggcucu

SEQ ID NO: 3126141 - RNA, 18 nt, Human
ugcacuuuguucuggcuc

SEQ ID NO: 3126142 - RNA, 15 nt, Human
ugcacuuuguucugg

SEQ ID NO: 3126143 - RNA, 14 nt, Human
ugcagcaauaaagc

SEQ ID NO: 3126144 - RNA, 15 nt, Human
ugcagcaauaaagca

SEQ ID NO: 3126145 - RNA, 16 nt, Human
ugcagcaauaaagcag

SEQ ID NO: 3126146 - RNA, 18 nt, Human
ugcaggaccucaggugag

SEQ ID NO: 3126147 - RNA, 16 nt, Human
ugcaggaccucaggug

SEQ ID NO: 3126148 - RNA, 15 nt, Human
ugcaggaccucaggu

SEQ ID NO: 3126149 - RNA, 14 nt, Human
ugcaggaccucagg

SEQ ID NO: 3126150 - RNA, 23 nt, Human
ugcccaggcuggcgugcaguggu

SEQ ID NO: 3126151 - RNA, 11 nt, Human
ugcccagcccc

SEQ ID NO: 3126152 - RNA, 14 nt, Human
ugccucugggacug

SEQ ID NO: 3126153 - RNA, 16 nt, Human
ugccuccuuugugagg

SEQ ID NO: 3126154 - RNA, 18 nt, Human
ugccuccuuugugaggaa

SEQ ID NO: 3126155 - RNA, 17 nt, Human
ugccuccuuugugagga

SEQ ID NO: 3126156 - RNA, 22 nt, Human
ugccugaagucacacagugagu

SEQ ID NO: 3126157 - RNA, 18 nt, Human
ugccugaagucacacagu

SEQ ID NO: 3126158 - RNA, 17 nt, Human
ugccugaagucacacag

SEQ ID NO: 3126159 - RNA, 21 nt, Human
ugccuggauggggcugcaccg

SEQ ID NO: 3126160 - RNA, 22 nt, Human
ugccuuauggaacacucugaga

SEQ ID NO: 3126161 - RNA, 21 nt, Human
ugccuuauggaacacucugag

SEQ ID NO: 3126162 - RNA, 20 nt, Human
ugccuuauggaacacucuga

SEQ ID NO: 3126163 - RNA, 18 nt, Human
ugccuuauggaacacucu

SEQ ID NO: 3126164 - RNA, 23 nt, Human
ugcggugcuaucucccccagccc

SEQ ID NO: 3126165 - RNA, 21 nt, Human
ugcggugcuaucucccccagc

SEQ ID NO: 3126166 - RNA, 21 nt, Human
ugcugaaggcucgagcaugcc

SEQ ID NO: 3126167 - RNA, 23 nt, Human
ugcugaauacagaggcaacugca

SEQ ID NO: 3126168 - RNA, 18 nt, Human
ugcugaauacagaggcaa

SEQ ID NO: 3126169 - RNA, 17 nt, Human
ugcugaaugguuuucaa

SEQ ID NO: 3126170 - RNA, 18 nt, Human
ugcugaaugguuuucaaa

SEQ ID NO: 3126171 - RNA, 22 nt, Human
ugcugaaugguuuucaaaauaa

SEQ ID NO: 3126172 - RNA, 19 nt, Human
ugcuccuggcccacugcau

SEQ ID NO: 3126173 - RNA, 15 nt, Human
ugcugcaguugccag

SEQ ID NO: 3126174 - RNA, 23 nt, Human
ugcugauggugcaaugaccuuuc

SEQ ID NO: 3126175 - RNA, 20 nt, Human
ugcugauggugcaaugaccu

SEQ ID NO: 3126176 - RNA, 18 nt, Human
ugcugauggugcaaugac

SEQ ID NO: 3126177 - RNA, 15 nt, Human
ugcugacagacacag

SEQ ID NO: 3126178 - RNA, 23 nt, Human
ugcugagucugaaggcuggguuc

SEQ ID NO: 3126179 - RNA, 16 nt, Human
ugcugacagacacagg

SEQ ID NO: 3126180 - RNA, 16 nt, Human
ugcuaggaacacuccu

SEQ ID NO: 3126181 - RNA, 19 nt, Human
ugcuaggaacacuccuuca

SEQ ID NO: 3126182 - RNA, 17 nt, Human
ugcuaggaacacuccuu

SEQ ID NO: 3126183 - RNA, 15 nt, Human
ugcgugcauaccacu

SEQ ID NO: 3126184 - RNA, 18 nt, Human
ugcuccucuccccagcaa

SEQ ID NO: 3126185 - RNA, 19 nt, Human
ugcuccucuccccagcaag

SEQ ID NO: 3126186 - RNA, 20 nt, Human
ugucagugugacugaucucu

SEQ ID NO: 3126187 - RNA, 12 nt, Human
ugucagugugac

SEQ ID NO: 3126188 - RNA, 16 nt, Human
uguaucccaugagccu

SEQ ID NO: 3126189 - RNA, 19 nt, Human
uguaucccaugagccucag

SEQ ID NO: 3126190 - RNA, 23 nt, Human
uguaucccaugagccucagcauc

SEQ ID NO: 3126191 - RNA, 23 nt, Human
uguaccucuugagccuugaacuu

SEQ ID NO: 3126192 - RNA, 22 nt, Human
uguaccucuugagccuugaacu

SEQ ID NO: 3126193 - RNA, 14 nt, Human
uguaccucuugagc

SEQ ID NO: 3126194 - RNA, 17 nt, Human
uguacgucugacaggca

SEQ ID NO: 3126195 - RNA, 16 nt, Human
uguacgucugacaggc

SEQ ID NO: 3126196 - RNA, 14 nt, Human
uguagagugggagc

SEQ ID NO: 3126197 - RNA, 13 nt, Human
uguaaauuaacuu

SEQ ID NO: 3126198 - RNA, 14 nt, Human
uguaaauuaacuuu

SEQ ID NO: 3126199 - RNA, 15 nt, Human
uguaaauuaacuuuu

SEQ ID NO: 3126200 - RNA, 16 nt, Human
uguaaauuaacuuuua

SEQ ID NO: 3126201 - RNA, 17 nt, Human
uguaaauuaacuuuuau

SEQ ID NO: 3126202 - RNA, 21 nt, Human
ugugacaaggauugcuacugu

SEQ ID NO: 3126203 - RNA, 21 nt, Human
ugugauacaaugcugugcccu

SEQ ID NO: 3126204 - RNA, 23 nt, Human
ugugaguacuacaguccucccau

SEQ ID NO: 3126205 - RNA, 20 nt, Human
ugugaguacuacaguccucc

SEQ ID NO: 3126206 - RNA, 19 nt, Human
ugugaguacuacaguccuc

SEQ ID NO: 3126207 - RNA, 18 nt, Human
ugugaguacuacaguccu

SEQ ID NO: 3126208 - RNA, 18 nt, Human
ugucuuuggacccugagg

SEQ ID NO: 3126209 - RNA, 17 nt, Human
ugucuuuggacccugag

SEQ ID NO: 3126210 - RNA, 22 nt, Human
ugucuuuggacccugaggccca

SEQ ID NO: 3126211 - RNA, 19 nt, Human
ugucuuuggacccugaggc

SEQ ID NO: 3126212 - RNA, 16 nt, Human
ugucuuuuuucacuac

SEQ ID NO: 3126213 - RNA, 13 nt, Human
ugugaaaggaaag

SEQ ID NO: 3126214 - RNA, 14 nt, Human
ugugaaaggaaaga

SEQ ID NO: 3126215 - RNA, 20 nt, Human
ugugcgugcauguguguuca

SEQ ID NO: 3126216 - RNA, 17 nt, Human
ugugccucugggacugg

SEQ ID NO: 3126217 - RNA, 16 nt, Human
ugugcacaugcacgug

SEQ ID NO: 3126218 - RNA, 22 nt, Human
ugugcacaugcacgugugugca

SEQ ID NO: 3126219 - RNA, 13 nt, Human
ugugccucuggga

SEQ ID NO: 3126220 - RNA, 15 nt, Human
ugugccucugggacu

SEQ ID NO: 3126221 - RNA, 16 nt, Human
ugugccucugggacug

SEQ ID NO: 3126222 - RNA, 15 nt, Human
uguggacacagcucu

SEQ ID NO: 3126223 - RNA, 12 nt, Human
uguggagaagcg

SEQ ID NO: 3126224 - RNA, 14 nt, Human
uguggacacagcuc

SEQ ID NO: 3126225 - RNA, 13 nt, Human
uguggacacagcu

SEQ ID NO: 3126226 - RNA, 22 nt, Human
ugugggcuaguugggcuuccuc

SEQ ID NO: 3126227 - RNA, 12 nt, Human
ugugggaagggg

SEQ ID NO: 3126228 - RNA, 16 nt, Human
uguuacugucuucagu

SEQ ID NO: 3126229 - RNA, 15 nt, Human
uguuacugucuucag

SEQ ID NO: 3126230 - RNA, 22 nt, Human
uguuacauuuuuaagugcugca

SEQ ID NO: 3126231 - RNA, 13 nt, Human
uguuacauuuuua

SEQ ID NO: 3126232 - RNA, 19 nt, Human
uguuacauaagauaaaugu

SEQ ID NO: 3126233 - RNA, 15 nt, Human
uguucagcuccagcu

SEQ ID NO: 3126234 - RNA, 16 nt, Human
uguucagcuccagcuc

SEQ ID NO: 3126235 - RNA, 22 nt, Human
uguucagcuccagcucaccagc

SEQ ID NO: 3126236 - RNA, 11 nt, Human
uguucagcugg

SEQ ID NO: 3126237 - RNA, 14 nt, Human
uguucagcuccagc

SEQ ID NO: 3126238 - RNA, 16 nt, Human
uguguagggcgggagg

SEQ ID NO: 3126239 - RNA, 15 nt, Human
uguuggccaaagcca

SEQ ID NO: 3126240 - RNA, 11 nt, Human
uguuggccagg

SEQ ID NO: 3126241 - RNA, 14 nt, Human
uguuggccaggcug

SEQ ID NO: 3126242 - RNA, 11 nt, Human
uguugaaagau

SEQ ID NO: 3126243 - RNA, 20 nt, Human
uguucuuuccaaaguacacu

SEQ ID NO: 3126244 - RNA, 20 nt, Human
uguucuuucuggcuaugcau

SEQ ID NO: 3126245 - RNA, 22 nt, Human
uguucuuucuggcuaugcauuu

SEQ ID NO: 3126246 - RNA, 14 nt, Human
uguucuuucuggcu

SEQ ID NO: 3126247 - RNA, 18 nt, Human
uguucugacccugcuuca

SEQ ID NO: 3126248 - RNA, 19 nt, Human
uguucucugcccuccaaga

SEQ ID NO: 3126249 - RNA, 15 nt, Human
uguucugacccugcu

SEQ ID NO: 3126250 - RNA, 13 nt, Human
uguucucugagga

SEQ ID NO: 3126251 - RNA, 16 nt, Human
uguucucugaggacac

SEQ ID NO: 3126252 - RNA, 18 nt, Human
uguucucugaggacacua

SEQ ID NO: 3126253 - RNA, 12 nt, Human
uguucucugccc

SEQ ID NO: 3126254 - RNA, 21 nt, Human
uuaaggaagacaaugugaaaa

SEQ ID NO: 3126255 - RNA, 17 nt, Human
uuaaggaugcuuguaca

SEQ ID NO: 3126256 - RNA, 18 nt, Human
uuaaggaugcuuguacau

SEQ ID NO: 3126257 - RNA, 19 nt, Human
uuaaggaugcuuguacaua

SEQ ID NO: 3126258 - RNA, 20 nt, Human
uuaaggaugcuuguacauaa

SEQ ID NO: 3126259 - RNA, 22 nt, Human
uuaaggaugcuuguacauaaug

SEQ ID NO: 3126260 - RNA, 18 nt, Human
uuaaugucacaggcaggu

SEQ ID NO: 3126261 - RNA, 17 nt, Human
uuaaugucacaggcagg

SEQ ID NO: 3126262 - RNA, 20 nt, Human
uuacgguuuuccagguuuaa

SEQ ID NO: 3126263 - RNA, 22 nt, Human
uuaccuuuuuuauacauaaaca

SEQ ID NO: 3126264 - RNA, 19 nt, Human
uuaccuuuuuuauacauaa

SEQ ID NO: 3126265 - RNA, 20 nt, Human
uuaccuuuuuuauacauaaa

SEQ ID NO: 3126266 - RNA, 20 nt, Human
uuacauuuuuaagugcugca

SEQ ID NO: 3126267 - RNA, 21 nt, Human
uuacauuuuuaagugcugcau

SEQ ID NO: 3126268 - RNA, 22 nt, Human
uuacauuuuuaagugcugcauu

SEQ ID NO: 3126269 - RNA, 18 nt, Human
uuaaaugcccagccccuu

SEQ ID NO: 3126270 - RNA, 17 nt, Human
uuaaaugcccagccccu

SEQ ID NO: 3126271 - RNA, 17 nt, Human
uuaaaugcaccuggaau

SEQ ID NO: 3126272 - RNA, 18 nt, Human
uuaaaugcaccuggaaua

SEQ ID NO: 3126273 - RNA, 16 nt, Human
uuaaaugcaccuggaa

SEQ ID NO: 3126274 - RNA, 11 nt, Human
uuaaaugcacc

SEQ ID NO: 3126275 - RNA, 16 nt, Human
uuaaacuuaaucuaaa

SEQ ID NO: 3126276 - RNA, 18 nt, Human
uuaaacuuaaucuaaaug

SEQ ID NO: 3126277 - RNA, 20 nt, Human
uuaaacuuaaucuaaaugga

SEQ ID NO: 3126278 - RNA, 15 nt, Human
uguuuccuggcacug

SEQ ID NO: 3126279 - RNA, 22 nt, Human
uguuuccuggcacugcuuccag

SEQ ID NO: 3126280 - RNA, 21 nt, Human
uguuuccuggcacugcuucca

SEQ ID NO: 3126281 - RNA, 20 nt, Human
uguuuccuggcacugcuucc

SEQ ID NO: 3126282 - RNA, 16 nt, Human
uguuuguugucagcug

SEQ ID NO: 3126283 - RNA, 17 nt, Human
uguuuguugucagcuga

SEQ ID NO: 3126284 - RNA, 13 nt, Human
uguuuuugucuua

SEQ ID NO: 3126285 - RNA, 19 nt, Human
uugcugauggugcaaugac

SEQ ID NO: 3126286 - RNA, 20 nt, Human
uugcugauggugcaaugacc

SEQ ID NO: 3126287 - RNA, 22 nt, Human
uugcugauggugcaaugaccuu

SEQ ID NO: 3126288 - RNA, 23 nt, Human
uugcccacgcuggagugcaguga

SEQ ID NO: 3126289 - RNA, 13 nt, Human
uugccagucaccc

SEQ ID NO: 3126290 - RNA, 18 nt, Human
uugccagucaccccggcc

SEQ ID NO: 3126291 - RNA, 11 nt, Human
uugccucugcc

SEQ ID NO: 3126292 - RNA, 14 nt, Human
uugccucugccucu

SEQ ID NO: 3126293 - RNA, 16 nt, Human
uugccucugccucuga

SEQ ID NO: 3126294 - RNA, 18 nt, Human
uugccucugccucugaca

SEQ ID NO: 3126295 - RNA, 23 nt, Human
uuggaaagaguaggaagacuuug

SEQ ID NO: 3126296 - RNA, 19 nt, Human
uuggaaggaacguccccug

SEQ ID NO: 3126297 - RNA, 11 nt, Human
uuggaaggaac

SEQ ID NO: 3126298 - RNA, 17 nt, Human
uuggcaaaaaggcagga

SEQ ID NO: 3126299 - RNA, 22 nt, Human
uuggcuuuggguugcaggaccu

SEQ ID NO: 3126300 - RNA, 16 nt, Human
uugggaggccauuugu

SEQ ID NO: 3126301 - RNA, 16 nt, Human
uuggguggaugccugg

SEQ ID NO: 3126302 - RNA, 16 nt, Human
uuggcugcugaaggcu

SEQ ID NO: 3126303 - RNA, 18 nt, Human
uuggcugggggccucagu

SEQ ID NO: 3126304 - RNA, 21 nt, Human
uuggcugggggccucagugcc

SEQ ID NO: 3126305 - RNA, 22 nt, Human
uuggcugggggccucagugcca

SEQ ID NO: 3126306 - RNA, 14 nt, Human
uuggccaggcuggu

SEQ ID NO: 3126307 - RNA, 24 nt, Human
uuggccaaagccaaagcuaggccu

SEQ ID NO: 3126308 - RNA, 13 nt, Human
uuggcauucccca

SEQ ID NO: 3126309 - RNA, 14 nt, Human
uuguagagccaggg

SEQ ID NO: 3126310 - RNA, 15 nt, Human
uuguagagccagggu

SEQ ID NO: 3126311 - RNA, 21 nt, Human
uuguauucucuccuguaccuc

SEQ ID NO: 3126312 - RNA, 13 nt, Human
uuguacagacaac

SEQ ID NO: 3126313 - RNA, 12 nt, Human
uuguacagacaa

SEQ ID NO: 3126314 - RNA, 16 nt, Human
uuggucccccuuccau

SEQ ID NO: 3126315 - RNA, 22 nt, Human
uuggucccccuuccauggacuu

SEQ ID NO: 3126316 - RNA, 12 nt, Human
uugguccugcug

SEQ ID NO: 3126317 - RNA, 19 nt, Human
uucuuauuuaaugaaagac

SEQ ID NO: 3126318 - RNA, 23 nt, Human
uucuuauuuaaugaaagacugua

SEQ ID NO: 3126319 - RNA, 13 nt, Human
uucuugguuugua

SEQ ID NO: 3126320 - RNA, 16 nt, Human
uucuugguuuguaaau

SEQ ID NO: 3126321 - RNA, 23 nt, Human
uucuugguuuguaaauuaacuuu

SEQ ID NO: 3126322 - RNA, 17 nt, Human
uucuugguuuguaaauu

SEQ ID NO: 3126323 - RNA, 18 nt, Human
uucuugguuuguaaauua

SEQ ID NO: 3126324 - RNA, 17 nt, Human
uucuguccuacucugug

SEQ ID NO: 3126325 - RNA, 23 nt, Human
uucuguggguuucuaaagcugcc

SEQ ID NO: 3126326 - RNA, 21 nt, Human
uucuguccgagcuuugaaaau

SEQ ID NO: 3126327 - RNA, 17 nt, Human
uucuguccgagcuuuga

SEQ ID NO: 3126328 - RNA, 19 nt, Human
uugaagacuuuucuuucag

SEQ ID NO: 3126329 - RNA, 17 nt, Human
uugaagacagagcuaca

SEQ ID NO: 3126330 - RNA, 22 nt, Human
uugaacuuugaccucugcagca

SEQ ID NO: 3126331 - RNA, 20 nt, Human
uugaacuuugaccucugcag

SEQ ID NO: 3126332 - RNA, 19 nt, Human
uugaacucuucaaucucuu

SEQ ID NO: 3126333 - RNA, 16 nt, Human
uugaacugauaaagau

SEQ ID NO: 3126334 - RNA, 18 nt, Human
uucuuuauaauucuacuu

SEQ ID NO: 3126335 - RNA, 21 nt, Human
uugaaaacacuguucucugcc

SEQ ID NO: 3126336 - RNA, 19 nt, Human
uugaaaacacuguucucug

SEQ ID NO: 3126337 - RNA, 21 nt, Human
uugauagcacagacccugccc

SEQ ID NO: 3126338 - RNA, 18 nt, Human
uugauagcacagacccug

SEQ ID NO: 3126339 - RNA, 14 nt, Human
uugcaacaggcugg

SEQ ID NO: 3126340 - RNA, 17 nt, Human
uugcaacaggcugggcu

SEQ ID NO: 3126341 - RNA, 18 nt, Human
uugauuuccguuaaaaua

SEQ ID NO: 3126342 - RNA, 16 nt, Human
uugcagacaggcaagc

SEQ ID NO: 3126343 - RNA, 20 nt, Human
uugacgccaucccagcccca

SEQ ID NO: 3126344 - RNA, 20 nt, Human
uugauagcacagacccugcc

SEQ ID NO: 3126345 - RNA, 19 nt, Human
uugauagcacagacccugc

SEQ ID NO: 3126346 - RNA, 22 nt, Human
uugaccugaggcccuucucucc

SEQ ID NO: 3126347 - RNA, 19 nt, Human
uugaccugaggcccuucuc

SEQ ID NO: 3126348 - RNA, 12 nt, Human
uugaccugaggc

SEQ ID NO: 3126349 - RNA, 22 nt, Human
uugacgccaucccagccccaau

SEQ ID NO: 3126350 - RNA, 14 nt, Human
uugacgccauccca

SEQ ID NO: 3126351 - RNA, 16 nt, Human
uugaccucugcagcaa

SEQ ID NO: 3126352 - RNA, 15 nt, Human
uugaccucaggugau

SEQ ID NO: 3126353 - RNA, 21 nt, Human
uugaccgugaggccagagaca

SEQ ID NO: 3126354 - RNA, 20 nt, Human
uugaccgugaggccagagac

SEQ ID NO: 3126355 - RNA, 23 nt, Human
uucagcuccagcucaccagcccc

SEQ ID NO: 3126356 - RNA, 24 nt, Human
uucagcucugcaagaauugaagca

SEQ ID NO: 3126357 - RNA, 17 nt, Human
uucagcucugcaagaau

SEQ ID NO: 3126358 - RNA, 16 nt, Human
uucaggaagcucaggg

SEQ ID NO: 3126359 - RNA, 17 nt, Human
uucagcugacuuuucug

SEQ ID NO: 3126360 - RNA, 19 nt, Human
uucaggaagcucagggccu

SEQ ID NO: 3126361 - RNA, 17 nt, Human
uucaggaagcucagggc

SEQ ID NO: 3126362 - RNA, 20 nt, Human
uucaggaagcucagggccug

SEQ ID NO: 3126363 - RNA, 15 nt, Human
uucaggaagcucagg

SEQ ID NO: 3126364 - RNA, 15 nt, Human
uucagagacuccugc

SEQ ID NO: 3126365 - RNA, 22 nt, Human
uucagcuccagcucaccagccc

SEQ ID NO: 3126366 - RNA, 14 nt, Human
uucacucuccuugg

SEQ ID NO: 3126367 - RNA, 18 nt, Human
uucaauucucauuuguca

SEQ ID NO: 3126368 - RNA, 14 nt, Human
uuacgugaguccug

SEQ ID NO: 3126369 - RNA, 13 nt, Human
uuacgugaguccu

SEQ ID NO: 3126370 - RNA, 13 nt, Human
uucaaagauauuu

SEQ ID NO: 3126371 - RNA, 17 nt, Human
uuccaugaguccccugu

SEQ ID NO: 3126372 - RNA, 18 nt, Human
uucauuuaggugaggaag

SEQ ID NO: 3126373 - RNA, 19 nt, Human
uucauuuaggugaggaagc

SEQ ID NO: 3126374 - RNA, 11 nt, Human
uucaucuugaa

SEQ ID NO: 3126375 - RNA, 20 nt, Human
uucaucuuccaacucaaacu

SEQ ID NO: 3126376 - RNA, 12 nt, Human
uucaucuugaau

SEQ ID NO: 3126377 - RNA, 18 nt, Human
uucagugccuuauggaac

SEQ ID NO: 3126378 - RNA, 21 nt, Human
uucagugccuuauggaacacu

SEQ ID NO: 3126379 - RNA, 19 nt, Human
uucagugccuuauggaaca

SEQ ID NO: 3126380 - RNA, 23 nt, Human
uucauaaugacuuaagcacacuu

SEQ ID NO: 3126381 - RNA, 13 nt, Human
uucauaaugacuu

SEQ ID NO: 3126382 - RNA, 11 nt, Human
uucuccaggcu

SEQ ID NO: 3126383 - RNA, 13 nt, Human
uucuccacccugc

SEQ ID NO: 3126384 - RNA, 16 nt, Human
uucuccaagcaggaca

SEQ ID NO: 3126385 - RNA, 16 nt, Human
uucucuccagccccug

SEQ ID NO: 3126386 - RNA, 18 nt, Human
uucucuccagccccugga

SEQ ID NO: 3126387 - RNA, 22 nt, Human
uucucuccuguaccucuugagc

SEQ ID NO: 3126388 - RNA, 17 nt, Human
uucucugcccuccaaga

SEQ ID NO: 3126389 - RNA, 20 nt, Human
uucucugaggacacuaacca

SEQ ID NO: 3126390 - RNA, 21 nt, Human
uucugacccugcuucaaauau

SEQ ID NO: 3126391 - RNA, 21 nt, Human
uucugacccaugcugcccugu

SEQ ID NO: 3126392 - RNA, 20 nt, Human
uucugacccaugcugcccug

SEQ ID NO: 3126393 - RNA, 18 nt, Human
uucugacccaugcugccc

SEQ ID NO: 3126394 - RNA, 16 nt, Human
uucugacccaugcugc

SEQ ID NO: 3126395 - RNA, 14 nt, Human
uucuauuguuucuu

SEQ ID NO: 3126396 - RNA, 16 nt, Human
uucuaugacacaugca

SEQ ID NO: 3126397 - RNA, 17 nt, Human
uucuaugacacaugcaa

SEQ ID NO: 3126398 - RNA, 12 nt, Human
uuccucccuccc

SEQ ID NO: 3126399 - RNA, 19 nt, Human
uuccucccucccucuuucc

SEQ ID NO: 3126400 - RNA, 21 nt, Human
uuccucccucccucuuucccu

SEQ ID NO: 3126401 - RNA, 22 nt, Human
uuccucccucccucuuucccuc

SEQ ID NO: 3126402 - RNA, 23 nt, Human
uuccucauaguaugguggcuggg

SEQ ID NO: 3126403 - RNA, 22 nt, Human
uuccccacuugagaauuacccu

SEQ ID NO: 3126404 - RNA, 19 nt, Human
uucccuuugacgccauccc

SEQ ID NO: 3126405 - RNA, 17 nt, Human
uucuaaaggcuaccuuu

SEQ ID NO: 3126406 - RNA, 18 nt, Human
uucuaaaggcuaccuuug

SEQ ID NO: 3126407 - RNA, 16 nt, Human
uucuaaaggcuaccuu

SEQ ID NO: 3126408 - RNA, 19 nt, Human
uuccuucagugccuuaugg

SEQ ID NO: 3126409 - RNA, 16 nt, Human
uuccuucagugccuua

SEQ ID NO: 3126410 - RNA, 23 nt, Human
uuccuucagugccuuauggaaca

SEQ ID NO: 3126411 - RNA, 19 nt, Human
uuccuucauucaacccacc

SEQ ID NO: 3126412 - RNA, 15 nt, Human
uuccuucagugccuu

SEQ ID NO: 3126413 - RNA, 17 nt, Human
uuuuuuccuucagugcc

SEQ ID NO: 3126414 - RNA, 12 nt, Human
uuuuuuacuaau

SEQ ID NO: 3126415 - RNA, 21 nt, Human
uuuaucgucacugcuuaacuu

SEQ ID NO: 3126416 - RNA, 16 nt, Human
uuuaucgucacugcuu

SEQ ID NO: 3126417 - RNA, 16 nt, Human
uuuauaaacuuuaccu

SEQ ID NO: 3126418 - RNA, 14 nt, Human
uuuauaaacuuuac

SEQ ID NO: 3126419 - RNA, 19 nt, Human
uuuauuuaguuccuugagu

SEQ ID NO: 3126420 - RNA, 16 nt, Human
uuuauugucaaagugg

SEQ ID NO: 3126421 - RNA, 14 nt, Human
uuuauugucaaagu

SEQ ID NO: 3126422 - RNA, 15 nt, Human
uuuacuuuguguuca

SEQ ID NO: 3126423 - RNA, 21 nt, Human
uuuccucuuuggucuacacug

SEQ ID NO: 3126424 - RNA, 14 nt, Human
uuucuaaaggcuac

SEQ ID NO: 3126425 - RNA, 17 nt, Human
uuucuaaagcugccagc

SEQ ID NO: 3126426 - RNA, 14 nt, Human
uuucuaaagcugcc

SEQ ID NO: 3126427 - RNA, 15 nt, Human
uuucuagccagagga

SEQ ID NO: 3126428 - RNA, 15 nt, Human
uuucagccaagaauu

SEQ ID NO: 3126429 - RNA, 22 nt, Human
uuucauugcugggcuugucugu

SEQ ID NO: 3126430 - RNA, 13 nt, Human
uuuccaggaaggc

SEQ ID NO: 3126431 - RNA, 12 nt, Human
uuuccaaaguac

SEQ ID NO: 3126432 - RNA, 15 nt, Human
uuuccaaaguacacu

SEQ ID NO: 3126433 - RNA, 19 nt, Human
uuucaauaggaaaaacuga

SEQ ID NO: 3126434 - RNA, 22 nt, Human
uuucaauaggaaaaacugauuu

SEQ ID NO: 3126435 - RNA, 20 nt, Human
uuucaauaggaaaaacugau

SEQ ID NO: 3126436 - RNA, 18 nt, Human
uuuuaucgucacugcuua

SEQ ID NO: 3126437 - RNA, 15 nt, Human
uuuuccuucagugcc

SEQ ID NO: 3126438 - RNA, 17 nt, Human
uuuucuugcaugaggcu

SEQ ID NO: 3126439 - RNA, 14 nt, Human
uuuucuucucccuc

SEQ ID NO: 3126440 - RNA, 19 nt, Human
uuuuccaugaguccccugu

SEQ ID NO: 3126441 - RNA, 18 nt, Human
uuuuccaugaguccccug

SEQ ID NO: 3126442 - RNA, 15 nt, Human
uuuucacaguucucu

SEQ ID NO: 3126443 - RNA, 19 nt, Human
uuuggugguuucagaaaug

SEQ ID NO: 3126444 - RNA, 16 nt, Human
uuuguaaauuaacuuu

SEQ ID NO: 3126445 - RNA, 17 nt, Human
uuuguaaauuaacuuuu

SEQ ID NO: 3126446 - RNA, 15 nt, Human
uuuguaaauuaacuu

SEQ ID NO: 3126447 - RNA, 21 nt, Human
uuuguccccaccgcagacagg

SEQ ID NO: 3126448 - RNA, 13 nt, Human
uuuguccccaccg

SEQ ID NO: 3126449 - RNA, 16 nt, Human
uuuguugucagcugaa

SEQ ID NO: 3126450 - RNA, 15 nt, Human
uuugagcagggcuca

SEQ ID NO: 3126451 - RNA, 17 nt, Human
uuugaggucuguucuuu

SEQ ID NO: 3126452 - RNA, 22 nt, Human
uuugaggucuguucuuuccaaa

SEQ ID NO: 3126453 - RNA, 18 nt, Human
uuugccauguuggccagg

SEQ ID NO: 3126454 - RNA, 14 nt, Human
uuugcagacaggca

SEQ ID NO: 3126455 - RNA, 20 nt, Human
ccauccucuguacagagccc

SEQ ID NO: 3126456 - RNA, 13 nt, Human
ccaugcugcccug

SEQ ID NO: 3126457 - RNA, 11 nt, Human
ccaugcugccc

SEQ ID NO: 3126458 - RNA, 14 nt, Human
ccaugcugcccugu

SEQ ID NO: 3126459 - RNA, 18 nt, Human
ccaugauguuuuccauga

SEQ ID NO: 3126460 - RNA, 21 nt, Human
ccaugauuaaccacuucagcu

SEQ ID NO: 3126461 - RNA, 19 nt, Human
ccaugauuaaccacuucag

SEQ ID NO: 3126462 - RNA, 19 nt, Human
ccagugaggcucugcccuu

SEQ ID NO: 3126463 - RNA, 18 nt, Human
ccagugaggcucugcccu

SEQ ID NO: 3126464 - RNA, 20 nt, Human
ccagugaggcucugcccuug

SEQ ID NO: 3126465 - RNA, 17 nt, Human
ccagugaggcucugccc

SEQ ID NO: 3126466 - RNA, 19 nt, Human
ccauccucuguacagagcc

SEQ ID NO: 3126467 - RNA, 12 nt, Human
ccauccucugua

SEQ ID NO: 3126468 - RNA, 22 nt, Human
ccaucauugaaaucuuuuugcu

SEQ ID NO: 3126469 - RNA, 16 nt, Human
ccauucuccaccugcc

SEQ ID NO: 3126470 - RNA, 15 nt, Human
ccauucuccaccugc

SEQ ID NO: 3126471 - RNA, 14 nt, Human
ccauggacuuuguu

SEQ ID NO: 3126472 - RNA, 13 nt, Human
ccauggacuuugu

SEQ ID NO: 3126473 - RNA, 21 nt, Human
ccauucugccugcccaggccc

SEQ ID NO: 3126474 - RNA, 14 nt, Human
ccauucuccaccug

SEQ ID NO: 3126475 - RNA, 19 nt, Human
ccauucugccugcccaggc

SEQ ID NO: 3126476 - RNA, 20 nt, Human
ccauucugccugcccaggcc

SEQ ID NO: 3126477 - RNA, 16 nt, Human
ccauucugccugccca

SEQ ID NO: 3126478 - RNA, 17 nt, Human
ccauucuccaccugcca

SEQ ID NO: 3126479 - RNA, 17 nt, Human
ccauucugccugcccag

SEQ ID NO: 3126480 - RNA, 18 nt, Human
ccauucugccugcccagg

SEQ ID NO: 3126481 - RNA, 22 nt, Human
ccauuuugggguacccacugcu

SEQ ID NO: 3126482 - RNA, 20 nt, Human
ccauuuugggguacccacug

SEQ ID NO: 3126483 - RNA, 23 nt, Human
ccauuuuggauucuuauggacaa

SEQ ID NO: 3126484 - RNA, 20 nt, Human
cccaaaacucuccucugcug

SEQ ID NO: 3126485 - RNA, 16 nt, Human
cccaaagcagugcaug

SEQ ID NO: 3126486 - RNA, 15 nt, Human
cccaaagaugcagcc

SEQ ID NO: 3126487 - RNA, 12 nt, Human
cccaaagaugca

SEQ ID NO: 3126488 - RNA, 13 nt, Human
ccaggaggccagc

SEQ ID NO: 3126489 - RNA, 12 nt, Human
ccaggaggccag

SEQ ID NO: 3126490 - RNA, 12 nt, Human
ccaggagccucc

SEQ ID NO: 3126491 - RNA, 18 nt, Human
ccaggagccuccugcccu

SEQ ID NO: 3126492 - RNA, 14 nt, Human
ccaggagccuccug

SEQ ID NO: 3126493 - RNA, 13 nt, Human
ccaggagccuccu

SEQ ID NO: 3126494 - RNA, 22 nt, Human
ccaggcauuccccaggaggcca

SEQ ID NO: 3126495 - RNA, 23 nt, Human
ccaggcauuccccaggaggccag

SEQ ID NO: 3126496 - RNA, 24 nt, Human
ccaggcauuccccaggaggccagc

SEQ ID NO: 3126497 - RNA, 14 nt, Human
ccaggcauucccca

SEQ ID NO: 3126498 - RNA, 13 nt, Human
ccaggcauggugg

SEQ ID NO: 3126499 - RNA, 15 nt, Human
ccaggagccccgagg

SEQ ID NO: 3126500 - RNA, 16 nt, Human
ccaggagcagccacau

SEQ ID NO: 3126501 - RNA, 15 nt, Human
ccaggagcagccaca

SEQ ID NO: 3126502 - RNA, 19 nt, Human
ccaggugcuaggaacacuc

SEQ ID NO: 3126503 - RNA, 23 nt, Human
ccaguaaaugggggugcauuuga

SEQ ID NO: 3126504 - RNA, 14 nt, Human
ccagguucagcuug

SEQ ID NO: 3126505 - RNA, 20 nt, Human
ccaggcuguaucccaugagc

SEQ ID NO: 3126506 - RNA, 14 nt, Human
ccaggcuggucuca

SEQ ID NO: 3126507 - RNA, 19 nt, Human
ccaggcuggucucaaacuc

SEQ ID NO: 3126508 - RNA, 13 nt, Human
ccaggccccugcc

SEQ ID NO: 3126509 - RNA, 11 nt, Human
ccagcucuggu

SEQ ID NO: 3126510 - RNA, 13 nt, Human
ccagcucuggucc

SEQ ID NO: 3126511 - RNA, 12 nt, Human
ccagcucugguc

SEQ ID NO: 3126512 - RNA, 14 nt, Human
ccagcgagcccugg

SEQ ID NO: 3126513 - RNA, 13 nt, Human
ccagcgagcccug

SEQ ID NO: 3126514 - RNA, 15 nt, Human
ccagcgagcccuggu

SEQ ID NO: 3126515 - RNA, 16 nt, Human
ccagcgagcccuggug

SEQ ID NO: 3126516 - RNA, 22 nt, Human
ccagagcccaccuuggcucaag

SEQ ID NO: 3126517 - RNA, 16 nt, Human
ccagagcccaccuugg

SEQ ID NO: 3126518 - RNA, 20 nt, Human
ccagccuugaccauucucca

SEQ ID NO: 3126519 - RNA, 19 nt, Human
ccagccuugaccauucucc

SEQ ID NO: 3126520 - RNA, 23 nt, Human
ccagcugcuugggcuucauccuc

SEQ ID NO: 3126521 - RNA, 20 nt, Human
ccagcugcuugggcuucauc

SEQ ID NO: 3126522 - RNA, 22 nt, Human
ccagcucugguccauagagagc

SEQ ID NO: 3126523 - RNA, 21 nt, Human
ccagcucugguccauagagag

SEQ ID NO: 3126524 - RNA, 17 nt, Human
ccagcucugguccauag

SEQ ID NO: 3126525 - RNA, 14 nt, Human
ccagcucuggucca

SEQ ID NO: 3126526 - RNA, 22 nt, Human
ccaggaagccagcaggcucuca

SEQ ID NO: 3126527 - RNA, 20 nt, Human
ccaggaagccagcaggcucu

SEQ ID NO: 3126528 - RNA, 22 nt, Human
ccccaaauggaaaugggcagag

SEQ ID NO: 3126529 - RNA, 20 nt, Human
ccccacccaagggccuggcc

SEQ ID NO: 3126530 - RNA, 14 nt, Human
ccccacccaagggc

SEQ ID NO: 3126531 - RNA, 15 nt, Human
cccagugcccacagg

SEQ ID NO: 3126532 - RNA, 20 nt, Human
cccagugcccacaggaucag

SEQ ID NO: 3126533 - RNA, 17 nt, Human
cccagugccgagaagga

SEQ ID NO: 3126534 - RNA, 18 nt, Human
cccagugccgagaaggaa

SEQ ID NO: 3126535 - RNA, 16 nt, Human
cccaugcugcccugug

SEQ ID NO: 3126536 - RNA, 15 nt, Human
cccaugcugcccugu

SEQ ID NO: 3126537 - RNA, 17 nt, Human
cccaugcugcccuguga

SEQ ID NO: 3126538 - RNA, 17 nt, Human
ccccaggaggccagccu

SEQ ID NO: 3126539 - RNA, 11 nt, Human
cccaggcaggu

SEQ ID NO: 3126540 - RNA, 13 nt, Human
cccaggcaggucu

SEQ ID NO: 3126541 - RNA, 21 nt, Human
cccaggagccccgaggccuuc

SEQ ID NO: 3126542 - RNA, 18 nt, Human
cccaggagccccgaggcc

SEQ ID NO: 3126543 - RNA, 22 nt, Human
cccaggaggccagccuugacca

SEQ ID NO: 3126544 - RNA, 13 nt, Human
cccaggaggccag

SEQ ID NO: 3126545 - RNA, 18 nt, Human
cccaggaggccagccuug

SEQ ID NO: 3126546 - RNA, 17 nt, Human
cccaggcaggucuugaa

SEQ ID NO: 3126547 - RNA, 18 nt, Human
cccaggcauuccccagga

SEQ ID NO: 3126548 - RNA, 21 nt, Human
cccaggcauuccccaggaggc

SEQ ID NO: 3126549 - RNA, 20 nt, Human
cccaggcauuccccaggagg

SEQ ID NO: 3126550 - RNA, 23 nt, Human
cccaggcauuccccaggaggcca

SEQ ID NO: 3126551 - RNA, 22 nt, Human
cccaggcauuccccaggaggcc

SEQ ID NO: 3126552 - RNA, 11 nt, Human
cccaggccccu

SEQ ID NO: 3126553 - RNA, 16 nt, Human
cccaggccccugccac

SEQ ID NO: 3126554 - RNA, 18 nt, Human
cccaggccccugccaccc

SEQ ID NO: 3126555 - RNA, 21 nt, Human
cccaggccccugccacccugg

SEQ ID NO: 3126556 - RNA, 22 nt, Human
cccaggccccugccacccuggg

SEQ ID NO: 3126557 - RNA, 20 nt, Human
cccagucuggaaugcagugg

SEQ ID NO: 3126558 - RNA, 13 nt, Human
cccagugcccaca

SEQ ID NO: 3126559 - RNA, 23 nt, Human
cccaggugcuaggaacacuccuu

SEQ ID NO: 3126560 - RNA, 22 nt, Human
cccaggugcuaggaacacuccu

SEQ ID NO: 3126561 - RNA, 18 nt, Human
cccaggccuccuacagcu

SEQ ID NO: 3126562 - RNA, 17 nt, Human
cccaggccuccuacagc

SEQ ID NO: 3126563 - RNA, 11 nt, Human
cccagccccuu

SEQ ID NO: 3126564 - RNA, 19 nt, Human
cccagcaagugagagcugg

SEQ ID NO: 3126565 - RNA, 20 nt, Human
cccagcaagugagagcuggg

SEQ ID NO: 3126566 - RNA, 21 nt, Human
cccagcaagugagagcugggu

SEQ ID NO: 3126567 - RNA, 22 nt, Human
cccagcaagugagagcugggug

SEQ ID NO: 3126568 - RNA, 12 nt, Human
cccagccugcua

SEQ ID NO: 3126569 - RNA, 19 nt, Human
cccagcgagcccugguggc

SEQ ID NO: 3126570 - RNA, 23 nt, Human
cccagcgagcccugguggcagug

SEQ ID NO: 3126571 - RNA, 17 nt, Human
cccagcgagcccuggug

SEQ ID NO: 3126572 - RNA, 18 nt, Human
cccagcgagcccuggugg

SEQ ID NO: 3126573 - RNA, 15 nt, Human
cccagcgagcccugg

SEQ ID NO: 3126574 - RNA, 18 nt, Human
cccagagggccugcaagg

SEQ ID NO: 3126575 - RNA, 20 nt, Human
cccagagggccugcaaggga

SEQ ID NO: 3126576 - RNA, 20 nt, Human
cccagauugcaacaggcugg

SEQ ID NO: 3126577 - RNA, 21 nt, Human
cccagauugcaacaggcuggg

SEQ ID NO: 3126578 - RNA, 22 nt, Human
cccagauugcaacaggcugggc

SEQ ID NO: 3126579 - RNA, 16 nt, Human
cccagcaagugagagc

SEQ ID NO: 3126580 - RNA, 18 nt, Human
cccagcaagugagagcug

SEQ ID NO: 3126581 - RNA, 23 nt, Human
cccaaugcacuuuguucuggcuc

SEQ ID NO: 3126582 - RNA, 23 nt, Human
cccaagggccuggccugagcugg

SEQ ID NO: 3126583 - RNA, 19 nt, Human
cccaagggccuggccugag

SEQ ID NO: 3126584 - RNA, 18 nt, Human
cccaagggccuggccuga

SEQ ID NO: 3126585 - RNA, 23 nt, Human
cccaaauggaaaugggcagagca

SEQ ID NO: 3126586 - RNA, 17 nt, Human
cccaagggccuggccug

SEQ ID NO: 3126587 - RNA, 22 nt, Human
ccaacauacucccaucugugaa

SEQ ID NO: 3126588 - RNA, 21 nt, Human
ccaacauacucccaucuguga

SEQ ID NO: 3126589 - RNA, 16 nt, Human
ccaacauacucccauc

SEQ ID NO: 3126590 - RNA, 20 nt, Human
ccaacauacucccaucugug

SEQ ID NO: 3126591 - RNA, 19 nt, Human
ccaacauacucccaucugu

SEQ ID NO: 3126592 - RNA, 18 nt, Human
ccaacauacucccaucug

SEQ ID NO: 3126593 - RNA, 17 nt, Human
ccaacauacucccaucu

SEQ ID NO: 3126594 - RNA, 15 nt, Human
ccaaaguacacuguu

SEQ ID NO: 3126595 - RNA, 18 nt, Human
ccaaaguacacuguuuca

SEQ ID NO: 3126596 - RNA, 23 nt, Human
ccaaaggaagcacaugccucucu

SEQ ID NO: 3126597 - RNA, 15 nt, Human
ccaaaggaagcacau

SEQ ID NO: 3126598 - RNA, 21 nt, Human
ccaaagcuaggccuggccaga

SEQ ID NO: 3126599 - RNA, 16 nt, Human
ccaaagcuaggccugg

SEQ ID NO: 3126600 - RNA, 17 nt, Human
ccaaagcuaggccuggc

SEQ ID NO: 3126601 - RNA, 15 nt, Human
ccaaagcuaggccug

SEQ ID NO: 3126602 - RNA, 20 nt, Human
ccaaacucaccugccccuca

SEQ ID NO: 3126603 - RNA, 19 nt, Human
ccaaagccaaagcuaggcc

SEQ ID NO: 3126604 - RNA, 23 nt, Human
ccaaagcagugcaugcugucccu

SEQ ID NO: 3126605 - RNA, 19 nt, Human
ccaaagcagugcaugcugu

SEQ ID NO: 3126606 - RNA, 22 nt, Human
ccaaagccuccuccagccgcca

SEQ ID NO: 3126607 - RNA, 17 nt, Human
ccaaagccuccuccagc

SEQ ID NO: 3126608 - RNA, 20 nt, Human
ccaagaagcccaggaaaggc

SEQ ID NO: 3126609 - RNA, 19 nt, Human
ccaagaagcccaggaaagg

SEQ ID NO: 3126610 - RNA, 12 nt, Human
ccaacccucauc

SEQ ID NO: 3126611 - RNA, 15 nt, Human
ccaagaagcccagga

SEQ ID NO: 3126612 - RNA, 15 nt, Human
ccaagggccuggccu

SEQ ID NO: 3126613 - RNA, 21 nt, Human
ccaaggccaaaggaagcacau

SEQ ID NO: 3126614 - RNA, 18 nt, Human
ccaaggccaaaggaagca

SEQ ID NO: 3126615 - RNA, 22 nt, Human
ccaaggggaauguuugccucug

SEQ ID NO: 3126616 - RNA, 18 nt, Human
ccaagggccuggccugag

SEQ ID NO: 3126617 - RNA, 16 nt, Human
ccaagggccuggccug

SEQ ID NO: 3126618 - RNA, 19 nt, Human
ccaagggccuggccugagc

SEQ ID NO: 3126619 - RNA, 20 nt, Human
ccaagucaagugaaaaagga

SEQ ID NO: 3126620 - RNA, 13 nt, Human
ccaaggugggagg

SEQ ID NO: 3126621 - RNA, 23 nt, Human
ccaagguuuggggaagaacgaag

SEQ ID NO: 3126622 - RNA, 14 nt, Human
ccaagcucccaggc

SEQ ID NO: 3126623 - RNA, 17 nt, Human
ccaaggccaaaggaagc

SEQ ID NO: 3126624 - RNA, 22 nt, Human
ccaagcucccaggcauucccca

SEQ ID NO: 3126625 - RNA, 16 nt, Human
ccaagcucccaggcau

SEQ ID NO: 3126626 - RNA, 15 nt, Human
ccaagcucccaggca

SEQ ID NO: 3126627 - RNA, 16 nt, Human
cauuugagcagggcuc

SEQ ID NO: 3126628 - RNA, 20 nt, Human
cauuugagcagggcucagcg

SEQ ID NO: 3126629 - RNA, 17 nt, Human
cauuugagcagggcuca

SEQ ID NO: 3126630 - RNA, 18 nt, Human
cauuugagcagggcucag

SEQ ID NO: 3126631 - RNA, 17 nt, Human
cauuuguuugaacugau

SEQ ID NO: 3126632 - RNA, 20 nt, Human
cauuuguuugaacugauaaa

SEQ ID NO: 3126633 - RNA, 22 nt, Human
cauuuguuugaacugauaaaga

SEQ ID NO: 3126634 - RNA, 14 nt, Human
cauuugcuccuuuc

SEQ ID NO: 3126635 - RNA, 13 nt, Human
cauuugcuccuuu

SEQ ID NO: 3126636 - RNA, 22 nt, Human
cauuugaaaauuuugauguuuu

SEQ ID NO: 3126637 - RNA, 20 nt, Human
cauuugaaaauuuugauguu

SEQ ID NO: 3126638 - RNA, 17 nt, Human
ccaaacucaccugcccc

SEQ ID NO: 3126639 - RNA, 15 nt, Human
cacccaagggccugg

SEQ ID NO: 3126640 - RNA, 14 nt, Human
cacccaagggccug

SEQ ID NO: 3126641 - RNA, 17 nt, Human
cauuguuggccaaagcc

SEQ ID NO: 3126642 - RNA, 18 nt, Human
cauuguuggccaaagcca

SEQ ID NO: 3126643 - RNA, 12 nt, Human
cauuuccugugu

SEQ ID NO: 3126644 - RNA, 13 nt, Human
cauuuccuguguc

SEQ ID NO: 3126645 - RNA, 12 nt, Human
cauuuaaaagau

SEQ ID NO: 3126646 - RNA, 15 nt, Human
cauuuaaaagauaca

SEQ ID NO: 3126647 - RNA, 16 nt, Human
cauuuaaaagauacag

SEQ ID NO: 3126648 - RNA, 16 nt, Human
ccacuacauucuguua

SEQ ID NO: 3126649 - RNA, 17 nt, Human
ccacuacauucuguuaa

SEQ ID NO: 3126650 - RNA, 11 nt, Human
ccacuacauuc

SEQ ID NO: 3126651 - RNA, 15 nt, Human
ccacuacauucuguu

SEQ ID NO: 3126652 - RNA, 14 nt, Human
ccacuacauucugu

SEQ ID NO: 3126653 - RNA, 15 nt, Human
ccaccccacacacgc

SEQ ID NO: 3126654 - RNA, 16 nt, Human
ccacgcuggagugcag

SEQ ID NO: 3126655 - RNA, 13 nt, Human
ccacgcuggagug

SEQ ID NO: 3126656 - RNA, 15 nt, Human
ccacccccacccaag

SEQ ID NO: 3126657 - RNA, 18 nt, Human
ccacgcuggagugcagug

SEQ ID NO: 3126658 - RNA, 19 nt, Human
ccacgcuggagugcaguga

SEQ ID NO: 3126659 - RNA, 16 nt, Human
ccacggccaggccaga

SEQ ID NO: 3126660 - RNA, 18 nt, Human
ccacggccaggccagagg

SEQ ID NO: 3126661 - RNA, 23 nt, Human
ccacggccaggccagagggagug

SEQ ID NO: 3126662 - RNA, 19 nt, Human
ccagaauuucccaaagcag

SEQ ID NO: 3126663 - RNA, 12 nt, Human
ccagaauuuccc

SEQ ID NO: 3126664 - RNA, 18 nt, Human
ccagaauuucccaaagca

SEQ ID NO: 3126665 - RNA, 21 nt, Human
ccagaauuucccaaagcagug

SEQ ID NO: 3126666 - RNA, 21 nt, Human
ccagacaccuugacagggcac

SEQ ID NO: 3126667 - RNA, 20 nt, Human
ccagacaccuugacagggca

SEQ ID NO: 3126668 - RNA, 14 nt, Human
ccacuucagcugac

SEQ ID NO: 3126669 - RNA, 13 nt, Human
ccacuucagcuga

SEQ ID NO: 3126670 - RNA, 23 nt, Human
ccacugcacuccagccuggguga

SEQ ID NO: 3126671 - RNA, 23 nt, Human
ccagaaguuugagaucagccugg

SEQ ID NO: 3126672 - RNA, 22 nt, Human
ccagaaguuugagaucagccug

SEQ ID NO: 3126673 - RNA, 21 nt, Human
ccacccaggagccccgaggcc

SEQ ID NO: 3126674 - RNA, 23 nt, Human
ccacccaggagccccgaggccuu

SEQ ID NO: 3126675 - RNA, 17 nt, Human
ccacccccacccaaggg

SEQ ID NO: 3126676 - RNA, 16 nt, Human
ccacaugugcacaugc

SEQ ID NO: 3126677 - RNA, 16 nt, Human
ccacauuccugaugcu

SEQ ID NO: 3126678 - RNA, 19 nt, Human
ccacaucuugcucugcuga

SEQ ID NO: 3126679 - RNA, 18 nt, Human
ccacaucuugcucugcug

SEQ ID NO: 3126680 - RNA, 17 nt, Human
ccacaucuugcucugcu

SEQ ID NO: 3126681 - RNA, 21 nt, Human
ccaccaacauacucccaucug

SEQ ID NO: 3126682 - RNA, 16 nt, Human
ccacaggaucagucug

SEQ ID NO: 3126683 - RNA, 20 nt, Human
ccacacccagcccacuucug

SEQ ID NO: 3126684 - RNA, 15 nt, Human
ccacacccagcccac

SEQ ID NO: 3126685 - RNA, 21 nt, Human
ccacacccagcccacuucugc

SEQ ID NO: 3126686 - RNA, 22 nt, Human
ccacacccagcccacuucugcc

SEQ ID NO: 3126687 - RNA, 14 nt, Human
ccuggcaugggaau

SEQ ID NO: 3126688 - RNA, 17 nt, Human
ccuggcaugggaaugaa

SEQ ID NO: 3126689 - RNA, 16 nt, Human
ccuggcaugggaauga

SEQ ID NO: 3126690 - RNA, 16 nt, Human
ccuggcagccccuguu

SEQ ID NO: 3126691 - RNA, 14 nt, Human
ccuggcagccccug

SEQ ID NO: 3126692 - RNA, 21 nt, Human
ccuggcacugcuuccagugag

SEQ ID NO: 3126693 - RNA, 17 nt, Human
ccuggcacugcuuccag

SEQ ID NO: 3126694 - RNA, 20 nt, Human
ccuggcacugcuuccaguga

SEQ ID NO: 3126695 - RNA, 14 nt, Human
ccuggacccugugg

SEQ ID NO: 3126696 - RNA, 13 nt, Human
ccuggacccugug

SEQ ID NO: 3126697 - RNA, 14 nt, Human
ccugggcagaagga

SEQ ID NO: 3126698 - RNA, 12 nt, Human
ccugggcagaag

SEQ ID NO: 3126699 - RNA, 20 nt, Human
ccugggaggucaaggcugca

SEQ ID NO: 3126700 - RNA, 20 nt, Human
ccugggaucccucauccuca

SEQ ID NO: 3126701 - RNA, 16 nt, Human
ccugggaucccucauc

SEQ ID NO: 3126702 - RNA, 18 nt, Human
ccuggcaugggaaugaau

SEQ ID NO: 3126703 - RNA, 14 nt, Human
ccuggccccucagg

SEQ ID NO: 3126704 - RNA, 12 nt, Human
ccugcuccagcu

SEQ ID NO: 3126705 - RNA, 22 nt, Human
ccugcuccagcuguucagcugg

SEQ ID NO: 3126706 - RNA, 14 nt, Human
ccugcuccagcugu

SEQ ID NO: 3126707 - RNA, 13 nt, Human
ccugcuccagcug

SEQ ID NO: 3126708 - RNA, 18 nt, Human
ccugcaacaccuuguuuc

SEQ ID NO: 3126709 - RNA, 16 nt, Human
ccugcaaccugauugu

SEQ ID NO: 3126710 - RNA, 19 nt, Human
ccugcaacaccuuguuucc

SEQ ID NO: 3126711 - RNA, 23 nt, Human
ccugcgucucauacucaccucac

SEQ ID NO: 3126712 - RNA, 19 nt, Human
ccugcugguucaggguugg

SEQ ID NO: 3126713 - RNA, 13 nt, Human
ccugcugguucag

SEQ ID NO: 3126714 - RNA, 21 nt, Human
ccugcuggguguggcgcagca

SEQ ID NO: 3126715 - RNA, 23 nt, Human
ccuguagagugggagcugagugg

SEQ ID NO: 3126716 - RNA, 19 nt, Human
ccuguagagugggagcuga

SEQ ID NO: 3126717 - RNA, 21 nt, Human
ccuguagagugggagcugagu

SEQ ID NO: 3126718 - RNA, 20 nt, Human
ccuguaauccuagcacuuug

SEQ ID NO: 3126719 - RNA, 12 nt, Human
ccuguaccucuu

SEQ ID NO: 3126720 - RNA, 18 nt, Human
ccugguggcagcucaccu

SEQ ID NO: 3126721 - RNA, 17 nt, Human
ccugguggcagcucacc

SEQ ID NO: 3126722 - RNA, 16 nt, Human
ccugguggcagcucac

SEQ ID NO: 3126723 - RNA, 14 nt, Human
ccugguggcagcuc

SEQ ID NO: 3126724 - RNA, 12 nt, Human
ccugguggcagc

SEQ ID NO: 3126725 - RNA, 13 nt, Human
ccugguggcagcu

SEQ ID NO: 3126726 - RNA, 17 nt, Human
ccugugauggggcccug

SEQ ID NO: 3126727 - RNA, 19 nt, Human
ccugugauggggcccugcc

SEQ ID NO: 3126728 - RNA, 18 nt, Human
ccugugauggggcccugc

SEQ ID NO: 3126729 - RNA, 22 nt, Human
ccugugauggggcccugccucc

SEQ ID NO: 3126730 - RNA, 21 nt, Human
ccugugauggggcccugccuc

SEQ ID NO: 3126731 - RNA, 20 nt, Human
ccugugauggggcccugccu

SEQ ID NO: 3126732 - RNA, 19 nt, Human
ccugugccucugggacugg

SEQ ID NO: 3126733 - RNA, 15 nt, Human
ccugugccucuggga

SEQ ID NO: 3126734 - RNA, 17 nt, Human
ccugugccucugggacu

SEQ ID NO: 3126735 - RNA, 18 nt, Human
ccuguccccgcacugggc

SEQ ID NO: 3126736 - RNA, 16 nt, Human
ccugucccccugacaa

SEQ ID NO: 3126737 - RNA, 17 nt, Human
ccugucccccugacaac

SEQ ID NO: 3126738 - RNA, 20 nt, Human
ccugugaguacuacaguccu

SEQ ID NO: 3126739 - RNA, 12 nt, Human
ccuucagugccu

SEQ ID NO: 3126740 - RNA, 14 nt, Human
ccuucagugccuua

SEQ ID NO: 3126741 - RNA, 13 nt, Human
ccuucagugccuu

SEQ ID NO: 3126742 - RNA, 19 nt, Human
ccuucagugccuuauggaa

SEQ ID NO: 3126743 - RNA, 15 nt, Human
ccuucagugccuuau

SEQ ID NO: 3126744 - RNA, 20 nt, Human
ccuucagugccuuauggaac

SEQ ID NO: 3126745 - RNA, 14 nt, Human
ccuuccucuuucca

SEQ ID NO: 3126746 - RNA, 18 nt, Human
ccuuccaggggugggaca

SEQ ID NO: 3126747 - RNA, 16 nt, Human
ccuuccagggguggga

SEQ ID NO: 3126748 - RNA, 15 nt, Human
ccuuccagggguggg

SEQ ID NO: 3126749 - RNA, 17 nt, Human
ccuuagacagucccugc

SEQ ID NO: 3126750 - RNA, 16 nt, Human
ccuuagacagucccug

SEQ ID NO: 3126751 - RNA, 19 nt, Human
ccuuagacagucccugcca

SEQ ID NO: 3126752 - RNA, 18 nt, Human
ccuuagacagucccugcc

SEQ ID NO: 3126753 - RNA, 21 nt, Human
ccuuagacagucccugccaau

SEQ ID NO: 3126754 - RNA, 14 nt, Human
ccuuagacaguccc

SEQ ID NO: 3126755 - RNA, 20 nt, Human
ccuuaccucggugccuuccu

SEQ ID NO: 3126756 - RNA, 19 nt, Human
ccuuacccucauguucuua

SEQ ID NO: 3126757 - RNA, 16 nt, Human
ccuuaccagcagagca

SEQ ID NO: 3126758 - RNA, 15 nt, Human
ccuuaccagcagagc

SEQ ID NO: 3126759 - RNA, 14 nt, Human
ccuuaccagcagag

SEQ ID NO: 3126760 - RNA, 11 nt, Human
ccuuuggcuuc

SEQ ID NO: 3126761 - RNA, 15 nt, Human
ccuugaaaacacugu

SEQ ID NO: 3126762 - RNA, 13 nt, Human
ccuucgcuccugu

SEQ ID NO: 3126763 - RNA, 14 nt, Human
ccuucgcuccugug

SEQ ID NO: 3126764 - RNA, 15 nt, Human
ccuucgcuccugugu

SEQ ID NO: 3126765 - RNA, 18 nt, Human
ccuucgcuccugugucuu

SEQ ID NO: 3126766 - RNA, 14 nt, Human
ccuugaacugggua

SEQ ID NO: 3126767 - RNA, 22 nt, Human
ccuugaaaacacuguucucugc

SEQ ID NO: 3126768 - RNA, 21 nt, Human
ccuugaaaacacuguucucug

SEQ ID NO: 3126769 - RNA, 19 nt, Human
ccuugaaaacacuguucuc

SEQ ID NO: 3126770 - RNA, 16 nt, Human
ccuugaacuggguacu

SEQ ID NO: 3126771 - RNA, 17 nt, Human
ccuugaacuuugaccuc

SEQ ID NO: 3126772 - RNA, 17 nt, Human
ccuugaaugaugccaug

SEQ ID NO: 3126773 - RNA, 20 nt, Human
ccuugaguugauucagcucu

SEQ ID NO: 3126774 - RNA, 21 nt, Human
ccuugaccauucuccaccugc

SEQ ID NO: 3126775 - RNA, 23 nt, Human
ccuugaguugauucagcucugca

SEQ ID NO: 3126776 - RNA, 22 nt, Human
ccuugaguugauucagcucugc

SEQ ID NO: 3126777 - RNA, 19 nt, Human
ccuuggauuguccccgacc

SEQ ID NO: 3126778 - RNA, 15 nt, Human
ccuugacagggcaca

SEQ ID NO: 3126779 - RNA, 17 nt, Human
ccuugacagggcacacc

SEQ ID NO: 3126780 - RNA, 20 nt, Human
ccuugaccauucuccaccug

SEQ ID NO: 3126781 - RNA, 19 nt, Human
ccuugaccauucuccaccu

SEQ ID NO: 3126782 - RNA, 14 nt, Human
ccuugacagggcac

SEQ ID NO: 3126783 - RNA, 13 nt, Human
ccuugacagggca

SEQ ID NO: 3126784 - RNA, 20 nt, Human
cguuucuaugacacaugcaa

SEQ ID NO: 3126785 - RNA, 19 nt, Human
cguuucuaaaggcuaccuu

SEQ ID NO: 3126786 - RNA, 21 nt, Human
cguuucuaaaggcuaccuuug

SEQ ID NO: 3126787 - RNA, 15 nt, Human
cguggcugcuucaag

SEQ ID NO: 3126788 - RNA, 14 nt, Human
cguggcugcuucaa

SEQ ID NO: 3126789 - RNA, 12 nt, Human
cguggcugcuuc

SEQ ID NO: 3126790 - RNA, 22 nt, Human
cgugcaguggugcgaucugggu

SEQ ID NO: 3126791 - RNA, 22 nt, Human
cgugcacacaccagagcccacc

SEQ ID NO: 3126792 - RNA, 14 nt, Human
cgugcauaccacuu

SEQ ID NO: 3126793 - RNA, 18 nt, Human
cgugcauaccacuuuugu

SEQ ID NO: 3126794 - RNA, 19 nt, Human
cgugcauaccacuuuuguu

SEQ ID NO: 3126795 - RNA, 20 nt, Human
cgugcacacaccagagccca

SEQ ID NO: 3126796 - RNA, 21 nt, Human
cgugcacacaccagagcccac

SEQ ID NO: 3126797 - RNA, 14 nt, Human
cguccccugucccc

SEQ ID NO: 3126798 - RNA, 11 nt, Human
cguccccuguc

SEQ ID NO: 3126799 - RNA, 13 nt, Human
cgucugacaggca

SEQ ID NO: 3126800 - RNA, 14 nt, Human
cgucugacaggcaa

SEQ ID NO: 3126801 - RNA, 14 nt, Human
cgucuaccugaggg

SEQ ID NO: 3126802 - RNA, 23 nt, Human
cggugcuaucucccccagcccca

SEQ ID NO: 3126803 - RNA, 13 nt, Human
cgcuccugugucu

SEQ ID NO: 3126804 - RNA, 15 nt, Human
cggacagccacggcc

SEQ ID NO: 3126805 - RNA, 16 nt, Human
cggacagccacggcca

SEQ ID NO: 3126806 - RNA, 18 nt, Human
cggacagccacggccagg

SEQ ID NO: 3126807 - RNA, 20 nt, Human
cggaaugaaccacaucuugc

SEQ ID NO: 3126808 - RNA, 18 nt, Human
cggcuggccuggccccuc

SEQ ID NO: 3126809 - RNA, 14 nt, Human
cggcuggccuggcc

SEQ ID NO: 3126810 - RNA, 16 nt, Human
cggcuggccuggcccc

SEQ ID NO: 3126811 - RNA, 15 nt, Human
cggcuggccuggccc

SEQ ID NO: 3126812 - RNA, 16 nt, Human
cgggaggucgaggcag

SEQ ID NO: 3126813 - RNA, 17 nt, Human
cgggaggucgaggcagg

SEQ ID NO: 3126814 - RNA, 15 nt, Human
cgggcaugacacgaa

SEQ ID NO: 3126815 - RNA, 12 nt, Human
cgggcaugacac

SEQ ID NO: 3126816 - RNA, 20 nt, Human
cgggaggauguucugggaca

SEQ ID NO: 3126817 - RNA, 14 nt, Human
cgcagacaggacca

SEQ ID NO: 3126818 - RNA, 13 nt, Human
cgcagacaggacc

SEQ ID NO: 3126819 - RNA, 15 nt, Human
cgcccccacugguga

SEQ ID NO: 3126820 - RNA, 15 nt, Human
cgcgacaaugcaaac

SEQ ID NO: 3126821 - RNA, 17 nt, Human
cgcgacaaugcaaacca

SEQ ID NO: 3126822 - RNA, 16 nt, Human
cgcgacaaugcaaacc

SEQ ID NO: 3126823 - RNA, 14 nt, Human
cgcuaagagggagg

SEQ ID NO: 3126824 - RNA, 16 nt, Human
cgcuaagagggaggga

SEQ ID NO: 3126825 - RNA, 15 nt, Human
cgcuaagagggaggg

SEQ ID NO: 3126826 - RNA, 16 nt, Human
cgcgugcacacaccag

SEQ ID NO: 3126827 - RNA, 19 nt, Human
cgcgugcacacaccagagc

SEQ ID NO: 3126828 - RNA, 20 nt, Human
cgcgugcacacaccagagcc

SEQ ID NO: 3126829 - RNA, 15 nt, Human
ccuuuguauucucuc

SEQ ID NO: 3126830 - RNA, 18 nt, Human
ccuuuguauucucuccug

SEQ ID NO: 3126831 - RNA, 20 nt, Human
ccuuuguauucucuccugua

SEQ ID NO: 3126832 - RNA, 18 nt, Human
cgaggccuucucugaagg

SEQ ID NO: 3126833 - RNA, 19 nt, Human
cgaggccuucucugaagga

SEQ ID NO: 3126834 - RNA, 13 nt, Human
cgaggacagggag

SEQ ID NO: 3126835 - RNA, 12 nt, Human
cgaggacaggga

SEQ ID NO: 3126836 - RNA, 23 nt, Human
cgcacuucgggaggucgaggcag

SEQ ID NO: 3126837 - RNA, 12 nt, Human
cgauuucuguuu

SEQ ID NO: 3126838 - RNA, 19 nt, Human
cgaucuggguucacugcaa

SEQ ID NO: 3126839 - RNA, 13 nt, Human
cgauucuucugcu

SEQ ID NO: 3126840 - RNA, 19 nt, Human
cgauucuucugcuucagcc

SEQ ID NO: 3126841 - RNA, 21 nt, Human
cgauucuucugcuucagccuc

SEQ ID NO: 3126842 - RNA, 12 nt, Human
ccuuggcugcag

SEQ ID NO: 3126843 - RNA, 13 nt, Human
ccuuggcugcagg

SEQ ID NO: 3126844 - RNA, 20 nt, Human
ccuuguggucccaccccaca

SEQ ID NO: 3126845 - RNA, 19 nt, Human
ccuuguggucccaccccac

SEQ ID NO: 3126846 - RNA, 16 nt, Human
ccuuguggucccaccc

SEQ ID NO: 3126847 - RNA, 13 nt, Human
ccuuuaagagaaa

SEQ ID NO: 3126848 - RNA, 23 nt, Human
ccuuugacgccaucccagcccca

SEQ ID NO: 3126849 - RNA, 17 nt, Human
ccucugacacacagcuc

SEQ ID NO: 3126850 - RNA, 18 nt, Human
ccucugacacacagcucu

SEQ ID NO: 3126851 - RNA, 15 nt, Human
ccucugcacaagcug

SEQ ID NO: 3126852 - RNA, 11 nt, Human
ccucugcacaa

SEQ ID NO: 3126853 - RNA, 19 nt, Human
ccucugcacaagcugcacc

SEQ ID NO: 3126854 - RNA, 17 nt, Human
ccucugcacaagcugca

SEQ ID NO: 3126855 - RNA, 20 nt, Human
ccucugcacaagcugcaccc

SEQ ID NO: 3126856 - RNA, 19 nt, Human
ccucugcagcaauaaagca

SEQ ID NO: 3126857 - RNA, 22 nt, Human
ccucugcacuccccugcugggu

SEQ ID NO: 3126858 - RNA, 21 nt, Human
ccucugcacuccccugcuggg

SEQ ID NO: 3126859 - RNA, 20 nt, Human
ccucugcacuccccugcugg

SEQ ID NO: 3126860 - RNA, 19 nt, Human
ccucugcacuccccugcug

SEQ ID NO: 3126861 - RNA, 14 nt, Human
ccucugcacucccc

SEQ ID NO: 3126862 - RNA, 12 nt, Human
ccucugggacug

SEQ ID NO: 3126863 - RNA, 16 nt, Human
ccucugacacacagcu

SEQ ID NO: 3126864 - RNA, 15 nt, Human
ccucugacacacagc

SEQ ID NO: 3126865 - RNA, 23 nt, Human
ccucugaaaaccaauguucucuc

SEQ ID NO: 3126866 - RNA, 12 nt, Human
ccucucccauca

SEQ ID NO: 3126867 - RNA, 23 nt, Human
ccuccugugugugcgccuacagg

SEQ ID NO: 3126868 - RNA, 14 nt, Human
ccucagggucccug

SEQ ID NO: 3126869 - RNA, 11 nt, Human
ccucaggccug

SEQ ID NO: 3126870 - RNA, 10 nt, Human
ccucaggccu

SEQ ID NO: 3126871 - RNA, 21 nt, Human
ccucaggccugggggcugggc

SEQ ID NO: 3126872 - RNA, 14 nt, Human
ccucaggccugggg

SEQ ID NO: 3126873 - RNA, 16 nt, Human
ccucagcauccuggca

SEQ ID NO: 3126874 - RNA, 17 nt, Human
ccucagcauccuggcac

SEQ ID NO: 3126875 - RNA, 14 nt, Human
ccucagcauccugg

SEQ ID NO: 3126876 - RNA, 16 nt, Human
ccucaggugagaagca

SEQ ID NO: 3126877 - RNA, 22 nt, Human
ccucagggucccugguggcagc

SEQ ID NO: 3126878 - RNA, 15 nt, Human
ccucagggucccugg

SEQ ID NO: 3126879 - RNA, 22 nt, Human
ccucaggugauccacccaccuc

SEQ ID NO: 3126880 - RNA, 22 nt, Human
ccucaggugagaagcagaggaa

SEQ ID NO: 3126881 - RNA, 17 nt, Human
ccucaggugauccaccc

SEQ ID NO: 3126882 - RNA, 19 nt, Human
ccucaggugauccacccac

SEQ ID NO: 3126883 - RNA, 15 nt, Human
ccucagucuggcccu

SEQ ID NO: 3126884 - RNA, 16 nt, Human
ccucccucccucuuuc

SEQ ID NO: 3126885 - RNA, 13 nt, Human
ccucccucccucu

SEQ ID NO: 3126886 - RNA, 15 nt, Human
ccucccucccucuuu

SEQ ID NO: 3126887 - RNA, 13 nt, Human
ccuccugugugug

SEQ ID NO: 3126888 - RNA, 15 nt, Human
ccuccugugugugcg

SEQ ID NO: 3126889 - RNA, 22 nt, Human
ccuccugugugugcgccuacag

SEQ ID NO: 3126890 - RNA, 13 nt, Human
ccuccugggcuaa

SEQ ID NO: 3126891 - RNA, 18 nt, Human
ccugaugcuucuucagag

SEQ ID NO: 3126892 - RNA, 17 nt, Human
ccugaugcuucuucaga

SEQ ID NO: 3126893 - RNA, 23 nt, Human
ccugauugugucucuugguccug

SEQ ID NO: 3126894 - RNA, 14 nt, Human
ccugaugcuucuuc

SEQ ID NO: 3126895 - RNA, 14 nt, Human
ccugaggcccuucu

SEQ ID NO: 3126896 - RNA, 20 nt, Human
ccugaggcccuucucuccag

SEQ ID NO: 3126897 - RNA, 19 nt, Human
ccugaggcccuucucucca

SEQ ID NO: 3126898 - RNA, 17 nt, Human
ccugaggcccuucucuc

SEQ ID NO: 3126899 - RNA, 16 nt, Human
ccugaggcccuucucu

SEQ ID NO: 3126900 - RNA, 22 nt, Human
ccugaggcccuucucuccagcc

SEQ ID NO: 3126901 - RNA, 21 nt, Human
ccugaggcccuucucuccagc

SEQ ID NO: 3126902 - RNA, 23 nt, Human
ccugaggcccuucucuccagccc

SEQ ID NO: 3126903 - RNA, 16 nt, Human
ccugacaacacucauu

SEQ ID NO: 3126904 - RNA, 15 nt, Human
ccugacaacacucau

SEQ ID NO: 3126905 - RNA, 14 nt, Human
ccugacaacacuca

SEQ ID NO: 3126906 - RNA, 12 nt, Human
ccugacaacacu

SEQ ID NO: 3126907 - RNA, 14 nt, Human
ccugaggcccagag

SEQ ID NO: 3126908 - RNA, 13 nt, Human
ccugaggcccaga

SEQ ID NO: 3126909 - RNA, 12 nt, Human
ccugaggcccag

SEQ ID NO: 3126910 - RNA, 23 nt, Human
ccucuguacagagcccacgcccc

SEQ ID NO: 3126911 - RNA, 18 nt, Human
ccucuguacagagcccac

SEQ ID NO: 3126912 - RNA, 17 nt, Human
ccucuguacagagccca

SEQ ID NO: 3126913 - RNA, 16 nt, Human
ccucuguacagagccc

SEQ ID NO: 3126914 - RNA, 15 nt, Human
ccucuguacagagcc

SEQ ID NO: 3126915 - RNA, 14 nt, Human
ccucuguacagagc

SEQ ID NO: 3126916 - RNA, 14 nt, Human
ccucuuagaaaaac

SEQ ID NO: 3126917 - RNA, 14 nt, Human
ccucuuaugggcug

SEQ ID NO: 3126918 - RNA, 16 nt, Human
ccucuuaugggcuggg

SEQ ID NO: 3126919 - RNA, 15 nt, Human
ccucuuaugggcugg

SEQ ID NO: 3126920 - RNA, 17 nt, Human
ccucuuaugggcugggu

SEQ ID NO: 3126921 - RNA, 22 nt, Human
ccucuuuggucuacacugugcu

SEQ ID NO: 3126922 - RNA, 15 nt, Human
ccugaagucacacag

SEQ ID NO: 3126923 - RNA, 13 nt, Human
ccugaaggccccg

SEQ ID NO: 3126924 - RNA, 16 nt, Human
ccugaagucacacagu

SEQ ID NO: 3126925 - RNA, 17 nt, Human
ccugaagucacacagug

SEQ ID NO: 3126926 - RNA, 17 nt, Human
ccucacaguccuuacca

SEQ ID NO: 3126927 - RNA, 17 nt, Human
ccucaccuuucccaucu

SEQ ID NO: 3126928 - RNA, 15 nt, Human
ccucaccccacugug

SEQ ID NO: 3126929 - RNA, 12 nt, Human
ccucaccccacu

SEQ ID NO: 3126930 - RNA, 22 nt, Human
ccucacaguccuuaccagcaga

SEQ ID NO: 3126931 - RNA, 20 nt, Human
ccucacaguccuuaccagca

SEQ ID NO: 3126932 - RNA, 12 nt, Human
ccggcuggccug

SEQ ID NO: 3126933 - RNA, 15 nt, Human
ccgggcacucagaag

SEQ ID NO: 3126934 - RNA, 13 nt, Human
ccggcuggccugg

SEQ ID NO: 3126935 - RNA, 23 nt, Human
ccgcuuucuacccagcgagcccu

SEQ ID NO: 3126936 - RNA, 22 nt, Human
ccccaggaggccagccuugacc

SEQ ID NO: 3126937 - RNA, 21 nt, Human
ccccaggaggccagccuugac

SEQ ID NO: 3126938 - RNA, 15 nt, Human
ccccaggaggccagc

SEQ ID NO: 3126939 - RNA, 14 nt, Human
ccccaggaggccag

SEQ ID NO: 3126940 - RNA, 13 nt, Human
ccccaggaggcca

SEQ ID NO: 3126941 - RNA, 13 nt, Human
ccccacuggugac

SEQ ID NO: 3126942 - RNA, 12 nt, Human
ccccacugguga

SEQ ID NO: 3126943 - RNA, 21 nt, Human
cccccgcugucagccauuccu

SEQ ID NO: 3126944 - RNA, 12 nt, Human
cccccagcccca

SEQ ID NO: 3126945 - RNA, 18 nt, Human
cccugugggcccccaaau

SEQ ID NO: 3126946 - RNA, 15 nt, Human
cccuguuuguuucug

SEQ ID NO: 3126947 - RNA, 15 nt, Human
cccugugggccccca

SEQ ID NO: 3126948 - RNA, 16 nt, Human
cccugugggcccccaa

SEQ ID NO: 3126949 - RNA, 15 nt, Human
cccugguggcagugg

SEQ ID NO: 3126950 - RNA, 16 nt, Human
cccugguggcaguggg

SEQ ID NO: 3126951 - RNA, 19 nt, Human
cccugguggcagugggagc

SEQ ID NO: 3126952 - RNA, 17 nt, Human
ccccucagggucccugg

SEQ ID NO: 3126953 - RNA, 20 nt, Human
ccccucagggucccuggugg

SEQ ID NO: 3126954 - RNA, 18 nt, Human
ccccucagggucccuggu

SEQ ID NO: 3126955 - RNA, 20 nt, Human
cccuuugacgccaucccagc

SEQ ID NO: 3126956 - RNA, 18 nt, Human
cccuuguggucccacccc

SEQ ID NO: 3126957 - RNA, 16 nt, Human
cccuuguggucccacc

SEQ ID NO: 3126958 - RNA, 14 nt, Human
cccuugugguccca

SEQ ID NO: 3126959 - RNA, 18 nt, Human
cccuuggggagcaggcuc

SEQ ID NO: 3126960 - RNA, 18 nt, Human
cccuugccgucuaccuga

SEQ ID NO: 3126961 - RNA, 17 nt, Human
cccuugccgucuaccug

SEQ ID NO: 3126962 - RNA, 18 nt, Human
ccgagaucacgccacugc

SEQ ID NO: 3126963 - RNA, 17 nt, Human
ccgaggccuucucugaa

SEQ ID NO: 3126964 - RNA, 18 nt, Human
cccuuuuuuggcugcuga

SEQ ID NO: 3126965 - RNA, 17 nt, Human
cccuuuuuuggcugcug

SEQ ID NO: 3126966 - RNA, 13 nt, Human
cccuuuucuguuu

SEQ ID NO: 3126967 - RNA, 11 nt, Human
cccuuuuccuu

SEQ ID NO: 3126968 - RNA, 22 nt, Human
ccgagauagccaaggccaaagg

SEQ ID NO: 3126969 - RNA, 19 nt, Human
ccgagauagccaaggccaa

SEQ ID NO: 3126970 - RNA, 18 nt, Human
ccgagauagccaaggcca

SEQ ID NO: 3126971 - RNA, 17 nt, Human
ccgagaaggaagccucc

SEQ ID NO: 3126972 - RNA, 19 nt, Human
cccuuuuuuggcugcugaa

SEQ ID NO: 3126973 - RNA, 14 nt, Human
cuggaaugcagugg

SEQ ID NO: 3126974 - RNA, 15 nt, Human
cuggaaugcaguggu

SEQ ID NO: 3126975 - RNA, 14 nt, Human
cuggaagcacagcu

SEQ ID NO: 3126976 - RNA, 18 nt, Human
cuggaagcacagcuucau

SEQ ID NO: 3126977 - RNA, 15 nt, Human
cuggaagcacagcuu

SEQ ID NO: 3126978 - RNA, 14 nt, Human
cuggccuagcauac

SEQ ID NO: 3126979 - RNA, 23 nt, Human
cuggccuagcauacguacacauu

SEQ ID NO: 3126980 - RNA, 13 nt, Human
cuggcccacugca

SEQ ID NO: 3126981 - RNA, 12 nt, Human
cuggcccacugc

SEQ ID NO: 3126982 - RNA, 17 nt, Human
cuggccuagcauacgua

SEQ ID NO: 3126983 - RNA, 21 nt, Human
cuggccagaugcaccagcccu

SEQ ID NO: 3126984 - RNA, 17 nt, Human
cuggccagaugcaccag

SEQ ID NO: 3126985 - RNA, 18 nt, Human
cuggccagaugcaccagc

SEQ ID NO: 3126986 - RNA, 19 nt, Human
cuggccagaugcaccagcc

SEQ ID NO: 3126987 - RNA, 20 nt, Human
cuggccagaugcaccagccc

SEQ ID NO: 3126988 - RNA, 17 nt, Human
cuggcacugcuuccagu

SEQ ID NO: 3126989 - RNA, 16 nt, Human
cuggcacugcuuccag

SEQ ID NO: 3126990 - RNA, 15 nt, Human
cuggcacugcuucca

SEQ ID NO: 3126991 - RNA, 16 nt, Human
cuggccagaugcacca

SEQ ID NO: 3126992 - RNA, 14 nt, Human
cuggcacugcuucc

SEQ ID NO: 3126993 - RNA, 13 nt, Human
cuggcacugcuuc

SEQ ID NO: 3126994 - RNA, 23 nt, Human
cuggcacuauaauguaagcucua

SEQ ID NO: 3126995 - RNA, 22 nt, Human
cuggcacuauaauguaagcucu

SEQ ID NO: 3126996 - RNA, 15 nt, Human
cuggauggggcugca

SEQ ID NO: 3126997 - RNA, 13 nt, Human
cuggauuaaacuu

SEQ ID NO: 3126998 - RNA, 23 nt, Human
cuggauuaaacuuaaucuaaaug

SEQ ID NO: 3126999 - RNA, 16 nt, Human
cuggauggggcugcac

SEQ ID NO: 3127000 - RNA, 21 nt, Human
cugggcuucaguggcagcugc

SEQ ID NO: 3127001 - RNA, 22 nt, Human
cugggcuucaguggcagcugcu

SEQ ID NO: 3127002 - RNA, 13 nt, Human
cugggcuugggga

SEQ ID NO: 3127003 - RNA, 20 nt, Human
cugggcuuggggaccagagc

SEQ ID NO: 3127004 - RNA, 17 nt, Human
cugggcuuggggaccag

SEQ ID NO: 3127005 - RNA, 21 nt, Human
cugggcuuggggaccagagcu

SEQ ID NO: 3127006 - RNA, 18 nt, Human
cugggcuucaguggcagc

SEQ ID NO: 3127007 - RNA, 17 nt, Human
cugggcuucaguggcag

SEQ ID NO: 3127008 - RNA, 19 nt, Human
cugggcuucaguggcagcu

SEQ ID NO: 3127009 - RNA, 20 nt, Human
cugggcuucaguggcagcug

SEQ ID NO: 3127010 - RNA, 19 nt, Human
cuggguacuuguggacaca

SEQ ID NO: 3127011 - RNA, 21 nt, Human
cuggguacuuguggacacagc

SEQ ID NO: 3127012 - RNA, 23 nt, Human
cuggguacuuguggacacagcuc

SEQ ID NO: 3127013 - RNA, 20 nt, Human
cuggguacuuguggacacag

SEQ ID NO: 3127014 - RNA, 23 nt, Human
cugggguggggaccucaggccug

SEQ ID NO: 3127015 - RNA, 22 nt, Human
cugggguggggaccucaggccu

SEQ ID NO: 3127016 - RNA, 21 nt, Human
cugggguggggaccucaggcc

SEQ ID NO: 3127017 - RNA, 13 nt, Human
cugggggccucag

SEQ ID NO: 3127018 - RNA, 17 nt, Human
cugggggccucagugcc

SEQ ID NO: 3127019 - RNA, 17 nt, Human
cugggguggggaccuca

SEQ ID NO: 3127020 - RNA, 19 nt, Human
cugggguggggaccucagg

SEQ ID NO: 3127021 - RNA, 18 nt, Human
cugggguggggaccucag

SEQ ID NO: 3127022 - RNA, 19 nt, Human
cugguggcagugggagcug

SEQ ID NO: 3127023 - RNA, 23 nt, Human
cugguggcagugggagcugccug

SEQ ID NO: 3127024 - RNA, 19 nt, Human
cuggguucuacccaggugc

SEQ ID NO: 3127025 - RNA, 13 nt, Human
cuggguuggaggg

SEQ ID NO: 3127026 - RNA, 17 nt, Human
cugguccauagagagca

SEQ ID NO: 3127027 - RNA, 15 nt, Human
cugguccauagagag

SEQ ID NO: 3127028 - RNA, 15 nt, Human
cuggucccacucagu

SEQ ID NO: 3127029 - RNA, 18 nt, Human
cuggucccacucagucca

SEQ ID NO: 3127030 - RNA, 14 nt, Human
cuggucccacucag

SEQ ID NO: 3127031 - RNA, 18 nt, Human
cugguccauagagagcaa

SEQ ID NO: 3127032 - RNA, 13 nt, Human
cuggccugagcug

SEQ ID NO: 3127033 - RNA, 17 nt, Human
cuggcucuuccaggcug

SEQ ID NO: 3127034 - RNA, 19 nt, Human
cuggcucuuccaggcuggg

SEQ ID NO: 3127035 - RNA, 18 nt, Human
cuggcucuuccaggcugg

SEQ ID NO: 3127036 - RNA, 19 nt, Human
cuggcuguuggcugggggc

SEQ ID NO: 3127037 - RNA, 21 nt, Human
cuggcuggguggcaccagcag

SEQ ID NO: 3127038 - RNA, 18 nt, Human
cuggcuguuggcuggggg

SEQ ID NO: 3127039 - RNA, 20 nt, Human
cuggcuguuggcugggggcc

SEQ ID NO: 3127040 - RNA, 18 nt, Human
cugggaggucaaggcugc

SEQ ID NO: 3127041 - RNA, 16 nt, Human
cugggagugagcuggu

SEQ ID NO: 3127042 - RNA, 13 nt, Human
cugggagugagcu

SEQ ID NO: 3127043 - RNA, 12 nt, Human
cugggagugagc

SEQ ID NO: 3127044 - RNA, 20 nt, Human
cugggcaaugugauaaaacc

SEQ ID NO: 3127045 - RNA, 20 nt, Human
cugcccggcaggguccuaga

SEQ ID NO: 3127046 - RNA, 16 nt, Human
cugccccuggcagccc

SEQ ID NO: 3127047 - RNA, 15 nt, Human
cugccccuggcagcc

SEQ ID NO: 3127048 - RNA, 14 nt, Human
cugccccuggcagc

SEQ ID NO: 3127049 - RNA, 16 nt, Human
cugccauuucugagau

SEQ ID NO: 3127050 - RNA, 16 nt, Human
cugcccugcccaccug

SEQ ID NO: 3127051 - RNA, 15 nt, Human
cugcccugcccaccu

SEQ ID NO: 3127052 - RNA, 14 nt, Human
cugcccugcccacc

SEQ ID NO: 3127053 - RNA, 13 nt, Human
cugcccugcccac

SEQ ID NO: 3127054 - RNA, 11 nt, Human
cugcccggcug

SEQ ID NO: 3127055 - RNA, 15 nt, Human
cugcccggcugcgga

SEQ ID NO: 3127056 - RNA, 19 nt, Human
cugcccuccaagaccuucu

SEQ ID NO: 3127057 - RNA, 15 nt, Human
cugccacccugggga

SEQ ID NO: 3127058 - RNA, 16 nt, Human
cugccacccuggggag

SEQ ID NO: 3127059 - RNA, 20 nt, Human
cugccacccuggggagaaag

SEQ ID NO: 3127060 - RNA, 14 nt, Human
cugccacccugggg

SEQ ID NO: 3127061 - RNA, 19 nt, Human
cugccagccgagauagcca

SEQ ID NO: 3127062 - RNA, 19 nt, Human
cugccaggaagccagcagg

SEQ ID NO: 3127063 - RNA, 18 nt, Human
cugccaggaagccagcag

SEQ ID NO: 3127064 - RNA, 16 nt, Human
cugccaggaagccagc

SEQ ID NO: 3127065 - RNA, 15 nt, Human
cugccaggaagccag

SEQ ID NO: 3127066 - RNA, 19 nt, Human
cugccaugccagcuuaucu

SEQ ID NO: 3127067 - RNA, 17 nt, Human
cugccaugccagcuuau

SEQ ID NO: 3127068 - RNA, 15 nt, Human
cugccaugccagcuu

SEQ ID NO: 3127069 - RNA, 14 nt, Human
cugcuccagcuguu

SEQ ID NO: 3127070 - RNA, 16 nt, Human
cugcgguccacccagg

SEQ ID NO: 3127071 - RNA, 21 nt, Human
cugcggaaugaaccacaucuu

SEQ ID NO: 3127072 - RNA, 15 nt, Human
cugcgguccacccag

SEQ ID NO: 3127073 - RNA, 20 nt, Human
cugcggaaugaaccacaucu

SEQ ID NO: 3127074 - RNA, 16 nt, Human
cugcuccucuccccag

SEQ ID NO: 3127075 - RNA, 17 nt, Human
cugcuccucuccccagc

SEQ ID NO: 3127076 - RNA, 18 nt, Human
cugcuccucuccccagca

SEQ ID NO: 3127077 - RNA, 13 nt, Human
cugccucagccuc

SEQ ID NO: 3127078 - RNA, 13 nt, Human
cugccugcccagg

SEQ ID NO: 3127079 - RNA, 14 nt, Human
cugccugcccaggc

SEQ ID NO: 3127080 - RNA, 23 nt, Human
cugccuguugggccaggagccuc

SEQ ID NO: 3127081 - RNA, 23 nt, Human
cugccugaagucacacagugagu

SEQ ID NO: 3127082 - RNA, 13 nt, Human
cugccucuucucu

SEQ ID NO: 3127083 - RNA, 16 nt, Human
cugcaccggcuggccu

SEQ ID NO: 3127084 - RNA, 14 nt, Human
cugcacuugcagac

SEQ ID NO: 3127085 - RNA, 16 nt, Human
cugcacuugcagacuc

SEQ ID NO: 3127086 - RNA, 17 nt, Human
cugcacuugcagacucu

SEQ ID NO: 3127087 - RNA, 19 nt, Human
cugcaccggcuggccuggc

SEQ ID NO: 3127088 - RNA, 18 nt, Human
cugcaccggcuggccugg

SEQ ID NO: 3127089 - RNA, 17 nt, Human
cugcaccggcuggccug

SEQ ID NO: 3127090 - RNA, 22 nt, Human
cugcagggaguccgaaagggac

SEQ ID NO: 3127091 - RNA, 22 nt, Human
cugcagccucaaccuccugggc

SEQ ID NO: 3127092 - RNA, 19 nt, Human
cugcagccucaaccuccug

SEQ ID NO: 3127093 - RNA, 20 nt, Human
cugcagccucaaccuccugg

SEQ ID NO: 3127094 - RNA, 11 nt, Human
cugcagccuca

SEQ ID NO: 3127095 - RNA, 16 nt, Human
cugcacaagcugcacc

SEQ ID NO: 3127096 - RNA, 15 nt, Human
cugcacaagcugcac

SEQ ID NO: 3127097 - RNA, 14 nt, Human
cugcacaagcugca

SEQ ID NO: 3127098 - RNA, 13 nt, Human
cugcacaagcugc

SEQ ID NO: 3127099 - RNA, 18 nt, Human
cugcacccucaggcaggu

SEQ ID NO: 3127100 - RNA, 16 nt, Human
cugcacccucaggcag

SEQ ID NO: 3127101 - RNA, 17 nt, Human
cugcacccucaggcagg

SEQ ID NO: 3127102 - RNA, 13 nt, Human
cugauaaagauga

SEQ ID NO: 3127103 - RNA, 16 nt, Human
cugagucugaaggcug

SEQ ID NO: 3127104 - RNA, 15 nt, Human
cugagucugaaggcu

SEQ ID NO: 3127105 - RNA, 14 nt, Human
cugagucugaaggc

SEQ ID NO: 3127106 - RNA, 13 nt, Human
cugagucugaagg

SEQ ID NO: 3127107 - RNA, 22 nt, Human
cugauucccaagcucugcuccu

SEQ ID NO: 3127108 - RNA, 19 nt, Human
cugauucccaagcucugcu

SEQ ID NO: 3127109 - RNA, 20 nt, Human
cugauucccaagcucugcuc

SEQ ID NO: 3127110 - RNA, 17 nt, Human
cugauucccaagcucug

SEQ ID NO: 3127111 - RNA, 18 nt, Human
cugauucccaagcucugc

SEQ ID NO: 3127112 - RNA, 15 nt, Human
cugauucccaagcuc

SEQ ID NO: 3127113 - RNA, 13 nt, Human
cucccuuccucuu

SEQ ID NO: 3127114 - RNA, 14 nt, Human
cucccuuccucuuu

SEQ ID NO: 3127115 - RNA, 17 nt, Human
cucccuuggauuguccc

SEQ ID NO: 3127116 - RNA, 23 nt, Human
cucccuucccaccucucucacuc

SEQ ID NO: 3127117 - RNA, 10 nt, Human
cucccuuccu

SEQ ID NO: 3127118 - RNA, 18 nt, Human
cucccaucucacacauga

SEQ ID NO: 3127119 - RNA, 15 nt, Human
cucccaucucacaca

SEQ ID NO: 3127120 - RNA, 14 nt, Human
cucccaucucacac

SEQ ID NO: 3127121 - RNA, 12 nt, Human
cuccugcaggca

SEQ ID NO: 3127122 - RNA, 14 nt, Human
cuccugcaggcagc

SEQ ID NO: 3127123 - RNA, 13 nt, Human
cuccugcaggcag

SEQ ID NO: 3127124 - RNA, 14 nt, Human
cuccucagaucuuc

SEQ ID NO: 3127125 - RNA, 12 nt, Human
cuccucagaucu

SEQ ID NO: 3127126 - RNA, 20 nt, Human
cucgaguuacagacaaagcg

SEQ ID NO: 3127127 - RNA, 16 nt, Human
cucgaguuacagacaa

SEQ ID NO: 3127128 - RNA, 15 nt, Human
cucgcgacaaugcaa

SEQ ID NO: 3127129 - RNA, 13 nt, Human
cucgcgacaaugc

SEQ ID NO: 3127130 - RNA, 21 nt, Human
cuccuugaaaacacuguucuc

SEQ ID NO: 3127131 - RNA, 11 nt, Human
cuccuucuucc

SEQ ID NO: 3127132 - RNA, 16 nt, Human
cucgaacuggcugcaa

SEQ ID NO: 3127133 - RNA, 13 nt, Human
cuccuucaccuuu

SEQ ID NO: 3127134 - RNA, 14 nt, Human
cuccuucuguccua

SEQ ID NO: 3127135 - RNA, 15 nt, Human
cuccuucuguccuac

SEQ ID NO: 3127136 - RNA, 20 nt, Human
cuccuucuguccuacucugu

SEQ ID NO: 3127137 - RNA, 15 nt, Human
cuccugugucuugca

SEQ ID NO: 3127138 - RNA, 23 nt, Human
cuccugugucuugcaauggcagc

SEQ ID NO: 3127139 - RNA, 11 nt, Human
cuccugugugu

SEQ ID NO: 3127140 - RNA, 22 nt, Human
cuccugcaggcagccaggccac

SEQ ID NO: 3127141 - RNA, 21 nt, Human
cuccugcaggcagccaggcca

SEQ ID NO: 3127142 - RNA, 15 nt, Human
cuccugcaggcagcc

SEQ ID NO: 3127143 - RNA, 21 nt, Human
cuccuucaccuuuguccccac

SEQ ID NO: 3127144 - RNA, 19 nt, Human
cuccuucaccuuugucccc

SEQ ID NO: 3127145 - RNA, 16 nt, Human
cuccuucaccuuuguc

SEQ ID NO: 3127146 - RNA, 14 nt, Human
cuccuucaccuuug

SEQ ID NO: 3127147 - RNA, 19 nt, Human
cuccagcuguucagcuggu

SEQ ID NO: 3127148 - RNA, 18 nt, Human
cuccagcuguucagcugg

SEQ ID NO: 3127149 - RNA, 13 nt, Human
cuccagcuguuca

SEQ ID NO: 3127150 - RNA, 11 nt, Human
cuccaggcucc

SEQ ID NO: 3127151 - RNA, 22 nt, Human
cucccaggcauuccccaggagg

SEQ ID NO: 3127152 - RNA, 21 nt, Human
cucccaggcauuccccaggag

SEQ ID NO: 3127153 - RNA, 20 nt, Human
cucccaggcauuccccagga

SEQ ID NO: 3127154 - RNA, 19 nt, Human
cucccaggcauuccccagg

SEQ ID NO: 3127155 - RNA, 17 nt, Human
cucccaggcauucccca

SEQ ID NO: 3127156 - RNA, 15 nt, Human
cucccaggcauuccc

SEQ ID NO: 3127157 - RNA, 21 nt, Human
cucccaaggggcccaaauucu

SEQ ID NO: 3127158 - RNA, 22 nt, Human
cucccaaggggcccaaauucuu

SEQ ID NO: 3127159 - RNA, 14 nt, Human
cuccaugugggcua

SEQ ID NO: 3127160 - RNA, 11 nt, Human
cuccacccugc

SEQ ID NO: 3127161 - RNA, 12 nt, Human
cuccacccugcu

SEQ ID NO: 3127162 - RNA, 21 nt, Human
cuccaccugccagggacagag

SEQ ID NO: 3127163 - RNA, 18 nt, Human
cuccaccugccagggaca

SEQ ID NO: 3127164 - RNA, 17 nt, Human
cuccaccugccagggac

SEQ ID NO: 3127165 - RNA, 15 nt, Human
cuccaccugccaggg

SEQ ID NO: 3127166 - RNA, 19 nt, Human
cuccagcucaccagcccca

SEQ ID NO: 3127167 - RNA, 20 nt, Human
cuccagcucaccagccccag

SEQ ID NO: 3127168 - RNA, 23 nt, Human
cuaaaagguaugcaaucaaaucu

SEQ ID NO: 3127169 - RNA, 12 nt, Human
cucagggucccu

SEQ ID NO: 3127170 - RNA, 15 nt, Human
cucaggugucccugc

SEQ ID NO: 3127171 - RNA, 16 nt, Human
cucaggugucccugca

SEQ ID NO: 3127172 - RNA, 23 nt, Human
cucagguggggucacucuggcag

SEQ ID NO: 3127173 - RNA, 22 nt, Human
cucagguggggucacucuggca

SEQ ID NO: 3127174 - RNA, 18 nt, Human
cucauaguaugguggcug

SEQ ID NO: 3127175 - RNA, 19 nt, Human
cucauaguaugguggcugg

SEQ ID NO: 3127176 - RNA, 17 nt, Human
cucaggugucccugcac

SEQ ID NO: 3127177 - RNA, 18 nt, Human
cucaggugucccugcacu

SEQ ID NO: 3127178 - RNA, 19 nt, Human
cucaggugucccugcacuu

SEQ ID NO: 3127179 - RNA, 21 nt, Human
cucauuagcauuuugcuaaau

SEQ ID NO: 3127180 - RNA, 16 nt, Human
cucauugaccugaggc

SEQ ID NO: 3127181 - RNA, 23 nt, Human
cucauucuucuguacgucugaca

SEQ ID NO: 3127182 - RNA, 15 nt, Human
cucauugaccugagg

SEQ ID NO: 3127183 - RNA, 13 nt, Human
cucauugaccuga

SEQ ID NO: 3127184 - RNA, 13 nt, Human
cucauucuucugu

SEQ ID NO: 3127185 - RNA, 14 nt, Human
cucauucuucugua

SEQ ID NO: 3127186 - RNA, 12 nt, Human
cucauucuucug

SEQ ID NO: 3127187 - RNA, 13 nt, Human
cucucccaucacu

SEQ ID NO: 3127188 - RNA, 20 nt, Human
cucucccaucacuucccuac

SEQ ID NO: 3127189 - RNA, 14 nt, Human
cucucccaucacuu

SEQ ID NO: 3127190 - RNA, 18 nt, Human
cucucccaucacuucccu

SEQ ID NO: 3127191 - RNA, 12 nt, Human
cucuccagcccc

SEQ ID NO: 3127192 - RNA, 13 nt, Human
cucuccagccccu

SEQ ID NO: 3127193 - RNA, 22 nt, Human
cucucaggccagcugcuugggc

SEQ ID NO: 3127194 - RNA, 23 nt, Human
cucucaggccagcugcuugggcu

SEQ ID NO: 3127195 - RNA, 22 nt, Human
cucuccuguaccucuugagccu

SEQ ID NO: 3127196 - RNA, 17 nt, Human
cucuccuguaccucuug

SEQ ID NO: 3127197 - RNA, 18 nt, Human
cucuccuguaccucuuga

SEQ ID NO: 3127198 - RNA, 13 nt, Human
cucuccuguaccu

SEQ ID NO: 3127199 - RNA, 14 nt, Human
cucuccuguaccuc

SEQ ID NO: 3127200 - RNA, 15 nt, Human
cucuccuguaccucu

SEQ ID NO: 3127201 - RNA, 14 nt, Human
cucucucacuccuu

SEQ ID NO: 3127202 - RNA, 12 nt, Human
cucucucaggcc

SEQ ID NO: 3127203 - RNA, 16 nt, Human
cucucucacuccuuga

SEQ ID NO: 3127204 - RNA, 15 nt, Human
cucucucacuccuug

SEQ ID NO: 3127205 - RNA, 16 nt, Human
cucugaggacacuaac

SEQ ID NO: 3127206 - RNA, 22 nt, Human
cucugcaagaauugaagcagga

SEQ ID NO: 3127207 - RNA, 23 nt, Human
cucugcccuccaagaccuucucc

SEQ ID NO: 3127208 - RNA, 16 nt, Human
cucugcccuccaagac

SEQ ID NO: 3127209 - RNA, 15 nt, Human
cucugcccuccaaga

SEQ ID NO: 3127210 - RNA, 14 nt, Human
cucugcccuccaag

SEQ ID NO: 3127211 - RNA, 14 nt, Human
cucugccucugaca

SEQ ID NO: 3127212 - RNA, 11 nt, Human
cugacccacug

SEQ ID NO: 3127213 - RNA, 17 nt, Human
cugacauuguuggccaa

SEQ ID NO: 3127214 - RNA, 20 nt, Human
cugacaggcaaugcuggcug

SEQ ID NO: 3127215 - RNA, 16 nt, Human
cugacaggcaaugcug

SEQ ID NO: 3127216 - RNA, 17 nt, Human
cugacaggcaaugcugg

SEQ ID NO: 3127217 - RNA, 18 nt, Human
cugacaggcaaugcuggc

SEQ ID NO: 3127218 - RNA, 19 nt, Human
cugacaggcaaugcuggcu

SEQ ID NO: 3127219 - RNA, 11 nt, Human
cugacaggcaa

SEQ ID NO: 3127220 - RNA, 21 nt, Human
cugacagacacaggcccggcu

SEQ ID NO: 3127221 - RNA, 19 nt, Human
cugacagacacaggcccgg

SEQ ID NO: 3127222 - RNA, 14 nt, Human
cugaagucacacag

SEQ ID NO: 3127223 - RNA, 15 nt, Human
cugaagucacacagu

SEQ ID NO: 3127224 - RNA, 24 nt, Human
cugaagucuuuguacagacaacaa

SEQ ID NO: 3127225 - RNA, 16 nt, Human
cugaauacagaggcaa

SEQ ID NO: 3127226 - RNA, 21 nt, Human
cugaaccuggguaacuaggga

SEQ ID NO: 3127227 - RNA, 18 nt, Human
cucuuugggccuggcucc

SEQ ID NO: 3127228 - RNA, 21 nt, Human
cucuuuggucuacacugugcu

SEQ ID NO: 3127229 - RNA, 19 nt, Human
cucuuuggucuacacugug

SEQ ID NO: 3127230 - RNA, 15 nt, Human
cugaacuuggcgcug

SEQ ID NO: 3127231 - RNA, 21 nt, Human
cugaacuuggcgcugccccug

SEQ ID NO: 3127232 - RNA, 16 nt, Human
cugaacuuggcgcugc

SEQ ID NO: 3127233 - RNA, 19 nt, Human
cugaagacucauucuucug

SEQ ID NO: 3127234 - RNA, 21 nt, Human
cugaagacucauucuucugua

SEQ ID NO: 3127235 - RNA, 17 nt, Human
cucuuucuauuguuucu

SEQ ID NO: 3127236 - RNA, 18 nt, Human
cucuuuggacacucacac

SEQ ID NO: 3127237 - RNA, 15 nt, Human
cucuuuggacacuca

SEQ ID NO: 3127238 - RNA, 17 nt, Human
cucuuuccaucuacccu

SEQ ID NO: 3127239 - RNA, 16 nt, Human
cucuugaccucaggug

SEQ ID NO: 3127240 - RNA, 13 nt, Human
cucuugaccucag

SEQ ID NO: 3127241 - RNA, 15 nt, Human
cucuugaccucaggu

SEQ ID NO: 3127242 - RNA, 17 nt, Human
cucuugguccugcugca

SEQ ID NO: 3127243 - RNA, 19 nt, Human
cucuugguccugcugcagu

SEQ ID NO: 3127244 - RNA, 18 nt, Human
cucuugguccugcugcag

SEQ ID NO: 3127245 - RNA, 12 nt, Human
cucuucuccagg

SEQ ID NO: 3127246 - RNA, 23 nt, Human
cucuuccaggcugggagagccuu

SEQ ID NO: 3127247 - RNA, 21 nt, Human
cucuuccaggcugggagagcc

SEQ ID NO: 3127248 - RNA, 22 nt, Human
cucuuccaggcugggagagccu

SEQ ID NO: 3127249 - RNA, 13 nt, Human
cucuuaaaaccca

SEQ ID NO: 3127250 - RNA, 24 nt, Human
cucuuaaaacccaagugccuuagc

SEQ ID NO: 3127251 - RNA, 19 nt, Human
cucuggcagcucagagagg

SEQ ID NO: 3127252 - RNA, 18 nt, Human
cucuggcagcucagagag

SEQ ID NO: 3127253 - RNA, 17 nt, Human
cucuggcagcucagaga

SEQ ID NO: 3127254 - RNA, 16 nt, Human
cucuggcagcucagag

SEQ ID NO: 3127255 - RNA, 17 nt, Human
cuucuccaggcuguauc

SEQ ID NO: 3127256 - RNA, 14 nt, Human
cuucuccaggcugu

SEQ ID NO: 3127257 - RNA, 14 nt, Human
cuucuccacccugc

SEQ ID NO: 3127258 - RNA, 15 nt, Human
cuucuccacccugcu

SEQ ID NO: 3127259 - RNA, 19 nt, Human
cuucuccuucaccuuuguc

SEQ ID NO: 3127260 - RNA, 22 nt, Human
cuucuccuucaccuuugucccc

SEQ ID NO: 3127261 - RNA, 18 nt, Human
cuucugcuucagccuccc

SEQ ID NO: 3127262 - RNA, 13 nt, Human
cuucugcuucagc

SEQ ID NO: 3127263 - RNA, 16 nt, Human
cuucugcuucagccuc

SEQ ID NO: 3127264 - RNA, 17 nt, Human
cuucugcuucagccucc

SEQ ID NO: 3127265 - RNA, 21 nt, Human
cuucugccauauucuguuggc

SEQ ID NO: 3127266 - RNA, 15 nt, Human
cuucugccauauucu

SEQ ID NO: 3127267 - RNA, 17 nt, Human
cuucugccauauucugu

SEQ ID NO: 3127268 - RNA, 21 nt, Human
cuucgggaggucgaggcagga

SEQ ID NO: 3127269 - RNA, 20 nt, Human
cuucgggaggucgaggcagg

SEQ ID NO: 3127270 - RNA, 13 nt, Human
cuucgcuccugug

SEQ ID NO: 3127271 - RNA, 14 nt, Human
cuucgcuccugugu

SEQ ID NO: 3127272 - RNA, 15 nt, Human
cuucgcuccuguguc

SEQ ID NO: 3127273 - RNA, 14 nt, Human
cuuccagugaggcu

SEQ ID NO: 3127274 - RNA, 15 nt, Human
cuuccagugaggcuc

SEQ ID NO: 3127275 - RNA, 24 nt, Human
cuuccaggggugggacacccugug

SEQ ID NO: 3127276 - RNA, 22 nt, Human
cuuccaggggugggacacccug

SEQ ID NO: 3127277 - RNA, 21 nt, Human
cuuccaggggugggacacccu

SEQ ID NO: 3127278 - RNA, 11 nt, Human
cuucagcugac

SEQ ID NO: 3127279 - RNA, 18 nt, Human
cuucauuuccugugucuu

SEQ ID NO: 3127280 - RNA, 14 nt, Human
cuucagugccuuau

SEQ ID NO: 3127281 - RNA, 13 nt, Human
cuucagugccuua

SEQ ID NO: 3127282 - RNA, 12 nt, Human
cuucagugccuu

SEQ ID NO: 3127283 - RNA, 11 nt, Human
cuucagugccu

SEQ ID NO: 3127284 - RNA, 23 nt, Human
cuuccacaagagcccaggccucc

SEQ ID NO: 3127285 - RNA, 22 nt, Human
cuuccacaagagcccaggccuc

SEQ ID NO: 3127286 - RNA, 11 nt, Human
cuuagacaguc

SEQ ID NO: 3127287 - RNA, 19 nt, Human
cuuagacagucccugccaa

SEQ ID NO: 3127288 - RNA, 18 nt, Human
cuuagacagucccugcca

SEQ ID NO: 3127289 - RNA, 17 nt, Human
cuuagacagucccugcc

SEQ ID NO: 3127290 - RNA, 15 nt, Human
cuuagaagucacaca

SEQ ID NO: 3127291 - RNA, 14 nt, Human
cuuagacagucccu

SEQ ID NO: 3127292 - RNA, 16 nt, Human
cuuagacagucccugc

SEQ ID NO: 3127293 - RNA, 15 nt, Human
cuuagacagucccug

SEQ ID NO: 3127294 - RNA, 15 nt, Human
cuuacgugaguccug

SEQ ID NO: 3127295 - RNA, 16 nt, Human
cuuacuguacaugaaa

SEQ ID NO: 3127296 - RNA, 13 nt, Human
cuuacuguacaug

SEQ ID NO: 3127297 - RNA, 17 nt, Human
cuuagguuggcaaaaag

SEQ ID NO: 3127298 - RNA, 15 nt, Human
cuuauuuaaugaaag

SEQ ID NO: 3127299 - RNA, 23 nt, Human
cuguuuguuucugaaagggacgc

SEQ ID NO: 3127300 - RNA, 21 nt, Human
cuguuuguuucugaaagggac

SEQ ID NO: 3127301 - RNA, 14 nt, Human
cuguuuucucuuga

SEQ ID NO: 3127302 - RNA, 13 nt, Human
cuguuuucucuug

SEQ ID NO: 3127303 - RNA, 17 nt, Human
cuguuuucucuugagag

SEQ ID NO: 3127304 - RNA, 18 nt, Human
cuguuuguuucugaaagg

SEQ ID NO: 3127305 - RNA, 12 nt, Human
cuguuuagauaa

SEQ ID NO: 3127306 - RNA, 14 nt, Human
cuuaaucuaaaugg

SEQ ID NO: 3127307 - RNA, 15 nt, Human
cuuaacuucacauau

SEQ ID NO: 3127308 - RNA, 16 nt, Human
cuuaacuucacauauu

SEQ ID NO: 3127309 - RNA, 17 nt, Human
cuuaacuucacauauug

SEQ ID NO: 3127310 - RNA, 22 nt, Human
cuuaacuucacauauugauuuc

SEQ ID NO: 3127311 - RNA, 12 nt, Human
cuuaacuucaca

SEQ ID NO: 3127312 - RNA, 14 nt, Human
cuuaacuucacaua

SEQ ID NO: 3127313 - RNA, 22 nt, Human
cuuuuguucuugguuuguaaau

SEQ ID NO: 3127314 - RNA, 20 nt, Human
cuuuuguucuugguuuguaa

SEQ ID NO: 3127315 - RNA, 23 nt, Human
cuuuucuguccgagcuuugaaaa

SEQ ID NO: 3127316 - RNA, 15 nt, Human
cuuuucuguuugcua

SEQ ID NO: 3127317 - RNA, 21 nt, Human
cuuuguuuguugucagcugaa

SEQ ID NO: 3127318 - RNA, 16 nt, Human
cuuuuuuagaguugau

SEQ ID NO: 3127319 - RNA, 19 nt, Human
gaaaacacuguucucugcc

SEQ ID NO: 3127320 - RNA, 18 nt, Human
gaaaacacuguucucugc

SEQ ID NO: 3127321 - RNA, 21 nt, Human
gaaaacacuguucucugcccu

SEQ ID NO: 3127322 - RNA, 20 nt, Human
gaaaacacuguucucugccc

SEQ ID NO: 3127323 - RNA, 16 nt, Human
gaaaacaugcuacaca

SEQ ID NO: 3127324 - RNA, 18 nt, Human
gaaaacaugcuacacacu

SEQ ID NO: 3127325 - RNA, 19 nt, Human
gaaaacaugcuacacacug

SEQ ID NO: 3127326 - RNA, 15 nt, Human
cuuuagcgcccaguu

SEQ ID NO: 3127327 - RNA, 23 nt, Human
cuuugggaggccaaggugggagg

SEQ ID NO: 3127328 - RNA, 23 nt, Human
cuuugugaggaagccgcuggggc

SEQ ID NO: 3127329 - RNA, 13 nt, Human
cuuuguggcuucc

SEQ ID NO: 3127330 - RNA, 19 nt, Human
cuuugugaggaagccgcug

SEQ ID NO: 3127331 - RNA, 12 nt, Human
cuuugugauuuu

SEQ ID NO: 3127332 - RNA, 21 nt, Human
cuuuguucuggcucuuccagg

SEQ ID NO: 3127333 - RNA, 16 nt, Human
cuuuguucuggcucuu

SEQ ID NO: 3127334 - RNA, 15 nt, Human
cuuuguucuggcucu

SEQ ID NO: 3127335 - RNA, 12 nt, Human
cuuuggaaagac

SEQ ID NO: 3127336 - RNA, 23 nt, Human
cuuuggaaagacuuuuccaaccc

SEQ ID NO: 3127337 - RNA, 21 nt, Human
cuugcagacucuacagaggcc

SEQ ID NO: 3127338 - RNA, 20 nt, Human
cuugcagacucuacagaggc

SEQ ID NO: 3127339 - RNA, 15 nt, Human
cuugcaauggcagcc

SEQ ID NO: 3127340 - RNA, 16 nt, Human
cuugcaauggcagccu

SEQ ID NO: 3127341 - RNA, 17 nt, Human
cuugcaauggcagccuu

SEQ ID NO: 3127342 - RNA, 18 nt, Human
cuugcaauggcagccuug

SEQ ID NO: 3127343 - RNA, 19 nt, Human
cuugaguugauucagcucu

SEQ ID NO: 3127344 - RNA, 18 nt, Human
cuugaguugauucagcuc

SEQ ID NO: 3127345 - RNA, 20 nt, Human
cuugaguugauucagcucug

SEQ ID NO: 3127346 - RNA, 15 nt, Human
cuugaggguugggcu

SEQ ID NO: 3127347 - RNA, 17 nt, Human
cuugaggguugggcugg

SEQ ID NO: 3127348 - RNA, 15 nt, Human
cuugagccugggagg

SEQ ID NO: 3127349 - RNA, 12 nt, Human
cuugagccuggg

SEQ ID NO: 3127350 - RNA, 14 nt, Human
cuugcaugaggcua

SEQ ID NO: 3127351 - RNA, 13 nt, Human
cuugcaugaggcu

SEQ ID NO: 3127352 - RNA, 17 nt, Human
cuugcucugcugacaga

SEQ ID NO: 3127353 - RNA, 22 nt, Human
cuugcucugcugacagacacag

SEQ ID NO: 3127354 - RNA, 20 nt, Human
cuugcuucaaccccaugaga

SEQ ID NO: 3127355 - RNA, 20 nt, Human
cuuggaagcuccgcuuucua

SEQ ID NO: 3127356 - RNA, 14 nt, Human
cuuggaagcuccgc

SEQ ID NO: 3127357 - RNA, 17 nt, Human
cuuuaccuuuuuuauac

SEQ ID NO: 3127358 - RNA, 19 nt, Human
cuuuaccuuuuuuauacau

SEQ ID NO: 3127359 - RNA, 20 nt, Human
cuuuaccuuuuuuauacaua

SEQ ID NO: 3127360 - RNA, 15 nt, Human
cuuguggucccaccc

SEQ ID NO: 3127361 - RNA, 19 nt, Human
cuuguggucccaccccaca

SEQ ID NO: 3127362 - RNA, 16 nt, Human
cuuguggucccacccc

SEQ ID NO: 3127363 - RNA, 16 nt, Human
cuuguuaagauaguua

SEQ ID NO: 3127364 - RNA, 20 nt, Human
cuugggccacugugaagaga

SEQ ID NO: 3127365 - RNA, 18 nt, Human
cuugggccacugugaaga

SEQ ID NO: 3127366 - RNA, 14 nt, Human
cuugguuuguaaau

SEQ ID NO: 3127367 - RNA, 15 nt, Human
cuugguuuguaaauu

SEQ ID NO: 3127368 - RNA, 20 nt, Human
gaaguuucugccgcagcccu

SEQ ID NO: 3127369 - RNA, 15 nt, Human
gaagucuuagaugua

SEQ ID NO: 3127370 - RNA, 21 nt, Human
gaaguuucugccgcagcccug

SEQ ID NO: 3127371 - RNA, 18 nt, Human
gaaguacuauaauuuacc

SEQ ID NO: 3127372 - RNA, 15 nt, Human
gaaguacuggagaaa

SEQ ID NO: 3127373 - RNA, 21 nt, Human
gaaguaauaugcacacauuuu

SEQ ID NO: 3127374 - RNA, 22 nt, Human
gaaguaauaugcacacauuuuu

SEQ ID NO: 3127375 - RNA, 15 nt, Human
gaagggggcugggac

SEQ ID NO: 3127376 - RNA, 14 nt, Human
gaagcggcuggcag

SEQ ID NO: 3127377 - RNA, 19 nt, Human
gaagggggcugggacaugg

SEQ ID NO: 3127378 - RNA, 16 nt, Human
gaagggggcugggaca

SEQ ID NO: 3127379 - RNA, 20 nt, Human
gaaguuugagaucagccugg

SEQ ID NO: 3127380 - RNA, 18 nt, Human
gaauaacauguaauuaag

SEQ ID NO: 3127381 - RNA, 19 nt, Human
gaauaacauguaauuaagu

SEQ ID NO: 3127382 - RNA, 21 nt, Human
gaauacagaggcaacugcauu

SEQ ID NO: 3127383 - RNA, 17 nt, Human
gaauaauacaguaucuc

SEQ ID NO: 3127384 - RNA, 13 nt, Human
gaauaccuguccc

SEQ ID NO: 3127385 - RNA, 15 nt, Human
gaauaccuguccccc

SEQ ID NO: 3127386 - RNA, 23 nt, Human
gaauagcugggacuacaggugug

SEQ ID NO: 3127387 - RNA, 22 nt, Human
gaauagcugggacuacaggugu

SEQ ID NO: 3127388 - RNA, 11 nt, Human
gaaugcagugg

SEQ ID NO: 3127389 - RNA, 22 nt, Human
gaaugaaccacaucuugcucug

SEQ ID NO: 3127390 - RNA, 18 nt, Human
gaaugaaccacaucuugc

SEQ ID NO: 3127391 - RNA, 23 nt, Human
gaaugaaccacaucuugcucugc

SEQ ID NO: 3127392 - RNA, 22 nt, Human
gaaugguuuucaaaauaaaaau

SEQ ID NO: 3127393 - RNA, 14 nt, Human
gaaugucaguguga

SEQ ID NO: 3127394 - RNA, 13 nt, Human
gaaugucagugug

SEQ ID NO: 3127395 - RNA, 15 nt, Human
gaauuucccaaagca

SEQ ID NO: 3127396 - RNA, 22 nt, Human
gaauuguaaggaaugauuaauu

SEQ ID NO: 3127397 - RNA, 15 nt, Human
gaauuguaaggaaug

SEQ ID NO: 3127398 - RNA, 21 nt, Human
gaaugucagugugacugaucu

SEQ ID NO: 3127399 - RNA, 20 nt, Human
gaaugucagugugacugauc

SEQ ID NO: 3127400 - RNA, 17 nt, Human
gaauucucuaguuugau

SEQ ID NO: 3127401 - RNA, 17 nt, Human
gaauucucagaaucuca

SEQ ID NO: 3127402 - RNA, 14 nt, Human
gaauugaaaaacca

SEQ ID NO: 3127403 - RNA, 19 nt, Human
gaauucucuaguuugauua

SEQ ID NO: 3127404 - RNA, 14 nt, Human
gaacacucugagac

SEQ ID NO: 3127405 - RNA, 13 nt, Human
gaacacucugaga

SEQ ID NO: 3127406 - RNA, 15 nt, Human
gaacacucugagacu

SEQ ID NO: 3127407 - RNA, 18 nt, Human
gaaccuuuugagugccuu

SEQ ID NO: 3127408 - RNA, 21 nt, Human
gaaccuuuugagugccuuaca

SEQ ID NO: 3127409 - RNA, 19 nt, Human
gaaccuuuugagugccuua

SEQ ID NO: 3127410 - RNA, 22 nt, Human
gaaccuuuugagugccuuacac

SEQ ID NO: 3127411 - RNA, 20 nt, Human
gaagacuuuucuuucagcca

SEQ ID NO: 3127412 - RNA, 19 nt, Human
gaagacuucaucccucugg

SEQ ID NO: 3127413 - RNA, 17 nt, Human
gaagacuuuggaaagag

SEQ ID NO: 3127414 - RNA, 14 nt, Human
gaagacuuuggaaa

SEQ ID NO: 3127415 - RNA, 19 nt, Human
gaagagaaugcacaaacag

SEQ ID NO: 3127416 - RNA, 13 nt, Human
gaagacuuuggaa

SEQ ID NO: 3127417 - RNA, 11 nt, Human
gaagacuuugg

SEQ ID NO: 3127418 - RNA, 23 nt, Human
gaacuuugaccucugcagcaaua

SEQ ID NO: 3127419 - RNA, 23 nt, Human
gaagcccaggaaaggcuccagga

SEQ ID NO: 3127420 - RNA, 23 nt, Human
gaagcccuucuaccuuccugcaa

SEQ ID NO: 3127421 - RNA, 19 nt, Human
gaagcccaggaaaggcucc

SEQ ID NO: 3127422 - RNA, 16 nt, Human
gaagcccaggaaaggc

SEQ ID NO: 3127423 - RNA, 15 nt, Human
gaagcccaggaaagg

SEQ ID NO: 3127424 - RNA, 13 nt, Human
gaagcccaggaaa

SEQ ID NO: 3127425 - RNA, 22 nt, Human
gaagccagcaggcucucaggcc

SEQ ID NO: 3127426 - RNA, 21 nt, Human
gaagccagcaggcucucaggc

SEQ ID NO: 3127427 - RNA, 19 nt, Human
gaagccagcaggcucucag

SEQ ID NO: 3127428 - RNA, 20 nt, Human
gaagccagcaggcucucagg

SEQ ID NO: 3127429 - RNA, 17 nt, Human
gaagcauuuacuuugug

SEQ ID NO: 3127430 - RNA, 20 nt, Human
gaagauaauauuaaggaaga

SEQ ID NO: 3127431 - RNA, 23 nt, Human
gacggagucccaccuuggcugca

SEQ ID NO: 3127432 - RNA, 13 nt, Human
gacggagucccac

SEQ ID NO: 3127433 - RNA, 21 nt, Human
gacgcugugcugcccugccca

SEQ ID NO: 3127434 - RNA, 22 nt, Human
gacgcugugcugcccugcccac

SEQ ID NO: 3127435 - RNA, 20 nt, Human
gaccuuucaauaggaaaaac

SEQ ID NO: 3127436 - RNA, 19 nt, Human
gaccuuucaauaggaaaaa

SEQ ID NO: 3127437 - RNA, 11 nt, Human
gaccuuucaau

SEQ ID NO: 3127438 - RNA, 22 nt, Human
gaccuuuaagagaaaugagcug

SEQ ID NO: 3127439 - RNA, 14 nt, Human
gacguguuaugacu

SEQ ID NO: 3127440 - RNA, 11 nt, Human
gacguguuaug

SEQ ID NO: 3127441 - RNA, 23 nt, Human
gacuaacuugucuuuggacccug

SEQ ID NO: 3127442 - RNA, 16 nt, Human
gacuaacuugucuuug

SEQ ID NO: 3127443 - RNA, 19 nt, Human
gacccuugccgucuaccug

SEQ ID NO: 3127444 - RNA, 23 nt, Human
gacccuugccgucuaccugaggg

SEQ ID NO: 3127445 - RNA, 20 nt, Human
gacccuugccgucuaccuga

SEQ ID NO: 3127446 - RNA, 14 nt, Human
gaccuucuccuuca

SEQ ID NO: 3127447 - RNA, 16 nt, Human
gaccuucuccuucacc

SEQ ID NO: 3127448 - RNA, 15 nt, Human
gaccuucuccuucac

SEQ ID NO: 3127449 - RNA, 14 nt, Human
gaccuugaacuggg

SEQ ID NO: 3127450 - RNA, 21 nt, Human
gaccuucuccuucaccuuugu

SEQ ID NO: 3127451 - RNA, 20 nt, Human
gaccuucuccuucaccuuug

SEQ ID NO: 3127452 - RNA, 23 nt, Human
gacuggccaagguuuggggaaga

SEQ ID NO: 3127453 - RNA, 18 nt, Human
gacuuacuguacaugaaa

SEQ ID NO: 3127454 - RNA, 23 nt, Human
gacuuacuguacaugaaaacaca

SEQ ID NO: 3127455 - RNA, 15 nt, Human
gacuuacuguacaug

SEQ ID NO: 3127456 - RNA, 16 nt, Human
gacuuacuguacauga

SEQ ID NO: 3127457 - RNA, 12 nt, Human
gacuuacuguac

SEQ ID NO: 3127458 - RNA, 20 nt, Human
gacuucaucccucuggggcu

SEQ ID NO: 3127459 - RNA, 12 nt, Human
gacuucaucccu

SEQ ID NO: 3127460 - RNA, 18 nt, Human
gacuacaggcacccacca

SEQ ID NO: 3127461 - RNA, 13 nt, Human
gacuacaggcacc

SEQ ID NO: 3127462 - RNA, 15 nt, Human
gacuacaggcaccca

SEQ ID NO: 3127463 - RNA, 20 nt, Human
gacuccugcaggcagccagg

SEQ ID NO: 3127464 - RNA, 19 nt, Human
gacuccugcaggcagccag

SEQ ID NO: 3127465 - RNA, 18 nt, Human
gacuccugcaggcagcca

SEQ ID NO: 3127466 - RNA, 15 nt, Human
gacucuacagaggcc

SEQ ID NO: 3127467 - RNA, 21 nt, Human
gacucuacagaggccaugggc

SEQ ID NO: 3127468 - RNA, 16 nt, Human
gacugaauuucuuuug

SEQ ID NO: 3127469 - RNA, 21 nt, Human
gaccagagcugccaccugccu

SEQ ID NO: 3127470 - RNA, 23 nt, Human
gaccagacaccuugacagggcac

SEQ ID NO: 3127471 - RNA, 19 nt, Human
gaccagagcugccaccugc

SEQ ID NO: 3127472 - RNA, 21 nt, Human
gaccagcaccaucucuccucc

SEQ ID NO: 3127473 - RNA, 20 nt, Human
gaccagcaccaucucuccuc

SEQ ID NO: 3127474 - RNA, 16 nt, Human
gaccacguuucuaaag

SEQ ID NO: 3127475 - RNA, 22 nt, Human
gaccagacaccuugacagggca

SEQ ID NO: 3127476 - RNA, 21 nt, Human
gaccagacaccuugacagggc

SEQ ID NO: 3127477 - RNA, 18 nt, Human
gaccacaaaacuuuucua

SEQ ID NO: 3127478 - RNA, 18 nt, Human
gacccaugcugcccugug

SEQ ID NO: 3127479 - RNA, 20 nt, Human
gacccaugcugcccugugag

SEQ ID NO: 3127480 - RNA, 19 nt, Human
gacccaugcugcccuguga

SEQ ID NO: 3127481 - RNA, 12 nt, Human
gacccacugcuu

SEQ ID NO: 3127482 - RNA, 17 nt, Human
gacccaugcugcccugu

SEQ ID NO: 3127483 - RNA, 22 nt, Human
gacccugcccugugggccccca

SEQ ID NO: 3127484 - RNA, 20 nt, Human
gacccugcccugugggcccc

SEQ ID NO: 3127485 - RNA, 17 nt, Human
gacccugcccugugggc

SEQ ID NO: 3127486 - RNA, 16 nt, Human
gacccugaggcccaga

SEQ ID NO: 3127487 - RNA, 12 nt, Human
gacccugaggcc

SEQ ID NO: 3127488 - RNA, 11 nt, Human
gacccugaggc

SEQ ID NO: 3127489 - RNA, 10 nt, Human
gacccugagg

SEQ ID NO: 3127490 - RNA, 20 nt, Human
gacagagcuacacaggggaa

SEQ ID NO: 3127491 - RNA, 14 nt, Human
gacagagucucacu

SEQ ID NO: 3127492 - RNA, 23 nt, Human
gacagaggcagccccauucugcc

SEQ ID NO: 3127493 - RNA, 21 nt, Human
gacagagucucacuguugccc

SEQ ID NO: 3127494 - RNA, 16 nt, Human
gacagagugagacucu

SEQ ID NO: 3127495 - RNA, 17 nt, Human
gacagacacaggcccgg

SEQ ID NO: 3127496 - RNA, 16 nt, Human
gacacuagaagauuuu

SEQ ID NO: 3127497 - RNA, 20 nt, Human
gacagacacaggcccggcuc

SEQ ID NO: 3127498 - RNA, 22 nt, Human
gacagacacaggcccggcucca

SEQ ID NO: 3127499 - RNA, 21 nt, Human
gacacuaaccacgcuggaccu

SEQ ID NO: 3127500 - RNA, 22 nt, Human
gacacgaauauugcugauggug

SEQ ID NO: 3127501 - RNA, 18 nt, Human
gaauuucccaaagcagug

SEQ ID NO: 3127502 - RNA, 16 nt, Human
gaauuucccaaagcag

SEQ ID NO: 3127503 - RNA, 22 nt, Human
gaauuucccaaagcagugcaug

SEQ ID NO: 3127504 - RNA, 23 nt, Human
gacaggcaaugcuggcuguuggc

SEQ ID NO: 3127505 - RNA, 20 nt, Human
gacaggcauguucucugagg

SEQ ID NO: 3127506 - RNA, 21 nt, Human
gacaggcauguucucugagga

SEQ ID NO: 3127507 - RNA, 20 nt, Human
gacaggcaagcaccuccugc

SEQ ID NO: 3127508 - RNA, 18 nt, Human
gacaggcaaugcuggcug

SEQ ID NO: 3127509 - RNA, 19 nt, Human
gacaggcaaugcuggcugu

SEQ ID NO: 3127510 - RNA, 13 nt, Human
gacaggcaagcac

SEQ ID NO: 3127511 - RNA, 17 nt, Human
gacaggcaagcaccucc

SEQ ID NO: 3127512 - RNA, 18 nt, Human
gacaggcaagcaccuccu

SEQ ID NO: 3127513 - RNA, 22 nt, Human
gacaguuaagagaaaugagcuu

SEQ ID NO: 3127514 - RNA, 22 nt, Human
gacaggcauguucucugaggac

SEQ ID NO: 3127515 - RNA, 23 nt, Human
gacaucaacugcaucaagaugug

SEQ ID NO: 3127516 - RNA, 16 nt, Human
gacaucaacugcauca

SEQ ID NO: 3127517 - RNA, 13 nt, Human
gaucauccacugu

SEQ ID NO: 3127518 - RNA, 16 nt, Human
gauccucccaccucag

SEQ ID NO: 3127519 - RNA, 14 nt, Human
gauccuccaggugc

SEQ ID NO: 3127520 - RNA, 21 nt, Human
gauccucccaccucagccucc

SEQ ID NO: 3127521 - RNA, 17 nt, Human
gauccucccaccucagc

SEQ ID NO: 3127522 - RNA, 13 nt, Human
gaucuaggaagac

SEQ ID NO: 3127523 - RNA, 18 nt, Human
gaucuaggaagacuuugg

SEQ ID NO: 3127524 - RNA, 14 nt, Human
gaucuaggaagacu

SEQ ID NO: 3127525 - RNA, 20 nt, Human
gaucuaggaagacuuuggaa

SEQ ID NO: 3127526 - RNA, 12 nt, Human
gauccugagcca

SEQ ID NO: 3127527 - RNA, 19 nt, Human
gaugcagccucacaguccu

SEQ ID NO: 3127528 - RNA, 14 nt, Human
gaugccugguggca

SEQ ID NO: 3127529 - RNA, 14 nt, Human
gaugcagugcuucc

SEQ ID NO: 3127530 - RNA, 15 nt, Human
gaugccugguggcag

SEQ ID NO: 3127531 - RNA, 16 nt, Human
gaugccugguggcagc

SEQ ID NO: 3127532 - RNA, 18 nt, Human
gaugaccuugaaugaugc

SEQ ID NO: 3127533 - RNA, 23 nt, Human
gaugagaaauaaaguuucuguug

SEQ ID NO: 3127534 - RNA, 14 nt, Human
gaugcaccagcccu

SEQ ID NO: 3127535 - RNA, 14 nt, Human
gaugagaggaaauc

SEQ ID NO: 3127536 - RNA, 15 nt, Human
gaugcaccagcccuu

SEQ ID NO: 3127537 - RNA, 23 nt, Human
gaugcaccagcccuuagcaggga

SEQ ID NO: 3127538 - RNA, 22 nt, Human
gaucuucuguggguuucuaaag

SEQ ID NO: 3127539 - RNA, 19 nt, Human
gaucuucuuuauaauucua

SEQ ID NO: 3127540 - RNA, 15 nt, Human
gaugaaaugagguca

SEQ ID NO: 3127541 - RNA, 21 nt, Human
gaugaaaugaggucagagccu

SEQ ID NO: 3127542 - RNA, 16 nt, Human
gauacaaaagcaugug

SEQ ID NO: 3127543 - RNA, 20 nt, Human
gauagugucccacggugccu

SEQ ID NO: 3127544 - RNA, 18 nt, Human
gauauaugcucugcaugu

SEQ ID NO: 3127545 - RNA, 14 nt, Human
gaucacagccucug

SEQ ID NO: 3127546 - RNA, 23 nt, Human
gaucacggcucacugcagccuca

SEQ ID NO: 3127547 - RNA, 20 nt, Human
gaucacggcucacugcagcc

SEQ ID NO: 3127548 - RNA, 12 nt, Human
gauaauacacca

SEQ ID NO: 3127549 - RNA, 23 nt, Human
gauaauacaccacuacauucugu

SEQ ID NO: 3127550 - RNA, 24 nt, Human
gauaauacaccacuacauucuguu

SEQ ID NO: 3127551 - RNA, 15 nt, Human
gauucccaagcucug

SEQ ID NO: 3127552 - RNA, 13 nt, Human
gauuacaagcgug

SEQ ID NO: 3127553 - RNA, 21 nt, Human
gauuacaagcgugagccacug

SEQ ID NO: 3127554 - RNA, 18 nt, Human
gauucagacagcugccug

SEQ ID NO: 3127555 - RNA, 17 nt, Human
gauucagacagcugccu

SEQ ID NO: 3127556 - RNA, 14 nt, Human
gauucagacagcug

SEQ ID NO: 3127557 - RNA, 13 nt, Human
gauucagacagcu

SEQ ID NO: 3127558 - RNA, 18 nt, Human
gauguucuagcauggcug

SEQ ID NO: 3127559 - RNA, 15 nt, Human
gauugcaacaggcug

SEQ ID NO: 3127560 - RNA, 17 nt, Human
gauugcaacaggcuggg

SEQ ID NO: 3127561 - RNA, 18 nt, Human
gauugcaacaggcugggc

SEQ ID NO: 3127562 - RNA, 16 nt, Human
gauugcaacaggcugg

SEQ ID NO: 3127563 - RNA, 22 nt, Human
gauucuuuccugaggcugggcu

SEQ ID NO: 3127564 - RNA, 20 nt, Human
gauucuuuccugaggcuggg

SEQ ID NO: 3127565 - RNA, 16 nt, Human
gauucccaagcucugc

SEQ ID NO: 3127566 - RNA, 17 nt, Human
gauucccaagcucugcu

SEQ ID NO: 3127567 - RNA, 19 nt, Human
gauucuuuccugaggcugg

SEQ ID NO: 3127568 - RNA, 19 nt, Human
gauuuguuaaugauagcua

SEQ ID NO: 3127569 - RNA, 22 nt, Human
gauuucuguuuagauaauacac

SEQ ID NO: 3127570 - RNA, 21 nt, Human
gauuucuguuuagauaauaca

SEQ ID NO: 3127571 - RNA, 17 nt, Human
gcaauccugcaagaaca

SEQ ID NO: 3127572 - RNA, 13 nt, Human
gcaaggcugucaa

SEQ ID NO: 3127573 - RNA, 14 nt, Human
gcaaggucauuuuu

SEQ ID NO: 3127574 - RNA, 18 nt, Human
gcaaggcugucaauuaca

SEQ ID NO: 3127575 - RNA, 14 nt, Human
gcaaggcugucaau

SEQ ID NO: 3127576 - RNA, 18 nt, Human
gcaagcaccuccugccuc

SEQ ID NO: 3127577 - RNA, 20 nt, Human
gcaagcaccuccugccucga

SEQ ID NO: 3127578 - RNA, 15 nt, Human
gcaagcaccuccugc

SEQ ID NO: 3127579 - RNA, 16 nt, Human
gcaagcaccuccugcc

SEQ ID NO: 3127580 - RNA, 18 nt, Human
gcaacugcauuggcuuug

SEQ ID NO: 3127581 - RNA, 16 nt, Human
gcaaaccaucauugaa

SEQ ID NO: 3127582 - RNA, 21 nt, Human
gcaaaccaucauugaaaucuu

SEQ ID NO: 3127583 - RNA, 20 nt, Human
gcaaaccaucauugaaaucu

SEQ ID NO: 3127584 - RNA, 19 nt, Human
gcaaaccaucauugaaauc

SEQ ID NO: 3127585 - RNA, 17 nt, Human
gcaaaccaucauugaaa

SEQ ID NO: 3127586 - RNA, 15 nt, Human
gcaaaccaucauuga

SEQ ID NO: 3127587 - RNA, 17 nt, Human
gcacuaaggugugcucu

SEQ ID NO: 3127588 - RNA, 18 nt, Human
gcacuaaggugugcucug

SEQ ID NO: 3127589 - RNA, 14 nt, Human
gcacugggcuuggg

SEQ ID NO: 3127590 - RNA, 23 nt, Human
gcacugggcuuggggaccagagc

SEQ ID NO: 3127591 - RNA, 22 nt, Human
gcacugggcuuggggaccagag

SEQ ID NO: 3127592 - RNA, 12 nt, Human
gcagaaggaaga

SEQ ID NO: 3127593 - RNA, 14 nt, Human
gcagaaggaagacu

SEQ ID NO: 3127594 - RNA, 13 nt, Human
gcagaaggaagac

SEQ ID NO: 3127595 - RNA, 14 nt, Human
gcacccggccccug

SEQ ID NO: 3127596 - RNA, 15 nt, Human
gcacccggccccugc

SEQ ID NO: 3127597 - RNA, 17 nt, Human
gcacccggccccugcug

SEQ ID NO: 3127598 - RNA, 14 nt, Human
gcaccuccugccuc

SEQ ID NO: 3127599 - RNA, 15 nt, Human
gcaccuccugccucg

SEQ ID NO: 3127600 - RNA, 19 nt, Human
gcaccacugcacuccagcc

SEQ ID NO: 3127601 - RNA, 16 nt, Human
gcacagcuucauuucc

SEQ ID NO: 3127602 - RNA, 22 nt, Human
gcacaugccucucucaggccaa

SEQ ID NO: 3127603 - RNA, 14 nt, Human
gcaaugaccuuuca

SEQ ID NO: 3127604 - RNA, 13 nt, Human
gcaaugaccuuuc

SEQ ID NO: 3127605 - RNA, 19 nt, Human
gcacagcuaacauggaagu

SEQ ID NO: 3127606 - RNA, 20 nt, Human
gcagcagggagggcuucugc

SEQ ID NO: 3127607 - RNA, 19 nt, Human
gcagccucaaccuccuggg

SEQ ID NO: 3127608 - RNA, 20 nt, Human
gcagccucaaccuccugggc

SEQ ID NO: 3127609 - RNA, 21 nt, Human
gcagccucaaccuccugggcu

SEQ ID NO: 3127610 - RNA, 22 nt, Human
gcagccucaaccuccugggcua

SEQ ID NO: 3127611 - RNA, 14 nt, Human
gcagccuggacccu

SEQ ID NO: 3127612 - RNA, 19 nt, Human
gcagagaaugaaagggccc

SEQ ID NO: 3127613 - RNA, 20 nt, Human
gcagagaaugaaagggccca

SEQ ID NO: 3127614 - RNA, 21 nt, Human
gcagagaaugaaagggcccag

SEQ ID NO: 3127615 - RNA, 21 nt, Human
gcagagaauucucuuauccaa

SEQ ID NO: 3127616 - RNA, 22 nt, Human
gcagagaaugaaagggcccaga

SEQ ID NO: 3127617 - RNA, 23 nt, Human
gcagagaaugaaagggcccagag

SEQ ID NO: 3127618 - RNA, 15 nt, Human
gcagaguugaagaca

SEQ ID NO: 3127619 - RNA, 15 nt, Human
gcagagaccaucccu

SEQ ID NO: 3127620 - RNA, 14 nt, Human
gcagagaccauccc

SEQ ID NO: 3127621 - RNA, 17 nt, Human
gcagagaccaucccuga

SEQ ID NO: 3127622 - RNA, 19 nt, Human
gcagaguugaagacagagc

SEQ ID NO: 3127623 - RNA, 17 nt, Human
gcagaguugaagacaga

SEQ ID NO: 3127624 - RNA, 16 nt, Human
gcagaguugaagacag

SEQ ID NO: 3127625 - RNA, 17 nt, Human
gcauguuugugauugac

SEQ ID NO: 3127626 - RNA, 15 nt, Human
gcaugccuggauggg

SEQ ID NO: 3127627 - RNA, 15 nt, Human
gcaugcugucccuua

SEQ ID NO: 3127628 - RNA, 15 nt, Human
gcaucaggccaggcc

SEQ ID NO: 3127629 - RNA, 13 nt, Human
gcaucaggccagg

SEQ ID NO: 3127630 - RNA, 17 nt, Human
gcaucaggccaggcccu

SEQ ID NO: 3127631 - RNA, 16 nt, Human
gcaucaggccaggccc

SEQ ID NO: 3127632 - RNA, 23 nt, Human
gcaugaaguaauaugcacacauu

SEQ ID NO: 3127633 - RNA, 22 nt, Human
gcaugccuggauggggcugcac

SEQ ID NO: 3127634 - RNA, 17 nt, Human
gcaugccuggauggggc

SEQ ID NO: 3127635 - RNA, 19 nt, Human
gccaaacucaccugccccu

SEQ ID NO: 3127636 - RNA, 21 nt, Human
gccaaacucaccugccccuca

SEQ ID NO: 3127637 - RNA, 14 nt, Human
gccaaaggaagcac

SEQ ID NO: 3127638 - RNA, 20 nt, Human
gccaaaggaagcacaugccu

SEQ ID NO: 3127639 - RNA, 16 nt, Human
gccaaaggaagcacau

SEQ ID NO: 3127640 - RNA, 22 nt, Human
gcauuuugcuaaaugugaauga

SEQ ID NO: 3127641 - RNA, 12 nt, Human
gcauuccccacu

SEQ ID NO: 3127642 - RNA, 23 nt, Human
gcauuugcugaauacagaggcaa

SEQ ID NO: 3127643 - RNA, 21 nt, Human
gcauuuggugguuucagaaau

SEQ ID NO: 3127644 - RNA, 17 nt, Human
gcauuugcugaauacag

SEQ ID NO: 3127645 - RNA, 17 nt, Human
gcagugggagcugccug

SEQ ID NO: 3127646 - RNA, 18 nt, Human
gcagugggagcugccugu

SEQ ID NO: 3127647 - RNA, 21 nt, Human
gcaucaagaugugacauguuu

SEQ ID NO: 3127648 - RNA, 20 nt, Human
gcauauucaggaagcucagg

SEQ ID NO: 3127649 - RNA, 18 nt, Human
gcauauucaggaagcuca

SEQ ID NO: 3127650 - RNA, 17 nt, Human
gcauauucaggaagcuc

SEQ ID NO: 3127651 - RNA, 15 nt, Human
gcauauucaggaagc

SEQ ID NO: 3127652 - RNA, 16 nt, Human
gcagggagggcuucug

SEQ ID NO: 3127653 - RNA, 12 nt, Human
gcagggcucagc

SEQ ID NO: 3127654 - RNA, 20 nt, Human
gcaggauucuuccucccucc

SEQ ID NO: 3127655 - RNA, 16 nt, Human
gcagugggagcugccu

SEQ ID NO: 3127656 - RNA, 23 nt, Human
gcagugcuuccaaggauggacca

SEQ ID NO: 3127657 - RNA, 19 nt, Human
gccccuucugacccaugcu

SEQ ID NO: 3127658 - RNA, 12 nt, Human
gcccggcuccag

SEQ ID NO: 3127659 - RNA, 13 nt, Human
gcccggcuccagg

SEQ ID NO: 3127660 - RNA, 14 nt, Human
gcccggcuccaggc

SEQ ID NO: 3127661 - RNA, 12 nt, Human
gcccgggcucug

SEQ ID NO: 3127662 - RNA, 18 nt, Human
gcccgggcucugccuccc

SEQ ID NO: 3127663 - RNA, 15 nt, Human
gcccgggcucugccu

SEQ ID NO: 3127664 - RNA, 14 nt, Human
gcccgggcucugcc

SEQ ID NO: 3127665 - RNA, 13 nt, Human
gcccgggcucugc

SEQ ID NO: 3127666 - RNA, 21 nt, Human
gcccgggcucugccucccauc

SEQ ID NO: 3127667 - RNA, 20 nt, Human
gcccgggcucugccucccau

SEQ ID NO: 3127668 - RNA, 19 nt, Human
gcccgggcucugccuccca

SEQ ID NO: 3127669 - RNA, 22 nt, Human
gcccucugcccacucccugcaa

SEQ ID NO: 3127670 - RNA, 19 nt, Human
gcccucugcccacucccug

SEQ ID NO: 3127671 - RNA, 15 nt, Human
gccccauucugccug

SEQ ID NO: 3127672 - RNA, 23 nt, Human
gccccgaggccuucucugaagga

SEQ ID NO: 3127673 - RNA, 22 nt, Human
gccccauucugccugcccaggc

SEQ ID NO: 3127674 - RNA, 23 nt, Human
gccccauucugccugcccaggcc

SEQ ID NO: 3127675 - RNA, 22 nt, Human
gccccgaggccuucucugaagg

SEQ ID NO: 3127676 - RNA, 14 nt, Human
gccccgcccaggcu

SEQ ID NO: 3127677 - RNA, 18 nt, Human
gccccucagggucccugg

SEQ ID NO: 3127678 - RNA, 21 nt, Human
gccccucagggucccuggugg

SEQ ID NO: 3127679 - RNA, 19 nt, Human
gccccucagggucccuggu

SEQ ID NO: 3127680 - RNA, 23 nt, Human
gccccuggcagccccuguucugg

SEQ ID NO: 3127681 - RNA, 11 nt, Human
gcccaggcugg

SEQ ID NO: 3127682 - RNA, 18 nt, Human
gcccaggccuccuacagc

SEQ ID NO: 3127683 - RNA, 16 nt, Human
gcccaggaaaggcucc

SEQ ID NO: 3127684 - RNA, 15 nt, Human
gcccaggaaaggcuc

SEQ ID NO: 3127685 - RNA, 12 nt, Human
gcccaggaaagg

SEQ ID NO: 3127686 - RNA, 22 nt, Human
gcccagucuggaaugcaguggu

SEQ ID NO: 3127687 - RNA, 20 nt, Human
gcccagucuggaaugcagug

SEQ ID NO: 3127688 - RNA, 16 nt, Human
gcccaggcuggcgugc

SEQ ID NO: 3127689 - RNA, 14 nt, Human
gcccaggcuggcgu

SEQ ID NO: 3127690 - RNA, 15 nt, Human
gcccaggcuggcgug

SEQ ID NO: 3127691 - RNA, 23 nt, Human
gccccauccucuguacagagccc

SEQ ID NO: 3127692 - RNA, 17 nt, Human
gccccauucugccugcc

SEQ ID NO: 3127693 - RNA, 18 nt, Human
gccccauucugccugccc

SEQ ID NO: 3127694 - RNA, 20 nt, Human
gccccauucugccugcccag

SEQ ID NO: 3127695 - RNA, 21 nt, Human
gccccauucugccugcccagg

SEQ ID NO: 3127696 - RNA, 15 nt, Human
gccccagugcccaca

SEQ ID NO: 3127697 - RNA, 16 nt, Human
gccccagugcccacag

SEQ ID NO: 3127698 - RNA, 17 nt, Human
gccccagugcccacagg

SEQ ID NO: 3127699 - RNA, 23 nt, Human
gccaggggaaaaucagccugcuc

SEQ ID NO: 3127700 - RNA, 17 nt, Human
gccaggggaaaaucagc

SEQ ID NO: 3127701 - RNA, 22 nt, Human
gccaggggaaaaucagccugcu

SEQ ID NO: 3127702 - RNA, 21 nt, Human
gccaggggaaaaucagccugc

SEQ ID NO: 3127703 - RNA, 19 nt, Human
gccaggaagccagcaggcu

SEQ ID NO: 3127704 - RNA, 15 nt, Human
gccaggaagccagca

SEQ ID NO: 3127705 - RNA, 18 nt, Human
gccaggaagccagcaggc

SEQ ID NO: 3127706 - RNA, 17 nt, Human
gccaggaagccagcagg

SEQ ID NO: 3127707 - RNA, 19 nt, Human
gccauccagguucagcuug

SEQ ID NO: 3127708 - RNA, 20 nt, Human
gccauccagguucagcuugu

SEQ ID NO: 3127709 - RNA, 14 nt, Human
gccauccagguuca

SEQ ID NO: 3127710 - RNA, 17 nt, Human
gccaucccagccccaau

SEQ ID NO: 3127711 - RNA, 16 nt, Human
gccaucccagccccaa

SEQ ID NO: 3127712 - RNA, 15 nt, Human
gccaucccagcccca

SEQ ID NO: 3127713 - RNA, 14 nt, Human
gccaucccagcccc

SEQ ID NO: 3127714 - RNA, 13 nt, Human
gccaucccagccc

SEQ ID NO: 3127715 - RNA, 15 nt, Human
gcccaccccucaaca

SEQ ID NO: 3127716 - RNA, 19 nt, Human
gcccacaggaucagucuga

SEQ ID NO: 3127717 - RNA, 13 nt, Human
gcccacaggauca

SEQ ID NO: 3127718 - RNA, 18 nt, Human
gcccacaggaucagucug

SEQ ID NO: 3127719 - RNA, 16 nt, Human
gcccaaagaugcagcc

SEQ ID NO: 3127720 - RNA, 15 nt, Human
gcccaaagaugcagc

SEQ ID NO: 3127721 - RNA, 17 nt, Human
gccauuucuuccacaag

SEQ ID NO: 3127722 - RNA, 22 nt, Human
gccauuucuuccacaagagccc

SEQ ID NO: 3127723 - RNA, 20 nt, Human
gccauuucuuccacaagagc

SEQ ID NO: 3127724 - RNA, 17 nt, Human
gccagauucuuuccuga

SEQ ID NO: 3127725 - RNA, 19 nt, Human
gccagagggagugacagag

SEQ ID NO: 3127726 - RNA, 20 nt, Human
gccagagggagugacagagg

SEQ ID NO: 3127727 - RNA, 16 nt, Human
gccagauucuuuccug

SEQ ID NO: 3127728 - RNA, 12 nt, Human
gccagccuugac

SEQ ID NO: 3127729 - RNA, 20 nt, Human
gccagccgagauagccaagg

SEQ ID NO: 3127730 - RNA, 22 nt, Human
gccagccuugaccauucuccac

SEQ ID NO: 3127731 - RNA, 21 nt, Human
gccagccuugaccauucucca

SEQ ID NO: 3127732 - RNA, 20 nt, Human
gccagccuugaccauucucc

SEQ ID NO: 3127733 - RNA, 14 nt, Human
gccagccuugacca

SEQ ID NO: 3127734 - RNA, 15 nt, Human
gccagcugcuugggc

SEQ ID NO: 3127735 - RNA, 14 nt, Human
gccagcugcuuggg

SEQ ID NO: 3127736 - RNA, 20 nt, Human
gccacuauuguuagucucuu

SEQ ID NO: 3127737 - RNA, 21 nt, Human
gccacuauuguuagucucuug

SEQ ID NO: 3127738 - RNA, 16 nt, Human
gccacggccaggccag

SEQ ID NO: 3127739 - RNA, 12 nt, Human
gccaaaggaagc

SEQ ID NO: 3127740 - RNA, 14 nt, Human
gccacggccaggcc

SEQ ID NO: 3127741 - RNA, 15 nt, Human
gccacggccaggcca

SEQ ID NO: 3127742 - RNA, 15 nt, Human
gccagagacacaagc

SEQ ID NO: 3127743 - RNA, 12 nt, Human
gccagagacaca

SEQ ID NO: 3127744 - RNA, 17 nt, Human
gccagagggagugacag

SEQ ID NO: 3127745 - RNA, 18 nt, Human
gccagagggagugacaga

SEQ ID NO: 3127746 - RNA, 17 nt, Human
gccacugcaccgggcca

SEQ ID NO: 3127747 - RNA, 18 nt, Human
gccacugcaccgggccac

SEQ ID NO: 3127748 - RNA, 17 nt, Human
gccgagauagccaaggc

SEQ ID NO: 3127749 - RNA, 15 nt, Human
gccgcagcccugcag

SEQ ID NO: 3127750 - RNA, 17 nt, Human
gccgcagcccugcagag

SEQ ID NO: 3127751 - RNA, 16 nt, Human
gccgcagcccugcaga

SEQ ID NO: 3127752 - RNA, 13 nt, Human
gccgcagcccugc

SEQ ID NO: 3127753 - RNA, 23 nt, Human
gcccuucucuccagccccuggau

SEQ ID NO: 3127754 - RNA, 13 nt, Human
gcccuucucucca

SEQ ID NO: 3127755 - RNA, 16 nt, Human
gccgagauagccaagg

SEQ ID NO: 3127756 - RNA, 23 nt, Human
gccgucuaccugaggggccucuu

SEQ ID NO: 3127757 - RNA, 22 nt, Human
gccgucuaccugaggggccucu

SEQ ID NO: 3127758 - RNA, 20 nt, Human
gccgucuaccugaggggccu

SEQ ID NO: 3127759 - RNA, 18 nt, Human
gccgucuaccugaggggc

SEQ ID NO: 3127760 - RNA, 22 nt, Human
gccucaagugauucuccugccu

SEQ ID NO: 3127761 - RNA, 24 nt, Human
gccucaagugauucuccugccuca

SEQ ID NO: 3127762 - RNA, 18 nt, Human
gccucagcauccuggcac

SEQ ID NO: 3127763 - RNA, 17 nt, Human
gccucagcauccuggca

SEQ ID NO: 3127764 - RNA, 21 nt, Human
gccucagcauccuggcacccg

SEQ ID NO: 3127765 - RNA, 17 nt, Human
gccucccaucacccgcu

SEQ ID NO: 3127766 - RNA, 12 nt, Human
gccucagccucc

SEQ ID NO: 3127767 - RNA, 14 nt, Human
gccucagccuccca

SEQ ID NO: 3127768 - RNA, 20 nt, Human
gccucccgaguagcugggac

SEQ ID NO: 3127769 - RNA, 20 nt, Human
gccucccgaauagcugggac

SEQ ID NO: 3127770 - RNA, 21 nt, Human
gccucccgaguagcugggacu

SEQ ID NO: 3127771 - RNA, 23 nt, Human
gccucccgaguagcugggacuac

SEQ ID NO: 3127772 - RNA, 18 nt, Human
gccucccgaauagcuggg

SEQ ID NO: 3127773 - RNA, 19 nt, Human
gccucccgaauagcuggga

SEQ ID NO: 3127774 - RNA, 15 nt, Human
gccucucccaucacu

SEQ ID NO: 3127775 - RNA, 15 nt, Human
gccucugacacacag

SEQ ID NO: 3127776 - RNA, 16 nt, Human
gccucugcacuccccu

SEQ ID NO: 3127777 - RNA, 20 nt, Human
gccucugcacuccccugcug

SEQ ID NO: 3127778 - RNA, 19 nt, Human
gccucugcacuccccugcu

SEQ ID NO: 3127779 - RNA, 18 nt, Human
gccucugcacuccccugc

SEQ ID NO: 3127780 - RNA, 17 nt, Human
gccucugcacuccccug

SEQ ID NO: 3127781 - RNA, 15 nt, Human
gccucugcacucccc

SEQ ID NO: 3127782 - RNA, 21 nt, Human
gccucugcacuccccugcugg

SEQ ID NO: 3127783 - RNA, 11 nt, Human
gccugcccagg

SEQ ID NO: 3127784 - RNA, 14 nt, Human
gccuggacccugug

SEQ ID NO: 3127785 - RNA, 21 nt, Human
gccuuccaggggugggacacc

SEQ ID NO: 3127786 - RNA, 23 nt, Human
gccuuauggaacacucugagacu

SEQ ID NO: 3127787 - RNA, 22 nt, Human
gccuuauggaacacucugagac

SEQ ID NO: 3127788 - RNA, 21 nt, Human
gccuuauggaacacucugaga

SEQ ID NO: 3127789 - RNA, 19 nt, Human
gccuuacccucauguucuu

SEQ ID NO: 3127790 - RNA, 20 nt, Human
gccuuagaagucacacagua

SEQ ID NO: 3127791 - RNA, 14 nt, Human
gccugguggcagcu

SEQ ID NO: 3127792 - RNA, 15 nt, Human
gccugguggcagcug

SEQ ID NO: 3127793 - RNA, 16 nt, Human
gccugguggcagcugc

SEQ ID NO: 3127794 - RNA, 17 nt, Human
gccugguggcagcugcg

SEQ ID NO: 3127795 - RNA, 14 nt, Human
gcgcugccccuggc

SEQ ID NO: 3127796 - RNA, 20 nt, Human
gcgccuacaggagugagcac

SEQ ID NO: 3127797 - RNA, 21 nt, Human
gcgccuacaggagugagcacu

SEQ ID NO: 3127798 - RNA, 18 nt, Human
gcgccuacaggagugagc

SEQ ID NO: 3127799 - RNA, 23 nt, Human
gcggggacagcuccuucuguccu

SEQ ID NO: 3127800 - RNA, 20 nt, Human
gcgguccacccaggagcccc

SEQ ID NO: 3127801 - RNA, 23 nt, Human
gcgguccacccaggagccccgag

SEQ ID NO: 3127802 - RNA, 19 nt, Human
gcggaaugaaccacaucuu

SEQ ID NO: 3127803 - RNA, 16 nt, Human
gcggacagccacggcc

SEQ ID NO: 3127804 - RNA, 19 nt, Human
gcggacagccacggccagg

SEQ ID NO: 3127805 - RNA, 18 nt, Human
gcggggacagcuccuucu

SEQ ID NO: 3127806 - RNA, 19 nt, Human
gcggggacagcuccuucug

SEQ ID NO: 3127807 - RNA, 23 nt, Human
gcggacagccacggccaggccag

SEQ ID NO: 3127808 - RNA, 22 nt, Human
gcuagacgagcaggcuucuucc

SEQ ID NO: 3127809 - RNA, 21 nt, Human
gcuagacgagcaggcuucuuc

SEQ ID NO: 3127810 - RNA, 14 nt, Human
gcgugagccacugc

SEQ ID NO: 3127811 - RNA, 15 nt, Human
gcgugagccacugca

SEQ ID NO: 3127812 - RNA, 14 nt, Human
gcuaacauggaagu

SEQ ID NO: 3127813 - RNA, 18 nt, Human
gcuaacauggaaguacua

SEQ ID NO: 3127814 - RNA, 17 nt, Human
gcuaacauggaaguacu

SEQ ID NO: 3127815 - RNA, 22 nt, Human
gcuacacaggggaaaagaggag

SEQ ID NO: 3127816 - RNA, 20 nt, Human
ggaagccagcaggcucucag

SEQ ID NO: 3127817 - RNA, 21 nt, Human
ggagaccccuuggggagcagg

SEQ ID NO: 3127818 - RNA, 21 nt, Human
ggagagcuagcagcagggagg

SEQ ID NO: 3127819 - RNA, 17 nt, Human
ggagagcuagcagcagg

SEQ ID NO: 3127820 - RNA, 20 nt, Human
ggagauuuacaacuggggga

SEQ ID NO: 3127821 - RNA, 15 nt, Human
ggagaggggcacagg

SEQ ID NO: 3127822 - RNA, 20 nt, Human
ggagcaaaaucgaugcagug

SEQ ID NO: 3127823 - RNA, 21 nt, Human
ggaggaucucuugagccuggg

SEQ ID NO: 3127824 - RNA, 17 nt, Human
ggaggaucucuugagcc

SEQ ID NO: 3127825 - RNA, 23 nt, Human
ggaggaucacuugaguccagaag

SEQ ID NO: 3127826 - RNA, 13 nt, Human
ggagggcuccaga

SEQ ID NO: 3127827 - RNA, 12 nt, Human
ggagggcuccag

SEQ ID NO: 3127828 - RNA, 12 nt, Human
ggagggagggcu

SEQ ID NO: 3127829 - RNA, 15 nt, Human
ggagggcuccagaca

SEQ ID NO: 3127830 - RNA, 14 nt, Human
ggagggcuccagac

SEQ ID NO: 3127831 - RNA, 17 nt, Human
ggagggcuccagacaca

SEQ ID NO: 3127832 - RNA, 20 nt, Human
ggagucccaccuuggcugca

SEQ ID NO: 3127833 - RNA, 11 nt, Human
ggagugacaga

SEQ ID NO: 3127834 - RNA, 16 nt, Human
ggagugacagaggcag

SEQ ID NO: 3127835 - RNA, 12 nt, Human
ggagugagcugg

SEQ ID NO: 3127836 - RNA, 14 nt, Human
ggagugagcugguu

SEQ ID NO: 3127837 - RNA, 21 nt, Human
ggagugaguugauagcacaga

SEQ ID NO: 3127838 - RNA, 17 nt, Human
ggagugacagaggcagc

SEQ ID NO: 3127839 - RNA, 18 nt, Human
ggagugacagaggcagcc

SEQ ID NO: 3127840 - RNA, 19 nt, Human
ggagugacagaggcagccc

SEQ ID NO: 3127841 - RNA, 21 nt, Human
ggagugacagaggcagcccca

SEQ ID NO: 3127842 - RNA, 16 nt, Human
ggaucacagccucuga

SEQ ID NO: 3127843 - RNA, 22 nt, Human
ggccaccugcggugcuaucucc

SEQ ID NO: 3127844 - RNA, 16 nt, Human
ggccaccugcggugcu

SEQ ID NO: 3127845 - RNA, 17 nt, Human
ggccacaagacccuugu

SEQ ID NO: 3127846 - RNA, 16 nt, Human
ggccacaagacccuug

SEQ ID NO: 3127847 - RNA, 15 nt, Human
ggcauuccccaggag

SEQ ID NO: 3127848 - RNA, 23 nt, Human
ggcauguucucugaggacacuaa

SEQ ID NO: 3127849 - RNA, 15 nt, Human
ggcagguuggugggg

SEQ ID NO: 3127850 - RNA, 11 nt, Human
ggccacuguga

SEQ ID NO: 3127851 - RNA, 16 nt, Human
ggccaggagccuccug

SEQ ID NO: 3127852 - RNA, 14 nt, Human
ggccaggagccucc

SEQ ID NO: 3127853 - RNA, 16 nt, Human
ggccacugugaagaga

SEQ ID NO: 3127854 - RNA, 14 nt, Human
ggccaggccagagg

SEQ ID NO: 3127855 - RNA, 16 nt, Human
ggccaggccagaggga

SEQ ID NO: 3127856 - RNA, 11 nt, Human
ggccaggcugg

SEQ ID NO: 3127857 - RNA, 13 nt, Human
ggccaugggccuc

SEQ ID NO: 3127858 - RNA, 21 nt, Human
ggccccucagggucccuggug

SEQ ID NO: 3127859 - RNA, 20 nt, Human
ggccccucagggucccuggu

SEQ ID NO: 3127860 - RNA, 19 nt, Human
ggccccucagggucccugg

SEQ ID NO: 3127861 - RNA, 16 nt, Human
ggccccucaggguccc

SEQ ID NO: 3127862 - RNA, 13 nt, Human
ggccccugccacc

SEQ ID NO: 3127863 - RNA, 16 nt, Human
ggccccugccacccug

SEQ ID NO: 3127864 - RNA, 12 nt, Human
ggccccugccac

SEQ ID NO: 3127865 - RNA, 17 nt, Human
ggccccugccacccugg

SEQ ID NO: 3127866 - RNA, 18 nt, Human
ggccccugccacccuggg

SEQ ID NO: 3127867 - RNA, 13 nt, Human
ggccccugcccgg

SEQ ID NO: 3127868 - RNA, 16 nt, Human
ggcaaggcugucaauu

SEQ ID NO: 3127869 - RNA, 15 nt, Human
ggcacccggccccug

SEQ ID NO: 3127870 - RNA, 16 nt, Human
ggcacccggccccugc

SEQ ID NO: 3127871 - RNA, 12 nt, Human
ggcagagcagag

SEQ ID NO: 3127872 - RNA, 16 nt, Human
ggcagagcagagacca

SEQ ID NO: 3127873 - RNA, 15 nt, Human
ggcagagcagagacc

SEQ ID NO: 3127874 - RNA, 20 nt, Human
ggcagagcagagaccauccc

SEQ ID NO: 3127875 - RNA, 21 nt, Human
ggaucagucugauucccaagc

SEQ ID NO: 3127876 - RNA, 19 nt, Human
ggcaacccccagccugcua

SEQ ID NO: 3127877 - RNA, 15 nt, Human
ggcaaggcugucaau

SEQ ID NO: 3127878 - RNA, 19 nt, Human
ggcaacugcauuggcuuug

SEQ ID NO: 3127879 - RNA, 18 nt, Human
ggcaacugcauuggcuuu

SEQ ID NO: 3127880 - RNA, 17 nt, Human
ggcagaggaaagcaaag

SEQ ID NO: 3127881 - RNA, 21 nt, Human
ggcagaguugaagacagagcu

SEQ ID NO: 3127882 - RNA, 23 nt, Human
ggcagauacaggaaaagcugcug

SEQ ID NO: 3127883 - RNA, 23 nt, Human
ggcagaguugaagacagagcuac

SEQ ID NO: 3127884 - RNA, 19 nt, Human
ggcagcugcgguccaccca

SEQ ID NO: 3127885 - RNA, 21 nt, Human
ggcagcuugaggguugggcug

SEQ ID NO: 3127886 - RNA, 16 nt, Human
ggcagcucaccucucc

SEQ ID NO: 3127887 - RNA, 22 nt, Human
ggcagcucaccucucccuugga

SEQ ID NO: 3127888 - RNA, 21 nt, Human
ggcagcucaccucucccuugg

SEQ ID NO: 3127889 - RNA, 18 nt, Human
ggcagcucaccucucccu

SEQ ID NO: 3127890 - RNA, 13 nt, Human
ggcagguccaggg

SEQ ID NO: 3127891 - RNA, 23 nt, Human
ggcaggucuugaacuccuggccu

SEQ ID NO: 3127892 - RNA, 18 nt, Human
gcuuccagugaggcucug

SEQ ID NO: 3127893 - RNA, 20 nt, Human
gcuuccagugaggcucugcc

SEQ ID NO: 3127894 - RNA, 19 nt, Human
gcuuccagugaggcucugc

SEQ ID NO: 3127895 - RNA, 21 nt, Human
gcuuccagugaggcucugccc

SEQ ID NO: 3127896 - RNA, 15 nt, Human
gcuuggaggaaggaa

SEQ ID NO: 3127897 - RNA, 14 nt, Human
gcuuggaggaagga

SEQ ID NO: 3127898 - RNA, 13 nt, Human
gcuuggaggaagg

SEQ ID NO: 3127899 - RNA, 22 nt, Human
gcuugaggguugggcugguguc

SEQ ID NO: 3127900 - RNA, 13 nt, Human
ggaaaaauagccu

SEQ ID NO: 3127901 - RNA, 14 nt, Human
ggaaaaacugauuu

SEQ ID NO: 3127902 - RNA, 15 nt, Human
ggaaaaauagccugc

SEQ ID NO: 3127903 - RNA, 14 nt, Human
gcuuuuacuuaaac

SEQ ID NO: 3127904 - RNA, 14 nt, Human
ggaaaauaaauuau

SEQ ID NO: 3127905 - RNA, 15 nt, Human
ggaaaaucagccugc

SEQ ID NO: 3127906 - RNA, 17 nt, Human
ggaacagacuggaagca

SEQ ID NO: 3127907 - RNA, 19 nt, Human
ggaacagacuggaagcaca

SEQ ID NO: 3127908 - RNA, 20 nt, Human
ggaacagacuggaagcacag

SEQ ID NO: 3127909 - RNA, 14 nt, Human
ggaagccagcaggc

SEQ ID NO: 3127910 - RNA, 13 nt, Human
ggaagccagcagg

SEQ ID NO: 3127911 - RNA, 18 nt, Human
ggaagccagcaggcucuc

SEQ ID NO: 3127912 - RNA, 17 nt, Human
ggaagccagcaggcucu

SEQ ID NO: 3127913 - RNA, 16 nt, Human
ggaagccagcaggcuc

SEQ ID NO: 3127914 - RNA, 15 nt, Human
ggaagccagcaggcu

SEQ ID NO: 3127915 - RNA, 23 nt, Human
ggaagcacaugccucucucaggc

SEQ ID NO: 3127916 - RNA, 22 nt, Human
ggaagcacaugccucucucagg

SEQ ID NO: 3127917 - RNA, 21 nt, Human
ggaagcacaugccucucucag

SEQ ID NO: 3127918 - RNA, 17 nt, Human
ggaagcacagcuucauu

SEQ ID NO: 3127919 - RNA, 17 nt, Human
ggaagcacaugccucuc

SEQ ID NO: 3127920 - RNA, 15 nt, Human
ggaagcacaugccuc

SEQ ID NO: 3127921 - RNA, 14 nt, Human
ggaagcacaugccu

SEQ ID NO: 3127922 - RNA, 13 nt, Human
ggaagcacaugcc

SEQ ID NO: 3127923 - RNA, 13 nt, Human
ggaagagccuugc

SEQ ID NO: 3127924 - RNA, 17 nt, Human
gcugucuccauguuuga

SEQ ID NO: 3127925 - RNA, 19 nt, Human
gcugucccuuacgugaguc

SEQ ID NO: 3127926 - RNA, 21 nt, Human
gcugucccuuacgugaguccu

SEQ ID NO: 3127927 - RNA, 23 nt, Human
gcugucaauuacaggaaguacug

SEQ ID NO: 3127928 - RNA, 22 nt, Human
gcugucaauuacaggaaguacu

SEQ ID NO: 3127929 - RNA, 19 nt, Human
gcugucaauuacaggaagu

SEQ ID NO: 3127930 - RNA, 17 nt, Human
gcugucaauuacaggaa

SEQ ID NO: 3127931 - RNA, 16 nt, Human
gcuggugucaccugaa

SEQ ID NO: 3127932 - RNA, 18 nt, Human
gcuggugucaccugaaga

SEQ ID NO: 3127933 - RNA, 20 nt, Human
gcuggucccacucaguccau

SEQ ID NO: 3127934 - RNA, 14 nt, Human
gcuggucccacuca

SEQ ID NO: 3127935 - RNA, 15 nt, Human
gcugguucaggguug

SEQ ID NO: 3127936 - RNA, 21 nt, Human
gcugguuagagguucccuuug

SEQ ID NO: 3127937 - RNA, 16 nt, Human
gcugucaauuacagga

SEQ ID NO: 3127938 - RNA, 22 nt, Human
gcugguucaggguuggccccug

SEQ ID NO: 3127939 - RNA, 22 nt, Human
gcugggagagccuuccaggggu

SEQ ID NO: 3127940 - RNA, 19 nt, Human
gcugggagagccuuccagg

SEQ ID NO: 3127941 - RNA, 18 nt, Human
gcugggagagccuuccag

SEQ ID NO: 3127942 - RNA, 17 nt, Human
gcugggagagccuucca

SEQ ID NO: 3127943 - RNA, 13 nt, Human
gcugggagagccu

SEQ ID NO: 3127944 - RNA, 12 nt, Human
gcugggagagcc

SEQ ID NO: 3127945 - RNA, 17 nt, Human
gcugggcuucaguggca

SEQ ID NO: 3127946 - RNA, 21 nt, Human
gcugggaugauuggagggggg

SEQ ID NO: 3127947 - RNA, 19 nt, Human
gcugggggccucagugcca

SEQ ID NO: 3127948 - RNA, 20 nt, Human
gcugggggccucagugccac

SEQ ID NO: 3127949 - RNA, 15 nt, Human
gcuggucccacucag

SEQ ID NO: 3127950 - RNA, 19 nt, Human
gcuggucccacucagucca

SEQ ID NO: 3127951 - RNA, 12 nt, Human
gcuggggccagu

SEQ ID NO: 3127952 - RNA, 23 nt, Human
gcugggggaagaagcucucuccu

SEQ ID NO: 3127953 - RNA, 18 nt, Human
gcugggcuucaguggcag

SEQ ID NO: 3127954 - RNA, 16 nt, Human
gcuggaccuugaacug

SEQ ID NO: 3127955 - RNA, 18 nt, Human
gcuggaccuugaacuggg

SEQ ID NO: 3127956 - RNA, 17 nt, Human
gcugcuugggcuucauc

SEQ ID NO: 3127957 - RNA, 21 nt, Human
gcuggaccuugaacuggguac

SEQ ID NO: 3127958 - RNA, 19 nt, Human
gcugggacuacagguguga

SEQ ID NO: 3127959 - RNA, 13 nt, Human
gcugggacuacag

SEQ ID NO: 3127960 - RNA, 18 nt, Human
gcugggacuacaggcacc

SEQ ID NO: 3127961 - RNA, 19 nt, Human
gcugggacuacaggcaccc

SEQ ID NO: 3127962 - RNA, 20 nt, Human
gcugggacuacaggcaccca

SEQ ID NO: 3127963 - RNA, 20 nt, Human
gcugggacaugggaaagggg

SEQ ID NO: 3127964 - RNA, 23 nt, Human
gcugcuucaaggauccugagcca

SEQ ID NO: 3127965 - RNA, 22 nt, Human
gcugcuucaaggauccugagcc

SEQ ID NO: 3127966 - RNA, 21 nt, Human
gcugcuucaaggauccugagc

SEQ ID NO: 3127967 - RNA, 16 nt, Human
gcugcuugggcuucau

SEQ ID NO: 3127968 - RNA, 17 nt, Human
gcugcgguccacccagg

SEQ ID NO: 3127969 - RNA, 18 nt, Human
gcugcgguccacccagga

SEQ ID NO: 3127970 - RNA, 13 nt, Human
gcugcuucaagga

SEQ ID NO: 3127971 - RNA, 11 nt, Human
gcugcccugug

SEQ ID NO: 3127972 - RNA, 14 nt, Human
gcugcccugugagu

SEQ ID NO: 3127973 - RNA, 12 nt, Human
gcugcccuguga

SEQ ID NO: 3127974 - RNA, 16 nt, Human
gcugcgguccacccag

SEQ ID NO: 3127975 - RNA, 17 nt, Human
gggaagggggcugggac

SEQ ID NO: 3127976 - RNA, 16 nt, Human
gggaagggggcuggga

SEQ ID NO: 3127977 - RNA, 14 nt, Human
gggaagggggcugg

SEQ ID NO: 3127978 - RNA, 16 nt, Human
gggaaggauacaaaag

SEQ ID NO: 3127979 - RNA, 14 nt, Human
ggcuuuugugcauu

SEQ ID NO: 3127980 - RNA, 21 nt, Human
gggaaggauacaaaagcaugu

SEQ ID NO: 3127981 - RNA, 23 nt, Human
gggaaggauacaaaagcauguga

SEQ ID NO: 3127982 - RNA, 17 nt, Human
gggacuacaggcaccca

SEQ ID NO: 3127983 - RNA, 15 nt, Human
gggaccucaggccug

SEQ ID NO: 3127984 - RNA, 13 nt, Human
gggaccucaggcc

SEQ ID NO: 3127985 - RNA, 12 nt, Human
gggaccucaggc

SEQ ID NO: 3127986 - RNA, 17 nt, Human
ggcugggcucccuuccc

SEQ ID NO: 3127987 - RNA, 12 nt, Human
ggcugggcuuca

SEQ ID NO: 3127988 - RNA, 15 nt, Human
ggcuuaaaacaacac

SEQ ID NO: 3127989 - RNA, 13 nt, Human
ggcugggcuucag

SEQ ID NO: 3127990 - RNA, 17 nt, Human
ggcugggcuucaguggc

SEQ ID NO: 3127991 - RNA, 21 nt, Human
ggcuuagucacugagacagcc

SEQ ID NO: 3127992 - RNA, 15 nt, Human
ggcuuagucacugag

SEQ ID NO: 3127993 - RNA, 10 nt, Human
ggcuuuugug

SEQ ID NO: 3127994 - RNA, 21 nt, Human
ggcuuggggaccagagcugcc

SEQ ID NO: 3127995 - RNA, 19 nt, Human
ggcuuggggaccagagcug

SEQ ID NO: 3127996 - RNA, 22 nt, Human
ggcugcuucaaggauccugagc

SEQ ID NO: 3127997 - RNA, 14 nt, Human
ggcugcuucaagga

SEQ ID NO: 3127998 - RNA, 12 nt, Human
ggcugcuucaag

SEQ ID NO: 3127999 - RNA, 11 nt, Human
ggcugcuucaa

SEQ ID NO: 3128000 - RNA, 12 nt, Human
ggcugcagggag

SEQ ID NO: 3128001 - RNA, 13 nt, Human
ggcugcagggagu

SEQ ID NO: 3128002 - RNA, 14 nt, Human
ggcugcugaaggcu

SEQ ID NO: 3128003 - RNA, 17 nt, Human
ggcugcugaaggcucga

SEQ ID NO: 3128004 - RNA, 15 nt, Human
ggcugcugaaggcuc

SEQ ID NO: 3128005 - RNA, 18 nt, Human
ggcugcugaaggcucgag

SEQ ID NO: 3128006 - RNA, 13 nt, Human
ggcugcugaaggc

SEQ ID NO: 3128007 - RNA, 23 nt, Human
ggcugggagagccuuccaggggu

SEQ ID NO: 3128008 - RNA, 20 nt, Human
ggcugggagagccuuccagg

SEQ ID NO: 3128009 - RNA, 14 nt, Human
ggcugggcagagga

SEQ ID NO: 3128010 - RNA, 13 nt, Human
ggcugggcagagg

SEQ ID NO: 3128011 - RNA, 19 nt, Human
ggcugggcagaggaaagca

SEQ ID NO: 3128012 - RNA, 15 nt, Human
ggcugggcagaggaa

SEQ ID NO: 3128013 - RNA, 18 nt, Human
ggcugggagagccuucca

SEQ ID NO: 3128014 - RNA, 19 nt, Human
ggcugggagagccuuccag

SEQ ID NO: 3128015 - RNA, 21 nt, Human
ggcugcuucaaggauccugag

SEQ ID NO: 3128016 - RNA, 23 nt, Human
ggcugcuucaaggauccugagcc

SEQ ID NO: 3128017 - RNA, 18 nt, Human
ggcugcaaaggguaucag

SEQ ID NO: 3128018 - RNA, 22 nt, Human
ggcugcaaaggguaucaggugc

SEQ ID NO: 3128019 - RNA, 23 nt, Human
ggcugcaaaggguaucaggugcu

SEQ ID NO: 3128020 - RNA, 24 nt, Human
ggcugcaaaggguaucaggugcug

SEQ ID NO: 3128021 - RNA, 17 nt, Human
ggcugcaccggcuggcc

SEQ ID NO: 3128022 - RNA, 19 nt, Human
ggcugcaccggcuggccug

SEQ ID NO: 3128023 - RNA, 18 nt, Human
ggcugcaccggcuggccu

SEQ ID NO: 3128024 - RNA, 15 nt, Human
ggcugaggugggagg

SEQ ID NO: 3128025 - RNA, 13 nt, Human
ggcugagguggga

SEQ ID NO: 3128026 - RNA, 20 nt, Human
ggccccugcccggcugcgga

SEQ ID NO: 3128027 - RNA, 17 nt, Human
ggcucugccucccauca

SEQ ID NO: 3128028 - RNA, 16 nt, Human
ggccccugcccggcug

SEQ ID NO: 3128029 - RNA, 17 nt, Human
ggccccugcccggcugc

SEQ ID NO: 3128030 - RNA, 16 nt, Human
gggcacagggucucua

SEQ ID NO: 3128031 - RNA, 13 nt, Human
gggcacagggucu

SEQ ID NO: 3128032 - RNA, 16 nt, Human
gggcacucagaagaca

SEQ ID NO: 3128033 - RNA, 19 nt, Human
gggcacucagaagacacug

SEQ ID NO: 3128034 - RNA, 21 nt, Human
gggcacagaaaauggaagaca

SEQ ID NO: 3128035 - RNA, 20 nt, Human
gggcacagaaaauggaagac

SEQ ID NO: 3128036 - RNA, 18 nt, Human
gggcacagaaaauggaag

SEQ ID NO: 3128037 - RNA, 23 nt, Human
gggcacaccgggcacucagaaga

SEQ ID NO: 3128038 - RNA, 20 nt, Human
gggcacucagaagacacuga

SEQ ID NO: 3128039 - RNA, 14 nt, Human
gggcagaaggaaga

SEQ ID NO: 3128040 - RNA, 18 nt, Human
gggcagaaggaagacuuc

SEQ ID NO: 3128041 - RNA, 11 nt, Human
gggcagagcag

SEQ ID NO: 3128042 - RNA, 17 nt, Human
gggcagguugguggggg

SEQ ID NO: 3128043 - RNA, 16 nt, Human
gggaggugaccccagg

SEQ ID NO: 3128044 - RNA, 17 nt, Human
gggaggugggauccucc

SEQ ID NO: 3128045 - RNA, 17 nt, Human
gggagugacagaggcag

SEQ ID NO: 3128046 - RNA, 18 nt, Human
gggagugacagaggcagc

SEQ ID NO: 3128047 - RNA, 11 nt, Human
gggagugagcu

SEQ ID NO: 3128048 - RNA, 14 nt, Human
gggagugagcuggu

SEQ ID NO: 3128049 - RNA, 23 nt, Human
gggauccuggaguucugguuccu

SEQ ID NO: 3128050 - RNA, 20 nt, Human
gggcaacccccagccugcua

SEQ ID NO: 3128051 - RNA, 18 nt, Human
gggcaacccuggugacca

SEQ ID NO: 3128052 - RNA, 16 nt, Human
gggauccuccaggugc

SEQ ID NO: 3128053 - RNA, 15 nt, Human
gggauccuccaggug

SEQ ID NO: 3128054 - RNA, 21 nt, Human
gggauaugauuuaaaucagcc

SEQ ID NO: 3128055 - RNA, 13 nt, Human
gggauagagagag

SEQ ID NO: 3128056 - RNA, 13 nt, Human
gggccuggcuccc

SEQ ID NO: 3128057 - RNA, 17 nt, Human
gggccuggcucaggugg

SEQ ID NO: 3128058 - RNA, 18 nt, Human
gggccuggccugagcugg

SEQ ID NO: 3128059 - RNA, 14 nt, Human
gggccuggccugag

SEQ ID NO: 3128060 - RNA, 12 nt, Human
gggccuggccug

SEQ ID NO: 3128061 - RNA, 13 nt, Human
gggccuggccuga

SEQ ID NO: 3128062 - RNA, 13 nt, Human
gggcccugccucc

SEQ ID NO: 3128063 - RNA, 17 nt, Human
gggcccagagagggugg

SEQ ID NO: 3128064 - RNA, 16 nt, Human
gggccacagagaaagu

SEQ ID NO: 3128065 - RNA, 23 nt, Human
gggccacagagaaaguacuucuc

SEQ ID NO: 3128066 - RNA, 12 nt, Human
gggcaugacacg

SEQ ID NO: 3128067 - RNA, 14 nt, Human
gguggugaccucug

SEQ ID NO: 3128068 - RNA, 15 nt, Human
gguggugaccucugc

SEQ ID NO: 3128069 - RNA, 16 nt, Human
gguggugaccucugcc

SEQ ID NO: 3128070 - RNA, 19 nt, Human
ggugucaccugaagacuca

SEQ ID NO: 3128071 - RNA, 19 nt, Human
ggugucaagagggucugag

SEQ ID NO: 3128072 - RNA, 17 nt, Human
ggugucaagagggucug

SEQ ID NO: 3128073 - RNA, 15 nt, Human
ggugguuuucuguuc

SEQ ID NO: 3128074 - RNA, 18 nt, Human
ggugguuuucuguucuuu

SEQ ID NO: 3128075 - RNA, 17 nt, Human
ggugguuucagaaaugu

SEQ ID NO: 3128076 - RNA, 18 nt, Human
ggugguuucagaaaugug

SEQ ID NO: 3128077 - RNA, 21 nt, Human
ggugguuauggagaggguguc

SEQ ID NO: 3128078 - RNA, 13 nt, Human
gguuauggagagg

SEQ ID NO: 3128079 - RNA, 17 nt, Human
gguuaggcauuguggga

SEQ ID NO: 3128080 - RNA, 21 nt, Human
gguuacccaguuagcucucaa

SEQ ID NO: 3128081 - RNA, 13 nt, Human
gguugagguuuca

SEQ ID NO: 3128082 - RNA, 13 nt, Human
gguucaaagauau

SEQ ID NO: 3128083 - RNA, 21 nt, Human
gguucaaagauauuuugcuuu

SEQ ID NO: 3128084 - RNA, 15 nt, Human
ggugcugccauccag

SEQ ID NO: 3128085 - RNA, 19 nt, Human
gguggcagugggagcugcc

SEQ ID NO: 3128086 - RNA, 22 nt, Human
gguggcagugggagcugccugu

SEQ ID NO: 3128087 - RNA, 16 nt, Human
gguggcagugggagcu

SEQ ID NO: 3128088 - RNA, 22 nt, Human
gguggccucccaacucacccca

SEQ ID NO: 3128089 - RNA, 23 nt, Human
gguggccucccaacucaccccag

SEQ ID NO: 3128090 - RNA, 15 nt, Human
ggugagaagcagagg

SEQ ID NO: 3128091 - RNA, 16 nt, Human
ggugagaggggaacag

SEQ ID NO: 3128092 - RNA, 20 nt, Human
ggugcuaucucccccagccc

SEQ ID NO: 3128093 - RNA, 19 nt, Human
ggugcuaucucccccagcc

SEQ ID NO: 3128094 - RNA, 17 nt, Human
ggugcuaucucccccag

SEQ ID NO: 3128095 - RNA, 16 nt, Human
ggugcuaucuccccca

SEQ ID NO: 3128096 - RNA, 16 nt, Human
ggucucacucugucgc

SEQ ID NO: 3128097 - RNA, 22 nt, Human
ggucucacucugucgcccaguc

SEQ ID NO: 3128098 - RNA, 23 nt, Human
ggucucacucugucgcccagucu

SEQ ID NO: 3128099 - RNA, 14 nt, Human
ggucccaccccaca

SEQ ID NO: 3128100 - RNA, 17 nt, Human
ggucccaccccacacac

SEQ ID NO: 3128101 - RNA, 21 nt, Human
ggugacagagugagacucugu

SEQ ID NO: 3128102 - RNA, 14 nt, Human
ggucugacccacug

SEQ ID NO: 3128103 - RNA, 22 nt, Human
ggugaccagcaccaucucuccu

SEQ ID NO: 3128104 - RNA, 21 nt, Human
ggugaccucugccugaaguca

SEQ ID NO: 3128105 - RNA, 17 nt, Human
ggggcugaggugggagg

SEQ ID NO: 3128106 - RNA, 16 nt, Human
ggggcaacccugguga

SEQ ID NO: 3128107 - RNA, 16 nt, Human
ggggaaaaucagccug

SEQ ID NO: 3128108 - RNA, 19 nt, Human
ggggaaaaucagccugcuc

SEQ ID NO: 3128109 - RNA, 17 nt, Human
ggggaaaaucagccugc

SEQ ID NO: 3128110 - RNA, 22 nt, Human
gggcuuggggaccagagcugcc

SEQ ID NO: 3128111 - RNA, 21 nt, Human
ggggaaaaucagccugcucca

SEQ ID NO: 3128112 - RNA, 12 nt, Human
gggucugaggaa

SEQ ID NO: 3128113 - RNA, 21 nt, Human
gggucugaggaauccagaccc

SEQ ID NO: 3128114 - RNA, 12 nt, Human
gggucucacucu

SEQ ID NO: 3128115 - RNA, 14 nt, Human
gggucucacucugu

SEQ ID NO: 3128116 - RNA, 17 nt, Human
ggguaagugagagaggg

SEQ ID NO: 3128117 - RNA, 22 nt, Human
ggggcugcaccggcuggccugg

SEQ ID NO: 3128118 - RNA, 21 nt, Human
ggggcugcaccggcuggccug

SEQ ID NO: 3128119 - RNA, 12 nt, Human
ggggcugcaccg

SEQ ID NO: 3128120 - RNA, 19 nt, Human
ggggcugaggugggaggau

SEQ ID NO: 3128121 - RNA, 22 nt, Human
gggggaggugggauccuccagg

SEQ ID NO: 3128122 - RNA, 17 nt, Human
gggguggggaccucagg

SEQ ID NO: 3128123 - RNA, 12 nt, Human
gggguggccucc

SEQ ID NO: 3128124 - RNA, 22 nt, Human
gguagaagcccuucuaccuucc

SEQ ID NO: 3128125 - RNA, 23 nt, Human
gguagaaauaucugaaaauguau

SEQ ID NO: 3128126 - RNA, 16 nt, Human
gguacuuguggacaca

SEQ ID NO: 3128127 - RNA, 17 nt, Human
gguacuuguggacacag

SEQ ID NO: 3128128 - RNA, 22 nt, Human
gguagaaauaucugaaaaugua

SEQ ID NO: 3128129 - RNA, 11 nt, Human
gguacccacug

SEQ ID NO: 3128130 - RNA, 13 nt, Human
gguacccacugcu

SEQ ID NO: 3128131 - RNA, 16 nt, Human
ggucccaccccacaca

SEQ ID NO: 3128132 - RNA, 15 nt, Human
ggucccaccccacac

SEQ ID NO: 3128133 - RNA, 19 nt, Human
gggugacagagcaagugag

SEQ ID NO: 3128134 - RNA, 17 nt, Human
gggugaagugaagacaa

SEQ ID NO: 3128135 - RNA, 12 nt, Human
ggguucuaccca

SEQ ID NO: 3128136 - RNA, 23 nt, Human
ggguucaagcgauucuucugcuu

SEQ ID NO: 3128137 - RNA, 22 nt, Human
ggguucaagcgauucuucugcu

SEQ ID NO: 3128138 - RNA, 16 nt, Human
acuauuguuagucucu

SEQ ID NO: 3128139 - RNA, 17 nt, Human
acuagggaagauaauau

SEQ ID NO: 3128140 - RNA, 11 nt, Human
accugugucuc

SEQ ID NO: 3128141 - RNA, 15 nt, Human
acuaauagacaauuu

SEQ ID NO: 3128142 - RNA, 15 nt, Human
acgucugacaggcaa

SEQ ID NO: 3128143 - RNA, 23 nt, Human
acgucugacaggcaaugcuggcu

SEQ ID NO: 3128144 - RNA, 16 nt, Human
acggaagagccuugcg

SEQ ID NO: 3128145 - RNA, 15 nt, Human
acggaagagccuugc

SEQ ID NO: 3128146 - RNA, 19 nt, Human
acggacacucaaaagcugg

SEQ ID NO: 3128147 - RNA, 19 nt, Human
acgcuggagugcagugagc

SEQ ID NO: 3128148 - RNA, 18 nt, Human
acgcuggagugcagugag

SEQ ID NO: 3128149 - RNA, 18 nt, Human
accugccagggacagagg

SEQ ID NO: 3128150 - RNA, 16 nt, Human
accugccagggacaga

SEQ ID NO: 3128151 - RNA, 15 nt, Human
accugccagggacag

SEQ ID NO: 3128152 - RNA, 13 nt, Human
accugccagggac

SEQ ID NO: 3128153 - RNA, 12 nt, Human
accugccaggga

SEQ ID NO: 3128154 - RNA, 11 nt, Human
accugccaggg

SEQ ID NO: 3128155 - RNA, 17 nt, Human
accucuugagccuugaa

SEQ ID NO: 3128156 - RNA, 19 nt, Human
accucuugagccuugaacu

SEQ ID NO: 3128157 - RNA, 20 nt, Human
accucuugagccuugaacuu

SEQ ID NO: 3128158 - RNA, 18 nt, Human
accucaggugagaagcag

SEQ ID NO: 3128159 - RNA, 22 nt, Human
accucaggccugggggcugggc

SEQ ID NO: 3128160 - RNA, 14 nt, Human
accucaggccuggg

SEQ ID NO: 3128161 - RNA, 13 nt, Human
accucaggccugg

SEQ ID NO: 3128162 - RNA, 12 nt, Human
accucaggccug

SEQ ID NO: 3128163 - RNA, 17 nt, Human
accgugaggccagagac

SEQ ID NO: 3128164 - RNA, 16 nt, Human
accgugaggccagaga

SEQ ID NO: 3128165 - RNA, 15 nt, Human
acccaugcugcccug

SEQ ID NO: 3128166 - RNA, 14 nt, Human
acccaugcugcccu

SEQ ID NO: 3128167 - RNA, 16 nt, Human
accccacacacgccag

SEQ ID NO: 3128168 - RNA, 22 nt, Human
acccugugauggggcccugccu

SEQ ID NO: 3128169 - RNA, 17 nt, Human
acccuguuaccauuuug

SEQ ID NO: 3128170 - RNA, 20 nt, Human
accgggcacucagaagacac

SEQ ID NO: 3128171 - RNA, 18 nt, Human
accggcuggccuggcccc

SEQ ID NO: 3128172 - RNA, 17 nt, Human
accggcuggccuggccc

SEQ ID NO: 3128173 - RNA, 15 nt, Human
accggcuggccuggc

SEQ ID NO: 3128174 - RNA, 14 nt, Human
accggcuggccugg

SEQ ID NO: 3128175 - RNA, 14 nt, Human
accgugaggccaga

SEQ ID NO: 3128176 - RNA, 15 nt, Human
accgggccacagaga

SEQ ID NO: 3128177 - RNA, 19 nt, Human
accgggccacagagaaagu

SEQ ID NO: 3128178 - RNA, 22 nt, Human
acugcccggcaggguccuagaa

SEQ ID NO: 3128179 - RNA, 14 nt, Human
acugcuuuuggucu

SEQ ID NO: 3128180 - RNA, 15 nt, Human
acugcuuuuggucug

SEQ ID NO: 3128181 - RNA, 16 nt, Human
acugcuuuuggucugu

SEQ ID NO: 3128182 - RNA, 20 nt, Human
acugcuuuuggucuguguga

SEQ ID NO: 3128183 - RNA, 15 nt, Human
acugcccggcagggu

SEQ ID NO: 3128184 - RNA, 19 nt, Human
acucugucucaaaaaaaca

SEQ ID NO: 3128185 - RNA, 21 nt, Human
acucugugucagguggggcag

SEQ ID NO: 3128186 - RNA, 19 nt, Human
acucugugucagguggggc

SEQ ID NO: 3128187 - RNA, 22 nt, Human
acugauuuuuuuuuccuucagu

SEQ ID NO: 3128188 - RNA, 21 nt, Human
acugauuuuuuuuuccuucag

SEQ ID NO: 3128189 - RNA, 23 nt, Human
acugauuuuuuuuuccuucagug

SEQ ID NO: 3128190 - RNA, 12 nt, Human
acugaugggcaa

SEQ ID NO: 3128191 - RNA, 22 nt, Human
acugaugggcaacccccagccu

SEQ ID NO: 3128192 - RNA, 22 nt, Human
acugauggcuaauguacugcau

SEQ ID NO: 3128193 - RNA, 13 nt, Human
acugaucucucgu

SEQ ID NO: 3128194 - RNA, 22 nt, Human
acugacauuguuggccaaagcc

SEQ ID NO: 3128195 - RNA, 23 nt, Human
acugacauuguuggccaaagcca

SEQ ID NO: 3128196 - RNA, 17 nt, Human
acuucuuauacauuuga

SEQ ID NO: 3128197 - RNA, 19 nt, Human
acuucugccauauucuguu

SEQ ID NO: 3128198 - RNA, 20 nt, Human
acuucugccauauucuguug

SEQ ID NO: 3128199 - RNA, 14 nt, Human
acuuaaauaaugug

SEQ ID NO: 3128200 - RNA, 23 nt, Human
acagugagucgaggacagggagg

SEQ ID NO: 3128201 - RNA, 22 nt, Human
acagugagucgaggacagggag

SEQ ID NO: 3128202 - RNA, 19 nt, Human
acaggugugaaccaccaca

SEQ ID NO: 3128203 - RNA, 22 nt, Human
acaggugugagucaccaagccc

SEQ ID NO: 3128204 - RNA, 23 nt, Human
acaggugugagucaccaagccca

SEQ ID NO: 3128205 - RNA, 19 nt, Human
acaggcaagcaccuccugc

SEQ ID NO: 3128206 - RNA, 15 nt, Human
acagcuccuucuguc

SEQ ID NO: 3128207 - RNA, 19 nt, Human
acagaggggguggccuccc

SEQ ID NO: 3128208 - RNA, 18 nt, Human
acagaggggguggccucc

SEQ ID NO: 3128209 - RNA, 17 nt, Human
acagaggggguggccuc

SEQ ID NO: 3128210 - RNA, 16 nt, Human
acagcuccuucugucc

SEQ ID NO: 3128211 - RNA, 18 nt, Human
acagcuccuucuguccua

SEQ ID NO: 3128212 - RNA, 14 nt, Human
acagcucuguccug

SEQ ID NO: 3128213 - RNA, 20 nt, Human
acaggcaagcaccuccugcc

SEQ ID NO: 3128214 - RNA, 23 nt, Human
acaggcaagcaccuccugccucg

SEQ ID NO: 3128215 - RNA, 16 nt, Human
acagcucuguccuggg

SEQ ID NO: 3128216 - RNA, 13 nt, Human
acagcucuguccu

SEQ ID NO: 3128217 - RNA, 17 nt, Human
acaugcaaggucauuuu

SEQ ID NO: 3128218 - RNA, 18 nt, Human
acaugccucucucaggcc

SEQ ID NO: 3128219 - RNA, 17 nt, Human
acaugccucucucaggc

SEQ ID NO: 3128220 - RNA, 16 nt, Human
acaugccucucucagg

SEQ ID NO: 3128221 - RNA, 15 nt, Human
acaugccucucucag

SEQ ID NO: 3128222 - RNA, 16 nt, Human
acaugcaaggucauuu

SEQ ID NO: 3128223 - RNA, 16 nt, Human
acauaagauaaaugug

SEQ ID NO: 3128224 - RNA, 15 nt, Human
acauaagauaaaugu

SEQ ID NO: 3128225 - RNA, 13 nt, Human
acccaugcugccc

SEQ ID NO: 3128226 - RNA, 15 nt, Human
acccacccuccuuuc

SEQ ID NO: 3128227 - RNA, 17 nt, Human
acccacccccacccaag

SEQ ID NO: 3128228 - RNA, 15 nt, Human
acccacccccaccca

SEQ ID NO: 3128229 - RNA, 14 nt, Human
accaucaagccacc

SEQ ID NO: 3128230 - RNA, 15 nt, Human
accaucaagccacca

SEQ ID NO: 3128231 - RNA, 12 nt, Human
accaucauugaa

SEQ ID NO: 3128232 - RNA, 15 nt, Human
accaucauugaaauc

SEQ ID NO: 3128233 - RNA, 23 nt, Human
accaucauugaaaucuuuuugcu

SEQ ID NO: 3128234 - RNA, 20 nt, Human
accagccccagugcccacag

SEQ ID NO: 3128235 - RNA, 18 nt, Human
accagccccagugcccac

SEQ ID NO: 3128236 - RNA, 19 nt, Human
accagccccagugcccaca

SEQ ID NO: 3128237 - RNA, 16 nt, Human
accagccccagugccc

SEQ ID NO: 3128238 - RNA, 17 nt, Human
accagccccagugccca

SEQ ID NO: 3128239 - RNA, 14 nt, Human
accagcagaaaugc

SEQ ID NO: 3128240 - RNA, 13 nt, Human
accagcagagcac

SEQ ID NO: 3128241 - RNA, 12 nt, Human
accagcagagca

SEQ ID NO: 3128242 - RNA, 19 nt, Human
acaugccucucucaggcca

SEQ ID NO: 3128243 - RNA, 23 nt, Human
acaugucuuuucuugcaugaggc

SEQ ID NO: 3128244 - RNA, 12 nt, Human
aauuguaaggaa

SEQ ID NO: 3128245 - RNA, 16 nt, Human
aaugucacaggcaggu

SEQ ID NO: 3128246 - RNA, 19 nt, Human
aaugucacaggcaggucca

SEQ ID NO: 3128247 - RNA, 20 nt, Human
aauuuauuuaugggauccug

SEQ ID NO: 3128248 - RNA, 17 nt, Human
aauuuauuauggcacau

SEQ ID NO: 3128249 - RNA, 14 nt, Human
aauuuugauguuuu

SEQ ID NO: 3128250 - RNA, 22 nt, Human
acaaaaugaaacgcaaccacca

SEQ ID NO: 3128251 - RNA, 13 nt, Human
acaaaaugaaacg

SEQ ID NO: 3128252 - RNA, 13 nt, Human
acagacaaagcgu

SEQ ID NO: 3128253 - RNA, 14 nt, Human
acagacaaagcgug

SEQ ID NO: 3128254 - RNA, 23 nt, Human
acagaggcagccccauucugccu

SEQ ID NO: 3128255 - RNA, 17 nt, Human
acagaggccaugggccu

SEQ ID NO: 3128256 - RNA, 14 nt, Human
acagaggggguggc

SEQ ID NO: 3128257 - RNA, 21 nt, Human
acagaggccaugggccuccug

SEQ ID NO: 3128258 - RNA, 13 nt, Human
acagaggcagccc

SEQ ID NO: 3128259 - RNA, 22 nt, Human
acacugugcugagucugaaggc

SEQ ID NO: 3128260 - RNA, 17 nt, Human
acacugugcugagucug

SEQ ID NO: 3128261 - RNA, 13 nt, Human
acaauuuauuaug

SEQ ID NO: 3128262 - RNA, 16 nt, Human
acaaggauugcuacug

SEQ ID NO: 3128263 - RNA, 20 nt, Human
acaaggaugaucuaggaaga

SEQ ID NO: 3128264 - RNA, 19 nt, Human
acacagcucuucuccaggc

SEQ ID NO: 3128265 - RNA, 19 nt, Human
acacaaaaguuucucuuuu

SEQ ID NO: 3128266 - RNA, 20 nt, Human
acacagcucuucuccaggcu

SEQ ID NO: 3128267 - RNA, 21 nt, Human
acacagcucuucuccaggcug

SEQ ID NO: 3128268 - RNA, 14 nt, Human
acacauuuuuuaaa

SEQ ID NO: 3128269 - RNA, 12 nt, Human
acacauuuuucu

SEQ ID NO: 3128270 - RNA, 16 nt, Human
acacauuuuuuaaaug

SEQ ID NO: 3128271 - RNA, 18 nt, Human
acacauuuuuuaaaugca

SEQ ID NO: 3128272 - RNA, 14 nt, Human
acaccacuacauuc

SEQ ID NO: 3128273 - RNA, 15 nt, Human
acaccacuacauucu

SEQ ID NO: 3128274 - RNA, 14 nt, Human
acacgaauauugcu

SEQ ID NO: 3128275 - RNA, 12 nt, Human
acacgaauauug

SEQ ID NO: 3128276 - RNA, 17 nt, Human
acaccacuacauucugu

SEQ ID NO: 3128277 - RNA, 20 nt, Human
acaccacuacauucuguuaa

SEQ ID NO: 3128278 - RNA, 21 nt, Human
acacgaauauugcugauggug

SEQ ID NO: 3128279 - RNA, 15 nt, Human
acacgaauauugcug

SEQ ID NO: 3128280 - RNA, 21 nt, Human
aauaccugucccccugacaac

SEQ ID NO: 3128281 - RNA, 19 nt, Human
aauaauguuaacauggaca

SEQ ID NO: 3128282 - RNA, 13 nt, Human
aagugcugcauuu

SEQ ID NO: 3128283 - RNA, 21 nt, Human
aaugcgugcauaccacuuuug

SEQ ID NO: 3128284 - RNA, 23 nt, Human
aaugcgugcauaccacuuuuguu

SEQ ID NO: 3128285 - RNA, 13 nt, Human
aaugggacacuaa

SEQ ID NO: 3128286 - RNA, 14 nt, Human
aaugggagcucaug

SEQ ID NO: 3128287 - RNA, 23 nt, Human
aaugcucuuuacuucauggacuu

SEQ ID NO: 3128288 - RNA, 15 nt, Human
aaugucacaggcagg

SEQ ID NO: 3128289 - RNA, 15 nt, Human
aaugggggugcauuu

SEQ ID NO: 3128290 - RNA, 17 nt, Human
aaugggggugcauuuga

SEQ ID NO: 3128291 - RNA, 15 nt, Human
aaugauagcuacugu

SEQ ID NO: 3128292 - RNA, 13 nt, Human
aaugauuaauuaa

SEQ ID NO: 3128293 - RNA, 12 nt, Human
aaugauuaauua

SEQ ID NO: 3128294 - RNA, 18 nt, Human
aaucuccaaaauaaaacu

SEQ ID NO: 3128295 - RNA, 20 nt, Human
aagggacuuggaagcuccgc

SEQ ID NO: 3128296 - RNA, 18 nt, Human
aagggacgcuacccggga

SEQ ID NO: 3128297 - RNA, 15 nt, Human
aagcgauucuucugc

SEQ ID NO: 3128298 - RNA, 14 nt, Human
aagcgauucuucug

SEQ ID NO: 3128299 - RNA, 16 nt, Human
aagcgugagccacugc

SEQ ID NO: 3128300 - RNA, 16 nt, Human
aagcgauucuucugcu

SEQ ID NO: 3128301 - RNA, 15 nt, Human
aagccagcaggcucu

SEQ ID NO: 3128302 - RNA, 18 nt, Human
aagccagcaggcucucag

SEQ ID NO: 3128303 - RNA, 21 nt, Human
aagccaccaacauacucccau

SEQ ID NO: 3128304 - RNA, 23 nt, Human
aaggaaugauuaauuaaaacaca

SEQ ID NO: 3128305 - RNA, 16 nt, Human
aagcugcugacagugu

SEQ ID NO: 3128306 - RNA, 17 nt, Human
aagcgugagccacugca

SEQ ID NO: 3128307 - RNA, 20 nt, Human
aagcgugagccacugcaccg

SEQ ID NO: 3128308 - RNA, 14 nt, Human
aagcugcugacagu

SEQ ID NO: 3128309 - RNA, 22 nt, Human
aagcugccagccgagauagcca

SEQ ID NO: 3128310 - RNA, 12 nt, Human
aagcugccagcc

SEQ ID NO: 3128311 - RNA, 11 nt, Human
aagcugccagc

SEQ ID NO: 3128312 - RNA, 16 nt, Human
aagacuuuggaaagac

SEQ ID NO: 3128313 - RNA, 16 nt, Human
aagacuuuggaaagag

SEQ ID NO: 3128314 - RNA, 20 nt, Human
aagauucauauuuacuucuu

SEQ ID NO: 3128315 - RNA, 21 nt, Human
aagcagaggaaggagaggaga

SEQ ID NO: 3128316 - RNA, 19 nt, Human
aagccaccaacauacuccc

SEQ ID NO: 3128317 - RNA, 19 nt, Human
aagauuuugaaauuuuuau

SEQ ID NO: 3128318 - RNA, 19 nt, Human
aaacugauuuuuuuuuccu

SEQ ID NO: 3128319 - RNA, 13 nt, Human
aaacugauuuuuu

SEQ ID NO: 3128320 - RNA, 20 nt, Human
aaacugauuuuuuuuuccuu

SEQ ID NO: 3128321 - RNA, 18 nt, Human
aaacccagcucuggucca

SEQ ID NO: 3128322 - RNA, 17 nt, Human
aaaccccaucucuacaa

SEQ ID NO: 3128323 - RNA, 14 nt, Human
aaacccuucagugc

SEQ ID NO: 3128324 - RNA, 17 nt, Human
aaacucuugaccucagg

SEQ ID NO: 3128325 - RNA, 15 nt, Human
aaagauacaguuacu

SEQ ID NO: 3128326 - RNA, 15 nt, Human
aaagccaaagcuagg

SEQ ID NO: 3128327 - RNA, 14 nt, Human
aaaggcuccaggag

SEQ ID NO: 3128328 - RNA, 17 nt, Human
aaaggcuaccuuuguau

SEQ ID NO: 3128329 - RNA, 14 nt, Human
aaaggcuaccuuug

SEQ ID NO: 3128330 - RNA, 21 nt, Human
aaaggcuccaggagcagccac

SEQ ID NO: 3128331 - RNA, 22 nt, Human
aaaggcuccaggagcagccaca

SEQ ID NO: 3128332 - RNA, 11 nt, Human
aaauaaauuau

SEQ ID NO: 3128333 - RNA, 15 nt, Human
aaaauuagccaagug

SEQ ID NO: 3128334 - RNA, 17 nt, Human
aaacagcuaaugggaca

SEQ ID NO: 3128335 - RNA, 22 nt, Human
aacaugcuacacacugcauguu

SEQ ID NO: 3128336 - RNA, 15 nt, Human
aacauggaaguacua

SEQ ID NO: 3128337 - RNA, 13 nt, Human
aacccuucagugc

SEQ ID NO: 3128338 - RNA, 19 nt, Human
aaccaguguuguggauuua

SEQ ID NO: 3128339 - RNA, 17 nt, Human
aaccaguguuguggauu

SEQ ID NO: 3128340 - RNA, 16 nt, Human
aacagcuaaugggaca

SEQ ID NO: 3128341 - RNA, 17 nt, Human
aacucaaacucuuaaaa

SEQ ID NO: 3128342 - RNA, 17 nt, Human
aacucaccccagcccca

SEQ ID NO: 3128343 - RNA, 16 nt, Human
aacucaccccagcccc

SEQ ID NO: 3128344 - RNA, 18 nt, Human
aacucaccccagccccaa

SEQ ID NO: 3128345 - RNA, 15 nt, Human
aacucaccccagccc

SEQ ID NO: 3128346 - RNA, 14 nt, Human
aaauggacguguua

SEQ ID NO: 3128347 - RNA, 17 nt, Human
aaauggacguguuauga

SEQ ID NO: 3128348 - RNA, 15 nt, Human
aaauggacguguuau

SEQ ID NO: 3128349 - RNA, 22 nt, Human
aaaucuccaaaauaaaacuuuu

SEQ ID NO: 3128350 - RNA, 19 nt, Human
aaaucuccaaaauaaaacu

SEQ ID NO: 3128351 - RNA, 22 nt, Human
aacaaaccuguuucugcagcca

SEQ ID NO: 3128352 - RNA, 21 nt, Human
aacacauacaggaagguagaa

SEQ ID NO: 3128353 - RNA, 13 nt, Human
aaauuaacuuuua

SEQ ID NO: 3128354 - RNA, 14 nt, Human
aaauuaacuuuuau

SEQ ID NO: 3128355 - RNA, 12 nt, Human
aaauuaacuuuu

SEQ ID NO: 3128356 - RNA, 18 nt, Human
agcaaaagaugcuucuca

SEQ ID NO: 3128357 - RNA, 18 nt, Human
agauucuuuccugaggcu

SEQ ID NO: 3128358 - RNA, 21 nt, Human
agauucuuuccugaggcuggg

SEQ ID NO: 3128359 - RNA, 19 nt, Human
agauucuuuccugaggcug

SEQ ID NO: 3128360 - RNA, 19 nt, Human
agauugcaacaggcugggc

SEQ ID NO: 3128361 - RNA, 23 nt, Human
agauugcaacaggcugggcuuca

SEQ ID NO: 3128362 - RNA, 20 nt, Human
agauugcaacaggcugggcu

SEQ ID NO: 3128363 - RNA, 21 nt, Human
agauugcaacaggcugggcuu

SEQ ID NO: 3128364 - RNA, 20 nt, Human
agcaaaggagauuggaagga

SEQ ID NO: 3128365 - RNA, 14 nt, Human
agaugagugagcau

SEQ ID NO: 3128366 - RNA, 12 nt, Human
agcacagacccu

SEQ ID NO: 3128367 - RNA, 15 nt, Human
agcacagacccugcc

SEQ ID NO: 3128368 - RNA, 14 nt, Human
agcacagacccugc

SEQ ID NO: 3128369 - RNA, 16 nt, Human
agcacagacccugccc

SEQ ID NO: 3128370 - RNA, 17 nt, Human
agcacgauuucuguuua

SEQ ID NO: 3128371 - RNA, 19 nt, Human
agcacgauuucuguuuaga

SEQ ID NO: 3128372 - RNA, 21 nt, Human
agcacgauuucuguuuagaua

SEQ ID NO: 3128373 - RNA, 24 nt, Human
agccccaaaacucuccucugcugc

SEQ ID NO: 3128374 - RNA, 20 nt, Human
agcccgggcucugccuccca

SEQ ID NO: 3128375 - RNA, 18 nt, Human
agcccgggcucugccucc

SEQ ID NO: 3128376 - RNA, 17 nt, Human
agcccgggcucugccuc

SEQ ID NO: 3128377 - RNA, 15 nt, Human
agccccauccucugu

SEQ ID NO: 3128378 - RNA, 23 nt, Human
agccccauccucuguacagagcc

SEQ ID NO: 3128379 - RNA, 17 nt, Human
agccccauccucuguac

SEQ ID NO: 3128380 - RNA, 17 nt, Human
agccccauucugccugc

SEQ ID NO: 3128381 - RNA, 18 nt, Human
agccccauucugccugcc

SEQ ID NO: 3128382 - RNA, 19 nt, Human
agccccauucugccugccc

SEQ ID NO: 3128383 - RNA, 13 nt, Human
agcauccuggcac

SEQ ID NO: 3128384 - RNA, 23 nt, Human
agcccacgcccccacuggugaca

SEQ ID NO: 3128385 - RNA, 20 nt, Human
agcccacgcccccacuggug

SEQ ID NO: 3128386 - RNA, 14 nt, Human
agcccacgccccca

SEQ ID NO: 3128387 - RNA, 16 nt, Human
agcccaccuuggcuca

SEQ ID NO: 3128388 - RNA, 14 nt, Human
agcccaccuuggcu

SEQ ID NO: 3128389 - RNA, 15 nt, Human
agcccaccccucaac

SEQ ID NO: 3128390 - RNA, 16 nt, Human
agccagcaggcucuca

SEQ ID NO: 3128391 - RNA, 15 nt, Human
agccagaggagagag

SEQ ID NO: 3128392 - RNA, 13 nt, Human
agccagaggagag

SEQ ID NO: 3128393 - RNA, 14 nt, Human
agccagcaggcucu

SEQ ID NO: 3128394 - RNA, 17 nt, Human
agccagaggagagagga

SEQ ID NO: 3128395 - RNA, 14 nt, Human
agcauccuggcacc

SEQ ID NO: 3128396 - RNA, 17 nt, Human
agcauccuggcacccgg

SEQ ID NO: 3128397 - RNA, 16 nt, Human
agccaaagcuaggccu

SEQ ID NO: 3128398 - RNA, 14 nt, Human
agaggacuuuucuu

SEQ ID NO: 3128399 - RNA, 21 nt, Human
agaggacuuuucuuuguggcu

SEQ ID NO: 3128400 - RNA, 22 nt, Human
agaggacuuuucuuuguggcuu

SEQ ID NO: 3128401 - RNA, 19 nt, Human
agaggggguggccucccaa

SEQ ID NO: 3128402 - RNA, 17 nt, Human
agaggggguggccuccc

SEQ ID NO: 3128403 - RNA, 16 nt, Human
agagggccugcaaggg

SEQ ID NO: 3128404 - RNA, 13 nt, Human
agagggccugcaa

SEQ ID NO: 3128405 - RNA, 18 nt, Human
agacucugucucaaaaaa

SEQ ID NO: 3128406 - RNA, 13 nt, Human
agacucugucuca

SEQ ID NO: 3128407 - RNA, 22 nt, Human
agacugaguacguugugcauuu

SEQ ID NO: 3128408 - RNA, 20 nt, Human
agacugaguacguugugcau

SEQ ID NO: 3128409 - RNA, 16 nt, Human
agacgcugugcugccc

SEQ ID NO: 3128410 - RNA, 16 nt, Human
agagagaccacuuuuc

SEQ ID NO: 3128411 - RNA, 13 nt, Human
agagccagggucu

SEQ ID NO: 3128412 - RNA, 16 nt, Human
agaaugaaagggccca

SEQ ID NO: 3128413 - RNA, 18 nt, Human
agaaugaaagggcccaga

SEQ ID NO: 3128414 - RNA, 19 nt, Human
agaaugcacaaacagaggc

SEQ ID NO: 3128415 - RNA, 23 nt, Human
agaagagaaugcacaaacagagg

SEQ ID NO: 3128416 - RNA, 21 nt, Human
agaagagauugugguuucauu

SEQ ID NO: 3128417 - RNA, 21 nt, Human
acuuuccucuuuggucuacac

SEQ ID NO: 3128418 - RNA, 13 nt, Human
agaagacacugau

SEQ ID NO: 3128419 - RNA, 21 nt, Human
agaagacacugaugggcaacc

SEQ ID NO: 3128420 - RNA, 14 nt, Human
agaaguaacuuacu

SEQ ID NO: 3128421 - RNA, 20 nt, Human
agacaaugacuuacuguaca

SEQ ID NO: 3128422 - RNA, 11 nt, Human
agacagagucu

SEQ ID NO: 3128423 - RNA, 13 nt, Human
agacagagcuaca

SEQ ID NO: 3128424 - RNA, 19 nt, Human
agacagagucucacuguug

SEQ ID NO: 3128425 - RNA, 20 nt, Human
agacagagucucacuguugc

SEQ ID NO: 3128426 - RNA, 15 nt, Human
agacagagcuacaca

SEQ ID NO: 3128427 - RNA, 19 nt, Human
agacaaugacuuacuguac

SEQ ID NO: 3128428 - RNA, 21 nt, Human
agacaaugacuuacuguacau

SEQ ID NO: 3128429 - RNA, 22 nt, Human
agacaaugacuuacuguacaug

SEQ ID NO: 3128430 - RNA, 21 nt, Human
agacagagucucacuguugcc

SEQ ID NO: 3128431 - RNA, 15 nt, Human
agaccacguuucuaa

SEQ ID NO: 3128432 - RNA, 15 nt, Human
aggagaggagagggg

SEQ ID NO: 3128433 - RNA, 18 nt, Human
agcuucauuuccuguguc

SEQ ID NO: 3128434 - RNA, 23 nt, Human
agcuuuguuuguugucagcugaa

SEQ ID NO: 3128435 - RNA, 22 nt, Human
agcuuuguuuguugucagcuga

SEQ ID NO: 3128436 - RNA, 19 nt, Human
agcuucauuuccugugucu

SEQ ID NO: 3128437 - RNA, 22 nt, Human
aggaauaccugucccccugaca

SEQ ID NO: 3128438 - RNA, 18 nt, Human
aggaauaccugucccccu

SEQ ID NO: 3128439 - RNA, 15 nt, Human
aggaauaccuguccc

SEQ ID NO: 3128440 - RNA, 21 nt, Human
aggaacuuaaauaaugugaaa

SEQ ID NO: 3128441 - RNA, 20 nt, Human
aggaacaaggcaaggcuguc

SEQ ID NO: 3128442 - RNA, 19 nt, Human
aggaacaaggcaaggcugu

SEQ ID NO: 3128443 - RNA, 17 nt, Human
aggaacaaggcaaggcu

SEQ ID NO: 3128444 - RNA, 16 nt, Human
aggaacaaggcaaggc

SEQ ID NO: 3128445 - RNA, 13 nt, Human
aggaacaaggcaa

SEQ ID NO: 3128446 - RNA, 12 nt, Human
aggaacaaggca

SEQ ID NO: 3128447 - RNA, 15 nt, Human
agcugaaccugggua

SEQ ID NO: 3128448 - RNA, 22 nt, Human
agcugguuuuuagcggagacgg

SEQ ID NO: 3128449 - RNA, 16 nt, Human
agcugguugagguuuc

SEQ ID NO: 3128450 - RNA, 18 nt, Human
agcuggucccacucaguc

SEQ ID NO: 3128451 - RNA, 13 nt, Human
agcugcugacagu

SEQ ID NO: 3128452 - RNA, 14 nt, Human
agcugcugacagug

SEQ ID NO: 3128453 - RNA, 16 nt, Human
agcuggucccacucag

SEQ ID NO: 3128454 - RNA, 17 nt, Human
agcuggucccacucagu

SEQ ID NO: 3128455 - RNA, 13 nt, Human
agcugcgguccac

SEQ ID NO: 3128456 - RNA, 16 nt, Human
agcugcgguccaccca

SEQ ID NO: 3128457 - RNA, 17 nt, Human
agcugcgguccacccag

SEQ ID NO: 3128458 - RNA, 18 nt, Human
agcugcgguccacccagg

SEQ ID NO: 3128459 - RNA, 19 nt, Human
agcugcgguccacccagga

SEQ ID NO: 3128460 - RNA, 20 nt, Human
agcugcgguccacccaggag

SEQ ID NO: 3128461 - RNA, 12 nt, Human
agcugcugacag

SEQ ID NO: 3128462 - RNA, 19 nt, Human
agcgagcccugguggcagu

SEQ ID NO: 3128463 - RNA, 13 nt, Human
agcgagcccuggu

SEQ ID NO: 3128464 - RNA, 12 nt, Human
agccugggaggu

SEQ ID NO: 3128465 - RNA, 12 nt, Human
agcucagagagg

SEQ ID NO: 3128466 - RNA, 14 nt, Human
agcucagagagggu

SEQ ID NO: 3128467 - RNA, 18 nt, Human
agcucagagaggguggga

SEQ ID NO: 3128468 - RNA, 19 nt, Human
agcucaccagccccagugc

SEQ ID NO: 3128469 - RNA, 20 nt, Human
agcucaccagccccagugcc

SEQ ID NO: 3128470 - RNA, 15 nt, Human
agcucaccagcccca

SEQ ID NO: 3128471 - RNA, 12 nt, Human
agcucaccucuc

SEQ ID NO: 3128472 - RNA, 19 nt, Human
agcucaccucucccuugga

SEQ ID NO: 3128473 - RNA, 18 nt, Human
agcucaccucucccuugg

SEQ ID NO: 3128474 - RNA, 15 nt, Human
agcucaccucucccu

SEQ ID NO: 3128475 - RNA, 16 nt, Human
agcucaccagccccag

SEQ ID NO: 3128476 - RNA, 22 nt, Human
aggguuuugccauguuggccag

SEQ ID NO: 3128477 - RNA, 22 nt, Human
agguacgaaaagaggggaagag

SEQ ID NO: 3128478 - RNA, 16 nt, Human
agguaacaggcagaua

SEQ ID NO: 3128479 - RNA, 13 nt, Human
agguaacaggcag

SEQ ID NO: 3128480 - RNA, 14 nt, Human
agguaacaggcaga

SEQ ID NO: 3128481 - RNA, 13 nt, Human
agguacucuccug

SEQ ID NO: 3128482 - RNA, 14 nt, Human
agguacucuccugg

SEQ ID NO: 3128483 - RNA, 15 nt, Human
aggguaucuggugac

SEQ ID NO: 3128484 - RNA, 21 nt, Human
aggguaucuggugacuuuccu

SEQ ID NO: 3128485 - RNA, 13 nt, Human
aggguauuccaga

SEQ ID NO: 3128486 - RNA, 14 nt, Human
agggucccuggugg

SEQ ID NO: 3128487 - RNA, 12 nt, Human
agggucccuggu

SEQ ID NO: 3128488 - RNA, 22 nt, Human
agggucccugguggcagcucac

SEQ ID NO: 3128489 - RNA, 20 nt, Human
agggucccugguggcagcuc

SEQ ID NO: 3128490 - RNA, 17 nt, Human
agggucccugguggcag

SEQ ID NO: 3128491 - RNA, 16 nt, Human
agggucccugguggca

SEQ ID NO: 3128492 - RNA, 22 nt, Human
aggggcccaaauucuuucagug

SEQ ID NO: 3128493 - RNA, 16 nt, Human
agggauacccauccca

SEQ ID NO: 3128494 - RNA, 14 nt, Human
agggccugcaaggg

SEQ ID NO: 3128495 - RNA, 15 nt, Human
agggccugcaaggga

SEQ ID NO: 3128496 - RNA, 13 nt, Human
agggccuggccug

SEQ ID NO: 3128497 - RNA, 12 nt, Human
agggccuggccu

SEQ ID NO: 3128498 - RNA, 15 nt, Human
aggcaugguggccca

SEQ ID NO: 3128499 - RNA, 17 nt, Human
aggcaugugaugagagg

SEQ ID NO: 3128500 - RNA, 17 nt, Human
aggcauguucucugagg

SEQ ID NO: 3128501 - RNA, 21 nt, Human
aggcaugugaugagaggaaau

SEQ ID NO: 3128502 - RNA, 20 nt, Human
aggcaugugaugagaggaaa

SEQ ID NO: 3128503 - RNA, 19 nt, Human
aggcaugugaugagaggaa

SEQ ID NO: 3128504 - RNA, 18 nt, Human
aggcauguucucugagga

SEQ ID NO: 3128505 - RNA, 19 nt, Human
aggcauguucucugaggac

SEQ ID NO: 3128506 - RNA, 12 nt, Human
aggcauguucuc

SEQ ID NO: 3128507 - RNA, 17 nt, Human
aggcauuccccaggagg

SEQ ID NO: 3128508 - RNA, 18 nt, Human
aggcauuccccaggaggc

SEQ ID NO: 3128509 - RNA, 15 nt, Human
aggccaggcccucug

SEQ ID NO: 3128510 - RNA, 14 nt, Human
aggccaggcccucu

SEQ ID NO: 3128511 - RNA, 13 nt, Human
aggccaggcccuc

SEQ ID NO: 3128512 - RNA, 23 nt, Human
aggccagcugcuugggcuucauc

SEQ ID NO: 3128513 - RNA, 20 nt, Human
aggcauuccccaggaggcca

SEQ ID NO: 3128514 - RNA, 19 nt, Human
aggcauuccccaggaggcc

SEQ ID NO: 3128515 - RNA, 12 nt, Human
aggcccuucucu

SEQ ID NO: 3128516 - RNA, 19 nt, Human
aggcccuucucuccagccc

SEQ ID NO: 3128517 - RNA, 15 nt, Human
aggcccuucucucca

SEQ ID NO: 3128518 - RNA, 21 nt, Human
aggcccucugcccacucccug

SEQ ID NO: 3128519 - RNA, 23 nt, Human
aggcccucugcccacucccugca

SEQ ID NO: 3128520 - RNA, 22 nt, Human
aggcccucugcccacucccugc

SEQ ID NO: 3128521 - RNA, 18 nt, Human
aggcuggguucugauccu

SEQ ID NO: 3128522 - RNA, 13 nt, Human
aggcuaccuuugu

SEQ ID NO: 3128523 - RNA, 14 nt, Human
aggcuaccuuugua

SEQ ID NO: 3128524 - RNA, 15 nt, Human
aggcuaccuuuguau

SEQ ID NO: 3128525 - RNA, 17 nt, Human
aggcuuagucacugaga

SEQ ID NO: 3128526 - RNA, 22 nt, Human
aggcuguaucccaugagccuca

SEQ ID NO: 3128527 - RNA, 20 nt, Human
aggcuguaucccaugagccu

SEQ ID NO: 3128528 - RNA, 21 nt, Human
aggcuguaucccaugagccuc

SEQ ID NO: 3128529 - RNA, 18 nt, Human
aggcuuagucacugagac

SEQ ID NO: 3128530 - RNA, 15 nt, Human
agggacccuccacca

SEQ ID NO: 3128531 - RNA, 22 nt, Human
aguccucuuuucugagaggacu

SEQ ID NO: 3128532 - RNA, 20 nt, Human
aguccuuaccagcagagcac

SEQ ID NO: 3128533 - RNA, 19 nt, Human
aguccucuuuucugagagg

SEQ ID NO: 3128534 - RNA, 19 nt, Human
aguccuuaccagcagagca

SEQ ID NO: 3128535 - RNA, 17 nt, Human
agucugaaggcuggguu

SEQ ID NO: 3128536 - RNA, 22 nt, Human
agucacacaguauuacuucugc

SEQ ID NO: 3128537 - RNA, 20 nt, Human
aguaugaggcauuuguuuga

SEQ ID NO: 3128538 - RNA, 21 nt, Human
aguaugaggcauuuguuugaa

SEQ ID NO: 3128539 - RNA, 23 nt, Human
aguaugaggcauuuguuugaacu

SEQ ID NO: 3128540 - RNA, 17 nt, Human
aguaugaggcauuuguu

SEQ ID NO: 3128541 - RNA, 18 nt, Human
aguacguugugcauuugg

SEQ ID NO: 3128542 - RNA, 16 nt, Human
aguacguugugcauuu

SEQ ID NO: 3128543 - RNA, 17 nt, Human
aguacguugugcauuug

SEQ ID NO: 3128544 - RNA, 14 nt, Human
aguacuauaauuua

SEQ ID NO: 3128545 - RNA, 22 nt, Human
aguacuacaguccucccaucuc

SEQ ID NO: 3128546 - RNA, 19 nt, Human
aguacuacaguccucccau

SEQ ID NO: 3128547 - RNA, 17 nt, Human
aguacuucuccacccug

SEQ ID NO: 3128548 - RNA, 12 nt, Human
aguacuucuuuu

SEQ ID NO: 3128549 - RNA, 22 nt, Human
aguacuucuccacccugcucuc

SEQ ID NO: 3128550 - RNA, 12 nt, Human
aguacuauguau

SEQ ID NO: 3128551 - RNA, 14 nt, Human
aguacuauguauca

SEQ ID NO: 3128552 - RNA, 15 nt, Human
aguacguugugcauu

SEQ ID NO: 3128553 - RNA, 14 nt, Human
aguacguugugcau

SEQ ID NO: 3128554 - RNA, 16 nt, Human
aggucuguucuuucca

SEQ ID NO: 3128555 - RNA, 13 nt, Human
aggucuguucuuu

SEQ ID NO: 3128556 - RNA, 15 nt, Human
aggucuguucuuucc

SEQ ID NO: 3128557 - RNA, 16 nt, Human
agugggagcugccugu

SEQ ID NO: 3128558 - RNA, 14 nt, Human
agugauucuccugc

SEQ ID NO: 3128559 - RNA, 18 nt, Human
agugccuuacacaauggu

SEQ ID NO: 3128560 - RNA, 15 nt, Human
agugauucuccugcc

SEQ ID NO: 3128561 - RNA, 17 nt, Human
agugauucuccugccuc

SEQ ID NO: 3128562 - RNA, 14 nt, Human
agugauccucccac

SEQ ID NO: 3128563 - RNA, 15 nt, Human
agugauccucccacc

SEQ ID NO: 3128564 - RNA, 18 nt, Human
agugauccucccaccuca

SEQ ID NO: 3128565 - RNA, 23 nt, Human
agugauccucccaccucagccuc

SEQ ID NO: 3128566 - RNA, 24 nt, Human
agugauccucccaccucagccucc

SEQ ID NO: 3128567 - RNA, 15 nt, Human
agugccuuauggaac

SEQ ID NO: 3128568 - RNA, 14 nt, Human
agugccuuauggaa

SEQ ID NO: 3128569 - RNA, 13 nt, Human
agugccuuaugga

SEQ ID NO: 3128570 - RNA, 10 nt, Human
agugccuuau

SEQ ID NO: 3128571 - RNA, 16 nt, Human
agugccuuauggaaca

SEQ ID NO: 3128572 - RNA, 16 nt, Human
aguugauacuacaguu

SEQ ID NO: 3128573 - RNA, 13 nt, Human
aguucaucuugaa

SEQ ID NO: 3128574 - RNA, 19 nt, Human
aguucaucuugaauuguaa

SEQ ID NO: 3128575 - RNA, 15 nt, Human
aguucaucuugaauu

SEQ ID NO: 3128576 - RNA, 16 nt, Human
auaccugucccccuga

SEQ ID NO: 3128577 - RNA, 15 nt, Human
auaccugucccccug

SEQ ID NO: 3128578 - RNA, 14 nt, Human
auaccugucccccu

SEQ ID NO: 3128579 - RNA, 13 nt, Human
auaccuguccccc

SEQ ID NO: 3128580 - RNA, 14 nt, Human
auacaaugcugugc

SEQ ID NO: 3128581 - RNA, 13 nt, Human
auacacuuacacu

SEQ ID NO: 3128582 - RNA, 22 nt, Human
auacacuuacacuuuaugcaca

SEQ ID NO: 3128583 - RNA, 13 nt, Human
auacccaccccca

SEQ ID NO: 3128584 - RNA, 16 nt, Human
auacccacccccaccc

SEQ ID NO: 3128585 - RNA, 14 nt, Human
auacccacccccac

SEQ ID NO: 3128586 - RNA, 17 nt, Human
auacccacccccaccca

SEQ ID NO: 3128587 - RNA, 18 nt, Human
auaaggguaucuggugac

SEQ ID NO: 3128588 - RNA, 12 nt, Human
auaacauguaau

SEQ ID NO: 3128589 - RNA, 13 nt, Human
auaacauguaauu

SEQ ID NO: 3128590 - RNA, 18 nt, Human
auaacauguaauuaagua

SEQ ID NO: 3128591 - RNA, 22 nt, Human
aguuguuacauuuuuaagugcu

SEQ ID NO: 3128592 - RNA, 19 nt, Human
aguuguuacauuuuuaagu

SEQ ID NO: 3128593 - RNA, 20 nt, Human
aguuguuacauuuuuaagug

SEQ ID NO: 3128594 - RNA, 17 nt, Human
aguuugauuaaauucuu

SEQ ID NO: 3128595 - RNA, 18 nt, Human
aguuugauuaaauucuug

SEQ ID NO: 3128596 - RNA, 20 nt, Human
aguuugauuaaauucuugca

SEQ ID NO: 3128597 - RNA, 22 nt, Human
aguuugauuaaauucuugcaaa

SEQ ID NO: 3128598 - RNA, 19 nt, Human
aguuugagaucagccuggg

SEQ ID NO: 3128599 - RNA, 18 nt, Human
aguuugagaucagccugg

SEQ ID NO: 3128600 - RNA, 16 nt, Human
aguuugauuaaauucu

SEQ ID NO: 3128601 - RNA, 20 nt, Human
aguuugagaucagccugggc

SEQ ID NO: 3128602 - RNA, 23 nt, Human
aguuugauuaaauucuugcaaag

SEQ ID NO: 3128603 - RNA, 15 nt, Human
auagcacagacccug

SEQ ID NO: 3128604 - RNA, 18 nt, Human
auagcacagacccugccc

SEQ ID NO: 3128605 - RNA, 17 nt, Human
auagcacagacccugcc

SEQ ID NO: 3128606 - RNA, 15 nt, Human
auagccuaggugaca

SEQ ID NO: 3128607 - RNA, 17 nt, Human
auagccuaggugacaga

SEQ ID NO: 3128608 - RNA, 20 nt, Human
auaugcucugcauguuacau

SEQ ID NO: 3128609 - RNA, 22 nt, Human
auaugcacacauuuuuuaaaug

SEQ ID NO: 3128610 - RNA, 16 nt, Human
auaugcucugcauguu

SEQ ID NO: 3128611 - RNA, 17 nt, Human
auaugcucugcauguua

SEQ ID NO: 3128612 - RNA, 17 nt, Human
auauucaggaagcucag

SEQ ID NO: 3128613 - RNA, 19 nt, Human
auauucaggaagcucaggg

SEQ ID NO: 3128614 - RNA, 17 nt, Human
auccucauacccacccc

SEQ ID NO: 3128615 - RNA, 19 nt, Human
auccagacccggcugcgug

SEQ ID NO: 3128616 - RNA, 19 nt, Human
aucccaugagccucagcau

SEQ ID NO: 3128617 - RNA, 20 nt, Human
aucaccaacgucugugccau

SEQ ID NO: 3128618 - RNA, 13 nt, Human
aucaccagacagg

SEQ ID NO: 3128619 - RNA, 23 nt, Human
aucaaagagguuuuaaaaaaauc

SEQ ID NO: 3128620 - RNA, 20 nt, Human
aucaaagagguuuuaaaaaa

SEQ ID NO: 3128621 - RNA, 24 nt, Human
aucaaaagguuaauaaaguaauua

SEQ ID NO: 3128622 - RNA, 14 nt, Human
aucaugucuggcua

SEQ ID NO: 3128623 - RNA, 14 nt, Human
augaaaacacauuu

SEQ ID NO: 3128624 - RNA, 15 nt, Human
augaaaacacauuuu

SEQ ID NO: 3128625 - RNA, 16 nt, Human
augaaaacacauuuuu

SEQ ID NO: 3128626 - RNA, 13 nt, Human
augaggcauuugu

SEQ ID NO: 3128627 - RNA, 14 nt, Human
augaggcauuuguu

SEQ ID NO: 3128628 - RNA, 21 nt, Human
augaggcauuuguuugaacug

SEQ ID NO: 3128629 - RNA, 16 nt, Human
augcugcccugugagu

SEQ ID NO: 3128630 - RNA, 15 nt, Human
augcugcccugugag

SEQ ID NO: 3128631 - RNA, 14 nt, Human
augcugcccuguga

SEQ ID NO: 3128632 - RNA, 12 nt, Human
augcugcccugu

SEQ ID NO: 3128633 - RNA, 13 nt, Human
augcugcccugug

SEQ ID NO: 3128634 - RNA, 16 nt, Human
auggcuuuugugcauu

SEQ ID NO: 3128635 - RNA, 17 nt, Human
auggcuuuugugcauua

SEQ ID NO: 3128636 - RNA, 16 nt, Human
augcuuguacauaaug

SEQ ID NO: 3128637 - RNA, 15 nt, Human
augcuuguacauaau

SEQ ID NO: 3128638 - RNA, 15 nt, Human
augcacacauuuuuu

SEQ ID NO: 3128639 - RNA, 18 nt, Human
augcacagaguuguuaca

SEQ ID NO: 3128640 - RNA, 13 nt, Human
augcacacauuuu

SEQ ID NO: 3128641 - RNA, 14 nt, Human
augcacacauuuuu

SEQ ID NO: 3128642 - RNA, 19 nt, Human
augcacagaguuguuacau

SEQ ID NO: 3128643 - RNA, 21 nt, Human
augcacagaguuguuacauuu

SEQ ID NO: 3128644 - RNA, 22 nt, Human
augcacagaguuguuacauuuu

SEQ ID NO: 3128645 - RNA, 20 nt, Human
augccuggauggggcugcac

SEQ ID NO: 3128646 - RNA, 19 nt, Human
augccuggauggggcugca

SEQ ID NO: 3128647 - RNA, 17 nt, Human
augaucuuugcagacag

SEQ ID NO: 3128648 - RNA, 18 nt, Human
augaucuucuuuauaauu

SEQ ID NO: 3128649 - RNA, 18 nt, Human
augaucuuugcagacagg

SEQ ID NO: 3128650 - RNA, 19 nt, Human
augaucuuugcagacaggc

SEQ ID NO: 3128651 - RNA, 21 nt, Human
augaucuuugcagacaggcaa

SEQ ID NO: 3128652 - RNA, 15 nt, Human
augaugauccuaggc

SEQ ID NO: 3128653 - RNA, 23 nt, Human
augaugaaaugaggucagagccu

SEQ ID NO: 3128654 - RNA, 18 nt, Human
augaugaaaugaggucag

SEQ ID NO: 3128655 - RNA, 18 nt, Human
augcacaaacagaggccg

SEQ ID NO: 3128656 - RNA, 14 nt, Human
auguuugccucugc

SEQ ID NO: 3128657 - RNA, 15 nt, Human
auguuugccucugcc

SEQ ID NO: 3128658 - RNA, 17 nt, Human
auguuugccucugccuc

SEQ ID NO: 3128659 - RNA, 15 nt, Human
auguucugggacaca

SEQ ID NO: 3128660 - RNA, 14 nt, Human
auguucugggacac

SEQ ID NO: 3128661 - RNA, 13 nt, Human
auguucucugagg

SEQ ID NO: 3128662 - RNA, 17 nt, Human
auguucucucuucucca

SEQ ID NO: 3128663 - RNA, 16 nt, Human
auguucucucuucucc

SEQ ID NO: 3128664 - RNA, 13 nt, Human
auguguaaguauu

SEQ ID NO: 3128665 - RNA, 23 nt, Human
augggugcuuggaggaaggaaac

SEQ ID NO: 3128666 - RNA, 21 nt, Human
augggugcuuggaggaaggaa

SEQ ID NO: 3128667 - RNA, 20 nt, Human
augggugcuuggaggaagga

SEQ ID NO: 3128668 - RNA, 23 nt, Human
auguaauuaaguacuauguauca

SEQ ID NO: 3128669 - RNA, 13 nt, Human
augucacaggcag

SEQ ID NO: 3128670 - RNA, 17 nt, Human
augucacaggcaggucc

SEQ ID NO: 3128671 - RNA, 19 nt, Human
augucacaggcagguccag

SEQ ID NO: 3128672 - RNA, 19 nt, Human
cuccgcuuucuacccagcg

SEQ ID NO: 3128673 - RNA, 12 nt, Human
cucccaccucag

SEQ ID NO: 3128674 - RNA, 11 nt, Human
cuccaggugca

SEQ ID NO: 3128675 - RNA, 20 nt, Human
cuccacuuucuagccagagg

SEQ ID NO: 3128676 - RNA, 22 nt, Human
cuccacuuucuagccagaggag

SEQ ID NO: 3128677 - RNA, 15 nt, Human
cuccaagaccuucuc

SEQ ID NO: 3128678 - RNA, 16 nt, Human
cuccaagaccuucucc

SEQ ID NO: 3128679 - RNA, 18 nt, Human
cuccaagaccuucuccuu

SEQ ID NO: 3128680 - RNA, 17 nt, Human
cuccaagaccuucuccu

SEQ ID NO: 3128681 - RNA, 18 nt, Human
cuccagaauuucccaaag

SEQ ID NO: 3128682 - RNA, 15 nt, Human
cuccagaauuuccca

SEQ ID NO: 3128683 - RNA, 19 nt, Human
cuccagacacauguccaag

SEQ ID NO: 3128684 - RNA, 17 nt, Human
cuccagacacaugucca

SEQ ID NO: 3128685 - RNA, 16 nt, Human
cuccagacacaugucc

SEQ ID NO: 3128686 - RNA, 17 nt, Human
cucagucuggcccuucc

SEQ ID NO: 3128687 - RNA, 18 nt, Human
cucagucuggcccuuccu

SEQ ID NO: 3128688 - RNA, 13 nt, Human
cucagugccacua

SEQ ID NO: 3128689 - RNA, 12 nt, Human
cucauguucuua

SEQ ID NO: 3128690 - RNA, 14 nt, Human
cucauguucuuaau

SEQ ID NO: 3128691 - RNA, 18 nt, Human
cucauguucuuaauucuu

SEQ ID NO: 3128692 - RNA, 19 nt, Human
cucauguucuuaauucuua

SEQ ID NO: 3128693 - RNA, 23 nt, Human
cucagccucccgaauagcuggga

SEQ ID NO: 3128694 - RNA, 22 nt, Human
cucagccucccaaagugcuggg

SEQ ID NO: 3128695 - RNA, 13 nt, Human
cucagccucccga

SEQ ID NO: 3128696 - RNA, 21 nt, Human
cucagccucccaaagugcugg

SEQ ID NO: 3128697 - RNA, 14 nt, Human
cucagccucccaaa

SEQ ID NO: 3128698 - RNA, 16 nt, Human
cucagccucccaaagu

SEQ ID NO: 3128699 - RNA, 13 nt, Human
cucagccucccaa

SEQ ID NO: 3128700 - RNA, 13 nt, Human
cucaggccagcug

SEQ ID NO: 3128701 - RNA, 22 nt, Human
cucaggccagcugcuugggcuu

SEQ ID NO: 3128702 - RNA, 21 nt, Human
cucaggccagcugcuugggcu

SEQ ID NO: 3128703 - RNA, 20 nt, Human
cucaggccagcugcuugggc

SEQ ID NO: 3128704 - RNA, 14 nt, Human
cucaggccagcugc

SEQ ID NO: 3128705 - RNA, 21 nt, Human
cucaggccugggggcugggca

SEQ ID NO: 3128706 - RNA, 20 nt, Human
cucaggccugggggcugggc

SEQ ID NO: 3128707 - RNA, 14 nt, Human
cucaggccuggggg

SEQ ID NO: 3128708 - RNA, 13 nt, Human
cucaggccugggg

SEQ ID NO: 3128709 - RNA, 13 nt, Human
cucugcagcaaua

SEQ ID NO: 3128710 - RNA, 23 nt, Human
cucugcagcaauaaagcagcguu

SEQ ID NO: 3128711 - RNA, 18 nt, Human
cucugcagcaauaaagca

SEQ ID NO: 3128712 - RNA, 19 nt, Human
cucugcagcaauaaagcag

SEQ ID NO: 3128713 - RNA, 15 nt, Human
cucugguuaucuaau

SEQ ID NO: 3128714 - RNA, 19 nt, Human
cucugguccauagagagca

SEQ ID NO: 3128715 - RNA, 18 nt, Human
cucugguccauagagagc

SEQ ID NO: 3128716 - RNA, 16 nt, Human
cucugguccauagaga

SEQ ID NO: 3128717 - RNA, 17 nt, Human
cucugcugacagacaca

SEQ ID NO: 3128718 - RNA, 18 nt, Human
cucugcugacagacacag

SEQ ID NO: 3128719 - RNA, 19 nt, Human
cucugcugacagacacagg

SEQ ID NO: 3128720 - RNA, 15 nt, Human
cucugguccauagag

SEQ ID NO: 3128721 - RNA, 21 nt, Human
cucuguacagagcccacgccc

SEQ ID NO: 3128722 - RNA, 17 nt, Human
cucuguacagagcccac

SEQ ID NO: 3128723 - RNA, 14 nt, Human
cucucacuccuuga

SEQ ID NO: 3128724 - RNA, 12 nt, Human
cucucacuccuu

SEQ ID NO: 3128725 - RNA, 15 nt, Human
cucucacuccuugaa

SEQ ID NO: 3128726 - RNA, 19 nt, Human
cucucagauuguaccauug

SEQ ID NO: 3128727 - RNA, 15 nt, Human
cucugaaggacauug

SEQ ID NO: 3128728 - RNA, 21 nt, Human
cucuccgaccagacaccuuga

SEQ ID NO: 3128729 - RNA, 24 nt, Human
cucuccccagcaagugagagcugg

SEQ ID NO: 3128730 - RNA, 23 nt, Human
cugacccugcuucaaauauuucc

SEQ ID NO: 3128731 - RNA, 20 nt, Human
cugacccaugcugcccugug

SEQ ID NO: 3128732 - RNA, 19 nt, Human
cugacccaugcugcccugu

SEQ ID NO: 3128733 - RNA, 17 nt, Human
cugacccaugcugcccu

SEQ ID NO: 3128734 - RNA, 18 nt, Human
cugacccaugcugcccug

SEQ ID NO: 3128735 - RNA, 12 nt, Human
cugacagacaca

SEQ ID NO: 3128736 - RNA, 14 nt, Human
cugacagacacagg

SEQ ID NO: 3128737 - RNA, 14 nt, Human
cugaaaauguaugu

SEQ ID NO: 3128738 - RNA, 16 nt, Human
cugaaaauguaugugu

SEQ ID NO: 3128739 - RNA, 19 nt, Human
cugaaggacauugcggaca

SEQ ID NO: 3128740 - RNA, 20 nt, Human
cugaaggacauugcggacag

SEQ ID NO: 3128741 - RNA, 17 nt, Human
cugaaggccccgcccag

SEQ ID NO: 3128742 - RNA, 17 nt, Human
cugaaggcuggguucug

SEQ ID NO: 3128743 - RNA, 14 nt, Human
cugaaggccccgcc

SEQ ID NO: 3128744 - RNA, 13 nt, Human
cugaaggccccgc

SEQ ID NO: 3128745 - RNA, 14 nt, Human
ccuuuagcgcccag

SEQ ID NO: 3128746 - RNA, 20 nt, Human
ccuuuagcgcccaguugggu

SEQ ID NO: 3128747 - RNA, 20 nt, Human
ccuuuucgcaggauucuucc

SEQ ID NO: 3128748 - RNA, 12 nt, Human
ccuuuuuuauac

SEQ ID NO: 3128749 - RNA, 21 nt, Human
ccuuuuuuagaguugauacua

SEQ ID NO: 3128750 - RNA, 23 nt, Human
cgaccagacaccuugacagggca

SEQ ID NO: 3128751 - RNA, 17 nt, Human
ccuuuuuuauacauaaa

SEQ ID NO: 3128752 - RNA, 18 nt, Human
ccuuuuuuauacauaaac

SEQ ID NO: 3128753 - RNA, 20 nt, Human
ccuugccgucuaccugaggg

SEQ ID NO: 3128754 - RNA, 17 nt, Human
ccuugccgucuaccuga

SEQ ID NO: 3128755 - RNA, 15 nt, Human
ccuggccugagcugg

SEQ ID NO: 3128756 - RNA, 14 nt, Human
ccuggccugagcug

SEQ ID NO: 3128757 - RNA, 20 nt, Human
ccuucugacccaugcugccc

SEQ ID NO: 3128758 - RNA, 17 nt, Human
ccuucugacccaugcug

SEQ ID NO: 3128759 - RNA, 16 nt, Human
ccuucugacccaugcu

SEQ ID NO: 3128760 - RNA, 12 nt, Human
ccuucugaccca

SEQ ID NO: 3128761 - RNA, 22 nt, Human
ccuucuggaauaaggagaauga

SEQ ID NO: 3128762 - RNA, 23 nt, Human
ccuucugacccaugcugcccugu

SEQ ID NO: 3128763 - RNA, 22 nt, Human
ccuucugacccaugcugcccug

SEQ ID NO: 3128764 - RNA, 21 nt, Human
ccuucugacccaugcugcccu

SEQ ID NO: 3128765 - RNA, 18 nt, Human
cgaguuacagacaaagcg

SEQ ID NO: 3128766 - RNA, 17 nt, Human
cgaguuacagacaaagc

SEQ ID NO: 3128767 - RNA, 13 nt, Human
cgaguagcuggga

SEQ ID NO: 3128768 - RNA, 14 nt, Human
cgaguagcugggac

SEQ ID NO: 3128769 - RNA, 15 nt, Human
cgaguagcugggacu

SEQ ID NO: 3128770 - RNA, 12 nt, Human
cgccaaggcugg

SEQ ID NO: 3128771 - RNA, 16 nt, Human
cgccaaggcuggggga

SEQ ID NO: 3128772 - RNA, 13 nt, Human
cgccaaggcuggg

SEQ ID NO: 3128773 - RNA, 15 nt, Human
cggccuuuggcuuca

SEQ ID NO: 3128774 - RNA, 17 nt, Human
cggcucacugcagccuc

SEQ ID NO: 3128775 - RNA, 19 nt, Human
cggcucacugcagccucaa

SEQ ID NO: 3128776 - RNA, 18 nt, Human
cggcucacugcagccuca

SEQ ID NO: 3128777 - RNA, 16 nt, Human
cuaacuucaccauauu

SEQ ID NO: 3128778 - RNA, 16 nt, Human
cuaacuuuccuucauu

SEQ ID NO: 3128779 - RNA, 15 nt, Human
cuaacuucaccauau

SEQ ID NO: 3128780 - RNA, 18 nt, Human
cuaagugaggaugaaaaa

SEQ ID NO: 3128781 - RNA, 20 nt, Human
cuaagugauccucccaccuc

SEQ ID NO: 3128782 - RNA, 22 nt, Human
cuaagugauccucccaccucag

SEQ ID NO: 3128783 - RNA, 13 nt, Human
cuacaguugaaaa

SEQ ID NO: 3128784 - RNA, 17 nt, Human
cuacaguccucccaucu

SEQ ID NO: 3128785 - RNA, 16 nt, Human
cuacaguccucccauc

SEQ ID NO: 3128786 - RNA, 15 nt, Human
cuacaguccucccau

SEQ ID NO: 3128787 - RNA, 22 nt, Human
cuaguuccaccaucaagccacc

SEQ ID NO: 3128788 - RNA, 14 nt, Human
cuaguuccaccauc

SEQ ID NO: 3128789 - RNA, 20 nt, Human
cuaguuccaccaucaagcca

SEQ ID NO: 3128790 - RNA, 18 nt, Human
cuaguuccaccaucaagc

SEQ ID NO: 3128791 - RNA, 21 nt, Human
cuagggaaaaaccagcgugug

SEQ ID NO: 3128792 - RNA, 19 nt, Human
cuagggaaaaaccagcgug

SEQ ID NO: 3128793 - RNA, 14 nt, Human
cuaccugaggggcc

SEQ ID NO: 3128794 - RNA, 11 nt, Human
cuaccugaggg

SEQ ID NO: 3128795 - RNA, 19 nt, Human
cuagaaauuccccacccug

SEQ ID NO: 3128796 - RNA, 12 nt, Human
cuagcagcaggg

SEQ ID NO: 3128797 - RNA, 22 nt, Human
cuagcagcagggagggcuucug

SEQ ID NO: 3128798 - RNA, 17 nt, Human
cuagcauggcugccaau

SEQ ID NO: 3128799 - RNA, 23 nt, Human
cuagcagcagggagggcuucugc

SEQ ID NO: 3128800 - RNA, 16 nt, Human
ccgccaugcuccuggc

SEQ ID NO: 3128801 - RNA, 20 nt, Human
ccgcccaggcuuagucacug

SEQ ID NO: 3128802 - RNA, 18 nt, Human
ccgaccagacaccuugac

SEQ ID NO: 3128803 - RNA, 20 nt, Human
ccgaauagcugggacuacag

SEQ ID NO: 3128804 - RNA, 17 nt, Human
ccgaauagcugggacua

SEQ ID NO: 3128805 - RNA, 16 nt, Human
ccgacccuugccgucu

SEQ ID NO: 3128806 - RNA, 17 nt, Human
ccgccaaggcuggggga

SEQ ID NO: 3128807 - RNA, 21 nt, Human
cccuucugacccaugcugccc

SEQ ID NO: 3128808 - RNA, 23 nt, Human
cccuucugacccaugcugcccug

SEQ ID NO: 3128809 - RNA, 22 nt, Human
cccuucugacccaugcugcccu

SEQ ID NO: 3128810 - RNA, 16 nt, Human
cccuucgcuccugugu

SEQ ID NO: 3128811 - RNA, 18 nt, Human
cccuucgcuccugugucu

SEQ ID NO: 3128812 - RNA, 16 nt, Human
cccuucuaccuuccug

SEQ ID NO: 3128813 - RNA, 13 nt, Human
cccugcccugugg

SEQ ID NO: 3128814 - RNA, 12 nt, Human
cccugcccugug

SEQ ID NO: 3128815 - RNA, 11 nt, Human
cccugcccugu

SEQ ID NO: 3128816 - RNA, 14 nt, Human
cccugcccuguggg

SEQ ID NO: 3128817 - RNA, 15 nt, Human
cccugcccugugggc

SEQ ID NO: 3128818 - RNA, 20 nt, Human
cccugcccugugggccccca

SEQ ID NO: 3128819 - RNA, 16 nt, Human
cccugcccugugggcc

SEQ ID NO: 3128820 - RNA, 13 nt, Human
cccuggcagcccc

SEQ ID NO: 3128821 - RNA, 12 nt, Human
cccuggcagccc

SEQ ID NO: 3128822 - RNA, 16 nt, Human
cccuggcagccccugu

SEQ ID NO: 3128823 - RNA, 14 nt, Human
cccuggcagccccu

SEQ ID NO: 3128824 - RNA, 20 nt, Human
ccuccaagaccuucuccuuc

SEQ ID NO: 3128825 - RNA, 19 nt, Human
ccucauguucuuaauucuu

SEQ ID NO: 3128826 - RNA, 23 nt, Human
ccucccaacucaccccagcccca

SEQ ID NO: 3128827 - RNA, 22 nt, Human
ccucccaaggggcccaaauucu

SEQ ID NO: 3128828 - RNA, 13 nt, Human
ccucauguucuua

SEQ ID NO: 3128829 - RNA, 23 nt, Human
ccucagccucccaaagugcuggg

SEQ ID NO: 3128830 - RNA, 22 nt, Human
ccucagccucccgaauagcugg

SEQ ID NO: 3128831 - RNA, 11 nt, Human
ccucagccucc

SEQ ID NO: 3128832 - RNA, 22 nt, Human
ccucagccucccaaagugcugg

SEQ ID NO: 3128833 - RNA, 15 nt, Human
ccucaagagaaggca

SEQ ID NO: 3128834 - RNA, 15 nt, Human
ccucaacucuccucc

SEQ ID NO: 3128835 - RNA, 16 nt, Human
ccucaaccuccugggc

SEQ ID NO: 3128836 - RNA, 15 nt, Human
ccuggaguucugguu

SEQ ID NO: 3128837 - RNA, 17 nt, Human
ccuggaguucugguucc

SEQ ID NO: 3128838 - RNA, 16 nt, Human
ccuggaguucugguuc

SEQ ID NO: 3128839 - RNA, 13 nt, Human
ccuggaugcagcc

SEQ ID NO: 3128840 - RNA, 19 nt, Human
ccuggaugcagccucacag

SEQ ID NO: 3128841 - RNA, 17 nt, Human
ccuggaugcagccucac

SEQ ID NO: 3128842 - RNA, 14 nt, Human
ccuggaugcagccu

SEQ ID NO: 3128843 - RNA, 20 nt, Human
ccugcuggguguggcgcagc

SEQ ID NO: 3128844 - RNA, 14 nt, Human
ccugcugggugugg

SEQ ID NO: 3128845 - RNA, 12 nt, Human
ccugcugggugu

SEQ ID NO: 3128846 - RNA, 14 nt, Human
ccugcccaggcccc

SEQ ID NO: 3128847 - RNA, 15 nt, Human
ccugcccaggccccu

SEQ ID NO: 3128848 - RNA, 22 nt, Human
ccugcccaggccccugccaccc

SEQ ID NO: 3128849 - RNA, 16 nt, Human
ccugcccaggccccug

SEQ ID NO: 3128850 - RNA, 12 nt, Human
ccuggccucugc

SEQ ID NO: 3128851 - RNA, 13 nt, Human
ccuggccugagcu

SEQ ID NO: 3128852 - RNA, 15 nt, Human
ccuggccucugcacu

SEQ ID NO: 3128853 - RNA, 14 nt, Human
ccuggccucugcac

SEQ ID NO: 3128854 - RNA, 13 nt, Human
ccucuugagccuu

SEQ ID NO: 3128855 - RNA, 19 nt, Human
ccucuugagccuugaacuu

SEQ ID NO: 3128856 - RNA, 13 nt, Human
ccucuuggguuca

SEQ ID NO: 3128857 - RNA, 19 nt, Human
ccugcacuugcagacucua

SEQ ID NO: 3128858 - RNA, 22 nt, Human
ccugcacuugcagacucuacag

SEQ ID NO: 3128859 - RNA, 12 nt, Human
ccucucucaggc

SEQ ID NO: 3128860 - RNA, 17 nt, Human
ccucucucacuccuuga

SEQ ID NO: 3128861 - RNA, 15 nt, Human
ccucucucacuccuu

SEQ ID NO: 3128862 - RNA, 14 nt, Human
ccucucucacuccu

SEQ ID NO: 3128863 - RNA, 13 nt, Human
ccucucucacucc

SEQ ID NO: 3128864 - RNA, 12 nt, Human
ccucucucacuc

SEQ ID NO: 3128865 - RNA, 14 nt, Human
ccucucucaggcca

SEQ ID NO: 3128866 - RNA, 14 nt, Human
ccucugcugcuggc

SEQ ID NO: 3128867 - RNA, 13 nt, Human
ccucugcugcugg

SEQ ID NO: 3128868 - RNA, 18 nt, Human
ccucugcugcuggcuggu

SEQ ID NO: 3128869 - RNA, 17 nt, Human
ccucugcugcuggcugg

SEQ ID NO: 3128870 - RNA, 16 nt, Human
ccucugcugcuggcug

SEQ ID NO: 3128871 - RNA, 15 nt, Human
ccucugcugcuggcu

SEQ ID NO: 3128872 - RNA, 22 nt, Human
ccucugccugaagucacacagu

SEQ ID NO: 3128873 - RNA, 21 nt, Human
ccucugccugaagucacacag

SEQ ID NO: 3128874 - RNA, 17 nt, Human
ccaggcuggcgugcagu

SEQ ID NO: 3128875 - RNA, 18 nt, Human
ccaggcuggcgugcagug

SEQ ID NO: 3128876 - RNA, 16 nt, Human
ccaggcuggcgugcag

SEQ ID NO: 3128877 - RNA, 20 nt, Human
ccaggcuccuuuagcgccca

SEQ ID NO: 3128878 - RNA, 21 nt, Human
ccaggcuccuuuagcgcccag

SEQ ID NO: 3128879 - RNA, 19 nt, Human
ccaggggaaaaucagccug

SEQ ID NO: 3128880 - RNA, 13 nt, Human
ccaggggugggac

SEQ ID NO: 3128881 - RNA, 20 nt, Human
ccaggggaaaaucagccugc

SEQ ID NO: 3128882 - RNA, 17 nt, Human
ccaggggugggacaccc

SEQ ID NO: 3128883 - RNA, 14 nt, Human
ccaggggugggaca

SEQ ID NO: 3128884 - RNA, 23 nt, Human
ccaggggugggacacccugugau

SEQ ID NO: 3128885 - RNA, 17 nt, Human
ccaucccugaaggcccc

SEQ ID NO: 3128886 - RNA, 15 nt, Human
ccaucccugaaggcc

SEQ ID NO: 3128887 - RNA, 14 nt, Human
ccaucccugaaggc

SEQ ID NO: 3128888 - RNA, 23 nt, Human
ccaguuggucccccuuccaugga

SEQ ID NO: 3128889 - RNA, 15 nt, Human
ccaucccagccccaa

SEQ ID NO: 3128890 - RNA, 13 nt, Human
ccaucccagcccc

SEQ ID NO: 3128891 - RNA, 14 nt, Human
ccaucccagcccca

SEQ ID NO: 3128892 - RNA, 20 nt, Human
ccauggucggaaaacaugcu

SEQ ID NO: 3128893 - RNA, 21 nt, Human
ccaugagccucagcauccugg

SEQ ID NO: 3128894 - RNA, 23 nt, Human
ccaugagccucagcauccuggca

SEQ ID NO: 3128895 - RNA, 17 nt, Human
ccaguuggguggaugcc

SEQ ID NO: 3128896 - RNA, 19 nt, Human
ccaguuggguggaugccug

SEQ ID NO: 3128897 - RNA, 20 nt, Human
ccaguuggguggaugccugg

SEQ ID NO: 3128898 - RNA, 16 nt, Human
ccaggaaaggcuccag

SEQ ID NO: 3128899 - RNA, 15 nt, Human
ccaggaaaggcucca

SEQ ID NO: 3128900 - RNA, 14 nt, Human
ccaggaaaggcucc

SEQ ID NO: 3128901 - RNA, 12 nt, Human
ccaggaagccag

SEQ ID NO: 3128902 - RNA, 13 nt, Human
ccaggaagccagc

SEQ ID NO: 3128903 - RNA, 19 nt, Human
ccagcuuaaaggggcuaga

SEQ ID NO: 3128904 - RNA, 17 nt, Human
ccagcuguucagcuggu

SEQ ID NO: 3128905 - RNA, 22 nt, Human
ccagcucaccagccccagugcc

SEQ ID NO: 3128906 - RNA, 16 nt, Human
ccagcuguucagcugg

SEQ ID NO: 3128907 - RNA, 15 nt, Human
ccagcucaccagccc

SEQ ID NO: 3128908 - RNA, 16 nt, Human
ccagcucaccagcccc

SEQ ID NO: 3128909 - RNA, 12 nt, Human
ccagccccugga

SEQ ID NO: 3128910 - RNA, 11 nt, Human
ccagccccugg

SEQ ID NO: 3128911 - RNA, 20 nt, Human
ccagcagccuggacccugug

SEQ ID NO: 3128912 - RNA, 15 nt, Human
ccagcaggcucucag

SEQ ID NO: 3128913 - RNA, 13 nt, Human
ccagcaggcucuc

SEQ ID NO: 3128914 - RNA, 18 nt, Human
ccagaugcaccagcccuu

SEQ ID NO: 3128915 - RNA, 17 nt, Human
ccagaugcaccagcccu

SEQ ID NO: 3128916 - RNA, 15 nt, Human
ccagaugcaccagcc

SEQ ID NO: 3128917 - RNA, 16 nt, Human
ccaccuuggcucaagu

SEQ ID NO: 3128918 - RNA, 17 nt, Human
ccagagggccugcaagg

SEQ ID NO: 3128919 - RNA, 19 nt, Human
ccagagggccugcaaggga

SEQ ID NO: 3128920 - RNA, 18 nt, Human
ccagagggccugcaaggg

SEQ ID NO: 3128921 - RNA, 17 nt, Human
cccacccccacccaagg

SEQ ID NO: 3128922 - RNA, 15 nt, Human
cccacccccacccaa

SEQ ID NO: 3128923 - RNA, 12 nt, Human
cccacccccacc

SEQ ID NO: 3128924 - RNA, 18 nt, Human
cccacccaagggccuggc

SEQ ID NO: 3128925 - RNA, 18 nt, Human
cccacccugaaagcccug

SEQ ID NO: 3128926 - RNA, 22 nt, Human
cccacccaagggccuggccuga

SEQ ID NO: 3128927 - RNA, 21 nt, Human
cccacccaagggccuggccug

SEQ ID NO: 3128928 - RNA, 20 nt, Human
cccacccaagggccuggccu

SEQ ID NO: 3128929 - RNA, 19 nt, Human
cccacugcuuuuggucugu

SEQ ID NO: 3128930 - RNA, 12 nt, Human
cccacugcucug

SEQ ID NO: 3128931 - RNA, 13 nt, Human
cccacugcucugg

SEQ ID NO: 3128932 - RNA, 13 nt, Human
cccaggcuggcgu

SEQ ID NO: 3128933 - RNA, 17 nt, Human
cccaggcuggcgugcag

SEQ ID NO: 3128934 - RNA, 13 nt, Human
cccauccucugua

SEQ ID NO: 3128935 - RNA, 22 nt, Human
cccagcuuaaaggggcuagagu

SEQ ID NO: 3128936 - RNA, 23 nt, Human
cccagcucugguccauagagagc

SEQ ID NO: 3128937 - RNA, 14 nt, Human
cccgaauagcuggg

SEQ ID NO: 3128938 - RNA, 11 nt, Human
cccggcuccag

SEQ ID NO: 3128939 - RNA, 12 nt, Human
cccggcuccagg

SEQ ID NO: 3128940 - RNA, 14 nt, Human
cccggccaccugcg

SEQ ID NO: 3128941 - RNA, 13 nt, Human
cccggccaccugc

SEQ ID NO: 3128942 - RNA, 13 nt, Human
cccggcuccaggc

SEQ ID NO: 3128943 - RNA, 14 nt, Human
cccggcuccaggcu

SEQ ID NO: 3128944 - RNA, 15 nt, Human
cccggcuccaggcuc

SEQ ID NO: 3128945 - RNA, 16 nt, Human
cccggcuccaggcucc

SEQ ID NO: 3128946 - RNA, 18 nt, Human
cccuauuagagaagagau

SEQ ID NO: 3128947 - RNA, 22 nt, Human
cccgggaagggggcugggacau

SEQ ID NO: 3128948 - RNA, 23 nt, Human
ccccgacccuugccgucuaccug

SEQ ID NO: 3128949 - RNA, 22 nt, Human
cccccaaauggaaaugggcaga

SEQ ID NO: 3128950 - RNA, 21 nt, Human
ccccagcaagugagagcuggg

SEQ ID NO: 3128951 - RNA, 22 nt, Human
ccccagcaagugagagcugggu

SEQ ID NO: 3128952 - RNA, 22 nt, Human
ccccaaaacucuccucugcugc

SEQ ID NO: 3128953 - RNA, 23 nt, Human
ccccaaaacucuccucugcugcu

SEQ ID NO: 3128954 - RNA, 21 nt, Human
ccccaaaacucuccucugcug

SEQ ID NO: 3128955 - RNA, 17 nt, Human
auuacaggaaguacugg

SEQ ID NO: 3128956 - RNA, 16 nt, Human
auuacaggugugaacc

SEQ ID NO: 3128957 - RNA, 21 nt, Human
auuaggugugacugaauuucu

SEQ ID NO: 3128958 - RNA, 16 nt, Human
auuaggugugacugaa

SEQ ID NO: 3128959 - RNA, 18 nt, Human
auuaggugugacugaauu

SEQ ID NO: 3128960 - RNA, 15 nt, Human
auucauaaugacuua

SEQ ID NO: 3128961 - RNA, 14 nt, Human
auucauaaugacuu

SEQ ID NO: 3128962 - RNA, 19 nt, Human
auucauaaugacuuaagca

SEQ ID NO: 3128963 - RNA, 11 nt, Human
auucuucugcu

SEQ ID NO: 3128964 - RNA, 12 nt, Human
auucuucugcuu

SEQ ID NO: 3128965 - RNA, 11 nt, Human
auucuuuccug

SEQ ID NO: 3128966 - RNA, 14 nt, Human
auugcuacuguccu

SEQ ID NO: 3128967 - RNA, 15 nt, Human
auugcuacuguccua

SEQ ID NO: 3128968 - RNA, 17 nt, Human
auugauaugcuuauaca

SEQ ID NO: 3128969 - RNA, 20 nt, Human
auugcuacuguccuacccac

SEQ ID NO: 3128970 - RNA, 22 nt, Human
auugcuacuguccuacccaccc

SEQ ID NO: 3128971 - RNA, 21 nt, Human
auugauaagaaccuuuugagu

SEQ ID NO: 3128972 - RNA, 12 nt, Human
auugcugcuuga

SEQ ID NO: 3128973 - RNA, 23 nt, Human
auugcugauggugcaaugaccuu

SEQ ID NO: 3128974 - RNA, 14 nt, Human
auugcuugagcuca

SEQ ID NO: 3128975 - RNA, 19 nt, Human
auugcugauggugcaauga

SEQ ID NO: 3128976 - RNA, 18 nt, Human
auugcugauggugcaaug

SEQ ID NO: 3128977 - RNA, 16 nt, Human
auugcugauggugcaa

SEQ ID NO: 3128978 - RNA, 15 nt, Human
auugcugauggugca

SEQ ID NO: 3128979 - RNA, 16 nt, Human
auuguuagucucuuga

SEQ ID NO: 3128980 - RNA, 23 nt, Human
auugugucucuugguccugcugc

SEQ ID NO: 3128981 - RNA, 21 nt, Human
auugugucucuugguccugcu

SEQ ID NO: 3128982 - RNA, 18 nt, Human
caaagauauuuugcuuug

SEQ ID NO: 3128983 - RNA, 20 nt, Human
caaagauauuuugcuuugug

SEQ ID NO: 3128984 - RNA, 23 nt, Human
auuuuuuuuuccuucagugccuu

SEQ ID NO: 3128985 - RNA, 18 nt, Human
caaaagaugcuucucacu

SEQ ID NO: 3128986 - RNA, 16 nt, Human
caaaagaugcuucuca

SEQ ID NO: 3128987 - RNA, 19 nt, Human
caaaccaucauugaaaucu

SEQ ID NO: 3128988 - RNA, 21 nt, Human
caaaccaucauugaaaucuuu

SEQ ID NO: 3128989 - RNA, 15 nt, Human
caaacagaggccgcc

SEQ ID NO: 3128990 - RNA, 14 nt, Human
caaagaugcagccg

SEQ ID NO: 3128991 - RNA, 22 nt, Human
caaagauauuuugcuuugugau

SEQ ID NO: 3128992 - RNA, 23 nt, Human
caaagauauuuugcuuugugauu

SEQ ID NO: 3128993 - RNA, 22 nt, Human
caaaguacacuguuucaaacuu

SEQ ID NO: 3128994 - RNA, 17 nt, Human
caaagcagugcaugcug

SEQ ID NO: 3128995 - RNA, 15 nt, Human
caaagcagugcaugc

SEQ ID NO: 3128996 - RNA, 14 nt, Human
caaaguagaagucu

SEQ ID NO: 3128997 - RNA, 21 nt, Human
caaaguagaagucuuagaugu

SEQ ID NO: 3128998 - RNA, 20 nt, Human
caaauggaaaugggcagagc

SEQ ID NO: 3128999 - RNA, 21 nt, Human
caaauggaaaugggcagagca

SEQ ID NO: 3129000 - RNA, 13 nt, Human
auuugcuccuuuc

SEQ ID NO: 3129001 - RNA, 15 nt, Human
auuugugauacaaug

SEQ ID NO: 3129002 - RNA, 17 nt, Human
auuugugauacaaugcu

SEQ ID NO: 3129003 - RNA, 20 nt, Human
auuugugauacaaugcugug

SEQ ID NO: 3129004 - RNA, 20 nt, Human
auuuguuugaacugauaaag

SEQ ID NO: 3129005 - RNA, 22 nt, Human
auuuguuugaacugauaaagau

SEQ ID NO: 3129006 - RNA, 23 nt, Human
auuuguuugaacugauaaagaug

SEQ ID NO: 3129007 - RNA, 17 nt, Human
caccugccuguugggcc

SEQ ID NO: 3129008 - RNA, 24 nt, Human
caccugccuguugggccaggagcc

SEQ ID NO: 3129009 - RNA, 19 nt, Human
caccugccuguugggccag

SEQ ID NO: 3129010 - RNA, 14 nt, Human
caccuuggcugcag

SEQ ID NO: 3129011 - RNA, 14 nt, Human
caccuuggcucaag

SEQ ID NO: 3129012 - RNA, 15 nt, Human
caccuuggcucaagu

SEQ ID NO: 3129013 - RNA, 13 nt, Human
caccuuggcugca

SEQ ID NO: 3129014 - RNA, 14 nt, Human
caccucagccuccc

SEQ ID NO: 3129015 - RNA, 12 nt, Human
caccucagccuc

SEQ ID NO: 3129016 - RNA, 13 nt, Human
caccucagccucc

SEQ ID NO: 3129017 - RNA, 14 nt, Human
caccugccccucaa

SEQ ID NO: 3129018 - RNA, 15 nt, Human
caccugccccucaac

SEQ ID NO: 3129019 - RNA, 17 nt, Human
cacccugaaagcccuga

SEQ ID NO: 3129020 - RNA, 15 nt, Human
cacccuggggagaaa

SEQ ID NO: 3129021 - RNA, 16 nt, Human
cacccuggggagaaag

SEQ ID NO: 3129022 - RNA, 14 nt, Human
cacccucaggcagg

SEQ ID NO: 3129023 - RNA, 11 nt, Human
caccccagccc

SEQ ID NO: 3129024 - RNA, 16 nt, Human
cacuuacacuuuaugc

SEQ ID NO: 3129025 - RNA, 18 nt, Human
cacuuacacuuuaugcac

SEQ ID NO: 3129026 - RNA, 19 nt, Human
cacugcacuauagccuagg

SEQ ID NO: 3129027 - RNA, 16 nt, Human
cacugcacuccagccu

SEQ ID NO: 3129028 - RNA, 15 nt, Human
cacugcacuccagcc

SEQ ID NO: 3129029 - RNA, 18 nt, Human
cacugcacuccagccugg

SEQ ID NO: 3129030 - RNA, 19 nt, Human
cacugcacuccagccuggg

SEQ ID NO: 3129031 - RNA, 20 nt, Human
cacugcacuccagccugggu

SEQ ID NO: 3129032 - RNA, 12 nt, Human
cacugcagccuc

SEQ ID NO: 3129033 - RNA, 13 nt, Human
cacugcagccuca

SEQ ID NO: 3129034 - RNA, 16 nt, Human
cacugcauguuuguga

SEQ ID NO: 3129035 - RNA, 16 nt, Human
cacuccagccugggug

SEQ ID NO: 3129036 - RNA, 13 nt, Human
cacuccccugcug

SEQ ID NO: 3129037 - RNA, 12 nt, Human
cacuccccugcu

SEQ ID NO: 3129038 - RNA, 14 nt, Human
cacuccccugcugg

SEQ ID NO: 3129039 - RNA, 19 nt, Human
caauaaagcagcguuucua

SEQ ID NO: 3129040 - RNA, 13 nt, Human
caagcucugcucc

SEQ ID NO: 3129041 - RNA, 12 nt, Human
caagcuccaagc

SEQ ID NO: 3129042 - RNA, 14 nt, Human
caagcucugcuccu

SEQ ID NO: 3129043 - RNA, 13 nt, Human
caagcugcacccu

SEQ ID NO: 3129044 - RNA, 18 nt, Human
caagcugcacccucaggc

SEQ ID NO: 3129045 - RNA, 14 nt, Human
caagcugcacccuc

SEQ ID NO: 3129046 - RNA, 18 nt, Human
caaggccaaaggaagcac

SEQ ID NO: 3129047 - RNA, 17 nt, Human
caaggccaaaggaagca

SEQ ID NO: 3129048 - RNA, 16 nt, Human
caaggccaaaggaagc

SEQ ID NO: 3129049 - RNA, 15 nt, Human
caaggccaaaggaag

SEQ ID NO: 3129050 - RNA, 17 nt, Human
caagucaagugaaaaag

SEQ ID NO: 3129051 - RNA, 13 nt, Human
caagucaagugaa

SEQ ID NO: 3129052 - RNA, 18 nt, Human
caagcgugagccacugca

SEQ ID NO: 3129053 - RNA, 20 nt, Human
cacaguauuacuucugcuac

SEQ ID NO: 3129054 - RNA, 21 nt, Human
cacaguauuacuucugcuaca

SEQ ID NO: 3129055 - RNA, 19 nt, Human
cacaguauuacuucugcua

SEQ ID NO: 3129056 - RNA, 19 nt, Human
cacaggggaaaagaggagu

SEQ ID NO: 3129057 - RNA, 18 nt, Human
cacaggggaaaagaggag

SEQ ID NO: 3129058 - RNA, 17 nt, Human
cacaggggaaaagagga

SEQ ID NO: 3129059 - RNA, 15 nt, Human
cacacauacacacac

SEQ ID NO: 3129060 - RNA, 21 nt, Human
cacacagugagucgaggacag

SEQ ID NO: 3129061 - RNA, 23 nt, Human
cacacagugagucgaggacaggg

SEQ ID NO: 3129062 - RNA, 20 nt, Human
cacacaugagcaucaggcca

SEQ ID NO: 3129063 - RNA, 18 nt, Human
cacacagugagucgagga

SEQ ID NO: 3129064 - RNA, 20 nt, Human
cacacaguauuacuucugcu

SEQ ID NO: 3129065 - RNA, 23 nt, Human
cacacaguauuacuucugcuaca

SEQ ID NO: 3129066 - RNA, 16 nt, Human
cacacagcucuguccu

SEQ ID NO: 3129067 - RNA, 22 nt, Human
cacagaaaauggaagacagcuc

SEQ ID NO: 3129068 - RNA, 20 nt, Human
cacagaaaauggaagacagc

SEQ ID NO: 3129069 - RNA, 19 nt, Human
cacagaaaauggaagacag

SEQ ID NO: 3129070 - RNA, 18 nt, Human
cacagaaaauggaagaca

SEQ ID NO: 3129071 - RNA, 22 nt, Human
cacacaugagcaucaggccagg

SEQ ID NO: 3129072 - RNA, 21 nt, Human
cacacaugagcaucaggccag

SEQ ID NO: 3129073 - RNA, 11 nt, Human
cacagccucug

SEQ ID NO: 3129074 - RNA, 13 nt, Human
cacagacccugcc

SEQ ID NO: 3129075 - RNA, 19 nt, Human
cacagacauacuaaccagc

SEQ ID NO: 3129076 - RNA, 21 nt, Human
cacagacauacuaaccagcag

SEQ ID NO: 3129077 - RNA, 19 nt, Human
cacagaaaauucuucucca

SEQ ID NO: 3129078 - RNA, 23 nt, Human
cacagaaaauggaagacagcucu

SEQ ID NO: 3129079 - RNA, 18 nt, Human
cacagacauacuaaccag

SEQ ID NO: 3129080 - RNA, 17 nt, Human
cacacagcucuguccug

SEQ ID NO: 3129081 - RNA, 20 nt, Human
cacacagcucuguccuggga

SEQ ID NO: 3129082 - RNA, 14 nt, Human
cacaagagcccagg

SEQ ID NO: 3129083 - RNA, 15 nt, Human
cacaagcuccaagcu

SEQ ID NO: 3129084 - RNA, 14 nt, Human
cacaagcuccaagc

SEQ ID NO: 3129085 - RNA, 13 nt, Human
cacaagcuccaag

SEQ ID NO: 3129086 - RNA, 16 nt, Human
cacaagagcccaggcc

SEQ ID NO: 3129087 - RNA, 21 nt, Human
cacaagcuccaagcucccagg

SEQ ID NO: 3129088 - RNA, 23 nt, Human
cacaagcuccaagcucccaggca

SEQ ID NO: 3129089 - RNA, 17 nt, Human
cacaagcuccaagcucc

SEQ ID NO: 3129090 - RNA, 23 nt, Human
cacaagcugcacccucaggcagg

SEQ ID NO: 3129091 - RNA, 17 nt, Human
cacaagcugcacccuca

SEQ ID NO: 3129092 - RNA, 11 nt, Human
caauggcagcc

SEQ ID NO: 3129093 - RNA, 12 nt, Human
caauggcagccu

SEQ ID NO: 3129094 - RNA, 21 nt, Human
cagauugcaacaggcugggcu

SEQ ID NO: 3129095 - RNA, 13 nt, Human
cagauuucacucu

SEQ ID NO: 3129096 - RNA, 18 nt, Human
cagauuucacucuccuug

SEQ ID NO: 3129097 - RNA, 19 nt, Human
cagauuugaacucuucaau

SEQ ID NO: 3129098 - RNA, 16 nt, Human
cagauuucacucuccu

SEQ ID NO: 3129099 - RNA, 15 nt, Human
cagauuucacucucc

SEQ ID NO: 3129100 - RNA, 18 nt, Human
cagcauauucaggaagcu

SEQ ID NO: 3129101 - RNA, 17 nt, Human
cagcauauucaggaagc

SEQ ID NO: 3129102 - RNA, 16 nt, Human
cagcauauucaggaag

SEQ ID NO: 3129103 - RNA, 17 nt, Human
cagcauagaaguaacuu

SEQ ID NO: 3129104 - RNA, 23 nt, Human
cagccccauucugccugcccagg

SEQ ID NO: 3129105 - RNA, 24 nt, Human
cagccccauucugccugcccaggc

SEQ ID NO: 3129106 - RNA, 19 nt, Human
cagccccauucugccugcc

SEQ ID NO: 3129107 - RNA, 20 nt, Human
cagccccauucugccugccc

SEQ ID NO: 3129108 - RNA, 22 nt, Human
cagccccauucugccugcccag

SEQ ID NO: 3129109 - RNA, 23 nt, Human
cagccgccaugcuccuggcccac

SEQ ID NO: 3129110 - RNA, 13 nt, Human
cagcccuuagcag

SEQ ID NO: 3129111 - RNA, 16 nt, Human
cagcguuucuaugaca

SEQ ID NO: 3129112 - RNA, 14 nt, Human
cagcguuucuauga

SEQ ID NO: 3129113 - RNA, 20 nt, Human
cagagacuccugcaggcagc

SEQ ID NO: 3129114 - RNA, 22 nt, Human
cagagacuccugcaggcagcca

SEQ ID NO: 3129115 - RNA, 21 nt, Human
cagagacuccugcaggcagcc

SEQ ID NO: 3129116 - RNA, 19 nt, Human
cagagacuccugcaggcag

SEQ ID NO: 3129117 - RNA, 14 nt, Human
cagagccugcaguu

SEQ ID NO: 3129118 - RNA, 22 nt, Human
cagagagggugggagugggccc

SEQ ID NO: 3129119 - RNA, 20 nt, Human
cagagagggugggagugggc

SEQ ID NO: 3129120 - RNA, 13 nt, Human
cagagaggguggg

SEQ ID NO: 3129121 - RNA, 16 nt, Human
cagagagggugggagu

SEQ ID NO: 3129122 - RNA, 22 nt, Human
cagagcuacacaggggaaaaga

SEQ ID NO: 3129123 - RNA, 17 nt, Human
cagagcuacacagggga

SEQ ID NO: 3129124 - RNA, 23 nt, Human
cagauacaggaaaagcugcugac

SEQ ID NO: 3129125 - RNA, 13 nt, Human
caggaccucaggu

SEQ ID NO: 3129126 - RNA, 13 nt, Human
caggaccagggau

SEQ ID NO: 3129127 - RNA, 16 nt, Human
caggccaggcccucug

SEQ ID NO: 3129128 - RNA, 15 nt, Human
caggccaggcccucu

SEQ ID NO: 3129129 - RNA, 14 nt, Human
caggccaggcccuc

SEQ ID NO: 3129130 - RNA, 13 nt, Human
caggccaggcccu

SEQ ID NO: 3129131 - RNA, 17 nt, Human
caggcaaugcuggcugu

SEQ ID NO: 3129132 - RNA, 21 nt, Human
caggcaaugcuggcuguuggc

SEQ ID NO: 3129133 - RNA, 19 nt, Human
caggcaaugcuggcuguug

SEQ ID NO: 3129134 - RNA, 20 nt, Human
caggcaaugcuggcuguugg

SEQ ID NO: 3129135 - RNA, 13 nt, Human
caggaggccagcc

SEQ ID NO: 3129136 - RNA, 12 nt, Human
caggaggccagc

SEQ ID NO: 3129137 - RNA, 15 nt, Human
caggccagcugcuug

SEQ ID NO: 3129138 - RNA, 13 nt, Human
caggccagcugcu

SEQ ID NO: 3129139 - RNA, 23 nt, Human
caggccagagggagugacagagg

SEQ ID NO: 3129140 - RNA, 23 nt, Human
caggaaaggcuccaggagcagcc

SEQ ID NO: 3129141 - RNA, 22 nt, Human
caggaaaggcuccaggagcagc

SEQ ID NO: 3129142 - RNA, 21 nt, Human
caggaaaggcuccaggagcag

SEQ ID NO: 3129143 - RNA, 19 nt, Human
caggaaaagcugcugacag

SEQ ID NO: 3129144 - RNA, 20 nt, Human
caggaaaagcugcugacagu

SEQ ID NO: 3129145 - RNA, 20 nt, Human
caggaaaggcuccaggagca

SEQ ID NO: 3129146 - RNA, 15 nt, Human
cagcuguucagcugg

SEQ ID NO: 3129147 - RNA, 16 nt, Human
cagcuguucagcuggu

SEQ ID NO: 3129148 - RNA, 15 nt, Human
caggcuggcgugcag

SEQ ID NO: 3129149 - RNA, 19 nt, Human
caggcugggagagccuucc

SEQ ID NO: 3129150 - RNA, 18 nt, Human
caggcugggagagccuuc

SEQ ID NO: 3129151 - RNA, 16 nt, Human
caggcugggagagccu

SEQ ID NO: 3129152 - RNA, 17 nt, Human
caggcuggcgugcagug

SEQ ID NO: 3129153 - RNA, 23 nt, Human
caggccugggggcugggcagagg

SEQ ID NO: 3129154 - RNA, 18 nt, Human
caggcuggcgugcagugg

SEQ ID NO: 3129155 - RNA, 19 nt, Human
caggcuggcgugcaguggu

SEQ ID NO: 3129156 - RNA, 22 nt, Human
caggccugggggcugggcagag

SEQ ID NO: 3129157 - RNA, 20 nt, Human
caggccugggggcugggcag

SEQ ID NO: 3129158 - RNA, 12 nt, Human
cagggcucagcg

SEQ ID NO: 3129159 - RNA, 15 nt, Human
cagggcucagcgggg

SEQ ID NO: 3129160 - RNA, 16 nt, Human
cagggagggcuucugc

SEQ ID NO: 3129161 - RNA, 15 nt, Human
caggcugggagagcc

SEQ ID NO: 3129162 - RNA, 14 nt, Human
caggcugggcuuca

SEQ ID NO: 3129163 - RNA, 15 nt, Human
caggguuggccccug

SEQ ID NO: 3129164 - RNA, 16 nt, Human
caggguuggccccugc

SEQ ID NO: 3129165 - RNA, 21 nt, Human
cagggucucuaccauccccug

SEQ ID NO: 3129166 - RNA, 22 nt, Human
cagggucucacucugucgccca

SEQ ID NO: 3129167 - RNA, 23 nt, Human
cagggucucacucugucgcccag

SEQ ID NO: 3129168 - RNA, 23 nt, Human
cagguuuuuggucugacccacug

SEQ ID NO: 3129169 - RNA, 13 nt, Human
caggugcugccau

SEQ ID NO: 3129170 - RNA, 14 nt, Human
caggugcugccauc

SEQ ID NO: 3129171 - RNA, 14 nt, Human
caggguuggccccu

SEQ ID NO: 3129172 - RNA, 17 nt, Human
caggguuggccccugcc

SEQ ID NO: 3129173 - RNA, 21 nt, Human
caggguuggccccugcccggc

SEQ ID NO: 3129174 - RNA, 18 nt, Human
caguaaaugggggugcau

SEQ ID NO: 3129175 - RNA, 19 nt, Human
caguauuacuucugcuaca

SEQ ID NO: 3129176 - RNA, 19 nt, Human
caguaaaugggggugcauu

SEQ ID NO: 3129177 - RNA, 14 nt, Human
cagucaccccggcc

SEQ ID NO: 3129178 - RNA, 17 nt, Human
cagucaccccggccacc

SEQ ID NO: 3129179 - RNA, 16 nt, Human
cagucaccccggccac

SEQ ID NO: 3129180 - RNA, 20 nt, Human
ccaauguucucucuucucca

SEQ ID NO: 3129181 - RNA, 23 nt, Human
ccaaugcacuuuguucuggcucu

SEQ ID NO: 3129182 - RNA, 22 nt, Human
ccaaugcacuuuguucuggcuc

SEQ ID NO: 3129183 - RNA, 20 nt, Human
ccaaugcacuuuguucuggc

SEQ ID NO: 3129184 - RNA, 20 nt, Human
ccaagcuggucccacucagu

SEQ ID NO: 3129185 - RNA, 14 nt, Human
ccaaagugcuggga

SEQ ID NO: 3129186 - RNA, 16 nt, Human
ccaacgucugugccau

SEQ ID NO: 3129187 - RNA, 16 nt, Human
ccaaaucauaguggcu

SEQ ID NO: 3129188 - RNA, 13 nt, Human
ccaccuuggcuca

SEQ ID NO: 3129189 - RNA, 14 nt, Human
ccaccuuggcucaa

SEQ ID NO: 3129190 - RNA, 15 nt, Human
ccaccuuggcucaag

SEQ ID NO: 3129191 - RNA, 13 nt, Human
ccaccgcagacag

SEQ ID NO: 3129192 - RNA, 18 nt, Human
ccaccgcagacaggacca

SEQ ID NO: 3129193 - RNA, 13 nt, Human
ccacccugcucuc

SEQ ID NO: 3129194 - RNA, 15 nt, Human
ccaccaucaagccac

SEQ ID NO: 3129195 - RNA, 20 nt, Human
ccaccaucaagccaccaaca

SEQ ID NO: 3129196 - RNA, 17 nt, Human
ccaccgcagacaggacc

SEQ ID NO: 3129197 - RNA, 14 nt, Human
ccaccgcagacagg

SEQ ID NO: 3129198 - RNA, 17 nt, Human
ccaccaucaagccacca

SEQ ID NO: 3129199 - RNA, 16 nt, Human
ccaccaucaagccacc

SEQ ID NO: 3129200 - RNA, 18 nt, Human
cauuaucuagauacugua

SEQ ID NO: 3129201 - RNA, 16 nt, Human
cauucuccuuguguua

SEQ ID NO: 3129202 - RNA, 21 nt, Human
cauucuccaccugccagggac

SEQ ID NO: 3129203 - RNA, 22 nt, Human
cauggccucuucagaucucuaa

SEQ ID NO: 3129204 - RNA, 22 nt, Human
cauggcugccaaugggagcuca

SEQ ID NO: 3129205 - RNA, 17 nt, Human
cauggcugccaauggga

SEQ ID NO: 3129206 - RNA, 15 nt, Human
cauguucucugagga

SEQ ID NO: 3129207 - RNA, 12 nt, Human
cauuaucuagau

SEQ ID NO: 3129208 - RNA, 16 nt, Human
cauuaucuagauacug

SEQ ID NO: 3129209 - RNA, 17 nt, Human
cauuaucuagauacugu

SEQ ID NO: 3129210 - RNA, 18 nt, Human
cauugcugggcuugucug

SEQ ID NO: 3129211 - RNA, 14 nt, Human
cauugcggacagcc

SEQ ID NO: 3129212 - RNA, 15 nt, Human
cauugcggacagcca

SEQ ID NO: 3129213 - RNA, 17 nt, Human
cauugcggacagccacg

SEQ ID NO: 3129214 - RNA, 21 nt, Human
cauugcggacagccacggcca

SEQ ID NO: 3129215 - RNA, 21 nt, Human
cauuuggugguuucagaaaug

SEQ ID NO: 3129216 - RNA, 22 nt, Human
cauuuggugguuucagaaaugu

SEQ ID NO: 3129217 - RNA, 23 nt, Human
cauuuggugguuucagaaaugug

SEQ ID NO: 3129218 - RNA, 23 nt, Human
cauuuuucuuagggaaggauaca

SEQ ID NO: 3129219 - RNA, 17 nt, Human
ccaaaaaaugcuugcuu

SEQ ID NO: 3129220 - RNA, 17 nt, Human
ccaaaacucuccucugc

SEQ ID NO: 3129221 - RNA, 16 nt, Human
cauuuauucugcucac

SEQ ID NO: 3129222 - RNA, 15 nt, Human
cauuuauucugcuca

SEQ ID NO: 3129223 - RNA, 18 nt, Human
cagucaccccggccaccu

SEQ ID NO: 3129224 - RNA, 20 nt, Human
cauauuaccacagacauacu

SEQ ID NO: 3129225 - RNA, 21 nt, Human
cauauuaccacagacauacua

SEQ ID NO: 3129226 - RNA, 17 nt, Human
cauauuaccacagacau

SEQ ID NO: 3129227 - RNA, 16 nt, Human
cauauuaccacagaca

SEQ ID NO: 3129228 - RNA, 21 nt, Human
cauaaugcgugcauaccacuu

SEQ ID NO: 3129229 - RNA, 15 nt, Human
cauacaauuccaaac

SEQ ID NO: 3129230 - RNA, 14 nt, Human
cauaaugcgugcau

SEQ ID NO: 3129231 - RNA, 17 nt, Human
cauaaugcgugcauacc

SEQ ID NO: 3129232 - RNA, 22 nt, Human
caucuuagguuggcaaaaaggc

SEQ ID NO: 3129233 - RNA, 21 nt, Human
caucuuagguuggcaaaaagg

SEQ ID NO: 3129234 - RNA, 19 nt, Human
caucugugaaaggaaagag

SEQ ID NO: 3129235 - RNA, 18 nt, Human
caucugugaaaggaaaga

SEQ ID NO: 3129236 - RNA, 23 nt, Human
cauccuggcacccggccccugcu

SEQ ID NO: 3129237 - RNA, 13 nt, Human
caucccagcccca

SEQ ID NO: 3129238 - RNA, 14 nt, Human
caucccagccccaa

SEQ ID NO: 3129239 - RNA, 16 nt, Human
caucccagccccaaug

SEQ ID NO: 3129240 - RNA, 12 nt, Human
caucccagcccc

SEQ ID NO: 3129241 - RNA, 23 nt, Human
caucaggccaggcccucugccca

SEQ ID NO: 3129242 - RNA, 22 nt, Human
caucaggccaggcccucugccc

SEQ ID NO: 3129243 - RNA, 21 nt, Human
caucaggccaggcccucugcc

SEQ ID NO: 3129244 - RNA, 20 nt, Human
caucaggccaggcccucugc

SEQ ID NO: 3129245 - RNA, 17 nt, Human
caucagcacgauuucug

SEQ ID NO: 3129246 - RNA, 18 nt, Human
caucagcacgauuucugu

SEQ ID NO: 3129247 - RNA, 13 nt, Human
caucaggccaggc

SEQ ID NO: 3129248 - RNA, 18 nt, Human
caugcugcccugugagua

SEQ ID NO: 3129249 - RNA, 16 nt, Human
caugcugcccugugag

SEQ ID NO: 3129250 - RNA, 22 nt, Human
caugcaaggucauuuuuuuuaa

SEQ ID NO: 3129251 - RNA, 15 nt, Human
caugcaaggucauuu

SEQ ID NO: 3129252 - RNA, 17 nt, Human
caugcaaggucauuuuu

SEQ ID NO: 3129253 - RNA, 18 nt, Human
caugcaaggucauuuuuu

SEQ ID NO: 3129254 - RNA, 18 nt, Human
caugacacgaauauugcu

SEQ ID NO: 3129255 - RNA, 17 nt, Human
caugacacgaauauugc

SEQ ID NO: 3129256 - RNA, 14 nt, Human
caugacacgaauau

SEQ ID NO: 3129257 - RNA, 19 nt, Human
cugagacucgcgacaaugc

SEQ ID NO: 3129258 - RNA, 17 nt, Human
cugagacucgcgacaau

SEQ ID NO: 3129259 - RNA, 15 nt, Human
cugcauguuugugau

SEQ ID NO: 3129260 - RNA, 13 nt, Human
cugcauguuacau

SEQ ID NO: 3129261 - RNA, 20 nt, Human
cugcauuuaaaagauacagu

SEQ ID NO: 3129262 - RNA, 22 nt, Human
cugcauuuaaaagauacaguua

SEQ ID NO: 3129263 - RNA, 18 nt, Human
cugcauuuaaaagauaca

SEQ ID NO: 3129264 - RNA, 15 nt, Human
cugccaaugggagcu

SEQ ID NO: 3129265 - RNA, 12 nt, Human
cugcccugugag

SEQ ID NO: 3129266 - RNA, 18 nt, Human
cugcccugugggccccca

SEQ ID NO: 3129267 - RNA, 16 nt, Human
cugcccugugggcccc

SEQ ID NO: 3129268 - RNA, 15 nt, Human
cugcccugugggccc

SEQ ID NO: 3129269 - RNA, 22 nt, Human
cugccccucaacucuccuccag

SEQ ID NO: 3129270 - RNA, 14 nt, Human
cugccccucaacuc

SEQ ID NO: 3129271 - RNA, 11 nt, Human
cugccagggac

SEQ ID NO: 3129272 - RNA, 15 nt, Human
cugccagggacagag

SEQ ID NO: 3129273 - RNA, 12 nt, Human
cugccagggaca

SEQ ID NO: 3129274 - RNA, 20 nt, Human
cugccauauucuguuggcca

SEQ ID NO: 3129275 - RNA, 21 nt, Human
cugccauauucuguuggccag

SEQ ID NO: 3129276 - RNA, 22 nt, Human
cugccauauucuguuggccagu

SEQ ID NO: 3129277 - RNA, 23 nt, Human
cugccauauucuguuggccagug

SEQ ID NO: 3129278 - RNA, 13 nt, Human
cugcuuaacuuca

SEQ ID NO: 3129279 - RNA, 13 nt, Human
cugcuucagccuc

SEQ ID NO: 3129280 - RNA, 15 nt, Human
cugcuuaacuucaca

SEQ ID NO: 3129281 - RNA, 17 nt, Human
cugcuuaacuucacaua

SEQ ID NO: 3129282 - RNA, 14 nt, Human
cugcuucagccucc

SEQ ID NO: 3129283 - RNA, 16 nt, Human
cugcuucagccucccg

SEQ ID NO: 3129284 - RNA, 22 nt, Human
cugcuuuuuaaagaaugcucuu

SEQ ID NO: 3129285 - RNA, 17 nt, Human
cuggaacacuaaugagg

SEQ ID NO: 3129286 - RNA, 16 nt, Human
cuggaaauauuaagaa

SEQ ID NO: 3129287 - RNA, 19 nt, Human
cugcuuuuuaaagaaugcu

SEQ ID NO: 3129288 - RNA, 21 nt, Human
cugcugacagacacaggcccg

SEQ ID NO: 3129289 - RNA, 23 nt, Human
cugcugacagacacaggcccggc

SEQ ID NO: 3129290 - RNA, 15 nt, Human
cugcugacagacaca

SEQ ID NO: 3129291 - RNA, 18 nt, Human
cugcugacagacacaggc

SEQ ID NO: 3129292 - RNA, 19 nt, Human
cugcugacagacacaggcc

SEQ ID NO: 3129293 - RNA, 20 nt, Human
cugcugacagacacaggccc

SEQ ID NO: 3129294 - RNA, 23 nt, Human
cugccugggaucccucauccuca

SEQ ID NO: 3129295 - RNA, 14 nt, Human
cugccuguucagcu

SEQ ID NO: 3129296 - RNA, 15 nt, Human
cugccucgaacuggc

SEQ ID NO: 3129297 - RNA, 17 nt, Human
cugccucgaacuggcug

SEQ ID NO: 3129298 - RNA, 18 nt, Human
cugccucgaacuggcugc

SEQ ID NO: 3129299 - RNA, 22 nt, Human
cugccugggaucccucauccuc

SEQ ID NO: 3129300 - RNA, 16 nt, Human
cugcuaauuccccaga

SEQ ID NO: 3129301 - RNA, 19 nt, Human
cugccuguugggccaggag

SEQ ID NO: 3129302 - RNA, 18 nt, Human
cugccuguugggccagga

SEQ ID NO: 3129303 - RNA, 14 nt, Human
cugccuguugggcc

SEQ ID NO: 3129304 - RNA, 16 nt, Human
cugccuguugggccag

SEQ ID NO: 3129305 - RNA, 15 nt, Human
cugcuacagagcaga

SEQ ID NO: 3129306 - RNA, 14 nt, Human
cugcccugugggcc

SEQ ID NO: 3129307 - RNA, 18 nt, Human
cugucagccauuccuguu

SEQ ID NO: 3129308 - RNA, 17 nt, Human
cugucauuugagcaggg

SEQ ID NO: 3129309 - RNA, 18 nt, Human
cugucauuugagcagggc

SEQ ID NO: 3129310 - RNA, 16 nt, Human
cugucauuugagcagg

SEQ ID NO: 3129311 - RNA, 18 nt, Human
cuguaggaagguuaaugu

SEQ ID NO: 3129312 - RNA, 21 nt, Human
cuguaggaagguuaauguuca

SEQ ID NO: 3129313 - RNA, 13 nt, Human
cugucgcccaguc

SEQ ID NO: 3129314 - RNA, 15 nt, Human
cugugaagagaacca

SEQ ID NO: 3129315 - RNA, 14 nt, Human
cugugcucuggaca

SEQ ID NO: 3129316 - RNA, 19 nt, Human
cugugcucuggacaggcau

SEQ ID NO: 3129317 - RNA, 21 nt, Human
cuggccccucagggucccugg

SEQ ID NO: 3129318 - RNA, 20 nt, Human
cuggccccucagggucccug

SEQ ID NO: 3129319 - RNA, 18 nt, Human
cuggccccucaggguccc

SEQ ID NO: 3129320 - RNA, 17 nt, Human
cuggccccucagggucc

SEQ ID NO: 3129321 - RNA, 11 nt, Human
cugggacacag

SEQ ID NO: 3129322 - RNA, 12 nt, Human
cugggacacagu

SEQ ID NO: 3129323 - RNA, 13 nt, Human
cugggacacaguu

SEQ ID NO: 3129324 - RNA, 13 nt, Human
cuggccccucagg

SEQ ID NO: 3129325 - RNA, 14 nt, Human
cuggcagcucagag

SEQ ID NO: 3129326 - RNA, 13 nt, Human
cuggcagcucaga

SEQ ID NO: 3129327 - RNA, 12 nt, Human
cuggcagcucag

SEQ ID NO: 3129328 - RNA, 17 nt, Human
cugggcagaaggaagac

SEQ ID NO: 3129329 - RNA, 18 nt, Human
cugggcagaaggaagacu

SEQ ID NO: 3129330 - RNA, 16 nt, Human
cugggcagaaggaaga

SEQ ID NO: 3129331 - RNA, 23 nt, Human
cuggugacuuuccucuuuggucu

SEQ ID NO: 3129332 - RNA, 16 nt, Human
cuggguguggcgcagc

SEQ ID NO: 3129333 - RNA, 17 nt, Human
cuggguguggcgcagca

SEQ ID NO: 3129334 - RNA, 22 nt, Human
cuggguggcaccagcagccugg

SEQ ID NO: 3129335 - RNA, 23 nt, Human
cuggguggcaccagcagccugga

SEQ ID NO: 3129336 - RNA, 14 nt, Human
cuggguucacugca

SEQ ID NO: 3129337 - RNA, 15 nt, Human
cuggugacuuuccuc

SEQ ID NO: 3129338 - RNA, 21 nt, Human
cuggugacuuuccucuuuggu

SEQ ID NO: 3129339 - RNA, 20 nt, Human
cuggugacuuuccucuuugg

SEQ ID NO: 3129340 - RNA, 13 nt, Human
cuuuuauaaacuu

SEQ ID NO: 3129341 - RNA, 17 nt, Human
cuuugggccuggcuccc

SEQ ID NO: 3129342 - RNA, 17 nt, Human
cuuucuacccagcgagc

SEQ ID NO: 3129343 - RNA, 15 nt, Human
cuuucuagccagagg

SEQ ID NO: 3129344 - RNA, 16 nt, Human
cuuucuagccagagga

SEQ ID NO: 3129345 - RNA, 20 nt, Human
cuuucagccaagaauucuua

SEQ ID NO: 3129346 - RNA, 23 nt, Human
cuuucagccaagaauucuuaaau

SEQ ID NO: 3129347 - RNA, 23 nt, Human
cuuucaauaggaaaaacugauuu

SEQ ID NO: 3129348 - RNA, 22 nt, Human
cuuuccugaggcugggcucccu

SEQ ID NO: 3129349 - RNA, 23 nt, Human
cuuuugcccacacuugggagcaa

SEQ ID NO: 3129350 - RNA, 18 nt, Human
cuuuugucuaugggacuc

SEQ ID NO: 3129351 - RNA, 23 nt, Human
cuuuuuuggcugcugaaggcucg

SEQ ID NO: 3129352 - RNA, 12 nt, Human
cuuuugugcauu

SEQ ID NO: 3129353 - RNA, 13 nt, Human
cuuuugugcauua

SEQ ID NO: 3129354 - RNA, 18 nt, Human
gaaaagaaaaaugagccu

SEQ ID NO: 3129355 - RNA, 21 nt, Human
gaaaauggaagacagcucuua

SEQ ID NO: 3129356 - RNA, 14 nt, Human
gaaaaacugauuuu

SEQ ID NO: 3129357 - RNA, 23 nt, Human
gaaaauggacguguuaugacucc

SEQ ID NO: 3129358 - RNA, 19 nt, Human
gaaaauggacguguuauga

SEQ ID NO: 3129359 - RNA, 15 nt, Human
gaaaauguaugugua

SEQ ID NO: 3129360 - RNA, 20 nt, Human
gaaagacuaucuaaauguug

SEQ ID NO: 3129361 - RNA, 21 nt, Human
gaaaggcuccaggagcagcca

SEQ ID NO: 3129362 - RNA, 22 nt, Human
gaaaggcuccaggagcagccac

SEQ ID NO: 3129363 - RNA, 20 nt, Human
gaaaggcuccaggagcagcc

SEQ ID NO: 3129364 - RNA, 19 nt, Human
gaaaucaccgaaaacgugg

SEQ ID NO: 3129365 - RNA, 19 nt, Human
gaaagggacuuggaagcuc

SEQ ID NO: 3129366 - RNA, 20 nt, Human
gaaagggacgcuacccggga

SEQ ID NO: 3129367 - RNA, 22 nt, Human
gaaagggacuuggaagcuccgc

SEQ ID NO: 3129368 - RNA, 16 nt, Human
cuuauggaacacucug

SEQ ID NO: 3129369 - RNA, 13 nt, Human
cuuauggaacacu

SEQ ID NO: 3129370 - RNA, 20 nt, Human
cuuauggaacacucugagac

SEQ ID NO: 3129371 - RNA, 19 nt, Human
cuuauggaacacucugaga

SEQ ID NO: 3129372 - RNA, 17 nt, Human
cuuauggaacacucuga

SEQ ID NO: 3129373 - RNA, 22 nt, Human
cuucaccuuuguccccaccgca

SEQ ID NO: 3129374 - RNA, 19 nt, Human
cuucacggaagagccuugc

SEQ ID NO: 3129375 - RNA, 15 nt, Human
cuucacggaagagcc

SEQ ID NO: 3129376 - RNA, 21 nt, Human
cuucaccuuuguccccaccgc

SEQ ID NO: 3129377 - RNA, 12 nt, Human
cugugcugaguc

SEQ ID NO: 3129378 - RNA, 14 nt, Human
cugugcugagucug

SEQ ID NO: 3129379 - RNA, 23 nt, Human
cuucccaccucucucacuccuug

SEQ ID NO: 3129380 - RNA, 21 nt, Human
cuucccaccucucucacuccu

SEQ ID NO: 3129381 - RNA, 11 nt, Human
cuucccaccuc

SEQ ID NO: 3129382 - RNA, 23 nt, Human
cuuccagugaggcucugcccuug

SEQ ID NO: 3129383 - RNA, 22 nt, Human
cuuccagugaggcucugcccuu

SEQ ID NO: 3129384 - RNA, 21 nt, Human
cuuccagugaggcucugcccu

SEQ ID NO: 3129385 - RNA, 20 nt, Human
cuucagagacuccugcaggc

SEQ ID NO: 3129386 - RNA, 19 nt, Human
cuucagagacuccugcagg

SEQ ID NO: 3129387 - RNA, 18 nt, Human
cuucagagacuccugcag

SEQ ID NO: 3129388 - RNA, 17 nt, Human
cuucagagacuccugca

SEQ ID NO: 3129389 - RNA, 16 nt, Human
cuugaagacuuuucuu

SEQ ID NO: 3129390 - RNA, 18 nt, Human
cuugaauuguaaggaaug

SEQ ID NO: 3129391 - RNA, 19 nt, Human
cuugaauuguaaggaauga

SEQ ID NO: 3129392 - RNA, 14 nt, Human
cuugacagggcaca

SEQ ID NO: 3129393 - RNA, 15 nt, Human
cuugacagggcacac

SEQ ID NO: 3129394 - RNA, 13 nt, Human
cuugacagggcac

SEQ ID NO: 3129395 - RNA, 12 nt, Human
cuuggcgcugcc

SEQ ID NO: 3129396 - RNA, 17 nt, Human
cuuggcgcugccccugg

SEQ ID NO: 3129397 - RNA, 14 nt, Human
cuuggcgcugcccc

SEQ ID NO: 3129398 - RNA, 20 nt, Human
cuucugacccaugcugcccu

SEQ ID NO: 3129399 - RNA, 22 nt, Human
cuucugacccaugcugcccugu

SEQ ID NO: 3129400 - RNA, 21 nt, Human
cuucugacccaugcugcccug

SEQ ID NO: 3129401 - RNA, 23 nt, Human
cuucuucagagacuccugcaggc

SEQ ID NO: 3129402 - RNA, 18 nt, Human
cuuccucccucccucuuu

SEQ ID NO: 3129403 - RNA, 17 nt, Human
cuuccugcaacaccuug

SEQ ID NO: 3129404 - RNA, 13 nt, Human
gagauuuacaacu

SEQ ID NO: 3129405 - RNA, 18 nt, Human
gagauugcaccacugcac

SEQ ID NO: 3129406 - RNA, 14 nt, Human
gagaggcauccagu

SEQ ID NO: 3129407 - RNA, 17 nt, Human
gagacuccugcaggcag

SEQ ID NO: 3129408 - RNA, 16 nt, Human
gagacuccugcaggca

SEQ ID NO: 3129409 - RNA, 15 nt, Human
gagacuccugcaggc

SEQ ID NO: 3129410 - RNA, 14 nt, Human
gagacuccugcagg

SEQ ID NO: 3129411 - RNA, 21 nt, Human
gagaugaugccaugggcccuc

SEQ ID NO: 3129412 - RNA, 22 nt, Human
gagaggcauccaguaucuugaa

SEQ ID NO: 3129413 - RNA, 18 nt, Human
gagcugggugucaagagg

SEQ ID NO: 3129414 - RNA, 17 nt, Human
gagcggagaaaggaagg

SEQ ID NO: 3129415 - RNA, 21 nt, Human
gagcggagaaaggaagggcug

SEQ ID NO: 3129416 - RNA, 18 nt, Human
gagcggagaaaggaaggg

SEQ ID NO: 3129417 - RNA, 20 nt, Human
gagcugccuguucagcucca

SEQ ID NO: 3129418 - RNA, 21 nt, Human
gagcugccuguucagcuccag

SEQ ID NO: 3129419 - RNA, 22 nt, Human
gagcugccuguucagcuccagc

SEQ ID NO: 3129420 - RNA, 22 nt, Human
gagccuugaacuuugaccucug

SEQ ID NO: 3129421 - RNA, 19 nt, Human
gagccuugaacuuugaccu

SEQ ID NO: 3129422 - RNA, 17 nt, Human
gagccuuccaggggugg

SEQ ID NO: 3129423 - RNA, 16 nt, Human
gagccuuccaggggug

SEQ ID NO: 3129424 - RNA, 15 nt, Human
gagccuuccaggggu

SEQ ID NO: 3129425 - RNA, 14 nt, Human
gagccuuccagggg

SEQ ID NO: 3129426 - RNA, 14 nt, Human
gagcagggcucagc

SEQ ID NO: 3129427 - RNA, 12 nt, Human
gagcaucaggcc

SEQ ID NO: 3129428 - RNA, 21 nt, Human
gagcaugccuggauggggcug

SEQ ID NO: 3129429 - RNA, 22 nt, Human
gagcaugccuggauggggcugc

SEQ ID NO: 3129430 - RNA, 15 nt, Human
gagaagcggcuggca

SEQ ID NO: 3129431 - RNA, 13 nt, Human
gagaagcggcugg

SEQ ID NO: 3129432 - RNA, 12 nt, Human
gagaaggaagcc

SEQ ID NO: 3129433 - RNA, 23 nt, Human
gacuuuucuguccgagcuuugaa

SEQ ID NO: 3129434 - RNA, 21 nt, Human
gacuuuucuuuguggcuuccu

SEQ ID NO: 3129435 - RNA, 23 nt, Human
gacuuuucuuucagccaagaauu

SEQ ID NO: 3129436 - RNA, 22 nt, Human
gacuaucuaaauguugaaagau

SEQ ID NO: 3129437 - RNA, 12 nt, Human
gacucugucuca

SEQ ID NO: 3129438 - RNA, 15 nt, Human
gaagcucagggccug

SEQ ID NO: 3129439 - RNA, 14 nt, Human
gaagcucagggccu

SEQ ID NO: 3129440 - RNA, 23 nt, Human
gaagcucagggccuggcucaggu

SEQ ID NO: 3129441 - RNA, 21 nt, Human
gaagcucagggccuggcucag

SEQ ID NO: 3129442 - RNA, 20 nt, Human
gaagcucagggccuggcuca

SEQ ID NO: 3129443 - RNA, 19 nt, Human
gaagcucagggccuggcuc

SEQ ID NO: 3129444 - RNA, 18 nt, Human
gaagcucagggccuggcu

SEQ ID NO: 3129445 - RNA, 17 nt, Human
gaagcucagggccuggc

SEQ ID NO: 3129446 - RNA, 16 nt, Human
gaagcucagggccugg

SEQ ID NO: 3129447 - RNA, 17 nt, Human
gaaggcucgagcaugcc

SEQ ID NO: 3129448 - RNA, 16 nt, Human
gaaggcucgagcaugc

SEQ ID NO: 3129449 - RNA, 20 nt, Human
gaagucuuuguacagacaac

SEQ ID NO: 3129450 - RNA, 19 nt, Human
gaagucuuuguacagacaa

SEQ ID NO: 3129451 - RNA, 18 nt, Human
gaagucuuuguacagaca

SEQ ID NO: 3129452 - RNA, 22 nt, Human
gaaugaaugucagugugacuga

SEQ ID NO: 3129453 - RNA, 18 nt, Human
gaaugaaugucaguguga

SEQ ID NO: 3129454 - RNA, 14 nt, Human
gaaugaaugucagu

SEQ ID NO: 3129455 - RNA, 11 nt, Human
gaaugaauguc

SEQ ID NO: 3129456 - RNA, 21 nt, Human
gacacacagcucuguccuggg

SEQ ID NO: 3129457 - RNA, 21 nt, Human
gaauuuugugcccccauguaa

SEQ ID NO: 3129458 - RNA, 23 nt, Human
gaauuuuggcugugucucccuuc

SEQ ID NO: 3129459 - RNA, 20 nt, Human
gaauuuugugcccccaugua

SEQ ID NO: 3129460 - RNA, 14 nt, Human
gacacacagcucug

SEQ ID NO: 3129461 - RNA, 13 nt, Human
gacacacagcucu

SEQ ID NO: 3129462 - RNA, 15 nt, Human
gacacacagcucugu

SEQ ID NO: 3129463 - RNA, 17 nt, Human
gacacacagcucugucc

SEQ ID NO: 3129464 - RNA, 18 nt, Human
gacacacagcucuguccu

SEQ ID NO: 3129465 - RNA, 19 nt, Human
gacacacagcucuguccug

SEQ ID NO: 3129466 - RNA, 19 nt, Human
gaauuuuggcugugucucc

SEQ ID NO: 3129467 - RNA, 13 nt, Human
gacacugaugggc

SEQ ID NO: 3129468 - RNA, 15 nt, Human
gacacugaugggcaa

SEQ ID NO: 3129469 - RNA, 23 nt, Human
gacagcccgggcucugccuccca

SEQ ID NO: 3129470 - RNA, 22 nt, Human
gacagcccgggcucugccuccc

SEQ ID NO: 3129471 - RNA, 21 nt, Human
gacagcccgggcucugccucc

SEQ ID NO: 3129472 - RNA, 20 nt, Human
gacagcccgggcucugccuc

SEQ ID NO: 3129473 - RNA, 11 nt, Human
gacagcuccuu

SEQ ID NO: 3129474 - RNA, 20 nt, Human
gacaggguuuugccauguug

SEQ ID NO: 3129475 - RNA, 22 nt, Human
gacaggguuuugccauguuggc

SEQ ID NO: 3129476 - RNA, 16 nt, Human
gcauaccacuuuuguu

SEQ ID NO: 3129477 - RNA, 17 nt, Human
gcauaccacuuuuguuc

SEQ ID NO: 3129478 - RNA, 20 nt, Human
gcauaccacuuuuguucuug

SEQ ID NO: 3129479 - RNA, 18 nt, Human
gcaggcucucaggccagc

SEQ ID NO: 3129480 - RNA, 23 nt, Human
gcaggcucucaggccagcugcuu

SEQ ID NO: 3129481 - RNA, 17 nt, Human
gcagcugcgguccaccc

SEQ ID NO: 3129482 - RNA, 22 nt, Human
gcaggcucucaggccagcugcu

SEQ ID NO: 3129483 - RNA, 20 nt, Human
gcaggcucucaggccagcug

SEQ ID NO: 3129484 - RNA, 18 nt, Human
gcagcccaccccucaaca

SEQ ID NO: 3129485 - RNA, 14 nt, Human
gcagccaggccaca

SEQ ID NO: 3129486 - RNA, 13 nt, Human
gcagccaggccac

SEQ ID NO: 3129487 - RNA, 16 nt, Human
gcagccacauuccuga

SEQ ID NO: 3129488 - RNA, 15 nt, Human
gcagccacauuccug

SEQ ID NO: 3129489 - RNA, 14 nt, Human
gcagccacuauugu

SEQ ID NO: 3129490 - RNA, 12 nt, Human
gcagccaggcca

SEQ ID NO: 3129491 - RNA, 12 nt, Human
gcacugacauug

SEQ ID NO: 3129492 - RNA, 19 nt, Human
gcagagcaccuuagacagu

SEQ ID NO: 3129493 - RNA, 23 nt, Human
gcagagcaccuuagacagucccu

SEQ ID NO: 3129494 - RNA, 22 nt, Human
gcagagcaccuuagacaguccc

SEQ ID NO: 3129495 - RNA, 15 nt, Human
gcagagcagagacca

SEQ ID NO: 3129496 - RNA, 14 nt, Human
gcagagcagagacc

SEQ ID NO: 3129497 - RNA, 12 nt, Human
gcagagcagaga

SEQ ID NO: 3129498 - RNA, 24 nt, Human
gcagagcaccuuagacagucccug

SEQ ID NO: 3129499 - RNA, 20 nt, Human
gcagagcagagaccaucccu

SEQ ID NO: 3129500 - RNA, 19 nt, Human
gcagagcagagaccauccc

SEQ ID NO: 3129501 - RNA, 13 nt, Human
gcaagugagagcu

SEQ ID NO: 3129502 - RNA, 21 nt, Human
gcaauaaagcagcguuucuau

SEQ ID NO: 3129503 - RNA, 22 nt, Human
gcacaagcuccaagcucccagg

SEQ ID NO: 3129504 - RNA, 21 nt, Human
gcacaagcuccaagcucccag

SEQ ID NO: 3129505 - RNA, 23 nt, Human
gcacaagcuccaagcucccaggc

SEQ ID NO: 3129506 - RNA, 14 nt, Human
gcacaagcugcacc

SEQ ID NO: 3129507 - RNA, 13 nt, Human
gcacaugccucuc

SEQ ID NO: 3129508 - RNA, 21 nt, Human
gcacaucagcacgauuucugu

SEQ ID NO: 3129509 - RNA, 19 nt, Human
gcacaucagcacgauuucu

SEQ ID NO: 3129510 - RNA, 20 nt, Human
gcacaucagcacgauuucug

SEQ ID NO: 3129511 - RNA, 21 nt, Human
gcacaugccucucucaggcca

SEQ ID NO: 3129512 - RNA, 20 nt, Human
gcacaugccucucucaggcc

SEQ ID NO: 3129513 - RNA, 19 nt, Human
gcacaugccucucucaggc

SEQ ID NO: 3129514 - RNA, 18 nt, Human
gcacaugccucucucagg

SEQ ID NO: 3129515 - RNA, 17 nt, Human
gcacaugccucucucag

SEQ ID NO: 3129516 - RNA, 14 nt, Human
gcacaugccucucu

SEQ ID NO: 3129517 - RNA, 19 nt, Human
gcaccggcuggccuggccc

SEQ ID NO: 3129518 - RNA, 23 nt, Human
gcaccggcuggccuggccccuca

SEQ ID NO: 3129519 - RNA, 21 nt, Human
gcaccggcuggccuggccccu

SEQ ID NO: 3129520 - RNA, 18 nt, Human
gcaccggcuggccuggcc

SEQ ID NO: 3129521 - RNA, 14 nt, Human
gauacccaucccau

SEQ ID NO: 3129522 - RNA, 13 nt, Human
gauacccauccca

SEQ ID NO: 3129523 - RNA, 16 nt, Human
gauacuacaguuuguu

SEQ ID NO: 3129524 - RNA, 11 nt, Human
gauacuacagu

SEQ ID NO: 3129525 - RNA, 13 nt, Human
gaggucuguucuu

SEQ ID NO: 3129526 - RNA, 14 nt, Human
gaggucuguucuuu

SEQ ID NO: 3129527 - RNA, 11 nt, Human
gaggugggagg

SEQ ID NO: 3129528 - RNA, 12 nt, Human
gaggugggaucc

SEQ ID NO: 3129529 - RNA, 13 nt, Human
gagucaccaagcc

SEQ ID NO: 3129530 - RNA, 14 nt, Human
gagucaccaagccc

SEQ ID NO: 3129531 - RNA, 16 nt, Human
gagucccaccuuggcu

SEQ ID NO: 3129532 - RNA, 20 nt, Human
gagucccaccuuggcugcag

SEQ ID NO: 3129533 - RNA, 24 nt, Human
gagugagcacuaaggugugcucug

SEQ ID NO: 3129534 - RNA, 13 nt, Human
gagucccaccuug

SEQ ID NO: 3129535 - RNA, 12 nt, Human
gagugagcuggu

SEQ ID NO: 3129536 - RNA, 11 nt, Human
gagugcaguga

SEQ ID NO: 3129537 - RNA, 12 nt, Human
gagugcagugag

SEQ ID NO: 3129538 - RNA, 20 nt, Human
gaguuugggguaugggagag

SEQ ID NO: 3129539 - RNA, 18 nt, Human
gagugccuuacacaaugg

SEQ ID NO: 3129540 - RNA, 16 nt, Human
gaguuguuacauuuuu

SEQ ID NO: 3129541 - RNA, 20 nt, Human
gaguuguuacauuuuuaagu

SEQ ID NO: 3129542 - RNA, 20 nt, Human
gauuacaggugugaaccacc

SEQ ID NO: 3129543 - RNA, 17 nt, Human
gaucucuugagccuggg

SEQ ID NO: 3129544 - RNA, 16 nt, Human
gaucucuugagccugg

SEQ ID NO: 3129545 - RNA, 12 nt, Human
gaucucuugagc

SEQ ID NO: 3129546 - RNA, 15 nt, Human
gauauuuugcuuugu

SEQ ID NO: 3129547 - RNA, 16 nt, Human
gauauuuugcuuugug

SEQ ID NO: 3129548 - RNA, 15 nt, Human
gauauuuuuuucuuu

SEQ ID NO: 3129549 - RNA, 16 nt, Human
gaugagaggaaaucac

SEQ ID NO: 3129550 - RNA, 20 nt, Human
gaugaucuuugcagacaggc

SEQ ID NO: 3129551 - RNA, 21 nt, Human
gaugaucuuugcagacaggca

SEQ ID NO: 3129552 - RNA, 14 nt, Human
gaugaucuuugcag

SEQ ID NO: 3129553 - RNA, 13 nt, Human
gggaagagacuug

SEQ ID NO: 3129554 - RNA, 13 nt, Human
gggaaggauacaa

SEQ ID NO: 3129555 - RNA, 16 nt, Human
gggacagcuccuucug

SEQ ID NO: 3129556 - RNA, 23 nt, Human
gggacagaggggguggccuccca

SEQ ID NO: 3129557 - RNA, 22 nt, Human
gggacagaggggguggccuccc

SEQ ID NO: 3129558 - RNA, 13 nt, Human
gggacagaggggg

SEQ ID NO: 3129559 - RNA, 21 nt, Human
gggacagcuccuucuguccua

SEQ ID NO: 3129560 - RNA, 14 nt, Human
aaaaaucucaaauu

SEQ ID NO: 3129561 - RNA, 15 nt, Human
aaaacaugcuacaca

SEQ ID NO: 3129562 - RNA, 21 nt, Human
aaaaccaauguucucucuucu

SEQ ID NO: 3129563 - RNA, 22 nt, Human
aaaacugcugacuguuuucucu

SEQ ID NO: 3129564 - RNA, 20 nt, Human
aaaacugcugacuguuuucu

SEQ ID NO: 3129565 - RNA, 23 nt, Human
aaaacugcugacuguuuucucuu

SEQ ID NO: 3129566 - RNA, 13 nt, Human
aaaagaugcuucu

SEQ ID NO: 3129567 - RNA, 16 nt, Human
gggcaacccccagccu

SEQ ID NO: 3129568 - RNA, 18 nt, Human
gggcaacccccagccugc

SEQ ID NO: 3129569 - RNA, 12 nt, Human
gggcagagcaga

SEQ ID NO: 3129570 - RNA, 16 nt, Human
gggcagagcagagacc

SEQ ID NO: 3129571 - RNA, 14 nt, Human
gggcagaggaaagc

SEQ ID NO: 3129572 - RNA, 22 nt, Human
gggcagagcagagaccaucccu

SEQ ID NO: 3129573 - RNA, 17 nt, Human
gggcagagcagagacca

SEQ ID NO: 3129574 - RNA, 15 nt, Human
gggauuacaggugug

SEQ ID NO: 3129575 - RNA, 19 nt, Human
gggaggccaaggugggagg

SEQ ID NO: 3129576 - RNA, 19 nt, Human
gggaggucgaggcaggagg

SEQ ID NO: 3129577 - RNA, 18 nt, Human
gggaggucgaggcaggag

SEQ ID NO: 3129578 - RNA, 17 nt, Human
gggaggucgaggcagga

SEQ ID NO: 3129579 - RNA, 17 nt, Human
gggagggcuccagacac

SEQ ID NO: 3129580 - RNA, 15 nt, Human
gggagggcuccagac

SEQ ID NO: 3129581 - RNA, 14 nt, Human
gggagggcuccaga

SEQ ID NO: 3129582 - RNA, 15 nt, Human
gggaggucgaggcag

SEQ ID NO: 3129583 - RNA, 19 nt, Human
gggccucuuaugggcuggg

SEQ ID NO: 3129584 - RNA, 20 nt, Human
gggccucuuaugggcugggu

SEQ ID NO: 3129585 - RNA, 15 nt, Human
gggccuccugugugu

SEQ ID NO: 3129586 - RNA, 13 nt, Human
gggccuccugugu

SEQ ID NO: 3129587 - RNA, 15 nt, Human
gggccucagugccac

SEQ ID NO: 3129588 - RNA, 18 nt, Human
gggcuaguugggcuuccu

SEQ ID NO: 3129589 - RNA, 15 nt, Human
gggcgggaggauguu

SEQ ID NO: 3129590 - RNA, 23 nt, Human
gggccaguuggucccccuuccau

SEQ ID NO: 3129591 - RNA, 22 nt, Human
gggccaguuggucccccuucca

SEQ ID NO: 3129592 - RNA, 18 nt, Human
gggccaguuggucccccu

SEQ ID NO: 3129593 - RNA, 14 nt, Human
gggccaguuggucc

SEQ ID NO: 3129594 - RNA, 21 nt, Human
aaaaugagccuggcaagaaug

SEQ ID NO: 3129595 - RNA, 14 nt, Human
aaaaugagccuggc

SEQ ID NO: 3129596 - RNA, 11 nt, Human
gggccaggagc

SEQ ID NO: 3129597 - RNA, 22 nt, Human
gggcuggguucuacccaggugc

SEQ ID NO: 3129598 - RNA, 20 nt, Human
gggcuggguucuacccaggu

SEQ ID NO: 3129599 - RNA, 10 nt, Human
gggcucagca

SEQ ID NO: 3129600 - RNA, 22 nt, Human
gggcugcaccggcuggccuggc

SEQ ID NO: 3129601 - RNA, 21 nt, Human
gggcugcaugcgggcuuccuc

SEQ ID NO: 3129602 - RNA, 18 nt, Human
gggcugcaugcgggcuuc

SEQ ID NO: 3129603 - RNA, 12 nt, Human
ggggacagcucc

SEQ ID NO: 3129604 - RNA, 14 nt, Human
ggggacagcuccuu

SEQ ID NO: 3129605 - RNA, 20 nt, Human
ggggacagcuccuucugucc

SEQ ID NO: 3129606 - RNA, 15 nt, Human
ggggccucagugcca

SEQ ID NO: 3129607 - RNA, 18 nt, Human
aaacaagaccacguuucu

SEQ ID NO: 3129608 - RNA, 20 nt, Human
aaacaagaccacguuucuaa

SEQ ID NO: 3129609 - RNA, 12 nt, Human
aaacacauuuuu

SEQ ID NO: 3129610 - RNA, 16 nt, Human
aaacacauuuuucuua

SEQ ID NO: 3129611 - RNA, 17 nt, Human
ggguuucuaaagcugcc

SEQ ID NO: 3129612 - RNA, 14 nt, Human
gguaacaggcagau

SEQ ID NO: 3129613 - RNA, 20 nt, Human
gguaacaggcagauacagga

SEQ ID NO: 3129614 - RNA, 13 nt, Human
gguaacaggcaga

SEQ ID NO: 3129615 - RNA, 17 nt, Human
ggguggaugccuggugg

SEQ ID NO: 3129616 - RNA, 15 nt, Human
ggguggcaccagcag

SEQ ID NO: 3129617 - RNA, 13 nt, Human
ggguggaugccug

SEQ ID NO: 3129618 - RNA, 19 nt, Human
gggugggacacccugugau

SEQ ID NO: 3129619 - RNA, 20 nt, Human
ggguggggaccucaggccug

SEQ ID NO: 3129620 - RNA, 17 nt, Human
ggguguggcgcagcaua

SEQ ID NO: 3129621 - RNA, 17 nt, Human
aaagacuaucuaaaugu

SEQ ID NO: 3129622 - RNA, 12 nt, Human
aaacuuuacuau

SEQ ID NO: 3129623 - RNA, 15 nt, Human
gguccauagagagca

SEQ ID NO: 3129624 - RNA, 17 nt, Human
aaacuuuaccuuuuuua

SEQ ID NO: 3129625 - RNA, 22 nt, Human
aaacuuuaccuuuuuuauacau

SEQ ID NO: 3129626 - RNA, 17 nt, Human
gguccacccaggagccc

SEQ ID NO: 3129627 - RNA, 12 nt, Human
gguccacccagg

SEQ ID NO: 3129628 - RNA, 13 nt, Human
gguccacccagga

SEQ ID NO: 3129629 - RNA, 15 nt, Human
gguccacccaggagc

SEQ ID NO: 3129630 - RNA, 16 nt, Human
gguccacccaggagcc

SEQ ID NO: 3129631 - RNA, 22 nt, Human
gguaugaucacggcucacugca

SEQ ID NO: 3129632 - RNA, 14 nt, Human
gguaugcaaucaaa

SEQ ID NO: 3129633 - RNA, 16 nt, Human
aaagcagcguuucuau

SEQ ID NO: 3129634 - RNA, 18 nt, Human
aaagcagcguuucuauga

SEQ ID NO: 3129635 - RNA, 22 nt, Human
aaagcagcguuucuaugacaca

SEQ ID NO: 3129636 - RNA, 21 nt, Human
gguggaugccugguggcagcu

SEQ ID NO: 3129637 - RNA, 14 nt, Human
gguggaugccuggu

SEQ ID NO: 3129638 - RNA, 15 nt, Human
aaagcagcguuucua

SEQ ID NO: 3129639 - RNA, 18 nt, Human
ggugcaaugaccuuucaa

SEQ ID NO: 3129640 - RNA, 20 nt, Human
ggugcaaugaccuuucaaua

SEQ ID NO: 3129641 - RNA, 19 nt, Human
ggugcaaugaccuuucaau

SEQ ID NO: 3129642 - RNA, 16 nt, Human
ggugcaaugaccuuuc

SEQ ID NO: 3129643 - RNA, 21 nt, Human
ggugcauuugaggucuguucu

SEQ ID NO: 3129644 - RNA, 14 nt, Human
gguccugcugcagu

SEQ ID NO: 3129645 - RNA, 13 nt, Human
ggucggaaaacau

SEQ ID NO: 3129646 - RNA, 14 nt, Human
ggucggaaaacaug

SEQ ID NO: 3129647 - RNA, 17 nt, Human
ggucuacacugugcuga

SEQ ID NO: 3129648 - RNA, 23 nt, Human
gguccuagaaauuccccacccug

SEQ ID NO: 3129649 - RNA, 23 nt, Human
gguccugcugcaguugccaguca

SEQ ID NO: 3129650 - RNA, 21 nt, Human
gguccugcugcaguugccagu

SEQ ID NO: 3129651 - RNA, 13 nt, Human
aaagcaaaggaga

SEQ ID NO: 3129652 - RNA, 21 nt, Human
aaaguuucucuuuucaaaaca

SEQ ID NO: 3129653 - RNA, 23 nt, Human
aaaguuucucuuuucaaaacauu

SEQ ID NO: 3129654 - RNA, 12 nt, Human
aaaguggugaga

SEQ ID NO: 3129655 - RNA, 12 nt, Human
aaauaaugugaa

SEQ ID NO: 3129656 - RNA, 13 nt, Human
aaauaaugugaaa

SEQ ID NO: 3129657 - RNA, 14 nt, Human
gguuucagaaaugu

SEQ ID NO: 3129658 - RNA, 12 nt, Human
gguuucagaaau

SEQ ID NO: 3129659 - RNA, 13 nt, Human
gguuucagaaaug

SEQ ID NO: 3129660 - RNA, 21 nt, Human
gguucccuuugacgccauccc

SEQ ID NO: 3129661 - RNA, 22 nt, Human
gguucaggguuggccccugccc

SEQ ID NO: 3129662 - RNA, 18 nt, Human
gguucaggguuggccccu

SEQ ID NO: 3129663 - RNA, 21 nt, Human
gguucaggguuggccccugcc

SEQ ID NO: 3129664 - RNA, 12 nt, Human
gguucagcuugu

SEQ ID NO: 3129665 - RNA, 12 nt, Human
gguguggaagag

SEQ ID NO: 3129666 - RNA, 13 nt, Human
ggugugcucugau

SEQ ID NO: 3129667 - RNA, 21 nt, Human
ggugugcggccuuuggcuuca

SEQ ID NO: 3129668 - RNA, 18 nt, Human
ggugugagucaccaagcc

SEQ ID NO: 3129669 - RNA, 16 nt, Human
ggugugacugaauuuc

SEQ ID NO: 3129670 - RNA, 16 nt, Human
ggugucgggcaugaca

SEQ ID NO: 3129671 - RNA, 13 nt, Human
ggugucgggcaug

SEQ ID NO: 3129672 - RNA, 23 nt, Human
gguggggucacucuggcagcuca

SEQ ID NO: 3129673 - RNA, 15 nt, Human
gguggggucacucug

SEQ ID NO: 3129674 - RNA, 17 nt, Human
gguggggcagcuugagg

SEQ ID NO: 3129675 - RNA, 13 nt, Human
gguggggcagcuu

SEQ ID NO: 3129676 - RNA, 19 nt, Human
ggugggauccuccaggugc

SEQ ID NO: 3129677 - RNA, 20 nt, Human
ggugggaggaucucuugagc

SEQ ID NO: 3129678 - RNA, 20 nt, Human
ggugggaggauugcuugagc

SEQ ID NO: 3129679 - RNA, 15 nt, Human
ggugggauccuccag

SEQ ID NO: 3129680 - RNA, 14 nt, Human
ggugggauccucca

SEQ ID NO: 3129681 - RNA, 14 nt, Human
ggaggugaccccag

SEQ ID NO: 3129682 - RNA, 20 nt, Human
ggaggucaaggcugcaguga

SEQ ID NO: 3129683 - RNA, 16 nt, Human
ggaggggggagguggg

SEQ ID NO: 3129684 - RNA, 19 nt, Human
ggaggaaggaaacccagcu

SEQ ID NO: 3129685 - RNA, 23 nt, Human
ggaggaaggaaacccagcucugg

SEQ ID NO: 3129686 - RNA, 20 nt, Human
ggaggaaggaaacccagcuc

SEQ ID NO: 3129687 - RNA, 11 nt, Human
ggaggccagcc

SEQ ID NO: 3129688 - RNA, 20 nt, Human
ggaggccaaggugggaggau

SEQ ID NO: 3129689 - RNA, 21 nt, Human
ggagcugccuguucagcucca

SEQ ID NO: 3129690 - RNA, 16 nt, Human
ggagcugaguggggga

SEQ ID NO: 3129691 - RNA, 12 nt, Human
ggagcugccugu

SEQ ID NO: 3129692 - RNA, 16 nt, Human
ggagccccgaggccuu

SEQ ID NO: 3129693 - RNA, 22 nt, Human
ggagccccgaggccuucucuga

SEQ ID NO: 3129694 - RNA, 15 nt, Human
ggagugcagugagcc

SEQ ID NO: 3129695 - RNA, 15 nt, Human
ggaguucugguuccu

SEQ ID NO: 3129696 - RNA, 14 nt, Human
ggaguggccacaga

SEQ ID NO: 3129697 - RNA, 16 nt, Human
ggauggggcugcaccg

SEQ ID NO: 3129698 - RNA, 18 nt, Human
ggauggauuuccagccaa

SEQ ID NO: 3129699 - RNA, 14 nt, Human
ggauccugagccag

SEQ ID NO: 3129700 - RNA, 13 nt, Human
ggauccugagcca

SEQ ID NO: 3129701 - RNA, 14 nt, Human
ggauccuccaggug

SEQ ID NO: 3129702 - RNA, 15 nt, Human
ggauccuccaggugc

SEQ ID NO: 3129703 - RNA, 18 nt, Human
ggaucucuugagccuggg

SEQ ID NO: 3129704 - RNA, 24 nt, Human
ggcacagaaaauggaagacagcuc

SEQ ID NO: 3129705 - RNA, 13 nt, Human
ggauguucuggga

SEQ ID NO: 3129706 - RNA, 16 nt, Human
ggauguucugggacac

SEQ ID NO: 3129707 - RNA, 15 nt, Human
ggauguucugggaca

SEQ ID NO: 3129708 - RNA, 18 nt, Human
ggcccuucucuccagccc

SEQ ID NO: 3129709 - RNA, 14 nt, Human
ggcccuuccuuuuc

SEQ ID NO: 3129710 - RNA, 17 nt, Human
ggcccuucucuccagcc

SEQ ID NO: 3129711 - RNA, 16 nt, Human
ggcccuucucuccagc

SEQ ID NO: 3129712 - RNA, 16 nt, Human
ggccagugugacaagg

SEQ ID NO: 3129713 - RNA, 17 nt, Human
ggccaaacucaccugcc

SEQ ID NO: 3129714 - RNA, 16 nt, Human
ggccaggcuggucuca

SEQ ID NO: 3129715 - RNA, 18 nt, Human
ggccaggcuggucucaaa

SEQ ID NO: 3129716 - RNA, 12 nt, Human
ggccaggcuggu

SEQ ID NO: 3129717 - RNA, 14 nt, Human
ggccaggcuggucu

SEQ ID NO: 3129718 - RNA, 18 nt, Human
ggcagugggagcugccug

SEQ ID NO: 3129719 - RNA, 19 nt, Human
ggcagugggagcugccugu

SEQ ID NO: 3129720 - RNA, 18 nt, Human
ggcauccaguaucuugaa

SEQ ID NO: 3129721 - RNA, 24 nt, Human
ggcacugcuuccagugaggcucug

SEQ ID NO: 3129722 - RNA, 22 nt, Human
ggcacugcuuccagugaggcuc

SEQ ID NO: 3129723 - RNA, 16 nt, Human
ggcaccagcagccugg

SEQ ID NO: 3129724 - RNA, 15 nt, Human
ggcaccagcagccug

SEQ ID NO: 3129725 - RNA, 17 nt, Human
ggcagugggagcugccu

SEQ ID NO: 3129726 - RNA, 12 nt, Human
ggccugagcugg

SEQ ID NO: 3129727 - RNA, 15 nt, Human
ggccugagcugggau

SEQ ID NO: 3129728 - RNA, 14 nt, Human
ggccuuuggcuuca

SEQ ID NO: 3129729 - RNA, 13 nt, Human
ggccuuuggcuuc

SEQ ID NO: 3129730 - RNA, 15 nt, Human
ggccuucucugaagg

SEQ ID NO: 3129731 - RNA, 16 nt, Human
ggccuucucugaagga

SEQ ID NO: 3129732 - RNA, 16 nt, Human
ggccuggccagaugca

SEQ ID NO: 3129733 - RNA, 21 nt, Human
ggccuggccagaugcaccagc

SEQ ID NO: 3129734 - RNA, 12 nt, Human
ggccuucucuga

SEQ ID NO: 3129735 - RNA, 21 nt, Human
ggccugugucuaguuguuuga

SEQ ID NO: 3129736 - RNA, 23 nt, Human
ggcucagcggggacagcuccuuc

SEQ ID NO: 3129737 - RNA, 21 nt, Human
ggcucagcggggacagcuccu

SEQ ID NO: 3129738 - RNA, 22 nt, Human
ggcucagcggggacagcuccuu

SEQ ID NO: 3129739 - RNA, 19 nt, Human
ggcucagcaaaagaugcuu

SEQ ID NO: 3129740 - RNA, 23 nt, Human
ggcucagcaaaagaugcuucuca

SEQ ID NO: 3129741 - RNA, 19 nt, Human
ggcgugcaguggugcgauc

SEQ ID NO: 3129742 - RNA, 14 nt, Human
ggcgugcaguggug

SEQ ID NO: 3129743 - RNA, 16 nt, Human
ggcucacugcagccuc

SEQ ID NO: 3129744 - RNA, 17 nt, Human
ggcucacugcagccuca

SEQ ID NO: 3129745 - RNA, 15 nt, Human
gcuuuuggucugugu

SEQ ID NO: 3129746 - RNA, 18 nt, Human
gcuuuugucuaugggacu

SEQ ID NO: 3129747 - RNA, 18 nt, Human
ggaaaauuuuaaaaauac

SEQ ID NO: 3129748 - RNA, 16 nt, Human
ggaaacccagcucugg

SEQ ID NO: 3129749 - RNA, 17 nt, Human
gcuuugaucccuucuua

SEQ ID NO: 3129750 - RNA, 14 nt, Human
gcuuugaucccuuc

SEQ ID NO: 3129751 - RNA, 20 nt, Human
ggaagacuucaucccucugg

SEQ ID NO: 3129752 - RNA, 17 nt, Human
ggaagacuucaucccuc

SEQ ID NO: 3129753 - RNA, 14 nt, Human
ggaaaugggcagag

SEQ ID NO: 3129754 - RNA, 22 nt, Human
ggaaaugggcagagcagagacc

SEQ ID NO: 3129755 - RNA, 18 nt, Human
ggaaaugggcagagcaga

SEQ ID NO: 3129756 - RNA, 17 nt, Human
ggaaaugggcagagcag

SEQ ID NO: 3129757 - RNA, 16 nt, Human
ggaaaugggcagagca

SEQ ID NO: 3129758 - RNA, 15 nt, Human
ggaacaaggcaaggc

SEQ ID NO: 3129759 - RNA, 21 nt, Human
ggaacaaggcaaggcugucaa

SEQ ID NO: 3129760 - RNA, 17 nt, Human
ggaacaaggcaaggcug

SEQ ID NO: 3129761 - RNA, 23 nt, Human
ggaacaaggcaaggcugucaauu

SEQ ID NO: 3129762 - RNA, 15 nt, Human
ggaacacuccuucac

SEQ ID NO: 3129763 - RNA, 16 nt, Human
ggaagacaaugugaaa

SEQ ID NO: 3129764 - RNA, 14 nt, Human
ggaagacaauguga

SEQ ID NO: 3129765 - RNA, 14 nt, Human
gcuucaguggcagc

SEQ ID NO: 3129766 - RNA, 14 nt, Human
gcuucaaggauccu

SEQ ID NO: 3129767 - RNA, 13 nt, Human
gcuguuggcuggg

SEQ ID NO: 3129768 - RNA, 23 nt, Human
gcugguucaggguuggccccugc

SEQ ID NO: 3129769 - RNA, 22 nt, Human
gcuuccagugaggcucugcccu

SEQ ID NO: 3129770 - RNA, 20 nt, Human
gcuugaccgugaggccagag

SEQ ID NO: 3129771 - RNA, 15 nt, Human
gcuucuucagagacu

SEQ ID NO: 3129772 - RNA, 12 nt, Human
gcuucuucagag

SEQ ID NO: 3129773 - RNA, 23 nt, Human
gcuuccagugaggcucugcccuu

SEQ ID NO: 3129774 - RNA, 18 nt, Human
gcuuguaaauagcucagg

SEQ ID NO: 3129775 - RNA, 19 nt, Human
gcuuguaaauagcucaggu

SEQ ID NO: 3129776 - RNA, 17 nt, Human
gcuuguaaauagcucag

SEQ ID NO: 3129777 - RNA, 18 nt, Human
gcuugaccuuuaagagaa

SEQ ID NO: 3129778 - RNA, 23 nt, Human
gcuugaccgugaggccagagaca

SEQ ID NO: 3129779 - RNA, 23 nt, Human
gcuuucuacccagcgagcccugg

SEQ ID NO: 3129780 - RNA, 15 nt, Human
gcugcacccucaggc

SEQ ID NO: 3129781 - RNA, 13 nt, Human
gcugcacccucag

SEQ ID NO: 3129782 - RNA, 12 nt, Human
gcugccauccag

SEQ ID NO: 3129783 - RNA, 13 nt, Human
gcugccauccagg

SEQ ID NO: 3129784 - RNA, 15 nt, Human
gcugaggugggagga

SEQ ID NO: 3129785 - RNA, 18 nt, Human
gcugcugaaggcucgagc

SEQ ID NO: 3129786 - RNA, 12 nt, Human
gcugcugacagu

SEQ ID NO: 3129787 - RNA, 17 nt, Human
gcugccauccagguuca

SEQ ID NO: 3129788 - RNA, 13 nt, Human
gcugccccuggca

SEQ ID NO: 3129789 - RNA, 16 nt, Human
gcugccccuggcagcc

SEQ ID NO: 3129790 - RNA, 15 nt, Human
gcugccccuggcagc

SEQ ID NO: 3129791 - RNA, 19 nt, Human
gcucucaggccagcugcuu

SEQ ID NO: 3129792 - RNA, 18 nt, Human
gcucucaggccagcugcu

SEQ ID NO: 3129793 - RNA, 17 nt, Human
gcucucaggccagcugc

SEQ ID NO: 3129794 - RNA, 19 nt, Human
gcucuacugaggugcuaug

SEQ ID NO: 3129795 - RNA, 16 nt, Human
gcuccucuccccagca

SEQ ID NO: 3129796 - RNA, 19 nt, Human
gcuccucuccccagcaagu

SEQ ID NO: 3129797 - RNA, 18 nt, Human
gcucucaaguuaucaggg

SEQ ID NO: 3129798 - RNA, 23 nt, Human
gcuccagacacauguccaagaag

SEQ ID NO: 3129799 - RNA, 21 nt, Human
gcuccagacacauguccaaga

SEQ ID NO: 3129800 - RNA, 18 nt, Human
gcuccagacacaugucca

SEQ ID NO: 3129801 - RNA, 9 nt, Human
gcuccagac

SEQ ID NO: 3129802 - RNA, 13 nt, Human
gcuccagcucacc

SEQ ID NO: 3129803 - RNA, 14 nt, Human
gcuccagcucacca

SEQ ID NO: 3129804 - RNA, 23 nt, Human
gcucccaggcauuccccaggagg

SEQ ID NO: 3129805 - RNA, 15 nt, Human
gcuccucuccccagc

SEQ ID NO: 3129806 - RNA, 20 nt, Human
gcucugaucauccacugugc

SEQ ID NO: 3129807 - RNA, 21 nt, Human
gcucugaucauccacugugcc

SEQ ID NO: 3129808 - RNA, 22 nt, Human
gcucugaucauccacugugcca

SEQ ID NO: 3129809 - RNA, 17 nt, Human
gcugaauacagaggcaa

SEQ ID NO: 3129810 - RNA, 23 nt, Human
gcugaaggcucgagcaugccugg

SEQ ID NO: 3129811 - RNA, 13 nt, Human
gcugacagacaca

SEQ ID NO: 3129812 - RNA, 23 nt, Human
gcucugguccauagagagcaaga

SEQ ID NO: 3129813 - RNA, 23 nt, Human
gccagcaggcucucaggccagcu

SEQ ID NO: 3129814 - RNA, 14 nt, Human
gccaggcccucugc

SEQ ID NO: 3129815 - RNA, 13 nt, Human
gccaggcccucug

SEQ ID NO: 3129816 - RNA, 18 nt, Human
gccaggccacaagacccu

SEQ ID NO: 3129817 - RNA, 13 nt, Human
gccaggccacaag

SEQ ID NO: 3129818 - RNA, 22 nt, Human
gccaggccagagggagugacag

SEQ ID NO: 3129819 - RNA, 15 nt, Human
gccaggccagaggga

SEQ ID NO: 3129820 - RNA, 21 nt, Human
gccaggccacaagacccuugu

SEQ ID NO: 3129821 - RNA, 13 nt, Human
gccaguugguccc

SEQ ID NO: 3129822 - RNA, 13 nt, Human
gccagugugacaa

SEQ ID NO: 3129823 - RNA, 23 nt, Human
gccaguuggucccccuuccaugg

SEQ ID NO: 3129824 - RNA, 22 nt, Human
gccaguuggucccccuuccaug

SEQ ID NO: 3129825 - RNA, 21 nt, Human
gccaguuggucccccuuccau

SEQ ID NO: 3129826 - RNA, 20 nt, Human
gccaguuggucccccuucca

SEQ ID NO: 3129827 - RNA, 18 nt, Human
gccaguuggucccccuuc

SEQ ID NO: 3129828 - RNA, 16 nt, Human
gccaguuggucccccu

SEQ ID NO: 3129829 - RNA, 21 nt, Human
gccccugcugguucaggguug

SEQ ID NO: 3129830 - RNA, 22 nt, Human
gccccugcugguucaggguugg

SEQ ID NO: 3129831 - RNA, 15 nt, Human
gccccugcccggcug

SEQ ID NO: 3129832 - RNA, 17 nt, Human
gcccaggccccugccac

SEQ ID NO: 3129833 - RNA, 13 nt, Human
gcccaggcagguc

SEQ ID NO: 3129834 - RNA, 12 nt, Human
gcccaggcaggu

SEQ ID NO: 3129835 - RNA, 14 nt, Human
gcccaggcaggucu

SEQ ID NO: 3129836 - RNA, 15 nt, Human
gcccaggccccugcc

SEQ ID NO: 3129837 - RNA, 13 nt, Human
gcccaggccccug

SEQ ID NO: 3129838 - RNA, 14 nt, Human
gccaugugccaggu

SEQ ID NO: 3129839 - RNA, 19 nt, Human
gcuacuguccuacccaccc

SEQ ID NO: 3129840 - RNA, 20 nt, Human
gcuacuguccuacccacccu

SEQ ID NO: 3129841 - RNA, 17 nt, Human
gcguuucuaugacacau

SEQ ID NO: 3129842 - RNA, 16 nt, Human
gcuaauuuuucauuuu

SEQ ID NO: 3129843 - RNA, 14 nt, Human
gcgugcacacacca

SEQ ID NO: 3129844 - RNA, 18 nt, Human
gcgugcacacaccagagc

SEQ ID NO: 3129845 - RNA, 20 nt, Human
gcgugguggacaugcacagc

SEQ ID NO: 3129846 - RNA, 13 nt, Human
gcgauucuucugc

SEQ ID NO: 3129847 - RNA, 14 nt, Human
gcgauucuucugcu

SEQ ID NO: 3129848 - RNA, 13 nt, Human
gccugcuccagcu

SEQ ID NO: 3129849 - RNA, 17 nt, Human
gccugcuaauuccccag

SEQ ID NO: 3129850 - RNA, 23 nt, Human
gccugcuaauuccccagauugca

SEQ ID NO: 3129851 - RNA, 19 nt, Human
gccuccuuugugaggaagc

SEQ ID NO: 3129852 - RNA, 21 nt, Human
gccuccuuugugaggaagccg

SEQ ID NO: 3129853 - RNA, 20 nt, Human
gccuccuuugugaggaagcc

SEQ ID NO: 3129854 - RNA, 19 nt, Human
auuuaauuuuuuugagaca

SEQ ID NO: 3129855 - RNA, 23 nt, Human
auuuaauuuuuuugagacagagu

SEQ ID NO: 3129856 - RNA, 17 nt, Human
auuuaacagaaauguac

SEQ ID NO: 3129857 - RNA, 19 nt, Human
auuuaacagaaauguacag

SEQ ID NO: 3129858 - RNA, 20 nt, Human
auuuaacagaaauguacagc

SEQ ID NO: 3129859 - RNA, 15 nt, Human
auuuaacagaaaugu

SEQ ID NO: 3129860 - RNA, 16 nt, Human
auuuaacagaaaugua

SEQ ID NO: 3129861 - RNA, 23 nt, Human
auuggcuuuggguugcaggaccu

SEQ ID NO: 3129862 - RNA, 13 nt, Human
auucuccaccugc

SEQ ID NO: 3129863 - RNA, 18 nt, Human
auucucagaaucucaaau

SEQ ID NO: 3129864 - RNA, 20 nt, Human
auucucagaaucucaaauaa

SEQ ID NO: 3129865 - RNA, 17 nt, Human
auucuccaccugccagg

SEQ ID NO: 3129866 - RNA, 16 nt, Human
auucuccaccugccag

SEQ ID NO: 3129867 - RNA, 14 nt, Human
auucucagaaucuc

SEQ ID NO: 3129868 - RNA, 13 nt, Human
auucuacuuugag

SEQ ID NO: 3129869 - RNA, 16 nt, Human
auucuacuuugagugc

SEQ ID NO: 3129870 - RNA, 23 nt, Human
auugccauuucuuccacaagagc

SEQ ID NO: 3129871 - RNA, 17 nt, Human
auugcccacgcuggagu

SEQ ID NO: 3129872 - RNA, 21 nt, Human
auugcccacgcuggagugcag

SEQ ID NO: 3129873 - RNA, 16 nt, Human
auugcggacagccacg

SEQ ID NO: 3129874 - RNA, 18 nt, Human
auugcggacagccacggc

SEQ ID NO: 3129875 - RNA, 19 nt, Human
auugcggacagccacggcc

SEQ ID NO: 3129876 - RNA, 13 nt, Human
auugaccugaggc

SEQ ID NO: 3129877 - RNA, 15 nt, Human
auugcaacaggcugg

SEQ ID NO: 3129878 - RNA, 21 nt, Human
auugcaacaggcugggcuuca

SEQ ID NO: 3129879 - RNA, 23 nt, Human
auuucuuuugccguuauuaaaaa

SEQ ID NO: 3129880 - RNA, 13 nt, Human
auuuauuauggca

SEQ ID NO: 3129881 - RNA, 20 nt, Human
auuuauuaaaugcccagccc

SEQ ID NO: 3129882 - RNA, 21 nt, Human
auuucuaaaucuccaaaauaa

SEQ ID NO: 3129883 - RNA, 12 nt, Human
auuucuaaaucu

SEQ ID NO: 3129884 - RNA, 13 nt, Human
auuucuaaaucuc

SEQ ID NO: 3129885 - RNA, 14 nt, Human
auuuccugugucuu

SEQ ID NO: 3129886 - RNA, 16 nt, Human
auuuauuauggcacau

SEQ ID NO: 3129887 - RNA, 23 nt, Human
auuugaggucuguucuuuccaaa

SEQ ID NO: 3129888 - RNA, 17 nt, Human
auuugagcagggcucag

SEQ ID NO: 3129889 - RNA, 22 nt, Human
auuugaggucuguucuuuccaa

SEQ ID NO: 3129890 - RNA, 20 nt, Human
auuucuuuugccguuauuaa

SEQ ID NO: 3129891 - RNA, 16 nt, Human
auuugagcagggcuca

SEQ ID NO: 3129892 - RNA, 18 nt, Human
auuuggugguuucagaaa

SEQ ID NO: 3129893 - RNA, 20 nt, Human
auuuggugguuucagaaaug

SEQ ID NO: 3129894 - RNA, 17 nt, Human
auuuggugguuucagaa

SEQ ID NO: 3129895 - RNA, 17 nt, Human
auuuuauuaugcaugaa

SEQ ID NO: 3129896 - RNA, 14 nt, Human
auuuuauuaugcau

SEQ ID NO: 3129897 - RNA, 15 nt, Human
auuuuauuaugcaug

SEQ ID NO: 3129898 - RNA, 13 nt, Human
auuuuauuaugca

SEQ ID NO: 3129899 - RNA, 13 nt, Human
auuagagaagaga

SEQ ID NO: 3129900 - RNA, 23 nt, Human
auuauuuauuaaaugcccagccc

SEQ ID NO: 3129901 - RNA, 22 nt, Human
auuaccugaauuuuggcugugu

SEQ ID NO: 3129902 - RNA, 19 nt, Human
auuaccacagacauacuaa

SEQ ID NO: 3129903 - RNA, 22 nt, Human
uuuuuguuccacaaguuaaaua

SEQ ID NO: 3129904 - RNA, 20 nt, Human
auuccccagauugcaacagg

SEQ ID NO: 3129905 - RNA, 22 nt, Human
auuccccacccugaaagcccug

SEQ ID NO: 3129906 - RNA, 16 nt, Human
auuccccaggaggcca

SEQ ID NO: 3129907 - RNA, 20 nt, Human
auucaggaagcucagggccu

SEQ ID NO: 3129908 - RNA, 21 nt, Human
auucaguuguuagugugucuu

SEQ ID NO: 3129909 - RNA, 16 nt, Human
auucaguuguuagugu

SEQ ID NO: 3129910 - RNA, 23 nt, Human
auucaggaagcucagggccuggc

SEQ ID NO: 3129911 - RNA, 22 nt, Human
auucaggaagcucagggccugg

SEQ ID NO: 3129912 - RNA, 21 nt, Human
auucaggaagcucagggccug

SEQ ID NO: 3129913 - RNA, 18 nt, Human
auucagcucugcaagaau

SEQ ID NO: 3129914 - RNA, 14 nt, Human
auucagcucugcaa

SEQ ID NO: 3129915 - RNA, 17 nt, Human
auuaaacuuaaucuaaa

SEQ ID NO: 3129916 - RNA, 16 nt, Human
auuaaacuuaaucuaa

SEQ ID NO: 3129917 - RNA, 19 nt, Human
auuaaacuuaaucuaaaug

SEQ ID NO: 3129918 - RNA, 21 nt, Human
auuaaacuuaaucuaaaugga

SEQ ID NO: 3129919 - RNA, 20 nt, Human
auuaaccacuucagcugacu

SEQ ID NO: 3129920 - RNA, 18 nt, Human
auuaaccacuucagcuga

SEQ ID NO: 3129921 - RNA, 17 nt, Human
auuaaccacuucagcug

SEQ ID NO: 3129922 - RNA, 13 nt, Human
auuaagaaagacu

SEQ ID NO: 3129923 - RNA, 14 nt, Human
auuaagaaagacua

SEQ ID NO: 3129924 - RNA, 23 nt, Human
auuaacuuuuauaaacuuuaccu

SEQ ID NO: 3129925 - RNA, 12 nt, Human
auuaacuuuuau

SEQ ID NO: 3129926 - RNA, 16 nt, Human
auuaacuuuuauaaac

SEQ ID NO: 3129927 - RNA, 17 nt, Human
auuaacuuuuauaaacu

SEQ ID NO: 3129928 - RNA, 19 nt, Human
auuaacuuuuauaaacuuu

SEQ ID NO: 3129929 - RNA, 20 nt, Human
auuaacuuuuauaaacuuua

SEQ ID NO: 3129930 - RNA, 17 nt, Human
auguuuuucuucucccu

SEQ ID NO: 3129931 - RNA, 18 nt, Human
auguuuuucuucucccuc

SEQ ID NO: 3129932 - RNA, 14 nt, Human
auguuuuccaugag

SEQ ID NO: 3129933 - RNA, 21 nt, Human
uuuuaagugcugcauuuaaaa

SEQ ID NO: 3129934 - RNA, 16 nt, Human
uuuuaagugcugcauu

SEQ ID NO: 3129935 - RNA, 17 nt, Human
uuuuaagugcugcauuu

SEQ ID NO: 3129936 - RNA, 21 nt, Human
auguucaucauccuaagcuau

SEQ ID NO: 3129937 - RNA, 13 nt, Human
auguuggccaggc

SEQ ID NO: 3129938 - RNA, 14 nt, Human
auguuggccaggcu

SEQ ID NO: 3129939 - RNA, 23 nt, Human
uuuuagaguugauacuacaguuu

SEQ ID NO: 3129940 - RNA, 12 nt, Human
uuuuauaaacuu

SEQ ID NO: 3129941 - RNA, 13 nt, Human
uuuuauaaacuuu

SEQ ID NO: 3129942 - RNA, 19 nt, Human
uuuuauaaacuuuaccuuu

SEQ ID NO: 3129943 - RNA, 14 nt, Human
uuuuauaaacuuua

SEQ ID NO: 3129944 - RNA, 17 nt, Human
uuuuauaaacuuuaccu

SEQ ID NO: 3129945 - RNA, 19 nt, Human
uuuuccagguuuaagcugu

SEQ ID NO: 3129946 - RNA, 19 nt, Human
uuugugaggaagccgcugg

SEQ ID NO: 3129947 - RNA, 18 nt, Human
uuugugaggaagccgcug

SEQ ID NO: 3129948 - RNA, 12 nt, Human
uuuguuugaacu

SEQ ID NO: 3129949 - RNA, 13 nt, Human
uuuguuugaacug

SEQ ID NO: 3129950 - RNA, 14 nt, Human
uuuguuugaacuga

SEQ ID NO: 3129951 - RNA, 22 nt, Human
uuuguaaauuaacuuuuauaaa

SEQ ID NO: 3129952 - RNA, 13 nt, Human
uuuguagagccag

SEQ ID NO: 3129953 - RNA, 21 nt, Human
uuuuaaaaaacugcugacugu

SEQ ID NO: 3129954 - RNA, 18 nt, Human
uuuguuugaacugauaaa

SEQ ID NO: 3129955 - RNA, 15 nt, Human
uuuuaagugcugcau

SEQ ID NO: 3129956 - RNA, 16 nt, Human
uuuuaagaggcagggu

SEQ ID NO: 3129957 - RNA, 15 nt, Human
uuuuaagaggcaggg

SEQ ID NO: 3129958 - RNA, 15 nt, Human
auguaucaaugagua

SEQ ID NO: 3129959 - RNA, 22 nt, Human
uuugggggaaaauuuagaaaua

SEQ ID NO: 3129960 - RNA, 15 nt, Human
auguaucugagcagg

SEQ ID NO: 3129961 - RNA, 12 nt, Human
auguauguguaa

SEQ ID NO: 3129962 - RNA, 23 nt, Human
augucucuuuaaugucacaggca

SEQ ID NO: 3129963 - RNA, 23 nt, Human
auguccaagaagcccaggaaagg

SEQ ID NO: 3129964 - RNA, 18 nt, Human
auguccaagaagcccagg

SEQ ID NO: 3129965 - RNA, 19 nt, Human
auguccaagaagcccagga

SEQ ID NO: 3129966 - RNA, 16 nt, Human
augucagugugacuga

SEQ ID NO: 3129967 - RNA, 15 nt, Human
augucagugugacug

SEQ ID NO: 3129968 - RNA, 21 nt, Human
augucagugugacugaucucu

SEQ ID NO: 3129969 - RNA, 13 nt, Human
uuuggggaagaac

SEQ ID NO: 3129970 - RNA, 22 nt, Human
uuugggaggccaaggugggagg

SEQ ID NO: 3129971 - RNA, 14 nt, Human
uuuggggauauuuu

SEQ ID NO: 3129972 - RNA, 22 nt, Human
uuugccauguuggccaggcugg

SEQ ID NO: 3129973 - RNA, 16 nt, Human
uugauucagacagcug

SEQ ID NO: 3129974 - RNA, 15 nt, Human
uugauucagacagcu

SEQ ID NO: 3129975 - RNA, 14 nt, Human
uugauucagacagc

SEQ ID NO: 3129976 - RNA, 19 nt, Human
auccuaguuccaccaucaa

SEQ ID NO: 3129977 - RNA, 15 nt, Human
auccuaguuccacca

SEQ ID NO: 3129978 - RNA, 16 nt, Human
aucucacacaugagca

SEQ ID NO: 3129979 - RNA, 15 nt, Human
aucucacacaugagc

SEQ ID NO: 3129980 - RNA, 13 nt, Human
aucucccccagcc

SEQ ID NO: 3129981 - RNA, 12 nt, Human
aucucccccagc

SEQ ID NO: 3129982 - RNA, 18 nt, Human
aucuugaauuguaaggaa

SEQ ID NO: 3129983 - RNA, 17 nt, Human
aucuugaauuguaagga

SEQ ID NO: 3129984 - RNA, 17 nt, Human
aucuugcucugcugaca

SEQ ID NO: 3129985 - RNA, 19 nt, Human
aucuugcucugcugacaga

SEQ ID NO: 3129986 - RNA, 19 nt, Human
aucuggguucacugcaacc

SEQ ID NO: 3129987 - RNA, 17 nt, Human
aucuggguucacugcaa

SEQ ID NO: 3129988 - RNA, 23 nt, Human
aucugugaaaggaaagagggagg

SEQ ID NO: 3129989 - RNA, 18 nt, Human
uugccgucuaccugaggg

SEQ ID NO: 3129990 - RNA, 15 nt, Human
uugccgucuaccuga

SEQ ID NO: 3129991 - RNA, 19 nt, Human
uugccgucuaccugagggg

SEQ ID NO: 3129992 - RNA, 14 nt, Human
uugccguuauuaaa

SEQ ID NO: 3129993 - RNA, 13 nt, Human
uugccgucuaccu

SEQ ID NO: 3129994 - RNA, 14 nt, Human
augacacaugcaag

SEQ ID NO: 3129995 - RNA, 22 nt, Human
augacacaugcaaggucauuuu

SEQ ID NO: 3129996 - RNA, 16 nt, Human
augacuuacuguacau

SEQ ID NO: 3129997 - RNA, 17 nt, Human
augacuuacuguacaug

SEQ ID NO: 3129998 - RNA, 18 nt, Human
augacacgaauauugcug

SEQ ID NO: 3129999 - RNA, 22 nt, Human
augacuuaagcacacuugacau

SEQ ID NO: 3130000 - RNA, 14 nt, Human
augacuuacuguac

SEQ ID NO: 3130001 - RNA, 21 nt, Human
augagaaagguugaagcacca

SEQ ID NO: 3130002 - RNA, 22 nt, Human
augagaaagguugaagcaccaa

SEQ ID NO: 3130003 - RNA, 20 nt, Human
augaaugucagugugacuga

SEQ ID NO: 3130004 - RNA, 22 nt, Human
uuggggggcugaggugggagga

SEQ ID NO: 3130005 - RNA, 14 nt, Human
uuggggauauuuuu

SEQ ID NO: 3130006 - RNA, 18 nt, Human
uuggcuagagguucaaag

SEQ ID NO: 3130007 - RNA, 23 nt, Human
uuggcgcugccccuggcagcccc

SEQ ID NO: 3130008 - RNA, 22 nt, Human
uuggcgcugccccuggcagccc

SEQ ID NO: 3130009 - RNA, 18 nt, Human
aucuuugcagacaggcaa

SEQ ID NO: 3130010 - RNA, 24 nt, Human
uuuauggcuuuugugcauuaucua

SEQ ID NO: 3130011 - RNA, 20 nt, Human
uuuauggcuuuugugcauua

SEQ ID NO: 3130012 - RNA, 15 nt, Human
uuuaguagagacagg

SEQ ID NO: 3130013 - RNA, 19 nt, Human
augcuccuggcccacugca

SEQ ID NO: 3130014 - RNA, 15 nt, Human
auggaagacagcucu

SEQ ID NO: 3130015 - RNA, 16 nt, Human
auggaacacucugaga

SEQ ID NO: 3130016 - RNA, 15 nt, Human
auggaacacucugag

SEQ ID NO: 3130017 - RNA, 14 nt, Human
auggaacacucuga

SEQ ID NO: 3130018 - RNA, 11 nt, Human
auggaacacuc

SEQ ID NO: 3130019 - RNA, 19 nt, Human
augcugucccuuacgugag

SEQ ID NO: 3130020 - RNA, 23 nt, Human
augcugucccuuacgugaguccu

SEQ ID NO: 3130021 - RNA, 17 nt, Human
auggcacaucagcacga

SEQ ID NO: 3130022 - RNA, 23 nt, Human
auggcacaucagcacgauuucug

SEQ ID NO: 3130023 - RNA, 20 nt, Human
auggacguguuaugacucca

SEQ ID NO: 3130024 - RNA, 19 nt, Human
auggacguguuaugacucc

SEQ ID NO: 3130025 - RNA, 23 nt, Human
auggacguguuaugacuccagaa

SEQ ID NO: 3130026 - RNA, 18 nt, Human
auggauuuccagccaaag

SEQ ID NO: 3130027 - RNA, 21 nt, Human
auggccgggcgcgguggcuca

SEQ ID NO: 3130028 - RNA, 18 nt, Human
auggcuaauguacugcau

SEQ ID NO: 3130029 - RNA, 14 nt, Human
auggacaugaucuu

SEQ ID NO: 3130030 - RNA, 13 nt, Human
uuucagaaaugug

SEQ ID NO: 3130031 - RNA, 16 nt, Human
auggaagacagcucuu

SEQ ID NO: 3130032 - RNA, 21 nt, Human
uugugaggaagccgcuggggc

SEQ ID NO: 3130033 - RNA, 18 nt, Human
uugugauacaaugcugug

SEQ ID NO: 3130034 - RNA, 22 nt, Human
uuguucuggcucuuccaggcug

SEQ ID NO: 3130035 - RNA, 20 nt, Human
uuguucuggcucuuccaggc

SEQ ID NO: 3130036 - RNA, 19 nt, Human
uuguucuggcucuuccagg

SEQ ID NO: 3130037 - RNA, 17 nt, Human
uuguguguuuauuguca

SEQ ID NO: 3130038 - RNA, 13 nt, Human
uugugguuaaucu

SEQ ID NO: 3130039 - RNA, 12 nt, Human
augcacuuuguu

SEQ ID NO: 3130040 - RNA, 13 nt, Human
augcaccagcccu

SEQ ID NO: 3130041 - RNA, 19 nt, Human
augauuaaccacuucagcu

SEQ ID NO: 3130042 - RNA, 21 nt, Human
augauuaaccacuucagcuga

SEQ ID NO: 3130043 - RNA, 20 nt, Human
augauuaaccacuucagcug

SEQ ID NO: 3130044 - RNA, 21 nt, Human
augauucaacagguuuuccug

SEQ ID NO: 3130045 - RNA, 15 nt, Human
augcagccucacagu

SEQ ID NO: 3130046 - RNA, 14 nt, Human
augcagccucacag

SEQ ID NO: 3130047 - RNA, 13 nt, Human
augcagccucaca

SEQ ID NO: 3130048 - RNA, 14 nt, Human
uuuaagaggcaggg

SEQ ID NO: 3130049 - RNA, 15 nt, Human
augcacuuuguucug

SEQ ID NO: 3130050 - RNA, 13 nt, Human
uuguuuucagugu

SEQ ID NO: 3130051 - RNA, 16 nt, Human
uuguuuucaguguaca

SEQ ID NO: 3130052 - RNA, 17 nt, Human
uuuaagugcugcauuua

SEQ ID NO: 3130053 - RNA, 15 nt, Human
uuuaagugcugcauu

SEQ ID NO: 3130054 - RNA, 16 nt, Human
uuuaagugcugcauuu

SEQ ID NO: 3130055 - RNA, 12 nt, Human
uuuaauucaguu

SEQ ID NO: 3130056 - RNA, 21 nt, Human
uucucacugccaugccagcuu

SEQ ID NO: 3130057 - RNA, 13 nt, Human
aucaggccaggcc

SEQ ID NO: 3130058 - RNA, 21 nt, Human
uucgcaggauucuuccucccu

SEQ ID NO: 3130059 - RNA, 19 nt, Human
aucaaccccuucgcuccug

SEQ ID NO: 3130060 - RNA, 20 nt, Human
aucaaccccuucgcuccugu

SEQ ID NO: 3130061 - RNA, 22 nt, Human
aucaaccccuucgcuccugugu

SEQ ID NO: 3130062 - RNA, 18 nt, Human
uucccuuuuuuggcugcu

SEQ ID NO: 3130063 - RNA, 19 nt, Human
uucccuuuuuuggcugcug

SEQ ID NO: 3130064 - RNA, 20 nt, Human
uucuguuuuucuaggccugg

SEQ ID NO: 3130065 - RNA, 11 nt, Human
uucuguucuuu

SEQ ID NO: 3130066 - RNA, 18 nt, Human
uucuguucuuucuggcua

SEQ ID NO: 3130067 - RNA, 13 nt, Human
uucuuaauucuua

SEQ ID NO: 3130068 - RNA, 23 nt, Human
uucuuccucccucccucuuuccc

SEQ ID NO: 3130069 - RNA, 12 nt, Human
uucuugcaaagu

SEQ ID NO: 3130070 - RNA, 22 nt, Human
uucuuucuggcuaugcauuuga

SEQ ID NO: 3130071 - RNA, 21 nt, Human
uugaaauuuuuauuaaauuau

SEQ ID NO: 3130072 - RNA, 20 nt, Human
uugaaauauaggaacuuaaa

SEQ ID NO: 3130073 - RNA, 11 nt, Human
uugaaaucuuu

SEQ ID NO: 3130074 - RNA, 21 nt, Human
auccuaagcuauucaguaaua

SEQ ID NO: 3130075 - RNA, 21 nt, Human
auccuaggcauuugcugaaua

SEQ ID NO: 3130076 - RNA, 13 nt, Human
auccuaguuccac

SEQ ID NO: 3130077 - RNA, 16 nt, Human
uucuggcuaugcauuu

SEQ ID NO: 3130078 - RNA, 15 nt, Human
uucugccgcagcccu

SEQ ID NO: 3130079 - RNA, 14 nt, Human
uucugccgcagccc

SEQ ID NO: 3130080 - RNA, 18 nt, Human
uucuggcuaugcauuuga

SEQ ID NO: 3130081 - RNA, 20 nt, Human
uucuggcuaugcauuugaaa

SEQ ID NO: 3130082 - RNA, 21 nt, Human
auccaagcuggucccacucag

SEQ ID NO: 3130083 - RNA, 13 nt, Human
uucugccgcagcc

SEQ ID NO: 3130084 - RNA, 14 nt, Human
uucugacccaugcu

SEQ ID NO: 3130085 - RNA, 16 nt, Human
uucucuuuucaaaaca

SEQ ID NO: 3130086 - RNA, 17 nt, Human
uucucuacucuagggaa

SEQ ID NO: 3130087 - RNA, 20 nt, Human
aucaggccaggcccucugcc

SEQ ID NO: 3130088 - RNA, 20 nt, Human
aucauugaaaucuuuuugcu

SEQ ID NO: 3130089 - RNA, 23 nt, Human
aucaggccaggcccucugcccac

SEQ ID NO: 3130090 - RNA, 22 nt, Human
aucaggccaggcccucugccca

SEQ ID NO: 3130091 - RNA, 21 nt, Human
aucaggccaggcccucugccc

SEQ ID NO: 3130092 - RNA, 21 nt, Human
aucauugaaaucuuuuugcuu

SEQ ID NO: 3130093 - RNA, 12 nt, Human
auauauaaccag

SEQ ID NO: 3130094 - RNA, 13 nt, Human
auauauaaccagu

SEQ ID NO: 3130095 - RNA, 22 nt, Human
auaguuaagcgugcauaaguua

SEQ ID NO: 3130096 - RNA, 22 nt, Human
auaguuggcuaggaccccucca

SEQ ID NO: 3130097 - RNA, 15 nt, Human
auaguggugugauuu

SEQ ID NO: 3130098 - RNA, 17 nt, Human
auaguggcuuaaaacaa

SEQ ID NO: 3130099 - RNA, 13 nt, Human
uucacaguucucu

SEQ ID NO: 3130100 - RNA, 20 nt, Human
uucacaguucucuccuucuu

SEQ ID NO: 3130101 - RNA, 15 nt, Human
uucacaguucucucc

SEQ ID NO: 3130102 - RNA, 20 nt, Human
uucacagaugggugcuugga

SEQ ID NO: 3130103 - RNA, 17 nt, Human
auaggaaaaacugauuu

SEQ ID NO: 3130104 - RNA, 16 nt, Human
auaggaaaaacugauu

SEQ ID NO: 3130105 - RNA, 14 nt, Human
auaggaaaaacuga

SEQ ID NO: 3130106 - RNA, 12 nt, Human
auaggaaaaacu

SEQ ID NO: 3130107 - RNA, 18 nt, Human
uuauuuuuagacagaguc

SEQ ID NO: 3130108 - RNA, 17 nt, Human
uuauuuuuagacagagu

SEQ ID NO: 3130109 - RNA, 21 nt, Human
uucaagcgauucuucugcuuc

SEQ ID NO: 3130110 - RNA, 23 nt, Human
uucccaaagcagugcaugcuguc

SEQ ID NO: 3130111 - RNA, 22 nt, Human
uuccagugaggcucugcccuug

SEQ ID NO: 3130112 - RNA, 21 nt, Human
uuccagugaggcucugcccuu

SEQ ID NO: 3130113 - RNA, 20 nt, Human
uuccagugaggcucugcccu

SEQ ID NO: 3130114 - RNA, 19 nt, Human
uuccagugaggcucugccc

SEQ ID NO: 3130115 - RNA, 17 nt, Human
uuccagugaggcucugc

SEQ ID NO: 3130116 - RNA, 21 nt, Human
uuccaggggugggacacccug

SEQ ID NO: 3130117 - RNA, 18 nt, Human
uucccaagcucugcuccu

SEQ ID NO: 3130118 - RNA, 22 nt, Human
uucccaccucucucacuccuug

SEQ ID NO: 3130119 - RNA, 12 nt, Human
uucccaccucuc

SEQ ID NO: 3130120 - RNA, 13 nt, Human
uucccaagcucug

SEQ ID NO: 3130121 - RNA, 14 nt, Human
uucccaagcucugc

SEQ ID NO: 3130122 - RNA, 15 nt, Human
uucccaagcucugcu

SEQ ID NO: 3130123 - RNA, 16 nt, Human
uucccaagcucugcuc

SEQ ID NO: 3130124 - RNA, 17 nt, Human
uuccaggggugggacac

SEQ ID NO: 3130125 - RNA, 18 nt, Human
uuccaccaucaagccacc

SEQ ID NO: 3130126 - RNA, 22 nt, Human
uuccacaagagcccaggccucc

SEQ ID NO: 3130127 - RNA, 19 nt, Human
uuccaccaucaagccacca

SEQ ID NO: 3130128 - RNA, 16 nt, Human
auauguggaguucauc

SEQ ID NO: 3130129 - RNA, 15 nt, Human
auauguggaguucau

SEQ ID NO: 3130130 - RNA, 15 nt, Human
uuccaaggguacuaa

SEQ ID NO: 3130131 - RNA, 17 nt, Human
uuccaaggguacuaagg

SEQ ID NO: 3130132 - RNA, 13 nt, Human
uucagugccuuau

SEQ ID NO: 3130133 - RNA, 12 nt, Human
uucagugccuua

SEQ ID NO: 3130134 - RNA, 16 nt, Human
uucagugccaaaaaca

SEQ ID NO: 3130135 - RNA, 11 nt, Human
uucagaaaugu

SEQ ID NO: 3130136 - RNA, 13 nt, Human
uucagaaaugugu

SEQ ID NO: 3130137 - RNA, 17 nt, Human
uucaucccucuggggcu

SEQ ID NO: 3130138 - RNA, 21 nt, Human
uucaucccucuggggcuguuc

SEQ ID NO: 3130139 - RNA, 13 nt, Human
auaugcacacauu

SEQ ID NO: 3130140 - RNA, 16 nt, Human
auaugcacacauuuuu

SEQ ID NO: 3130141 - RNA, 14 nt, Human
auaugcacacauuu

SEQ ID NO: 3130142 - RNA, 15 nt, Human
auaugcacacauuuu

SEQ ID NO: 3130143 - RNA, 17 nt, Human
auauguaacaagccacc

SEQ ID NO: 3130144 - RNA, 16 nt, Human
auauguaacaagccac

SEQ ID NO: 3130145 - RNA, 16 nt, Human
auaucugaaaauguau

SEQ ID NO: 3130146 - RNA, 17 nt, Human
auaucugaaaauguaug

SEQ ID NO: 3130147 - RNA, 20 nt, Human
auaucugaaaauguaugugu

SEQ ID NO: 3130148 - RNA, 22 nt, Human
agcauauucaggaagcucaggg

SEQ ID NO: 3130149 - RNA, 20 nt, Human
ugaucacggcucacugcagc

SEQ ID NO: 3130150 - RNA, 21 nt, Human
ugaucacggcucacugcagcc

SEQ ID NO: 3130151 - RNA, 12 nt, Human
agcaucaggcca

SEQ ID NO: 3130152 - RNA, 13 nt, Human
agcaucaggccag

SEQ ID NO: 3130153 - RNA, 18 nt, Human
ugaucacggcucacugca

SEQ ID NO: 3130154 - RNA, 19 nt, Human
ugaucacggcucacugcag

SEQ ID NO: 3130155 - RNA, 18 nt, Human
agcaucaggccaggcccu

SEQ ID NO: 3130156 - RNA, 17 nt, Human
agcaucaggccaggccc

SEQ ID NO: 3130157 - RNA, 16 nt, Human
agcaucaggccaggcc

SEQ ID NO: 3130158 - RNA, 14 nt, Human
agcaucaggccagg

SEQ ID NO: 3130159 - RNA, 20 nt, Human
agcaucaggccaggcccucu

SEQ ID NO: 3130160 - RNA, 19 nt, Human
agcaucaggccaggcccuc

SEQ ID NO: 3130161 - RNA, 12 nt, Human
agcauggcugcc

SEQ ID NO: 3130162 - RNA, 14 nt, Human
ugaguacuacaguc

SEQ ID NO: 3130163 - RNA, 23 nt, Human
ugaguacuacaguccucccaucu

SEQ ID NO: 3130164 - RNA, 22 nt, Human
ugaguacuacaguccucccauc

SEQ ID NO: 3130165 - RNA, 21 nt, Human
ugaguacuacaguccucccau

SEQ ID NO: 3130166 - RNA, 17 nt, Human
ugaguacuacaguccuc

SEQ ID NO: 3130167 - RNA, 14 nt, Human
agcauauucaggaa

SEQ ID NO: 3130168 - RNA, 15 nt, Human
ugaguacuacagucc

SEQ ID NO: 3130169 - RNA, 20 nt, Human
agcauacguacacauuuuau

SEQ ID NO: 3130170 - RNA, 21 nt, Human
agcauacguacacauuuuauu

SEQ ID NO: 3130171 - RNA, 16 nt, Human
agcauacguacacauu

SEQ ID NO: 3130172 - RNA, 17 nt, Human
agcauacguacacauuu

SEQ ID NO: 3130173 - RNA, 18 nt, Human
agcauacguacacauuuu

SEQ ID NO: 3130174 - RNA, 19 nt, Human
agcauacguacacauuuua

SEQ ID NO: 3130175 - RNA, 12 nt, Human
ugagaauuaccc

SEQ ID NO: 3130176 - RNA, 15 nt, Human
agcauacguacacau

SEQ ID NO: 3130177 - RNA, 17 nt, Human
ugaguucauacccuguu

SEQ ID NO: 3130178 - RNA, 20 nt, Human
ugauaagaaccuuuugagug

SEQ ID NO: 3130179 - RNA, 18 nt, Human
ugauacaaugcugugccc

SEQ ID NO: 3130180 - RNA, 20 nt, Human
ugauacaaugcugugcccua

SEQ ID NO: 3130181 - RNA, 21 nt, Human
ugauacaaugcugugcccuaa

SEQ ID NO: 3130182 - RNA, 14 nt, Human
ugauacuacaguuu

SEQ ID NO: 3130183 - RNA, 17 nt, Human
ugauacuacaguuuguu

SEQ ID NO: 3130184 - RNA, 14 nt, Human
ugagucaccaagcc

SEQ ID NO: 3130185 - RNA, 16 nt, Human
ugagucaccaagccca

SEQ ID NO: 3130186 - RNA, 17 nt, Human
ugagucaccaagcccag

SEQ ID NO: 3130187 - RNA, 20 nt, Human
ugagugccuuacacaauggu

SEQ ID NO: 3130188 - RNA, 17 nt, Human
ugagugccuuacacaau

SEQ ID NO: 3130189 - RNA, 16 nt, Human
ugagugccuuacacaa

SEQ ID NO: 3130190 - RNA, 21 nt, Human
ugagugggugaauaauacagu

SEQ ID NO: 3130191 - RNA, 23 nt, Human
ugagugggggaucacagccucug

SEQ ID NO: 3130192 - RNA, 14 nt, Human
ugauucagcucugc

SEQ ID NO: 3130193 - RNA, 13 nt, Human
ugauucagcucug

SEQ ID NO: 3130194 - RNA, 18 nt, Human
agcccaggaaaggcucca

SEQ ID NO: 3130195 - RNA, 24 nt, Human
agcccaggaaaggcuccaggagca

SEQ ID NO: 3130196 - RNA, 23 nt, Human
agcccaggaaaggcuccaggagc

SEQ ID NO: 3130197 - RNA, 22 nt, Human
agcccaggaaaggcuccaggag

SEQ ID NO: 3130198 - RNA, 15 nt, Human
ugauucccaagcucu

SEQ ID NO: 3130199 - RNA, 16 nt, Human
ugauucccaagcucug

SEQ ID NO: 3130200 - RNA, 18 nt, Human
ugauucccaagcucugcu

SEQ ID NO: 3130201 - RNA, 19 nt, Human
ugauucccaagcucugcuc

SEQ ID NO: 3130202 - RNA, 21 nt, Human
ugauucccaagcucugcuccu

SEQ ID NO: 3130203 - RNA, 21 nt, Human
agcccaggaaaggcuccagga

SEQ ID NO: 3130204 - RNA, 20 nt, Human
agcccaggaaaggcuccagg

SEQ ID NO: 3130205 - RNA, 19 nt, Human
agcccaggaaaggcuccag

SEQ ID NO: 3130206 - RNA, 22 nt, Human
agcccacuucugccauauucug

SEQ ID NO: 3130207 - RNA, 14 nt, Human
agccaggccacaag

SEQ ID NO: 3130208 - RNA, 12 nt, Human
agccaggccaca

SEQ ID NO: 3130209 - RNA, 23 nt, Human
agccaguaaaugggggugcauuu

SEQ ID NO: 3130210 - RNA, 22 nt, Human
agccaguaaaugggggugcauu

SEQ ID NO: 3130211 - RNA, 12 nt, Human
agccagggucuc

SEQ ID NO: 3130212 - RNA, 22 nt, Human
agccaggccacaagacccuugu

SEQ ID NO: 3130213 - RNA, 21 nt, Human
agccaggccacaagacccuug

SEQ ID NO: 3130214 - RNA, 23 nt, Human
ugauguuuuccaugaguccccug

SEQ ID NO: 3130215 - RNA, 17 nt, Human
ugauguuuuaaggaugc

SEQ ID NO: 3130216 - RNA, 16 nt, Human
ugauggugcaaugacc

SEQ ID NO: 3130217 - RNA, 15 nt, Human
ugauggugcaaugac

SEQ ID NO: 3130218 - RNA, 23 nt, Human
ugauggugcaaugaccuuucaau

SEQ ID NO: 3130219 - RNA, 17 nt, Human
ugauggugcaaugaccu

SEQ ID NO: 3130220 - RNA, 20 nt, Human
ugaugauccuaggcauuugc

SEQ ID NO: 3130221 - RNA, 14 nt, Human
ugaugauccuaggc

SEQ ID NO: 3130222 - RNA, 20 nt, Human
agccacugcaccgggccaca

SEQ ID NO: 3130223 - RNA, 13 nt, Human
agccacugcaccg

SEQ ID NO: 3130224 - RNA, 21 nt, Human
agccacugcaccgggccacag

SEQ ID NO: 3130225 - RNA, 22 nt, Human
agccacugcaccgggccacaga

SEQ ID NO: 3130226 - RNA, 15 nt, Human
ugauuaauuaaaaca

SEQ ID NO: 3130227 - RNA, 14 nt, Human
agccacggccaggc

SEQ ID NO: 3130228 - RNA, 19 nt, Human
agccaccaacauacuccca

SEQ ID NO: 3130229 - RNA, 23 nt, Human
agccaccaacauacucccaucug

SEQ ID NO: 3130230 - RNA, 20 nt, Human
agccaccaacauacucccau

SEQ ID NO: 3130231 - RNA, 18 nt, Human
agccacauuccugaugcu

SEQ ID NO: 3130232 - RNA, 14 nt, Human
agccacauuccuga

SEQ ID NO: 3130233 - RNA, 15 nt, Human
agccacggccaggcc

SEQ ID NO: 3130234 - RNA, 17 nt, Human
agccucagcauccuggc

SEQ ID NO: 3130235 - RNA, 19 nt, Human
agccucagcauccuggcac

SEQ ID NO: 3130236 - RNA, 20 nt, Human
agccucagcauccuggcacc

SEQ ID NO: 3130237 - RNA, 21 nt, Human
agccucagcauccuggcaccc

SEQ ID NO: 3130238 - RNA, 16 nt, Human
agccucagcauccugg

SEQ ID NO: 3130239 - RNA, 16 nt, Human
agccucccaaagugcu

SEQ ID NO: 3130240 - RNA, 22 nt, Human
agccucagcauccuggcacccg

SEQ ID NO: 3130241 - RNA, 23 nt, Human
agccucagcauccuggcacccgg

SEQ ID NO: 3130242 - RNA, 22 nt, Human
ugcacuauagccuaggugacag

SEQ ID NO: 3130243 - RNA, 23 nt, Human
ugcacuauagccuaggugacaga

SEQ ID NO: 3130244 - RNA, 23 nt, Human
agcccuucuaccuuccugcaaca

SEQ ID NO: 3130245 - RNA, 23 nt, Human
ugcagccucaaccuccugggcua

SEQ ID NO: 3130246 - RNA, 15 nt, Human
ugcagccucacaguc

SEQ ID NO: 3130247 - RNA, 13 nt, Human
ugcagccucacag

SEQ ID NO: 3130248 - RNA, 16 nt, Human
ugcagccucacagucc

SEQ ID NO: 3130249 - RNA, 14 nt, Human
ugcauaaguuaacu

SEQ ID NO: 3130250 - RNA, 17 nt, Human
ugcauaaguuaacuucc

SEQ ID NO: 3130251 - RNA, 10 nt, Human
ugcacacauu

SEQ ID NO: 3130252 - RNA, 20 nt, Human
ugcacacauuuuuuaaaugc

SEQ ID NO: 3130253 - RNA, 17 nt, Human
ugcacccucaggcaggu

SEQ ID NO: 3130254 - RNA, 16 nt, Human
ugcacccucaggcagg

SEQ ID NO: 3130255 - RNA, 14 nt, Human
ugcacgugugugca

SEQ ID NO: 3130256 - RNA, 15 nt, Human
ugcacgugugugcac

SEQ ID NO: 3130257 - RNA, 22 nt, Human
agcccugguggcagugggagcu

SEQ ID NO: 3130258 - RNA, 23 nt, Human
agcccugguggcagugggagcug

SEQ ID NO: 3130259 - RNA, 15 nt, Human
ugcacaagcugcacc

SEQ ID NO: 3130260 - RNA, 14 nt, Human
ugcacaagcugcac

SEQ ID NO: 3130261 - RNA, 22 nt, Human
ugcacacaccagagcccaccuu

SEQ ID NO: 3130262 - RNA, 21 nt, Human
ugcacaagcugcacccucagg

SEQ ID NO: 3130263 - RNA, 18 nt, Human
ugcacaagcugcacccuc

SEQ ID NO: 3130264 - RNA, 24 nt, Human
agccccuucugacccaugcugccc

SEQ ID NO: 3130265 - RNA, 20 nt, Human
agccccuucugacccaugcu

SEQ ID NO: 3130266 - RNA, 21 nt, Human
agcccugguggcagugggagc

SEQ ID NO: 3130267 - RNA, 17 nt, Human
agccccgaggccuucuc

SEQ ID NO: 3130268 - RNA, 22 nt, Human
agccccgaggccuucucugaag

SEQ ID NO: 3130269 - RNA, 16 nt, Human
agccccgaggccuucu

SEQ ID NO: 3130270 - RNA, 23 nt, Human
agccccauucugccugcccaggc

SEQ ID NO: 3130271 - RNA, 18 nt, Human
agccccuggaugcagccu

SEQ ID NO: 3130272 - RNA, 17 nt, Human
agccccuggaugcagcc

SEQ ID NO: 3130273 - RNA, 19 nt, Human
agccccuggaugcagccuc

SEQ ID NO: 3130274 - RNA, 20 nt, Human
agccccaaaacucuccucug

SEQ ID NO: 3130275 - RNA, 22 nt, Human
agccccaaaacucuccucugcu

SEQ ID NO: 3130276 - RNA, 21 nt, Human
agccccaaaacucuccucugc

SEQ ID NO: 3130277 - RNA, 19 nt, Human
ugauucuccugccucagcc

SEQ ID NO: 3130278 - RNA, 15 nt, Human
ugauucuccugccuc

SEQ ID NO: 3130279 - RNA, 13 nt, Human
ugauucuccugcc

SEQ ID NO: 3130280 - RNA, 20 nt, Human
ugauucuccugccucagccu

SEQ ID NO: 3130281 - RNA, 20 nt, Human
agcucauucuccuuguguua

SEQ ID NO: 3130282 - RNA, 21 nt, Human
agcucauucuccuuguguuac

SEQ ID NO: 3130283 - RNA, 20 nt, Human
ugcccacaggaucagucuga

SEQ ID NO: 3130284 - RNA, 19 nt, Human
ugcccacaggaucagucug

SEQ ID NO: 3130285 - RNA, 16 nt, Human
ugcccacaggaucagu

SEQ ID NO: 3130286 - RNA, 20 nt, Human
ugcccagccccuucugaccc

SEQ ID NO: 3130287 - RNA, 21 nt, Human
ugcccagccccuucugaccca

SEQ ID NO: 3130288 - RNA, 22 nt, Human
agcucaggugucccugcacuug

SEQ ID NO: 3130289 - RNA, 20 nt, Human
agcucaggugucccugcacu

SEQ ID NO: 3130290 - RNA, 21 nt, Human
agcucaggugucccugcacuu

SEQ ID NO: 3130291 - RNA, 18 nt, Human
agcucaggugucccugca

SEQ ID NO: 3130292 - RNA, 17 nt, Human
agcucaggugucccugc

SEQ ID NO: 3130293 - RNA, 14 nt, Human
agcuaggccuggcc

SEQ ID NO: 3130294 - RNA, 15 nt, Human
agcuaggccuggcca

SEQ ID NO: 3130295 - RNA, 12 nt, Human
agcuaggccugg

SEQ ID NO: 3130296 - RNA, 18 nt, Human
agcuagacgagcaggcuu

SEQ ID NO: 3130297 - RNA, 19 nt, Human
agcgugagccacugcaccg

SEQ ID NO: 3130298 - RNA, 22 nt, Human
agcgugagccacugcaccgggc

SEQ ID NO: 3130299 - RNA, 15 nt, Human
agcgugcauaaguua

SEQ ID NO: 3130300 - RNA, 18 nt, Human
ugccaaugggagcucaug

SEQ ID NO: 3130301 - RNA, 18 nt, Human
ugcauuaucuagauacug

SEQ ID NO: 3130302 - RNA, 21 nt, Human
ugcauuaucuagauacuguau

SEQ ID NO: 3130303 - RNA, 22 nt, Human
ugcauuaucuagauacuguauc

SEQ ID NO: 3130304 - RNA, 20 nt, Human
ugcauuaucuagauacugua

SEQ ID NO: 3130305 - RNA, 18 nt, Human
agcggagacggaguccca

SEQ ID NO: 3130306 - RNA, 20 nt, Human
agcggagaaaggaagggcug

SEQ ID NO: 3130307 - RNA, 16 nt, Human
agcggagaaaggaagg

SEQ ID NO: 3130308 - RNA, 17 nt, Human
agccuuccagggguggg

SEQ ID NO: 3130309 - RNA, 16 nt, Human
agccuuccaggggugg

SEQ ID NO: 3130310 - RNA, 14 nt, Human
agccuuccaggggu

SEQ ID NO: 3130311 - RNA, 11 nt, Human
agccuuccagg

SEQ ID NO: 3130312 - RNA, 17 nt, Human
agccugcuccagcuguu

SEQ ID NO: 3130313 - RNA, 16 nt, Human
agccugcuccagcugu

SEQ ID NO: 3130314 - RNA, 15 nt, Human
agccugcuccagcug

SEQ ID NO: 3130315 - RNA, 14 nt, Human
agccugcuccagcu

SEQ ID NO: 3130316 - RNA, 12 nt, Human
ugcauaccacuu

SEQ ID NO: 3130317 - RNA, 22 nt, Human
agccugcuccagcuguucagcu

SEQ ID NO: 3130318 - RNA, 19 nt, Human
agccugcuccagcuguuca

SEQ ID NO: 3130319 - RNA, 22 nt, Human
agccugggugacagagcaagug

SEQ ID NO: 3130320 - RNA, 19 nt, Human
agccugugccucugggacu

SEQ ID NO: 3130321 - RNA, 21 nt, Human
agccugugccucugggacugg

SEQ ID NO: 3130322 - RNA, 22 nt, Human
agccuuagaagucacacaguau

SEQ ID NO: 3130323 - RNA, 23 nt, Human
uggccgggcgcgguggcucacgc

SEQ ID NO: 3130324 - RNA, 13 nt, Human
uggccucuucaga

SEQ ID NO: 3130325 - RNA, 20 nt, Human
aggccugggggcugggcaga

SEQ ID NO: 3130326 - RNA, 18 nt, Human
aggccugggggcugggca

SEQ ID NO: 3130327 - RNA, 12 nt, Human
aggccuggggac

SEQ ID NO: 3130328 - RNA, 12 nt, Human
uggccuggcccc

SEQ ID NO: 3130329 - RNA, 21 nt, Human
uggccuggccccucagggucc

SEQ ID NO: 3130330 - RNA, 18 nt, Human
uggccuggccccucaggg

SEQ ID NO: 3130331 - RNA, 21 nt, Human
uggccaaagccaaagcuaggc

SEQ ID NO: 3130332 - RNA, 23 nt, Human
uggccaaagccaaagcuaggccu

SEQ ID NO: 3130333 - RNA, 23 nt, Human
uggccagugugacaaggauugcu

SEQ ID NO: 3130334 - RNA, 17 nt, Human
aggccccgcccaggcuu

SEQ ID NO: 3130335 - RNA, 16 nt, Human
aggccccgcccaggcu

SEQ ID NO: 3130336 - RNA, 21 nt, Human
aggcccagagggccugcaagg

SEQ ID NO: 3130337 - RNA, 20 nt, Human
aggccagagggagugacaga

SEQ ID NO: 3130338 - RNA, 17 nt, Human
uggcagccuuggcaaac

SEQ ID NO: 3130339 - RNA, 15 nt, Human
uggcagcucaccucu

SEQ ID NO: 3130340 - RNA, 19 nt, Human
uggcagcucaccucucccu

SEQ ID NO: 3130341 - RNA, 16 nt, Human
aggccacaagacccuu

SEQ ID NO: 3130342 - RNA, 14 nt, Human
aggccagagggagu

SEQ ID NO: 3130343 - RNA, 19 nt, Human
aggccacaagacccuugug

SEQ ID NO: 3130344 - RNA, 18 nt, Human
aggccacaagacccuugu

SEQ ID NO: 3130345 - RNA, 17 nt, Human
aggccacaagacccuug

SEQ ID NO: 3130346 - RNA, 13 nt, Human
uggcagccuuggc

SEQ ID NO: 3130347 - RNA, 16 nt, Human
aggccaaggugggagg

SEQ ID NO: 3130348 - RNA, 18 nt, Human
aggcagccaggccacaag

SEQ ID NO: 3130349 - RNA, 16 nt, Human
aggcagccccauucug

SEQ ID NO: 3130350 - RNA, 17 nt, Human
aggcagccccauucugc

SEQ ID NO: 3130351 - RNA, 15 nt, Human
aggccaaaggaagca

SEQ ID NO: 3130352 - RNA, 19 nt, Human
aggccaaaggaagcacaug

SEQ ID NO: 3130353 - RNA, 18 nt, Human
aggccaaaggaagcacau

SEQ ID NO: 3130354 - RNA, 16 nt, Human
aggccaaaggaagcac

SEQ ID NO: 3130355 - RNA, 14 nt, Human
uggaguauauguca

SEQ ID NO: 3130356 - RNA, 13 nt, Human
uggauuguccccg

SEQ ID NO: 3130357 - RNA, 14 nt, Human
aggauccugagcca

SEQ ID NO: 3130358 - RNA, 13 nt, Human
aggauccugagcc

SEQ ID NO: 3130359 - RNA, 21 nt, Human
aggauacaaaagcaugugaga

SEQ ID NO: 3130360 - RNA, 17 nt, Human
uggaaaugggcagagca

SEQ ID NO: 3130361 - RNA, 22 nt, Human
ugcuuguacauaaugcgugcau

SEQ ID NO: 3130362 - RNA, 14 nt, Human
ugcuuguacauaau

SEQ ID NO: 3130363 - RNA, 16 nt, Human
ugcuuguacauaaugc

SEQ ID NO: 3130364 - RNA, 12 nt, Human
ugcuuugugauu

SEQ ID NO: 3130365 - RNA, 14 nt, Human
ugcuuugugauuuu

SEQ ID NO: 3130366 - RNA, 16 nt, Human
ugcuuugugauuuuug

SEQ ID NO: 3130367 - RNA, 14 nt, Human
ugcuuuuggucugu

SEQ ID NO: 3130368 - RNA, 17 nt, Human
ugcuuuuggucugugug

SEQ ID NO: 3130369 - RNA, 14 nt, Human
ugcuuggaggaagg

SEQ ID NO: 3130370 - RNA, 16 nt, Human
ugcuuggaggaaggaa

SEQ ID NO: 3130371 - RNA, 15 nt, Human
ugcuuggaggaagga

SEQ ID NO: 3130372 - RNA, 12 nt, Human
ugcuuguacaua

SEQ ID NO: 3130373 - RNA, 13 nt, Human
ugcuuguacauaa

SEQ ID NO: 3130374 - RNA, 21 nt, Human
ugcuugaggcaacucaucuua

SEQ ID NO: 3130375 - RNA, 23 nt, Human
uggacacagcucuucuccaggcu

SEQ ID NO: 3130376 - RNA, 18 nt, Human
uggacccugaggcccaga

SEQ ID NO: 3130377 - RNA, 16 nt, Human
uggacccugaggccca

SEQ ID NO: 3130378 - RNA, 20 nt, Human
uggacccugaggcccagagg

SEQ ID NO: 3130379 - RNA, 19 nt, Human
uggacccugaggcccagag

SEQ ID NO: 3130380 - RNA, 21 nt, Human
uggacccugaggcccagaggg

SEQ ID NO: 3130381 - RNA, 23 nt, Human
uggacccuguggaugauaaaaca

SEQ ID NO: 3130382 - RNA, 15 nt, Human
uggacccugaggccc

SEQ ID NO: 3130383 - RNA, 21 nt, Human
uggacacagcucuucuccagg

SEQ ID NO: 3130384 - RNA, 22 nt, Human
uggacacagcucuucuccaggc

SEQ ID NO: 3130385 - RNA, 13 nt, Human
uggacacagcucu

SEQ ID NO: 3130386 - RNA, 14 nt, Human
uggacacagcucuu

SEQ ID NO: 3130387 - RNA, 12 nt, Human
aggaucucuuga

SEQ ID NO: 3130388 - RNA, 19 nt, Human
aggaucucuugagccuggg

SEQ ID NO: 3130389 - RNA, 18 nt, Human
aggaucucuugagccugg

SEQ ID NO: 3130390 - RNA, 17 nt, Human
aggaucucuugagccug

SEQ ID NO: 3130391 - RNA, 15 nt, Human
aggcacccaccauca

SEQ ID NO: 3130392 - RNA, 14 nt, Human
aggcaaugcuggcu

SEQ ID NO: 3130393 - RNA, 20 nt, Human
aggcacccaccaucaugucu

SEQ ID NO: 3130394 - RNA, 21 nt, Human
aggcacccaccaucaugucug

SEQ ID NO: 3130395 - RNA, 22 nt, Human
aggcacccaccaucaugucugg

SEQ ID NO: 3130396 - RNA, 17 nt, Human
aggcaaggcugucaauu

SEQ ID NO: 3130397 - RNA, 22 nt, Human
uggagaagcggcuggcagccca

SEQ ID NO: 3130398 - RNA, 13 nt, Human
uggagaagcggcu

SEQ ID NO: 3130399 - RNA, 19 nt, Human
agcugugcucuggacaggc

SEQ ID NO: 3130400 - RNA, 20 nt, Human
agcugugcucuggacaggca

SEQ ID NO: 3130401 - RNA, 21 nt, Human
agcugugcucuggacaggcau

SEQ ID NO: 3130402 - RNA, 21 nt, Human
ugccuguucagcuccagcuca

SEQ ID NO: 3130403 - RNA, 19 nt, Human
ugccuguugggccaggagc

SEQ ID NO: 3130404 - RNA, 20 nt, Human
ugccuguugggccaggagcc

SEQ ID NO: 3130405 - RNA, 16 nt, Human
ugccuuauggaacacu

SEQ ID NO: 3130406 - RNA, 15 nt, Human
ugccuuauggaacac

SEQ ID NO: 3130407 - RNA, 17 nt, Human
ugccuguucagcuccag

SEQ ID NO: 3130408 - RNA, 13 nt, Human
agcuguucagcug

SEQ ID NO: 3130409 - RNA, 18 nt, Human
ugccuguucagcuccagc

SEQ ID NO: 3130410 - RNA, 20 nt, Human
ugccuguucagcuccagcuc

SEQ ID NO: 3130411 - RNA, 21 nt, Human
agcugcuuuugucuaugggac

SEQ ID NO: 3130412 - RNA, 19 nt, Human
agcugccuguucagcucca

SEQ ID NO: 3130413 - RNA, 21 nt, Human
agcugcuugggcuucauccuc

SEQ ID NO: 3130414 - RNA, 21 nt, Human
agcugccuguucagcuccagc

SEQ ID NO: 3130415 - RNA, 20 nt, Human
agcugcuugggcuucauccu

SEQ ID NO: 3130416 - RNA, 15 nt, Human
ugccuggauggggcu

SEQ ID NO: 3130417 - RNA, 14 nt, Human
ugccuggauggggc

SEQ ID NO: 3130418 - RNA, 20 nt, Human
agcugccuguucagcuccag

SEQ ID NO: 3130419 - RNA, 12 nt, Human
ugcccaggcagg

SEQ ID NO: 3130420 - RNA, 13 nt, Human
ugcccaggcaggu

SEQ ID NO: 3130421 - RNA, 14 nt, Human
ugcccaggcagguc

SEQ ID NO: 3130422 - RNA, 13 nt, Human
ugccucugccucu

SEQ ID NO: 3130423 - RNA, 14 nt, Human
ugccucugccucug

SEQ ID NO: 3130424 - RNA, 13 nt, Human
ugccugcccaggc

SEQ ID NO: 3130425 - RNA, 15 nt, Human
ugccucugccucuga

SEQ ID NO: 3130426 - RNA, 14 nt, Human
ugccugcccaggcc

SEQ ID NO: 3130427 - RNA, 15 nt, Human
ugccugcccaggccc

SEQ ID NO: 3130428 - RNA, 12 nt, Human
ugccucugccuc

SEQ ID NO: 3130429 - RNA, 24 nt, Human
ugccugcccaggccccugccaccc

SEQ ID NO: 3130430 - RNA, 16 nt, Human
ugccugcccaggcccc

SEQ ID NO: 3130431 - RNA, 23 nt, Human
ugcggacagccacggccaggcca

SEQ ID NO: 3130432 - RNA, 21 nt, Human
ugcggacagccacggccaggc

SEQ ID NO: 3130433 - RNA, 22 nt, Human
ugcggacagccacggccaggcc

SEQ ID NO: 3130434 - RNA, 18 nt, Human
ugcgguccacccaggagc

SEQ ID NO: 3130435 - RNA, 17 nt, Human
ugcggugcuaucucccc

SEQ ID NO: 3130436 - RNA, 17 nt, Human
ugcgguccacccaggag

SEQ ID NO: 3130437 - RNA, 19 nt, Human
ugcggccuuuggcuucacg

SEQ ID NO: 3130438 - RNA, 17 nt, Human
ugcggccuuuggcuuca

SEQ ID NO: 3130439 - RNA, 20 nt, Human
ugcgggcuuccuccuggugu

SEQ ID NO: 3130440 - RNA, 14 nt, Human
agcuguucagcugg

SEQ ID NO: 3130441 - RNA, 18 nt, Human
agcuugaggguugggcug

SEQ ID NO: 3130442 - RNA, 14 nt, Human
agcuugaggguugg

SEQ ID NO: 3130443 - RNA, 21 nt, Human
aggaagccagcaggcucucag

SEQ ID NO: 3130444 - RNA, 23 nt, Human
aggaagccagcaggcucucaggc

SEQ ID NO: 3130445 - RNA, 22 nt, Human
aggaagccagcaggcucucagg

SEQ ID NO: 3130446 - RNA, 20 nt, Human
aggaagccgcuggggccagu

SEQ ID NO: 3130447 - RNA, 19 nt, Human
aggaagccgcuggggccag

SEQ ID NO: 3130448 - RNA, 18 nt, Human
aggaagccgcuggggcca

SEQ ID NO: 3130449 - RNA, 18 nt, Human
aggaagccagcaggcucu

SEQ ID NO: 3130450 - RNA, 23 nt, Human
aggaaggaaacccagcucugguc

SEQ ID NO: 3130451 - RNA, 22 nt, Human
aggaaggaaacccagcucuggu

SEQ ID NO: 3130452 - RNA, 20 nt, Human
aggaaggaaacccagcucug

SEQ ID NO: 3130453 - RNA, 14 nt, Human
aggaaaggcuccag

SEQ ID NO: 3130454 - RNA, 13 nt, Human
aggaaaggcucca

SEQ ID NO: 3130455 - RNA, 15 nt, Human
aggaaaggcuccagg

SEQ ID NO: 3130456 - RNA, 11 nt, Human
aggaagcacau

SEQ ID NO: 3130457 - RNA, 17 nt, Human
aggaagcacaugccucu

SEQ ID NO: 3130458 - RNA, 16 nt, Human
aggaagcacaugccuc

SEQ ID NO: 3130459 - RNA, 19 nt, Human
aggaaaucaccgaaaacgu

SEQ ID NO: 3130460 - RNA, 15 nt, Human
aggaaaucaccgaaa

SEQ ID NO: 3130461 - RNA, 14 nt, Human
ugcucuggacaggc

SEQ ID NO: 3130462 - RNA, 15 nt, Human
ugcucuggacaggca

SEQ ID NO: 3130463 - RNA, 16 nt, Human
ugcucuggacaggcau

SEQ ID NO: 3130464 - RNA, 18 nt, Human
ugcuaucucccccagccc

SEQ ID NO: 3130465 - RNA, 20 nt, Human
ugcuaucucccccagcccca

SEQ ID NO: 3130466 - RNA, 19 nt, Human
ugcuaucucccccagcccc

SEQ ID NO: 3130467 - RNA, 17 nt, Human
ugcugucccuuacguga

SEQ ID NO: 3130468 - RNA, 15 nt, Human
ugcugucccuuuucc

SEQ ID NO: 3130469 - RNA, 19 nt, Human
ugcugucccuuacgugagu

SEQ ID NO: 3130470 - RNA, 17 nt, Human
ugcugucccuuuuccuu

SEQ ID NO: 3130471 - RNA, 18 nt, Human
aggacacuaaccacgcug

SEQ ID NO: 3130472 - RNA, 16 nt, Human
ugcuuccagugaggcu

SEQ ID NO: 3130473 - RNA, 23 nt, Human
ugcuucaaggauccugagccaga

SEQ ID NO: 3130474 - RNA, 21 nt, Human
ugcuucaaggauccugagcca

SEQ ID NO: 3130475 - RNA, 20 nt, Human
ugcuucaaggauccugagcc

SEQ ID NO: 3130476 - RNA, 18 nt, Human
ugcugcccugcccaccug

SEQ ID NO: 3130477 - RNA, 17 nt, Human
ugcugcccugcccaccu

SEQ ID NO: 3130478 - RNA, 16 nt, Human
ugcugcccugcccacc

SEQ ID NO: 3130479 - RNA, 13 nt, Human
ugcugcccugccc

SEQ ID NO: 3130480 - RNA, 21 nt, Human
ugcugcccugcccaccuggcc

SEQ ID NO: 3130481 - RNA, 19 nt, Human
ugcugcccugcccaccugg

SEQ ID NO: 3130482 - RNA, 12 nt, Human
ugcugcccugcc

SEQ ID NO: 3130483 - RNA, 11 nt, Human
ugcugcccugu

SEQ ID NO: 3130484 - RNA, 18 nt, Human
ugcuggcuguuggcuggg

SEQ ID NO: 3130485 - RNA, 19 nt, Human
ugcugggauuacaagcgug

SEQ ID NO: 3130486 - RNA, 19 nt, Human
ugcuggcuguuggcugggg

SEQ ID NO: 3130487 - RNA, 21 nt, Human
ugcuggcuguuggcugggggc

SEQ ID NO: 3130488 - RNA, 21 nt, Human
ugcugggauuacaagcgugag

SEQ ID NO: 3130489 - RNA, 17 nt, Human
ugcugggauuacaggug

SEQ ID NO: 3130490 - RNA, 24 nt, Human
agggguucccuuuuuuggcugcug

SEQ ID NO: 3130491 - RNA, 20 nt, Human
agggucucacuauguugccc

SEQ ID NO: 3130492 - RNA, 21 nt, Human
agggucucacuauguugccca

SEQ ID NO: 3130493 - RNA, 22 nt, Human
agggucucacuauguugcccag

SEQ ID NO: 3130494 - RNA, 23 nt, Human
agggucucacuauguugcccagg

SEQ ID NO: 3130495 - RNA, 15 nt, Human
aggggguggccuccc

SEQ ID NO: 3130496 - RNA, 18 nt, Human
aggggguggccucccaac

SEQ ID NO: 3130497 - RNA, 17 nt, Human
aggggguggccucccaa

SEQ ID NO: 3130498 - RNA, 22 nt, Human
aggggugggacacccugugaug

SEQ ID NO: 3130499 - RNA, 20 nt, Human
aggggugggacacccuguga

SEQ ID NO: 3130500 - RNA, 18 nt, Human
aggggugggacacccugu

SEQ ID NO: 3130501 - RNA, 19 nt, Human
uggggucacucuggcagcu

SEQ ID NO: 3130502 - RNA, 23 nt, Human
aggggagcaaaaucgaugcagug

SEQ ID NO: 3130503 - RNA, 16 nt, Human
ugguacuaacuuuccu

SEQ ID NO: 3130504 - RNA, 22 nt, Human
agggucucacucugucgcccag

SEQ ID NO: 3130505 - RNA, 21 nt, Human
agggucucacucugucgccca

SEQ ID NO: 3130506 - RNA, 22 nt, Human
uggguggcaccagcagccugga

SEQ ID NO: 3130507 - RNA, 22 nt, Human
ugggugcuuggaggaaggaaac

SEQ ID NO: 3130508 - RNA, 19 nt, Human
ugggugcuuggaggaagga

SEQ ID NO: 3130509 - RNA, 15 nt, Human
ugggugcuuggagga

SEQ ID NO: 3130510 - RNA, 16 nt, Human
uggucugacccacugc

SEQ ID NO: 3130511 - RNA, 17 nt, Human
uggucugacccacugcu

SEQ ID NO: 3130512 - RNA, 21 nt, Human
aggguggugaccucugccuga

SEQ ID NO: 3130513 - RNA, 22 nt, Human
aggguguccggucccuguccca

SEQ ID NO: 3130514 - RNA, 13 nt, Human
aggguuauaauaa

SEQ ID NO: 3130515 - RNA, 13 nt, Human
uggucccacccca

SEQ ID NO: 3130516 - RNA, 16 nt, Human
uggucucaaacucuug

SEQ ID NO: 3130517 - RNA, 19 nt, Human
uggucuacacugugcugag

SEQ ID NO: 3130518 - RNA, 16 nt, Human
uggucccaccccacac

SEQ ID NO: 3130519 - RNA, 17 nt, Human
uggucucaaacucuuga

SEQ ID NO: 3130520 - RNA, 23 nt, Human
uggucucaaacucuugaccucag

SEQ ID NO: 3130521 - RNA, 15 nt, Human
uggucccaccccaca

SEQ ID NO: 3130522 - RNA, 14 nt, Human
uggucccaccccac

SEQ ID NO: 3130523 - RNA, 18 nt, Human
uggucaccaaaucagcug

SEQ ID NO: 3130524 - RNA, 22 nt, Human
uggucagauuugaacucuucaa

SEQ ID NO: 3130525 - RNA, 17 nt, Human
aggucauuuuuuuuaag

SEQ ID NO: 3130526 - RNA, 12 nt, Human
aggucagagccu

SEQ ID NO: 3130527 - RNA, 18 nt, Human
aggguuggccccugcccg

SEQ ID NO: 3130528 - RNA, 23 nt, Human
aggguuggccccugcccggcugc

SEQ ID NO: 3130529 - RNA, 17 nt, Human
aggguuggccccugccc

SEQ ID NO: 3130530 - RNA, 17 nt, Human
agguagaaauaucugaa

SEQ ID NO: 3130531 - RNA, 19 nt, Human
agguagaaauaucugaaaa

SEQ ID NO: 3130532 - RNA, 23 nt, Human
agguagaaauaucugaaaaugua

SEQ ID NO: 3130533 - RNA, 21 nt, Human
agguaugcaaucaaaucugcu

SEQ ID NO: 3130534 - RNA, 17 nt, Human
agguaugcaaucaaauc

SEQ ID NO: 3130535 - RNA, 17 nt, Human
ugggcaacccccagccu

SEQ ID NO: 3130536 - RNA, 20 nt, Human
ugggcaacccccagccugcu

SEQ ID NO: 3130537 - RNA, 20 nt, Human
ugggcccaaugcacuuuguu

SEQ ID NO: 3130538 - RNA, 16 nt, Human
ugggccaggagccucc

SEQ ID NO: 3130539 - RNA, 14 nt, Human
ugggccaggagccu

SEQ ID NO: 3130540 - RNA, 13 nt, Human
ugggccaggagcc

SEQ ID NO: 3130541 - RNA, 17 nt, Human
ugggaggucaaggcugc

SEQ ID NO: 3130542 - RNA, 23 nt, Human
ugggaggucaaggcugcagugag

SEQ ID NO: 3130543 - RNA, 20 nt, Human
ugggaggucaaggcugcagu

SEQ ID NO: 3130544 - RNA, 19 nt, Human
ugggaggucaaggcugcag

SEQ ID NO: 3130545 - RNA, 18 nt, Human
ugggaggucaaggcugca

SEQ ID NO: 3130546 - RNA, 16 nt, Human
ugggcaacccccagcc

SEQ ID NO: 3130547 - RNA, 17 nt, Human
agggaggugaccccagg

SEQ ID NO: 3130548 - RNA, 17 nt, Human
agggagugacagaggca

SEQ ID NO: 3130549 - RNA, 18 nt, Human
agggagugacagaggcag

SEQ ID NO: 3130550 - RNA, 19 nt, Human
agggagugacagaggcagc

SEQ ID NO: 3130551 - RNA, 15 nt, Human
agggagggcuucugc

SEQ ID NO: 3130552 - RNA, 23 nt, Human
agggcccagagaggguggugacc

SEQ ID NO: 3130553 - RNA, 18 nt, Human
agggcccagagagggugg

SEQ ID NO: 3130554 - RNA, 16 nt, Human
uggggcccugccuccu

SEQ ID NO: 3130555 - RNA, 15 nt, Human
uggggcccugccucc

SEQ ID NO: 3130556 - RNA, 18 nt, Human
uggggcggugagagggga

SEQ ID NO: 3130557 - RNA, 23 nt, Human
uggggaccucaggccugggggcu

SEQ ID NO: 3130558 - RNA, 12 nt, Human
uggggagaaagu

SEQ ID NO: 3130559 - RNA, 14 nt, Human
uggggcccugccuc

SEQ ID NO: 3130560 - RNA, 15 nt, Human
ugggguacccacugc

SEQ ID NO: 3130561 - RNA, 16 nt, Human
ugggguacccacugcu

SEQ ID NO: 3130562 - RNA, 20 nt, Human
ugggguacccacugcucugg

SEQ ID NO: 3130563 - RNA, 18 nt, Human
uggggucacucuggcagc

SEQ ID NO: 3130564 - RNA, 17 nt, Human
uggggucacucuggcag

SEQ ID NO: 3130565 - RNA, 14 nt, Human
ugggguacccacug

SEQ ID NO: 3130566 - RNA, 20 nt, Human
uggggcugcaccggcuggcc

SEQ ID NO: 3130567 - RNA, 23 nt, Human
agggcuucugccauuucugagau

SEQ ID NO: 3130568 - RNA, 15 nt, Human
ugggcucccuuccca

SEQ ID NO: 3130569 - RNA, 19 nt, Human
ugggcucccuucccaccuc

SEQ ID NO: 3130570 - RNA, 18 nt, Human
ugggcucccuucccaccu

SEQ ID NO: 3130571 - RNA, 20 nt, Human
ugggcucccuucccaccucu

SEQ ID NO: 3130572 - RNA, 19 nt, Human
ugggcuggguucuacccag

SEQ ID NO: 3130573 - RNA, 18 nt, Human
ugggcuggguucuaccca

SEQ ID NO: 3130574 - RNA, 13 nt, Human
uggggaccucagg

SEQ ID NO: 3130575 - RNA, 18 nt, Human
uggggaccagagcugcca

SEQ ID NO: 3130576 - RNA, 17 nt, Human
uggggaccagagcugcc

SEQ ID NO: 3130577 - RNA, 15 nt, Human
uggggaccagagcug

SEQ ID NO: 3130578 - RNA, 14 nt, Human
uggggaccagagcu

SEQ ID NO: 3130579 - RNA, 22 nt, Human
agucagaaguuucugccgcagc

SEQ ID NO: 3130580 - RNA, 15 nt, Human
ugucgggcaugacac

SEQ ID NO: 3130581 - RNA, 14 nt, Human
ugucgggcaugaca

SEQ ID NO: 3130582 - RNA, 14 nt, Human
ugucgcccagucug

SEQ ID NO: 3130583 - RNA, 15 nt, Human
ugucgcccagucugg

SEQ ID NO: 3130584 - RNA, 12 nt, Human
ugucgggcauga

SEQ ID NO: 3130585 - RNA, 14 nt, Human
uguccgagcuuuga

SEQ ID NO: 3130586 - RNA, 13 nt, Human
uguccgagcuuug

SEQ ID NO: 3130587 - RNA, 17 nt, Human
ugucccuuuuccuuuuu

SEQ ID NO: 3130588 - RNA, 16 nt, Human
agucucacuguugccc

SEQ ID NO: 3130589 - RNA, 17 nt, Human
agucucacuguugccca

SEQ ID NO: 3130590 - RNA, 23 nt, Human
aguccgaaagggacuuggaagcu

SEQ ID NO: 3130591 - RNA, 12 nt, Human
agucccugccaa

SEQ ID NO: 3130592 - RNA, 16 nt, Human
aguaggaagacuuugg

SEQ ID NO: 3130593 - RNA, 22 nt, Human
aguaggaagacuuuggaaagac

SEQ ID NO: 3130594 - RNA, 19 nt, Human
aguaggaagacuuuggaaa

SEQ ID NO: 3130595 - RNA, 18 nt, Human
aguaggaagacuuuggaa

SEQ ID NO: 3130596 - RNA, 17 nt, Human
aguaggaagacuuugga

SEQ ID NO: 3130597 - RNA, 14 nt, Human
uguauuuuuuuacu

SEQ ID NO: 3130598 - RNA, 19 nt, Human
ugucaagagggucugagga

SEQ ID NO: 3130599 - RNA, 15 nt, Human
ugucaagccauaauu

SEQ ID NO: 3130600 - RNA, 13 nt, Human
agucaccaagccc

SEQ ID NO: 3130601 - RNA, 16 nt, Human
ugucagcugaaccugg

SEQ ID NO: 3130602 - RNA, 18 nt, Human
agucacugagacagcccg

SEQ ID NO: 3130603 - RNA, 19 nt, Human
agucacugagacagcccgg

SEQ ID NO: 3130604 - RNA, 19 nt, Human
ugucagcugaaccugggua

SEQ ID NO: 3130605 - RNA, 20 nt, Human
aggugggauccuccaggugc

SEQ ID NO: 3130606 - RNA, 18 nt, Human
aggugggauccuccaggu

SEQ ID NO: 3130607 - RNA, 21 nt, Human
aggugcacaagcuccaagcuc

SEQ ID NO: 3130608 - RNA, 15 nt, Human
aggugcacaagcucc

SEQ ID NO: 3130609 - RNA, 20 nt, Human
aggugcacaagcuccaagcu

SEQ ID NO: 3130610 - RNA, 18 nt, Human
aggugcacaagcuccaag

SEQ ID NO: 3130611 - RNA, 17 nt, Human
aggugcacaagcuccaa

SEQ ID NO: 3130612 - RNA, 16 nt, Human
aggugcacaagcucca

SEQ ID NO: 3130613 - RNA, 23 nt, Human
aggucuugaacuccuggccucaa

SEQ ID NO: 3130614 - RNA, 22 nt, Human
aggucuugaacuccuggccuca

SEQ ID NO: 3130615 - RNA, 14 nt, Human
agguuggugggggc

SEQ ID NO: 3130616 - RNA, 17 nt, Human
aggugguuauggagagg

SEQ ID NO: 3130617 - RNA, 23 nt, Human
uguaauuaaguacuauguaucaa

SEQ ID NO: 3130618 - RNA, 11 nt, Human
agguuuuccug

SEQ ID NO: 3130619 - RNA, 20 nt, Human
aguaagccgugauuuucauu

SEQ ID NO: 3130620 - RNA, 17 nt, Human
aguaauaugcacacauu

SEQ ID NO: 3130621 - RNA, 20 nt, Human
aguaauaugcacacauuuuu

SEQ ID NO: 3130622 - RNA, 18 nt, Human
aguaauaugcacacauuu

SEQ ID NO: 3130623 - RNA, 19 nt, Human
aguaauaugcacacauuuu

SEQ ID NO: 3130624 - RNA, 13 nt, Human
uguagagugggag

SEQ ID NO: 3130625 - RNA, 14 nt, Human
uguaauuugugaua

SEQ ID NO: 3130626 - RNA, 16 nt, Human
aguacacuguuucaaa

SEQ ID NO: 3130627 - RNA, 14 nt, Human
aguacacuguuuca

SEQ ID NO: 3130628 - RNA, 20 nt, Human
uguaggaagguuaauguuca

SEQ ID NO: 3130629 - RNA, 18 nt, Human
uguaggaagguuaauguu

SEQ ID NO: 3130630 - RNA, 12 nt, Human
aguagagacagg

SEQ ID NO: 3130631 - RNA, 16 nt, Human
agugagucgaggacag

SEQ ID NO: 3130632 - RNA, 22 nt, Human
agugauucuccugccucagccu

SEQ ID NO: 3130633 - RNA, 24 nt, Human
agugauucuccugccucagccucc

SEQ ID NO: 3130634 - RNA, 14 nt, Human
agugccaaaaacaa

SEQ ID NO: 3130635 - RNA, 16 nt, Human
agugccaaaaacaaca

SEQ ID NO: 3130636 - RNA, 14 nt, Human
agugcccacaggau

SEQ ID NO: 3130637 - RNA, 22 nt, Human
ugugcucugaucauccacugug

SEQ ID NO: 3130638 - RNA, 12 nt, Human
ugugcucugauc

SEQ ID NO: 3130639 - RNA, 23 nt, Human
ugugcucugaucauccacugugc

SEQ ID NO: 3130640 - RNA, 15 nt, Human
ugugcucuggacagg

SEQ ID NO: 3130641 - RNA, 20 nt, Human
agucucacuguugcccaggc

SEQ ID NO: 3130642 - RNA, 18 nt, Human
agucucacuguugcccag

SEQ ID NO: 3130643 - RNA, 19 nt, Human
agucucacuguugcccagg

SEQ ID NO: 3130644 - RNA, 20 nt, Human
ugugcccuaaaguguauuuu

SEQ ID NO: 3130645 - RNA, 21 nt, Human
ugugcccuaaaguguauuuuu

SEQ ID NO: 3130646 - RNA, 15 nt, Human
ugugcugcccugccc

SEQ ID NO: 3130647 - RNA, 21 nt, Human
uguggagaagcggcuggcagc

SEQ ID NO: 3130648 - RNA, 14 nt, Human
ugugcugcccugcc

SEQ ID NO: 3130649 - RNA, 13 nt, Human
ugugcugcccugc

SEQ ID NO: 3130650 - RNA, 12 nt, Human
ugugcugcccug

SEQ ID NO: 3130651 - RNA, 19 nt, Human
ugugcucuggacaggcaug

SEQ ID NO: 3130652 - RNA, 16 nt, Human
ugugcucuggacaggc

SEQ ID NO: 3130653 - RNA, 18 nt, Human
ugugcucuggacaggcau

SEQ ID NO: 3130654 - RNA, 13 nt, Human
ugugucucuuggu

SEQ ID NO: 3130655 - RNA, 17 nt, Human
ugugucagguggggcag

SEQ ID NO: 3130656 - RNA, 19 nt, Human
ugugucagguggggcagcu

SEQ ID NO: 3130657 - RNA, 14 nt, Human
uguguuaugaagca

SEQ ID NO: 3130658 - RNA, 23 nt, Human
uguguuaucacccagaagaaaau

SEQ ID NO: 3130659 - RNA, 19 nt, Human
uguuaaugauagcuacugu

SEQ ID NO: 3130660 - RNA, 11 nt, Human
aguggaaaaau

SEQ ID NO: 3130661 - RNA, 19 nt, Human
aguggaaaaauagccugcc

SEQ ID NO: 3130662 - RNA, 18 nt, Human
aguggaaaaauagccugc

SEQ ID NO: 3130663 - RNA, 21 nt, Human
uguuaacauggacaugaucuu

SEQ ID NO: 3130664 - RNA, 20 nt, Human
agugcugggauuacaagcgu

SEQ ID NO: 3130665 - RNA, 22 nt, Human
agugcugcauuuaaaagauaca

SEQ ID NO: 3130666 - RNA, 19 nt, Human
agugcugggauuacaggug

SEQ ID NO: 3130667 - RNA, 15 nt, Human
agugccuuacacaau

SEQ ID NO: 3130668 - RNA, 17 nt, Human
agugccuuacacaaugg

SEQ ID NO: 3130669 - RNA, 20 nt, Human
agugcugcauuuaaaagaua

SEQ ID NO: 3130670 - RNA, 16 nt, Human
uguggucccaccccac

SEQ ID NO: 3130671 - RNA, 16 nt, Human
agugcuuccaaggaug

SEQ ID NO: 3130672 - RNA, 12 nt, Human
ugugguuucauu

SEQ ID NO: 3130673 - RNA, 19 nt, Human
ugugucagcauagaaguaa

SEQ ID NO: 3130674 - RNA, 20 nt, Human
ugugguguuuccuggcacug

SEQ ID NO: 3130675 - RNA, 15 nt, Human
uguugcccaggcugg

SEQ ID NO: 3130676 - RNA, 13 nt, Human
uguugcccaggcu

SEQ ID NO: 3130677 - RNA, 19 nt, Human
uguucuugguuuguaaauu

SEQ ID NO: 3130678 - RNA, 20 nt, Human
uguucuugguuuguaaauua

SEQ ID NO: 3130679 - RNA, 22 nt, Human
uguucuugguuuguaaauuaac

SEQ ID NO: 3130680 - RNA, 18 nt, Human
uguucuuaguuugcaguu

SEQ ID NO: 3130681 - RNA, 18 nt, Human
uguucuagcauggcugcc

SEQ ID NO: 3130682 - RNA, 16 nt, Human
aguucaauucucauuu

SEQ ID NO: 3130683 - RNA, 23 nt, Human
aguuccucauuagcauuuugcua

SEQ ID NO: 3130684 - RNA, 14 nt, Human
uguuuauugucaaa

SEQ ID NO: 3130685 - RNA, 20 nt, Human
uguuuagauaauacaccacu

SEQ ID NO: 3130686 - RNA, 12 nt, Human
auaauacaccac

SEQ ID NO: 3130687 - RNA, 18 nt, Human
auaauacaccacuacauu

SEQ ID NO: 3130688 - RNA, 20 nt, Human
auaauacaccacuacauucu

SEQ ID NO: 3130689 - RNA, 15 nt, Human
auaaugcgugcauac

SEQ ID NO: 3130690 - RNA, 15 nt, Human
auaaugaaugaaaca

SEQ ID NO: 3130691 - RNA, 22 nt, Human
auaauugacaggauuauuggaa

SEQ ID NO: 3130692 - RNA, 15 nt, Human
uuaguuucuccaagc

SEQ ID NO: 3130693 - RNA, 22 nt, Human
uuaguuugcaguuacacuaaaa

SEQ ID NO: 3130694 - RNA, 18 nt, Human
uuagguuggcaaaaaggc

SEQ ID NO: 3130695 - RNA, 16 nt, Human
uuaggugaggaagcaa

SEQ ID NO: 3130696 - RNA, 16 nt, Human
uuaggugugacugaau

SEQ ID NO: 3130697 - RNA, 20 nt, Human
uuagggaaggauacaaaagc

SEQ ID NO: 3130698 - RNA, 15 nt, Human
uuaggugaggaagca

SEQ ID NO: 3130699 - RNA, 18 nt, Human
uuagcaaauucuguuuuu

SEQ ID NO: 3130700 - RNA, 18 nt, Human
uuagccaagugugguaga

SEQ ID NO: 3130701 - RNA, 13 nt, Human
uuagacagagucu

SEQ ID NO: 3130702 - RNA, 20 nt, Human
uuagacagagucucacuguu

SEQ ID NO: 3130703 - RNA, 13 nt, Human
uuagacagucccu

SEQ ID NO: 3130704 - RNA, 19 nt, Human
uuacccucauguucuuaau

SEQ ID NO: 3130705 - RNA, 20 nt, Human
auaaccaguguuguggauuu

SEQ ID NO: 3130706 - RNA, 11 nt, Human
auaaauuauuu

SEQ ID NO: 3130707 - RNA, 16 nt, Human
uuaaaaaucucaaauu

SEQ ID NO: 3130708 - RNA, 14 nt, Human
uuaaaaaucucaaa

SEQ ID NO: 3130709 - RNA, 15 nt, Human
uuaaaaaucucaaau

SEQ ID NO: 3130710 - RNA, 15 nt, Human
uuaaauaaugugaaa

SEQ ID NO: 3130711 - RNA, 13 nt, Human
uuaaauaauguga

SEQ ID NO: 3130712 - RNA, 16 nt, Human
uuaaauaaugugaaac

SEQ ID NO: 3130713 - RNA, 18 nt, Human
uuaaauaaugugaaacug

SEQ ID NO: 3130714 - RNA, 20 nt, Human
uuaacagaaauguacagcaa

SEQ ID NO: 3130715 - RNA, 19 nt, Human
uuaacagaaauguacagca

SEQ ID NO: 3130716 - RNA, 16 nt, Human
uuaacagaaauguaca

SEQ ID NO: 3130717 - RNA, 13 nt, Human
aguugggcuuccu

SEQ ID NO: 3130718 - RNA, 19 nt, Human
aguugggcuuccucauagu

SEQ ID NO: 3130719 - RNA, 23 nt, Human
aguugccagucaccccggccacc

SEQ ID NO: 3130720 - RNA, 13 nt, Human
uuaaaaaaaaucc

SEQ ID NO: 3130721 - RNA, 17 nt, Human
aguuggucccccuucca

SEQ ID NO: 3130722 - RNA, 13 nt, Human
aguuggucccccu

SEQ ID NO: 3130723 - RNA, 11 nt, Human
aguuggucccc

SEQ ID NO: 3130724 - RNA, 22 nt, Human
uuaaucauuaggugugacugaa

SEQ ID NO: 3130725 - RNA, 23 nt, Human
uuaaucauuaggugugacugaau

SEQ ID NO: 3130726 - RNA, 13 nt, Human
uuaaucauuaggu

SEQ ID NO: 3130727 - RNA, 19 nt, Human
uuaaugaaagacuguacaa

SEQ ID NO: 3130728 - RNA, 22 nt, Human
uuaaucugguuuauuuuuguuc

SEQ ID NO: 3130729 - RNA, 18 nt, Human
uuaaugaaagacuguaca

SEQ ID NO: 3130730 - RNA, 22 nt, Human
uuaagaaagacuaucuaaaugu

SEQ ID NO: 3130731 - RNA, 9 nt, Human
uuaaggugg

SEQ ID NO: 3130732 - RNA, 19 nt, Human
uuaagugcugcauuuaaaa

SEQ ID NO: 3130733 - RNA, 15 nt, Human
uuaagugcugcauuu

SEQ ID NO: 3130734 - RNA, 16 nt, Human
uuaagugcugcauuua

SEQ ID NO: 3130735 - RNA, 14 nt, Human
uuaagugcugcauu

SEQ ID NO: 3130736 - RNA, 23 nt, Human
aguuuuuauggcuuuugugcauu

SEQ ID NO: 3130737 - RNA, 21 nt, Human
uuaagaaaaaggaugcacaga

SEQ ID NO: 3130738 - RNA, 19 nt, Human
uuaagaaaaaggaugcaca

SEQ ID NO: 3130739 - RNA, 20 nt, Human
uuaagaaaaaggaugcacag

SEQ ID NO: 3130740 - RNA, 23 nt, Human
ucaaggauccugagccagauuuc

SEQ ID NO: 3130741 - RNA, 17 nt, Human
ucaagagggucugagga

SEQ ID NO: 3130742 - RNA, 16 nt, Human
ucaagugauucuccug

SEQ ID NO: 3130743 - RNA, 17 nt, Human
ucaagugauucuccugc

SEQ ID NO: 3130744 - RNA, 17 nt, Human
ucaauaggaaaaacuga

SEQ ID NO: 3130745 - RNA, 19 nt, Human
ucaauaggaaaaacugauu

SEQ ID NO: 3130746 - RNA, 18 nt, Human
ucaauaggaaaaacugau

SEQ ID NO: 3130747 - RNA, 22 nt, Human
ucaauaggaaaaacugauuuuu

SEQ ID NO: 3130748 - RNA, 21 nt, Human
acauuuuuuaaaugcaccugg

SEQ ID NO: 3130749 - RNA, 13 nt, Human
acauuuuucuuag

SEQ ID NO: 3130750 - RNA, 23 nt, Human
acauuuuucuuagggaaggauac

SEQ ID NO: 3130751 - RNA, 15 nt, Human
acauuuuuaagugcu

SEQ ID NO: 3130752 - RNA, 18 nt, Human
acauuuuuaagugcugca

SEQ ID NO: 3130753 - RNA, 21 nt, Human
acauugcggacagccacggcc

SEQ ID NO: 3130754 - RNA, 22 nt, Human
acauugcggacagccacggcca

SEQ ID NO: 3130755 - RNA, 15 nt, Human
ucacagaugggugcu

SEQ ID NO: 3130756 - RNA, 14 nt, Human
ucacagaugggugc

SEQ ID NO: 3130757 - RNA, 16 nt, Human
ucacauauugauuucc

SEQ ID NO: 3130758 - RNA, 18 nt, Human
ucacauauugauuuccgu

SEQ ID NO: 3130759 - RNA, 20 nt, Human
ucacauauugauuuccguua

SEQ ID NO: 3130760 - RNA, 17 nt, Human
ucaccagccccagugcc

SEQ ID NO: 3130761 - RNA, 16 nt, Human
ucaccagccccagugc

SEQ ID NO: 3130762 - RNA, 17 nt, Human
accacacagaggcugcc

SEQ ID NO: 3130763 - RNA, 15 nt, Human
accacacccagccca

SEQ ID NO: 3130764 - RNA, 16 nt, Human
accacacccagcccac

SEQ ID NO: 3130765 - RNA, 20 nt, Human
accacacccagcccacuucu

SEQ ID NO: 3130766 - RNA, 21 nt, Human
accacacccagcccacuucug

SEQ ID NO: 3130767 - RNA, 23 nt, Human
accacacccagcccacuucugcc

SEQ ID NO: 3130768 - RNA, 16 nt, Human
accaacauacucccau

SEQ ID NO: 3130769 - RNA, 20 nt, Human
accaaccacugcgaccacaa

SEQ ID NO: 3130770 - RNA, 16 nt, Human
accaaaucagcugcua

SEQ ID NO: 3130771 - RNA, 19 nt, Human
accaaaucagcugcuacua

SEQ ID NO: 3130772 - RNA, 15 nt, Human
acauggaguauaugu

SEQ ID NO: 3130773 - RNA, 19 nt, Human
acauggaguauaugucaag

SEQ ID NO: 3130774 - RNA, 23 nt, Human
acaugagcaucaggccaggcccu

SEQ ID NO: 3130775 - RNA, 20 nt, Human
acaugagcaucaggccaggc

SEQ ID NO: 3130776 - RNA, 20 nt, Human
acauggaauaacauguaauu

SEQ ID NO: 3130777 - RNA, 14 nt, Human
acauggaaguacua

SEQ ID NO: 3130778 - RNA, 18 nt, Human
acauggaauaacauguaa

SEQ ID NO: 3130779 - RNA, 21 nt, Human
acaugucuuuucuugcaugag

SEQ ID NO: 3130780 - RNA, 22 nt, Human
ucaaagauauuuugcuuuguga

SEQ ID NO: 3130781 - RNA, 13 nt, Human
ucaaagauauuuu

SEQ ID NO: 3130782 - RNA, 20 nt, Human
ucaaagauauuuugcuuugu

SEQ ID NO: 3130783 - RNA, 16 nt, Human
ucaaaagcugggcagg

SEQ ID NO: 3130784 - RNA, 13 nt, Human
acaugagcaucag

SEQ ID NO: 3130785 - RNA, 23 nt, Human
acaugaaaacacauuuuucuuag

SEQ ID NO: 3130786 - RNA, 22 nt, Human
acaugaaaacacauuuuucuua

SEQ ID NO: 3130787 - RNA, 15 nt, Human
acaugaaaacacauu

SEQ ID NO: 3130788 - RNA, 14 nt, Human
acaucuugcucugc

SEQ ID NO: 3130789 - RNA, 19 nt, Human
acaucuuggucagauuuga

SEQ ID NO: 3130790 - RNA, 22 nt, Human
acaucuugcucugcugacagac

SEQ ID NO: 3130791 - RNA, 17 nt, Human
acaucuugcucugcuga

SEQ ID NO: 3130792 - RNA, 15 nt, Human
acaucuugcucugcu

SEQ ID NO: 3130793 - RNA, 16 nt, Human
acaucuugcucugcug

SEQ ID NO: 3130794 - RNA, 17 nt, Human
uauuuuuguagagccag

SEQ ID NO: 3130795 - RNA, 20 nt, Human
uauuuugcuuugugauuuuu

SEQ ID NO: 3130796 - RNA, 13 nt, Human
uauuuugcuuugu

SEQ ID NO: 3130797 - RNA, 15 nt, Human
uauuuugcuuuguga

SEQ ID NO: 3130798 - RNA, 21 nt, Human
acccuccuuucaccacaugug

SEQ ID NO: 3130799 - RNA, 22 nt, Human
acccgggaagggggcugggaca

SEQ ID NO: 3130800 - RNA, 14 nt, Human
acccucauguucuu

SEQ ID NO: 3130801 - RNA, 15 nt, Human
acccucauguucuua

SEQ ID NO: 3130802 - RNA, 17 nt, Human
acccucauguucuuaau

SEQ ID NO: 3130803 - RNA, 20 nt, Human
acccgggaagggggcuggga

SEQ ID NO: 3130804 - RNA, 19 nt, Human
acccgggaagggggcuggg

SEQ ID NO: 3130805 - RNA, 21 nt, Human
acccugaggcccagagggccu

SEQ ID NO: 3130806 - RNA, 19 nt, Human
acccugaggcccagagggc

SEQ ID NO: 3130807 - RNA, 17 nt, Human
acccugaggcccagagg

SEQ ID NO: 3130808 - RNA, 11 nt, Human
acccugaggcc

SEQ ID NO: 3130809 - RNA, 23 nt, Human
acccugaggcccagagggccugc

SEQ ID NO: 3130810 - RNA, 17 nt, Human
ucaggcaggugggaugg

SEQ ID NO: 3130811 - RNA, 18 nt, Human
ucaggcaggugggaugga

SEQ ID NO: 3130812 - RNA, 13 nt, Human
acccccagccugc

SEQ ID NO: 3130813 - RNA, 12 nt, Human
acccccagccug

SEQ ID NO: 3130814 - RNA, 16 nt, Human
ucaggccaggcccucu

SEQ ID NO: 3130815 - RNA, 15 nt, Human
ucaggccaggcccuc

SEQ ID NO: 3130816 - RNA, 14 nt, Human
ucaggccaggcccu

SEQ ID NO: 3130817 - RNA, 13 nt, Human
ucaggccaggccc

SEQ ID NO: 3130818 - RNA, 12 nt, Human
ucaggccaggcc

SEQ ID NO: 3130819 - RNA, 13 nt, Human
ucaggccagcugc

SEQ ID NO: 3130820 - RNA, 19 nt, Human
acccgcuaagagggaggga

SEQ ID NO: 3130821 - RNA, 18 nt, Human
ucaggguuggccccugcc

SEQ ID NO: 3130822 - RNA, 19 nt, Human
ucaggguuggccccugccc

SEQ ID NO: 3130823 - RNA, 17 nt, Human
ucaggguuggccccugc

SEQ ID NO: 3130824 - RNA, 19 nt, Human
ucaggggugugcggccuuu

SEQ ID NO: 3130825 - RNA, 12 nt, Human
ucaggggugugc

SEQ ID NO: 3130826 - RNA, 18 nt, Human
ucaggccaggcccucugc

SEQ ID NO: 3130827 - RNA, 17 nt, Human
ucaggccaggcccucug

SEQ ID NO: 3130828 - RNA, 19 nt, Human
ucaggccaggcccucugcc

SEQ ID NO: 3130829 - RNA, 22 nt, Human
ucaggugucccugcacuugcag

SEQ ID NO: 3130830 - RNA, 13 nt, Human
ucaguaagccgug

SEQ ID NO: 3130831 - RNA, 13 nt, Human
ucaguaauaacuc

SEQ ID NO: 3130832 - RNA, 20 nt, Human
acccuugccgucuaccugag

SEQ ID NO: 3130833 - RNA, 20 nt, Human
accgaaaacguggcugcuuc

SEQ ID NO: 3130834 - RNA, 15 nt, Human
ucaggugucccugca

SEQ ID NO: 3130835 - RNA, 23 nt, Human
ucagguggggucacucuggcagc

SEQ ID NO: 3130836 - RNA, 17 nt, Human
ucaggugucccugcacu

SEQ ID NO: 3130837 - RNA, 18 nt, Human
ucaggugucccugcacuu

SEQ ID NO: 3130838 - RNA, 22 nt, Human
accgaaaacguggcugcuucaa

SEQ ID NO: 3130839 - RNA, 21 nt, Human
accgaaaacguggcugcuuca

SEQ ID NO: 3130840 - RNA, 22 nt, Human
ucagguggggucacucuggcag

SEQ ID NO: 3130841 - RNA, 21 nt, Human
ucagguggggucacucuggca

SEQ ID NO: 3130842 - RNA, 23 nt, Human
ucagugccuuauggaacacucug

SEQ ID NO: 3130843 - RNA, 22 nt, Human
ucagugccuuauggaacacucu

SEQ ID NO: 3130844 - RNA, 20 nt, Human
ucagugccuuauggaacacu

SEQ ID NO: 3130845 - RNA, 19 nt, Human
ucagugccuuauggaacac

SEQ ID NO: 3130846 - RNA, 14 nt, Human
ucaguggcagcugc

SEQ ID NO: 3130847 - RNA, 15 nt, Human
ucaguggcagcugcu

SEQ ID NO: 3130848 - RNA, 17 nt, Human
ucaguuguuaguguguc

SEQ ID NO: 3130849 - RNA, 16 nt, Human
ucaguggcagcugcuu

SEQ ID NO: 3130850 - RNA, 18 nt, Human
ucagugccuuauggaaca

SEQ ID NO: 3130851 - RNA, 13 nt, Human
ucaguggcagcug

SEQ ID NO: 3130852 - RNA, 19 nt, Human
ucaguuguuagugugucuu

SEQ ID NO: 3130853 - RNA, 21 nt, Human
accauuuugggguacccacug

SEQ ID NO: 3130854 - RNA, 23 nt, Human
accauuuugcugucccuuuuccu

SEQ ID NO: 3130855 - RNA, 22 nt, Human
accauuuugcugucccuuuucc

SEQ ID NO: 3130856 - RNA, 18 nt, Human
accauucuccaccugcca

SEQ ID NO: 3130857 - RNA, 19 nt, Human
accauucuccaccugccag

SEQ ID NO: 3130858 - RNA, 21 nt, Human
accauucuccaccugccaggg

SEQ ID NO: 3130859 - RNA, 20 nt, Human
accauucuccaccugccagg

SEQ ID NO: 3130860 - RNA, 20 nt, Human
acccacugcuuuuggucugu

SEQ ID NO: 3130861 - RNA, 15 nt, Human
ucacuguugcccagg

SEQ ID NO: 3130862 - RNA, 18 nt, Human
ucacugcaaccuccgccu

SEQ ID NO: 3130863 - RNA, 14 nt, Human
ucacuguugcccag

SEQ ID NO: 3130864 - RNA, 22 nt, Human
ucaccagccccagugcccacag

SEQ ID NO: 3130865 - RNA, 20 nt, Human
ucacuauguugcccaggcag

SEQ ID NO: 3130866 - RNA, 21 nt, Human
ucacuauguugcccaggcagg

SEQ ID NO: 3130867 - RNA, 23 nt, Human
ucacugagacagcccgggcucug

SEQ ID NO: 3130868 - RNA, 23 nt, Human
ucagagacuccugcaggcagcca

SEQ ID NO: 3130869 - RNA, 15 nt, Human
ucagaucucuaacuu

SEQ ID NO: 3130870 - RNA, 16 nt, Human
ucagaucucuaacuuc

SEQ ID NO: 3130871 - RNA, 22 nt, Human
ucagagacuccugcaggcagcc

SEQ ID NO: 3130872 - RNA, 20 nt, Human
ucagaauucucagaaucuca

SEQ ID NO: 3130873 - RNA, 10 nt, Human
ucagaauucu

SEQ ID NO: 3130874 - RNA, 12 nt, Human
ucagaauucuca

SEQ ID NO: 3130875 - RNA, 23 nt, Human
ucagaaguuucugccgcagcccu

SEQ ID NO: 3130876 - RNA, 13 nt, Human
acccagcgagccc

SEQ ID NO: 3130877 - RNA, 16 nt, Human
acccagcgagcccugg

SEQ ID NO: 3130878 - RNA, 17 nt, Human
acccagcgagcccuggu

SEQ ID NO: 3130879 - RNA, 13 nt, Human
acccaggagcccc

SEQ ID NO: 3130880 - RNA, 15 nt, Human
acccaggagccccga

SEQ ID NO: 3130881 - RNA, 13 nt, Human
accccagguuucu

SEQ ID NO: 3130882 - RNA, 23 nt, Human
acccaggugcuaggaacacuccu

SEQ ID NO: 3130883 - RNA, 11 nt, Human
acccaggugcu

SEQ ID NO: 3130884 - RNA, 14 nt, Human
ucccaccccacaca

SEQ ID NO: 3130885 - RNA, 11 nt, Human
ucccaccccac

SEQ ID NO: 3130886 - RNA, 14 nt, Human
ucccacaaaggaga

SEQ ID NO: 3130887 - RNA, 15 nt, Human
ucccaaagugcuggg

SEQ ID NO: 3130888 - RNA, 16 nt, Human
ucccaaagugcuggga

SEQ ID NO: 3130889 - RNA, 14 nt, Human
acggcucacugcag

SEQ ID NO: 3130890 - RNA, 17 nt, Human
uccagugaggcucugcc

SEQ ID NO: 3130891 - RNA, 19 nt, Human
uccagugaggcucugcccu

SEQ ID NO: 3130892 - RNA, 18 nt, Human
uccagugaggcucugccc

SEQ ID NO: 3130893 - RNA, 20 nt, Human
uccagugaggcucugcccuu

SEQ ID NO: 3130894 - RNA, 17 nt, Human
uccaugaguccccuguu

SEQ ID NO: 3130895 - RNA, 16 nt, Human
uccaugaguccccugu

SEQ ID NO: 3130896 - RNA, 15 nt, Human
uccaugaguccccug

SEQ ID NO: 3130897 - RNA, 20 nt, Human
acgcgugcacacaccagagc

SEQ ID NO: 3130898 - RNA, 23 nt, Human
acgcgugcacacaccagagccca

SEQ ID NO: 3130899 - RNA, 14 nt, Human
acgcccccacuggu

SEQ ID NO: 3130900 - RNA, 17 nt, Human
acgcuacccgggaaggg

SEQ ID NO: 3130901 - RNA, 13 nt, Human
acgcuacccggga

SEQ ID NO: 3130902 - RNA, 19 nt, Human
acggagucccaccuuggcu

SEQ ID NO: 3130903 - RNA, 13 nt, Human
acggccaggccag

SEQ ID NO: 3130904 - RNA, 16 nt, Human
acggccaggccagagg

SEQ ID NO: 3130905 - RNA, 18 nt, Human
acgccaucccagccccaa

SEQ ID NO: 3130906 - RNA, 17 nt, Human
acgccaucccagcccca

SEQ ID NO: 3130907 - RNA, 16 nt, Human
acgccaucccagcccc

SEQ ID NO: 3130908 - RNA, 15 nt, Human
acgccaucccagccc

SEQ ID NO: 3130909 - RNA, 14 nt, Human
acgccaucccagcc

SEQ ID NO: 3130910 - RNA, 11 nt, Human
acgccauccca

SEQ ID NO: 3130911 - RNA, 23 nt, Human
acgccaggggaaaaucagccugc

SEQ ID NO: 3130912 - RNA, 15 nt, Human
acgacugcccggcag

SEQ ID NO: 3130913 - RNA, 18 nt, Human
acgccaggggaaaaucag

SEQ ID NO: 3130914 - RNA, 22 nt, Human
uccaggcuccuuuagcgcccag

SEQ ID NO: 3130915 - RNA, 18 nt, Human
uccaggcugggagagccu

SEQ ID NO: 3130916 - RNA, 17 nt, Human
uccaggcugggagagcc

SEQ ID NO: 3130917 - RNA, 14 nt, Human
uccaggcugggaga

SEQ ID NO: 3130918 - RNA, 14 nt, Human
accuucuccuucac

SEQ ID NO: 3130919 - RNA, 22 nt, Human
accuucuccuucaccuuugucc

SEQ ID NO: 3130920 - RNA, 16 nt, Human
accuugacagggcaca

SEQ ID NO: 3130921 - RNA, 13 nt, Human
accuuugucccca

SEQ ID NO: 3130922 - RNA, 14 nt, Human
accuuuuuuauaca

SEQ ID NO: 3130923 - RNA, 16 nt, Human
accuuuguccccaccg

SEQ ID NO: 3130924 - RNA, 15 nt, Human
accuuuguccccacc

SEQ ID NO: 3130925 - RNA, 14 nt, Human
accuuuguccccac

SEQ ID NO: 3130926 - RNA, 16 nt, Human
accuuuuuuauacaua

SEQ ID NO: 3130927 - RNA, 17 nt, Human
accuuuuuuauacauaa

SEQ ID NO: 3130928 - RNA, 18 nt, Human
accuuuuuuauacauaaa

SEQ ID NO: 3130929 - RNA, 21 nt, Human
accuggguaacuagggaagau

SEQ ID NO: 3130930 - RNA, 20 nt, Human
uccacccaggagccccgagg

SEQ ID NO: 3130931 - RNA, 12 nt, Human
uccacccaccuc

SEQ ID NO: 3130932 - RNA, 18 nt, Human
uccaccaucaagccacca

SEQ ID NO: 3130933 - RNA, 13 nt, Human
uccacccaccuca

SEQ ID NO: 3130934 - RNA, 17 nt, Human
uccacccaggagccccg

SEQ ID NO: 3130935 - RNA, 13 nt, Human
accuggccucugc

SEQ ID NO: 3130936 - RNA, 12 nt, Human
accuggccucug

SEQ ID NO: 3130937 - RNA, 20 nt, Human
accuggaauauauaaccagu

SEQ ID NO: 3130938 - RNA, 17 nt, Human
accuggaauauauaacc

SEQ ID NO: 3130939 - RNA, 16 nt, Human
accugcggugcuaucu

SEQ ID NO: 3130940 - RNA, 21 nt, Human
accugcgucucauacucaccu

SEQ ID NO: 3130941 - RNA, 23 nt, Human
accugccuguugggccaggagcc

SEQ ID NO: 3130942 - RNA, 16 nt, Human
ucauuugucacacacu

SEQ ID NO: 3130943 - RNA, 14 nt, Human
ucauuugucacaca

SEQ ID NO: 3130944 - RNA, 19 nt, Human
ucauuuuuaguagagacag

SEQ ID NO: 3130945 - RNA, 18 nt, Human
ucauuuuuuuuaagaaaa

SEQ ID NO: 3130946 - RNA, 17 nt, Human
ucauuuuuuuuaagaaa

SEQ ID NO: 3130947 - RNA, 17 nt, Human
accugccaggaagccag

SEQ ID NO: 3130948 - RNA, 16 nt, Human
accugccaggaagcca

SEQ ID NO: 3130949 - RNA, 18 nt, Human
accugccaggaagccagc

SEQ ID NO: 3130950 - RNA, 15 nt, Human
accugccaggaagcc

SEQ ID NO: 3130951 - RNA, 14 nt, Human
accugaggggccuc

SEQ ID NO: 3130952 - RNA, 23 nt, Human
accugaggcccuucucuccagcc

SEQ ID NO: 3130953 - RNA, 18 nt, Human
accugaagacucauucuu

SEQ ID NO: 3130954 - RNA, 19 nt, Human
accugaauuuuggcugugu

SEQ ID NO: 3130955 - RNA, 12 nt, Human
ucauaaugacuu

SEQ ID NO: 3130956 - RNA, 16 nt, Human
acucgcgacaaugcaa

SEQ ID NO: 3130957 - RNA, 15 nt, Human
acucgcgacaaugca

SEQ ID NO: 3130958 - RNA, 17 nt, Human
acucuggcagcucagag

SEQ ID NO: 3130959 - RNA, 16 nt, Human
acucuggcagcucaga

SEQ ID NO: 3130960 - RNA, 21 nt, Human
acucuuauugcccacgcugga

SEQ ID NO: 3130961 - RNA, 20 nt, Human
acucuggcagcucagagagg

SEQ ID NO: 3130962 - RNA, 19 nt, Human
acucuggcagcucagagag

SEQ ID NO: 3130963 - RNA, 15 nt, Human
uccguuaaaauacca

SEQ ID NO: 3130964 - RNA, 13 nt, Human
uccguuaaaauac

SEQ ID NO: 3130965 - RNA, 16 nt, Human
acucgaguuacagaca

SEQ ID NO: 3130966 - RNA, 21 nt, Human
uccuagccugugccucuggga

SEQ ID NO: 3130967 - RNA, 20 nt, Human
uccuagcacuuugggaggcc

SEQ ID NO: 3130968 - RNA, 21 nt, Human
uccucccaccucagccucccg

SEQ ID NO: 3130969 - RNA, 15 nt, Human
uccucccaccucagc

SEQ ID NO: 3130970 - RNA, 16 nt, Human
uccucccaccucagcc

SEQ ID NO: 3130971 - RNA, 18 nt, Human
uccucccaccucagccuc

SEQ ID NO: 3130972 - RNA, 20 nt, Human
uccucccaccucagccuccc

SEQ ID NO: 3130973 - RNA, 13 nt, Human
uccucccaccuca

SEQ ID NO: 3130974 - RNA, 14 nt, Human
uccucccaccucag

SEQ ID NO: 3130975 - RNA, 23 nt, Human
uccucuuuggucuacacugugcu

SEQ ID NO: 3130976 - RNA, 15 nt, Human
uccugaagaauugaa

SEQ ID NO: 3130977 - RNA, 19 nt, Human
acucuuucuauuguuucuu

SEQ ID NO: 3130978 - RNA, 13 nt, Human
acguacacacaca

SEQ ID NO: 3130979 - RNA, 12 nt, Human
acguacacauuu

SEQ ID NO: 3130980 - RNA, 13 nt, Human
acguacacauuuu

SEQ ID NO: 3130981 - RNA, 18 nt, Human
acuacggaauaguuggcu

SEQ ID NO: 3130982 - RNA, 19 nt, Human
acucacauuuauucugcuc

SEQ ID NO: 3130983 - RNA, 20 nt, Human
acucacauuuauucugcuca

SEQ ID NO: 3130984 - RNA, 14 nt, Human
acucaaugcacuga

SEQ ID NO: 3130985 - RNA, 12 nt, Human
acuauguaucaa

SEQ ID NO: 3130986 - RNA, 12 nt, Human
acuauaauguaa

SEQ ID NO: 3130987 - RNA, 11 nt, Human
acuauaaugua

SEQ ID NO: 3130988 - RNA, 13 nt, Human
acuauaauguaag

SEQ ID NO: 3130989 - RNA, 14 nt, Human
acuauaauguaagc

SEQ ID NO: 3130990 - RNA, 23 nt, Human
ucccugaaggccccgcccaggcu

SEQ ID NO: 3130991 - RNA, 17 nt, Human
acucaccccagccccaa

SEQ ID NO: 3130992 - RNA, 17 nt, Human
ucccugaaggccccgcc

SEQ ID NO: 3130993 - RNA, 18 nt, Human
ucccugaaggccccgccc

SEQ ID NO: 3130994 - RNA, 22 nt, Human
ucccugaaggccccgcccaggc

SEQ ID NO: 3130995 - RNA, 21 nt, Human
ucccugaaggccccgcccagg

SEQ ID NO: 3130996 - RNA, 21 nt, Human
ucccucuuucccucccuuccu

SEQ ID NO: 3130997 - RNA, 18 nt, Human
ucccucagucuggcccuu

SEQ ID NO: 3130998 - RNA, 11 nt, Human
ucccucuuucc

SEQ ID NO: 3130999 - RNA, 13 nt, Human
ucccucuuucccu

SEQ ID NO: 3131000 - RNA, 18 nt, Human
acucauugaccugaggcc

SEQ ID NO: 3131001 - RNA, 17 nt, Human
acucauugaccugaggc

SEQ ID NO: 3131002 - RNA, 16 nt, Human
acucauugaccugagg

SEQ ID NO: 3131003 - RNA, 12 nt, Human
acucaucuuagg

SEQ ID NO: 3131004 - RNA, 21 nt, Human
acucaccugccccucaacucu

SEQ ID NO: 3131005 - RNA, 19 nt, Human
acucaccugccccucaacu

SEQ ID NO: 3131006 - RNA, 14 nt, Human
acucaccugccccu

SEQ ID NO: 3131007 - RNA, 14 nt, Human
acucagaagacacu

SEQ ID NO: 3131008 - RNA, 15 nt, Human
acucagaagacacug

SEQ ID NO: 3131009 - RNA, 16 nt, Human
acucagaagacacuga

SEQ ID NO: 3131010 - RNA, 17 nt, Human
acucagaagacacugau

SEQ ID NO: 3131011 - RNA, 18 nt, Human
acucagaagacacugaug

SEQ ID NO: 3131012 - RNA, 21 nt, Human
acucagaauucucuaguuuga

SEQ ID NO: 3131013 - RNA, 22 nt, Human
acucagaauucucuaguuugau

SEQ ID NO: 3131014 - RNA, 14 nt, Human
acucagaauucucu

SEQ ID NO: 3131015 - RNA, 22 nt, Human
ucuaguuugauuaaauucuugc

SEQ ID NO: 3131016 - RNA, 23 nt, Human
ucuaguuugauuaaauucuugca

SEQ ID NO: 3131017 - RNA, 24 nt, Human
ucuagauacuguaucaugacaaag

SEQ ID NO: 3131018 - RNA, 13 nt, Human
ucuagauacugua

SEQ ID NO: 3131019 - RNA, 13 nt, Human
ucuagccagagga

SEQ ID NO: 3131020 - RNA, 18 nt, Human
acuuccaauuuacauacu

SEQ ID NO: 3131021 - RNA, 17 nt, Human
acuuccacugccauccu

SEQ ID NO: 3131022 - RNA, 16 nt, Human
acuucaucccucuggg

SEQ ID NO: 3131023 - RNA, 13 nt, Human
acuuacuguacau

SEQ ID NO: 3131024 - RNA, 14 nt, Human
acuuacuguacaug

SEQ ID NO: 3131025 - RNA, 15 nt, Human
acuuacuguacauga

SEQ ID NO: 3131026 - RNA, 20 nt, Human
acuuagagguggggagcaga

SEQ ID NO: 3131027 - RNA, 19 nt, Human
ucuaccugaggggccucuu

SEQ ID NO: 3131028 - RNA, 12 nt, Human
ucuaccugaggg

SEQ ID NO: 3131029 - RNA, 14 nt, Human
acuuggaagcuccg

SEQ ID NO: 3131030 - RNA, 14 nt, Human
acuugucuuuggac

SEQ ID NO: 3131031 - RNA, 16 nt, Human
ucuauuguuucuuuca

SEQ ID NO: 3131032 - RNA, 16 nt, Human
ucucaaaaaaagaaaa

SEQ ID NO: 3131033 - RNA, 18 nt, Human
acuucuccacccugcucu

SEQ ID NO: 3131034 - RNA, 20 nt, Human
acuucgggaggucgaggcag

SEQ ID NO: 3131035 - RNA, 17 nt, Human
acuucgggaggucgagg

SEQ ID NO: 3131036 - RNA, 21 nt, Human
acuguuaauaguucagguaac

SEQ ID NO: 3131037 - RNA, 17 nt, Human
acuguuaauaguucagg

SEQ ID NO: 3131038 - RNA, 21 nt, Human
ucuacccucuuagaaaaacca

SEQ ID NO: 3131039 - RNA, 14 nt, Human
ucuacccaggugcu

SEQ ID NO: 3131040 - RNA, 17 nt, Human
ucuaaagcugccagccg

SEQ ID NO: 3131041 - RNA, 16 nt, Human
ucuaaagcugccagcc

SEQ ID NO: 3131042 - RNA, 13 nt, Human
ucuaaaggcuacc

SEQ ID NO: 3131043 - RNA, 16 nt, Human
ucuaaaggcuaccuuu

SEQ ID NO: 3131044 - RNA, 22 nt, Human
ucuaacuucaccauauuaccac

SEQ ID NO: 3131045 - RNA, 15 nt, Human
acuggguacuugugg

SEQ ID NO: 3131046 - RNA, 21 nt, Human
acugggcuuggggaccagagc

SEQ ID NO: 3131047 - RNA, 14 nt, Human
ucgcuccugugucu

SEQ ID NO: 3131048 - RNA, 23 nt, Human
acuguccuacccacccuccuuuc

SEQ ID NO: 3131049 - RNA, 16 nt, Human
acuguaucaugacaaa

SEQ ID NO: 3131050 - RNA, 20 nt, Human
acuguaucaugacaaagacu

SEQ ID NO: 3131051 - RNA, 20 nt, Human
acuguacaugaaaacacauu

SEQ ID NO: 3131052 - RNA, 21 nt, Human
acuguacaugaaaacacauuu

SEQ ID NO: 3131053 - RNA, 14 nt, Human
acuguaucaugaca

SEQ ID NO: 3131054 - RNA, 17 nt, Human
acuggguacuuguggac

SEQ ID NO: 3131055 - RNA, 16 nt, Human
acuguacaaaguagaa

SEQ ID NO: 3131056 - RNA, 22 nt, Human
acuguacaaaguagaagucuua

SEQ ID NO: 3131057 - RNA, 19 nt, Human
acuguacaugaaaacacau

SEQ ID NO: 3131058 - RNA, 16 nt, Human
acuguacaugaaaaca

SEQ ID NO: 3131059 - RNA, 22 nt, Human
ucugcuuugggguuuaucagaa

SEQ ID NO: 3131060 - RNA, 21 nt, Human
ucuggcagcucagagagggug

SEQ ID NO: 3131061 - RNA, 18 nt, Human
ucuggcagcucagagagg

SEQ ID NO: 3131062 - RNA, 23 nt, Human
ucuggcagaguugaagacagagc

SEQ ID NO: 3131063 - RNA, 20 nt, Human
ucuggcagaguugaagacag

SEQ ID NO: 3131064 - RNA, 17 nt, Human
ucuggcagcucagagag

SEQ ID NO: 3131065 - RNA, 16 nt, Human
ucuggcagcucagaga

SEQ ID NO: 3131066 - RNA, 22 nt, Human
agaaguuugagaucagccuggg

SEQ ID NO: 3131067 - RNA, 16 nt, Human
agaagcagaggaagga

SEQ ID NO: 3131068 - RNA, 23 nt, Human
agaagcccaggaaaggcuccagg

SEQ ID NO: 3131069 - RNA, 23 nt, Human
ucugcccacucccugcaaccuga

SEQ ID NO: 3131070 - RNA, 12 nt, Human
ucugcccuuggu

SEQ ID NO: 3131071 - RNA, 23 nt, Human
agaaccuuuugagugccuuacac

SEQ ID NO: 3131072 - RNA, 19 nt, Human
agaaccuuuugagugccuu

SEQ ID NO: 3131073 - RNA, 20 nt, Human
agaaagacuaucuaaauguu

SEQ ID NO: 3131074 - RNA, 22 nt, Human
agaaagacuaucuaaauguuga

SEQ ID NO: 3131075 - RNA, 22 nt, Human
ucugaaggacauugcggacagc

SEQ ID NO: 3131076 - RNA, 18 nt, Human
ucugaaggcuggguucug

SEQ ID NO: 3131077 - RNA, 15 nt, Human
agaaaugccuuaccc

SEQ ID NO: 3131078 - RNA, 18 nt, Human
ucucuugguccugcugca

SEQ ID NO: 3131079 - RNA, 17 nt, Human
ucucuugguccugcugc

SEQ ID NO: 3131080 - RNA, 16 nt, Human
ucucuugguccugcug

SEQ ID NO: 3131081 - RNA, 18 nt, Human
agaaaaaugagccuggca

SEQ ID NO: 3131082 - RNA, 17 nt, Human
agaaaaaugagccuggc

SEQ ID NO: 3131083 - RNA, 23 nt, Human
agaaaaaauauuuuccugccagg

SEQ ID NO: 3131084 - RNA, 17 nt, Human
agaaaaaauauuuuccu

SEQ ID NO: 3131085 - RNA, 19 nt, Human
agaaaaaauauuuucccua

SEQ ID NO: 3131086 - RNA, 12 nt, Human
ucucucaggcca

SEQ ID NO: 3131087 - RNA, 19 nt, Human
ucuccuguaccucuugagc

SEQ ID NO: 3131088 - RNA, 23 nt, Human
ucuccuuggugucgggcaugaca

SEQ ID NO: 3131089 - RNA, 21 nt, Human
ucuccuuggugucgggcauga

SEQ ID NO: 3131090 - RNA, 16 nt, Human
acuuuguguucaccuu

SEQ ID NO: 3131091 - RNA, 14 nt, Human
acuuguggacacag

SEQ ID NO: 3131092 - RNA, 16 nt, Human
acuuuaaaaggagcca

SEQ ID NO: 3131093 - RNA, 23 nt, Human
acuuuaccuuuuuuauacauaaa

SEQ ID NO: 3131094 - RNA, 23 nt, Human
acuuuggaaagacuuuuccaacc

SEQ ID NO: 3131095 - RNA, 14 nt, Human
acuuuggaaagagu

SEQ ID NO: 3131096 - RNA, 13 nt, Human
acuuuggaaagag

SEQ ID NO: 3131097 - RNA, 23 nt, Human
acuuuggaaagaguaggaagacu

SEQ ID NO: 3131098 - RNA, 19 nt, Human
ucuugcaauggcagccuug

SEQ ID NO: 3131099 - RNA, 18 nt, Human
ucuugcaauggcagccuu

SEQ ID NO: 3131100 - RNA, 22 nt, Human
ucuugcaauggcagccuuggca

SEQ ID NO: 3131101 - RNA, 14 nt, Human
ucuugguccugcug

SEQ ID NO: 3131102 - RNA, 17 nt, Human
ucuuggucagauuugaa

SEQ ID NO: 3131103 - RNA, 16 nt, Human
ucuuuccugaggcugg

SEQ ID NO: 3131104 - RNA, 17 nt, Human
ucuuuccugaggcuggg

SEQ ID NO: 3131105 - RNA, 19 nt, Human
ucuugguccugcugcaguu

SEQ ID NO: 3131106 - RNA, 17 nt, Human
ucuugguccugcugcag

SEQ ID NO: 3131107 - RNA, 15 nt, Human
ucuugguccugcugc

SEQ ID NO: 3131108 - RNA, 11 nt, Human
agaccuucucc

SEQ ID NO: 3131109 - RNA, 18 nt, Human
agaccuucuccuucaccu

SEQ ID NO: 3131110 - RNA, 15 nt, Human
agaccuucuccuuca

SEQ ID NO: 3131111 - RNA, 23 nt, Human
agaccuucuccuucaccuuuguc

SEQ ID NO: 3131112 - RNA, 21 nt, Human
agaccuucuccuucaccuuug

SEQ ID NO: 3131113 - RNA, 20 nt, Human
ucuugagccuugaacuuuga

SEQ ID NO: 3131114 - RNA, 16 nt, Human
ucuugagccugggagg

SEQ ID NO: 3131115 - RNA, 13 nt, Human
ucuugagccuggg

SEQ ID NO: 3131116 - RNA, 13 nt, Human
ucuugauucauaa

SEQ ID NO: 3131117 - RNA, 15 nt, Human
ucuuccucccucccu

SEQ ID NO: 3131118 - RNA, 14 nt, Human
ucuuccucccuccc

SEQ ID NO: 3131119 - RNA, 19 nt, Human
ucuucccuacaguugaaaa

SEQ ID NO: 3131120 - RNA, 20 nt, Human
ucuuccaggcugggagagcc

SEQ ID NO: 3131121 - RNA, 17 nt, Human
ucuuccaggcugggaga

SEQ ID NO: 3131122 - RNA, 15 nt, Human
ucuuccaggcuggga

SEQ ID NO: 3131123 - RNA, 20 nt, Human
ucuucagagacuccugcagg

SEQ ID NO: 3131124 - RNA, 12 nt, Human
ucuucagagacu

SEQ ID NO: 3131125 - RNA, 18 nt, Human
ucuucagagacuccugca

SEQ ID NO: 3131126 - RNA, 17 nt, Human
ucuucagagacuccugc

SEQ ID NO: 3131127 - RNA, 20 nt, Human
ucuucuguggguuucuaaag

SEQ ID NO: 3131128 - RNA, 15 nt, Human
ucuucuguacgucug

SEQ ID NO: 3131129 - RNA, 23 nt, Human
ucuucuguacgucugacaggcaa

SEQ ID NO: 3131130 - RNA, 12 nt, Human
ucuucugcuuca

SEQ ID NO: 3131131 - RNA, 21 nt, Human
ucuucugaacuuggcgcugcc

SEQ ID NO: 3131132 - RNA, 19 nt, Human
agacauacuaaccagcaga

SEQ ID NO: 3131133 - RNA, 23 nt, Human
agagcaccuuagacagucccugc

SEQ ID NO: 3131134 - RNA, 21 nt, Human
agagcaccuuagacagucccu

SEQ ID NO: 3131135 - RNA, 22 nt, Human
agagcaccuuagacagucccug

SEQ ID NO: 3131136 - RNA, 20 nt, Human
agagcuagcagcagggaggg

SEQ ID NO: 3131137 - RNA, 22 nt, Human
agagccuuccaggggugggaca

SEQ ID NO: 3131138 - RNA, 17 nt, Human
agagccuuccaggggug

SEQ ID NO: 3131139 - RNA, 15 nt, Human
agagccuuccagggg

SEQ ID NO: 3131140 - RNA, 13 nt, Human
agagccuuccagg

SEQ ID NO: 3131141 - RNA, 14 nt, Human
agagcugccaccug

SEQ ID NO: 3131142 - RNA, 15 nt, Human
agagacuccugcagg

SEQ ID NO: 3131143 - RNA, 18 nt, Human
agagacuccugcaggcag

SEQ ID NO: 3131144 - RNA, 17 nt, Human
agagacuccugcaggca

SEQ ID NO: 3131145 - RNA, 22 nt, Human
agagacuccugcaggcagccag

SEQ ID NO: 3131146 - RNA, 21 nt, Human
agagacuccugcaggcagcca

SEQ ID NO: 3131147 - RNA, 20 nt, Human
agagacuccugcaggcagcc

SEQ ID NO: 3131148 - RNA, 19 nt, Human
agagacuccugcaggcagc

SEQ ID NO: 3131149 - RNA, 13 nt, Human
ugaaagacuguac

SEQ ID NO: 3131150 - RNA, 15 nt, Human
ugaaagacuguacaa

SEQ ID NO: 3131151 - RNA, 22 nt, Human
agagaucaaccccuucgcuccu

SEQ ID NO: 3131152 - RNA, 23 nt, Human
agagacuccugcaggcagccagg

SEQ ID NO: 3131153 - RNA, 23 nt, Human
agagcaagacgcugugcugcccu

SEQ ID NO: 3131154 - RNA, 19 nt, Human
agagcaagacgcugugcug

SEQ ID NO: 3131155 - RNA, 22 nt, Human
ugaaaaaggaggaagagaaaaa

SEQ ID NO: 3131156 - RNA, 20 nt, Human
ugaaaaaggaggaagagaaa

SEQ ID NO: 3131157 - RNA, 16 nt, Human
ugaaaaucgugacaac

SEQ ID NO: 3131158 - RNA, 17 nt, Human
ugaaaauguauguguaa

SEQ ID NO: 3131159 - RNA, 19 nt, Human
ugaaaaucgugacaacacu

SEQ ID NO: 3131160 - RNA, 16 nt, Human
ugaaacgcaaccacca

SEQ ID NO: 3131161 - RNA, 14 nt, Human
ucuuuguggcuucc

SEQ ID NO: 3131162 - RNA, 22 nt, Human
ucuuuggucuacacugugcuga

SEQ ID NO: 3131163 - RNA, 20 nt, Human
ucuuucuggcuaugcauuug

SEQ ID NO: 3131164 - RNA, 19 nt, Human
ucuuucuggcuaugcauuu

SEQ ID NO: 3131165 - RNA, 21 nt, Human
ucuuucuggcuaugcauuuga

SEQ ID NO: 3131166 - RNA, 16 nt, Human
ugaaaaaggaggaaga

SEQ ID NO: 3131167 - RNA, 15 nt, Human
agagguuaagguggg

SEQ ID NO: 3131168 - RNA, 16 nt, Human
agagguggggagcaga

SEQ ID NO: 3131169 - RNA, 16 nt, Human
agagggagggagggcu

SEQ ID NO: 3131170 - RNA, 14 nt, Human
ugaagucacacagu

SEQ ID NO: 3131171 - RNA, 22 nt, Human
agauacaguuacucagaauucu

SEQ ID NO: 3131172 - RNA, 11 nt, Human
agauacuguau

SEQ ID NO: 3131173 - RNA, 20 nt, Human
agauacaggaaaagcugcug

SEQ ID NO: 3131174 - RNA, 13 nt, Human
agauacaguuacu

SEQ ID NO: 3131175 - RNA, 22 nt, Human
agauaauauuaaggaagacaau

SEQ ID NO: 3131176 - RNA, 18 nt, Human
agauaauauuaaggaaga

SEQ ID NO: 3131177 - RNA, 18 nt, Human
agaucaaaagguuaauaa

SEQ ID NO: 3131178 - RNA, 20 nt, Human
agauauuuugcuuugugauu

SEQ ID NO: 3131179 - RNA, 21 nt, Human
agauauuuugcuuugugauuu

SEQ ID NO: 3131180 - RNA, 15 nt, Human
agauacuguaucaug

SEQ ID NO: 3131181 - RNA, 16 nt, Human
agauacuguaucauga

SEQ ID NO: 3131182 - RNA, 18 nt, Human
agauaauacaccacuaca

SEQ ID NO: 3131183 - RNA, 19 nt, Human
agaguuguuacauuuuuaa

SEQ ID NO: 3131184 - RNA, 20 nt, Human
agaguuguuacauuuuuaag

SEQ ID NO: 3131185 - RNA, 16 nt, Human
agaguuguuacauuuu

SEQ ID NO: 3131186 - RNA, 17 nt, Human
agaguuguuacauuuuu

SEQ ID NO: 3131187 - RNA, 15 nt, Human
agagucacuggaaca

SEQ ID NO: 3131188 - RNA, 19 nt, Human
ugacacacagcucuguccu

SEQ ID NO: 3131189 - RNA, 19 nt, Human
ugacaaagacugaguacgu

SEQ ID NO: 3131190 - RNA, 16 nt, Human
ugacacacagcucugu

SEQ ID NO: 3131191 - RNA, 18 nt, Human
ugacacacagcucugucc

SEQ ID NO: 3131192 - RNA, 12 nt, Human
ugacacaugcaa

SEQ ID NO: 3131193 - RNA, 20 nt, Human
ugacacaugcaaggucauuu

SEQ ID NO: 3131194 - RNA, 23 nt, Human
ugaauuucuuuugccguuauuaa

SEQ ID NO: 3131195 - RNA, 16 nt, Human
agcaagacgcugugcu

SEQ ID NO: 3131196 - RNA, 13 nt, Human
agcaagacgcugu

SEQ ID NO: 3131197 - RNA, 23 nt, Human
agcaagacgcugugcugcccugc

SEQ ID NO: 3131198 - RNA, 22 nt, Human
agcaagacgcugugcugcccug

SEQ ID NO: 3131199 - RNA, 21 nt, Human
agcaagacgcugugcugcccu

SEQ ID NO: 3131200 - RNA, 20 nt, Human
agcaagacgcugugcugccc

SEQ ID NO: 3131201 - RNA, 17 nt, Human
agcaagacgcugugcug

SEQ ID NO: 3131202 - RNA, 21 nt, Human
agauuuugaaauuuuuauuaa

SEQ ID NO: 3131203 - RNA, 19 nt, Human
agauucauauuuacuucuu

SEQ ID NO: 3131204 - RNA, 22 nt, Human
agauucauauuuacuucuuaua

SEQ ID NO: 3131205 - RNA, 13 nt, Human
agauuggaaggaa

SEQ ID NO: 3131206 - RNA, 16 nt, Human
agaugccgcauuugga

SEQ ID NO: 3131207 - RNA, 21 nt, Human
ugacccaugcugcccugugag

SEQ ID NO: 3131208 - RNA, 16 nt, Human
ugacccaugcugcccu

SEQ ID NO: 3131209 - RNA, 12 nt, Human
ugacccaugcug

SEQ ID NO: 3131210 - RNA, 15 nt, Human
ugacccaugcugccc

SEQ ID NO: 3131211 - RNA, 14 nt, Human
ugacccaugcugcc

SEQ ID NO: 3131212 - RNA, 15 nt, Human
ugacuuacuguacau

SEQ ID NO: 3131213 - RNA, 16 nt, Human
ugacuuacuguacaug

SEQ ID NO: 3131214 - RNA, 13 nt, Human
ugacuuacuguac

SEQ ID NO: 3131215 - RNA, 17 nt, Human
ugaccugaggcccuucu

SEQ ID NO: 3131216 - RNA, 19 nt, Human
ugaccugaggcccuucucu

SEQ ID NO: 3131217 - RNA, 18 nt, Human
ugaccugaggcccuucuc

SEQ ID NO: 3131218 - RNA, 13 nt, Human
aacuuccaauuua

SEQ ID NO: 3131219 - RNA, 16 nt, Human
gugaugagaggaaauc

SEQ ID NO: 3131220 - RNA, 14 nt, Human
gugaugagaggaaa

SEQ ID NO: 3131221 - RNA, 22 nt, Human
gugaugcgcaugucacggaggg

SEQ ID NO: 3131222 - RNA, 18 nt, Human
gugauggggcccugccuc

SEQ ID NO: 3131223 - RNA, 17 nt, Human
gugauggggcccugccu

SEQ ID NO: 3131224 - RNA, 16 nt, Human
gugauggggcccugcc

SEQ ID NO: 3131225 - RNA, 14 nt, Human
gugauggggcccug

SEQ ID NO: 3131226 - RNA, 23 nt, Human
gugcauuaucuagauacuguauc

SEQ ID NO: 3131227 - RNA, 19 nt, Human
gugcauguguguucaugca

SEQ ID NO: 3131228 - RNA, 15 nt, Human
gugcauuaucuagau

SEQ ID NO: 3131229 - RNA, 19 nt, Human
gugcauuaucuagauacug

SEQ ID NO: 3131230 - RNA, 22 nt, Human
gugcaugcugucccuuacguga

SEQ ID NO: 3131231 - RNA, 21 nt, Human
gugcacacaccagagcccacc

SEQ ID NO: 3131232 - RNA, 19 nt, Human
gugauggggcccugccucc

SEQ ID NO: 3131233 - RNA, 22 nt, Human
gugcaaugaccuuucaauagga

SEQ ID NO: 3131234 - RNA, 21 nt, Human
aacucuucaaucucuugcacu

SEQ ID NO: 3131235 - RNA, 15 nt, Human
gugagucgaggacag

SEQ ID NO: 3131236 - RNA, 22 nt, Human
gugagucgaggacagggaggug

SEQ ID NO: 3131237 - RNA, 19 nt, Human
gugaacuugggccacugug

SEQ ID NO: 3131238 - RNA, 17 nt, Human
gugaacuugggccacug

SEQ ID NO: 3131239 - RNA, 13 nt, Human
gugaggccagaga

SEQ ID NO: 3131240 - RNA, 22 nt, Human
gugaggccagagacacaagccu

SEQ ID NO: 3131241 - RNA, 17 nt, Human
gugaggccagagacaca

SEQ ID NO: 3131242 - RNA, 16 nt, Human
aacuggguacuugugg

SEQ ID NO: 3131243 - RNA, 21 nt, Human
aacuggguacuuguggacaca

SEQ ID NO: 3131244 - RNA, 21 nt, Human
aacugggggagggugaaguga

SEQ ID NO: 3131245 - RNA, 22 nt, Human
aacugggggagggugaagugaa

SEQ ID NO: 3131246 - RNA, 16 nt, Human
aacuggauuaaacuua

SEQ ID NO: 3131247 - RNA, 11 nt, Human
aacuggcugca

SEQ ID NO: 3131248 - RNA, 15 nt, Human
aacuggauuaaacuu

SEQ ID NO: 3131249 - RNA, 23 nt, Human
aacugcugacuguuuucucuuga

SEQ ID NO: 3131250 - RNA, 21 nt, Human
aacugcugacuguuuucucuu

SEQ ID NO: 3131251 - RNA, 20 nt, Human
aacugcugacuguuuucucu

SEQ ID NO: 3131252 - RNA, 15 nt, Human
aacugcugacuguuu

SEQ ID NO: 3131253 - RNA, 14 nt, Human
gucuggcccuuccu

SEQ ID NO: 3131254 - RNA, 18 nt, Human
gucuuuggacccugaggc

SEQ ID NO: 3131255 - RNA, 22 nt, Human
gugaaccaccacacccagccca

SEQ ID NO: 3131256 - RNA, 23 nt, Human
gugaaccaccacacccagcccac

SEQ ID NO: 3131257 - RNA, 16 nt, Human
aacucuccucugcugc

SEQ ID NO: 3131258 - RNA, 18 nt, Human
aacucuccuccagaguca

SEQ ID NO: 3131259 - RNA, 15 nt, Human
aacucuccuccagag

SEQ ID NO: 3131260 - RNA, 12 nt, Human
aacuccuggccu

SEQ ID NO: 3131261 - RNA, 15 nt, Human
aaccaagucaaguga

SEQ ID NO: 3131262 - RNA, 19 nt, Human
aaccaccacacccagccca

SEQ ID NO: 3131263 - RNA, 18 nt, Human
aaccaucauugaaaucuu

SEQ ID NO: 3131264 - RNA, 17 nt, Human
aaccaucauugaaaucu

SEQ ID NO: 3131265 - RNA, 12 nt, Human
aaccaucauuga

SEQ ID NO: 3131266 - RNA, 21 nt, Human
aaccaccacacccagcccacu

SEQ ID NO: 3131267 - RNA, 10 nt, Human
aacccagcuc

SEQ ID NO: 3131268 - RNA, 22 nt, Human
gucacacaguauuacuucugcu

SEQ ID NO: 3131269 - RNA, 21 nt, Human
gucacacaguauuacuucugc

SEQ ID NO: 3131270 - RNA, 23 nt, Human
gucagaaguuucugccgcagccc

SEQ ID NO: 3131271 - RNA, 18 nt, Human
aaauuuguuauaaugaau

SEQ ID NO: 3131272 - RNA, 15 nt, Human
gucagugugacugau

SEQ ID NO: 3131273 - RNA, 18 nt, Human
aaauuuugauguuuuaag

SEQ ID NO: 3131274 - RNA, 23 nt, Human
aaauuuugauguuuuaaggaugc

SEQ ID NO: 3131275 - RNA, 20 nt, Human
aacaagaccacguuucuaaa

SEQ ID NO: 3131276 - RNA, 16 nt, Human
aacaaggcaaggcugu

SEQ ID NO: 3131277 - RNA, 15 nt, Human
aacaaggcaaggcug

SEQ ID NO: 3131278 - RNA, 21 nt, Human
aacaaggcaaggcugucaauu

SEQ ID NO: 3131279 - RNA, 18 nt, Human
aacaaggcaaggcuguca

SEQ ID NO: 3131280 - RNA, 14 nt, Human
guccauagagagca

SEQ ID NO: 3131281 - RNA, 13 nt, Human
guccauagagagc

SEQ ID NO: 3131282 - RNA, 21 nt, Human
gucccaccccacacacgccag

SEQ ID NO: 3131283 - RNA, 20 nt, Human
gucccaccccacacacgcca

SEQ ID NO: 3131284 - RNA, 14 nt, Human
gucccaccuuggcu

SEQ ID NO: 3131285 - RNA, 15 nt, Human
gucccaccuuggcug

SEQ ID NO: 3131286 - RNA, 16 nt, Human
gucccaccuuggcugc

SEQ ID NO: 3131287 - RNA, 19 nt, Human
gucauuuuuuuuaagaaaa

SEQ ID NO: 3131288 - RNA, 21 nt, Human
gucauuuuuuuuaagaaaaag

SEQ ID NO: 3131289 - RNA, 18 nt, Human
guccaagaagcccaggaa

SEQ ID NO: 3131290 - RNA, 17 nt, Human
guccaagaagcccagga

SEQ ID NO: 3131291 - RNA, 20 nt, Human
guccaagaagcccaggaaag

SEQ ID NO: 3131292 - RNA, 16 nt, Human
guccaagaagcccagg

SEQ ID NO: 3131293 - RNA, 15 nt, Human
guccaagaagcccag

SEQ ID NO: 3131294 - RNA, 13 nt, Human
guccaagaagccc

SEQ ID NO: 3131295 - RNA, 18 nt, Human
gucccccugacaacacuc

SEQ ID NO: 3131296 - RNA, 14 nt, Human
gucccccuuccaug

SEQ ID NO: 3131297 - RNA, 18 nt, Human
gucccccuuccauggacu

SEQ ID NO: 3131298 - RNA, 16 nt, Human
gucccccuuccaugga

SEQ ID NO: 3131299 - RNA, 16 nt, Human
guccuacccacccucc

SEQ ID NO: 3131300 - RNA, 15 nt, Human
guccuacccacccuc

SEQ ID NO: 3131301 - RNA, 12 nt, Human
guccuacucugu

SEQ ID NO: 3131302 - RNA, 14 nt, Human
aacagaaauguaca

SEQ ID NO: 3131303 - RNA, 12 nt, Human
aacagaaaugua

SEQ ID NO: 3131304 - RNA, 13 nt, Human
aacagaaauguac

SEQ ID NO: 3131305 - RNA, 11 nt, Human
aacagaaaugu

SEQ ID NO: 3131306 - RNA, 22 nt, Human
guauuuuguuuuugucuuaaaa

SEQ ID NO: 3131307 - RNA, 19 nt, Human
aaaugucuaguuguaacac

SEQ ID NO: 3131308 - RNA, 16 nt, Human
guaucaggugcugcca

SEQ ID NO: 3131309 - RNA, 18 nt, Human
guaucaggugcugccauc

SEQ ID NO: 3131310 - RNA, 19 nt, Human
guaucccaugagccucagc

SEQ ID NO: 3131311 - RNA, 22 nt, Human
guaucaggugcugccauccagg

SEQ ID NO: 3131312 - RNA, 15 nt, Human
guaugguggcugggu

SEQ ID NO: 3131313 - RNA, 16 nt, Human
guaugguggcuggguu

SEQ ID NO: 3131314 - RNA, 14 nt, Human
guaugguggcuggg

SEQ ID NO: 3131315 - RNA, 13 nt, Human
guaugguggcugg

SEQ ID NO: 3131316 - RNA, 20 nt, Human
guaacaggaaaauuuuaaaa

SEQ ID NO: 3131317 - RNA, 19 nt, Human
aaaugggggugcauuugag

SEQ ID NO: 3131318 - RNA, 12 nt, Human
guaacaggcaga

SEQ ID NO: 3131319 - RNA, 22 nt, Human
guaacaggaaaauuuuaaaaau

SEQ ID NO: 3131320 - RNA, 15 nt, Human
gugggagcugccugu

SEQ ID NO: 3131321 - RNA, 18 nt, Human
gugggagcugccuguuca

SEQ ID NO: 3131322 - RNA, 15 nt, Human
guggggucacucugg

SEQ ID NO: 3131323 - RNA, 14 nt, Human
gugggagcugccug

SEQ ID NO: 3131324 - RNA, 15 nt, Human
gugggacacccugug

SEQ ID NO: 3131325 - RNA, 13 nt, Human
gugggacacccug

SEQ ID NO: 3131326 - RNA, 15 nt, Human
guggccucccaacuc

SEQ ID NO: 3131327 - RNA, 22 nt, Human
guggccucccaacucaccccag

SEQ ID NO: 3131328 - RNA, 21 nt, Human
guggccucccaacucacccca

SEQ ID NO: 3131329 - RNA, 23 nt, Human
aagacugaguacguugugcauuu

SEQ ID NO: 3131330 - RNA, 22 nt, Human
aagacugaguacguugugcauu

SEQ ID NO: 3131331 - RNA, 19 nt, Human
aagaccuucuccuucaccu

SEQ ID NO: 3131332 - RNA, 18 nt, Human
aagaccuucuccuucacc

SEQ ID NO: 3131333 - RNA, 15 nt, Human
aagaccuucuccuuc

SEQ ID NO: 3131334 - RNA, 19 nt, Human
aagacgcugugcugcccug

SEQ ID NO: 3131335 - RNA, 18 nt, Human
aagacgcugugcugcccu

SEQ ID NO: 3131336 - RNA, 17 nt, Human
aagacgcugugcugccc

SEQ ID NO: 3131337 - RNA, 15 nt, Human
aagacgcugugcugc

SEQ ID NO: 3131338 - RNA, 13 nt, Human
aagacgcugugcu

SEQ ID NO: 3131339 - RNA, 12 nt, Human
aagaguaggaag

SEQ ID NO: 3131340 - RNA, 23 nt, Human
aagagggagggagggcuccagac

SEQ ID NO: 3131341 - RNA, 22 nt, Human
guggggucacucuggcagcuca

SEQ ID NO: 3131342 - RNA, 21 nt, Human
guggggucacucuggcagcuc

SEQ ID NO: 3131343 - RNA, 20 nt, Human
guggggucacucuggcagcu

SEQ ID NO: 3131344 - RNA, 17 nt, Human
guggggucacucuggca

SEQ ID NO: 3131345 - RNA, 16 nt, Human
aagaugcuucucacug

SEQ ID NO: 3131346 - RNA, 17 nt, Human
aagaugcuucucacugc

SEQ ID NO: 3131347 - RNA, 19 nt, Human
aagaugcuucucacugcca

SEQ ID NO: 3131348 - RNA, 13 nt, Human
aagaguaggaaga

SEQ ID NO: 3131349 - RNA, 16 nt, Human
gugucagcauagaagu

SEQ ID NO: 3131350 - RNA, 20 nt, Human
gugucaagagggucugagga

SEQ ID NO: 3131351 - RNA, 17 nt, Human
guguauuuuuuuacuaa

SEQ ID NO: 3131352 - RNA, 23 nt, Human
guguauuuuuuuacuaauagaca

SEQ ID NO: 3131353 - RNA, 20 nt, Human
gugucagguggggcagcuug

SEQ ID NO: 3131354 - RNA, 22 nt, Human
gugugacaaggauugcuacugu

SEQ ID NO: 3131355 - RNA, 16 nt, Human
gugugguagagugugc

SEQ ID NO: 3131356 - RNA, 16 nt, Human
aagcauuuacuuugug

SEQ ID NO: 3131357 - RNA, 12 nt, Human
aagcagugcaug

SEQ ID NO: 3131358 - RNA, 21 nt, Human
gugugugcgccuacaggagug

SEQ ID NO: 3131359 - RNA, 15 nt, Human
aagcagugcaugcug

SEQ ID NO: 3131360 - RNA, 14 nt, Human
aagcagugcaugcu

SEQ ID NO: 3131361 - RNA, 20 nt, Human
aagcagugcaugcugucccu

SEQ ID NO: 3131362 - RNA, 19 nt, Human
aagcccugagcuuucugcu

SEQ ID NO: 3131363 - RNA, 20 nt, Human
aagccgcuggggccaguugg

SEQ ID NO: 3131364 - RNA, 22 nt, Human
aagcccaggaaaggcuccagga

SEQ ID NO: 3131365 - RNA, 19 nt, Human
aagcccaggaaaggcucca

SEQ ID NO: 3131366 - RNA, 20 nt, Human
aagccaaagcuaggccuggc

SEQ ID NO: 3131367 - RNA, 22 nt, Human
aagccaaagcuaggccuggcca

SEQ ID NO: 3131368 - RNA, 17 nt, Human
aagcccaggaaaggcuc

SEQ ID NO: 3131369 - RNA, 14 nt, Human
aagcccaggaaagg

SEQ ID NO: 3131370 - RNA, 17 nt, Human
aagcucagggccuggcu

SEQ ID NO: 3131371 - RNA, 16 nt, Human
aagcucagggccuggc

SEQ ID NO: 3131372 - RNA, 13 nt, Human
aagcucagggccu

SEQ ID NO: 3131373 - RNA, 12 nt, Human
aagcucagggcc

SEQ ID NO: 3131374 - RNA, 20 nt, Human
aagcucagggccuggcucag

SEQ ID NO: 3131375 - RNA, 19 nt, Human
aagcucagggccuggcuca

SEQ ID NO: 3131376 - RNA, 18 nt, Human
aagcucagggccuggcuc

SEQ ID NO: 3131377 - RNA, 18 nt, Human
aagcuccaagcucccagg

SEQ ID NO: 3131378 - RNA, 17 nt, Human
aagcuccaagcucccag

SEQ ID NO: 3131379 - RNA, 13 nt, Human
guucagcuccagc

SEQ ID NO: 3131380 - RNA, 12 nt, Human
aagcuaggccug

SEQ ID NO: 3131381 - RNA, 22 nt, Human
aagcuagacgagcaggcuucuu

SEQ ID NO: 3131382 - RNA, 20 nt, Human
guuaggcauugugggaaggg

SEQ ID NO: 3131383 - RNA, 19 nt, Human
guuaggcauugugggaagg

SEQ ID NO: 3131384 - RNA, 12 nt, Human
guuaagagaaau

SEQ ID NO: 3131385 - RNA, 11 nt, Human
guuaagagaaa

SEQ ID NO: 3131386 - RNA, 18 nt, Human
guuaagagaaaugagcuu

SEQ ID NO: 3131387 - RNA, 18 nt, Human
guucaagcgauucuucug

SEQ ID NO: 3131388 - RNA, 20 nt, Human
guucaaagauauuuugcuuu

SEQ ID NO: 3131389 - RNA, 21 nt, Human
guucaaagauauuuugcuuug

SEQ ID NO: 3131390 - RNA, 22 nt, Human
guucaaagauauuuugcuuugu

SEQ ID NO: 3131391 - RNA, 23 nt, Human
guuauuuuuauuuauuuaaauuu

SEQ ID NO: 3131392 - RNA, 22 nt, Human
aaggggcccaaauucuuucagu

SEQ ID NO: 3131393 - RNA, 17 nt, Human
aaggggcaguggugguu

SEQ ID NO: 3131394 - RNA, 20 nt, Human
aagguagaaauaucugaaaa

SEQ ID NO: 3131395 - RNA, 19 nt, Human
guuucuauguguagggcgg

SEQ ID NO: 3131396 - RNA, 18 nt, Human
guuucugaaagggacgcu

SEQ ID NO: 3131397 - RNA, 12 nt, Human
aaggucauuuuu

SEQ ID NO: 3131398 - RNA, 22 nt, Human
guuucuaugacacaugcaaggu

SEQ ID NO: 3131399 - RNA, 22 nt, Human
aaggcucgagcaugccuggaug

SEQ ID NO: 3131400 - RNA, 20 nt, Human
aaggcucgagcaugccugga

SEQ ID NO: 3131401 - RNA, 19 nt, Human
aaggcucgagcaugccugg

SEQ ID NO: 3131402 - RNA, 18 nt, Human
aaggcucgagcaugccug

SEQ ID NO: 3131403 - RNA, 16 nt, Human
aaggcucgagcaugcc

SEQ ID NO: 3131404 - RNA, 22 nt, Human
aaggcuccaggagcagccacau

SEQ ID NO: 3131405 - RNA, 19 nt, Human
aaggcuccaggagcagcca

SEQ ID NO: 3131406 - RNA, 13 nt, Human
guuucaaacuuua

SEQ ID NO: 3131407 - RNA, 14 nt, Human
guuucaaacuuuac

SEQ ID NO: 3131408 - RNA, 16 nt, Human
guuucaaacuuuacua

SEQ ID NO: 3131409 - RNA, 18 nt, Human
aaggcuccaggagcagcc

SEQ ID NO: 3131410 - RNA, 16 nt, Human
aaggcuccaggagcag

SEQ ID NO: 3131411 - RNA, 15 nt, Human
aaggcuccaggagca

SEQ ID NO: 3131412 - RNA, 13 nt, Human
guugggcuggugu

SEQ ID NO: 3131413 - RNA, 17 nt, Human
guugggccaggagccuc

SEQ ID NO: 3131414 - RNA, 15 nt, Human
guugggccaggagcc

SEQ ID NO: 3131415 - RNA, 13 nt, Human
guuuauugucaaa

SEQ ID NO: 3131416 - RNA, 20 nt, Human
aaggaggggauagagagaga

SEQ ID NO: 3131417 - RNA, 18 nt, Human
aaggaggaagagaaaaaa

SEQ ID NO: 3131418 - RNA, 18 nt, Human
aaggaauaccuguccccc

SEQ ID NO: 3131419 - RNA, 11 nt, Human
aaggagagcua

SEQ ID NO: 3131420 - RNA, 14 nt, Human
aaggagauuuacaa

SEQ ID NO: 3131421 - RNA, 16 nt, Human
aaggaagcacaugccu

SEQ ID NO: 3131422 - RNA, 17 nt, Human
aaggaauaccugucccc

SEQ ID NO: 3131423 - RNA, 14 nt, Human
aaggaagacuucau

SEQ ID NO: 3131424 - RNA, 13 nt, Human
aaggaagcacaug

SEQ ID NO: 3131425 - RNA, 15 nt, Human
aaggaagacuucauc

SEQ ID NO: 3131426 - RNA, 15 nt, Human
aaggaaagagggagg

SEQ ID NO: 3131427 - RNA, 23 nt, Human
guugcccaggcaggucuugaacu

SEQ ID NO: 3131428 - RNA, 12 nt, Human
guugcccaggcu

SEQ ID NO: 3131429 - RNA, 13 nt, Human
guugcccaggcug

SEQ ID NO: 3131430 - RNA, 19 nt, Human
guugcccaggcaggucuug

SEQ ID NO: 3131431 - RNA, 13 nt, Human
aaggauacaaaag

SEQ ID NO: 3131432 - RNA, 21 nt, Human
aaggauacaaaagcaugugag

SEQ ID NO: 3131433 - RNA, 15 nt, Human
uaaaaaucucaaauu

SEQ ID NO: 3131434 - RNA, 16 nt, Human
uaaaaaucucaaauuu

SEQ ID NO: 3131435 - RNA, 17 nt, Human
uaaaaaucucaaauuuc

SEQ ID NO: 3131436 - RNA, 15 nt, Human
guuuuucuucucccu

SEQ ID NO: 3131437 - RNA, 15 nt, Human
uaaaaaguggaaaaa

SEQ ID NO: 3131438 - RNA, 19 nt, Human
uaaaaaucucaaauuucua

SEQ ID NO: 3131439 - RNA, 20 nt, Human
uaaaaaucucaaauuucuaa

SEQ ID NO: 3131440 - RNA, 21 nt, Human
uaaaaaucucaaauuucuaaa

SEQ ID NO: 3131441 - RNA, 20 nt, Human
uaaaacuugauguguuaucu

SEQ ID NO: 3131442 - RNA, 22 nt, Human
uaaaacuugauguguuaucucu

SEQ ID NO: 3131443 - RNA, 15 nt, Human
aagugagagcugggu

SEQ ID NO: 3131444 - RNA, 16 nt, Human
aagugaggaugaaaaa

SEQ ID NO: 3131445 - RNA, 19 nt, Human
aagugauucuccugccuca

SEQ ID NO: 3131446 - RNA, 15 nt, Human
aagugauucuccugc

SEQ ID NO: 3131447 - RNA, 16 nt, Human
aagugauucuccugcc

SEQ ID NO: 3131448 - RNA, 17 nt, Human
aagugauucuccugccu

SEQ ID NO: 3131449 - RNA, 18 nt, Human
aagugauucuccugccuc

SEQ ID NO: 3131450 - RNA, 21 nt, Human
uaaaauaccagccaguaaaug

SEQ ID NO: 3131451 - RNA, 22 nt, Human
uaaaauaccagccaguaaaugg

SEQ ID NO: 3131452 - RNA, 14 nt, Human
guuucugccgcagc

SEQ ID NO: 3131453 - RNA, 15 nt, Human
guuucugccgcagcc

SEQ ID NO: 3131454 - RNA, 16 nt, Human
guuuugccauguuggc

SEQ ID NO: 3131455 - RNA, 20 nt, Human
guuuugccauguuggccagg

SEQ ID NO: 3131456 - RNA, 21 nt, Human
guuuugccauguuggccaggc

SEQ ID NO: 3131457 - RNA, 22 nt, Human
guuuugccauguuggccaggcu

SEQ ID NO: 3131458 - RNA, 13 nt, Human
aaguacacuguuu

SEQ ID NO: 3131459 - RNA, 18 nt, Human
aaguacacuguuucaaac

SEQ ID NO: 3131460 - RNA, 23 nt, Human
aaguacacuguuucaaacuuuac

SEQ ID NO: 3131461 - RNA, 19 nt, Human
aaguacacuguuucaaacu

SEQ ID NO: 3131462 - RNA, 20 nt, Human
aaguacacuguuucaaacuu

SEQ ID NO: 3131463 - RNA, 21 nt, Human
aagugaaaaaggaggaagaga

SEQ ID NO: 3131464 - RNA, 17 nt, Human
aagugaagacaaugacu

SEQ ID NO: 3131465 - RNA, 19 nt, Human
aagugaagacaaugacuua

SEQ ID NO: 3131466 - RNA, 14 nt, Human
aagugagagcuggg

SEQ ID NO: 3131467 - RNA, 12 nt, Human
aagugagagagg

SEQ ID NO: 3131468 - RNA, 14 nt, Human
uaccagcagagcac

SEQ ID NO: 3131469 - RNA, 13 nt, Human
uaccagcagagca

SEQ ID NO: 3131470 - RNA, 22 nt, Human
uaccagcagagcaccuuagaca

SEQ ID NO: 3131471 - RNA, 18 nt, Human
uaccagccaguaaauggg

SEQ ID NO: 3131472 - RNA, 12 nt, Human
uaccagcagagc

SEQ ID NO: 3131473 - RNA, 11 nt, Human
aauuaacuuuu

SEQ ID NO: 3131474 - RNA, 12 nt, Human
aauuaacuuuua

SEQ ID NO: 3131475 - RNA, 13 nt, Human
aauuaacuuuuau

SEQ ID NO: 3131476 - RNA, 15 nt, Human
aauuaacuuuuauaa

SEQ ID NO: 3131477 - RNA, 13 nt, Human
aauuaaguacuau

SEQ ID NO: 3131478 - RNA, 16 nt, Human
aauuaaguacuaugua

SEQ ID NO: 3131479 - RNA, 17 nt, Human
aauuaaguacuauguau

SEQ ID NO: 3131480 - RNA, 21 nt, Human
aaugugcugaaugguuuucaa

SEQ ID NO: 3131481 - RNA, 16 nt, Human
uaccugccaggaagcc

SEQ ID NO: 3131482 - RNA, 16 nt, Human
uaccugaggggccucu

SEQ ID NO: 3131483 - RNA, 20 nt, Human
aauuacaggaaguacuggag

SEQ ID NO: 3131484 - RNA, 19 nt, Human
aauuacaggaaguacugga

SEQ ID NO: 3131485 - RNA, 17 nt, Human
aauuacaggaaguacug

SEQ ID NO: 3131486 - RNA, 23 nt, Human
uacccgggaagggggcugggaca

SEQ ID NO: 3131487 - RNA, 21 nt, Human
uaccucuugagccuugaacuu

SEQ ID NO: 3131488 - RNA, 22 nt, Human
uaccucuugagccuugaacuuu

SEQ ID NO: 3131489 - RNA, 23 nt, Human
uaccucuugagccuugaacuuug

SEQ ID NO: 3131490 - RNA, 16 nt, Human
uaccugaagucuuugu

SEQ ID NO: 3131491 - RNA, 15 nt, Human
uaccugaggggccuc

SEQ ID NO: 3131492 - RNA, 13 nt, Human
uaccugaggggcc

SEQ ID NO: 3131493 - RNA, 14 nt, Human
uaccugaagucuuu

SEQ ID NO: 3131494 - RNA, 13 nt, Human
uaccugaagucuu

SEQ ID NO: 3131495 - RNA, 21 nt, Human
aauuauuuauuaaaugcccag

SEQ ID NO: 3131496 - RNA, 22 nt, Human
aauuauuuauuaaaugcccagc

SEQ ID NO: 3131497 - RNA, 22 nt, Human
aauucaguuguuagugugucuu

SEQ ID NO: 3131498 - RNA, 17 nt, Human
aauucaguuguuagugu

SEQ ID NO: 3131499 - RNA, 11 nt, Human
aauucaguugu

SEQ ID NO: 3131500 - RNA, 13 nt, Human
aaugcaccuggaa

SEQ ID NO: 3131501 - RNA, 12 nt, Human
aaugcaaaccau

SEQ ID NO: 3131502 - RNA, 11 nt, Human
aaugcaaacca

SEQ ID NO: 3131503 - RNA, 13 nt, Human
aaugagccuggca

SEQ ID NO: 3131504 - RNA, 12 nt, Human
aaugagccuggc

SEQ ID NO: 3131505 - RNA, 16 nt, Human
aaugaggucagagccu

SEQ ID NO: 3131506 - RNA, 18 nt, Human
aaugaggucagagccugc

SEQ ID NO: 3131507 - RNA, 11 nt, Human
aaugagccugg

SEQ ID NO: 3131508 - RNA, 20 nt, Human
aaugaccuuucaauaggaaa

SEQ ID NO: 3131509 - RNA, 21 nt, Human
aaugaccuuucaauaggaaaa

SEQ ID NO: 3131510 - RNA, 13 nt, Human
aauggaagacagc

SEQ ID NO: 3131511 - RNA, 21 nt, Human
aaugcuggcuguuggcugggg

SEQ ID NO: 3131512 - RNA, 22 nt, Human
aaugcuggcuguuggcuggggg

SEQ ID NO: 3131513 - RNA, 13 nt, Human
uacaaugcugugc

SEQ ID NO: 3131514 - RNA, 14 nt, Human
uacaaugcugugcc

SEQ ID NO: 3131515 - RNA, 16 nt, Human
uacaaugcugugcccu

SEQ ID NO: 3131516 - RNA, 18 nt, Human
uaauuuuuuugagacaga

SEQ ID NO: 3131517 - RNA, 14 nt, Human
aaugguuuucaaaa

SEQ ID NO: 3131518 - RNA, 16 nt, Human
aauggaagacagcucu

SEQ ID NO: 3131519 - RNA, 16 nt, Human
aaugguuuucaaaaua

SEQ ID NO: 3131520 - RNA, 13 nt, Human
uacagacaaagcg

SEQ ID NO: 3131521 - RNA, 15 nt, Human
uacagacaaagcgug

SEQ ID NO: 3131522 - RNA, 14 nt, Human
uacagacaaagcgu

SEQ ID NO: 3131523 - RNA, 22 nt, Human
uacagagcccacgcccccacug

SEQ ID NO: 3131524 - RNA, 19 nt, Human
uacagagcccacgccccca

SEQ ID NO: 3131525 - RNA, 23 nt, Human
uacagagcagacaguuaagagaa

SEQ ID NO: 3131526 - RNA, 17 nt, Human
aauaccagccaguaaau

SEQ ID NO: 3131527 - RNA, 19 nt, Human
aauaccagccaguaaaugg

SEQ ID NO: 3131528 - RNA, 19 nt, Human
aauaccugucccccugaca

SEQ ID NO: 3131529 - RNA, 18 nt, Human
aauaccugucccccugac

SEQ ID NO: 3131530 - RNA, 15 nt, Human
aauaccugucccccu

SEQ ID NO: 3131531 - RNA, 20 nt, Human
aauagccugccucuucucua

SEQ ID NO: 3131532 - RNA, 18 nt, Human
uaaaugaaaaucgugaca

SEQ ID NO: 3131533 - RNA, 18 nt, Human
aaguguauuuuuuuacua

SEQ ID NO: 3131534 - RNA, 21 nt, Human
aaguguauuuuuuuacuaaua

SEQ ID NO: 3131535 - RNA, 18 nt, Human
uaaauuaacuuuuauaaa

SEQ ID NO: 3131536 - RNA, 19 nt, Human
uaaauuaacuuuuauaaac

SEQ ID NO: 3131537 - RNA, 20 nt, Human
uaaauuaacuuuuauaaacu

SEQ ID NO: 3131538 - RNA, 21 nt, Human
uaaauuaacuuuuauaaacuu

SEQ ID NO: 3131539 - RNA, 21 nt, Human
aauacaccacuacauucuguu

SEQ ID NO: 3131540 - RNA, 13 nt, Human
aauacagaggcaa

SEQ ID NO: 3131541 - RNA, 17 nt, Human
uaacauguaauuaagua

SEQ ID NO: 3131542 - RNA, 19 nt, Human
uaacauguaauuaaguacu

SEQ ID NO: 3131543 - RNA, 20 nt, Human
uaacuugucuuuggacccug

SEQ ID NO: 3131544 - RNA, 16 nt, Human
uaacuugucuuuggac

SEQ ID NO: 3131545 - RNA, 17 nt, Human
aaucccauuuaaaaaaa

SEQ ID NO: 3131546 - RNA, 21 nt, Human
uaaguauucuuauuuaaugaa

SEQ ID NO: 3131547 - RNA, 19 nt, Human
aaucagccugcuccagcug

SEQ ID NO: 3131548 - RNA, 18 nt, Human
aaucagccugcuccagcu

SEQ ID NO: 3131549 - RNA, 13 nt, Human
aaucagccugcuc

SEQ ID NO: 3131550 - RNA, 11 nt, Human
aaucagccugc

SEQ ID NO: 3131551 - RNA, 14 nt, Human
uaagauucauauuu

SEQ ID NO: 3131552 - RNA, 14 nt, Human
uaagcuauucagua

SEQ ID NO: 3131553 - RNA, 21 nt, Human
uaagcuauucaguaauaacuc

SEQ ID NO: 3131554 - RNA, 9 nt, Human
uaaggaaua

SEQ ID NO: 3131555 - RNA, 13 nt, Human
uaaggaagacaau

SEQ ID NO: 3131556 - RNA, 18 nt, Human
uaaggaauaccugucccc

SEQ ID NO: 3131557 - RNA, 17 nt, Human
uaaggaauaccuguccc

SEQ ID NO: 3131558 - RNA, 18 nt, Human
acaggcccggcuccaggc

SEQ ID NO: 3131559 - RNA, 20 nt, Human
acaggcccggcuccaggcuc

SEQ ID NO: 3131560 - RNA, 21 nt, Human
acaggcccggcuccaggcucc

SEQ ID NO: 3131561 - RNA, 22 nt, Human
acaggcccggcuccaggcuccu

SEQ ID NO: 3131562 - RNA, 20 nt, Human
acaggaaaauuuuaaaaaua

SEQ ID NO: 3131563 - RNA, 15 nt, Human
acaggcagauacagg

SEQ ID NO: 3131564 - RNA, 16 nt, Human
acaggcccggcuccag

SEQ ID NO: 3131565 - RNA, 17 nt, Human
acaggcccggcuccagg

SEQ ID NO: 3131566 - RNA, 23 nt, Human
acagcuugaccgugaggccagag

SEQ ID NO: 3131567 - RNA, 22 nt, Human
acagcuugaccgugaggccaga

SEQ ID NO: 3131568 - RNA, 18 nt, Human
acaggaaaagcugcugac

SEQ ID NO: 3131569 - RNA, 19 nt, Human
acaggaaaagcugcugaca

SEQ ID NO: 3131570 - RNA, 20 nt, Human
acaggaaaagcugcugacag

SEQ ID NO: 3131571 - RNA, 21 nt, Human
acaggaaaagcugcugacagu

SEQ ID NO: 3131572 - RNA, 17 nt, Human
acagcuugaccgugagg

SEQ ID NO: 3131573 - RNA, 21 nt, Human
acagcuugaccgugaggccag

SEQ ID NO: 3131574 - RNA, 20 nt, Human
acagcuugaccgugaggcca

SEQ ID NO: 3131575 - RNA, 17 nt, Human
acagcuucauuuccugu

SEQ ID NO: 3131576 - RNA, 19 nt, Human
acagcuucauuuccugugu

SEQ ID NO: 3131577 - RNA, 21 nt, Human
acagcuucauuuccugugucu

SEQ ID NO: 3131578 - RNA, 15 nt, Human
acagcuaaugggaca

SEQ ID NO: 3131579 - RNA, 16 nt, Human
acagcuaaugggacac

SEQ ID NO: 3131580 - RNA, 17 nt, Human
acagcuaaugggacacu

SEQ ID NO: 3131581 - RNA, 19 nt, Human
acagcuaaugggacacuaa

SEQ ID NO: 3131582 - RNA, 22 nt, Human
uaugcaugaaguaauaugcaca

SEQ ID NO: 3131583 - RNA, 18 nt, Human
uaugcaugaaguaauaug

SEQ ID NO: 3131584 - RNA, 20 nt, Human
uauggcccuggccuagcaua

SEQ ID NO: 3131585 - RNA, 23 nt, Human
uauggcuuuugugcauuaucuag

SEQ ID NO: 3131586 - RNA, 21 nt, Human
uauggcccuggccuagcauac

SEQ ID NO: 3131587 - RNA, 16 nt, Human
uaugggacucaaugca

SEQ ID NO: 3131588 - RNA, 23 nt, Human
uaugggacucaaugcacugacau

SEQ ID NO: 3131589 - RNA, 15 nt, Human
acagcccgggcucug

SEQ ID NO: 3131590 - RNA, 16 nt, Human
acagcccgggcucugc

SEQ ID NO: 3131591 - RNA, 21 nt, Human
uaugaggcauuuguuugaacu

SEQ ID NO: 3131592 - RNA, 14 nt, Human
uaugaggcauuugu

SEQ ID NO: 3131593 - RNA, 15 nt, Human
uaugaggcauuuguu

SEQ ID NO: 3131594 - RNA, 20 nt, Human
acacuguuucaaacuuuacu

SEQ ID NO: 3131595 - RNA, 16 nt, Human
acacuuacacuuuaug

SEQ ID NO: 3131596 - RNA, 17 nt, Human
acacucauugaccugag

SEQ ID NO: 3131597 - RNA, 16 nt, Human
acacuguuucaaacuu

SEQ ID NO: 3131598 - RNA, 17 nt, Human
acacuguuucaaacuuu

SEQ ID NO: 3131599 - RNA, 18 nt, Human
acacuguuucaaacuuua

SEQ ID NO: 3131600 - RNA, 18 nt, Human
acacuuacacuuuaugca

SEQ ID NO: 3131601 - RNA, 21 nt, Human
acacuuacacuuuaugcacaa

SEQ ID NO: 3131602 - RNA, 18 nt, Human
acagacauacuaaccagc

SEQ ID NO: 3131603 - RNA, 19 nt, Human
acagacauacuaaccagca

SEQ ID NO: 3131604 - RNA, 19 nt, Human
uaucacccagaagaaaaua

SEQ ID NO: 3131605 - RNA, 22 nt, Human
uaucacccagaagaaaauagug

SEQ ID NO: 3131606 - RNA, 19 nt, Human
uauccaacaucaacaucuu

SEQ ID NO: 3131607 - RNA, 10 nt, Human
uaucagaauu

SEQ ID NO: 3131608 - RNA, 17 nt, Human
uaucagaauucucagaa

SEQ ID NO: 3131609 - RNA, 20 nt, Human
uagucacugagacagcccgg

SEQ ID NO: 3131610 - RNA, 17 nt, Human
uagucacugagacagcc

SEQ ID NO: 3131611 - RNA, 21 nt, Human
acacucaaaagcugggcaggu

SEQ ID NO: 3131612 - RNA, 22 nt, Human
acacuaaugaggaaacugcacu

SEQ ID NO: 3131613 - RNA, 15 nt, Human
acacuaaugaggaaa

SEQ ID NO: 3131614 - RNA, 18 nt, Human
uauaauuuaccugaaguc

SEQ ID NO: 3131615 - RNA, 21 nt, Human
uauacacuuacacuuuaugca

SEQ ID NO: 3131616 - RNA, 22 nt, Human
uauacacuuacacuuuaugcac

SEQ ID NO: 3131617 - RNA, 23 nt, Human
uauaggaacuuaaauaaugugaa

SEQ ID NO: 3131618 - RNA, 16 nt, Human
acacucauugaccuga

SEQ ID NO: 3131619 - RNA, 13 nt, Human
uagggaagauaau

SEQ ID NO: 3131620 - RNA, 17 nt, Human
uaggaaaaacugauuuu

SEQ ID NO: 3131621 - RNA, 16 nt, Human
uaggaaaaacugauuu

SEQ ID NO: 3131622 - RNA, 20 nt, Human
uagccuuagaagucacacag

SEQ ID NO: 3131623 - RNA, 17 nt, Human
uagcgcccaguugggug

SEQ ID NO: 3131624 - RNA, 14 nt, Human
uagcgcccaguugg

SEQ ID NO: 3131625 - RNA, 20 nt, Human
uagccugugccucugggacu

SEQ ID NO: 3131626 - RNA, 21 nt, Human
uagccuuagaagucacacagu

SEQ ID NO: 3131627 - RNA, 14 nt, Human
uaggaaaaacugau

SEQ ID NO: 3131628 - RNA, 13 nt, Human
uaggaaaaacuga

SEQ ID NO: 3131629 - RNA, 19 nt, Human
acaaugacuuacuguacau

SEQ ID NO: 3131630 - RNA, 20 nt, Human
acaaugacuuacuguacaug

SEQ ID NO: 3131631 - RNA, 22 nt, Human
acaaugacuuacuguacaugaa

SEQ ID NO: 3131632 - RNA, 18 nt, Human
acaaugcaaaccaucauu

SEQ ID NO: 3131633 - RNA, 17 nt, Human
acaaugcaaaccaucau

SEQ ID NO: 3131634 - RNA, 16 nt, Human
acaaugcaaaccauca

SEQ ID NO: 3131635 - RNA, 11 nt, Human
acaaugcaaac

SEQ ID NO: 3131636 - RNA, 19 nt, Human
uaggguaagugagagaggg

SEQ ID NO: 3131637 - RNA, 17 nt, Human
uaggguuauaauaaugu

SEQ ID NO: 3131638 - RNA, 15 nt, Human
uaggguuauaauaau

SEQ ID NO: 3131639 - RNA, 23 nt, Human
acaaugcaaaccaucauugaaau

SEQ ID NO: 3131640 - RNA, 21 nt, Human
acaaugcaaaccaucauugaa

SEQ ID NO: 3131641 - RNA, 19 nt, Human
acaaugcaaaccaucauug

SEQ ID NO: 3131642 - RNA, 23 nt, Human
acacaggcccggcuccaggcucc

SEQ ID NO: 3131643 - RNA, 24 nt, Human
acacaggcccggcuccaggcuccu

SEQ ID NO: 3131644 - RNA, 19 nt, Human
acacaggcccggcuccagg

SEQ ID NO: 3131645 - RNA, 20 nt, Human
acacaggcccggcuccaggc

SEQ ID NO: 3131646 - RNA, 21 nt, Human
acacaggcccggcuccaggcu

SEQ ID NO: 3131647 - RNA, 22 nt, Human
acacaggcccggcuccaggcuc

SEQ ID NO: 3131648 - RNA, 17 nt, Human
acacaggcccggcucca

SEQ ID NO: 3131649 - RNA, 18 nt, Human
acacaggcccggcuccag

SEQ ID NO: 3131650 - RNA, 16 nt, Human
acacaggcccggcucc

SEQ ID NO: 3131651 - RNA, 22 nt, Human
acacacacgcgugcacacacca

SEQ ID NO: 3131652 - RNA, 15 nt, Human
uaguagagacagggu

SEQ ID NO: 3131653 - RNA, 22 nt, Human
uaguagagacaggguuuugcca

SEQ ID NO: 3131654 - RNA, 14 nt, Human
uagucacugagaca

SEQ ID NO: 3131655 - RNA, 14 nt, Human
uaguagagacaggg

SEQ ID NO: 3131656 - RNA, 10 nt, Human
uagacagagu

SEQ ID NO: 3131657 - RNA, 16 nt, Human
uagacagucccugcca

SEQ ID NO: 3131658 - RNA, 18 nt, Human
uagacaauuuauuauggc

SEQ ID NO: 3131659 - RNA, 21 nt, Human
uagacagucccugccaaugga

SEQ ID NO: 3131660 - RNA, 17 nt, Human
uagacagucccugccaa

SEQ ID NO: 3131661 - RNA, 17 nt, Human
aauuugugauacaaugc

SEQ ID NO: 3131662 - RNA, 18 nt, Human
aauuugugauacaaugcu

SEQ ID NO: 3131663 - RNA, 14 nt, Human
aauuugugauacaa

SEQ ID NO: 3131664 - RNA, 14 nt, Human
uagagccagggucu

SEQ ID NO: 3131665 - RNA, 22 nt, Human
uagagcggagaaaggaagggcu

SEQ ID NO: 3131666 - RNA, 16 nt, Human
acaaaaagcauaaaaa

SEQ ID NO: 3131667 - RNA, 13 nt, Human
uagccaaggccaa

SEQ ID NO: 3131668 - RNA, 12 nt, Human
uagccaaggcca

SEQ ID NO: 3131669 - RNA, 22 nt, Human
uagcacagacccugcccugugg

SEQ ID NO: 3131670 - RNA, 14 nt, Human
uagcacagacccug

SEQ ID NO: 3131671 - RNA, 21 nt, Human
uagcacagacccugcccugug

SEQ ID NO: 3131672 - RNA, 20 nt, Human
uagcacagacccugcccugu

SEQ ID NO: 3131673 - RNA, 15 nt, Human
uagcacagacccugc

SEQ ID NO: 3131674 - RNA, 23 nt, Human
cacagaugggugcuuggaggaag

SEQ ID NO: 3131675 - RNA, 21 nt, Human
cacagaguuguuacauuuuua

SEQ ID NO: 3131676 - RNA, 22 nt, Human
cacagaguuguuacauuuuuaa

SEQ ID NO: 3131677 - RNA, 13 nt, Human
cacagaggcugcc

SEQ ID NO: 3131678 - RNA, 19 nt, Human
cacagagaaaguacuucuc

SEQ ID NO: 3131679 - RNA, 20 nt, Human
cacagagaaaguacuucucc

SEQ ID NO: 3131680 - RNA, 12 nt, Human
cacagagaaagu

SEQ ID NO: 3131681 - RNA, 21 nt, Human
cacagcucuucuccaggcugu

SEQ ID NO: 3131682 - RNA, 13 nt, Human
cacaaacagaggc

SEQ ID NO: 3131683 - RNA, 14 nt, Human
cacaaacagaggcc

SEQ ID NO: 3131684 - RNA, 18 nt, Human
caauuacaggaaguacug

SEQ ID NO: 3131685 - RNA, 17 nt, Human
caauuacaggaaguacu

SEQ ID NO: 3131686 - RNA, 14 nt, Human
caauguucucucuu

SEQ ID NO: 3131687 - RNA, 19 nt, Human
caaugugaaaagaaaaaug

SEQ ID NO: 3131688 - RNA, 22 nt, Human
caaugugaaaagaaaaaugagc

SEQ ID NO: 3131689 - RNA, 17 nt, Human
cacacacgcgugcacac

SEQ ID NO: 3131690 - RNA, 13 nt, Human
cacaaaggagagc

SEQ ID NO: 3131691 - RNA, 16 nt, Human
caaggagauuuacaac

SEQ ID NO: 3131692 - RNA, 19 nt, Human
caaggauccugagccagau

SEQ ID NO: 3131693 - RNA, 18 nt, Human
caaggauccugagccaga

SEQ ID NO: 3131694 - RNA, 20 nt, Human
caaggauccugagccagauu

SEQ ID NO: 3131695 - RNA, 15 nt, Human
caaggcugcagugag

SEQ ID NO: 3131696 - RNA, 17 nt, Human
caaggauccugagccag

SEQ ID NO: 3131697 - RNA, 22 nt, Human
caaggcugcagugagccgagau

SEQ ID NO: 3131698 - RNA, 17 nt, Human
caaggcugcagugagcc

SEQ ID NO: 3131699 - RNA, 22 nt, Human
caagcuggucccacucagucca

SEQ ID NO: 3131700 - RNA, 23 nt, Human
caagcuggucccacucaguccau

SEQ ID NO: 3131701 - RNA, 18 nt, Human
caagcgauucuucugcuu

SEQ ID NO: 3131702 - RNA, 21 nt, Human
caagcugcacccucaggcagg

SEQ ID NO: 3131703 - RNA, 15 nt, Human
caagcgauucuucug

SEQ ID NO: 3131704 - RNA, 17 nt, Human
caagcgauucuucugcu

SEQ ID NO: 3131705 - RNA, 21 nt, Human
caagcuggucccacucagucc

SEQ ID NO: 3131706 - RNA, 22 nt, Human
caagcugcacccucaggcaggu

SEQ ID NO: 3131707 - RNA, 20 nt, Human
caagcugcacccucaggcag

SEQ ID NO: 3131708 - RNA, 14 nt, Human
caauaggaaaaacu

SEQ ID NO: 3131709 - RNA, 15 nt, Human
caauaggaaaaacug

SEQ ID NO: 3131710 - RNA, 17 nt, Human
caauaggaaaaacugau

SEQ ID NO: 3131711 - RNA, 16 nt, Human
caauaggaaaaacuga

SEQ ID NO: 3131712 - RNA, 13 nt, Human
caagacgcugugc

SEQ ID NO: 3131713 - RNA, 23 nt, Human
caagaccuucuccuucaccuuug

SEQ ID NO: 3131714 - RNA, 21 nt, Human
caagaccuucuccuucaccuu

SEQ ID NO: 3131715 - RNA, 13 nt, Human
caagaagcccagg

SEQ ID NO: 3131716 - RNA, 15 nt, Human
caaauuucuaaaucu

SEQ ID NO: 3131717 - RNA, 22 nt, Human
caaauuucuaaaucuccaaaau

SEQ ID NO: 3131718 - RNA, 20 nt, Human
caacauacucccaucuguga

SEQ ID NO: 3131719 - RNA, 12 nt, Human
caacaggcuggg

SEQ ID NO: 3131720 - RNA, 19 nt, Human
caacauacucccaucugug

SEQ ID NO: 3131721 - RNA, 17 nt, Human
caacauacucccaucug

SEQ ID NO: 3131722 - RNA, 19 nt, Human
caaaguggugagaggcauc

SEQ ID NO: 3131723 - RNA, 23 nt, Human
caaagugcugggauuacaagcgu

SEQ ID NO: 3131724 - RNA, 13 nt, Human
caaagugcuggga

SEQ ID NO: 3131725 - RNA, 19 nt, Human
caaagugcugggauuacaa

SEQ ID NO: 3131726 - RNA, 22 nt, Human
caaauggaaaugggcagagcag

SEQ ID NO: 3131727 - RNA, 23 nt, Human
caaauggaaaugggcagagcaga

SEQ ID NO: 3131728 - RNA, 22 nt, Human
caaaaugaaacgcaaccaccac

SEQ ID NO: 3131729 - RNA, 11 nt, Human
caaaaugaaac

SEQ ID NO: 3131730 - RNA, 13 nt, Human
caaacagaggccg

SEQ ID NO: 3131731 - RNA, 17 nt, Human
caaacucuugaccucag

SEQ ID NO: 3131732 - RNA, 19 nt, Human
caaacucuugaccucaggu

SEQ ID NO: 3131733 - RNA, 20 nt, Human
caaacucuugaccucaggug

SEQ ID NO: 3131734 - RNA, 21 nt, Human
caaacucuugaccucagguga

SEQ ID NO: 3131735 - RNA, 16 nt, Human
caaaacucuccucugc

SEQ ID NO: 3131736 - RNA, 15 nt, Human
caaaacucuccucug

SEQ ID NO: 3131737 - RNA, 18 nt, Human
auuuuauuuuauuaugca

SEQ ID NO: 3131738 - RNA, 21 nt, Human
caaaacgguuuuacugcagcu

SEQ ID NO: 3131739 - RNA, 15 nt, Human
caaaacgguuuuacu

SEQ ID NO: 3131740 - RNA, 14 nt, Human
caaaaguuucucuu

SEQ ID NO: 3131741 - RNA, 23 nt, Human
caaaacucuccucugcugcuggc

SEQ ID NO: 3131742 - RNA, 21 nt, Human
caaaaucgaugcagugcuucc

SEQ ID NO: 3131743 - RNA, 14 nt, Human
caaaauaaaacuuu

SEQ ID NO: 3131744 - RNA, 16 nt, Human
caaaauaaaacuuuuu

SEQ ID NO: 3131745 - RNA, 20 nt, Human
caaaauaaaacuuuuuaaaa

SEQ ID NO: 3131746 - RNA, 17 nt, Human
cacaguucaauucucau

SEQ ID NO: 3131747 - RNA, 21 nt, Human
ugacucuuucuauuguuucuu

SEQ ID NO: 3131748 - RNA, 16 nt, Human
ugacuuuccucuuugg

SEQ ID NO: 3131749 - RNA, 13 nt, Human
ugaccauucucca

SEQ ID NO: 3131750 - RNA, 14 nt, Human
ugagaccaaccugg

SEQ ID NO: 3131751 - RNA, 18 nt, Human
ugagaggggaacagacug

SEQ ID NO: 3131752 - RNA, 14 nt, Human
ugagaggggaacag

SEQ ID NO: 3131753 - RNA, 22 nt, Human
ugacuuuucuguccgagcuuug

SEQ ID NO: 3131754 - RNA, 15 nt, Human
ugagaaauaaaguuu

SEQ ID NO: 3131755 - RNA, 21 nt, Human
ugaggugggaggaucucuuga

SEQ ID NO: 3131756 - RNA, 21 nt, Human
ugaggcugggcucccuuccca

SEQ ID NO: 3131757 - RNA, 18 nt, Human
ugaggucagagccugcag

SEQ ID NO: 3131758 - RNA, 19 nt, Human
ugaggucagagccugcagu

SEQ ID NO: 3131759 - RNA, 15 nt, Human
ugaggcucugcccuu

SEQ ID NO: 3131760 - RNA, 16 nt, Human
ugaggcucugcccuug

SEQ ID NO: 3131761 - RNA, 18 nt, Human
ugaggcucugcccuuggu

SEQ ID NO: 3131762 - RNA, 16 nt, Human
ugaggcugggcucccu

SEQ ID NO: 3131763 - RNA, 15 nt, Human
ugaggcugggcuccc

SEQ ID NO: 3131764 - RNA, 19 nt, Human
ugagcucaggaguuugaga

SEQ ID NO: 3131765 - RNA, 11 nt, Human
ugagcucagga

SEQ ID NO: 3131766 - RNA, 23 nt, Human
ugagccgagaucacgccacugca

SEQ ID NO: 3131767 - RNA, 20 nt, Human
ugagcagggcucagcgggga

SEQ ID NO: 3131768 - RNA, 22 nt, Human
ugagcagggcucagcggggaca

SEQ ID NO: 3131769 - RNA, 23 nt, Human
ugagcagggcucagcggggacag

SEQ ID NO: 3131770 - RNA, 22 nt, Human
ugagccgagaucacgccacugc

SEQ ID NO: 3131771 - RNA, 22 nt, Human
ugaggaugaaaaaauaacacug

SEQ ID NO: 3131772 - RNA, 20 nt, Human
ugaccagcaccaucucuccu

SEQ ID NO: 3131773 - RNA, 23 nt, Human
ugacaucaacugcaucaagaugu

SEQ ID NO: 3131774 - RNA, 22 nt, Human
ugacagagcaagugagacccug

SEQ ID NO: 3131775 - RNA, 17 nt, Human
ugacagacacaggcccg

SEQ ID NO: 3131776 - RNA, 18 nt, Human
ugacagacacaggcccgg

SEQ ID NO: 3131777 - RNA, 23 nt, Human
ugacaaggauugcuacuguccua

SEQ ID NO: 3131778 - RNA, 14 nt, Human
ugacagacacaggc

SEQ ID NO: 3131779 - RNA, 16 nt, Human
ugacagacacaggccc

SEQ ID NO: 3131780 - RNA, 13 nt, Human
ugacagacacagg

SEQ ID NO: 3131781 - RNA, 14 nt, Human
ugacacacagcucu

SEQ ID NO: 3131782 - RNA, 15 nt, Human
ugacacacagcucug

SEQ ID NO: 3131783 - RNA, 21 nt, Human
ugaauuguaaggaaugauuaa

SEQ ID NO: 3131784 - RNA, 13 nt, Human
ugaauuguaagga

SEQ ID NO: 3131785 - RNA, 23 nt, Human
ugacaacacucauugaccugagg

SEQ ID NO: 3131786 - RNA, 13 nt, Human
ugacaacacucau

SEQ ID NO: 3131787 - RNA, 20 nt, Human
ugaaggccccgcccaggcuu

SEQ ID NO: 3131788 - RNA, 19 nt, Human
ugaaggccccgcccaggcu

SEQ ID NO: 3131789 - RNA, 16 nt, Human
ugaaggcuggguucug

SEQ ID NO: 3131790 - RNA, 18 nt, Human
ugaaggccccgcccaggc

SEQ ID NO: 3131791 - RNA, 19 nt, Human
ugaagacucauucuucugu

SEQ ID NO: 3131792 - RNA, 20 nt, Human
ugaagacucauucuucugua

SEQ ID NO: 3131793 - RNA, 23 nt, Human
ugaacuggguacuuguggacaca

SEQ ID NO: 3131794 - RNA, 21 nt, Human
ugaaggcuggguucugauccu

SEQ ID NO: 3131795 - RNA, 20 nt, Human
ugaaggcuggguucugaucc

SEQ ID NO: 3131796 - RNA, 23 nt, Human
ugaaugaugauccuaggcauuug

SEQ ID NO: 3131797 - RNA, 13 nt, Human
ucuuugcagacag

SEQ ID NO: 3131798 - RNA, 23 nt, Human
ucuuugagugaagcugggagaac

SEQ ID NO: 3131799 - RNA, 14 nt, Human
ucuuugcagacagg

SEQ ID NO: 3131800 - RNA, 17 nt, Human
ucuuugcagacaggcaa

SEQ ID NO: 3131801 - RNA, 13 nt, Human
ucuuuggacccug

SEQ ID NO: 3131802 - RNA, 15 nt, Human
ucuuuggacccugag

SEQ ID NO: 3131803 - RNA, 14 nt, Human
ucuuuggacccuga

SEQ ID NO: 3131804 - RNA, 13 nt, Human
ucuuguguguuua

SEQ ID NO: 3131805 - RNA, 23 nt, Human
ucuuuccaaaguacacuguuuca

SEQ ID NO: 3131806 - RNA, 13 nt, Human
ucuuucccucccu

SEQ ID NO: 3131807 - RNA, 23 nt, Human
ucuuucccucccuuccucuuucc

SEQ ID NO: 3131808 - RNA, 17 nt, Human
ucuuuccaaaguacacu

SEQ ID NO: 3131809 - RNA, 12 nt, Human
ucuuucccuccc

SEQ ID NO: 3131810 - RNA, 21 nt, Human
ugaaaacacauuuuucuuagg

SEQ ID NO: 3131811 - RNA, 21 nt, Human
ugaaaacacuguucucugccc

SEQ ID NO: 3131812 - RNA, 20 nt, Human
ugaaaacacuguucucugcc

SEQ ID NO: 3131813 - RNA, 17 nt, Human
ugaaaacacuguucucu

SEQ ID NO: 3131814 - RNA, 20 nt, Human
ugaaaacacauuuuucuuag

SEQ ID NO: 3131815 - RNA, 23 nt, Human
ugaaaacacuguucucugcccuc

SEQ ID NO: 3131816 - RNA, 22 nt, Human
ugaaaacacuguucucugcccu

SEQ ID NO: 3131817 - RNA, 22 nt, Human
ugaaaagaaaaaugagccuggc

SEQ ID NO: 3131818 - RNA, 20 nt, Human
ugaaaagaaaaaugagccug

SEQ ID NO: 3131819 - RNA, 15 nt, Human
ugaaaagaaaaauga

SEQ ID NO: 3131820 - RNA, 19 nt, Human
ugaaaagaaaaaugagccu

SEQ ID NO: 3131821 - RNA, 14 nt, Human
ugaaaauucagugg

SEQ ID NO: 3131822 - RNA, 14 nt, Human
ucuugcucugcuga

SEQ ID NO: 3131823 - RNA, 15 nt, Human
ucuugcucugcugac

SEQ ID NO: 3131824 - RNA, 23 nt, Human
ucuugcucugcugacagacacag

SEQ ID NO: 3131825 - RNA, 22 nt, Human
ucuugaagacuuuucuuucagc

SEQ ID NO: 3131826 - RNA, 13 nt, Human
ucuugaagacuuu

SEQ ID NO: 3131827 - RNA, 15 nt, Human
ucuugcaugaggcua

SEQ ID NO: 3131828 - RNA, 20 nt, Human
ucuugaaauauaggaacuua

SEQ ID NO: 3131829 - RNA, 21 nt, Human
ucuugaaauauaggaacuuaa

SEQ ID NO: 3131830 - RNA, 23 nt, Human
ucuuagguuggcaaaaaggcagg

SEQ ID NO: 3131831 - RNA, 20 nt, Human
ucuuagguuggcaaaaaggc

SEQ ID NO: 3131832 - RNA, 17 nt, Human
ucugugucagguggggc

SEQ ID NO: 3131833 - RNA, 20 nt, Human
ucugugucagguggggcagc

SEQ ID NO: 3131834 - RNA, 15 nt, Human
ucuuagauguauaua

SEQ ID NO: 3131835 - RNA, 14 nt, Human
ucuuagauguauau

SEQ ID NO: 3131836 - RNA, 14 nt, Human
ucuucagaucucua

SEQ ID NO: 3131837 - RNA, 21 nt, Human
ucuucagagacuccugcaggc

SEQ ID NO: 3131838 - RNA, 22 nt, Human
ucuuauccaacaucaacaucuu

SEQ ID NO: 3131839 - RNA, 15 nt, Human
ucugccucugacaca

SEQ ID NO: 3131840 - RNA, 18 nt, Human
ucugccucugacacacag

SEQ ID NO: 3131841 - RNA, 21 nt, Human
ucugccucccaucacccgcua

SEQ ID NO: 3131842 - RNA, 20 nt, Human
ucugccucccaucacccgcu

SEQ ID NO: 3131843 - RNA, 17 nt, Human
ucugccucccaucaccc

SEQ ID NO: 3131844 - RNA, 16 nt, Human
ucugccucccaucacc

SEQ ID NO: 3131845 - RNA, 23 nt, Human
ucugccucugacacacagcucug

SEQ ID NO: 3131846 - RNA, 21 nt, Human
ucugccucugacacacagcuc

SEQ ID NO: 3131847 - RNA, 22 nt, Human
ucugccucugacacacagcucu

SEQ ID NO: 3131848 - RNA, 19 nt, Human
ucugccugaagucacacag

SEQ ID NO: 3131849 - RNA, 20 nt, Human
ucugccugaagucacacagu

SEQ ID NO: 3131850 - RNA, 18 nt, Human
ucugccauauucuguugg

SEQ ID NO: 3131851 - RNA, 12 nt, Human
ucugcccacucc

SEQ ID NO: 3131852 - RNA, 22 nt, Human
ucugccauauucuguuggccag

SEQ ID NO: 3131853 - RNA, 23 nt, Human
ucugccauauucuguuggccagu

SEQ ID NO: 3131854 - RNA, 14 nt, Human
ucugcccacucccu

SEQ ID NO: 3131855 - RNA, 13 nt, Human
ucugcccacuccc

SEQ ID NO: 3131856 - RNA, 12 nt, Human
ucugccucccau

SEQ ID NO: 3131857 - RNA, 15 nt, Human
ucugccucccaucac

SEQ ID NO: 3131858 - RNA, 13 nt, Human
ucugccucccauc

SEQ ID NO: 3131859 - RNA, 22 nt, Human
ucugaggaauccagacccggcu

SEQ ID NO: 3131860 - RNA, 18 nt, Human
ucugaggaauccagaccc

SEQ ID NO: 3131861 - RNA, 21 nt, Human
ucugaggaauccagacccggc

SEQ ID NO: 3131862 - RNA, 21 nt, Human
ucugcaagaauugaagcagga

SEQ ID NO: 3131863 - RNA, 23 nt, Human
ucugacccaugcugcccugugag

SEQ ID NO: 3131864 - RNA, 22 nt, Human
ucugacccaugcugcccuguga

SEQ ID NO: 3131865 - RNA, 20 nt, Human
ucugacccaugcugcccugu

SEQ ID NO: 3131866 - RNA, 19 nt, Human
ucugacccaugcugcccug

SEQ ID NO: 3131867 - RNA, 18 nt, Human
ucugagaggacuuuucuu

SEQ ID NO: 3131868 - RNA, 20 nt, Human
ucuguccuacucugugucag

SEQ ID NO: 3131869 - RNA, 15 nt, Human
ucuguacagagccca

SEQ ID NO: 3131870 - RNA, 14 nt, Human
ucuguacagagccc

SEQ ID NO: 3131871 - RNA, 12 nt, Human
ucuguccuggga

SEQ ID NO: 3131872 - RNA, 17 nt, Human
ucugucgcccagucugg

SEQ ID NO: 3131873 - RNA, 16 nt, Human
ucugucgcccagucug

SEQ ID NO: 3131874 - RNA, 13 nt, Human
ucugucuaggaau

SEQ ID NO: 3131875 - RNA, 16 nt, Human
ucuggugacuuuccuc

SEQ ID NO: 3131876 - RNA, 13 nt, Human
ucugcugcuggcu

SEQ ID NO: 3131877 - RNA, 11 nt, Human
ucugcugcugg

SEQ ID NO: 3131878 - RNA, 21 nt, Human
ucugcuccucuccccagcaag

SEQ ID NO: 3131879 - RNA, 16 nt, Human
ucugccugcccaggcc

SEQ ID NO: 3131880 - RNA, 17 nt, Human
ucugccugcccaggccc

SEQ ID NO: 3131881 - RNA, 18 nt, Human
ucugccugcccaggcccc

SEQ ID NO: 3131882 - RNA, 20 nt, Human
ucugccugcccaggccccug

SEQ ID NO: 3131883 - RNA, 17 nt, Human
ucugcugcuggcugguu

SEQ ID NO: 3131884 - RNA, 15 nt, Human
ucugcugcuggcugg

SEQ ID NO: 3131885 - RNA, 14 nt, Human
ucugcugcuggcug

SEQ ID NO: 3131886 - RNA, 16 nt, Human
ucuggaaugcaguggu

SEQ ID NO: 3131887 - RNA, 15 nt, Human
ucagcuccagcucac

SEQ ID NO: 3131888 - RNA, 18 nt, Human
ucagcuccagcucaccag

SEQ ID NO: 3131889 - RNA, 21 nt, Human
ucagcuccagcucaccagccc

SEQ ID NO: 3131890 - RNA, 16 nt, Human
ucagccugcuccagcu

SEQ ID NO: 3131891 - RNA, 12 nt, Human
ucagccucccga

SEQ ID NO: 3131892 - RNA, 20 nt, Human
ucagccucccgaauagcugg

SEQ ID NO: 3131893 - RNA, 22 nt, Human
ucagccucccaaagugcuggga

SEQ ID NO: 3131894 - RNA, 15 nt, Human
ucagcugcuacuacu

SEQ ID NO: 3131895 - RNA, 15 nt, Human
ucagcauccuggcac

SEQ ID NO: 3131896 - RNA, 16 nt, Human
ucagcauccuggcacc

SEQ ID NO: 3131897 - RNA, 17 nt, Human
ucagcauccuggcaccc

SEQ ID NO: 3131898 - RNA, 18 nt, Human
ucagcauccuggcacccg

SEQ ID NO: 3131899 - RNA, 12 nt, Human
ucagccucccaa

SEQ ID NO: 3131900 - RNA, 15 nt, Human
ucagcacgauuucug

SEQ ID NO: 3131901 - RNA, 16 nt, Human
ucagcacgauuucugu

SEQ ID NO: 3131902 - RNA, 17 nt, Human
ucagcacgauuucuguu

SEQ ID NO: 3131903 - RNA, 15 nt, Human
ucauacucaccucac

SEQ ID NO: 3131904 - RNA, 14 nt, Human
ucagguggggcagc

SEQ ID NO: 3131905 - RNA, 18 nt, Human
ucaggugcugccauccag

SEQ ID NO: 3131906 - RNA, 20 nt, Human
ucaggugcugccauccaggu

SEQ ID NO: 3131907 - RNA, 15 nt, Human
ucagguggggcagcu

SEQ ID NO: 3131908 - RNA, 16 nt, Human
ucagguggggcagcuu

SEQ ID NO: 3131909 - RNA, 21 nt, Human
ucagguggggcagcuugaggg

SEQ ID NO: 3131910 - RNA, 15 nt, Human
ucaggugcugccauc

SEQ ID NO: 3131911 - RNA, 20 nt, Human
ucagguggggucacucuggc

SEQ ID NO: 3131912 - RNA, 17 nt, Human
ucagguggggucacucu

SEQ ID NO: 3131913 - RNA, 15 nt, Human
ucaguccauagcaga

SEQ ID NO: 3131914 - RNA, 17 nt, Human
ucagucugauucccaag

SEQ ID NO: 3131915 - RNA, 18 nt, Human
ucagugugacugaucucu

SEQ ID NO: 3131916 - RNA, 14 nt, Human
uccacuuucuagcc

SEQ ID NO: 3131917 - RNA, 21 nt, Human
uccacccugcucuccgaccag

SEQ ID NO: 3131918 - RNA, 13 nt, Human
uccacccugcucu

SEQ ID NO: 3131919 - RNA, 14 nt, Human
uccacccugcucuc

SEQ ID NO: 3131920 - RNA, 22 nt, Human
uccacugugccaugugccaggu

SEQ ID NO: 3131921 - RNA, 12 nt, Human
uccaagaagccc

SEQ ID NO: 3131922 - RNA, 14 nt, Human
uccaagaagcccag

SEQ ID NO: 3131923 - RNA, 16 nt, Human
uccaagaagcccagga

SEQ ID NO: 3131924 - RNA, 15 nt, Human
uccaagaagcccagg

SEQ ID NO: 3131925 - RNA, 14 nt, Human
uccaagcaggacau

SEQ ID NO: 3131926 - RNA, 20 nt, Human
uccaagaccuucuccuucac

SEQ ID NO: 3131927 - RNA, 19 nt, Human
uccaagaccuucuccuuca

SEQ ID NO: 3131928 - RNA, 21 nt, Human
uccacaagagcccaggccucc

SEQ ID NO: 3131929 - RNA, 19 nt, Human
uccacaagagcccaggccu

SEQ ID NO: 3131930 - RNA, 20 nt, Human
uccacaagagcccaggccuc

SEQ ID NO: 3131931 - RNA, 18 nt, Human
ucccaccucagccucccg

SEQ ID NO: 3131932 - RNA, 16 nt, Human
ucccaccucagccucc

SEQ ID NO: 3131933 - RNA, 14 nt, Human
ucccaccucucuca

SEQ ID NO: 3131934 - RNA, 18 nt, Human
ucccaccucucucacucc

SEQ ID NO: 3131935 - RNA, 17 nt, Human
ucccaccucucucacuc

SEQ ID NO: 3131936 - RNA, 19 nt, Human
ucccaccuuggcugcaggg

SEQ ID NO: 3131937 - RNA, 21 nt, Human
ucccaccuuggcugcagggag

SEQ ID NO: 3131938 - RNA, 18 nt, Human
ucccaccuuggcugcagg

SEQ ID NO: 3131939 - RNA, 20 nt, Human
ucccaccucucucacuccuu

SEQ ID NO: 3131940 - RNA, 14 nt, Human
ucccacucagucca

SEQ ID NO: 3131941 - RNA, 15 nt, Human
ucccaugagccucag

SEQ ID NO: 3131942 - RNA, 16 nt, Human
ucccaugagccucagc

SEQ ID NO: 3131943 - RNA, 18 nt, Human
ucccaggcauuccccagg

SEQ ID NO: 3131944 - RNA, 17 nt, Human
ucccaggcauuccccag

SEQ ID NO: 3131945 - RNA, 20 nt, Human
uccauagagagcaagacgcu

SEQ ID NO: 3131946 - RNA, 17 nt, Human
uccauagagagcaagac

SEQ ID NO: 3131947 - RNA, 15 nt, Human
uccauagagagcaag

SEQ ID NO: 3131948 - RNA, 21 nt, Human
ucccaacucaccccagcccca

SEQ ID NO: 3131949 - RNA, 19 nt, Human
ucccaacucaccccagccc

SEQ ID NO: 3131950 - RNA, 18 nt, Human
ucccaacucaccccagcc

SEQ ID NO: 3131951 - RNA, 17 nt, Human
ucccaacucaccccagc

SEQ ID NO: 3131952 - RNA, 12 nt, Human
uccuccucagau

SEQ ID NO: 3131953 - RNA, 13 nt, Human
uccuccaggugca

SEQ ID NO: 3131954 - RNA, 12 nt, Human
uccuccaggugc

SEQ ID NO: 3131955 - RNA, 22 nt, Human
uccuccaggugcacaagcucca

SEQ ID NO: 3131956 - RNA, 20 nt, Human
uccuccaggugcacaagcuc

SEQ ID NO: 3131957 - RNA, 18 nt, Human
uccuccaggugcacaagc

SEQ ID NO: 3131958 - RNA, 14 nt, Human
uccuccaggugcac

SEQ ID NO: 3131959 - RNA, 21 nt, Human
uccuaguuccaccaucaagcc

SEQ ID NO: 3131960 - RNA, 12 nt, Human
uccuaguuccac

SEQ ID NO: 3131961 - RNA, 17 nt, Human
uccuaguuccaccauca

SEQ ID NO: 3131962 - RNA, 14 nt, Human
uccuaguuccacca

SEQ ID NO: 3131963 - RNA, 16 nt, Human
uccuaagcuauucagu

SEQ ID NO: 3131964 - RNA, 19 nt, Human
uccucuguacagagcccac

SEQ ID NO: 3131965 - RNA, 23 nt, Human
uccucuguacagagcccacgccc

SEQ ID NO: 3131966 - RNA, 17 nt, Human
uccugagccagauuuca

SEQ ID NO: 3131967 - RNA, 14 nt, Human
uccugagccagauu

SEQ ID NO: 3131968 - RNA, 19 nt, Human
uccugagccagauuucacu

SEQ ID NO: 3131969 - RNA, 18 nt, Human
uccugagccagauuucac

SEQ ID NO: 3131970 - RNA, 12 nt, Human
uccugaggcugg

SEQ ID NO: 3131971 - RNA, 19 nt, Human
uccugaggcugggcucccu

SEQ ID NO: 3131972 - RNA, 17 nt, Human
uccugaggcugggcucc

SEQ ID NO: 3131973 - RNA, 16 nt, Human
uccugaggcugggcuc

SEQ ID NO: 3131974 - RNA, 15 nt, Human
uccugaggcugggcu

SEQ ID NO: 3131975 - RNA, 15 nt, Human
uccucuggccugugu

SEQ ID NO: 3131976 - RNA, 13 nt, Human
uccucuguacaga

SEQ ID NO: 3131977 - RNA, 17 nt, Human
uccucugcugcuggcug

SEQ ID NO: 3131978 - RNA, 21 nt, Human
uccuccuuuucacaguucucu

SEQ ID NO: 3131979 - RNA, 17 nt, Human
uccucuaggaggucucu

SEQ ID NO: 3131980 - RNA, 21 nt, Human
uccucuaggaggucucuaaga

SEQ ID NO: 3131981 - RNA, 16 nt, Human
ucccuucccaccucuc

SEQ ID NO: 3131982 - RNA, 14 nt, Human
ucccuucccaccuc

SEQ ID NO: 3131983 - RNA, 21 nt, Human
ucccuucccacuggaggcaug

SEQ ID NO: 3131984 - RNA, 17 nt, Human
ucccuucccaccucucu

SEQ ID NO: 3131985 - RNA, 21 nt, Human
uccgaaagggacuuggaagcu

SEQ ID NO: 3131986 - RNA, 17 nt, Human
uccgaccagacaccuug

SEQ ID NO: 3131987 - RNA, 22 nt, Human
uccgaaagggacuuggaagcuc

SEQ ID NO: 3131988 - RNA, 21 nt, Human
uccgcuuucuacccagcgagc

SEQ ID NO: 3131989 - RNA, 22 nt, Human
ucccaugagccucagcauccug

SEQ ID NO: 3131990 - RNA, 18 nt, Human
ucccucccuuccucuuuc

SEQ ID NO: 3131991 - RNA, 16 nt, Human
ucccugccaauggacu

SEQ ID NO: 3131992 - RNA, 14 nt, Human
ucccugccaaugga

SEQ ID NO: 3131993 - RNA, 20 nt, Human
ucccugcacuugcagacucu

SEQ ID NO: 3131994 - RNA, 17 nt, Human
ucccucuggggcuguuc

SEQ ID NO: 3131995 - RNA, 13 nt, Human
ucccucuggggcu

SEQ ID NO: 3131996 - RNA, 23 nt, Human
ucucacucugucgcccagucugg

SEQ ID NO: 3131997 - RNA, 21 nt, Human
ucucacacaugagcaucaggc

SEQ ID NO: 3131998 - RNA, 22 nt, Human
ucucacucugucgcccagucug

SEQ ID NO: 3131999 - RNA, 20 nt, Human
ucucacugccaugccagcuu

SEQ ID NO: 3132000 - RNA, 16 nt, Human
ucucacacaugagcau

SEQ ID NO: 3132001 - RNA, 18 nt, Human
ucucaaauuucuaaaucu

SEQ ID NO: 3132002 - RNA, 13 nt, Human
ucucaaauuucua

SEQ ID NO: 3132003 - RNA, 14 nt, Human
ucucaaauuucuaa

SEQ ID NO: 3132004 - RNA, 16 nt, Human
ucucaaauuucuaaau

SEQ ID NO: 3132005 - RNA, 14 nt, Human
ucucacuguugccc

SEQ ID NO: 3132006 - RNA, 15 nt, Human
ucucacuguugccca

SEQ ID NO: 3132007 - RNA, 14 nt, Human
ucuaauauguaaca

SEQ ID NO: 3132008 - RNA, 18 nt, Human
ucuaggaggucucuaaga

SEQ ID NO: 3132009 - RNA, 18 nt, Human
ucuacucuagggaaaaac

SEQ ID NO: 3132010 - RNA, 21 nt, Human
ucuacucgaguuacagacaaa

SEQ ID NO: 3132011 - RNA, 20 nt, Human
ucuacucgaguuacagacaa

SEQ ID NO: 3132012 - RNA, 12 nt, Human
ucuagggaaaaa

SEQ ID NO: 3132013 - RNA, 23 nt, Human
ucgucacugcuuaacuucacaua

SEQ ID NO: 3132014 - RNA, 14 nt, Human
ucgcccagucugga

SEQ ID NO: 3132015 - RNA, 19 nt, Human
ucgcccagucuggaaugca

SEQ ID NO: 3132016 - RNA, 23 nt, Human
ucgcccagucuggaaugcagugg

SEQ ID NO: 3132017 - RNA, 15 nt, Human
ucggaaaacaugcua

SEQ ID NO: 3132018 - RNA, 18 nt, Human
ucggaaaacaugcuacac

SEQ ID NO: 3132019 - RNA, 17 nt, Human
ucgcaggauucuuccuc

SEQ ID NO: 3132020 - RNA, 21 nt, Human
ucgcaggauucuuccucccuc

SEQ ID NO: 3132021 - RNA, 23 nt, Human
ucgcaggauucuuccucccuccc

SEQ ID NO: 3132022 - RNA, 22 nt, Human
uccuuuucgcaggauucuuccu

SEQ ID NO: 3132023 - RNA, 18 nt, Human
uccuuuucgcaggauucu

SEQ ID NO: 3132024 - RNA, 17 nt, Human
uccuuugugaggaagcc

SEQ ID NO: 3132025 - RNA, 22 nt, Human
uccuuugugaggaagccgcugg

SEQ ID NO: 3132026 - RNA, 18 nt, Human
uccuuugugaggaagccg

SEQ ID NO: 3132027 - RNA, 21 nt, Human
uccuuggugucgggcaugaca

SEQ ID NO: 3132028 - RNA, 18 nt, Human
uccuuggugucgggcaug

SEQ ID NO: 3132029 - RNA, 23 nt, Human
uccuugaaaacacuguucucugc

SEQ ID NO: 3132030 - RNA, 22 nt, Human
uccuugaaaacacuguucucug

SEQ ID NO: 3132031 - RNA, 21 nt, Human
uccuuaccagcagagcaccuu

SEQ ID NO: 3132032 - RNA, 20 nt, Human
uccuuaccagcagagcaccu

SEQ ID NO: 3132033 - RNA, 20 nt, Human
uggccagaugcaccagcccu

SEQ ID NO: 3132034 - RNA, 21 nt, Human
uggccagaugcaccagcccuu

SEQ ID NO: 3132035 - RNA, 21 nt, Human
uggcacccggccccugcuggu

SEQ ID NO: 3132036 - RNA, 13 nt, Human
uggcagcugcuuu

SEQ ID NO: 3132037 - RNA, 23 nt, Human
uggcagcugcgguccacccagga

SEQ ID NO: 3132038 - RNA, 17 nt, Human
uggauuuaacagaaaug

SEQ ID NO: 3132039 - RNA, 20 nt, Human
uggauuuaacagaaauguac

SEQ ID NO: 3132040 - RNA, 24 nt, Human
uggauuuaacagaaauguacagca

SEQ ID NO: 3132041 - RNA, 20 nt, Human
uggaggaaggaaacccagcu

SEQ ID NO: 3132042 - RNA, 18 nt, Human
uggaggaaggaaacccag

SEQ ID NO: 3132043 - RNA, 12 nt, Human
uggaggaaggaa

SEQ ID NO: 3132044 - RNA, 14 nt, Human
uggaauaacaugua

SEQ ID NO: 3132045 - RNA, 15 nt, Human
uggaauaacauguaa

SEQ ID NO: 3132046 - RNA, 19 nt, Human
uggaauaacauguaauuaa

SEQ ID NO: 3132047 - RNA, 15 nt, Human
uggaauauauaacca

SEQ ID NO: 3132048 - RNA, 16 nt, Human
uggaauauauaaccag

SEQ ID NO: 3132049 - RNA, 17 nt, Human
uggaauaaggagaauga

SEQ ID NO: 3132050 - RNA, 19 nt, Human
uggacaugcacagcuaaca

SEQ ID NO: 3132051 - RNA, 13 nt, Human
uggacaugcacag

SEQ ID NO: 3132052 - RNA, 20 nt, Human
uggaaaaauagccugccucu

SEQ ID NO: 3132053 - RNA, 17 nt, Human
uggaaaaauagccugcc

SEQ ID NO: 3132054 - RNA, 21 nt, Human
uggaaagacuuuuccaacccu

SEQ ID NO: 3132055 - RNA, 20 nt, Human
uggaaagaguaggaagacuu

SEQ ID NO: 3132056 - RNA, 21 nt, Human
uggcugcuucaaggauccuga

SEQ ID NO: 3132057 - RNA, 16 nt, Human
uggcugcuucaaggau

SEQ ID NO: 3132058 - RNA, 21 nt, Human
uggcugggggccucagugcca

SEQ ID NO: 3132059 - RNA, 22 nt, Human
uggcuuccuaaaauucagugga

SEQ ID NO: 3132060 - RNA, 14 nt, Human
uggcuuuugugcau

SEQ ID NO: 3132061 - RNA, 12 nt, Human
ugggacacccug

SEQ ID NO: 3132062 - RNA, 12 nt, Human
ugggagcugccu

SEQ ID NO: 3132063 - RNA, 13 nt, Human
ugggagcugccug

SEQ ID NO: 3132064 - RNA, 14 nt, Human
ugggagcugccugu

SEQ ID NO: 3132065 - RNA, 13 nt, Human
ugggagcaaaaga

SEQ ID NO: 3132066 - RNA, 15 nt, Human
ugggcagaggaaagc

SEQ ID NO: 3132067 - RNA, 16 nt, Human
ugggauuacaggugug

SEQ ID NO: 3132068 - RNA, 13 nt, Human
ugggauccuggag

SEQ ID NO: 3132069 - RNA, 18 nt, Human
ugggauccuccaggugca

SEQ ID NO: 3132070 - RNA, 17 nt, Human
ugggagcugccuguuca

SEQ ID NO: 3132071 - RNA, 21 nt, Human
ugggagcugccuguucagcuc

SEQ ID NO: 3132072 - RNA, 22 nt, Human
ugggagcugccuguucagcucc

SEQ ID NO: 3132073 - RNA, 15 nt, Human
ugggagugagcuggu

SEQ ID NO: 3132074 - RNA, 15 nt, Human
ugggauccuccaggu

SEQ ID NO: 3132075 - RNA, 14 nt, Human
ugggauccuccagg

SEQ ID NO: 3132076 - RNA, 16 nt, Human
ugggcuaguugggcuu

SEQ ID NO: 3132077 - RNA, 17 nt, Human
ugggcuggugucaccug

SEQ ID NO: 3132078 - RNA, 23 nt, Human
ugggcuggguucuacccaggugc

SEQ ID NO: 3132079 - RNA, 22 nt, Human
ugggcuaagugauccucccacc

SEQ ID NO: 3132080 - RNA, 16 nt, Human
ugggcagaggaaagca

SEQ ID NO: 3132081 - RNA, 17 nt, Human
ugggcuucaguggcagc

SEQ ID NO: 3132082 - RNA, 15 nt, Human
ugggcuucaguggca

SEQ ID NO: 3132083 - RNA, 20 nt, Human
ugggggaucacagccucuga

SEQ ID NO: 3132084 - RNA, 21 nt, Human
ugggggaucacagccucugaa

SEQ ID NO: 3132085 - RNA, 18 nt, Human
ugggggcugggcagagga

SEQ ID NO: 3132086 - RNA, 17 nt, Human
ugggggcugggcagagg

SEQ ID NO: 3132087 - RNA, 12 nt, Human
ugggggugcauu

SEQ ID NO: 3132088 - RNA, 15 nt, Human
ugggggugcauuuga

SEQ ID NO: 3132089 - RNA, 18 nt, Human
uggguuucuaaagcugcc

SEQ ID NO: 3132090 - RNA, 17 nt, Human
uggguuucuaaagcugc

SEQ ID NO: 3132091 - RNA, 21 nt, Human
uggguuucuaaagcugccagc

SEQ ID NO: 3132092 - RNA, 23 nt, Human
ugguauuggcuagagguucaaag

SEQ ID NO: 3132093 - RNA, 14 nt, Human
uggguguggcgcag

SEQ ID NO: 3132094 - RNA, 22 nt, Human
uggguucuacccaggugcuagg

SEQ ID NO: 3132095 - RNA, 16 nt, Human
uggguucuacccaggu

SEQ ID NO: 3132096 - RNA, 15 nt, Human
uggguucuacccagg

SEQ ID NO: 3132097 - RNA, 16 nt, Human
uggguaacuagggaag

SEQ ID NO: 3132098 - RNA, 19 nt, Human
ugggguuuaucagaauucu

SEQ ID NO: 3132099 - RNA, 14 nt, Human
ugcaguugccaguc

SEQ ID NO: 3132100 - RNA, 13 nt, Human
ugcaguugccagu

SEQ ID NO: 3132101 - RNA, 22 nt, Human
ugcagugguaugaucacggcuc

SEQ ID NO: 3132102 - RNA, 15 nt, Human
ugcaggcagccaggc

SEQ ID NO: 3132103 - RNA, 19 nt, Human
ugcaggcagccaggccaca

SEQ ID NO: 3132104 - RNA, 14 nt, Human
ugcaggcagccagg

SEQ ID NO: 3132105 - RNA, 13 nt, Human
ugcaggcagccag

SEQ ID NO: 3132106 - RNA, 16 nt, Human
ugcagugcuuccaagg

SEQ ID NO: 3132107 - RNA, 14 nt, Human
ugcaccgggccaca

SEQ ID NO: 3132108 - RNA, 15 nt, Human
ugcaccgggccacag

SEQ ID NO: 3132109 - RNA, 23 nt, Human
ugcaccggcuggccuggccccuc

SEQ ID NO: 3132110 - RNA, 19 nt, Human
ugaguccccuguuuguuuc

SEQ ID NO: 3132111 - RNA, 17 nt, Human
ugcaccgggccacagag

SEQ ID NO: 3132112 - RNA, 22 nt, Human
ugcaccgggccacagagaaagu

SEQ ID NO: 3132113 - RNA, 14 nt, Human
ugcacuuuguucug

SEQ ID NO: 3132114 - RNA, 12 nt, Human
ugcacuuuguuc

SEQ ID NO: 3132115 - RNA, 20 nt, Human
ugcagcaauaaagcagcguu

SEQ ID NO: 3132116 - RNA, 23 nt, Human
ugcagcaauaaagcagcguuucu

SEQ ID NO: 3132117 - RNA, 19 nt, Human
ugccccucaacucuccucc

SEQ ID NO: 3132118 - RNA, 17 nt, Human
ugccccuggcagccccu

SEQ ID NO: 3132119 - RNA, 23 nt, Human
ugccccucaacucuccuccagag

SEQ ID NO: 3132120 - RNA, 11 nt, Human
ugcccaggcug

SEQ ID NO: 3132121 - RNA, 16 nt, Human
ugcccacucccugcaa

SEQ ID NO: 3132122 - RNA, 15 nt, Human
ugcccacucccugca

SEQ ID NO: 3132123 - RNA, 14 nt, Human
ugcccacucccugc

SEQ ID NO: 3132124 - RNA, 13 nt, Human
ugcccaccuggcc

SEQ ID NO: 3132125 - RNA, 13 nt, Human
ugcccacucccug

SEQ ID NO: 3132126 - RNA, 21 nt, Human
ugccauccagguucagcuugu

SEQ ID NO: 3132127 - RNA, 20 nt, Human
ugccauccagguucagcuug

SEQ ID NO: 3132128 - RNA, 22 nt, Human
ugccacuacggaauaguuggcu

SEQ ID NO: 3132129 - RNA, 19 nt, Human
ugccacccuggggagaaag

SEQ ID NO: 3132130 - RNA, 18 nt, Human
ugccagguuuuuggucug

SEQ ID NO: 3132131 - RNA, 19 nt, Human
ugccagguuuuuggucuga

SEQ ID NO: 3132132 - RNA, 22 nt, Human
ugccagguuuuuggucugaccc

SEQ ID NO: 3132133 - RNA, 14 nt, Human
ugcaucaagaugug

SEQ ID NO: 3132134 - RNA, 15 nt, Human
ugcuaaaugugaaug

SEQ ID NO: 3132135 - RNA, 13 nt, Human
ugcgccuacagga

SEQ ID NO: 3132136 - RNA, 22 nt, Human
ugcgccuacaggagugagcacu

SEQ ID NO: 3132137 - RNA, 14 nt, Human
ugcgccuacaggag

SEQ ID NO: 3132138 - RNA, 16 nt, Human
ugcgccuacaggagug

SEQ ID NO: 3132139 - RNA, 14 nt, Human
ugcgaucuggguuc

SEQ ID NO: 3132140 - RNA, 15 nt, Human
ugcgaucuggguuca

SEQ ID NO: 3132141 - RNA, 19 nt, Human
ugcgaucuggguucacugc

SEQ ID NO: 3132142 - RNA, 20 nt, Human
ugcgaucuggguucacugca

SEQ ID NO: 3132143 - RNA, 21 nt, Human
ugcgaucuggguucacugcaa

SEQ ID NO: 3132144 - RNA, 14 nt, Human
ugccugguggcagc

SEQ ID NO: 3132145 - RNA, 15 nt, Human
ugccugguggcagcu

SEQ ID NO: 3132146 - RNA, 16 nt, Human
ugccugguggcagcug

SEQ ID NO: 3132147 - RNA, 18 nt, Human
ugccugggcagaaggaag

SEQ ID NO: 3132148 - RNA, 21 nt, Human
ugccugggaucccucauccuc

SEQ ID NO: 3132149 - RNA, 18 nt, Human
ugccccuggcagccccug

SEQ ID NO: 3132150 - RNA, 20 nt, Human
ugccucgaacuggcugcaaa

SEQ ID NO: 3132151 - RNA, 18 nt, Human
ugccucgaacuggcugca

SEQ ID NO: 3132152 - RNA, 19 nt, Human
ugccucgaacuggcugcaa

SEQ ID NO: 3132153 - RNA, 13 nt, Human
ugcugauggugca

SEQ ID NO: 3132154 - RNA, 17 nt, Human
ugcugauggugcaauga

SEQ ID NO: 3132155 - RNA, 15 nt, Human
ugcugauggugcaau

SEQ ID NO: 3132156 - RNA, 22 nt, Human
ugcugacagacacaggcccggc

SEQ ID NO: 3132157 - RNA, 23 nt, Human
ugcugacagacacaggcccggcu

SEQ ID NO: 3132158 - RNA, 19 nt, Human
ugcugacagacacaggccc

SEQ ID NO: 3132159 - RNA, 13 nt, Human
ugcugaaggcucg

SEQ ID NO: 3132160 - RNA, 12 nt, Human
ugcugaaggcuc

SEQ ID NO: 3132161 - RNA, 13 nt, Human
ugcugcuggcugg

SEQ ID NO: 3132162 - RNA, 23 nt, Human
ugcugcaguugccagucaccccg

SEQ ID NO: 3132163 - RNA, 18 nt, Human
ugcugcaguugccaguca

SEQ ID NO: 3132164 - RNA, 16 nt, Human
ugcugcaguugccagu

SEQ ID NO: 3132165 - RNA, 18 nt, Human
ugcuccuuucuuguuuua

SEQ ID NO: 3132166 - RNA, 17 nt, Human
ugcuccucuccccagca

SEQ ID NO: 3132167 - RNA, 14 nt, Human
ugcuccucucccca

SEQ ID NO: 3132168 - RNA, 15 nt, Human
ugcucacauaucugu

SEQ ID NO: 3132169 - RNA, 16 nt, Human
ugcucacauaucuguc

SEQ ID NO: 3132170 - RNA, 13 nt, Human
ugucaccugaaga

SEQ ID NO: 3132171 - RNA, 16 nt, Human
ugucauuugagcaggg

SEQ ID NO: 3132172 - RNA, 19 nt, Human
ugucauuugagcagggcuc

SEQ ID NO: 3132173 - RNA, 23 nt, Human
ugucccaaaaagaaaggagggga

SEQ ID NO: 3132174 - RNA, 13 nt, Human
uguccccaccgca

SEQ ID NO: 3132175 - RNA, 22 nt, Human
uguccccaccgcagacaggacc

SEQ ID NO: 3132176 - RNA, 19 nt, Human
uguccccaccgcagacagg

SEQ ID NO: 3132177 - RNA, 18 nt, Human
uguccccaccgcagacag

SEQ ID NO: 3132178 - RNA, 20 nt, Human
uguccuacccacccuccuuu

SEQ ID NO: 3132179 - RNA, 17 nt, Human
uguccccgacccuugcc

SEQ ID NO: 3132180 - RNA, 16 nt, Human
uguccccgacccuugc

SEQ ID NO: 3132181 - RNA, 12 nt, Human
uguccuacucug

SEQ ID NO: 3132182 - RNA, 17 nt, Human
uguccuacucuguguca

SEQ ID NO: 3132183 - RNA, 16 nt, Human
uguccuacccacccuc

SEQ ID NO: 3132184 - RNA, 19 nt, Human
uguauuuuacuaauaaaau

SEQ ID NO: 3132185 - RNA, 13 nt, Human
ugucacacacuuu

SEQ ID NO: 3132186 - RNA, 17 nt, Human
ugucacacacuuuggcu

SEQ ID NO: 3132187 - RNA, 12 nt, Human
ugucacaggcag

SEQ ID NO: 3132188 - RNA, 22 nt, Human
uguauucucuccuguaccucuu

SEQ ID NO: 3132189 - RNA, 20 nt, Human
uguauucucuccuguaccuc

SEQ ID NO: 3132190 - RNA, 13 nt, Human
uguacagagccca

SEQ ID NO: 3132191 - RNA, 17 nt, Human
uguacagagcccacgcc

SEQ ID NO: 3132192 - RNA, 16 nt, Human
uguacagagcccacgc

SEQ ID NO: 3132193 - RNA, 18 nt, Human
uguacagagcccacgccc

SEQ ID NO: 3132194 - RNA, 19 nt, Human
uguacugcauaugaaagga

SEQ ID NO: 3132195 - RNA, 15 nt, Human
uguacgucugacagg

SEQ ID NO: 3132196 - RNA, 14 nt, Human
ugugcacguacaca

SEQ ID NO: 3132197 - RNA, 16 nt, Human
ugugcauuaucuagau

SEQ ID NO: 3132198 - RNA, 19 nt, Human
ugugcauuaucuagauacu

SEQ ID NO: 3132199 - RNA, 14 nt, Human
ugugcauuaucuag

SEQ ID NO: 3132200 - RNA, 23 nt, Human
ugugcauuaucuagauacuguau

SEQ ID NO: 3132201 - RNA, 20 nt, Human
ugugcauuaucuagauacug

SEQ ID NO: 3132202 - RNA, 21 nt, Human
ugugcauuaucuagauacugu

SEQ ID NO: 3132203 - RNA, 19 nt, Human
ugugcgccuacaggaguga

SEQ ID NO: 3132204 - RNA, 14 nt, Human
ugugcgccuacagg

SEQ ID NO: 3132205 - RNA, 16 nt, Human
uguggacacagcucuu

SEQ ID NO: 3132206 - RNA, 19 nt, Human
uguggacacagcucuucuc

SEQ ID NO: 3132207 - RNA, 18 nt, Human
uguggacacagcucuucu

SEQ ID NO: 3132208 - RNA, 23 nt, Human
uguggcgcagcauauucaggaag

SEQ ID NO: 3132209 - RNA, 12 nt, Human
uguguagggcgg

SEQ ID NO: 3132210 - RNA, 21 nt, Human
ugugaaaagaaaaaugagccu

SEQ ID NO: 3132211 - RNA, 23 nt, Human
ugugaaaagaaaaaugagccugg

SEQ ID NO: 3132212 - RNA, 23 nt, Human
ugucuuuucuugcaugaggcuag

SEQ ID NO: 3132213 - RNA, 14 nt, Human
ugucuuuggacccu

SEQ ID NO: 3132214 - RNA, 21 nt, Human
ugucuuuucuugcaugaggcu

SEQ ID NO: 3132215 - RNA, 16 nt, Human
ugucuuuggacccuga

SEQ ID NO: 3132216 - RNA, 19 nt, Human
ugugagucaccaagcccag

SEQ ID NO: 3132217 - RNA, 21 nt, Human
ugugagucaccaagcccaguu

SEQ ID NO: 3132218 - RNA, 15 nt, Human
ugugagucaccaagc

SEQ ID NO: 3132219 - RNA, 17 nt, Human
ugugagucaccaagccc

SEQ ID NO: 3132220 - RNA, 12 nt, Human
ugugaggaagcc

SEQ ID NO: 3132221 - RNA, 20 nt, Human
ugugaggaagccgcuggggc

SEQ ID NO: 3132222 - RNA, 18 nt, Human
ugugaggaagccgcuggg

SEQ ID NO: 3132223 - RNA, 13 nt, Human
ugugaggaagccg

SEQ ID NO: 3132224 - RNA, 15 nt, Human
ugugacauguuuuau

SEQ ID NO: 3132225 - RNA, 14 nt, Human
uguuacuaaguuuu

SEQ ID NO: 3132226 - RNA, 19 nt, Human
uguuaguaugaggcauuug

SEQ ID NO: 3132227 - RNA, 20 nt, Human
uguuaguaugaggcauuugu

SEQ ID NO: 3132228 - RNA, 17 nt, Human
uguuaguaugaggcauu

SEQ ID NO: 3132229 - RNA, 20 nt, Human
uguucagcuccagcucacca

SEQ ID NO: 3132230 - RNA, 21 nt, Human
uguucagcuccagcucaccag

SEQ ID NO: 3132231 - RNA, 18 nt, Human
uguucagcuccagcucac

SEQ ID NO: 3132232 - RNA, 19 nt, Human
ugugugcacguacacacac

SEQ ID NO: 3132233 - RNA, 13 nt, Human
uguguuuauuguc

SEQ ID NO: 3132234 - RNA, 16 nt, Human
uguguuuauugucaaa

SEQ ID NO: 3132235 - RNA, 16 nt, Human
uguucucucuucucca

SEQ ID NO: 3132236 - RNA, 15 nt, Human
uguucucucuucucc

SEQ ID NO: 3132237 - RNA, 19 nt, Human
uguucaucauccuaagcua

SEQ ID NO: 3132238 - RNA, 12 nt, Human
uguucuggcucu

SEQ ID NO: 3132239 - RNA, 16 nt, Human
uguucuggcucuucca

SEQ ID NO: 3132240 - RNA, 13 nt, Human
uguucuggcucuu

SEQ ID NO: 3132241 - RNA, 16 nt, Human
uguucucugcccucca

SEQ ID NO: 3132242 - RNA, 15 nt, Human
uguucucugcccucc

SEQ ID NO: 3132243 - RNA, 14 nt, Human
uguucucugcccuc

SEQ ID NO: 3132244 - RNA, 13 nt, Human
uguucucugcccu

SEQ ID NO: 3132245 - RNA, 21 nt, Human
uguucuggcucuuccaggcug

SEQ ID NO: 3132246 - RNA, 20 nt, Human
uguucuggcucuuccaggcu

SEQ ID NO: 3132247 - RNA, 17 nt, Human
uguucuggcucuuccag

SEQ ID NO: 3132248 - RNA, 23 nt, Human
uguucuuucuggcuaugcauuug

SEQ ID NO: 3132249 - RNA, 15 nt, Human
uguuggccaggcugg

SEQ ID NO: 3132250 - RNA, 16 nt, Human
uguuggccaggcuggu

SEQ ID NO: 3132251 - RNA, 17 nt, Human
uguuggcugggggccuc

SEQ ID NO: 3132252 - RNA, 19 nt, Human
uguuggcugggggccucag

SEQ ID NO: 3132253 - RNA, 14 nt, Human
uuaaaugcccagcc

SEQ ID NO: 3132254 - RNA, 16 nt, Human
uuaaaugcccagcccc

SEQ ID NO: 3132255 - RNA, 15 nt, Human
uuaaaugcccagccc

SEQ ID NO: 3132256 - RNA, 22 nt, Human
uuaaacuuaaucuaaauggaac

SEQ ID NO: 3132257 - RNA, 14 nt, Human
uuaaaacccaagug

SEQ ID NO: 3132258 - RNA, 17 nt, Human
uguuuuaagaggcaggg

SEQ ID NO: 3132259 - RNA, 19 nt, Human
uguuuuaaggaugcuugua

SEQ ID NO: 3132260 - RNA, 22 nt, Human
uguuuuaaggaugcuuguacau

SEQ ID NO: 3132261 - RNA, 23 nt, Human
uguuuuaaggaugcuuguacaua

SEQ ID NO: 3132262 - RNA, 16 nt, Human
uguuuuaagaggcagg

SEQ ID NO: 3132263 - RNA, 12 nt, Human
uuaacuuuuaua

SEQ ID NO: 3132264 - RNA, 13 nt, Human
uuaacuuuuauaa

SEQ ID NO: 3132265 - RNA, 13 nt, Human
uuaaaugcccagc

SEQ ID NO: 3132266 - RNA, 13 nt, Human
uuacacuuuaugc

SEQ ID NO: 3132267 - RNA, 20 nt, Human
uuacacuuuaugcacaaaau

SEQ ID NO: 3132268 - RNA, 12 nt, Human
uuacauuuuuaa

SEQ ID NO: 3132269 - RNA, 17 nt, Human
uuacauuuuuaagugcu

SEQ ID NO: 3132270 - RNA, 22 nt, Human
uuaauuaaaacacaacaucuuu

SEQ ID NO: 3132271 - RNA, 12 nt, Human
uaagaggcaggg

SEQ ID NO: 3132272 - RNA, 15 nt, Human
uaagaggcagggucu

SEQ ID NO: 3132273 - RNA, 16 nt, Human
uaaggauguucuagca

SEQ ID NO: 3132274 - RNA, 20 nt, Human
uaagguggguacgggagggu

SEQ ID NO: 3132275 - RNA, 15 nt, Human
uaaggugugcucuga

SEQ ID NO: 3132276 - RNA, 17 nt, Human
uaaggguaucuggugac

SEQ ID NO: 3132277 - RNA, 14 nt, Human
uaagugcugcauuu

SEQ ID NO: 3132278 - RNA, 23 nt, Human
uaagugaggaugaaaaaauaaca

SEQ ID NO: 3132279 - RNA, 12 nt, Human
uaagugagagag

SEQ ID NO: 3132280 - RNA, 20 nt, Human
uaagugguacuaacuuuccu

SEQ ID NO: 3132281 - RNA, 15 nt, Human
uaagugcugcauuua

SEQ ID NO: 3132282 - RNA, 16 nt, Human
uaagugcugcauuuaa

SEQ ID NO: 3132283 - RNA, 18 nt, Human
uaagugcugcauuuaaaa

SEQ ID NO: 3132284 - RNA, 22 nt, Human
uaagugcugcauuuaaaagaua

SEQ ID NO: 3132285 - RNA, 15 nt, Human
uaauggggcggugag

SEQ ID NO: 3132286 - RNA, 23 nt, Human
uaaugcgugcauaccacuuuugu

SEQ ID NO: 3132287 - RNA, 19 nt, Human
uaaugcgugcauaccacuu

SEQ ID NO: 3132288 - RNA, 22 nt, Human
uaaugcgugcauaccacuuuug

SEQ ID NO: 3132289 - RNA, 15 nt, Human
uaaugcgugcauacc

SEQ ID NO: 3132290 - RNA, 14 nt, Human
uaauuaaguacuau

SEQ ID NO: 3132291 - RNA, 17 nt, Human
uaauuaaguacuaugua

SEQ ID NO: 3132292 - RNA, 20 nt, Human
uaauauuaaggaagacaaug

SEQ ID NO: 3132293 - RNA, 12 nt, Human
uaaucuaaaugg

SEQ ID NO: 3132294 - RNA, 13 nt, Human
uaaucuaaaugga

SEQ ID NO: 3132295 - RNA, 19 nt, Human
uaauaugcacacauuuuuu

SEQ ID NO: 3132296 - RNA, 15 nt, Human
uaauaugcacacauu

SEQ ID NO: 3132297 - RNA, 16 nt, Human
uaauaugcacacauuu

SEQ ID NO: 3132298 - RNA, 17 nt, Human
uaauaugcacacauuuu

SEQ ID NO: 3132299 - RNA, 18 nt, Human
uaauaugcacacauuuuu

SEQ ID NO: 3132300 - RNA, 22 nt, Human
uaaaugucucuuuaaugucaca

SEQ ID NO: 3132301 - RNA, 20 nt, Human
uaaaugucuaguuguaacac

SEQ ID NO: 3132302 - RNA, 18 nt, Human
uaaaugggggugcauuug

SEQ ID NO: 3132303 - RNA, 19 nt, Human
uaaaugggggugcauuuga

SEQ ID NO: 3132304 - RNA, 14 nt, Human
uaaaugggggugca

SEQ ID NO: 3132305 - RNA, 17 nt, Human
uaaaugggggugcauuu

SEQ ID NO: 3132306 - RNA, 16 nt, Human
uaaauggaaccacucu

SEQ ID NO: 3132307 - RNA, 17 nt, Human
uaaaugcccagccccuu

SEQ ID NO: 3132308 - RNA, 16 nt, Human
uaaaugcccagccccu

SEQ ID NO: 3132309 - RNA, 15 nt, Human
uaaaugcccagcccc

SEQ ID NO: 3132310 - RNA, 14 nt, Human
uaaaugcccagccc

SEQ ID NO: 3132311 - RNA, 13 nt, Human
uaaaugcccagcc

SEQ ID NO: 3132312 - RNA, 11 nt, Human
uaaauuauuuu

SEQ ID NO: 3132313 - RNA, 22 nt, Human
uaaauucuugcaaaguaucccu

SEQ ID NO: 3132314 - RNA, 17 nt, Human
uaaauucuugcaaagua

SEQ ID NO: 3132315 - RNA, 18 nt, Human
uaaauucuugcaaaguau

SEQ ID NO: 3132316 - RNA, 16 nt, Human
uaaauucuugcaaagu

SEQ ID NO: 3132317 - RNA, 18 nt, Human
uaacaccaugauuaacca

SEQ ID NO: 3132318 - RNA, 11 nt, Human
uaacagaaaug

SEQ ID NO: 3132319 - RNA, 23 nt, Human
uaaccaguguuguggauuuaaca

SEQ ID NO: 3132320 - RNA, 16 nt, Human
uaaccacuucagcuga

SEQ ID NO: 3132321 - RNA, 19 nt, Human
uaagaaccuuuugagugcc

SEQ ID NO: 3132322 - RNA, 16 nt, Human
uaagaaaaaggaugca

SEQ ID NO: 3132323 - RNA, 18 nt, Human
uaagaaaaaggaugcaca

SEQ ID NO: 3132324 - RNA, 19 nt, Human
uaagaaaaaggaugcacag

SEQ ID NO: 3132325 - RNA, 23 nt, Human
uaagaaaaaggaugcacagaguu

SEQ ID NO: 3132326 - RNA, 20 nt, Human
guuggccccugcccggcugc

SEQ ID NO: 3132327 - RNA, 13 nt, Human
guuggccccugcc

SEQ ID NO: 3132328 - RNA, 14 nt, Human
guuggccccugccc

SEQ ID NO: 3132329 - RNA, 12 nt, Human
guuggcuggggg

SEQ ID NO: 3132330 - RNA, 19 nt, Human
guuggcugggggccucagu

SEQ ID NO: 3132331 - RNA, 12 nt, Human
guugucagcuga

SEQ ID NO: 3132332 - RNA, 14 nt, Human
guugugguuaaucu

SEQ ID NO: 3132333 - RNA, 22 nt, Human
guuguggauuuaacagaaaugu

SEQ ID NO: 3132334 - RNA, 14 nt, Human
guuguuacauuuuu

SEQ ID NO: 3132335 - RNA, 15 nt, Human
guuguuacauuuuua

SEQ ID NO: 3132336 - RNA, 14 nt, Human
guuuagauaauaca

SEQ ID NO: 3132337 - RNA, 20 nt, Human
guuuuccaugaguccccugu

SEQ ID NO: 3132338 - RNA, 19 nt, Human
guuuuccaugaguccccug

SEQ ID NO: 3132339 - RNA, 20 nt, Human
guuuuccagguuuaagcugu

SEQ ID NO: 3132340 - RNA, 20 nt, Human
guuuguuucugaaagggacg

SEQ ID NO: 3132341 - RNA, 11 nt, Human
guuuucacucu

SEQ ID NO: 3132342 - RNA, 12 nt, Human
guuuucacucuu

SEQ ID NO: 3132343 - RNA, 17 nt, Human
guuuucaaaauaaaaau

SEQ ID NO: 3132344 - RNA, 20 nt, Human
guuuguaaauuaacuuuuau

SEQ ID NO: 3132345 - RNA, 18 nt, Human
guuuggggaugagaaagg

SEQ ID NO: 3132346 - RNA, 20 nt, Human
guuugauucagacagcugcc

SEQ ID NO: 3132347 - RNA, 16 nt, Human
guuugauucagacagc

SEQ ID NO: 3132348 - RNA, 18 nt, Human
guuuguuucugaaaggga

SEQ ID NO: 3132349 - RNA, 17 nt, Human
guuugagaucagccugg

SEQ ID NO: 3132350 - RNA, 23 nt, Human
guuugauuaaauucuugcaaagu

SEQ ID NO: 3132351 - RNA, 12 nt, Human
uaaagaaaacug

SEQ ID NO: 3132352 - RNA, 16 nt, Human
uaaagcagcguuucua

SEQ ID NO: 3132353 - RNA, 17 nt, Human
uaaagcagcguuucuau

SEQ ID NO: 3132354 - RNA, 19 nt, Human
uaaagcagcguuucuauga

SEQ ID NO: 3132355 - RNA, 15 nt, Human
uaaaggcuaccuuug

SEQ ID NO: 3132356 - RNA, 17 nt, Human
uaaaggcuaccuuugua

SEQ ID NO: 3132357 - RNA, 22 nt, Human
uaaacuugguuuuuaaaaaacu

SEQ ID NO: 3132358 - RNA, 21 nt, Human
uaaacaagaccacguuucuaa

SEQ ID NO: 3132359 - RNA, 22 nt, Human
uaaacaagaccacguuucuaaa

SEQ ID NO: 3132360 - RNA, 20 nt, Human
uaaacaagaccacguuucua

SEQ ID NO: 3132361 - RNA, 19 nt, Human
uaaacaagaccacguuucu

SEQ ID NO: 3132362 - RNA, 17 nt, Human
uaaaacacaacaucuuu

SEQ ID NO: 3132363 - RNA, 23 nt, Human
uaaaacacaacaucuuuuucuac

SEQ ID NO: 3132364 - RNA, 22 nt, Human
uaaaacacaacaucuuuuucua

SEQ ID NO: 3132365 - RNA, 15 nt, Human
uaaaacaacacucac

SEQ ID NO: 3132366 - RNA, 12 nt, Human
uaaaaggagcca

SEQ ID NO: 3132367 - RNA, 21 nt, Human
uaaaagguaugcaaucaaauc

SEQ ID NO: 3132368 - RNA, 12 nt, Human
uaaaaggugacc

SEQ ID NO: 3132369 - RNA, 21 nt, Human
uaaaagauacaguuacucaga

SEQ ID NO: 3132370 - RNA, 17 nt, Human
uaaaagauacaguuacu

SEQ ID NO: 3132371 - RNA, 20 nt, Human
uaaaagauacaguuacucag

SEQ ID NO: 3132372 - RNA, 14 nt, Human
uaaaagauacaguu

SEQ ID NO: 3132373 - RNA, 13 nt, Human
uacuaacuuuccu

SEQ ID NO: 3132374 - RNA, 14 nt, Human
uacuaaggaaucuu

SEQ ID NO: 3132375 - RNA, 20 nt, Human
uacuaauagacaauuuauua

SEQ ID NO: 3132376 - RNA, 21 nt, Human
uacuaauagacaauuuauuau

SEQ ID NO: 3132377 - RNA, 22 nt, Human
uaccuuuuuuauacauaaacaa

SEQ ID NO: 3132378 - RNA, 17 nt, Human
uaccuuuuuuauacaua

SEQ ID NO: 3132379 - RNA, 13 nt, Human
uaccuuuuuuaua

SEQ ID NO: 3132380 - RNA, 16 nt, Human
uaccuuuuuuauacau

SEQ ID NO: 3132381 - RNA, 21 nt, Human
uacgaaaagaggggaagagac

SEQ ID NO: 3132382 - RNA, 18 nt, Human
uacgaaaagaggggaaga

SEQ ID NO: 3132383 - RNA, 18 nt, Human
uaccucggugccuuccuc

SEQ ID NO: 3132384 - RNA, 13 nt, Human
uaccuuuuuuaga

SEQ ID NO: 3132385 - RNA, 19 nt, Human
uaccuuuuuuagaguugau

SEQ ID NO: 3132386 - RNA, 22 nt, Human
uaccuuuuuuagaguugauacu

SEQ ID NO: 3132387 - RNA, 15 nt, Human
uaccuacauacaauu

SEQ ID NO: 3132388 - RNA, 23 nt, Human
uacauuuuuaagugcugcauuua

SEQ ID NO: 3132389 - RNA, 15 nt, Human
uacccacugcucugg

SEQ ID NO: 3132390 - RNA, 21 nt, Human
uacugucuucaguaagccgug

SEQ ID NO: 3132391 - RNA, 16 nt, Human
uacuguccuacccacc

SEQ ID NO: 3132392 - RNA, 13 nt, Human
uacuuguggacac

SEQ ID NO: 3132393 - RNA, 17 nt, Human
uacugcauaugaaagga

SEQ ID NO: 3132394 - RNA, 13 nt, Human
uacuacaguuugu

SEQ ID NO: 3132395 - RNA, 14 nt, Human
uacuacaguuuguu

SEQ ID NO: 3132396 - RNA, 20 nt, Human
uacuacaguccucccaucuc

SEQ ID NO: 3132397 - RNA, 22 nt, Human
uacuacaguccucccaucucac

SEQ ID NO: 3132398 - RNA, 18 nt, Human
uacucgaguuacagacaa

SEQ ID NO: 3132399 - RNA, 22 nt, Human
uacucgaguuacagacaaagcg

SEQ ID NO: 3132400 - RNA, 14 nt, Human
uacaaaguagaagu

SEQ ID NO: 3132401 - RNA, 18 nt, Human
uacaaaguagaagucuua

SEQ ID NO: 3132402 - RNA, 11 nt, Human
uacacacacac

SEQ ID NO: 3132403 - RNA, 23 nt, Human
uacacaaugguuuucuugugugu

SEQ ID NO: 3132404 - RNA, 21 nt, Human
uacacugugcugagucugaag

SEQ ID NO: 3132405 - RNA, 15 nt, Human
uacacacugcauguu

SEQ ID NO: 3132406 - RNA, 14 nt, Human
uacauuuuuaagug

SEQ ID NO: 3132407 - RNA, 19 nt, Human
uacauuuuuaagugcugca

SEQ ID NO: 3132408 - RNA, 22 nt, Human
uacauuuuuaagugcugcauuu

SEQ ID NO: 3132409 - RNA, 14 nt, Human
uacauggaauaaca

SEQ ID NO: 3132410 - RNA, 18 nt, Human
uacauggaauaacaugua

SEQ ID NO: 3132411 - RNA, 19 nt, Human
uacauggaauaacauguaa

SEQ ID NO: 3132412 - RNA, 22 nt, Human
uacauggaauaacauguaauua

SEQ ID NO: 3132413 - RNA, 16 nt, Human
uacaugaaaacacauu

SEQ ID NO: 3132414 - RNA, 16 nt, Human
uacauaagauaaaugu

SEQ ID NO: 3132415 - RNA, 17 nt, Human
uacauaagauaaaugug

SEQ ID NO: 3132416 - RNA, 17 nt, Human
uacaugaaaacacauuu

SEQ ID NO: 3132417 - RNA, 18 nt, Human
uacaugaaaacacauuuu

SEQ ID NO: 3132418 - RNA, 19 nt, Human
uacaugaaaacacauuuuu

SEQ ID NO: 3132419 - RNA, 23 nt, Human
uacaugaaaacacauuuuucuua

SEQ ID NO: 3132420 - RNA, 16 nt, Human
uacauaaacaaguccu

SEQ ID NO: 3132421 - RNA, 19 nt, Human
uacaguuuguuaguaugag

SEQ ID NO: 3132422 - RNA, 21 nt, Human
uacaguuuguuaguaugaggc

SEQ ID NO: 3132423 - RNA, 20 nt, Human
uacacuguuucaaacuuuac

SEQ ID NO: 3132424 - RNA, 23 nt, Human
uacacugugcugagucugaaggc

SEQ ID NO: 3132425 - RNA, 22 nt, Human
uacacugugcugagucugaagg

SEQ ID NO: 3132426 - RNA, 22 nt, Human
uacacuguuucaaacuuuacua

SEQ ID NO: 3132427 - RNA, 16 nt, Human
uacacuuacacuuuau

SEQ ID NO: 3132428 - RNA, 19 nt, Human
uacacuguuucaaacuuua

SEQ ID NO: 3132429 - RNA, 20 nt, Human
uacagcuugaccgugaggcc

SEQ ID NO: 3132430 - RNA, 13 nt, Human
uacaggaaguacu

SEQ ID NO: 3132431 - RNA, 18 nt, Human
uacaggaagguagaaaua

SEQ ID NO: 3132432 - RNA, 18 nt, Human
uacaguuuguuaguauga

SEQ ID NO: 3132433 - RNA, 20 nt, Human
uacaguugaaaaacagcuga

SEQ ID NO: 3132434 - RNA, 19 nt, Human
uacaguugaaaaacagcug

SEQ ID NO: 3132435 - RNA, 17 nt, Human
uacaguugaaaaacagc

SEQ ID NO: 3132436 - RNA, 15 nt, Human
uacaggagugagcac

SEQ ID NO: 3132437 - RNA, 22 nt, Human
uacaggaaguacuggagaaaau

SEQ ID NO: 3132438 - RNA, 15 nt, Human
uacaggaaguacugg

SEQ ID NO: 3132439 - RNA, 14 nt, Human
uacaggaaguacug

SEQ ID NO: 3132440 - RNA, 17 nt, Human
uaucaugacaaagacug

SEQ ID NO: 3132441 - RNA, 17 nt, Human
uaucaggugcugccauc

SEQ ID NO: 3132442 - RNA, 20 nt, Human
uaucaggugcugccauccag

SEQ ID NO: 3132443 - RNA, 19 nt, Human
uaucaggugcugccaucca

SEQ ID NO: 3132444 - RNA, 22 nt, Human
uaguuguuugauucagacagcu

SEQ ID NO: 3132445 - RNA, 21 nt, Human
uaguuguuugauucagacagc

SEQ ID NO: 3132446 - RNA, 20 nt, Human
uaguuguuugauucagacag

SEQ ID NO: 3132447 - RNA, 20 nt, Human
uaguggcuuaaaacaacacu

SEQ ID NO: 3132448 - RNA, 16 nt, Human
uaguaugguggcuggg

SEQ ID NO: 3132449 - RNA, 15 nt, Human
uaguaugaggcauuu

SEQ ID NO: 3132450 - RNA, 17 nt, Human
uauaaacuuuaccuuuu

SEQ ID NO: 3132451 - RNA, 15 nt, Human
uauaaacuuuaccuu

SEQ ID NO: 3132452 - RNA, 16 nt, Human
uauaaacuuuaccuuu

SEQ ID NO: 3132453 - RNA, 11 nt, Human
uauaaacuuua

SEQ ID NO: 3132454 - RNA, 13 nt, Human
uauaaacuuuacc

SEQ ID NO: 3132455 - RNA, 14 nt, Human
uauaaacuuuaccu

SEQ ID NO: 3132456 - RNA, 15 nt, Human
uaguuugauuaaauu

SEQ ID NO: 3132457 - RNA, 16 nt, Human
uaguuugauuaaauuc

SEQ ID NO: 3132458 - RNA, 11 nt, Human
uaggugacaga

SEQ ID NO: 3132459 - RNA, 16 nt, Human
uaggugacagagugag

SEQ ID NO: 3132460 - RNA, 17 nt, Human
uaguaugaggcauuugu

SEQ ID NO: 3132461 - RNA, 18 nt, Human
uaguaugaggcauuuguu

SEQ ID NO: 3132462 - RNA, 19 nt, Human
uaggugugacugaauuucu

SEQ ID NO: 3132463 - RNA, 21 nt, Human
uaggugugacugaauuucuuu

SEQ ID NO: 3132464 - RNA, 23 nt, Human
uaggugugacugaauuucuuuug

SEQ ID NO: 3132465 - RNA, 17 nt, Human
uaggugugggggaagca

SEQ ID NO: 3132466 - RNA, 13 nt, Human
uagguguggggga

SEQ ID NO: 3132467 - RNA, 20 nt, Human
uagaagucuuagauguauau

SEQ ID NO: 3132468 - RNA, 14 nt, Human
uagagguucaaaga

SEQ ID NO: 3132469 - RNA, 15 nt, Human
uagagguucaaagau

SEQ ID NO: 3132470 - RNA, 12 nt, Human
uagagugggagc

SEQ ID NO: 3132471 - RNA, 14 nt, Human
uagaguugauacua

SEQ ID NO: 3132472 - RNA, 17 nt, Human
uagaguugauacuacag

SEQ ID NO: 3132473 - RNA, 11 nt, Human
uagcagggaaa

SEQ ID NO: 3132474 - RNA, 16 nt, Human
uagcauacguacacau

SEQ ID NO: 3132475 - RNA, 17 nt, Human
uagcauacguacacauu

SEQ ID NO: 3132476 - RNA, 18 nt, Human
uagcauacguacacauuu

SEQ ID NO: 3132477 - RNA, 19 nt, Human
uagcauacguacacauuuu

SEQ ID NO: 3132478 - RNA, 16 nt, Human
uagauacuguaucaug

SEQ ID NO: 3132479 - RNA, 12 nt, Human
uagcugggacua

SEQ ID NO: 3132480 - RNA, 15 nt, Human
uagcugggacuacag

SEQ ID NO: 3132481 - RNA, 17 nt, Human
uagcugggacuacaggc

SEQ ID NO: 3132482 - RNA, 18 nt, Human
uagccugugccucuggga

SEQ ID NO: 3132483 - RNA, 20 nt, Human
uagcucaggugucccugcac

SEQ ID NO: 3132484 - RNA, 21 nt, Human
uagcucaggugucccugcacu

SEQ ID NO: 3132485 - RNA, 12 nt, Human
uagcucauucuc

SEQ ID NO: 3132486 - RNA, 15 nt, Human
gugggcuaguugggc

SEQ ID NO: 3132487 - RNA, 17 nt, Human
gugggcccaaugcacuu

SEQ ID NO: 3132488 - RNA, 23 nt, Human
guggguuucuaaagcugccagcc

SEQ ID NO: 3132489 - RNA, 17 nt, Human
guggggcagcuugaggg

SEQ ID NO: 3132490 - RNA, 13 nt, Human
guggggcagcuug

SEQ ID NO: 3132491 - RNA, 18 nt, Human
guggggaccucaggccug

SEQ ID NO: 3132492 - RNA, 15 nt, Human
guggggaccucaggc

SEQ ID NO: 3132493 - RNA, 14 nt, Human
guggcugcuucaag

SEQ ID NO: 3132494 - RNA, 12 nt, Human
guggcugcuuca

SEQ ID NO: 3132495 - RNA, 14 nt, Human
guggcucacgccug

SEQ ID NO: 3132496 - RNA, 22 nt, Human
guggcuuaaaacaacacucaca

SEQ ID NO: 3132497 - RNA, 22 nt, Human
guggcugcuucaaggauccuga

SEQ ID NO: 3132498 - RNA, 19 nt, Human
guggcugcuucaaggaucc

SEQ ID NO: 3132499 - RNA, 16 nt, Human
guggcugcuucaagga

SEQ ID NO: 3132500 - RNA, 15 nt, Human
guggcugcuucaagg

SEQ ID NO: 3132501 - RNA, 19 nt, Human
guggcuggguuggagggug

SEQ ID NO: 3132502 - RNA, 23 nt, Human
guggcugcuucaaggauccugag

SEQ ID NO: 3132503 - RNA, 13 nt, Human
gugucccugcacu

SEQ ID NO: 3132504 - RNA, 16 nt, Human
gugucccugcacuugc

SEQ ID NO: 3132505 - RNA, 18 nt, Human
gugucccugcacuugcag

SEQ ID NO: 3132506 - RNA, 17 nt, Human
guguacauggaauaaca

SEQ ID NO: 3132507 - RNA, 22 nt, Human
guguacauggaauaacauguaa

SEQ ID NO: 3132508 - RNA, 21 nt, Human
guguaaguauucuuauuuaau

SEQ ID NO: 3132509 - RNA, 19 nt, Human
guggugcgaucuggguuca

SEQ ID NO: 3132510 - RNA, 14 nt, Human
guggugaccucugc

SEQ ID NO: 3132511 - RNA, 17 nt, Human
guggugaccucugccug

SEQ ID NO: 3132512 - RNA, 21 nt, Human
guggugagaggcauccaguau

SEQ ID NO: 3132513 - RNA, 17 nt, Human
gugguagagugugccug

SEQ ID NO: 3132514 - RNA, 19 nt, Human
gugguaugaucacggcuca

SEQ ID NO: 3132515 - RNA, 16 nt, Human
guggucccaccccaca

SEQ ID NO: 3132516 - RNA, 15 nt, Human
guggucccaccccac

SEQ ID NO: 3132517 - RNA, 14 nt, Human
guggucccacccca

SEQ ID NO: 3132518 - RNA, 18 nt, Human
gugguccuaaucuucuga

SEQ ID NO: 3132519 - RNA, 17 nt, Human
guggucccaccccacac

SEQ ID NO: 3132520 - RNA, 20 nt, Human
gugugagucaccaagcccag

SEQ ID NO: 3132521 - RNA, 21 nt, Human
gugucucuugguccugcugca

SEQ ID NO: 3132522 - RNA, 20 nt, Human
gugucucuugguccugcugc

SEQ ID NO: 3132523 - RNA, 19 nt, Human
gugucucuugguccugcug

SEQ ID NO: 3132524 - RNA, 18 nt, Human
gugucucuugguccugcu

SEQ ID NO: 3132525 - RNA, 22 nt, Human
gugucucuugguccugcugcag

SEQ ID NO: 3132526 - RNA, 17 nt, Human
gugucucccuucauccu

SEQ ID NO: 3132527 - RNA, 14 nt, Human
gugucucuuggucc

SEQ ID NO: 3132528 - RNA, 23 nt, Human
gugucccugcacuugcagacucu

SEQ ID NO: 3132529 - RNA, 14 nt, Human
guguccggucccug

SEQ ID NO: 3132530 - RNA, 15 nt, Human
gugucgggcaugaca

SEQ ID NO: 3132531 - RNA, 21 nt, Human
guguggagaagcggcuggcag

SEQ ID NO: 3132532 - RNA, 13 nt, Human
guguggagaagcg

SEQ ID NO: 3132533 - RNA, 15 nt, Human
gugugcucugaucau

SEQ ID NO: 3132534 - RNA, 22 nt, Human
gugugcucugaucauccacugu

SEQ ID NO: 3132535 - RNA, 12 nt, Human
gugugcucugau

SEQ ID NO: 3132536 - RNA, 15 nt, Human
guuacacuaaaaggu

SEQ ID NO: 3132537 - RNA, 16 nt, Human
guuacacuaaaaggug

SEQ ID NO: 3132538 - RNA, 13 nt, Human
guuacagacaaag

SEQ ID NO: 3132539 - RNA, 22 nt, Human
guuaaaauaccagccaguaaau

SEQ ID NO: 3132540 - RNA, 18 nt, Human
guguuaugacuccagaau

SEQ ID NO: 3132541 - RNA, 14 nt, Human
guguuacuaaguuu

SEQ ID NO: 3132542 - RNA, 12 nt, Human
guguuacuaagu

SEQ ID NO: 3132543 - RNA, 12 nt, Human
guucuggcucuu

SEQ ID NO: 3132544 - RNA, 20 nt, Human
guucuggcucuuccaggcug

SEQ ID NO: 3132545 - RNA, 16 nt, Human
guucuggcucuuccag

SEQ ID NO: 3132546 - RNA, 23 nt, Human
guucuggcagaguugaagacaga

SEQ ID NO: 3132547 - RNA, 11 nt, Human
guucugggaca

SEQ ID NO: 3132548 - RNA, 12 nt, Human
guucugggacac

SEQ ID NO: 3132549 - RNA, 14 nt, Human
guucugggacacag

SEQ ID NO: 3132550 - RNA, 15 nt, Human
guucugggacacagu

SEQ ID NO: 3132551 - RNA, 16 nt, Human
guucugggacacaguu

SEQ ID NO: 3132552 - RNA, 18 nt, Human
guucuuucacccuuuucu

SEQ ID NO: 3132553 - RNA, 13 nt, Human
guucuuuccaaag

SEQ ID NO: 3132554 - RNA, 14 nt, Human
guucuuuccaaagu

SEQ ID NO: 3132555 - RNA, 18 nt, Human
guucuuuccaaaguacac

SEQ ID NO: 3132556 - RNA, 20 nt, Human
guucuuuccaaaguacacug

SEQ ID NO: 3132557 - RNA, 17 nt, Human
guugaaaaacagcugag

SEQ ID NO: 3132558 - RNA, 19 nt, Human
guucugauccuaguuccac

SEQ ID NO: 3132559 - RNA, 14 nt, Human
guugccagucaccc

SEQ ID NO: 3132560 - RNA, 13 nt, Human
guugccagucacc

SEQ ID NO: 3132561 - RNA, 23 nt, Human
guugccagucaccccggccaccu

SEQ ID NO: 3132562 - RNA, 18 nt, Human
guugccagucaccccggc

SEQ ID NO: 3132563 - RNA, 17 nt, Human
guugccagucaccccgg

SEQ ID NO: 3132564 - RNA, 16 nt, Human
guugccagucaccccg

SEQ ID NO: 3132565 - RNA, 12 nt, Human
guugcccaggca

SEQ ID NO: 3132566 - RNA, 14 nt, Human
guugcccaggcagg

SEQ ID NO: 3132567 - RNA, 17 nt, Human
guuggccaggcuggucu

SEQ ID NO: 3132568 - RNA, 19 nt, Human
guuggccaggcuggucuca

SEQ ID NO: 3132569 - RNA, 14 nt, Human
guuggccaguguga

SEQ ID NO: 3132570 - RNA, 15 nt, Human
guuggccaggcuggu

SEQ ID NO: 3132571 - RNA, 14 nt, Human
guuggccaggcugg

SEQ ID NO: 3132572 - RNA, 13 nt, Human
guuggccaggcug

SEQ ID NO: 3132573 - RNA, 18 nt, Human
guuggcaaaaaggcagga

SEQ ID NO: 3132574 - RNA, 14 nt, Human
guuggcaaaaaggc

SEQ ID NO: 3132575 - RNA, 23 nt, Human
guuggccaaagccaaagcuaggc

SEQ ID NO: 3132576 - RNA, 16 nt, Human
guugaagacagagcua

SEQ ID NO: 3132577 - RNA, 15 nt, Human
guugcaggaccucag

SEQ ID NO: 3132578 - RNA, 18 nt, Human
guucaucuugaauuguaa

SEQ ID NO: 3132579 - RNA, 13 nt, Human
guucaucuugaau

SEQ ID NO: 3132580 - RNA, 12 nt, Human
guucaucuugaa

SEQ ID NO: 3132581 - RNA, 17 nt, Human
guucaucauccuaagcu

SEQ ID NO: 3132582 - RNA, 19 nt, Human
guucacugcaaccuccgcc

SEQ ID NO: 3132583 - RNA, 22 nt, Human
guuccucauuagcauuuugcua

SEQ ID NO: 3132584 - RNA, 14 nt, Human
guuccuaauccucu

SEQ ID NO: 3132585 - RNA, 20 nt, Human
guuccaccaucaagccacca

SEQ ID NO: 3132586 - RNA, 17 nt, Human
guuccaccaucaagcca

SEQ ID NO: 3132587 - RNA, 22 nt, Human
guuaguuucuccaagcaggaca

SEQ ID NO: 3132588 - RNA, 19 nt, Human
guuaguuucuccaagcagg

SEQ ID NO: 3132589 - RNA, 16 nt, Human
guuaguuucuccaagc

SEQ ID NO: 3132590 - RNA, 15 nt, Human
guuacucagaauucu

SEQ ID NO: 3132591 - RNA, 22 nt, Human
guuacuaaguuuuuauggcuuu

SEQ ID NO: 3132592 - RNA, 17 nt, Human
guuacagacaaagcgug

SEQ ID NO: 3132593 - RNA, 15 nt, Human
guuacagacaaagcg

SEQ ID NO: 3132594 - RNA, 18 nt, Human
guuacauaagauaaaugu

SEQ ID NO: 3132595 - RNA, 19 nt, Human
guuacauaagauaaaugug

SEQ ID NO: 3132596 - RNA, 21 nt, Human
guuacauuuuuaagugcugca

SEQ ID NO: 3132597 - RNA, 23 nt, Human
guuaccauuuugggguacccacu

SEQ ID NO: 3132598 - RNA, 21 nt, Human
guuaugacuccagaauuuccc

SEQ ID NO: 3132599 - RNA, 19 nt, Human
guucaagcgauucuucugc

SEQ ID NO: 3132600 - RNA, 19 nt, Human
guuauuaaaaaucucaaau

SEQ ID NO: 3132601 - RNA, 16 nt, Human
guucaauucucauuug

SEQ ID NO: 3132602 - RNA, 23 nt, Human
guucaauucucauuugucacaca

SEQ ID NO: 3132603 - RNA, 20 nt, Human
guucaagcgauucuucugcu

SEQ ID NO: 3132604 - RNA, 18 nt, Human
gucugugccauuuuguau

SEQ ID NO: 3132605 - RNA, 14 nt, Human
gucuguucuuucca

SEQ ID NO: 3132606 - RNA, 17 nt, Human
gucuguucuuuccaaag

SEQ ID NO: 3132607 - RNA, 21 nt, Human
gucuuaaaaaguggaaaaaua

SEQ ID NO: 3132608 - RNA, 16 nt, Human
gucuugaacuccuggc

SEQ ID NO: 3132609 - RNA, 17 nt, Human
gucuugaacuccuggcc

SEQ ID NO: 3132610 - RNA, 21 nt, Human
gucuugaacuccuggccucaa

SEQ ID NO: 3132611 - RNA, 18 nt, Human
gucuugaacuccuggccu

SEQ ID NO: 3132612 - RNA, 20 nt, Human
gucuugaacuccuggccuca

SEQ ID NO: 3132613 - RNA, 16 nt, Human
gucuugcaauggcagc

SEQ ID NO: 3132614 - RNA, 17 nt, Human
gucuugcaauggcagcc

SEQ ID NO: 3132615 - RNA, 18 nt, Human
gucuugcaauggcagccu

SEQ ID NO: 3132616 - RNA, 19 nt, Human
gucuugcaauggcagccuu

SEQ ID NO: 3132617 - RNA, 23 nt, Human
gucuugcaauggcagccuuggca

SEQ ID NO: 3132618 - RNA, 20 nt, Human
gucuugcaauggcagccuug

SEQ ID NO: 3132619 - RNA, 21 nt, Human
gucuugcaauggcagccuugg

SEQ ID NO: 3132620 - RNA, 16 nt, Human
gucuuuuuucacuaca

SEQ ID NO: 3132621 - RNA, 21 nt, Human
gucggaaaacaugcuacacac

SEQ ID NO: 3132622 - RNA, 16 nt, Human
gucgggcaugacacga

SEQ ID NO: 3132623 - RNA, 19 nt, Human
guccuuaccagcagagcac

SEQ ID NO: 3132624 - RNA, 18 nt, Human
guccuuaccagcagagca

SEQ ID NO: 3132625 - RNA, 21 nt, Human
guccuuaccagcagagcaccu

SEQ ID NO: 3132626 - RNA, 14 nt, Human
gucccugccaaugg

SEQ ID NO: 3132627 - RNA, 11 nt, Human
gucccugccaa

SEQ ID NO: 3132628 - RNA, 15 nt, Human
gucccugccaaugga

SEQ ID NO: 3132629 - RNA, 18 nt, Human
gucucacuauguugccca

SEQ ID NO: 3132630 - RNA, 11 nt, Human
gucucacucug

SEQ ID NO: 3132631 - RNA, 19 nt, Human
gucucacuauguugcccag

SEQ ID NO: 3132632 - RNA, 15 nt, Human
gucucacucugucgc

SEQ ID NO: 3132633 - RNA, 16 nt, Human
gucucacucugucgcc

SEQ ID NO: 3132634 - RNA, 18 nt, Human
gucucacucugucgccca

SEQ ID NO: 3132635 - RNA, 19 nt, Human
gucucacucugucgcccag

SEQ ID NO: 3132636 - RNA, 22 nt, Human
gucucacucugucgcccagucu

SEQ ID NO: 3132637 - RNA, 21 nt, Human
gugcauaccacuuuuguucuu

SEQ ID NO: 3132638 - RNA, 22 nt, Human
gugcauaccacuuuuguucuug

SEQ ID NO: 3132639 - RNA, 20 nt, Human
gugcaguggugcgaucuggg

SEQ ID NO: 3132640 - RNA, 23 nt, Human
gugcaguggugcgaucuggguuc

SEQ ID NO: 3132641 - RNA, 23 nt, Human
gugauccacccaccucagccucc

SEQ ID NO: 3132642 - RNA, 24 nt, Human
gugauccacccaccucagccuccc

SEQ ID NO: 3132643 - RNA, 13 nt, Human
gugauuuuuguaa

SEQ ID NO: 3132644 - RNA, 18 nt, Human
gugauuuuuguaauuuuu

SEQ ID NO: 3132645 - RNA, 14 nt, Human
gugcggccuuuggc

SEQ ID NO: 3132646 - RNA, 14 nt, Human
gugcgccuacagga

SEQ ID NO: 3132647 - RNA, 14 nt, Human
gugccaugugccag

SEQ ID NO: 3132648 - RNA, 16 nt, Human
gugccaugugccaggu

SEQ ID NO: 3132649 - RNA, 21 nt, Human
gugcgaucuggguucacugca

SEQ ID NO: 3132650 - RNA, 17 nt, Human
gugauacaaugcugugc

SEQ ID NO: 3132651 - RNA, 15 nt, Human
gugauacaaugcugu

SEQ ID NO: 3132652 - RNA, 17 nt, Human
gugaguugauagcacag

SEQ ID NO: 3132653 - RNA, 22 nt, Human
gugauccacccaccucagccuc

SEQ ID NO: 3132654 - RNA, 19 nt, Human
gugagccgagaucacgcca

SEQ ID NO: 3132655 - RNA, 17 nt, Human
gugaggaugaaaaaaua

SEQ ID NO: 3132656 - RNA, 14 nt, Human
gugagccacugcac

SEQ ID NO: 3132657 - RNA, 15 nt, Human
gugagccacugcacc

SEQ ID NO: 3132658 - RNA, 20 nt, Human
gugagccacugcaccgggcc

SEQ ID NO: 3132659 - RNA, 12 nt, Human
gugacagaggca

SEQ ID NO: 3132660 - RNA, 13 nt, Human
gugacagaggcag

SEQ ID NO: 3132661 - RNA, 14 nt, Human
gugacagaggcagc

SEQ ID NO: 3132662 - RNA, 12 nt, Human
gugaccucugcc

SEQ ID NO: 3132663 - RNA, 15 nt, Human
gugacagaggcagcc

SEQ ID NO: 3132664 - RNA, 13 nt, Human
gugaccucugccu

SEQ ID NO: 3132665 - RNA, 14 nt, Human
gugaccucugccug

SEQ ID NO: 3132666 - RNA, 20 nt, Human
gugacaaggauugcuacugu

SEQ ID NO: 3132667 - RNA, 21 nt, Human
gugaaugaugauccuaggcau

SEQ ID NO: 3132668 - RNA, 19 nt, Human
guauuuuguuuuugucuua

SEQ ID NO: 3132669 - RNA, 15 nt, Human
gucaagugaaaaagg

SEQ ID NO: 3132670 - RNA, 15 nt, Human
gucaccccggccacc

SEQ ID NO: 3132671 - RNA, 14 nt, Human
guauuuuacuaaua

SEQ ID NO: 3132672 - RNA, 22 nt, Human
gucaccccggccaccugcggug

SEQ ID NO: 3132673 - RNA, 18 nt, Human
gucaccccggccaccugc

SEQ ID NO: 3132674 - RNA, 17 nt, Human
gucaccccggccaccug

SEQ ID NO: 3132675 - RNA, 19 nt, Human
gucacucuggcagcucaga

SEQ ID NO: 3132676 - RNA, 17 nt, Human
gucacucuggcagcuca

SEQ ID NO: 3132677 - RNA, 16 nt, Human
gucacucuggcagcuc

SEQ ID NO: 3132678 - RNA, 14 nt, Human
gucacucuggcagc

SEQ ID NO: 3132679 - RNA, 13 nt, Human
gucacucuggcag

SEQ ID NO: 3132680 - RNA, 12 nt, Human
gucacucuggca

SEQ ID NO: 3132681 - RNA, 14 nt, Human
gucagagccugcag

SEQ ID NO: 3132682 - RNA, 15 nt, Human
gucagagccugcagu

SEQ ID NO: 3132683 - RNA, 16 nt, Human
gucagagccugcaguu

SEQ ID NO: 3132684 - RNA, 23 nt, Human
guccacccaggagccccgaggcc

SEQ ID NO: 3132685 - RNA, 12 nt, Human
guccacccagga

SEQ ID NO: 3132686 - RNA, 21 nt, Human
gucccaccuuggcugcaggga

SEQ ID NO: 3132687 - RNA, 19 nt, Human
gucccugcacuugcagacu

SEQ ID NO: 3132688 - RNA, 21 nt, Human
gucccugcacuugcagacucu

SEQ ID NO: 3132689 - RNA, 16 nt, Human
gucccugcacuugcag

SEQ ID NO: 3132690 - RNA, 20 nt, Human
gucccaccuuggcugcaggg

SEQ ID NO: 3132691 - RNA, 23 nt, Human
gucccaccuuggcugcagggagu

SEQ ID NO: 3132692 - RNA, 16 nt, Human
guaggguuauaauaau

SEQ ID NO: 3132693 - RNA, 14 nt, Human
guagucaggugccu

SEQ ID NO: 3132694 - RNA, 16 nt, Human
guagggcgggaggaug

SEQ ID NO: 3132695 - RNA, 23 nt, Human
guagggcgggaggauguucuggg

SEQ ID NO: 3132696 - RNA, 21 nt, Human
guagggcgggaggauguucug

SEQ ID NO: 3132697 - RNA, 22 nt, Human
guagggcgggaggauguucugg

SEQ ID NO: 3132698 - RNA, 15 nt, Human
guagagugugccuga

SEQ ID NO: 3132699 - RNA, 22 nt, Human
guauaugucaagccauaauugu

SEQ ID NO: 3132700 - RNA, 20 nt, Human
guaugaucacggcucacugc

SEQ ID NO: 3132701 - RNA, 17 nt, Human
guaugaggcauuuguuu

SEQ ID NO: 3132702 - RNA, 20 nt, Human
guaugaggcauuuguuugaa

SEQ ID NO: 3132703 - RNA, 21 nt, Human
guaugaucacggcucacugca

SEQ ID NO: 3132704 - RNA, 19 nt, Human
guaucuggugacuuuccuc

SEQ ID NO: 3132705 - RNA, 12 nt, Human
guaucuggugac

SEQ ID NO: 3132706 - RNA, 12 nt, Human
guaucugagcag

SEQ ID NO: 3132707 - RNA, 13 nt, Human
guaugaggcauuu

SEQ ID NO: 3132708 - RNA, 15 nt, Human
guaugaggcauuugu

SEQ ID NO: 3132709 - RNA, 19 nt, Human
uuuuuccuucagugccuua

SEQ ID NO: 3132710 - RNA, 23 nt, Human
uuuuuaagaaaaaggaugcacag

SEQ ID NO: 3132711 - RNA, 11 nt, Human
uuuuuccuuca

SEQ ID NO: 3132712 - RNA, 16 nt, Human
uuuugucauauaagau

SEQ ID NO: 3132713 - RNA, 19 nt, Human
uuuuguagagccagggucu

SEQ ID NO: 3132714 - RNA, 15 nt, Human
uuuuggucuguguga

SEQ ID NO: 3132715 - RNA, 14 nt, Human
uuuuggcugcugaa

SEQ ID NO: 3132716 - RNA, 20 nt, Human
uuuugacaaggggcaguggu

SEQ ID NO: 3132717 - RNA, 11 nt, Human
uuuuaaaugca

SEQ ID NO: 3132718 - RNA, 12 nt, Human
uuuuaaaugcac

SEQ ID NO: 3132719 - RNA, 21 nt, Human
uuuuaaaugcaccuggaauau

SEQ ID NO: 3132720 - RNA, 21 nt, Human
uuuguucuggcucuuccaggc

SEQ ID NO: 3132721 - RNA, 17 nt, Human
uuuuaaagaaugcucuu

SEQ ID NO: 3132722 - RNA, 21 nt, Human
uuuggaauuuugugcccccau

SEQ ID NO: 3132723 - RNA, 17 nt, Human
uuuggucuacacugugc

SEQ ID NO: 3132724 - RNA, 14 nt, Human
uuuggaauuuugug

SEQ ID NO: 3132725 - RNA, 15 nt, Human
uuugcuuugugauuu

SEQ ID NO: 3132726 - RNA, 16 nt, Human
uuugcuuugugauuuu

SEQ ID NO: 3132727 - RNA, 18 nt, Human
uuucuuagggaaggauac

SEQ ID NO: 3132728 - RNA, 23 nt, Human
uuucuuagggaaggauacaaaag

SEQ ID NO: 3132729 - RNA, 13 nt, Human
uuucuucucccuc

SEQ ID NO: 3132730 - RNA, 12 nt, Human
uuucuucucccu

SEQ ID NO: 3132731 - RNA, 17 nt, Human
uuugaacugauaaagau

SEQ ID NO: 3132732 - RNA, 19 nt, Human
uuugaacugauaaagauga

SEQ ID NO: 3132733 - RNA, 15 nt, Human
uuugaacugauaaag

SEQ ID NO: 3132734 - RNA, 14 nt, Human
uuugaacucuucaa

SEQ ID NO: 3132735 - RNA, 22 nt, Human
uuugaagaugccgcauuuggau

SEQ ID NO: 3132736 - RNA, 16 nt, Human
uuuccugaggcugggc

SEQ ID NO: 3132737 - RNA, 14 nt, Human
uuaccacagacaua

SEQ ID NO: 3132738 - RNA, 17 nt, Human
uuaccacagacauacua

SEQ ID NO: 3132739 - RNA, 23 nt, Human
uuacauuuuuaagugcugcauuu

SEQ ID NO: 3132740 - RNA, 20 nt, Human
uuucuguucuuucuggcuau

SEQ ID NO: 3132741 - RNA, 23 nt, Human
uuucuacucgaguuacagacaaa

SEQ ID NO: 3132742 - RNA, 20 nt, Human
uuucuaaaggcuaccuuugu

SEQ ID NO: 3132743 - RNA, 21 nt, Human
uuucuaaaggcuaccuuugua

SEQ ID NO: 3132744 - RNA, 18 nt, Human
uuucuaaaggcuaccuuu

SEQ ID NO: 3132745 - RNA, 16 nt, Human
cuaaccagcagaaaug

SEQ ID NO: 3132746 - RNA, 17 nt, Human
cuaaccacgcuggaccu

SEQ ID NO: 3132747 - RNA, 17 nt, Human
cuaaccagcagaaaugc

SEQ ID NO: 3132748 - RNA, 15 nt, Human
cuaaggugugcucug

SEQ ID NO: 3132749 - RNA, 19 nt, Human
cuaagcuauucaguaauaa

SEQ ID NO: 3132750 - RNA, 21 nt, Human
cuaagcuauucaguaauaacu

SEQ ID NO: 3132751 - RNA, 13 nt, Human
cuacacacugcau

SEQ ID NO: 3132752 - RNA, 15 nt, Human
cuacacacugcaugu

SEQ ID NO: 3132753 - RNA, 18 nt, Human
cuacacugugcugagucu

SEQ ID NO: 3132754 - RNA, 15 nt, Human
cuacagaggccaugg

SEQ ID NO: 3132755 - RNA, 17 nt, Human
cuacccacccuccuuuc

SEQ ID NO: 3132756 - RNA, 13 nt, Human
cuacccacccucc

SEQ ID NO: 3132757 - RNA, 22 nt, Human
cuacccacccuccuuucaccac

SEQ ID NO: 3132758 - RNA, 20 nt, Human
cuacccagcgagcccuggug

SEQ ID NO: 3132759 - RNA, 19 nt, Human
cuacccagcgagcccuggu

SEQ ID NO: 3132760 - RNA, 16 nt, Human
cuaauguacugcauau

SEQ ID NO: 3132761 - RNA, 14 nt, Human
cuaauguacugcau

SEQ ID NO: 3132762 - RNA, 20 nt, Human
cuaauaaaauuuaaaagucu

SEQ ID NO: 3132763 - RNA, 16 nt, Human
cuaaggugugcucuga

SEQ ID NO: 3132764 - RNA, 21 nt, Human
cuaauaaaauuuaaaagucuu

SEQ ID NO: 3132765 - RNA, 18 nt, Human
cuaauauguaacaagcca

SEQ ID NO: 3132766 - RNA, 21 nt, Human
cuagacgagcaggcuucuucc

SEQ ID NO: 3132767 - RNA, 20 nt, Human
cuagacgagcaggcuucuuc

SEQ ID NO: 3132768 - RNA, 21 nt, Human
cuagagugaacuugggccacu

SEQ ID NO: 3132769 - RNA, 17 nt, Human
cuagagugaacuugggc

SEQ ID NO: 3132770 - RNA, 17 nt, Human
cuagcacuuugggaggc

SEQ ID NO: 3132771 - RNA, 13 nt, Human
cuacucuguguca

SEQ ID NO: 3132772 - RNA, 16 nt, Human
cuacucugugucaggu

SEQ ID NO: 3132773 - RNA, 21 nt, Human
cuacucugugucagguggggc

SEQ ID NO: 3132774 - RNA, 21 nt, Human
cuacccgggaagggggcuggg

SEQ ID NO: 3132775 - RNA, 20 nt, Human
cuacccgggaagggggcugg

SEQ ID NO: 3132776 - RNA, 15 nt, Human
cuacccgggaagggg

SEQ ID NO: 3132777 - RNA, 14 nt, Human
cuacccgggaaggg

SEQ ID NO: 3132778 - RNA, 14 nt, Human
cuacugaggugcua

SEQ ID NO: 3132779 - RNA, 17 nt, Human
cuacuguaauuugugau

SEQ ID NO: 3132780 - RNA, 16 nt, Human
cuacuguaauuuguga

SEQ ID NO: 3132781 - RNA, 22 nt, Human
cuaggaccccuccaugugggcu

SEQ ID NO: 3132782 - RNA, 17 nt, Human
cuaggaggucucuaaga

SEQ ID NO: 3132783 - RNA, 15 nt, Human
cuaggaacacuccuu

SEQ ID NO: 3132784 - RNA, 13 nt, Human
cuaggaacacucc

SEQ ID NO: 3132785 - RNA, 21 nt, Human
cuaggaagacuuuggaaagag

SEQ ID NO: 3132786 - RNA, 19 nt, Human
cuagugugguguuuccugg

SEQ ID NO: 3132787 - RNA, 23 nt, Human
cuagugugguguuuccuggcacu

SEQ ID NO: 3132788 - RNA, 22 nt, Human
cuagugugguguuuccuggcac

SEQ ID NO: 3132789 - RNA, 21 nt, Human
cuagugugguguuuccuggca

SEQ ID NO: 3132790 - RNA, 21 nt, Human
cuaggcauuugcugaauacag

SEQ ID NO: 3132791 - RNA, 22 nt, Human
cuauauuguuuucaguguacau

SEQ ID NO: 3132792 - RNA, 23 nt, Human
cuauauuguuuucaguguacaug

SEQ ID NO: 3132793 - RNA, 14 nt, Human
cuaugacacaugca

SEQ ID NO: 3132794 - RNA, 20 nt, Human
cuaucaaguauuauaccuuu

SEQ ID NO: 3132795 - RNA, 11 nt, Human
cuaugcauuug

SEQ ID NO: 3132796 - RNA, 12 nt, Human
cuaugcauuuga

SEQ ID NO: 3132797 - RNA, 23 nt, Human
cucacaguccuuaccagcagagc

SEQ ID NO: 3132798 - RNA, 18 nt, Human
cucaagugauucuccugc

SEQ ID NO: 3132799 - RNA, 19 nt, Human
cucaagugauucuccugcc

SEQ ID NO: 3132800 - RNA, 20 nt, Human
cucaagugauucuccugccu

SEQ ID NO: 3132801 - RNA, 20 nt, Human
cucaccagccccagugccca

SEQ ID NO: 3132802 - RNA, 21 nt, Human
cucaccagccccagugcccac

SEQ ID NO: 3132803 - RNA, 19 nt, Human
cucaccagccccagugccc

SEQ ID NO: 3132804 - RNA, 13 nt, Human
cucaccccagccc

SEQ ID NO: 3132805 - RNA, 12 nt, Human
cucaccccagcc

SEQ ID NO: 3132806 - RNA, 16 nt, Human
cucacuauguugccca

SEQ ID NO: 3132807 - RNA, 17 nt, Human
cucacuauguugcccag

SEQ ID NO: 3132808 - RNA, 21 nt, Human
cucaacucuccuccagaguca

SEQ ID NO: 3132809 - RNA, 20 nt, Human
cucaacucuccuccagaguc

SEQ ID NO: 3132810 - RNA, 19 nt, Human
cucaacucuccuccagagu

SEQ ID NO: 3132811 - RNA, 14 nt, Human
cuaugcauuugaaa

SEQ ID NO: 3132812 - RNA, 15 nt, Human
cuaaauggaaccacu

SEQ ID NO: 3132813 - RNA, 16 nt, Human
cuaaauggaaccacuc

SEQ ID NO: 3132814 - RNA, 17 nt, Human
cuaaauggaaccacucu

SEQ ID NO: 3132815 - RNA, 18 nt, Human
cuaaauggaaccacucua

SEQ ID NO: 3132816 - RNA, 16 nt, Human
cuaaauguugaaagau

SEQ ID NO: 3132817 - RNA, 17 nt, Human
cuaacauggaaguacua

SEQ ID NO: 3132818 - RNA, 15 nt, Human
cuaacauggaaguac

SEQ ID NO: 3132819 - RNA, 14 nt, Human
cgugcacacaccag

SEQ ID NO: 3132820 - RNA, 18 nt, Human
cgugcacacaccagagcc

SEQ ID NO: 3132821 - RNA, 19 nt, Human
cgugcacacaccagagccc

SEQ ID NO: 3132822 - RNA, 21 nt, Human
cgugcaguggugcgaucuggg

SEQ ID NO: 3132823 - RNA, 23 nt, Human
cgugcauaccacuuuuguucuug

SEQ ID NO: 3132824 - RNA, 20 nt, Human
cgucugacaggcaaugcugg

SEQ ID NO: 3132825 - RNA, 21 nt, Human
cgucugacaggcaaugcuggc

SEQ ID NO: 3132826 - RNA, 22 nt, Human
cgucugacaggcaaugcuggcu

SEQ ID NO: 3132827 - RNA, 16 nt, Human
cgugcacacaccagag

SEQ ID NO: 3132828 - RNA, 16 nt, Human
cgucuaccugaggggc

SEQ ID NO: 3132829 - RNA, 16 nt, Human
cgucucauacucaccu

SEQ ID NO: 3132830 - RNA, 18 nt, Human
cggugcuaucucccccag

SEQ ID NO: 3132831 - RNA, 21 nt, Human
cggugcuaucucccccagccc

SEQ ID NO: 3132832 - RNA, 20 nt, Human
cggugcuaucucccccagcc

SEQ ID NO: 3132833 - RNA, 22 nt, Human
cggugcuaucucccccagcccc

SEQ ID NO: 3132834 - RNA, 17 nt, Human
cguggcugcuucaagga

SEQ ID NO: 3132835 - RNA, 23 nt, Human
cggggacagcuccuucuguccua

SEQ ID NO: 3132836 - RNA, 15 nt, Human
cgggggcagagaggg

SEQ ID NO: 3132837 - RNA, 20 nt, Human
cgggaggucgaggcaggagg

SEQ ID NO: 3132838 - RNA, 18 nt, Human
cgggaggucgaggcagga

SEQ ID NO: 3132839 - RNA, 22 nt, Human
cggggacagcuccuucuguccu

SEQ ID NO: 3132840 - RNA, 14 nt, Human
cgggcacucagaag

SEQ ID NO: 3132841 - RNA, 22 nt, Human
cgggcacucagaagacacugau

SEQ ID NO: 3132842 - RNA, 19 nt, Human
cggcuggccuggccccuca

SEQ ID NO: 3132843 - RNA, 22 nt, Human
cggcuggccuggccccucaggg

SEQ ID NO: 3132844 - RNA, 23 nt, Human
cggcuggccuggccccucagggu

SEQ ID NO: 3132845 - RNA, 14 nt, Human
cgguccacccagga

SEQ ID NO: 3132846 - RNA, 15 nt, Human
cgguccacccaggag

SEQ ID NO: 3132847 - RNA, 16 nt, Human
cgguccacccaggagc

SEQ ID NO: 3132848 - RNA, 20 nt, Human
cgguccacccaggagccccg

SEQ ID NO: 3132849 - RNA, 20 nt, Human
cggugagaggggaacagacu

SEQ ID NO: 3132850 - RNA, 21 nt, Human
cggugagaggggaacagacug

SEQ ID NO: 3132851 - RNA, 17 nt, Human
cggccaccugcggugcu

SEQ ID NO: 3132852 - RNA, 16 nt, Human
cggccaccugcggugc

SEQ ID NO: 3132853 - RNA, 15 nt, Human
cggccaccugcggug

SEQ ID NO: 3132854 - RNA, 11 nt, Human
cggccaccugc

SEQ ID NO: 3132855 - RNA, 13 nt, Human
cggaagagccuug

SEQ ID NO: 3132856 - RNA, 13 nt, Human
cggccccugcugg

SEQ ID NO: 3132857 - RNA, 18 nt, Human
cggccccugcugguucag

SEQ ID NO: 3132858 - RNA, 19 nt, Human
cggccccugcugguucagg

SEQ ID NO: 3132859 - RNA, 24 nt, Human
cggccaggccagagggagugacag

SEQ ID NO: 3132860 - RNA, 21 nt, Human
cgcuaagagggagggagggcu

SEQ ID NO: 3132861 - RNA, 22 nt, Human
cgcuaagagggagggagggcuc

SEQ ID NO: 3132862 - RNA, 16 nt, Human
cgcuacccgggaaggg

SEQ ID NO: 3132863 - RNA, 15 nt, Human
cggaaaacaugcuac

SEQ ID NO: 3132864 - RNA, 20 nt, Human
cggaaaacaugcuacacacu

SEQ ID NO: 3132865 - RNA, 15 nt, Human
cgcugugcugcccug

SEQ ID NO: 3132866 - RNA, 17 nt, Human
cgcugugcugcccugcc

SEQ ID NO: 3132867 - RNA, 16 nt, Human
cgcugugcugcccugc

SEQ ID NO: 3132868 - RNA, 22 nt, Human
cgcugucagccauuccuguucc

SEQ ID NO: 3132869 - RNA, 22 nt, Human
cgccagauucuuuccugaggcu

SEQ ID NO: 3132870 - RNA, 20 nt, Human
ccucugcccacucccugcaa

SEQ ID NO: 3132871 - RNA, 19 nt, Human
ccucugcccacucccugca

SEQ ID NO: 3132872 - RNA, 17 nt, Human
ccucugcccacucccug

SEQ ID NO: 3132873 - RNA, 16 nt, Human
cgccaucccagcccca

SEQ ID NO: 3132874 - RNA, 14 nt, Human
cgccaucccagccc

SEQ ID NO: 3132875 - RNA, 23 nt, Human
cgccaggggaaaaucagccugcu

SEQ ID NO: 3132876 - RNA, 22 nt, Human
cgcccaggcuuagucacugaga

SEQ ID NO: 3132877 - RNA, 23 nt, Human
cugaaagcccugagcuuucugcu

SEQ ID NO: 3132878 - RNA, 19 nt, Human
cugaaagcccugagcuuuc

SEQ ID NO: 3132879 - RNA, 18 nt, Human
cugaaagcccugagcuuu

SEQ ID NO: 3132880 - RNA, 17 nt, Human
cugaaagcccugagcuu

SEQ ID NO: 3132881 - RNA, 16 nt, Human
cugaaagcccugagcu

SEQ ID NO: 3132882 - RNA, 15 nt, Human
cugaaagcccugagc

SEQ ID NO: 3132883 - RNA, 19 nt, Human
cugaagaauugaaaaacca

SEQ ID NO: 3132884 - RNA, 18 nt, Human
cucuuuaaugucacaggc

SEQ ID NO: 3132885 - RNA, 16 nt, Human
cucuugguccugcugc

SEQ ID NO: 3132886 - RNA, 15 nt, Human
cucuugguccugcug

SEQ ID NO: 3132887 - RNA, 13 nt, Human
cucuugguccugc

SEQ ID NO: 3132888 - RNA, 20 nt, Human
cucuuuaaugucacaggcag

SEQ ID NO: 3132889 - RNA, 21 nt, Human
cucuuuaaugucacaggcagg

SEQ ID NO: 3132890 - RNA, 22 nt, Human
cucuuuaaugucacaggcaggu

SEQ ID NO: 3132891 - RNA, 23 nt, Human
cucuuuaaugucacaggcagguc

SEQ ID NO: 3132892 - RNA, 13 nt, Human
cucuuucccuccc

SEQ ID NO: 3132893 - RNA, 17 nt, Human
cucuuucccucccuucc

SEQ ID NO: 3132894 - RNA, 22 nt, Human
cucuugaaauauaggaacuuaa

SEQ ID NO: 3132895 - RNA, 21 nt, Human
cucuuggguucaagcgauucu

SEQ ID NO: 3132896 - RNA, 19 nt, Human
cucuuggguucaagcgauu

SEQ ID NO: 3132897 - RNA, 13 nt, Human
cucuuccaggcug

SEQ ID NO: 3132898 - RNA, 15 nt, Human
cucuuccaggcuggg

SEQ ID NO: 3132899 - RNA, 14 nt, Human
cucuuccaggcugg

SEQ ID NO: 3132900 - RNA, 15 nt, Human
cucuuagaaaaacca

SEQ ID NO: 3132901 - RNA, 13 nt, Human
cucuuagaaaaac

SEQ ID NO: 3132902 - RNA, 15 nt, Human
cucugugucaggugg

SEQ ID NO: 3132903 - RNA, 13 nt, Human
cucucuccucccu

SEQ ID NO: 3132904 - RNA, 22 nt, Human
cucugccugaagucacacagug

SEQ ID NO: 3132905 - RNA, 10 nt, Human
cucugccuga

SEQ ID NO: 3132906 - RNA, 21 nt, Human
cucugccugaagucacacagu

SEQ ID NO: 3132907 - RNA, 15 nt, Human
cucuggacaggcaug

SEQ ID NO: 3132908 - RNA, 15 nt, Human
cucuggcagcucaga

SEQ ID NO: 3132909 - RNA, 14 nt, Human
cucuggcagcucag

SEQ ID NO: 3132910 - RNA, 12 nt, Human
cucuggcagcuc

SEQ ID NO: 3132911 - RNA, 16 nt, Human
cucuggacaggcaugu

SEQ ID NO: 3132912 - RNA, 22 nt, Human
cucuggacaggcauguucucug

SEQ ID NO: 3132913 - RNA, 14 nt, Human
cucuggacaggcau

SEQ ID NO: 3132914 - RNA, 15 nt, Human
cugagccagauuuca

SEQ ID NO: 3132915 - RNA, 21 nt, Human
cugagccagauuucacucucc

SEQ ID NO: 3132916 - RNA, 20 nt, Human
cugagccagauuucacucuc

SEQ ID NO: 3132917 - RNA, 19 nt, Human
cugagccagauuucacucu

SEQ ID NO: 3132918 - RNA, 18 nt, Human
cugagccagauuucacuc

SEQ ID NO: 3132919 - RNA, 17 nt, Human
cugagccagauuucacu

SEQ ID NO: 3132920 - RNA, 18 nt, Human
cugagacagcccgggcuc

SEQ ID NO: 3132921 - RNA, 17 nt, Human
cugagacagcccgggcu

SEQ ID NO: 3132922 - RNA, 16 nt, Human
cugagacagcccgggc

SEQ ID NO: 3132923 - RNA, 20 nt, Human
cugaggcccuucucuccagc

SEQ ID NO: 3132924 - RNA, 19 nt, Human
cugaggcccuucucuccag

SEQ ID NO: 3132925 - RNA, 18 nt, Human
cugaggcccuucucucca

SEQ ID NO: 3132926 - RNA, 15 nt, Human
cugaggcccuucucu

SEQ ID NO: 3132927 - RNA, 14 nt, Human
cugaggcccuucuc

SEQ ID NO: 3132928 - RNA, 23 nt, Human
cugaggcccagagggccugcaag

SEQ ID NO: 3132929 - RNA, 21 nt, Human
cugaggcccagagggccugca

SEQ ID NO: 3132930 - RNA, 19 nt, Human
cugaggcccagagggccug

SEQ ID NO: 3132931 - RNA, 18 nt, Human
cugaggcccagagggccu

SEQ ID NO: 3132932 - RNA, 17 nt, Human
cugaggcccagagggcc

SEQ ID NO: 3132933 - RNA, 16 nt, Human
cugaggcccagagggc

SEQ ID NO: 3132934 - RNA, 15 nt, Human
cugaggcccagaggg

SEQ ID NO: 3132935 - RNA, 14 nt, Human
cugaggcccagagg

SEQ ID NO: 3132936 - RNA, 13 nt, Human
cugaggcccagag

SEQ ID NO: 3132937 - RNA, 12 nt, Human
cugaggcccaga

SEQ ID NO: 3132938 - RNA, 15 nt, Human
cugagacagcccggg

SEQ ID NO: 3132939 - RNA, 14 nt, Human
cugagacagcccgg

SEQ ID NO: 3132940 - RNA, 18 nt, Human
cugacuguuuucucuuga

SEQ ID NO: 3132941 - RNA, 16 nt, Human
cugacuguuuucucuu

SEQ ID NO: 3132942 - RNA, 22 nt, Human
cugacauuguuggccaaagcca

SEQ ID NO: 3132943 - RNA, 12 nt, Human
cugacccacugc

SEQ ID NO: 3132944 - RNA, 16 nt, Human
cugacccaugcugccc

SEQ ID NO: 3132945 - RNA, 15 nt, Human
cugacccaugcugcc

SEQ ID NO: 3132946 - RNA, 14 nt, Human
cugacccaugcugc

SEQ ID NO: 3132947 - RNA, 13 nt, Human
cugacccacugcu

SEQ ID NO: 3132948 - RNA, 14 nt, Human
cugacccacugcuu

SEQ ID NO: 3132949 - RNA, 13 nt, Human
cugacccaugcug

SEQ ID NO: 3132950 - RNA, 21 nt, Human
cugacauuguuggccaaagcc

SEQ ID NO: 3132951 - RNA, 21 nt, Human
cugacaggcaaugcuggcugu

SEQ ID NO: 3132952 - RNA, 15 nt, Human
cucuaguuugauuaa

SEQ ID NO: 3132953 - RNA, 19 nt, Human
cucuaguuugauuaaauuc

SEQ ID NO: 3132954 - RNA, 20 nt, Human
cucuaguuugauuaaauucu

SEQ ID NO: 3132955 - RNA, 21 nt, Human
cucuaguuugauuaaauucuu

SEQ ID NO: 3132956 - RNA, 12 nt, Human
cucucaggccaa

SEQ ID NO: 3132957 - RNA, 21 nt, Human
cucucaggccaaacucaccug

SEQ ID NO: 3132958 - RNA, 20 nt, Human
cucucaggccaaacucaccu

SEQ ID NO: 3132959 - RNA, 15 nt, Human
cucucaggccagcug

SEQ ID NO: 3132960 - RNA, 13 nt, Human
cucucaggccagc

SEQ ID NO: 3132961 - RNA, 23 nt, Human
cucucaggccaaacucaccugcc

SEQ ID NO: 3132962 - RNA, 22 nt, Human
cucucaggccaaacucaccugc

SEQ ID NO: 3132963 - RNA, 21 nt, Human
cucucaggccagcugcuuggg

SEQ ID NO: 3132964 - RNA, 19 nt, Human
cucucaggccagcugcuug

SEQ ID NO: 3132965 - RNA, 18 nt, Human
cucucaggccagcugcuu

SEQ ID NO: 3132966 - RNA, 17 nt, Human
cucucaggccagcugcu

SEQ ID NO: 3132967 - RNA, 18 nt, Human
cucuccagccccuggaug

SEQ ID NO: 3132968 - RNA, 17 nt, Human
cucuccagccccuggau

SEQ ID NO: 3132969 - RNA, 16 nt, Human
cucuccagccccugga

SEQ ID NO: 3132970 - RNA, 15 nt, Human
cucuccagccccugg

SEQ ID NO: 3132971 - RNA, 14 nt, Human
cucuccagccccug

SEQ ID NO: 3132972 - RNA, 13 nt, Human
cucucucaggcca

SEQ ID NO: 3132973 - RNA, 12 nt, Human
cucucucacucc

SEQ ID NO: 3132974 - RNA, 14 nt, Human
cucuccccagcaag

SEQ ID NO: 3132975 - RNA, 22 nt, Human
cucuccccagcaagugagagcu

SEQ ID NO: 3132976 - RNA, 12 nt, Human
cucuccucugcu

SEQ ID NO: 3132977 - RNA, 19 nt, Human
cucuccagccccuggaugc

SEQ ID NO: 3132978 - RNA, 13 nt, Human
cucuccccagcaa

SEQ ID NO: 3132979 - RNA, 18 nt, Human
cucuccucugcugcuggc

SEQ ID NO: 3132980 - RNA, 15 nt, Human
cucuccucugcugcu

SEQ ID NO: 3132981 - RNA, 14 nt, Human
cucuccucugcugc

SEQ ID NO: 3132982 - RNA, 13 nt, Human
cucuccucugcug

SEQ ID NO: 3132983 - RNA, 13 nt, Human
cucuacagaggcc

SEQ ID NO: 3132984 - RNA, 19 nt, Human
cucuacagaggccaugggc

SEQ ID NO: 3132985 - RNA, 14 nt, Human
cucuacagaggcca

SEQ ID NO: 3132986 - RNA, 16 nt, Human
cucuacagaggccaug

SEQ ID NO: 3132987 - RNA, 13 nt, Human
cucuacaaaaagc

SEQ ID NO: 3132988 - RNA, 19 nt, Human
cuccuucacagaugggugc

SEQ ID NO: 3132989 - RNA, 14 nt, Human
cuccugugugugcg

SEQ ID NO: 3132990 - RNA, 17 nt, Human
cuccuucacagaugggu

SEQ ID NO: 3132991 - RNA, 16 nt, Human
cuccuucacagauggg

SEQ ID NO: 3132992 - RNA, 23 nt, Human
cucuagggaaaaaccagcgugug

SEQ ID NO: 3132993 - RNA, 20 nt, Human
cucuaccauccccuguagag

SEQ ID NO: 3132994 - RNA, 13 nt, Human
cucuacccuggca

SEQ ID NO: 3132995 - RNA, 20 nt, Human
cuccugcaggcagccaggcc

SEQ ID NO: 3132996 - RNA, 18 nt, Human
cuccugcaggcagccagg

SEQ ID NO: 3132997 - RNA, 11 nt, Human
cuccugcccuu

SEQ ID NO: 3132998 - RNA, 13 nt, Human
cuccugccucagc

SEQ ID NO: 3132999 - RNA, 14 nt, Human
cuccugccucagcc

SEQ ID NO: 3133000 - RNA, 17 nt, Human
cuccugcaggcagccag

SEQ ID NO: 3133001 - RNA, 16 nt, Human
cuccugcaggcagcca

SEQ ID NO: 3133002 - RNA, 11 nt, Human
cuccugcaggc

SEQ ID NO: 3133003 - RNA, 16 nt, Human
cuccugugugugcgcc

SEQ ID NO: 3133004 - RNA, 19 nt, Human
cuccugugugugcgccuac

SEQ ID NO: 3133005 - RNA, 22 nt, Human
cuccugccucgaacuggcugca

SEQ ID NO: 3133006 - RNA, 15 nt, Human
cuccugccucagccu

SEQ ID NO: 3133007 - RNA, 18 nt, Human
cucccucagucuggcccu

SEQ ID NO: 3133008 - RNA, 17 nt, Human
cucccuuucuucccuac

SEQ ID NO: 3133009 - RNA, 22 nt, Human
cuccuccagccgccaugcuccu

SEQ ID NO: 3133010 - RNA, 22 nt, Human
cuccucuccccagcaagugaga

SEQ ID NO: 3133011 - RNA, 17 nt, Human
cucccgaauagcuggga

SEQ ID NO: 3133012 - RNA, 16 nt, Human
cucccgaauagcuggg

SEQ ID NO: 3133013 - RNA, 13 nt, Human
cuccccugcuggg

SEQ ID NO: 3133014 - RNA, 15 nt, Human
cucccgaguagcugg

SEQ ID NO: 3133015 - RNA, 18 nt, Human
cucccgaauagcugggac

SEQ ID NO: 3133016 - RNA, 16 nt, Human
cucccgaguagcuggg

SEQ ID NO: 3133017 - RNA, 17 nt, Human
cucccgaguagcuggga

SEQ ID NO: 3133018 - RNA, 12 nt, Human
cuccccagcaag

SEQ ID NO: 3133019 - RNA, 20 nt, Human
cuccccagcaagugagagcu

SEQ ID NO: 3133020 - RNA, 20 nt, Human
cuccccagccccaucccaaa

SEQ ID NO: 3133021 - RNA, 12 nt, Human
cuccccugcugg

SEQ ID NO: 3133022 - RNA, 22 nt, Human
cucccaacucaccccagcccca

SEQ ID NO: 3133023 - RNA, 18 nt, Human
cucccaaagugcugggau

SEQ ID NO: 3133024 - RNA, 17 nt, Human
cucccaacucaccccag

SEQ ID NO: 3133025 - RNA, 16 nt, Human
cucccaacucacccca

SEQ ID NO: 3133026 - RNA, 23 nt, Human
cucccaucugugaaaggaaagag

SEQ ID NO: 3133027 - RNA, 18 nt, Human
cucccaucugugaaagga

SEQ ID NO: 3133028 - RNA, 15 nt, Human
cucccaucugugaaa

SEQ ID NO: 3133029 - RNA, 14 nt, Human
cucccaucugugaa

SEQ ID NO: 3133030 - RNA, 11 nt, Human
cucccaucugu

SEQ ID NO: 3133031 - RNA, 21 nt, Human
cucccaucucacacaugagca

SEQ ID NO: 3133032 - RNA, 17 nt, Human
cucccaaagugcuggga

SEQ ID NO: 3133033 - RNA, 13 nt, Human
cuccaugugggcu

SEQ ID NO: 3133034 - RNA, 18 nt, Human
cucacuauguugcccagg

SEQ ID NO: 3133035 - RNA, 16 nt, Human
cugcccaggccccugc

SEQ ID NO: 3133036 - RNA, 18 nt, Human
cugcccaggccccugcca

SEQ ID NO: 3133037 - RNA, 19 nt, Human
cugcccaggccccugccac

SEQ ID NO: 3133038 - RNA, 20 nt, Human
cugcccaggccccugccacc

SEQ ID NO: 3133039 - RNA, 13 nt, Human
cugcccaggcccc

SEQ ID NO: 3133040 - RNA, 12 nt, Human
cugcccaccugg

SEQ ID NO: 3133041 - RNA, 14 nt, Human
cugcccaggccccu

SEQ ID NO: 3133042 - RNA, 15 nt, Human
cugcccaggccccug

SEQ ID NO: 3133043 - RNA, 15 nt, Human
cugccauuucugaga

SEQ ID NO: 3133044 - RNA, 19 nt, Human
cugccccuggcagccccug

SEQ ID NO: 3133045 - RNA, 17 nt, Human
cugccccuggcagcccc

SEQ ID NO: 3133046 - RNA, 18 nt, Human
cugccccuggcagccccu

SEQ ID NO: 3133047 - RNA, 13 nt, Human
cugcccggcaggg

SEQ ID NO: 3133048 - RNA, 21 nt, Human
cugccaggaagccagcaggcu

SEQ ID NO: 3133049 - RNA, 20 nt, Human
cugccaggaagccagcaggc

SEQ ID NO: 3133050 - RNA, 14 nt, Human
cugccaggaagcca

SEQ ID NO: 3133051 - RNA, 13 nt, Human
cugccaggaagcc

SEQ ID NO: 3133052 - RNA, 21 nt, Human
cugccauccagguucagcuug

SEQ ID NO: 3133053 - RNA, 15 nt, Human
cugccauccucccaa

SEQ ID NO: 3133054 - RNA, 22 nt, Human
cugccaggaagccagcaggcuc

SEQ ID NO: 3133055 - RNA, 15 nt, Human
cugcauaugaaagga

SEQ ID NO: 3133056 - RNA, 20 nt, Human
cugcaucaagaugugacaug

SEQ ID NO: 3133057 - RNA, 21 nt, Human
cugccacccuggggagaaagu

SEQ ID NO: 3133058 - RNA, 12 nt, Human
cugccacccugg

SEQ ID NO: 3133059 - RNA, 14 nt, Human
cugcaccgggccac

SEQ ID NO: 3133060 - RNA, 15 nt, Human
cugcaccgggccaca

SEQ ID NO: 3133061 - RNA, 15 nt, Human
cugcaccggcuggcc

SEQ ID NO: 3133062 - RNA, 14 nt, Human
cugcaccggcuggc

SEQ ID NO: 3133063 - RNA, 23 nt, Human
cugaggcccuucucuccagcccc

SEQ ID NO: 3133064 - RNA, 22 nt, Human
cugaggcccuucucuccagccc

SEQ ID NO: 3133065 - RNA, 18 nt, Human
cugcaccgggccacagag

SEQ ID NO: 3133066 - RNA, 19 nt, Human
cugcacuccagccugggug

SEQ ID NO: 3133067 - RNA, 20 nt, Human
cugcacuccagccuggguga

SEQ ID NO: 3133068 - RNA, 13 nt, Human
cugcacuccccug

SEQ ID NO: 3133069 - RNA, 20 nt, Human
cugcacuccccugcugggug

SEQ ID NO: 3133070 - RNA, 19 nt, Human
cugcacuccccugcugggu

SEQ ID NO: 3133071 - RNA, 18 nt, Human
cugcacuccccugcuggg

SEQ ID NO: 3133072 - RNA, 21 nt, Human
cugcacuccccugcugggugu

SEQ ID NO: 3133073 - RNA, 13 nt, Human
cugcagagggcac

SEQ ID NO: 3133074 - RNA, 15 nt, Human
cugcagcaauaaagc

SEQ ID NO: 3133075 - RNA, 16 nt, Human
cugcagcaauaaagca

SEQ ID NO: 3133076 - RNA, 10 nt, Human
cugcagaggg

SEQ ID NO: 3133077 - RNA, 17 nt, Human
cugcagcaauaaagcag

SEQ ID NO: 3133078 - RNA, 16 nt, Human
cugcaguugccaguca

SEQ ID NO: 3133079 - RNA, 13 nt, Human
cugcaguugccag

SEQ ID NO: 3133080 - RNA, 19 nt, Human
cugcuugugaaaggaaaga

SEQ ID NO: 3133081 - RNA, 19 nt, Human
cugcuugggcuucauccuc

SEQ ID NO: 3133082 - RNA, 18 nt, Human
cugcuugggcuucauccu

SEQ ID NO: 3133083 - RNA, 17 nt, Human
cugcuugggcuucaucc

SEQ ID NO: 3133084 - RNA, 15 nt, Human
cugcuugggcuucau

SEQ ID NO: 3133085 - RNA, 13 nt, Human
cugcuugggcuuc

SEQ ID NO: 3133086 - RNA, 22 nt, Human
cugcuugaggcaacucaucuua

SEQ ID NO: 3133087 - RNA, 20 nt, Human
cugcuugcuugcuuuuuaau

SEQ ID NO: 3133088 - RNA, 15 nt, Human
cugcuuuuggucugu

SEQ ID NO: 3133089 - RNA, 17 nt, Human
cugcuuuuggucugugu

SEQ ID NO: 3133090 - RNA, 13 nt, Human
cugcugcuggcug

SEQ ID NO: 3133091 - RNA, 12 nt, Human
cugcugcuggcu

SEQ ID NO: 3133092 - RNA, 15 nt, Human
cugcuggguguggcg

SEQ ID NO: 3133093 - RNA, 14 nt, Human
cugcuggguguggc

SEQ ID NO: 3133094 - RNA, 17 nt, Human
cugcuggguguggcgca

SEQ ID NO: 3133095 - RNA, 21 nt, Human
cugcuugaggcaacucaucuu

SEQ ID NO: 3133096 - RNA, 20 nt, Human
cugcuugaggcaacucaucu

SEQ ID NO: 3133097 - RNA, 13 nt, Human
cugcuugaggcaa

SEQ ID NO: 3133098 - RNA, 19 nt, Human
cugccugaagucacacagu

SEQ ID NO: 3133099 - RNA, 18 nt, Human
cugccugaagucacacag

SEQ ID NO: 3133100 - RNA, 16 nt, Human
cugccugaagucacac

SEQ ID NO: 3133101 - RNA, 21 nt, Human
cugcccugcccaccuggccuc

SEQ ID NO: 3133102 - RNA, 17 nt, Human
cugcccugcccaccugg

SEQ ID NO: 3133103 - RNA, 20 nt, Human
cugcccugcccaccuggccu

SEQ ID NO: 3133104 - RNA, 23 nt, Human
cugcgguccacccaggagccccg

SEQ ID NO: 3133105 - RNA, 19 nt, Human
cugcggugcuaucuccccc

SEQ ID NO: 3133106 - RNA, 18 nt, Human
cugcggugcuaucucccc

SEQ ID NO: 3133107 - RNA, 23 nt, Human
cugcggugcuaucucccccagcc

SEQ ID NO: 3133108 - RNA, 22 nt, Human
cugcggugcuaucucccccagc

SEQ ID NO: 3133109 - RNA, 21 nt, Human
cugcggugcuaucucccccag

SEQ ID NO: 3133110 - RNA, 20 nt, Human
cugcggugcuaucuccccca

SEQ ID NO: 3133111 - RNA, 23 nt, Human
cugcuccucuccccagcaaguga

SEQ ID NO: 3133112 - RNA, 19 nt, Human
cugcuccucuccccagcaa

SEQ ID NO: 3133113 - RNA, 20 nt, Human
cugcuccucuccccagcaag

SEQ ID NO: 3133114 - RNA, 15 nt, Human
cugcucuccgaccag

SEQ ID NO: 3133115 - RNA, 13 nt, Human
cugcugcaguugc

SEQ ID NO: 3133116 - RNA, 10 nt, Human
cugcugcagu

SEQ ID NO: 3133117 - RNA, 14 nt, Human
cugcugcaguugcc

SEQ ID NO: 3133118 - RNA, 12 nt, Human
cugcucugguua

SEQ ID NO: 3133119 - RNA, 18 nt, Human
cugggagagccuuccagg

SEQ ID NO: 3133120 - RNA, 17 nt, Human
cugggagagccuuccag

SEQ ID NO: 3133121 - RNA, 21 nt, Human
cugggagagccuuccaggggu

SEQ ID NO: 3133122 - RNA, 20 nt, Human
cugggagagccuuccagggg

SEQ ID NO: 3133123 - RNA, 19 nt, Human
cugggagagccuuccaggg

SEQ ID NO: 3133124 - RNA, 20 nt, Human
cuggcugguuagagguuccc

SEQ ID NO: 3133125 - RNA, 22 nt, Human
cuggcuggguggcaccagcagc

SEQ ID NO: 3133126 - RNA, 16 nt, Human
cuggcuguuggcuggg

SEQ ID NO: 3133127 - RNA, 17 nt, Human
cuggcuguuggcugggg

SEQ ID NO: 3133128 - RNA, 17 nt, Human
cugggauuacaggugug

SEQ ID NO: 3133129 - RNA, 20 nt, Human
cugggauuacaggugugaac

SEQ ID NO: 3133130 - RNA, 18 nt, Human
cugggaugauuggagggg

SEQ ID NO: 3133131 - RNA, 20 nt, Human
cugggaucccucauccucau

SEQ ID NO: 3133132 - RNA, 21 nt, Human
cugggaggucaaggcugcagu

SEQ ID NO: 3133133 - RNA, 19 nt, Human
cugggaggucaaggcugca

SEQ ID NO: 3133134 - RNA, 23 nt, Human
cuggccucaagugauucuccugc

SEQ ID NO: 3133135 - RNA, 12 nt, Human
cuggccucugca

SEQ ID NO: 3133136 - RNA, 22 nt, Human
cuggccucaagugauucuccug

SEQ ID NO: 3133137 - RNA, 16 nt, Human
cuggccugagcuggga

SEQ ID NO: 3133138 - RNA, 14 nt, Human
cuggccucugcacu

SEQ ID NO: 3133139 - RNA, 13 nt, Human
cuggccucugcac

SEQ ID NO: 3133140 - RNA, 13 nt, Human
cuggccuggcccc

SEQ ID NO: 3133141 - RNA, 14 nt, Human
cuggccuggccccu

SEQ ID NO: 3133142 - RNA, 18 nt, Human
cuggccugagcugggaug

SEQ ID NO: 3133143 - RNA, 15 nt, Human
cuggccugagcuggg

SEQ ID NO: 3133144 - RNA, 14 nt, Human
cuggccugugucua

SEQ ID NO: 3133145 - RNA, 17 nt, Human
cuggccuggccccucag

SEQ ID NO: 3133146 - RNA, 16 nt, Human
cuggccuggccccuca

SEQ ID NO: 3133147 - RNA, 15 nt, Human
cuggcacuauaaugu

SEQ ID NO: 3133148 - RNA, 16 nt, Human
cuggcacuauaaugua

SEQ ID NO: 3133149 - RNA, 22 nt, Human
cuggcaugggaaugaaugucag

SEQ ID NO: 3133150 - RNA, 19 nt, Human
cuggcaugggaaugaaugu

SEQ ID NO: 3133151 - RNA, 18 nt, Human
cuggcaugggaaugaaug

SEQ ID NO: 3133152 - RNA, 16 nt, Human
cuggcaugggaaugaa

SEQ ID NO: 3133153 - RNA, 24 nt, Human
cuggcaugggaaugaaugucagug

SEQ ID NO: 3133154 - RNA, 22 nt, Human
cuggccagaugcaccagcccuu

SEQ ID NO: 3133155 - RNA, 16 nt, Human
cuggcacccggccccu

SEQ ID NO: 3133156 - RNA, 17 nt, Human
cuggcacccggccccug

SEQ ID NO: 3133157 - RNA, 18 nt, Human
cuggcacccggccccugc

SEQ ID NO: 3133158 - RNA, 22 nt, Human
cuggcacccggccccugcuggu

SEQ ID NO: 3133159 - RNA, 14 nt, Human
cuggcaagaaugug

SEQ ID NO: 3133160 - RNA, 18 nt, Human
cuggaauauauaaccagu

SEQ ID NO: 3133161 - RNA, 13 nt, Human
cuggucccacuca

SEQ ID NO: 3133162 - RNA, 23 nt, Human
cuggucucaaacucuugaccuca

SEQ ID NO: 3133163 - RNA, 21 nt, Human
cugguccauagagagcaagac

SEQ ID NO: 3133164 - RNA, 22 nt, Human
cugggcucccuucccaccucuc

SEQ ID NO: 3133165 - RNA, 21 nt, Human
cugggcucccuucccaccucu

SEQ ID NO: 3133166 - RNA, 20 nt, Human
cugggcucccuucccaccuc

SEQ ID NO: 3133167 - RNA, 19 nt, Human
cugggcucccuucccaccu

SEQ ID NO: 3133168 - RNA, 16 nt, Human
cuggguacuuguggac

SEQ ID NO: 3133169 - RNA, 14 nt, Human
cuggguacuugugg

SEQ ID NO: 3133170 - RNA, 18 nt, Human
cuggguacuuguggacac

SEQ ID NO: 3133171 - RNA, 15 nt, Human
cuggguuggagggug

SEQ ID NO: 3133172 - RNA, 18 nt, Human
cuguaauuugugauacaa

SEQ ID NO: 3133173 - RNA, 17 nt, Human
cuguaauuugugauaca

SEQ ID NO: 3133174 - RNA, 23 nt, Human
cuguacagagcccacgcccccac

SEQ ID NO: 3133175 - RNA, 21 nt, Human
cuguaauuugugauacaaugc

SEQ ID NO: 3133176 - RNA, 21 nt, Human
cuguaccucuugagccuugaa

SEQ ID NO: 3133177 - RNA, 22 nt, Human
cuguacaugaaaacacauuuuu

SEQ ID NO: 3133178 - RNA, 23 nt, Human
cuguacaugaaaacacauuuuuc

SEQ ID NO: 3133179 - RNA, 12 nt, Human
cugguggcagcu

SEQ ID NO: 3133180 - RNA, 14 nt, Human
cugguggcagcuca

SEQ ID NO: 3133181 - RNA, 13 nt, Human
cugguggcagcuc

SEQ ID NO: 3133182 - RNA, 20 nt, Human
cugguucaggguuggccccu

SEQ ID NO: 3133183 - RNA, 22 nt, Human
cugucucaaaaaaagaaaaaga

SEQ ID NO: 3133184 - RNA, 21 nt, Human
cuguccuacucugugucaggu

SEQ ID NO: 3133185 - RNA, 22 nt, Human
cugucccuuacgugaguccugg

SEQ ID NO: 3133186 - RNA, 16 nt, Human
cuguccuacucugugu

SEQ ID NO: 3133187 - RNA, 17 nt, Human
cuguccuacucuguguc

SEQ ID NO: 3133188 - RNA, 18 nt, Human
cuguccuacucuguguca

SEQ ID NO: 3133189 - RNA, 20 nt, Human
cuguccuacucugugucagg

SEQ ID NO: 3133190 - RNA, 14 nt, Human
cugucccccugaca

SEQ ID NO: 3133191 - RNA, 13 nt, Human
cugucccccugac

SEQ ID NO: 3133192 - RNA, 23 nt, Human
cugucauuugagcagggcucagc

SEQ ID NO: 3133193 - RNA, 22 nt, Human
cugucccagugccgagaaggaa

SEQ ID NO: 3133194 - RNA, 18 nt, Human
cuguaucccaugagccuc

SEQ ID NO: 3133195 - RNA, 14 nt, Human
cuguaucccaugag

SEQ ID NO: 3133196 - RNA, 15 nt, Human
cuguaucccaugagc

SEQ ID NO: 3133197 - RNA, 22 nt, Human
cuguaccucuugagccuugaac

SEQ ID NO: 3133198 - RNA, 13 nt, Human
gaagggggcuggg

SEQ ID NO: 3133199 - RNA, 18 nt, Human
gaagucuuagauguauau

SEQ ID NO: 3133200 - RNA, 13 nt, Human
gaagucacacagu

SEQ ID NO: 3133201 - RNA, 19 nt, Human
gaaguaauaugcacacauu

SEQ ID NO: 3133202 - RNA, 20 nt, Human
gaaguaauaugcacacauuu

SEQ ID NO: 3133203 - RNA, 20 nt, Human
gaaggaaacccagcucuggu

SEQ ID NO: 3133204 - RNA, 19 nt, Human
gaaggaaacccagcucugg

SEQ ID NO: 3133205 - RNA, 14 nt, Human
gaagccgcuggggc

SEQ ID NO: 3133206 - RNA, 20 nt, Human
gaagccgcuggggccaguug

SEQ ID NO: 3133207 - RNA, 18 nt, Human
gaagccgcuggggccagu

SEQ ID NO: 3133208 - RNA, 19 nt, Human
gaaggacauugcggacagc

SEQ ID NO: 3133209 - RNA, 20 nt, Human
gaaggacauugcggacagcc

SEQ ID NO: 3133210 - RNA, 21 nt, Human
gaaggacauugcggacagcca

SEQ ID NO: 3133211 - RNA, 22 nt, Human
gaaggaaacccagcucuggucc

SEQ ID NO: 3133212 - RNA, 21 nt, Human
gaaggaaacccagcucugguc

SEQ ID NO: 3133213 - RNA, 15 nt, Human
gaaggaacguccccu

SEQ ID NO: 3133214 - RNA, 19 nt, Human
gaaggaagacuucaucccu

SEQ ID NO: 3133215 - RNA, 17 nt, Human
gaacuuaaauaauguga

SEQ ID NO: 3133216 - RNA, 14 nt, Human
gaacuuaaauaaug

SEQ ID NO: 3133217 - RNA, 17 nt, Human
gaacuuggcgcugcccc

SEQ ID NO: 3133218 - RNA, 18 nt, Human
gaaccacaucuugcucug

SEQ ID NO: 3133219 - RNA, 14 nt, Human
gaagaagcucucuc

SEQ ID NO: 3133220 - RNA, 16 nt, Human
gaacuuugaccucugc

SEQ ID NO: 3133221 - RNA, 22 nt, Human
gaacuuugaccucugcagcaau

SEQ ID NO: 3133222 - RNA, 17 nt, Human
gaacuuuccaggaaggc

SEQ ID NO: 3133223 - RNA, 18 nt, Human
gaacuuggcgcugccccu

SEQ ID NO: 3133224 - RNA, 17 nt, Human
gaacuugggccacugug

SEQ ID NO: 3133225 - RNA, 17 nt, Human
gaagacuucaucccucu

SEQ ID NO: 3133226 - RNA, 12 nt, Human
gaagagccuugc

SEQ ID NO: 3133227 - RNA, 16 nt, Human
gaagacuucaucccuc

SEQ ID NO: 3133228 - RNA, 15 nt, Human
gaagacuucaucccu

SEQ ID NO: 3133229 - RNA, 18 nt, Human
gaagcauuuacuuugugu

SEQ ID NO: 3133230 - RNA, 16 nt, Human
gaaagaguaggaagac

SEQ ID NO: 3133231 - RNA, 16 nt, Human
gaaagaucaaaagguu

SEQ ID NO: 3133232 - RNA, 16 nt, Human
gaaaaaugagccuggc

SEQ ID NO: 3133233 - RNA, 22 nt, Human
gaaaguacuucuccacccugcu

SEQ ID NO: 3133234 - RNA, 16 nt, Human
gaaaggaaagaggcuc

SEQ ID NO: 3133235 - RNA, 11 nt, Human
gaaaggaaaga

SEQ ID NO: 3133236 - RNA, 18 nt, Human
gaaauaucugaaaaugua

SEQ ID NO: 3133237 - RNA, 19 nt, Human
gaaauaucugaaaauguau

SEQ ID NO: 3133238 - RNA, 17 nt, Human
gaaauauaggaacuuaa

SEQ ID NO: 3133239 - RNA, 18 nt, Human
gaaaugaggucagagccu

SEQ ID NO: 3133240 - RNA, 11 nt, Human
gaaaugagcug

SEQ ID NO: 3133241 - RNA, 15 nt, Human
gaaaugggcagagca

SEQ ID NO: 3133242 - RNA, 16 nt, Human
gaaaugggcagagcag

SEQ ID NO: 3133243 - RNA, 17 nt, Human
gaaauguacagcaagga

SEQ ID NO: 3133244 - RNA, 19 nt, Human
gaaaugggcagagcagaga

SEQ ID NO: 3133245 - RNA, 17 nt, Human
gaaaugggcagagcaga

SEQ ID NO: 3133246 - RNA, 22 nt, Human
gaacagacuggaagcacagcuu

SEQ ID NO: 3133247 - RNA, 17 nt, Human
gaacacuccuucacaga

SEQ ID NO: 3133248 - RNA, 20 nt, Human
gaacagacuggaagcacagc

SEQ ID NO: 3133249 - RNA, 19 nt, Human
gaacagacuggaagcacag

SEQ ID NO: 3133250 - RNA, 16 nt, Human
gaacacuccuucacag

SEQ ID NO: 3133251 - RNA, 15 nt, Human
gaacacuccuucaca

SEQ ID NO: 3133252 - RNA, 16 nt, Human
cuuguggacacagcuc

SEQ ID NO: 3133253 - RNA, 17 nt, Human
cuuguggacacagcucu

SEQ ID NO: 3133254 - RNA, 18 nt, Human
cuuguggacacagcucuu

SEQ ID NO: 3133255 - RNA, 16 nt, Human
cuuggggaccagagcu

SEQ ID NO: 3133256 - RNA, 17 nt, Human
cuuggggaccagagcug

SEQ ID NO: 3133257 - RNA, 19 nt, Human
cuuggggaccagagcugcc

SEQ ID NO: 3133258 - RNA, 18 nt, Human
cuuggggaccagagcugc

SEQ ID NO: 3133259 - RNA, 21 nt, Human
cuuguaaauagcucagguguc

SEQ ID NO: 3133260 - RNA, 20 nt, Human
cuugguuuguaaauuaacuu

SEQ ID NO: 3133261 - RNA, 12 nt, Human
cuuggcugcagg

SEQ ID NO: 3133262 - RNA, 13 nt, Human
cuuggcugcaggg

SEQ ID NO: 3133263 - RNA, 23 nt, Human
cuuggcucaaguccucuuuucug

SEQ ID NO: 3133264 - RNA, 13 nt, Human
cuuggauuguccc

SEQ ID NO: 3133265 - RNA, 13 nt, Human
cuugcuugcuuuu

SEQ ID NO: 3133266 - RNA, 22 nt, Human
cuugcaaaguaucccuacugua

SEQ ID NO: 3133267 - RNA, 14 nt, Human
cuugcaauggcagc

SEQ ID NO: 3133268 - RNA, 18 nt, Human
cuugcagacucuacagag

SEQ ID NO: 3133269 - RNA, 17 nt, Human
cuugcaugaggcuagug

SEQ ID NO: 3133270 - RNA, 21 nt, Human
cuugcaugaggcuaguguggu

SEQ ID NO: 3133271 - RNA, 19 nt, Human
cuugagccuugaacuuuga

SEQ ID NO: 3133272 - RNA, 20 nt, Human
cuugaccauucuccaccugc

SEQ ID NO: 3133273 - RNA, 17 nt, Human
cuugaccauucuccacc

SEQ ID NO: 3133274 - RNA, 21 nt, Human
cuugaccauucuccaccugcc

SEQ ID NO: 3133275 - RNA, 14 nt, Human
cuugagagggugga

SEQ ID NO: 3133276 - RNA, 20 nt, Human
cuugagccuugaacuuugac

SEQ ID NO: 3133277 - RNA, 22 nt, Human
cuugagccuugaacuuugaccu

SEQ ID NO: 3133278 - RNA, 19 nt, Human
cuugaaauauaggaacuua

SEQ ID NO: 3133279 - RNA, 22 nt, Human
cuucuuuauaauucuacuuuga

SEQ ID NO: 3133280 - RNA, 14 nt, Human
cuugaacuccuggc

SEQ ID NO: 3133281 - RNA, 15 nt, Human
cuugaacuccuggcc

SEQ ID NO: 3133282 - RNA, 17 nt, Human
cuugaacuccuggccuc

SEQ ID NO: 3133283 - RNA, 18 nt, Human
cuugaacuccuggccuca

SEQ ID NO: 3133284 - RNA, 15 nt, Human
cuugaacuuugaccu

SEQ ID NO: 3133285 - RNA, 18 nt, Human
cuugaacuggguacuugu

SEQ ID NO: 3133286 - RNA, 20 nt, Human
cuugaacuggguacuugugg

SEQ ID NO: 3133287 - RNA, 19 nt, Human
cuugaacuccuggccucaa

SEQ ID NO: 3133288 - RNA, 16 nt, Human
cuugaacuggguacuu

SEQ ID NO: 3133289 - RNA, 22 nt, Human
cuuuucauuuaggugaggaagc

SEQ ID NO: 3133290 - RNA, 23 nt, Human
cuuuuccaacccucaucaccaac

SEQ ID NO: 3133291 - RNA, 13 nt, Human
cuuuuccaacccu

SEQ ID NO: 3133292 - RNA, 20 nt, Human
cuuuucgcaggauucuuccu

SEQ ID NO: 3133293 - RNA, 21 nt, Human
cuuuucgcaggauucuuccuc

SEQ ID NO: 3133294 - RNA, 22 nt, Human
cuuuuuaauauugauaugcuua

SEQ ID NO: 3133295 - RNA, 13 nt, Human
cuuuucuuuucuu

SEQ ID NO: 3133296 - RNA, 16 nt, Human
cuuuucuuucagccaa

SEQ ID NO: 3133297 - RNA, 17 nt, Human
cuuuucuuucagccaag

SEQ ID NO: 3133298 - RNA, 15 nt, Human
cuuuuuuauacauaa

SEQ ID NO: 3133299 - RNA, 16 nt, Human
cuuuuuuauacauaaa

SEQ ID NO: 3133300 - RNA, 17 nt, Human
cuuuuuuauacauaaac

SEQ ID NO: 3133301 - RNA, 16 nt, Human
gaaaaagaaaaaauau

SEQ ID NO: 3133302 - RNA, 11 nt, Human
gaaaaagaaaa

SEQ ID NO: 3133303 - RNA, 18 nt, Human
cuuuuuuauacauaaaca

SEQ ID NO: 3133304 - RNA, 14 nt, Human
cuuugcagacaggc

SEQ ID NO: 3133305 - RNA, 15 nt, Human
cuuugcagacaggca

SEQ ID NO: 3133306 - RNA, 23 nt, Human
cuuuggaaagaguaggaagacuu

SEQ ID NO: 3133307 - RNA, 19 nt, Human
cuuuggaaagaguaggaag

SEQ ID NO: 3133308 - RNA, 21 nt, Human
cuuuccugaggcugggcuccc

SEQ ID NO: 3133309 - RNA, 20 nt, Human
cuuuccugaggcugggcucc

SEQ ID NO: 3133310 - RNA, 16 nt, Human
cuuuccugaggcuggg

SEQ ID NO: 3133311 - RNA, 17 nt, Human
cuuuccugaggcugggc

SEQ ID NO: 3133312 - RNA, 21 nt, Human
cuuguggacacagcucuucuc

SEQ ID NO: 3133313 - RNA, 22 nt, Human
cuuuccaaaguacacuguuuca

SEQ ID NO: 3133314 - RNA, 16 nt, Human
cuuuccaaaguacacu

SEQ ID NO: 3133315 - RNA, 14 nt, Human
cuuuccaggaaggc

SEQ ID NO: 3133316 - RNA, 21 nt, Human
gagauagccaaggccaaagga

SEQ ID NO: 3133317 - RNA, 20 nt, Human
gagauagccaaggccaaagg

SEQ ID NO: 3133318 - RNA, 19 nt, Human
gagauagccaaggccaaag

SEQ ID NO: 3133319 - RNA, 16 nt, Human
gagcagagaccauccc

SEQ ID NO: 3133320 - RNA, 18 nt, Human
gagcagagaccaucccug

SEQ ID NO: 3133321 - RNA, 17 nt, Human
gagcagagaccaucccu

SEQ ID NO: 3133322 - RNA, 23 nt, Human
gagcagagaccaucccugaaggc

SEQ ID NO: 3133323 - RNA, 21 nt, Human
gagcagagaccaucccugaag

SEQ ID NO: 3133324 - RNA, 19 nt, Human
gagcagagaccaucccuga

SEQ ID NO: 3133325 - RNA, 21 nt, Human
gagcagccacauuccugaugc

SEQ ID NO: 3133326 - RNA, 22 nt, Human
gagcagccacauuccugaugcu

SEQ ID NO: 3133327 - RNA, 13 nt, Human
gagccagauuuca

SEQ ID NO: 3133328 - RNA, 13 nt, Human
gagcccaccuugg

SEQ ID NO: 3133329 - RNA, 15 nt, Human
gagcccaccuuggcu

SEQ ID NO: 3133330 - RNA, 17 nt, Human
gagcccaccuuggcuca

SEQ ID NO: 3133331 - RNA, 18 nt, Human
gagccacugcaccgggcc

SEQ ID NO: 3133332 - RNA, 19 nt, Human
gagccacugcaccgggcca

SEQ ID NO: 3133333 - RNA, 13 nt, Human
gagccacugcacc

SEQ ID NO: 3133334 - RNA, 15 nt, Human
gagccagauuucacu

SEQ ID NO: 3133335 - RNA, 19 nt, Human
gagccagauuucacucucc

SEQ ID NO: 3133336 - RNA, 18 nt, Human
gagccagauuucacucuc

SEQ ID NO: 3133337 - RNA, 13 nt, Human
gagccuccugccc

SEQ ID NO: 3133338 - RNA, 12 nt, Human
gagccugcaguu

SEQ ID NO: 3133339 - RNA, 17 nt, Human
gagccucagcauccugg

SEQ ID NO: 3133340 - RNA, 14 nt, Human
gagccucagcaucc

SEQ ID NO: 3133341 - RNA, 15 nt, Human
gagccucagcauccu

SEQ ID NO: 3133342 - RNA, 13 nt, Human
gagccucagcauc

SEQ ID NO: 3133343 - RNA, 21 nt, Human
gagccgagaucacgccacugc

SEQ ID NO: 3133344 - RNA, 22 nt, Human
gagccgagaucacgccacugca

SEQ ID NO: 3133345 - RNA, 19 nt, Human
gagccgagaucacgccacu

SEQ ID NO: 3133346 - RNA, 20 nt, Human
gagccgagaucacgccacug

SEQ ID NO: 3133347 - RNA, 18 nt, Human
gagcccacgcccccacug

SEQ ID NO: 3133348 - RNA, 15 nt, Human
gagccugcaguuauu

SEQ ID NO: 3133349 - RNA, 17 nt, Human
gagcuagcagcagggag

SEQ ID NO: 3133350 - RNA, 15 nt, Human
gagcuagcagcaggg

SEQ ID NO: 3133351 - RNA, 15 nt, Human
gagcugaguggggga

SEQ ID NO: 3133352 - RNA, 14 nt, Human
gaggaacaaggcaa

SEQ ID NO: 3133353 - RNA, 16 nt, Human
gaggaacaaggcaagg

SEQ ID NO: 3133354 - RNA, 17 nt, Human
gaggaagagaaaaaaua

SEQ ID NO: 3133355 - RNA, 13 nt, Human
gaggaagccgcug

SEQ ID NO: 3133356 - RNA, 18 nt, Human
gaggaagccgcuggggcc

SEQ ID NO: 3133357 - RNA, 17 nt, Human
gaggaagccgcuggggc

SEQ ID NO: 3133358 - RNA, 14 nt, Human
gaggaagccgcugg

SEQ ID NO: 3133359 - RNA, 17 nt, Human
gaggaaagcaaaggaga

SEQ ID NO: 3133360 - RNA, 16 nt, Human
gaggaaagcaaaggag

SEQ ID NO: 3133361 - RNA, 22 nt, Human
gagcuuucugcuaucaaagagg

SEQ ID NO: 3133362 - RNA, 20 nt, Human
gagcuuugaaaauucagugg

SEQ ID NO: 3133363 - RNA, 14 nt, Human
gacuuggaagcucc

SEQ ID NO: 3133364 - RNA, 15 nt, Human
gacuuggaagcuccg

SEQ ID NO: 3133365 - RNA, 16 nt, Human
gacuuggaagcuccgc

SEQ ID NO: 3133366 - RNA, 19 nt, Human
gacucgcgacaaugcaaac

SEQ ID NO: 3133367 - RNA, 18 nt, Human
gacucgcgacaaugcaaa

SEQ ID NO: 3133368 - RNA, 17 nt, Human
gacuccugcaggcagcc

SEQ ID NO: 3133369 - RNA, 21 nt, Human
gagaaaauggacguguuauga

SEQ ID NO: 3133370 - RNA, 13 nt, Human
gacuuggaagcuc

SEQ ID NO: 3133371 - RNA, 23 nt, Human
gagaaaguacuucuccacccugc

SEQ ID NO: 3133372 - RNA, 22 nt, Human
gagaaaguacuucuccacccug

SEQ ID NO: 3133373 - RNA, 17 nt, Human
gagacacaagccuucgg

SEQ ID NO: 3133374 - RNA, 15 nt, Human
gagacacaagccuuc

SEQ ID NO: 3133375 - RNA, 19 nt, Human
gagacagaguuuucacucu

SEQ ID NO: 3133376 - RNA, 12 nt, Human
gagacagcccgg

SEQ ID NO: 3133377 - RNA, 21 nt, Human
gagaaugcacaaacagaggcc

SEQ ID NO: 3133378 - RNA, 20 nt, Human
gagaaugcacaaacagaggc

SEQ ID NO: 3133379 - RNA, 14 nt, Human
gagacucugucuca

SEQ ID NO: 3133380 - RNA, 13 nt, Human
gagacucugucuc

SEQ ID NO: 3133381 - RNA, 16 nt, Human
gagacucgcgacaaug

SEQ ID NO: 3133382 - RNA, 22 nt, Human
gagacuccugcaggcagccagg

SEQ ID NO: 3133383 - RNA, 24 nt, Human
gagacagcccgggcucugccuccc

SEQ ID NO: 3133384 - RNA, 23 nt, Human
gagacagcccgggcucugccucc

SEQ ID NO: 3133385 - RNA, 22 nt, Human
gagacagcccgggcucugccuc

SEQ ID NO: 3133386 - RNA, 21 nt, Human
gagacagcccgggcucugccu

SEQ ID NO: 3133387 - RNA, 20 nt, Human
gagacagcccgggcucugcc

SEQ ID NO: 3133388 - RNA, 19 nt, Human
gagacagcccgggcucugc

SEQ ID NO: 3133389 - RNA, 18 nt, Human
gagacagcccgggcucug

SEQ ID NO: 3133390 - RNA, 17 nt, Human
gagacagcccgggcucu

SEQ ID NO: 3133391 - RNA, 14 nt, Human
gagacagcccgggc

SEQ ID NO: 3133392 - RNA, 17 nt, Human
gagagaagagaaugcac

SEQ ID NO: 3133393 - RNA, 13 nt, Human
gagagccuuccag

SEQ ID NO: 3133394 - RNA, 13 nt, Human
gagaggggaacag

SEQ ID NO: 3133395 - RNA, 21 nt, Human
gagagggugggagugggccca

SEQ ID NO: 3133396 - RNA, 20 nt, Human
gagagggugggagugggccc

SEQ ID NO: 3133397 - RNA, 14 nt, Human
gaagucuuuguaca

SEQ ID NO: 3133398 - RNA, 16 nt, Human
gaagucuuuguacaga

SEQ ID NO: 3133399 - RNA, 21 nt, Human
gacaaggauugcuacuguccu

SEQ ID NO: 3133400 - RNA, 22 nt, Human
gacaaggauugcuacuguccua

SEQ ID NO: 3133401 - RNA, 16 nt, Human
gacaaugacccagugg

SEQ ID NO: 3133402 - RNA, 12 nt, Human
gacacaggcccg

SEQ ID NO: 3133403 - RNA, 15 nt, Human
gacacaggcccggcu

SEQ ID NO: 3133404 - RNA, 17 nt, Human
gacacaggcccggcucc

SEQ ID NO: 3133405 - RNA, 22 nt, Human
gacacaagccuucggcgccuua

SEQ ID NO: 3133406 - RNA, 13 nt, Human
gacaauuuauuau

SEQ ID NO: 3133407 - RNA, 19 nt, Human
gacaauuuauuauggcaca

SEQ ID NO: 3133408 - RNA, 12 nt, Human
gacaauuuauua

SEQ ID NO: 3133409 - RNA, 18 nt, Human
gacaaugcaaaccaucau

SEQ ID NO: 3133410 - RNA, 16 nt, Human
gacaaugcaaaccauc

SEQ ID NO: 3133411 - RNA, 17 nt, Human
gacaaugacuuacugua

SEQ ID NO: 3133412 - RNA, 20 nt, Human
gacaaugacuuacuguacau

SEQ ID NO: 3133413 - RNA, 12 nt, Human
gacaaugcaaac

SEQ ID NO: 3133414 - RNA, 21 nt, Human
gacaaugacuuacuguacaug

SEQ ID NO: 3133415 - RNA, 15 nt, Human
gacacgaauauugcu

SEQ ID NO: 3133416 - RNA, 18 nt, Human
gacaccuugacagggcac

SEQ ID NO: 3133417 - RNA, 20 nt, Human
gacaccuugacagggcacac

SEQ ID NO: 3133418 - RNA, 15 nt, Human
gacaccuugacaggg

SEQ ID NO: 3133419 - RNA, 17 nt, Human
gacaccuugacagggca

SEQ ID NO: 3133420 - RNA, 19 nt, Human
gacacgaauauugcugaug

SEQ ID NO: 3133421 - RNA, 18 nt, Human
gacacgaauauugcugau

SEQ ID NO: 3133422 - RNA, 17 nt, Human
gacacgaauauugcuga

SEQ ID NO: 3133423 - RNA, 15 nt, Human
gacacuaaccacgcu

SEQ ID NO: 3133424 - RNA, 16 nt, Human
gacacuaaccacgcug

SEQ ID NO: 3133425 - RNA, 17 nt, Human
gacacuaaccacgcugg

SEQ ID NO: 3133426 - RNA, 18 nt, Human
gacacuaaccacgcugga

SEQ ID NO: 3133427 - RNA, 13 nt, Human
gacacccugugau

SEQ ID NO: 3133428 - RNA, 12 nt, Human
gacacccuguga

SEQ ID NO: 3133429 - RNA, 18 nt, Human
gacacaggcccggcucca

SEQ ID NO: 3133430 - RNA, 23 nt, Human
gacacccugugauggggcccugc

SEQ ID NO: 3133431 - RNA, 22 nt, Human
gacacccugugauggggcccug

SEQ ID NO: 3133432 - RNA, 15 nt, Human
gacauacuaaccagc

SEQ ID NO: 3133433 - RNA, 16 nt, Human
gacauacuaaccagca

SEQ ID NO: 3133434 - RNA, 23 nt, Human
gacauacuaaccagcagaaaugc

SEQ ID NO: 3133435 - RNA, 21 nt, Human
gacaugucuuuucuugcauga

SEQ ID NO: 3133436 - RNA, 17 nt, Human
gacaugucuuuucuugc

SEQ ID NO: 3133437 - RNA, 21 nt, Human
gacaggcaagcaccuccugcc

SEQ ID NO: 3133438 - RNA, 14 nt, Human
gacaggcaaugcug

SEQ ID NO: 3133439 - RNA, 16 nt, Human
gacaggcaaugcuggc

SEQ ID NO: 3133440 - RNA, 24 nt, Human
gacaggcaaugcuggcuguuggcu

SEQ ID NO: 3133441 - RNA, 17 nt, Human
gacaggcaaugcuggcu

SEQ ID NO: 3133442 - RNA, 18 nt, Human
gacaggcauguucucuga

SEQ ID NO: 3133443 - RNA, 19 nt, Human
gacaggcauguucucugag

SEQ ID NO: 3133444 - RNA, 15 nt, Human
gacagcugccuggga

SEQ ID NO: 3133445 - RNA, 14 nt, Human
gacagcugccuggg

SEQ ID NO: 3133446 - RNA, 21 nt, Human
gacagcugccugggaucccuc

SEQ ID NO: 3133447 - RNA, 12 nt, Human
gacagacacagg

SEQ ID NO: 3133448 - RNA, 14 nt, Human
gacagacacaggcc

SEQ ID NO: 3133449 - RNA, 20 nt, Human
gacacuaaccacgcuggacc

SEQ ID NO: 3133450 - RNA, 15 nt, Human
gacagacacaggccc

SEQ ID NO: 3133451 - RNA, 16 nt, Human
gacagacacaggcccg

SEQ ID NO: 3133452 - RNA, 13 nt, Human
gacagcugccugg

SEQ ID NO: 3133453 - RNA, 12 nt, Human
gacagcugccug

SEQ ID NO: 3133454 - RNA, 22 nt, Human
gacguguuaugacuccagaauu

SEQ ID NO: 3133455 - RNA, 12 nt, Human
gacuacaggcac

SEQ ID NO: 3133456 - RNA, 17 nt, Human
gacuacucccccaggug

SEQ ID NO: 3133457 - RNA, 14 nt, Human
gacuccugcaggca

SEQ ID NO: 3133458 - RNA, 16 nt, Human
gacuccugcaggcagc

SEQ ID NO: 3133459 - RNA, 15 nt, Human
gacuccugcaggcag

SEQ ID NO: 3133460 - RNA, 14 nt, Human
gacggagucccacc

SEQ ID NO: 3133461 - RNA, 18 nt, Human
gacggagucccaccuugg

SEQ ID NO: 3133462 - RNA, 21 nt, Human
gacggagucccaccuuggcug

SEQ ID NO: 3133463 - RNA, 20 nt, Human
gacguguuaugacuccagaa

SEQ ID NO: 3133464 - RNA, 17 nt, Human
gacguguuaugacucca

SEQ ID NO: 3133465 - RNA, 15 nt, Human
gacguguuaugacuc

SEQ ID NO: 3133466 - RNA, 23 nt, Human
gaccuugaacuggguacuugugg

SEQ ID NO: 3133467 - RNA, 21 nt, Human
gaccuuucaauaggaaaaacu

SEQ ID NO: 3133468 - RNA, 13 nt, Human
gaccccuccaugu

SEQ ID NO: 3133469 - RNA, 18 nt, Human
gacccugaggcccagagg

SEQ ID NO: 3133470 - RNA, 21 nt, Human
gacccugaggcccagagggcc

SEQ ID NO: 3133471 - RNA, 12 nt, Human
gacccugcccug

SEQ ID NO: 3133472 - RNA, 20 nt, Human
gacccugaggcccagagggc

SEQ ID NO: 3133473 - RNA, 19 nt, Human
gacccugaggcccagaggg

SEQ ID NO: 3133474 - RNA, 15 nt, Human
gacccugcccugugg

SEQ ID NO: 3133475 - RNA, 13 nt, Human
gacccugcccugu

SEQ ID NO: 3133476 - RNA, 16 nt, Human
gacccugcccuguggg

SEQ ID NO: 3133477 - RNA, 23 nt, Human
gacccugucucaaaaaaagaaaa

SEQ ID NO: 3133478 - RNA, 13 nt, Human
gacccaugcugcc

SEQ ID NO: 3133479 - RNA, 15 nt, Human
gacccaugcugcccu

SEQ ID NO: 3133480 - RNA, 14 nt, Human
gacccaugcugccc

SEQ ID NO: 3133481 - RNA, 16 nt, Human
gacccaugcugcccug

SEQ ID NO: 3133482 - RNA, 11 nt, Human
gacccacugcu

SEQ ID NO: 3133483 - RNA, 19 nt, Human
gaccgugaggccagagaca

SEQ ID NO: 3133484 - RNA, 14 nt, Human
gaccgugaggccag

SEQ ID NO: 3133485 - RNA, 21 nt, Human
gaccugaggcccuucucucca

SEQ ID NO: 3133486 - RNA, 18 nt, Human
gaccugaggcccuucucu

SEQ ID NO: 3133487 - RNA, 15 nt, Human
gaccugaggcccuuc

SEQ ID NO: 3133488 - RNA, 14 nt, Human
gaccugaggcccuu

SEQ ID NO: 3133489 - RNA, 12 nt, Human
gaccucaggccu

SEQ ID NO: 3133490 - RNA, 11 nt, Human
gaccucaggcc

SEQ ID NO: 3133491 - RNA, 17 nt, Human
gaucauccacugugcca

SEQ ID NO: 3133492 - RNA, 19 nt, Human
gaucauccacugugccaug

SEQ ID NO: 3133493 - RNA, 16 nt, Human
gaucauccacugugcc

SEQ ID NO: 3133494 - RNA, 21 nt, Human
gaucauccacugugccaugug

SEQ ID NO: 3133495 - RNA, 22 nt, Human
gaucagucugauucccaagcuc

SEQ ID NO: 3133496 - RNA, 15 nt, Human
gaucagccugggcaa

SEQ ID NO: 3133497 - RNA, 12 nt, Human
gaucagccuggg

SEQ ID NO: 3133498 - RNA, 12 nt, Human
gaucacggcuca

SEQ ID NO: 3133499 - RNA, 16 nt, Human
gaucacgccacugcac

SEQ ID NO: 3133500 - RNA, 18 nt, Human
gaucacgccacugcacua

SEQ ID NO: 3133501 - RNA, 21 nt, Human
gaggaaggaaacccagcucug

SEQ ID NO: 3133502 - RNA, 20 nt, Human
gaggaaggaaacccagcucu

SEQ ID NO: 3133503 - RNA, 19 nt, Human
gaggaaggaaacccagcuc

SEQ ID NO: 3133504 - RNA, 13 nt, Human
gaggaaggaaacc

SEQ ID NO: 3133505 - RNA, 22 nt, Human
gauagcacagacccugcccugu

SEQ ID NO: 3133506 - RNA, 21 nt, Human
gauagcacagacccugcccug

SEQ ID NO: 3133507 - RNA, 20 nt, Human
gauagcacagacccugcccu

SEQ ID NO: 3133508 - RNA, 18 nt, Human
gauacaggaaaagcugcu

SEQ ID NO: 3133509 - RNA, 14 nt, Human
gauaauacaccacu

SEQ ID NO: 3133510 - RNA, 18 nt, Human
gauaauacaccacuacau

SEQ ID NO: 3133511 - RNA, 21 nt, Human
gauaauacaccacuacauucu

SEQ ID NO: 3133512 - RNA, 22 nt, Human
gauaauacaccacuacauucug

SEQ ID NO: 3133513 - RNA, 16 nt, Human
gaucccucauccucau

SEQ ID NO: 3133514 - RNA, 15 nt, Human
gaucccucauccuca

SEQ ID NO: 3133515 - RNA, 22 nt, Human
gauccugagccagauuucacuc

SEQ ID NO: 3133516 - RNA, 21 nt, Human
gauccugagccagauuucacu

SEQ ID NO: 3133517 - RNA, 18 nt, Human
gaucuuugcagacaggca

SEQ ID NO: 3133518 - RNA, 17 nt, Human
gaucuuugcagacaggc

SEQ ID NO: 3133519 - RNA, 13 nt, Human
gauggggcccugc

SEQ ID NO: 3133520 - RNA, 22 nt, Human
gauggggcccugccuccuuugu

SEQ ID NO: 3133521 - RNA, 14 nt, Human
gauggggcccugcc

SEQ ID NO: 3133522 - RNA, 20 nt, Human
gaugccugguggcagcugcg

SEQ ID NO: 3133523 - RNA, 18 nt, Human
gaugccugguggcagcug

SEQ ID NO: 3133524 - RNA, 19 nt, Human
gaugccugguggcagcugc

SEQ ID NO: 3133525 - RNA, 22 nt, Human
gauggauuuccagccaaagccu

SEQ ID NO: 3133526 - RNA, 17 nt, Human
gaugccugguggcagcu

SEQ ID NO: 3133527 - RNA, 12 nt, Human
gaugcagccuca

SEQ ID NO: 3133528 - RNA, 14 nt, Human
gaugcagccucaca

SEQ ID NO: 3133529 - RNA, 13 nt, Human
gaugcaccagccc

SEQ ID NO: 3133530 - RNA, 21 nt, Human
gaugcacagaguuguuacauu

SEQ ID NO: 3133531 - RNA, 22 nt, Human
gaugcacagaguuguuacauuu

SEQ ID NO: 3133532 - RNA, 23 nt, Human
gcaaugaccuuucaauaggaaaa

SEQ ID NO: 3133533 - RNA, 13 nt, Human
gcaaugcuggcug

SEQ ID NO: 3133534 - RNA, 14 nt, Human
gcaaugcuggcugu

SEQ ID NO: 3133535 - RNA, 22 nt, Human
gcaaugcuggcuguuggcuggg

SEQ ID NO: 3133536 - RNA, 23 nt, Human
gcaaugcuggcuguuggcugggg

SEQ ID NO: 3133537 - RNA, 17 nt, Human
gcaaucaaaucugcuuu

SEQ ID NO: 3133538 - RNA, 15 nt, Human
gcaaucaaaucugcu

SEQ ID NO: 3133539 - RNA, 22 nt, Human
gcaaugaccuuucaauaggaaa

SEQ ID NO: 3133540 - RNA, 20 nt, Human
gcaaugaccuuucaauagga

SEQ ID NO: 3133541 - RNA, 17 nt, Human
gcaaugaccuuucaaua

SEQ ID NO: 3133542 - RNA, 15 nt, Human
gcaaugaccuuucaa

SEQ ID NO: 3133543 - RNA, 18 nt, Human
gcaaggagauuuacaacu

SEQ ID NO: 3133544 - RNA, 11 nt, Human
gcaaggcuguc

SEQ ID NO: 3133545 - RNA, 16 nt, Human
gcaaaguaucccuacu

SEQ ID NO: 3133546 - RNA, 23 nt, Human
gcaagacgcugugcugcccugcc

SEQ ID NO: 3133547 - RNA, 22 nt, Human
gcaagacgcugugcugcccugc

SEQ ID NO: 3133548 - RNA, 21 nt, Human
gcaagacgcugugcugcccug

SEQ ID NO: 3133549 - RNA, 20 nt, Human
gcaagacgcugugcugcccu

SEQ ID NO: 3133550 - RNA, 14 nt, Human
gcaagacgcugugc

SEQ ID NO: 3133551 - RNA, 17 nt, Human
gcaagaauugaagcagg

SEQ ID NO: 3133552 - RNA, 15 nt, Human
gauuuccguuaaaau

SEQ ID NO: 3133553 - RNA, 11 nt, Human
gauuucuguuu

SEQ ID NO: 3133554 - RNA, 19 nt, Human
gauuucuguuuagauaaua

SEQ ID NO: 3133555 - RNA, 21 nt, Human
gauugcaacaggcugggcuuc

SEQ ID NO: 3133556 - RNA, 23 nt, Human
gauugcaccacugcacuccagcc

SEQ ID NO: 3133557 - RNA, 16 nt, Human
gauugcaccacugcac

SEQ ID NO: 3133558 - RNA, 20 nt, Human
gauugcaacaggcugggcuu

SEQ ID NO: 3133559 - RNA, 18 nt, Human
gauucuuuccugaggcug

SEQ ID NO: 3133560 - RNA, 17 nt, Human
gauucuuuccugaggcu

SEQ ID NO: 3133561 - RNA, 16 nt, Human
gauucuuuccugaggc

SEQ ID NO: 3133562 - RNA, 12 nt, Human
gauucuuuccug

SEQ ID NO: 3133563 - RNA, 19 nt, Human
gauucccaagcucugcucc

SEQ ID NO: 3133564 - RNA, 20 nt, Human
gauucccaagcucugcuccu

SEQ ID NO: 3133565 - RNA, 19 nt, Human
gauucagacagcugccugg

SEQ ID NO: 3133566 - RNA, 15 nt, Human
gauucagcucugcaa

SEQ ID NO: 3133567 - RNA, 13 nt, Human
gauucagcucugc

SEQ ID NO: 3133568 - RNA, 19 nt, Human
gauggggcugcaccggcug

SEQ ID NO: 3133569 - RNA, 23 nt, Human
gauggggcugcaccggcuggccu

SEQ ID NO: 3133570 - RNA, 17 nt, Human
gauucauauuuacuucu

SEQ ID NO: 3133571 - RNA, 18 nt, Human
gauucauauuuacuucuu

SEQ ID NO: 3133572 - RNA, 19 nt, Human
gauucauauuuacuucuua

SEQ ID NO: 3133573 - RNA, 18 nt, Human
gauucccaagcucugcuc

SEQ ID NO: 3133574 - RNA, 13 nt, Human
gcagcccugcaga

SEQ ID NO: 3133575 - RNA, 21 nt, Human
gcagccccuguucuggcagag

SEQ ID NO: 3133576 - RNA, 20 nt, Human
gcagccccuguucuggcaga

SEQ ID NO: 3133577 - RNA, 17 nt, Human
gcagccccauucugccu

SEQ ID NO: 3133578 - RNA, 16 nt, Human
gcagcaauaaagcagc

SEQ ID NO: 3133579 - RNA, 23 nt, Human
gcagcaauaaagcagcguuucua

SEQ ID NO: 3133580 - RNA, 18 nt, Human
gcagccccauucugccug

SEQ ID NO: 3133581 - RNA, 19 nt, Human
gcagccccauucugccugc

SEQ ID NO: 3133582 - RNA, 21 nt, Human
gcagccccauucugccugccc

SEQ ID NO: 3133583 - RNA, 24 nt, Human
gcagccccauucugccugcccagg

SEQ ID NO: 3133584 - RNA, 22 nt, Human
gcagauacaggaaaagcugcug

SEQ ID NO: 3133585 - RNA, 12 nt, Human
gcagcaauaaag

SEQ ID NO: 3133586 - RNA, 17 nt, Human
gcagacaguuaagagaa

SEQ ID NO: 3133587 - RNA, 21 nt, Human
gcagaguugaagacagagcua

SEQ ID NO: 3133588 - RNA, 20 nt, Human
gcagaguugaagacagagcu

SEQ ID NO: 3133589 - RNA, 12 nt, Human
gcaggcagccag

SEQ ID NO: 3133590 - RNA, 14 nt, Human
gcaggcagccaggc

SEQ ID NO: 3133591 - RNA, 13 nt, Human
gcaggcagccagg

SEQ ID NO: 3133592 - RNA, 20 nt, Human
gcaggaggaucacuugaguc

SEQ ID NO: 3133593 - RNA, 23 nt, Human
gcaggaggaucacuugaguccag

SEQ ID NO: 3133594 - RNA, 14 nt, Human
gcagcucaccucuc

SEQ ID NO: 3133595 - RNA, 15 nt, Human
gcagccuuggcaaac

SEQ ID NO: 3133596 - RNA, 15 nt, Human
gcagcucaccucucc

SEQ ID NO: 3133597 - RNA, 17 nt, Human
gcagcccugcagagggc

SEQ ID NO: 3133598 - RNA, 16 nt, Human
gcagcccugcagaggg

SEQ ID NO: 3133599 - RNA, 15 nt, Human
gcagcccugcagagg

SEQ ID NO: 3133600 - RNA, 14 nt, Human
gcagcccugcagag

SEQ ID NO: 3133601 - RNA, 14 nt, Human
gcaauggcagccuu

SEQ ID NO: 3133602 - RNA, 20 nt, Human
gcaccacugcacuccagccu

SEQ ID NO: 3133603 - RNA, 12 nt, Human
gcaauggcagcc

SEQ ID NO: 3133604 - RNA, 13 nt, Human
gcaauggcagccu

SEQ ID NO: 3133605 - RNA, 14 nt, Human
gcaccagcagccug

SEQ ID NO: 3133606 - RNA, 15 nt, Human
gcaccagcagccugg

SEQ ID NO: 3133607 - RNA, 22 nt, Human
gcaccacugcacuccagccugg

SEQ ID NO: 3133608 - RNA, 21 nt, Human
gcaccacugcacuccagccug

SEQ ID NO: 3133609 - RNA, 16 nt, Human
gcaccagcagccugga

SEQ ID NO: 3133610 - RNA, 22 nt, Human
gcacccaccaucaugucuggcu

SEQ ID NO: 3133611 - RNA, 18 nt, Human
gcacccggccccugcugg

SEQ ID NO: 3133612 - RNA, 19 nt, Human
gcacccggccccugcuggu

SEQ ID NO: 3133613 - RNA, 22 nt, Human
gcaccuggaauauauaaccagu

SEQ ID NO: 3133614 - RNA, 17 nt, Human
gcaccuuagacaguccc

SEQ ID NO: 3133615 - RNA, 14 nt, Human
gcaccuuagacagu

SEQ ID NO: 3133616 - RNA, 15 nt, Human
gcacccucaggcagg

SEQ ID NO: 3133617 - RNA, 18 nt, Human
gcaccuggaauauauaac

SEQ ID NO: 3133618 - RNA, 21 nt, Human
gcaccuggaauauauaaccag

SEQ ID NO: 3133619 - RNA, 18 nt, Human
gcaccuuagacagucccu

SEQ ID NO: 3133620 - RNA, 12 nt, Human
gcacgauuucug

SEQ ID NO: 3133621 - RNA, 23 nt, Human
gcagacaggcaagcaccuccugc

SEQ ID NO: 3133622 - RNA, 19 nt, Human
gcagacaggcaagcaccuc

SEQ ID NO: 3133623 - RNA, 14 nt, Human
gcagacaggcaagc

SEQ ID NO: 3133624 - RNA, 15 nt, Human
gcagacaggaccagg

SEQ ID NO: 3133625 - RNA, 13 nt, Human
gcagacaggacca

SEQ ID NO: 3133626 - RNA, 12 nt, Human
gcagacaggacc

SEQ ID NO: 3133627 - RNA, 20 nt, Human
gcacugcuuccagugaggcu

SEQ ID NO: 3133628 - RNA, 18 nt, Human
gcacugcuuccagugagg

SEQ ID NO: 3133629 - RNA, 16 nt, Human
gcacugcuuccaguga

SEQ ID NO: 3133630 - RNA, 19 nt, Human
gcagggcucagcggggaca

SEQ ID NO: 3133631 - RNA, 21 nt, Human
gcagggcucagcggggacagc

SEQ ID NO: 3133632 - RNA, 16 nt, Human
gcaggcagccaggcca

SEQ ID NO: 3133633 - RNA, 15 nt, Human
gcaggcagccaggcc

SEQ ID NO: 3133634 - RNA, 17 nt, Human
gcagggucucacucugu

SEQ ID NO: 3133635 - RNA, 18 nt, Human
gcagggucucacucuguc

SEQ ID NO: 3133636 - RNA, 22 nt, Human
gcaggggaggguagagcggaga

SEQ ID NO: 3133637 - RNA, 14 nt, Human
gcagggcucagcgg

SEQ ID NO: 3133638 - RNA, 16 nt, Human
gcagugcaugcugucc

SEQ ID NO: 3133639 - RNA, 15 nt, Human
gcagugcaugcuguc

SEQ ID NO: 3133640 - RNA, 22 nt, Human
gcagguccaggguuugaguuca

SEQ ID NO: 3133641 - RNA, 19 nt, Human
gcaggucuugaacuccugg

SEQ ID NO: 3133642 - RNA, 20 nt, Human
gcaggucuugaacuccuggc

SEQ ID NO: 3133643 - RNA, 22 nt, Human
gcaguggugguuuucuguucuu

SEQ ID NO: 3133644 - RNA, 23 nt, Human
gcaguggugguuuucuguucuuu

SEQ ID NO: 3133645 - RNA, 13 nt, Human
gcagugggagcug

SEQ ID NO: 3133646 - RNA, 12 nt, Human
gcagugggagcu

SEQ ID NO: 3133647 - RNA, 14 nt, Human
gcagugggagcugc

SEQ ID NO: 3133648 - RNA, 15 nt, Human
gcagugggagcugcc

SEQ ID NO: 3133649 - RNA, 17 nt, Human
gcaguuauuaacacuaa

SEQ ID NO: 3133650 - RNA, 13 nt, Human
gccaaagccaaag

SEQ ID NO: 3133651 - RNA, 20 nt, Human
gccaaagccaaagcuaggcc

SEQ ID NO: 3133652 - RNA, 19 nt, Human
gccaaagccuccuccagcc

SEQ ID NO: 3133653 - RNA, 16 nt, Human
gccaaagccuccucca

SEQ ID NO: 3133654 - RNA, 16 nt, Human
gccaaagcuaggccug

SEQ ID NO: 3133655 - RNA, 22 nt, Human
gccaaagcuaggccuggccaga

SEQ ID NO: 3133656 - RNA, 18 nt, Human
gcauuuguuugaacugau

SEQ ID NO: 3133657 - RNA, 16 nt, Human
gccaaacucaccugcc

SEQ ID NO: 3133658 - RNA, 14 nt, Human
gccaaacucaccug

SEQ ID NO: 3133659 - RNA, 21 nt, Human
gcauuugaggucuguucuuuc

SEQ ID NO: 3133660 - RNA, 13 nt, Human
gcauuugcugaau

SEQ ID NO: 3133661 - RNA, 14 nt, Human
gcauuugcugaaua

SEQ ID NO: 3133662 - RNA, 16 nt, Human
gcauuuguuugaacug

SEQ ID NO: 3133663 - RNA, 17 nt, Human
gcauuaucuagauacug

SEQ ID NO: 3133664 - RNA, 14 nt, Human
gcauguucucugag

SEQ ID NO: 3133665 - RNA, 15 nt, Human
gcauguucucugagg

SEQ ID NO: 3133666 - RNA, 21 nt, Human
gcauguucucugaggacacua

SEQ ID NO: 3133667 - RNA, 22 nt, Human
gcauguucucugaggacacuaa

SEQ ID NO: 3133668 - RNA, 18 nt, Human
gcaugcgggcuuccuccu

SEQ ID NO: 3133669 - RNA, 22 nt, Human
gcccaguuggguggaugccugg

SEQ ID NO: 3133670 - RNA, 15 nt, Human
gcccagagagggugg

SEQ ID NO: 3133671 - RNA, 21 nt, Human
gcccagagaggguggugaccu

SEQ ID NO: 3133672 - RNA, 23 nt, Human
gcccaggccccugccacccuggg

SEQ ID NO: 3133673 - RNA, 13 nt, Human
gcccaggccuccu

SEQ ID NO: 3133674 - RNA, 22 nt, Human
gcccaggccccugccacccugg

SEQ ID NO: 3133675 - RNA, 12 nt, Human
gcccaggcuggc

SEQ ID NO: 3133676 - RNA, 14 nt, Human
gccccauucugccu

SEQ ID NO: 3133677 - RNA, 22 nt, Human
gccccauccucuguacagagcc

SEQ ID NO: 3133678 - RNA, 14 nt, Human
gccccauccucugu

SEQ ID NO: 3133679 - RNA, 13 nt, Human
gccccauccucug

SEQ ID NO: 3133680 - RNA, 21 nt, Human
gccccagugcccacaggauca

SEQ ID NO: 3133681 - RNA, 13 nt, Human
gccccagugccca

SEQ ID NO: 3133682 - RNA, 14 nt, Human
gccccagugcccac

SEQ ID NO: 3133683 - RNA, 18 nt, Human
gccccaucccaaacccuu

SEQ ID NO: 3133684 - RNA, 12 nt, Human
gccccagugccc

SEQ ID NO: 3133685 - RNA, 18 nt, Human
gcccucugcccacucccu

SEQ ID NO: 3133686 - RNA, 16 nt, Human
gcccucugcccacucc

SEQ ID NO: 3133687 - RNA, 13 nt, Human
gcccucugcccac

SEQ ID NO: 3133688 - RNA, 13 nt, Human
gcccugcagaggg

SEQ ID NO: 3133689 - RNA, 14 nt, Human
gcccugcagagggc

SEQ ID NO: 3133690 - RNA, 15 nt, Human
gcccugcagagggca

SEQ ID NO: 3133691 - RNA, 23 nt, Human
gcccuccaagaccuucuccuuca

SEQ ID NO: 3133692 - RNA, 22 nt, Human
gcccuccaagaccuucuccuuc

SEQ ID NO: 3133693 - RNA, 21 nt, Human
gcccuccaagaccuucuccuu

SEQ ID NO: 3133694 - RNA, 19 nt, Human
gcccuccaagaccuucucc

SEQ ID NO: 3133695 - RNA, 15 nt, Human
gccccgaggccuucu

SEQ ID NO: 3133696 - RNA, 23 nt, Human
gccccucaacucuccuccagagu

SEQ ID NO: 3133697 - RNA, 18 nt, Human
gccccgaggccuucucug

SEQ ID NO: 3133698 - RNA, 14 nt, Human
gccccucagggucc

SEQ ID NO: 3133699 - RNA, 16 nt, Human
gccccucagggucccu

SEQ ID NO: 3133700 - RNA, 20 nt, Human
gccccuucugacccaugcug

SEQ ID NO: 3133701 - RNA, 11 nt, Human
gccaggaagcc

SEQ ID NO: 3133702 - RNA, 20 nt, Human
gccaggaagccagcaggcuc

SEQ ID NO: 3133703 - RNA, 16 nt, Human
gccaggagccuccugc

SEQ ID NO: 3133704 - RNA, 14 nt, Human
gccaggagccuccu

SEQ ID NO: 3133705 - RNA, 20 nt, Human
gccaggagccuccugcccuu

SEQ ID NO: 3133706 - RNA, 19 nt, Human
gccaggagccuccugcccu

SEQ ID NO: 3133707 - RNA, 16 nt, Human
gccagcugcuugggcu

SEQ ID NO: 3133708 - RNA, 18 nt, Human
gccagcugcuugggcuuc

SEQ ID NO: 3133709 - RNA, 17 nt, Human
gccagcugcuugggcuu

SEQ ID NO: 3133710 - RNA, 14 nt, Human
gccaggaagccagc

SEQ ID NO: 3133711 - RNA, 13 nt, Human
gccaggaagccag

SEQ ID NO: 3133712 - RNA, 12 nt, Human
gccaggaagcca

SEQ ID NO: 3133713 - RNA, 20 nt, Human
gccagcugcuugggcuucau

SEQ ID NO: 3133714 - RNA, 19 nt, Human
gccagauucuuuccugagg

SEQ ID NO: 3133715 - RNA, 21 nt, Human
gccagccgagauagccaaggc

SEQ ID NO: 3133716 - RNA, 22 nt, Human
gccagccgagauagccaaggcc

SEQ ID NO: 3133717 - RNA, 20 nt, Human
gccagauucuuuccugaggc

SEQ ID NO: 3133718 - RNA, 13 nt, Human
gccagauuucacu

SEQ ID NO: 3133719 - RNA, 24 nt, Human
gccagauucuuuccugaggcuggg

SEQ ID NO: 3133720 - RNA, 14 nt, Human
gccagaugcaccag

SEQ ID NO: 3133721 - RNA, 20 nt, Human
gccacugcaccgggccacag

SEQ ID NO: 3133722 - RNA, 21 nt, Human
gccacugcaccgggccacaga

SEQ ID NO: 3133723 - RNA, 19 nt, Human
gccacugcaccgggccaca

SEQ ID NO: 3133724 - RNA, 22 nt, Human
gccagagacacaagccuucggc

SEQ ID NO: 3133725 - RNA, 21 nt, Human
gccagagacacaagccuucgg

SEQ ID NO: 3133726 - RNA, 20 nt, Human
gccaaggccaaaggaagcac

SEQ ID NO: 3133727 - RNA, 19 nt, Human
gccaaggccaaaggaagca

SEQ ID NO: 3133728 - RNA, 24 nt, Human
gccaaggccaaaggaagcacaugc

SEQ ID NO: 3133729 - RNA, 15 nt, Human
gccaugggccuccug

SEQ ID NO: 3133730 - RNA, 16 nt, Human
gccaugggccuccugu

SEQ ID NO: 3133731 - RNA, 16 nt, Human
gcccaccuggccucug

SEQ ID NO: 3133732 - RNA, 15 nt, Human
gcccaccuggccucu

SEQ ID NO: 3133733 - RNA, 24 nt, Human
gcccaccuggccucugcacucccc

SEQ ID NO: 3133734 - RNA, 21 nt, Human
gcccaccuggccucugcacuc

SEQ ID NO: 3133735 - RNA, 20 nt, Human
gcccaccuggccucugcacu

SEQ ID NO: 3133736 - RNA, 17 nt, Human
gcccaccuggccucugc

SEQ ID NO: 3133737 - RNA, 13 nt, Human
gcccaccuuggcu

SEQ ID NO: 3133738 - RNA, 15 nt, Human
gcccaccuuggcuca

SEQ ID NO: 3133739 - RNA, 16 nt, Human
gcccaccuuggcucaa

SEQ ID NO: 3133740 - RNA, 14 nt, Human
gcccacuucugcca

SEQ ID NO: 3133741 - RNA, 21 nt, Human
gccagucaccccggccaccug

SEQ ID NO: 3133742 - RNA, 23 nt, Human
gccaguaaaugggggugcauuug

SEQ ID NO: 3133743 - RNA, 12 nt, Human
gccaguaaaugg

SEQ ID NO: 3133744 - RNA, 13 nt, Human
gccaggcuggucu

SEQ ID NO: 3133745 - RNA, 20 nt, Human
gccaugaggaacaaggcaag

SEQ ID NO: 3133746 - RNA, 14 nt, Human
gccaugcuccuggc

SEQ ID NO: 3133747 - RNA, 17 nt, Human
gcccuucucuccagccc

SEQ ID NO: 3133748 - RNA, 16 nt, Human
gcccuucucuccagcc

SEQ ID NO: 3133749 - RNA, 14 nt, Human
gcccuucucuccag

SEQ ID NO: 3133750 - RNA, 20 nt, Human
gccgagaucacgccacugca

SEQ ID NO: 3133751 - RNA, 21 nt, Human
gccgagaucacgccacugcac

SEQ ID NO: 3133752 - RNA, 22 nt, Human
gccgagaucacgccacugcacu

SEQ ID NO: 3133753 - RNA, 19 nt, Human
gccgagaucacgccacugc

SEQ ID NO: 3133754 - RNA, 12 nt, Human
gccgcagcccug

SEQ ID NO: 3133755 - RNA, 11 nt, Human
gccgcagcccu

SEQ ID NO: 3133756 - RNA, 21 nt, Human
gccgggcgcgguggcucacgc

SEQ ID NO: 3133757 - RNA, 20 nt, Human
gccguguaaccauggaccca

SEQ ID NO: 3133758 - RNA, 17 nt, Human
gccgucuaccugagggg

SEQ ID NO: 3133759 - RNA, 16 nt, Human
gccgucuaccugaggg

SEQ ID NO: 3133760 - RNA, 15 nt, Human
gccgucuaccugagg

SEQ ID NO: 3133761 - RNA, 18 nt, Human
gccucaaccuccugggcu

SEQ ID NO: 3133762 - RNA, 19 nt, Human
gccucaaccuccugggcua

SEQ ID NO: 3133763 - RNA, 17 nt, Human
gccucaaccuccugggc

SEQ ID NO: 3133764 - RNA, 17 nt, Human
gccucacaguccuuacc

SEQ ID NO: 3133765 - RNA, 13 nt, Human
gccucacaguccu

SEQ ID NO: 3133766 - RNA, 15 nt, Human
gccugcaagggagug

SEQ ID NO: 3133767 - RNA, 13 nt, Human
gccugcaagggag

SEQ ID NO: 3133768 - RNA, 12 nt, Human
gccucugccucu

SEQ ID NO: 3133769 - RNA, 13 nt, Human
gccucugccucug

SEQ ID NO: 3133770 - RNA, 19 nt, Human
gccucugacacacagcucu

SEQ ID NO: 3133771 - RNA, 20 nt, Human
gccucugacacacagcucug

SEQ ID NO: 3133772 - RNA, 21 nt, Human
gccucugacacacagcucugu

SEQ ID NO: 3133773 - RNA, 14 nt, Human
gccucugcacuccc

SEQ ID NO: 3133774 - RNA, 17 nt, Human
gccucugacacacagcu

SEQ ID NO: 3133775 - RNA, 18 nt, Human
gccucugacacacagcuc

SEQ ID NO: 3133776 - RNA, 16 nt, Human
gccucugacacacagc

SEQ ID NO: 3133777 - RNA, 16 nt, Human
gccucucucaggccaa

SEQ ID NO: 3133778 - RNA, 14 nt, Human
gccucucucaggcc

SEQ ID NO: 3133779 - RNA, 13 nt, Human
gccucucucaggc

SEQ ID NO: 3133780 - RNA, 18 nt, Human
gccucacaguccuuacca

SEQ ID NO: 3133781 - RNA, 15 nt, Human
gccucagcauccugg

SEQ ID NO: 3133782 - RNA, 16 nt, Human
gccucagcauccuggc

SEQ ID NO: 3133783 - RNA, 18 nt, Human
gccucccaaagugcuggg

SEQ ID NO: 3133784 - RNA, 19 nt, Human
gccucccaaagugcuggga

SEQ ID NO: 3133785 - RNA, 13 nt, Human
gccucccaacuca

SEQ ID NO: 3133786 - RNA, 16 nt, Human
gccucccaucacccgc

SEQ ID NO: 3133787 - RNA, 14 nt, Human
gccucccaucaccc

SEQ ID NO: 3133788 - RNA, 19 nt, Human
gccucccaacucaccccag

SEQ ID NO: 3133789 - RNA, 18 nt, Human
gccucccaacucacccca

SEQ ID NO: 3133790 - RNA, 17 nt, Human
gccucccaacucacccc

SEQ ID NO: 3133791 - RNA, 16 nt, Human
gccucccaacucaccc

SEQ ID NO: 3133792 - RNA, 18 nt, Human
gccucccgaguagcuggg

SEQ ID NO: 3133793 - RNA, 19 nt, Human
gccucccgaguagcuggga

SEQ ID NO: 3133794 - RNA, 17 nt, Human
gccucccgaguagcugg

SEQ ID NO: 3133795 - RNA, 15 nt, Human
gcggacagccacggc

SEQ ID NO: 3133796 - RNA, 19 nt, Human
gcgucucauacucaccuca

SEQ ID NO: 3133797 - RNA, 15 nt, Human
gcgccuacaggagug

SEQ ID NO: 3133798 - RNA, 11 nt, Human
gcggacagcca

SEQ ID NO: 3133799 - RNA, 13 nt, Human
gcggacagccacg

SEQ ID NO: 3133800 - RNA, 16 nt, Human
gcuaccuuuguauucu

SEQ ID NO: 3133801 - RNA, 15 nt, Human
gcuaggaacacuccu

SEQ ID NO: 3133802 - RNA, 20 nt, Human
gcuaagagggagggagggcu

SEQ ID NO: 3133803 - RNA, 13 nt, Human
gcuacacacugca

SEQ ID NO: 3133804 - RNA, 20 nt, Human
gcuacacacugcauguuugu

SEQ ID NO: 3133805 - RNA, 14 nt, Human
gcuacacaggggaa

SEQ ID NO: 3133806 - RNA, 13 nt, Human
gcuaagagggagg

SEQ ID NO: 3133807 - RNA, 16 nt, Human
gccuuccagggguggg

SEQ ID NO: 3133808 - RNA, 15 nt, Human
gccuuccaggggugg

SEQ ID NO: 3133809 - RNA, 12 nt, Human
gccuuccagggg

SEQ ID NO: 3133810 - RNA, 20 nt, Human
gccuuauggaacacucugag

SEQ ID NO: 3133811 - RNA, 19 nt, Human
gccuuauggaacacucuga

SEQ ID NO: 3133812 - RNA, 18 nt, Human
gccuuauggaacacucug

SEQ ID NO: 3133813 - RNA, 16 nt, Human
gccuuauggaacacuc

SEQ ID NO: 3133814 - RNA, 23 nt, Human
gcgacaaugcaaaccaucauuga

SEQ ID NO: 3133815 - RNA, 13 nt, Human
gccuuuggcuuca

SEQ ID NO: 3133816 - RNA, 14 nt, Human
gccuuauggaacac

SEQ ID NO: 3133817 - RNA, 10 nt, Human
gccuuaugga

SEQ ID NO: 3133818 - RNA, 19 nt, Human
gccuuagaagucacacagu

SEQ ID NO: 3133819 - RNA, 17 nt, Human
gccuuagaagucacaca

SEQ ID NO: 3133820 - RNA, 18 nt, Human
gccuuagaagucacacag

SEQ ID NO: 3133821 - RNA, 21 nt, Human
gccuuacacaaugguuuucuu

SEQ ID NO: 3133822 - RNA, 18 nt, Human
gccuuacccucauguucu

SEQ ID NO: 3133823 - RNA, 20 nt, Human
gccuuacacaaugguuuucu

SEQ ID NO: 3133824 - RNA, 16 nt, Human
gccuuacacaaugguu

SEQ ID NO: 3133825 - RNA, 21 nt, Human
gccuguugggccaggagccuc

SEQ ID NO: 3133826 - RNA, 22 nt, Human
gccugggggcugggcagaggaa

SEQ ID NO: 3133827 - RNA, 21 nt, Human
gccugggggcugggcagagga

SEQ ID NO: 3133828 - RNA, 18 nt, Human
gccugguggcagcugcgg

SEQ ID NO: 3133829 - RNA, 19 nt, Human
gccugguggcagcugcggu

SEQ ID NO: 3133830 - RNA, 21 nt, Human
gccugguggcagcugcggucc

SEQ ID NO: 3133831 - RNA, 13 nt, Human
gccugguggcagc

SEQ ID NO: 3133832 - RNA, 17 nt, Human
cccuuggauuguccccg

SEQ ID NO: 3133833 - RNA, 20 nt, Human
cccuuguggucccaccccac

SEQ ID NO: 3133834 - RNA, 22 nt, Human
cccuuguggucccaccccacac

SEQ ID NO: 3133835 - RNA, 23 nt, Human
cccuugguuaggcauugugggaa

SEQ ID NO: 3133836 - RNA, 22 nt, Human
cccuugguuaggcauuguggga

SEQ ID NO: 3133837 - RNA, 12 nt, Human
cccuucccaccu

SEQ ID NO: 3133838 - RNA, 13 nt, Human
cccuucccaccuc

SEQ ID NO: 3133839 - RNA, 17 nt, Human
ccgggaagggggcuggg

SEQ ID NO: 3133840 - RNA, 12 nt, Human
ccguuauuaaaa

SEQ ID NO: 3133841 - RNA, 16 nt, Human
ccuaaaauucagugga

SEQ ID NO: 3133842 - RNA, 15 nt, Human
ccuaaaauucagugg

SEQ ID NO: 3133843 - RNA, 22 nt, Human
ccuacaguugaaaaacagcuga

SEQ ID NO: 3133844 - RNA, 19 nt, Human
ccuacagcuugaccgugag

SEQ ID NO: 3133845 - RNA, 21 nt, Human
ccuacaguugaaaaacagcug

SEQ ID NO: 3133846 - RNA, 13 nt, Human
ccuacccacccuc

SEQ ID NO: 3133847 - RNA, 18 nt, Human
ccuacccacccuccuuuc

SEQ ID NO: 3133848 - RNA, 19 nt, Human
ccuacuguaauuugugaua

SEQ ID NO: 3133849 - RNA, 21 nt, Human
ccuagaaauuccccacccuga

SEQ ID NO: 3133850 - RNA, 13 nt, Human
ccuaggugacaga

SEQ ID NO: 3133851 - RNA, 23 nt, Human
ccucaggccugggggcugggcag

SEQ ID NO: 3133852 - RNA, 20 nt, Human
ccucagggucccugguggca

SEQ ID NO: 3133853 - RNA, 17 nt, Human
ccucagggucccuggug

SEQ ID NO: 3133854 - RNA, 16 nt, Human
ccucagggucccuggu

SEQ ID NO: 3133855 - RNA, 16 nt, Human
ccucagaucuucugug

SEQ ID NO: 3133856 - RNA, 15 nt, Human
ccuaggugacagagu

SEQ ID NO: 3133857 - RNA, 17 nt, Human
ccuauuagagaagagau

SEQ ID NO: 3133858 - RNA, 16 nt, Human
ccuauuagagaagaga

SEQ ID NO: 3133859 - RNA, 23 nt, Human
ccucacaguccuuaccagcagag

SEQ ID NO: 3133860 - RNA, 24 nt, Human
ccucacaguccuuaccagcagagc

SEQ ID NO: 3133861 - RNA, 15 nt, Human
ccucccaacucaccc

SEQ ID NO: 3133862 - RNA, 18 nt, Human
ccucccgaauagcuggga

SEQ ID NO: 3133863 - RNA, 13 nt, Human
ccucccucuuucc

SEQ ID NO: 3133864 - RNA, 11 nt, Human
ccuccucagau

SEQ ID NO: 3133865 - RNA, 12 nt, Human
ccuccuccagcc

SEQ ID NO: 3133866 - RNA, 17 nt, Human
ccucccgaguagcuggg

SEQ ID NO: 3133867 - RNA, 18 nt, Human
ccucccgaguagcuggga

SEQ ID NO: 3133868 - RNA, 21 nt, Human
ccucccgaauagcugggacua

SEQ ID NO: 3133869 - RNA, 19 nt, Human
ccucccgaauagcugggac

SEQ ID NO: 3133870 - RNA, 20 nt, Human
ccucccgaauagcugggacu

SEQ ID NO: 3133871 - RNA, 12 nt, Human
ccuccauguggg

SEQ ID NO: 3133872 - RNA, 15 nt, Human
ccuccaugugggcua

SEQ ID NO: 3133873 - RNA, 17 nt, Human
ccucccaaagugcuggg

SEQ ID NO: 3133874 - RNA, 14 nt, Human
ccucccaacucacc

SEQ ID NO: 3133875 - RNA, 12 nt, Human
ccuccaggugca

SEQ ID NO: 3133876 - RNA, 11 nt, Human
ccuccaggugc

SEQ ID NO: 3133877 - RNA, 17 nt, Human
ccuccaggugcacaagc

SEQ ID NO: 3133878 - RNA, 20 nt, Human
ccucaggugagaagcagagg

SEQ ID NO: 3133879 - RNA, 18 nt, Human
ccucaggugagaagcaga

SEQ ID NO: 3133880 - RNA, 17 nt, Human
ccucaggugagaagcag

SEQ ID NO: 3133881 - RNA, 13 nt, Human
ccucugacacaca

SEQ ID NO: 3133882 - RNA, 14 nt, Human
ccucugacacacag

SEQ ID NO: 3133883 - RNA, 19 nt, Human
ccucugacacacagcucug

SEQ ID NO: 3133884 - RNA, 20 nt, Human
ccucugacacacagcucugu

SEQ ID NO: 3133885 - RNA, 21 nt, Human
ccucugacacacagcucuguc

SEQ ID NO: 3133886 - RNA, 15 nt, Human
ccucugcacuccccu

SEQ ID NO: 3133887 - RNA, 17 nt, Human
ccucugcacuccccugc

SEQ ID NO: 3133888 - RNA, 16 nt, Human
ccucugcacuccccug

SEQ ID NO: 3133889 - RNA, 18 nt, Human
ccucugcacuccccugcu

SEQ ID NO: 3133890 - RNA, 23 nt, Human
ccucugcacuccccugcugggug

SEQ ID NO: 3133891 - RNA, 14 nt, Human
ccucugcagcaaua

SEQ ID NO: 3133892 - RNA, 18 nt, Human
ccucugcagcaauaaagc

SEQ ID NO: 3133893 - RNA, 16 nt, Human
ccucugcccacucccu

SEQ ID NO: 3133894 - RNA, 13 nt, Human
ccucugcccacuc

SEQ ID NO: 3133895 - RNA, 18 nt, Human
ccucgguguggagaagcg

SEQ ID NO: 3133896 - RNA, 21 nt, Human
ccuccuccagccgccaugcuc

SEQ ID NO: 3133897 - RNA, 22 nt, Human
ccucucccuuggauuguccccg

SEQ ID NO: 3133898 - RNA, 13 nt, Human
ccucucccuugga

SEQ ID NO: 3133899 - RNA, 20 nt, Human
ccucuccccagcaagugaga

SEQ ID NO: 3133900 - RNA, 15 nt, Human
ccucuccccagcaag

SEQ ID NO: 3133901 - RNA, 14 nt, Human
cccugguggcagcu

SEQ ID NO: 3133902 - RNA, 13 nt, Human
cccugcugguuca

SEQ ID NO: 3133903 - RNA, 22 nt, Human
cccugcuggguguggcgcagca

SEQ ID NO: 3133904 - RNA, 19 nt, Human
cccugcugguucaggguug

SEQ ID NO: 3133905 - RNA, 20 nt, Human
cccugcugguucaggguugg

SEQ ID NO: 3133906 - RNA, 22 nt, Human
cccugguggcagugggagcugc

SEQ ID NO: 3133907 - RNA, 21 nt, Human
cccugguggcagugggagcug

SEQ ID NO: 3133908 - RNA, 22 nt, Human
cccugcacuugcagacucuaca

SEQ ID NO: 3133909 - RNA, 12 nt, Human
cccugcagaggg

SEQ ID NO: 3133910 - RNA, 18 nt, Human
cccugcagagggcacaga

SEQ ID NO: 3133911 - RNA, 16 nt, Human
cccugcaaccugauug

SEQ ID NO: 3133912 - RNA, 22 nt, Human
cccugcaaccugauugugucuc

SEQ ID NO: 3133913 - RNA, 12 nt, Human
cccugccacccu

SEQ ID NO: 3133914 - RNA, 14 nt, Human
cccugccacccugg

SEQ ID NO: 3133915 - RNA, 15 nt, Human
cccugccacccuggg

SEQ ID NO: 3133916 - RNA, 17 nt, Human
cccugccacccugggga

SEQ ID NO: 3133917 - RNA, 18 nt, Human
cccugccacccuggggag

SEQ ID NO: 3133918 - RNA, 14 nt, Human
cccugccuccuuug

SEQ ID NO: 3133919 - RNA, 23 nt, Human
cccugccuccuuugugaggaagc

SEQ ID NO: 3133920 - RNA, 16 nt, Human
cccugccuccuuugug

SEQ ID NO: 3133921 - RNA, 21 nt, Human
cccucagggucccugguggca

SEQ ID NO: 3133922 - RNA, 20 nt, Human
cccucagucuggcccuuccu

SEQ ID NO: 3133923 - RNA, 22 nt, Human
cccucaucaccaacgucugugc

SEQ ID NO: 3133924 - RNA, 20 nt, Human
cccucauccucauacccacc

SEQ ID NO: 3133925 - RNA, 17 nt, Human
cccucauccucauaccc

SEQ ID NO: 3133926 - RNA, 22 nt, Human
cccucauccucauacccacccc

SEQ ID NO: 3133927 - RNA, 21 nt, Human
cccuccaagaccuucuccuuc

SEQ ID NO: 3133928 - RNA, 17 nt, Human
cccuccaugugggcuag

SEQ ID NO: 3133929 - RNA, 13 nt, Human
cccucccucuuuc

SEQ ID NO: 3133930 - RNA, 22 nt, Human
cccuaaaguguauuuuuuuacu

SEQ ID NO: 3133931 - RNA, 17 nt, Human
cccuaaaguguauuuuu

SEQ ID NO: 3133932 - RNA, 16 nt, Human
cccggcaggguccuag

SEQ ID NO: 3133933 - RNA, 15 nt, Human
cccucagggucccug

SEQ ID NO: 3133934 - RNA, 19 nt, Human
cccucagggucccuggugg

SEQ ID NO: 3133935 - RNA, 18 nt, Human
cccucagggucccuggug

SEQ ID NO: 3133936 - RNA, 17 nt, Human
cccucagggucccuggu

SEQ ID NO: 3133937 - RNA, 16 nt, Human
cccucagggucccugg

SEQ ID NO: 3133938 - RNA, 20 nt, Human
cccgaggccuucucugaagg

SEQ ID NO: 3133939 - RNA, 15 nt, Human
cccgaggccuucucu

SEQ ID NO: 3133940 - RNA, 20 nt, Human
ccccuguucuggcagaguug

SEQ ID NO: 3133941 - RNA, 22 nt, Human
ccccuguccccgcacugggcuu

SEQ ID NO: 3133942 - RNA, 12 nt, Human
ccccaggaggcc

SEQ ID NO: 3133943 - RNA, 15 nt, Human
ccccuggcagccccu

SEQ ID NO: 3133944 - RNA, 14 nt, Human
ccccuggcagcccc

SEQ ID NO: 3133945 - RNA, 12 nt, Human
ccccuggcagcc

SEQ ID NO: 3133946 - RNA, 15 nt, Human
ccccagccccauccu

SEQ ID NO: 3133947 - RNA, 16 nt, Human
ccccagccccauccca

SEQ ID NO: 3133948 - RNA, 13 nt, Human
ccccagccugcua

SEQ ID NO: 3133949 - RNA, 14 nt, Human
cccaguuagcucuc

SEQ ID NO: 3133950 - RNA, 20 nt, Human
cccagugguuccuaauccuc

SEQ ID NO: 3133951 - RNA, 15 nt, Human
cccagugccgagaag

SEQ ID NO: 3133952 - RNA, 21 nt, Human
cccagugcccacaggaucagu

SEQ ID NO: 3133953 - RNA, 10 nt, Human
cccagucugg

SEQ ID NO: 3133954 - RNA, 18 nt, Human
cccagucuggaaugcagu

SEQ ID NO: 3133955 - RNA, 19 nt, Human
cccagucuggaaugcagug

SEQ ID NO: 3133956 - RNA, 17 nt, Human
cccaggcauuccccagg

SEQ ID NO: 3133957 - RNA, 23 nt, Human
cccaggcaggucuugaacuccug

SEQ ID NO: 3133958 - RNA, 15 nt, Human
cccaggcauucccca

SEQ ID NO: 3133959 - RNA, 16 nt, Human
cccaggaggccagccu

SEQ ID NO: 3133960 - RNA, 15 nt, Human
cccaggaggccagcc

SEQ ID NO: 3133961 - RNA, 13 nt, Human
cccagguuucuau

SEQ ID NO: 3133962 - RNA, 21 nt, Human
ccccaaauggaaaugggcaga

SEQ ID NO: 3133963 - RNA, 20 nt, Human
cccaucugugaaaggaaaga

SEQ ID NO: 3133964 - RNA, 13 nt, Human
cccaucucacaca

SEQ ID NO: 3133965 - RNA, 18 nt, Human
cccaucucacacaugagc

SEQ ID NO: 3133966 - RNA, 12 nt, Human
cccaucugugaa

SEQ ID NO: 3133967 - RNA, 14 nt, Human
cccaugcugcccug

SEQ ID NO: 3133968 - RNA, 13 nt, Human
cccaugcugcccu

SEQ ID NO: 3133969 - RNA, 12 nt, Human
cccaugcugccc

SEQ ID NO: 3133970 - RNA, 20 nt, Human
cccaugagccucagcauccu

SEQ ID NO: 3133971 - RNA, 15 nt, Human
cccaugagccucagc

SEQ ID NO: 3133972 - RNA, 16 nt, Human
cccaugagccucagca

SEQ ID NO: 3133973 - RNA, 15 nt, Human
ccaugcugcccugug

SEQ ID NO: 3133974 - RNA, 18 nt, Human
ccaugcuccuggcccacu

SEQ ID NO: 3133975 - RNA, 15 nt, Human
ccaugcuccuggccc

SEQ ID NO: 3133976 - RNA, 17 nt, Human
ccaugcugcccugugag

SEQ ID NO: 3133977 - RNA, 16 nt, Human
ccaugcugcccuguga

SEQ ID NO: 3133978 - RNA, 13 nt, Human
ccaugcuccuggc

SEQ ID NO: 3133979 - RNA, 13 nt, Human
ccauguuggccag

SEQ ID NO: 3133980 - RNA, 14 nt, Human
ccauguuggccagg

SEQ ID NO: 3133981 - RNA, 13 nt, Human
ccaugugccaggu

SEQ ID NO: 3133982 - RNA, 19 nt, Human
ccauguuggccaggcuggu

SEQ ID NO: 3133983 - RNA, 21 nt, Human
ccauguuggccaggcuggucu

SEQ ID NO: 3133984 - RNA, 18 nt, Human
ccauguuggccaggcugg

SEQ ID NO: 3133985 - RNA, 15 nt, Human
ccauguuggccaggc

SEQ ID NO: 3133986 - RNA, 15 nt, Human
cccaccuggccucug

SEQ ID NO: 3133987 - RNA, 12 nt, Human
cccaccuggccu

SEQ ID NO: 3133988 - RNA, 16 nt, Human
cccaccuuggcugcag

SEQ ID NO: 3133989 - RNA, 17 nt, Human
cccaccuuggcugcagg

SEQ ID NO: 3133990 - RNA, 19 nt, Human
cccaccuuggcugcaggga

SEQ ID NO: 3133991 - RNA, 14 nt, Human
cccacgcccccacu

SEQ ID NO: 3133992 - RNA, 13 nt, Human
cccacgcccccac

SEQ ID NO: 3133993 - RNA, 15 nt, Human
cccagccccauccuc

SEQ ID NO: 3133994 - RNA, 14 nt, Human
cccagccccauccu

SEQ ID NO: 3133995 - RNA, 14 nt, Human
cccagccccauccc

SEQ ID NO: 3133996 - RNA, 13 nt, Human
cccagccccaucc

SEQ ID NO: 3133997 - RNA, 18 nt, Human
cccagccccuucugaccc

SEQ ID NO: 3133998 - RNA, 19 nt, Human
cccagccccauccucugua

SEQ ID NO: 3133999 - RNA, 18 nt, Human
cccagccccauccucugu

SEQ ID NO: 3134000 - RNA, 13 nt, Human
cccagccccaaug

SEQ ID NO: 3134001 - RNA, 12 nt, Human
cccagccccauc

SEQ ID NO: 3134002 - RNA, 11 nt, Human
cccagccccau

SEQ ID NO: 3134003 - RNA, 17 nt, Human
cccagccccaaugaaca

SEQ ID NO: 3134004 - RNA, 23 nt, Human
cccagauugcaacaggcugggcu

SEQ ID NO: 3134005 - RNA, 18 nt, Human
cccagcucugguccauag

SEQ ID NO: 3134006 - RNA, 16 nt, Human
cccagcucugguccau

SEQ ID NO: 3134007 - RNA, 15 nt, Human
cccagcucuggucca

SEQ ID NO: 3134008 - RNA, 12 nt, Human
cccagcucuggu

SEQ ID NO: 3134009 - RNA, 14 nt, Human
cccagcucuggucc

SEQ ID NO: 3134010 - RNA, 13 nt, Human
cccagcucugguc

SEQ ID NO: 3134011 - RNA, 14 nt, Human
cccagcgagcccug

SEQ ID NO: 3134012 - RNA, 13 nt, Human
cccaggagccccg

SEQ ID NO: 3134013 - RNA, 14 nt, Human
cccaggagccccga

SEQ ID NO: 3134014 - RNA, 14 nt, Human
cccaggaggccagc

SEQ ID NO: 3134015 - RNA, 19 nt, Human
ccaggccccugccacccug

SEQ ID NO: 3134016 - RNA, 21 nt, Human
ccaggccccugccacccuggg

SEQ ID NO: 3134017 - RNA, 23 nt, Human
ccaggccccugccacccugggga

SEQ ID NO: 3134018 - RNA, 14 nt, Human
ccaggccagaggga

SEQ ID NO: 3134019 - RNA, 21 nt, Human
ccaggccagagggagugacag

SEQ ID NO: 3134020 - RNA, 14 nt, Human
ccaggagcagccac

SEQ ID NO: 3134021 - RNA, 12 nt, Human
ccaggccagagg

SEQ ID NO: 3134022 - RNA, 19 nt, Human
ccaggccuccuacagcuug

SEQ ID NO: 3134023 - RNA, 18 nt, Human
ccaggccuccuacagcuu

SEQ ID NO: 3134024 - RNA, 13 nt, Human
ccaggccuccuac

SEQ ID NO: 3134025 - RNA, 19 nt, Human
ccaggcccucugcccacuc

SEQ ID NO: 3134026 - RNA, 18 nt, Human
ccaggcccucugcccacu

SEQ ID NO: 3134027 - RNA, 17 nt, Human
ccaggcccucugcccac

SEQ ID NO: 3134028 - RNA, 16 nt, Human
ccaggcccucugccca

SEQ ID NO: 3134029 - RNA, 22 nt, Human
ccagcugugcucuggacaggca

SEQ ID NO: 3134030 - RNA, 23 nt, Human
ccagcugugcucuggacaggcau

SEQ ID NO: 3134031 - RNA, 19 nt, Human
ccaggaagccagcaggcuc

SEQ ID NO: 3134032 - RNA, 17 nt, Human
ccaggaagccagcaggc

SEQ ID NO: 3134033 - RNA, 15 nt, Human
ccaggaagccagcag

SEQ ID NO: 3134034 - RNA, 14 nt, Human
ccaggaagccagca

SEQ ID NO: 3134035 - RNA, 13 nt, Human
ccaggagcagcca

SEQ ID NO: 3134036 - RNA, 12 nt, Human
ccaggagcagcc

SEQ ID NO: 3134037 - RNA, 18 nt, Human
ccagcugugcucuggaca

SEQ ID NO: 3134038 - RNA, 20 nt, Human
ccagcugugcucuggacagg

SEQ ID NO: 3134039 - RNA, 21 nt, Human
ccagcugugcucuggacaggc

SEQ ID NO: 3134040 - RNA, 15 nt, Human
ccagcugcuugggcu

SEQ ID NO: 3134041 - RNA, 13 nt, Human
ccagcugcuuggg

SEQ ID NO: 3134042 - RNA, 18 nt, Human
ccagcugcuugggcuuca

SEQ ID NO: 3134043 - RNA, 16 nt, Human
ccagcugcuugggcuu

SEQ ID NO: 3134044 - RNA, 23 nt, Human
ccagggacagaggggguggccuc

SEQ ID NO: 3134045 - RNA, 23 nt, Human
ccauagagagcaagacgcugugc

SEQ ID NO: 3134046 - RNA, 19 nt, Human
ccauauuaccacagacaua

SEQ ID NO: 3134047 - RNA, 15 nt, Human
ccauauucuguuggc

SEQ ID NO: 3134048 - RNA, 18 nt, Human
ccauauucuguuggccag

SEQ ID NO: 3134049 - RNA, 12 nt, Human
ccaucacccgcu

SEQ ID NO: 3134050 - RNA, 13 nt, Human
ccaucaccagaca

SEQ ID NO: 3134051 - RNA, 21 nt, Human
ccauccucuguacagagccca

SEQ ID NO: 3134052 - RNA, 14 nt, Human
ccaucaugucuggc

SEQ ID NO: 3134053 - RNA, 16 nt, Human
ccaucaugucuggcua

SEQ ID NO: 3134054 - RNA, 15 nt, Human
caucaccaacgucug

SEQ ID NO: 3134055 - RNA, 13 nt, Human
caucauugaaauc

SEQ ID NO: 3134056 - RNA, 21 nt, Human
caucauugaaaucuuuuugcu

SEQ ID NO: 3134057 - RNA, 20 nt, Human
caucauugaaaucuuuuugc

SEQ ID NO: 3134058 - RNA, 15 nt, Human
caucauugaaaucuu

SEQ ID NO: 3134059 - RNA, 14 nt, Human
caucauugaaaucu

SEQ ID NO: 3134060 - RNA, 15 nt, Human
cauccagguucagcu

SEQ ID NO: 3134061 - RNA, 19 nt, Human
caucccucuggggcuguuc

SEQ ID NO: 3134062 - RNA, 13 nt, Human
caucccugaaggc

SEQ ID NO: 3134063 - RNA, 11 nt, Human
caucccugaag

SEQ ID NO: 3134064 - RNA, 21 nt, Human
caucccugaaggccccgccca

SEQ ID NO: 3134065 - RNA, 19 nt, Human
caucccugaaggccccgcc

SEQ ID NO: 3134066 - RNA, 18 nt, Human
caucccugaaggccccgc

SEQ ID NO: 3134067 - RNA, 17 nt, Human
caucccugaaggccccg

SEQ ID NO: 3134068 - RNA, 20 nt, Human
caucuugcucugcugacaga

SEQ ID NO: 3134069 - RNA, 19 nt, Human
caucuugcucugcugacag

SEQ ID NO: 3134070 - RNA, 14 nt, Human
caucuugcucugcu

SEQ ID NO: 3134071 - RNA, 13 nt, Human
caucuugcucugc

SEQ ID NO: 3134072 - RNA, 22 nt, Human
caucuuccaaggguacuaagga

SEQ ID NO: 3134073 - RNA, 12 nt, Human
cauccuccucag

SEQ ID NO: 3134074 - RNA, 11 nt, Human
cauccuccuca

SEQ ID NO: 3134075 - RNA, 19 nt, Human
cauccuccucagaucuucu

SEQ ID NO: 3134076 - RNA, 18 nt, Human
cauccuccucagaucuuc

SEQ ID NO: 3134077 - RNA, 16 nt, Human
cauccuccucagaucu

SEQ ID NO: 3134078 - RNA, 15 nt, Human
cauccuccucagauc

SEQ ID NO: 3134079 - RNA, 13 nt, Human
cauccucccaagg

SEQ ID NO: 3134080 - RNA, 22 nt, Human
cauccucauacccacccccacc

SEQ ID NO: 3134081 - RNA, 21 nt, Human
cauccucauacccacccccac

SEQ ID NO: 3134082 - RNA, 18 nt, Human
cauccucauacccacccc

SEQ ID NO: 3134083 - RNA, 17 nt, Human
cauccucauacccaccc

SEQ ID NO: 3134084 - RNA, 16 nt, Human
cauccucauacccacc

SEQ ID NO: 3134085 - RNA, 15 nt, Human
cauccucauacccac

SEQ ID NO: 3134086 - RNA, 20 nt, Human
caucucacacaugagcauca

SEQ ID NO: 3134087 - RNA, 17 nt, Human
caucucacacaugagca

SEQ ID NO: 3134088 - RNA, 16 nt, Human
caucucacacaugagc

SEQ ID NO: 3134089 - RNA, 19 nt, Human
cauccucuguacagagccc

SEQ ID NO: 3134090 - RNA, 18 nt, Human
cauccucuguacagagcc

SEQ ID NO: 3134091 - RNA, 15 nt, Human
cauccucuguacaga

SEQ ID NO: 3134092 - RNA, 15 nt, Human
caucuacccuccgau

SEQ ID NO: 3134093 - RNA, 14 nt, Human
caucaagaugugac

SEQ ID NO: 3134094 - RNA, 14 nt, Human
cauauuuacuucuu

SEQ ID NO: 3134095 - RNA, 16 nt, Human
cauauuuacuucuuau

SEQ ID NO: 3134096 - RNA, 17 nt, Human
cauauuuacuucuuaua

SEQ ID NO: 3134097 - RNA, 20 nt, Human
cauauuuacuucuuauacau

SEQ ID NO: 3134098 - RNA, 17 nt, Human
cauaguaugguggcugg

SEQ ID NO: 3134099 - RNA, 20 nt, Human
cauaguaugguggcuggguu

SEQ ID NO: 3134100 - RNA, 18 nt, Human
cauaguaugguggcuggg

SEQ ID NO: 3134101 - RNA, 19 nt, Human
cauaguaugguggcugggu

SEQ ID NO: 3134102 - RNA, 22 nt, Human
cauaguggcuuaaaacaacacu

SEQ ID NO: 3134103 - RNA, 22 nt, Human
cauauauauguuuuaagaggca

SEQ ID NO: 3134104 - RNA, 11 nt, Human
cauacucugcu

SEQ ID NO: 3134105 - RNA, 20 nt, Human
cauacucccaucugugaaag

SEQ ID NO: 3134106 - RNA, 18 nt, Human
cauacucccaucugugaa

SEQ ID NO: 3134107 - RNA, 15 nt, Human
cauacucccaucugu

SEQ ID NO: 3134108 - RNA, 16 nt, Human
cauacucccaucugug

SEQ ID NO: 3134109 - RNA, 21 nt, Human
cauagagagcaagacgcugug

SEQ ID NO: 3134110 - RNA, 19 nt, Human
cauagagagcaagacgcug

SEQ ID NO: 3134111 - RNA, 23 nt, Human
cauagagagcaagacgcugugcu

SEQ ID NO: 3134112 - RNA, 16 nt, Human
caguguacauggaaua

SEQ ID NO: 3134113 - RNA, 20 nt, Human
caguguacauggaauaacau

SEQ ID NO: 3134114 - RNA, 23 nt, Human
caguguacauggaauaacaugua

SEQ ID NO: 3134115 - RNA, 14 nt, Human
cagugugacaagga

SEQ ID NO: 3134116 - RNA, 12 nt, Human
cagugugacuga

SEQ ID NO: 3134117 - RNA, 12 nt, Human
caguggcagcug

SEQ ID NO: 3134118 - RNA, 13 nt, Human
caguggcagcugc

SEQ ID NO: 3134119 - RNA, 14 nt, Human
caguggcagcugcu

SEQ ID NO: 3134120 - RNA, 15 nt, Human
caguggcagcugcuu

SEQ ID NO: 3134121 - RNA, 16 nt, Human
caguggcagcugcuuu

SEQ ID NO: 3134122 - RNA, 22 nt, Human
cagugguuccuaauccucuagg

SEQ ID NO: 3134123 - RNA, 19 nt, Human
caguugaaaaacagcugag

SEQ ID NO: 3134124 - RNA, 18 nt, Human
caguugaaaaacagcuga

SEQ ID NO: 3134125 - RNA, 12 nt, Human
caguugaaaaac

SEQ ID NO: 3134126 - RNA, 22 nt, Human
caguucucuccuucuucccccc

SEQ ID NO: 3134127 - RNA, 13 nt, Human
caguucucuccuu

SEQ ID NO: 3134128 - RNA, 15 nt, Human
caguucucuccuucu

SEQ ID NO: 3134129 - RNA, 14 nt, Human
caguucucuccuuc

SEQ ID NO: 3134130 - RNA, 14 nt, Human
caguuaagagaaau

SEQ ID NO: 3134131 - RNA, 13 nt, Human
caguuaagagaaa

SEQ ID NO: 3134132 - RNA, 19 nt, Human
caguguuguggauuuaaca

SEQ ID NO: 3134133 - RNA, 20 nt, Human
caguguuguggauuuaacag

SEQ ID NO: 3134134 - RNA, 22 nt, Human
caguguuguggauuuaacagaa

SEQ ID NO: 3134135 - RNA, 16 nt, Human
cauaaccuagccuuag

SEQ ID NO: 3134136 - RNA, 22 nt, Human
cauaaacaagaccacguuucua

SEQ ID NO: 3134137 - RNA, 20 nt, Human
cauaaacaagaccacguuuc

SEQ ID NO: 3134138 - RNA, 21 nt, Human
cauaaacaagaccacguuucu

SEQ ID NO: 3134139 - RNA, 21 nt, Human
cauaaaaauuagccaagugug

SEQ ID NO: 3134140 - RNA, 19 nt, Human
cauaccacuuuuguucuug

SEQ ID NO: 3134141 - RNA, 12 nt, Human
cauacccacccc

SEQ ID NO: 3134142 - RNA, 11 nt, Human
cauacccaccc

SEQ ID NO: 3134143 - RNA, 13 nt, Human
cauaccacuuuug

SEQ ID NO: 3134144 - RNA, 14 nt, Human
cauaccacuuuugu

SEQ ID NO: 3134145 - RNA, 15 nt, Human
cauaccacuuuuguu

SEQ ID NO: 3134146 - RNA, 18 nt, Human
cauaccacuuuuguucuu

SEQ ID NO: 3134147 - RNA, 14 nt, Human
cauaagauaaaugu

SEQ ID NO: 3134148 - RNA, 18 nt, Human
caguuggucccccuucca

SEQ ID NO: 3134149 - RNA, 18 nt, Human
caguuggguggaugccug

SEQ ID NO: 3134150 - RNA, 19 nt, Human
caguuggguggaugccugg

SEQ ID NO: 3134151 - RNA, 22 nt, Human
caguuggucccccuuccaugga

SEQ ID NO: 3134152 - RNA, 21 nt, Human
caguuggucccccuuccaugg

SEQ ID NO: 3134153 - RNA, 20 nt, Human
caguuggucccccuuccaug

SEQ ID NO: 3134154 - RNA, 19 nt, Human
caguuggucccccuuccau

SEQ ID NO: 3134155 - RNA, 16 nt, Human
caguuggguggaugcc

SEQ ID NO: 3134156 - RNA, 23 nt, Human
caguugccagucaccccggccac

SEQ ID NO: 3134157 - RNA, 17 nt, Human
caguuguuagugugucu

SEQ ID NO: 3134158 - RNA, 13 nt, Human
cauacguacacau

SEQ ID NO: 3134159 - RNA, 15 nt, Human
cauacguacacauuu

SEQ ID NO: 3134160 - RNA, 16 nt, Human
cauacguacacauuuu

SEQ ID NO: 3134161 - RNA, 17 nt, Human
cauacguacacauuuua

SEQ ID NO: 3134162 - RNA, 18 nt, Human
cauacguacacauuuuau

SEQ ID NO: 3134163 - RNA, 14 nt, Human
cauacuaaccagca

SEQ ID NO: 3134164 - RNA, 21 nt, Human
cauacuaaccagcagaaaugc

SEQ ID NO: 3134165 - RNA, 21 nt, Human
cauacccacccccacccaagg

SEQ ID NO: 3134166 - RNA, 18 nt, Human
cauacccacccccaccca

SEQ ID NO: 3134167 - RNA, 17 nt, Human
cauacccacccccaccc

SEQ ID NO: 3134168 - RNA, 14 nt, Human
cauacccaccccca

SEQ ID NO: 3134169 - RNA, 22 nt, Human
cauugaccugaggcccuucucu

SEQ ID NO: 3134170 - RNA, 13 nt, Human
cauugaccugagg

SEQ ID NO: 3134171 - RNA, 19 nt, Human
cauugaaaucuuuuugcuu

SEQ ID NO: 3134172 - RNA, 21 nt, Human
cauuucuuccacaagagccca

SEQ ID NO: 3134173 - RNA, 21 nt, Human
cauuuaaaagauacaguuacu

SEQ ID NO: 3134174 - RNA, 17 nt, Human
cauuuacuuuguguuca

SEQ ID NO: 3134175 - RNA, 21 nt, Human
cauuuacuuuguguucaccuu

SEQ ID NO: 3134176 - RNA, 17 nt, Human
cauuugaggucuguucu

SEQ ID NO: 3134177 - RNA, 18 nt, Human
cauuugaggucuguucuu

SEQ ID NO: 3134178 - RNA, 19 nt, Human
cauuugaggucuguucuuu

SEQ ID NO: 3134179 - RNA, 14 nt, Human
cauuugagcagggc

SEQ ID NO: 3134180 - RNA, 23 nt, Human
cauuucuuccacaagagcccagg

SEQ ID NO: 3134181 - RNA, 20 nt, Human
cauuuugggguacccacugc

SEQ ID NO: 3134182 - RNA, 21 nt, Human
cauuuugggguacccacugcu

SEQ ID NO: 3134183 - RNA, 22 nt, Human
cauuuugggguacccacugcuc

SEQ ID NO: 3134184 - RNA, 24 nt, Human
cauuuugcuaaaugugaaugauga

SEQ ID NO: 3134185 - RNA, 21 nt, Human
cauuuugcuaaaugugaauga

SEQ ID NO: 3134186 - RNA, 18 nt, Human
cauuuugcuaaaugugaa

SEQ ID NO: 3134187 - RNA, 23 nt, Human
cauuuugggguacccacugcucu

SEQ ID NO: 3134188 - RNA, 19 nt, Human
cauuuuuaguagagacagg

SEQ ID NO: 3134189 - RNA, 18 nt, Human
cauuuuuaguagagacag

SEQ ID NO: 3134190 - RNA, 15 nt, Human
cauuuuuaagugcug

SEQ ID NO: 3134191 - RNA, 20 nt, Human
cauuuuuaagugcugcauuu

SEQ ID NO: 3134192 - RNA, 19 nt, Human
cauuuuauuuuauuaugca

SEQ ID NO: 3134193 - RNA, 21 nt, Human
cauuuuauuuuauuaugcaug

SEQ ID NO: 3134194 - RNA, 20 nt, Human
cauuuuuaguagagacaggg

SEQ ID NO: 3134195 - RNA, 18 nt, Human
ccaaaauaaaacuuuuua

SEQ ID NO: 3134196 - RNA, 21 nt, Human
ccaaaauaaaacuuuuuaaaa

SEQ ID NO: 3134197 - RNA, 16 nt, Human
ccaaacccuucagugc

SEQ ID NO: 3134198 - RNA, 21 nt, Human
ccacaagagcccaggccuccu

SEQ ID NO: 3134199 - RNA, 20 nt, Human
ccacaagagcccaggccucc

SEQ ID NO: 3134200 - RNA, 19 nt, Human
ccacaagagcccaggccuc

SEQ ID NO: 3134201 - RNA, 18 nt, Human
ccacaagagcccaggccu

SEQ ID NO: 3134202 - RNA, 17 nt, Human
ccacaagagcccaggcc

SEQ ID NO: 3134203 - RNA, 16 nt, Human
ccacaagagcccaggc

SEQ ID NO: 3134204 - RNA, 15 nt, Human
ccacaaguuaaauaa

SEQ ID NO: 3134205 - RNA, 20 nt, Human
ccacaaguuaaauaaaucau

SEQ ID NO: 3134206 - RNA, 18 nt, Human
ccacaaaggagagcuagc

SEQ ID NO: 3134207 - RNA, 13 nt, Human
ccacaagagccca

SEQ ID NO: 3134208 - RNA, 16 nt, Human
ccacaagacccuugug

SEQ ID NO: 3134209 - RNA, 18 nt, Human
ccaaggugggaggauugc

SEQ ID NO: 3134210 - RNA, 14 nt, Human
ccaaggcuggggga

SEQ ID NO: 3134211 - RNA, 13 nt, Human
ccaagcucccagg

SEQ ID NO: 3134212 - RNA, 12 nt, Human
ccaagcucccag

SEQ ID NO: 3134213 - RNA, 14 nt, Human
ccaagcaggacaug

SEQ ID NO: 3134214 - RNA, 23 nt, Human
ccaagcagagguugggaggccau

SEQ ID NO: 3134215 - RNA, 13 nt, Human
ccaaagaugcagc

SEQ ID NO: 3134216 - RNA, 14 nt, Human
ccaaagaugcagcc

SEQ ID NO: 3134217 - RNA, 13 nt, Human
ccaacaucaacau

SEQ ID NO: 3134218 - RNA, 14 nt, Human
ccaacauacuccca

SEQ ID NO: 3134219 - RNA, 16 nt, Human
ccaacaucaacaucuu

SEQ ID NO: 3134220 - RNA, 15 nt, Human
ccaaauucuuucagu

SEQ ID NO: 3134221 - RNA, 22 nt, Human
ccaaauucuuucaguggcuacc

SEQ ID NO: 3134222 - RNA, 15 nt, Human
ccaagaccuucuccu

SEQ ID NO: 3134223 - RNA, 15 nt, Human
ccaacccucaucacc

SEQ ID NO: 3134224 - RNA, 13 nt, Human
ccaacccucauca

SEQ ID NO: 3134225 - RNA, 21 nt, Human
caugugccagguuuuuggucu

SEQ ID NO: 3134226 - RNA, 15 nt, Human
caugugcacaugcac

SEQ ID NO: 3134227 - RNA, 15 nt, Human
cauguuugugauuga

SEQ ID NO: 3134228 - RNA, 18 nt, Human
cauguaauuaaguacuau

SEQ ID NO: 3134229 - RNA, 21 nt, Human
cauguaauuaaguacuaugua

SEQ ID NO: 3134230 - RNA, 23 nt, Human
caugucuuuucuugcaugaggcu

SEQ ID NO: 3134231 - RNA, 21 nt, Human
caugucuuuucuugcaugagg

SEQ ID NO: 3134232 - RNA, 19 nt, Human
caugucuuuucuugcauga

SEQ ID NO: 3134233 - RNA, 14 nt, Human
caugucuuuucuug

SEQ ID NO: 3134234 - RNA, 16 nt, Human
cauggucggaaaacau

SEQ ID NO: 3134235 - RNA, 15 nt, Human
cauguuuuguuuacg

SEQ ID NO: 3134236 - RNA, 20 nt, Human
caugccagcuuaucucaggg

SEQ ID NO: 3134237 - RNA, 19 nt, Human
caugccagcuuaucucagg

SEQ ID NO: 3134238 - RNA, 13 nt, Human
caugccccugaac

SEQ ID NO: 3134239 - RNA, 15 nt, Human
caugccucucucagg

SEQ ID NO: 3134240 - RNA, 14 nt, Human
caugccucucucag

SEQ ID NO: 3134241 - RNA, 13 nt, Human
caugccuggaugg

SEQ ID NO: 3134242 - RNA, 19 nt, Human
caugccucucucaggccaa

SEQ ID NO: 3134243 - RNA, 18 nt, Human
caugccucucucaggcca

SEQ ID NO: 3134244 - RNA, 17 nt, Human
caugccucucucaggcc

SEQ ID NO: 3134245 - RNA, 16 nt, Human
caugccucucucaggc

SEQ ID NO: 3134246 - RNA, 15 nt, Human
caugggccuccugug

SEQ ID NO: 3134247 - RNA, 22 nt, Human
caugggaaugaaugucagugug

SEQ ID NO: 3134248 - RNA, 16 nt, Human
caugggccuccugugu

SEQ ID NO: 3134249 - RNA, 17 nt, Human
caugggccuccugugug

SEQ ID NO: 3134250 - RNA, 18 nt, Human
caugggaaugaaugucag

SEQ ID NO: 3134251 - RNA, 16 nt, Human
cauggaguauauguca

SEQ ID NO: 3134252 - RNA, 13 nt, Human
cauggacuuuguu

SEQ ID NO: 3134253 - RNA, 11 nt, Human
cauggacuuug

SEQ ID NO: 3134254 - RNA, 17 nt, Human
cauggagguuugaagau

SEQ ID NO: 3134255 - RNA, 23 nt, Human
caugccuggauggggcugcaccg

SEQ ID NO: 3134256 - RNA, 21 nt, Human
caugccuggauggggcugcac

SEQ ID NO: 3134257 - RNA, 18 nt, Human
caugccuggauggggcug

SEQ ID NO: 3134258 - RNA, 17 nt, Human
caugcgggcuuccuccu

SEQ ID NO: 3134259 - RNA, 22 nt, Human
caugcugucccuuacgugaguc

SEQ ID NO: 3134260 - RNA, 17 nt, Human
caugcugucccuuacgu

SEQ ID NO: 3134261 - RNA, 22 nt, Human
cauggaaguacuauaauuuacc

SEQ ID NO: 3134262 - RNA, 20 nt, Human
cauggaaguacuauaauuua

SEQ ID NO: 3134263 - RNA, 16 nt, Human
cauggaauaacaugua

SEQ ID NO: 3134264 - RNA, 18 nt, Human
cauggacaugaucuucuu

SEQ ID NO: 3134265 - RNA, 17 nt, Human
guuaagagaaaugagcu

SEQ ID NO: 3134266 - RNA, 17 nt, Human
cccgggcucugccuccc

SEQ ID NO: 3134267 - RNA, 17 nt, Human
gaacaaggcaaggcugu

SEQ ID NO: 3134268 - RNA, 12 nt, Human
gagaaaugagcu

SEQ ID NO: 3134269 - RNA, 14 nt, Human
ggcccccaaaugga

SEQ ID NO: 3134270 - RNA, 22 nt, Human
ggaagagcuccuugauauccuc

SEQ ID NO: 3134271 - RNA, 16 nt, Human
agucccugccaaugga

SEQ ID NO: 3134272 - RNA, 15 nt, Human
cugcuucagccuccc

SEQ ID NO: 3134273 - RNA, 12 nt, Human
ccucagccuccc

SEQ ID NO: 3134274 - RNA, 19 nt, Human
ccaaagcagugcaugcugu

SEQ ID NO: 3134275 - RNA, 20 nt, Human
ccaggcugggagagccuucc

SEQ ID NO: 3134276 - RNA, 21 nt, Human
auuguuucuuucaauaucccc

SEQ ID NO: 3134277 - RNA, 15 nt, Human
ccaccucagccuccc

SEQ ID NO: 3134278 - RNA, 24 nt, Human
cccugugaguacuacaguccuccc

SEQ ID NO: 3134279 - RNA, 21 nt, Murray Valley encephalitis virus
aggccagccgguuaggcugcc

SEQ ID NO: 3134280 - RNA, 16 nt, Murray Valley encephalitis virus
ugaguggcccaagcuc

SEQ ID NO: 3134281 - RNA, 16 nt, Murray Valley encephalitis virus
cgccgaggagugcaau

SEQ ID NO: 3134282 - RNA, 14 nt, Murray Valley encephalitis virus
gaggccccaggagg

SEQ ID NO: 3134283 - RNA, 11 nt, Murray Valley encephalitis virus
aaccccaggag

SEQ ID NO: 3134284 - RNA, 13 nt, Murray Valley encephalitis virus
uagagguuagagg

SEQ ID NO: 3134285 - RNA, 18 nt, Murray Valley encephalitis virus
cgaggagugcaaucugug

SEQ ID NO: 3134286 - RNA, 23 nt, Murray Valley encephalitis virus
ccgcagcccgggccgggaggagg

SEQ ID NO: 3134287 - RNA, 18 nt, Murray Valley encephalitis virus
ucugugaggccccaggag

SEQ ID NO: 3134288 - RNA, 22 nt, Murray Valley encephalitis virus
acgguuggaaagccucccagaa

SEQ ID NO: 3134289 - RNA, 16 nt, Murray Valley encephalitis virus
uagagguuagaggaga

SEQ ID NO: 3134290 - RNA, 18 nt, Murray Valley encephalitis virus
cuagagguuagaggagac

SEQ ID NO: 3134291 - RNA, 15 nt, Murray Valley encephalitis virus
ugaggccccaggagg

SEQ ID NO: 3134292 - RNA, 12 nt, Murray Valley encephalitis virus
gucucggaagag

SEQ ID NO: 3134293 - RNA, 15 nt, Murray Valley encephalitis virus
ccacuucgccgagga

SEQ ID NO: 3134294 - RNA, 16 nt, Murray Valley encephalitis virus
gaccaaccccaggagg

SEQ ID NO: 3134295 - RNA, 22 nt, Murray Valley encephalitis virus
aggccagccgguuaggcugcca

SEQ ID NO: 3134296 - RNA, 14 nt, Murray Valley encephalitis virus
guuaggcugccacc

SEQ ID NO: 3134297 - RNA, 17 nt, Murray Valley encephalitis virus
ggaagaggagucccugc

SEQ ID NO: 3134298 - RNA, 21 nt, Murray Valley encephalitis virus
gccgaacacugugacugaugg

SEQ ID NO: 3134299 - RNA, 20 nt, Murray Valley encephalitis virus
gccugcgaccaaccccagga

SEQ ID NO: 3134300 - RNA, 21 nt, Murray Valley encephalitis virus
ugcaaucugugaggccccagg

SEQ ID NO: 3134301 - RNA, 21 nt, Murray Valley encephalitis virus
ugcgaccaaccccaggaggac

SEQ ID NO: 3134302 - RNA, 16 nt, Murray Valley encephalitis virus
gugaggccccaggagg

SEQ ID NO: 3134303 - RNA, 21 nt, Murray Valley encephalitis virus
cccccgcagcccgggccggga

SEQ ID NO: 3134304 - RNA, 13 nt, Murray Valley encephalitis virus
gaucuucugcucu

SEQ ID NO: 3134305 - RNA, 14 nt, Murray Valley encephalitis virus
caggaggacugggu

SEQ ID NO: 3134306 - RNA, 17 nt, Murray Valley encephalitis virus
gaccaaccccaggagga

SEQ ID NO: 3134307 - RNA, 15 nt, Murray Valley encephalitis virus
ugcucuauuccaaca

SEQ ID NO: 3134308 - RNA, 15 nt, Murray Valley encephalitis virus
acggacuagagguua

SEQ ID NO: 3134309 - RNA, 15 nt, Murray Valley encephalitis virus
gugcugccugcgacc

SEQ ID NO: 3134310 - RNA, 23 nt, Murray Valley encephalitis virus
uguaauauaguauagguaaaauu

SEQ ID NO: 3134311 - RNA, 11 nt, Murray Valley encephalitis virus
aggaggacugg

SEQ ID NO: 3134312 - RNA, 15 nt, Murray Valley encephalitis virus
ggagaagaccacagg

SEQ ID NO: 3134313 - RNA, 13 nt, Murray Valley encephalitis virus
gaggccccaggag

SEQ ID NO: 3134314 - RNA, 15 nt, Murray Valley encephalitis virus
gaaaagacuaggaga

SEQ ID NO: 3134315 - RNA, 15 nt, Murray Valley encephalitis virus
uggagaugaagcccg

SEQ ID NO: 3134316 - RNA, 20 nt, Murray Valley encephalitis virus
agucacaaggcaccgagcgc

SEQ ID NO: 3134317 - RNA, 22 nt, Murray Valley encephalitis virus
cgucucggaagaggagucccug

SEQ ID NO: 3134318 - RNA, 16 nt, Murray Valley encephalitis virus
ugugaggccccaggag

SEQ ID NO: 3134319 - RNA, 22 nt, Murray Valley encephalitis virus
cugcgaccaaccccaggaggac

SEQ ID NO: 3134320 - RNA, 15 nt, Murray Valley encephalitis virus
caggccagccgguua

SEQ ID NO: 3134321 - RNA, 23 nt, Murray Valley encephalitis virus
acugaugggggagaagaccacag

SEQ ID NO: 3134322 - RNA, 15 nt, Murray Valley encephalitis virus
accaaccccaggagg

SEQ ID NO: 3134323 - RNA, 21 nt, Murray Valley encephalitis virus
cccaggaggacuggguaaaca

SEQ ID NO: 3134324 - RNA, 17 nt, Murray Valley encephalitis virus
agcccgggccgggagga

SEQ ID NO: 3134325 - RNA, 21 nt, Murray Valley encephalitis virus
aucugugaggccccaggagga

SEQ ID NO: 3134326 - RNA, 20 nt, Murray Valley encephalitis virus
gacugaugggggagaagacc

SEQ ID NO: 3134327 - RNA, 20 nt, Murray Valley encephalitis virus
aaccgucucggaagaggagu

SEQ ID NO: 3134328 - RNA, 19 nt, Murray Valley encephalitis virus
ggagugcaaucugugaggc

SEQ ID NO: 3134329 - RNA, 20 nt, Murray Valley encephalitis virus
caccugggaaaagacuagga

SEQ ID NO: 3134330 - RNA, 14 nt, Murray Valley encephalitis virus
agacggugcugccu

SEQ ID NO: 3134331 - RNA, 18 nt, Murray Valley encephalitis virus
gguuggaaagccucccag

SEQ ID NO: 3134332 - RNA, 19 nt, Murray Valley encephalitis virus
aucugugaggccccaggag

SEQ ID NO: 3134333 - RNA, 20 nt, Murray Valley encephalitis virus
ggacuagagguuagaggaga

SEQ ID NO: 3134334 - RNA, 15 nt, Murray Valley encephalitis virus
aggcccccgcagccc

SEQ ID NO: 3134335 - RNA, 13 nt, Murray Valley encephalitis virus
ccugggaaaagac

SEQ ID NO: 3134336 - RNA, 18 nt, Murray Valley encephalitis virus
gcgaccaaccccaggagg

SEQ ID NO: 3134337 - RNA, 22 nt, Murray Valley encephalitis virus
aagcgccacuucgccgaggagu

SEQ ID NO: 3134338 - RNA, 13 nt, Murray Valley encephalitis virus
agagguuagagga

SEQ ID NO: 3134339 - RNA, 23 nt, Murray Valley encephalitis virus
acaccugggaaaagacuaggaga

SEQ ID NO: 3134340 - RNA, 21 nt, Murray Valley encephalitis virus
cuagagguuagaggagacccu

SEQ ID NO: 3134341 - RNA, 12 nt, Murray Valley encephalitis virus
aaccccaggagg

SEQ ID NO: 3134342 - RNA, 13 nt, Murray Valley encephalitis virus
ugaggccccagga

SEQ ID NO: 3134343 - RNA, 18 nt, Murray Valley encephalitis virus
acuagagguuagaggaga

SEQ ID NO: 3134344 - RNA, 14 nt, Murray Valley encephalitis virus
agaggagaccccac

SEQ ID NO: 3134345 - RNA, 16 nt, Murray Valley encephalitis virus
gccccaggaggacugg

SEQ ID NO: 3134346 - RNA, 15 nt, Murray Valley encephalitis virus
gggccgggaggaggu

SEQ ID NO: 3134347 - RNA, 19 nt, Murray Valley encephalitis virus
ugcgaccaaccccaggagg

SEQ ID NO: 3134348 - RNA, 22 nt, Murray Valley encephalitis virus
agaaccgucucggaagaggagu

SEQ ID NO: 3134349 - RNA, 15 nt, Murray Valley encephalitis virus
gaggccccaggagga

SEQ ID NO: 3134350 - RNA, 22 nt, Murray Valley encephalitis virus
aucuucugcucuauuccaacau

SEQ ID NO: 3134351 - RNA, 22 nt, Murray Valley encephalitis virus
gcccaagcucgccgaagcugua

SEQ ID NO: 3134352 - RNA, 15 nt, Murray Valley encephalitis virus
agugcaaucugugag

SEQ ID NO: 3134353 - RNA, 18 nt, Murray Valley encephalitis virus
uaguauagguaaaauuuu

SEQ ID NO: 3134354 - RNA, 21 nt, Murray Valley encephalitis virus
ccagccgguuaggcugccacc

SEQ ID NO: 3134355 - RNA, 19 nt, Murray Valley encephalitis virus
guggacggacuagagguua

SEQ ID NO: 3134356 - RNA, 14 nt, Murray Valley encephalitis virus
ggaggaggugaugc

SEQ ID NO: 3134357 - RNA, 18 nt, Murray Valley encephalitis virus
aggagaucuucugcucua

SEQ ID NO: 3134358 - RNA, 12 nt, Murray Valley encephalitis virus
acuggguaaaca

SEQ ID NO: 3134359 - RNA, 20 nt, Murray Valley encephalitis virus
cugugaggccccaggaggac

SEQ ID NO: 3134360 - RNA, 13 nt, Murray Valley encephalitis virus
gugaggccccagg

SEQ ID NO: 3134361 - RNA, 15 nt, Murray Valley encephalitis virus
gcgaccaaccccagg

SEQ ID NO: 3134362 - RNA, 16 nt, Murray Valley encephalitis virus
ugcgaccaaccccagg

SEQ ID NO: 3134363 - RNA, 24 nt, Murray Valley encephalitis virus
gacuagagguuagaggagacccug

SEQ ID NO: 3134364 - RNA, 20 nt, Murray Valley encephalitis virus
guuggaaagccucccagaac

SEQ ID NO: 3134365 - RNA, 19 nt, Murray Valley encephalitis virus
agguuagaggagacccugc

SEQ ID NO: 3134366 - RNA, 22 nt, Murray Valley encephalitis virus
ugccugcgaccaaccccaggag

SEQ ID NO: 3134367 - RNA, 15 nt, Murray Valley encephalitis virus
caggaggacuggguu

SEQ ID NO: 3134368 - RNA, 19 nt, Murray Valley encephalitis virus
gccugcgaccaaccccagg

SEQ ID NO: 3134369 - RNA, 18 nt, Murray Valley encephalitis virus
aggccccaggaggacugg

SEQ ID NO: 3134370 - RNA, 14 nt, Murray Valley encephalitis virus
ccaggaggacuggg

SEQ ID NO: 3134371 - RNA, 13 nt, Murray Valley encephalitis virus
ccguaaggccccc

SEQ ID NO: 3134372 - RNA, 18 nt, Murray Valley encephalitis virus
guuaccaaagcugauucu

SEQ ID NO: 3134373 - RNA, 17 nt, Murray Valley encephalitis virus
ccugcggaagaaaugag

SEQ ID NO: 3134374 - RNA, 14 nt, Murray Valley encephalitis virus
ccaaccccaggagg

SEQ ID NO: 3134375 - RNA, 13 nt, Murray Valley encephalitis virus
aaccccaggagga

SEQ ID NO: 3134376 - RNA, 15 nt, Murray Valley encephalitis virus
gguagacggugcugc

SEQ ID NO: 3134377 - RNA, 22 nt, Murray Valley encephalitis virus
cugccugcgaccaaccccagga

SEQ ID NO: 3134378 - RNA, 16 nt, Murray Valley encephalitis virus
gacugaugggggagaa

SEQ ID NO: 3134379 - RNA, 19 nt, Murray Valley encephalitis virus
caagcucgccgaagcugua

SEQ ID NO: 3134380 - RNA, 19 nt, Murray Valley encephalitis virus
cggguggacggacuagagg

SEQ ID NO: 3134381 - RNA, 20 nt, Murray Valley encephalitis virus
caaucugugaggccccagga

SEQ ID NO: 3134382 - RNA, 13 nt, Murray Valley encephalitis virus
aagcuguaaggcg

SEQ ID NO: 3134383 - RNA, 14 nt, Murray Valley encephalitis virus
agccguaaggcccc

SEQ ID NO: 3134384 - RNA, 23 nt, Murray Valley encephalitis virus
ccccaggaggacuggguaaacaa

SEQ ID NO: 3134385 - RNA, 13 nt, Murray Valley encephalitis virus
aagccguaaggcc

SEQ ID NO: 3134386 - RNA, 13 nt, Murray Valley encephalitis virus
cgccgaagcugua

SEQ ID NO: 3134387 - RNA, 13 nt, Murray Valley encephalitis virus
aggaggacugggu

SEQ ID NO: 3134388 - RNA, 13 nt, Murray Valley encephalitis virus
aggccccaggagg

SEQ ID NO: 3134389 - RNA, 19 nt, Murray Valley encephalitis virus
ugguagacggugcugccug

SEQ ID NO: 3134390 - RNA, 17 nt, Murray Valley encephalitis virus
acuggguuaccaaagcu

SEQ ID NO: 3134391 - RNA, 17 nt, Murray Valley encephalitis virus
ugaaauuaaguaaaauu

SEQ ID NO: 3134392 - RNA, 11 nt, Murray Valley encephalitis virus
agccucccaga

SEQ ID NO: 3134393 - RNA, 22 nt, Murray Valley encephalitis virus
aggacuagagguuagaggagac

SEQ ID NO: 3134394 - RNA, 23 nt, Murray Valley encephalitis virus
ccccaggaggacuggguuaccaa

SEQ ID NO: 3134395 - RNA, 15 nt, Murray Valley encephalitis virus
ccccaggaggacugg

SEQ ID NO: 3134396 - RNA, 15 nt, Murray Valley encephalitis virus
uugauagaaaauuuu

SEQ ID NO: 3134397 - RNA, 14 nt, Murray Valley encephalitis virus
accaaccccaggag

SEQ ID NO: 3134398 - RNA, 23 nt, Murray Valley encephalitis virus
auguaauauaguauagguaaaau

SEQ ID NO: 3134399 - RNA, 18 nt, Murray Valley encephalitis virus
gacuggguuaccaaagcu

SEQ ID NO: 3134400 - RNA, 22 nt, Murray Valley encephalitis virus
gagugcaaucugugaggcccca

SEQ ID NO: 3134401 - RNA, 22 nt, Murray Valley encephalitis virus
caacaucagucacaaggcaccg

SEQ ID NO: 3134402 - RNA, 17 nt, Murray Valley encephalitis virus
gacugaugggggagaag

SEQ ID NO: 3134403 - RNA, 17 nt, Murray Valley encephalitis virus
aaccccaggaggacugg

SEQ ID NO: 3134404 - RNA, 23 nt, Murray Valley encephalitis virus
acggacuagagguuagaggagac

SEQ ID NO: 3134405 - RNA, 18 nt, Murray Valley encephalitis virus
aaccccggcgaaggacua

SEQ ID NO: 3134406 - RNA, 21 nt, Murray Valley encephalitis virus
aaucugugaggccccaggagg

SEQ ID NO: 3134407 - RNA, 20 nt, Murray Valley encephalitis virus
cagaucgcgaaagcgccacu

SEQ ID NO: 3134408 - RNA, 16 nt, Murray Valley encephalitis virus
ugaggccccaggagga

SEQ ID NO: 3134409 - RNA, 17 nt, Murray Valley encephalitis virus
gguggacggacuagagg

SEQ ID NO: 3134410 - RNA, 22 nt, Murray Valley encephalitis virus
ugacugaugggggagaagacca

SEQ ID NO: 3134411 - RNA, 15 nt, Murray Valley encephalitis virus
guaaacaaagccgua

SEQ ID NO: 3134412 - RNA, 21 nt, Murray Valley encephalitis virus
cccagaaccgucucggaagag

SEQ ID NO: 3134413 - RNA, 12 nt, Murray Valley encephalitis virus
aggccccaggag

SEQ ID NO: 3134414 - RNA, 17 nt, Murray Valley encephalitis virus
accugggaaaagacuag

SEQ ID NO: 3134415 - RNA, 15 nt, Murray Valley encephalitis virus
cgaccaaccccagga

SEQ ID NO: 3134416 - RNA, 18 nt, Murray Valley encephalitis virus
accccaggaggacugggu

SEQ ID NO: 3134417 - RNA, 22 nt, Murray Valley encephalitis virus
caccgagcgccgaacacuguga

SEQ ID NO: 3134418 - RNA, 19 nt, Murray Valley encephalitis virus
gcgaccaaccccaggagga

SEQ ID NO: 3134419 - RNA, 20 nt, Murray Valley encephalitis virus
agaaaugaguggcccaagcu

SEQ ID NO: 3134420 - RNA, 15 nt, Murray Valley encephalitis virus
agaagaccacaggau

SEQ ID NO: 3134421 - RNA, 22 nt, Murray Valley encephalitis virus
caaucugugaggccccaggagg

SEQ ID NO: 3134422 - RNA, 18 nt, Murray Valley encephalitis virus
ugcgaccaaccccaggag

SEQ ID NO: 3134423 - RNA, 15 nt, Murray Valley encephalitis virus
gagucccugccaaca

SEQ ID NO: 3134424 - RNA, 20 nt, Murray Valley encephalitis virus
ugcgaccaaccccaggagga

SEQ ID NO: 3134425 - RNA, 21 nt, Murray Valley encephalitis virus
cuagagguuagaggagacccc

SEQ ID NO: 3134426 - RNA, 18 nt, Murray Valley encephalitis virus
ggaaaagacuaggagauc

SEQ ID NO: 3134427 - RNA, 15 nt, Murray Valley encephalitis virus
gaagaggagucccug

SEQ ID NO: 3134428 - RNA, 22 nt, Murray Valley encephalitis virus
acagcauauugacaccugggaa

SEQ ID NO: 3134429 - RNA, 21 nt, Murray Valley encephalitis virus
cccaggaggacuggguuacca

SEQ ID NO: 3134430 - RNA, 22 nt, Murray Valley encephalitis virus
auuuaauguaauauaguauagg

SEQ ID NO: 3134431 - RNA, 21 nt, Murray Valley encephalitis virus
ucugugaggccccaggaggac

SEQ ID NO: 3134432 - RNA, 21 nt, Murray Valley encephalitis virus
caaucugugaggccccaggag

SEQ ID NO: 3134433 - RNA, 19 nt, Murray Valley encephalitis virus
ugcugccugcgaccaaccc

SEQ ID NO: 3134434 - RNA, 22 nt, Murray Valley encephalitis virus
aggagugcaaucugugaggccc

SEQ ID NO: 3134435 - RNA, 16 nt, Murray Valley encephalitis virus
cugggaaaagacuagg

SEQ ID NO: 3134436 - RNA, 17 nt, Murray Valley encephalitis virus
cugcgaccaaccccagg

SEQ ID NO: 3134437 - RNA, 15 nt, Murray Valley encephalitis virus
caggaggacugggua

SEQ ID NO: 3134438 - RNA, 22 nt, Murray Valley encephalitis virus
gguugguagacggugcugccug

SEQ ID NO: 3134439 - RNA, 21 nt, Murray Valley encephalitis virus
ggacuagagguuagaggagac

SEQ ID NO: 3134440 - RNA, 13 nt, Murray Valley encephalitis virus
ggccccaggagga

SEQ ID NO: 3134441 - RNA, 13 nt, Murray Valley encephalitis virus
ccaggaggacugg

SEQ ID NO: 3134442 - RNA, 18 nt, Murray Valley encephalitis virus
aagaggagucccugccaa

SEQ ID NO: 3134443 - RNA, 19 nt, Murray Valley encephalitis virus
ccugcgaccaaccccagga

SEQ ID NO: 3134444 - RNA, 18 nt, Murray Valley encephalitis virus
aaggcaccgagcgccgaa

SEQ ID NO: 3134445 - RNA, 17 nt, Murray Valley encephalitis virus
cuagagguuagaggaga

SEQ ID NO: 3134446 - RNA, 16 nt, Murray Valley encephalitis virus
agagguuagaggagac

SEQ ID NO: 3134447 - RNA, 22 nt, Murray Valley encephalitis virus
gaccaaccccaggaggacuggg

SEQ ID NO: 3134448 - RNA, 16 nt, Murray Valley encephalitis virus
cugugaggccccagga

SEQ ID NO: 3134449 - RNA, 14 nt, Murray Valley encephalitis virus
acuugauagucagg

SEQ ID NO: 3134450 - RNA, 21 nt, Murray Valley encephalitis virus
cuucugcucuauuccaacauc

SEQ ID NO: 3134451 - RNA, 14 nt, Murray Valley encephalitis virus
aggccccaggagga

SEQ ID NO: 3134452 - RNA, 17 nt, Murray Valley encephalitis virus
auuaaguagcaagacuu

SEQ ID NO: 3134453 - RNA, 16 nt, Murray Valley encephalitis virus
cuucgccgaggagugc

SEQ ID NO: 3134454 - RNA, 14 nt, Murray Valley encephalitis virus
gccgaacacuguga

SEQ ID NO: 3134455 - RNA, 15 nt, Murray Valley encephalitis virus
aaggacuagagguua

SEQ ID NO: 3134456 - RNA, 17 nt, Murray Valley encephalitis virus
gcagcccgggccgggag

SEQ ID NO: 3134457 - RNA, 13 nt, Murray Valley encephalitis virus
caaccccaggagg

SEQ ID NO: 3134458 - RNA, 16 nt, Murray Valley encephalitis virus
ggcgaaggacuagagg

SEQ ID NO: 3134459 - RNA, 17 nt, Murray Valley encephalitis virus
cugccugcgaccaaccc

SEQ ID NO: 3134460 - RNA, 12 nt, Murray Valley encephalitis virus
gaacacugugac

SEQ ID NO: 3134461 - RNA, 19 nt, Murray Valley encephalitis virus
ucucaaaagcaucaaacaa

SEQ ID NO: 3134462 - RNA, 19 nt, Murray Valley encephalitis virus
ccacgguuggaaagccucc

SEQ ID NO: 3134463 - RNA, 20 nt, Murray Valley encephalitis virus
gagucccugccaacaaugga

SEQ ID NO: 3134464 - RNA, 12 nt, Human
aaaaacaacuuu

SEQ ID NO: 3134465 - RNA, 12 nt, Human
aaaacaacuuua

SEQ ID NO: 3134466 - RNA, 14 nt, Human
aauuaaauuuugag

SEQ ID NO: 3134467 - RNA, 18 nt, Human
aaucucauaauuuauaca

SEQ ID NO: 3134468 - RNA, 21 nt, Human
aaugauaaguaaaugcuaggu

SEQ ID NO: 3134469 - RNA, 18 nt, Human
aaugauaaguaaaugcua

SEQ ID NO: 3134470 - RNA, 14 nt, Human
aauauuauguguuu

SEQ ID NO: 3134471 - RNA, 21 nt, Human
aaauugauguguuuauuuaua

SEQ ID NO: 3134472 - RNA, 16 nt, Human
aacuuuggaacaagau

SEQ ID NO: 3134473 - RNA, 14 nt, Human
aaauaguauuugag

SEQ ID NO: 3134474 - RNA, 21 nt, Human
aaaauuauuuuguucauacau

SEQ ID NO: 3134475 - RNA, 12 nt, Human
acuguuuugaau

SEQ ID NO: 3134476 - RNA, 19 nt, Human
acuuuauacccagaaaguu

SEQ ID NO: 3134477 - RNA, 23 nt, Human
agaaaauauuauguguuuccaua

SEQ ID NO: 3134478 - RNA, 21 nt, Human
acagaauauguuucaaacuuu

SEQ ID NO: 3134479 - RNA, 19 nt, Human
acagaauauguuucaaacu

SEQ ID NO: 3134480 - RNA, 17 nt, Human
acagaauauguuucaaa

SEQ ID NO: 3134481 - RNA, 16 nt, Human
acagaauauguuucaa

SEQ ID NO: 3134482 - RNA, 19 nt, Human
acaggucauauuaauauau

SEQ ID NO: 3134483 - RNA, 20 nt, Human
aauuuugaguucuacauaag

SEQ ID NO: 3134484 - RNA, 15 nt, Human
aauuuuauaucuugu

SEQ ID NO: 3134485 - RNA, 14 nt, Human
acaacuuuauaccc

SEQ ID NO: 3134486 - RNA, 13 nt, Human
acaacuuuauacc

SEQ ID NO: 3134487 - RNA, 18 nt, Human
acaacuucccagugaauu

SEQ ID NO: 3134488 - RNA, 17 nt, Human
acaacuucaauauccaa

SEQ ID NO: 3134489 - RNA, 16 nt, Human
acaacuauuuuuccaa

SEQ ID NO: 3134490 - RNA, 14 nt, Human
agacacaacuauuu

SEQ ID NO: 3134491 - RNA, 19 nt, Human
agcuuccuucugugaaagu

SEQ ID NO: 3134492 - RNA, 15 nt, Human
agguuaauuccaauu

SEQ ID NO: 3134493 - RNA, 22 nt, Human
agguuaauuccaauuauaugag

SEQ ID NO: 3134494 - RNA, 22 nt, Human
auauaaguauucuaaauuuuau

SEQ ID NO: 3134495 - RNA, 15 nt, Human
auauccuuucuaaca

SEQ ID NO: 3134496 - RNA, 16 nt, Human
auauccuuucuaacaa

SEQ ID NO: 3134497 - RNA, 17 nt, Human
auguaauaacugugaag

SEQ ID NO: 3134498 - RNA, 13 nt, Human
auccuuucuaaca

SEQ ID NO: 3134499 - RNA, 14 nt, Human
augacucagaauau

SEQ ID NO: 3134500 - RNA, 20 nt, Human
augaaacacucaguuguuca

SEQ ID NO: 3134501 - RNA, 18 nt, Human
cugugaaguuuacauugu

SEQ ID NO: 3134502 - RNA, 23 nt, Human
cugugaaguuuacauuguaaaua

SEQ ID NO: 3134503 - RNA, 16 nt, Human
gaacaagaugguucua

SEQ ID NO: 3134504 - RNA, 19 nt, Human
gaaaucaaagagagaaaau

SEQ ID NO: 3134505 - RNA, 23 nt, Human
ggaucuucaucugacuaugacau

SEQ ID NO: 3134506 - RNA, 20 nt, Human
aaaaagccugcaauuucaua

SEQ ID NO: 3134507 - RNA, 23 nt, Human
aaaaagauuuucagaaaauauua

SEQ ID NO: 3134508 - RNA, 15 nt, Human
aaaauauauuuaaug

SEQ ID NO: 3134509 - RNA, 16 nt, Human
aaaauauauuuaauga

SEQ ID NO: 3134510 - RNA, 21 nt, Human
aaacuucccuuucugcuugug

SEQ ID NO: 3134511 - RNA, 15 nt, Human
aaauauauuuaauga

SEQ ID NO: 3134512 - RNA, 14 nt, Human
aaauauauuuaaug

SEQ ID NO: 3134513 - RNA, 20 nt, Human
aaauauuguguugugaaugu

SEQ ID NO: 3134514 - RNA, 15 nt, Human
guaauagagcaaaau

SEQ ID NO: 3134515 - RNA, 20 nt, Human
gguucuagcauggcauauuu

SEQ ID NO: 3134516 - RNA, 23 nt, Human
cauaugcuguauauccuuucuaa

SEQ ID NO: 3134517 - RNA, 15 nt, Human
cauauuaauauauuu

SEQ ID NO: 3134518 - RNA, 14 nt, Human
cauauuaauauauu

SEQ ID NO: 3134519 - RNA, 19 nt, Human
cauauuaauauauuuccau

SEQ ID NO: 3134520 - RNA, 12 nt, Human
cagaauauguuu

SEQ ID NO: 3134521 - RNA, 13 nt, Human
cagaauauugcuu

SEQ ID NO: 3134522 - RNA, 20 nt, Human
cagaauauguuucaaacuuu

SEQ ID NO: 3134523 - RNA, 18 nt, Human
cagaauauguuucaaacu

SEQ ID NO: 3134524 - RNA, 17 nt, Human
cagaauauguuucaaac

SEQ ID NO: 3134525 - RNA, 15 nt, Human
cagaauauguuucaa

SEQ ID NO: 3134526 - RNA, 14 nt, Human
cagaauauguuuca

SEQ ID NO: 3134527 - RNA, 13 nt, Human
cagaauauguuuc

SEQ ID NO: 3134528 - RNA, 18 nt, Human
caaaaaaauauauuuaau

SEQ ID NO: 3134529 - RNA, 20 nt, Human
caacuauuuuuccaaaauaa

SEQ ID NO: 3134530 - RNA, 18 nt, Human
auuaaauuuugaguucua

SEQ ID NO: 3134531 - RNA, 22 nt, Human
auucaagaaaacaacuucaaua

SEQ ID NO: 3134532 - RNA, 22 nt, Human
auuuaaugauaaguaaaugcua

SEQ ID NO: 3134533 - RNA, 19 nt, Human
auuuauacaggucauauua

SEQ ID NO: 3134534 - RNA, 23 nt, Human
cgccacuguuuugaaucucauaa

SEQ ID NO: 3134535 - RNA, 13 nt, Human
cugaaacuucccu

SEQ ID NO: 3134536 - RNA, 19 nt, Human
guauucuagcuaauguaau

SEQ ID NO: 3134537 - RNA, 24 nt, Human
guauucuaaauuuuauaucuugua

SEQ ID NO: 3134538 - RNA, 21 nt, Human
guauucuaaauuuuauaucuu

SEQ ID NO: 3134539 - RNA, 23 nt, Human
aacuauucaggagaguagaacag

SEQ ID NO: 3134540 - RNA, 14 nt, Human
gugaaguuuacauu

SEQ ID NO: 3134541 - RNA, 17 nt, Human
aacugugaaguuuacau

SEQ ID NO: 3134542 - RNA, 19 nt, Human
aacugugaaguuuacauug

SEQ ID NO: 3134543 - RNA, 14 nt, Human
aagaaaacaacuuc

SEQ ID NO: 3134544 - RNA, 12 nt, Human
aaguaaaugcua

SEQ ID NO: 3134545 - RNA, 19 nt, Human
aaguauguguaaaauguga

SEQ ID NO: 3134546 - RNA, 18 nt, Human
aaguauguguaaaaugug

SEQ ID NO: 3134547 - RNA, 11 nt, Human
uaaaaugugaa

SEQ ID NO: 3134548 - RNA, 13 nt, Human
uaaaaugugaagu

SEQ ID NO: 3134549 - RNA, 21 nt, Human
uaaaaauauuguguugugaau

SEQ ID NO: 3134550 - RNA, 22 nt, Human
uaaaaauauuguguugugaaug

SEQ ID NO: 3134551 - RNA, 14 nt, Human
uaaaaauauugugu

SEQ ID NO: 3134552 - RNA, 19 nt, Human
uaaaaagccugcaauuuca

SEQ ID NO: 3134553 - RNA, 22 nt, Human
uaaaaagccugcaauuucauau

SEQ ID NO: 3134554 - RNA, 15 nt, Human
guguaaaaugugaag

SEQ ID NO: 3134555 - RNA, 18 nt, Human
guuauugauaaguucaua

SEQ ID NO: 3134556 - RNA, 21 nt, Human
guuauugauaaguucauacau

SEQ ID NO: 3134557 - RNA, 22 nt, Human
guuauugauaaguucauacauu

SEQ ID NO: 3134558 - RNA, 19 nt, Human
guuaauuccaauuauauga

SEQ ID NO: 3134559 - RNA, 22 nt, Human
guucuagcauggcauauuuuuc

SEQ ID NO: 3134560 - RNA, 19 nt, Human
guucuagcauggcauauuu

SEQ ID NO: 3134561 - RNA, 20 nt, Human
acagauuuccauccuaguca

SEQ ID NO: 3134562 - RNA, 19 nt, Human
uaugaaauuauauaaguau

SEQ ID NO: 3134563 - RNA, 19 nt, Human
uauccaaaccaaauaaaaa

SEQ ID NO: 3134564 - RNA, 17 nt, Human
uauguguaaaaugugaa

SEQ ID NO: 3134565 - RNA, 18 nt, Human
uaggcaaccuuuauuuuu

SEQ ID NO: 3134566 - RNA, 12 nt, Human
uagcuaauguaa

SEQ ID NO: 3134567 - RNA, 19 nt, Human
uagcuaauguaauaacugu

SEQ ID NO: 3134568 - RNA, 22 nt, Human
uagcauggcauauuuuucacau

SEQ ID NO: 3134569 - RNA, 21 nt, Human
uagcauggcauauuuuucaca

SEQ ID NO: 3134570 - RNA, 22 nt, Human
uagagcaaaauugauguguuua

SEQ ID NO: 3134571 - RNA, 14 nt, Human
uagagcaaaauuga

SEQ ID NO: 3134572 - RNA, 21 nt, Human
uagagcaaaauugauguguuu

SEQ ID NO: 3134573 - RNA, 20 nt, Human
aauuauuuuguucauacaua

SEQ ID NO: 3134574 - RNA, 19 nt, Human
aauuauuuuguucauacau

SEQ ID NO: 3134575 - RNA, 18 nt, Human
aauuauuuuguucauaca

SEQ ID NO: 3134576 - RNA, 16 nt, Human
aauuauuuuguucaua

SEQ ID NO: 3134577 - RNA, 22 nt, Human
aauuauuuuguucauacauauu

SEQ ID NO: 3134578 - RNA, 21 nt, Human
aauuauuuuguucauacauau

SEQ ID NO: 3134579 - RNA, 19 nt, Human
uacauuguacgaagaguau

SEQ ID NO: 3134580 - RNA, 13 nt, Human
aauugauguguuu

SEQ ID NO: 3134581 - RNA, 14 nt, Human
aauugauguguuua

SEQ ID NO: 3134582 - RNA, 12 nt, Human
aaugcuguguua

SEQ ID NO: 3134583 - RNA, 13 nt, Human
aaugcuguguuaa

SEQ ID NO: 3134584 - RNA, 23 nt, Human
uacaggucauauuaauauauuuc

SEQ ID NO: 3134585 - RNA, 13 nt, Human
aauguuaagcaga

SEQ ID NO: 3134586 - RNA, 17 nt, Human
uacauuguaaauaguau

SEQ ID NO: 3134587 - RNA, 12 nt, Human
uaauagagcaaa

SEQ ID NO: 3134588 - RNA, 21 nt, Human
uaauagagcaaaauugaugug

SEQ ID NO: 3134589 - RNA, 18 nt, Human
uaauguaauaacugugaa

SEQ ID NO: 3134590 - RNA, 19 nt, Human
aaugaaacacucaguuguu

SEQ ID NO: 3134591 - RNA, 16 nt, Human
uaaguauucuaaauuu

SEQ ID NO: 3134592 - RNA, 14 nt, Human
uaaguucauacauu

SEQ ID NO: 3134593 - RNA, 13 nt, Human
uaaguaaaugcua

SEQ ID NO: 3134594 - RNA, 23 nt, Human
aauaguauuugagaguucuaaau

SEQ ID NO: 3134595 - RNA, 20 nt, Human
aauaguauuugagaguucua

SEQ ID NO: 3134596 - RNA, 22 nt, Human
aauaguauuugagaguucuaaa

SEQ ID NO: 3134597 - RNA, 17 nt, Human
aauauuguguugugaau

SEQ ID NO: 3134598 - RNA, 18 nt, Human
accuuuggagcaaagcug

SEQ ID NO: 3134599 - RNA, 17 nt, Human
ucaagaaaacaacuuca

SEQ ID NO: 3134600 - RNA, 18 nt, Human
ucaauauccaaaccaaau

SEQ ID NO: 3134601 - RNA, 19 nt, Human
acauucuuccaaaaagauu

SEQ ID NO: 3134602 - RNA, 19 nt, Human
acauuguacgaagaguauu

SEQ ID NO: 3134603 - RNA, 14 nt, Human
ucacauaucuagua

SEQ ID NO: 3134604 - RNA, 22 nt, Human
ucauaaaaagccugcaauuuca

SEQ ID NO: 3134605 - RNA, 14 nt, Human
accccugcuucuga

SEQ ID NO: 3134606 - RNA, 15 nt, Human
acuuuggaacaagau

SEQ ID NO: 3134607 - RNA, 23 nt, Human
acuuaacuauucaggagaguaga

SEQ ID NO: 3134608 - RNA, 23 nt, Human
ucuagcauggcauauuuuucaca

SEQ ID NO: 3134609 - RNA, 22 nt, Human
ucuagcauggcauauuuuucac

SEQ ID NO: 3134610 - RNA, 21 nt, Human
ucuagcauggcauauuuuuca

SEQ ID NO: 3134611 - RNA, 16 nt, Human
ucugugaaaguacauu

SEQ ID NO: 3134612 - RNA, 14 nt, Human
ucugcuuguguuaa

SEQ ID NO: 3134613 - RNA, 21 nt, Human
agaauauguuucaaacuuugg

SEQ ID NO: 3134614 - RNA, 19 nt, Human
agaauauguuucaaacuuu

SEQ ID NO: 3134615 - RNA, 18 nt, Human
agaauauguuucaaacuu

SEQ ID NO: 3134616 - RNA, 17 nt, Human
agaauauguuucaaacu

SEQ ID NO: 3134617 - RNA, 13 nt, Human
agaauauguuuca

SEQ ID NO: 3134618 - RNA, 14 nt, Human
ugacuaugacauaa

SEQ ID NO: 3134619 - RNA, 15 nt, Human
uuuuccaaaauaauu

SEQ ID NO: 3134620 - RNA, 13 nt, Human
auguuaagcagau

SEQ ID NO: 3134621 - RNA, 17 nt, Human
auuauauaaguauucua

SEQ ID NO: 3134622 - RNA, 14 nt, Human
auuauauaaguauu

SEQ ID NO: 3134623 - RNA, 20 nt, Human
auuauauaaguauucuaaau

SEQ ID NO: 3134624 - RNA, 14 nt, Human
uuuugaguucuaca

SEQ ID NO: 3134625 - RNA, 14 nt, Human
uuuuguucauacau

SEQ ID NO: 3134626 - RNA, 17 nt, Human
uuuuguucauacauauu

SEQ ID NO: 3134627 - RNA, 14 nt, Human
auuuucagaaaaua

SEQ ID NO: 3134628 - RNA, 17 nt, Human
auuuucagaaaauauua

SEQ ID NO: 3134629 - RNA, 22 nt, Human
auaugagcuuccuucugugaaa

SEQ ID NO: 3134630 - RNA, 21 nt, Human
auaugagcuuccuucugugaa

SEQ ID NO: 3134631 - RNA, 16 nt, Human
auauauuuaaugauaa

SEQ ID NO: 3134632 - RNA, 15 nt, Human
auauauuuaaugaua

SEQ ID NO: 3134633 - RNA, 12 nt, Human
auauuuaaugau

SEQ ID NO: 3134634 - RNA, 13 nt, Human
auauuuaaugaua

SEQ ID NO: 3134635 - RNA, 23 nt, Human
auauuuaaugauaaguaaaugcu

SEQ ID NO: 3134636 - RNA, 17 nt, Human
uucccagugaauucuug

SEQ ID NO: 3134637 - RNA, 16 nt, Human
auauguuucaaacuuu

SEQ ID NO: 3134638 - RNA, 14 nt, Human
auauguuucaaacu

SEQ ID NO: 3134639 - RNA, 13 nt, Human
auauguuucaaac

SEQ ID NO: 3134640 - RNA, 23 nt, Human
auauuuuuguagcacugacagau

SEQ ID NO: 3134641 - RNA, 16 nt, Human
auauuuuuguagcacu

SEQ ID NO: 3134642 - RNA, 15 nt, Human
auauuuuuguagcac

SEQ ID NO: 3134643 - RNA, 18 nt, Human
auauuuuucacauaucua

SEQ ID NO: 3134644 - RNA, 23 nt, Human
aucagugugucuaaauuugaaug

SEQ ID NO: 3134645 - RNA, 17 nt, Human
uugaaggaaaaugauac

SEQ ID NO: 3134646 - RNA, 14 nt, Human
uugagaguucuaaa

SEQ ID NO: 3134647 - RNA, 16 nt, Human
uugauaaguucauaca

SEQ ID NO: 3134648 - RNA, 17 nt, Human
uugauaaguucauacau

SEQ ID NO: 3134649 - RNA, 19 nt, Human
augcuguauauccuuucua

SEQ ID NO: 3134650 - RNA, 22 nt, Human
uuucagaaaauauuauguguuu

SEQ ID NO: 3134651 - RNA, 19 nt, Human
augacauaaaaacaacuuu

SEQ ID NO: 3134652 - RNA, 23 nt, Human
aguuauugauaaguucauacauu

SEQ ID NO: 3134653 - RNA, 22 nt, Human
aguuauugauaaguucauacau

SEQ ID NO: 3134654 - RNA, 21 nt, Human
aguuauugauaaguucauaca

SEQ ID NO: 3134655 - RNA, 19 nt, Human
aguuauugauaaguucaua

SEQ ID NO: 3134656 - RNA, 17 nt, Human
aguuauugauaaguuca

SEQ ID NO: 3134657 - RNA, 15 nt, Human
aguucuaaauuuugu

SEQ ID NO: 3134658 - RNA, 22 nt, Human
uuaucaaagggugaaaauuauu

SEQ ID NO: 3134659 - RNA, 21 nt, Human
auacaggucauauuaauauau

SEQ ID NO: 3134660 - RNA, 15 nt, Human
auacaggucauauua

SEQ ID NO: 3134661 - RNA, 22 nt, Human
auacauuguacgaagaguauuu

SEQ ID NO: 3134662 - RNA, 21 nt, Human
auacauuguacgaagaguauu

SEQ ID NO: 3134663 - RNA, 14 nt, Human
auacauuguacgaa

SEQ ID NO: 3134664 - RNA, 19 nt, Human
auacauauuuuuguagcac

SEQ ID NO: 3134665 - RNA, 14 nt, Human
auaauuuuaagaaa

SEQ ID NO: 3134666 - RNA, 15 nt, Human
auaauuuuaagaaau

SEQ ID NO: 3134667 - RNA, 21 nt, Human
auaauuuuaagaaaucaaaga

SEQ ID NO: 3134668 - RNA, 13 nt, Human
uuauauaaguauu

SEQ ID NO: 3134669 - RNA, 16 nt, Human
uuauauaaguauucua

SEQ ID NO: 3134670 - RNA, 14 nt, Human
uuauauaaguauuc

SEQ ID NO: 3134671 - RNA, 23 nt, Human
uuauacccagaaaguuauugaua

SEQ ID NO: 3134672 - RNA, 19 nt, Human
uuauacccagaaaguuauu

SEQ ID NO: 3134673 - RNA, 18 nt, Human
uuauacccagaaaguuau

SEQ ID NO: 3134674 - RNA, 23 nt, Human
uuauagaguguacuuaacuauuc

SEQ ID NO: 3134675 - RNA, 20 nt, Human
auaaucagugugucuaaauu

SEQ ID NO: 3134676 - RNA, 21 nt, Human
auaaguucauacauuguacga

SEQ ID NO: 3134677 - RNA, 15 nt, Human
auaaguucauacauu

SEQ ID NO: 3134678 - RNA, 14 nt, Human
auaaguucauacau

SEQ ID NO: 3134679 - RNA, 13 nt, Human
auaaguucauaca

SEQ ID NO: 3134680 - RNA, 11 nt, Human
auaaguucaua

SEQ ID NO: 3134681 - RNA, 16 nt, Human
auaaaccucaaaaugu

SEQ ID NO: 3134682 - RNA, 12 nt, Human
auaacugugaag

SEQ ID NO: 3134683 - RNA, 15 nt, Human
uguacuuaacuauuc

SEQ ID NO: 3134684 - RNA, 15 nt, Human
agggugaaaauuauu

SEQ ID NO: 3134685 - RNA, 14 nt, Human
aguauguguaaaau

SEQ ID NO: 3134686 - RNA, 18 nt, Human
ugucuaaauuugaauguu

SEQ ID NO: 3134687 - RNA, 15 nt, Human
ugucuaagauaguaa

SEQ ID NO: 3134688 - RNA, 14 nt, Human
ugucuaagauagua

SEQ ID NO: 3134689 - RNA, 16 nt, Human
ugugauguauucuagc

SEQ ID NO: 3134690 - RNA, 19 nt, Human
caaagcugaugacaacuuc

SEQ ID NO: 3134691 - RNA, 22 nt, Human
caaaauugauguguuuauuuau

SEQ ID NO: 3134692 - RNA, 15 nt, Human
caaaauugauguguu

SEQ ID NO: 3134693 - RNA, 16 nt, Human
caaaauugauguguuu

SEQ ID NO: 3134694 - RNA, 15 nt, Human
caagaaaacaacuuc

SEQ ID NO: 3134695 - RNA, 20 nt, Human
caggucauauuaauauauuu

SEQ ID NO: 3134696 - RNA, 21 nt, Human
caggucauauuaauauauuuc

SEQ ID NO: 3134697 - RNA, 12 nt, Human
cagugaauucuu

SEQ ID NO: 3134698 - RNA, 12 nt, Human
caggagaguaga

SEQ ID NO: 3134699 - RNA, 16 nt, Human
cagauggaaugcugug

SEQ ID NO: 3134700 - RNA, 17 nt, Human
cagauggaaugcugugu

SEQ ID NO: 3134701 - RNA, 19 nt, Human
cagauggaaugcuguguua

SEQ ID NO: 3134702 - RNA, 21 nt, Human
cagauggaaugcuguguuaaa

SEQ ID NO: 3134703 - RNA, 14 nt, Human
cagauaaucagugu

SEQ ID NO: 3134704 - RNA, 17 nt, Human
cagaaggaucuucaucu

SEQ ID NO: 3134705 - RNA, 19 nt, Human
cagaaaauauuauguguuu

SEQ ID NO: 3134706 - RNA, 22 nt, Human
cacugacagauuuccauccuag

SEQ ID NO: 3134707 - RNA, 17 nt, Human
cacugacagauuuccau

SEQ ID NO: 3134708 - RNA, 13 nt, Human
cacugacagauuu

SEQ ID NO: 3134709 - RNA, 12 nt, Human
gcuuguguuaag

SEQ ID NO: 3134710 - RNA, 18 nt, Human
gcuguguuaaauaaaccu

SEQ ID NO: 3134711 - RNA, 22 nt, Human
gcagauggaaugcuguguuaaa

SEQ ID NO: 3134712 - RNA, 13 nt, Human
gagcaaagcugau

SEQ ID NO: 3134713 - RNA, 16 nt, Human
gaucuucaucugacua

SEQ ID NO: 3134714 - RNA, 23 nt, Human
gaucuucaucugacuaugacaua

SEQ ID NO: 3134715 - RNA, 21 nt, Human
gauaaucagugugucuaaauu

SEQ ID NO: 3134716 - RNA, 18 nt, Human
gaguauuuuugacagaau

SEQ ID NO: 3134717 - RNA, 17 nt, Human
gaguauuuuugacagaa

SEQ ID NO: 3134718 - RNA, 16 nt, Human
gaguauuuuugacaga

SEQ ID NO: 3134719 - RNA, 14 nt, Human
gaguauuuuugaca

SEQ ID NO: 3134720 - RNA, 12 nt, Human
cucaaauuugga

SEQ ID NO: 3134721 - RNA, 17 nt, Human
gaaaauauuauguguuu

SEQ ID NO: 3134722 - RNA, 19 nt, Human
cuuguguuaaguaugugua

SEQ ID NO: 3134723 - RNA, 16 nt, Human
gaaguuuacauuguaa

SEQ ID NO: 3134724 - RNA, 17 nt, Human
gaaguuuacauuguaaa

SEQ ID NO: 3134725 - RNA, 14 nt, Human
gaaggaaaaugaua

SEQ ID NO: 3134726 - RNA, 18 nt, Human
cugugaaaguacauuugg

SEQ ID NO: 3134727 - RNA, 15 nt, Human
ccuucugugaaagua

SEQ ID NO: 3134728 - RNA, 21 nt, Human
cgaagaguauuuuugacagaa

SEQ ID NO: 3134729 - RNA, 19 nt, Human
ccugcaauuucauaugcug

SEQ ID NO: 3134730 - RNA, 17 nt, Human
caucugacuaugacaua

SEQ ID NO: 3134731 - RNA, 21 nt, Human
cauaucuaguaugaaauuaua

SEQ ID NO: 3134732 - RNA, 15 nt, Human
cauaucuaguaugaa

SEQ ID NO: 3134733 - RNA, 18 nt, Human
cauaucuaguaugaaauu

SEQ ID NO: 3134734 - RNA, 17 nt, Human
cauaucuaguaugaaau

SEQ ID NO: 3134735 - RNA, 13 nt, Human
cauggcauauuuu

SEQ ID NO: 3134736 - RNA, 19 nt, Human
cauggcauauuuuucacau

SEQ ID NO: 3134737 - RNA, 15 nt, Human
cauggcauauuuuuc

SEQ ID NO: 3134738 - RNA, 23 nt, Human
cauggcauauuuuucacauaucu

SEQ ID NO: 3134739 - RNA, 21 nt, Human
cauuaaaaaaucaguuguaca

SEQ ID NO: 3134740 - RNA, 19 nt, Human
cauuguacgaagaguauuu

SEQ ID NO: 3134741 - RNA, 11 nt, Human
uuuugacagaa

SEQ ID NO: 3134742 - RNA, 22 nt, Human
uuuugacagaauauguuucaaa

SEQ ID NO: 3134743 - RNA, 23 nt, Human
uuuugacagaauauguuucaaac

SEQ ID NO: 3134744 - RNA, 12 nt, Human
uuugaguucuac

SEQ ID NO: 3134745 - RNA, 23 nt, Human
uuuucagaaaauauuauguguuu

SEQ ID NO: 3134746 - RNA, 16 nt, Human
uuuucacauaucuagu

SEQ ID NO: 3134747 - RNA, 22 nt, Human
uuuucagaaaauauuauguguu

SEQ ID NO: 3134748 - RNA, 22 nt, Human
uuauacaggucauauuaauaua

SEQ ID NO: 3134749 - RNA, 14 nt, Human
uuauacaggucaua

SEQ ID NO: 3134750 - RNA, 15 nt, Human
uuauaucuuguagcu

SEQ ID NO: 3134751 - RNA, 22 nt, Human
uuauaucuuguagcuuuaucaa

SEQ ID NO: 3134752 - RNA, 16 nt, Human
uucaauaauaaauauu

SEQ ID NO: 3134753 - RNA, 16 nt, Human
uuauuuuguucauaca

SEQ ID NO: 3134754 - RNA, 14 nt, Human
uuauuuuguucaua

SEQ ID NO: 3134755 - RNA, 20 nt, Human
uucaucugacuaugacauaa

SEQ ID NO: 3134756 - RNA, 21 nt, Human
uuccaaaaagauuuucagaaa

SEQ ID NO: 3134757 - RNA, 22 nt, Human
uucuacauaaguaauucaagaa

SEQ ID NO: 3134758 - RNA, 17 nt, Human
uucuuccaaaaagauuu

SEQ ID NO: 3134759 - RNA, 18 nt, Human
uucugcuuguguuaagua

SEQ ID NO: 3134760 - RNA, 21 nt, Human
uuguacgaagaguauuuuuga

SEQ ID NO: 3134761 - RNA, 23 nt, Human
uuguacgaagaguauuuuugaca

SEQ ID NO: 3134762 - RNA, 17 nt, Human
uuguaaauaguauuuga

SEQ ID NO: 3134763 - RNA, 13 nt, Human
uuguguugugaau

SEQ ID NO: 3134764 - RNA, 20 nt, Human
uuuacauuguaaauaguauu

SEQ ID NO: 3134765 - RNA, 17 nt, Human
uggagacacaacuauuu

SEQ ID NO: 3134766 - RNA, 12 nt, Human
ugcuuguguuaa

SEQ ID NO: 3134767 - RNA, 15 nt, Human
ugcuuguguuaagua

SEQ ID NO: 3134768 - RNA, 14 nt, Human
uguaauaacuguga

SEQ ID NO: 3134769 - RNA, 22 nt, Human
uguaauaacugugaaguuuaca

SEQ ID NO: 3134770 - RNA, 15 nt, Human
uguagcuuuaucaaa

SEQ ID NO: 3134771 - RNA, 14 nt, Human
uguagcuuuaucaa

SEQ ID NO: 3134772 - RNA, 13 nt, Human
ugauguauucuag

SEQ ID NO: 3134773 - RNA, 21 nt, Human
ugauguauucuagcuaaugua

SEQ ID NO: 3134774 - RNA, 14 nt, Human
ugauguauucuagc

SEQ ID NO: 3134775 - RNA, 20 nt, Human
ugauguauucuagcuaaugu

SEQ ID NO: 3134776 - RNA, 19 nt, Human
ucuugaaggaaaaugauac

SEQ ID NO: 3134777 - RNA, 14 nt, Human
ugcaauuucauaug

SEQ ID NO: 3134778 - RNA, 20 nt, Human
ugcaauuucauaugcuguau

SEQ ID NO: 3134779 - RNA, 19 nt, Human
ucuucaucugacuaugaca

SEQ ID NO: 3134780 - RNA, 18 nt, Human
ucaucugacuaugacaua

SEQ ID NO: 3134781 - RNA, 17 nt, Human
ucaucugacuaugacau

SEQ ID NO: 3134782 - RNA, 15 nt, Human
uccaaaauaauuuua

SEQ ID NO: 3134783 - RNA, 19 nt, Human
uccaaaauaauuuuaagaa

SEQ ID NO: 3134784 - RNA, 12 nt, Human
uauuaauauauu

SEQ ID NO: 3134785 - RNA, 16 nt, Human
uauguuucaaacuuug

SEQ ID NO: 3134786 - RNA, 15 nt, Human
uauguuucaaacuuu

SEQ ID NO: 3134787 - RNA, 13 nt, Human
uauguuucaaacu

SEQ ID NO: 3134788 - RNA, 14 nt, Human
uauuguguugugaa

SEQ ID NO: 3134789 - RNA, 19 nt, Human
uauucuagcuaauguaaua

SEQ ID NO: 3134790 - RNA, 20 nt, Human
uauucuaaauuuuauaucuu

SEQ ID NO: 3134791 - RNA, 19 nt, Human
uauucuaaauuuuauaucu

SEQ ID NO: 3134792 - RNA, 15 nt, Human
uauucuaaauuuuau

SEQ ID NO: 3134793 - RNA, 14 nt, Human
uauucuaaauuuua

SEQ ID NO: 3134794 - RNA, 16 nt, Human
aguaugaaauuauaua

SEQ ID NO: 3134795 - RNA, 14 nt, Human
aguaugaaauuaua

SEQ ID NO: 3134796 - RNA, 11 nt, Human
aguucauacau

SEQ ID NO: 3134797 - RNA, 10 nt, Human
aguucauaca

SEQ ID NO: 3134798 - RNA, 15 nt, Human
aguucauacauugua

SEQ ID NO: 3134799 - RNA, 20 nt, Human
auaguauuugagaguucuaa

SEQ ID NO: 3134800 - RNA, 21 nt, Human
auaguauuugagaguucuaaa

SEQ ID NO: 3134801 - RNA, 23 nt, Human
auaguauuugagaguucuaaauu

SEQ ID NO: 3134802 - RNA, 20 nt, Human
auaauuaaauuuugaguucu

SEQ ID NO: 3134803 - RNA, 14 nt, Human
auaaaaauauugug

SEQ ID NO: 3134804 - RNA, 13 nt, Human
auguuucaaacuu

SEQ ID NO: 3134805 - RNA, 12 nt, Human
auguuucaaacu

SEQ ID NO: 3134806 - RNA, 17 nt, Human
auguuucaaacuuugga

SEQ ID NO: 3134807 - RNA, 14 nt, Human
auguuucaaacuuu

SEQ ID NO: 3134808 - RNA, 19 nt, Human
auguauucuagcuaaugua

SEQ ID NO: 3134809 - RNA, 20 nt, Human
auguauucuagcuaauguaa

SEQ ID NO: 3134810 - RNA, 17 nt, Human
augcauagguuuagcag

SEQ ID NO: 3134811 - RNA, 21 nt, Human
augcauagguuuagcaguaua

SEQ ID NO: 3134812 - RNA, 14 nt, Human
agcacugacagauu

SEQ ID NO: 3134813 - RNA, 13 nt, Human
agcacugacagau

SEQ ID NO: 3134814 - RNA, 18 nt, Human
agcacugacagauuucca

SEQ ID NO: 3134815 - RNA, 23 nt, Human
agaaaguuauugauaaguucaua

SEQ ID NO: 3134816 - RNA, 11 nt, Human
agaaaguuauu

SEQ ID NO: 3134817 - RNA, 22 nt, Human
acuuuauacccagaaaguuauu

SEQ ID NO: 3134818 - RNA, 20 nt, Human
acuuuauacccagaaaguua

SEQ ID NO: 3134819 - RNA, 22 nt, Human
acugugaaguuuacauuguaaa

SEQ ID NO: 3134820 - RNA, 21 nt, Human
acucauaaaaagccugcaauu

SEQ ID NO: 3134821 - RNA, 22 nt, Human
acuauucaggagaguagaacag

SEQ ID NO: 3134822 - RNA, 17 nt, Human
aagcagauggaaugcug

SEQ ID NO: 3134823 - RNA, 19 nt, Human
aagcagauggaaugcugug

SEQ ID NO: 3134824 - RNA, 20 nt, Human
aagcagauggaaugcugugu

SEQ ID NO: 3134825 - RNA, 21 nt, Human
aaugcuagguuaauuccaauu

SEQ ID NO: 3134826 - RNA, 18 nt, Human
aaugcuagguuaauucca

SEQ ID NO: 3134827 - RNA, 19 nt, Human
aaugcuagguuaauuccaa

SEQ ID NO: 3134828 - RNA, 15 nt, Human
aaucaccaaaggcuc

SEQ ID NO: 3134829 - RNA, 17 nt, Human
aauauguuucaaacuuu

SEQ ID NO: 3134830 - RNA, 16 nt, Human
aauauguuucaaacuu

SEQ ID NO: 3134831 - RNA, 15 nt, Human
aauauguuucaaacu

SEQ ID NO: 3134832 - RNA, 13 nt, Human
aauauguuucaaa

SEQ ID NO: 3134833 - RNA, 23 nt, Human
aacuuuauacccagaaaguuauu

SEQ ID NO: 3134834 - RNA, 22 nt, Human
aacuuuauacccagaaaguuau

SEQ ID NO: 3134835 - RNA, 24 nt, Human
aaacacucaguuguucaauaauaa

SEQ ID NO: 3134836 - RNA, 21 nt, Human
aaaauugauguguuuauuuau

SEQ ID NO: 3134837 - RNA, 12 nt, Human
aaaauugaugug

SEQ ID NO: 3134838 - RNA, 14 nt, Human
aaaauugauguguu

SEQ ID NO: 3134839 - RNA, 17 nt, Human
aaaaucaguuguacagu

SEQ ID NO: 3134840 - RNA, 21 nt, Human
aaaagauuuucagaaaauauu

SEQ ID NO: 3134841 - RNA, 14 nt, Human
guacuuaacuauuc

SEQ ID NO: 3134842 - RNA, 15 nt, Human
guacauuuggagaca

SEQ ID NO: 3134843 - RNA, 14 nt, Human
aaauauuauguguu

SEQ ID NO: 3134844 - RNA, 15 nt, Human
aaauauuauguguuu

SEQ ID NO: 3134845 - RNA, 19 nt, Human
guaauagagcaaaauugau

SEQ ID NO: 3134846 - RNA, 15 nt, Human
guaauaacugugaag

SEQ ID NO: 3134847 - RNA, 16 nt, Human
guaauaacugugaagu

SEQ ID NO: 3134848 - RNA, 22 nt, Human
guaauaacugugaaguuuacau

SEQ ID NO: 3134849 - RNA, 20 nt, Human
aaaguuauugauaaguucau

SEQ ID NO: 3134850 - RNA, 14 nt, Human
aaauaaaaauauug

SEQ ID NO: 3134851 - RNA, 22 nt, Human
aaagaccuuuggagcaaagcug

SEQ ID NO: 3134852 - RNA, 17 nt, Human
aaagggugaaaauuauu

SEQ ID NO: 3134853 - RNA, 22 nt, Human
ggugaaaauuauuuuguucaua

SEQ ID NO: 3134854 - RNA, 14 nt, Human
ggugaaaauuauuu

SEQ ID NO: 3134855 - RNA, 13 nt, Human
ggugaaaauuauu

SEQ ID NO: 3134856 - RNA, 18 nt, Human
gcauggcauauuuuucac

SEQ ID NO: 3134857 - RNA, 22 nt, Human
gaaaauuauuuuguucauacau

SEQ ID NO: 3134858 - RNA, 21 nt, Human
gaaaauuauuuuguucauaca

SEQ ID NO: 3134859 - RNA, 20 nt, Human
gaaaauuauuuuguucauac

SEQ ID NO: 3134860 - RNA, 23 nt, Human
gaaaauuauuuuguucauacaua

SEQ ID NO: 3134861 - RNA, 12 nt, Human
cucagaauauug

SEQ ID NO: 3134862 - RNA, 21 nt, Human
cauuuggagacacaacuauuu

SEQ ID NO: 3134863 - RNA, 19 nt, Human
cauuguaaauaguauuuga

SEQ ID NO: 3134864 - RNA, 20 nt, Human
cauaauuuauacaggucaua

SEQ ID NO: 3134865 - RNA, 13 nt, Human
cauaauuuauaca

SEQ ID NO: 3134866 - RNA, 11 nt, Human
cagaaaguuau

SEQ ID NO: 3134867 - RNA, 16 nt, Human
cagaaaguuauugaua

SEQ ID NO: 3134868 - RNA, 22 nt, Human
cacuguuuugaaucucauaauu

SEQ ID NO: 3134869 - RNA, 16 nt, Human
auuuuauaucuuguag

SEQ ID NO: 3134870 - RNA, 14 nt, Human
auuuuauaucuugu

SEQ ID NO: 3134871 - RNA, 12 nt, Human
auuuuauaucuu

SEQ ID NO: 3134872 - RNA, 15 nt, Human
caaaccaaauaaaaa

SEQ ID NO: 3134873 - RNA, 14 nt, Human
caaaccaaauaaaa

SEQ ID NO: 3134874 - RNA, 18 nt, Human
caaagggugaaaauuauu

SEQ ID NO: 3134875 - RNA, 16 nt, Human
caagaugguucuagca

SEQ ID NO: 3134876 - RNA, 13 nt, Human
caagaugguucua

SEQ ID NO: 3134877 - RNA, 16 nt, Human
auuucauaugcuguau

SEQ ID NO: 3134878 - RNA, 17 nt, Human
auuguguugugaauguu

SEQ ID NO: 3134879 - RNA, 14 nt, Human
auuguguugugaau

SEQ ID NO: 3134880 - RNA, 15 nt, Human
uacauaaguaauuca

SEQ ID NO: 3134881 - RNA, 16 nt, Human
uacauaaguaauucaa

SEQ ID NO: 3134882 - RNA, 17 nt, Human
uacauaaguaauucaag

SEQ ID NO: 3134883 - RNA, 19 nt, Human
uacauaaguaauucaagaa

SEQ ID NO: 3134884 - RNA, 22 nt, Human
aauuaaauuuugaguucuacau

SEQ ID NO: 3134885 - RNA, 23 nt, Human
uacauuguacgaagaguauuuuu

SEQ ID NO: 3134886 - RNA, 22 nt, Human
uacauuguacgaagaguauuuu

SEQ ID NO: 3134887 - RNA, 20 nt, Human
uacauuguacgaagaguauu

SEQ ID NO: 3134888 - RNA, 17 nt, Human
uaauguaauaacuguga

SEQ ID NO: 3134889 - RNA, 17 nt, Human
uaaucagugugucuaaa

SEQ ID NO: 3134890 - RNA, 18 nt, Human
uaaucagugugucuaaau

SEQ ID NO: 3134891 - RNA, 13 nt, Human
acaaaaaaauaua

SEQ ID NO: 3134892 - RNA, 17 nt, Human
acaaaaaaauauauuua

SEQ ID NO: 3134893 - RNA, 20 nt, Human
acaaaaaaauauauuuaaug

SEQ ID NO: 3134894 - RNA, 15 nt, Human
aauucuugaaggaaa

SEQ ID NO: 3134895 - RNA, 16 nt, Human
aauucuugaaggaaaa

SEQ ID NO: 3134896 - RNA, 21 nt, Human
aauucuugaaggaaaaugaua

SEQ ID NO: 3134897 - RNA, 19 nt, Human
uauuuaaugauaaguaaau

SEQ ID NO: 3134898 - RNA, 16 nt, Human
uauucaggagaguaga

SEQ ID NO: 3134899 - RNA, 17 nt, Human
uaucuaguaugaaauua

SEQ ID NO: 3134900 - RNA, 16 nt, Human
uaucuaguaugaaauu

SEQ ID NO: 3134901 - RNA, 14 nt, Human
uaucuaguaugaaa

SEQ ID NO: 3134902 - RNA, 21 nt, Human
uaugagcuuccuucugugaaa

SEQ ID NO: 3134903 - RNA, 18 nt, Human
uaugagcuuccuucugug

SEQ ID NO: 3134904 - RNA, 16 nt, Human
uauauccuuucuaaca

SEQ ID NO: 3134905 - RNA, 16 nt, Human
gugaagugaaugaaac

SEQ ID NO: 3134906 - RNA, 12 nt, Human
aacauaauuaaa

SEQ ID NO: 3134907 - RNA, 15 nt, Human
aaguauucuaaauuu

SEQ ID NO: 3134908 - RNA, 13 nt, Human
aaguauucuaaau

SEQ ID NO: 3134909 - RNA, 14 nt, Human
aaggaaaaugauac

SEQ ID NO: 3134910 - RNA, 12 nt, Human
aaggaaaaugau

SEQ ID NO: 3134911 - RNA, 14 nt, Human
aaggaucuucaucu

SEQ ID NO: 3134912 - RNA, 13 nt, Human
guguuuauuuaua

SEQ ID NO: 3134913 - RNA, 14 nt, Human
uaaauuuuauaucu

SEQ ID NO: 3134914 - RNA, 16 nt, Human
uaaauuuugaguucua

SEQ ID NO: 3134915 - RNA, 20 nt, Human
uaacaaaaaaauauauuuaa

SEQ ID NO: 3134916 - RNA, 23 nt, Human
uaacaaaaaaauauauuuaauga

SEQ ID NO: 3134917 - RNA, 18 nt, Human
uaaauaguauuugagagu

SEQ ID NO: 3134918 - RNA, 22 nt, Human
aauaaaaauauuguguugugaa

SEQ ID NO: 3134919 - RNA, 20 nt, Human
aaguuauugauaaguucaua

SEQ ID NO: 3134920 - RNA, 19 nt, Human
aaguuauugauaaguucau

SEQ ID NO: 3134921 - RNA, 15 nt, Human
aaguucauacauugu

SEQ ID NO: 3134922 - RNA, 13 nt, Human
aaguucauacauu

SEQ ID NO: 3134923 - RNA, 12 nt, Human
aaguucauacau

SEQ ID NO: 3134924 - RNA, 23 nt, Human
aaguuauugauaaguucauacau

SEQ ID NO: 3134925 - RNA, 22 nt, Human
aaguuauugauaaguucauaca

SEQ ID NO: 3134926 - RNA, 18 nt, Human
aaguuuacauuguaaaua

SEQ ID NO: 3134927 - RNA, 19 nt, Human
aaguuuacauuguaaauag

SEQ ID NO: 3134928 - RNA, 18 nt, Human
uaaaccucaaaaugucua

SEQ ID NO: 3134929 - RNA, 19 nt, Human
uaaaccucaaaaugucuaa

SEQ ID NO: 3134930 - RNA, 15 nt, Human
ucccagugaauucuu

SEQ ID NO: 3134931 - RNA, 19 nt, Human
ucauauuaauauauuucca

SEQ ID NO: 3134932 - RNA, 21 nt, Human
agcagauggaaugcuguguua

SEQ ID NO: 3134933 - RNA, 12 nt, Human
agauuuucagaa

SEQ ID NO: 3134934 - RNA, 17 nt, Human
agauuuucagaaaauau

SEQ ID NO: 3134935 - RNA, 19 nt, Human
agauaaucagugugucuaa

SEQ ID NO: 3134936 - RNA, 17 nt, Human
auaauucagaaggaucu

SEQ ID NO: 3134937 - RNA, 21 nt, Human
auaauuuauacaggucauauu

SEQ ID NO: 3134938 - RNA, 19 nt, Human
auaauuuauacaggucaua

SEQ ID NO: 3134939 - RNA, 15 nt, Human
uuaaauuuugaguuc

SEQ ID NO: 3134940 - RNA, 20 nt, Human
uuaaauuuugaguucuacau

SEQ ID NO: 3134941 - RNA, 15 nt, Human
aguuuacauuguaaa

SEQ ID NO: 3134942 - RNA, 17 nt, Human
aguuuacauuguaaaua

SEQ ID NO: 3134943 - RNA, 13 nt, Human
aguuuacauugua

SEQ ID NO: 3134944 - RNA, 23 nt, Human
auacgcaacauaauuaaauuuug

SEQ ID NO: 3134945 - RNA, 15 nt, Human
auagagcaaaauuga

SEQ ID NO: 3134946 - RNA, 17 nt, Human
auagagcaaaauugaug

SEQ ID NO: 3134947 - RNA, 21 nt, Human
auagagcaaaauugauguguu

SEQ ID NO: 3134948 - RNA, 22 nt, Human
auagagcaaaauugauguguuu

SEQ ID NO: 3134949 - RNA, 21 nt, Human
auagaguguacuuaacuauuc

SEQ ID NO: 3134950 - RNA, 14 nt, Human
auagaguguacuua

SEQ ID NO: 3134951 - RNA, 19 nt, Human
auagaguguacuuaacuau

SEQ ID NO: 3134952 - RNA, 13 nt, Human
aguaauagagcaa

SEQ ID NO: 3134953 - RNA, 19 nt, Human
aguacauuuggagacacaa

SEQ ID NO: 3134954 - RNA, 19 nt, Human
aguaauucaagaaaacaac

SEQ ID NO: 3134955 - RNA, 18 nt, Human
uguauauccuuucuaaca

SEQ ID NO: 3134956 - RNA, 14 nt, Human
uguguaaaauguga

SEQ ID NO: 3134957 - RNA, 19 nt, Human
ugugucuaaauuugaaugu

SEQ ID NO: 3134958 - RNA, 22 nt, Human
ugugucuaaauuugaauguuaa

SEQ ID NO: 3134959 - RNA, 22 nt, Human
uguguuaaguauguguaaaaug

SEQ ID NO: 3134960 - RNA, 23 nt, Human
uguuaagcagauggaaugcugug

SEQ ID NO: 3134961 - RNA, 21 nt, Human
uggaacaagaugguucuagca

SEQ ID NO: 3134962 - RNA, 19 nt, Human
agccugcaauuucauaugc

SEQ ID NO: 3134963 - RNA, 21 nt, Human
agccugcaauuucauaugcug

SEQ ID NO: 3134964 - RNA, 19 nt, Human
auuauuuuguucauacaua

SEQ ID NO: 3134965 - RNA, 18 nt, Human
auuauuuuguucauacau

SEQ ID NO: 3134966 - RNA, 17 nt, Human
auuauuuuguucauaca

SEQ ID NO: 3134967 - RNA, 16 nt, Human
auuauuuuguucauac

SEQ ID NO: 3134968 - RNA, 15 nt, Human
auuauuuuguucaua

SEQ ID NO: 3134969 - RNA, 24 nt, Human
auucagaaggaucuucaucugacu

SEQ ID NO: 3134970 - RNA, 18 nt, Human
auucagaaggaucuucau

SEQ ID NO: 3134971 - RNA, 14 nt, Human
auucuaaauuuuau

SEQ ID NO: 3134972 - RNA, 15 nt, Human
auucuagcuaaugua

SEQ ID NO: 3134973 - RNA, 18 nt, Human
auucuagcuaauguaaua

SEQ ID NO: 3134974 - RNA, 15 nt, Human
auuuuugacagaaua

SEQ ID NO: 3134975 - RNA, 14 nt, Human
auuuuugacagaau

SEQ ID NO: 3134976 - RNA, 13 nt, Human
auuuuugacagaa

SEQ ID NO: 3134977 - RNA, 12 nt, Human
auuuuugacaga

SEQ ID NO: 3134978 - RNA, 22 nt, Human
auuuuugacagaauauguuuca

SEQ ID NO: 3134979 - RNA, 15 nt, Human
auuuuuccaaaauaa

SEQ ID NO: 3134980 - RNA, 15 nt, Human
auuuuucacauaucu

SEQ ID NO: 3134981 - RNA, 21 nt, Human
auuuuucacauaucuaguaug

SEQ ID NO: 3134982 - RNA, 18 nt, Human
auuuuucacauaucuagu

SEQ ID NO: 3134983 - RNA, 21 nt, Human
auuuuuguagcacugacagau

SEQ ID NO: 3134984 - RNA, 20 nt, Human
auuuuuguagcacugacaga

SEQ ID NO: 3134985 - RNA, 18 nt, Human
auuuuguucauacauauu

SEQ ID NO: 3134986 - RNA, 16 nt, Human
auuuuguucauacaua

SEQ ID NO: 3134987 - RNA, 15 nt, Human
auuuuguucauacau

SEQ ID NO: 3134988 - RNA, 14 nt, Human
auuuuguucauaca

SEQ ID NO: 3134989 - RNA, 12 nt, Human
auuuuguucaua

SEQ ID NO: 3134990 - RNA, 14 nt, Human
auugcuuuggucau

SEQ ID NO: 3134991 - RNA, 18 nt, Human
auugcuuuggucauauga

SEQ ID NO: 3134992 - RNA, 16 nt, Human
auuguacgaagaguau

SEQ ID NO: 3134993 - RNA, 17 nt, Human
uugacagaauauguuuc

SEQ ID NO: 3134994 - RNA, 20 nt, Human
uugacagaauauguuucaaa

SEQ ID NO: 3134995 - RNA, 18 nt, Human
aucuuguagcuuuaucaa

SEQ ID NO: 3134996 - RNA, 20 nt, Human
aucuuguagcuuuaucaaag

SEQ ID NO: 3134997 - RNA, 19 nt, Human
aucuuguagcuuuaucaaa

SEQ ID NO: 3134998 - RNA, 20 nt, Human
uuggagacacaacuauuuuu

SEQ ID NO: 3134999 - RNA, 19 nt, Human
augaaauuauauaaguauu

SEQ ID NO: 3135000 - RNA, 21 nt, Human
augaaauuauauaaguauucu

SEQ ID NO: 3135001 - RNA, 22 nt, Human
uucuagcauggcauauuuuuca

SEQ ID NO: 3135002 - RNA, 17 nt, Human
uucuagcuaauguaaua

SEQ ID NO: 3135003 - RNA, 14 nt, Human
uucuagcauggcau

SEQ ID NO: 3135004 - RNA, 21 nt, Human
uucuagcauggcauauuuuuc

SEQ ID NO: 3135005 - RNA, 20 nt, Human
uucuagcauggcauauuuuu

SEQ ID NO: 3135006 - RNA, 18 nt, Human
uucuagcauggcauauuu

SEQ ID NO: 3135007 - RNA, 15 nt, Human
uucuagcauggcaua

SEQ ID NO: 3135008 - RNA, 14 nt, Human
uucuaaauuuuaua

SEQ ID NO: 3135009 - RNA, 17 nt, Human
auauuuuucacauaucu

SEQ ID NO: 3135010 - RNA, 15 nt, Human
auauuuuucacauau

SEQ ID NO: 3135011 - RNA, 14 nt, Human
auauuuuucacaua

SEQ ID NO: 3135012 - RNA, 13 nt, Human
auauuuuucacau

SEQ ID NO: 3135013 - RNA, 12 nt, Human
auauuuuucaca

SEQ ID NO: 3135014 - RNA, 14 nt, Human
uuucaaacuuugga

SEQ ID NO: 3135015 - RNA, 18 nt, Human
auggcauauuuuucacau

SEQ ID NO: 3135016 - RNA, 23 nt, Human
auggcauauuuuucacauaucua

SEQ ID NO: 3135017 - RNA, 22 nt, Human
auggcauauuuuucacauaucu

SEQ ID NO: 3135018 - RNA, 21 nt, Human
auggcauauuuuucacauauc

SEQ ID NO: 3135019 - RNA, 20 nt, Human
auggcauauuuuucacauau

SEQ ID NO: 3135020 - RNA, 18 nt, Human
augcuagguuaauuccaa

SEQ ID NO: 3135021 - RNA, 21 nt, Human
uuuaucaaagggugaaaauua

SEQ ID NO: 3135022 - RNA, 20 nt, Human
uuguguuaaguauguguaaa

SEQ ID NO: 3135023 - RNA, 17 nt, Human
augauaaguaaaugcua

SEQ ID NO: 3135024 - RNA, 22 nt, Human
uuugacagaauauguuucaaac

SEQ ID NO: 3135025 - RNA, 18 nt, Human
caagaaaacaacuucaau

SEQ ID NO: 3135026 - RNA, 12 nt, Human
caacuuuauacc

SEQ ID NO: 3135027 - RNA, 23 nt, Human
caaaaaaauauauuuaaugauaa

SEQ ID NO: 3135028 - RNA, 23 nt, Human
cacauaucuaguaugaaauuaua

SEQ ID NO: 3135029 - RNA, 14 nt, Human
cacaacuauuuuuc

SEQ ID NO: 3135030 - RNA, 19 nt, Human
cacaacuauuuuuccaaaa

SEQ ID NO: 3135031 - RNA, 20 nt, Human
cuaaauuuuauaucuuguag

SEQ ID NO: 3135032 - RNA, 13 nt, Human
cuaaauuuuauau

SEQ ID NO: 3135033 - RNA, 16 nt, Human
cuaaauuuuauaucuu

SEQ ID NO: 3135034 - RNA, 15 nt, Human
cuaaauuuuauaucu

SEQ ID NO: 3135035 - RNA, 16 nt, Human
cuaagauaguaacaau

SEQ ID NO: 3135036 - RNA, 21 nt, Human
cuauucaggagaguagaacag

SEQ ID NO: 3135037 - RNA, 22 nt, Human
cuagcuaauguaauaacuguga

SEQ ID NO: 3135038 - RNA, 21 nt, Human
cucauaaaaagccugcaauuu

SEQ ID NO: 3135039 - RNA, 23 nt, Human
cgaagaguauuuuugacagaaua

SEQ ID NO: 3135040 - RNA, 23 nt, Human
ccagugaauucuugaaggaaaau

SEQ ID NO: 3135041 - RNA, 13 nt, Human
cuucccuuucugc

SEQ ID NO: 3135042 - RNA, 14 nt, Human
cuucugugaaagua

SEQ ID NO: 3135043 - RNA, 20 nt, Human
gaaaaugauacgcaacauaa

SEQ ID NO: 3135044 - RNA, 21 nt, Human
gaaaauauuauguguuuccau

SEQ ID NO: 3135045 - RNA, 22 nt, Human
cuuuaucaaagggugaaaauua

SEQ ID NO: 3135046 - RNA, 21 nt, Human
cuuuaucaaagggugaaaauu

SEQ ID NO: 3135047 - RNA, 16 nt, Human
cuuucugcuuguguua

SEQ ID NO: 3135048 - RNA, 21 nt, Human
gcaaagcugaugacaacuucc

SEQ ID NO: 3135049 - RNA, 14 nt, Human
gcaauuucauaugc

SEQ ID NO: 3135050 - RNA, 18 nt, Human
gaguguacuuaacuauuc

SEQ ID NO: 3135051 - RNA, 18 nt, Human
gaauucuugaaggaaaau

SEQ ID NO: 3135052 - RNA, 15 nt, Human
gaauguuaagcagau

SEQ ID NO: 3135053 - RNA, 14 nt, Human
gaauguuaagcaga

SEQ ID NO: 3135054 - RNA, 18 nt, Human
gaaucucauaauuuauac

SEQ ID NO: 3135055 - RNA, 19 nt, Human
gaaucucauaauuuauaca

SEQ ID NO: 3135056 - RNA, 13 nt, Human
gaaugcuguguua

SEQ ID NO: 3135057 - RNA, 14 nt, Human
gaaugcuguguuaa

SEQ ID NO: 3135058 - RNA, 13 nt, Human
gacacaacuauuu

SEQ ID NO: 3135059 - RNA, 15 nt, Human
gagaguagaacagau

SEQ ID NO: 3135060 - RNA, 14 nt, Human
ggaaugcuguguua

SEQ ID NO: 3135061 - RNA, 13 nt, Human
guaauucaagaaa

SEQ ID NO: 3135062 - RNA, 14 nt, Human
guaauucaagaaaa

SEQ ID NO: 3135063 - RNA, 15 nt, Human
guacgaagaguauuu

SEQ ID NO: 3135064 - RNA, 16 nt, Human
guaaauaguauuugag

SEQ ID NO: 3135065 - RNA, 17 nt, Human
guaaauaguauuugaga

SEQ ID NO: 3135066 - RNA, 15 nt, Human
guaaauaguauuuga

SEQ ID NO: 3135067 - RNA, 23 nt, Human
gucuaagauaguaacaaugaaga

SEQ ID NO: 3135068 - RNA, 19 nt, Human
guauuugagaguucuaaau

SEQ ID NO: 3135069 - RNA, 21 nt, Human
guauuugagaguucuaaauuu

SEQ ID NO: 3135070 - RNA, 17 nt, Human
gugaaaguacauuugga

SEQ ID NO: 3135071 - RNA, 15 nt, Human
gugaaaauuauuuug

SEQ ID NO: 3135072 - RNA, 12 nt, Human
gugaaaauuauu

SEQ ID NO: 3135073 - RNA, 16 nt, Human
ugcauagguuuagcag

SEQ ID NO: 3135074 - RNA, 11 nt, Human
ugcuguguuaa

SEQ ID NO: 3135075 - RNA, 18 nt, Human
ugcuguguuaaauaaacc

SEQ ID NO: 3135076 - RNA, 16 nt, Human
ugacagaauauguuuc

SEQ ID NO: 3135077 - RNA, 14 nt, Human
ugauguguuuauuu

SEQ ID NO: 3135078 - RNA, 18 nt, Human
ugauguguuuauuuauag

SEQ ID NO: 3135079 - RNA, 22 nt, Human
ugaguucuacauaaguaauuca

SEQ ID NO: 3135080 - RNA, 23 nt, Human
ugagacguuuuuggaagaguagu

SEQ ID NO: 3135081 - RNA, 16 nt, Human
uccaaaccaaauaaaa

SEQ ID NO: 3135082 - RNA, 22 nt, Human
uccaaaaagauuuucagaaaau

SEQ ID NO: 3135083 - RNA, 23 nt, Human
ucucauaauuuauacaggucaua

SEQ ID NO: 3135084 - RNA, 23 nt, Human
uaguaugaaauuauauaaguauu

SEQ ID NO: 3135085 - RNA, 15 nt, Human
uaguaugaaauuaua

SEQ ID NO: 3135086 - RNA, 13 nt, Human
uaguaugaaauua

SEQ ID NO: 3135087 - RNA, 17 nt, Human
uauccuuucuaacaaaa

SEQ ID NO: 3135088 - RNA, 23 nt, Human
uaugacauaaaaacaacuuuaua

SEQ ID NO: 3135089 - RNA, 22 nt, Human
uaugacauaaaaacaacuuuau

SEQ ID NO: 3135090 - RNA, 19 nt, Human
uaugacauaaaaacaacuu

SEQ ID NO: 3135091 - RNA, 20 nt, Human
ucaaagagagaaaauaaaga

SEQ ID NO: 3135092 - RNA, 15 nt, Human
ucaaagagagaaaau

SEQ ID NO: 3135093 - RNA, 23 nt, Human
uauugauaaguucauacauugua

SEQ ID NO: 3135094 - RNA, 16 nt, Human
uauugauaaguucaua

SEQ ID NO: 3135095 - RNA, 14 nt, Human
uauugauaaguuca

SEQ ID NO: 3135096 - RNA, 12 nt, Human
uauuauguguuu

SEQ ID NO: 3135097 - RNA, 21 nt, Human
uuaagcagauggaaugcugug

SEQ ID NO: 3135098 - RNA, 17 nt, Human
uuaaugauaaguaaaug

SEQ ID NO: 3135099 - RNA, 21 nt, Human
uuaaugauaaguaaaugcuag

SEQ ID NO: 3135100 - RNA, 14 nt, Human
uuaauauauuucca

SEQ ID NO: 3135101 - RNA, 13 nt, Human
uuaauauauuucc

SEQ ID NO: 3135102 - RNA, 20 nt, Human
uuccuucugugaaaguacau

SEQ ID NO: 3135103 - RNA, 13 nt, Human
uuccaaaauaauu

SEQ ID NO: 3135104 - RNA, 21 nt, Human
uuccaaaauaauuuuaagaaa

SEQ ID NO: 3135105 - RNA, 12 nt, Human
uuccaaaauaau

SEQ ID NO: 3135106 - RNA, 19 nt, Human
uucaugcauagguuuagca

SEQ ID NO: 3135107 - RNA, 20 nt, Human
uuauugauaaguucauacau

SEQ ID NO: 3135108 - RNA, 19 nt, Human
uuauugauaaguucauaca

SEQ ID NO: 3135109 - RNA, 15 nt, Human
uuauugauaaguuca

SEQ ID NO: 3135110 - RNA, 19 nt, Human
uuguucaauaauaaauauu

SEQ ID NO: 3135111 - RNA, 15 nt, Human
uuuauacaggucaua

SEQ ID NO: 3135112 - RNA, 14 nt, Human
uuugagaguucuaa

SEQ ID NO: 3135113 - RNA, 16 nt, Human
uuugagaguucuaaau

SEQ ID NO: 3135114 - RNA, 13 nt, Human
uuugaguucuaca

SEQ ID NO: 3135115 - RNA, 21 nt, Human
uuucuaacaaaaaaauauauu

SEQ ID NO: 3135116 - RNA, 21 nt, Human
uuucacauaucuaguaugaaa

SEQ ID NO: 3135117 - RNA, 15 nt, Human
uuucacauaucuagu

SEQ ID NO: 3135118 - RNA, 22 nt, Human
uuguagcacugacagauuucca

SEQ ID NO: 3135119 - RNA, 18 nt, Human
uuguagcacugacagauu

SEQ ID NO: 3135120 - RNA, 17 nt, Human
uuguagcacugacagau

SEQ ID NO: 3135121 - RNA, 16 nt, Human
uuguagcacugacaga

SEQ ID NO: 3135122 - RNA, 14 nt, Human
uuguagcacugaca

SEQ ID NO: 3135123 - RNA, 19 nt, Human
uuguacgaagaguauuuuu

SEQ ID NO: 3135124 - RNA, 16 nt, Human
uuguacgaagaguauu

SEQ ID NO: 3135125 - RNA, 14 nt, Human
uugaauguuaagca

SEQ ID NO: 3135126 - RNA, 17 nt, Human
uugaauguuaagcagau

SEQ ID NO: 3135127 - RNA, 23 nt, Human
cuacauaaguaauucaagaaaac

SEQ ID NO: 3135128 - RNA, 22 nt, Human
cuacauaaguaauucaagaaaa

SEQ ID NO: 3135129 - RNA, 19 nt, Human
ccaaaaagauuuucagaaa

SEQ ID NO: 3135130 - RNA, 11 nt, Human
cacugacagau

SEQ ID NO: 3135131 - RNA, 14 nt, Human
auuguaaauaguau

SEQ ID NO: 3135132 - RNA, 21 nt, Human
auugauaaguucauacauugu

SEQ ID NO: 3135133 - RNA, 22 nt, Human
auugauaaguucauacauugua

SEQ ID NO: 3135134 - RNA, 15 nt, Human
auucuugaaggaaaa

SEQ ID NO: 3135135 - RNA, 18 nt, Human
auucuugaaggaaaauga

SEQ ID NO: 3135136 - RNA, 22 nt, Human
ggaucuucaucugacuaugaca

SEQ ID NO: 3135137 - RNA, 17 nt, Human
ggcauauuuuucacaua

SEQ ID NO: 3135138 - RNA, 15 nt, Human
ggcauauuuuucaca

SEQ ID NO: 3135139 - RNA, 17 nt, Human
guaacaaugaagauaaa

SEQ ID NO: 3135140 - RNA, 12 nt, Human
guaaaaugugaa

SEQ ID NO: 3135141 - RNA, 19 nt, Human
guaaaaugugaagugaaug

SEQ ID NO: 3135142 - RNA, 20 nt, Human
guaaaaugugaagugaauga

SEQ ID NO: 3135143 - RNA, 22 nt, Human
guaaaaugugaagugaaugaaa

SEQ ID NO: 3135144 - RNA, 23 nt, Human
aaaguuauugauaaguucauaca

SEQ ID NO: 3135145 - RNA, 13 nt, Human
aaagauuuucaga

SEQ ID NO: 3135146 - RNA, 12 nt, Human
aaaaugugaagu

SEQ ID NO: 3135147 - RNA, 19 nt, Human
aaaaauauauuuaaugaua

SEQ ID NO: 3135148 - RNA, 13 nt, Human
aaaaauauauuua

SEQ ID NO: 3135149 - RNA, 15 nt, Human
aaaaauauauuuaau

SEQ ID NO: 3135150 - RNA, 13 nt, Human
gacuaugacauaa

SEQ ID NO: 3135151 - RNA, 22 nt, Human
gagacguuuuuggaagaguagu

SEQ ID NO: 3135152 - RNA, 16 nt, Human
gacagaauauguuuca

SEQ ID NO: 3135153 - RNA, 12 nt, Human
gcacugacagau

SEQ ID NO: 3135154 - RNA, 17 nt, Human
gcacugacagauuucca

SEQ ID NO: 3135155 - RNA, 20 nt, Human
cuucaugcauagguuuagca

SEQ ID NO: 3135156 - RNA, 19 nt, Human
cuucaucugacuaugacau

SEQ ID NO: 3135157 - RNA, 21 nt, Human
cuucaucugacuaugacauaa

SEQ ID NO: 3135158 - RNA, 19 nt, Human
uagcacugacagauuucca

SEQ ID NO: 3135159 - RNA, 14 nt, Human
uagcacugacagau

SEQ ID NO: 3135160 - RNA, 16 nt, Human
aauuuggauugcuaau

SEQ ID NO: 3135161 - RNA, 17 nt, Human
aauuccaauuauaugag

SEQ ID NO: 3135162 - RNA, 16 nt, Human
acacucaguuguucaa

SEQ ID NO: 3135163 - RNA, 17 nt, Human
uauauccuuucuaacaa

SEQ ID NO: 3135164 - RNA, 20 nt, Human
uauauccuuucuaacaaaaa

SEQ ID NO: 3135165 - RNA, 21 nt, Human
uauacaggucauauuaauaua

SEQ ID NO: 3135166 - RNA, 16 nt, Human
uauacaggucauauua

SEQ ID NO: 3135167 - RNA, 15 nt, Human
uauacaggucauauu

SEQ ID NO: 3135168 - RNA, 19 nt, Human
uaucaaagggugaaaauua

SEQ ID NO: 3135169 - RNA, 18 nt, Human
uaucaaagggugaaaauu

SEQ ID NO: 3135170 - RNA, 22 nt, Human
uaucaaagggugaaaauuauuu

SEQ ID NO: 3135171 - RNA, 22 nt, Human
uaagcagauggaaugcuguguu

SEQ ID NO: 3135172 - RNA, 16 nt, Human
uaaguaauucaagaaa

SEQ ID NO: 3135173 - RNA, 14 nt, Human
aaucagugugucua

SEQ ID NO: 3135174 - RNA, 17 nt, Human
aaucagugugucuaaau

SEQ ID NO: 3135175 - RNA, 18 nt, Human
aaucagugugucuaaauu

SEQ ID NO: 3135176 - RNA, 22 nt, Human
aaucagugugucuaaauuugaa

SEQ ID NO: 3135177 - RNA, 14 nt, Human
aauauauuuaauga

SEQ ID NO: 3135178 - RNA, 17 nt, Human
uaacaaugaagauaaaa

SEQ ID NO: 3135179 - RNA, 20 nt, Human
aauagagcaaaauugaugug

SEQ ID NO: 3135180 - RNA, 22 nt, Human
aauagagcaaaauugauguguu

SEQ ID NO: 3135181 - RNA, 20 nt, Human
aaugacucagaauauugcuu

SEQ ID NO: 3135182 - RNA, 16 nt, Human
uaauuuauacagguca

SEQ ID NO: 3135183 - RNA, 15 nt, Human
aauucagaaggaucu

SEQ ID NO: 3135184 - RNA, 21 nt, Human
aauucagaaggaucuucaucu

SEQ ID NO: 3135185 - RNA, 12 nt, Human
aauucaagaaaa

SEQ ID NO: 3135186 - RNA, 20 nt, Human
aauucaagaaaacaacuuca

SEQ ID NO: 3135187 - RNA, 12 nt, Human
guuucaaacuuu

SEQ ID NO: 3135188 - RNA, 16 nt, Human
aagggugaaaauuauu

SEQ ID NO: 3135189 - RNA, 15 nt, Human
aagggugaaaauuau

SEQ ID NO: 3135190 - RNA, 17 nt, Human
aagccugcaauuucaua

SEQ ID NO: 3135191 - RNA, 22 nt, Human
aagccugcaauuucauaugcug

SEQ ID NO: 3135192 - RNA, 21 nt, Human
aagaccuuuggagcaaagcug

SEQ ID NO: 3135193 - RNA, 23 nt, Human
aagaccuugcuuaugauugcaga

SEQ ID NO: 3135194 - RNA, 15 nt, Human
guauuuuugacagaa

SEQ ID NO: 3135195 - RNA, 12 nt, Human
guauuuuugaca

SEQ ID NO: 3135196 - RNA, 13 nt, Human
aacagauaaucag

SEQ ID NO: 3135197 - RNA, 19 nt, Human
aacaagaugguucuagcau

SEQ ID NO: 3135198 - RNA, 18 nt, Human
aacuucccagugaauucu

SEQ ID NO: 3135199 - RNA, 18 nt, Human
agauggaaugcuguguua

SEQ ID NO: 3135200 - RNA, 13 nt, Human
agauggaaugcug

SEQ ID NO: 3135201 - RNA, 15 nt, Human
agauggaaugcugug

SEQ ID NO: 3135202 - RNA, 20 nt, Human
agaguauuuuugacagaaua

SEQ ID NO: 3135203 - RNA, 18 nt, Human
agaguauuuuugacagaa

SEQ ID NO: 3135204 - RNA, 17 nt, Human
agaguauuuuugacaga

SEQ ID NO: 3135205 - RNA, 23 nt, Human
ugaaaguacauuuggagacacaa

SEQ ID NO: 3135206 - RNA, 14 nt, Human
ugaaaguacauuug

SEQ ID NO: 3135207 - RNA, 15 nt, Human
agaguauuuuugaca

SEQ ID NO: 3135208 - RNA, 14 nt, Human
agaguauuuuugac

SEQ ID NO: 3135209 - RNA, 22 nt, Human
ugaaaaagaccuuuggagcaaa

SEQ ID NO: 3135210 - RNA, 20 nt, Human
agagcaaaauugauguguuu

SEQ ID NO: 3135211 - RNA, 14 nt, Human
agagagaaaauaaa

SEQ ID NO: 3135212 - RNA, 19 nt, Human
agacauucuuccaaaaaga

SEQ ID NO: 3135213 - RNA, 15 nt, Human
ucuuuaacucauaaa

SEQ ID NO: 3135214 - RNA, 16 nt, Human
agaaggaucuucaucu

SEQ ID NO: 3135215 - RNA, 21 nt, Human
ucuaagauaguaacaaugaag

SEQ ID NO: 3135216 - RNA, 22 nt, Human
acuucccuuucugcuuguguua

SEQ ID NO: 3135217 - RNA, 14 nt, Human
acuucccuuucugc

SEQ ID NO: 3135218 - RNA, 18 nt, Human
ucuagcauggcauauuuu

SEQ ID NO: 3135219 - RNA, 17 nt, Human
ucuagcauggcauauuu

SEQ ID NO: 3135220 - RNA, 17 nt, Human
acuucccagugaauucu

SEQ ID NO: 3135221 - RNA, 14 nt, Human
acucagaauauugc

SEQ ID NO: 3135222 - RNA, 22 nt, Human
acuaugacauaaaaacaacuuu

SEQ ID NO: 3135223 - RNA, 13 nt, Human
acugaaacuuccc

SEQ ID NO: 3135224 - RNA, 19 nt, Human
uccaaaaagauuuucagaa

SEQ ID NO: 3135225 - RNA, 20 nt, Human
uccaaaaagauuuucagaaa

SEQ ID NO: 3135226 - RNA, 20 nt, Human
acgaagaguauuuuugacag

SEQ ID NO: 3135227 - RNA, 22 nt, Human
acgaagaguauuuuugacagaa

SEQ ID NO: 3135228 - RNA, 13 nt, Human
uauuuuuguagca

SEQ ID NO: 3135229 - RNA, 13 nt, Human
uauuuuucacaua

SEQ ID NO: 3135230 - RNA, 12 nt, Human
uauuuuucacau

SEQ ID NO: 3135231 - RNA, 16 nt, Human
uauuuuguucauacau

SEQ ID NO: 3135232 - RNA, 15 nt, Human
uauuuuguucauaca

SEQ ID NO: 3135233 - RNA, 14 nt, Human
uauguguaaaaugu

SEQ ID NO: 3135234 - RNA, 19 nt, Human
uauuuuuguagcacugaca

SEQ ID NO: 3135235 - RNA, 15 nt, Human
uauuuuuguagcacu

SEQ ID NO: 3135236 - RNA, 16 nt, Human
accaaauaaaaauauu

SEQ ID NO: 3135237 - RNA, 18 nt, Human
accaaauaaaaauauugu

SEQ ID NO: 3135238 - RNA, 17 nt, Human
acauuguaaauaguauu

SEQ ID NO: 3135239 - RNA, 19 nt, Human
acauuguaaauaguauuug

SEQ ID NO: 3135240 - RNA, 21 nt, Human
acauuguaaauaguauuugag

SEQ ID NO: 3135241 - RNA, 14 nt, Human
uuaaguauguguaa

SEQ ID NO: 3135242 - RNA, 13 nt, Human
auaacugugaagu

SEQ ID NO: 3135243 - RNA, 18 nt, Human
auaaauauuuuugccaua

SEQ ID NO: 3135244 - RNA, 12 nt, Human
uguugugaaugu

SEQ ID NO: 3135245 - RNA, 13 nt, Human
uguugugaauguu

SEQ ID NO: 3135246 - RNA, 14 nt, Human
uguugugauguauu

SEQ ID NO: 3135247 - RNA, 20 nt, Human
uguugugauguauucuagcu

SEQ ID NO: 3135248 - RNA, 15 nt, Human
aguucuacauaagua

SEQ ID NO: 3135249 - RNA, 13 nt, Human
uguguugugaaug

SEQ ID NO: 3135250 - RNA, 13 nt, Human
aguagaacagaua

SEQ ID NO: 3135251 - RNA, 19 nt, Human
aguagaacagauaaucagu

SEQ ID NO: 3135252 - RNA, 16 nt, Human
aguauuugagaguucu

SEQ ID NO: 3135253 - RNA, 16 nt, Human
aggucauauuaauaua

SEQ ID NO: 3135254 - RNA, 19 nt, Human
aggucauauuaauauauuu

SEQ ID NO: 3135255 - RNA, 18 nt, Human
aggucauauuaauauauu

SEQ ID NO: 3135256 - RNA, 23 nt, Human
agcuuuaucaaagggugaaaauu

SEQ ID NO: 3135257 - RNA, 17 nt, Human
uggcauauuuuucacau

SEQ ID NO: 3135258 - RNA, 16 nt, Human
uggcauauuuuucaca

SEQ ID NO: 3135259 - RNA, 19 nt, Human
ugauacgcaacauaauuaa

SEQ ID NO: 3135260 - RNA, 12 nt, Human
ugauaaguaaau

SEQ ID NO: 3135261 - RNA, 22 nt, Human
agcauggcauauuuuucacaua

SEQ ID NO: 3135262 - RNA, 21 nt, Human
agcauggcauauuuuucacau

SEQ ID NO: 3135263 - RNA, 19 nt, Human
agcauggcauauuuuucac

SEQ ID NO: 3135264 - RNA, 18 nt, Human
agcauggcauauuuuuca

SEQ ID NO: 3135265 - RNA, 13 nt, Human
auaucuuguagcu

SEQ ID NO: 3135266 - RNA, 17 nt, Human
auaucuaguaugaaauu

SEQ ID NO: 3135267 - RNA, 15 nt, Human
auaucuaguaugaaa

SEQ ID NO: 3135268 - RNA, 14 nt, Human
auaucuaguaugaa

SEQ ID NO: 3135269 - RNA, 13 nt, Human
auauauuuaauga

SEQ ID NO: 3135270 - RNA, 23 nt, Human
uucauacauauuuuuguagcacu

SEQ ID NO: 3135271 - RNA, 12 nt, Human
uucauacauauu

SEQ ID NO: 3135272 - RNA, 13 nt, Human
uucauaugcugua

SEQ ID NO: 3135273 - RNA, 19 nt, Human
uucauacauuguacgaaga

SEQ ID NO: 3135274 - RNA, 13 nt, Human
uucauacauugua

SEQ ID NO: 3135275 - RNA, 21 nt, Human
uuauuuuguucauacauauuu

SEQ ID NO: 3135276 - RNA, 17 nt, Human
uuauuuuguucauacau

SEQ ID NO: 3135277 - RNA, 13 nt, Human
auagucuuucagu

SEQ ID NO: 3135278 - RNA, 20 nt, Human
auccuagucacuaccuucau

SEQ ID NO: 3135279 - RNA, 19 nt, Human
uucuaacaaaaaaauauau

SEQ ID NO: 3135280 - RNA, 20 nt, Human
uucuaacaaaaaaauauauu

SEQ ID NO: 3135281 - RNA, 16 nt, Human
auggaaugcuguguua

SEQ ID NO: 3135282 - RNA, 15 nt, Human
uuucauaugcuguau

SEQ ID NO: 3135283 - RNA, 18 nt, Human
aucucauaauuuauacag

SEQ ID NO: 3135284 - RNA, 17 nt, Human
aucucauaauuuauaca

SEQ ID NO: 3135285 - RNA, 11 nt, Human
uugauguguuu

SEQ ID NO: 3135286 - RNA, 11 nt, Human
uuuuaagaaau

SEQ ID NO: 3135287 - RNA, 17 nt, Human
uuuguagcacugacaga

SEQ ID NO: 3135288 - RNA, 19 nt, Human
uuuguagcacugacagauu

SEQ ID NO: 3135289 - RNA, 15 nt, Human
auguugugauguauu

SEQ ID NO: 3135290 - RNA, 20 nt, Human
auuaaaaaaucaguuguaca

SEQ ID NO: 3135291 - RNA, 15 nt, Human
auuaauauauuucca

SEQ ID NO: 3135292 - RNA, 20 nt, Human
auuuggagacacaacuauuu

SEQ ID NO: 3135293 - RNA, 21 nt, Human
auugcuaaucaccaaaggcuc

SEQ ID NO: 3135294 - RNA, 15 nt, Human
auguguaaaauguga

SEQ ID NO: 3135295 - RNA, 14 nt, Human
aucuaguaugaaau

SEQ ID NO: 3135296 - RNA, 19 nt, Human
aucuaguaugaaauuauau

SEQ ID NO: 3135297 - RNA, 18 nt, Human
aucuaguaugaaauuaua

SEQ ID NO: 3135298 - RNA, 17 nt, Human
aucuaguaugaaauuau

SEQ ID NO: 3135299 - RNA, 16 nt, Human
aucuaguaugaaauua

SEQ ID NO: 3135300 - RNA, 15 nt, Human
aucuaguaugaaauu

SEQ ID NO: 3135301 - RNA, 13 nt, Human
auauuauguguuu

SEQ ID NO: 3135302 - RNA, 17 nt, Human
auauuauguguuuccau

SEQ ID NO: 3135303 - RNA, 20 nt, Human
auaaaaagccugcaauuuca

SEQ ID NO: 3135304 - RNA, 22 nt, Human
auaaaaagccugcaauuucaua

SEQ ID NO: 3135305 - RNA, 17 nt, Human
auacccagaaaguuauu

SEQ ID NO: 3135306 - RNA, 19 nt, Human
aguaacaaugaagauaaaa

SEQ ID NO: 3135307 - RNA, 23 nt, Human
aguaaaugcuagguuaauuccaa

SEQ ID NO: 3135308 - RNA, 11 nt, Human
aguaaaugcua

SEQ ID NO: 3135309 - RNA, 22 nt, Human
aguaaaugcuagguuaauucca

SEQ ID NO: 3135310 - RNA, 13 nt, Human
aguauuuuugaca

SEQ ID NO: 3135311 - RNA, 18 nt, Human
aguauuuuugacagaaua

SEQ ID NO: 3135312 - RNA, 17 nt, Human
aguauuuuugacagaau

SEQ ID NO: 3135313 - RNA, 16 nt, Human
aguauuuuugacagaa

SEQ ID NO: 3135314 - RNA, 20 nt, Human
agugaauucuugaaggaaaa

SEQ ID NO: 3135315 - RNA, 23 nt, Human
agcuaauguaauaacugugaagu

SEQ ID NO: 3135316 - RNA, 14 nt, Human
agaugguucuagca

SEQ ID NO: 3135317 - RNA, 21 nt, Human
agcaaagcugaugacaacuuc

SEQ ID NO: 3135318 - RNA, 23 nt, Human
agcaaagcugaugacaacuuccc

SEQ ID NO: 3135319 - RNA, 14 nt, Human
aaauugauguguuu

SEQ ID NO: 3135320 - RNA, 20 nt, Human
aaaugcuagguuaauuccaa

SEQ ID NO: 3135321 - RNA, 20 nt, Human
aaaauuauuuuguucauaca

SEQ ID NO: 3135322 - RNA, 18 nt, Human
aaaauuauuuuguucaua

SEQ ID NO: 3135323 - RNA, 16 nt, Human
aaaauuauuuuguuca

SEQ ID NO: 3135324 - RNA, 19 nt, Human
aaauaaaccucaaaauguc

SEQ ID NO: 3135325 - RNA, 20 nt, Human
aaauaaaaauauuguguugu

SEQ ID NO: 3135326 - RNA, 17 nt, Human
aaaccucaaaaugucua

SEQ ID NO: 3135327 - RNA, 22 nt, Human
aaaccucaaaaugucuaagaua

SEQ ID NO: 3135328 - RNA, 13 nt, Human
aagauuuucagaa

SEQ ID NO: 3135329 - RNA, 21 nt, Human
aagacauucuuccaaaaagau

SEQ ID NO: 3135330 - RNA, 17 nt, Human
aauaaaccucaaaaugu

SEQ ID NO: 3135331 - RNA, 20 nt, Human
aauaaaccucaaaaugucua

SEQ ID NO: 3135332 - RNA, 14 nt, Human
aauaauaaauauuu

SEQ ID NO: 3135333 - RNA, 15 nt, Human
acauaaguaauucaa

SEQ ID NO: 3135334 - RNA, 19 nt, Human
acauaauuaaauuuugagu

SEQ ID NO: 3135335 - RNA, 18 nt, Human
caaaauaauuuuaagaaa

SEQ ID NO: 3135336 - RNA, 22 nt, Human
caaaauaauuuuaagaaaucaa

SEQ ID NO: 3135337 - RNA, 19 nt, Human
caaagagagaaaauaaaga

SEQ ID NO: 3135338 - RNA, 16 nt, Human
caaagagagaaaauaa

SEQ ID NO: 3135339 - RNA, 15 nt, Human
caaauaaaaauauug

SEQ ID NO: 3135340 - RNA, 16 nt, Human
caaauaaaaauauugu

SEQ ID NO: 3135341 - RNA, 18 nt, Human
caaauaaaaauauugugu

SEQ ID NO: 3135342 - RNA, 19 nt, Human
caauaauaaauauuuuugc

SEQ ID NO: 3135343 - RNA, 15 nt, Human
cauaaaaacaacuuu

SEQ ID NO: 3135344 - RNA, 18 nt, Human
cauaaguaauucaagaaa

SEQ ID NO: 3135345 - RNA, 22 nt, Human
cauaaguaauucaagaaaacaa

SEQ ID NO: 3135346 - RNA, 16 nt, Human
cauaaguaauucaaga

SEQ ID NO: 3135347 - RNA, 17 nt, Human
cauaaguaauucaagaa

SEQ ID NO: 3135348 - RNA, 15 nt, Human
cauacauuguacgaa

SEQ ID NO: 3135349 - RNA, 19 nt, Human
cauacauauuuuuguagca

SEQ ID NO: 3135350 - RNA, 12 nt, Human
cauacauauuuu

SEQ ID NO: 3135351 - RNA, 11 nt, Human
cauacauauuu

SEQ ID NO: 3135352 - RNA, 23 nt, Human
cauaaaaagccugcaauuucaua

SEQ ID NO: 3135353 - RNA, 23 nt, Human
cauaaaaacaacuuuauacccag

SEQ ID NO: 3135354 - RNA, 21 nt, Human
cauaaaaacaacuuuauaccc

SEQ ID NO: 3135355 - RNA, 20 nt, Human
cauaaaaacaacuuuauacc

SEQ ID NO: 3135356 - RNA, 17 nt, Human
cauaaaaacaacuuuau

SEQ ID NO: 3135357 - RNA, 23 nt, Human
cagugugucuaaauuugaauguu

SEQ ID NO: 3135358 - RNA, 14 nt, Human
cagugugucuaaau

SEQ ID NO: 3135359 - RNA, 18 nt, Human
cauauuuuucacauaucu

SEQ ID NO: 3135360 - RNA, 14 nt, Human
cauauuuuucacau

SEQ ID NO: 3135361 - RNA, 21 nt, Human
cauauuuuucacauaucuagu

SEQ ID NO: 3135362 - RNA, 15 nt, Human
gccugcaauuucaua

SEQ ID NO: 3135363 - RNA, 20 nt, Human
gcauauuuuucacauaucua

SEQ ID NO: 3135364 - RNA, 19 nt, Human
gcauauuuuucacauaucu

SEQ ID NO: 3135365 - RNA, 16 nt, Human
gcauauuuuucacaua

SEQ ID NO: 3135366 - RNA, 15 nt, Human
gcauauuuuucacau

SEQ ID NO: 3135367 - RNA, 14 nt, Human
gcauauuuuucaca

SEQ ID NO: 3135368 - RNA, 17 nt, Human
gcaaaauugauguguuu

SEQ ID NO: 3135369 - RNA, 17 nt, Human
gaugacaacuucccagu

SEQ ID NO: 3135370 - RNA, 12 nt, Human
gauaaguucaua

SEQ ID NO: 3135371 - RNA, 16 nt, Human
gauaaguucauacauu

SEQ ID NO: 3135372 - RNA, 14 nt, Human
gauaaguucauaca

SEQ ID NO: 3135373 - RNA, 22 nt, Human
gauagucuuucaguuaaggaga

SEQ ID NO: 3135374 - RNA, 15 nt, Human
gauaguaacaaugaa

SEQ ID NO: 3135375 - RNA, 14 nt, Human
gauagucuuucagu

SEQ ID NO: 3135376 - RNA, 16 nt, Human
cuuuggaacaagaugg

SEQ ID NO: 3135377 - RNA, 23 nt, Human
gaaauuauauaaguauucuaaau

SEQ ID NO: 3135378 - RNA, 17 nt, Human
gaaauuauauaaguauu

SEQ ID NO: 3135379 - RNA, 18 nt, Human
gaacagauaaucagugug

SEQ ID NO: 3135380 - RNA, 23 nt, Human
gaaaguuauugauaaguucauac

SEQ ID NO: 3135381 - RNA, 20 nt, Human
gaagaguauuuuugacagaa

SEQ ID NO: 3135382 - RNA, 21 nt, Human
cucuccugauagucuuucagu

SEQ ID NO: 3135383 - RNA, 15 nt, Human
cugacagauuuccau

SEQ ID NO: 3135384 - RNA, 11 nt, Human
cugacagauuu

SEQ ID NO: 3135385 - RNA, 15 nt, Human
cugacuaugacauaa

SEQ ID NO: 3135386 - RNA, 23 nt, Human
cuaaauuugaauguuaagcagau

SEQ ID NO: 3135387 - RNA, 21 nt, Human
cuaugacauaaaaacaacuuu

SEQ ID NO: 3135388 - RNA, 18 nt, Human
cuaugacauaaaaacaac

SEQ ID NO: 3135389 - RNA, 16 nt, Human
cuaguaugaaauuaua

SEQ ID NO: 3135390 - RNA, 19 nt, Human
cuaauguaauaacugugaa

SEQ ID NO: 3135391 - RNA, 22 nt, Human
uuugaaucucauaauuuauaca

SEQ ID NO: 3135392 - RNA, 21 nt, Human
uuugaaucucauaauuuauac

SEQ ID NO: 3135393 - RNA, 20 nt, Human
uuugaaucucauaauuuaua

SEQ ID NO: 3135394 - RNA, 19 nt, Human
uuugaaucucauaauuuau

SEQ ID NO: 3135395 - RNA, 16 nt, Human
uuugaaucucauaauu

SEQ ID NO: 3135396 - RNA, 20 nt, Human
uuuugaaucucauaauuuau

SEQ ID NO: 3135397 - RNA, 19 nt, Human
uuuuguagcacugacagau

SEQ ID NO: 3135398 - RNA, 18 nt, Human
uuuuguagcacugacaga

SEQ ID NO: 3135399 - RNA, 23 nt, Human
guaugaaauuauauaaguauucu

SEQ ID NO: 3135400 - RNA, 13 nt, Human
guaugaaauuaua

SEQ ID NO: 3135401 - RNA, 15 nt, Human
guagcacugacagau

SEQ ID NO: 3135402 - RNA, 14 nt, Human
guagcacugacaga

SEQ ID NO: 3135403 - RNA, 18 nt, Human
gugaauucuugaaggaaa

SEQ ID NO: 3135404 - RNA, 22 nt, Human
gugaauucuugaaggaaaauga

SEQ ID NO: 3135405 - RNA, 13 nt, Human
gucuaaauuugaa

SEQ ID NO: 3135406 - RNA, 21 nt, Human
gucuaagauaguaacaaugaa

SEQ ID NO: 3135407 - RNA, 18 nt, Human
guucaauaauaaauauuu

SEQ ID NO: 3135408 - RNA, 15 nt, Human
guguacuuaacuauu

SEQ ID NO: 3135409 - RNA, 15 nt, Human
uagcauggcauauuu

SEQ ID NO: 3135410 - RNA, 18 nt, Human
uagcauggcauauuuuuc

SEQ ID NO: 3135411 - RNA, 17 nt, Human
uagcauggcauauuuuu

SEQ ID NO: 3135412 - RNA, 22 nt, Human
uagguuaauuccaauuauauga

SEQ ID NO: 3135413 - RNA, 14 nt, Human
uauaucuuguagcu

SEQ ID NO: 3135414 - RNA, 13 nt, Human
uacuuaacuauuc

SEQ ID NO: 3135415 - RNA, 14 nt, Human
uacccagaaaguua

SEQ ID NO: 3135416 - RNA, 13 nt, Human
uaaaaacaacuuu

SEQ ID NO: 3135417 - RNA, 19 nt, Human
uaaaaacaacuuuauaccc

SEQ ID NO: 3135418 - RNA, 18 nt, Human
uaaaaacaacuuuauacc

SEQ ID NO: 3135419 - RNA, 21 nt, Human
uaaaaagacauucuuccaaaa

SEQ ID NO: 3135420 - RNA, 14 nt, Human
guugugaauguugu

SEQ ID NO: 3135421 - RNA, 13 nt, Human
uaacugugaaguu

SEQ ID NO: 3135422 - RNA, 17 nt, Human
uaacugugaaguuuaca

SEQ ID NO: 3135423 - RNA, 18 nt, Human
uaacugugaaguuuacau

SEQ ID NO: 3135424 - RNA, 19 nt, Human
uaagaaaucaaagagagaa

SEQ ID NO: 3135425 - RNA, 14 nt, Human
uaaauuugaauguu

SEQ ID NO: 3135426 - RNA, 22 nt, Human
uaaauuugaauguuaagcagau

SEQ ID NO: 3135427 - RNA, 21 nt, Human
uaauaacugugaaguuuacau

SEQ ID NO: 3135428 - RNA, 16 nt, Human
uuaaugauaaguaaau

SEQ ID NO: 3135429 - RNA, 12 nt, Human
uuacauuguaaa

SEQ ID NO: 3135430 - RNA, 13 nt, Human
uuacauuguaaau

SEQ ID NO: 3135431 - RNA, 19 nt, Human
uguuuccauauuuuauagg

SEQ ID NO: 3135432 - RNA, 12 nt, Human
uguucauacaua

SEQ ID NO: 3135433 - RNA, 23 nt, Human
uguucauacauauuuuuguagca

SEQ ID NO: 3135434 - RNA, 14 nt, Human
uguucauacauauu

SEQ ID NO: 3135435 - RNA, 18 nt, Human
ugugaagugaaugaaaca

SEQ ID NO: 3135436 - RNA, 21 nt, Human
ugugaauguugugauguauuc

SEQ ID NO: 3135437 - RNA, 22 nt, Human
uguacgaagaguauuuuugaca

SEQ ID NO: 3135438 - RNA, 14 nt, Human
uguacgaagaguau

SEQ ID NO: 3135439 - RNA, 16 nt, Human
uggaaugcuguguuaa

SEQ ID NO: 3135440 - RNA, 22 nt, Human
ucucauaauuuauacaggucau

SEQ ID NO: 3135441 - RNA, 16 nt, Human
ucucauaauuuauaca

SEQ ID NO: 3135442 - RNA, 19 nt, Human
ucagugugucuaaauuuga

SEQ ID NO: 3135443 - RNA, 22 nt, Human
ucaggagaguagaacagauaau

SEQ ID NO: 3135444 - RNA, 18 nt, Human
ucuuguagcuuuaucaaa

SEQ ID NO: 3135445 - RNA, 23 nt, Human
ugaaaauuauuuuguucauacau

SEQ ID NO: 3135446 - RNA, 22 nt, Human
ugaaaauuauuuuguucauaca

SEQ ID NO: 3135447 - RNA, 23 nt, Human
ugaaacacucaguuguucaauaa

SEQ ID NO: 3135448 - RNA, 19 nt, Human
ugaaaauuauuuuguucau

SEQ ID NO: 3135449 - RNA, 20 nt, Human
ugaaucucauaauuuauaca

SEQ ID NO: 3135450 - RNA, 13 nt, Human
ugaaucucauaau

SEQ ID NO: 3135451 - RNA, 14 nt, Human
ugaaguuuacauug

SEQ ID NO: 3135452 - RNA, 16 nt, Human
ugaaguuuacauugua

SEQ ID NO: 3135453 - RNA, 20 nt, Human
ugaaguuuacauuguaaaua

SEQ ID NO: 3135454 - RNA, 15 nt, Human
ugaaggaaaaugaua

SEQ ID NO: 3135455 - RNA, 18 nt, Human
ugacagaauauguuucaa

SEQ ID NO: 3135456 - RNA, 22 nt, Human
ugacagaauauguuucaaacuu

SEQ ID NO: 3135457 - RNA, 21 nt, Human
ugacagaauauguuucaaacu

SEQ ID NO: 3135458 - RNA, 22 nt, Human
ugacaacuucccagugaauucu

SEQ ID NO: 3135459 - RNA, 23 nt, Human
ugacagaauauguuucaaacuuu

SEQ ID NO: 3135460 - RNA, 13 nt, Human
agugaaugaaaca

SEQ ID NO: 3135461 - RNA, 17 nt, Human
auaaguaauucaagaaa

SEQ ID NO: 3135462 - RNA, 15 nt, Human
auaaguaaaugcuag

SEQ ID NO: 3135463 - RNA, 20 nt, Human
aguuguucaauaauaaauau

SEQ ID NO: 3135464 - RNA, 22 nt, Human
auaaaaauauuguguugugaau

SEQ ID NO: 3135465 - RNA, 23 nt, Human
auaaaaauauuguguugugaaug

SEQ ID NO: 3135466 - RNA, 20 nt, Human
auaaaaagacauucuuccaa

SEQ ID NO: 3135467 - RNA, 14 nt, Human
auaaaaacaacuuu

SEQ ID NO: 3135468 - RNA, 18 nt, Human
aucaaagagagaaaauaa

SEQ ID NO: 3135469 - RNA, 20 nt, Human
aucaaagggugaaaauuauu

SEQ ID NO: 3135470 - RNA, 23 nt, Human
agcaaaauugauguguuuauuua

SEQ ID NO: 3135471 - RNA, 13 nt, Human
agcaaaauugaug

SEQ ID NO: 3135472 - RNA, 19 nt, Human
agcaaaauugauguguuua

SEQ ID NO: 3135473 - RNA, 19 nt, Human
agaacagauaaucagugug

SEQ ID NO: 3135474 - RNA, 17 nt, Human
aauuauauaaguauucu

SEQ ID NO: 3135475 - RNA, 16 nt, Human
aauuauauaaguauuc

SEQ ID NO: 3135476 - RNA, 15 nt, Human
aauuauauaaguauu

SEQ ID NO: 3135477 - RNA, 16 nt, Human
aauuucauaugcugua

SEQ ID NO: 3135478 - RNA, 18 nt, Human
aauuucauaugcuguaua

SEQ ID NO: 3135479 - RNA, 20 nt, Human
acauaaguaauucaagaaaa

SEQ ID NO: 3135480 - RNA, 21 nt, Human
acauaaguaauucaagaaaac

SEQ ID NO: 3135481 - RNA, 16 nt, Human
acugacagauuuccau

SEQ ID NO: 3135482 - RNA, 16 nt, Human
aaucucauaauuuaua

SEQ ID NO: 3135483 - RNA, 16 nt, Human
aagaguaguaauagag

SEQ ID NO: 3135484 - RNA, 19 nt, Human
aagaguauuuuugacagaa

SEQ ID NO: 3135485 - RNA, 14 nt, Human
aagagagaaaauaa

SEQ ID NO: 3135486 - RNA, 23 nt, Human
aaaucucaaauuuggauugcuaa

SEQ ID NO: 3135487 - RNA, 13 nt, Human
aaagccugcaauu

SEQ ID NO: 3135488 - RNA, 18 nt, Human
aaagccugcaauuucaua

SEQ ID NO: 3135489 - RNA, 22 nt, Human
gcuuccuucugugaaaguacau

SEQ ID NO: 3135490 - RNA, 21 nt, Human
gccacuguuuugaaucucaua

SEQ ID NO: 3135491 - RNA, 21 nt, Human
aaagauuuucagaaaauauua

SEQ ID NO: 3135492 - RNA, 18 nt, Human
ggucauauuaauauauuu

SEQ ID NO: 3135493 - RNA, 21 nt, Human
ggucauauuaauauauuucca

SEQ ID NO: 3135494 - RNA, 14 nt, Human
aaagauuuucagaa

SEQ ID NO: 3135495 - RNA, 15 nt, Human
aaagauuuucagaaa

SEQ ID NO: 3135496 - RNA, 21 nt, Human
aaaauauuauguguuuccaua

SEQ ID NO: 3135497 - RNA, 14 nt, Human
aaaauauuaugugu

SEQ ID NO: 3135498 - RNA, 15 nt, Human
aaaauauuauguguu

SEQ ID NO: 3135499 - RNA, 19 nt, Human
aaacaacuucaauauccaa

SEQ ID NO: 3135500 - RNA, 19 nt, Human
aaaagccugcaauuucaua

SEQ ID NO: 3135501 - RNA, 14 nt, Human
aaaauauauuuaau

SEQ ID NO: 3135502 - RNA, 14 nt, Human
gaugguucuagcau

SEQ ID NO: 3135503 - RNA, 20 nt, Human
gaauauguuucaaacuuugg

SEQ ID NO: 3135504 - RNA, 15 nt, Human
gaauauguuucaaac

SEQ ID NO: 3135505 - RNA, 14 nt, Human
gaauauguuucaaa

SEQ ID NO: 3135506 - RNA, 22 nt, Human
gaauauugcuuuggucauauga

SEQ ID NO: 3135507 - RNA, 12 nt, Human
cuucaucugacu

SEQ ID NO: 3135508 - RNA, 18 nt, Human
cuucaucugacuaugaca

SEQ ID NO: 3135509 - RNA, 23 nt, Human
caguuguucaauaauaaauauuu

SEQ ID NO: 3135510 - RNA, 22 nt, Human
ccaauuauaugagacguuuuug

SEQ ID NO: 3135511 - RNA, 19 nt, Human
ccaauucgaacuuuuucca

SEQ ID NO: 3135512 - RNA, 15 nt, Human
caacuauuuuuccaa

SEQ ID NO: 3135513 - RNA, 20 nt, Human
auuaaauuuugaguucuaca

SEQ ID NO: 3135514 - RNA, 15 nt, Human
auugauaaguucaua

SEQ ID NO: 3135515 - RNA, 12 nt, Human
auugauaaguuc

SEQ ID NO: 3135516 - RNA, 19 nt, Human
auugauaaguucauacauu

SEQ ID NO: 3135517 - RNA, 18 nt, Human
auugauaaguucauacau

SEQ ID NO: 3135518 - RNA, 17 nt, Human
auugauaaguucauaca

SEQ ID NO: 3135519 - RNA, 16 nt, Human
auugauaaguucauac

SEQ ID NO: 3135520 - RNA, 13 nt, Human
uaauucaagaaaa

SEQ ID NO: 3135521 - RNA, 17 nt, Human
uaauuuauacaggucau

SEQ ID NO: 3135522 - RNA, 18 nt, Human
uacauauuuuuguagcac

SEQ ID NO: 3135523 - RNA, 17 nt, Human
uacauauuuuuguagca

SEQ ID NO: 3135524 - RNA, 14 nt, Human
uaaugguguuuuaa

SEQ ID NO: 3135525 - RNA, 23 nt, Human
uaaucagugugucuaaauuugaa

SEQ ID NO: 3135526 - RNA, 20 nt, Human
uaaguauguguaaaauguga

SEQ ID NO: 3135527 - RNA, 13 nt, Human
uaaguucauacau

SEQ ID NO: 3135528 - RNA, 12 nt, Human
uaaguucauaca

SEQ ID NO: 3135529 - RNA, 15 nt, Human
aauaguauuugagag

SEQ ID NO: 3135530 - RNA, 20 nt, Human
uaaauuuugucuuuaacuca

SEQ ID NO: 3135531 - RNA, 18 nt, Human
uaaauuuugaguucuaca

SEQ ID NO: 3135532 - RNA, 19 nt, Human
uaaauuuugaguucuacau

SEQ ID NO: 3135533 - RNA, 20 nt, Human
aauauugcuuuggucauaug

SEQ ID NO: 3135534 - RNA, 18 nt, Human
aauauuguguugugaaug

SEQ ID NO: 3135535 - RNA, 17 nt, Human
uaaauuuugaguucuac

SEQ ID NO: 3135536 - RNA, 21 nt, Human
aauaauuuuaagaaaucaaag

SEQ ID NO: 3135537 - RNA, 20 nt, Human
aauaacugugaaguuuacau

SEQ ID NO: 3135538 - RNA, 14 nt, Human
aauaacugugaagu

SEQ ID NO: 3135539 - RNA, 16 nt, Human
aauaacugugaaguuu

SEQ ID NO: 3135540 - RNA, 13 nt, Human
aauaacugugaag

SEQ ID NO: 3135541 - RNA, 17 nt, Human
aauuuauacaggucaua

SEQ ID NO: 3135542 - RNA, 16 nt, Human
aauuuauacaggucau

SEQ ID NO: 3135543 - RNA, 18 nt, Human
acaaugaagauaaaaaga

SEQ ID NO: 3135544 - RNA, 17 nt, Human
acaagaugguucuagca

SEQ ID NO: 3135545 - RNA, 16 nt, Human
uauaaguauucuaaau

SEQ ID NO: 3135546 - RNA, 15 nt, Human
uauauuuaaugauaa

SEQ ID NO: 3135547 - RNA, 16 nt, Human
uaucuuguagcuuuau

SEQ ID NO: 3135548 - RNA, 14 nt, Human
acagauaaucagug

SEQ ID NO: 3135549 - RNA, 20 nt, Human
uaguaauagagcaaaauuga

SEQ ID NO: 3135550 - RNA, 14 nt, Human
uaguaauagagcaa

SEQ ID NO: 3135551 - RNA, 18 nt, Human
acacaacuauuuuuccaa

SEQ ID NO: 3135552 - RNA, 18 nt, Human
guucuagcauggcauauu

SEQ ID NO: 3135553 - RNA, 9 nt, Human
guucauaca

SEQ ID NO: 3135554 - RNA, 23 nt, Human
guucauacauauuuuuguagcac

SEQ ID NO: 3135555 - RNA, 14 nt, Human
guucauacauauuu

SEQ ID NO: 3135556 - RNA, 13 nt, Human
guucauacauauu

SEQ ID NO: 3135557 - RNA, 10 nt, Human
guucauacau

SEQ ID NO: 3135558 - RNA, 14 nt, Human
guucauacauugua

SEQ ID NO: 3135559 - RNA, 11 nt, Human
guucauacauu

SEQ ID NO: 3135560 - RNA, 14 nt, Human
guuaaguaugugua

SEQ ID NO: 3135561 - RNA, 18 nt, Human
guguuuccauauuuuaua

SEQ ID NO: 3135562 - RNA, 16 nt, Human
guauuuuugacagaau

SEQ ID NO: 3135563 - RNA, 20 nt, Human
guauuuuugacagaauaugu

SEQ ID NO: 3135564 - RNA, 22 nt, Human
aaauuauuuuguucauacauau

SEQ ID NO: 3135565 - RNA, 21 nt, Human
aaauuauuuuguucauacaua

SEQ ID NO: 3135566 - RNA, 20 nt, Human
aaauuauuuuguucauacau

SEQ ID NO: 3135567 - RNA, 18 nt, Human
aaauuauauaaguauucu

SEQ ID NO: 3135568 - RNA, 16 nt, Human
aaauuauauaaguauu

SEQ ID NO: 3135569 - RNA, 22 nt, Human
aaauuauauaaguauucuaaau

SEQ ID NO: 3135570 - RNA, 19 nt, Human
aaauuauuuuguucauaca

SEQ ID NO: 3135571 - RNA, 17 nt, Human
aaauuauuuuguucaua

SEQ ID NO: 3135572 - RNA, 17 nt, Human
aaccucaaaaugucuaa

SEQ ID NO: 3135573 - RNA, 18 nt, Human
aacaaugaagauaaaaag

SEQ ID NO: 3135574 - RNA, 14 nt, Human
aacaaugaagauaa

SEQ ID NO: 3135575 - RNA, 19 nt, Human
agacacaacuauuuuucca

SEQ ID NO: 3135576 - RNA, 20 nt, Human
agacacaacuauuuuuccaa

SEQ ID NO: 3135577 - RNA, 17 nt, Human
ugacauaaaaacaacuu

SEQ ID NO: 3135578 - RNA, 20 nt, Human
ugacauaaaaacaacuuuau

SEQ ID NO: 3135579 - RNA, 18 nt, Human
ugacauaaaaacaacuuu

SEQ ID NO: 3135580 - RNA, 14 nt, Human
agagcaaaauugau

SEQ ID NO: 3135581 - RNA, 22 nt, Human
ucuacauaaguaauucaagaaa

SEQ ID NO: 3135582 - RNA, 17 nt, Human
ucuacauaaguaauuca

SEQ ID NO: 3135583 - RNA, 20 nt, Human
ucuacauaaguaauucaaga

SEQ ID NO: 3135584 - RNA, 22 nt, Human
uccuuucuaacaaaaaaauaua

SEQ ID NO: 3135585 - RNA, 17 nt, Human
agaaaucaaagagagaa

SEQ ID NO: 3135586 - RNA, 16 nt, Human
ucugacuaugacauaa

SEQ ID NO: 3135587 - RNA, 14 nt, Human
ucugacuaugacau

SEQ ID NO: 3135588 - RNA, 19 nt, Human
ucccuuucugcuuguguua

SEQ ID NO: 3135589 - RNA, 16 nt, Human
accucaaaaugucuaa

SEQ ID NO: 3135590 - RNA, 19 nt, Human
accucaaaaugucuaagau

SEQ ID NO: 3135591 - RNA, 17 nt, Human
acauaucuaguaugaaa

SEQ ID NO: 3135592 - RNA, 23 nt, Human
acauaucuaguaugaaauuauau

SEQ ID NO: 3135593 - RNA, 22 nt, Human
acauaucuaguaugaaauuaua

SEQ ID NO: 3135594 - RNA, 20 nt, Human
acauaucuaguaugaaauua

SEQ ID NO: 3135595 - RNA, 21 nt, Human
uauuuccauuaaaaaaucagu

SEQ ID NO: 3135596 - RNA, 21 nt, Human
acauaaaaacaacuuuauacc

SEQ ID NO: 3135597 - RNA, 19 nt, Human
acauaaaaacaacuuuaua

SEQ ID NO: 3135598 - RNA, 16 nt, Human
acauaaaaacaacuuu

SEQ ID NO: 3135599 - RNA, 17 nt, Human
ucaaagggugaaaauua

SEQ ID NO: 3135600 - RNA, 23 nt, Human
uauuuuugacagaauauguuuca

SEQ ID NO: 3135601 - RNA, 19 nt, Human
uauuuuugacagaauaugu

SEQ ID NO: 3135602 - RNA, 13 nt, Human
uauuuuugacaga

SEQ ID NO: 3135603 - RNA, 15 nt, Human
uauuuuugacagaau

SEQ ID NO: 3135604 - RNA, 14 nt, Human
uauuuuugacagaa

SEQ ID NO: 3135605 - RNA, 14 nt, Human
ucaaaaugucuaag

SEQ ID NO: 3135606 - RNA, 22 nt, Human
ucacauaucuaguaugaaauua

SEQ ID NO: 3135607 - RNA, 21 nt, Human
ucacauaucuaguaugaaauu

SEQ ID NO: 3135608 - RNA, 17 nt, Human
ucacauaucuaguauga

SEQ ID NO: 3135609 - RNA, 17 nt, Human
ucacuaccuucaugcau

SEQ ID NO: 3135610 - RNA, 14 nt, Human
agugugucuaaauu

SEQ ID NO: 3135611 - RNA, 17 nt, Human
aguguacuuaacuauuc

SEQ ID NO: 3135612 - RNA, 19 nt, Human
uguguuaaguauguguaaa

SEQ ID NO: 3135613 - RNA, 15 nt, Human
uguuaaguaugugua

SEQ ID NO: 3135614 - RNA, 16 nt, Human
uguuaaguauguguaa

SEQ ID NO: 3135615 - RNA, 14 nt, Human
ugugauguauucua

SEQ ID NO: 3135616 - RNA, 18 nt, Human
agucacuaccuucaugca

SEQ ID NO: 3135617 - RNA, 17 nt, Human
uuaauuccaauuauaug

SEQ ID NO: 3135618 - RNA, 14 nt, Human
uguuuauuuauaga

SEQ ID NO: 3135619 - RNA, 24 nt, Human
uguuuauuuauagaguguacuuaa

SEQ ID NO: 3135620 - RNA, 19 nt, Human
uguuuugaaucucauaauu

SEQ ID NO: 3135621 - RNA, 16 nt, Human
uguaaauaguauuuga

SEQ ID NO: 3135622 - RNA, 22 nt, Human
uguauucuagcuaauguaauaa

SEQ ID NO: 3135623 - RNA, 20 nt, Human
uguauucuagcuaauguaau

SEQ ID NO: 3135624 - RNA, 16 nt, Human
aguaguaauagagcaa

SEQ ID NO: 3135625 - RNA, 16 nt, Human
aguacauuuggagaca

SEQ ID NO: 3135626 - RNA, 15 nt, Human
aguaauucaagaaaa

SEQ ID NO: 3135627 - RNA, 14 nt, Human
aguaauagagcaaa

SEQ ID NO: 3135628 - RNA, 17 nt, Human
aggagaguagaacagau

SEQ ID NO: 3135629 - RNA, 15 nt, Human
uggagcaaagcugau

SEQ ID NO: 3135630 - RNA, 15 nt, Human
ugaguucuacauaag

SEQ ID NO: 3135631 - RNA, 20 nt, Human
ugaguucuacauaaguaauu

SEQ ID NO: 3135632 - RNA, 16 nt, Human
ugauaaguaaaugcua

SEQ ID NO: 3135633 - RNA, 19 nt, Human
ugauaaguucauacauugu

SEQ ID NO: 3135634 - RNA, 17 nt, Human
ugauaaguucauacauu

SEQ ID NO: 3135635 - RNA, 15 nt, Human
ugauaaguucauaca

SEQ ID NO: 3135636 - RNA, 13 nt, Human
ugauaaguucaua

SEQ ID NO: 3135637 - RNA, 19 nt, Human
auuugaauguuaagcagau

SEQ ID NO: 3135638 - RNA, 13 nt, Human
auuugaauguuaa

SEQ ID NO: 3135639 - RNA, 18 nt, Human
auuugaauguuaagcaga

SEQ ID NO: 3135640 - RNA, 21 nt, Human
auuuggagacacaacuauuuu

SEQ ID NO: 3135641 - RNA, 19 nt, Human
auugauguguuuauuuaua

SEQ ID NO: 3135642 - RNA, 12 nt, Human
auugauguguuu

SEQ ID NO: 3135643 - RNA, 17 nt, Human
auuguacgaagaguauu

SEQ ID NO: 3135644 - RNA, 21 nt, Human
auucaggagaguagaacagau

SEQ ID NO: 3135645 - RNA, 22 nt, Human
auucaggagaguagaacagaua

SEQ ID NO: 3135646 - RNA, 21 nt, Human
auuauuuuguucauacauauu

SEQ ID NO: 3135647 - RNA, 19 nt, Human
uuuuuguagcacugacaga

SEQ ID NO: 3135648 - RNA, 17 nt, Human
uuuuuguagcacugaca

SEQ ID NO: 3135649 - RNA, 21 nt, Human
uuuuuguagcacugacagauu

SEQ ID NO: 3135650 - RNA, 20 nt, Human
uuuuuguagcacugacagau

SEQ ID NO: 3135651 - RNA, 13 nt, Human
uuuuugacagaau

SEQ ID NO: 3135652 - RNA, 12 nt, Human
uuuuugacagaa

SEQ ID NO: 3135653 - RNA, 12 nt, Human
auguuaagcaga

SEQ ID NO: 3135654 - RNA, 12 nt, Human
auguguuuccau

SEQ ID NO: 3135655 - RNA, 13 nt, Human
uuugagaguucua

SEQ ID NO: 3135656 - RNA, 21 nt, Human
uuugacagaauauguuucaaa

SEQ ID NO: 3135657 - RNA, 20 nt, Human
uuugacagaauauguuucaa

SEQ ID NO: 3135658 - RNA, 19 nt, Human
uuugacagaauauguuuca

SEQ ID NO: 3135659 - RNA, 18 nt, Human
uuugacagaauauguuuc

SEQ ID NO: 3135660 - RNA, 16 nt, Human
uucaaacuuuggaaca

SEQ ID NO: 3135661 - RNA, 22 nt, Human
uucaagaaaacaacuucaauau

SEQ ID NO: 3135662 - RNA, 21 nt, Human
uucacauaucuaguaugaaau

SEQ ID NO: 3135663 - RNA, 20 nt, Human
uucacauaucuaguaugaaa

SEQ ID NO: 3135664 - RNA, 13 nt, Human
uucagaaaauauu

SEQ ID NO: 3135665 - RNA, 14 nt, Human
uucagaaaauauua

SEQ ID NO: 3135666 - RNA, 20 nt, Human
uucagaaaauauuauguguu

SEQ ID NO: 3135667 - RNA, 21 nt, Human
uucagaaaauauuauguguuu

SEQ ID NO: 3135668 - RNA, 17 nt, Human
auauaaguauucuaaau

SEQ ID NO: 3135669 - RNA, 19 nt, Human
auauaaguauucuaaauuu

SEQ ID NO: 3135670 - RNA, 17 nt, Human
auauuguguugugaaug

SEQ ID NO: 3135671 - RNA, 18 nt, Human
auauuguguugugaaugu

SEQ ID NO: 3135672 - RNA, 17 nt, Human
auauguuucaaacuuug

SEQ ID NO: 3135673 - RNA, 20 nt, Human
aucagugugucuaaauuuga

SEQ ID NO: 3135674 - RNA, 19 nt, Human
aucagugugucuaaauuug

SEQ ID NO: 3135675 - RNA, 20 nt, Human
uugauguguuuauuuauaga

SEQ ID NO: 3135676 - RNA, 17 nt, Human
aucugacuaugacauaa

SEQ ID NO: 3135677 - RNA, 14 nt, Human
aucugacuaugaca

SEQ ID NO: 3135678 - RNA, 18 nt, Human
uuggagacacaacuauuu

SEQ ID NO: 3135679 - RNA, 18 nt, Human
uuguucauacauauuuuu

SEQ ID NO: 3135680 - RNA, 16 nt, Human
uuguucauacauauuu

SEQ ID NO: 3135681 - RNA, 20 nt, Human
uuguucaauaauaaauauuu

SEQ ID NO: 3135682 - RNA, 22 nt, Human
uuguucaauaauaaauauuuuu

SEQ ID NO: 3135683 - RNA, 13 nt, Human
uuguucauacaua

SEQ ID NO: 3135684 - RNA, 17 nt, Human
uuguagcuuuaucaaag

SEQ ID NO: 3135685 - RNA, 16 nt, Human
uuguagcuuuaucaaa

SEQ ID NO: 3135686 - RNA, 22 nt, Human
uuucacauaucuaguaugaaau

SEQ ID NO: 3135687 - RNA, 21 nt, Human
auggaaugcuguguuaaauaa

SEQ ID NO: 3135688 - RNA, 17 nt, Human
auggaaugcuguguuaa

SEQ ID NO: 3135689 - RNA, 17 nt, Human
gguguuuuaaaaaaucu

SEQ ID NO: 3135690 - RNA, 14 nt, Human
gcuuuaucaaaggg

SEQ ID NO: 3135691 - RNA, 18 nt, Human
gcagauggaaugcugugu

SEQ ID NO: 3135692 - RNA, 11 nt, Human
gaguucuacau

SEQ ID NO: 3135693 - RNA, 17 nt, Human
gacauaaaaacaacuuu

SEQ ID NO: 3135694 - RNA, 23 nt, Human
gaauucuugaaggaaaaugauac

SEQ ID NO: 3135695 - RNA, 11 nt, Human
cuuaacuauuc

SEQ ID NO: 3135696 - RNA, 18 nt, Human
cuguuuugaaucucauaa

SEQ ID NO: 3135697 - RNA, 15 nt, Human
cuuaugauugcagau

SEQ ID NO: 3135698 - RNA, 15 nt, Human
cucauaauuuauaca

SEQ ID NO: 3135699 - RNA, 13 nt, Human
cucauaauuuaua

SEQ ID NO: 3135700 - RNA, 22 nt, Human
cucauaauuuauacaggucaua

SEQ ID NO: 3135701 - RNA, 20 nt, Human
cugcaauuucauaugcugua

SEQ ID NO: 3135702 - RNA, 18 nt, Human
cugcaauuucauaugcug

SEQ ID NO: 3135703 - RNA, 20 nt, Human
cauuguacgaagaguauuuu

SEQ ID NO: 3135704 - RNA, 16 nt, Human
ccaaaggcucucuccu

SEQ ID NO: 3135705 - RNA, 16 nt, Human
ccagugaauucuugaa

SEQ ID NO: 3135706 - RNA, 20 nt, Human
ccagugaauucuugaaggaa

SEQ ID NO: 3135707 - RNA, 23 nt, Human
uuuggaacaagaugguucuagca

SEQ ID NO: 3135708 - RNA, 13 nt, Human
uuuguucauacau

SEQ ID NO: 3135709 - RNA, 16 nt, Human
uuuguucauacauauu

SEQ ID NO: 3135710 - RNA, 15 nt, Human
uuuucagaaaauauu

SEQ ID NO: 3135711 - RNA, 13 nt, Human
uuuucacauaucu

SEQ ID NO: 3135712 - RNA, 16 nt, Human
uuuucagaaaauauua

SEQ ID NO: 3135713 - RNA, 14 nt, Human
uuuccaaaauaauu

SEQ ID NO: 3135714 - RNA, 15 nt, Human
uuuacauuguaaaua

SEQ ID NO: 3135715 - RNA, 13 nt, Human
uuuacauuguaaa

SEQ ID NO: 3135716 - RNA, 17 nt, Human
uuccuucugugaaagua

SEQ ID NO: 3135717 - RNA, 17 nt, Human
uucaucugacuaugaca

SEQ ID NO: 3135718 - RNA, 21 nt, Human
uuccauccuagucacuaccuu

SEQ ID NO: 3135719 - RNA, 15 nt, Human
uugaaucucauaauu

SEQ ID NO: 3135720 - RNA, 21 nt, Human
uugaaucucauaauuuauaca

SEQ ID NO: 3135721 - RNA, 12 nt, Human
uguuuuaaaaaa

SEQ ID NO: 3135722 - RNA, 20 nt, Human
ugugaaguuuacauuguaaa

SEQ ID NO: 3135723 - RNA, 14 nt, Human
ugugaaguuuacau

SEQ ID NO: 3135724 - RNA, 20 nt, Human
uguaaaaugugaagugaaug

SEQ ID NO: 3135725 - RNA, 22 nt, Human
uguagcacugacagauuuccau

SEQ ID NO: 3135726 - RNA, 17 nt, Human
uguagcacugacagauu

SEQ ID NO: 3135727 - RNA, 16 nt, Human
uguagcacugacagau

SEQ ID NO: 3135728 - RNA, 16 nt, Human
ugcuagguuaauucca

SEQ ID NO: 3135729 - RNA, 23 nt, Human
ugcuagguuaauuccaauuauau

SEQ ID NO: 3135730 - RNA, 22 nt, Human
uaaauaaaccucaaaaugucua

SEQ ID NO: 3135731 - RNA, 13 nt, Human
guuuagcaguaua

SEQ ID NO: 3135732 - RNA, 13 nt, Human
uaauuuuaagaaa

SEQ ID NO: 3135733 - RNA, 23 nt, Human
uaauuaaauuuugaguucuacau

SEQ ID NO: 3135734 - RNA, 19 nt, Human
uaaugauaaguaaaugcua

SEQ ID NO: 3135735 - RNA, 14 nt, Human
uaauauauuuccau

SEQ ID NO: 3135736 - RNA, 19 nt, Human
uaauaaauauuuuugccau

SEQ ID NO: 3135737 - RNA, 15 nt, Human
uaauaacugugaagu

SEQ ID NO: 3135738 - RNA, 18 nt, Human
uauauaaguauucuaaau

SEQ ID NO: 3135739 - RNA, 21 nt, Human
uauaauucagaaggaucuuca

SEQ ID NO: 3135740 - RNA, 16 nt, Human
uauacccagaaaguua

SEQ ID NO: 3135741 - RNA, 23 nt, Human
uacauuuggagacacaacuauuu

SEQ ID NO: 3135742 - RNA, 22 nt, Human
uacgaagaguauuuuugacaga

SEQ ID NO: 3135743 - RNA, 20 nt, Human
uacgaagaguauuuuugaca

SEQ ID NO: 3135744 - RNA, 23 nt, Human
uacgaagaguauuuuugacagaa

SEQ ID NO: 3135745 - RNA, 17 nt, Human
uagaacagauaaucagu

SEQ ID NO: 3135746 - RNA, 21 nt, Human
ucucaaauuuggauugcuaau

SEQ ID NO: 3135747 - RNA, 17 nt, Human
ucuaguaugaaauuaua

SEQ ID NO: 3135748 - RNA, 15 nt, Human
ucuaguaugaaauua

SEQ ID NO: 3135749 - RNA, 13 nt, Human
ucuaaauuugaau

SEQ ID NO: 3135750 - RNA, 17 nt, Human
ucuaaauuugaauguua

SEQ ID NO: 3135751 - RNA, 19 nt, Human
ucuaacaaaaaaauauauu

SEQ ID NO: 3135752 - RNA, 22 nt, Human
ucuaaauuugaauguuaagcag

SEQ ID NO: 3135753 - RNA, 23 nt, Human
ucuaaauuugaauguuaagcaga

SEQ ID NO: 3135754 - RNA, 23 nt, Human
ucuaaauuuuauaucuuguagcu

SEQ ID NO: 3135755 - RNA, 18 nt, Human
ucuaaauuuuauaucuug

SEQ ID NO: 3135756 - RNA, 20 nt, Human
uccuucugugaaaguacauu

SEQ ID NO: 3135757 - RNA, 18 nt, Human
uauuugagaguucuaaau

SEQ ID NO: 3135758 - RNA, 19 nt, Human
uauuugagaguucuaaauu

SEQ ID NO: 3135759 - RNA, 15 nt, Human
uauuugagaguucua

SEQ ID NO: 3135760 - RNA, 16 nt, Human
uauuugagaguucuaa

SEQ ID NO: 3135761 - RNA, 19 nt, Human
ucagaaaauauuauguguu

SEQ ID NO: 3135762 - RNA, 20 nt, Human
ucagaaaauauuauguguuu

SEQ ID NO: 3135763 - RNA, 17 nt, Human
ucagaaaauauuaugug

SEQ ID NO: 3135764 - RNA, 13 nt, Human
ucaguuguacagu

SEQ ID NO: 3135765 - RNA, 16 nt, Human
ucauacauuguacgaa

SEQ ID NO: 3135766 - RNA, 15 nt, Human
ucauacauuguacga

SEQ ID NO: 3135767 - RNA, 13 nt, Human
ucauacauuguac

SEQ ID NO: 3135768 - RNA, 15 nt, Human
ucauaauuuauacag

SEQ ID NO: 3135769 - RNA, 13 nt, Norwalk virus
ggcaucauauuca

SEQ ID NO: 3135770 - RNA, 15 nt, Norwalk virus
accccauugaggugc

SEQ ID NO: 3135771 - RNA, 20 nt, Norwalk virus
gacagcagucgcgacugcug

SEQ ID NO: 3135772 - RNA, 21 nt, Norwalk virus
uuaccacaagaguacauuuca

SEQ ID NO: 3135773 - RNA, 17 nt, Norwalk virus
ucucccaaucaguagua

SEQ ID NO: 3135774 - RNA, 16 nt, Norwalk virus
aggcugcccugcucca

SEQ ID NO: 3135775 - RNA, 18 nt, Norwalk virus
gugagagugucugcuccc

SEQ ID NO: 3135776 - RNA, 16 nt, Norwalk virus
gguggcuucaugucag

SEQ ID NO: 3135777 - RNA, 18 nt, Norwalk virus
guaucggcauuuccccag

SEQ ID NO: 3135778 - RNA, 22 nt, Norwalk virus
auuugaguuuggguccccaucu

SEQ ID NO: 3135779 - RNA, 15 nt, Norwalk virus
gcaagaaaauucuuu

SEQ ID NO: 3135780 - RNA, 15 nt, Norwalk virus
gagguuaaugcuucu

SEQ ID NO: 3135781 - RNA, 17 nt, Norwalk virus
auggcgcuaguggcgcu

SEQ ID NO: 3135782 - RNA, 12 nt, Norwalk virus
aaugauagaaau

SEQ ID NO: 3135783 - RNA, 18 nt, Norwalk virus
ugcuagcugguaaugccu

SEQ ID NO: 3135784 - RNA, 17 nt, Norwalk virus
ucaauacagacagguug

SEQ ID NO: 3135785 - RNA, 14 nt, Norwalk virus
caacucucuuucca

SEQ ID NO: 3135786 - RNA, 22 nt, Norwalk virus
agcgggcauacagguugguggc

SEQ ID NO: 3135787 - RNA, 21 nt, Norwalk virus
auuucccccccaucacacccg

SEQ ID NO: 3135788 - RNA, 15 nt, Norwalk virus
ucccaaucaguagua

SEQ ID NO: 3135789 - RNA, 14 nt, Norwalk virus
ugcucccgaguccu

SEQ ID NO: 3135790 - RNA, 14 nt, Norwalk virus
auccgguggcuuca

SEQ ID NO: 3135791 - RNA, 19 nt, Norwalk virus
ccaaaucugccauugaguu

SEQ ID NO: 3135792 - RNA, 19 nt, Norwalk virus
gagauuuggaaaucuuucu

SEQ ID NO: 3135793 - RNA, 21 nt, Norwalk virus
guaccggagguuaaugcuucu

SEQ ID NO: 3135794 - RNA, 15 nt, Norwalk virus
cccugucuauuacca

SEQ ID NO: 3135795 - RNA, 14 nt, Norwalk virus
cgcuggucaguugg

SEQ ID NO: 3135796 - RNA, 15 nt, Norwalk virus
acaaaauuugcaacu

SEQ ID NO: 3135797 - RNA, 20 nt, Norwalk virus
cgagucacaaaacucaucga

SEQ ID NO: 3135798 - RNA, 18 nt, Norwalk virus
acacucccaaaucugcca

SEQ ID NO: 3135799 - RNA, 20 nt, Norwalk virus
cuacacugucuucugugcca

SEQ ID NO: 3135800 - RNA, 23 nt, Norwalk virus
gcacugguggugguacuggugau

SEQ ID NO: 3135801 - RNA, 14 nt, Norwalk virus
ugaccuuuggaaga

SEQ ID NO: 3135802 - RNA, 16 nt, Norwalk virus
acugucuucugugcca

SEQ ID NO: 3135803 - RNA, 20 nt, Norwalk virus
aacucacgugccccucuccc

SEQ ID NO: 3135804 - RNA, 12 nt, Norwalk virus
cacuuuuguccc

SEQ ID NO: 3135805 - RNA, 17 nt, Norwalk virus
uaccacgcggaggcucu

SEQ ID NO: 3135806 - RNA, 22 nt, Norwalk virus
ugaugcagcaagaucuguggca

SEQ ID NO: 3135807 - RNA, 17 nt, Norwalk virus
aggcugcccugcuccac

SEQ ID NO: 3135808 - RNA, 12 nt, Norwalk virus
gaacaagccccu

SEQ ID NO: 3135809 - RNA, 20 nt, Norwalk virus
cauugaggugccuuuggaag

SEQ ID NO: 3135810 - RNA, 17 nt, Norwalk virus
ccaggcccuucacacuc

SEQ ID NO: 3135811 - RNA, 15 nt, Norwalk virus
uauaauuugcccugu

SEQ ID NO: 3135812 - RNA, 13 nt, Norwalk virus
ugaacaagccccu

SEQ ID NO: 3135813 - RNA, 16 nt, Norwalk virus
caugcuguacaccccc

SEQ ID NO: 3135814 - RNA, 18 nt, Norwalk virus
ccaauggggcuagcucgg

SEQ ID NO: 3135815 - RNA, 16 nt, Norwalk virus
uuuccugcauaccccc

SEQ ID NO: 3135816 - RNA, 18 nt, Norwalk virus
aguuaugacuugccccag

SEQ ID NO: 3135817 - RNA, 19 nt, Norwalk virus
gagcuccagucacccgcau

SEQ ID NO: 3135818 - RNA, 13 nt, Norwalk virus
cucuuuccacaug

SEQ ID NO: 3135819 - RNA, 13 nt, Norwalk virus
acugccagcucgg

SEQ ID NO: 3135820 - RNA, 12 nt, Norwalk virus
ucaaucaucugg

SEQ ID NO: 3135821 - RNA, 19 nt, Norwalk virus
aagcaacucucuuuccaca

SEQ ID NO: 3135822 - RNA, 13 nt, Norwalk virus
ugacuccacccgg

SEQ ID NO: 3135823 - RNA, 16 nt, Norwalk virus
ugagagugucugcucc

SEQ ID NO: 3135824 - RNA, 13 nt, Norwalk virus
ucuuuguuucaug

SEQ ID NO: 3135825 - RNA, 23 nt, Norwalk virus
uugaagcuucaaaucaauuauug

SEQ ID NO: 3135826 - RNA, 15 nt, Norwalk virus
caagagguaggcuug

SEQ ID NO: 3135827 - RNA, 19 nt, Norwalk virus
uggaagauccccaauuaug

SEQ ID NO: 3135828 - RNA, 19 nt, Norwalk virus
aguaauccaaauuauuccc

SEQ ID NO: 3135829 - RNA, 19 nt, Norwalk virus
aacacaucuagccccuucu

SEQ ID NO: 3135830 - RNA, 16 nt, Norwalk virus
gaauuuacuauuuccc

SEQ ID NO: 3135831 - RNA, 23 nt, Norwalk virus
gaaaugugggcaucauauucauu

SEQ ID NO: 3135832 - RNA, 20 nt, Norwalk virus
auuucaauacagacagguug

SEQ ID NO: 3135833 - RNA, 21 nt, Norwalk virus
ucuuaauccuuucuugcucca

SEQ ID NO: 3135834 - RNA, 19 nt, Norwalk virus
ggagcgggcauacagguug

SEQ ID NO: 3135835 - RNA, 24 nt, Norwalk virus
caucaagcguggauggcgcuagug

SEQ ID NO: 3135836 - RNA, 16 nt, Norwalk virus
aaccaggcccuucaca

SEQ ID NO: 3135837 - RNA, 23 nt, Norwalk virus
uacuguaggugaggcugcccugc

SEQ ID NO: 3135838 - RNA, 17 nt, Norwalk virus
guccucugcuaccacau

SEQ ID NO: 3135839 - RNA, 16 nt, Norwalk virus
agcagguucuucgaca

SEQ ID NO: 3135840 - RNA, 12 nt, Norwalk virus
cuugcuagugaa

SEQ ID NO: 3135841 - RNA, 18 nt, Norwalk virus
agucgcgacugcuggaca

SEQ ID NO: 3135842 - RNA, 13 nt, Norwalk virus
gugccuuuggaag

SEQ ID NO: 3135843 - RNA, 15 nt, Norwalk virus
agacagguugccauu

SEQ ID NO: 3135844 - RNA, 13 nt, Norwalk virus
auaugaaaugugg

SEQ ID NO: 3135845 - RNA, 14 nt, Norwalk virus
auccauuucucgaa

SEQ ID NO: 3135846 - RNA, 20 nt, Norwalk virus
cauuuccccagacaaugucc

SEQ ID NO: 3135847 - RNA, 23 nt, Norwalk virus
cauaauuggugcaauugcugcuu

SEQ ID NO: 3135848 - RNA, 23 nt, Norwalk virus
uggcccaagccauaauuggugca

SEQ ID NO: 3135849 - RNA, 14 nt, Norwalk virus
uuuacuauuucccc

SEQ ID NO: 3135850 - RNA, 18 nt, Norwalk virus
ggccgccugguuggcacc

SEQ ID NO: 3135851 - RNA, 16 nt, Norwalk virus
guuggcaccaccccag

SEQ ID NO: 3135852 - RNA, 21 nt, Norwalk virus
agguuuaauuagguuuaauuu

SEQ ID NO: 3135853 - RNA, 19 nt, Norwalk virus
uucuuagcuggauuucccc

SEQ ID NO: 3135854 - RNA, 22 nt, Norwalk virus
uuguaauaugaaaugugggcau

SEQ ID NO: 3135855 - RNA, 23 nt, Norwalk virus
uguuguaauaugaaaugugggca

SEQ ID NO: 3135856 - RNA, 23 nt, Norwalk virus
ucugggagcgggcauacagguug

SEQ ID NO: 3135857 - RNA, 15 nt, Norwalk virus
guggcuucaugucag

SEQ ID NO: 3135858 - RNA, 14 nt, Norwalk virus
cuucacacucccaa

SEQ ID NO: 3135859 - RNA, 18 nt, Norwalk virus
ccaucuaucacaaaugua

SEQ ID NO: 3135860 - RNA, 22 nt, Norwalk virus
cuuuggaagauccccaauuaug

SEQ ID NO: 3135861 - RNA, 20 nt, Norwalk virus
cauuucacaucuugcuagug

SEQ ID NO: 3135862 - RNA, 11 nt, Norwalk virus
ccaguuucauu

SEQ ID NO: 3135863 - RNA, 14 nt, Norwalk virus
uguuaggacucuag

SEQ ID NO: 3135864 - RNA, 19 nt, Norwalk virus
uaguaucggcauuucccca

SEQ ID NO: 3135865 - RNA, 17 nt, Norwalk virus
gcuucaugucaguuccc

SEQ ID NO: 3135866 - RNA, 12 nt, Norwalk virus
acacaucuagcc

SEQ ID NO: 3135867 - RNA, 13 nt, Norwalk virus
ugccuuuggaaga

SEQ ID NO: 3135868 - RNA, 19 nt, Norwalk virus
auaugacacaguuuggcca

SEQ ID NO: 3135869 - RNA, 14 nt, Norwalk virus
caucauauucauuu

SEQ ID NO: 3135870 - RNA, 14 nt, Norwalk virus
cauguugccaagau

SEQ ID NO: 3135871 - RNA, 16 nt, Norwalk virus
ggcaagagguaggcuu

SEQ ID NO: 3135872 - RNA, 20 nt, Norwalk virus
ucuacacugucuucugugcc

SEQ ID NO: 3135873 - RNA, 20 nt, Norwalk virus
gaagauguuaggaauguucu

SEQ ID NO: 3135874 - RNA, 20 nt, Norwalk virus
augcuguacaccccccuccg

SEQ ID NO: 3135875 - RNA, 18 nt, Norwalk virus
caugcgccuugugugcau

SEQ ID NO: 3135876 - RNA, 17 nt, Norwalk virus
acuguaggugaggcugc

SEQ ID NO: 3135877 - RNA, 21 nt, Norwalk virus
cacugguggugguacugguga

SEQ ID NO: 3135878 - RNA, 15 nt, Norwalk virus
cucaauacagugugg

SEQ ID NO: 3135879 - RNA, 19 nt, Norwalk virus
cagucgcgacugcuggaca

SEQ ID NO: 3135880 - RNA, 16 nt, Norwalk virus
gguccacaacagcugc

SEQ ID NO: 3135881 - RNA, 17 nt, Norwalk virus
ucuaucacaaauguaua

SEQ ID NO: 3135882 - RNA, 19 nt, Norwalk virus
caaagcauacccugauggu

SEQ ID NO: 3135883 - RNA, 21 nt, Norwalk virus
uccgcacugguggugguacug

SEQ ID NO: 3135884 - RNA, 20 nt, Norwalk virus
cucugucuaacucacgugcc

SEQ ID NO: 3135885 - RNA, 12 nt, Norwalk virus
cgucuggcuccc

SEQ ID NO: 3135886 - RNA, 14 nt, Norwalk virus
cagguccuggugcu

SEQ ID NO: 3135887 - RNA, 23 nt, Norwalk virus
accucggugguugugauuggcau

SEQ ID NO: 3135888 - RNA, 13 nt, Norwalk virus
auauucauuuaau

SEQ ID NO: 3135889 - RNA, 13 nt, Norwalk virus
uaauccaaauuau

SEQ ID NO: 3135890 - RNA, 11 nt, Norwalk virus
cagacagguug

SEQ ID NO: 3135891 - RNA, 16 nt, Norwalk virus
aacagccucuucuaca

SEQ ID NO: 3135892 - RNA, 19 nt, Norwalk virus
cugccauugaguucucugu

SEQ ID NO: 3135893 - RNA, 21 nt, Norwalk virus
agagugugcaguuccaaaaug

SEQ ID NO: 3135894 - RNA, 13 nt, Norwalk virus
cugucuauuacca

SEQ ID NO: 3135895 - RNA, 20 nt, Norwalk virus
ccaggcccuucacacuccca

SEQ ID NO: 3135896 - RNA, 22 nt, Norwalk virus
ugaagcuucaaaucaauuauug

SEQ ID NO: 3135897 - RNA, 15 nt, Norwalk virus
gacuugccccagucc

SEQ ID NO: 3135898 - RNA, 13 nt, Norwalk virus
uacuauuucccca

SEQ ID NO: 3135899 - RNA, 21 nt, Norwalk virus
ccuggauaauuaauaauuuug

SEQ ID NO: 3135900 - RNA, 14 nt, Norwalk virus
gggcauacagguug

SEQ ID NO: 3135901 - RNA, 19 nt, Norwalk virus
cgcuaguggcgcuggucag

SEQ ID NO: 3135902 - RNA, 17 nt, Norwalk virus
aggaauguucucuuuca

SEQ ID NO: 3135903 - RNA, 14 nt, Norwalk virus
guuugaccagugcu

SEQ ID NO: 3135904 - RNA, 17 nt, Norwalk virus
agggcccugcccccauu

SEQ ID NO: 3135905 - RNA, 17 nt, Norwalk virus
ccauucuagccagaccc

SEQ ID NO: 3135906 - RNA, 17 nt, Norwalk virus
cucccgaguccucugcu

SEQ ID NO: 3135907 - RNA, 18 nt, Norwalk virus
uucccauaccauuugccu

SEQ ID NO: 3135908 - RNA, 21 nt, Norwalk virus
caaagguaucaacaaaauuug

SEQ ID NO: 3135909 - RNA, 15 nt, Norwalk virus
ucccccaucuugguu

SEQ ID NO: 3135910 - RNA, 17 nt, Norwalk virus
aacucacgugccccucu

SEQ ID NO: 3135911 - RNA, 13 nt, Norwalk virus
gguccuggugcuu

SEQ ID NO: 3135912 - RNA, 16 nt, Norwalk virus
aaucaucugguauuag

SEQ ID NO: 3135913 - RNA, 13 nt, Norwalk virus
uacauuucacauc

SEQ ID NO: 3135914 - RNA, 17 nt, Norwalk virus
uaguuuccugcauaccc

SEQ ID NO: 3135915 - RNA, 22 nt, Norwalk virus
acacaguuuggccauucuagcc

SEQ ID NO: 3135916 - RNA, 16 nt, Norwalk virus
uucuucgacagcaguc

SEQ ID NO: 3135917 - RNA, 14 nt, Norwalk virus
acucuggauggccg

SEQ ID NO: 3135918 - RNA, 20 nt, Norwalk virus
auguccagagugugcaguuc

SEQ ID NO: 3135919 - RNA, 20 nt, Norwalk virus
auccuauugaucccuggaua

SEQ ID NO: 3135920 - RNA, 22 nt, Norwalk virus
uaaugcuucugacccucuugca

SEQ ID NO: 3135921 - RNA, 21 nt, Norwalk virus
uuaauuagguuuaauuagguu

SEQ ID NO: 3135922 - RNA, 17 nt, Norwalk virus
agcgggcauacagguug

SEQ ID NO: 3135923 - RNA, 12 nt, Norwalk virus
cagguucaauca

SEQ ID NO: 3135924 - RNA, 17 nt, Norwalk virus
ggguccacaacagcugc

SEQ ID NO: 3135925 - RNA, 14 nt, Norwalk virus
gguucaacagccuc

SEQ ID NO: 3135926 - RNA, 20 nt, Norwalk virus
ugcaugcuguacaccccccu

SEQ ID NO: 3135927 - RNA, 23 nt, Norwalk virus
cacaagaguacauuucacaucuu

SEQ ID NO: 3135928 - RNA, 11 nt, Norwalk virus
auauucauuua

SEQ ID NO: 3135929 - RNA, 15 nt, Norwalk virus
gcccccauuggguuu

SEQ ID NO: 3135930 - RNA, 18 nt, Norwalk virus
auucuagccagacccagu

SEQ ID NO: 3135931 - RNA, 12 nt, Norwalk virus
cuagccccuucu

SEQ ID NO: 3135932 - RNA, 22 nt, Norwalk virus
uccaaauuauuccccuucaucc

SEQ ID NO: 3135933 - RNA, 17 nt, Norwalk virus
caucaagcguggauggc

SEQ ID NO: 3135934 - RNA, 16 nt, Norwalk virus
uggccauucuagccag

SEQ ID NO: 3135935 - RNA, 16 nt, Norwalk virus
gauccgguggcuucau

SEQ ID NO: 3135936 - RNA, 15 nt, Norwalk virus
aggcaaauggcauug

SEQ ID NO: 3135937 - RNA, 21 nt, Norwalk virus
gcugccgaucaauggggucuu

SEQ ID NO: 3135938 - RNA, 19 nt, Norwalk virus
uggauaauuaauaauuuug

SEQ ID NO: 3135939 - RNA, 15 nt, Norwalk virus
ucacgugccccucuc

SEQ ID NO: 3135940 - RNA, 12 nt, Norwalk virus
ucucaauacagu

SEQ ID NO: 3135941 - RNA, 18 nt, Norwalk virus
ucaggauuaugcuagcug

SEQ ID NO: 3135942 - RNA, 19 nt, Norwalk virus
uguaaucaaccuuacugaa

SEQ ID NO: 3135943 - RNA, 14 nt, Norwalk virus
gugaggcugcccug

SEQ ID NO: 3135944 - RNA, 19 nt, Norwalk virus
ccugguuggcaccacccca

SEQ ID NO: 3135945 - RNA, 20 nt, Norwalk virus
auggcgugagagugucugcu

SEQ ID NO: 3135946 - RNA, 19 nt, Norwalk virus
agcuccagucacccgcauu

SEQ ID NO: 3135947 - RNA, 16 nt, Norwalk virus
uaauaauuuugugcaa

SEQ ID NO: 3135948 - RNA, 15 nt, Norwalk virus
gaguuugggucccca

SEQ ID NO: 3135949 - RNA, 18 nt, Norwalk virus
acucaucgagauuuggaa

SEQ ID NO: 3135950 - RNA, 15 nt, Norwalk virus
cugugggaacugcca

SEQ ID NO: 3135951 - RNA, 22 nt, Norwalk virus
auaccacgcggaggcucucaau

SEQ ID NO: 3135952 - RNA, 14 nt, Norwalk virus
gucuauuaccacaa

SEQ ID NO: 3135953 - RNA, 15 nt, Norwalk virus
caaagcauacccuga

SEQ ID NO: 3135954 - RNA, 16 nt, Norwalk virus
uuagcuggauuucccc

SEQ ID NO: 3135955 - RNA, 15 nt, Norwalk virus
acgugccccucuccc

SEQ ID NO: 3135956 - RNA, 13 nt, Norwalk virus
ucaaagcauaccc

SEQ ID NO: 3135957 - RNA, 22 nt, Norwalk virus
accccauugaggugccuuugga

SEQ ID NO: 3135958 - RNA, 16 nt, Norwalk virus
agcaacucucuuucca

SEQ ID NO: 3135959 - RNA, 12 nt, Norwalk virus
ugcuggacaagu

SEQ ID NO: 3135960 - RNA, 23 nt, Norwalk virus
acaaauguauaaugguuggguug

SEQ ID NO: 3135961 - RNA, 15 nt, Norwalk virus
agacccaguaugaug

SEQ ID NO: 3135962 - RNA, 15 nt, Norwalk virus
ggugccuuuggaaga

SEQ ID NO: 3135963 - RNA, 14 nt, Norwalk virus
ugugguugacucca

SEQ ID NO: 3135964 - RNA, 14 nt, Norwalk virus
cacaucuagccccu

SEQ ID NO: 3135965 - RNA, 19 nt, Norwalk virus
caaaucugccauugaguuc

SEQ ID NO: 3135966 - RNA, 13 nt, Norwalk virus
ggcaccaccccag

SEQ ID NO: 3135967 - RNA, 23 nt, Norwalk virus
gccaagauaagagggaccuccaa

SEQ ID NO: 3135968 - RNA, 15 nt, Norwalk virus
ugugcaugcuguaca

SEQ ID NO: 3135969 - RNA, 18 nt, Norwalk virus
aacaaaauuugcaacugc

SEQ ID NO: 3135970 - RNA, 14 nt, Norwalk virus
ccauugaguucucu

SEQ ID NO: 3135971 - RNA, 16 nt, Norwalk virus
aucauauucauuuaau

SEQ ID NO: 3135972 - RNA, 20 nt, Norwalk virus
gugccuuuggaagauguuag

SEQ ID NO: 3135973 - RNA, 22 nt, Norwalk virus
uccacccgguucaacagccucu

SEQ ID NO: 3135974 - RNA, 17 nt, Norwalk virus
ugaggcugcccugcucc

SEQ ID NO: 3135975 - RNA, 18 nt, Norwalk virus
ugcugaugcagcaagauc

SEQ ID NO: 3135976 - RNA, 15 nt, Norwalk virus
ccgucuggcucccaa

SEQ ID NO: 3135977 - RNA, 15 nt, Norwalk virus
gaaaugugggcauca

SEQ ID NO: 3135978 - RNA, 15 nt, Norwalk virus
uccagaccucggugg

SEQ ID NO: 3135979 - RNA, 15 nt, Norwalk virus
uguauaccccccugg

SEQ ID NO: 3135980 - RNA, 18 nt, Norwalk virus
cucaucgagauuuggaaa

SEQ ID NO: 3135981 - RNA, 14 nt, Norwalk virus
gauaauaguuuccu

SEQ ID NO: 3135982 - RNA, 20 nt, Norwalk virus
ugcgccuugugugcaugcug

SEQ ID NO: 3135983 - RNA, 19 nt, Norwalk virus
ucuaagcaaaaacagguuc

SEQ ID NO: 3135984 - RNA, 13 nt, Norwalk virus
ucccccccaucac

SEQ ID NO: 3135985 - RNA, 19 nt, Norwalk virus
uggagcagaaaaccaggcc

SEQ ID NO: 3135986 - RNA, 15 nt, Norwalk virus
acaugugauugcuga

SEQ ID NO: 3135987 - RNA, 15 nt, Norwalk virus
cugucuucugugcca

SEQ ID NO: 3135988 - RNA, 13 nt, Norwalk virus
agucaggauuaug

SEQ ID NO: 3135989 - RNA, 13 nt, Norwalk virus
caugcgccuugug

SEQ ID NO: 3135990 - RNA, 18 nt, Norwalk virus
cccaaguugaccuuugga

SEQ ID NO: 3135991 - RNA, 13 nt, Norwalk virus
gcaguuccaaaau

SEQ ID NO: 3135992 - RNA, 20 nt, Norwalk virus
uccagaccucggugguugug

SEQ ID NO: 3135993 - RNA, 11 nt, Norwalk virus
aucaauuauug

SEQ ID NO: 3135994 - RNA, 13 nt, Norwalk virus
caucuuaauccuu

SEQ ID NO: 3135995 - RNA, 14 nt, Norwalk virus
agggcccugccccc

SEQ ID NO: 3135996 - RNA, 18 nt, Norwalk virus
caggcccuucacacuccc

SEQ ID NO: 3135997 - RNA, 18 nt, Norwalk virus
accccaguuucauuguca

SEQ ID NO: 3135998 - RNA, 15 nt, Norwalk virus
ucuaagcaaaaacag

SEQ ID NO: 3135999 - RNA, 13 nt, Norwalk virus
uaaugcuucugac

SEQ ID NO: 3136000 - RNA, 15 nt, Norwalk virus
uggcaggagcuccag

SEQ ID NO: 3136001 - RNA, 15 nt, Norwalk virus
ugccgaucaaugggg

SEQ ID NO: 3136002 - RNA, 21 nt, Norwalk virus
ucacacccgucuggcucccaa

SEQ ID NO: 3136003 - RNA, 18 nt, Norwalk virus
gggaacugccagcucggc

SEQ ID NO: 3136004 - RNA, 15 nt, Norwalk virus
uucauaauaaugaua

SEQ ID NO: 3136005 - RNA, 14 nt, Norwalk virus
gcugcccugcucca

SEQ ID NO: 3136006 - RNA, 22 nt, Norwalk virus
uacaccccccuccgcacuggug

SEQ ID NO: 3136007 - RNA, 21 nt, Norwalk virus
cucaucgagauuuggaaaucu

SEQ ID NO: 3136008 - RNA, 19 nt, Norwalk virus
gaauuuacuauuuccccaa

SEQ ID NO: 3136009 - RNA, 15 nt, Norwalk virus
aggugaggcugcccu

SEQ ID NO: 3136010 - RNA, 15 nt, Norwalk virus
cuucuguauaccccc

SEQ ID NO: 3136011 - RNA, 13 nt, Norwalk virus
uuacuauuucccc

SEQ ID NO: 3136012 - RNA, 20 nt, Norwalk virus
ggcgcuaguggcgcugguca

SEQ ID NO: 3136013 - RNA, 22 nt, Norwalk virus
gucgcgacugcuggacaaguua

SEQ ID NO: 3136014 - RNA, 19 nt, Norwalk virus
uacagugugguugacucca

SEQ ID NO: 3136015 - RNA, 23 nt, Norwalk virus
gugcuggggguuugaccagugcu

SEQ ID NO: 3136016 - RNA, 13 nt, Norwalk virus
uccgcacuggugg

SEQ ID NO: 3136017 - RNA, 14 nt, Norwalk virus
ggcaggagcuccag

SEQ ID NO: 3136018 - RNA, 15 nt, Norwalk virus
ccagagugugcaguu

SEQ ID NO: 3136019 - RNA, 23 nt, Norwalk virus
agcaacucucuuuccacauguga

SEQ ID NO: 3136020 - RNA, 17 nt, Norwalk virus
cagcagguagugcucug

SEQ ID NO: 3136021 - RNA, 12 nt, Norwalk virus
auggcacacccu

SEQ ID NO: 3136022 - RNA, 20 nt, Norwalk virus
caggcccuucacacucccaa

SEQ ID NO: 3136023 - RNA, 18 nt, Norwalk virus
uuguaauaugaaaugugg

SEQ ID NO: 3136024 - RNA, 15 nt, Norwalk virus
uaucggcauuucccc

SEQ ID NO: 3136025 - RNA, 14 nt, Norwalk virus
cugaauuggauggc

SEQ ID NO: 3136026 - RNA, 22 nt, Norwalk virus
cugacacuuuugucccccaucu

SEQ ID NO: 3136027 - RNA, 20 nt, Norwalk virus
uaugacuugccccaguccug

SEQ ID NO: 3136028 - RNA, 16 nt, Norwalk virus
cugguuggcaccaccc

SEQ ID NO: 3136029 - RNA, 13 nt, Norwalk virus
uaucaauaugaca

SEQ ID NO: 3136030 - RNA, 20 nt, Norwalk virus
aaaugugggcaucauauuca

SEQ ID NO: 3136031 - RNA, 23 nt, Norwalk virus
gcccccauuggguuuccagaccu

SEQ ID NO: 3136032 - RNA, 19 nt, Norwalk virus
uucacauaaucuuacuaua

SEQ ID NO: 3136033 - RNA, 18 nt, Norwalk virus
uaguaucggcauuucccc

SEQ ID NO: 3136034 - RNA, 16 nt, Norwalk virus
cauuguagauuggaau

SEQ ID NO: 3136035 - RNA, 20 nt, Norwalk virus
aagccugugggaacugccag

SEQ ID NO: 3136036 - RNA, 14 nt, Norwalk virus
aagcuucaaaucaa

SEQ ID NO: 3136037 - RNA, 18 nt, Norwalk virus
caguuucauugucacaug

SEQ ID NO: 3136038 - RNA, 20 nt, Norwalk virus
gucugcucccgaguccucug

SEQ ID NO: 3136039 - RNA, 14 nt, Norwalk virus
gucgcgacugcugg

SEQ ID NO: 3136040 - RNA, 15 nt, Norwalk virus
cgugccccucuccca

SEQ ID NO: 3136041 - RNA, 17 nt, Norwalk virus
uguggcaggagcuccag

SEQ ID NO: 3136042 - RNA, 17 nt, Norwalk virus
ggcccuucacacuccca

SEQ ID NO: 3136043 - RNA, 14 nt, Norwalk virus
cuuucuugcuccau

SEQ ID NO: 3136044 - RNA, 13 nt, Norwalk virus
ggguaucagguug

SEQ ID NO: 3136045 - RNA, 13 nt, Norwalk virus
ggaaaucuuucuc

SEQ ID NO: 3136046 - RNA, 13 nt, Norwalk virus
ccgcacugguggu

SEQ ID NO: 3136047 - RNA, 18 nt, Norwalk virus
uaguaauccaaauuauuc

SEQ ID NO: 3136048 - RNA, 19 nt, Norwalk virus
cuuggggaauucaaagcau

SEQ ID NO: 3136049 - RNA, 17 nt, Norwalk virus
gacacuuuuguccccca

SEQ ID NO: 3136050 - RNA, 13 nt, Norwalk virus
uccacaacagcug

SEQ ID NO: 3136051 - RNA, 21 nt, Norwalk virus
cucggguccacaacagcugcc

SEQ ID NO: 3136052 - RNA, 13 nt, Norwalk virus
gaaaugugggcau

SEQ ID NO: 3136053 - RNA, 22 nt, Norwalk virus
aaucuuggggaauucaaagcau

SEQ ID NO: 3136054 - RNA, 20 nt, Norwalk virus
ugccacgugguuauuucaau

SEQ ID NO: 3136055 - RNA, 16 nt, Norwalk virus
agugugguugacucca

SEQ ID NO: 3136056 - RNA, 17 nt, Norwalk virus
acugucuucugugccac

SEQ ID NO: 3136057 - RNA, 23 nt, Norwalk virus
acaagcaacucucuuuccacaug

SEQ ID NO: 3136058 - RNA, 14 nt, Norwalk virus
ggugcaauugcugc

SEQ ID NO: 3136059 - RNA, 14 nt, Norwalk virus
guuuuuagucccuc

SEQ ID NO: 3136060 - RNA, 16 nt, Norwalk virus
aguccucugcuaccac

SEQ ID NO: 3136061 - RNA, 13 nt, Norwalk virus
agggaaaugauug

SEQ ID NO: 3136062 - RNA, 22 nt, Norwalk virus
uguacucuggauggccgccugg

SEQ ID NO: 3136063 - RNA, 15 nt, Norwalk virus
caucugguauuagua

SEQ ID NO: 3136064 - RNA, 15 nt, Norwalk virus
ccagauuuuaucaau

SEQ ID NO: 3136065 - RNA, 12 nt, Norwalk virus
caucuaucacaa

SEQ ID NO: 3136066 - RNA, 12 nt, Norwalk virus
auuggauggcac

SEQ ID NO: 3136067 - RNA, 15 nt, Norwalk virus
guugaccuuuggaag

SEQ ID NO: 3136068 - RNA, 23 nt, Norwalk virus
gguauuggucuuuuucaugucaa

SEQ ID NO: 3136069 - RNA, 11 nt, Norwalk virus
acucuggaugg

SEQ ID NO: 3136070 - RNA, 19 nt, Norwalk virus
agccucuucuacacugucu

SEQ ID NO: 3136071 - RNA, 19 nt, Norwalk virus
ugcauacccccugguuuug

SEQ ID NO: 3136072 - RNA, 15 nt, Norwalk virus
acgcggaggcucuca

SEQ ID NO: 3136073 - RNA, 13 nt, Norwalk virus
ccuucacacuccc

SEQ ID NO: 3136074 - RNA, 14 nt, Norwalk virus
cugcccugcuccac

SEQ ID NO: 3136075 - RNA, 20 nt, Norwalk virus
uuggguccccaucuuaaucc

SEQ ID NO: 3136076 - RNA, 20 nt, Norwalk virus
cccaguuucauugucacaug

SEQ ID NO: 3136077 - RNA, 19 nt, Norwalk virus
uuuaauuagguuuaauuug

SEQ ID NO: 3136078 - RNA, 19 nt, Norwalk virus
ucacacccgucuggcuccc

SEQ ID NO: 3136079 - RNA, 20 nt, Norwalk virus
uuuccccaaauaauaccccc

SEQ ID NO: 3136080 - RNA, 19 nt, Norwalk virus
acaugugauugcugauguu

SEQ ID NO: 3136081 - RNA, 22 nt, Norwalk virus
cacugguggugguacuggugau

SEQ ID NO: 3136082 - RNA, 20 nt, Norwalk virus
gacaaguuaauccuauugau

SEQ ID NO: 3136083 - RNA, 18 nt, Norwalk virus
gcaacacaucuagccccu

SEQ ID NO: 3136084 - RNA, 19 nt, Norwalk virus
cacagcagguagugcucug

SEQ ID NO: 3136085 - RNA, 16 nt, Norwalk virus
gcggcccuccaaagcc

SEQ ID NO: 3136086 - RNA, 18 nt, Norwalk virus
cgguguacucuggauggc

SEQ ID NO: 3136087 - RNA, 20 nt, Norwalk virus
cucacgugccccucucccaa

SEQ ID NO: 3136088 - RNA, 16 nt, Norwalk virus
cagcaagaucuguggc

SEQ ID NO: 3136089 - RNA, 17 nt, Norwalk virus
auuuaauuagguuuaau

SEQ ID NO: 3136090 - RNA, 14 nt, Norwalk virus
accacauugagauc

SEQ ID NO: 3136091 - RNA, 17 nt, Norwalk virus
gcuuauaauuugcccug

SEQ ID NO: 3136092 - RNA, 12 nt, Norwalk virus
ccaauggcacug

SEQ ID NO: 3136093 - RNA, 15 nt, Norwalk virus
ugugguugacuccac

SEQ ID NO: 3136094 - RNA, 21 nt, Norwalk virus
caguucccauaccauuugccu

SEQ ID NO: 3136095 - RNA, 17 nt, Norwalk virus
cagucgcgacugcugga

SEQ ID NO: 3136096 - RNA, 18 nt, Norwalk virus
gcaauugcugcuuccaca

SEQ ID NO: 3136097 - RNA, 17 nt, Norwalk virus
uaagcaaaaacagguuc

SEQ ID NO: 3136098 - RNA, 20 nt, Norwalk virus
ucaaucaucugguauuagua

SEQ ID NO: 3136099 - RNA, 17 nt, Norwalk virus
aagguaucaacaaaauu

SEQ ID NO: 3136100 - RNA, 18 nt, Norwalk virus
cugguuuugguucacaua

SEQ ID NO: 3136101 - RNA, 12 nt, Norwalk virus
ugccccaguccu

SEQ ID NO: 3136102 - RNA, 21 nt, Norwalk virus
agcuggauuucccccccauca

SEQ ID NO: 3136103 - RNA, 22 nt, Norwalk virus
uuucacaucuugcuagugaaca

SEQ ID NO: 3136104 - RNA, 20 nt, Norwalk virus
ucugcgccgauaauggccca

SEQ ID NO: 3136105 - RNA, 17 nt, Norwalk virus
aggacucuagaccccau

SEQ ID NO: 3136106 - RNA, 12 nt, Norwalk virus
ugcaagcccccc

SEQ ID NO: 3136107 - RNA, 22 nt, Norwalk virus
ccauuggguuuccagaccucgg

SEQ ID NO: 3136108 - RNA, 13 nt, Norwalk virus
ugggucaaguauu

SEQ ID NO: 3136109 - RNA, 18 nt, Norwalk virus
ggcaggagcuccagucac

SEQ ID NO: 3136110 - RNA, 13 nt, Norwalk virus
aauuggauggcac

SEQ ID NO: 3136111 - RNA, 20 nt, Norwalk virus
caacagccucuucuacacug

SEQ ID NO: 3136112 - RNA, 14 nt, Norwalk virus
cuccgcacuggugg

SEQ ID NO: 3136113 - RNA, 15 nt, Norwalk virus
guaucagguugaagc

SEQ ID NO: 3136114 - RNA, 15 nt, Norwalk virus
accagugcugaugca

SEQ ID NO: 3136115 - RNA, 18 nt, Norwalk virus
cagguagugcucugggag

SEQ ID NO: 3136116 - RNA, 16 nt, Norwalk virus
ugugauuggcauauca

SEQ ID NO: 3136117 - RNA, 17 nt, Norwalk virus
ugaauuuacuauuuccc

SEQ ID NO: 3136118 - RNA, 18 nt, Norwalk virus
caaguugaccuuuggaag

SEQ ID NO: 3136119 - RNA, 14 nt, Norwalk virus
caaguuaauccuau

SEQ ID NO: 3136120 - RNA, 18 nt, Norwalk virus
aauuggugcaauugcugc

SEQ ID NO: 3136121 - RNA, 13 nt, Norwalk virus
caucuagccccuu

SEQ ID NO: 3136122 - RNA, 14 nt, Norwalk virus
ucgagauuuggaaa

SEQ ID NO: 3136123 - RNA, 22 nt, Norwalk virus
aguaguaucggcauuuccccag

SEQ ID NO: 3136124 - RNA, 14 nt, Norwalk virus
aagauguuaggaau

SEQ ID NO: 3136125 - RNA, 14 nt, Norwalk virus
ccaccccaguuuca

SEQ ID NO: 3136126 - RNA, 23 nt, Norwalk virus
ccuacgguggagcagaaaaccag

SEQ ID NO: 3136127 - RNA, 18 nt, Norwalk virus
ugccagguccuggugcuu

SEQ ID NO: 3136128 - RNA, 15 nt, Norwalk virus
uaauuugcccugucu

SEQ ID NO: 3136129 - RNA, 19 nt, Norwalk virus
uucuuguuuuuagucccuc

SEQ ID NO: 3136130 - RNA, 23 nt, Norwalk virus
uaaacaugacagggaaaugauug

SEQ ID NO: 3136131 - RNA, 15 nt, Norwalk virus
cacgugccccucucc

SEQ ID NO: 3136132 - RNA, 14 nt, Norwalk virus
caauuaaagccugu

SEQ ID NO: 3136133 - RNA, 18 nt, Norwalk virus
accuccaauggcacugua

SEQ ID NO: 3136134 - RNA, 20 nt, Norwalk virus
agguuaaugcuucugacccu

SEQ ID NO: 3136135 - RNA, 16 nt, Norwalk virus
cgugccccucucccaa

SEQ ID NO: 3136136 - RNA, 19 nt, Norwalk virus
agggaccuccaauggcacu

SEQ ID NO: 3136137 - RNA, 19 nt, Norwalk virus
auuuggaaaucuuucucca

SEQ ID NO: 3136138 - RNA, 16 nt, Norwalk virus
accacuaguugggucg

SEQ ID NO: 3136139 - RNA, 15 nt, Norwalk virus
auuuaauuagguuua

SEQ ID NO: 3136140 - RNA, 20 nt, Norwalk virus
ugaguuuggguccccaucuu

SEQ ID NO: 3136141 - RNA, 18 nt, Norwalk virus
ugguuauuucaauacaga

SEQ ID NO: 3136142 - RNA, 17 nt, Norwalk virus
cuaaaaauuuggcaacu

SEQ ID NO: 3136143 - RNA, 20 nt, Norwalk virus
uaugacacaguuuggccauu

SEQ ID NO: 3136144 - RNA, 13 nt, Norwalk virus
cugguuggcacca

SEQ ID NO: 3136145 - RNA, 23 nt, Norwalk virus
cugaugcagcaagaucuguggca

SEQ ID NO: 3136146 - RNA, 16 nt, Norwalk virus
ugggaacugccagcuc

SEQ ID NO: 3136147 - RNA, 19 nt, Norwalk virus
cacaucuagccccuucugu

SEQ ID NO: 3136148 - RNA, 20 nt, Norwalk virus
ggauccuguagcagguucuu

SEQ ID NO: 3136149 - RNA, 19 nt, Norwalk virus
cagguugccauuauucgca

SEQ ID NO: 3136150 - RNA, 22 nt, Norwalk virus
gguuuccucacuugugucccca

SEQ ID NO: 3136151 - RNA, 17 nt, Norwalk virus
cggaggcaacacaucua

SEQ ID NO: 3136152 - RNA, 16 nt, Norwalk virus
acccgucuggcuccca

SEQ ID NO: 3136153 - RNA, 17 nt, Norwalk virus
ugcuuccacagcaggua

SEQ ID NO: 3136154 - RNA, 21 nt, Norwalk virus
cuccacccgguucaacagccu

SEQ ID NO: 3136155 - RNA, 19 nt, Norwalk virus
uaauccuuucuugcuccau

SEQ ID NO: 3136156 - RNA, 14 nt, Norwalk virus
ucuugguucaauuc

SEQ ID NO: 3136157 - RNA, 19 nt, Norwalk virus
uccacagcagguagugcuc

SEQ ID NO: 3136158 - RNA, 17 nt, Norwalk virus
auguuguaauaugaaau

SEQ ID NO: 3136159 - RNA, 15 nt, Norwalk virus
gguccacaacagcug

SEQ ID NO: 3136160 - RNA, 12 nt, Norwalk virus
cuccauaccacg

SEQ ID NO: 3136161 - RNA, 14 nt, Norwalk virus
ggauggcacacccu

SEQ ID NO: 3136162 - RNA, 14 nt, Norwalk virus
ccuucacacuccca

SEQ ID NO: 3136163 - RNA, 17 nt, Norwalk virus
cacccuuuugagggccc

SEQ ID NO: 3136164 - RNA, 21 nt, Norwalk virus
cugugggaacugccagcucgg

SEQ ID NO: 3136165 - RNA, 14 nt, Norwalk virus
ccccaucacacccg

SEQ ID NO: 3136166 - RNA, 16 nt, Norwalk virus
auuuaauuagguuuaa

SEQ ID NO: 3136167 - RNA, 16 nt, Norwalk virus
ggacucuagaccccau

SEQ ID NO: 3136168 - RNA, 21 nt, Norwalk virus
cgaucaauggggucuuugucu

SEQ ID NO: 3136169 - RNA, 15 nt, Norwalk virus
cggcccuccaaagcc

SEQ ID NO: 3136170 - RNA, 18 nt, Norwalk virus
aauucaggcaaauggcau

SEQ ID NO: 3136171 - RNA, 19 nt, Norwalk virus
ugcuggggguuugaccagu

SEQ ID NO: 3136172 - RNA, 23 nt, Norwalk virus
ucuugcuagugaacaagccccua

SEQ ID NO: 3136173 - RNA, 13 nt, Norwalk virus
agacaccaccccu

SEQ ID NO: 3136174 - RNA, 19 nt, Norwalk virus
caguaguaucggcauuucc

SEQ ID NO: 3136175 - RNA, 15 nt, Norwalk virus
cacgcggaggcucuc

SEQ ID NO: 3136176 - RNA, 19 nt, Norwalk virus
uugagauccgguggcuuca

SEQ ID NO: 3136177 - RNA, 21 nt, Norwalk virus
ccucuaagcaaaaacagguuc

SEQ ID NO: 3136178 - RNA, 22 nt, Norwalk virus
agccccuucuguauaccccccu

SEQ ID NO: 3136179 - RNA, 15 nt, Norwalk virus
ccccaguuucauugu

SEQ ID NO: 3136180 - RNA, 15 nt, Norwalk virus
uaauccaaauuauuc

SEQ ID NO: 3136181 - RNA, 14 nt, Norwalk virus
uugaggugccuuug

SEQ ID NO: 3136182 - RNA, 20 nt, Norwalk virus
uaauccuauugaucccugga

SEQ ID NO: 3136183 - RNA, 20 nt, Norwalk virus
auaauuuugugcaagccccc

SEQ ID NO: 3136184 - RNA, 20 nt, Norwalk virus
cgggcauacagguugguggc

SEQ ID NO: 3136185 - RNA, 21 nt, Norwalk virus
ucuggauggccgccugguugg

SEQ ID NO: 3136186 - RNA, 15 nt, Norwalk virus
cgcggaggcucucaa

SEQ ID NO: 3136187 - RNA, 19 nt, Norwalk virus
auuggcagugguaauuaug

SEQ ID NO: 3136188 - RNA, 18 nt, Norwalk virus
uaauuagguuuaauuuga

SEQ ID NO: 3136189 - RNA, 17 nt, Norwalk virus
gugauugcugauguuag

SEQ ID NO: 3136190 - RNA, 21 nt, Norwalk virus
cacccuuuugagggcccugcc

SEQ ID NO: 3136191 - RNA, 20 nt, Norwalk virus
uguaggugaggcugcccugc

SEQ ID NO: 3136192 - RNA, 17 nt, Norwalk virus
caagauaagagggaccu

SEQ ID NO: 3136193 - RNA, 11 nt, Norwalk virus
cgucuggcucc

SEQ ID NO: 3136194 - RNA, 18 nt, Norwalk virus
ggcuucaugucaguuccc

SEQ ID NO: 3136195 - RNA, 19 nt, Norwalk virus
ugucuucugugccacgugg

SEQ ID NO: 3136196 - RNA, 22 nt, Norwalk virus
ugcgccgauaauggcccaagcc

SEQ ID NO: 3136197 - RNA, 16 nt, Norwalk virus
ccugauuuuaauuucu

SEQ ID NO: 3136198 - RNA, 19 nt, Norwalk virus
ccauuggguuuccagaccu

SEQ ID NO: 3136199 - RNA, 17 nt, Norwalk virus
uggcagugguaauuaug

SEQ ID NO: 3136200 - RNA, 16 nt, Norwalk virus
uguguccccaaugggg

SEQ ID NO: 3136201 - RNA, 13 nt, Norwalk virus
cgaguuaugacuu

SEQ ID NO: 3136202 - RNA, 17 nt, Norwalk virus
ugcuuauaauuugcccu

SEQ ID NO: 3136203 - RNA, 22 nt, Norwalk virus
aacagccucuucuacacugucu

SEQ ID NO: 3136204 - RNA, 21 nt, Norwalk virus
augaaaugugggcaucauauu

SEQ ID NO: 3136205 - RNA, 21 nt, Norwalk virus
agccagacccaguaugaugua

SEQ ID NO: 3136206 - RNA, 15 nt, Norwalk virus
uacacugucuucugu

SEQ ID NO: 3136207 - RNA, 12 nt, Norwalk virus
cagagugugcag

SEQ ID NO: 3136208 - RNA, 20 nt, Norwalk virus
cacaagaguacauuucacau

SEQ ID NO: 3136209 - RNA, 18 nt, Norwalk virus
ccccaaggugaauuuacu

SEQ ID NO: 3136210 - RNA, 18 nt, Norwalk virus
acugccagcucggcaaga

SEQ ID NO: 3136211 - RNA, 23 nt, Norwalk virus
ucauauucauuuaauuagguuua

SEQ ID NO: 3136212 - RNA, 19 nt, Norwalk virus
ccccaguccugauuuuaau

SEQ ID NO: 3136213 - RNA, 21 nt, Norwalk virus
cuccauaccacgcggaggcuc

SEQ ID NO: 3136214 - RNA, 17 nt, Norwalk virus
uccgguggcuucauguc

SEQ ID NO: 3136215 - RNA, 20 nt, Norwalk virus
ccaugcgccuugugugcaug

SEQ ID NO: 3136216 - RNA, 17 nt, Norwalk virus
uuuaauuagguuuaauu

SEQ ID NO: 3136217 - RNA, 17 nt, Norwalk virus
acacugucuucugugcc

SEQ ID NO: 3136218 - RNA, 15 nt, Norwalk virus
gggcccugcccccau

SEQ ID NO: 3136219 - RNA, 16 nt, Norwalk virus
cuucugugccacgugg

SEQ ID NO: 3136220 - RNA, 23 nt, Norwalk virus
cuccaaagccaaagguaucaaca

SEQ ID NO: 3136221 - RNA, 13 nt, Norwalk virus
acaccccccuccg

SEQ ID NO: 3136222 - RNA, 19 nt, Norwalk virus
cuuuugucccccaucuugg

SEQ ID NO: 3136223 - RNA, 19 nt, Norwalk virus
cacuuuugucccccaucuu

SEQ ID NO: 3136224 - RNA, 19 nt, Norwalk virus
gaaaucuuucuccauacca

SEQ ID NO: 3136225 - RNA, 22 nt, Norwalk virus
caggcaaauggcauuggcagug

SEQ ID NO: 3136226 - RNA, 12 nt, Norwalk virus
uuucaauacaga

SEQ ID NO: 3136227 - RNA, 16 nt, Norwalk virus
uccuccgugcuggggg

SEQ ID NO: 3136228 - RNA, 19 nt, Norwalk virus
uggcacacccuuucacccu

SEQ ID NO: 3136229 - RNA, 16 nt, Norwalk virus
guugaccuuuggaaga

SEQ ID NO: 3136230 - RNA, 15 nt, Norwalk virus
uuucacaucuugcua

SEQ ID NO: 3136231 - RNA, 15 nt, Norwalk virus
cuauagcacaagcaa

SEQ ID NO: 3136232 - RNA, 14 nt, Norwalk virus
uugugcaagccccc

SEQ ID NO: 3136233 - RNA, 20 nt, Norwalk virus
auuaguaauccaaauuauuc

SEQ ID NO: 3136234 - RNA, 19 nt, Norwalk virus
uacacugucuucugugcca

SEQ ID NO: 3136235 - RNA, 21 nt, Norwalk virus
uucaauacagacagguugcca

SEQ ID NO: 3136236 - RNA, 20 nt, Norwalk virus
uucauugucacauguugcca

SEQ ID NO: 3136237 - RNA, 20 nt, Norwalk virus
gcacuguaaucaaccuuacu

SEQ ID NO: 3136238 - RNA, 13 nt, Human
cucucacucccca

SEQ ID NO: 3136239 - RNA, 21 nt, Human
cucucacuccccagccugggc

SEQ ID NO: 3136240 - RNA, 22 nt, Human
cucucacuccccagccugggcc

SEQ ID NO: 3136241 - RNA, 23 nt, Human
cucucacuccccagccugggccc

SEQ ID NO: 3136242 - RNA, 12 nt, Human
cuccguggagga

SEQ ID NO: 3136243 - RNA, 13 nt, Human
cuccguggaggag

SEQ ID NO: 3136244 - RNA, 17 nt, Human
cuccguggaggagguug

SEQ ID NO: 3136245 - RNA, 18 nt, Human
cuccguggaggagguugg

SEQ ID NO: 3136246 - RNA, 22 nt, Human
cuccguggaggagguugggagg

SEQ ID NO: 3136247 - RNA, 13 nt, Human
cuaaacuuuucug

SEQ ID NO: 3136248 - RNA, 14 nt, Human
cgccgugcugggca

SEQ ID NO: 3136249 - RNA, 15 nt, Human
cgccgugcugggcag

SEQ ID NO: 3136250 - RNA, 16 nt, Human
cgccgugcugggcagc

SEQ ID NO: 3136251 - RNA, 17 nt, Human
cgccgugcugggcagcc

SEQ ID NO: 3136252 - RNA, 19 nt, Human
cgccgugcugggcagcccg

SEQ ID NO: 3136253 - RNA, 20 nt, Human
cgaguggugacaggacgcug

SEQ ID NO: 3136254 - RNA, 13 nt, Human
cgacauugucucc

SEQ ID NO: 3136255 - RNA, 14 nt, Human
cgacauugucuccc

SEQ ID NO: 3136256 - RNA, 15 nt, Human
ccuuuuucauuauuu

SEQ ID NO: 3136257 - RNA, 17 nt, Human
ccuuuuucauuauuuua

SEQ ID NO: 3136258 - RNA, 12 nt, Human
ccuuucccgggc

SEQ ID NO: 3136259 - RNA, 13 nt, Human
ccuuucccgggcu

SEQ ID NO: 3136260 - RNA, 14 nt, Human
ccuuucccgggcug

SEQ ID NO: 3136261 - RNA, 18 nt, Human
ccuuucccgggcugucca

SEQ ID NO: 3136262 - RNA, 22 nt, Human
ccuuucccgggcuguccacuag

SEQ ID NO: 3136263 - RNA, 13 nt, Human
ccccgcuggagga

SEQ ID NO: 3136264 - RNA, 22 nt, Human
ccccgcuggaggaugugggcag

SEQ ID NO: 3136265 - RNA, 23 nt, Human
ccccgcuggaggaugugggcagc

SEQ ID NO: 3136266 - RNA, 13 nt, Human
ccccuuucccggg

SEQ ID NO: 3136267 - RNA, 14 nt, Human
ccccuuucccgggc

SEQ ID NO: 3136268 - RNA, 18 nt, Human
ccccuuucccgggcuguc

SEQ ID NO: 3136269 - RNA, 16 nt, Human
ccagcagauuauucac

SEQ ID NO: 3136270 - RNA, 21 nt, Human
ccagcagauuauucacugauu

SEQ ID NO: 3136271 - RNA, 22 nt, Human
ccagcagauuauucacugauuu

SEQ ID NO: 3136272 - RNA, 15 nt, Human
ccaugucacugcaga

SEQ ID NO: 3136273 - RNA, 13 nt, Human
ccagggcuggaga

SEQ ID NO: 3136274 - RNA, 12 nt, Human
ccucuugucucc

SEQ ID NO: 3136275 - RNA, 13 nt, Human
ccucuugucuccc

SEQ ID NO: 3136276 - RNA, 14 nt, Human
ccucuugucucccc

SEQ ID NO: 3136277 - RNA, 17 nt, Human
ccuggaggcggugcggc

SEQ ID NO: 3136278 - RNA, 20 nt, Human
ccuggaggcggugcggcagg

SEQ ID NO: 3136279 - RNA, 21 nt, Human
ccuggaggcggugcggcaggg

SEQ ID NO: 3136280 - RNA, 18 nt, Human
ccuggaucuaccuggagg

SEQ ID NO: 3136281 - RNA, 19 nt, Human
ccuggaucuaccuggaggg

SEQ ID NO: 3136282 - RNA, 14 nt, Human
ccuggagggaagag

SEQ ID NO: 3136283 - RNA, 21 nt, Human
ccuggagggaagaguggaggu

SEQ ID NO: 3136284 - RNA, 22 nt, Human
ccuggagggaagaguggaggug

SEQ ID NO: 3136285 - RNA, 21 nt, Human
ccuaggauaaaaagccagggc

SEQ ID NO: 3136286 - RNA, 22 nt, Human
cccuggcggccccaacucgggc

SEQ ID NO: 3136287 - RNA, 15 nt, Human
cccuucuugcugccc

SEQ ID NO: 3136288 - RNA, 16 nt, Human
cccuucuugcugcccu

SEQ ID NO: 3136289 - RNA, 20 nt, Human
cccuucuugcugcccugccc

SEQ ID NO: 3136290 - RNA, 22 nt, Human
cccuucuugcugcccugcccca

SEQ ID NO: 3136291 - RNA, 19 nt, Human
ccgccccccacacuucccu

SEQ ID NO: 3136292 - RNA, 20 nt, Human
ccgccccccacacuucccug

SEQ ID NO: 3136293 - RNA, 21 nt, Human
ccgccccccacacuucccugg

SEQ ID NO: 3136294 - RNA, 23 nt, Human
ccgccccccacacuucccuggcg

SEQ ID NO: 3136295 - RNA, 13 nt, Human
auuguaauuauau

SEQ ID NO: 3136296 - RNA, 14 nt, Human
auuguaauuauauc

SEQ ID NO: 3136297 - RNA, 14 nt, Human
auuaugaaacuugu

SEQ ID NO: 3136298 - RNA, 15 nt, Human
auuaugaaacuugug

SEQ ID NO: 3136299 - RNA, 21 nt, Human
auuaugaaacuuguguaaaua

SEQ ID NO: 3136300 - RNA, 18 nt, Human
auuaugaaacuuguguaa

SEQ ID NO: 3136301 - RNA, 20 nt, Human
auuaugaaacuuguguaaau

SEQ ID NO: 3136302 - RNA, 17 nt, Human
auucaaaguugccuaaa

SEQ ID NO: 3136303 - RNA, 18 nt, Human
auucaaaguugccuaaau

SEQ ID NO: 3136304 - RNA, 20 nt, Human
auucaaaguugccuaaaucc

SEQ ID NO: 3136305 - RNA, 21 nt, Human
auucaaaguugccuaaaucca

SEQ ID NO: 3136306 - RNA, 22 nt, Human
auucaaaguugccuaaauccau

SEQ ID NO: 3136307 - RNA, 12 nt, Human
auuacaguauaa

SEQ ID NO: 3136308 - RNA, 14 nt, Human
auuacaguauaauu

SEQ ID NO: 3136309 - RNA, 15 nt, Human
auuacaguauaauua

SEQ ID NO: 3136310 - RNA, 16 nt, Human
auuacaguauaauuaa

SEQ ID NO: 3136311 - RNA, 14 nt, Human
auuuuaugauccag

SEQ ID NO: 3136312 - RNA, 15 nt, Human
auuuuaugauccagc

SEQ ID NO: 3136313 - RNA, 16 nt, Human
auuuuaugauccagca

SEQ ID NO: 3136314 - RNA, 13 nt, Human
auuuggaaaucuu

SEQ ID NO: 3136315 - RNA, 11 nt, Human
auuuggaaauc

SEQ ID NO: 3136316 - RNA, 12 nt, Human
auuuggaaaucu

SEQ ID NO: 3136317 - RNA, 14 nt, Human
caaacccaaaagaa

SEQ ID NO: 3136318 - RNA, 20 nt, Human
ccaaaaaccaguauuguaca

SEQ ID NO: 3136319 - RNA, 16 nt, Human
ccaaaaaccaguauug

SEQ ID NO: 3136320 - RNA, 19 nt, Human
ccaaaaaccaguauuguac

SEQ ID NO: 3136321 - RNA, 14 nt, Human
cauuuuucuuguuu

SEQ ID NO: 3136322 - RNA, 21 nt, Human
cauucuccuaucaccugucuu

SEQ ID NO: 3136323 - RNA, 11 nt, Human
ccacacuuccc

SEQ ID NO: 3136324 - RNA, 13 nt, Human
ccacacuucccug

SEQ ID NO: 3136325 - RNA, 14 nt, Human
ccacacuucccugg

SEQ ID NO: 3136326 - RNA, 15 nt, Human
ccacacuucccuggc

SEQ ID NO: 3136327 - RNA, 16 nt, Human
ccacacuucccuggcg

SEQ ID NO: 3136328 - RNA, 15 nt, Human
ccaaaugcaauguga

SEQ ID NO: 3136329 - RNA, 22 nt, Human
cauggccuuugcuugaaagaaa

SEQ ID NO: 3136330 - RNA, 19 nt, Human
cauggccuuugcuugaaag

SEQ ID NO: 3136331 - RNA, 22 nt, Human
caguauuguacaaaguauuaag

SEQ ID NO: 3136332 - RNA, 16 nt, Human
cagguugaagccaugu

SEQ ID NO: 3136333 - RNA, 18 nt, Human
cagguugaagccaugucu

SEQ ID NO: 3136334 - RNA, 12 nt, Human
cagggcuggaga

SEQ ID NO: 3136335 - RNA, 13 nt, Human
cagggcuggagaa

SEQ ID NO: 3136336 - RNA, 14 nt, Human
cagcuuagggcccu

SEQ ID NO: 3136337 - RNA, 15 nt, Human
cagcuuagggcccug

SEQ ID NO: 3136338 - RNA, 16 nt, Human
cagcuuagggcccugg

SEQ ID NO: 3136339 - RNA, 17 nt, Human
cagcuuagggcccugga

SEQ ID NO: 3136340 - RNA, 18 nt, Human
cagcuuagggcccuggag

SEQ ID NO: 3136341 - RNA, 19 nt, Human
cagcuuagggcccuggagg

SEQ ID NO: 3136342 - RNA, 20 nt, Human
cagcuuagggcccuggaggc

SEQ ID NO: 3136343 - RNA, 18 nt, Human
gcguugaaauuguaauua

SEQ ID NO: 3136344 - RNA, 20 nt, Human
gcggccccaacucgggcucc

SEQ ID NO: 3136345 - RNA, 23 nt, Human
gcguugaaauuguaauuauaucu

SEQ ID NO: 3136346 - RNA, 24 nt, Human
gcguugaaauuguaauuauaucug

SEQ ID NO: 3136347 - RNA, 21 nt, Human
gcccuaggauaaaaagccagg

SEQ ID NO: 3136348 - RNA, 13 nt, Human
gccccaaguuggg

SEQ ID NO: 3136349 - RNA, 16 nt, Human
gccccacaccuccucu

SEQ ID NO: 3136350 - RNA, 16 nt, Human
gccccaacucgggcuc

SEQ ID NO: 3136351 - RNA, 20 nt, Human
gccccaacucgggcucccgg

SEQ ID NO: 3136352 - RNA, 21 nt, Human
gccccaacucgggcucccggg

SEQ ID NO: 3136353 - RNA, 17 nt, Human
gcugguuuuggcaucuc

SEQ ID NO: 3136354 - RNA, 21 nt, Human
gcugguuuuggcaucucuguc

SEQ ID NO: 3136355 - RNA, 16 nt, Human
gcuuuucugauccagu

SEQ ID NO: 3136356 - RNA, 12 nt, Human
gcuuuucugauc

SEQ ID NO: 3136357 - RNA, 15 nt, Human
gcuuuucugauccag

SEQ ID NO: 3136358 - RNA, 11 nt, Human
gcuuuucugau

SEQ ID NO: 3136359 - RNA, 13 nt, Human
ggaacaccuccuc

SEQ ID NO: 3136360 - RNA, 13 nt, Human
ggaaaucuuuaaa

SEQ ID NO: 3136361 - RNA, 20 nt, Human
ggagguggauuccgaguggu

SEQ ID NO: 3136362 - RNA, 18 nt, Human
ggaggggguugggguggu

SEQ ID NO: 3136363 - RNA, 20 nt, Human
ggaggccagcacggugguga

SEQ ID NO: 3136364 - RNA, 17 nt, Human
ggagcuuaagccacugc

SEQ ID NO: 3136365 - RNA, 18 nt, Human
ggagcuuaagccacugcc

SEQ ID NO: 3136366 - RNA, 17 nt, Human
ggcacacaaggggcccu

SEQ ID NO: 3136367 - RNA, 20 nt, Human
ggcacacaaggggcccuugg

SEQ ID NO: 3136368 - RNA, 21 nt, Human
ggcacacaaggggcccuugga

SEQ ID NO: 3136369 - RNA, 15 nt, Human
ggaucugguggucag

SEQ ID NO: 3136370 - RNA, 17 nt, Human
ggauaaaaagccagggc

SEQ ID NO: 3136371 - RNA, 18 nt, Human
ggauaaaaagccagggcu

SEQ ID NO: 3136372 - RNA, 19 nt, Human
ggauaaaaagccagggcug

SEQ ID NO: 3136373 - RNA, 20 nt, Human
ggauaaaaagccagggcugg

SEQ ID NO: 3136374 - RNA, 21 nt, Human
ggauaaaaagccagggcugga

SEQ ID NO: 3136375 - RNA, 12 nt, Human
ggauaaaugcca

SEQ ID NO: 3136376 - RNA, 22 nt, Human
ggauaauaaggaaaaguuuaau

SEQ ID NO: 3136377 - RNA, 19 nt, Human
ggccgacauugucucccgc

SEQ ID NO: 3136378 - RNA, 14 nt, Human
ggcaucucuguccc

SEQ ID NO: 3136379 - RNA, 15 nt, Human
ggcaucucuguccca

SEQ ID NO: 3136380 - RNA, 21 nt, Human
ggcaucucugucccauucccu

SEQ ID NO: 3136381 - RNA, 22 nt, Human
ggcaucucugucccauucccug

SEQ ID NO: 3136382 - RNA, 23 nt, Human
ggcaucucugucccauucccugg

SEQ ID NO: 3136383 - RNA, 14 nt, Human
aaaaauauuuuaug

SEQ ID NO: 3136384 - RNA, 17 nt, Human
gggaagaguggaggugg

SEQ ID NO: 3136385 - RNA, 18 nt, Human
gggaagaguggaggugga

SEQ ID NO: 3136386 - RNA, 16 nt, Human
gggcaaaugccagggc

SEQ ID NO: 3136387 - RNA, 17 nt, Human
gggcaaaugccagggcc

SEQ ID NO: 3136388 - RNA, 18 nt, Human
gggcccuucuugcugccc

SEQ ID NO: 3136389 - RNA, 19 nt, Human
gggcccuucuugcugcccu

SEQ ID NO: 3136390 - RNA, 22 nt, Human
gggcccuucuugcugcccugcc

SEQ ID NO: 3136391 - RNA, 17 nt, Human
gggcccuuggagcgugg

SEQ ID NO: 3136392 - RNA, 20 nt, Human
gggccgacauugucucccgc

SEQ ID NO: 3136393 - RNA, 19 nt, Human
gguggauuccgagugguga

SEQ ID NO: 3136394 - RNA, 16 nt, Human
aaaguugaauuuauug

SEQ ID NO: 3136395 - RNA, 22 nt, Human
aaaguugaauuuauuggcuuuu

SEQ ID NO: 3136396 - RNA, 12 nt, Human
aaaguugaauuu

SEQ ID NO: 3136397 - RNA, 13 nt, Human
aaaguugaauuua

SEQ ID NO: 3136398 - RNA, 14 nt, Human
aaaguuuaauauua

SEQ ID NO: 3136399 - RNA, 16 nt, Human
aaaguuuaauauuaaa

SEQ ID NO: 3136400 - RNA, 19 nt, Human
aaaguuuaauauuaaagcc

SEQ ID NO: 3136401 - RNA, 22 nt, Human
aaaguuuaauauuaaagccaug

SEQ ID NO: 3136402 - RNA, 20 nt, Human
aaaguuuaauauuaaagcca

SEQ ID NO: 3136403 - RNA, 21 nt, Human
aaaguuuaauauuaaagccau

SEQ ID NO: 3136404 - RNA, 15 nt, Human
gacuggugacugauu

SEQ ID NO: 3136405 - RNA, 18 nt, Human
gacuggugacugauucuu

SEQ ID NO: 3136406 - RNA, 12 nt, Human
gacuggugacug

SEQ ID NO: 3136407 - RNA, 13 nt, Human
gaauuuuguguua

SEQ ID NO: 3136408 - RNA, 16 nt, Human
gaauuuuguguuagag

SEQ ID NO: 3136409 - RNA, 22 nt, Human
gaauuuuguguuagagauuuuu

SEQ ID NO: 3136410 - RNA, 12 nt, Human
gaaguggaaugg

SEQ ID NO: 3136411 - RNA, 14 nt, Human
gauuagaauucugu

SEQ ID NO: 3136412 - RNA, 15 nt, Human
gauuagaauucugua

SEQ ID NO: 3136413 - RNA, 23 nt, Human
gauuagaauucuguauagauuag

SEQ ID NO: 3136414 - RNA, 13 nt, Human
gauuauucacuga

SEQ ID NO: 3136415 - RNA, 15 nt, Human
gauuauucacugauu

SEQ ID NO: 3136416 - RNA, 16 nt, Human
gauuauucacugauuu

SEQ ID NO: 3136417 - RNA, 14 nt, Human
gauuagagaguguu

SEQ ID NO: 3136418 - RNA, 18 nt, Human
gauuagagaguguugaaa

SEQ ID NO: 3136419 - RNA, 22 nt, Human
gauccaguuuuguuuggaccaa

SEQ ID NO: 3136420 - RNA, 11 nt, Human
gauccaguuuu

SEQ ID NO: 3136421 - RNA, 17 nt, Human
gauccaguuuuguuugg

SEQ ID NO: 3136422 - RNA, 21 nt, Human
gcauaacauaaaucugugaac

SEQ ID NO: 3136423 - RNA, 23 nt, Human
gcauaacauaaaucugugaacuu

SEQ ID NO: 3136424 - RNA, 15 nt, Human
gcauaacauaaaucu

SEQ ID NO: 3136425 - RNA, 14 nt, Human
gcagguugaagcca

SEQ ID NO: 3136426 - RNA, 16 nt, Human
gcagguugaagccaug

SEQ ID NO: 3136427 - RNA, 17 nt, Human
gcagguugaagccaugu

SEQ ID NO: 3136428 - RNA, 13 nt, Human
gcaccgaccacgg

SEQ ID NO: 3136429 - RNA, 21 nt, Human
gcaccgaccacggggccgaca

SEQ ID NO: 3136430 - RNA, 20 nt, Human
gcacacaaggggcccuugga

SEQ ID NO: 3136431 - RNA, 21 nt, Human
gcacacaaggggcccuuggag

SEQ ID NO: 3136432 - RNA, 14 nt, Human
cuguacuuuuuggc

SEQ ID NO: 3136433 - RNA, 18 nt, Human
cugugaacuugaaauuug

SEQ ID NO: 3136434 - RNA, 18 nt, Human
cuggugacugauucuuca

SEQ ID NO: 3136435 - RNA, 16 nt, Human
cuggggccgaaagaac

SEQ ID NO: 3136436 - RNA, 12 nt, Human
gaaaauuugaau

SEQ ID NO: 3136437 - RNA, 11 nt, Human
cuuuguauaga

SEQ ID NO: 3136438 - RNA, 20 nt, Human
cuuuguauagaaccucuuug

SEQ ID NO: 3136439 - RNA, 23 nt, Human
cuugccuuuuucauuauuuuauu

SEQ ID NO: 3136440 - RNA, 20 nt, Human
cuugccuuuuucauuauuuu

SEQ ID NO: 3136441 - RNA, 22 nt, Human
cuugccuuuuucauuauuuuau

SEQ ID NO: 3136442 - RNA, 14 nt, Human
cuugccuuuuucau

SEQ ID NO: 3136443 - RNA, 15 nt, Human
cuugccuuuuucauu

SEQ ID NO: 3136444 - RNA, 23 nt, Human
auugugcgcuaaacuuuucugau

SEQ ID NO: 3136445 - RNA, 17 nt, Human
auuuggaaaucuuuaaa

SEQ ID NO: 3136446 - RNA, 20 nt, Human
auuuggaaaucuuuaaaaaa

SEQ ID NO: 3136447 - RNA, 18 nt, Human
auuuuauuaugaaacuug

SEQ ID NO: 3136448 - RNA, 21 nt, Human
auuuuauuaugaaacuugugu

SEQ ID NO: 3136449 - RNA, 13 nt, Human
auuuuauuaugaa

SEQ ID NO: 3136450 - RNA, 14 nt, Human
auuuuauuaugaaa

SEQ ID NO: 3136451 - RNA, 11 nt, Human
auuuuauuaug

SEQ ID NO: 3136452 - RNA, 12 nt, Human
auuuuauuauga

SEQ ID NO: 3136453 - RNA, 13 nt, Human
auuuuauuaugua

SEQ ID NO: 3136454 - RNA, 14 nt, Human
auuuuauuauguaa

SEQ ID NO: 3136455 - RNA, 15 nt, Human
auuauuuuauuauga

SEQ ID NO: 3136456 - RNA, 15 nt, Human
auuagagaguguuga

SEQ ID NO: 3136457 - RNA, 16 nt, Human
auuagagaguguugaa

SEQ ID NO: 3136458 - RNA, 17 nt, Human
auuagagaguguugaaa

SEQ ID NO: 3136459 - RNA, 18 nt, Human
auuagagaguguugaaac

SEQ ID NO: 3136460 - RNA, 19 nt, Human
auuagagaguguugaaacg

SEQ ID NO: 3136461 - RNA, 21 nt, Human
auuauuuuauuaugaaacuug

SEQ ID NO: 3136462 - RNA, 22 nt, Human
auuauuuuauuaugaaacuugu

SEQ ID NO: 3136463 - RNA, 14 nt, Human
auucccugggaucu

SEQ ID NO: 3136464 - RNA, 16 nt, Human
auucccugggaucugg

SEQ ID NO: 3136465 - RNA, 19 nt, Human
auuaacauguuaaaccaug

SEQ ID NO: 3136466 - RNA, 13 nt, Human
auuaacauguuaa

SEQ ID NO: 3136467 - RNA, 14 nt, Human
auuaacauguuaaa

SEQ ID NO: 3136468 - RNA, 15 nt, Human
auuaacauguuaaac

SEQ ID NO: 3136469 - RNA, 17 nt, Human
auuaacauguuaaacca

SEQ ID NO: 3136470 - RNA, 11 nt, Human
auuaaagccau

SEQ ID NO: 3136471 - RNA, 12 nt, Human
auuaaagccaug

SEQ ID NO: 3136472 - RNA, 16 nt, Human
auuaaagccauguuua

SEQ ID NO: 3136473 - RNA, 17 nt, Human
auuaaagccauguuuau

SEQ ID NO: 3136474 - RNA, 21 nt, Human
auuaaagccauguuuauuaca

SEQ ID NO: 3136475 - RNA, 21 nt, Human
uuuucauuauuuuauuaugaa

SEQ ID NO: 3136476 - RNA, 15 nt, Human
uuuucauuauuuuau

SEQ ID NO: 3136477 - RNA, 13 nt, Human
uuuuauuauguaa

SEQ ID NO: 3136478 - RNA, 14 nt, Human
uuuuauuauguaaa

SEQ ID NO: 3136479 - RNA, 12 nt, Human
uuuuauuaugua

SEQ ID NO: 3136480 - RNA, 15 nt, Human
uuugucuacaccauu

SEQ ID NO: 3136481 - RNA, 18 nt, Human
uuuguuucuguacuuuuu

SEQ ID NO: 3136482 - RNA, 12 nt, Human
uuuguuucugua

SEQ ID NO: 3136483 - RNA, 13 nt, Human
uuuguuucuguac

SEQ ID NO: 3136484 - RNA, 22 nt, Human
uugccuaaauccauuuggaaau

SEQ ID NO: 3136485 - RNA, 13 nt, Human
uugccuaaaucca

SEQ ID NO: 3136486 - RNA, 14 nt, Human
uugccuaaauccau

SEQ ID NO: 3136487 - RNA, 15 nt, Human
uugccuaaauccauu

SEQ ID NO: 3136488 - RNA, 15 nt, Human
aucugaggaauucug

SEQ ID NO: 3136489 - RNA, 21 nt, Human
aucugaggaauucuguauaga

SEQ ID NO: 3136490 - RNA, 16 nt, Human
aucugaggaauucugu

SEQ ID NO: 3136491 - RNA, 17 nt, Human
aucugaggaauucugua

SEQ ID NO: 3136492 - RNA, 18 nt, Human
aucugaggaauucuguau

SEQ ID NO: 3136493 - RNA, 20 nt, Human
aucugaggaauucuguauag

SEQ ID NO: 3136494 - RNA, 13 nt, Human
aucugugaacuug

SEQ ID NO: 3136495 - RNA, 17 nt, Human
aucugugaacuugaaau

SEQ ID NO: 3136496 - RNA, 18 nt, Human
aucugugaacuugaaauu

SEQ ID NO: 3136497 - RNA, 19 nt, Human
aucugugaacuugaaauuu

SEQ ID NO: 3136498 - RNA, 18 nt, Human
aucugccuaaggacuucu

SEQ ID NO: 3136499 - RNA, 19 nt, Human
aucugccuaaggacuucuu

SEQ ID NO: 3136500 - RNA, 13 nt, Human
aucugccuaagga

SEQ ID NO: 3136501 - RNA, 14 nt, Human
aucugccuaaggac

SEQ ID NO: 3136502 - RNA, 15 nt, Human
aucugccuaaggacu

SEQ ID NO: 3136503 - RNA, 16 nt, Human
aucugccuaaggacuu

SEQ ID NO: 3136504 - RNA, 17 nt, Human
aucugccuaaggacuuc

SEQ ID NO: 3136505 - RNA, 19 nt, Human
uuggauaauaaggaaaagu

SEQ ID NO: 3136506 - RNA, 21 nt, Human
uuggauaauaaggaaaaguuu

SEQ ID NO: 3136507 - RNA, 15 nt, Human
uuggauaauaaggaa

SEQ ID NO: 3136508 - RNA, 13 nt, Human
uuggggauucuua

SEQ ID NO: 3136509 - RNA, 16 nt, Human
uugggggucagugcug

SEQ ID NO: 3136510 - RNA, 19 nt, Human
uugggggucagugcugccu

SEQ ID NO: 3136511 - RNA, 20 nt, Human
uugggggucagugcugccug

SEQ ID NO: 3136512 - RNA, 15 nt, Human
uuggggauucuuaaa

SEQ ID NO: 3136513 - RNA, 15 nt, Human
uuguacaaaguauua

SEQ ID NO: 3136514 - RNA, 17 nt, Human
uuguacaaaguauuaag

SEQ ID NO: 3136515 - RNA, 20 nt, Human
uuguacaaaguauuaagcau

SEQ ID NO: 3136516 - RNA, 21 nt, Human
uuguacaaaguauuaagcaua

SEQ ID NO: 3136517 - RNA, 13 nt, Human
uuguacaaaguau

SEQ ID NO: 3136518 - RNA, 14 nt, Human
uuguacaaaguauu

SEQ ID NO: 3136519 - RNA, 20 nt, Human
auggccuuugcuugaaagaa

SEQ ID NO: 3136520 - RNA, 23 nt, Human
auggaacgcguugaaauuguaau

SEQ ID NO: 3136521 - RNA, 23 nt, Human
uuuauuacaguauaauuaacaug

SEQ ID NO: 3136522 - RNA, 22 nt, Human
augcuguaacuuucugaaauaa

SEQ ID NO: 3136523 - RNA, 21 nt, Human
augcuggcauagagcagcacu

SEQ ID NO: 3136524 - RNA, 14 nt, Human
uuuagucuugucuc

SEQ ID NO: 3136525 - RNA, 22 nt, Human
uuuauuacaguauaauuaacau

SEQ ID NO: 3136526 - RNA, 14 nt, Human
uuuaauuuuggaau

SEQ ID NO: 3136527 - RNA, 15 nt, Human
uuuaauuuuggaauu

SEQ ID NO: 3136528 - RNA, 17 nt, Human
uuuaauuuuggaauuuu

SEQ ID NO: 3136529 - RNA, 10 nt, Human
augcaggugg

SEQ ID NO: 3136530 - RNA, 16 nt, Human
augauuucuaugcuga

SEQ ID NO: 3136531 - RNA, 12 nt, Human
augauuucuaug

SEQ ID NO: 3136532 - RNA, 13 nt, Human
augauuucuaugc

SEQ ID NO: 3136533 - RNA, 19 nt, Human
uuguguaaauacaauuuug

SEQ ID NO: 3136534 - RNA, 17 nt, Human
uucuaaccaagaggcug

SEQ ID NO: 3136535 - RNA, 18 nt, Human
uucuaaccaagaggcugg

SEQ ID NO: 3136536 - RNA, 19 nt, Human
uucuaaccaagaggcuggu

SEQ ID NO: 3136537 - RNA, 18 nt, Human
aucaauaaaaaauuauga

SEQ ID NO: 3136538 - RNA, 15 nt, Human
aucaauaaaaaauua

SEQ ID NO: 3136539 - RNA, 17 nt, Human
aucaauaaaaaauuaug

SEQ ID NO: 3136540 - RNA, 13 nt, Human
aucagacagaucu

SEQ ID NO: 3136541 - RNA, 16 nt, Human
uuccccucuugucucc

SEQ ID NO: 3136542 - RNA, 17 nt, Human
uuccccucuugucuccc

SEQ ID NO: 3136543 - RNA, 18 nt, Human
uuccccucuugucucccc

SEQ ID NO: 3136544 - RNA, 19 nt, Human
uuccccucuugucuccccu

SEQ ID NO: 3136545 - RNA, 12 nt, Human
uuccccucuccc

SEQ ID NO: 3136546 - RNA, 13 nt, Human
uuccccucucccu

SEQ ID NO: 3136547 - RNA, 21 nt, Human
uuccccucucccuucccuccu

SEQ ID NO: 3136548 - RNA, 16 nt, Human
auauuuuuauauuuac

SEQ ID NO: 3136549 - RNA, 17 nt, Human
auauuuucauucuccua

SEQ ID NO: 3136550 - RNA, 13 nt, Human
auauuuucauucu

SEQ ID NO: 3136551 - RNA, 20 nt, Human
auccaguuuuguuuggacca

SEQ ID NO: 3136552 - RNA, 21 nt, Human
auccaguuuuguuuggaccaa

SEQ ID NO: 3136553 - RNA, 18 nt, Human
auccaguuuuguuuggac

SEQ ID NO: 3136554 - RNA, 17 nt, Human
auccaguuuuguuugga

SEQ ID NO: 3136555 - RNA, 13 nt, Human
auccauuuggaaa

SEQ ID NO: 3136556 - RNA, 17 nt, Human
auccauuuggaaaucuu

SEQ ID NO: 3136557 - RNA, 19 nt, Human
auccauuuggaaaucuuua

SEQ ID NO: 3136558 - RNA, 13 nt, Human
uucuguacuuuuu

SEQ ID NO: 3136559 - RNA, 18 nt, Human
uucuguacuuuuuggcau

SEQ ID NO: 3136560 - RNA, 19 nt, Human
uucuguacuuuuuggcaua

SEQ ID NO: 3136561 - RNA, 13 nt, Human
auagucuggcugu

SEQ ID NO: 3136562 - RNA, 14 nt, Human
auaguucugcaggu

SEQ ID NO: 3136563 - RNA, 21 nt, Human
ugauccagcagauuauucacu

SEQ ID NO: 3136564 - RNA, 20 nt, Human
ugauccagcagauuauucac

SEQ ID NO: 3136565 - RNA, 22 nt, Human
ugauccagcagauuauucacug

SEQ ID NO: 3136566 - RNA, 22 nt, Human
ugauccaguuuuguuuggacca

SEQ ID NO: 3136567 - RNA, 14 nt, Human
agccacugccucuc

SEQ ID NO: 3136568 - RNA, 15 nt, Human
agccacugccucucc

SEQ ID NO: 3136569 - RNA, 16 nt, Human
agccacugccucuccc

SEQ ID NO: 3136570 - RNA, 17 nt, Human
agccacugccucucccu

SEQ ID NO: 3136571 - RNA, 18 nt, Human
agccacugccucucccuc

SEQ ID NO: 3136572 - RNA, 20 nt, Human
agccacugccucucccucug

SEQ ID NO: 3136573 - RNA, 21 nt, Human
agccacugccucucccucugg

SEQ ID NO: 3136574 - RNA, 12 nt, Human
agccagggcugg

SEQ ID NO: 3136575 - RNA, 13 nt, Human
agccagggcugga

SEQ ID NO: 3136576 - RNA, 14 nt, Human
agccagggcuggag

SEQ ID NO: 3136577 - RNA, 15 nt, Human
agccagggcuggaga

SEQ ID NO: 3136578 - RNA, 16 nt, Human
agccagggcuggagaa

SEQ ID NO: 3136579 - RNA, 16 nt, Human
agccauguuuauuaca

SEQ ID NO: 3136580 - RNA, 13 nt, Human
agccauguuuauu

SEQ ID NO: 3136581 - RNA, 14 nt, Human
agccauguuuauua

SEQ ID NO: 3136582 - RNA, 13 nt, Human
agcuagacuggug

SEQ ID NO: 3136583 - RNA, 14 nt, Human
agcuagacugguga

SEQ ID NO: 3136584 - RNA, 16 nt, Human
agcuagacuggugacu

SEQ ID NO: 3136585 - RNA, 17 nt, Human
agcuagacuggugacug

SEQ ID NO: 3136586 - RNA, 21 nt, Human
agcuagacuggugacugauuc

SEQ ID NO: 3136587 - RNA, 17 nt, Human
uggcauaacauaaaucu

SEQ ID NO: 3136588 - RNA, 21 nt, Human
uggcauagagcagcacuaaau

SEQ ID NO: 3136589 - RNA, 15 nt, Human
uggcauagagcagca

SEQ ID NO: 3136590 - RNA, 12 nt, Human
uggcaucucugu

SEQ ID NO: 3136591 - RNA, 15 nt, Human
uggcaucucuguccc

SEQ ID NO: 3136592 - RNA, 21 nt, Human
uggcauaacauaaaucuguga

SEQ ID NO: 3136593 - RNA, 22 nt, Human
uggcauaacauaaaucugugaa

SEQ ID NO: 3136594 - RNA, 15 nt, Human
uggagcguggacugg

SEQ ID NO: 3136595 - RNA, 16 nt, Human
uggagcguggacuggu

SEQ ID NO: 3136596 - RNA, 15 nt, Human
uggacuguggugacu

SEQ ID NO: 3136597 - RNA, 16 nt, Human
uggacuguggugacuu

SEQ ID NO: 3136598 - RNA, 17 nt, Human
uggacuguggugacuuu

SEQ ID NO: 3136599 - RNA, 19 nt, Human
uggacuguggugacuuugg

SEQ ID NO: 3136600 - RNA, 21 nt, Human
uggacuguggugacuuuggau

SEQ ID NO: 3136601 - RNA, 22 nt, Human
uggacuguggugacuuuggaua

SEQ ID NO: 3136602 - RNA, 17 nt, Human
ugcuuuucuuuucuaac

SEQ ID NO: 3136603 - RNA, 14 nt, Human
uggaaaucuuuaaa

SEQ ID NO: 3136604 - RNA, 15 nt, Human
uggaaaucuuuaaaa

SEQ ID NO: 3136605 - RNA, 13 nt, Human
ugcuccguggagg

SEQ ID NO: 3136606 - RNA, 17 nt, Human
ugcuccguggaggaggu

SEQ ID NO: 3136607 - RNA, 21 nt, Human
aggaagccugauuaaagaaug

SEQ ID NO: 3136608 - RNA, 17 nt, Human
aggaagccugauuaaag

SEQ ID NO: 3136609 - RNA, 18 nt, Human
aggaagccugauuaaaga

SEQ ID NO: 3136610 - RNA, 14 nt, Human
ugcugcccugcccc

SEQ ID NO: 3136611 - RNA, 15 nt, Human
ugcugcccugcccca

SEQ ID NO: 3136612 - RNA, 23 nt, Human
aggaauggagccugcacggugaa

SEQ ID NO: 3136613 - RNA, 13 nt, Human
ugcuaaggacuug

SEQ ID NO: 3136614 - RNA, 18 nt, Human
ugcuaaggacuuguuaga

SEQ ID NO: 3136615 - RNA, 22 nt, Human
ugcuaaggacuuguuagaucua

SEQ ID NO: 3136616 - RNA, 12 nt, Human
ugcuaaggacuu

SEQ ID NO: 3136617 - RNA, 14 nt, Human
ugcggcagggaaga

SEQ ID NO: 3136618 - RNA, 15 nt, Human
ugcggcagggaagag

SEQ ID NO: 3136619 - RNA, 20 nt, Human
uggucagcccuaggauaaaa

SEQ ID NO: 3136620 - RNA, 15 nt, Human
agggccaggagaugg

SEQ ID NO: 3136621 - RNA, 16 nt, Human
agggccaggagaugga

SEQ ID NO: 3136622 - RNA, 13 nt, Human
ugggcccaucucc

SEQ ID NO: 3136623 - RNA, 16 nt, Human
ugggcccaucucccug

SEQ ID NO: 3136624 - RNA, 17 nt, Human
ugggcccaucucccugc

SEQ ID NO: 3136625 - RNA, 18 nt, Human
ugggcccaucucccugcu

SEQ ID NO: 3136626 - RNA, 19 nt, Human
ugggcccaucucccugcuu

SEQ ID NO: 3136627 - RNA, 12 nt, Human
ugucgggcccuu

SEQ ID NO: 3136628 - RNA, 21 nt, Human
ugucgggcccuucuugcugcc

SEQ ID NO: 3136629 - RNA, 22 nt, Human
ugucgggcccuucuugcugccc

SEQ ID NO: 3136630 - RNA, 17 nt, Human
uguacuuuuuggcauaa

SEQ ID NO: 3136631 - RNA, 12 nt, Human
uguacuuuuugg

SEQ ID NO: 3136632 - RNA, 15 nt, Human
uguacuuuuuggcau

SEQ ID NO: 3136633 - RNA, 16 nt, Human
uguacuuuuuggcaua

SEQ ID NO: 3136634 - RNA, 13 nt, Human
uguaauuauaucu

SEQ ID NO: 3136635 - RNA, 14 nt, Human
uguaauuauaucug

SEQ ID NO: 3136636 - RNA, 15 nt, Human
uguaauuauaucuga

SEQ ID NO: 3136637 - RNA, 17 nt, Human
uguaacuuucugaaaua

SEQ ID NO: 3136638 - RNA, 16 nt, Human
uguaaaucccauuauu

SEQ ID NO: 3136639 - RNA, 18 nt, Human
uguaaaucccauuauuca

SEQ ID NO: 3136640 - RNA, 13 nt, Human
uguaaaucccauu

SEQ ID NO: 3136641 - RNA, 22 nt, Human
uguaaaucccauuauucaaagu

SEQ ID NO: 3136642 - RNA, 19 nt, Human
uguaaaucccauuauucaa

SEQ ID NO: 3136643 - RNA, 20 nt, Human
uguaaaucccauuauucaaa

SEQ ID NO: 3136644 - RNA, 18 nt, Human
agguggugucgggcccuu

SEQ ID NO: 3136645 - RNA, 16 nt, Human
uguggugacuuuggau

SEQ ID NO: 3136646 - RNA, 17 nt, Human
uguggugacuuuggaua

SEQ ID NO: 3136647 - RNA, 16 nt, Human
agugcugccugucccc

SEQ ID NO: 3136648 - RNA, 17 nt, Human
agugcugccugucccca

SEQ ID NO: 3136649 - RNA, 21 nt, Human
agugcugccuguccccaugcu

SEQ ID NO: 3136650 - RNA, 23 nt, Human
uguggcaaaauguuacagaaucu

SEQ ID NO: 3136651 - RNA, 22 nt, Human
aguucacucuccauuuaauaau

SEQ ID NO: 3136652 - RNA, 24 nt, Human
aguucacucuccauuuaauaauua

SEQ ID NO: 3136653 - RNA, 18 nt, Human
uguuuauuacaguauaau

SEQ ID NO: 3136654 - RNA, 13 nt, Human
uguuuagucuugu

SEQ ID NO: 3136655 - RNA, 17 nt, Human
uguuuagucuugucuca

SEQ ID NO: 3136656 - RNA, 18 nt, Human
uguuuagucuugucucag

SEQ ID NO: 3136657 - RNA, 19 nt, Human
uguuuagucuugucucaga

SEQ ID NO: 3136658 - RNA, 13 nt, Human
uguuccccucucc

SEQ ID NO: 3136659 - RNA, 14 nt, Human
uguuccccucuccc

SEQ ID NO: 3136660 - RNA, 15 nt, Human
uguuccccucucccu

SEQ ID NO: 3136661 - RNA, 16 nt, Human
uguuccccucucccuu

SEQ ID NO: 3136662 - RNA, 17 nt, Human
uguuccccucucccuuc

SEQ ID NO: 3136663 - RNA, 21 nt, Human
uguuccccucucccuucccuc

SEQ ID NO: 3136664 - RNA, 23 nt, Human
uguuccccucucccuucccuccu

SEQ ID NO: 3136665 - RNA, 12 nt, Human
uguuccccucuu

SEQ ID NO: 3136666 - RNA, 15 nt, Human
uguuccccucuuguc

SEQ ID NO: 3136667 - RNA, 18 nt, Human
uguuccccucuugucucc

SEQ ID NO: 3136668 - RNA, 19 nt, Human
uguuccccucuugucuccc

SEQ ID NO: 3136669 - RNA, 20 nt, Human
uguuccccucuugucucccc

SEQ ID NO: 3136670 - RNA, 21 nt, Human
uguuccccucuugucuccccu

SEQ ID NO: 3136671 - RNA, 22 nt, Human
uguuccccucuugucuccccug

SEQ ID NO: 3136672 - RNA, 23 nt, Human
uguuccccucuugucuccccugu

SEQ ID NO: 3136673 - RNA, 12 nt, Human
aguggaggugga

SEQ ID NO: 3136674 - RNA, 21 nt, Human
aguguugaaacggaugauuuc

SEQ ID NO: 3136675 - RNA, 21 nt, Human
auaaauagcuagacuggugac

SEQ ID NO: 3136676 - RNA, 22 nt, Human
auaaauagcuagacuggugacu

SEQ ID NO: 3136677 - RNA, 11 nt, Human
aguugccuaaa

SEQ ID NO: 3136678 - RNA, 15 nt, Human
aguugccuaaaucca

SEQ ID NO: 3136679 - RNA, 16 nt, Human
aguugccuaaauccau

SEQ ID NO: 3136680 - RNA, 17 nt, Human
aguugccuaaauccauu

SEQ ID NO: 3136681 - RNA, 18 nt, Human
aguugggggucagugcug

SEQ ID NO: 3136682 - RNA, 21 nt, Human
aguugggggucagugcugccu

SEQ ID NO: 3136683 - RNA, 14 nt, Human
acauugguguugua

SEQ ID NO: 3136684 - RNA, 16 nt, Human
acauugguguuguacu

SEQ ID NO: 3136685 - RNA, 22 nt, Human
acauugguguuguacucaauuu

SEQ ID NO: 3136686 - RNA, 23 nt, Human
acauugguguuguacucaauuuu

SEQ ID NO: 3136687 - RNA, 12 nt, Human
accaaaaaccag

SEQ ID NO: 3136688 - RNA, 13 nt, Human
accaaaaaccagu

SEQ ID NO: 3136689 - RNA, 15 nt, Human
ucaaaguugccuaaa

SEQ ID NO: 3136690 - RNA, 14 nt, Human
acauggccuuugcu

SEQ ID NO: 3136691 - RNA, 13 nt, Human
ucagaucugccua

SEQ ID NO: 3136692 - RNA, 20 nt, Human
ucagaucugccuaaggacuu

SEQ ID NO: 3136693 - RNA, 15 nt, Human
ucagaucugccuaag

SEQ ID NO: 3136694 - RNA, 18 nt, Human
ucagaucugccuaaggac

SEQ ID NO: 3136695 - RNA, 17 nt, Human
accaugggauaaaugcc

SEQ ID NO: 3136696 - RNA, 12 nt, Human
ucagugcugccu

SEQ ID NO: 3136697 - RNA, 13 nt, Human
ucagugcugccug

SEQ ID NO: 3136698 - RNA, 14 nt, Human
ucagugcugccugu

SEQ ID NO: 3136699 - RNA, 19 nt, Human
ucagugcugccugucccca

SEQ ID NO: 3136700 - RNA, 15 nt, Human
acccgccuagcugcu

SEQ ID NO: 3136701 - RNA, 18 nt, Human
acccgccuagcugcuguc

SEQ ID NO: 3136702 - RNA, 15 nt, Human
acggaugauuucuau

SEQ ID NO: 3136703 - RNA, 14 nt, Human
acggaugauuucua

SEQ ID NO: 3136704 - RNA, 15 nt, Human
acgcugaccguggag

SEQ ID NO: 3136705 - RNA, 13 nt, Human
acgcguugaaauu

SEQ ID NO: 3136706 - RNA, 14 nt, Human
acgcguugaaauug

SEQ ID NO: 3136707 - RNA, 18 nt, Human
acgcguugaaauuguaau

SEQ ID NO: 3136708 - RNA, 20 nt, Human
acgcguugaaauuguaauua

SEQ ID NO: 3136709 - RNA, 12 nt, Human
uccauuuaauaa

SEQ ID NO: 3136710 - RNA, 19 nt, Human
uccauuuggaaaucuuuaa

SEQ ID NO: 3136711 - RNA, 20 nt, Human
uccauuuggaaaucuuuaaa

SEQ ID NO: 3136712 - RNA, 12 nt, Human
uccauuuggaaa

SEQ ID NO: 3136713 - RNA, 20 nt, Human
acggggccgacauugucucc

SEQ ID NO: 3136714 - RNA, 21 nt, Human
acggggccgacauugucuccc

SEQ ID NO: 3136715 - RNA, 20 nt, Human
acucuucuugauuaaaaguu

SEQ ID NO: 3136716 - RNA, 19 nt, Human
acucuucuugauuaaaagu

SEQ ID NO: 3136717 - RNA, 12 nt, Human
uccguggaggag

SEQ ID NO: 3136718 - RNA, 22 nt, Human
uccguggaggagguugggaggg

SEQ ID NO: 3136719 - RNA, 23 nt, Human
uccgugcuaaggacuuguuagau

SEQ ID NO: 3136720 - RNA, 17 nt, Human
uccgugcuaaggacuug

SEQ ID NO: 3136721 - RNA, 18 nt, Human
uccgugcuaaggacuugu

SEQ ID NO: 3136722 - RNA, 16 nt, Human
uccgugcuaaggacuu

SEQ ID NO: 3136723 - RNA, 19 nt, Human
uccccucuugucuccccug

SEQ ID NO: 3136724 - RNA, 16 nt, Human
ucuaguucacucucca

SEQ ID NO: 3136725 - RNA, 19 nt, Human
ucuaguucacucuccauuu

SEQ ID NO: 3136726 - RNA, 12 nt, Human
ucuaguucacuc

SEQ ID NO: 3136727 - RNA, 12 nt, Human
ucuaccuggagg

SEQ ID NO: 3136728 - RNA, 13 nt, Human
ucuaccuggaggg

SEQ ID NO: 3136729 - RNA, 18 nt, Human
ucuaccuggagggaagag

SEQ ID NO: 3136730 - RNA, 18 nt, Human
ucucacuccccagccugg

SEQ ID NO: 3136731 - RNA, 21 nt, Human
ucucacuccccagccugggcc

SEQ ID NO: 3136732 - RNA, 22 nt, Human
ucucacuccccagccugggccc

SEQ ID NO: 3136733 - RNA, 22 nt, Human
agaaccucuuugucuacaccau

SEQ ID NO: 3136734 - RNA, 18 nt, Human
ucugcagguugaagccau

SEQ ID NO: 3136735 - RNA, 22 nt, Human
ucugcagguugaagccaugucu

SEQ ID NO: 3136736 - RNA, 21 nt, Human
agaagccccacccugccucac

SEQ ID NO: 3136737 - RNA, 22 nt, Human
acuuugugcugggguuaucuga

SEQ ID NO: 3136738 - RNA, 15 nt, Human
ucuugauuaaaaguu

SEQ ID NO: 3136739 - RNA, 15 nt, Human
ugaaacggaugauuu

SEQ ID NO: 3136740 - RNA, 17 nt, Human
ugaaacuuguguaaaua

SEQ ID NO: 3136741 - RNA, 23 nt, Human
ugaaacuuguguaaauacaauuu

SEQ ID NO: 3136742 - RNA, 17 nt, Human
ugaaacggaugauuucu

SEQ ID NO: 3136743 - RNA, 18 nt, Human
ugaaacggaugauuucua

SEQ ID NO: 3136744 - RNA, 19 nt, Human
ugaaacggaugauuucuau

SEQ ID NO: 3136745 - RNA, 20 nt, Human
ugaaacggaugauuucuaug

SEQ ID NO: 3136746 - RNA, 16 nt, Human
agaggcuguggcuggu

SEQ ID NO: 3136747 - RNA, 14 nt, Human
agaggcugguuuug

SEQ ID NO: 3136748 - RNA, 18 nt, Human
agaggcugguuuuggcau

SEQ ID NO: 3136749 - RNA, 10 nt, Human
agaggcuggu

SEQ ID NO: 3136750 - RNA, 17 nt, Human
ugaauggcuuuguauag

SEQ ID NO: 3136751 - RNA, 18 nt, Human
ugaauggcuuuguauaga

SEQ ID NO: 3136752 - RNA, 19 nt, Human
ugaauggcuuuguauagaa

SEQ ID NO: 3136753 - RNA, 22 nt, Human
ugaauggcuuuguauagaaccu

SEQ ID NO: 3136754 - RNA, 12 nt, Human
ugaauggcuuug

SEQ ID NO: 3136755 - RNA, 15 nt, Human
ugaauggcuuuguau

SEQ ID NO: 3136756 - RNA, 11 nt, Human
ugaauggcuuu

SEQ ID NO: 3136757 - RNA, 17 nt, Human
agauacuggauuguacu

SEQ ID NO: 3136758 - RNA, 14 nt, Human
agauacuggauugu

SEQ ID NO: 3136759 - RNA, 17 nt, Human
ugaauuuuguguuagag

SEQ ID NO: 3136760 - RNA, 21 nt, Human
ugaauuuuguguuagagauuu

SEQ ID NO: 3136761 - RNA, 12 nt, Human
agauuuugaaug

SEQ ID NO: 3136762 - RNA, 19 nt, Human
agauuuuauuauguaaauc

SEQ ID NO: 3136763 - RNA, 14 nt, Human
agauuuuauuaugu

SEQ ID NO: 3136764 - RNA, 15 nt, Human
agauuuuauuaugua

SEQ ID NO: 3136765 - RNA, 16 nt, Human
agauuuuauuauguaa

SEQ ID NO: 3136766 - RNA, 17 nt, Human
agauuuuauuauguaaa

SEQ ID NO: 3136767 - RNA, 18 nt, Human
agauuuuauuauguaaau

SEQ ID NO: 3136768 - RNA, 16 nt, Human
ugagaaggguguugua

SEQ ID NO: 3136769 - RNA, 23 nt, Human
agauuuuuuuguuguuuguuuag

SEQ ID NO: 3136770 - RNA, 18 nt, Human
agauuuuuuuguuguuug

SEQ ID NO: 3136771 - RNA, 19 nt, Human
agauuuuuuuguuguuugu

SEQ ID NO: 3136772 - RNA, 15 nt, Human
agauuuuuuuguugu

SEQ ID NO: 3136773 - RNA, 16 nt, Human
agauuuuuuuguuguu

SEQ ID NO: 3136774 - RNA, 22 nt, Human
aacugguggacauggcuguuca

SEQ ID NO: 3136775 - RNA, 14 nt, Human
gugaacuugaaauu

SEQ ID NO: 3136776 - RNA, 15 nt, Human
gugaacuugaaauuu

SEQ ID NO: 3136777 - RNA, 16 nt, Human
aaccucuuugucuaca

SEQ ID NO: 3136778 - RNA, 17 nt, Human
aacucgggcucccgggu

SEQ ID NO: 3136779 - RNA, 14 nt, Human
aaauuguaauuaua

SEQ ID NO: 3136780 - RNA, 15 nt, Human
aaauuguaauuauau

SEQ ID NO: 3136781 - RNA, 13 nt, Human
aaauguaugugag

SEQ ID NO: 3136782 - RNA, 12 nt, Human
guaugcugcuuu

SEQ ID NO: 3136783 - RNA, 13 nt, Human
guaugcugcuuuu

SEQ ID NO: 3136784 - RNA, 19 nt, Human
aagaggggugcagaggcug

SEQ ID NO: 3136785 - RNA, 21 nt, Human
aagaggggugcagaggcugug

SEQ ID NO: 3136786 - RNA, 22 nt, Human
aagaggggugcagaggcugugg

SEQ ID NO: 3136787 - RNA, 20 nt, Human
aagccugaguuugcuuucaa

SEQ ID NO: 3136788 - RNA, 14 nt, Human
aagcauuuaggaau

SEQ ID NO: 3136789 - RNA, 14 nt, Human
aaggggcccuugga

SEQ ID NO: 3136790 - RNA, 15 nt, Human
aaggggcccuuggag

SEQ ID NO: 3136791 - RNA, 16 nt, Human
aaggggcccuuggagc

SEQ ID NO: 3136792 - RNA, 20 nt, Human
aaggggcccuuggagcgugg

SEQ ID NO: 3136793 - RNA, 21 nt, Human
aaggggcccuuggagcgugga

SEQ ID NO: 3136794 - RNA, 19 nt, Human
guuuaauauuaaagccaug

SEQ ID NO: 3136795 - RNA, 20 nt, Human
guuuaauauuaaagccaugu

SEQ ID NO: 3136796 - RNA, 17 nt, Human
guugccuaaauccauuu

SEQ ID NO: 3136797 - RNA, 22 nt, Human
guugccuaaauccauuuggaaa

SEQ ID NO: 3136798 - RNA, 18 nt, Human
guugggaucuaggagagg

SEQ ID NO: 3136799 - RNA, 14 nt, Human
aaguauuaagcaua

SEQ ID NO: 3136800 - RNA, 15 nt, Human
aaguauuaagcauau

SEQ ID NO: 3136801 - RNA, 16 nt, Human
aaguauuaagcauaua

SEQ ID NO: 3136802 - RNA, 17 nt, Human
aaguauuaagcauauau

SEQ ID NO: 3136803 - RNA, 18 nt, Human
aaguauuaagcauauauu

SEQ ID NO: 3136804 - RNA, 22 nt, Human
uaaaagacugucuuaauuugca

SEQ ID NO: 3136805 - RNA, 12 nt, Human
aauuauugguaa

SEQ ID NO: 3136806 - RNA, 15 nt, Human
aauguuacagaaucu

SEQ ID NO: 3136807 - RNA, 19 nt, Human
uaauuauaucugaggaauu

SEQ ID NO: 3136808 - RNA, 21 nt, Human
uaauuauaucugaggaauucu

SEQ ID NO: 3136809 - RNA, 22 nt, Human
uaauuauaucugaggaauucug

SEQ ID NO: 3136810 - RNA, 23 nt, Human
uaauuauaucugaggaauucugu

SEQ ID NO: 3136811 - RNA, 19 nt, Human
uaauuauaugcuauuucua

SEQ ID NO: 3136812 - RNA, 14 nt, Human
uaauuauaugcuau

SEQ ID NO: 3136813 - RNA, 18 nt, Human
uaauuauaugcuauuucu

SEQ ID NO: 3136814 - RNA, 14 nt, Human
uacaccauuaugug

SEQ ID NO: 3136815 - RNA, 12 nt, Human
aauaccaaggaa

SEQ ID NO: 3136816 - RNA, 21 nt, Human
aauagcuagacuggugacuga

SEQ ID NO: 3136817 - RNA, 14 nt, Human
aauagcuagacugg

SEQ ID NO: 3136818 - RNA, 20 nt, Human
aauagcuagacuggugacug

SEQ ID NO: 3136819 - RNA, 12 nt, Human
uaacauguuaaa

SEQ ID NO: 3136820 - RNA, 15 nt, Human
uaacauguuaaacca

SEQ ID NO: 3136821 - RNA, 14 nt, Human
aaucccauuauuca

SEQ ID NO: 3136822 - RNA, 16 nt, Human
aaucccauuauucaaa

SEQ ID NO: 3136823 - RNA, 21 nt, Human
aaucccauuauucaaaguugc

SEQ ID NO: 3136824 - RNA, 13 nt, Human
uaaggacuuguua

SEQ ID NO: 3136825 - RNA, 15 nt, Human
uaaggacuuguuaga

SEQ ID NO: 3136826 - RNA, 16 nt, Human
uaaggacuuguuagau

SEQ ID NO: 3136827 - RNA, 19 nt, Human
uaaggacuuguuagaucua

SEQ ID NO: 3136828 - RNA, 13 nt, Human
uaagcauauauuu

SEQ ID NO: 3136829 - RNA, 14 nt, Human
uaaggacuucuuua

SEQ ID NO: 3136830 - RNA, 15 nt, Human
uaaggacuucuuuaa

SEQ ID NO: 3136831 - RNA, 16 nt, Human
uaaggacuucuuuaau

SEQ ID NO: 3136832 - RNA, 22 nt, Human
uaaggacuucuuuaauuuugga

SEQ ID NO: 3136833 - RNA, 16 nt, Human
uaaggaaaaguuuaau

SEQ ID NO: 3136834 - RNA, 21 nt, Human
uaaggaaaaguuuaauauuaa

SEQ ID NO: 3136835 - RNA, 17 nt, Human
uaaggaaaaguuuaaua

SEQ ID NO: 3136836 - RNA, 19 nt, Human
uaaggaaaaguuuaauauu

SEQ ID NO: 3136837 - RNA, 11 nt, Human
acacuucccug

SEQ ID NO: 3136838 - RNA, 12 nt, Human
acacuucccugg

SEQ ID NO: 3136839 - RNA, 13 nt, Human
acacuucccuggc

SEQ ID NO: 3136840 - RNA, 14 nt, Human
acacuucccuggcg

SEQ ID NO: 3136841 - RNA, 18 nt, Human
uauagauuagaauucugu

SEQ ID NO: 3136842 - RNA, 21 nt, Human
uaugaaacuuguguaaauaca

SEQ ID NO: 3136843 - RNA, 14 nt, Human
uaugaaacuugugu

SEQ ID NO: 3136844 - RNA, 19 nt, Human
uaugaaacuuguguaaaua

SEQ ID NO: 3136845 - RNA, 19 nt, Human
uaugccacccccgcuggag

SEQ ID NO: 3136846 - RNA, 14 nt, Human
uaugcuauuucuau

SEQ ID NO: 3136847 - RNA, 15 nt, Human
uaugcuauuucuaua

SEQ ID NO: 3136848 - RNA, 16 nt, Human
uaugcuauuucuauau

SEQ ID NO: 3136849 - RNA, 18 nt, Human
uaugcuauuucuauauuu

SEQ ID NO: 3136850 - RNA, 22 nt, Human
uaugcuauuucuauauuuucau

SEQ ID NO: 3136851 - RNA, 23 nt, Human
uaugcuauuucuauauuuucauu

SEQ ID NO: 3136852 - RNA, 17 nt, Human
uagagggaacagggcgg

SEQ ID NO: 3136853 - RNA, 13 nt, Human
acaaaguauuaag

SEQ ID NO: 3136854 - RNA, 15 nt, Human
acaaaguauuaagca

SEQ ID NO: 3136855 - RNA, 16 nt, Human
acaaaguauuaagcau

SEQ ID NO: 3136856 - RNA, 18 nt, Human
acaaaguauuaagcauau

SEQ ID NO: 3136857 - RNA, 14 nt, Human
acacaaggggcccu

SEQ ID NO: 3136858 - RNA, 20 nt, Human
acacaaggggcccuuggagc

SEQ ID NO: 3136859 - RNA, 16 nt, Human
uaggauaaaaagccag

SEQ ID NO: 3136860 - RNA, 20 nt, Human
uaggauaaaaagccagggcu

SEQ ID NO: 3136861 - RNA, 21 nt, Human
uaggauaaaaagccagggcug

SEQ ID NO: 3136862 - RNA, 22 nt, Human
uaggauaaaaagccagggcugg

SEQ ID NO: 3136863 - RNA, 23 nt, Human
uaggauaaaaagccagggcugga

SEQ ID NO: 3136864 - RNA, 14 nt, Human
uagggcccuggagg

SEQ ID NO: 3136865 - RNA, 16 nt, Human
uagggcccuggaggcg

SEQ ID NO: 3136866 - RNA, 13 nt, Human
acaugcccucccu

SEQ ID NO: 3136867 - RNA, 14 nt, Human
acaugcccucccuu

SEQ ID NO: 3136868 - RNA, 19 nt, Human
acaugcccucccuucuccc

SEQ ID NO: 3136869 - RNA, 21 nt, Human
acaugcccucccuucucccug

SEQ ID NO: 3136870 - RNA, 22 nt, Human
acaugcccucccuucucccugg

SEQ ID NO: 3136871 - RNA, 23 nt, Human
acaugcccucccuucucccugga

SEQ ID NO: 3136872 - RNA, 12 nt, Human
accaagaggcug

SEQ ID NO: 3136873 - RNA, 13 nt, Human
accaagaggcugg

SEQ ID NO: 3136874 - RNA, 14 nt, Human
accaagaggcuggu

SEQ ID NO: 3136875 - RNA, 15 nt, Human
accaagaggcugguu

SEQ ID NO: 3136876 - RNA, 16 nt, Human
accaagaggcugguuu

SEQ ID NO: 3136877 - RNA, 18 nt, Human
acaauuuuguuucuguac

SEQ ID NO: 3136878 - RNA, 20 nt, Human
acaauuuuguuucuguacuu

SEQ ID NO: 3136879 - RNA, 12 nt, Human
aauuuuggaauu

SEQ ID NO: 3136880 - RNA, 11 nt, Human
aauuuuggaau

SEQ ID NO: 3136881 - RNA, 23 nt, Human
aauuuauuggcuuuucugaucca

SEQ ID NO: 3136882 - RNA, 17 nt, Human
aauuuauuggcuuuucu

SEQ ID NO: 3136883 - RNA, 19 nt, Human
aauuuauuggcuuuucuga

SEQ ID NO: 3136884 - RNA, 20 nt, Human
aauuuauuggcuuuucugau

SEQ ID NO: 3136885 - RNA, 21 nt, Human
aauuuauuggcuuuucugauc

SEQ ID NO: 3136886 - RNA, 16 nt, Human
aauuggggauucuuaa

SEQ ID NO: 3136887 - RNA, 15 nt, Human
aauuggggauucuua

SEQ ID NO: 3136888 - RNA, 21 nt, Human
aaugguccgugcuaaggacuu

SEQ ID NO: 3136889 - RNA, 17 nt, Human
aauuggggauucuuaaa

SEQ ID NO: 3136890 - RNA, 20 nt, Human
aauuggggauucuuaaaguu

SEQ ID NO: 3136891 - RNA, 15 nt, Human
acugauucuucagca

SEQ ID NO: 3136892 - RNA, 22 nt, Human
acugauucuucagcaaaaauau

SEQ ID NO: 3136893 - RNA, 12 nt, Human
acugauucuuca

SEQ ID NO: 3136894 - RNA, 13 nt, Human
acugauucuucag

SEQ ID NO: 3136895 - RNA, 22 nt, Human
accugucuugccuuuuucauua

SEQ ID NO: 3136896 - RNA, 19 nt, Human
accugucuugccuuuuuca

SEQ ID NO: 3136897 - RNA, 21 nt, Human
accugucuugccuuuuucauu

SEQ ID NO: 3136898 - RNA, 12 nt, Human
aauauuaaagcc

SEQ ID NO: 3136899 - RNA, 13 nt, Human
aauauuaaagcca

SEQ ID NO: 3136900 - RNA, 14 nt, Human
aauauuaaagccau

SEQ ID NO: 3136901 - RNA, 15 nt, Human
aauauuaaagccaug

SEQ ID NO: 3136902 - RNA, 16 nt, Human
aauauuaaagccaugu

SEQ ID NO: 3136903 - RNA, 18 nt, Human
aauauuaaagccauguuu

SEQ ID NO: 3136904 - RNA, 19 nt, Human
aauauuaaagccauguuua

SEQ ID NO: 3136905 - RNA, 20 nt, Human
aauauuaaagccauguuuau

SEQ ID NO: 3136906 - RNA, 20 nt, Human
aaugguccgugcuaaggacu

SEQ ID NO: 3136907 - RNA, 17 nt, Human
aagccacugccucuccc

SEQ ID NO: 3136908 - RNA, 18 nt, Human
aagccacugccucucccu

SEQ ID NO: 3136909 - RNA, 19 nt, Human
aagccacugccucucccuc

SEQ ID NO: 3136910 - RNA, 15 nt, Human
aaagaaacugacaug

SEQ ID NO: 3136911 - RNA, 22 nt, Human
aaagaaacugacaugcccuccc

SEQ ID NO: 3136912 - RNA, 23 nt, Human
aaaaguuuaauauuaaagccaug

SEQ ID NO: 3136913 - RNA, 21 nt, Human
aaaaguuuaauauuaaagcca

SEQ ID NO: 3136914 - RNA, 22 nt, Human
aaaaguuuaauauuaaagccau

SEQ ID NO: 3136915 - RNA, 20 nt, Human
aaaaguuuaauauuaaagcc

SEQ ID NO: 3136916 - RNA, 21 nt, Human
aaaucugugaacuugaaauuu

SEQ ID NO: 3136917 - RNA, 20 nt, Human
aaaucugugaacuugaaauu

SEQ ID NO: 3136918 - RNA, 19 nt, Human
aaaucugugaacuugaaau

SEQ ID NO: 3136919 - RNA, 17 nt, Human
aaauuggggauucuuaa

SEQ ID NO: 3136920 - RNA, 18 nt, Human
aaauuggggauucuuaaa

SEQ ID NO: 3136921 - RNA, 19 nt, Human
aaauuggggauucuuaaag

SEQ ID NO: 3136922 - RNA, 20 nt, Human
aaauuggggauucuuaaagu

SEQ ID NO: 3136923 - RNA, 22 nt, Human
aaauuggggauucuuaaaguug

SEQ ID NO: 3136924 - RNA, 23 nt, Human
aaauuggggauucuuaaaguuga

SEQ ID NO: 3136925 - RNA, 15 nt, Human
aacgcguugaaauug

SEQ ID NO: 3136926 - RNA, 17 nt, Human
aacgcguugaaauugua

SEQ ID NO: 3136927 - RNA, 13 nt, Human
aacgcguugaaau

SEQ ID NO: 3136928 - RNA, 14 nt, Human
aacgcguugaaauu

SEQ ID NO: 3136929 - RNA, 14 nt, Human
aaccaguauuguac

SEQ ID NO: 3136930 - RNA, 11 nt, Human
aaccaguauug

SEQ ID NO: 3136931 - RNA, 13 nt, Human
aaccaguauugua

SEQ ID NO: 3136932 - RNA, 19 nt, Human
agaucugccuaaggacuuc

SEQ ID NO: 3136933 - RNA, 16 nt, Human
agaucuggaaugugaa

SEQ ID NO: 3136934 - RNA, 13 nt, Human
agaguggaggugg

SEQ ID NO: 3136935 - RNA, 14 nt, Human
agcagcccugcccc

SEQ ID NO: 3136936 - RNA, 17 nt, Human
agcagcccugccccaca

SEQ ID NO: 3136937 - RNA, 20 nt, Human
agacagaucuggaaugugaa

SEQ ID NO: 3136938 - RNA, 22 nt, Human
agacagauacuccuccaagguu

SEQ ID NO: 3136939 - RNA, 17 nt, Human
agccugggcccaucucc

SEQ ID NO: 3136940 - RNA, 18 nt, Human
agccugggcccaucuccc

SEQ ID NO: 3136941 - RNA, 19 nt, Human
agccugggcccaucucccu

SEQ ID NO: 3136942 - RNA, 20 nt, Human
agccugggcccaucucccug

SEQ ID NO: 3136943 - RNA, 21 nt, Human
agccugggcccaucucccugc

SEQ ID NO: 3136944 - RNA, 22 nt, Human
agccugggcccaucucccugcu

SEQ ID NO: 3136945 - RNA, 23 nt, Human
agccugggcccaucucccugcuu

SEQ ID NO: 3136946 - RNA, 13 nt, Human
aggaaguggaaug

SEQ ID NO: 3136947 - RNA, 13 nt, Human
aggcuaaguuggg

SEQ ID NO: 3136948 - RNA, 17 nt, Human
aggcuaaguugggaucu

SEQ ID NO: 3136949 - RNA, 24 nt, Human
aggcuaaguugggaucuaggagag

SEQ ID NO: 3136950 - RNA, 17 nt, Human
aggcugacguuccgggc

SEQ ID NO: 3136951 - RNA, 22 nt, Human
aggcggugcggcagggaagagg

SEQ ID NO: 3136952 - RNA, 18 nt, Human
auaaaaagccagggcugg

SEQ ID NO: 3136953 - RNA, 20 nt, Human
auauauuuuuauauuuacua

SEQ ID NO: 3136954 - RNA, 18 nt, Human
auauauuuuuauauuuac

SEQ ID NO: 3136955 - RNA, 19 nt, Human
auauauuuuuauauuuacu

SEQ ID NO: 3136956 - RNA, 20 nt, Human
aucccauuauucaaaguugc

SEQ ID NO: 3136957 - RNA, 14 nt, Human
aucccauuauucaa

SEQ ID NO: 3136958 - RNA, 15 nt, Human
aucccauuauucaaa

SEQ ID NO: 3136959 - RNA, 16 nt, Human
auccuuaugccacccc

SEQ ID NO: 3136960 - RNA, 15 nt, Human
augguccgugcuaag

SEQ ID NO: 3136961 - RNA, 18 nt, Human
augguccgugcuaaggac

SEQ ID NO: 3136962 - RNA, 18 nt, Human
auggcuuuguauagaacc

SEQ ID NO: 3136963 - RNA, 19 nt, Human
auggcuuuguauagaaccu

SEQ ID NO: 3136964 - RNA, 20 nt, Human
augcugaguuugugcuggug

SEQ ID NO: 3136965 - RNA, 21 nt, Human
caaaugggcgccccccccucc

SEQ ID NO: 3136966 - RNA, 23 nt, Human
caacagcuggugcccugcuuuca

SEQ ID NO: 3136967 - RNA, 16 nt, Human
ugacaugcccucccuu

SEQ ID NO: 3136968 - RNA, 21 nt, Human
ugacaugcccucccuucuccc

SEQ ID NO: 3136969 - RNA, 22 nt, Human
ugacaugcccucccuucucccu

SEQ ID NO: 3136970 - RNA, 23 nt, Human
ugacaugcccucccuucucccug

SEQ ID NO: 3136971 - RNA, 18 nt, Human
ugaacuugaaauuugaau

SEQ ID NO: 3136972 - RNA, 13 nt, Human
ugaacuugaaauu

SEQ ID NO: 3136973 - RNA, 14 nt, Human
ugaacuugaaauuu

SEQ ID NO: 3136974 - RNA, 20 nt, Human
ugaggcguauguggcaaaau

SEQ ID NO: 3136975 - RNA, 14 nt, Human
ugacguuccgggca

SEQ ID NO: 3136976 - RNA, 12 nt, Human
ugacuuuggaua

SEQ ID NO: 3136977 - RNA, 13 nt, Human
ugacuuuggauaa

SEQ ID NO: 3136978 - RNA, 14 nt, Human
ugacuuuggauaau

SEQ ID NO: 3136979 - RNA, 15 nt, Human
ugacuuuggauaaua

SEQ ID NO: 3136980 - RNA, 16 nt, Human
ugacuuuggauaauaa

SEQ ID NO: 3136981 - RNA, 20 nt, Human
ugacuuuggauaauaaggaa

SEQ ID NO: 3136982 - RNA, 22 nt, Human
ugacuuuggauaauaaggaaaa

SEQ ID NO: 3136983 - RNA, 14 nt, Human
ucuugucucagauu

SEQ ID NO: 3136984 - RNA, 15 nt, Human
ucuugucucagauuu

SEQ ID NO: 3136985 - RNA, 12 nt, Human
ucuugucucaga

SEQ ID NO: 3136986 - RNA, 14 nt, Human
ucuugccccaucac

SEQ ID NO: 3136987 - RNA, 21 nt, Human
ucuugccccaucacugcgcca

SEQ ID NO: 3136988 - RNA, 14 nt, Human
ucuggaaugugaag

SEQ ID NO: 3136989 - RNA, 23 nt, Human
ucugccuaaggacuucuuuaauu

SEQ ID NO: 3136990 - RNA, 16 nt, Human
ucugccuaaggacuuc

SEQ ID NO: 3136991 - RNA, 20 nt, Human
ucugccuaaggacuucuuua

SEQ ID NO: 3136992 - RNA, 21 nt, Human
ucugccuaaggacuucuuuaa

SEQ ID NO: 3136993 - RNA, 16 nt, Human
ucagauacuggauugu

SEQ ID NO: 3136994 - RNA, 19 nt, Human
ucagauacuggauuguacu

SEQ ID NO: 3136995 - RNA, 20 nt, Human
ucagauacuggauuguacuu

SEQ ID NO: 3136996 - RNA, 14 nt, Human
ucagauacuggauu

SEQ ID NO: 3136997 - RNA, 15 nt, Human
ucagauacuggauug

SEQ ID NO: 3136998 - RNA, 16 nt, Human
ucucagauuuuauuau

SEQ ID NO: 3136999 - RNA, 17 nt, Human
ucucagauuuuauuaug

SEQ ID NO: 3137000 - RNA, 18 nt, Human
ucucagauuuuauuaugu

SEQ ID NO: 3137001 - RNA, 14 nt, Human
ucucagauuuuauu

SEQ ID NO: 3137002 - RNA, 15 nt, Human
ucucagauuuuauua

SEQ ID NO: 3137003 - RNA, 13 nt, Human
ucucagauuuuau

SEQ ID NO: 3137004 - RNA, 18 nt, Human
ucuauauguuuaaaagua

SEQ ID NO: 3137005 - RNA, 15 nt, Human
ucuauauuuucauuc

SEQ ID NO: 3137006 - RNA, 16 nt, Human
ucuauauuuucauucu

SEQ ID NO: 3137007 - RNA, 13 nt, Human
ucuauauuuucau

SEQ ID NO: 3137008 - RNA, 14 nt, Human
ucuauauuuucauu

SEQ ID NO: 3137009 - RNA, 15 nt, Human
ucgucuuccgucucc

SEQ ID NO: 3137010 - RNA, 17 nt, Human
ucgucuuccgucucccc

SEQ ID NO: 3137011 - RNA, 19 nt, Human
ucgucuuccgucucccccg

SEQ ID NO: 3137012 - RNA, 22 nt, Human
ucgucuuccgucucccccgugu

SEQ ID NO: 3137013 - RNA, 23 nt, Human
uccuuaugccacccccgcuggag

SEQ ID NO: 3137014 - RNA, 14 nt, Human
ucccucugguccca

SEQ ID NO: 3137015 - RNA, 16 nt, Human
ucccucuggucccaca

SEQ ID NO: 3137016 - RNA, 15 nt, Human
ucccuggcggcccca

SEQ ID NO: 3137017 - RNA, 19 nt, Human
ucccuggcggccccaacuc

SEQ ID NO: 3137018 - RNA, 15 nt, Human
ucccugggaucuggu

SEQ ID NO: 3137019 - RNA, 17 nt, Human
ucccugggaucuggugg

SEQ ID NO: 3137020 - RNA, 13 nt, Human
uccucucacuccc

SEQ ID NO: 3137021 - RNA, 15 nt, Human
uccucucacucccca

SEQ ID NO: 3137022 - RNA, 22 nt, Human
uccucucacuccccagccuggg

SEQ ID NO: 3137023 - RNA, 19 nt, Human
uggaacgcguugaaauugu

SEQ ID NO: 3137024 - RNA, 18 nt, Human
uggaacgcguugaaauug

SEQ ID NO: 3137025 - RNA, 17 nt, Human
uggaacgcguugaaauu

SEQ ID NO: 3137026 - RNA, 15 nt, Human
uggaucuaccuggag

SEQ ID NO: 3137027 - RNA, 16 nt, Human
uggaucuaccuggagg

SEQ ID NO: 3137028 - RNA, 17 nt, Human
uggaucuaccuggaggg

SEQ ID NO: 3137029 - RNA, 18 nt, Human
uggggauucuuaaaguug

SEQ ID NO: 3137030 - RNA, 20 nt, Human
uggggauucuuaaaguugaa

SEQ ID NO: 3137031 - RNA, 13 nt, Human
uggggauucuuaa

SEQ ID NO: 3137032 - RNA, 16 nt, Human
uggggauucuuaaagu

SEQ ID NO: 3137033 - RNA, 12 nt, Human
uggggauucuua

SEQ ID NO: 3137034 - RNA, 14 nt, Human
ugggaucuaggaga

SEQ ID NO: 3137035 - RNA, 15 nt, Human
ugggaucuaggagag

SEQ ID NO: 3137036 - RNA, 16 nt, Human
ugggaucuaggagagg

SEQ ID NO: 3137037 - RNA, 18 nt, Human
uggcuuuucugauccagu

SEQ ID NO: 3137038 - RNA, 19 nt, Human
uggcuuuucugauccaguu

SEQ ID NO: 3137039 - RNA, 14 nt, Human
uggcuuuucugauc

SEQ ID NO: 3137040 - RNA, 17 nt, Human
uggcuuuucugauccag

SEQ ID NO: 3137041 - RNA, 13 nt, Human
uggcuuuucugau

SEQ ID NO: 3137042 - RNA, 16 nt, Human
uggcuggugagccggu

SEQ ID NO: 3137043 - RNA, 20 nt, Human
uggcuggugagccggucagg

SEQ ID NO: 3137044 - RNA, 12 nt, Human
ugccucucccuc

SEQ ID NO: 3137045 - RNA, 13 nt, Human
ugccucucccucu

SEQ ID NO: 3137046 - RNA, 14 nt, Human
ugccucucccucug

SEQ ID NO: 3137047 - RNA, 15 nt, Human
ugccucucccucugg

SEQ ID NO: 3137048 - RNA, 18 nt, Human
ugccccaucacugcgcca

SEQ ID NO: 3137049 - RNA, 11 nt, Human
ugcagaggcug

SEQ ID NO: 3137050 - RNA, 12 nt, Human
ugcagaggcugu

SEQ ID NO: 3137051 - RNA, 13 nt, Human
ugcagaggcugug

SEQ ID NO: 3137052 - RNA, 14 nt, Human
ugcagaggcugugg

SEQ ID NO: 3137053 - RNA, 15 nt, Human
ugcagaggcuguggc

SEQ ID NO: 3137054 - RNA, 22 nt, Human
ugcagaggcuguggcuggugag

SEQ ID NO: 3137055 - RNA, 14 nt, Human
ugcacggugaaugg

SEQ ID NO: 3137056 - RNA, 18 nt, Human
ugcacggugaauggcuuu

SEQ ID NO: 3137057 - RNA, 21 nt, Human
uguauugugcgcuaaacuuuu

SEQ ID NO: 3137058 - RNA, 23 nt, Human
ugucacauuuuucuuguuuuguc

SEQ ID NO: 3137059 - RNA, 21 nt, Human
ugugggcagcuuagggcccug

SEQ ID NO: 3137060 - RNA, 13 nt, Human
uguguaugcugcu

SEQ ID NO: 3137061 - RNA, 15 nt, Human
uguguaugcugcuuu

SEQ ID NO: 3137062 - RNA, 11 nt, Human
uguuucuguac

SEQ ID NO: 3137063 - RNA, 22 nt, Human
uguuucuguacuuuuuggcaua

SEQ ID NO: 3137064 - RNA, 23 nt, Human
uguuucuguacuuuuuggcauaa

SEQ ID NO: 3137065 - RNA, 15 nt, Human
uuaaaaaaaaaauug

SEQ ID NO: 3137066 - RNA, 18 nt, Human
uuaaagccauguuuauua

SEQ ID NO: 3137067 - RNA, 20 nt, Human
uuaaagccauguuuauuaca

SEQ ID NO: 3137068 - RNA, 12 nt, Human
uuaaagccaugu

SEQ ID NO: 3137069 - RNA, 14 nt, Human
uuaaagccauguuu

SEQ ID NO: 3137070 - RNA, 19 nt, Human
uuacagaaucuaacuggug

SEQ ID NO: 3137071 - RNA, 12 nt, Human
uuacagaagccc

SEQ ID NO: 3137072 - RNA, 18 nt, Human
uuaauauuaaagccaugu

SEQ ID NO: 3137073 - RNA, 19 nt, Human
uuaauauuaaagccauguu

SEQ ID NO: 3137074 - RNA, 13 nt, Human
uuaagccacugcc

SEQ ID NO: 3137075 - RNA, 15 nt, Human
uuaagccacugccuc

SEQ ID NO: 3137076 - RNA, 16 nt, Human
uuaagccacugccucu

SEQ ID NO: 3137077 - RNA, 19 nt, Human
uuaagccacugccucuccc

SEQ ID NO: 3137078 - RNA, 20 nt, Human
uuaagccacugccucucccu

SEQ ID NO: 3137079 - RNA, 23 nt, Human
uuaagcauauauuuuuauauuua

SEQ ID NO: 3137080 - RNA, 11 nt, Human
uuaauauuaaa

SEQ ID NO: 3137081 - RNA, 13 nt, Human
uuaauauuaaagc

SEQ ID NO: 3137082 - RNA, 14 nt, Human
uuaauauuaaagcc

SEQ ID NO: 3137083 - RNA, 16 nt, Human
uuaauauuaaagccau

SEQ ID NO: 3137084 - RNA, 17 nt, Human
uuaauauuaaagccaug

SEQ ID NO: 3137085 - RNA, 16 nt, Human
uaauaaggaaaaguuu

SEQ ID NO: 3137086 - RNA, 15 nt, Human
uaauauuaaagccau

SEQ ID NO: 3137087 - RNA, 16 nt, Human
uaauauuaaagccaug

SEQ ID NO: 3137088 - RNA, 21 nt, Human
uaauauuaaagccauguuuau

SEQ ID NO: 3137089 - RNA, 17 nt, Human
uaauauuaaagccaugu

SEQ ID NO: 3137090 - RNA, 20 nt, Human
uaauauuaaagccauguuua

SEQ ID NO: 3137091 - RNA, 21 nt, Human
uaauuaacauguuaaaccaug

SEQ ID NO: 3137092 - RNA, 20 nt, Human
uaauuaacauguuaaaccau

SEQ ID NO: 3137093 - RNA, 16 nt, Human
uaaaugccaucaauaa

SEQ ID NO: 3137094 - RNA, 23 nt, Human
uaaaugccaucaauaaaaaauua

SEQ ID NO: 3137095 - RNA, 18 nt, Human
guuuagucuugucucaga

SEQ ID NO: 3137096 - RNA, 17 nt, Human
uaaaaagccagggcugg

SEQ ID NO: 3137097 - RNA, 20 nt, Human
uaaaaagccagggcuggaga

SEQ ID NO: 3137098 - RNA, 20 nt, Human
uaaagccugaguuugcuuuc

SEQ ID NO: 3137099 - RNA, 15 nt, Human
uaaagccauguuuau

SEQ ID NO: 3137100 - RNA, 20 nt, Human
uaaagccauguuuauuacag

SEQ ID NO: 3137101 - RNA, 11 nt, Human
uaaagccaugu

SEQ ID NO: 3137102 - RNA, 13 nt, Human
uaaagccauguuu

SEQ ID NO: 3137103 - RNA, 17 nt, Human
uacuaaaauggacugug

SEQ ID NO: 3137104 - RNA, 15 nt, Human
uacuaaaauggacug

SEQ ID NO: 3137105 - RNA, 23 nt, Human
uacuaaaauggacuguggugacu

SEQ ID NO: 3137106 - RNA, 17 nt, Human
uacaauuuuguuucugu

SEQ ID NO: 3137107 - RNA, 15 nt, Human
uacaauuuuguuucu

SEQ ID NO: 3137108 - RNA, 16 nt, Human
uacaauuuuguuucug

SEQ ID NO: 3137109 - RNA, 12 nt, Human
uacaauuuuguu

SEQ ID NO: 3137110 - RNA, 13 nt, Human
uacaaaguauuaa

SEQ ID NO: 3137111 - RNA, 14 nt, Human
uacaaaguauuaag

SEQ ID NO: 3137112 - RNA, 12 nt, Human
uacaaaguauua

SEQ ID NO: 3137113 - RNA, 15 nt, Human
uacaaaguauuaagc

SEQ ID NO: 3137114 - RNA, 16 nt, Human
uacaaaguauuaagca

SEQ ID NO: 3137115 - RNA, 18 nt, Human
uacaaaguauuaagcaua

SEQ ID NO: 3137116 - RNA, 19 nt, Human
uacaaaguauuaagcauau

SEQ ID NO: 3137117 - RNA, 23 nt, Human
uauaucugaggaauucuguauag

SEQ ID NO: 3137118 - RNA, 20 nt, Human
uauagaaccucuuugucuac

SEQ ID NO: 3137119 - RNA, 21 nt, Human
uauagaaccucuuugucuaca

SEQ ID NO: 3137120 - RNA, 16 nt, Human
uauauuuucauucucc

SEQ ID NO: 3137121 - RNA, 22 nt, Human
uagcuggucuuauuuguaaagc

SEQ ID NO: 3137122 - RNA, 14 nt, Human
uagauuagaauucu

SEQ ID NO: 3137123 - RNA, 15 nt, Human
uagauuagaauucug

SEQ ID NO: 3137124 - RNA, 16 nt, Human
uagauuagaauucugu

SEQ ID NO: 3137125 - RNA, 17 nt, Human
uagauuagaauucugua

SEQ ID NO: 3137126 - RNA, 19 nt, Human
uagauuagaauucuguaua

SEQ ID NO: 3137127 - RNA, 20 nt, Human
uagauuagaauucuguauag

SEQ ID NO: 3137128 - RNA, 20 nt, Human
uagauuagagaguguugaaa

SEQ ID NO: 3137129 - RNA, 13 nt, Human
uagagugucuuaa

SEQ ID NO: 3137130 - RNA, 11 nt, Human
uagaauucugu

SEQ ID NO: 3137131 - RNA, 13 nt, Human
uagaauucuguau

SEQ ID NO: 3137132 - RNA, 14 nt, Human
uagaauucuguaua

SEQ ID NO: 3137133 - RNA, 15 nt, Human
uagaauucuguauag

SEQ ID NO: 3137134 - RNA, 16 nt, Human
uagaauucuguauaga

SEQ ID NO: 3137135 - RNA, 21 nt, Human
uagaauucuguauagauuaga

SEQ ID NO: 3137136 - RNA, 18 nt, Human
uagacuggugacugauuc

SEQ ID NO: 3137137 - RNA, 21 nt, Human
uagacuggugacugauucuuc

SEQ ID NO: 3137138 - RNA, 23 nt, Human
uagacuggugacugauucuucag

SEQ ID NO: 3137139 - RNA, 20 nt, Human
uagacuggugacugauucuu

SEQ ID NO: 3137140 - RNA, 23 nt, Human
uagaauuaguggcacuugcuuuu

SEQ ID NO: 3137141 - RNA, 14 nt, Human
guguaugcugcuuu

SEQ ID NO: 3137142 - RNA, 13 nt, Human
guggugacuuugg

SEQ ID NO: 3137143 - RNA, 15 nt, Human
guggugacuuuggau

SEQ ID NO: 3137144 - RNA, 17 nt, Human
guggugacaggacgcug

SEQ ID NO: 3137145 - RNA, 16 nt, Human
guggugacuuuggaua

SEQ ID NO: 3137146 - RNA, 16 nt, Human
guggcuggugagccgg

SEQ ID NO: 3137147 - RNA, 23 nt, Human
gugggcagcuuagggcccuggag

SEQ ID NO: 3137148 - RNA, 18 nt, Human
guguuccccucuugucuc

SEQ ID NO: 3137149 - RNA, 19 nt, Human
guguuccccucuugucucc

SEQ ID NO: 3137150 - RNA, 20 nt, Human
guguuccccucuugucuccc

SEQ ID NO: 3137151 - RNA, 22 nt, Human
guguuccccucuugucuccccu

SEQ ID NO: 3137152 - RNA, 18 nt, Human
guuaaaccaugggauaaa

SEQ ID NO: 3137153 - RNA, 21 nt, Human
guuaaaccaugggauaaaugc

SEQ ID NO: 3137154 - RNA, 13 nt, Human
guuacagaagccc

SEQ ID NO: 3137155 - RNA, 13 nt, Human
gugucgggcccuu

SEQ ID NO: 3137156 - RNA, 19 nt, Human
guuauguaauaaccaaaug

SEQ ID NO: 3137157 - RNA, 19 nt, Human
guuaucugaagucagaucu

SEQ ID NO: 3137158 - RNA, 18 nt, Human
guuccgggcaaaugccag

SEQ ID NO: 3137159 - RNA, 22 nt, Human
guuccgggcaaaugccagggcc

SEQ ID NO: 3137160 - RNA, 19 nt, Human
guucacucuccauuuaaua

SEQ ID NO: 3137161 - RNA, 22 nt, Human
guucauggaacgcguugaaauu

SEQ ID NO: 3137162 - RNA, 23 nt, Human
guucauggaacgcguugaaauug

SEQ ID NO: 3137163 - RNA, 21 nt, Human
guugaaacggaugauuucuau

SEQ ID NO: 3137164 - RNA, 22 nt, Human
guugaaacggaugauuucuaug

SEQ ID NO: 3137165 - RNA, 16 nt, Human
guugaaauuguaauua

SEQ ID NO: 3137166 - RNA, 20 nt, Human
guugaaauuguaauuauauc

SEQ ID NO: 3137167 - RNA, 15 nt, Human
guugaaauuguaauu

SEQ ID NO: 3137168 - RNA, 21 nt, Human
guugaauuuauuggcuuuucu

SEQ ID NO: 3137169 - RNA, 15 nt, Human
guugaagccaugucu

SEQ ID NO: 3137170 - RNA, 14 nt, Human
guugaauuuauugg

SEQ ID NO: 3137171 - RNA, 15 nt, Human
guucugcagguugaa

SEQ ID NO: 3137172 - RNA, 23 nt, Human
guucugcagguugaagccauguc

SEQ ID NO: 3137173 - RNA, 21 nt, Human
gucgggcccuucuugcugccc

SEQ ID NO: 3137174 - RNA, 22 nt, Human
gucgggcccuucuugcugcccu

SEQ ID NO: 3137175 - RNA, 23 nt, Human
gucgggcccuucuugcugcccug

SEQ ID NO: 3137176 - RNA, 14 nt, Human
gucucagauuuuau

SEQ ID NO: 3137177 - RNA, 15 nt, Human
gucucagauuuuauu

SEQ ID NO: 3137178 - RNA, 16 nt, Human
gucucagauuuuauua

SEQ ID NO: 3137179 - RNA, 17 nt, Human
gucucagauuuuauuau

SEQ ID NO: 3137180 - RNA, 21 nt, Human
gucucagauuuuauuauguaa

SEQ ID NO: 3137181 - RNA, 20 nt, Human
gucuugucucagauuuuauu

SEQ ID NO: 3137182 - RNA, 15 nt, Human
gucuugucucagauu

SEQ ID NO: 3137183 - RNA, 13 nt, Human
gucuugccccauc

SEQ ID NO: 3137184 - RNA, 16 nt, Human
gucuugccccaucacu

SEQ ID NO: 3137185 - RNA, 22 nt, Human
gucuugccccaucacugcgcca

SEQ ID NO: 3137186 - RNA, 20 nt, Human
gucuugccuuuuucauuauu

SEQ ID NO: 3137187 - RNA, 15 nt, Human
gucuugccuuuuuca

SEQ ID NO: 3137188 - RNA, 16 nt, Human
gucuugccuuuuucau

SEQ ID NO: 3137189 - RNA, 17 nt, Human
gucuugccuuuuucauu

SEQ ID NO: 3137190 - RNA, 18 nt, Human
gucuugccuuuuucauua

SEQ ID NO: 3137191 - RNA, 14 nt, Human
gugagcgcuugggc

SEQ ID NO: 3137192 - RNA, 15 nt, Human
gugcccggggcagca

SEQ ID NO: 3137193 - RNA, 21 nt, Human
gugcccggggcagcagcagcc

SEQ ID NO: 3137194 - RNA, 23 nt, Human
gugcccggggcagcagcagcccu

SEQ ID NO: 3137195 - RNA, 21 nt, Human
gugcgcuaaacuuuucugaua

SEQ ID NO: 3137196 - RNA, 17 nt, Human
gugcgcuaaacuuuucu

SEQ ID NO: 3137197 - RNA, 16 nt, Human
gugcggcagggaagag

SEQ ID NO: 3137198 - RNA, 20 nt, Human
gugcuaaggacuuguuagau

SEQ ID NO: 3137199 - RNA, 13 nt, Human
gugcuaaggacuu

SEQ ID NO: 3137200 - RNA, 14 nt, Human
gugcuaaggacuug

SEQ ID NO: 3137201 - RNA, 12 nt, Human
gugcuaaggacu

SEQ ID NO: 3137202 - RNA, 12 nt, Human
gugcagaggcug

SEQ ID NO: 3137203 - RNA, 13 nt, Human
gugcagaggcugu

SEQ ID NO: 3137204 - RNA, 14 nt, Human
gugcagaggcugug

SEQ ID NO: 3137205 - RNA, 17 nt, Human
gugcagaggcuguggcu

SEQ ID NO: 3137206 - RNA, 22 nt, Human
gugcagaggcuguggcugguga

SEQ ID NO: 3137207 - RNA, 10 nt, Human
guauaauuaa

SEQ ID NO: 3137208 - RNA, 13 nt, Human
guauaauuaacau

SEQ ID NO: 3137209 - RNA, 14 nt, Human
guauaauuaacaug

SEQ ID NO: 3137210 - RNA, 23 nt, Human
guauaauuaacauguuaaaccau

SEQ ID NO: 3137211 - RNA, 15 nt, Human
guauaauuaacaugu

SEQ ID NO: 3137212 - RNA, 17 nt, Human
guauaauuaacauguua

SEQ ID NO: 3137213 - RNA, 19 nt, Human
guauaauuaacauguuaaa

SEQ ID NO: 3137214 - RNA, 22 nt, Human
guauaauuaacauguuaaacca

SEQ ID NO: 3137215 - RNA, 21 nt, Human
guaugugugaagugagugagu

SEQ ID NO: 3137216 - RNA, 14 nt, Human
guauagauuagaau

SEQ ID NO: 3137217 - RNA, 19 nt, Human
guauagaaccucuuugucu

SEQ ID NO: 3137218 - RNA, 14 nt, Human
gucccauucccugg

SEQ ID NO: 3137219 - RNA, 15 nt, Human
gucccauucccuggg

SEQ ID NO: 3137220 - RNA, 16 nt, Human
gucccauucccuggga

SEQ ID NO: 3137221 - RNA, 17 nt, Human
gucccauucccugggau

SEQ ID NO: 3137222 - RNA, 16 nt, Human
gucagaucugccuaag

SEQ ID NO: 3137223 - RNA, 18 nt, Human
gucagaucugccuaagga

SEQ ID NO: 3137224 - RNA, 21 nt, Human
gucagaucugccuaaggacuu

SEQ ID NO: 3137225 - RNA, 19 nt, Human
gucagaucugccuaaggac

SEQ ID NO: 3137226 - RNA, 20 nt, Human
gucagaucugccuaaggacu

SEQ ID NO: 3137227 - RNA, 18 nt, Human
guauuaagcauauauuuu

SEQ ID NO: 3137228 - RNA, 21 nt, Human
guauuaagcauauauuuuuau

SEQ ID NO: 3137229 - RNA, 16 nt, Human
guauuaagcauauauu

SEQ ID NO: 3137230 - RNA, 17 nt, Human
guauuaagcauauauuu

SEQ ID NO: 3137231 - RNA, 15 nt, Human
guauuaagcauauau

SEQ ID NO: 3137232 - RNA, 21 nt, Human
uuuuggcauaacauaaaucug

SEQ ID NO: 3137233 - RNA, 19 nt, Human
uuuuggcaucucuguccca

SEQ ID NO: 3137234 - RNA, 22 nt, Human
uuuggaauuuuccuccuuucuc

SEQ ID NO: 3137235 - RNA, 16 nt, Human
uuuggauaauaaggaa

SEQ ID NO: 3137236 - RNA, 11 nt, Human
cuaaggacuug

SEQ ID NO: 3137237 - RNA, 16 nt, Human
cuaaggacuuguuaga

SEQ ID NO: 3137238 - RNA, 17 nt, Human
cuaaggacuuguuagau

SEQ ID NO: 3137239 - RNA, 22 nt, Human
cuaaggacuucuuuaauuuugg

SEQ ID NO: 3137240 - RNA, 19 nt, Human
cuaggauaaaaagccaggg

SEQ ID NO: 3137241 - RNA, 21 nt, Human
cuaggauaaaaagccagggcu

SEQ ID NO: 3137242 - RNA, 22 nt, Human
cuaggauaaaaagccagggcug

SEQ ID NO: 3137243 - RNA, 19 nt, Human
cuaggagaggagaaccaga

SEQ ID NO: 3137244 - RNA, 19 nt, Human
cuauauuuucauucuccua

SEQ ID NO: 3137245 - RNA, 12 nt, Human
cuaguucacucu

SEQ ID NO: 3137246 - RNA, 16 nt, Human
cuaaauccauuuggaa

SEQ ID NO: 3137247 - RNA, 17 nt, Human
cuaaauccauuuggaaa

SEQ ID NO: 3137248 - RNA, 19 nt, Human
cuaaauccauuuggaaauc

SEQ ID NO: 3137249 - RNA, 20 nt, Human
cuaaauccauuuggaaaucu

SEQ ID NO: 3137250 - RNA, 18 nt, Human
cguugaaauuguaauuau

SEQ ID NO: 3137251 - RNA, 23 nt, Human
cguugaaauuguaauuauaucug

SEQ ID NO: 3137252 - RNA, 20 nt, Human
cguggagcuuaagccacugc

SEQ ID NO: 3137253 - RNA, 19 nt, Human
cguggaggagguugggagg

SEQ ID NO: 3137254 - RNA, 12 nt, Human
cgugcuaaggac

SEQ ID NO: 3137255 - RNA, 13 nt, Human
cgugcuaaggacu

SEQ ID NO: 3137256 - RNA, 14 nt, Human
cgugcuaaggacuu

SEQ ID NO: 3137257 - RNA, 15 nt, Human
cgugcuaaggacuug

SEQ ID NO: 3137258 - RNA, 16 nt, Human
cgugcuaaggacuugu

SEQ ID NO: 3137259 - RNA, 12 nt, Human
cgugcugggcag

SEQ ID NO: 3137260 - RNA, 13 nt, Human
cgugcugggcagc

SEQ ID NO: 3137261 - RNA, 15 nt, Human
cgugcugggcagccc

SEQ ID NO: 3137262 - RNA, 16 nt, Human
cgugcugggcagcccg

SEQ ID NO: 3137263 - RNA, 17 nt, Human
cggugcggcagggaaga

SEQ ID NO: 3137264 - RNA, 16 nt, Human
cgucuuccgucucccc

SEQ ID NO: 3137265 - RNA, 17 nt, Human
cgucuuccgucuccccc

SEQ ID NO: 3137266 - RNA, 22 nt, Human
cgcuugggcgccgugcugggca

SEQ ID NO: 3137267 - RNA, 22 nt, Human
cggugaauggcuuuguauagaa

SEQ ID NO: 3137268 - RNA, 18 nt, Human
cggugaauggcuuuguau

SEQ ID NO: 3137269 - RNA, 20 nt, Human
cggugaauggcuuuguauag

SEQ ID NO: 3137270 - RNA, 13 nt, Human
cggugaauggcuu

SEQ ID NO: 3137271 - RNA, 14 nt, Human
cggugaauggcuuu

SEQ ID NO: 3137272 - RNA, 15 nt, Human
cggugaauggcuuug

SEQ ID NO: 3137273 - RNA, 16 nt, Human
cggugaauggcuuugu

SEQ ID NO: 3137274 - RNA, 17 nt, Human
cgggcaaaugccagggc

SEQ ID NO: 3137275 - RNA, 18 nt, Human
cgggcaaaugccagggcc

SEQ ID NO: 3137276 - RNA, 20 nt, Human
cgggcaaaugccagggcccg

SEQ ID NO: 3137277 - RNA, 22 nt, Human
cgggcaaaugccagggcccgca

SEQ ID NO: 3137278 - RNA, 15 nt, Human
cugacaugcccuccc

SEQ ID NO: 3137279 - RNA, 17 nt, Human
cugacaugcccucccuu

SEQ ID NO: 3137280 - RNA, 19 nt, Human
cugacaugcccucccuucu

SEQ ID NO: 3137281 - RNA, 20 nt, Human
cugacaugcccucccuucuc

SEQ ID NO: 3137282 - RNA, 13 nt, Human
cuccccagccugg

SEQ ID NO: 3137283 - RNA, 14 nt, Human
cuccccagccuggg

SEQ ID NO: 3137284 - RNA, 16 nt, Human
cuccccagccugggcc

SEQ ID NO: 3137285 - RNA, 14 nt, Human
cuccucccauguca

SEQ ID NO: 3137286 - RNA, 19 nt, Human
cuccucccaugucacugca

SEQ ID NO: 3137287 - RNA, 20 nt, Human
cuccucccaugucacugcag

SEQ ID NO: 3137288 - RNA, 16 nt, Human
cuguauagauuagaga

SEQ ID NO: 3137289 - RNA, 15 nt, Human
cuguauagauuagag

SEQ ID NO: 3137290 - RNA, 20 nt, Human
cuguauagauuagaauucug

SEQ ID NO: 3137291 - RNA, 13 nt, Human
cugucccauuccc

SEQ ID NO: 3137292 - RNA, 14 nt, Human
cugucccauucccu

SEQ ID NO: 3137293 - RNA, 15 nt, Human
cugucccauucccug

SEQ ID NO: 3137294 - RNA, 16 nt, Human
cugucccauucccugg

SEQ ID NO: 3137295 - RNA, 17 nt, Human
cugucccauucccuggg

SEQ ID NO: 3137296 - RNA, 18 nt, Human
cugucccauucccuggga

SEQ ID NO: 3137297 - RNA, 23 nt, Human
cugucccauucccugggaucugg

SEQ ID NO: 3137298 - RNA, 15 nt, Human
cugggaucugguggu

SEQ ID NO: 3137299 - RNA, 16 nt, Human
cugggaucuggugguc

SEQ ID NO: 3137300 - RNA, 14 nt, Human
cugggcccaucucc

SEQ ID NO: 3137301 - RNA, 17 nt, Human
cugggcccaucucccug

SEQ ID NO: 3137302 - RNA, 18 nt, Human
cugggcccaucucccugc

SEQ ID NO: 3137303 - RNA, 19 nt, Human
cugggcccaucucccugcu

SEQ ID NO: 3137304 - RNA, 21 nt, Human
cugggcccaucucccugcuuu

SEQ ID NO: 3137305 - RNA, 13 nt, Human
cugcgccacugcu

SEQ ID NO: 3137306 - RNA, 20 nt, Human
cugcgccacugcuccgugga

SEQ ID NO: 3137307 - RNA, 17 nt, Human
cugcccugccccaaguu

SEQ ID NO: 3137308 - RNA, 18 nt, Human
cugcuuuucuuuucuaac

SEQ ID NO: 3137309 - RNA, 18 nt, Human
cugcuuugcgugcccggg

SEQ ID NO: 3137310 - RNA, 20 nt, Human
cugcuuugcgugcccggggc

SEQ ID NO: 3137311 - RNA, 21 nt, Human
cugcuuugcgugcccggggca

SEQ ID NO: 3137312 - RNA, 23 nt, Human
cugcuuugcgugcccggggcagc

SEQ ID NO: 3137313 - RNA, 12 nt, Human
cugcuuucagau

SEQ ID NO: 3137314 - RNA, 15 nt, Human
cugcuuucagauacu

SEQ ID NO: 3137315 - RNA, 17 nt, Human
cugcagguugaagccau

SEQ ID NO: 3137316 - RNA, 19 nt, Human
cugcagguugaagccaugu

SEQ ID NO: 3137317 - RNA, 21 nt, Human
cugcagguugaagccaugucu

SEQ ID NO: 3137318 - RNA, 13 nt, Human
cugccccaaguug

SEQ ID NO: 3137319 - RNA, 16 nt, Human
cugccccacaccuccu

SEQ ID NO: 3137320 - RNA, 18 nt, Human
cugccccacaccuccucu

SEQ ID NO: 3137321 - RNA, 20 nt, Human
cugccccacaccuccucuca

SEQ ID NO: 3137322 - RNA, 22 nt, Human
cugccccacaccuccucucacu

SEQ ID NO: 3137323 - RNA, 16 nt, Human
gaagaguggaggugga

SEQ ID NO: 3137324 - RNA, 12 nt, Human
gaacuugaaauu

SEQ ID NO: 3137325 - RNA, 13 nt, Human
gaacuugaaauuu

SEQ ID NO: 3137326 - RNA, 15 nt, Human
gaacuugaaauuuga

SEQ ID NO: 3137327 - RNA, 22 nt, Human
gaacuugaaauuugaauuuugu

SEQ ID NO: 3137328 - RNA, 22 nt, Human
gaagucagaucugccuaaggac

SEQ ID NO: 3137329 - RNA, 23 nt, Human
gaagucagaucugccuaaggacu

SEQ ID NO: 3137330 - RNA, 14 nt, Human
gaagucagaucugc

SEQ ID NO: 3137331 - RNA, 19 nt, Human
gaaacugacaugcccuccc

SEQ ID NO: 3137332 - RNA, 16 nt, Human
gaaacggaugauuucu

SEQ ID NO: 3137333 - RNA, 13 nt, Human
gaaauuugaauuu

SEQ ID NO: 3137334 - RNA, 16 nt, Human
gaaauuugaauuuugu

SEQ ID NO: 3137335 - RNA, 24 nt, Human
gaaauuugaauuuuguguuagaga

SEQ ID NO: 3137336 - RNA, 21 nt, Human
cuuuuucauuauuuuauuaug

SEQ ID NO: 3137337 - RNA, 20 nt, Human
cuuuucuaaccaagaggcug

SEQ ID NO: 3137338 - RNA, 21 nt, Human
cuuuucuaaccaagaggcugg

SEQ ID NO: 3137339 - RNA, 22 nt, Human
cuuuucuaaccaagaggcuggu

SEQ ID NO: 3137340 - RNA, 15 nt, Human
cuuuucuuuucuaac

SEQ ID NO: 3137341 - RNA, 19 nt, Human
cuugaaauuugaauuuugu

SEQ ID NO: 3137342 - RNA, 20 nt, Human
cuugaaauuugaauuuugug

SEQ ID NO: 3137343 - RNA, 17 nt, Human
cuuggagcguggacugg

SEQ ID NO: 3137344 - RNA, 18 nt, Human
cuuggagcguggacuggu

SEQ ID NO: 3137345 - RNA, 13 nt, Human
gaccuacaggcug

SEQ ID NO: 3137346 - RNA, 13 nt, Human
gacaggacgcuga

SEQ ID NO: 3137347 - RNA, 21 nt, Human
gacaggacgcugaccguggag

SEQ ID NO: 3137348 - RNA, 22 nt, Human
gacaggacgcugaccguggagc

SEQ ID NO: 3137349 - RNA, 13 nt, Human
gaccaaaaaccag

SEQ ID NO: 3137350 - RNA, 19 nt, Human
gaccaaaaaccaguauugu

SEQ ID NO: 3137351 - RNA, 20 nt, Human
gaccaaaaaccaguauugua

SEQ ID NO: 3137352 - RNA, 14 nt, Human
gacauggcuguuca

SEQ ID NO: 3137353 - RNA, 16 nt, Human
gacauagucuggcugu

SEQ ID NO: 3137354 - RNA, 19 nt, Human
gagaacaagaaagggccag

SEQ ID NO: 3137355 - RNA, 12 nt, Human
gacuuguuagau

SEQ ID NO: 3137356 - RNA, 18 nt, Human
gaggaagccugauuaaag

SEQ ID NO: 3137357 - RNA, 19 nt, Human
gaggaagccugauuaaaga

SEQ ID NO: 3137358 - RNA, 23 nt, Human
gaugacauucuggucucgucuuc

SEQ ID NO: 3137359 - RNA, 20 nt, Human
gauuuuauuauguaaauccc

SEQ ID NO: 3137360 - RNA, 23 nt, Human
gauuuuauuauguaaaucccauu

SEQ ID NO: 3137361 - RNA, 13 nt, Human
gauuuuauuaugu

SEQ ID NO: 3137362 - RNA, 15 nt, Human
gauuuuauuauguaa

SEQ ID NO: 3137363 - RNA, 18 nt, Human
gauuuuauuauguaaauc

SEQ ID NO: 3137364 - RNA, 19 nt, Human
gauuuuauuauguaaaucc

SEQ ID NO: 3137365 - RNA, 20 nt, Human
gcauauauuuuuauauuuac

SEQ ID NO: 3137366 - RNA, 18 nt, Human
gcacgguggugaggcagu

SEQ ID NO: 3137367 - RNA, 18 nt, Human
gcacggugaauggcuuug

SEQ ID NO: 3137368 - RNA, 16 nt, Human
gcagcccugccccaca

SEQ ID NO: 3137369 - RNA, 19 nt, Human
gcagcccugccccacaccu

SEQ ID NO: 3137370 - RNA, 22 nt, Human
gcagcccugccccacaccuccu

SEQ ID NO: 3137371 - RNA, 18 nt, Human
gcagauuauucacugauu

SEQ ID NO: 3137372 - RNA, 17 nt, Human
gcagauugagaccuaca

SEQ ID NO: 3137373 - RNA, 19 nt, Human
gcagauugagaccuacagg

SEQ ID NO: 3137374 - RNA, 23 nt, Human
gcagauugagaccuacaggcuga

SEQ ID NO: 3137375 - RNA, 16 nt, Human
gcagauuauucacuga

SEQ ID NO: 3137376 - RNA, 18 nt, Human
gcagcccgcuaggcucgc

SEQ ID NO: 3137377 - RNA, 23 nt, Human
gccuuuuucauuauuuuauuaug

SEQ ID NO: 3137378 - RNA, 13 nt, Human
gcuaaacuuuucu

SEQ ID NO: 3137379 - RNA, 15 nt, Human
gcuaaacuuuucuga

SEQ ID NO: 3137380 - RNA, 17 nt, Human
gcuaaacuuuucugaua

SEQ ID NO: 3137381 - RNA, 14 nt, Human
gcgccgugcugggc

SEQ ID NO: 3137382 - RNA, 15 nt, Human
gcgccgugcugggca

SEQ ID NO: 3137383 - RNA, 16 nt, Human
gcgccgugcugggcag

SEQ ID NO: 3137384 - RNA, 17 nt, Human
gcgccgugcugggcagc

SEQ ID NO: 3137385 - RNA, 18 nt, Human
gcgccgugcugggcagcc

SEQ ID NO: 3137386 - RNA, 20 nt, Human
gcgccgugcugggcagcccg

SEQ ID NO: 3137387 - RNA, 12 nt, Human
gccuaaauccau

SEQ ID NO: 3137388 - RNA, 13 nt, Human
gccuaaauccauu

SEQ ID NO: 3137389 - RNA, 19 nt, Human
gccuaaauccauuuggaaa

SEQ ID NO: 3137390 - RNA, 21 nt, Human
gccuaaauccauuuggaaauc

SEQ ID NO: 3137391 - RNA, 11 nt, Human
gccuaaaucca

SEQ ID NO: 3137392 - RNA, 22 nt, Human
gccuaaauccauuuggaaaucu

SEQ ID NO: 3137393 - RNA, 23 nt, Human
gccuaaauccauuuggaaaucuu

SEQ ID NO: 3137394 - RNA, 15 nt, Human
gccgugcugggcagc

SEQ ID NO: 3137395 - RNA, 16 nt, Human
gccgugcugggcagcc

SEQ ID NO: 3137396 - RNA, 17 nt, Human
gccgugcugggcagccc

SEQ ID NO: 3137397 - RNA, 18 nt, Human
gccgugcugggcagcccg

SEQ ID NO: 3137398 - RNA, 16 nt, Human
gccggucaggcacaca

SEQ ID NO: 3137399 - RNA, 14 nt, Human
gcccugcuuucaga

SEQ ID NO: 3137400 - RNA, 16 nt, Human
gcccugcuuucagaua

SEQ ID NO: 3137401 - RNA, 12 nt, Human
gcccuuggagcg

SEQ ID NO: 3137402 - RNA, 15 nt, Human
gcccuuggagcgugg

SEQ ID NO: 3137403 - RNA, 21 nt, Human
gcccuuggagcguggacuggu

SEQ ID NO: 3137404 - RNA, 15 nt, Human
gccgacauugucucc

SEQ ID NO: 3137405 - RNA, 16 nt, Human
gccgacauugucuccc

SEQ ID NO: 3137406 - RNA, 17 nt, Human
gccgacauugucucccg

SEQ ID NO: 3137407 - RNA, 24 nt, Human
gccaucaauaaaaaauuaugacau

SEQ ID NO: 3137408 - RNA, 9 nt, Human
gccaggaga

SEQ ID NO: 3137409 - RNA, 15 nt, Human
gcccccuuucccggg

SEQ ID NO: 3137410 - RNA, 16 nt, Human
gcccccuuucccgggc

SEQ ID NO: 3137411 - RNA, 17 nt, Human
gcccccuuucccgggcu

SEQ ID NO: 3137412 - RNA, 18 nt, Human
gcccccuuucccgggcug

SEQ ID NO: 3137413 - RNA, 20 nt, Human
gcccccuuucccgggcuguc

SEQ ID NO: 3137414 - RNA, 23 nt, Human
gcccccuuucccgggcuguccac

SEQ ID NO: 3137415 - RNA, 17 nt, Human
gcccucccuucucccug

SEQ ID NO: 3137416 - RNA, 18 nt, Human
gcccucccuucucccugg

SEQ ID NO: 3137417 - RNA, 19 nt, Human
gcccucccuucucccugga

SEQ ID NO: 3137418 - RNA, 20 nt, Human
gcccucccuucucccuggau

SEQ ID NO: 3137419 - RNA, 13 nt, Human
gccccaucacugc

SEQ ID NO: 3137420 - RNA, 22 nt, Human
gccccaucacugcgccacugcu

SEQ ID NO: 3137421 - RNA, 22 nt, Human
cauauauuuuuauauuuacuaa

SEQ ID NO: 3137422 - RNA, 14 nt, Human
cauagagcagcacu

SEQ ID NO: 3137423 - RNA, 13 nt, Human
caucucuguccca

SEQ ID NO: 3137424 - RNA, 19 nt, Human
caucucugucccauucccu

SEQ ID NO: 3137425 - RNA, 20 nt, Human
caucucugucccauucccug

SEQ ID NO: 3137426 - RNA, 21 nt, Human
caucucugucccauucccugg

SEQ ID NO: 3137427 - RNA, 22 nt, Human
caucucugucccauucccuggg

SEQ ID NO: 3137428 - RNA, 23 nt, Human
caucucugucccauucccuggga

SEQ ID NO: 3137429 - RNA, 21 nt, Human
cauaacauaaaucugugaacu

SEQ ID NO: 3137430 - RNA, 12 nt, Human
cauaacauaaau

SEQ ID NO: 3137431 - RNA, 19 nt, Human
cauaacauaaaucugugaa

SEQ ID NO: 3137432 - RNA, 14 nt, Human
cauaaaucugugaa

SEQ ID NO: 3137433 - RNA, 16 nt, Human
cauaaaucugugaacu

SEQ ID NO: 3137434 - RNA, 18 nt, Human
cauaaaucugugaacuug

SEQ ID NO: 3137435 - RNA, 22 nt, Human
cauaaaucugugaacuugaaau

SEQ ID NO: 3137436 - RNA, 23 nt, Human
cauaaaucugugaacuugaaauu

SEQ ID NO: 3137437 - RNA, 21 nt, Human
caguuuuguuuggaccaaaaa

SEQ ID NO: 3137438 - RNA, 20 nt, Human
caguugagaaaauuugaaug

SEQ ID NO: 3137439 - RNA, 19 nt, Human
cauacccgccuagcugcug

SEQ ID NO: 3137440 - RNA, 20 nt, Human
cauacccgccuagcugcugu

SEQ ID NO: 3137441 - RNA, 22 nt, Human
cauacccgccuagcugcuguca

SEQ ID NO: 3137442 - RNA, 19 nt, Human
cauggaacgcguugaaauu

SEQ ID NO: 3137443 - RNA, 20 nt, Human
cauggaacgcguugaaauug

SEQ ID NO: 3137444 - RNA, 23 nt, Human
cauggaacgcguugaaauuguaa

SEQ ID NO: 3137445 - RNA, 18 nt, Human
cauggaacgcguugaaau

SEQ ID NO: 3137446 - RNA, 13 nt, Human
caugcccucccuu

SEQ ID NO: 3137447 - RNA, 14 nt, Human
caugcccucccuuc

SEQ ID NO: 3137448 - RNA, 15 nt, Human
caugcccucccuucu

SEQ ID NO: 3137449 - RNA, 20 nt, Human
caugcccucccuucucccug

SEQ ID NO: 3137450 - RNA, 21 nt, Human
caugcccucccuucucccugg

SEQ ID NO: 3137451 - RNA, 22 nt, Human
caugcccucccuucucccugga

SEQ ID NO: 3137452 - RNA, 23 nt, Human
caugcccucccuucucccuggau

SEQ ID NO: 3137453 - RNA, 22 nt, Human
caugcagguggugucgggcccu

SEQ ID NO: 3137454 - RNA, 21 nt, Human
cauuaaagccugaguuugcuu

SEQ ID NO: 3137455 - RNA, 11 nt, Human
cauuauuuuau

SEQ ID NO: 3137456 - RNA, 13 nt, Human
cauguuuauuaca

SEQ ID NO: 3137457 - RNA, 18 nt, Human
cauguuuauuacaguaua

SEQ ID NO: 3137458 - RNA, 19 nt, Human
cauguuuauuacaguauaa

SEQ ID NO: 3137459 - RNA, 20 nt, Human
cauguuuauuacaguauaau

SEQ ID NO: 3137460 - RNA, 12 nt, Human
cauguuuauuac

SEQ ID NO: 3137461 - RNA, 10 nt, Human
ccaagaggcu

SEQ ID NO: 3137462 - RNA, 11 nt, Human
ccaagaggcug

SEQ ID NO: 3137463 - RNA, 23 nt, Human
ccacaaaugggcgccccccccuc

SEQ ID NO: 3137464 - RNA, 23 nt, Human
cauuuuguuguguguaugcugcu

SEQ ID NO: 3137465 - RNA, 12 nt, Human
cauuauuuuauu

SEQ ID NO: 3137466 - RNA, 14 nt, Human
cauuauuuuauuau

SEQ ID NO: 3137467 - RNA, 16 nt, Human
cauuauuuuauuauga

SEQ ID NO: 3137468 - RNA, 14 nt, Human
ccaucacugcgcca

SEQ ID NO: 3137469 - RNA, 18 nt, Human
ccaucacugcgccacugc

SEQ ID NO: 3137470 - RNA, 19 nt, Human
ccaucacugcgccacugcu

SEQ ID NO: 3137471 - RNA, 21 nt, Human
ccaucacugcgccacugcucc

SEQ ID NO: 3137472 - RNA, 13 nt, Human
cccagccugggcc

SEQ ID NO: 3137473 - RNA, 15 nt, Human
cccagccugggccca

SEQ ID NO: 3137474 - RNA, 21 nt, Human
cccagccugggcccaucuccc

SEQ ID NO: 3137475 - RNA, 23 nt, Human
cccagccugggcccaucucccug

SEQ ID NO: 3137476 - RNA, 12 nt, Human
cccagccugggc

SEQ ID NO: 3137477 - RNA, 12 nt, Human
ccauucccuggg

SEQ ID NO: 3137478 - RNA, 19 nt, Human
ccauucccugggaucuggu

SEQ ID NO: 3137479 - RNA, 14 nt, Human
ccccacacuucccu

SEQ ID NO: 3137480 - RNA, 16 nt, Human
ccccacacuucccugg

SEQ ID NO: 3137481 - RNA, 17 nt, Human
ccccacacuucccuggc

SEQ ID NO: 3137482 - RNA, 18 nt, Human
ccccacacuucccuggcg

SEQ ID NO: 3137483 - RNA, 13 nt, Human
ccccagccugggc

SEQ ID NO: 3137484 - RNA, 15 nt, Human
ccccagccugggccc

SEQ ID NO: 3137485 - RNA, 21 nt, Human
ccccagccugggcccaucucc

SEQ ID NO: 3137486 - RNA, 16 nt, Human
cccucccuucucccug

SEQ ID NO: 3137487 - RNA, 17 nt, Human
cccucccuucucccugg

SEQ ID NO: 3137488 - RNA, 18 nt, Human
cccugggaucuggugguc

SEQ ID NO: 3137489 - RNA, 20 nt, Human
cccugggaucugguggucag

SEQ ID NO: 3137490 - RNA, 12 nt, Human
cccuggaggcgg

SEQ ID NO: 3137491 - RNA, 23 nt, Human
cccuggaggcggugcggcaggga

SEQ ID NO: 3137492 - RNA, 18 nt, Human
ccucucccucugguccca

SEQ ID NO: 3137493 - RNA, 13 nt, Human
ccuccucucacuc

SEQ ID NO: 3137494 - RNA, 14 nt, Human
ccuccucucacucc

SEQ ID NO: 3137495 - RNA, 21 nt, Human
ccuccucucacuccccagccu

SEQ ID NO: 3137496 - RNA, 14 nt, Human
ccucucccuucccu

SEQ ID NO: 3137497 - RNA, 15 nt, Human
ccucucccuucccuc

SEQ ID NO: 3137498 - RNA, 16 nt, Human
ccucucccuucccucc

SEQ ID NO: 3137499 - RNA, 17 nt, Human
ccucucccuucccuccu

SEQ ID NO: 3137500 - RNA, 10 nt, Human
ccucucccuu

SEQ ID NO: 3137501 - RNA, 20 nt, Human
ccuaaauccauuuggaaauc

SEQ ID NO: 3137502 - RNA, 21 nt, Human
ccuaaauccauuuggaaaucu

SEQ ID NO: 3137503 - RNA, 18 nt, Human
ccuaaauccauuuggaaa

SEQ ID NO: 3137504 - RNA, 19 nt, Human
ccuaaauccauuuggaaau

SEQ ID NO: 3137505 - RNA, 14 nt, Human
ccguguuccccucu

SEQ ID NO: 3137506 - RNA, 12 nt, Human
cccuuucccggg

SEQ ID NO: 3137507 - RNA, 14 nt, Human
cccuuucccgggcu

SEQ ID NO: 3137508 - RNA, 17 nt, Human
ccggggcagcagcagcc

SEQ ID NO: 3137509 - RNA, 18 nt, Human
ccggggcagcagcagccc

SEQ ID NO: 3137510 - RNA, 19 nt, Human
ccggggcagcagcagcccu

SEQ ID NO: 3137511 - RNA, 23 nt, Human
ccggggcagcagcagcccugccc

SEQ ID NO: 3137512 - RNA, 20 nt, Human
ccguggaggagguugggagg

SEQ ID NO: 3137513 - RNA, 19 nt, Human
cccuuggagcguggacugg

SEQ ID NO: 3137514 - RNA, 23 nt, Human
aaagccauguuuauuacaguaua

SEQ ID NO: 3137515 - RNA, 17 nt, Human
aaagccauguuuauuac

SEQ ID NO: 3137516 - RNA, 18 nt, Human
aaagccauguuuauuaca

SEQ ID NO: 3137517 - RNA, 14 nt, Human
aaagccauguuuau

SEQ ID NO: 3137518 - RNA, 16 nt, Human
aaagccauguuuauua

SEQ ID NO: 3137519 - RNA, 22 nt, Human
aaaccaguauuguacaaaguau

SEQ ID NO: 3137520 - RNA, 14 nt, Human
aaaccaguauugua

SEQ ID NO: 3137521 - RNA, 16 nt, Human
aaaccaguauuguaca

SEQ ID NO: 3137522 - RNA, 17 nt, Human
aaaccaguauuguacaa

SEQ ID NO: 3137523 - RNA, 18 nt, Human
aaaccaguauuguacaaa

SEQ ID NO: 3137524 - RNA, 18 nt, Human
aaaaguuuaauauuaaag

SEQ ID NO: 3137525 - RNA, 14 nt, Human
aaaaguuuaauauu

SEQ ID NO: 3137526 - RNA, 16 nt, Human
aaaaguuuaauauuaa

SEQ ID NO: 3137527 - RNA, 14 nt, Human
aaaagacugucuua

SEQ ID NO: 3137528 - RNA, 19 nt, Human
aaaugcuguaacuuucuga

SEQ ID NO: 3137529 - RNA, 23 nt, Human
aaauggacuguggugacuuugga

SEQ ID NO: 3137530 - RNA, 21 nt, Human
aaauggacuguggugacuuug

SEQ ID NO: 3137531 - RNA, 20 nt, Human
aaauggacuguggugacuuu

SEQ ID NO: 3137532 - RNA, 23 nt, Human
aacauggccuuugcuugaaagaa

SEQ ID NO: 3137533 - RNA, 22 nt, Human
aacauggccuuugcuugaaaga

SEQ ID NO: 3137534 - RNA, 23 nt, Human
aagacagauacuccuccaagguu

SEQ ID NO: 3137535 - RNA, 14 nt, Human
aagccagggcugga

SEQ ID NO: 3137536 - RNA, 16 nt, Human
aagccagggcuggaga

SEQ ID NO: 3137537 - RNA, 17 nt, Human
aagccagggcuggagaa

SEQ ID NO: 3137538 - RNA, 15 nt, Human
aaggacuuguuagau

SEQ ID NO: 3137539 - RNA, 21 nt, Human
aaggacuuguuagaucuaguu

SEQ ID NO: 3137540 - RNA, 23 nt, Human
aaggacuucuuuaauuuuggaau

SEQ ID NO: 3137541 - RNA, 23 nt, Human
aaggacuuguuagaucuaguuca

SEQ ID NO: 3137542 - RNA, 22 nt, Human
aauauuaaagccauguuuauua

SEQ ID NO: 3137543 - RNA, 14 nt, Human
aaguugaauuuauu

SEQ ID NO: 3137544 - RNA, 15 nt, Human
aaguugaauuuauug

SEQ ID NO: 3137545 - RNA, 17 nt, Human
aaguugaauuuauuggc

SEQ ID NO: 3137546 - RNA, 15 nt, Human
aaguuuaauauuaaa

SEQ ID NO: 3137547 - RNA, 17 nt, Human
aaguuuaauauuaaagc

SEQ ID NO: 3137548 - RNA, 19 nt, Human
aaguugggaucuaggagag

SEQ ID NO: 3137549 - RNA, 23 nt, Human
aaguugaauuuauuggcuuuucu

SEQ ID NO: 3137550 - RNA, 24 nt, Human
aaguugaauuuauuggcuuuucug

SEQ ID NO: 3137551 - RNA, 16 nt, Human
acugacaugcccuccc

SEQ ID NO: 3137552 - RNA, 17 nt, Human
acugacaugcccucccu

SEQ ID NO: 3137553 - RNA, 21 nt, Human
acugacaugcccucccuucuc

SEQ ID NO: 3137554 - RNA, 22 nt, Human
acugauuugacauagucuggcu

SEQ ID NO: 3137555 - RNA, 18 nt, Human
acuucuuuaauuuuggaa

SEQ ID NO: 3137556 - RNA, 19 nt, Human
acuucuuuaauuuuggaau

SEQ ID NO: 3137557 - RNA, 20 nt, Human
acuggugacugauucuucag

SEQ ID NO: 3137558 - RNA, 16 nt, Human
acuggugacugauucu

SEQ ID NO: 3137559 - RNA, 18 nt, Human
acuggugacugauucuuc

SEQ ID NO: 3137560 - RNA, 19 nt, Human
acuggugacugauucuuca

SEQ ID NO: 3137561 - RNA, 23 nt, Human
acauguuaaaccaugggauaaau

SEQ ID NO: 3137562 - RNA, 16 nt, Human
acauguuaaaccaugg

SEQ ID NO: 3137563 - RNA, 21 nt, Human
acauguuaaaccaugggauaa

SEQ ID NO: 3137564 - RNA, 14 nt, Human
acauguuaaaccau

SEQ ID NO: 3137565 - RNA, 17 nt, Human
aauuguaauuauaucug

SEQ ID NO: 3137566 - RNA, 15 nt, Human
aauuguaauuauauc

SEQ ID NO: 3137567 - RNA, 16 nt, Human
aauuguaauuauaucu

SEQ ID NO: 3137568 - RNA, 14 nt, Human
aauuguaauuauau

SEQ ID NO: 3137569 - RNA, 20 nt, Human
aauuauaugcuauuucuaua

SEQ ID NO: 3137570 - RNA, 21 nt, Human
aauuauaugcuauuucuauau

SEQ ID NO: 3137571 - RNA, 20 nt, Human
aauuauaucugaggaauucu

SEQ ID NO: 3137572 - RNA, 22 nt, Human
aauuauaucugaggaauucugu

SEQ ID NO: 3137573 - RNA, 23 nt, Human
aauuauaucugaggaauucugua

SEQ ID NO: 3137574 - RNA, 19 nt, Human
aauuauaugcuauuucuau

SEQ ID NO: 3137575 - RNA, 13 nt, Human
aauucuguauaga

SEQ ID NO: 3137576 - RNA, 14 nt, Human
aauucuguauagau

SEQ ID NO: 3137577 - RNA, 20 nt, Human
aauucuguauagauuagaga

SEQ ID NO: 3137578 - RNA, 12 nt, Human
aauucuguauag

SEQ ID NO: 3137579 - RNA, 13 nt, Human
acaaggggcccuu

SEQ ID NO: 3137580 - RNA, 22 nt, Human
acaaggggcccuuggagcgugg

SEQ ID NO: 3137581 - RNA, 22 nt, Human
agaacaagaaagggccaggaga

SEQ ID NO: 3137582 - RNA, 21 nt, Human
agaaucuaacugguggacaug

SEQ ID NO: 3137583 - RNA, 22 nt, Human
agaaucuaacugguggacaugg

SEQ ID NO: 3137584 - RNA, 24 nt, Human
agaaccagauucuauccucaucuu

SEQ ID NO: 3137585 - RNA, 20 nt, Human
agauugagaccuacaggcug

SEQ ID NO: 3137586 - RNA, 13 nt, Human
agaucugccuaag

SEQ ID NO: 3137587 - RNA, 18 nt, Human
agaucugccuaaggacuu

SEQ ID NO: 3137588 - RNA, 17 nt, Human
agauucuauccucaucu

SEQ ID NO: 3137589 - RNA, 13 nt, Human
agaggggugcaga

SEQ ID NO: 3137590 - RNA, 18 nt, Human
agaggggugcagaggcug

SEQ ID NO: 3137591 - RNA, 19 nt, Human
agaggggugcagaggcugu

SEQ ID NO: 3137592 - RNA, 23 nt, Human
agaggggugcagaggcuguggcu

SEQ ID NO: 3137593 - RNA, 14 nt, Human
agcuggugcccugc

SEQ ID NO: 3137594 - RNA, 14 nt, Human
aggagguugggagg

SEQ ID NO: 3137595 - RNA, 22 nt, Human
aggagguugggaggggguuggg

SEQ ID NO: 3137596 - RNA, 14 nt, Human
aggaugugggcagc

SEQ ID NO: 3137597 - RNA, 15 nt, Human
aggaugugggcagcu

SEQ ID NO: 3137598 - RNA, 18 nt, Human
auccagcagauuauucac

SEQ ID NO: 3137599 - RNA, 15 nt, Human
augagcugugagaag

SEQ ID NO: 3137600 - RNA, 18 nt, Human
augaaacuuguguaaaua

SEQ ID NO: 3137601 - RNA, 14 nt, Human
aucuaggagaggag

SEQ ID NO: 3137602 - RNA, 16 nt, Human
aucuaggagaggagaa

SEQ ID NO: 3137603 - RNA, 15 nt, Human
auggcuuuguauaga

SEQ ID NO: 3137604 - RNA, 16 nt, Human
auggcuuuguauagaa

SEQ ID NO: 3137605 - RNA, 16 nt, Human
auaaaaaauuaugaca

SEQ ID NO: 3137606 - RNA, 14 nt, Human
auacaauuuuguuu

SEQ ID NO: 3137607 - RNA, 16 nt, Human
auacaauuuuguuucu

SEQ ID NO: 3137608 - RNA, 17 nt, Human
auacaauuuuguuucug

SEQ ID NO: 3137609 - RNA, 19 nt, Human
agucuggcuguacccagga

SEQ ID NO: 3137610 - RNA, 21 nt, Human
agucuggcuguacccaggaau

SEQ ID NO: 3137611 - RNA, 21 nt, Human
gcucgccuucccuccugcuuu

SEQ ID NO: 3137612 - RNA, 22 nt, Human
gcucgccuucccuccugcuuug

SEQ ID NO: 3137613 - RNA, 12 nt, Human
gcugggcagccc

SEQ ID NO: 3137614 - RNA, 13 nt, Human
gcugggcagcccg

SEQ ID NO: 3137615 - RNA, 14 nt, Human
gcugggcagcccgc

SEQ ID NO: 3137616 - RNA, 17 nt, Human
gcuggaggaugugggca

SEQ ID NO: 3137617 - RNA, 19 nt, Human
gcuggaggaugugggcagc

SEQ ID NO: 3137618 - RNA, 20 nt, Human
gcuggaggaugugggcagcu

SEQ ID NO: 3137619 - RNA, 16 nt, Human
gcuugggcgccgugcu

SEQ ID NO: 3137620 - RNA, 23 nt, Human
gcuugggcgccgugcugggcagc

SEQ ID NO: 3137621 - RNA, 12 nt, Human
gccacugccucu

SEQ ID NO: 3137622 - RNA, 15 nt, Human
gccacugcuccgugg

SEQ ID NO: 3137623 - RNA, 16 nt, Human
gccacugcuccgugga

SEQ ID NO: 3137624 - RNA, 19 nt, Human
gccacugcuccguggagga

SEQ ID NO: 3137625 - RNA, 13 nt, Human
gccacugccucuc

SEQ ID NO: 3137626 - RNA, 15 nt, Human
gccacugccucuccc

SEQ ID NO: 3137627 - RNA, 16 nt, Human
gccacugccucucccu

SEQ ID NO: 3137628 - RNA, 18 nt, Human
gccacccccgcuggagga

SEQ ID NO: 3137629 - RNA, 19 nt, Human
gccacccccgcuggaggau

SEQ ID NO: 3137630 - RNA, 12 nt, Human
gccaugucuaca

SEQ ID NO: 3137631 - RNA, 13 nt, Human
ggcccaucucccu

SEQ ID NO: 3137632 - RNA, 14 nt, Human
ggcccaucucccug

SEQ ID NO: 3137633 - RNA, 15 nt, Human
ggcccaucucccugc

SEQ ID NO: 3137634 - RNA, 16 nt, Human
ggcccaucucccugcu

SEQ ID NO: 3137635 - RNA, 18 nt, Human
ggcccaucucccugcuuu

SEQ ID NO: 3137636 - RNA, 19 nt, Human
ggcccaucucccugcuuug

SEQ ID NO: 3137637 - RNA, 18 nt, Human
ggccccaacucgggcucc

SEQ ID NO: 3137638 - RNA, 19 nt, Human
ggccccaacucgggcuccc

SEQ ID NO: 3137639 - RNA, 15 nt, Human
ggcaaaugccagggc

SEQ ID NO: 3137640 - RNA, 17 nt, Human
ggcaaaugccagggccc

SEQ ID NO: 3137641 - RNA, 18 nt, Human
ggcaaaugccagggcccg

SEQ ID NO: 3137642 - RNA, 13 nt, Human
ggaugugggcagc

SEQ ID NO: 3137643 - RNA, 14 nt, Human
ggaugugggcagcu

SEQ ID NO: 3137644 - RNA, 20 nt, Human
ggagaacaagaaagggccag

SEQ ID NO: 3137645 - RNA, 14 nt, Human
aaaauaccaaggaa

SEQ ID NO: 3137646 - RNA, 20 nt, Human
gggauucuuaaaguugaauu

SEQ ID NO: 3137647 - RNA, 15 nt, Human
gggauucuuaaaguu

SEQ ID NO: 3137648 - RNA, 19 nt, Human
gggcagcuuagggcccugg

SEQ ID NO: 3137649 - RNA, 20 nt, Human
gggcagcuuagggcccugga

SEQ ID NO: 3137650 - RNA, 16 nt, Human
gggcagcagcagcccu

SEQ ID NO: 3137651 - RNA, 17 nt, Human
gggcagcagcagcccug

SEQ ID NO: 3137652 - RNA, 19 nt, Human
gggcagcagcagcccugcc

SEQ ID NO: 3137653 - RNA, 11 nt, Human
gggcuggagaa

SEQ ID NO: 3137654 - RNA, 22 nt, Human
aaaauggacuguggugacuuug

SEQ ID NO: 3137655 - RNA, 21 nt, Human
aaaauuggggauucuuaaagu

SEQ ID NO: 3137656 - RNA, 23 nt, Human
aaaauuggggauucuuaaaguug

SEQ ID NO: 3137657 - RNA, 16 nt, Human
aaacggaugauuucua

SEQ ID NO: 3137658 - RNA, 18 nt, Human
aaacggaugauuucuaug

SEQ ID NO: 3137659 - RNA, 13 nt, Human
aaacuuuucugau

SEQ ID NO: 3137660 - RNA, 14 nt, Human
aaacuuuucugaua

SEQ ID NO: 3137661 - RNA, 12 nt, Human
aaacuuuucuga

SEQ ID NO: 3137662 - RNA, 16 nt, Human
aaacuuuucugauaga

SEQ ID NO: 3137663 - RNA, 17 nt, Human
aaacuuuucugauagag

SEQ ID NO: 3137664 - RNA, 19 nt, Human
ggucccacaaaugggcgcc

SEQ ID NO: 3137665 - RNA, 15 nt, Human
aaacuuguguaaaua

SEQ ID NO: 3137666 - RNA, 17 nt, Human
aaacuuguguaaauaca

SEQ ID NO: 3137667 - RNA, 14 nt, Human
ggucuugccccauc

SEQ ID NO: 3137668 - RNA, 19 nt, Human
ggucuugccccaucacugc

SEQ ID NO: 3137669 - RNA, 21 nt, Human
gagugaguuggguguauugug

SEQ ID NO: 3137670 - RNA, 21 nt, Human
gauuuuuuuguuguuuguuua

SEQ ID NO: 3137671 - RNA, 18 nt, Human
gauuuuuuuguuguuugu

SEQ ID NO: 3137672 - RNA, 23 nt, Human
gauucuucagcaaaaauauuuua

SEQ ID NO: 3137673 - RNA, 22 nt, Human
gauuauucacugauuugacaua

SEQ ID NO: 3137674 - RNA, 21 nt, Human
gauuauucacugauuugacau

SEQ ID NO: 3137675 - RNA, 17 nt, Human
gaucugccuaaggacuu

SEQ ID NO: 3137676 - RNA, 18 nt, Human
gaucugccuaaggacuuc

SEQ ID NO: 3137677 - RNA, 20 nt, Human
gaucugccuaaggacuucuu

SEQ ID NO: 3137678 - RNA, 21 nt, Human
gaucugccuaaggacuucuuu

SEQ ID NO: 3137679 - RNA, 23 nt, Human
gaucugccuaaggacuucuuuaa

SEQ ID NO: 3137680 - RNA, 12 nt, Human
gacauugucucc

SEQ ID NO: 3137681 - RNA, 13 nt, Human
gacauugucuccc

SEQ ID NO: 3137682 - RNA, 20 nt, Human
gacauugucucccgcccccc

SEQ ID NO: 3137683 - RNA, 13 nt, Human
gacuguggugacu

SEQ ID NO: 3137684 - RNA, 14 nt, Human
gacuguggugacuu

SEQ ID NO: 3137685 - RNA, 12 nt, Human
cugggcagcccg

SEQ ID NO: 3137686 - RNA, 13 nt, Human
cugggcagcccgc

SEQ ID NO: 3137687 - RNA, 20 nt, Human
cugggcagcccgcuaggcuc

SEQ ID NO: 3137688 - RNA, 22 nt, Human
cugggcagcccgcuaggcucgc

SEQ ID NO: 3137689 - RNA, 14 nt, Human
cugcacggugaaug

SEQ ID NO: 3137690 - RNA, 15 nt, Human
cugcacggugaaugg

SEQ ID NO: 3137691 - RNA, 17 nt, Human
cugcacggugaauggcu

SEQ ID NO: 3137692 - RNA, 20 nt, Human
cugcacggugaauggcuuug

SEQ ID NO: 3137693 - RNA, 16 nt, Human
cuuuaauuuuggaauu

SEQ ID NO: 3137694 - RNA, 14 nt, Human
cuuuaauuuuggaa

SEQ ID NO: 3137695 - RNA, 15 nt, Human
cuuuaauuuuggaau

SEQ ID NO: 3137696 - RNA, 13 nt, Human
cuuuaauuuugga

SEQ ID NO: 3137697 - RNA, 15 nt, Human
cuuuggucuugcccc

SEQ ID NO: 3137698 - RNA, 18 nt, Human
cuuuuauuuuuuucuaau

SEQ ID NO: 3137699 - RNA, 11 nt, Human
cuuaaaguuga

SEQ ID NO: 3137700 - RNA, 13 nt, Human
cuuaaaguugaau

SEQ ID NO: 3137701 - RNA, 15 nt, Human
auuuaauaauuauau

SEQ ID NO: 3137702 - RNA, 18 nt, Human
auuuaauaauuauaugcu

SEQ ID NO: 3137703 - RNA, 13 nt, Human
auuuaauaauuau

SEQ ID NO: 3137704 - RNA, 13 nt, Human
auuuuuuucuaau

SEQ ID NO: 3137705 - RNA, 18 nt, Human
auuuuuuuguuguuuguu

SEQ ID NO: 3137706 - RNA, 15 nt, Human
auuauguaaauccca

SEQ ID NO: 3137707 - RNA, 17 nt, Human
auuauguaaaucccauu

SEQ ID NO: 3137708 - RNA, 22 nt, Human
auuauguaaaucccauuauuca

SEQ ID NO: 3137709 - RNA, 23 nt, Human
auuauguaaaucccauuauucaa

SEQ ID NO: 3137710 - RNA, 13 nt, Human
auuauguaaaucc

SEQ ID NO: 3137711 - RNA, 14 nt, Human
auuauguaaauccc

SEQ ID NO: 3137712 - RNA, 12 nt, Human
auuauguaaauc

SEQ ID NO: 3137713 - RNA, 17 nt, Human
cauugguguuguacuca

SEQ ID NO: 3137714 - RNA, 15 nt, Human
cauuauucaaaguug

SEQ ID NO: 3137715 - RNA, 14 nt, Human
cauuauucaaaguu

SEQ ID NO: 3137716 - RNA, 16 nt, Human
cauacaguuugcacuu

SEQ ID NO: 3137717 - RNA, 13 nt, Human
cagauacuggauu

SEQ ID NO: 3137718 - RNA, 14 nt, Human
cagauacuggauug

SEQ ID NO: 3137719 - RNA, 18 nt, Human
cagauacuggauuguacu

SEQ ID NO: 3137720 - RNA, 17 nt, Human
cagacagaucuggaaug

SEQ ID NO: 3137721 - RNA, 14 nt, Human
ccaguauuguacaa

SEQ ID NO: 3137722 - RNA, 17 nt, Human
ccaugggauaaaugcca

SEQ ID NO: 3137723 - RNA, 19 nt, Human
ccaugggauaaaugccauc

SEQ ID NO: 3137724 - RNA, 15 nt, Human
cccugccccacaccu

SEQ ID NO: 3137725 - RNA, 18 nt, Human
cccugccccacaccuccu

SEQ ID NO: 3137726 - RNA, 19 nt, Human
cccugccccacaccuccuc

SEQ ID NO: 3137727 - RNA, 19 nt, Human
cccuggaucuaccuggagg

SEQ ID NO: 3137728 - RNA, 20 nt, Human
cccuggaucuaccuggaggg

SEQ ID NO: 3137729 - RNA, 21 nt, Human
cccuggaucuaccuggaggga

SEQ ID NO: 3137730 - RNA, 11 nt, Human
ccuaaggacuu

SEQ ID NO: 3137731 - RNA, 12 nt, Human
ccuaaggacuuc

SEQ ID NO: 3137732 - RNA, 16 nt, Human
ccuaaggacuucuuua

SEQ ID NO: 3137733 - RNA, 17 nt, Human
ccuaaggacuucuuuaa

SEQ ID NO: 3137734 - RNA, 18 nt, Human
ccuaaggacuucuuuaau

SEQ ID NO: 3137735 - RNA, 23 nt, Human
ccuaaggacuucuuuaauuuugg

SEQ ID NO: 3137736 - RNA, 15 nt, Human
ccuagcugcugucac

SEQ ID NO: 3137737 - RNA, 11 nt, Human
ccuucccuccu

SEQ ID NO: 3137738 - RNA, 12 nt, Human
ccuucccuccuc

SEQ ID NO: 3137739 - RNA, 13 nt, Human
ccuucccuccucc

SEQ ID NO: 3137740 - RNA, 12 nt, Human
ccuucccuccug

SEQ ID NO: 3137741 - RNA, 14 nt, Human
ccuucccuccugcu

SEQ ID NO: 3137742 - RNA, 15 nt, Human
ccuucccuccugcuu

SEQ ID NO: 3137743 - RNA, 13 nt, Human
ccuguuccccucu

SEQ ID NO: 3137744 - RNA, 14 nt, Human
ccuguuccccucuc

SEQ ID NO: 3137745 - RNA, 15 nt, Human
ccuguuccccucucc

SEQ ID NO: 3137746 - RNA, 16 nt, Human
ccuguuccccucuccc

SEQ ID NO: 3137747 - RNA, 17 nt, Human
ccuguuccccucucccu

SEQ ID NO: 3137748 - RNA, 18 nt, Human
ccuguuccccucucccuu

SEQ ID NO: 3137749 - RNA, 19 nt, Human
ccuguuccccucucccuuc

SEQ ID NO: 3137750 - RNA, 12 nt, Human
ccuguuccccuc

SEQ ID NO: 3137751 - RNA, 19 nt, Human
cgggcccuucuugcugccc

SEQ ID NO: 3137752 - RNA, 20 nt, Human
cgggcccuucuugcugcccu

SEQ ID NO: 3137753 - RNA, 21 nt, Human
cgggcccuucuugcugcccug

SEQ ID NO: 3137754 - RNA, 23 nt, Human
cgggcccuucuugcugcccugcc

SEQ ID NO: 3137755 - RNA, 16 nt, Human
cuaaguugggaucuag

SEQ ID NO: 3137756 - RNA, 24 nt, Human
cuaaguugggaucuaggagaggag

SEQ ID NO: 3137757 - RNA, 13 nt, Human
cguguuccccucu

SEQ ID NO: 3137758 - RNA, 15 nt, Human
cguguuccccucuug

SEQ ID NO: 3137759 - RNA, 18 nt, Human
cguguuccccucuugucu

SEQ ID NO: 3137760 - RNA, 19 nt, Human
cguguuccccucuugucuc

SEQ ID NO: 3137761 - RNA, 20 nt, Human
cguguuccccucuugucucc

SEQ ID NO: 3137762 - RNA, 11 nt, Human
cuauccucauc

SEQ ID NO: 3137763 - RNA, 15 nt, Human
cucgucuuccgucuc

SEQ ID NO: 3137764 - RNA, 18 nt, Human
cucgucuuccgucucccc

SEQ ID NO: 3137765 - RNA, 19 nt, Human
cucgucuuccgucuccccc

SEQ ID NO: 3137766 - RNA, 15 nt, Human
cucucccucuggucc

SEQ ID NO: 3137767 - RNA, 17 nt, Human
cucugucccauucccug

SEQ ID NO: 3137768 - RNA, 18 nt, Human
cucugucccauucccugg

SEQ ID NO: 3137769 - RNA, 19 nt, Human
cucugucccauucccuggg

SEQ ID NO: 3137770 - RNA, 20 nt, Human
cucugucccauucccuggga

SEQ ID NO: 3137771 - RNA, 21 nt, Human
cucugucccauucccugggau

SEQ ID NO: 3137772 - RNA, 21 nt, Human
cucccccguguuccccucuug

SEQ ID NO: 3137773 - RNA, 20 nt, Human
augcuuaacauacccgccua

SEQ ID NO: 3137774 - RNA, 13 nt, Human
augcccucccuuc

SEQ ID NO: 3137775 - RNA, 16 nt, Human
augcccucccuucucc

SEQ ID NO: 3137776 - RNA, 17 nt, Human
augcccucccuucuccc

SEQ ID NO: 3137777 - RNA, 19 nt, Human
augcccucccuucucccug

SEQ ID NO: 3137778 - RNA, 20 nt, Human
augcccucccuucucccugg

SEQ ID NO: 3137779 - RNA, 21 nt, Human
augcccucccuucucccugga

SEQ ID NO: 3137780 - RNA, 22 nt, Human
augcccucccuucucccuggau

SEQ ID NO: 3137781 - RNA, 14 nt, Human
augccaucaauaaa

SEQ ID NO: 3137782 - RNA, 15 nt, Human
uuuagucuugucuca

SEQ ID NO: 3137783 - RNA, 17 nt, Human
uuuagucuugucucaga

SEQ ID NO: 3137784 - RNA, 23 nt, Human
uuuagucuugucucagauuuuau

SEQ ID NO: 3137785 - RNA, 16 nt, Human
uuggagcguggacugg

SEQ ID NO: 3137786 - RNA, 18 nt, Human
uuggggugguugaggcua

SEQ ID NO: 3137787 - RNA, 14 nt, Human
uugguuuugccauu

SEQ ID NO: 3137788 - RNA, 18 nt, Human
aucugaagucagaucugc

SEQ ID NO: 3137789 - RNA, 23 nt, Human
aucugaagucagaucugccuaag

SEQ ID NO: 3137790 - RNA, 16 nt, Human
aucugaagucagaucu

SEQ ID NO: 3137791 - RNA, 17 nt, Human
aucugaagucagaucug

SEQ ID NO: 3137792 - RNA, 14 nt, Human
uugccccaucacug

SEQ ID NO: 3137793 - RNA, 13 nt, Human
aucuaccuggagg

SEQ ID NO: 3137794 - RNA, 18 nt, Human
aucuaccuggagggaaga

SEQ ID NO: 3137795 - RNA, 19 nt, Human
aucuaccuggagggaagag

SEQ ID NO: 3137796 - RNA, 22 nt, Human
aucauuaaagccugaguuugcu

SEQ ID NO: 3137797 - RNA, 13 nt, Human
uucuggucucguc

SEQ ID NO: 3137798 - RNA, 19 nt, Human
uucuggucucgucuuccgu

SEQ ID NO: 3137799 - RNA, 22 nt, Human
uucuggucucgucuuccgucuc

SEQ ID NO: 3137800 - RNA, 14 nt, Human
auauuaaagccaug

SEQ ID NO: 3137801 - RNA, 15 nt, Human
auauuaaagccaugu

SEQ ID NO: 3137802 - RNA, 18 nt, Human
auauuaaagccauguuua

SEQ ID NO: 3137803 - RNA, 23 nt, Human
auauuaaagccauguuuauuaca

SEQ ID NO: 3137804 - RNA, 17 nt, Human
auauuuuaugauccagc

SEQ ID NO: 3137805 - RNA, 22 nt, Human
auauuuuaugauccagcagauu

SEQ ID NO: 3137806 - RNA, 12 nt, Human
auauuuuaugau

SEQ ID NO: 3137807 - RNA, 13 nt, Human
auauuuuaugauc

SEQ ID NO: 3137808 - RNA, 19 nt, Human
uucagcaaaaauauuuuau

SEQ ID NO: 3137809 - RNA, 21 nt, Human
uucagcaaaaauauuuuauga

SEQ ID NO: 3137810 - RNA, 15 nt, Human
auaucugaggaauuc

SEQ ID NO: 3137811 - RNA, 16 nt, Human
auaucugaggaauucu

SEQ ID NO: 3137812 - RNA, 17 nt, Human
auaucugaggaauucug

SEQ ID NO: 3137813 - RNA, 18 nt, Human
auaucugaggaauucugu

SEQ ID NO: 3137814 - RNA, 23 nt, Human
auaucugaggaauucuguauaga

SEQ ID NO: 3137815 - RNA, 19 nt, Human
auaucugaggaauucugua

SEQ ID NO: 3137816 - RNA, 20 nt, Human
auaucugaggaauucuguau

SEQ ID NO: 3137817 - RNA, 21 nt, Human
auaucugaggaauucuguaua

SEQ ID NO: 3137818 - RNA, 22 nt, Human
auaucugaggaauucuguauag

SEQ ID NO: 3137819 - RNA, 23 nt, Human
auagcuagacuggugacugauuc

SEQ ID NO: 3137820 - RNA, 18 nt, Human
auagcuagacuggugacu

SEQ ID NO: 3137821 - RNA, 19 nt, Human
auagcuagacuggugacug

SEQ ID NO: 3137822 - RNA, 14 nt, Human
auagcuagacuggu

SEQ ID NO: 3137823 - RNA, 15 nt, Human
auagcuagacuggug

SEQ ID NO: 3137824 - RNA, 16 nt, Human
auagcuagacugguga

SEQ ID NO: 3137825 - RNA, 22 nt, Human
auagcuggucuuauuuguaaag

SEQ ID NO: 3137826 - RNA, 23 nt, Human
auagcuggucuuauuuguaaagc

SEQ ID NO: 3137827 - RNA, 12 nt, Human
uuugaauuuugu

SEQ ID NO: 3137828 - RNA, 14 nt, Human
uuugaauuuugugu

SEQ ID NO: 3137829 - RNA, 22 nt, Human
uuugcuggggccgaaagaacag

SEQ ID NO: 3137830 - RNA, 19 nt, Human
uuugcuggggccgaaagaa

SEQ ID NO: 3137831 - RNA, 17 nt, Human
uuugcgugcccggggca

SEQ ID NO: 3137832 - RNA, 20 nt, Human
auguuacagaaucuaacugg

SEQ ID NO: 3137833 - RNA, 22 nt, Human
auguuuauuacaguauaauuaa

SEQ ID NO: 3137834 - RNA, 23 nt, Human
auguuuauuacaguauaauuaac

SEQ ID NO: 3137835 - RNA, 15 nt, Human
auguuuauuacagua

SEQ ID NO: 3137836 - RNA, 16 nt, Human
auguuuauuacaguau

SEQ ID NO: 3137837 - RNA, 18 nt, Human
auguuuauuacaguauaa

SEQ ID NO: 3137838 - RNA, 19 nt, Human
auguuuauuacaguauaau

SEQ ID NO: 3137839 - RNA, 19 nt, Human
uuuucugauccaguuuugu

SEQ ID NO: 3137840 - RNA, 12 nt, Human
auguuuauuaca

SEQ ID NO: 3137841 - RNA, 23 nt, Human
uuuuuggcauaacauaaaucugu

SEQ ID NO: 3137842 - RNA, 24 nt, Human
uuuuuggcauaacauaaaucugug

SEQ ID NO: 3137843 - RNA, 20 nt, Human
uuuuuauauuuacuaaaaug

SEQ ID NO: 3137844 - RNA, 15 nt, Human
uuuuggaauuuuccu

SEQ ID NO: 3137845 - RNA, 21 nt, Human
auuagaauucuguauagauua

SEQ ID NO: 3137846 - RNA, 19 nt, Human
auuauaugcuauuucuaua

SEQ ID NO: 3137847 - RNA, 18 nt, Human
auuauaugcuauuucuau

SEQ ID NO: 3137848 - RNA, 17 nt, Human
auuauaugcuauuucua

SEQ ID NO: 3137849 - RNA, 17 nt, Human
auuauucaaaguugccu

SEQ ID NO: 3137850 - RNA, 18 nt, Human
auuauucaaaguugccua

SEQ ID NO: 3137851 - RNA, 19 nt, Human
auuauucaaaguugccuaa

SEQ ID NO: 3137852 - RNA, 22 nt, Human
auuauucaaaguugccuaaauc

SEQ ID NO: 3137853 - RNA, 24 nt, Human
auuauucaaaguugccuaaaucca

SEQ ID NO: 3137854 - RNA, 19 nt, Human
auuauucacugauuugaca

SEQ ID NO: 3137855 - RNA, 18 nt, Human
auuauaucugaggaauuc

SEQ ID NO: 3137856 - RNA, 19 nt, Human
auuauaucugaggaauucu

SEQ ID NO: 3137857 - RNA, 20 nt, Human
auuauaucugaggaauucug

SEQ ID NO: 3137858 - RNA, 21 nt, Human
auuauaucugaggaauucugu

SEQ ID NO: 3137859 - RNA, 22 nt, Human
auuauaucugaggaauucugua

SEQ ID NO: 3137860 - RNA, 16 nt, Human
auuauaugcuauuucu

SEQ ID NO: 3137861 - RNA, 12 nt, Human
auucacugauuu

SEQ ID NO: 3137862 - RNA, 17 nt, Human
auucacugauuugacau

SEQ ID NO: 3137863 - RNA, 22 nt, Human
auuggggauucuuaaaguugaa

SEQ ID NO: 3137864 - RNA, 15 nt, Human
auuggggauucuuaa

SEQ ID NO: 3137865 - RNA, 16 nt, Human
auuggggauucuuaaa

SEQ ID NO: 3137866 - RNA, 20 nt, Human
auuggggauucuuaaaguug

SEQ ID NO: 3137867 - RNA, 21 nt, Human
auuggggauucuuaaaguuga

SEQ ID NO: 3137868 - RNA, 14 nt, Human
auuggggauucuua

SEQ ID NO: 3137869 - RNA, 13 nt, Human
auuugaauuuugu

SEQ ID NO: 3137870 - RNA, 20 nt, Human
auuuacuaaaauggacugug

SEQ ID NO: 3137871 - RNA, 16 nt, Human
auuuacuaaaauggac

SEQ ID NO: 3137872 - RNA, 19 nt, Human
auuuacuaaaauggacugu

SEQ ID NO: 3137873 - RNA, 15 nt, Human
auuuacuaaaaugga

SEQ ID NO: 3137874 - RNA, 15 nt, Human
auuguacuuugugcu

SEQ ID NO: 3137875 - RNA, 20 nt, Human
auuuauuggcuuuucugauc

SEQ ID NO: 3137876 - RNA, 23 nt, Human
auuuauuggcuuuucugauccag

SEQ ID NO: 3137877 - RNA, 14 nt, Human
auuuauuggcuuuu

SEQ ID NO: 3137878 - RNA, 18 nt, Human
auuuauuggcuuuucuga

SEQ ID NO: 3137879 - RNA, 15 nt, Human
agcauauauuuuuau

SEQ ID NO: 3137880 - RNA, 22 nt, Human
agcauauauuuuuauauuuacu

SEQ ID NO: 3137881 - RNA, 18 nt, Human
agcauauauuuuuauauu

SEQ ID NO: 3137882 - RNA, 20 nt, Human
agcauauauuuuuauauuua

SEQ ID NO: 3137883 - RNA, 12 nt, Human
agcagcagcccu

SEQ ID NO: 3137884 - RNA, 13 nt, Human
agcagcagcccug

SEQ ID NO: 3137885 - RNA, 19 nt, Human
ugauccagcagauuauuca

SEQ ID NO: 3137886 - RNA, 17 nt, Human
ugcagguugaagccaug

SEQ ID NO: 3137887 - RNA, 19 nt, Human
ugcagguggugucgggccc

SEQ ID NO: 3137888 - RNA, 20 nt, Human
ugcagguggugucgggcccu

SEQ ID NO: 3137889 - RNA, 21 nt, Human
ugcagguggugucgggcccuu

SEQ ID NO: 3137890 - RNA, 12 nt, Human
agcccugcccca

SEQ ID NO: 3137891 - RNA, 15 nt, Human
agcccugccccacac

SEQ ID NO: 3137892 - RNA, 20 nt, Human
agcccugccccacaccuccu

SEQ ID NO: 3137893 - RNA, 22 nt, Human
agcccugccccacaccuccucu

SEQ ID NO: 3137894 - RNA, 23 nt, Human
ugauuugacauagucuggcugua

SEQ ID NO: 3137895 - RNA, 17 nt, Human
aggcacacaaggggccc

SEQ ID NO: 3137896 - RNA, 18 nt, Human
aggcacacaaggggcccu

SEQ ID NO: 3137897 - RNA, 19 nt, Human
aggcacacaaggggcccuu

SEQ ID NO: 3137898 - RNA, 22 nt, Human
aggcacacaaggggcccuugga

SEQ ID NO: 3137899 - RNA, 18 nt, Human
uggauuccgaguggugac

SEQ ID NO: 3137900 - RNA, 16 nt, Human
aggacuucuuuaauuu

SEQ ID NO: 3137901 - RNA, 21 nt, Human
aggacuucuuuaauuuuggaa

SEQ ID NO: 3137902 - RNA, 22 nt, Human
aggacuucuuuaauuuuggaau

SEQ ID NO: 3137903 - RNA, 23 nt, Human
aggacuucuuuaauuuuggaauu

SEQ ID NO: 3137904 - RNA, 14 nt, Human
aggacuucuuuaau

SEQ ID NO: 3137905 - RNA, 13 nt, Human
aggaauucuguau

SEQ ID NO: 3137906 - RNA, 14 nt, Human
aggaauucuguaua

SEQ ID NO: 3137907 - RNA, 19 nt, Human
aggacgcugaccguggagc

SEQ ID NO: 3137908 - RNA, 14 nt, Human
ugccaucaauaaaa

SEQ ID NO: 3137909 - RNA, 22 nt, Human
ugccaucaauaaaaaauuauga

SEQ ID NO: 3137910 - RNA, 21 nt, Human
ugcuauuucuauauuuucauu

SEQ ID NO: 3137911 - RNA, 22 nt, Human
ugcuauuucuauauuuucauuc

SEQ ID NO: 3137912 - RNA, 16 nt, Human
agcuuaagccacugcc

SEQ ID NO: 3137913 - RNA, 20 nt, Human
agcuuaagccacugccucuc

SEQ ID NO: 3137914 - RNA, 21 nt, Human
agcuuaagccacugccucucc

SEQ ID NO: 3137915 - RNA, 23 nt, Human
agcuuaagccacugccucucccu

SEQ ID NO: 3137916 - RNA, 13 nt, Human
uguaugugugaag

SEQ ID NO: 3137917 - RNA, 15 nt, Human
uguaaauacaauuuu

SEQ ID NO: 3137918 - RNA, 15 nt, Human
uggugucgggcccuu

SEQ ID NO: 3137919 - RNA, 14 nt, Human
uggugcccugcuuu

SEQ ID NO: 3137920 - RNA, 20 nt, Human
uggugcccugcuuucagaua

SEQ ID NO: 3137921 - RNA, 16 nt, Human
uggugcccugcuuuca

SEQ ID NO: 3137922 - RNA, 19 nt, Human
uggugcccugcuuucagau

SEQ ID NO: 3137923 - RNA, 16 nt, Human
aggggugcagaggcug

SEQ ID NO: 3137924 - RNA, 17 nt, Human
aggggugcagaggcugu

SEQ ID NO: 3137925 - RNA, 12 nt, Human
agggcccuggag

SEQ ID NO: 3137926 - RNA, 13 nt, Human
agggcccuggagg

SEQ ID NO: 3137927 - RNA, 14 nt, Human
agggcccuggaggc

SEQ ID NO: 3137928 - RNA, 15 nt, Human
agggcccuggaggcg

SEQ ID NO: 3137929 - RNA, 17 nt, Human
agggcccgcaccgacca

SEQ ID NO: 3137930 - RNA, 13 nt, Human
agggaagagugga

SEQ ID NO: 3137931 - RNA, 19 nt, Human
agggaagaguggaggugga

SEQ ID NO: 3137932 - RNA, 14 nt, Human
agggaacagggcgg

SEQ ID NO: 3137933 - RNA, 15 nt, Human
agggaacagggcgga

SEQ ID NO: 3137934 - RNA, 19 nt, Human
uguuuggaccaaaaaccag

SEQ ID NO: 3137935 - RNA, 12 nt, Human
aguucugcaggu

SEQ ID NO: 3137936 - RNA, 18 nt, Human
aguucugcagguugaagc

SEQ ID NO: 3137937 - RNA, 23 nt, Human
uguuuagucuugucucagauuuu

SEQ ID NO: 3137938 - RNA, 22 nt, Human
uguuuagucuugucucagauuu

SEQ ID NO: 3137939 - RNA, 20 nt, Human
uguuuagucuugucucagau

SEQ ID NO: 3137940 - RNA, 14 nt, Human
uguuuauuacagua

SEQ ID NO: 3137941 - RNA, 14 nt, Human
uuaacaacagcugg

SEQ ID NO: 3137942 - RNA, 21 nt, Human
aguuuauaaaagacugucuua

SEQ ID NO: 3137943 - RNA, 13 nt, Human
aguuuauaaaaga

SEQ ID NO: 3137944 - RNA, 17 nt, Human
aguuggguguauugugc

SEQ ID NO: 3137945 - RNA, 20 nt, Human
aguuggguguauugugcgcu

SEQ ID NO: 3137946 - RNA, 20 nt, Human
aguuuaauauuaaagccaug

SEQ ID NO: 3137947 - RNA, 15 nt, Human
aguuuaauauuaaag

SEQ ID NO: 3137948 - RNA, 16 nt, Human
aguuuaauauuaaagc

SEQ ID NO: 3137949 - RNA, 18 nt, Human
aguuuaauauuaaagcca

SEQ ID NO: 3137950 - RNA, 19 nt, Human
aguuuaauauuaaagccau

SEQ ID NO: 3137951 - RNA, 16 nt, Human
aguuggguguauugug

SEQ ID NO: 3137952 - RNA, 22 nt, Human
aguugccuaaauccauuuggaa

SEQ ID NO: 3137953 - RNA, 23 nt, Human
aguugccuaaauccauuuggaaa

SEQ ID NO: 3137954 - RNA, 19 nt, Human
aguugccuaaauccauuug

SEQ ID NO: 3137955 - RNA, 17 nt, Human
uuagaauucuguauaga

SEQ ID NO: 3137956 - RNA, 13 nt, Human
uuacaguauaauu

SEQ ID NO: 3137957 - RNA, 16 nt, Human
uuacaguauaauuaac

SEQ ID NO: 3137958 - RNA, 17 nt, Human
uuacaguauaauuaaca

SEQ ID NO: 3137959 - RNA, 18 nt, Human
uuacaguauaauuaacau

SEQ ID NO: 3137960 - RNA, 19 nt, Human
uuacaguauaauuaacaug

SEQ ID NO: 3137961 - RNA, 20 nt, Human
uuacaguauaauuaacaugu

SEQ ID NO: 3137962 - RNA, 20 nt, Human
auaaaucugugaacuugaaa

SEQ ID NO: 3137963 - RNA, 21 nt, Human
auaaaucugugaacuugaaau

SEQ ID NO: 3137964 - RNA, 22 nt, Human
auaaaucugugaacuugaaauu

SEQ ID NO: 3137965 - RNA, 16 nt, Human
auaaauagcuagacug

SEQ ID NO: 3137966 - RNA, 18 nt, Human
auaaauagcuagacuggu

SEQ ID NO: 3137967 - RNA, 12 nt, Human
ugugaacuugaa

SEQ ID NO: 3137968 - RNA, 16 nt, Human
ugugaacuugaaauuu

SEQ ID NO: 3137969 - RNA, 14 nt, Human
ugugaacuugaaau

SEQ ID NO: 3137970 - RNA, 15 nt, Human
ugugaacuugaaauu

SEQ ID NO: 3137971 - RNA, 18 nt, Human
ugugcugggguuaucuga

SEQ ID NO: 3137972 - RNA, 19 nt, Human
agugaguuggguguauugu

SEQ ID NO: 3137973 - RNA, 16 nt, Human
ucacuccccagccugg

SEQ ID NO: 3137974 - RNA, 17 nt, Human
ucacuccccagccuggg

SEQ ID NO: 3137975 - RNA, 18 nt, Human
ucacuccccagccugggc

SEQ ID NO: 3137976 - RNA, 19 nt, Human
ucacuccccagccugggcc

SEQ ID NO: 3137977 - RNA, 13 nt, Human
ucaauuuuaacaa

SEQ ID NO: 3137978 - RNA, 18 nt, Human
accaugggauaaaugcca

SEQ ID NO: 3137979 - RNA, 19 nt, Human
accaugggauaaaugccau

SEQ ID NO: 3137980 - RNA, 18 nt, Human
ucaaaauaucaaguguug

SEQ ID NO: 3137981 - RNA, 16 nt, Human
uauuuuuauauuuacu

SEQ ID NO: 3137982 - RNA, 18 nt, Human
ucaaaguugccuaaaucc

SEQ ID NO: 3137983 - RNA, 19 nt, Human
ucaaaguugccuaaaucca

SEQ ID NO: 3137984 - RNA, 21 nt, Human
ucaaaguugccuaaauccauu

SEQ ID NO: 3137985 - RNA, 22 nt, Human
ucaaaguugccuaaauccauuu

SEQ ID NO: 3137986 - RNA, 17 nt, Human
acauucuggucucgucu

SEQ ID NO: 3137987 - RNA, 18 nt, Human
acauucuggucucgucuu

SEQ ID NO: 3137988 - RNA, 20 nt, Human
acauucuggucucgucuucc

SEQ ID NO: 3137989 - RNA, 22 nt, Human
acauucuggucucgucuuccgu

SEQ ID NO: 3137990 - RNA, 17 nt, Human
acauacccgccuagcug

SEQ ID NO: 3137991 - RNA, 21 nt, Human
acauacccgccuagcugcugu

SEQ ID NO: 3137992 - RNA, 22 nt, Human
acauacccgccuagcugcuguc

SEQ ID NO: 3137993 - RNA, 16 nt, Human
uauuucuauauuuuca

SEQ ID NO: 3137994 - RNA, 17 nt, Human
uauuucuauauuuucau

SEQ ID NO: 3137995 - RNA, 20 nt, Human
acauagucuggcuguaccca

SEQ ID NO: 3137996 - RNA, 14 nt, Human
acauagucuggcug

SEQ ID NO: 3137997 - RNA, 15 nt, Human
acauagucuggcugu

SEQ ID NO: 3137998 - RNA, 14 nt, Human
accuggagggaaga

SEQ ID NO: 3137999 - RNA, 16 nt, Human
accuggagggaagagu

SEQ ID NO: 3138000 - RNA, 18 nt, Human
uccgggcaaaugccaggg

SEQ ID NO: 3138001 - RNA, 19 nt, Human
uccgggcaaaugccagggc

SEQ ID NO: 3138002 - RNA, 20 nt, Human
uccgggcaaaugccagggcc

SEQ ID NO: 3138003 - RNA, 21 nt, Human
uccgggcaaaugccagggccc

SEQ ID NO: 3138004 - RNA, 15 nt, Human
uccccucucccuucc

SEQ ID NO: 3138005 - RNA, 12 nt, Human
acguuccgggca

SEQ ID NO: 3138006 - RNA, 20 nt, Human
acguuccgggcaaaugccag

SEQ ID NO: 3138007 - RNA, 18 nt, Human
uccauuuaauaauuauau

SEQ ID NO: 3138008 - RNA, 17 nt, Human
uccauuuaauaauuaua

SEQ ID NO: 3138009 - RNA, 21 nt, Human
uccccaugcuuaacauacccg

SEQ ID NO: 3138010 - RNA, 19 nt, Human
ucugaagucagaucugccu

SEQ ID NO: 3138011 - RNA, 15 nt, Human
ucugaagucagaucu

SEQ ID NO: 3138012 - RNA, 20 nt, Human
agaaacgaucagacagaucu

SEQ ID NO: 3138013 - RNA, 14 nt, Human
acuuguuagaucua

SEQ ID NO: 3138014 - RNA, 15 nt, Human
acuuguuagaucuag

SEQ ID NO: 3138015 - RNA, 23 nt, Human
acuuguuagaucuaguucacucu

SEQ ID NO: 3138016 - RNA, 20 nt, Human
acuugaaauuugaauuuugu

SEQ ID NO: 3138017 - RNA, 19 nt, Human
acuugaaauuugaauuuug

SEQ ID NO: 3138018 - RNA, 16 nt, Human
acuugaaauuugaauu

SEQ ID NO: 3138019 - RNA, 13 nt, Human
acugcuccgugga

SEQ ID NO: 3138020 - RNA, 14 nt, Human
acugcuccguggag

SEQ ID NO: 3138021 - RNA, 17 nt, Human
acugcuccguggaggag

SEQ ID NO: 3138022 - RNA, 23 nt, Human
acugcuccguggaggagguuggg

SEQ ID NO: 3138023 - RNA, 12 nt, Human
acugccucuccc

SEQ ID NO: 3138024 - RNA, 13 nt, Human
acugccucucccu

SEQ ID NO: 3138025 - RNA, 14 nt, Human
acugccucucccuc

SEQ ID NO: 3138026 - RNA, 16 nt, Human
acugccucucccucug

SEQ ID NO: 3138027 - RNA, 17 nt, Human
acuuaagcauuuaggaa

SEQ ID NO: 3138028 - RNA, 12 nt, Human
acuguggugacu

SEQ ID NO: 3138029 - RNA, 14 nt, Human
acuguggugacuuu

SEQ ID NO: 3138030 - RNA, 15 nt, Human
acuguggugacuuug

SEQ ID NO: 3138031 - RNA, 18 nt, Human
acuguggugacuuuggau

SEQ ID NO: 3138032 - RNA, 20 nt, Human
acuguggugacuuuggauaa

SEQ ID NO: 3138033 - RNA, 21 nt, Human
acuguggugacuuuggauaau

SEQ ID NO: 3138034 - RNA, 13 nt, Human
ucgggcccuucuu

SEQ ID NO: 3138035 - RNA, 18 nt, Human
ucgggcccuucuugcugc

SEQ ID NO: 3138036 - RNA, 20 nt, Human
ucgggcccuucuugcugccc

SEQ ID NO: 3138037 - RNA, 21 nt, Human
ucgggcccuucuugcugcccu

SEQ ID NO: 3138038 - RNA, 23 nt, Human
ucgggcccuucuugcugcccugc

SEQ ID NO: 3138039 - RNA, 14 nt, Human
ucgggcucccgggu

SEQ ID NO: 3138040 - RNA, 22 nt, Human
agagauuuuuuuguuguuuguu

SEQ ID NO: 3138041 - RNA, 23 nt, Human
agagauuuuuuuguuguuuguuu

SEQ ID NO: 3138042 - RNA, 20 nt, Human
ugaaauuguaauuauaucug

SEQ ID NO: 3138043 - RNA, 21 nt, Human
ugaaauuguaauuauaucuga

SEQ ID NO: 3138044 - RNA, 14 nt, Human
ugaaauuugaauuu

SEQ ID NO: 3138045 - RNA, 15 nt, Human
ugaaauuugaauuuu

SEQ ID NO: 3138046 - RNA, 16 nt, Human
ugaaauuugaauuuug

SEQ ID NO: 3138047 - RNA, 17 nt, Human
ugaaauuugaauuuugu

SEQ ID NO: 3138048 - RNA, 17 nt, Human
ugaauuuauuggcuuuu

SEQ ID NO: 3138049 - RNA, 21 nt, Human
ugaauuuauuggcuuuucuga

SEQ ID NO: 3138050 - RNA, 22 nt, Human
ugaauuuauuggcuuuucugau

SEQ ID NO: 3138051 - RNA, 23 nt, Human
ugaauuuauuggcuuuucugauc

SEQ ID NO: 3138052 - RNA, 19 nt, Human
agaauuaguggcacuugcu

SEQ ID NO: 3138053 - RNA, 14 nt, Human
ucuguacuuuuugg

SEQ ID NO: 3138054 - RNA, 17 nt, Human
ucuguacuuuuuggcau

SEQ ID NO: 3138055 - RNA, 13 nt, Human
ucuguacuuuuug

SEQ ID NO: 3138056 - RNA, 14 nt, Human
ucugucccauuccc

SEQ ID NO: 3138057 - RNA, 17 nt, Human
ucugucccauucccugg

SEQ ID NO: 3138058 - RNA, 18 nt, Human
ucugucccauucccuggg

SEQ ID NO: 3138059 - RNA, 19 nt, Human
ucugucccauucccuggga

SEQ ID NO: 3138060 - RNA, 24 nt, Human
ucugucccauucccugggaucugg

SEQ ID NO: 3138061 - RNA, 19 nt, Human
ucugugaacuugaaauuug

SEQ ID NO: 3138062 - RNA, 22 nt, Human
ucugugaacuugaaauuugaau

SEQ ID NO: 3138063 - RNA, 16 nt, Human
agacuggugacugauu

SEQ ID NO: 3138064 - RNA, 17 nt, Human
agacuggugacugauuc

SEQ ID NO: 3138065 - RNA, 12 nt, Human
agacuggugacu

SEQ ID NO: 3138066 - RNA, 13 nt, Human
agacuggugacug

SEQ ID NO: 3138067 - RNA, 14 nt, Human
agacuggugacuga

SEQ ID NO: 3138068 - RNA, 21 nt, Human
aaccaugggauaaaugccauc

SEQ ID NO: 3138069 - RNA, 15 nt, Human
aaccaugggauaaau

SEQ ID NO: 3138070 - RNA, 17 nt, Human
aaccaugggauaaaugc

SEQ ID NO: 3138071 - RNA, 18 nt, Human
aaccaugggauaaaugcc

SEQ ID NO: 3138072 - RNA, 20 nt, Human
aaccaugggauaaaugccau

SEQ ID NO: 3138073 - RNA, 17 nt, Human
gucuccccuguuccccu

SEQ ID NO: 3138074 - RNA, 18 nt, Human
gucuccccuguuccccuc

SEQ ID NO: 3138075 - RNA, 19 nt, Human
gucuccccuguuccccucu

SEQ ID NO: 3138076 - RNA, 23 nt, Human
gucuccccuguuccccucucccu

SEQ ID NO: 3138077 - RNA, 19 nt, Human
gucucccgccccccacacu

SEQ ID NO: 3138078 - RNA, 19 nt, Human
gucucccccguguuccccu

SEQ ID NO: 3138079 - RNA, 21 nt, Human
gucucccccguguuccccucu

SEQ ID NO: 3138080 - RNA, 23 nt, Human
gucucccccguguuccccucuug

SEQ ID NO: 3138081 - RNA, 14 nt, Human
gucuuccgucuccc

SEQ ID NO: 3138082 - RNA, 15 nt, Human
gucuuccgucucccc

SEQ ID NO: 3138083 - RNA, 20 nt, Human
aaaugggcgccccccccucc

SEQ ID NO: 3138084 - RNA, 17 nt, Human
guaugugugaagugagu

SEQ ID NO: 3138085 - RNA, 15 nt, Human
guauguggcaaaaug

SEQ ID NO: 3138086 - RNA, 13 nt, Human
guaugugugaagu

SEQ ID NO: 3138087 - RNA, 14 nt, Human
aaaugcaaugugaa

SEQ ID NO: 3138088 - RNA, 14 nt, Human
aaauccauuuggaa

SEQ ID NO: 3138089 - RNA, 15 nt, Human
aaauccauuuggaaa

SEQ ID NO: 3138090 - RNA, 16 nt, Human
aaauccauuuggaaau

SEQ ID NO: 3138091 - RNA, 19 nt, Human
aaaucccauuauucaaagu

SEQ ID NO: 3138092 - RNA, 20 nt, Human
aaaucccauuauucaaaguu

SEQ ID NO: 3138093 - RNA, 21 nt, Human
aaaucccauuauucaaaguug

SEQ ID NO: 3138094 - RNA, 22 nt, Human
aaaucccauuauucaaaguugc

SEQ ID NO: 3138095 - RNA, 18 nt, Human
aaauccauuuggaaaucu

SEQ ID NO: 3138096 - RNA, 21 nt, Human
aaauccauuuggaaaucuuua

SEQ ID NO: 3138097 - RNA, 22 nt, Human
aaauccauuuggaaaucuuuaa

SEQ ID NO: 3138098 - RNA, 23 nt, Human
aaauccauuuggaaaucuuuaaa

SEQ ID NO: 3138099 - RNA, 13 nt, Human
aaaucccauuauu

SEQ ID NO: 3138100 - RNA, 15 nt, Human
aaaucccauuauuca

SEQ ID NO: 3138101 - RNA, 16 nt, Human
aaaucccauuauucaa

SEQ ID NO: 3138102 - RNA, 17 nt, Human
aaaucccauuauucaaa

SEQ ID NO: 3138103 - RNA, 19 nt, Human
guguuguacucaauuuuaa

SEQ ID NO: 3138104 - RNA, 15 nt, Human
guguguaugcugcuu

SEQ ID NO: 3138105 - RNA, 19 nt, Human
aagacugucuuaauuugca

SEQ ID NO: 3138106 - RNA, 21 nt, Human
aagaaacugacaugcccuccc

SEQ ID NO: 3138107 - RNA, 22 nt, Human
aagaaacugacaugcccucccu

SEQ ID NO: 3138108 - RNA, 18 nt, Human
guggauuccgagugguga

SEQ ID NO: 3138109 - RNA, 17 nt, Human
guggacauggcuguuca

SEQ ID NO: 3138110 - RNA, 19 nt, Human
aagaaugguccgugcuaag

SEQ ID NO: 3138111 - RNA, 22 nt, Human
aagaaugguccgugcuaaggac

SEQ ID NO: 3138112 - RNA, 12 nt, Human
guuagaucuagu

SEQ ID NO: 3138113 - RNA, 21 nt, Human
guuuaacaaaauguaugugag

SEQ ID NO: 3138114 - RNA, 14 nt, Human
guugccuaaaucca

SEQ ID NO: 3138115 - RNA, 15 nt, Human
guugccuaaauccau

SEQ ID NO: 3138116 - RNA, 16 nt, Human
guugccuaaauccauu

SEQ ID NO: 3138117 - RNA, 20 nt, Human
guuucuguacuuuuuggcau

SEQ ID NO: 3138118 - RNA, 15 nt, Human
guuucuguacuuuuu

SEQ ID NO: 3138119 - RNA, 17 nt, Human
uagucuugucucagauu

SEQ ID NO: 3138120 - RNA, 22 nt, Human
uagucuugucucagauuuuauu

SEQ ID NO: 3138121 - RNA, 11 nt, Human
acaccuccucu

SEQ ID NO: 3138122 - RNA, 15 nt, Human
acaccuccucucacu

SEQ ID NO: 3138123 - RNA, 18 nt, Human
acaccuccucucacuccc

SEQ ID NO: 3138124 - RNA, 20 nt, Human
acagauacuccuccaagguu

SEQ ID NO: 3138125 - RNA, 15 nt, Human
acaacagcuggugcc

SEQ ID NO: 3138126 - RNA, 17 nt, Human
acaaaugggcgcccccc

SEQ ID NO: 3138127 - RNA, 21 nt, Human
acaaaugggcgccccccccuc

SEQ ID NO: 3138128 - RNA, 22 nt, Human
acaaaugggcgccccccccucc

SEQ ID NO: 3138129 - RNA, 15 nt, Human
uagcuagacugguga

SEQ ID NO: 3138130 - RNA, 19 nt, Human
uacuuuuuggcauaacaua

SEQ ID NO: 3138131 - RNA, 20 nt, Human
uacuuuuuggcauaacauaa

SEQ ID NO: 3138132 - RNA, 14 nt, Human
uacuuuuuggcaua

SEQ ID NO: 3138133 - RNA, 16 nt, Human
uacuuugugcuggggu

SEQ ID NO: 3138134 - RNA, 22 nt, Human
uacuuugugcugggguuaucug

SEQ ID NO: 3138135 - RNA, 16 nt, Human
aauuuuguuucuguac

SEQ ID NO: 3138136 - RNA, 15 nt, Human
aauuuuguuucugua

SEQ ID NO: 3138137 - RNA, 20 nt, Human
acaaaguauuaagcauauau

SEQ ID NO: 3138138 - RNA, 14 nt, Human
uagaucuaguucac

SEQ ID NO: 3138139 - RNA, 20 nt, Human
aauaaccaaaugcaauguga

SEQ ID NO: 3138140 - RNA, 17 nt, Human
uaaauaaauaaauagcu

SEQ ID NO: 3138141 - RNA, 14 nt, Human
uaaauaaauagcua

SEQ ID NO: 3138142 - RNA, 15 nt, Human
uaaaucugugaacuu

SEQ ID NO: 3138143 - RNA, 16 nt, Human
uaaaucugugaacuug

SEQ ID NO: 3138144 - RNA, 22 nt, Human
uaaaucugugaacuugaaauuu

SEQ ID NO: 3138145 - RNA, 17 nt, Human
uaaaucugugaacuuga

SEQ ID NO: 3138146 - RNA, 18 nt, Human
uaaaucugugaacuugaa

SEQ ID NO: 3138147 - RNA, 19 nt, Human
uaaaucugugaacuugaaa

SEQ ID NO: 3138148 - RNA, 21 nt, Human
uaaaucugugaacuugaaauu

SEQ ID NO: 3138149 - RNA, 18 nt, Human
uaaauagcuagacuggug

SEQ ID NO: 3138150 - RNA, 17 nt, Human
aauauuuuaugauccag

SEQ ID NO: 3138151 - RNA, 18 nt, Human
aauauuuuaugauccagc

SEQ ID NO: 3138152 - RNA, 23 nt, Human
uaacauacccgccuagcugcugu

SEQ ID NO: 3138153 - RNA, 14 nt, Human
uaacauaaaucugu

SEQ ID NO: 3138154 - RNA, 15 nt, Human
uaacauaaaucugug

SEQ ID NO: 3138155 - RNA, 16 nt, Human
uaacauaaaucuguga

SEQ ID NO: 3138156 - RNA, 17 nt, Human
uaacauaaaucugugaa

SEQ ID NO: 3138157 - RNA, 18 nt, Human
uaacauaaaucugugaac

SEQ ID NO: 3138158 - RNA, 20 nt, Human
uaacauaaaucugugaacuu

SEQ ID NO: 3138159 - RNA, 13 nt, Human
aaucugugaacuu

SEQ ID NO: 3138160 - RNA, 15 nt, Human
aaucugugaacuuga

SEQ ID NO: 3138161 - RNA, 19 nt, Human
aaucugugaacuugaaauu

SEQ ID NO: 3138162 - RNA, 17 nt, Human
aaucugugaacuugaaa

SEQ ID NO: 3138163 - RNA, 18 nt, Human
aaucugugaacuugaaau

SEQ ID NO: 3138164 - RNA, 19 nt, Human
aaucuuuaaaaaaaaaauu

SEQ ID NO: 3138165 - RNA, 20 nt, Human
aaucuuuaaaaaaaaaauug

SEQ ID NO: 3138166 - RNA, 23 nt, Human
uacaguauaauuaacauguuaaa

SEQ ID NO: 3138167 - RNA, 18 nt, Human
uacaguauaauuaacaug

SEQ ID NO: 3138168 - RNA, 19 nt, Human
uacaguauaauuaacaugu

SEQ ID NO: 3138169 - RNA, 20 nt, Human
aauggacuguggugacuuug

SEQ ID NO: 3138170 - RNA, 16 nt, Human
aauggacuguggugac

SEQ ID NO: 3138171 - RNA, 16 nt, Human
uacaguauaauuaaca

SEQ ID NO: 3138172 - RNA, 17 nt, Human
uacaguauaauuaacau

SEQ ID NO: 3138173 - RNA, 14 nt, Human
uacaguauaauuaa

SEQ ID NO: 3138174 - RNA, 20 nt, Human
uacaggcugacguuccgggc

SEQ ID NO: 3138175 - RNA, 22 nt, Human
uacaggcugacguuccgggcaa

SEQ ID NO: 3138176 - RNA, 16 nt, Human
cacacaaggggcccuu

SEQ ID NO: 3138177 - RNA, 19 nt, Human
cacacaaggggcccuugga

SEQ ID NO: 3138178 - RNA, 13 nt, Human
caauuuuguuucu

SEQ ID NO: 3138179 - RNA, 17 nt, Human
caauuuuguuucuguac

SEQ ID NO: 3138180 - RNA, 14 nt, Human
caauuuuguuucug

SEQ ID NO: 3138181 - RNA, 16 nt, Human
caauuuuguuucugua

SEQ ID NO: 3138182 - RNA, 17 nt, Human
cacaaggggcccuugga

SEQ ID NO: 3138183 - RNA, 21 nt, Human
caagaaagggccaggagaugg

SEQ ID NO: 3138184 - RNA, 22 nt, Human
caagaaagggccaggagaugga

SEQ ID NO: 3138185 - RNA, 14 nt, Human
caaaguugccuaaa

SEQ ID NO: 3138186 - RNA, 15 nt, Human
caaaguugccuaaau

SEQ ID NO: 3138187 - RNA, 17 nt, Human
caaaguugccuaaaucc

SEQ ID NO: 3138188 - RNA, 16 nt, Human
ucauuauuuuauuaug

SEQ ID NO: 3138189 - RNA, 18 nt, Human
ucauuauuuuauuaugaa

SEQ ID NO: 3138190 - RNA, 19 nt, Human
ucauuauuuuauuaugaaa

SEQ ID NO: 3138191 - RNA, 14 nt, Human
ucauuauuuuauua

SEQ ID NO: 3138192 - RNA, 15 nt, Human
ucauuauuuuauuau

SEQ ID NO: 3138193 - RNA, 13 nt, Human
ucauuauuuuauu

SEQ ID NO: 3138194 - RNA, 22 nt, Human
uccagcagauuauucacugauu

SEQ ID NO: 3138195 - RNA, 17 nt, Human
uccagcagauuauucac

SEQ ID NO: 3138196 - RNA, 20 nt, Human
uccagcagauuauucacuga

SEQ ID NO: 3138197 - RNA, 13 nt, Human
ucccauucccugg

SEQ ID NO: 3138198 - RNA, 14 nt, Human
ucccauucccuggg

SEQ ID NO: 3138199 - RNA, 15 nt, Human
ucccauucccuggga

SEQ ID NO: 3138200 - RNA, 14 nt, Human
uccccagccugggc

SEQ ID NO: 3138201 - RNA, 15 nt, Human
uccccagccugggcc

SEQ ID NO: 3138202 - RNA, 16 nt, Human
uccccagccugggccc

SEQ ID NO: 3138203 - RNA, 17 nt, Human
uccccagccugggccca

SEQ ID NO: 3138204 - RNA, 21 nt, Human
uccccagccugggcccaucuc

SEQ ID NO: 3138205 - RNA, 18 nt, Human
ucccccguguuccccucu

SEQ ID NO: 3138206 - RNA, 19 nt, Human
ucccccguguuccccucuu

SEQ ID NO: 3138207 - RNA, 16 nt, Human
uccccuguuccccucu

SEQ ID NO: 3138208 - RNA, 17 nt, Human
uccccuguuccccucuc

SEQ ID NO: 3138209 - RNA, 18 nt, Human
uccccuguuccccucucc

SEQ ID NO: 3138210 - RNA, 19 nt, Human
uccccuguuccccucuccc

SEQ ID NO: 3138211 - RNA, 20 nt, Human
uccccuguuccccucucccu

SEQ ID NO: 3138212 - RNA, 18 nt, Human
ucacucuccauuuaauaa

SEQ ID NO: 3138213 - RNA, 17 nt, Human
uaucugaagucagaucu

SEQ ID NO: 3138214 - RNA, 18 nt, Human
uaucugaagucagaucug

SEQ ID NO: 3138215 - RNA, 15 nt, Human
uaucugaggaauucu

SEQ ID NO: 3138216 - RNA, 14 nt, Human
uauuuuuuucuaau

SEQ ID NO: 3138217 - RNA, 12 nt, Human
uauuuuaugauc

SEQ ID NO: 3138218 - RNA, 14 nt, Human
uccuuggcccccuu

SEQ ID NO: 3138219 - RNA, 20 nt, Human
uccuuggcccccuuucccgg

SEQ ID NO: 3138220 - RNA, 21 nt, Human
uccuuggcccccuuucccggg

SEQ ID NO: 3138221 - RNA, 17 nt, Human
ucucccgccccccacac

SEQ ID NO: 3138222 - RNA, 13 nt, Human
ucucccucugguc

SEQ ID NO: 3138223 - RNA, 16 nt, Human
ucucccucugguccca

SEQ ID NO: 3138224 - RNA, 20 nt, Human
ucugaggaauucuguauaga

SEQ ID NO: 3138225 - RNA, 19 nt, Human
ucugaggaauucuguauag

SEQ ID NO: 3138226 - RNA, 19 nt, Human
ucuuuaaaaaaaaaauugg

SEQ ID NO: 3138227 - RNA, 18 nt, Human
ucuuuaaaaaaaaaauug

SEQ ID NO: 3138228 - RNA, 19 nt, Human
ucuugucucagauuuuauu

SEQ ID NO: 3138229 - RNA, 11 nt, Human
ucuugucuccc

SEQ ID NO: 3138230 - RNA, 12 nt, Human
ucuugucucccc

SEQ ID NO: 3138231 - RNA, 13 nt, Human
ucuugucuccccu

SEQ ID NO: 3138232 - RNA, 15 nt, Human
ucuugucuccccugu

SEQ ID NO: 3138233 - RNA, 16 nt, Human
ucuugucuccccuguu

SEQ ID NO: 3138234 - RNA, 17 nt, Human
ucuugucucagauuuua

SEQ ID NO: 3138235 - RNA, 18 nt, Human
uacagaaucuaacuggug

SEQ ID NO: 3138236 - RNA, 12 nt, Human
uaauuuuggaau

SEQ ID NO: 3138237 - RNA, 13 nt, Human
uaauuuuggaauu

SEQ ID NO: 3138238 - RNA, 18 nt, Human
uacaauuuuguuucugua

SEQ ID NO: 3138239 - RNA, 19 nt, Human
uacaauuuuguuucuguac

SEQ ID NO: 3138240 - RNA, 21 nt, Human
uacaauuuuguuucuguacuu

SEQ ID NO: 3138241 - RNA, 14 nt, Human
uaguuuauaaaaga

SEQ ID NO: 3138242 - RNA, 18 nt, Human
uauaugcuauuucuauau

SEQ ID NO: 3138243 - RNA, 16 nt, Human
uauaugcuauuucuau

SEQ ID NO: 3138244 - RNA, 18 nt, Human
uauauuuuuauauuuacu

SEQ ID NO: 3138245 - RNA, 17 nt, Human
uauccuuaugccacccc

SEQ ID NO: 3138246 - RNA, 22 nt, Human
uauccuuaugccacccccgcug

SEQ ID NO: 3138247 - RNA, 19 nt, Human
uauauuuuuauauuuacua

SEQ ID NO: 3138248 - RNA, 12 nt, Human
uagcugcuguca

SEQ ID NO: 3138249 - RNA, 17 nt, Human
uagcugcugucacauuu

SEQ ID NO: 3138250 - RNA, 15 nt, Human
uagagaguguugaaa

SEQ ID NO: 3138251 - RNA, 14 nt, Human
uagagaguguugaa

SEQ ID NO: 3138252 - RNA, 13 nt, Human
uagacuggugacu

SEQ ID NO: 3138253 - RNA, 14 nt, Human
uagacuggugacug

SEQ ID NO: 3138254 - RNA, 17 nt, Human
uagacuggugacugauu

SEQ ID NO: 3138255 - RNA, 22 nt, Human
uaauaaccaaaugcaaugugaa

SEQ ID NO: 3138256 - RNA, 20 nt, Human
uaauaaggaaaaguuuaaua

SEQ ID NO: 3138257 - RNA, 18 nt, Human
uaauaaggaaaaguuuaa

SEQ ID NO: 3138258 - RNA, 22 nt, Human
uaauaauuauaugcuauuucua

SEQ ID NO: 3138259 - RNA, 23 nt, Human
uaauaauuauaugcuauuucuau

SEQ ID NO: 3138260 - RNA, 15 nt, Human
uaauaauuauaugcu

SEQ ID NO: 3138261 - RNA, 16 nt, Human
uaauaauuauaugcua

SEQ ID NO: 3138262 - RNA, 19 nt, Human
uaauaauuauaugcuauuu

SEQ ID NO: 3138263 - RNA, 20 nt, Human
uaauaauuauaugcuauuuc

SEQ ID NO: 3138264 - RNA, 12 nt, Human
uaauauuaaagc

SEQ ID NO: 3138265 - RNA, 13 nt, Human
uaauauuaaagcc

SEQ ID NO: 3138266 - RNA, 14 nt, Human
uaauauuaaagcca

SEQ ID NO: 3138267 - RNA, 18 nt, Human
uaauuaacauguuaaacc

SEQ ID NO: 3138268 - RNA, 19 nt, Human
uaauuaacauguuaaacca

SEQ ID NO: 3138269 - RNA, 12 nt, Human
uaauuaacaugu

SEQ ID NO: 3138270 - RNA, 14 nt, Human
uaauuaacauguua

SEQ ID NO: 3138271 - RNA, 15 nt, Human
uaauuaacauguuaa

SEQ ID NO: 3138272 - RNA, 17 nt, Human
uaauuaacauguuaaac

SEQ ID NO: 3138273 - RNA, 18 nt, Human
uaagccacugccucuccc

SEQ ID NO: 3138274 - RNA, 19 nt, Human
uaagccacugccucucccu

SEQ ID NO: 3138275 - RNA, 23 nt, Human
uaagccacugccucucccucugg

SEQ ID NO: 3138276 - RNA, 23 nt, Human
uaagcauauauuuuuauauuuac

SEQ ID NO: 3138277 - RNA, 21 nt, Human
uaagcauauauuuuuauauuu

SEQ ID NO: 3138278 - RNA, 22 nt, Human
uaagcauauauuuuuauauuua

SEQ ID NO: 3138279 - RNA, 19 nt, Human
uaagcauauauuuuuauau

SEQ ID NO: 3138280 - RNA, 16 nt, Human
uaagcauauauuuuua

SEQ ID NO: 3138281 - RNA, 16 nt, Human
uaaaucccauuauuca

SEQ ID NO: 3138282 - RNA, 17 nt, Human
uaaaucccauuauucaa

SEQ ID NO: 3138283 - RNA, 18 nt, Human
uaaauccauuuggaaauc

SEQ ID NO: 3138284 - RNA, 19 nt, Human
uaaauccauuuggaaaucu

SEQ ID NO: 3138285 - RNA, 22 nt, Human
uaaauccauuuggaaaucuuua

SEQ ID NO: 3138286 - RNA, 23 nt, Human
uaaauccauuuggaaaucuuuaa

SEQ ID NO: 3138287 - RNA, 16 nt, Human
uaacauguuaaaccau

SEQ ID NO: 3138288 - RNA, 17 nt, Human
uaacauguuaaaccaug

SEQ ID NO: 3138289 - RNA, 14 nt, Human
uaaccaagaggcug

SEQ ID NO: 3138290 - RNA, 15 nt, Human
uaaccaagaggcugg

SEQ ID NO: 3138291 - RNA, 16 nt, Human
uaaccaagaggcuggu

SEQ ID NO: 3138292 - RNA, 18 nt, Human
uaacauguuaaaccaugg

SEQ ID NO: 3138293 - RNA, 14 nt, Human
guuuagucuugucu

SEQ ID NO: 3138294 - RNA, 23 nt, Human
guuugugcugguguaugugugaa

SEQ ID NO: 3138295 - RNA, 12 nt, Human
guuuguuuaguc

SEQ ID NO: 3138296 - RNA, 14 nt, Human
uaaauccauuugga

SEQ ID NO: 3138297 - RNA, 15 nt, Human
uaaauccauuuggaa

SEQ ID NO: 3138298 - RNA, 16 nt, Human
uaaauccauuuggaaa

SEQ ID NO: 3138299 - RNA, 13 nt, Human
uaaaguugaauuu

SEQ ID NO: 3138300 - RNA, 14 nt, Human
uaaaguugaauuua

SEQ ID NO: 3138301 - RNA, 15 nt, Human
uaaaguugaauuuau

SEQ ID NO: 3138302 - RNA, 17 nt, Human
uaaaguugaauuuauug

SEQ ID NO: 3138303 - RNA, 19 nt, Human
uaaaguugaauuuauuggc

SEQ ID NO: 3138304 - RNA, 21 nt, Human
uaaaguugaauuuauuggcuu

SEQ ID NO: 3138305 - RNA, 23 nt, Human
uaaaguugaauuuauuggcuuuu

SEQ ID NO: 3138306 - RNA, 14 nt, Human
uaaacuuuucugau

SEQ ID NO: 3138307 - RNA, 15 nt, Human
uaaacuuuucugaua

SEQ ID NO: 3138308 - RNA, 13 nt, Human
uaaacuuuucuga

SEQ ID NO: 3138309 - RNA, 17 nt, Human
ugcgugcccggggcagc

SEQ ID NO: 3138310 - RNA, 15 nt, Human
ugcugaguuugugcu

SEQ ID NO: 3138311 - RNA, 17 nt, Human
ugcugaguuugugcugg

SEQ ID NO: 3138312 - RNA, 21 nt, Human
ugccuaaggacuucuuuaauu

SEQ ID NO: 3138313 - RNA, 23 nt, Human
ugccuaaggacuucuuuaauuuu

SEQ ID NO: 3138314 - RNA, 22 nt, Human
ugcacggugaauggcuuuguau

SEQ ID NO: 3138315 - RNA, 23 nt, Human
ugcacggugaauggcuuuguaua

SEQ ID NO: 3138316 - RNA, 19 nt, Human
ugcacggugaauggcuuug

SEQ ID NO: 3138317 - RNA, 18 nt, Human
ugccacccccgcuggagg

SEQ ID NO: 3138318 - RNA, 19 nt, Human
ugccacccccgcuggagga

SEQ ID NO: 3138319 - RNA, 23 nt, Human
ugccacccccgcuggaggaugug

SEQ ID NO: 3138320 - RNA, 17 nt, Human
ugggcgccgugcugggc

SEQ ID NO: 3138321 - RNA, 18 nt, Human
ugggcgccgugcugggca

SEQ ID NO: 3138322 - RNA, 19 nt, Human
ugggcgccgugcugggcag

SEQ ID NO: 3138323 - RNA, 20 nt, Human
ugggcgccgugcugggcagc

SEQ ID NO: 3138324 - RNA, 23 nt, Human
ugggcgccgugcugggcagcccg

SEQ ID NO: 3138325 - RNA, 20 nt, Human
ugggcgccccccccucccca

SEQ ID NO: 3138326 - RNA, 15 nt, Human
uggcuguacccagga

SEQ ID NO: 3138327 - RNA, 14 nt, Human
uggcuuuguauaga

SEQ ID NO: 3138328 - RNA, 22 nt, Human
uggcuuuguauagaaccucuuu

SEQ ID NO: 3138329 - RNA, 18 nt, Human
uggaggcggugcggcagg

SEQ ID NO: 3138330 - RNA, 22 nt, Human
uggaggcggugcggcagggaag

SEQ ID NO: 3138331 - RNA, 20 nt, Human
uggauaauaaggaaaaguuu

SEQ ID NO: 3138332 - RNA, 15 nt, Human
uggcauaacauaaau

SEQ ID NO: 3138333 - RNA, 12 nt, Human
ugcuuucagaua

SEQ ID NO: 3138334 - RNA, 16 nt, Human
ugcuuucagauacugg

SEQ ID NO: 3138335 - RNA, 17 nt, Human
ugcuuucagauacugga

SEQ ID NO: 3138336 - RNA, 20 nt, Human
ugcuuucagauacuggauug

SEQ ID NO: 3138337 - RNA, 21 nt, Human
ugcuuucagauacuggauugu

SEQ ID NO: 3138338 - RNA, 16 nt, Human
uguauagaaccucuuu

SEQ ID NO: 3138339 - RNA, 13 nt, Human
uguacucaauuuu

SEQ ID NO: 3138340 - RNA, 14 nt, Human
ugucccauucccug

SEQ ID NO: 3138341 - RNA, 15 nt, Human
ugucccauucccugg

SEQ ID NO: 3138342 - RNA, 16 nt, Human
ugucccauucccuggg

SEQ ID NO: 3138343 - RNA, 17 nt, Human
ugucccauucccuggga

SEQ ID NO: 3138344 - RNA, 18 nt, Human
ugucccauucccugggau

SEQ ID NO: 3138345 - RNA, 14 nt, Human
ugugcgcuaaacuu

SEQ ID NO: 3138346 - RNA, 23 nt, Human
ugugcgcuaaacuuuucugauag

SEQ ID NO: 3138347 - RNA, 19 nt, Human
ugugcgcuaaacuuuucug

SEQ ID NO: 3138348 - RNA, 22 nt, Human
ugugcgcuaaacuuuucugaua

SEQ ID NO: 3138349 - RNA, 21 nt, Human
uguuuguuuagucuugucuca

SEQ ID NO: 3138350 - RNA, 12 nt, Human
uguuuguuuagu

SEQ ID NO: 3138351 - RNA, 12 nt, Human
uuaacauguuaa

SEQ ID NO: 3138352 - RNA, 18 nt, Human
uuaacauguuaaaccaug

SEQ ID NO: 3138353 - RNA, 19 nt, Human
uuaacauguuaaaccaugg

SEQ ID NO: 3138354 - RNA, 18 nt, Human
uuaauaauuauaugcuau

SEQ ID NO: 3138355 - RNA, 20 nt, Human
uuaauaauuauaugcuauuu

SEQ ID NO: 3138356 - RNA, 23 nt, Human
uuaauaauuauaugcuauuucua

SEQ ID NO: 3138357 - RNA, 20 nt, Human
uguugaaacggaugauuucu

SEQ ID NO: 3138358 - RNA, 23 nt, Human
uguugaaacggaugauuucuaug

SEQ ID NO: 3138359 - RNA, 21 nt, Human
uguugaaacggaugauuucua

SEQ ID NO: 3138360 - RNA, 22 nt, Human
uguugaaacggaugauuucuau

SEQ ID NO: 3138361 - RNA, 14 nt, Human
uguuguuuguuuag

SEQ ID NO: 3138362 - RNA, 17 nt, Human
ugugugaagugagugag

SEQ ID NO: 3138363 - RNA, 14 nt, Human
uguguguaugcugc

SEQ ID NO: 3138364 - RNA, 16 nt, Human
uguguguaugcugcuu

SEQ ID NO: 3138365 - RNA, 17 nt, Human
uguguguaugcugcuuu

SEQ ID NO: 3138366 - RNA, 16 nt, Human
uguuagaucuaguuca

SEQ ID NO: 3138367 - RNA, 23 nt, Human
uguuaaaccaugggauaaaugcc

SEQ ID NO: 3138368 - RNA, 20 nt, Human
uguuaaaccaugggauaaau

SEQ ID NO: 3138369 - RNA, 21 nt, Human
uguuaaaccaugggauaaaug

SEQ ID NO: 3138370 - RNA, 18 nt, Human
uguuaaaccaugggauaa

SEQ ID NO: 3138371 - RNA, 16 nt, Human
uguuaaaccaugggau

SEQ ID NO: 3138372 - RNA, 20 nt, Human
uugaaacggaugauuucuau

SEQ ID NO: 3138373 - RNA, 22 nt, Human
uugaaacggaugauuucuaugc

SEQ ID NO: 3138374 - RNA, 21 nt, Human
uugaaacggaugauuucuaug

SEQ ID NO: 3138375 - RNA, 22 nt, Human
uuguacaaaguauuaagcauau

SEQ ID NO: 3138376 - RNA, 17 nt, Human
uuggcaucucuguccca

SEQ ID NO: 3138377 - RNA, 15 nt, Human
uuggcuuuucugauc

SEQ ID NO: 3138378 - RNA, 19 nt, Human
uuggcuuuucugauccagu

SEQ ID NO: 3138379 - RNA, 22 nt, Human
uuggcuuuucugauccaguuuu

SEQ ID NO: 3138380 - RNA, 21 nt, Human
uuggaccaaaaaccaguauug

SEQ ID NO: 3138381 - RNA, 15 nt, Human
uuggaaaucuuuaaa

SEQ ID NO: 3138382 - RNA, 12 nt, Human
uuggaaaucuuu

SEQ ID NO: 3138383 - RNA, 20 nt, Human
uugcuggggccgaaagaaca

SEQ ID NO: 3138384 - RNA, 16 nt, Human
uugcugcccugcccca

SEQ ID NO: 3138385 - RNA, 18 nt, Human
uugcgugcccggggcagc

SEQ ID NO: 3138386 - RNA, 15 nt, Human
uuacuaaaauggacu

SEQ ID NO: 3138387 - RNA, 18 nt, Human
uuacuaaaauggacugug

SEQ ID NO: 3138388 - RNA, 16 nt, Human
uuacuaaaauggacug

SEQ ID NO: 3138389 - RNA, 17 nt, Human
uuacuaaaauggacugu

SEQ ID NO: 3138390 - RNA, 11 nt, Human
uucacugauuu

SEQ ID NO: 3138391 - RNA, 18 nt, Human
uucagcugcauacaguuu

SEQ ID NO: 3138392 - RNA, 15 nt, Human
uucuauauuuucauu

SEQ ID NO: 3138393 - RNA, 16 nt, Human
uucuauauuuucauuc

SEQ ID NO: 3138394 - RNA, 18 nt, Human
uucuauauuuucauucuc

SEQ ID NO: 3138395 - RNA, 21 nt, Human
uucuauauuuucauucuccua

SEQ ID NO: 3138396 - RNA, 14 nt, Human
uucuauauguuuaa

SEQ ID NO: 3138397 - RNA, 11 nt, Human
uucuauauuuu

SEQ ID NO: 3138398 - RNA, 14 nt, Human
uucuauauuuucau

SEQ ID NO: 3138399 - RNA, 17 nt, Human
uucuaugcugaguuugu

SEQ ID NO: 3138400 - RNA, 17 nt, Human
uuuauuggcuuuucuga

SEQ ID NO: 3138401 - RNA, 21 nt, Human
uuuauuggcuuuucugaucca

SEQ ID NO: 3138402 - RNA, 13 nt, Human
uuuaugauccagc

SEQ ID NO: 3138403 - RNA, 20 nt, Human
uuucauuauuuuauuaugaa

SEQ ID NO: 3138404 - RNA, 14 nt, Human
uuucucuuucguua

SEQ ID NO: 3138405 - RNA, 15 nt, Human
uuucuaaccaagagg

SEQ ID NO: 3138406 - RNA, 19 nt, Human
uuucuaaccaagaggcugg

SEQ ID NO: 3138407 - RNA, 20 nt, Human
uuucuaaccaagaggcuggu

SEQ ID NO: 3138408 - RNA, 15 nt, Human
uuuuaugauccagca

SEQ ID NO: 3138409 - RNA, 13 nt, Human
uuuuaugauccag

SEQ ID NO: 3138410 - RNA, 19 nt, Human
uuuguuguuuguuuagucu

SEQ ID NO: 3138411 - RNA, 12 nt, Human
uuuguuguuugu

SEQ ID NO: 3138412 - RNA, 14 nt, Human
uuuguuguuuguuu

SEQ ID NO: 3138413 - RNA, 12 nt, Human
uuuguguuagag

SEQ ID NO: 3138414 - RNA, 11 nt, Human
uuuguauagaa

SEQ ID NO: 3138415 - RNA, 16 nt, Human
uuuggaaaucuuuaaa

SEQ ID NO: 3138416 - RNA, 15 nt, Human
uuuggaaaucuuuaa

SEQ ID NO: 3138417 - RNA, 20 nt, Human
ccaggaauggagccugcacg

SEQ ID NO: 3138418 - RNA, 23 nt, Human
cccaaaagaaacugacaugcccu

SEQ ID NO: 3138419 - RNA, 22 nt, Human
ccaugcuuaacauacccgccua

SEQ ID NO: 3138420 - RNA, 13 nt, Human
ccaucucccugcu

SEQ ID NO: 3138421 - RNA, 16 nt, Human
ccaucucccugcuuug

SEQ ID NO: 3138422 - RNA, 19 nt, Human
ccaucaauaaaaaauuaug

SEQ ID NO: 3138423 - RNA, 20 nt, Human
ccaucaauaaaaaauuauga

SEQ ID NO: 3138424 - RNA, 13 nt, Human
ccaugcagguggu

SEQ ID NO: 3138425 - RNA, 23 nt, Human
ccaugcagguggugucgggcccu

SEQ ID NO: 3138426 - RNA, 15 nt, Human
cccaaguuggggguc

SEQ ID NO: 3138427 - RNA, 13 nt, Human
cccacaccuccuc

SEQ ID NO: 3138428 - RNA, 14 nt, Human
cccacaccuccucu

SEQ ID NO: 3138429 - RNA, 17 nt, Human
cccacaccuccucucac

SEQ ID NO: 3138430 - RNA, 18 nt, Human
cccacaccuccucucacu

SEQ ID NO: 3138431 - RNA, 20 nt, Human
ccccaacucgggcucccggg

SEQ ID NO: 3138432 - RNA, 12 nt, Human
ccaagaggcugg

SEQ ID NO: 3138433 - RNA, 13 nt, Human
ccaagaggcuggu

SEQ ID NO: 3138434 - RNA, 14 nt, Human
ccaagaggcugguu

SEQ ID NO: 3138435 - RNA, 23 nt, Human
ccaagaggcugguuuuggcaucu

SEQ ID NO: 3138436 - RNA, 12 nt, Human
cauuuaauaauu

SEQ ID NO: 3138437 - RNA, 14 nt, Human
cauuuaauaauuau

SEQ ID NO: 3138438 - RNA, 15 nt, Human
cauuuaauaauuaua

SEQ ID NO: 3138439 - RNA, 16 nt, Human
cauuuaauaauuauau

SEQ ID NO: 3138440 - RNA, 17 nt, Human
cauuuaauaauuauaug

SEQ ID NO: 3138441 - RNA, 19 nt, Human
cauuuaauaauuauaugcu

SEQ ID NO: 3138442 - RNA, 23 nt, Human
cauuuaauaauuauaugcuauuu

SEQ ID NO: 3138443 - RNA, 17 nt, Human
ccccguguuccccucuu

SEQ ID NO: 3138444 - RNA, 13 nt, Human
ccccuccccaugc

SEQ ID NO: 3138445 - RNA, 21 nt, Human
ccccuccccaugcagguggug

SEQ ID NO: 3138446 - RNA, 17 nt, Human
ccccccacacuucccug

SEQ ID NO: 3138447 - RNA, 13 nt, Human
cccccgcuggagg

SEQ ID NO: 3138448 - RNA, 17 nt, Human
ccgggcaaaugccaggg

SEQ ID NO: 3138449 - RNA, 18 nt, Human
ccgggcaaaugccagggc

SEQ ID NO: 3138450 - RNA, 19 nt, Human
ccgggcaaaugccagggcc

SEQ ID NO: 3138451 - RNA, 21 nt, Human
ccgggcaaaugccagggcccg

SEQ ID NO: 3138452 - RNA, 13 nt, Human
ccgugcuaaggac

SEQ ID NO: 3138453 - RNA, 21 nt, Human
ccucacccacccuuuuuuaaa

SEQ ID NO: 3138454 - RNA, 13 nt, Human
ccugauuaaagaa

SEQ ID NO: 3138455 - RNA, 12 nt, Human
ccugauuaaaga

SEQ ID NO: 3138456 - RNA, 12 nt, Human
ccuccucccaug

SEQ ID NO: 3138457 - RNA, 13 nt, Human
ccuccucccaugu

SEQ ID NO: 3138458 - RNA, 14 nt, Human
ccuccucccauguc

SEQ ID NO: 3138459 - RNA, 18 nt, Human
ccuccucccaugucacug

SEQ ID NO: 3138460 - RNA, 22 nt, Human
ccuccucccaugucacugcaga

SEQ ID NO: 3138461 - RNA, 16 nt, Human
ccuuugcuugaaagaa

SEQ ID NO: 3138462 - RNA, 16 nt, Human
ccuuucucuuucguua

SEQ ID NO: 3138463 - RNA, 21 nt, Human
ccuuggcccccuuucccgggc

SEQ ID NO: 3138464 - RNA, 13 nt, Human
cgcguugaaauug

SEQ ID NO: 3138465 - RNA, 17 nt, Human
cgcguugaaauuguaau

SEQ ID NO: 3138466 - RNA, 21 nt, Human
cgcguugaaauuguaauuaua

SEQ ID NO: 3138467 - RNA, 15 nt, Human
cgcuaggcucgccuu

SEQ ID NO: 3138468 - RNA, 18 nt, Human
cgcuaggcucgccuuccc

SEQ ID NO: 3138469 - RNA, 21 nt, Human
cgcuaggcucgccuucccucc

SEQ ID NO: 3138470 - RNA, 22 nt, Human
cgcuaggcucgccuucccuccu

SEQ ID NO: 3138471 - RNA, 23 nt, Human
cgcuaggcucgccuucccuccug

SEQ ID NO: 3138472 - RNA, 18 nt, Human
cgccccccacacuucccu

SEQ ID NO: 3138473 - RNA, 20 nt, Human
cgccccccacacuucccugg

SEQ ID NO: 3138474 - RNA, 21 nt, Human
cgccccccacacuucccuggc

SEQ ID NO: 3138475 - RNA, 17 nt, Human
cgccccccccuccccau

SEQ ID NO: 3138476 - RNA, 13 nt, Human
cggaugauuucua

SEQ ID NO: 3138477 - RNA, 14 nt, Human
cggaugauuucuau

SEQ ID NO: 3138478 - RNA, 18 nt, Human
cggggcagcagcagcccu

SEQ ID NO: 3138479 - RNA, 20 nt, Human
cggggcagcagcagcccugc

SEQ ID NO: 3138480 - RNA, 21 nt, Human
cggggcagcagcagcccugcc

SEQ ID NO: 3138481 - RNA, 17 nt, Human
cggggccgacauugucu

SEQ ID NO: 3138482 - RNA, 19 nt, Human
cguauguggcaaaauguua

SEQ ID NO: 3138483 - RNA, 14 nt, Human
cgucucccccgugu

SEQ ID NO: 3138484 - RNA, 21 nt, Human
cgucucccccguguuccccuc

SEQ ID NO: 3138485 - RNA, 22 nt, Human
cgucucccccguguuccccucu

SEQ ID NO: 3138486 - RNA, 10 nt, Human
cgucuccccc

SEQ ID NO: 3138487 - RNA, 14 nt, Human
cgugcccggggcag

SEQ ID NO: 3138488 - RNA, 16 nt, Human
cgugcccggggcagca

SEQ ID NO: 3138489 - RNA, 22 nt, Human
cguucauggaacgcguugaaau

SEQ ID NO: 3138490 - RNA, 21 nt, Human
cguucauggaacgcguugaaa

SEQ ID NO: 3138491 - RNA, 23 nt, Human
cguucauggaacgcguugaaauu

SEQ ID NO: 3138492 - RNA, 22 nt, Human
cguuccgggcaaaugccagggc

SEQ ID NO: 3138493 - RNA, 13 nt, Human
cguugaaauugua

SEQ ID NO: 3138494 - RNA, 18 nt, Human
ccugcuuugcgugcccgg

SEQ ID NO: 3138495 - RNA, 19 nt, Human
ccugcuuugcgugcccggg

SEQ ID NO: 3138496 - RNA, 20 nt, Human
ccugcuuugcgugcccgggg

SEQ ID NO: 3138497 - RNA, 21 nt, Human
ccugcuuucagauacuggauu

SEQ ID NO: 3138498 - RNA, 15 nt, Human
ccugcuuucagauac

SEQ ID NO: 3138499 - RNA, 16 nt, Human
ccugcuuucagauacu

SEQ ID NO: 3138500 - RNA, 15 nt, Human
ccuggcggccccaac

SEQ ID NO: 3138501 - RNA, 18 nt, Human
ccuggcggccccaacucg

SEQ ID NO: 3138502 - RNA, 15 nt, Human
ccugggaucuggugg

SEQ ID NO: 3138503 - RNA, 20 nt, Human
ccugggaucugguggucagc

SEQ ID NO: 3138504 - RNA, 21 nt, Human
ccugggaucugguggucagcc

SEQ ID NO: 3138505 - RNA, 23 nt, Human
ccugggaucugguggucagcccu

SEQ ID NO: 3138506 - RNA, 15 nt, Human
cugauucuucagcaa

SEQ ID NO: 3138507 - RNA, 18 nt, Human
cugcagauugagaccuac

SEQ ID NO: 3138508 - RNA, 20 nt, Human
cugauccaguuuuguuugga

SEQ ID NO: 3138509 - RNA, 20 nt, Human
cugauagaggaagccugauu

SEQ ID NO: 3138510 - RNA, 20 nt, Human
cugccuaaggacuucuuuaa

SEQ ID NO: 3138511 - RNA, 21 nt, Human
cugccuaaggacuucuuuaau

SEQ ID NO: 3138512 - RNA, 22 nt, Human
cugccuaaggacuucuuuaauu

SEQ ID NO: 3138513 - RNA, 19 nt, Human
cugccuaaggacuucuuua

SEQ ID NO: 3138514 - RNA, 15 nt, Human
cugcuccguggagga

SEQ ID NO: 3138515 - RNA, 23 nt, Human
cugcuccguggaggagguuggga

SEQ ID NO: 3138516 - RNA, 12 nt, Human
cugguggucagc

SEQ ID NO: 3138517 - RNA, 15 nt, Human
cugguggucagcccu

SEQ ID NO: 3138518 - RNA, 16 nt, Human
cugguggucagcccua

SEQ ID NO: 3138519 - RNA, 19 nt, Human
cugguggucagcccuagga

SEQ ID NO: 3138520 - RNA, 16 nt, Human
cuggaggcggugcggc

SEQ ID NO: 3138521 - RNA, 17 nt, Human
cuggaggcggugcggca

SEQ ID NO: 3138522 - RNA, 18 nt, Human
cuggaggcggugcggcag

SEQ ID NO: 3138523 - RNA, 19 nt, Human
cuggaggcggugcggcagg

SEQ ID NO: 3138524 - RNA, 17 nt, Human
cuggagggaagagugga

SEQ ID NO: 3138525 - RNA, 21 nt, Human
cuggagggaagaguggaggug

SEQ ID NO: 3138526 - RNA, 22 nt, Human
cuggagggaagaguggaggugg

SEQ ID NO: 3138527 - RNA, 23 nt, Human
cuggagggaagaguggaggugga

SEQ ID NO: 3138528 - RNA, 17 nt, Human
cuggaggaugugggcag

SEQ ID NO: 3138529 - RNA, 18 nt, Human
cuggaggaugugggcagc

SEQ ID NO: 3138530 - RNA, 19 nt, Human
cuggaggaugugggcagcu

SEQ ID NO: 3138531 - RNA, 22 nt, Human
cuggcaaaauaguucugcaggu

SEQ ID NO: 3138532 - RNA, 23 nt, Human
cuggcaaaauaguucugcagguu

SEQ ID NO: 3138533 - RNA, 19 nt, Human
cuggauuguacuuugugcu

SEQ ID NO: 3138534 - RNA, 20 nt, Human
cuggauuguacuuugugcug

SEQ ID NO: 3138535 - RNA, 18 nt, Human
cugcuuucagauacugga

SEQ ID NO: 3138536 - RNA, 21 nt, Human
cugcuuucagauacuggauug

SEQ ID NO: 3138537 - RNA, 17 nt, Human
cugcuuuggucuugccc

SEQ ID NO: 3138538 - RNA, 16 nt, Human
cugcuuucagauacug

SEQ ID NO: 3138539 - RNA, 18 nt, Human
cuccuaucaccugucuug

SEQ ID NO: 3138540 - RNA, 14 nt, Human
cuccucucacuccc

SEQ ID NO: 3138541 - RNA, 15 nt, Human
cuccucucacucccc

SEQ ID NO: 3138542 - RNA, 18 nt, Human
cuccucucacuccccagc

SEQ ID NO: 3138543 - RNA, 22 nt, Human
cuccucucacuccccagccugg

SEQ ID NO: 3138544 - RNA, 13 nt, Human
cucccuucccucc

SEQ ID NO: 3138545 - RNA, 14 nt, Human
cucccuucccuccu

SEQ ID NO: 3138546 - RNA, 15 nt, Human
cucccuucccuccuc

SEQ ID NO: 3138547 - RNA, 16 nt, Human
cucccuucccuccucc

SEQ ID NO: 3138548 - RNA, 13 nt, Human
cucccuucucccu

SEQ ID NO: 3138549 - RNA, 14 nt, Human
cucccuucucccug

SEQ ID NO: 3138550 - RNA, 15 nt, Human
cucccuucucccugg

SEQ ID NO: 3138551 - RNA, 16 nt, Human
cucccuucucccugga

SEQ ID NO: 3138552 - RNA, 17 nt, Human
cucccuucucccuggau

SEQ ID NO: 3138553 - RNA, 12 nt, Human
cucuugucuccc

SEQ ID NO: 3138554 - RNA, 13 nt, Human
cucuugucucccc

SEQ ID NO: 3138555 - RNA, 14 nt, Human
cucuugucuccccu

SEQ ID NO: 3138556 - RNA, 16 nt, Human
cucuugucuccccugu

SEQ ID NO: 3138557 - RNA, 20 nt, Human
cucuugucuccccuguuccc

SEQ ID NO: 3138558 - RNA, 15 nt, Human
cugaagucagaucug

SEQ ID NO: 3138559 - RNA, 16 nt, Human
cugaagucagaucugc

SEQ ID NO: 3138560 - RNA, 14 nt, Human
cugaagucagaucu

SEQ ID NO: 3138561 - RNA, 13 nt, Human
cucuccauuuaau

SEQ ID NO: 3138562 - RNA, 23 nt, Human
cuuaugccacccccgcuggagga

SEQ ID NO: 3138563 - RNA, 14 nt, Human
cuuaagccacugcc

SEQ ID NO: 3138564 - RNA, 17 nt, Human
cuuaagccacugccucu

SEQ ID NO: 3138565 - RNA, 19 nt, Human
cuuaagccacugccucucc

SEQ ID NO: 3138566 - RNA, 20 nt, Human
cuuaagccacugccucuccc

SEQ ID NO: 3138567 - RNA, 21 nt, Human
cuuaagccacugccucucccu

SEQ ID NO: 3138568 - RNA, 22 nt, Human
cuuaagccacugccucucccuc

SEQ ID NO: 3138569 - RNA, 11 nt, Human
cuucccuccuc

SEQ ID NO: 3138570 - RNA, 12 nt, Human
cuucccuccucc

SEQ ID NO: 3138571 - RNA, 13 nt, Human
cuucccuccuccc

SEQ ID NO: 3138572 - RNA, 14 nt, Human
cuucccuccuccca

SEQ ID NO: 3138573 - RNA, 16 nt, Human
cuucccuccucccaug

SEQ ID NO: 3138574 - RNA, 17 nt, Human
cuucccuccucccaugu

SEQ ID NO: 3138575 - RNA, 18 nt, Human
cuucccuccucccauguc

SEQ ID NO: 3138576 - RNA, 19 nt, Human
cuucccuccucccauguca

SEQ ID NO: 3138577 - RNA, 13 nt, Human
cuucccuccugcu

SEQ ID NO: 3138578 - RNA, 15 nt, Human
cuucccuccugcuuu

SEQ ID NO: 3138579 - RNA, 16 nt, Human
cuucccuccugcuuug

SEQ ID NO: 3138580 - RNA, 20 nt, Human
cuugggcgccgugcugggca

SEQ ID NO: 3138581 - RNA, 21 nt, Human
cuugggcgccgugcugggcag

SEQ ID NO: 3138582 - RNA, 22 nt, Human
cuugggcgccgugcugggcagc

SEQ ID NO: 3138583 - RNA, 23 nt, Human
cuugggcgccgugcugggcagcc

SEQ ID NO: 3138584 - RNA, 13 nt, Human
cuuguuagaucua

SEQ ID NO: 3138585 - RNA, 17 nt, Human
cuuuaaaaaaaaaauug

SEQ ID NO: 3138586 - RNA, 13 nt, Human
cuugcugcccugc

SEQ ID NO: 3138587 - RNA, 16 nt, Human
cuugcugcccugcccc

SEQ ID NO: 3138588 - RNA, 20 nt, Human
cuugcugcccugccccaagu

SEQ ID NO: 3138589 - RNA, 16 nt, Human
cuuuggauaauaagga

SEQ ID NO: 3138590 - RNA, 14 nt, Human
cuuuggauaauaag

SEQ ID NO: 3138591 - RNA, 14 nt, Human
cuuugcuugaaaga

SEQ ID NO: 3138592 - RNA, 13 nt, Human
cuuucugaaauaa

SEQ ID NO: 3138593 - RNA, 14 nt, Human
cuuuucugauccag

SEQ ID NO: 3138594 - RNA, 15 nt, Human
cuuuucugauccagu

SEQ ID NO: 3138595 - RNA, 14 nt, Human
cuuuucugauagag

SEQ ID NO: 3138596 - RNA, 11 nt, Human
cuuuucugauc

SEQ ID NO: 3138597 - RNA, 16 nt, Human
cuuuucugauccaguu

SEQ ID NO: 3138598 - RNA, 18 nt, Human
cuuuucugauccaguuuu

SEQ ID NO: 3138599 - RNA, 14 nt, Human
cuuuuucauuauuu

SEQ ID NO: 3138600 - RNA, 12 nt, Human
cuuuuucauuau

SEQ ID NO: 3138601 - RNA, 13 nt, Human
cuuuuucauuauu

SEQ ID NO: 3138602 - RNA, 15 nt, Human
cuuuuuuaaauaaau

SEQ ID NO: 3138603 - RNA, 22 nt, Human
gaauuuauuggcuuuucugauc

SEQ ID NO: 3138604 - RNA, 14 nt, Human
gaauuuauuggcuu

SEQ ID NO: 3138605 - RNA, 16 nt, Human
gaauuuauuggcuuuu

SEQ ID NO: 3138606 - RNA, 20 nt, Human
gaauuuauuggcuuuucuga

SEQ ID NO: 3138607 - RNA, 21 nt, Human
gaauuuauuggcuuuucugau

SEQ ID NO: 3138608 - RNA, 23 nt, Human
gaaugguccgugcuaaggacuug

SEQ ID NO: 3138609 - RNA, 20 nt, Human
gaaugguccgugcuaaggac

SEQ ID NO: 3138610 - RNA, 22 nt, Human
gaaugguccgugcuaaggacuu

SEQ ID NO: 3138611 - RNA, 21 nt, Human
gaauggcuuuguauagaaccu

SEQ ID NO: 3138612 - RNA, 20 nt, Human
gaagaggggugcagaggcug

SEQ ID NO: 3138613 - RNA, 17 nt, Human
gaaauuguaauuauauc

SEQ ID NO: 3138614 - RNA, 16 nt, Human
gacugauucuucagca

SEQ ID NO: 3138615 - RNA, 13 nt, Human
gacugauucuuca

SEQ ID NO: 3138616 - RNA, 22 nt, Human
gauaauaaggaaaaguuuaaua

SEQ ID NO: 3138617 - RNA, 20 nt, Human
gauaauaaggaaaaguuuaa

SEQ ID NO: 3138618 - RNA, 21 nt, Human
gauaauaaggaaaaguuuaau

SEQ ID NO: 3138619 - RNA, 17 nt, Human
gauaauuauugguaauu

SEQ ID NO: 3138620 - RNA, 15 nt, Human
gaucuaggagaggag

SEQ ID NO: 3138621 - RNA, 21 nt, Human
gaucuaggagaggagaaccag

SEQ ID NO: 3138622 - RNA, 17 nt, Human
gaucuaguucacucucc

SEQ ID NO: 3138623 - RNA, 14 nt, Human
gaucugguggucag

SEQ ID NO: 3138624 - RNA, 19 nt, Human
gaucugguggucagcccua

SEQ ID NO: 3138625 - RNA, 20 nt, Human
gaucugguggucagcccuag

SEQ ID NO: 3138626 - RNA, 22 nt, Human
gaucugguggucagcccuagga

SEQ ID NO: 3138627 - RNA, 14 nt, Human
gaucuaccuggagg

SEQ ID NO: 3138628 - RNA, 15 nt, Human
gaucuaccuggaggg

SEQ ID NO: 3138629 - RNA, 17 nt, Human
gaucuaccuggagggaa

SEQ ID NO: 3138630 - RNA, 14 nt, Human
gcaaaugccagggc

SEQ ID NO: 3138631 - RNA, 15 nt, Human
gcaaaugccagggcc

SEQ ID NO: 3138632 - RNA, 17 nt, Human
gcaaaugccagggcccg

SEQ ID NO: 3138633 - RNA, 18 nt, Human
gcaaaugccagggcccgc

SEQ ID NO: 3138634 - RNA, 16 nt, Human
gcauauauuuuuauau

SEQ ID NO: 3138635 - RNA, 14 nt, Human
gcauauauuuuuau

SEQ ID NO: 3138636 - RNA, 15 nt, Human
gcauauauuuuuaua

SEQ ID NO: 3138637 - RNA, 11 nt, Human
gcauauauuuu

SEQ ID NO: 3138638 - RNA, 20 nt, Human
gcuagacuggugacugauuc

SEQ ID NO: 3138639 - RNA, 22 nt, Human
gcuagacuggugacugauucuu

SEQ ID NO: 3138640 - RNA, 13 nt, Human
gcuagacugguga

SEQ ID NO: 3138641 - RNA, 15 nt, Human
gcuagacuggugacu

SEQ ID NO: 3138642 - RNA, 16 nt, Human
gcuagacuggugacug

SEQ ID NO: 3138643 - RNA, 19 nt, Human
gcuagacuggugacugauu

SEQ ID NO: 3138644 - RNA, 13 nt, Human
gcgcuugggcgcc

SEQ ID NO: 3138645 - RNA, 21 nt, Human
gcgcuugggcgccgugcuggg

SEQ ID NO: 3138646 - RNA, 22 nt, Human
gcgcuugggcgccgugcugggc

SEQ ID NO: 3138647 - RNA, 23 nt, Human
gcgcuugggcgccgugcugggca

SEQ ID NO: 3138648 - RNA, 11 nt, Human
gcgccacugcu

SEQ ID NO: 3138649 - RNA, 18 nt, Human
gcgccacugcuccgugga

SEQ ID NO: 3138650 - RNA, 19 nt, Human
gcgccacugcuccguggag

SEQ ID NO: 3138651 - RNA, 20 nt, Human
gccuuuuucauuauuuuauu

SEQ ID NO: 3138652 - RNA, 22 nt, Human
gccuuuuucauuauuuuauuau

SEQ ID NO: 3138653 - RNA, 12 nt, Human
gccuuuuucauu

SEQ ID NO: 3138654 - RNA, 16 nt, Human
gccuuuuucauuauuu

SEQ ID NO: 3138655 - RNA, 12 nt, Human
gccuaaggacuu

SEQ ID NO: 3138656 - RNA, 13 nt, Human
gccuaaggacuuc

SEQ ID NO: 3138657 - RNA, 14 nt, Human
gccuaaggacuucu

SEQ ID NO: 3138658 - RNA, 15 nt, Human
gccuaaggacuucuu

SEQ ID NO: 3138659 - RNA, 18 nt, Human
gccuaaggacuucuuuaa

SEQ ID NO: 3138660 - RNA, 15 nt, Human
gcccuucuugcugcc

SEQ ID NO: 3138661 - RNA, 16 nt, Human
gcccuucuugcugccc

SEQ ID NO: 3138662 - RNA, 23 nt, Human
gcccuucuugcugcccugcccca

SEQ ID NO: 3138663 - RNA, 13 nt, Human
gccagggcccgca

SEQ ID NO: 3138664 - RNA, 14 nt, Human
gccagggcuggaga

SEQ ID NO: 3138665 - RNA, 15 nt, Human
gccagggcuggagaa

SEQ ID NO: 3138666 - RNA, 13 nt, Human
gcccaucucccug

SEQ ID NO: 3138667 - RNA, 14 nt, Human
gcccaucucccugc

SEQ ID NO: 3138668 - RNA, 17 nt, Human
gcccaucucccugcuuu

SEQ ID NO: 3138669 - RNA, 18 nt, Human
gcccaucucccugcuuug

SEQ ID NO: 3138670 - RNA, 22 nt, Human
ggaagaggggugcagaggcugu

SEQ ID NO: 3138671 - RNA, 21 nt, Human
ggaacgcguugaaauuguaau

SEQ ID NO: 3138672 - RNA, 17 nt, Human
ggaacgcguugaaauug

SEQ ID NO: 3138673 - RNA, 16 nt, Human
ggaacgcguugaaauu

SEQ ID NO: 3138674 - RNA, 18 nt, Human
ggaaaaguuuaauauuaa

SEQ ID NO: 3138675 - RNA, 19 nt, Human
ggaaaaguuuaauauuaaa

SEQ ID NO: 3138676 - RNA, 22 nt, Human
gcuggugcccugcuuucagaua

SEQ ID NO: 3138677 - RNA, 24 nt, Human
gcuggugcccugcuuucagauacu

SEQ ID NO: 3138678 - RNA, 14 nt, Human
ggcagcagcagccc

SEQ ID NO: 3138679 - RNA, 15 nt, Human
ggcagcagcagcccu

SEQ ID NO: 3138680 - RNA, 16 nt, Human
ggcagcagcagcccug

SEQ ID NO: 3138681 - RNA, 17 nt, Human
ggcagcagcagcccugc

SEQ ID NO: 3138682 - RNA, 17 nt, Human
ggcccccuuucccgggc

SEQ ID NO: 3138683 - RNA, 18 nt, Human
ggcccccuuucccgggcu

SEQ ID NO: 3138684 - RNA, 19 nt, Human
ggcccccuuucccgggcug

SEQ ID NO: 3138685 - RNA, 15 nt, Human
ggaggaugugggcag

SEQ ID NO: 3138686 - RNA, 16 nt, Human
ggaggaugugggcagc

SEQ ID NO: 3138687 - RNA, 20 nt, Human
gguuaucugaagucagaucu

SEQ ID NO: 3138688 - RNA, 16 nt, Human
gguguaugugugaagu

SEQ ID NO: 3138689 - RNA, 16 nt, Human
gguggugucgggcccu

SEQ ID NO: 3138690 - RNA, 19 nt, Human
gguggugucgggcccuucu

SEQ ID NO: 3138691 - RNA, 14 nt, Human
gguggucagcccua

SEQ ID NO: 3138692 - RNA, 14 nt, Human
ggugacuuuggaua

SEQ ID NO: 3138693 - RNA, 18 nt, Human
ggugacuuuggauaauaa

SEQ ID NO: 3138694 - RNA, 21 nt, Human
ggugacuuuggauaauaagga

SEQ ID NO: 3138695 - RNA, 19 nt, Human
ggugacuuuggauaauaag

SEQ ID NO: 3138696 - RNA, 20 nt, Human
ggugacuuuggauaauaagg

SEQ ID NO: 3138697 - RNA, 17 nt, Human
ggucucgucuuccgucu

SEQ ID NO: 3138698 - RNA, 20 nt, Human
ggucucgucuuccgucuccc

SEQ ID NO: 3138699 - RNA, 22 nt, Human
ggucucgucuuccgucuccccc

SEQ ID NO: 3138700 - RNA, 14 nt, Human
gggugcagaggcug

SEQ ID NO: 3138701 - RNA, 15 nt, Human
gggugcagaggcugu

SEQ ID NO: 3138702 - RNA, 16 nt, Human
gggugcagaggcugug

SEQ ID NO: 3138703 - RNA, 11 nt, Human
ggggauucuua

SEQ ID NO: 3138704 - RNA, 15 nt, Human
ggggauucuuaaagu

SEQ ID NO: 3138705 - RNA, 12 nt, Human
gggcccuggagg

SEQ ID NO: 3138706 - RNA, 13 nt, Human
gggcccuggaggc

SEQ ID NO: 3138707 - RNA, 16 nt, Human
gggaucuaggagagga

SEQ ID NO: 3138708 - RNA, 13 nt, Human
ggcuuuucugauc

SEQ ID NO: 3138709 - RNA, 16 nt, Human
ggcuuuucugauccag

SEQ ID NO: 3138710 - RNA, 12 nt, Human
ggcuuuucugau

SEQ ID NO: 3138711 - RNA, 17 nt, Human
ggcuuuucugauccagu

SEQ ID NO: 3138712 - RNA, 15 nt, Human
cugaggaauucugua

SEQ ID NO: 3138713 - RNA, 16 nt, Human
cugaggaauucuguau

SEQ ID NO: 3138714 - RNA, 18 nt, Human
cugaggaauucuguauag

SEQ ID NO: 3138715 - RNA, 19 nt, Human
cugaggaauucuguauaga

SEQ ID NO: 3138716 - RNA, 13 nt, Human
cuccuuucucuuu

SEQ ID NO: 3138717 - RNA, 13 nt, Human
cucucccuucccu

SEQ ID NO: 3138718 - RNA, 14 nt, Human
cucucccuucccuc

SEQ ID NO: 3138719 - RNA, 15 nt, Human
cucucccuucccucc

SEQ ID NO: 3138720 - RNA, 16 nt, Human
cucucccuucccuccu

SEQ ID NO: 3138721 - RNA, 14 nt, Human
cucccucugguccc

SEQ ID NO: 3138722 - RNA, 15 nt, Human
cucccucugguccca

SEQ ID NO: 3138723 - RNA, 17 nt, Human
cuaggcucgccuucccu

SEQ ID NO: 3138724 - RNA, 18 nt, Human
cuaggcucgccuucccuc

SEQ ID NO: 3138725 - RNA, 20 nt, Human
cuaggcucgccuucccuccu

SEQ ID NO: 3138726 - RNA, 21 nt, Human
cuaggcucgccuucccuccug

SEQ ID NO: 3138727 - RNA, 22 nt, Human
cuagaccagugagcgcuugggc

SEQ ID NO: 3138728 - RNA, 19 nt, Human
cgcuggaggaugugggcag

SEQ ID NO: 3138729 - RNA, 20 nt, Human
cgcuggaggaugugggcagc

SEQ ID NO: 3138730 - RNA, 21 nt, Human
cgcuggaggaugugggcagcu

SEQ ID NO: 3138731 - RNA, 13 nt, Human
cgccuucccuccu

SEQ ID NO: 3138732 - RNA, 14 nt, Human
cgccuucccuccug

SEQ ID NO: 3138733 - RNA, 15 nt, Human
cgccuucccuccugc

SEQ ID NO: 3138734 - RNA, 19 nt, Human
cgccuucccuccugcuuug

SEQ ID NO: 3138735 - RNA, 15 nt, Human
cgguggugaggcagu

SEQ ID NO: 3138736 - RNA, 15 nt, Human
cuaaacuuuucugau

SEQ ID NO: 3138737 - RNA, 16 nt, Human
cuaaacuuuucugaua

SEQ ID NO: 3138738 - RNA, 14 nt, Human
ccucccuucucccu

SEQ ID NO: 3138739 - RNA, 15 nt, Human
ccucccuucucccug

SEQ ID NO: 3138740 - RNA, 16 nt, Human
ccucccuucucccugg

SEQ ID NO: 3138741 - RNA, 17 nt, Human
ccucccuucucccugga

SEQ ID NO: 3138742 - RNA, 18 nt, Human
ccucccuucucccuggau

SEQ ID NO: 3138743 - RNA, 13 nt, Human
cccuucucccugg

SEQ ID NO: 3138744 - RNA, 14 nt, Human
cccuucucccugga

SEQ ID NO: 3138745 - RNA, 15 nt, Human
cccuucucccuggau

SEQ ID NO: 3138746 - RNA, 14 nt, Human
ccgacauugucucc

SEQ ID NO: 3138747 - RNA, 15 nt, Human
ccgacauugucuccc

SEQ ID NO: 3138748 - RNA, 17 nt, Human
ccgacauugucucccgc

SEQ ID NO: 3138749 - RNA, 18 nt, Human
ccccucuugucuccccug

SEQ ID NO: 3138750 - RNA, 12 nt, Human
cccuccucccau

SEQ ID NO: 3138751 - RNA, 19 nt, Human
cccuccucccaugucacug

SEQ ID NO: 3138752 - RNA, 20 nt, Human
cccuccucccaugucacugc

SEQ ID NO: 3138753 - RNA, 13 nt, Human
cccuccugcuuug

SEQ ID NO: 3138754 - RNA, 13 nt, Human
cccccuuucccgg

SEQ ID NO: 3138755 - RNA, 14 nt, Human
cccccuuucccggg

SEQ ID NO: 3138756 - RNA, 15 nt, Human
cccccuuucccgggc

SEQ ID NO: 3138757 - RNA, 23 nt, Human
ccccaugcuuaacauacccgccu

SEQ ID NO: 3138758 - RNA, 15 nt, Human
cccaucacugcgcca

SEQ ID NO: 3138759 - RNA, 21 nt, Human
cccaucacugcgccacugcuc

SEQ ID NO: 3138760 - RNA, 22 nt, Human
cccaucacugcgccacugcucc

SEQ ID NO: 3138761 - RNA, 16 nt, Human
cccaacucgggcuccc

SEQ ID NO: 3138762 - RNA, 20 nt, Human
cccaacucgggcucccgggu

SEQ ID NO: 3138763 - RNA, 21 nt, Human
auuguaauuauaucugaggaa

SEQ ID NO: 3138764 - RNA, 16 nt, Human
auuguacaaaguauua

SEQ ID NO: 3138765 - RNA, 17 nt, Human
auuguacaaaguauuaa

SEQ ID NO: 3138766 - RNA, 19 nt, Human
auuguacaaaguauuaagc

SEQ ID NO: 3138767 - RNA, 16 nt, Human
auuguaauuauaucug

SEQ ID NO: 3138768 - RNA, 17 nt, Human
auuguaauuauaucuga

SEQ ID NO: 3138769 - RNA, 15 nt, Human
auuguaauuauaucu

SEQ ID NO: 3138770 - RNA, 15 nt, Human
auuucuauauuuuca

SEQ ID NO: 3138771 - RNA, 16 nt, Human
auuucuauauuuucau

SEQ ID NO: 3138772 - RNA, 17 nt, Human
auuucuauauuuucauu

SEQ ID NO: 3138773 - RNA, 18 nt, Human
auuucuauauuuucauuc

SEQ ID NO: 3138774 - RNA, 19 nt, Human
auuucuauauuuucauucu

SEQ ID NO: 3138775 - RNA, 19 nt, Human
auuucuaugcugaguuugu

SEQ ID NO: 3138776 - RNA, 21 nt, Human
auuucuaugcugaguuugugc

SEQ ID NO: 3138777 - RNA, 22 nt, Human
auuucuaugcugaguuugugcu

SEQ ID NO: 3138778 - RNA, 15 nt, Human
caacucgggcucccg

SEQ ID NO: 3138779 - RNA, 23 nt, Human
caaaugcuguaacuuucugaaau

SEQ ID NO: 3138780 - RNA, 14 nt, Human
caaaugccagggcc

SEQ ID NO: 3138781 - RNA, 16 nt, Human
caaaugccagggcccg

SEQ ID NO: 3138782 - RNA, 13 nt, Human
auuuuuuuguugu

SEQ ID NO: 3138783 - RNA, 15 nt, Human
auuuuuauauuuacu

SEQ ID NO: 3138784 - RNA, 16 nt, Human
auuuuuauauuuacua

SEQ ID NO: 3138785 - RNA, 13 nt, Human
caugucacugcag

SEQ ID NO: 3138786 - RNA, 22 nt, Human
cauuuggaaaucuuuaaaaaaa

SEQ ID NO: 3138787 - RNA, 12 nt, Human
caguauuguaca

SEQ ID NO: 3138788 - RNA, 13 nt, Human
caguauuguacaa

SEQ ID NO: 3138789 - RNA, 16 nt, Human
caguauuguacaaagu

SEQ ID NO: 3138790 - RNA, 17 nt, Human
caguauuguacaaagua

SEQ ID NO: 3138791 - RNA, 18 nt, Human
caguauuguacaaaguau

SEQ ID NO: 3138792 - RNA, 19 nt, Human
caguauuguacaaaguauu

SEQ ID NO: 3138793 - RNA, 21 nt, Human
caguauuguacaaaguauuaa

SEQ ID NO: 3138794 - RNA, 22 nt, Human
gcuauuucuauauuuucauucu

SEQ ID NO: 3138795 - RNA, 17 nt, Human
gcuaaguugggaucuag

SEQ ID NO: 3138796 - RNA, 14 nt, Human
gcgugcccggggca

SEQ ID NO: 3138797 - RNA, 16 nt, Human
gcgugcccggggcagc

SEQ ID NO: 3138798 - RNA, 17 nt, Human
gcgugcccggggcagca

SEQ ID NO: 3138799 - RNA, 18 nt, Human
gcucccggguccuuggcc

SEQ ID NO: 3138800 - RNA, 22 nt, Human
gcucccggguccuuggcccccu

SEQ ID NO: 3138801 - RNA, 13 nt, Human
gcccggggcagca

SEQ ID NO: 3138802 - RNA, 20 nt, Human
gcccggggcagcagcagccc

SEQ ID NO: 3138803 - RNA, 21 nt, Human
gcccggggcagcagcagcccu

SEQ ID NO: 3138804 - RNA, 23 nt, Human
gcccggggcagcagcagcccugc

SEQ ID NO: 3138805 - RNA, 16 nt, Human
gccccccacacuuccc

SEQ ID NO: 3138806 - RNA, 17 nt, Human
gccccccacacuucccu

SEQ ID NO: 3138807 - RNA, 18 nt, Human
gccccccacacuucccug

SEQ ID NO: 3138808 - RNA, 19 nt, Human
gccccccacacuucccugg

SEQ ID NO: 3138809 - RNA, 20 nt, Human
gccccccacacuucccuggc

SEQ ID NO: 3138810 - RNA, 21 nt, Human
gccccccacacuucccuggcg

SEQ ID NO: 3138811 - RNA, 17 nt, Human
gccccccccuccccaug

SEQ ID NO: 3138812 - RNA, 12 nt, Human
gccuagcugcug

SEQ ID NO: 3138813 - RNA, 13 nt, Human
gccuagcugcugu

SEQ ID NO: 3138814 - RNA, 15 nt, Human
gccuagcugcuguca

SEQ ID NO: 3138815 - RNA, 13 nt, Human
gcccugccccaca

SEQ ID NO: 3138816 - RNA, 14 nt, Human
gcccugccccacac

SEQ ID NO: 3138817 - RNA, 15 nt, Human
gcccugccccacacc

SEQ ID NO: 3138818 - RNA, 14 nt, Human
gcugggguuaucug

SEQ ID NO: 3138819 - RNA, 22 nt, Human
gcugggguuaucugaagucaga

SEQ ID NO: 3138820 - RNA, 23 nt, Human
gcugggguuaucugaagucagau

SEQ ID NO: 3138821 - RNA, 12 nt, Human
ggacuuguuaga

SEQ ID NO: 3138822 - RNA, 15 nt, Human
ggacuuguuagaucu

SEQ ID NO: 3138823 - RNA, 21 nt, Human
ggacuucuuuaauuuuggaau

SEQ ID NO: 3138824 - RNA, 18 nt, Human
ggacuucuuuaauuuugg

SEQ ID NO: 3138825 - RNA, 22 nt, Human
ggacuucuuuaauuuuggaauu

SEQ ID NO: 3138826 - RNA, 16 nt, Human
ggccgacauugucucc

SEQ ID NO: 3138827 - RNA, 17 nt, Human
ggccgacauugucuccc

SEQ ID NO: 3138828 - RNA, 10 nt, Human
ggcccuugga

SEQ ID NO: 3138829 - RNA, 17 nt, Human
ggcccuucuugcugccc

SEQ ID NO: 3138830 - RNA, 18 nt, Human
ggcccuucuugcugcccu

SEQ ID NO: 3138831 - RNA, 19 nt, Human
ggcccuucuugcugcccug

SEQ ID NO: 3138832 - RNA, 23 nt, Human
ggcccuucuugcugcccugcccc

SEQ ID NO: 3138833 - RNA, 17 nt, Human
ggcauaacauaaaucug

SEQ ID NO: 3138834 - RNA, 16 nt, Human
ggcauaacauaaaucu

SEQ ID NO: 3138835 - RNA, 17 nt, Human
ggcagcccgcuaggcuc

SEQ ID NO: 3138836 - RNA, 17 nt, Human
aaaaccaguauuguaca

SEQ ID NO: 3138837 - RNA, 12 nt, Human
aaaagccagggc

SEQ ID NO: 3138838 - RNA, 18 nt, Human
aaaagccagggcuggaga

SEQ ID NO: 3138839 - RNA, 15 nt, Human
ggcuguacccaggaa

SEQ ID NO: 3138840 - RNA, 12 nt, Human
gggaacagggcg

SEQ ID NO: 3138841 - RNA, 13 nt, Human
ggugcagaggcug

SEQ ID NO: 3138842 - RNA, 14 nt, Human
ggugcagaggcugu

SEQ ID NO: 3138843 - RNA, 15 nt, Human
aaagcucacuuuacu

SEQ ID NO: 3138844 - RNA, 11 nt, Human
aaacuuuucug

SEQ ID NO: 3138845 - RNA, 13 nt, Human
gguccuuggcccc

SEQ ID NO: 3138846 - RNA, 16 nt, Human
gguccuuggcccccuu

SEQ ID NO: 3138847 - RNA, 22 nt, Human
gguccuuggcccccuuucccgg

SEQ ID NO: 3138848 - RNA, 14 nt, Human
ggggcccuuggagc

SEQ ID NO: 3138849 - RNA, 18 nt, Human
ggggcccuuggagcgugg

SEQ ID NO: 3138850 - RNA, 17 nt, Human
aaacauggccuuugcuu

SEQ ID NO: 3138851 - RNA, 16 nt, Human
aaacauggccuuugcu

SEQ ID NO: 3138852 - RNA, 23 nt, Human
aaaguugccuaaauccauuugga

SEQ ID NO: 3138853 - RNA, 16 nt, Human
aaaguugccuaaaucc

SEQ ID NO: 3138854 - RNA, 17 nt, Human
aaaguugccuaaaucca

SEQ ID NO: 3138855 - RNA, 12 nt, Human
aaaguuuaauau

SEQ ID NO: 3138856 - RNA, 13 nt, Human
aaaguugccuaaa

SEQ ID NO: 3138857 - RNA, 14 nt, Human
aaaguugccuaaau

SEQ ID NO: 3138858 - RNA, 13 nt, Human
aaaguauuaagca

SEQ ID NO: 3138859 - RNA, 18 nt, Human
aaaguauuaagcauauau

SEQ ID NO: 3138860 - RNA, 19 nt, Human
aaaguauuaagcauauauu

SEQ ID NO: 3138861 - RNA, 20 nt, Human
aaaguauuaagcauauauuu

SEQ ID NO: 3138862 - RNA, 20 nt, Human
guaauuuuaugagcugugag

SEQ ID NO: 3138863 - RNA, 21 nt, Human
aaauacaauuuuguuucugua

SEQ ID NO: 3138864 - RNA, 22 nt, Human
aaauacaauuuuguuucuguac

SEQ ID NO: 3138865 - RNA, 14 nt, Human
aaauacaauuuugu

SEQ ID NO: 3138866 - RNA, 17 nt, Human
aaauacaauuuuguuuc

SEQ ID NO: 3138867 - RNA, 18 nt, Human
aaauacaauuuuguuucu

SEQ ID NO: 3138868 - RNA, 20 nt, Human
aaauacaauuuuguuucugu

SEQ ID NO: 3138869 - RNA, 13 nt, Human
aaauacaauuuug

SEQ ID NO: 3138870 - RNA, 17 nt, Human
gacuguggugacuuugg

SEQ ID NO: 3138871 - RNA, 19 nt, Human
gacuuuggauaauaaggaa

SEQ ID NO: 3138872 - RNA, 17 nt, Human
gacgcugaccguggagc

SEQ ID NO: 3138873 - RNA, 19 nt, Human
gaccagugagcgcuugggc

SEQ ID NO: 3138874 - RNA, 21 nt, Human
gagguggauuccgagugguga

SEQ ID NO: 3138875 - RNA, 24 nt, Human
gagguggauuccgaguggugacag

SEQ ID NO: 3138876 - RNA, 12 nt, Human
gagcgcuugggc

SEQ ID NO: 3138877 - RNA, 15 nt, Human
gagcgcuugggcgcc

SEQ ID NO: 3138878 - RNA, 21 nt, Human
gagcugugagaaggguguugu

SEQ ID NO: 3138879 - RNA, 16 nt, Human
gcaaaaauauuuuaug

SEQ ID NO: 3138880 - RNA, 23 nt, Human
gcaaaaauauuuuaugauccagc

SEQ ID NO: 3138881 - RNA, 17 nt, Human
gcaaaaauauuuuauga

SEQ ID NO: 3138882 - RNA, 22 nt, Human
gcaaaaauauuuuaugauccag

SEQ ID NO: 3138883 - RNA, 16 nt, Human
gauucuuaaaguugaa

SEQ ID NO: 3138884 - RNA, 17 nt, Human
gauucuuaaaguugaau

SEQ ID NO: 3138885 - RNA, 21 nt, Human
gauucuuaaaguugaauuuau

SEQ ID NO: 3138886 - RNA, 15 nt, Human
gauucuuaaaguuga

SEQ ID NO: 3138887 - RNA, 21 nt, Human
gcagggaagaggggugcagag

SEQ ID NO: 3138888 - RNA, 15 nt, Human
gcagcuuagggcccu

SEQ ID NO: 3138889 - RNA, 17 nt, Human
gcagcuuagggcccugg

SEQ ID NO: 3138890 - RNA, 18 nt, Human
gcagcuuagggcccugga

SEQ ID NO: 3138891 - RNA, 19 nt, Human
gcagcuuagggcccuggag

SEQ ID NO: 3138892 - RNA, 20 nt, Human
gcagcuuagggcccuggagg

SEQ ID NO: 3138893 - RNA, 21 nt, Human
gcagcuuagggcccuggaggc

SEQ ID NO: 3138894 - RNA, 13 nt, Human
gcauaacauaaau

SEQ ID NO: 3138895 - RNA, 21 nt, Human
gcaguugagaaaauuugaaug

SEQ ID NO: 3138896 - RNA, 20 nt, Human
gcagguggugucgggcccuu

SEQ ID NO: 3138897 - RNA, 15 nt, Human
cuguacuuuuuggca

SEQ ID NO: 3138898 - RNA, 13 nt, Human
cugguugguuuug

SEQ ID NO: 3138899 - RNA, 15 nt, Human
cuuaaaguugaauuu

SEQ ID NO: 3138900 - RNA, 18 nt, Human
cuuaaaguugaauuuauu

SEQ ID NO: 3138901 - RNA, 14 nt, Human
cuuaaaguugaauu

SEQ ID NO: 3138902 - RNA, 22 nt, Human
cuuaaaguugaauuuauuggcu

SEQ ID NO: 3138903 - RNA, 14 nt, Human
cuuagggcccugga

SEQ ID NO: 3138904 - RNA, 15 nt, Human
cuuagggcccuggag

SEQ ID NO: 3138905 - RNA, 16 nt, Human
cuuagggcccuggagg

SEQ ID NO: 3138906 - RNA, 17 nt, Human
cuuagggcccuggaggc

SEQ ID NO: 3138907 - RNA, 18 nt, Human
cuuagggcccuggaggcg

SEQ ID NO: 3138908 - RNA, 12 nt, Human
cugccucucccu

SEQ ID NO: 3138909 - RNA, 13 nt, Human
cugccucucccuc

SEQ ID NO: 3138910 - RNA, 14 nt, Human
cugccucucccucu

SEQ ID NO: 3138911 - RNA, 15 nt, Human
cugccucucccucug

SEQ ID NO: 3138912 - RNA, 16 nt, Human
cugccucucccucugg

SEQ ID NO: 3138913 - RNA, 13 nt, Human
cuugauuaaaagu

SEQ ID NO: 3138914 - RNA, 15 nt, Human
cuuucagauacugga

SEQ ID NO: 3138915 - RNA, 17 nt, Human
cuuucagauacuggauu

SEQ ID NO: 3138916 - RNA, 13 nt, Human
cuuucagauacug

SEQ ID NO: 3138917 - RNA, 22 nt, Human
cuuucagauacuggauuguacu

SEQ ID NO: 3138918 - RNA, 14 nt, Human
cuuucagauacugg

SEQ ID NO: 3138919 - RNA, 14 nt, Human
cuugucucagauuu

SEQ ID NO: 3138920 - RNA, 17 nt, Human
cuugucucagauuuuau

SEQ ID NO: 3138921 - RNA, 13 nt, Human
cuugucucagauu

SEQ ID NO: 3138922 - RNA, 18 nt, Human
cuugucucagauuuuauu

SEQ ID NO: 3138923 - RNA, 21 nt, Human
gaaagaaaauaccaaggaaca

SEQ ID NO: 3138924 - RNA, 13 nt, Human
gaaagggccagga

SEQ ID NO: 3138925 - RNA, 15 nt, Human
gaaagggccaggaga

SEQ ID NO: 3138926 - RNA, 18 nt, Human
gaaagggccaggagaugg

SEQ ID NO: 3138927 - RNA, 12 nt, Human
gaaaucuuuaaa

SEQ ID NO: 3138928 - RNA, 15 nt, Human
gaaaucuuuaaaaaa

SEQ ID NO: 3138929 - RNA, 15 nt, Human
gaaaaaaggaagugg

SEQ ID NO: 3138930 - RNA, 19 nt, Human
uuugugcugguguaugugu

SEQ ID NO: 3138931 - RNA, 21 nt, Human
uuuggcauaacauaaaucugu

SEQ ID NO: 3138932 - RNA, 20 nt, Human
uuuggcauaacauaaaucug

SEQ ID NO: 3138933 - RNA, 16 nt, Human
augguuuaacaaaaug

SEQ ID NO: 3138934 - RNA, 22 nt, Human
auguaaaucccauuauucaaag

SEQ ID NO: 3138935 - RNA, 23 nt, Human
auguaaaucccauuauucaaagu

SEQ ID NO: 3138936 - RNA, 14 nt, Human
auguaaaucccauu

SEQ ID NO: 3138937 - RNA, 20 nt, Human
auguaaaucccauuauucaa

SEQ ID NO: 3138938 - RNA, 21 nt, Human
augggcgccccccccucccca

SEQ ID NO: 3138939 - RNA, 20 nt, Human
augggauaaaugccaucaau

SEQ ID NO: 3138940 - RNA, 15 nt, Human
augggauaaaugcca

SEQ ID NO: 3138941 - RNA, 16 nt, Human
augggauaaaugccau

SEQ ID NO: 3138942 - RNA, 20 nt, Human
uuucuguacuuuuuggcaua

SEQ ID NO: 3138943 - RNA, 19 nt, Human
uuucuguacuuuuuggcau

SEQ ID NO: 3138944 - RNA, 22 nt, Human
augauccagcagauuauucacu

SEQ ID NO: 3138945 - RNA, 19 nt, Human
augauccagcagauuauuc

SEQ ID NO: 3138946 - RNA, 20 nt, Human
augauccagcagauuauuca

SEQ ID NO: 3138947 - RNA, 10 nt, Human
augauccagc

SEQ ID NO: 3138948 - RNA, 21 nt, Human
uuuaaauaaauaaauagcuag

SEQ ID NO: 3138949 - RNA, 19 nt, Human
augccacccccgcuggagg

SEQ ID NO: 3138950 - RNA, 20 nt, Human
augccacccccgcuggagga

SEQ ID NO: 3138951 - RNA, 21 nt, Human
augccacccccgcuggaggau

SEQ ID NO: 3138952 - RNA, 16 nt, Human
uuuauauuuacuaaaa

SEQ ID NO: 3138953 - RNA, 13 nt, Human
uuuauauuuacua

SEQ ID NO: 3138954 - RNA, 11 nt, Human
augcuauuucu

SEQ ID NO: 3138955 - RNA, 13 nt, Human
augcuauuucuau

SEQ ID NO: 3138956 - RNA, 14 nt, Human
augcuauuucuaua

SEQ ID NO: 3138957 - RNA, 15 nt, Human
augcuauuucuauau

SEQ ID NO: 3138958 - RNA, 20 nt, Human
augcuauuucuauauuuuca

SEQ ID NO: 3138959 - RNA, 23 nt, Human
augcuauuucuauauuuucauuc

SEQ ID NO: 3138960 - RNA, 21 nt, Human
augcuauuucuauauuuucau

SEQ ID NO: 3138961 - RNA, 22 nt, Human
augcuauuucuauauuuucauu

SEQ ID NO: 3138962 - RNA, 14 nt, Human
uuuauuacaguaua

SEQ ID NO: 3138963 - RNA, 18 nt, Human
uuuauuacaguauaauua

SEQ ID NO: 3138964 - RNA, 18 nt, Human
auggaacgcguugaaauu

SEQ ID NO: 3138965 - RNA, 19 nt, Human
auggaacgcguugaaauug

SEQ ID NO: 3138966 - RNA, 16 nt, Human
auggaacgcguugaaa

SEQ ID NO: 3138967 - RNA, 17 nt, Human
auggaacgcguugaaau

SEQ ID NO: 3138968 - RNA, 15 nt, Human
auggaacgcguugaa

SEQ ID NO: 3138969 - RNA, 21 nt, Human
augcugcuuuucuuuucuaac

SEQ ID NO: 3138970 - RNA, 11 nt, Human
augcugcuuuu

SEQ ID NO: 3138971 - RNA, 14 nt, Human
augggauaaaugcc

SEQ ID NO: 3138972 - RNA, 13 nt, Human
uuucauuauuuua

SEQ ID NO: 3138973 - RNA, 15 nt, Human
uuucauuauuuuauu

SEQ ID NO: 3138974 - RNA, 19 nt, Human
uuucauuauuuuauuauga

SEQ ID NO: 3138975 - RNA, 17 nt, Human
auggacuguggugacuu

SEQ ID NO: 3138976 - RNA, 22 nt, Human
auggacuguggugacuuuggau

SEQ ID NO: 3138977 - RNA, 16 nt, Human
auggacuguggugacu

SEQ ID NO: 3138978 - RNA, 14 nt, Human
uuucccgggcuguc

SEQ ID NO: 3138979 - RNA, 23 nt, Human
aucaccugucuugccuuuuucau

SEQ ID NO: 3138980 - RNA, 22 nt, Human
aucaccugucuugccuuuuuca

SEQ ID NO: 3138981 - RNA, 19 nt, Human
uuccgggcaaaugccaggg

SEQ ID NO: 3138982 - RNA, 13 nt, Human
uuccgucuccccc

SEQ ID NO: 3138983 - RNA, 15 nt, Human
uugaaauuguaauua

SEQ ID NO: 3138984 - RNA, 17 nt, Human
uugaaauuguaauuaua

SEQ ID NO: 3138985 - RNA, 13 nt, Human
uugaaauuguaau

SEQ ID NO: 3138986 - RNA, 14 nt, Human
uugaaauuguaauu

SEQ ID NO: 3138987 - RNA, 20 nt, Human
auccauuuggaaaucuuuaa

SEQ ID NO: 3138988 - RNA, 21 nt, Human
auccauuuggaaaucuuuaaa

SEQ ID NO: 3138989 - RNA, 14 nt, Human
uugcuugaaagaaa

SEQ ID NO: 3138990 - RNA, 19 nt, Human
uuggcccccuuucccgggc

SEQ ID NO: 3138991 - RNA, 15 nt, Human
aucugguggucagcc

SEQ ID NO: 3138992 - RNA, 18 nt, Human
aucugguggucagcccua

SEQ ID NO: 3138993 - RNA, 20 nt, Human
aucugguggucagcccuagg

SEQ ID NO: 3138994 - RNA, 20 nt, Human
aucugccuaaggacuucuuu

SEQ ID NO: 3138995 - RNA, 21 nt, Human
aucugccuaaggacuucuuua

SEQ ID NO: 3138996 - RNA, 11 nt, Human
aucugccuaag

SEQ ID NO: 3138997 - RNA, 22 nt, Human
aucugccuaaggacuucuuuaa

SEQ ID NO: 3138998 - RNA, 23 nt, Human
aucugccuaaggacuucuuuaau

SEQ ID NO: 3138999 - RNA, 18 nt, Human
uugagaccuacaggcuga

SEQ ID NO: 3139000 - RNA, 14 nt, Human
uugaagccaugucu

SEQ ID NO: 3139001 - RNA, 17 nt, Human
uugaagccaugucuaca

SEQ ID NO: 3139002 - RNA, 10 nt, Human
auugucuccc

SEQ ID NO: 3139003 - RNA, 18 nt, Human
auugucucccgcccccca

SEQ ID NO: 3139004 - RNA, 19 nt, Human
auugucucccgccccccac

SEQ ID NO: 3139005 - RNA, 16 nt, Human
auuggcuuuucugauc

SEQ ID NO: 3139006 - RNA, 19 nt, Human
auuggcuuuucugauccag

SEQ ID NO: 3139007 - RNA, 20 nt, Human
auuggcuuuucugauccagu

SEQ ID NO: 3139008 - RNA, 13 nt, Human
auuggcuuuucug

SEQ ID NO: 3139009 - RNA, 15 nt, Human
auuggcuuuucugau

SEQ ID NO: 3139010 - RNA, 15 nt, Human
auuugaauuuugugu

SEQ ID NO: 3139011 - RNA, 21 nt, Human
auuugacauagucuggcugua

SEQ ID NO: 3139012 - RNA, 16 nt, Human
auuugacauagucugg

SEQ ID NO: 3139013 - RNA, 17 nt, Human
auuugacauagucuggc

SEQ ID NO: 3139014 - RNA, 17 nt, Human
auuuuaacaacagcugg

SEQ ID NO: 3139015 - RNA, 11 nt, Human
auuuuguuucu

SEQ ID NO: 3139016 - RNA, 23 nt, Human
auuuuguuguguguaugcugcuu

SEQ ID NO: 3139017 - RNA, 12 nt, Human
auuuuggaauuu

SEQ ID NO: 3139018 - RNA, 14 nt, Human
auuuuguuucugua

SEQ ID NO: 3139019 - RNA, 15 nt, Human
auuuuguuucuguac

SEQ ID NO: 3139020 - RNA, 13 nt, Human
auucuguauagau

SEQ ID NO: 3139021 - RNA, 18 nt, Human
auucuuaaaguugaauuu

SEQ ID NO: 3139022 - RNA, 11 nt, Human
auucuguauag

SEQ ID NO: 3139023 - RNA, 12 nt, Human
auucuguauaga

SEQ ID NO: 3139024 - RNA, 19 nt, Human
auucuuaaaguugaauuua

SEQ ID NO: 3139025 - RNA, 20 nt, Human
auucuuaaaguugaauuuau

SEQ ID NO: 3139026 - RNA, 21 nt, Human
auucuuaaaguugaauuuauu

SEQ ID NO: 3139027 - RNA, 13 nt, Human
auuauucaaaguu

SEQ ID NO: 3139028 - RNA, 14 nt, Human
auuauucaaaguug

SEQ ID NO: 3139029 - RNA, 15 nt, Human
auuauucaaaguugc

SEQ ID NO: 3139030 - RNA, 16 nt, Human
agccugcacggugaau

SEQ ID NO: 3139031 - RNA, 18 nt, Human
agccugcacggugaaugg

SEQ ID NO: 3139032 - RNA, 14 nt, Human
agccugauuaaaga

SEQ ID NO: 3139033 - RNA, 13 nt, Human
agcguggacuggu

SEQ ID NO: 3139034 - RNA, 15 nt, Human
aggaauucuguauag

SEQ ID NO: 3139035 - RNA, 23 nt, Human
aggaauucuguauagauuagaau

SEQ ID NO: 3139036 - RNA, 16 nt, Human
aggaauucuguauaga

SEQ ID NO: 3139037 - RNA, 17 nt, Human
aggaauucuguauagau

SEQ ID NO: 3139038 - RNA, 22 nt, Human
aggaauucuguauagauuagaa

SEQ ID NO: 3139039 - RNA, 23 nt, Human
aggaaaaguuuaauauuaaagcc

SEQ ID NO: 3139040 - RNA, 24 nt, Human
aggaaaaguuuaauauuaaagcca

SEQ ID NO: 3139041 - RNA, 21 nt, Human
aggaaaaguuuaauauuaaag

SEQ ID NO: 3139042 - RNA, 14 nt, Human
agcuuagggcccug

SEQ ID NO: 3139043 - RNA, 15 nt, Human
agcuuagggcccugg

SEQ ID NO: 3139044 - RNA, 16 nt, Human
agcuuagggcccugga

SEQ ID NO: 3139045 - RNA, 17 nt, Human
agcuuagggcccuggag

SEQ ID NO: 3139046 - RNA, 18 nt, Human
agcuuagggcccuggagg

SEQ ID NO: 3139047 - RNA, 19 nt, Human
agcuuagggcccuggaggc

SEQ ID NO: 3139048 - RNA, 18 nt, Human
agcugcauacaguuugca

SEQ ID NO: 3139049 - RNA, 21 nt, Human
ugccuuuuucauuauuuuauu

SEQ ID NO: 3139050 - RNA, 14 nt, Human
ugccuuuuucauua

SEQ ID NO: 3139051 - RNA, 15 nt, Human
ugccuuuuucauuau

SEQ ID NO: 3139052 - RNA, 16 nt, Human
ugccuuuuucauuauu

SEQ ID NO: 3139053 - RNA, 17 nt, Human
ugccuuuuucauuauuu

SEQ ID NO: 3139054 - RNA, 13 nt, Human
ugccuuuuucauu

SEQ ID NO: 3139055 - RNA, 17 nt, Human
uggaauuuuccuccuuu

SEQ ID NO: 3139056 - RNA, 21 nt, Human
uggaauuuuccuccuuucucu

SEQ ID NO: 3139057 - RNA, 15 nt, Human
uggacaccggaaaca

SEQ ID NO: 3139058 - RNA, 16 nt, Human
uggagcuuaagccacu

SEQ ID NO: 3139059 - RNA, 17 nt, Human
uggagcuuaagccacug

SEQ ID NO: 3139060 - RNA, 18 nt, Human
uggagcuuaagccacugc

SEQ ID NO: 3139061 - RNA, 19 nt, Human
uggagcuuaagccacugcc

SEQ ID NO: 3139062 - RNA, 20 nt, Human
uggagcuuaagccacugccu

SEQ ID NO: 3139063 - RNA, 22 nt, Human
uggagcuuaagccacugccucu

SEQ ID NO: 3139064 - RNA, 23 nt, Human
uggagccugcacggugaauggcu

SEQ ID NO: 3139065 - RNA, 22 nt, Human
aggcaguugagaaaauuugaau

SEQ ID NO: 3139066 - RNA, 20 nt, Human
ugggaggggguugggguggu

SEQ ID NO: 3139067 - RNA, 24 nt, Human
ugggaggggguuggggugguugag

SEQ ID NO: 3139068 - RNA, 14 nt, Human
agggcuggagaaca

SEQ ID NO: 3139069 - RNA, 16 nt, Human
uguguuagagauuuuu

SEQ ID NO: 3139070 - RNA, 20 nt, Human
agucuugucucagauuuuau

SEQ ID NO: 3139071 - RNA, 21 nt, Human
agucuugucucagauuuuauu

SEQ ID NO: 3139072 - RNA, 17 nt, Human
agucuugucucagauuu

SEQ ID NO: 3139073 - RNA, 19 nt, Human
agucuugucucagauuuua

SEQ ID NO: 3139074 - RNA, 16 nt, Human
agucuugucucagauu

SEQ ID NO: 3139075 - RNA, 23 nt, Human
ugucuccccuguuccccucuccc

SEQ ID NO: 3139076 - RNA, 13 nt, Human
ugucucccgcccc

SEQ ID NO: 3139077 - RNA, 24 nt, Human
ugucucccgccccccacacuuccc

SEQ ID NO: 3139078 - RNA, 19 nt, Human
ugugcugggguuaucugaa

SEQ ID NO: 3139079 - RNA, 20 nt, Human
ugugcugguguaugugugaa

SEQ ID NO: 3139080 - RNA, 21 nt, Human
agugaguuggguguauugugc

SEQ ID NO: 3139081 - RNA, 20 nt, Human
agugaguuggguguauugug

SEQ ID NO: 3139082 - RNA, 17 nt, Human
agguugaagccaugucu

SEQ ID NO: 3139083 - RNA, 14 nt, Human
aguauuaagcauau

SEQ ID NO: 3139084 - RNA, 12 nt, Human
aguauuaagcau

SEQ ID NO: 3139085 - RNA, 13 nt, Human
aguauaauuaaca

SEQ ID NO: 3139086 - RNA, 14 nt, Human
aguauaauuaacau

SEQ ID NO: 3139087 - RNA, 16 nt, Human
aguauaauuaacaugu

SEQ ID NO: 3139088 - RNA, 23 nt, Human
aguauaauuaacauguuaaacca

SEQ ID NO: 3139089 - RNA, 21 nt, Human
auagaggaagccugauuaaag

SEQ ID NO: 3139090 - RNA, 22 nt, Human
auagaggaagccugauuaaaga

SEQ ID NO: 3139091 - RNA, 13 nt, Human
auagauuagaauu

SEQ ID NO: 3139092 - RNA, 15 nt, Human
auagauuagaauucu

SEQ ID NO: 3139093 - RNA, 16 nt, Human
auagauuagaauucug

SEQ ID NO: 3139094 - RNA, 21 nt, Human
auagauuagagaguguugaaa

SEQ ID NO: 3139095 - RNA, 22 nt, Human
auagauuagagaguguugaaac

SEQ ID NO: 3139096 - RNA, 20 nt, Human
auagaaccucuuugucuaca

SEQ ID NO: 3139097 - RNA, 14 nt, Human
auagaaccucuuug

SEQ ID NO: 3139098 - RNA, 23 nt, Human
uuauuaugaaacuuguguaaaua

SEQ ID NO: 3139099 - RNA, 17 nt, Human
uuauuaugaaacuugug

SEQ ID NO: 3139100 - RNA, 20 nt, Human
uuauuaugaaacuuguguaa

SEQ ID NO: 3139101 - RNA, 21 nt, Human
uuauuaugaaacuuguguaaa

SEQ ID NO: 3139102 - RNA, 22 nt, Human
uuauuaugaaacuuguguaaau

SEQ ID NO: 3139103 - RNA, 11 nt, Human
uuauuaugaaa

SEQ ID NO: 3139104 - RNA, 13 nt, Human
uuauuauguaaau

SEQ ID NO: 3139105 - RNA, 14 nt, Human
uuauuauguaaauc

SEQ ID NO: 3139106 - RNA, 16 nt, Human
uuauuauguaaauccc

SEQ ID NO: 3139107 - RNA, 22 nt, Human
uuauuauguaaaucccauuauu

SEQ ID NO: 3139108 - RNA, 15 nt, Human
uuauucaaaguugcc

SEQ ID NO: 3139109 - RNA, 19 nt, Human
uuauucaaaguugccuaaa

SEQ ID NO: 3139110 - RNA, 13 nt, Human
uuauucaaaguug

SEQ ID NO: 3139111 - RNA, 14 nt, Human
uuauucacugauuu

SEQ ID NO: 3139112 - RNA, 17 nt, Human
auacuccuccaagguua

SEQ ID NO: 3139113 - RNA, 15 nt, Human
auacuggauuguacu

SEQ ID NO: 3139114 - RNA, 22 nt, Human
uuaugauccagcagauuauuca

SEQ ID NO: 3139115 - RNA, 23 nt, Human
uuaugauccagcagauuauucac

SEQ ID NO: 3139116 - RNA, 19 nt, Human
uuauguaaaucccauuauu

SEQ ID NO: 3139117 - RNA, 21 nt, Human
uuauguaaaucccauuauuca

SEQ ID NO: 3139118 - RNA, 22 nt, Human
uuauguaaaucccauuauucaa

SEQ ID NO: 3139119 - RNA, 23 nt, Human
uuauguaaaucccauuauucaaa

SEQ ID NO: 3139120 - RNA, 12 nt, Human
uuauguaaaucc

SEQ ID NO: 3139121 - RNA, 13 nt, Human
uuauguaaauccc

SEQ ID NO: 3139122 - RNA, 11 nt, Human
uuauguaaauc

SEQ ID NO: 3139123 - RNA, 16 nt, Human
uuaugugcgcugauaa

SEQ ID NO: 3139124 - RNA, 19 nt, Human
uuaugaaacuuguguaaau

SEQ ID NO: 3139125 - RNA, 13 nt, Human
uuaugaaacuugu

SEQ ID NO: 3139126 - RNA, 16 nt, Human
uuaugaaacuugugua

SEQ ID NO: 3139127 - RNA, 18 nt, Human
uuaugaaacuuguguaaa

SEQ ID NO: 3139128 - RNA, 13 nt, Human
uuaugauccagca

SEQ ID NO: 3139129 - RNA, 18 nt, Human
uuaugauccagcagauua

SEQ ID NO: 3139130 - RNA, 21 nt, Human
uuaugagcugugagaagggug

SEQ ID NO: 3139131 - RNA, 14 nt, Human
uuaugagcugugag

SEQ ID NO: 3139132 - RNA, 17 nt, Human
uuaaaccaugggauaaa

SEQ ID NO: 3139133 - RNA, 21 nt, Human
uuaaaccaugggauaaaugcc

SEQ ID NO: 3139134 - RNA, 22 nt, Human
uuaaaccaugggauaaaugcca

SEQ ID NO: 3139135 - RNA, 13 nt, Human
uuaaaguugaauu

SEQ ID NO: 3139136 - RNA, 16 nt, Human
uuaaaguugaauuuau

SEQ ID NO: 3139137 - RNA, 17 nt, Human
uuaaaguugaauuuauu

SEQ ID NO: 3139138 - RNA, 22 nt, Human
uuaaaguugaauuuauuggcuu

SEQ ID NO: 3139139 - RNA, 19 nt, Human
aguuugugcugguguaugu

SEQ ID NO: 3139140 - RNA, 13 nt, Human
uuaauuuuggaau

SEQ ID NO: 3139141 - RNA, 14 nt, Human
uuaauuuuggaauu

SEQ ID NO: 3139142 - RNA, 15 nt, Human
uuaauuuuggaauuu

SEQ ID NO: 3139143 - RNA, 14 nt, Human
aguuuuguuuggac

SEQ ID NO: 3139144 - RNA, 16 nt, Human
aguuuuguuuggacca

SEQ ID NO: 3139145 - RNA, 12 nt, Human
aguuuuguuugg

SEQ ID NO: 3139146 - RNA, 18 nt, Human
aguuuuguuuggaccaaa

SEQ ID NO: 3139147 - RNA, 14 nt, Human
uuagggcccuggag

SEQ ID NO: 3139148 - RNA, 15 nt, Human
uuagggcccuggagg

SEQ ID NO: 3139149 - RNA, 14 nt, Human
uuagaauucuguau

SEQ ID NO: 3139150 - RNA, 15 nt, Human
uuagaauucuguaua

SEQ ID NO: 3139151 - RNA, 19 nt, Human
auaaaucugugaacuugaa

SEQ ID NO: 3139152 - RNA, 15 nt, Human
auaaaucugugaacu

SEQ ID NO: 3139153 - RNA, 16 nt, Human
auaaaucugugaacuu

SEQ ID NO: 3139154 - RNA, 17 nt, Human
auaaaugccaucaauaa

SEQ ID NO: 3139155 - RNA, 18 nt, Human
auaaaugccaucaauaaa

SEQ ID NO: 3139156 - RNA, 15 nt, Human
agagggaacagggcg

SEQ ID NO: 3139157 - RNA, 19 nt, Human
agagggaacagggcggaga

SEQ ID NO: 3139158 - RNA, 13 nt, Human
ugaagccaugucu

SEQ ID NO: 3139159 - RNA, 22 nt, Human
agauuuuauuauguaaauccca

SEQ ID NO: 3139160 - RNA, 20 nt, Human
agauuuuauuauguaaaucc

SEQ ID NO: 3139161 - RNA, 21 nt, Human
agauuuuauuauguaaauccc

SEQ ID NO: 3139162 - RNA, 23 nt, Human
agcaaaaauauuuuaugauccag

SEQ ID NO: 3139163 - RNA, 15 nt, Human
agcaaaaauauuuua

SEQ ID NO: 3139164 - RNA, 17 nt, Human
agcaaaaauauuuuaug

SEQ ID NO: 3139165 - RNA, 18 nt, Human
agcaaaaauauuuuauga

SEQ ID NO: 3139166 - RNA, 19 nt, Human
agcaaaaauauuuuaugau

SEQ ID NO: 3139167 - RNA, 16 nt, Human
agauuauucacugauu

SEQ ID NO: 3139168 - RNA, 12 nt, Human
ugaauuuauugg

SEQ ID NO: 3139169 - RNA, 15 nt, Human
ugaauuuauuggcuu

SEQ ID NO: 3139170 - RNA, 16 nt, Human
ugaauuuauuggcuuu

SEQ ID NO: 3139171 - RNA, 14 nt, Human
agcagauuauucac

SEQ ID NO: 3139172 - RNA, 15 nt, Human
agcagauuauucacu

SEQ ID NO: 3139173 - RNA, 16 nt, Human
agcagauuauucacug

SEQ ID NO: 3139174 - RNA, 19 nt, Human
agcagauuauucacugauu

SEQ ID NO: 3139175 - RNA, 20 nt, Human
agcagauuauucacugauuu

SEQ ID NO: 3139176 - RNA, 13 nt, Human
ugagcgcuugggc

SEQ ID NO: 3139177 - RNA, 15 nt, Human
ugaggaauucuguau

SEQ ID NO: 3139178 - RNA, 16 nt, Human
ugaggaauucuguaua

SEQ ID NO: 3139179 - RNA, 14 nt, Human
ugaggaauucugua

SEQ ID NO: 3139180 - RNA, 18 nt, Human
ugaggaauucuguauaga

SEQ ID NO: 3139181 - RNA, 19 nt, Human
ugaggaauucuguauagau

SEQ ID NO: 3139182 - RNA, 16 nt, Human
ucuguauagauuagag

SEQ ID NO: 3139183 - RNA, 22 nt, Human
ucuggucccacaaaugggcgcc

SEQ ID NO: 3139184 - RNA, 17 nt, Human
ucuguauagauuagaau

SEQ ID NO: 3139185 - RNA, 16 nt, Human
ucuucaaaauaucaag

SEQ ID NO: 3139186 - RNA, 18 nt, Human
ucuuuaauuuuggaauuu

SEQ ID NO: 3139187 - RNA, 14 nt, Human
ucuuuaauuuugga

SEQ ID NO: 3139188 - RNA, 15 nt, Human
ucuuuaauuuuggaa

SEQ ID NO: 3139189 - RNA, 16 nt, Human
ucuuuaauuuuggaau

SEQ ID NO: 3139190 - RNA, 17 nt, Human
ucuuuaauuuuggaauu

SEQ ID NO: 3139191 - RNA, 13 nt, Human
ucuuuaauuuugg

SEQ ID NO: 3139192 - RNA, 14 nt, Human
ucuuccgucucccc

SEQ ID NO: 3139193 - RNA, 15 nt, Human
ucuuccgucuccccc

SEQ ID NO: 3139194 - RNA, 20 nt, Human
ucuuccgucucccccguguu

SEQ ID NO: 3139195 - RNA, 14 nt, Human
agaccuacaggcug

SEQ ID NO: 3139196 - RNA, 16 nt, Human
agaccuacaggcugac

SEQ ID NO: 3139197 - RNA, 17 nt, Human
ucucccuucccuccucc

SEQ ID NO: 3139198 - RNA, 12 nt, Human
ucuccauuuaau

SEQ ID NO: 3139199 - RNA, 16 nt, Human
ucuccauuuaauaauu

SEQ ID NO: 3139200 - RNA, 19 nt, Human
ucuccauuuaauaauuaua

SEQ ID NO: 3139201 - RNA, 21 nt, Human
acuuguguaaauacaauuuug

SEQ ID NO: 3139202 - RNA, 22 nt, Human
acuuguguaaauacaauuuugu

SEQ ID NO: 3139203 - RNA, 13 nt, Human
acuuguguaaaua

SEQ ID NO: 3139204 - RNA, 23 nt, Human
acuuguguaaauacaauuuuguu

SEQ ID NO: 3139205 - RNA, 20 nt, Human
agaaacugacaugcccuccc

SEQ ID NO: 3139206 - RNA, 21 nt, Human
agaaacugacaugcccucccu

SEQ ID NO: 3139207 - RNA, 22 nt, Human
agaaacugacaugcccucccuu

SEQ ID NO: 3139208 - RNA, 13 nt, Human
ucugccuaaggac

SEQ ID NO: 3139209 - RNA, 14 nt, Human
ucugccuaaggacu

SEQ ID NO: 3139210 - RNA, 15 nt, Human
ucugccuaaggacuu

SEQ ID NO: 3139211 - RNA, 15 nt, Human
acccaaaagaaacug

SEQ ID NO: 3139212 - RNA, 14 nt, Human
accagugagcgcuu

SEQ ID NO: 3139213 - RNA, 13 nt, Human
acccccgcuggag

SEQ ID NO: 3139214 - RNA, 15 nt, Human
acccccgcuggagga

SEQ ID NO: 3139215 - RNA, 21 nt, Human
ucagaucugccuaaggacuuc

SEQ ID NO: 3139216 - RNA, 13 nt, Human
ucagauuuuauua

SEQ ID NO: 3139217 - RNA, 14 nt, Human
ucagauuuuauuau

SEQ ID NO: 3139218 - RNA, 15 nt, Human
ucagauuuuauuaug

SEQ ID NO: 3139219 - RNA, 16 nt, Human
ucagauuuuauuaugu

SEQ ID NO: 3139220 - RNA, 19 nt, Human
ucagauuuuauuauguaaa

SEQ ID NO: 3139221 - RNA, 20 nt, Human
ucagauuuuauuauguaaau

SEQ ID NO: 3139222 - RNA, 16 nt, Human
ucccgccccccacacu

SEQ ID NO: 3139223 - RNA, 19 nt, Human
ucccgccccccacacuucc

SEQ ID NO: 3139224 - RNA, 22 nt, Human
ucccgccccccacacuucccug

SEQ ID NO: 3139225 - RNA, 23 nt, Human
ucccgccccccacacuucccugg

SEQ ID NO: 3139226 - RNA, 20 nt, Human
uccgucucccccguguuccc

SEQ ID NO: 3139227 - RNA, 14 nt, Human
uccgugcuaaggac

SEQ ID NO: 3139228 - RNA, 15 nt, Human
uccgugcuaaggacu

SEQ ID NO: 3139229 - RNA, 22 nt, Human
acucuccauuuaauaauuauau

SEQ ID NO: 3139230 - RNA, 22 nt, Human
uccucaguaaguguuagaggga

SEQ ID NO: 3139231 - RNA, 14 nt, Human
ucgccuucccuccu

SEQ ID NO: 3139232 - RNA, 15 nt, Human
ucgccuucccuccug

SEQ ID NO: 3139233 - RNA, 16 nt, Human
ucgccuucccuccugc

SEQ ID NO: 3139234 - RNA, 13 nt, Human
acuggauuguacu

SEQ ID NO: 3139235 - RNA, 16 nt, Human
acuggauuguacuuug

SEQ ID NO: 3139236 - RNA, 23 nt, Human
acuggcaaaauaguucugcaggu

SEQ ID NO: 3139237 - RNA, 14 nt, Human
acugcagauugaga

SEQ ID NO: 3139238 - RNA, 17 nt, Human
acugcagauugagaccu

SEQ ID NO: 3139239 - RNA, 20 nt, Human
acugcagauugagaccuaca

SEQ ID NO: 3139240 - RNA, 23 nt, Human
acugcagauugagaccuacaggc

SEQ ID NO: 3139241 - RNA, 18 nt, Human
uaaaccaugggauaaaug

SEQ ID NO: 3139242 - RNA, 20 nt, Human
uaaaccaugggauaaaugcc

SEQ ID NO: 3139243 - RNA, 21 nt, Human
uaaaccaugggauaaaugcca

SEQ ID NO: 3139244 - RNA, 22 nt, Human
uaaaccaugggauaaaugccau

SEQ ID NO: 3139245 - RNA, 18 nt, Human
aaguuuaauauuaaagcc

SEQ ID NO: 3139246 - RNA, 19 nt, Human
aaguuuaauauuaaagcca

SEQ ID NO: 3139247 - RNA, 20 nt, Human
aaguuuaauauuaaagccau

SEQ ID NO: 3139248 - RNA, 21 nt, Human
aaguuuaauauuaaagccaug

SEQ ID NO: 3139249 - RNA, 14 nt, Human
aauaaaaaauuaug

SEQ ID NO: 3139250 - RNA, 15 nt, Human
aauaaaaaauuauga

SEQ ID NO: 3139251 - RNA, 16 nt, Human
aauaaaaaauuaugac

SEQ ID NO: 3139252 - RNA, 21 nt, Human
aauaaauagcuagacugguga

SEQ ID NO: 3139253 - RNA, 13 nt, Human
aauaaggaaaagu

SEQ ID NO: 3139254 - RNA, 15 nt, Human
aauaaggaaaaguuu

SEQ ID NO: 3139255 - RNA, 14 nt, Human
aauaauuauaugcu

SEQ ID NO: 3139256 - RNA, 15 nt, Human
aauaauuauaugcua

SEQ ID NO: 3139257 - RNA, 20 nt, Human
aauaauuauaugcuauuucu

SEQ ID NO: 3139258 - RNA, 21 nt, Human
aauaauuauaugcuauuucua

SEQ ID NO: 3139259 - RNA, 22 nt, Human
aauaauuauaugcuauuucuau

SEQ ID NO: 3139260 - RNA, 23 nt, Human
aauaauuauaugcuauuucuaua

SEQ ID NO: 3139261 - RNA, 16 nt, Human
aauaaggaaaaguuua

SEQ ID NO: 3139262 - RNA, 19 nt, Human
aauaaggaaaaguuuaaua

SEQ ID NO: 3139263 - RNA, 22 nt, Human
aauaaggaaaaguuuaauauua

SEQ ID NO: 3139264 - RNA, 19 nt, Human
uaaaucccauuauucaaag

SEQ ID NO: 3139265 - RNA, 23 nt, Human
uaaaucccauuauucaaaguugc

SEQ ID NO: 3139266 - RNA, 23 nt, Human
uaaauagcuagacuggugacuga

SEQ ID NO: 3139267 - RNA, 13 nt, Human
uaaauacaauuuu

SEQ ID NO: 3139268 - RNA, 15 nt, Human
uaaauacaauuuugu

SEQ ID NO: 3139269 - RNA, 22 nt, Human
uaaauacaauuuuguuucugua

SEQ ID NO: 3139270 - RNA, 23 nt, Human
uaaauacaauuuuguuucuguac

SEQ ID NO: 3139271 - RNA, 19 nt, Human
uaaauagcuagacugguga

SEQ ID NO: 3139272 - RNA, 22 nt, Human
aauacaauuuuguuucuguacu

SEQ ID NO: 3139273 - RNA, 23 nt, Human
aauacaauuuuguuucuguacuu

SEQ ID NO: 3139274 - RNA, 15 nt, Human
aauacaauuuuguuu

SEQ ID NO: 3139275 - RNA, 17 nt, Human
aauacaauuuuguuucu

SEQ ID NO: 3139276 - RNA, 18 nt, Human
aauacaauuuuguuucug

SEQ ID NO: 3139277 - RNA, 20 nt, Human
aauacaauuuuguuucugua

SEQ ID NO: 3139278 - RNA, 12 nt, Human
aauacaauuuug

SEQ ID NO: 3139279 - RNA, 13 nt, Human
aauacaauuuugu

SEQ ID NO: 3139280 - RNA, 16 nt, Human
uaacaacagcuggugc

SEQ ID NO: 3139281 - RNA, 12 nt, Human
guuccccucucc

SEQ ID NO: 3139282 - RNA, 14 nt, Human
guuccccucucccu

SEQ ID NO: 3139283 - RNA, 16 nt, Human
guuccccucucccuuc

SEQ ID NO: 3139284 - RNA, 19 nt, Human
guuccccucucccuucccu

SEQ ID NO: 3139285 - RNA, 20 nt, Human
guuccccucucccuucccuc

SEQ ID NO: 3139286 - RNA, 22 nt, Human
guuccccucucccuucccuccu

SEQ ID NO: 3139287 - RNA, 23 nt, Human
guuccccucucccuucccuccuc

SEQ ID NO: 3139288 - RNA, 18 nt, Human
guuccccucuugucuccc

SEQ ID NO: 3139289 - RNA, 20 nt, Human
guuccccucuugucuccccu

SEQ ID NO: 3139290 - RNA, 21 nt, Human
guuccccucuugucuccccug

SEQ ID NO: 3139291 - RNA, 22 nt, Human
guuccccucuugucuccccugu

SEQ ID NO: 3139292 - RNA, 22 nt, Human
guugaauuuauuggcuuuucug

SEQ ID NO: 3139293 - RNA, 14 nt, Human
guugggggucagug

SEQ ID NO: 3139294 - RNA, 22 nt, Human
guugggggucagugcugccugu

SEQ ID NO: 3139295 - RNA, 13 nt, Human
aaguauuaagcau

SEQ ID NO: 3139296 - RNA, 10 nt, Human
guuucuguac

SEQ ID NO: 3139297 - RNA, 12 nt, Human
aacauaaaucug

SEQ ID NO: 3139298 - RNA, 14 nt, Human
aacauaaaucugug

SEQ ID NO: 3139299 - RNA, 15 nt, Human
aacauaaaucuguga

SEQ ID NO: 3139300 - RNA, 16 nt, Human
aacauguuaaaccaug

SEQ ID NO: 3139301 - RNA, 23 nt, Human
aacauguuaaaccaugggauaaa

SEQ ID NO: 3139302 - RNA, 13 nt, Human
guccuuggccccc

SEQ ID NO: 3139303 - RNA, 15 nt, Human
guccuuggcccccuu

SEQ ID NO: 3139304 - RNA, 23 nt, Human
guccuuggcccccuuucccgggc

SEQ ID NO: 3139305 - RNA, 10 nt, Human
aaccaagagg

SEQ ID NO: 3139306 - RNA, 13 nt, Human
aaccaagaggcug

SEQ ID NO: 3139307 - RNA, 14 nt, Human
aaccaagaggcugg

SEQ ID NO: 3139308 - RNA, 15 nt, Human
aaccaagaggcuggu

SEQ ID NO: 3139309 - RNA, 17 nt, Human
aaccaagaggcugguuu

SEQ ID NO: 3139310 - RNA, 18 nt, Human
aaccaaaugcaaugugaa

SEQ ID NO: 3139311 - RNA, 12 nt, Human
gugcugggcagc

SEQ ID NO: 3139312 - RNA, 13 nt, Human
gugcugggcagcc

SEQ ID NO: 3139313 - RNA, 14 nt, Human
gugcugggcagccc

SEQ ID NO: 3139314 - RNA, 15 nt, Human
gugcugggcagcccg

SEQ ID NO: 3139315 - RNA, 22 nt, Human
gugcugggguuaucugaaguca

SEQ ID NO: 3139316 - RNA, 19 nt, Human
gugcugguguaugugugaa

SEQ ID NO: 3139317 - RNA, 14 nt, Human
aacuuguguaaaua

SEQ ID NO: 3139318 - RNA, 15 nt, Human
aacuuguguaaauac

SEQ ID NO: 3139319 - RNA, 20 nt, Human
aacuuguguaaauacaauuu

SEQ ID NO: 3139320 - RNA, 21 nt, Human
guguugaaacggaugauuucu

SEQ ID NO: 3139321 - RNA, 23 nt, Human
guguugaaacggaugauuucuau

SEQ ID NO: 3139322 - RNA, 19 nt, Human
uauagauuagagaguguug

SEQ ID NO: 3139323 - RNA, 22 nt, Human
uauagauuagagaguguugaaa

SEQ ID NO: 3139324 - RNA, 20 nt, Human
uauagauuagaauucuguau

SEQ ID NO: 3139325 - RNA, 19 nt, Human
uauagauuagaauucugua

SEQ ID NO: 3139326 - RNA, 18 nt, Human
uauaaaagacugucuuaa

SEQ ID NO: 3139327 - RNA, 10 nt, Human
uaugauccag

SEQ ID NO: 3139328 - RNA, 11 nt, Human
uaugauccagc

SEQ ID NO: 3139329 - RNA, 19 nt, Human
uaugauccagcagauuauu

SEQ ID NO: 3139330 - RNA, 22 nt, Human
uaugauccagcagauuauucac

SEQ ID NO: 3139331 - RNA, 20 nt, Human
uaugauccagcagauuauuc

SEQ ID NO: 3139332 - RNA, 21 nt, Human
uaugauccagcagauuauuca

SEQ ID NO: 3139333 - RNA, 20 nt, Human
uaucaccugucuugccuuuu

SEQ ID NO: 3139334 - RNA, 13 nt, Human
uauucacugauuu

SEQ ID NO: 3139335 - RNA, 19 nt, Human
uauucacugauuugacaua

SEQ ID NO: 3139336 - RNA, 22 nt, Human
uauucacugauuugacauaguc

SEQ ID NO: 3139337 - RNA, 23 nt, Human
uauucaaaguugccuaaauccau

SEQ ID NO: 3139338 - RNA, 16 nt, Human
uauucaaaguugccua

SEQ ID NO: 3139339 - RNA, 18 nt, Human
uauucaaaguugccuaaa

SEQ ID NO: 3139340 - RNA, 21 nt, Human
uauucaaaguugccuaaaucc

SEQ ID NO: 3139341 - RNA, 22 nt, Human
uauucaaaguugccuaaaucca

SEQ ID NO: 3139342 - RNA, 17 nt, Human
acagcuggugcccugcu

SEQ ID NO: 3139343 - RNA, 20 nt, Human
acagcuggugcccugcuuuc

SEQ ID NO: 3139344 - RNA, 13 nt, Human
uauuaaagccaug

SEQ ID NO: 3139345 - RNA, 14 nt, Human
uauuaaagccaugu

SEQ ID NO: 3139346 - RNA, 12 nt, Human
uauuaaagccau

SEQ ID NO: 3139347 - RNA, 14 nt, Human
uauuacaguauaau

SEQ ID NO: 3139348 - RNA, 16 nt, Human
uauuacaguauaauua

SEQ ID NO: 3139349 - RNA, 18 nt, Human
uauuacaguauaauuaac

SEQ ID NO: 3139350 - RNA, 20 nt, Human
uauuacaguauaauuaacau

SEQ ID NO: 3139351 - RNA, 21 nt, Human
uauuacaguauaauuaacaug

SEQ ID NO: 3139352 - RNA, 20 nt, Human
uauuaaagccauguuuauua

SEQ ID NO: 3139353 - RNA, 17 nt, Human
uauuaaagccauguuua

SEQ ID NO: 3139354 - RNA, 18 nt, Human
uauuaaagccauguuuau

SEQ ID NO: 3139355 - RNA, 23 nt, Human
acaguauaauuaacauguuaaac

SEQ ID NO: 3139356 - RNA, 21 nt, Human
acaguauaauuaacauguuaa

SEQ ID NO: 3139357 - RNA, 18 nt, Human
uauuuacuaaaauggacu

SEQ ID NO: 3139358 - RNA, 15 nt, Human
uauuguacaaaguau

SEQ ID NO: 3139359 - RNA, 16 nt, Human
uauuguacaaaguauu

SEQ ID NO: 3139360 - RNA, 21 nt, Human
uauuguacaaaguauuaagca

SEQ ID NO: 3139361 - RNA, 22 nt, Human
uauuguacaaaguauuaagcau

SEQ ID NO: 3139362 - RNA, 23 nt, Human
uauuguacaaaguauuaagcaua

SEQ ID NO: 3139363 - RNA, 14 nt, Human
uauuggcuuuucug

SEQ ID NO: 3139364 - RNA, 15 nt, Human
uauuggcuuuucuga

SEQ ID NO: 3139365 - RNA, 16 nt, Human
uauuggcuuuucugau

SEQ ID NO: 3139366 - RNA, 17 nt, Human
uauuggcuuuucugauc

SEQ ID NO: 3139367 - RNA, 18 nt, Human
uauuggcuuuucugaucc

SEQ ID NO: 3139368 - RNA, 21 nt, Human
uauuggcuuuucugauccagu

SEQ ID NO: 3139369 - RNA, 22 nt, Human
uauuggcuuuucugauccaguu

SEQ ID NO: 3139370 - RNA, 12 nt, Human
uacucaauuuua

SEQ ID NO: 3139371 - RNA, 13 nt, Human
uacucaauuuuaa

SEQ ID NO: 3139372 - RNA, 14 nt, Human
uacucaauuuuaac

SEQ ID NO: 3139373 - RNA, 18 nt, Human
aauuugaauuuuguguua

SEQ ID NO: 3139374 - RNA, 13 nt, Human
aauuugaauuuug

SEQ ID NO: 3139375 - RNA, 16 nt, Human
aauuugaauuuugugu

SEQ ID NO: 3139376 - RNA, 13 nt, Human
acaaaaacauggc

SEQ ID NO: 3139377 - RNA, 14 nt, Human
uagaaccucuuugu

SEQ ID NO: 3139378 - RNA, 21 nt, Human
uagaggaagccugauuaaaga

SEQ ID NO: 3139379 - RNA, 16 nt, Human
uacaaaaacauggccu

SEQ ID NO: 3139380 - RNA, 21 nt, Human
uaauuauaugcuauuucuaua

SEQ ID NO: 3139381 - RNA, 20 nt, Human
uaauuauaugcuauuucuau

SEQ ID NO: 3139382 - RNA, 13 nt, Human
uaauuauaucuga

SEQ ID NO: 3139383 - RNA, 17 nt, Human
uaauuauaucugaggaa

SEQ ID NO: 3139384 - RNA, 18 nt, Human
aauuaacauguuaaacca

SEQ ID NO: 3139385 - RNA, 13 nt, Human
aauuaacauguua

SEQ ID NO: 3139386 - RNA, 14 nt, Human
aauuaacauguuaa

SEQ ID NO: 3139387 - RNA, 18 nt, Human
aaaaaauuggggauucuu

SEQ ID NO: 3139388 - RNA, 20 nt, Human
aaaaaccaguauuguacaaa

SEQ ID NO: 3139389 - RNA, 19 nt, Human
aaaaaccaucuguaaaaga

SEQ ID NO: 3139390 - RNA, 15 nt, Human
aaaccaugggauaaa

SEQ ID NO: 3139391 - RNA, 20 nt, Human
aaaccaugggauaaaugcca

SEQ ID NO: 3139392 - RNA, 15 nt, Human
aaaucugugaacuug

SEQ ID NO: 3139393 - RNA, 16 nt, Human
aaaucugugaacuuga

SEQ ID NO: 3139394 - RNA, 18 nt, Human
aaaucugugaacuugaaa

SEQ ID NO: 3139395 - RNA, 18 nt, Human
aaauagcuagacugguga

SEQ ID NO: 3139396 - RNA, 10 nt, Human
aaauaaauaa

SEQ ID NO: 3139397 - RNA, 16 nt, Human
aaagccagggcuggag

SEQ ID NO: 3139398 - RNA, 14 nt, Human
aacggaugauuucu

SEQ ID NO: 3139399 - RNA, 15 nt, Human
aacggaugauuucua

SEQ ID NO: 3139400 - RNA, 16 nt, Human
aacggaugauuucuau

SEQ ID NO: 3139401 - RNA, 17 nt, Human
aacggaugauuucuaug

SEQ ID NO: 3139402 - RNA, 17 nt, Human
aacgaucagacagaucu

SEQ ID NO: 3139403 - RNA, 20 nt, Human
aacagcuggugcccugcuuu

SEQ ID NO: 3139404 - RNA, 21 nt, Human
aacagcuggugcccugcuuuc

SEQ ID NO: 3139405 - RNA, 19 nt, Human
aacagcuggugcccugcuu

SEQ ID NO: 3139406 - RNA, 17 nt, Human
aacagcuggugcccugc

SEQ ID NO: 3139407 - RNA, 15 nt, Human
aaguugccuaaaucc

SEQ ID NO: 3139408 - RNA, 16 nt, Human
aaguugccuaaaucca

SEQ ID NO: 3139409 - RNA, 17 nt, Human
aaguugccuaaauccau

SEQ ID NO: 3139410 - RNA, 18 nt, Human
aaguugccuaaauccauu

SEQ ID NO: 3139411 - RNA, 19 nt, Human
aaguugccuaaauccauuu

SEQ ID NO: 3139412 - RNA, 15 nt, Human
aagaguggaggugga

SEQ ID NO: 3139413 - RNA, 14 nt, Human
aaggacuucuuuaa

SEQ ID NO: 3139414 - RNA, 15 nt, Human
aaggacuucuuuaau

SEQ ID NO: 3139415 - RNA, 20 nt, Human
aaggacuucuuuaauuuugg

SEQ ID NO: 3139416 - RNA, 21 nt, Human
aaggacuucuuuaauuuugga

SEQ ID NO: 3139417 - RNA, 13 nt, Human
aagggccaggaga

SEQ ID NO: 3139418 - RNA, 17 nt, Human
aagggccaggagaugga

SEQ ID NO: 3139419 - RNA, 12 nt, Human
aaguugccuaaa

SEQ ID NO: 3139420 - RNA, 14 nt, Human
acuggugacugauu

SEQ ID NO: 3139421 - RNA, 19 nt, Human
acugguugguuuugccauu

SEQ ID NO: 3139422 - RNA, 15 nt, Human
agaaaauaccaagga

SEQ ID NO: 3139423 - RNA, 16 nt, Human
agaaagggccaggaga

SEQ ID NO: 3139424 - RNA, 20 nt, Human
agaaagggccaggagaugga

SEQ ID NO: 3139425 - RNA, 20 nt, Human
accagauucuauccucaucu

SEQ ID NO: 3139426 - RNA, 21 nt, Human
accagauucuauccucaucuu

SEQ ID NO: 3139427 - RNA, 13 nt, Human
aauuuuguuucug

SEQ ID NO: 3139428 - RNA, 14 nt, Human
aauuuuguuucugu

SEQ ID NO: 3139429 - RNA, 19 nt, Human
acaagaaagggccaggaga

SEQ ID NO: 3139430 - RNA, 21 nt, Human
agacagauacuccuccaaggu

SEQ ID NO: 3139431 - RNA, 15 nt, Human
agacagauacuccuc

SEQ ID NO: 3139432 - RNA, 20 nt, Human
aggcugguuuuggcaucucu

SEQ ID NO: 3139433 - RNA, 21 nt, Human
aggcugguuuuggcaucucug

SEQ ID NO: 3139434 - RNA, 20 nt, Human
augguccgugcuaaggacuu

SEQ ID NO: 3139435 - RNA, 21 nt, Human
augguccgugcuaaggacuug

SEQ ID NO: 3139436 - RNA, 19 nt, Human
augguccgugcuaaggacu

SEQ ID NO: 3139437 - RNA, 11 nt, Human
augugggcagc

SEQ ID NO: 3139438 - RNA, 12 nt, Human
augugggcagcu

SEQ ID NO: 3139439 - RNA, 13 nt, Human
augugugaaguga

SEQ ID NO: 3139440 - RNA, 15 nt, Human
auccucaucuuuuuu

SEQ ID NO: 3139441 - RNA, 14 nt, Human
aucucccugcuuug

SEQ ID NO: 3139442 - RNA, 17 nt, Human
aucucugucccauuccc

SEQ ID NO: 3139443 - RNA, 19 nt, Human
aucucugucccauucccug

SEQ ID NO: 3139444 - RNA, 20 nt, Human
aucucugucccauucccugg

SEQ ID NO: 3139445 - RNA, 21 nt, Human
aucucugucccauucccuggg

SEQ ID NO: 3139446 - RNA, 22 nt, Human
aucucugucccauucccuggga

SEQ ID NO: 3139447 - RNA, 14 nt, Human
auaacauaaaucug

SEQ ID NO: 3139448 - RNA, 15 nt, Human
auaacauaaaucugu

SEQ ID NO: 3139449 - RNA, 17 nt, Human
auaacauaaaucuguga

SEQ ID NO: 3139450 - RNA, 18 nt, Human
auaacauaaaucugugaa

SEQ ID NO: 3139451 - RNA, 19 nt, Human
auaacauaaaucugugaac

SEQ ID NO: 3139452 - RNA, 15 nt, Human
auaauuaacauguua

SEQ ID NO: 3139453 - RNA, 16 nt, Human
auaaggaaaaguuuaa

SEQ ID NO: 3139454 - RNA, 15 nt, Human
auaaggaaaaguuua

SEQ ID NO: 3139455 - RNA, 18 nt, Human
auauuuacuaaaauggac

SEQ ID NO: 3139456 - RNA, 20 nt, Human
auauuuacuaaaauggacug

SEQ ID NO: 3139457 - RNA, 22 nt, Human
auaugcuauuucuauauuuuca

SEQ ID NO: 3139458 - RNA, 23 nt, Human
auaugcuauuucuauauuuucau

SEQ ID NO: 3139459 - RNA, 15 nt, Human
auaugcuauuucuau

SEQ ID NO: 3139460 - RNA, 16 nt, Human
auaugcuauuucuaua

SEQ ID NO: 3139461 - RNA, 18 nt, Human
auaugcuauuucuauauu

SEQ ID NO: 3139462 - RNA, 19 nt, Human
auaugcuauuucuauauuu

SEQ ID NO: 3139463 - RNA, 21 nt, Human
auaugcuauuucuauauuuuc

SEQ ID NO: 3139464 - RNA, 12 nt, Human
cacaccuccucu

SEQ ID NO: 3139465 - RNA, 12 nt, Human
cacacuucccug

SEQ ID NO: 3139466 - RNA, 13 nt, Human
cacacuucccugg

SEQ ID NO: 3139467 - RNA, 14 nt, Human
cacacuucccuggc

SEQ ID NO: 3139468 - RNA, 15 nt, Human
cacacuucccuggcg

SEQ ID NO: 3139469 - RNA, 20 nt, Human
cacauugguguuguacucaa

SEQ ID NO: 3139470 - RNA, 18 nt, Human
caaaguugccuaaaucca

SEQ ID NO: 3139471 - RNA, 19 nt, Human
caaaguugccuaaauccau

SEQ ID NO: 3139472 - RNA, 15 nt, Human
cacccacccuuuuuu

SEQ ID NO: 3139473 - RNA, 14 nt, Human
cacccccgcuggag

SEQ ID NO: 3139474 - RNA, 16 nt, Human
cacccccgcuggagga

SEQ ID NO: 3139475 - RNA, 16 nt, Human
uugaaacggaugauuu

SEQ ID NO: 3139476 - RNA, 19 nt, Human
uugaaacggaugauuucua

SEQ ID NO: 3139477 - RNA, 17 nt, Human
uucuuuaauuuuggaau

SEQ ID NO: 3139478 - RNA, 18 nt, Human
uucuuuaauuuuggaauu

SEQ ID NO: 3139479 - RNA, 12 nt, Human
uucuuuaauuuu

SEQ ID NO: 3139480 - RNA, 14 nt, Human
uucuguauagauua

SEQ ID NO: 3139481 - RNA, 13 nt, Human
uucuguauagauu

SEQ ID NO: 3139482 - RNA, 11 nt, Human
uucuguauaga

SEQ ID NO: 3139483 - RNA, 18 nt, Human
uuggcauaacauaaaucu

SEQ ID NO: 3139484 - RNA, 19 nt, Human
uuggcauaacauaaaucug

SEQ ID NO: 3139485 - RNA, 20 nt, Human
uuggcauaacauaaaucugu

SEQ ID NO: 3139486 - RNA, 22 nt, Human
uuggcauaacauaaaucuguga

SEQ ID NO: 3139487 - RNA, 23 nt, Human
uuggcauaacauaaaucugugaa

SEQ ID NO: 3139488 - RNA, 12 nt, Human
uugccuuuuuca

SEQ ID NO: 3139489 - RNA, 13 nt, Human
uugccuuuuucau

SEQ ID NO: 3139490 - RNA, 14 nt, Human
uugccuuuuucauu

SEQ ID NO: 3139491 - RNA, 15 nt, Human
uugccuuuuucauua

SEQ ID NO: 3139492 - RNA, 16 nt, Human
uugccuuuuucauuau

SEQ ID NO: 3139493 - RNA, 17 nt, Human
uugccuuuuucauuauu

SEQ ID NO: 3139494 - RNA, 13 nt, Human
uuucugauccagu

SEQ ID NO: 3139495 - RNA, 15 nt, Human
uuucugauccaguuu

SEQ ID NO: 3139496 - RNA, 16 nt, Human
uuucugauccaguuuu

SEQ ID NO: 3139497 - RNA, 20 nt, Human
uuucugauccaguuuuguuu

SEQ ID NO: 3139498 - RNA, 22 nt, Human
uuucugauccaguuuuguuugg

SEQ ID NO: 3139499 - RNA, 14 nt, Human
uuucugaaauaaca

SEQ ID NO: 3139500 - RNA, 16 nt, Human
uuugcuugaaagaaaa

SEQ ID NO: 3139501 - RNA, 14 nt, Human
uuugcuugaaagaa

SEQ ID NO: 3139502 - RNA, 14 nt, Human
uuuaauauuaaagc

SEQ ID NO: 3139503 - RNA, 15 nt, Human
uuuaauauuaaagcc

SEQ ID NO: 3139504 - RNA, 17 nt, Human
uuuaauauuaaagccau

SEQ ID NO: 3139505 - RNA, 20 nt, Human
uuuaauauuaaagccauguu

SEQ ID NO: 3139506 - RNA, 21 nt, Human
uuuaauauuaaagccauguuu

SEQ ID NO: 3139507 - RNA, 12 nt, Human
uuguuucuguac

SEQ ID NO: 3139508 - RNA, 14 nt, Human
uuguuucuguacuu

SEQ ID NO: 3139509 - RNA, 13 nt, Human
uuguuuguuuagu

SEQ ID NO: 3139510 - RNA, 14 nt, Human
uuguuuguuuaguc

SEQ ID NO: 3139511 - RNA, 20 nt, Human
uuuaaaaguauauaauaaaa

SEQ ID NO: 3139512 - RNA, 17 nt, Human
uuaucugaagucagauc

SEQ ID NO: 3139513 - RNA, 13 nt, Human
uuaugccaccccc

SEQ ID NO: 3139514 - RNA, 23 nt, Human
uuaugccacccccgcuggaggau

SEQ ID NO: 3139515 - RNA, 13 nt, Human
uuauuuuauuaug

SEQ ID NO: 3139516 - RNA, 11 nt, Human
uucaaaguugc

SEQ ID NO: 3139517 - RNA, 15 nt, Human
uucaaaguugccuaa

SEQ ID NO: 3139518 - RNA, 16 nt, Human
uucaaaguugccuaaa

SEQ ID NO: 3139519 - RNA, 17 nt, Human
uucaaaguugccuaaau

SEQ ID NO: 3139520 - RNA, 23 nt, Human
uucaaaguugccuaaauccauuu

SEQ ID NO: 3139521 - RNA, 16 nt, Human
uuauuggcuuuucuga

SEQ ID NO: 3139522 - RNA, 18 nt, Human
uuauuggcuuuucugauc

SEQ ID NO: 3139523 - RNA, 22 nt, Human
uuauuggcuuuucugauccagu

SEQ ID NO: 3139524 - RNA, 12 nt, Human
uuauuggcuuuu

SEQ ID NO: 3139525 - RNA, 21 nt, Human
uucacucuccauuuaauaauu

SEQ ID NO: 3139526 - RNA, 20 nt, Human
uucccugggaucuggugguc

SEQ ID NO: 3139527 - RNA, 15 nt, Human
uucccuggcggcccc

SEQ ID NO: 3139528 - RNA, 20 nt, Human
uucccuggcggccccaacuc

SEQ ID NO: 3139529 - RNA, 11 nt, Human
uucccuccucc

SEQ ID NO: 3139530 - RNA, 12 nt, Human
uucccuccuccc

SEQ ID NO: 3139531 - RNA, 13 nt, Human
uucccuccuccca

SEQ ID NO: 3139532 - RNA, 14 nt, Human
uucccuccucccau

SEQ ID NO: 3139533 - RNA, 22 nt, Human
uucccuccucccaugucacugc

SEQ ID NO: 3139534 - RNA, 20 nt, Human
uuaauauuaaagccauguuu

SEQ ID NO: 3139535 - RNA, 21 nt, Human
uuaauauuaaagccauguuua

SEQ ID NO: 3139536 - RNA, 22 nt, Human
uuaauauuaaagccauguuuau

SEQ ID NO: 3139537 - RNA, 19 nt, Human
uuaagcauauauuuuuaua

SEQ ID NO: 3139538 - RNA, 15 nt, Human
uuaagcauauauuuu

SEQ ID NO: 3139539 - RNA, 18 nt, Human
uuaagcauauauuuuuau

SEQ ID NO: 3139540 - RNA, 13 nt, Human
uuaagcauauauu

SEQ ID NO: 3139541 - RNA, 13 nt, Human
uuagagugucuua

SEQ ID NO: 3139542 - RNA, 18 nt, Human
uuagagaguguugaaacg

SEQ ID NO: 3139543 - RNA, 12 nt, Human
uuagagauuuuu

SEQ ID NO: 3139544 - RNA, 13 nt, Human
uuagaucuaguuc

SEQ ID NO: 3139545 - RNA, 14 nt, Human
uuagaucuaguuca

SEQ ID NO: 3139546 - RNA, 14 nt, Human
uuagagaguguuga

SEQ ID NO: 3139547 - RNA, 16 nt, Human
uuagagaguguugaaa

SEQ ID NO: 3139548 - RNA, 17 nt, Human
uuagagaguguugaaac

SEQ ID NO: 3139549 - RNA, 22 nt, Human
uauuauguaaaucccauuauuc

SEQ ID NO: 3139550 - RNA, 12 nt, Human
uauuauguaaau

SEQ ID NO: 3139551 - RNA, 15 nt, Human
uauuauguaaauccc

SEQ ID NO: 3139552 - RNA, 12 nt, Human
uauuaugaaacu

SEQ ID NO: 3139553 - RNA, 20 nt, Human
uauuaugaaacuuguguaaa

SEQ ID NO: 3139554 - RNA, 21 nt, Human
uauuaugaaacuuguguaaau

SEQ ID NO: 3139555 - RNA, 22 nt, Human
uauuaugaaacuuguguaaaua

SEQ ID NO: 3139556 - RNA, 16 nt, Human
uauuaagcauauauuu

SEQ ID NO: 3139557 - RNA, 23 nt, Human
uauugugcgcuaaacuuuucuga

SEQ ID NO: 3139558 - RNA, 19 nt, Human
uauugugcgcuaaacuuuu

SEQ ID NO: 3139559 - RNA, 22 nt, Human
uauugugcgcuaaacuuuucug

SEQ ID NO: 3139560 - RNA, 18 nt, Human
uauuucuauauuuucauu

SEQ ID NO: 3139561 - RNA, 13 nt, Human
ucaauaaaaaauu

SEQ ID NO: 3139562 - RNA, 14 nt, Human
ucaauaaaaaauua

SEQ ID NO: 3139563 - RNA, 16 nt, Human
ucaauaaaaaauuaug

SEQ ID NO: 3139564 - RNA, 18 nt, Human
ucacauugguguuguacu

SEQ ID NO: 3139565 - RNA, 19 nt, Human
ucaauaaaaaauuaugaca

SEQ ID NO: 3139566 - RNA, 17 nt, Human
uaucugaggaauucugu

SEQ ID NO: 3139567 - RNA, 16 nt, Human
uaucugaggaauucug

SEQ ID NO: 3139568 - RNA, 18 nt, Human
uaucugaggaauucugua

SEQ ID NO: 3139569 - RNA, 19 nt, Human
uaucugaggaauucuguau

SEQ ID NO: 3139570 - RNA, 21 nt, Human
uaucugaggaauucuguauag

SEQ ID NO: 3139571 - RNA, 22 nt, Human
uaucugaggaauucuguauaga

SEQ ID NO: 3139572 - RNA, 17 nt, Human
uaggcucgccuucccuc

SEQ ID NO: 3139573 - RNA, 22 nt, Human
uaggcucgccuucccuccugcu

SEQ ID NO: 3139574 - RNA, 22 nt, Human
uauaauuaacauguuaaaccau

SEQ ID NO: 3139575 - RNA, 15 nt, Human
uauaauuaacauguu

SEQ ID NO: 3139576 - RNA, 16 nt, Human
uauaauuaacauguua

SEQ ID NO: 3139577 - RNA, 18 nt, Human
uauaauuaacauguuaaa

SEQ ID NO: 3139578 - RNA, 19 nt, Human
uauaauuaacauguuaaac

SEQ ID NO: 3139579 - RNA, 13 nt, Human
uauaauuaacaug

SEQ ID NO: 3139580 - RNA, 14 nt, Human
uauaauuaacaugu

SEQ ID NO: 3139581 - RNA, 12 nt, Human
uauaauuaacau

SEQ ID NO: 3139582 - RNA, 18 nt, Human
uauaucugaggaauucug

SEQ ID NO: 3139583 - RNA, 19 nt, Human
uauaucugaggaauucugu

SEQ ID NO: 3139584 - RNA, 20 nt, Human
uauaucugaggaauucugua

SEQ ID NO: 3139585 - RNA, 21 nt, Human
uauaucugaggaauucuguau

SEQ ID NO: 3139586 - RNA, 22 nt, Human
uauaucugaggaauucuguaua

SEQ ID NO: 3139587 - RNA, 16 nt, Human
ucucccugcuuugguc

SEQ ID NO: 3139588 - RNA, 10 nt, Human
ucucccugga

SEQ ID NO: 3139589 - RNA, 21 nt, Human
ucucccuggaucuaccuggag

SEQ ID NO: 3139590 - RNA, 22 nt, Human
ucucccuggaucuaccuggagg

SEQ ID NO: 3139591 - RNA, 20 nt, Human
uccuaucaccugucuugccu

SEQ ID NO: 3139592 - RNA, 12 nt, Human
uccgagugguga

SEQ ID NO: 3139593 - RNA, 11 nt, Human
ucccuucccuc

SEQ ID NO: 3139594 - RNA, 13 nt, Human
ucccuucccuccu

SEQ ID NO: 3139595 - RNA, 14 nt, Human
ucccuucccuccuc

SEQ ID NO: 3139596 - RNA, 15 nt, Human
ucccuucccuccucc

SEQ ID NO: 3139597 - RNA, 16 nt, Human
ucccuucccuccuccc

SEQ ID NO: 3139598 - RNA, 20 nt, Human
ucauggaacgcguugaaauu

SEQ ID NO: 3139599 - RNA, 21 nt, Human
ucauggaacgcguugaaauug

SEQ ID NO: 3139600 - RNA, 22 nt, Human
ucauggaacgcguugaaauugu

SEQ ID NO: 3139601 - RNA, 20 nt, Human
uccaguuuuguuuggaccaa

SEQ ID NO: 3139602 - RNA, 15 nt, Human
uccaguuuuguuugg

SEQ ID NO: 3139603 - RNA, 17 nt, Human
uccaguuuuguuuggac

SEQ ID NO: 3139604 - RNA, 14 nt, Human
uccagcagauuauu

SEQ ID NO: 3139605 - RNA, 15 nt, Human
uccagcagauuauuc

SEQ ID NO: 3139606 - RNA, 16 nt, Human
uccagcagauuauuca

SEQ ID NO: 3139607 - RNA, 16 nt, Human
ucccauuauucaaagu

SEQ ID NO: 3139608 - RNA, 18 nt, Human
ucccauuauucaaaguug

SEQ ID NO: 3139609 - RNA, 19 nt, Human
ucccauuauucaaaguugc

SEQ ID NO: 3139610 - RNA, 15 nt, Human
ucccaugucacugca

SEQ ID NO: 3139611 - RNA, 13 nt, Human
ucccauuauucaa

SEQ ID NO: 3139612 - RNA, 14 nt, Human
ucccauuauucaaa

SEQ ID NO: 3139613 - RNA, 16 nt, Human
ugaggcuaaguuggga

SEQ ID NO: 3139614 - RNA, 15 nt, Human
ugauagaggaagccu

SEQ ID NO: 3139615 - RNA, 21 nt, Human
ugauucuucagcaaaaauauu

SEQ ID NO: 3139616 - RNA, 17 nt, Human
ugacauagucuggcugu

SEQ ID NO: 3139617 - RNA, 16 nt, Human
ugacauagucuggcug

SEQ ID NO: 3139618 - RNA, 20 nt, Human
ugaagucagaucugccuaag

SEQ ID NO: 3139619 - RNA, 23 nt, Human
ugaagucagaucugccuaaggac

SEQ ID NO: 3139620 - RNA, 13 nt, Human
ucucccuucccuc

SEQ ID NO: 3139621 - RNA, 15 nt, Human
ucucccuucccuccu

SEQ ID NO: 3139622 - RNA, 16 nt, Human
ucucccuucccuccuc

SEQ ID NO: 3139623 - RNA, 14 nt, Human
ucuugcugcccugc

SEQ ID NO: 3139624 - RNA, 15 nt, Human
ucuugcugcccugcc

SEQ ID NO: 3139625 - RNA, 18 nt, Human
ucuugcugcccugcccca

SEQ ID NO: 3139626 - RNA, 15 nt, Human
ucuugccuuuuucau

SEQ ID NO: 3139627 - RNA, 16 nt, Human
ucuugccuuuuucauu

SEQ ID NO: 3139628 - RNA, 17 nt, Human
ucuugccuuuuucauua

SEQ ID NO: 3139629 - RNA, 19 nt, Human
ucuugccuuuuucauuauu

SEQ ID NO: 3139630 - RNA, 23 nt, Human
ugaaagggaguauuacaaaaaca

SEQ ID NO: 3139631 - RNA, 17 nt, Human
ugcugggguuaucugaa

SEQ ID NO: 3139632 - RNA, 20 nt, Human
ugcugggguuaucugaaguc

SEQ ID NO: 3139633 - RNA, 13 nt, Human
ugcugguguaugu

SEQ ID NO: 3139634 - RNA, 22 nt, Human
ugcugguguaugugugaaguga

SEQ ID NO: 3139635 - RNA, 11 nt, Human
ugcugggcagc

SEQ ID NO: 3139636 - RNA, 12 nt, Human
ugcugggcagcc

SEQ ID NO: 3139637 - RNA, 13 nt, Human
ugcugggcagccc

SEQ ID NO: 3139638 - RNA, 14 nt, Human
ugcugggcagcccg

SEQ ID NO: 3139639 - RNA, 15 nt, Human
ugcugggcagcccgc

SEQ ID NO: 3139640 - RNA, 13 nt, Human
ugcugccuguccc

SEQ ID NO: 3139641 - RNA, 14 nt, Human
ugcugccugucccc

SEQ ID NO: 3139642 - RNA, 15 nt, Human
ugcugccugucccca

SEQ ID NO: 3139643 - RNA, 21 nt, Human
ugcgcuaaacuuuucugauag

SEQ ID NO: 3139644 - RNA, 14 nt, Human
ugcgccacugcucc

SEQ ID NO: 3139645 - RNA, 19 nt, Human
ugcgccacugcuccgugga

SEQ ID NO: 3139646 - RNA, 22 nt, Human
ugcgccacugcuccguggagga

SEQ ID NO: 3139647 - RNA, 19 nt, Human
ugcgcuaaacuuuucugau

SEQ ID NO: 3139648 - RNA, 20 nt, Human
ugcgcuaaacuuuucugaua

SEQ ID NO: 3139649 - RNA, 17 nt, Human
ugccccacaccuccucu

SEQ ID NO: 3139650 - RNA, 20 nt, Human
ugccccacaccuccucucac

SEQ ID NO: 3139651 - RNA, 23 nt, Human
ugccuaaauccauuuggaaaucu

SEQ ID NO: 3139652 - RNA, 20 nt, Human
ugccuaaauccauuuggaaa

SEQ ID NO: 3139653 - RNA, 22 nt, Human
ugccuaaauccauuuggaaauc

SEQ ID NO: 3139654 - RNA, 20 nt, Human
ugccucacccacccuuuuuu

SEQ ID NO: 3139655 - RNA, 13 nt, Human
ugccuaaauccau

SEQ ID NO: 3139656 - RNA, 15 nt, Human
ugccuaaauccauuu

SEQ ID NO: 3139657 - RNA, 19 nt, Human
ugccuaaauccauuuggaa

SEQ ID NO: 3139658 - RNA, 19 nt, Human
uggugacugauucuucagc

SEQ ID NO: 3139659 - RNA, 15 nt, Human
uggugacugauucuu

SEQ ID NO: 3139660 - RNA, 16 nt, Human
uggugacugauucuuc

SEQ ID NO: 3139661 - RNA, 18 nt, Human
uggugagccggucaggca

SEQ ID NO: 3139662 - RNA, 19 nt, Human
uggugacaggacgcugacc

SEQ ID NO: 3139663 - RNA, 17 nt, Human
ugguccgugcuaaggac

SEQ ID NO: 3139664 - RNA, 18 nt, Human
ugguccgugcuaaggacu

SEQ ID NO: 3139665 - RNA, 19 nt, Human
ugguccgugcuaaggacuu

SEQ ID NO: 3139666 - RNA, 20 nt, Human
ugguccgugcuaaggacuug

SEQ ID NO: 3139667 - RNA, 18 nt, Human
ugggggucagugcugccu

SEQ ID NO: 3139668 - RNA, 21 nt, Human
uggcggccccaacucgggcuc

SEQ ID NO: 3139669 - RNA, 23 nt, Human
uggcggccccaacucgggcuccc

SEQ ID NO: 3139670 - RNA, 16 nt, Human
uggcccccuuucccgg

SEQ ID NO: 3139671 - RNA, 17 nt, Human
uggcccccuuucccggg

SEQ ID NO: 3139672 - RNA, 18 nt, Human
uggcccccuuucccgggc

SEQ ID NO: 3139673 - RNA, 23 nt, Human
uggcccccuuucccgggcugucc

SEQ ID NO: 3139674 - RNA, 17 nt, Human
uggaggagguugggagg

SEQ ID NO: 3139675 - RNA, 16 nt, Human
uggaggaugugggcag

SEQ ID NO: 3139676 - RNA, 17 nt, Human
uggaggaugugggcagc

SEQ ID NO: 3139677 - RNA, 21 nt, Human
uggcaaaauaguucugcaggu

SEQ ID NO: 3139678 - RNA, 17 nt, Human
uggaccaaaaaccagua

SEQ ID NO: 3139679 - RNA, 22 nt, Human
uggaccaaaaaccaguauugua

SEQ ID NO: 3139680 - RNA, 19 nt, Human
gugaauggcuuuguauaga

SEQ ID NO: 3139681 - RNA, 17 nt, Human
gugaauggcuuuguaua

SEQ ID NO: 3139682 - RNA, 18 nt, Human
gugaauggcuuuguauag

SEQ ID NO: 3139683 - RNA, 13 nt, Human
gugaauggcuuug

SEQ ID NO: 3139684 - RNA, 14 nt, Human
gugaauggcuuugu

SEQ ID NO: 3139685 - RNA, 23 nt, Human
guggagcuuaagccacugccucu

SEQ ID NO: 3139686 - RNA, 14 nt, Human
guggaggagguugg

SEQ ID NO: 3139687 - RNA, 15 nt, Human
guggaggagguuggg

SEQ ID NO: 3139688 - RNA, 16 nt, Human
guggaggagguuggga

SEQ ID NO: 3139689 - RNA, 13 nt, Human
gucucagauuuua

SEQ ID NO: 3139690 - RNA, 21 nt, Human
gucucgucuuccgucuccccc

SEQ ID NO: 3139691 - RNA, 22 nt, Human
guaaauacaauuuuguuucugu

SEQ ID NO: 3139692 - RNA, 23 nt, Human
guaaauacaauuuuguuucugua

SEQ ID NO: 3139693 - RNA, 15 nt, Human
guaaaucccauuauu

SEQ ID NO: 3139694 - RNA, 21 nt, Human
guaaauacaauuuuguuucug

SEQ ID NO: 3139695 - RNA, 20 nt, Human
guaaaucccauuauucaaag

SEQ ID NO: 3139696 - RNA, 21 nt, Human
guaaaucccauuauucaaagu

SEQ ID NO: 3139697 - RNA, 16 nt, Human
guaaaucccauuauuc

SEQ ID NO: 3139698 - RNA, 17 nt, Human
guaaaucccauuauuca

SEQ ID NO: 3139699 - RNA, 18 nt, Human
guaaaucccauuauucaa

SEQ ID NO: 3139700 - RNA, 19 nt, Human
guaaaucccauuauucaaa

SEQ ID NO: 3139701 - RNA, 15 nt, Human
gguuuuggcaucucu

SEQ ID NO: 3139702 - RNA, 16 nt, Human
gguugaagccaugucu

SEQ ID NO: 3139703 - RNA, 17 nt, Human
gguugaagccaugucua

SEQ ID NO: 3139704 - RNA, 12 nt, Human
guacuuuuuggc

SEQ ID NO: 3139705 - RNA, 21 nt, Human
guacuuuuuggcauaacauaa

SEQ ID NO: 3139706 - RNA, 13 nt, Human
guaauuauaucug

SEQ ID NO: 3139707 - RNA, 14 nt, Human
ggucagcccuagga

SEQ ID NO: 3139708 - RNA, 22 nt, Human
ggguuggggugguugaggcuaa

SEQ ID NO: 3139709 - RNA, 16 nt, Human
gguccgugcuaaggac

SEQ ID NO: 3139710 - RNA, 17 nt, Human
gguccgugcuaaggacu

SEQ ID NO: 3139711 - RNA, 18 nt, Human
gguccgugcuaaggacuu

SEQ ID NO: 3139712 - RNA, 17 nt, Human
ggugaauggcuuuguau

SEQ ID NO: 3139713 - RNA, 20 nt, Human
ggugaauggcuuuguauaga

SEQ ID NO: 3139714 - RNA, 14 nt, Human
ggugaauggcuuug

SEQ ID NO: 3139715 - RNA, 19 nt, Human
ggugcccugcuuucagaua

SEQ ID NO: 3139716 - RNA, 15 nt, Human
ggggcagcagcagcc

SEQ ID NO: 3139717 - RNA, 16 nt, Human
ggggcagcagcagccc

SEQ ID NO: 3139718 - RNA, 18 nt, Human
ggggcagcagcagcccug

SEQ ID NO: 3139719 - RNA, 19 nt, Human
ggggcagcagcagcccugc

SEQ ID NO: 3139720 - RNA, 20 nt, Human
ggggcagcagcagcccugcc

SEQ ID NO: 3139721 - RNA, 16 nt, Human
ggggugcagaggcugu

SEQ ID NO: 3139722 - RNA, 19 nt, Human
gggcgccccccccucccca

SEQ ID NO: 3139723 - RNA, 20 nt, Human
gggcgccgugcugggcagcc

SEQ ID NO: 3139724 - RNA, 22 nt, Human
gggcgccgugcugggcagcccg

SEQ ID NO: 3139725 - RNA, 24 nt, Human
gggcgccgugcugggcagcccgcu

SEQ ID NO: 3139726 - RNA, 24 nt, Human
gggcuguccacuagaccagugagc

SEQ ID NO: 3139727 - RNA, 12 nt, Human
ggaauucuguau

SEQ ID NO: 3139728 - RNA, 15 nt, Human
ggaauucuguauaga

SEQ ID NO: 3139729 - RNA, 17 nt, Human
ggaauucuguauagauu

SEQ ID NO: 3139730 - RNA, 15 nt, Human
ggacuguggugacuu

SEQ ID NO: 3139731 - RNA, 17 nt, Human
ggacuguggugacuuug

SEQ ID NO: 3139732 - RNA, 21 nt, Human
ggacuguggugacuuuggaua

SEQ ID NO: 3139733 - RNA, 22 nt, Human
ggacuguggugacuuuggauaa

SEQ ID NO: 3139734 - RNA, 14 nt, Human
ggacuguggugacu

SEQ ID NO: 3139735 - RNA, 16 nt, Human
ggaccaaaaaccagua

SEQ ID NO: 3139736 - RNA, 23 nt, Human
ggaccaaaaaccaguauuguaca

SEQ ID NO: 3139737 - RNA, 14 nt, Human
ggaccaaaaaccag

SEQ ID NO: 3139738 - RNA, 12 nt, Human
gcuuagggcccu

SEQ ID NO: 3139739 - RNA, 15 nt, Human
gcuuagggcccugga

SEQ ID NO: 3139740 - RNA, 16 nt, Human
gcuuagggcccuggag

SEQ ID NO: 3139741 - RNA, 17 nt, Human
gcuuagggcccuggagg

SEQ ID NO: 3139742 - RNA, 18 nt, Human
gcuuagggcccuggaggc

SEQ ID NO: 3139743 - RNA, 16 nt, Human
ggaacaggaaacugau

SEQ ID NO: 3139744 - RNA, 14 nt, Human
ggaaaaguuuaaua

SEQ ID NO: 3139745 - RNA, 14 nt, Human
gcuuucagauacug

SEQ ID NO: 3139746 - RNA, 18 nt, Human
gcuuucagauacuggauu

SEQ ID NO: 3139747 - RNA, 23 nt, Human
gcuuucagauacuggauuguacu

SEQ ID NO: 3139748 - RNA, 20 nt, Human
gcuuuguauagaaccucuuu

SEQ ID NO: 3139749 - RNA, 16 nt, Human
ggcgccgugcugggca

SEQ ID NO: 3139750 - RNA, 17 nt, Human
ggcgccgugcugggcag

SEQ ID NO: 3139751 - RNA, 18 nt, Human
ggcgccgugcugggcagc

SEQ ID NO: 3139752 - RNA, 19 nt, Human
ggcgccgugcugggcagcc

SEQ ID NO: 3139753 - RNA, 20 nt, Human
ggcgccgugcugggcagccc

SEQ ID NO: 3139754 - RNA, 21 nt, Human
ggcgccgugcugggcagcccg

SEQ ID NO: 3139755 - RNA, 18 nt, Human
ggcggccccaacucgggc

SEQ ID NO: 3139756 - RNA, 12 nt, Human
ggcccuggaggc

SEQ ID NO: 3139757 - RNA, 18 nt, Human
ggauucuuaaaguugaau

SEQ ID NO: 3139758 - RNA, 19 nt, Human
ggauucuuaaaguugaauu

SEQ ID NO: 3139759 - RNA, 16 nt, Human
ggauucuuaaaguuga

SEQ ID NO: 3139760 - RNA, 20 nt, Human
ggauucuuaaaguugaauuu

SEQ ID NO: 3139761 - RNA, 15 nt, Human
ggcagcuuagggccc

SEQ ID NO: 3139762 - RNA, 16 nt, Human
ggcagcuuagggcccu

SEQ ID NO: 3139763 - RNA, 17 nt, Human
ggcagcuuagggcccug

SEQ ID NO: 3139764 - RNA, 18 nt, Human
ggcagcuuagggcccugg

SEQ ID NO: 3139765 - RNA, 19 nt, Human
ggcagcuuagggcccugga

SEQ ID NO: 3139766 - RNA, 21 nt, Human
ggcagcuuagggcccuggagg

SEQ ID NO: 3139767 - RNA, 22 nt, Human
ggcagcuuagggcccuggaggc

SEQ ID NO: 3139768 - RNA, 15 nt, Human
ggcaugaagacagau

SEQ ID NO: 3139769 - RNA, 18 nt, Human
gccucucccucugguccc

SEQ ID NO: 3139770 - RNA, 19 nt, Human
gccucucccucugguccca

SEQ ID NO: 3139771 - RNA, 20 nt, Human
gccucucccucuggucccac

SEQ ID NO: 3139772 - RNA, 13 nt, Human
gccugauuaaaga

SEQ ID NO: 3139773 - RNA, 16 nt, Human
gccugauuaaagaaug

SEQ ID NO: 3139774 - RNA, 23 nt, Human
gccugcacggugaauggcuuugu

SEQ ID NO: 3139775 - RNA, 14 nt, Human
gcccuggaggcggu

SEQ ID NO: 3139776 - RNA, 15 nt, Human
gcccuggaggcggug

SEQ ID NO: 3139777 - RNA, 22 nt, Human
gcccuggaggcggugcggcagg

SEQ ID NO: 3139778 - RNA, 13 nt, Human
gagaguguugaaa

SEQ ID NO: 3139779 - RNA, 17 nt, Human
gacuucuuuaauuuugg

SEQ ID NO: 3139780 - RNA, 18 nt, Human
gacuucuuuaauuuugga

SEQ ID NO: 3139781 - RNA, 16 nt, Human
gacuucuuuaauuuug

SEQ ID NO: 3139782 - RNA, 19 nt, Human
gacuucuuuaauuuuggaa

SEQ ID NO: 3139783 - RNA, 20 nt, Human
gacuucuuuaauuuuggaau

SEQ ID NO: 3139784 - RNA, 21 nt, Human
gacuucuuuaauuuuggaauu

SEQ ID NO: 3139785 - RNA, 14 nt, Human
gaauggcuuuguau

SEQ ID NO: 3139786 - RNA, 16 nt, Human
gaauggcuuuguauag

SEQ ID NO: 3139787 - RNA, 17 nt, Human
gaauggcuuuguauaga

SEQ ID NO: 3139788 - RNA, 22 nt, Human
gaauucuguauagauuagaauu

SEQ ID NO: 3139789 - RNA, 14 nt, Human
gaauucuguauaga

SEQ ID NO: 3139790 - RNA, 21 nt, Human
gaauucuguauagauuagaau

SEQ ID NO: 3139791 - RNA, 13 nt, Human
gaauucuguauag

SEQ ID NO: 3139792 - RNA, 11 nt, Human
gaauucuguau

SEQ ID NO: 3139793 - RNA, 19 nt, Human
gacaugcccucccuucucc

SEQ ID NO: 3139794 - RNA, 22 nt, Human
gacaugcccucccuucucccug

SEQ ID NO: 3139795 - RNA, 12 nt, Human
gaguguugaaac

SEQ ID NO: 3139796 - RNA, 16 nt, Human
gaguguugaaacggau

SEQ ID NO: 3139797 - RNA, 20 nt, Human
gauaaaugccaucaauaaaa

SEQ ID NO: 3139798 - RNA, 11 nt, Human
gauaaaugcca

SEQ ID NO: 3139799 - RNA, 15 nt, Human
gauaaaugccaucaa

SEQ ID NO: 3139800 - RNA, 12 nt, Human
gagguugggagg

SEQ ID NO: 3139801 - RNA, 17 nt, Human
gaggggugcagaggcug

SEQ ID NO: 3139802 - RNA, 18 nt, Human
gaggggugcagaggcugu

SEQ ID NO: 3139803 - RNA, 19 nt, Human
gaggggugcagaggcugug

SEQ ID NO: 3139804 - RNA, 13 nt, Human
gaggcugguuuug

SEQ ID NO: 3139805 - RNA, 15 nt, Human
gaggcuguggcuggu

SEQ ID NO: 3139806 - RNA, 18 nt, Human
gaggcuguggcuggugag

SEQ ID NO: 3139807 - RNA, 19 nt, Human
gauugagaccuacaggcug

SEQ ID NO: 3139808 - RNA, 20 nt, Human
gauugagaccuacaggcuga

SEQ ID NO: 3139809 - RNA, 21 nt, Human
gauugagaccuacaggcugac

SEQ ID NO: 3139810 - RNA, 12 nt, Human
gaugugggcagc

SEQ ID NO: 3139811 - RNA, 13 nt, Human
gaugugggcagcu

SEQ ID NO: 3139812 - RNA, 14 nt, Human
gaugugggcagcuu

SEQ ID NO: 3139813 - RNA, 21 nt, Human
gaucagacagaucuggaaugu

SEQ ID NO: 3139814 - RNA, 16 nt, Human
cuuucucuuucguuac

SEQ ID NO: 3139815 - RNA, 17 nt, Human
cuuucccgggcugucca

SEQ ID NO: 3139816 - RNA, 19 nt, Human
cuuucccgggcuguccacu

SEQ ID NO: 3139817 - RNA, 17 nt, Human
cuuugcgugcccggggc

SEQ ID NO: 3139818 - RNA, 19 nt, Human
cuuugcgugcccggggcag

SEQ ID NO: 3139819 - RNA, 21 nt, Human
cuuugcgugcccggggcagca

SEQ ID NO: 3139820 - RNA, 15 nt, Human
cuuugugcugggguu

SEQ ID NO: 3139821 - RNA, 20 nt, Human
cuuugugcugggguuaucug

SEQ ID NO: 3139822 - RNA, 22 nt, Human
cuuugugcugggguuaucugaa

SEQ ID NO: 3139823 - RNA, 20 nt, Human
cuuugucuacaccauuaugu

SEQ ID NO: 3139824 - RNA, 23 nt, Human
cuuugucuacaccauuaugugcg

SEQ ID NO: 3139825 - RNA, 16 nt, Human
cuuguuagaucuaguu

SEQ ID NO: 3139826 - RNA, 22 nt, Human
cuuguuagaucuaguucacucu

SEQ ID NO: 3139827 - RNA, 21 nt, Human
cuuguguaaauacaauuuugu

SEQ ID NO: 3139828 - RNA, 14 nt, Human
cuuguguaaauaca

SEQ ID NO: 3139829 - RNA, 16 nt, Human
cuuguguaaauacaau

SEQ ID NO: 3139830 - RNA, 12 nt, Human
cuuguguaaaua

SEQ ID NO: 3139831 - RNA, 23 nt, Human
gaaaaguuuaauauuaaagccau

SEQ ID NO: 3139832 - RNA, 15 nt, Human
gaaaaguuuaauauu

SEQ ID NO: 3139833 - RNA, 19 nt, Human
gaaaaguuuaauauuaaag

SEQ ID NO: 3139834 - RNA, 20 nt, Human
gaaaaguuuaauauuaaagc

SEQ ID NO: 3139835 - RNA, 21 nt, Human
gaaaaguuuaauauuaaagcc

SEQ ID NO: 3139836 - RNA, 22 nt, Human
gaaaaguuuaauauuaaagcca

SEQ ID NO: 3139837 - RNA, 22 nt, Human
cuuuuuggcauaacauaaaucu

SEQ ID NO: 3139838 - RNA, 16 nt, Human
cuuuuuggcauaacau

SEQ ID NO: 3139839 - RNA, 20 nt, Human
cuuuuuggcauaacauaaau

SEQ ID NO: 3139840 - RNA, 18 nt, Human
gaaacggaugauuucuau

SEQ ID NO: 3139841 - RNA, 17 nt, Human
gaaacggaugauuucua

SEQ ID NO: 3139842 - RNA, 13 nt, Human
cuucuugcugccc

SEQ ID NO: 3139843 - RNA, 14 nt, Human
cuucuugcugcccu

SEQ ID NO: 3139844 - RNA, 15 nt, Human
cuucuugcugcccug

SEQ ID NO: 3139845 - RNA, 20 nt, Human
cuucuugcugcccugcccca

SEQ ID NO: 3139846 - RNA, 23 nt, Human
cuucuugcugcccugccccaagu

SEQ ID NO: 3139847 - RNA, 15 nt, Human
cuucuuuaauuuugg

SEQ ID NO: 3139848 - RNA, 16 nt, Human
cuucuuuaauuuugga

SEQ ID NO: 3139849 - RNA, 17 nt, Human
cuucuuuaauuuuggaa

SEQ ID NO: 3139850 - RNA, 18 nt, Human
cuucuuuaauuuuggaau

SEQ ID NO: 3139851 - RNA, 19 nt, Human
cuucuuuaauuuuggaauu

SEQ ID NO: 3139852 - RNA, 11 nt, Human
cuucucccugg

SEQ ID NO: 3139853 - RNA, 12 nt, Human
cuucucccugga

SEQ ID NO: 3139854 - RNA, 13 nt, Human
cuucucccuggau

SEQ ID NO: 3139855 - RNA, 13 nt, Human
cuuccgucucccc

SEQ ID NO: 3139856 - RNA, 14 nt, Human
cuuccgucuccccc

SEQ ID NO: 3139857 - RNA, 16 nt, Human
cuuccgucucccccgu

SEQ ID NO: 3139858 - RNA, 14 nt, Human
cuguuccccucucc

SEQ ID NO: 3139859 - RNA, 15 nt, Human
cuguuccccucuccc

SEQ ID NO: 3139860 - RNA, 16 nt, Human
cuguuccccucucccu

SEQ ID NO: 3139861 - RNA, 17 nt, Human
cuguuccccucucccuu

SEQ ID NO: 3139862 - RNA, 18 nt, Human
cuguuccccucucccuuc

SEQ ID NO: 3139863 - RNA, 20 nt, Human
cuguuccccucucccuuccc

SEQ ID NO: 3139864 - RNA, 21 nt, Human
cuguuccccucucccuucccu

SEQ ID NO: 3139865 - RNA, 12 nt, Human
cuguggcuggug

SEQ ID NO: 3139866 - RNA, 14 nt, Human
cuguggcuggugag

SEQ ID NO: 3139867 - RNA, 16 nt, Human
cuguauagauuagaau

SEQ ID NO: 3139868 - RNA, 15 nt, Human
cugccuaaggacuuc

SEQ ID NO: 3139869 - RNA, 12 nt, Human
cugccuaaggac

SEQ ID NO: 3139870 - RNA, 13 nt, Human
cugccuaaggacu

SEQ ID NO: 3139871 - RNA, 14 nt, Human
cugccuaaggacuu

SEQ ID NO: 3139872 - RNA, 12 nt, Human
cuggcggcccca

SEQ ID NO: 3139873 - RNA, 15 nt, Human
cuggcggccccaacu

SEQ ID NO: 3139874 - RNA, 22 nt, Human
cuggcggccccaacucgggcuc

SEQ ID NO: 3139875 - RNA, 15 nt, Human
cuggcauagagcagc

SEQ ID NO: 3139876 - RNA, 20 nt, Human
ccagugagcgcuugggcgcc

SEQ ID NO: 3139877 - RNA, 14 nt, Human
ccagggcccgcacc

SEQ ID NO: 3139878 - RNA, 14 nt, Human
cccacacuucccug

SEQ ID NO: 3139879 - RNA, 15 nt, Human
cccacacuucccugg

SEQ ID NO: 3139880 - RNA, 16 nt, Human
cccacacuucccuggc

SEQ ID NO: 3139881 - RNA, 13 nt, Human
ccauuuggaaauc

SEQ ID NO: 3139882 - RNA, 11 nt, Human
ccauuauucaa

SEQ ID NO: 3139883 - RNA, 14 nt, Human
ccagccugggccca

SEQ ID NO: 3139884 - RNA, 18 nt, Human
ccagccugggcccaucuc

SEQ ID NO: 3139885 - RNA, 21 nt, Human
ccagccugggcccaucucccu

SEQ ID NO: 3139886 - RNA, 22 nt, Human
ccagccugggcccaucucccug

SEQ ID NO: 3139887 - RNA, 23 nt, Human
ccagccugggcccaucucccugc

SEQ ID NO: 3139888 - RNA, 12 nt, Human
cccaucucccug

SEQ ID NO: 3139889 - RNA, 13 nt, Human
cccaucucccugc

SEQ ID NO: 3139890 - RNA, 14 nt, Human
cccaucucccugcu

SEQ ID NO: 3139891 - RNA, 15 nt, Human
cccaucucccugcuu

SEQ ID NO: 3139892 - RNA, 17 nt, Human
cccaucucccugcuuug

SEQ ID NO: 3139893 - RNA, 22 nt, Human
cccaugcuuaacauacccgccu

SEQ ID NO: 3139894 - RNA, 12 nt, Human
cccauuauucaa

SEQ ID NO: 3139895 - RNA, 17 nt, Human
cccaugcaggugguguc

SEQ ID NO: 3139896 - RNA, 16 nt, Human
ccccacccugccucac

SEQ ID NO: 3139897 - RNA, 21 nt, Human
ccccaaguugggggucagugc

SEQ ID NO: 3139898 - RNA, 12 nt, Human
cccauucccugg

SEQ ID NO: 3139899 - RNA, 13 nt, Human
cccauucccuggg

SEQ ID NO: 3139900 - RNA, 14 nt, Human
cccauucccuggga

SEQ ID NO: 3139901 - RNA, 17 nt, Human
cccauucccugggaucu

SEQ ID NO: 3139902 - RNA, 19 nt, Human
cccauucccugggaucugg

SEQ ID NO: 3139903 - RNA, 18 nt, Human
cccauuauucaaaguugc

SEQ ID NO: 3139904 - RNA, 23 nt, Human
cccauuauucaaaguugccuaaa

SEQ ID NO: 3139905 - RNA, 13 nt, Human
ccccucucccuuc

SEQ ID NO: 3139906 - RNA, 16 nt, Human
ccccucucccuucccu

SEQ ID NO: 3139907 - RNA, 17 nt, Human
cccccacacuucccugg

SEQ ID NO: 3139908 - RNA, 20 nt, Human
cccccacacuucccuggcgg

SEQ ID NO: 3139909 - RNA, 13 nt, Human
ccccaucacugcg

SEQ ID NO: 3139910 - RNA, 19 nt, Human
ccccaucacugcgccacug

SEQ ID NO: 3139911 - RNA, 16 nt, Human
ccccuguuccccucuc

SEQ ID NO: 3139912 - RNA, 19 nt, Human
ccccuguuccccucucccu

SEQ ID NO: 3139913 - RNA, 21 nt, Human
cccgcuaggcucgccuucccu

SEQ ID NO: 3139914 - RNA, 12 nt, Human
cccuucccuccu

SEQ ID NO: 3139915 - RNA, 17 nt, Human
cccuucccuccucccau

SEQ ID NO: 3139916 - RNA, 13 nt, Human
cccucucccuucc

SEQ ID NO: 3139917 - RNA, 18 nt, Human
cccucucccuucccuccu

SEQ ID NO: 3139918 - RNA, 20 nt, Human
cccucucccuucccuccucc

SEQ ID NO: 3139919 - RNA, 13 nt, Human
cccucuugucucc

SEQ ID NO: 3139920 - RNA, 15 nt, Human
cccucuugucucccc

SEQ ID NO: 3139921 - RNA, 16 nt, Human
cccucuugucuccccu

SEQ ID NO: 3139922 - RNA, 17 nt, Human
cccucuugucuccccug

SEQ ID NO: 3139923 - RNA, 18 nt, Human
cccucuugucuccccugu

SEQ ID NO: 3139924 - RNA, 12 nt, Human
ccuacaggcuga

SEQ ID NO: 3139925 - RNA, 14 nt, Human
ccuacaggcugacg

SEQ ID NO: 3139926 - RNA, 21 nt, Human
ccuacaggcugacguuccggg

SEQ ID NO: 3139927 - RNA, 11 nt, Human
ccgcuggagga

SEQ ID NO: 3139928 - RNA, 12 nt, Human
ccgcuggaggau

SEQ ID NO: 3139929 - RNA, 21 nt, Human
ccgcuggaggaugugggcagc

SEQ ID NO: 3139930 - RNA, 15 nt, Human
ccgccuagcugcugu

SEQ ID NO: 3139931 - RNA, 12 nt, Human
ccuucucccugg

SEQ ID NO: 3139932 - RNA, 13 nt, Human
ccuucucccugga

SEQ ID NO: 3139933 - RNA, 14 nt, Human
ccuucucccuggau

SEQ ID NO: 3139934 - RNA, 22 nt, Human
cgcguugaaauuguaauuauau

SEQ ID NO: 3139935 - RNA, 24 nt, Human
cgcguugaaauuguaauuauaucu

SEQ ID NO: 3139936 - RNA, 17 nt, Human
cgcuaaacuuuucugau

SEQ ID NO: 3139937 - RNA, 18 nt, Human
cgcuaaacuuuucugaua

SEQ ID NO: 3139938 - RNA, 19 nt, Human
cgcuaaacuuuucugauag

SEQ ID NO: 3139939 - RNA, 13 nt, Human
ccuguccccaugc

SEQ ID NO: 3139940 - RNA, 20 nt, Human
cucccuggaucuaccuggag

SEQ ID NO: 3139941 - RNA, 21 nt, Human
cucccuggaucuaccuggagg

SEQ ID NO: 3139942 - RNA, 12 nt, Human
cucccugcuuug

SEQ ID NO: 3139943 - RNA, 20 nt, Human
cuccauuuaauaauuauaug

SEQ ID NO: 3139944 - RNA, 13 nt, Human
cuccauuuaauaa

SEQ ID NO: 3139945 - RNA, 16 nt, Human
cucccaugucacugca

SEQ ID NO: 3139946 - RNA, 17 nt, Human
cucccaugucacugcag

SEQ ID NO: 3139947 - RNA, 23 nt, Human
cucagauuuuauuauguaaaucc

SEQ ID NO: 3139948 - RNA, 22 nt, Human
cucagauuuuauuauguaaauc

SEQ ID NO: 3139949 - RNA, 14 nt, Human
cuagacuggugacu

SEQ ID NO: 3139950 - RNA, 15 nt, Human
cuagacuggugacug

SEQ ID NO: 3139951 - RNA, 17 nt, Human
cuagacuggugacugau

SEQ ID NO: 3139952 - RNA, 18 nt, Human
cuagacuggugacugauu

SEQ ID NO: 3139953 - RNA, 23 nt, Human
cuagacuggugacugauucuuca

SEQ ID NO: 3139954 - RNA, 19 nt, Human
cuagacuggugacugauuc

SEQ ID NO: 3139955 - RNA, 22 nt, Human
cuagacuggugacugauucuuc

SEQ ID NO: 3139956 - RNA, 14 nt, Human
cuaugcugaguuug

SEQ ID NO: 3139957 - RNA, 15 nt, Human
cuaugcugaguuugu

SEQ ID NO: 3139958 - RNA, 13 nt, Human
cuaugcugaguuu

SEQ ID NO: 3139959 - RNA, 19 nt, Human
cuauuucuauauuuucauu

SEQ ID NO: 3139960 - RNA, 20 nt, Human
cuauuucuauauuuucauuc

SEQ ID NO: 3139961 - RNA, 18 nt, Human
cuauuucuauauuuucau

SEQ ID NO: 3139962 - RNA, 15 nt, Human
cuaaccaagaggcug

SEQ ID NO: 3139963 - RNA, 16 nt, Human
cuaaccaagaggcugg

SEQ ID NO: 3139964 - RNA, 17 nt, Human
cuaaccaagaggcuggu

SEQ ID NO: 3139965 - RNA, 21 nt, Human
cuaaaauggacuguggugacu

SEQ ID NO: 3139966 - RNA, 22 nt, Human
cuaaaauggacuguggugacuu

SEQ ID NO: 3139967 - RNA, 14 nt, Human
cuaaggacuucuuu

SEQ ID NO: 3139968 - RNA, 15 nt, Human
cuaaggacuucuuua

SEQ ID NO: 3139969 - RNA, 16 nt, Human
cuaaggacuucuuuaa

SEQ ID NO: 3139970 - RNA, 15 nt, Human
cuccccaugcaggug

SEQ ID NO: 3139971 - RNA, 20 nt, Human
cuccccaugcaggugguguc

SEQ ID NO: 3139972 - RNA, 13 nt, Human
cgccuagcugcug

SEQ ID NO: 3139973 - RNA, 15 nt, Human
cgccuagcugcuguc

SEQ ID NO: 3139974 - RNA, 16 nt, Human
ccuuuuuuaaauaaau

SEQ ID NO: 3139975 - RNA, 19 nt, Human
cgcugauaagcguucaugg

SEQ ID NO: 3139976 - RNA, 11 nt, Human
cuaccuggagg

SEQ ID NO: 3139977 - RNA, 16 nt, Human
cuaccuggagggaaga

SEQ ID NO: 3139978 - RNA, 23 nt, Human
cuaccuggagggaagaguggagg

SEQ ID NO: 3139979 - RNA, 20 nt, Human
ccaguauuguacaaaguauu

SEQ ID NO: 3139980 - RNA, 22 nt, Human
ccaguauuguacaaaguauuaa

SEQ ID NO: 3139981 - RNA, 15 nt, Human
ccagcagauuauuca

SEQ ID NO: 3139982 - RNA, 16 nt, Human
ccaguuuuguuuggac

SEQ ID NO: 3139983 - RNA, 19 nt, Human
ccaguuuuguuuggaccaa

SEQ ID NO: 3139984 - RNA, 18 nt, Human
cccaggaauggagccugc

SEQ ID NO: 3139985 - RNA, 19 nt, Human
cccaggaauggagccugca

SEQ ID NO: 3139986 - RNA, 20 nt, Human
cccaggaauggagccugcac

SEQ ID NO: 3139987 - RNA, 22 nt, Human
cccaggaauggagccugcacgg

SEQ ID NO: 3139988 - RNA, 19 nt, Human
ccugucuugccuuuuucau

SEQ ID NO: 3139989 - RNA, 20 nt, Human
ccugucuugccuuuuucauu

SEQ ID NO: 3139990 - RNA, 17 nt, Human
ccugucuugccuuuuuc

SEQ ID NO: 3139991 - RNA, 11 nt, Human
ccugccccaca

SEQ ID NO: 3139992 - RNA, 19 nt, Human
ccugccccacaccuccucu

SEQ ID NO: 3139993 - RNA, 15 nt, Human
ccucccaugucacug

SEQ ID NO: 3139994 - RNA, 16 nt, Human
ccucccaugucacugc

SEQ ID NO: 3139995 - RNA, 18 nt, Human
ccucccaugucacugcag

SEQ ID NO: 3139996 - RNA, 22 nt, Human
auuguacaaaguauuaagcaua

SEQ ID NO: 3139997 - RNA, 20 nt, Human
auuguacaaaguauuaagca

SEQ ID NO: 3139998 - RNA, 23 nt, Human
auuguacaaaguauuaagcauau

SEQ ID NO: 3139999 - RNA, 18 nt, Human
auugagaccuacaggcug

SEQ ID NO: 3140000 - RNA, 19 nt, Human
auugagaccuacaggcuga

SEQ ID NO: 3140001 - RNA, 16 nt, Human
caaaguauuaagcaua

SEQ ID NO: 3140002 - RNA, 17 nt, Human
caaaguauuaagcauau

SEQ ID NO: 3140003 - RNA, 19 nt, Human
caaaguauuaagcauauau

SEQ ID NO: 3140004 - RNA, 21 nt, Human
caaaguauuaagcauauauuu

SEQ ID NO: 3140005 - RNA, 14 nt, Human
caaaguauuaagca

SEQ ID NO: 3140006 - RNA, 15 nt, Human
caaaguauuaagcau

SEQ ID NO: 3140007 - RNA, 15 nt, Human
cacuccccagccugg

SEQ ID NO: 3140008 - RNA, 19 nt, Human
cacuccccagccugggccc

SEQ ID NO: 3140009 - RNA, 16 nt, Human
caauaaaaaauuauga

SEQ ID NO: 3140010 - RNA, 17 nt, Human
caauaaaaaauuaugac

SEQ ID NO: 3140011 - RNA, 13 nt, Human
caauaaaaaauua

SEQ ID NO: 3140012 - RNA, 18 nt, Human
caucacugcgccacugcu

SEQ ID NO: 3140013 - RNA, 15 nt, Human
ccaacucgggcuccc

SEQ ID NO: 3140014 - RNA, 19 nt, Human
ccaacucgggcucccgggu

SEQ ID NO: 3140015 - RNA, 15 nt, Human
ccaaaagaaacugac

SEQ ID NO: 3140016 - RNA, 16 nt, Human
ccaaaagaaacugaca

SEQ ID NO: 3140017 - RNA, 19 nt, Human
caggcacacaaggggcccu

SEQ ID NO: 3140018 - RNA, 23 nt, Human
caggcacacaaggggcccuugga

SEQ ID NO: 3140019 - RNA, 23 nt, Human
cagauugagaccuacaggcugac

SEQ ID NO: 3140020 - RNA, 11 nt, Human
gcagaggcugu

SEQ ID NO: 3140021 - RNA, 15 nt, Human
gcagaggcuguggcu

SEQ ID NO: 3140022 - RNA, 18 nt, Human
gcagaggcuguggcuggu

SEQ ID NO: 3140023 - RNA, 19 nt, Human
gcagaggcuguggcuggug

SEQ ID NO: 3140024 - RNA, 13 nt, Human
gaugauuucuaug

SEQ ID NO: 3140025 - RNA, 23 nt, Human
gaugauuucuaugcugaguuugu

SEQ ID NO: 3140026 - RNA, 12 nt, Human
gaugauuucuau

SEQ ID NO: 3140027 - RNA, 19 nt, Human
gauccagcagauuauucac

SEQ ID NO: 3140028 - RNA, 18 nt, Human
gauccagcagauuauuca

SEQ ID NO: 3140029 - RNA, 12 nt, Human
gaucugccuaag

SEQ ID NO: 3140030 - RNA, 15 nt, Human
gaucugccuaaggac

SEQ ID NO: 3140031 - RNA, 16 nt, Human
gaucugccuaaggacu

SEQ ID NO: 3140032 - RNA, 16 nt, Human
gauacuggauuguacu

SEQ ID NO: 3140033 - RNA, 20 nt, Human
gauacuggauuguacuuugu

SEQ ID NO: 3140034 - RNA, 19 nt, Human
gcaaaauguuacagaaucu

SEQ ID NO: 3140035 - RNA, 15 nt, Human
gagaccuacaggcug

SEQ ID NO: 3140036 - RNA, 17 nt, Human
gagaccuacaggcugac

SEQ ID NO: 3140037 - RNA, 10 nt, Human
cuggaucuac

SEQ ID NO: 3140038 - RNA, 15 nt, Human
cuggaucuaccugga

SEQ ID NO: 3140039 - RNA, 16 nt, Human
cuggaucuaccuggag

SEQ ID NO: 3140040 - RNA, 17 nt, Human
cuggaucuaccuggagg

SEQ ID NO: 3140041 - RNA, 18 nt, Human
cuggaucuaccuggaggg

SEQ ID NO: 3140042 - RNA, 20 nt, Human
cuggagaacaagaaagggcc

SEQ ID NO: 3140043 - RNA, 12 nt, Human
cugccugucccc

SEQ ID NO: 3140044 - RNA, 14 nt, Human
cugccuguccccau

SEQ ID NO: 3140045 - RNA, 15 nt, Human
cugccuguccccaug

SEQ ID NO: 3140046 - RNA, 17 nt, Human
cugccuguccccaugcu

SEQ ID NO: 3140047 - RNA, 11 nt, Human
cugccucuccc

SEQ ID NO: 3140048 - RNA, 13 nt, Human
cuggugacugauu

SEQ ID NO: 3140049 - RNA, 14 nt, Human
cuggugacugauuc

SEQ ID NO: 3140050 - RNA, 15 nt, Human
cuggugacugauucu

SEQ ID NO: 3140051 - RNA, 17 nt, Human
cuggugacugauucuuc

SEQ ID NO: 3140052 - RNA, 18 nt, Human
cuggucuuauuuguaaag

SEQ ID NO: 3140053 - RNA, 15 nt, Human
cuggugcccugcuuu

SEQ ID NO: 3140054 - RNA, 16 nt, Human
cuggugcccugcuuuc

SEQ ID NO: 3140055 - RNA, 19 nt, Human
cuggugcccugcuuucaga

SEQ ID NO: 3140056 - RNA, 21 nt, Human
cuggugcccugcuuucagaua

SEQ ID NO: 3140057 - RNA, 23 nt, Human
cuggugcccugcuuucagauacu

SEQ ID NO: 3140058 - RNA, 14 nt, Human
cugguuuuggcauc

SEQ ID NO: 3140059 - RNA, 21 nt, Human
cugguuuuggcaucucugucc

SEQ ID NO: 3140060 - RNA, 23 nt, Human
cugguuuuggcaucucuguccca

SEQ ID NO: 3140061 - RNA, 16 nt, Human
cugugaacuugaaauu

SEQ ID NO: 3140062 - RNA, 17 nt, Human
cugugaacuugaaauuu

SEQ ID NO: 3140063 - RNA, 15 nt, Human
cugugaacuugaaau

SEQ ID NO: 3140064 - RNA, 12 nt, Human
cuugucuccccu

SEQ ID NO: 3140065 - RNA, 21 nt, Human
cuugucucagauuuuauuaug

SEQ ID NO: 3140066 - RNA, 14 nt, Human
gaaacuuguguaaa

SEQ ID NO: 3140067 - RNA, 16 nt, Human
gaaacuuguguaaaua

SEQ ID NO: 3140068 - RNA, 20 nt, Human
gaaacuuguguaaauacaau

SEQ ID NO: 3140069 - RNA, 15 nt, Human
ggaagccugauuaaa

SEQ ID NO: 3140070 - RNA, 16 nt, Human
gcuuugcgugcccggg

SEQ ID NO: 3140071 - RNA, 19 nt, Human
gcuuugcgugcccggggca

SEQ ID NO: 3140072 - RNA, 15 nt, Human
gcuuaagccacugcc

SEQ ID NO: 3140073 - RNA, 18 nt, Human
gcuuaagccacugccucu

SEQ ID NO: 3140074 - RNA, 14 nt, Human
gcugccugucccca

SEQ ID NO: 3140075 - RNA, 16 nt, Human
gcugccuguccccaug

SEQ ID NO: 3140076 - RNA, 22 nt, Human
gccauguuuauuacaguauaau

SEQ ID NO: 3140077 - RNA, 14 nt, Human
gccauguuuauuac

SEQ ID NO: 3140078 - RNA, 18 nt, Human
gccauguuuauuacagua

SEQ ID NO: 3140079 - RNA, 13 nt, Human
gccauguuuauua

SEQ ID NO: 3140080 - RNA, 11 nt, Human
gccauguuuau

SEQ ID NO: 3140081 - RNA, 15 nt, Human
gcguggacugguugg

SEQ ID NO: 3140082 - RNA, 22 nt, Human
gcguucauggaacgcguugaaa

SEQ ID NO: 3140083 - RNA, 23 nt, Human
gcuaaggacuuguuagaucuagu

SEQ ID NO: 3140084 - RNA, 12 nt, Human
gcguugaaauug

SEQ ID NO: 3140085 - RNA, 11 nt, Human
gcuaaggacuu

SEQ ID NO: 3140086 - RNA, 12 nt, Human
gcuaaggacuug

SEQ ID NO: 3140087 - RNA, 13 nt, Human
gcggcagggaaga

SEQ ID NO: 3140088 - RNA, 19 nt, Human
gcuaggcucgccuucccuc

SEQ ID NO: 3140089 - RNA, 21 nt, Human
gcuaggcucgccuucccuccu

SEQ ID NO: 3140090 - RNA, 22 nt, Human
gcuaggcucgccuucccuccug

SEQ ID NO: 3140091 - RNA, 20 nt, Human
gcuauuucuauauuuucauu

SEQ ID NO: 3140092 - RNA, 18 nt, Human
gcuauuucuauauuuuca

SEQ ID NO: 3140093 - RNA, 19 nt, Human
gcuauuucuauauuuucau

SEQ ID NO: 3140094 - RNA, 11 nt, Human
gcuauuucuau

SEQ ID NO: 3140095 - RNA, 13 nt, Human
gcuauuucuauau

SEQ ID NO: 3140096 - RNA, 15 nt, Human
gcuauuucuauauuu

SEQ ID NO: 3140097 - RNA, 16 nt, Human
gcuauuucuauauuuu

SEQ ID NO: 3140098 - RNA, 23 nt, Human
ggcuaaguugggaucuaggagag

SEQ ID NO: 3140099 - RNA, 17 nt, Human
aaaaagccagggcugga

SEQ ID NO: 3140100 - RNA, 17 nt, Human
ggcucccggguccuugg

SEQ ID NO: 3140101 - RNA, 14 nt, Human
ggcucgccuucccu

SEQ ID NO: 3140102 - RNA, 15 nt, Human
ggcucgccuucccuc

SEQ ID NO: 3140103 - RNA, 18 nt, Human
ggcucgccuucccuccug

SEQ ID NO: 3140104 - RNA, 22 nt, Human
ggcucgccuucccuccugcuuu

SEQ ID NO: 3140105 - RNA, 17 nt, Human
ggcugacguuccgggca

SEQ ID NO: 3140106 - RNA, 15 nt, Human
ggaucuaccuggagg

SEQ ID NO: 3140107 - RNA, 16 nt, Human
ggaucuaccuggaggg

SEQ ID NO: 3140108 - RNA, 17 nt, Human
ggaucuaccuggaggga

SEQ ID NO: 3140109 - RNA, 15 nt, Human
ggagggaagagugga

SEQ ID NO: 3140110 - RNA, 19 nt, Human
ggagggaagaguggaggug

SEQ ID NO: 3140111 - RNA, 20 nt, Human
ggagggaagaguggaggugg

SEQ ID NO: 3140112 - RNA, 16 nt, Human
ggaggcggugcggcag

SEQ ID NO: 3140113 - RNA, 20 nt, Human
ggcagggaagaggggugcag

SEQ ID NO: 3140114 - RNA, 19 nt, Human
gguguuguacucaauuuua

SEQ ID NO: 3140115 - RNA, 20 nt, Human
gguguuguacucaauuuuaa

SEQ ID NO: 3140116 - RNA, 13 nt, Human
aaagggccaggag

SEQ ID NO: 3140117 - RNA, 20 nt, Human
guacaaaguauuaagcauau

SEQ ID NO: 3140118 - RNA, 21 nt, Human
guacaaaguauuaagcauaua

SEQ ID NO: 3140119 - RNA, 14 nt, Human
ggucagugcugccu

SEQ ID NO: 3140120 - RNA, 15 nt, Human
ggucagugcugccug

SEQ ID NO: 3140121 - RNA, 21 nt, Human
ggucagugcugccugucccca

SEQ ID NO: 3140122 - RNA, 16 nt, Human
gguaacucuucuugau

SEQ ID NO: 3140123 - RNA, 13 nt, Human
gggucagugcugc

SEQ ID NO: 3140124 - RNA, 13 nt, Human
ggggucagugcug

SEQ ID NO: 3140125 - RNA, 18 nt, Human
aaaauauuuuaugaucca

SEQ ID NO: 3140126 - RNA, 15 nt, Human
aaaauauuuuaugau

SEQ ID NO: 3140127 - RNA, 13 nt, Human
aaaauaccaagga

SEQ ID NO: 3140128 - RNA, 19 nt, Human
gggcucccggguccuuggc

SEQ ID NO: 3140129 - RNA, 20 nt, Human
gggcucccggguccuuggcc

SEQ ID NO: 3140130 - RNA, 15 nt, Human
ugucuugccuuuuuc

SEQ ID NO: 3140131 - RNA, 16 nt, Human
ugucuugccuuuuuca

SEQ ID NO: 3140132 - RNA, 17 nt, Human
ugucuugccuuuuucau

SEQ ID NO: 3140133 - RNA, 21 nt, Human
ugucuugccuuuuucauuauu

SEQ ID NO: 3140134 - RNA, 21 nt, Human
agucagaucugccuaaggacu

SEQ ID NO: 3140135 - RNA, 22 nt, Human
agucagaucugccuaaggacuu

SEQ ID NO: 3140136 - RNA, 20 nt, Human
agucagaucugccuaaggac

SEQ ID NO: 3140137 - RNA, 17 nt, Human
agucagaucugccuaag

SEQ ID NO: 3140138 - RNA, 23 nt, Human
agucagaucugccuaaggacuuc

SEQ ID NO: 3140139 - RNA, 11 nt, Human
aguauuguaca

SEQ ID NO: 3140140 - RNA, 15 nt, Human
aguauuguacaaagu

SEQ ID NO: 3140141 - RNA, 20 nt, Human
aguauuguacaaaguauuaa

SEQ ID NO: 3140142 - RNA, 22 nt, Human
aguauuguacaaaguauuaagc

SEQ ID NO: 3140143 - RNA, 23 nt, Human
aguauuguacaaaguauuaagca

SEQ ID NO: 3140144 - RNA, 12 nt, Human
uguaugugugaa

SEQ ID NO: 3140145 - RNA, 16 nt, Human
uggucuuauuuguaaa

SEQ ID NO: 3140146 - RNA, 22 nt, Human
uggucucgucuuccgucucccc

SEQ ID NO: 3140147 - RNA, 13 nt, Human
uguacaaaguauu

SEQ ID NO: 3140148 - RNA, 16 nt, Human
uguaaauacaauuuug

SEQ ID NO: 3140149 - RNA, 17 nt, Human
uguaaauacaauuuugu

SEQ ID NO: 3140150 - RNA, 18 nt, Human
uguaaauacaauuuuguu

SEQ ID NO: 3140151 - RNA, 19 nt, Human
uguaaauacaauuuuguuu

SEQ ID NO: 3140152 - RNA, 10 nt, Human
uguaaauccc

SEQ ID NO: 3140153 - RNA, 21 nt, Human
uguaaauacaauuuuguuucu

SEQ ID NO: 3140154 - RNA, 17 nt, Human
auaauaaggaaaaguuu

SEQ ID NO: 3140155 - RNA, 18 nt, Human
auaauaaggaaaaguuua

SEQ ID NO: 3140156 - RNA, 19 nt, Human
auaauaaggaaaaguuuaa

SEQ ID NO: 3140157 - RNA, 22 nt, Human
auaauaaggaaaaguuuaauau

SEQ ID NO: 3140158 - RNA, 16 nt, Human
auaauaaggaaaaguu

SEQ ID NO: 3140159 - RNA, 21 nt, Human
auaauuauaugcuauuucuau

SEQ ID NO: 3140160 - RNA, 23 nt, Human
auaauuauaugcuauuucuauau

SEQ ID NO: 3140161 - RNA, 17 nt, Human
auaauuauaugcuauuu

SEQ ID NO: 3140162 - RNA, 19 nt, Human
auaauuauaugcuauuucu

SEQ ID NO: 3140163 - RNA, 21 nt, Human
uguuguacucaauuuuaacaa

SEQ ID NO: 3140164 - RNA, 23 nt, Human
uuaaaccaugggauaaaugccau

SEQ ID NO: 3140165 - RNA, 11 nt, Human
agccagggcug

SEQ ID NO: 3140166 - RNA, 16 nt, Human
ugauuucuaugcugag

SEQ ID NO: 3140167 - RNA, 12 nt, Human
ugauuucuaugc

SEQ ID NO: 3140168 - RNA, 15 nt, Human
ugauuucuaugcuga

SEQ ID NO: 3140169 - RNA, 14 nt, Human
agcccgcuaggcuc

SEQ ID NO: 3140170 - RNA, 21 nt, Human
agcccgcuaggcucgccuucc

SEQ ID NO: 3140171 - RNA, 23 nt, Human
agcccgcuaggcucgccuucccu

SEQ ID NO: 3140172 - RNA, 22 nt, Human
agcgcuugggcgccgugcuggg

SEQ ID NO: 3140173 - RNA, 23 nt, Human
agcgcuugggcgccgugcugggc

SEQ ID NO: 3140174 - RNA, 23 nt, Human
ugccucacccacccuuuuuuaaa

SEQ ID NO: 3140175 - RNA, 13 nt, Human
ugcccucccuucu

SEQ ID NO: 3140176 - RNA, 14 nt, Human
ugcccucccuucuc

SEQ ID NO: 3140177 - RNA, 19 nt, Human
ugcccucccuucucccugg

SEQ ID NO: 3140178 - RNA, 20 nt, Human
ugcccucccuucucccugga

SEQ ID NO: 3140179 - RNA, 17 nt, Human
aggacuuguuagaucua

SEQ ID NO: 3140180 - RNA, 14 nt, Human
aggacuuguuagau

SEQ ID NO: 3140181 - RNA, 16 nt, Human
aggacuuguuagaucu

SEQ ID NO: 3140182 - RNA, 17 nt, Human
ugcuuuggucuugcccc

SEQ ID NO: 3140183 - RNA, 19 nt, Human
aggauaaaaagccagggcu

SEQ ID NO: 3140184 - RNA, 20 nt, Human
aggauaaaaagccagggcug

SEQ ID NO: 3140185 - RNA, 21 nt, Human
aggauaaaaagccagggcugg

SEQ ID NO: 3140186 - RNA, 22 nt, Human
aggauaaaaagccagggcugga

SEQ ID NO: 3140187 - RNA, 18 nt, Human
ugcuguaacuuucugaaa

SEQ ID NO: 3140188 - RNA, 12 nt, Human
ugcuauuucuau

SEQ ID NO: 3140189 - RNA, 13 nt, Human
ugcuauuucuaua

SEQ ID NO: 3140190 - RNA, 14 nt, Human
ugcuauuucuauau

SEQ ID NO: 3140191 - RNA, 20 nt, Human
ugcuauuucuauauuuucau

SEQ ID NO: 3140192 - RNA, 15 nt, Human
aggcucgccuucccu

SEQ ID NO: 3140193 - RNA, 16 nt, Human
aggcucgccuucccuc

SEQ ID NO: 3140194 - RNA, 18 nt, Human
aggcucgccuucccuccu

SEQ ID NO: 3140195 - RNA, 19 nt, Human
aggcucgccuucccuccug

SEQ ID NO: 3140196 - RNA, 20 nt, Human
aggcucgccuucccuccugc

SEQ ID NO: 3140197 - RNA, 24 nt, Human
aggcucgccuucccuccugcuuug

SEQ ID NO: 3140198 - RNA, 17 nt, Human
uuuaaaaaaaaaauugg

SEQ ID NO: 3140199 - RNA, 20 nt, Human
uuguguguaugcugcuuuuc

SEQ ID NO: 3140200 - RNA, 18 nt, Human
uugggcgccgugcugggc

SEQ ID NO: 3140201 - RNA, 19 nt, Human
uugggcgccgugcugggca

SEQ ID NO: 3140202 - RNA, 20 nt, Human
uugggcgccgugcugggcag

SEQ ID NO: 3140203 - RNA, 21 nt, Human
uugggcgccgugcugggcagc

SEQ ID NO: 3140204 - RNA, 15 nt, Human
uuguaauuauaucug

SEQ ID NO: 3140205 - RNA, 21 nt, Human
uuuauuaugaaacuuguguaa

SEQ ID NO: 3140206 - RNA, 13 nt, Human
uuuauuaugaaac

SEQ ID NO: 3140207 - RNA, 15 nt, Human
uuuacuaaaauggac

SEQ ID NO: 3140208 - RNA, 17 nt, Human
uuuacuaaaauggacug

SEQ ID NO: 3140209 - RNA, 21 nt, Human
uuucuaugcugaguuugugcu

SEQ ID NO: 3140210 - RNA, 13 nt, Human
uuucuauauuuuc

SEQ ID NO: 3140211 - RNA, 15 nt, Human
uuucuauauuuucau

SEQ ID NO: 3140212 - RNA, 18 nt, Human
uuucuauauuuucauucu

SEQ ID NO: 3140213 - RNA, 14 nt, Human
uugacauagucugg

SEQ ID NO: 3140214 - RNA, 17 nt, Human
uugacauagucuggcug

SEQ ID NO: 3140215 - RNA, 11 nt, Human
uucucccugga

SEQ ID NO: 3140216 - RNA, 12 nt, Human
uucucccuggau

SEQ ID NO: 3140217 - RNA, 23 nt, Human
uucugcagguugaagccaugucu

SEQ ID NO: 3140218 - RNA, 13 nt, Human
uucuuaaaguuga

SEQ ID NO: 3140219 - RNA, 12 nt, Human
uucuugcugccc

SEQ ID NO: 3140220 - RNA, 14 nt, Human
uucuugcugcccug

SEQ ID NO: 3140221 - RNA, 15 nt, Human
uucuugcugcccugc

SEQ ID NO: 3140222 - RNA, 18 nt, Human
uucuugcugcccugcccc

SEQ ID NO: 3140223 - RNA, 15 nt, Human
auauguuuaaaagua

SEQ ID NO: 3140224 - RNA, 12 nt, Human
auauuaaagcca

SEQ ID NO: 3140225 - RNA, 17 nt, Human
uucagcaaaaauauuuu

SEQ ID NO: 3140226 - RNA, 13 nt, Human
auauauuuuuaua

SEQ ID NO: 3140227 - RNA, 19 nt, Human
uucauggaacgcguugaaa

SEQ ID NO: 3140228 - RNA, 20 nt, Human
uucauggaacgcguugaaau

SEQ ID NO: 3140229 - RNA, 21 nt, Human
uucauggaacgcguugaaauu

SEQ ID NO: 3140230 - RNA, 22 nt, Human
uucauggaacgcguugaaauug

SEQ ID NO: 3140231 - RNA, 22 nt, Human
uucauuauuuuauuaugaaacu

SEQ ID NO: 3140232 - RNA, 13 nt, Human
auuuuccuccuuu

SEQ ID NO: 3140233 - RNA, 17 nt, Human
auuuuccuccuuucucu

SEQ ID NO: 3140234 - RNA, 20 nt, Human
auuuuauuauguaaauccca

SEQ ID NO: 3140235 - RNA, 21 nt, Human
auuuuauuauguaaaucccau

SEQ ID NO: 3140236 - RNA, 15 nt, Human
auuuuauuauguaaa

SEQ ID NO: 3140237 - RNA, 16 nt, Human
auuuuauuauguaaau

SEQ ID NO: 3140238 - RNA, 17 nt, Human
auuuuauuauguaaauc

SEQ ID NO: 3140239 - RNA, 18 nt, Human
auuuuauuauguaaaucc

SEQ ID NO: 3140240 - RNA, 19 nt, Human
auuuuauuauguaaauccc

SEQ ID NO: 3140241 - RNA, 15 nt, Human
auucuucagcaaaaa

SEQ ID NO: 3140242 - RNA, 23 nt, Human
auucuucagcaaaaauauuuuau

SEQ ID NO: 3140243 - RNA, 21 nt, Human
auucuguauagauuagaauuc

SEQ ID NO: 3140244 - RNA, 15 nt, Human
auucuguauagauua

SEQ ID NO: 3140245 - RNA, 13 nt, Human
auucuuaaaguug

SEQ ID NO: 3140246 - RNA, 14 nt, Human
auucuuaaaguuga

SEQ ID NO: 3140247 - RNA, 15 nt, Human
auucuuaaaguugaa

SEQ ID NO: 3140248 - RNA, 16 nt, Human
auucuuaaaguugaau

SEQ ID NO: 3140249 - RNA, 23 nt, Human
auugguguuguacucaauuuuaa

SEQ ID NO: 3140250 - RNA, 14 nt, Human
auugguguuguacu

SEQ ID NO: 3140251 - RNA, 22 nt, Human
auugguguuguacucaauuuua

SEQ ID NO: 3140252 - RNA, 18 nt, Human
uuuuguuguuuguuuagu

SEQ ID NO: 3140253 - RNA, 12 nt, Human
uuuuguuucugu

SEQ ID NO: 3140254 - RNA, 13 nt, Human
uuuuguuucugua

SEQ ID NO: 3140255 - RNA, 12 nt, Human
uuuuguuuggac

SEQ ID NO: 3140256 - RNA, 22 nt, Human
uuuuguuuggaccaaaaaccag

SEQ ID NO: 3140257 - RNA, 23 nt, Human
uuuuguuuggaccaaaaaccagu

SEQ ID NO: 3140258 - RNA, 14 nt, Human
auuaagcauauauu

SEQ ID NO: 3140259 - RNA, 15 nt, Human
auuaagcauauauuu

SEQ ID NO: 3140260 - RNA, 21 nt, Human
auuaagcauauauuuuuauau

SEQ ID NO: 3140261 - RNA, 12 nt, Human
auuagaauucug

SEQ ID NO: 3140262 - RNA, 13 nt, Human
auuagaauucugu

SEQ ID NO: 3140263 - RNA, 14 nt, Human
auuagaauucugua

SEQ ID NO: 3140264 - RNA, 15 nt, Human
auuagaauucuguau

SEQ ID NO: 3140265 - RNA, 16 nt, Human
auuagaauucuguaua

SEQ ID NO: 3140266 - RNA, 17 nt, Human
auuagaauucuguauag

SEQ ID NO: 3140267 - RNA, 18 nt, Human
auuagaauucuguauaga

SEQ ID NO: 3140268 - RNA, 12 nt, Human
auguuaaaccau

SEQ ID NO: 3140269 - RNA, 13 nt, Human
auguuaaaccaug

SEQ ID NO: 3140270 - RNA, 20 nt, Human
auguuaaaccaugggauaaa

SEQ ID NO: 3140271 - RNA, 22 nt, Human
uuuucauucuccuaucaccugu

SEQ ID NO: 3140272 - RNA, 15 nt, Human
uuuucugauccaguu

SEQ ID NO: 3140273 - RNA, 21 nt, Human
uuuuauuaugaaacuugugua

SEQ ID NO: 3140274 - RNA, 22 nt, Human
uuuuauuaugaaacuuguguaa

SEQ ID NO: 3140275 - RNA, 12 nt, Human
uuuuauuaugaa

SEQ ID NO: 3140276 - RNA, 21 nt, Human
auucuccuaucaccugucuug

SEQ ID NO: 3140277 - RNA, 15 nt, Human
agauuagaauucugu

SEQ ID NO: 3140278 - RNA, 16 nt, Human
agauuagaauucugua

SEQ ID NO: 3140279 - RNA, 21 nt, Human
agauuagagaguguugaaacg

SEQ ID NO: 3140280 - RNA, 22 nt, Human
agauuagaauucuguauagauu

SEQ ID NO: 3140281 - RNA, 23 nt, Human
agauuagaauucuguauagauua

SEQ ID NO: 3140282 - RNA, 14 nt, Human
ugacaggacgcuga

SEQ ID NO: 3140283 - RNA, 16 nt, Human
ugacaggacgcugacc

SEQ ID NO: 3140284 - RNA, 23 nt, Human
ugacaggacgcugaccguggagc

SEQ ID NO: 3140285 - RNA, 15 nt, Human
ugaaauuguaauuau

SEQ ID NO: 3140286 - RNA, 16 nt, Human
ugaaauuguaauuaua

SEQ ID NO: 3140287 - RNA, 19 nt, Human
ugaaauuguaauuauaucu

SEQ ID NO: 3140288 - RNA, 13 nt, Human
ugaaauuguaauu

SEQ ID NO: 3140289 - RNA, 14 nt, Human
ugaaauuguaauua

SEQ ID NO: 3140290 - RNA, 17 nt, Human
ugaaauaacauggccuu

SEQ ID NO: 3140291 - RNA, 16 nt, Human
ugaaauaacauggccu

SEQ ID NO: 3140292 - RNA, 20 nt, Human
agacuggugacugauucuuc

SEQ ID NO: 3140293 - RNA, 21 nt, Human
agacuggugacugauucuuca

SEQ ID NO: 3140294 - RNA, 19 nt, Human
agacuggugacugauucuu

SEQ ID NO: 3140295 - RNA, 17 nt, Human
ucuuugucuacaccauu

SEQ ID NO: 3140296 - RNA, 15 nt, Human
agagaguguugaaac

SEQ ID NO: 3140297 - RNA, 16 nt, Human
agagaguguugaaacg

SEQ ID NO: 3140298 - RNA, 22 nt, Human
ugaaagaaaauaccaaggaaca

SEQ ID NO: 3140299 - RNA, 21 nt, Human
agaaugguccgugcuaaggac

SEQ ID NO: 3140300 - RNA, 23 nt, Human
agaaugguccgugcuaaggacuu

SEQ ID NO: 3140301 - RNA, 18 nt, Human
ucugugaacuugaaauuu

SEQ ID NO: 3140302 - RNA, 14 nt, Human
ucugugaacuugaa

SEQ ID NO: 3140303 - RNA, 17 nt, Human
ucugugaacuugaaauu

SEQ ID NO: 3140304 - RNA, 12 nt, Human
agaauucuguau

SEQ ID NO: 3140305 - RNA, 14 nt, Human
agaauucuguauag

SEQ ID NO: 3140306 - RNA, 11 nt, Human
ucugauccagu

SEQ ID NO: 3140307 - RNA, 14 nt, Human
ucugauccaguuuu

SEQ ID NO: 3140308 - RNA, 21 nt, Human
ucugauccaguuuuguuugga

SEQ ID NO: 3140309 - RNA, 10 nt, Human
acuucccugg

SEQ ID NO: 3140310 - RNA, 11 nt, Human
acuucccuggc

SEQ ID NO: 3140311 - RNA, 12 nt, Human
acuuuggauaau

SEQ ID NO: 3140312 - RNA, 17 nt, Human
acuuuggauaauaagga

SEQ ID NO: 3140313 - RNA, 19 nt, Human
acuuuggauaauaaggaaa

SEQ ID NO: 3140314 - RNA, 14 nt, Human
acuuucugaaauaa

SEQ ID NO: 3140315 - RNA, 20 nt, Human
acuuucugaaauaacauggc

SEQ ID NO: 3140316 - RNA, 19 nt, Human
ucucagauuuuauuaugua

SEQ ID NO: 3140317 - RNA, 22 nt, Human
ucucagauuuuauuauguaaau

SEQ ID NO: 3140318 - RNA, 23 nt, Human
ucucagauuuuauuauguaaauc

SEQ ID NO: 3140319 - RNA, 23 nt, Human
ucagauuuuauuauguaaauccc

SEQ ID NO: 3140320 - RNA, 22 nt, Human
ucagauuuuauuauguaaaucc

SEQ ID NO: 3140321 - RNA, 19 nt, Human
ucagcaaaaauauuuuaug

SEQ ID NO: 3140322 - RNA, 20 nt, Human
ucagcaaaaauauuuuauga

SEQ ID NO: 3140323 - RNA, 18 nt, Human
accuccucucacucccca

SEQ ID NO: 3140324 - RNA, 19 nt, Human
accuccucucacuccccag

SEQ ID NO: 3140325 - RNA, 19 nt, Human
ucaccugucuugccuuuuu

SEQ ID NO: 3140326 - RNA, 20 nt, Human
ucaccugucuugccuuuuuc

SEQ ID NO: 3140327 - RNA, 23 nt, Human
accaguauuguacaaaguauuaa

SEQ ID NO: 3140328 - RNA, 14 nt, Human
accaguauuguaca

SEQ ID NO: 3140329 - RNA, 15 nt, Human
accaguauuguacaa

SEQ ID NO: 3140330 - RNA, 20 nt, Human
accaguauuguacaaaguau

SEQ ID NO: 3140331 - RNA, 22 nt, Human
accaguauuguacaaaguauua

SEQ ID NO: 3140332 - RNA, 12 nt, Human
acauugucuccc

SEQ ID NO: 3140333 - RNA, 13 nt, Human
acauugucucccg

SEQ ID NO: 3140334 - RNA, 16 nt, Human
acauugucucccgccc

SEQ ID NO: 3140335 - RNA, 19 nt, Human
acauugucucccgcccccc

SEQ ID NO: 3140336 - RNA, 13 nt, Human
acggaugauuucu

SEQ ID NO: 3140337 - RNA, 19 nt, Human
acggugaauggcuuuguau

SEQ ID NO: 3140338 - RNA, 20 nt, Human
acggugaauggcuuuguaua

SEQ ID NO: 3140339 - RNA, 16 nt, Human
acggugaauggcuuug

SEQ ID NO: 3140340 - RNA, 12 nt, Human
acucaauuuuaa

SEQ ID NO: 3140341 - RNA, 15 nt, Human
acucaauuuuaacaa

SEQ ID NO: 3140342 - RNA, 13 nt, Human
uccucccauguca

SEQ ID NO: 3140343 - RNA, 19 nt, Human
uccucccaugucacugcag

SEQ ID NO: 3140344 - RNA, 20 nt, Human
uccucccaugucacugcaga

SEQ ID NO: 3140345 - RNA, 19 nt, Human
uccugcuuugcgugcccgg

SEQ ID NO: 3140346 - RNA, 12 nt, Human
uaacauaaaucu

SEQ ID NO: 3140347 - RNA, 16 nt, Human
uaacuuucugaaauaa

SEQ ID NO: 3140348 - RNA, 20 nt, Human
aaucugugaacuugaaauuu

SEQ ID NO: 3140349 - RNA, 21 nt, Human
aaucugugaacuugaaauuug

SEQ ID NO: 3140350 - RNA, 22 nt, Human
aaucugugaacuugaaauuuga

SEQ ID NO: 3140351 - RNA, 19 nt, Human
aauuaacauguuaaaccau

SEQ ID NO: 3140352 - RNA, 20 nt, Human
aauuaacauguuaaaccaug

SEQ ID NO: 3140353 - RNA, 23 nt, Human
aaugccaucaauaaaaaauuaug

SEQ ID NO: 3140354 - RNA, 11 nt, Human
aaugccagggc

SEQ ID NO: 3140355 - RNA, 12 nt, Human
aaugccagggcc

SEQ ID NO: 3140356 - RNA, 16 nt, Human
aaugccaucaauaaaa

SEQ ID NO: 3140357 - RNA, 21 nt, Human
aaugccaucaauaaaaaauua

SEQ ID NO: 3140358 - RNA, 14 nt, Human
uacuggauuguacu

SEQ ID NO: 3140359 - RNA, 23 nt, Human
uagagauuuuuuuguuguuuguu

SEQ ID NO: 3140360 - RNA, 18 nt, Human
uagcuagacuggugacug

SEQ ID NO: 3140361 - RNA, 21 nt, Human
uagcuagacuggugacugauu

SEQ ID NO: 3140362 - RNA, 22 nt, Human
uagcuagacuggugacugauuc

SEQ ID NO: 3140363 - RNA, 17 nt, Human
uaggagaggagaaccag

SEQ ID NO: 3140364 - RNA, 21 nt, Human
acaccauuaugugcgcugaua

SEQ ID NO: 3140365 - RNA, 17 nt, Human
acaccauuaugugcgcu

SEQ ID NO: 3140366 - RNA, 14 nt, Human
uaugugugaaguga

SEQ ID NO: 3140367 - RNA, 12 nt, Human
uaugugugaagu

SEQ ID NO: 3140368 - RNA, 21 nt, Human
acaggacgcugaccguggagc

SEQ ID NO: 3140369 - RNA, 12 nt, Human
uauucaaaguug

SEQ ID NO: 3140370 - RNA, 13 nt, Human
uauucaaaguugc

SEQ ID NO: 3140371 - RNA, 15 nt, Human
acaguauaauuaaca

SEQ ID NO: 3140372 - RNA, 20 nt, Human
acaguauaauuaacauguua

SEQ ID NO: 3140373 - RNA, 13 nt, Human
acaguauaauuaa

SEQ ID NO: 3140374 - RNA, 20 nt, Human
acaggcugacguuccgggca

SEQ ID NO: 3140375 - RNA, 19 nt, Human
uauauuuacuaaaauggac

SEQ ID NO: 3140376 - RNA, 20 nt, Human
uauauuuacuaaaauggacu

SEQ ID NO: 3140377 - RNA, 21 nt, Human
uauauuuacuaaaauggacug

SEQ ID NO: 3140378 - RNA, 12 nt, Human
uaugcugcuuuu

SEQ ID NO: 3140379 - RNA, 11 nt, Human
uaugcugcuuu

SEQ ID NO: 3140380 - RNA, 15 nt, Human
uaugcugaguuugug

SEQ ID NO: 3140381 - RNA, 13 nt, Human
aagccauguuuau

SEQ ID NO: 3140382 - RNA, 20 nt, Human
aagccauguuuauuacagua

SEQ ID NO: 3140383 - RNA, 21 nt, Human
aagccauguuuauuacaguau

SEQ ID NO: 3140384 - RNA, 22 nt, Human
aagccauguuuauuacaguaua

SEQ ID NO: 3140385 - RNA, 23 nt, Human
aagccauguuuauuacaguauaa

SEQ ID NO: 3140386 - RNA, 14 nt, Human
guuagagggaacag

SEQ ID NO: 3140387 - RNA, 18 nt, Human
guuagagauuuuuuuguu

SEQ ID NO: 3140388 - RNA, 22 nt, Human
guguaaauacaauuuuguuucu

SEQ ID NO: 3140389 - RNA, 18 nt, Human
guguaaauacaauuuugu

SEQ ID NO: 3140390 - RNA, 21 nt, Human
guguaaauacaauuuuguuuc

SEQ ID NO: 3140391 - RNA, 13 nt, Human
gugcugccugucc

SEQ ID NO: 3140392 - RNA, 13 nt, Human
aagaggcugguuu

SEQ ID NO: 3140393 - RNA, 21 nt, Human
aagaggcugguuuuggcaucu

SEQ ID NO: 3140394 - RNA, 11 nt, Human
aagaggcuggu

SEQ ID NO: 3140395 - RNA, 12 nt, Human
aagaggcugguu

SEQ ID NO: 3140396 - RNA, 21 nt, Human
gugguugaggcuaaguuggga

SEQ ID NO: 3140397 - RNA, 23 nt, Human
aagcauauauuuuuauauuuacu

SEQ ID NO: 3140398 - RNA, 16 nt, Human
aagccauguuuauuac

SEQ ID NO: 3140399 - RNA, 17 nt, Human
aagccauguuuauuaca

SEQ ID NO: 3140400 - RNA, 15 nt, Human
aagccauguuuauua

SEQ ID NO: 3140401 - RNA, 14 nt, Human
uaaaaaaaaaauug

SEQ ID NO: 3140402 - RNA, 18 nt, Human
uaaaaaaaaaauugggga

SEQ ID NO: 3140403 - RNA, 23 nt, Human
aagucagaucugccuaaggacuu

SEQ ID NO: 3140404 - RNA, 21 nt, Human
aagucagaucugccuaaggac

SEQ ID NO: 3140405 - RNA, 22 nt, Human
aagucagaucugccuaaggacu

SEQ ID NO: 3140406 - RNA, 18 nt, Human
aagucagaucugccuaag

SEQ ID NO: 3140407 - RNA, 18 nt, Human
guuuggaccaaaaaccag

SEQ ID NO: 3140408 - RNA, 13 nt, Human
guuuaauauuaaa

SEQ ID NO: 3140409 - RNA, 14 nt, Human
guuuaauauuaaag

SEQ ID NO: 3140410 - RNA, 15 nt, Human
guuuaauauuaaagc

SEQ ID NO: 3140411 - RNA, 18 nt, Human
guuuaauauuaaagccau

SEQ ID NO: 3140412 - RNA, 17 nt, Human
guuuauuacaguauaau

SEQ ID NO: 3140413 - RNA, 13 nt, Human
guuuauuacagua

SEQ ID NO: 3140414 - RNA, 12 nt, Human
guuguuuguuua

SEQ ID NO: 3140415 - RNA, 12 nt, Human
aaggaaaaguuu

SEQ ID NO: 3140416 - RNA, 16 nt, Human
aagaaaauaccaagga

SEQ ID NO: 3140417 - RNA, 19 nt, Human
aacuugaaauuugaauuuu

SEQ ID NO: 3140418 - RNA, 13 nt, Human
aacuugaaauuug

SEQ ID NO: 3140419 - RNA, 18 nt, Human
aacuugaaauuugaauuu

SEQ ID NO: 3140420 - RNA, 12 nt, Human
aacuugaaauuu

SEQ ID NO: 3140421 - RNA, 12 nt, Human
gugacuuuggau

SEQ ID NO: 3140422 - RNA, 15 nt, Human
gugacuuuggauaau

SEQ ID NO: 3140423 - RNA, 22 nt, Human
gucuugucucagauuuuauuau

SEQ ID NO: 3140424 - RNA, 23 nt, Human
gucuugucucagauuuuauuaug

SEQ ID NO: 3140425 - RNA, 19 nt, Human
guauuguacaaaguauuaa

SEQ ID NO: 3140426 - RNA, 21 nt, Human
guauuguacaaaguauuaagc

SEQ ID NO: 3140427 - RNA, 22 nt, Human
guauuguacaaaguauuaagca

SEQ ID NO: 3140428 - RNA, 23 nt, Human
guauuguacaaaguauuaagcau

SEQ ID NO: 3140429 - RNA, 13 nt, Human
gucagugcugccu

SEQ ID NO: 3140430 - RNA, 14 nt, Human
gucagugcugccug

SEQ ID NO: 3140431 - RNA, 15 nt, Human
gucagugcugccugu

SEQ ID NO: 3140432 - RNA, 16 nt, Human
gucagugcugccuguc

SEQ ID NO: 3140433 - RNA, 22 nt, Human
gucagugcugccuguccccaug

SEQ ID NO: 3140434 - RNA, 14 nt, Human
aacauguuaaacca

SEQ ID NO: 3140435 - RNA, 15 nt, Human
aacauguuaaaccau

SEQ ID NO: 3140436 - RNA, 18 nt, Human
aacaguccauugaaaggg

SEQ ID NO: 3140437 - RNA, 15 nt, Human
guccgugcuaaggac

SEQ ID NO: 3140438 - RNA, 16 nt, Human
guccgugcuaaggacu

SEQ ID NO: 3140439 - RNA, 17 nt, Human
guccgugcuaaggacuu

SEQ ID NO: 3140440 - RNA, 12 nt, Human
aaauuugaauuu

SEQ ID NO: 3140441 - RNA, 15 nt, Human
aaauuugaauuuugu

SEQ ID NO: 3140442 - RNA, 22 nt, Human
aaauuugaauuuuguguuagag

SEQ ID NO: 3140443 - RNA, 17 nt, Human
gucccacaaaugggcgc

SEQ ID NO: 3140444 - RNA, 18 nt, Human
gucccacaaaugggcgcc

SEQ ID NO: 3140445 - RNA, 23 nt, Human
aaaaaauuggggauucuuaaagu

SEQ ID NO: 3140446 - RNA, 19 nt, Human
aaaaauuggggauucuuaa

SEQ ID NO: 3140447 - RNA, 20 nt, Human
aaaaauuggggauucuuaaa

SEQ ID NO: 3140448 - RNA, 17 nt, Human
aaaaauuggggauucuu

SEQ ID NO: 3140449 - RNA, 18 nt, Human
aaaaauuggggauucuua

SEQ ID NO: 3140450 - RNA, 16 nt, Human
aaaaaccaguauugua

SEQ ID NO: 3140451 - RNA, 18 nt, Human
aaaaaccaguauuguaca

SEQ ID NO: 3140452 - RNA, 14 nt, Human
aaaaacauggccuu

SEQ ID NO: 3140453 - RNA, 21 nt, Human
aucuucuauauguuuaaaagu

SEQ ID NO: 3140454 - RNA, 12 nt, Human
aucaccugucuu

SEQ ID NO: 3140455 - RNA, 21 nt, Human
aucaccugucuugccuuuuuc

SEQ ID NO: 3140456 - RNA, 18 nt, Human
auggagccugcacgguga

SEQ ID NO: 3140457 - RNA, 22 nt, Human
auggagccugcacggugaaugg

SEQ ID NO: 3140458 - RNA, 14 nt, Human
auaugcuauuucua

SEQ ID NO: 3140459 - RNA, 17 nt, Human
auaauuaacauguuaaa

SEQ ID NO: 3140460 - RNA, 22 nt, Human
auaauuaacauguuaaaccaug

SEQ ID NO: 3140461 - RNA, 20 nt, Human
auaauuaacauguuaaacca

SEQ ID NO: 3140462 - RNA, 21 nt, Human
auaauuaacauguuaaaccau

SEQ ID NO: 3140463 - RNA, 18 nt, Human
auacaauuuuguuucugu

SEQ ID NO: 3140464 - RNA, 19 nt, Human
auacaauuuuguuucugua

SEQ ID NO: 3140465 - RNA, 20 nt, Human
auacaauuuuguuucuguac

SEQ ID NO: 3140466 - RNA, 18 nt, Human
auacccgccuagcugcug

SEQ ID NO: 3140467 - RNA, 11 nt, Human
aguugaauuua

SEQ ID NO: 3140468 - RNA, 13 nt, Human
aguugaauuuauu

SEQ ID NO: 3140469 - RNA, 17 nt, Human
aguugaauuuauuggcu

SEQ ID NO: 3140470 - RNA, 19 nt, Human
aguugaauuuauuggcuuu

SEQ ID NO: 3140471 - RNA, 20 nt, Human
aguugaauuuauuggcuuuu

SEQ ID NO: 3140472 - RNA, 13 nt, Human
aggggcccuugga

SEQ ID NO: 3140473 - RNA, 20 nt, Human
aggggcccuuggagcgugga

SEQ ID NO: 3140474 - RNA, 14 nt, Human
aggcuguggcuggu

SEQ ID NO: 3140475 - RNA, 15 nt, Human
aggcuguggcuggug

SEQ ID NO: 3140476 - RNA, 17 nt, Human
aggcuguggcuggugag

SEQ ID NO: 3140477 - RNA, 16 nt, Human
aggagaaccagauucu

SEQ ID NO: 3140478 - RNA, 13 nt, Human
agaguguugaaac

SEQ ID NO: 3140479 - RNA, 14 nt, Human
agaguguugaaacg

SEQ ID NO: 3140480 - RNA, 22 nt, Human
agccauguuuauuacaguauaa

SEQ ID NO: 3140481 - RNA, 17 nt, Human
agccauguuuauuacag

SEQ ID NO: 3140482 - RNA, 18 nt, Human
agcacgguggugaggcag

SEQ ID NO: 3140483 - RNA, 15 nt, Human
acaauuuuguuucug

SEQ ID NO: 3140484 - RNA, 17 nt, Human
acaauuuuguuucugua

SEQ ID NO: 3140485 - RNA, 14 nt, Human
acaauuuuguuucu

SEQ ID NO: 3140486 - RNA, 15 nt, Human
acauaaaucugugaa

SEQ ID NO: 3140487 - RNA, 18 nt, Human
acauaaaucugugaacuu

SEQ ID NO: 3140488 - RNA, 14 nt, Human
acauaaaucuguga

SEQ ID NO: 3140489 - RNA, 12 nt, Human
acuuuucugaua

SEQ ID NO: 3140490 - RNA, 21 nt, Human
acuucuuuaauuuuggaauuu

SEQ ID NO: 3140491 - RNA, 20 nt, Human
acuucuuuaauuuuggaauu

SEQ ID NO: 3140492 - RNA, 17 nt, Human
acuccccagccugggcc

SEQ ID NO: 3140493 - RNA, 19 nt, Human
acuccccagccugggccca

SEQ ID NO: 3140494 - RNA, 18 nt, Human
aaaauuggggauucuuaa

SEQ ID NO: 3140495 - RNA, 19 nt, Human
aaaauuggggauucuuaaa

SEQ ID NO: 3140496 - RNA, 17 nt, Human
aaaauuggggauucuua

SEQ ID NO: 3140497 - RNA, 19 nt, Human
aaacugacaugcccucccu

SEQ ID NO: 3140498 - RNA, 20 nt, Human
aaacugacaugcccucccuu

SEQ ID NO: 3140499 - RNA, 22 nt, Human
aaacugacaugcccucccuucu

SEQ ID NO: 3140500 - RNA, 18 nt, Human
aaauauuuuaugauccag

SEQ ID NO: 3140501 - RNA, 19 nt, Human
aaauauuuuaugauccagc

SEQ ID NO: 3140502 - RNA, 14 nt, Human
aaauauuuuaugau

SEQ ID NO: 3140503 - RNA, 19 nt, Human
aaauggacuguggugacuu

SEQ ID NO: 3140504 - RNA, 12 nt, Human
aacuuuucugau

SEQ ID NO: 3140505 - RNA, 13 nt, Human
aacuuuucugaua

SEQ ID NO: 3140506 - RNA, 14 nt, Human
aacuuuucugauag

SEQ ID NO: 3140507 - RNA, 18 nt, Human
aacugacaugcccucccu

SEQ ID NO: 3140508 - RNA, 23 nt, Human
aacugacaugcccucccuucucc

SEQ ID NO: 3140509 - RNA, 16 nt, Human
aaauuggggauucuua

SEQ ID NO: 3140510 - RNA, 20 nt, Human
aaccaguauuguacaaagua

SEQ ID NO: 3140511 - RNA, 15 nt, Human
aaccaguauuguaca

SEQ ID NO: 3140512 - RNA, 21 nt, Human
aaccaguauuguacaaaguau

SEQ ID NO: 3140513 - RNA, 22 nt, Human
aaccaguauuguacaaaguauu

SEQ ID NO: 3140514 - RNA, 14 nt, Human
aauccauuuggaaa

SEQ ID NO: 3140515 - RNA, 15 nt, Human
aauccauuuggaaau

SEQ ID NO: 3140516 - RNA, 22 nt, Human
aauccauuuggaaaucuuuaaa

SEQ ID NO: 3140517 - RNA, 17 nt, Human
aauccauuuggaaaucu

SEQ ID NO: 3140518 - RNA, 18 nt, Human
aauccauuuggaaaucuu

SEQ ID NO: 3140519 - RNA, 22 nt, Human
aaugguccgugcuaaggacuug

SEQ ID NO: 3140520 - RNA, 18 nt, Human
aaugggcgccccccccuc

SEQ ID NO: 3140521 - RNA, 21 nt, Human
aaugggcgccccccccucccc

SEQ ID NO: 3140522 - RNA, 13 nt, Human
aauggcuuuguau

SEQ ID NO: 3140523 - RNA, 18 nt, Human
aauggcuuuguauagaac

SEQ ID NO: 3140524 - RNA, 15 nt, Human
aauggcuuuguauag

SEQ ID NO: 3140525 - RNA, 16 nt, Human
aauggcuuuguauaga

SEQ ID NO: 3140526 - RNA, 18 nt, Human
aauuaguggcacuugcuu

SEQ ID NO: 3140527 - RNA, 22 nt, Human
aagccacugccucucccucugg

SEQ ID NO: 3140528 - RNA, 11 nt, Human
caagaggcugg

SEQ ID NO: 3140529 - RNA, 12 nt, Human
caagaggcuggu

SEQ ID NO: 3140530 - RNA, 13 nt, Human
caagaggcugguu

SEQ ID NO: 3140531 - RNA, 14 nt, Human
caagaggcugguuu

SEQ ID NO: 3140532 - RNA, 16 nt, Human
caagaggcugguuuug

SEQ ID NO: 3140533 - RNA, 22 nt, Human
caaggggcccuuggagcgugga

SEQ ID NO: 3140534 - RNA, 22 nt, Human
caaaaauauuuuaugauccagc

SEQ ID NO: 3140535 - RNA, 23 nt, Human
caaaaauauuuuaugauccagca

SEQ ID NO: 3140536 - RNA, 14 nt, Human
caaaaauauuuuau

SEQ ID NO: 3140537 - RNA, 15 nt, Human
caaaaauauuuuaug

SEQ ID NO: 3140538 - RNA, 17 nt, Human
caaaaauauuuuaugau

SEQ ID NO: 3140539 - RNA, 21 nt, Human
caaaaauauuuuaugauccag

SEQ ID NO: 3140540 - RNA, 19 nt, Human
caaaaaccaguauuguaca

SEQ ID NO: 3140541 - RNA, 20 nt, Human
caaaaaccaguauuguacaa

SEQ ID NO: 3140542 - RNA, 18 nt, Human
caaaaaccaguauuguac

SEQ ID NO: 3140543 - RNA, 20 nt, Human
caaaaacauggccuuugcuu

SEQ ID NO: 3140544 - RNA, 12 nt, Human
uauuacaguaua

SEQ ID NO: 3140545 - RNA, 13 nt, Human
uauuacaguauaa

SEQ ID NO: 3140546 - RNA, 12 nt, Human
uauguaaauccc

SEQ ID NO: 3140547 - RNA, 15 nt, Human
uauguaaaucccauu

SEQ ID NO: 3140548 - RNA, 19 nt, Human
uauguaaaucccauuauuc

SEQ ID NO: 3140549 - RNA, 20 nt, Human
uauguaaaucccauuauuca

SEQ ID NO: 3140550 - RNA, 21 nt, Human
uauguaaaucccauuauucaa

SEQ ID NO: 3140551 - RNA, 23 nt, Human
uauguaaaucccauuauucaaag

SEQ ID NO: 3140552 - RNA, 15 nt, Human
uauuuucauucuccu

SEQ ID NO: 3140553 - RNA, 13 nt, Human
uauuuuauuauga

SEQ ID NO: 3140554 - RNA, 18 nt, Human
uauuuuauuaugaaacuu

SEQ ID NO: 3140555 - RNA, 23 nt, Human
uauuuuauuaugaaacuugugua

SEQ ID NO: 3140556 - RNA, 23 nt, Human
ucauuauuuuauuaugaaacuug

SEQ ID NO: 3140557 - RNA, 22 nt, Human
ucauuauuuuauuaugaaacuu

SEQ ID NO: 3140558 - RNA, 16 nt, Human
ucacugcgccacugcu

SEQ ID NO: 3140559 - RNA, 23 nt, Human
ucacugcgccacugcuccgugga

SEQ ID NO: 3140560 - RNA, 22 nt, Human
ucagacagaucuggaaugugaa

SEQ ID NO: 3140561 - RNA, 20 nt, Human
ucaggcacacaaggggcccu

SEQ ID NO: 3140562 - RNA, 21 nt, Human
ucaggcacacaaggggcccuu

SEQ ID NO: 3140563 - RNA, 21 nt, Human
ucuucagcaaaaauauuuuau

SEQ ID NO: 3140564 - RNA, 22 nt, Human
ucuucagcaaaaauauuuuaug

SEQ ID NO: 3140565 - RNA, 23 nt, Human
ucuucagcaaaaauauuuuauga

SEQ ID NO: 3140566 - RNA, 16 nt, Human
ucuuaaaguugaauuu

SEQ ID NO: 3140567 - RNA, 19 nt, Human
ucuuaaaguugaauuuauu

SEQ ID NO: 3140568 - RNA, 20 nt, Human
ucuuaaaguugaauuuauug

SEQ ID NO: 3140569 - RNA, 21 nt, Human
ucuuaaaguugaauuuauugg

SEQ ID NO: 3140570 - RNA, 22 nt, Human
ucuuaaaguugaauuuauuggc

SEQ ID NO: 3140571 - RNA, 16 nt, Human
ucuuaaaauguuucaa

SEQ ID NO: 3140572 - RNA, 20 nt, Human
ucuuaaaauguuucaaaugg

SEQ ID NO: 3140573 - RNA, 12 nt, Human
ucuuaaaguuga

SEQ ID NO: 3140574 - RNA, 13 nt, Human
ucuuaaaguugaa

SEQ ID NO: 3140575 - RNA, 14 nt, Human
ucuuaaaguugaau

SEQ ID NO: 3140576 - RNA, 16 nt, Human
ucugguggucagcccu

SEQ ID NO: 3140577 - RNA, 20 nt, Human
ucugguggucagcccuagga

SEQ ID NO: 3140578 - RNA, 15 nt, Human
ucucugucccauucc

SEQ ID NO: 3140579 - RNA, 19 nt, Human
ucucugucccauucccugg

SEQ ID NO: 3140580 - RNA, 20 nt, Human
ucucugucccauucccuggg

SEQ ID NO: 3140581 - RNA, 21 nt, Human
ucucugucccauucccuggga

SEQ ID NO: 3140582 - RNA, 17 nt, Human
ucucgucuuccgucucc

SEQ ID NO: 3140583 - RNA, 18 nt, Human
ucucgucuuccgucuccc

SEQ ID NO: 3140584 - RNA, 19 nt, Human
ucucgucuuccgucucccc

SEQ ID NO: 3140585 - RNA, 14 nt, Human
ucugaggaauucug

SEQ ID NO: 3140586 - RNA, 15 nt, Human
ucugaggaauucugu

SEQ ID NO: 3140587 - RNA, 16 nt, Human
ucugaggaauucugua

SEQ ID NO: 3140588 - RNA, 17 nt, Human
ucugaggaauucuguau

SEQ ID NO: 3140589 - RNA, 18 nt, Human
ucugaggaauucuguaua

SEQ ID NO: 3140590 - RNA, 20 nt, Human
ucuaugcugaguuugugcug

SEQ ID NO: 3140591 - RNA, 16 nt, Human
ucuaugcugaguuugu

SEQ ID NO: 3140592 - RNA, 19 nt, Human
ucuauauuuucauucuccu

SEQ ID NO: 3140593 - RNA, 13 nt, Human
ucuaggagaggag

SEQ ID NO: 3140594 - RNA, 17 nt, Human
ucuaaccaagaggcugg

SEQ ID NO: 3140595 - RNA, 19 nt, Human
ucccuggaucuaccuggag

SEQ ID NO: 3140596 - RNA, 20 nt, Human
ucccuggaucuaccuggagg

SEQ ID NO: 3140597 - RNA, 21 nt, Human
ucccuggaucuaccuggaggg

SEQ ID NO: 3140598 - RNA, 22 nt, Human
ucccuggaucuaccuggaggga

SEQ ID NO: 3140599 - RNA, 14 nt, Human
ucccuucucccugg

SEQ ID NO: 3140600 - RNA, 15 nt, Human
ucccuucucccugga

SEQ ID NO: 3140601 - RNA, 16 nt, Human
ucccuucucccuggau

SEQ ID NO: 3140602 - RNA, 18 nt, Human
ucccugcuuuggucuugc

SEQ ID NO: 3140603 - RNA, 15 nt, Human
ucccggguccuuggc

SEQ ID NO: 3140604 - RNA, 17 nt, Human
ucccggguccuuggccc

SEQ ID NO: 3140605 - RNA, 19 nt, Human
ucccggguccuuggccccc

SEQ ID NO: 3140606 - RNA, 15 nt, Human
ucccgggcuguccac

SEQ ID NO: 3140607 - RNA, 16 nt, Human
ucccuccucccauguc

SEQ ID NO: 3140608 - RNA, 20 nt, Human
ucccuccucccaugucacug

SEQ ID NO: 3140609 - RNA, 14 nt, Human
ucccuccugcuuug

SEQ ID NO: 3140610 - RNA, 22 nt, Human
ucccuccugcuuugcgugcccg

SEQ ID NO: 3140611 - RNA, 10 nt, Human
ucccuccucc

SEQ ID NO: 3140612 - RNA, 22 nt, Human
ugcagauugagaccuacaggcu

SEQ ID NO: 3140613 - RNA, 23 nt, Human
ugcagauugagaccuacaggcug

SEQ ID NO: 3140614 - RNA, 12 nt, Human
ugccagggcccg

SEQ ID NO: 3140615 - RNA, 12 nt, Human
ugccuaaggacu

SEQ ID NO: 3140616 - RNA, 13 nt, Human
ugccuaaggacuu

SEQ ID NO: 3140617 - RNA, 14 nt, Human
ugccuaaggacuuc

SEQ ID NO: 3140618 - RNA, 15 nt, Human
ugccuaaggacuucu

SEQ ID NO: 3140619 - RNA, 16 nt, Human
ugccuaaggacuucuu

SEQ ID NO: 3140620 - RNA, 20 nt, Human
ugccuaaggacuucuuuaau

SEQ ID NO: 3140621 - RNA, 14 nt, Human
ugcccggggcagca

SEQ ID NO: 3140622 - RNA, 22 nt, Human
ugcccggggcagcagcagcccu

SEQ ID NO: 3140623 - RNA, 23 nt, Human
ugcccggggcagcagcagcccug

SEQ ID NO: 3140624 - RNA, 16 nt, Human
ugcccugcuuucagau

SEQ ID NO: 3140625 - RNA, 17 nt, Human
ugcccugcuuucagaua

SEQ ID NO: 3140626 - RNA, 12 nt, Human
ugcccugcuuuc

SEQ ID NO: 3140627 - RNA, 17 nt, Human
ugacugauucuucagca

SEQ ID NO: 3140628 - RNA, 13 nt, Human
ugacugauucuuc

SEQ ID NO: 3140629 - RNA, 14 nt, Human
ugacugauucuuca

SEQ ID NO: 3140630 - RNA, 15 nt, Human
ugacugauucuucag

SEQ ID NO: 3140631 - RNA, 16 nt, Human
ugacugauucuucagc

SEQ ID NO: 3140632 - RNA, 17 nt, Human
ugagaccuacaggcuga

SEQ ID NO: 3140633 - RNA, 18 nt, Human
ugagaccuacaggcugac

SEQ ID NO: 3140634 - RNA, 19 nt, Human
ugagaccuacaggcugacg

SEQ ID NO: 3140635 - RNA, 19 nt, Human
ugagccggucaggcacaca

SEQ ID NO: 3140636 - RNA, 23 nt, Human
uguauagauuagagaguguugaa

SEQ ID NO: 3140637 - RNA, 23 nt, Human
uguauagaaccucuuugucuaca

SEQ ID NO: 3140638 - RNA, 15 nt, Human
uguauagauuagaau

SEQ ID NO: 3140639 - RNA, 21 nt, Human
uguauagauuagaauucugua

SEQ ID NO: 3140640 - RNA, 12 nt, Human
uguaugcugcuu

SEQ ID NO: 3140641 - RNA, 13 nt, Human
uguaugcugcuuu

SEQ ID NO: 3140642 - RNA, 16 nt, Human
uguaugcugcuuuucu

SEQ ID NO: 3140643 - RNA, 18 nt, Human
ugucuacaccauuaugug

SEQ ID NO: 3140644 - RNA, 17 nt, Human
ugucuacaccauuaugu

SEQ ID NO: 3140645 - RNA, 22 nt, Human
ugucucagauuuuauuauguaa

SEQ ID NO: 3140646 - RNA, 16 nt, Human
ugucucagauuuuauu

SEQ ID NO: 3140647 - RNA, 20 nt, Human
ugucucagauuuuauuaugu

SEQ ID NO: 3140648 - RNA, 21 nt, Human
ugucuacaugaaaguccucag

SEQ ID NO: 3140649 - RNA, 14 nt, Human
uguacaaaguauua

SEQ ID NO: 3140650 - RNA, 21 nt, Human
uguacaaaguauuaagcauau

SEQ ID NO: 3140651 - RNA, 15 nt, Human
uguacaaaguauuaa

SEQ ID NO: 3140652 - RNA, 17 nt, Human
uguacaaaguauuaagc

SEQ ID NO: 3140653 - RNA, 18 nt, Human
uguacaaaguauuaagca

SEQ ID NO: 3140654 - RNA, 19 nt, Human
uguacaaaguauuaagcau

SEQ ID NO: 3140655 - RNA, 20 nt, Human
uguacaaaguauuaagcaua

SEQ ID NO: 3140656 - RNA, 15 nt, Human
uggugacuuuggaua

SEQ ID NO: 3140657 - RNA, 16 nt, Human
uggugacuuuggauaa

SEQ ID NO: 3140658 - RNA, 18 nt, Human
uggugacuuuggauaaua

SEQ ID NO: 3140659 - RNA, 19 nt, Human
uggugacuuuggauaauaa

SEQ ID NO: 3140660 - RNA, 23 nt, Human
uggugacuuuggauaauaaggaa

SEQ ID NO: 3140661 - RNA, 15 nt, Human
ugguggucagcccua

SEQ ID NO: 3140662 - RNA, 22 nt, Human
ugcuuugcgugcccggggcagc

SEQ ID NO: 3140663 - RNA, 14 nt, Human
uggaacgcguugaa

SEQ ID NO: 3140664 - RNA, 15 nt, Human
uggaacgcguugaaa

SEQ ID NO: 3140665 - RNA, 16 nt, Human
uggaacgcguugaaau

SEQ ID NO: 3140666 - RNA, 14 nt, Human
ugcuuaacauaccc

SEQ ID NO: 3140667 - RNA, 17 nt, Human
ugccuguccccaugcuu

SEQ ID NO: 3140668 - RNA, 17 nt, Human
uggacugguugguuuug

SEQ ID NO: 3140669 - RNA, 15 nt, Human
uggaccaaaaaccag

SEQ ID NO: 3140670 - RNA, 14 nt, Human
uggggugguugagg

SEQ ID NO: 3140671 - RNA, 23 nt, Human
ugggguuaucugaagucagaucu

SEQ ID NO: 3140672 - RNA, 23 nt, Human
ugggaucugguggucagcccuag

SEQ ID NO: 3140673 - RNA, 12 nt, Human
ugggauaaaugc

SEQ ID NO: 3140674 - RNA, 13 nt, Human
ugggauaaaugcc

SEQ ID NO: 3140675 - RNA, 14 nt, Human
ugggauaaaugcca

SEQ ID NO: 3140676 - RNA, 11 nt, Human
ugggcagcccg

SEQ ID NO: 3140677 - RNA, 12 nt, Human
ugggcagcccgc

SEQ ID NO: 3140678 - RNA, 18 nt, Human
ugggcagcuuagggcccu

SEQ ID NO: 3140679 - RNA, 19 nt, Human
ugggcagcuuagggcccug

SEQ ID NO: 3140680 - RNA, 21 nt, Human
ugggcagcuuagggcccugga

SEQ ID NO: 3140681 - RNA, 22 nt, Human
ugggcagcuuagggcccuggag

SEQ ID NO: 3140682 - RNA, 23 nt, Human
ugggcagcuuagggcccuggagg

SEQ ID NO: 3140683 - RNA, 14 nt, Human
uuuaauaauuauau

SEQ ID NO: 3140684 - RNA, 18 nt, Human
uuuaauaauuauaugcua

SEQ ID NO: 3140685 - RNA, 21 nt, Human
uuuaauaauuauaugcuauuu

SEQ ID NO: 3140686 - RNA, 21 nt, Human
uuguuuggaccaaaaaccagu

SEQ ID NO: 3140687 - RNA, 16 nt, Human
uuuaacaacagcuggu

SEQ ID NO: 3140688 - RNA, 13 nt, Human
uuucagauacugg

SEQ ID NO: 3140689 - RNA, 21 nt, Human
uuucagauacuggauuguacu

SEQ ID NO: 3140690 - RNA, 14 nt, Human
uuuauuauguaaau

SEQ ID NO: 3140691 - RNA, 16 nt, Human
uuuauuauguaaaucc

SEQ ID NO: 3140692 - RNA, 17 nt, Human
uuuauuauguaaauccc

SEQ ID NO: 3140693 - RNA, 22 nt, Human
uugugcgcuaaacuuuucugau

SEQ ID NO: 3140694 - RNA, 23 nt, Human
uugugcgcuaaacuuuucugaua

SEQ ID NO: 3140695 - RNA, 19 nt, Human
uugugcugggguuaucuga

SEQ ID NO: 3140696 - RNA, 17 nt, Human
uuguuagaucuaguuca

SEQ ID NO: 3140697 - RNA, 17 nt, Human
uuguuguuuguuuaguc

SEQ ID NO: 3140698 - RNA, 16 nt, Human
uuggguguauugugcg

SEQ ID NO: 3140699 - RNA, 13 nt, Human
uuggguguauugu

SEQ ID NO: 3140700 - RNA, 15 nt, Human
uuggguguauugugc

SEQ ID NO: 3140701 - RNA, 18 nt, Human
uuggucuugccccaucac

SEQ ID NO: 3140702 - RNA, 14 nt, Human
uuguacucaauuuu

SEQ ID NO: 3140703 - RNA, 15 nt, Human
uuguacucaauuuua

SEQ ID NO: 3140704 - RNA, 19 nt, Human
uugucuacaccauuaugug

SEQ ID NO: 3140705 - RNA, 18 nt, Human
uugucuccccuguucccc

SEQ ID NO: 3140706 - RNA, 22 nt, Human
uugucuccccuguuccccucuc

SEQ ID NO: 3140707 - RNA, 23 nt, Human
uugucuccccuguuccccucucc

SEQ ID NO: 3140708 - RNA, 21 nt, Human
uugucucccgccccccacacu

SEQ ID NO: 3140709 - RNA, 22 nt, Human
uugucucagauuuuauuaugua

SEQ ID NO: 3140710 - RNA, 20 nt, Human
uugucuacaccauuaugugc

SEQ ID NO: 3140711 - RNA, 13 nt, Human
uugucucagauuu

SEQ ID NO: 3140712 - RNA, 16 nt, Human
uugucucagauuuuau

SEQ ID NO: 3140713 - RNA, 20 nt, Human
uugucucagauuuuauuaug

SEQ ID NO: 3140714 - RNA, 22 nt, Human
uugaauuuauuggcuuuucuga

SEQ ID NO: 3140715 - RNA, 15 nt, Human
uugaauuuauuggcu

SEQ ID NO: 3140716 - RNA, 18 nt, Human
uugaauuuauuggcuuuu

SEQ ID NO: 3140717 - RNA, 17 nt, Human
uugaauuuuguguuaga

SEQ ID NO: 3140718 - RNA, 21 nt, Human
uugaauuuuguguuagagauu

SEQ ID NO: 3140719 - RNA, 13 nt, Human
uucugauagagga

SEQ ID NO: 3140720 - RNA, 21 nt, Human
uucugauagaggaagccugau

SEQ ID NO: 3140721 - RNA, 15 nt, Human
uucuauccucaucuu

SEQ ID NO: 3140722 - RNA, 19 nt, Human
uucaaaugguuuaacaaaa

SEQ ID NO: 3140723 - RNA, 18 nt, Human
uucaaaugcuguaacuuu

SEQ ID NO: 3140724 - RNA, 20 nt, Human
uuauuuuauuaugaaacuug

SEQ ID NO: 3140725 - RNA, 15 nt, Human
uuauuuuauuaugaa

SEQ ID NO: 3140726 - RNA, 16 nt, Human
uuauuuuauuaugaaa

SEQ ID NO: 3140727 - RNA, 14 nt, Human
uuauuuuauuauga

SEQ ID NO: 3140728 - RNA, 16 nt, Human
uucagauacuggauug

SEQ ID NO: 3140729 - RNA, 20 nt, Human
uucagauacuggauuguacu

SEQ ID NO: 3140730 - RNA, 16 nt, Human
uuauaugcuauuucua

SEQ ID NO: 3140731 - RNA, 18 nt, Human
uuauaugcuauuucuaua

SEQ ID NO: 3140732 - RNA, 22 nt, Human
uuauaucugaggaauucuguau

SEQ ID NO: 3140733 - RNA, 23 nt, Human
uuauaucugaggaauucuguaua

SEQ ID NO: 3140734 - RNA, 14 nt, Human
uuauaucugaggaa

SEQ ID NO: 3140735 - RNA, 20 nt, Human
uuauaucugaggaauucugu

SEQ ID NO: 3140736 - RNA, 21 nt, Human
uuauaucugaggaauucugua

SEQ ID NO: 3140737 - RNA, 14 nt, Human
uuauuacaguauaa

SEQ ID NO: 3140738 - RNA, 16 nt, Human
uuauuacaguauaauu

SEQ ID NO: 3140739 - RNA, 13 nt, Human
uuuuauauuuacu

SEQ ID NO: 3140740 - RNA, 18 nt, Human
uuuggaccaaaaaccagu

SEQ ID NO: 3140741 - RNA, 21 nt, Human
uuuggaccaaaaaccaguauu

SEQ ID NO: 3140742 - RNA, 22 nt, Human
uuuggaccaaaaaccaguauug

SEQ ID NO: 3140743 - RNA, 24 nt, Human
uuuggaccaaaaaccaguauugua

SEQ ID NO: 3140744 - RNA, 13 nt, Human
uuuuucauuauuu

SEQ ID NO: 3140745 - RNA, 22 nt, Human
uuuuucauuauuuuauuaugaa

SEQ ID NO: 3140746 - RNA, 11 nt, Human
cauuuggaaau

SEQ ID NO: 3140747 - RNA, 17 nt, Human
cauuuggaaaucuuuaa

SEQ ID NO: 3140748 - RNA, 18 nt, Human
cauuuggaaaucuuuaaa

SEQ ID NO: 3140749 - RNA, 10 nt, Human
cauucccugg

SEQ ID NO: 3140750 - RNA, 12 nt, Human
cauucccuggga

SEQ ID NO: 3140751 - RNA, 15 nt, Human
cauucccugggaucu

SEQ ID NO: 3140752 - RNA, 17 nt, Human
cauuauuuuauuaugaa

SEQ ID NO: 3140753 - RNA, 16 nt, Human
cauuauucaaaguugc

SEQ ID NO: 3140754 - RNA, 22 nt, Human
cauuauucaaaguugccuaaau

SEQ ID NO: 3140755 - RNA, 18 nt, Human
cauuauucaaaguugccu

SEQ ID NO: 3140756 - RNA, 21 nt, Human
cauuauucaaaguugccuaaa

SEQ ID NO: 3140757 - RNA, 17 nt, Human
cauucuggucucgucuu

SEQ ID NO: 3140758 - RNA, 18 nt, Human
cauucuggucucgucuuc

SEQ ID NO: 3140759 - RNA, 22 nt, Human
cauucuggucucgucuuccguc

SEQ ID NO: 3140760 - RNA, 22 nt, Human
cauguuuauuacaguauaauua

SEQ ID NO: 3140761 - RNA, 22 nt, Human
cauguuaaaccaugggauaaau

SEQ ID NO: 3140762 - RNA, 23 nt, Human
cauguuuauuacaguauaauuaa

SEQ ID NO: 3140763 - RNA, 13 nt, Human
cauguuaaaccau

SEQ ID NO: 3140764 - RNA, 16 nt, Human
caugggauaaaugcca

SEQ ID NO: 3140765 - RNA, 17 nt, Human
caugggauaaaugccau

SEQ ID NO: 3140766 - RNA, 18 nt, Human
caugggauaaaugccauc

SEQ ID NO: 3140767 - RNA, 23 nt, Human
caugggauaaaugccaucaauaa

SEQ ID NO: 3140768 - RNA, 20 nt, Human
cauauauuuuuauauuuacu

SEQ ID NO: 3140769 - RNA, 21 nt, Human
cauauauuuuuauauuuacua

SEQ ID NO: 3140770 - RNA, 18 nt, Human
cauauauuuuuauauuua

SEQ ID NO: 3140771 - RNA, 19 nt, Human
cauagucuggcuguaccca

SEQ ID NO: 3140772 - RNA, 12 nt, Human
cagugcugccug

SEQ ID NO: 3140773 - RNA, 13 nt, Human
cagugcugccugu

SEQ ID NO: 3140774 - RNA, 14 nt, Human
cagugcugccuguc

SEQ ID NO: 3140775 - RNA, 15 nt, Human
cagugcugccugucc

SEQ ID NO: 3140776 - RNA, 22 nt, Human
cagugcugccuguccccaugcu

SEQ ID NO: 3140777 - RNA, 16 nt, Human
caucacugcgccacug

SEQ ID NO: 3140778 - RNA, 12 nt, Human
caucucccugcu

SEQ ID NO: 3140779 - RNA, 14 nt, Human
caucucccugcuuu

SEQ ID NO: 3140780 - RNA, 15 nt, Human
caucucccugcuuug

SEQ ID NO: 3140781 - RNA, 11 nt, Human
caucucccugc

SEQ ID NO: 3140782 - RNA, 12 nt, Human
caugaagacaga

SEQ ID NO: 3140783 - RNA, 13 nt, Human
ccaugggauaaau

SEQ ID NO: 3140784 - RNA, 17 nt, Human
ccauuauucaaaguugc

SEQ ID NO: 3140785 - RNA, 22 nt, Human
ccauuauucaaaguugccuaaa

SEQ ID NO: 3140786 - RNA, 14 nt, Human
ccauuauucaaagu

SEQ ID NO: 3140787 - RNA, 13 nt, Human
ccauguuuauuac

SEQ ID NO: 3140788 - RNA, 20 nt, Human
ccauguuuauuacaguauaa

SEQ ID NO: 3140789 - RNA, 18 nt, Human
ccaaacccaaaagaaacu

SEQ ID NO: 3140790 - RNA, 13 nt, Human
ccacaccuccucu

SEQ ID NO: 3140791 - RNA, 11 nt, Human
ccacugccucu

SEQ ID NO: 3140792 - RNA, 13 nt, Human
ccacugccucucc

SEQ ID NO: 3140793 - RNA, 15 nt, Human
ccacugccucucccu

SEQ ID NO: 3140794 - RNA, 16 nt, Human
ccacugccucucccuc

SEQ ID NO: 3140795 - RNA, 17 nt, Human
ccacugccucucccucu

SEQ ID NO: 3140796 - RNA, 19 nt, Human
ccacugccucucccucugg

SEQ ID NO: 3140797 - RNA, 16 nt, Human
ccacugcuccguggag

SEQ ID NO: 3140798 - RNA, 19 nt, Human
ccacugcuccguggaggag

SEQ ID NO: 3140799 - RNA, 20 nt, Human
ccagauucuauccucaucuu

SEQ ID NO: 3140800 - RNA, 21 nt, Human
ccugcacggugaauggcuuug

SEQ ID NO: 3140801 - RNA, 20 nt, Human
ccugcacggugaauggcuuu

SEQ ID NO: 3140802 - RNA, 17 nt, Human
ccugggcccaucucccu

SEQ ID NO: 3140803 - RNA, 18 nt, Human
ccugggcccaucucccug

SEQ ID NO: 3140804 - RNA, 20 nt, Human
ccugggcccaucucccugcu

SEQ ID NO: 3140805 - RNA, 22 nt, Human
ccugggcccaucucccugcuuu

SEQ ID NO: 3140806 - RNA, 21 nt, Human
cgaaagaacaguccauugaaa

SEQ ID NO: 3140807 - RNA, 12 nt, Human
cgaaagaacagu

SEQ ID NO: 3140808 - RNA, 19 nt, Human
ccuuuuauuuuuuucuaau

SEQ ID NO: 3140809 - RNA, 14 nt, Human
ccuucuugcugccc

SEQ ID NO: 3140810 - RNA, 16 nt, Human
ccuucuugcugcccug

SEQ ID NO: 3140811 - RNA, 21 nt, Human
ccuucuugcugcccugcccca

SEQ ID NO: 3140812 - RNA, 14 nt, Human
cccugcuuucagau

SEQ ID NO: 3140813 - RNA, 17 nt, Human
cccugcuuucagauacu

SEQ ID NO: 3140814 - RNA, 22 nt, Human
cccuccccaugcaggugguguc

SEQ ID NO: 3140815 - RNA, 15 nt, Human
cccucuggucccaca

SEQ ID NO: 3140816 - RNA, 23 nt, Human
cccguguuccccucuugucuccc

SEQ ID NO: 3140817 - RNA, 22 nt, Human
cccuaggauaaaaagccagggc

SEQ ID NO: 3140818 - RNA, 23 nt, Human
cccuaggauaaaaagccagggcu

SEQ ID NO: 3140819 - RNA, 12 nt, Human
cccggggcagca

SEQ ID NO: 3140820 - RNA, 20 nt, Human
cccggggcagcagcagcccu

SEQ ID NO: 3140821 - RNA, 14 nt, Human
cccgccccccacac

SEQ ID NO: 3140822 - RNA, 20 nt, Human
cccgccccccacacuucccu

SEQ ID NO: 3140823 - RNA, 23 nt, Human
cccgccccccacacuucccuggc

SEQ ID NO: 3140824 - RNA, 16 nt, Human
cccgccuagcugcugu

SEQ ID NO: 3140825 - RNA, 12 nt, Human
cccgcuggagga

SEQ ID NO: 3140826 - RNA, 13 nt, Human
cccgcuggaggau

SEQ ID NO: 3140827 - RNA, 21 nt, Human
cccgcuggaggaugugggcag

SEQ ID NO: 3140828 - RNA, 22 nt, Human
cccgcuggaggaugugggcagc

SEQ ID NO: 3140829 - RNA, 23 nt, Human
cccgcuggaggaugugggcagcu

SEQ ID NO: 3140830 - RNA, 12 nt, Human
ccuccccaugca

SEQ ID NO: 3140831 - RNA, 12 nt, Human
ccuccugcuuug

SEQ ID NO: 3140832 - RNA, 12 nt, Human
ccuaaauccauu

SEQ ID NO: 3140833 - RNA, 17 nt, Human
ccuaaauccauuuggaa

SEQ ID NO: 3140834 - RNA, 23 nt, Human
ccgcaccgaccacggggccgaca

SEQ ID NO: 3140835 - RNA, 20 nt, Human
ccgcuaggcucgccuucccu

SEQ ID NO: 3140836 - RNA, 21 nt, Human
ccgcuaggcucgccuucccuc

SEQ ID NO: 3140837 - RNA, 22 nt, Human
ccgcuaggcucgccuucccucc

SEQ ID NO: 3140838 - RNA, 18 nt, Human
ccggguccuuggcccccu

SEQ ID NO: 3140839 - RNA, 12 nt, Human
ccgugcugggca

SEQ ID NO: 3140840 - RNA, 14 nt, Human
ccgugcugggcagc

SEQ ID NO: 3140841 - RNA, 15 nt, Human
ccgugcugggcagcc

SEQ ID NO: 3140842 - RNA, 16 nt, Human
ccgugcugggcagccc

SEQ ID NO: 3140843 - RNA, 15 nt, Human
ccggucaggcacaca

SEQ ID NO: 3140844 - RNA, 23 nt, Human
ccggucaggcacacaaggggccc

SEQ ID NO: 3140845 - RNA, 14 nt, Human
ccgugcuaaggacu

SEQ ID NO: 3140846 - RNA, 15 nt, Human
ccgugcuaaggacuu

SEQ ID NO: 3140847 - RNA, 16 nt, Human
ccgugcuaaggacuug

SEQ ID NO: 3140848 - RNA, 21 nt, Human
cugucuugccuuuuucauuau

SEQ ID NO: 3140849 - RNA, 23 nt, Human
cugucuugccuuuuucauuauuu

SEQ ID NO: 3140850 - RNA, 13 nt, Human
cuguggugacuuu

SEQ ID NO: 3140851 - RNA, 14 nt, Human
cuguggugacuuug

SEQ ID NO: 3140852 - RNA, 12 nt, Human
cuguggugacuu

SEQ ID NO: 3140853 - RNA, 23 nt, Human
cuguggugacuuuggauaauaag

SEQ ID NO: 3140854 - RNA, 15 nt, Human
cuguggugacuuugg

SEQ ID NO: 3140855 - RNA, 17 nt, Human
cuguggugacuuuggau

SEQ ID NO: 3140856 - RNA, 18 nt, Human
cuguggugacuuuggaua

SEQ ID NO: 3140857 - RNA, 20 nt, Human
cuguggugacuuuggauaau

SEQ ID NO: 3140858 - RNA, 15 nt, Human
cuguggcuggugagc

SEQ ID NO: 3140859 - RNA, 24 nt, Human
cuggggugggggugggaggccagc

SEQ ID NO: 3140860 - RNA, 14 nt, Human
cugggguuaucuga

SEQ ID NO: 3140861 - RNA, 15 nt, Human
cugguguauguguga

SEQ ID NO: 3140862 - RNA, 19 nt, Human
cuuagaauuaguggcacuu

SEQ ID NO: 3140863 - RNA, 20 nt, Human
cuucagcaaaaauauuuuau

SEQ ID NO: 3140864 - RNA, 23 nt, Human
cuucagcaaaaauauuuuaugau

SEQ ID NO: 3140865 - RNA, 17 nt, Human
cuucagcaaaaauauuu

SEQ ID NO: 3140866 - RNA, 10 nt, Human
cuucccuggc

SEQ ID NO: 3140867 - RNA, 11 nt, Human
cuucccuggcg

SEQ ID NO: 3140868 - RNA, 21 nt, Human
cuucccuggcggccccaacuc

SEQ ID NO: 3140869 - RNA, 12 nt, Human
gaagccaugucu

SEQ ID NO: 3140870 - RNA, 16 nt, Human
gaacgcguugaaauug

SEQ ID NO: 3140871 - RNA, 15 nt, Human
gaacgcguugaaauu

SEQ ID NO: 3140872 - RNA, 23 nt, Human
cuuggagggcaugaagacagaua

SEQ ID NO: 3140873 - RNA, 12 nt, Human
cuuggagggcau

SEQ ID NO: 3140874 - RNA, 14 nt, Human
cuugccccaucacu

SEQ ID NO: 3140875 - RNA, 16 nt, Human
cuugccccaucacugc

SEQ ID NO: 3140876 - RNA, 17 nt, Human
cuugccccaucacugcg

SEQ ID NO: 3140877 - RNA, 11 nt, Human
cuuuucugaua

SEQ ID NO: 3140878 - RNA, 16 nt, Human
cuauuucuauauuuuc

SEQ ID NO: 3140879 - RNA, 14 nt, Human
cuauuucuauauuu

SEQ ID NO: 3140880 - RNA, 12 nt, Human
cucacuccccag

SEQ ID NO: 3140881 - RNA, 19 nt, Human
cucacuccccagccugggc

SEQ ID NO: 3140882 - RNA, 20 nt, Human
cucacuccccagccugggcc

SEQ ID NO: 3140883 - RNA, 18 nt, Human
cucagauuuuauuaugua

SEQ ID NO: 3140884 - RNA, 15 nt, Human
cucagauuuuauuau

SEQ ID NO: 3140885 - RNA, 17 nt, Human
cucagauuuuauuaugu

SEQ ID NO: 3140886 - RNA, 13 nt, Human
cucagauuuuauu

SEQ ID NO: 3140887 - RNA, 18 nt, Human
cuaugcugaguuugugcu

SEQ ID NO: 3140888 - RNA, 15 nt, Human
cuauauuuucauucu

SEQ ID NO: 3140889 - RNA, 17 nt, Human
cuccccuguuccccucu

SEQ ID NO: 3140890 - RNA, 18 nt, Human
cuccccuguuccccucuc

SEQ ID NO: 3140891 - RNA, 21 nt, Human
cuccccuguuccccucucccu

SEQ ID NO: 3140892 - RNA, 22 nt, Human
cuccccuguuccccucucccuu

SEQ ID NO: 3140893 - RNA, 13 nt, Human
cucccgcccccca

SEQ ID NO: 3140894 - RNA, 21 nt, Human
cucccgccccccacacuuccc

SEQ ID NO: 3140895 - RNA, 22 nt, Human
cucccgccccccacacuucccu

SEQ ID NO: 3140896 - RNA, 23 nt, Human
cucccgccccccacacuucccug

SEQ ID NO: 3140897 - RNA, 16 nt, Human
cucccggguccuuggc

SEQ ID NO: 3140898 - RNA, 17 nt, Human
cucccggguccuuggcc

SEQ ID NO: 3140899 - RNA, 13 nt, Human
cucgccuucccuc

SEQ ID NO: 3140900 - RNA, 15 nt, Human
cucgccuucccuccu

SEQ ID NO: 3140901 - RNA, 16 nt, Human
cucgccuucccuccug

SEQ ID NO: 3140902 - RNA, 17 nt, Human
cucgccuucccuccugc

SEQ ID NO: 3140903 - RNA, 20 nt, Human
cucgccuucccuccugcuuu

SEQ ID NO: 3140904 - RNA, 22 nt, Human
cugauuugacauagucuggcug

SEQ ID NO: 3140905 - RNA, 23 nt, Human
cugauuugacauagucuggcugu

SEQ ID NO: 3140906 - RNA, 21 nt, Human
cugauuugacauagucuggcu

SEQ ID NO: 3140907 - RNA, 13 nt, Human
cugaguuugugcu

SEQ ID NO: 3140908 - RNA, 18 nt, Human
cugaguuugugcuggugu

SEQ ID NO: 3140909 - RNA, 13 nt, Human
cugacguuccggg

SEQ ID NO: 3140910 - RNA, 15 nt, Human
cugacguuccgggca

SEQ ID NO: 3140911 - RNA, 23 nt, Human
cugacguuccgggcaaaugccag

SEQ ID NO: 3140912 - RNA, 21 nt, Human
cugaagucagaucugccuaag

SEQ ID NO: 3140913 - RNA, 17 nt, Human
cugaaguucagcugcau

SEQ ID NO: 3140914 - RNA, 23 nt, Human
cucuuugucuacaccauuaugug

SEQ ID NO: 3140915 - RNA, 18 nt, Human
gauaaaaagccagggcug

SEQ ID NO: 3140916 - RNA, 19 nt, Human
gauaaaaagccagggcugg

SEQ ID NO: 3140917 - RNA, 20 nt, Human
gauaaaaagccagggcugga

SEQ ID NO: 3140918 - RNA, 15 nt, Human
gauagaggaagccug

SEQ ID NO: 3140919 - RNA, 21 nt, Human
gauagaggaagccugauuaaa

SEQ ID NO: 3140920 - RNA, 22 nt, Human
gauagaggaagccugauuaaag

SEQ ID NO: 3140921 - RNA, 14 nt, Human
gauagaggaagccu

SEQ ID NO: 3140922 - RNA, 17 nt, Human
gagccugcacggugaau

SEQ ID NO: 3140923 - RNA, 22 nt, Human
gagccugcacggugaauggcuu

SEQ ID NO: 3140924 - RNA, 23 nt, Human
gagccugcacggugaauggcuuu

SEQ ID NO: 3140925 - RNA, 22 nt, Human
gagcguggacugguugguuuug

SEQ ID NO: 3140926 - RNA, 15 nt, Human
gagcuuaagccacug

SEQ ID NO: 3140927 - RNA, 17 nt, Human
gagcuuaagccacugcc

SEQ ID NO: 3140928 - RNA, 22 nt, Human
gagcuuaagccacugccucucc

SEQ ID NO: 3140929 - RNA, 23 nt, Human
gagcuuaagccacugccucuccc

SEQ ID NO: 3140930 - RNA, 14 nt, Human
gaggaugugggcag

SEQ ID NO: 3140931 - RNA, 15 nt, Human
gaggaugugggcagc

SEQ ID NO: 3140932 - RNA, 16 nt, Human
gaggaugugggcagcu

SEQ ID NO: 3140933 - RNA, 13 nt, Human
gaggagguuggga

SEQ ID NO: 3140934 - RNA, 14 nt, Human
gaggaauucuguau

SEQ ID NO: 3140935 - RNA, 16 nt, Human
gaggaauucuguauag

SEQ ID NO: 3140936 - RNA, 17 nt, Human
gaggaauucuguauaga

SEQ ID NO: 3140937 - RNA, 20 nt, Human
gaggcguauguggcaaaaug

SEQ ID NO: 3140938 - RNA, 15 nt, Human
gaggcuaaguuggga

SEQ ID NO: 3140939 - RNA, 18 nt, Human
gaggcuaaguugggaucu

SEQ ID NO: 3140940 - RNA, 19 nt, Human
gagggaagaguggaggugg

SEQ ID NO: 3140941 - RNA, 20 nt, Human
gagggaagaguggaggugga

SEQ ID NO: 3140942 - RNA, 13 nt, Human
gcagcagcagccc

SEQ ID NO: 3140943 - RNA, 14 nt, Human
gcagcagcagcccu

SEQ ID NO: 3140944 - RNA, 15 nt, Human
gcagcagcagcccug

SEQ ID NO: 3140945 - RNA, 16 nt, Human
gcagcagcagcccugc

SEQ ID NO: 3140946 - RNA, 13 nt, Human
gcagauuauucac

SEQ ID NO: 3140947 - RNA, 11 nt, Human
gcagcagcccu

SEQ ID NO: 3140948 - RNA, 13 nt, Human
gcagcagcccugc

SEQ ID NO: 3140949 - RNA, 14 nt, Human
gcagcagcccugcc

SEQ ID NO: 3140950 - RNA, 20 nt, Human
gcaucucugucccauucccu

SEQ ID NO: 3140951 - RNA, 21 nt, Human
gcaucucugucccauucccug

SEQ ID NO: 3140952 - RNA, 22 nt, Human
gcaucucugucccauucccugg

SEQ ID NO: 3140953 - RNA, 23 nt, Human
gcaucucugucccauucccuggg

SEQ ID NO: 3140954 - RNA, 13 nt, Human
gcuguggcuggug

SEQ ID NO: 3140955 - RNA, 15 nt, Human
gcuguggcuggugag

SEQ ID NO: 3140956 - RNA, 21 nt, Human
gcugguguaugugugaaguga

SEQ ID NO: 3140957 - RNA, 14 nt, Human
gcugcccugcccca

SEQ ID NO: 3140958 - RNA, 14 nt, Human
gcuuuguauagaac

SEQ ID NO: 3140959 - RNA, 12 nt, Human
gcuuuguauaga

SEQ ID NO: 3140960 - RNA, 13 nt, Human
gcuuuguauagaa

SEQ ID NO: 3140961 - RNA, 12 nt, Human
gcucgccuuccc

SEQ ID NO: 3140962 - RNA, 13 nt, Human
gcucgccuucccu

SEQ ID NO: 3140963 - RNA, 15 nt, Human
gcucgccuucccucc

SEQ ID NO: 3140964 - RNA, 17 nt, Human
gcucgccuucccuccug

SEQ ID NO: 3140965 - RNA, 16 nt, Human
gcugacguuccgggca

SEQ ID NO: 3140966 - RNA, 16 nt, Human
gcuggcauagagcagc

SEQ ID NO: 3140967 - RNA, 12 nt, Human
gcugcuuuucuu

SEQ ID NO: 3140968 - RNA, 19 nt, Human
gcugcuuuucuuuucuaac

SEQ ID NO: 3140969 - RNA, 13 nt, Human
gccuucccuccug

SEQ ID NO: 3140970 - RNA, 17 nt, Human
gccuucccuccugcuuu

SEQ ID NO: 3140971 - RNA, 19 nt, Human
gcgccccccccuccccaug

SEQ ID NO: 3140972 - RNA, 15 nt, Human
gccugggcccaucuc

SEQ ID NO: 3140973 - RNA, 16 nt, Human
gccugggcccaucucc

SEQ ID NO: 3140974 - RNA, 18 nt, Human
gccugggcccaucucccu

SEQ ID NO: 3140975 - RNA, 21 nt, Human
gccugggcccaucucccugcu

SEQ ID NO: 3140976 - RNA, 23 nt, Human
gccugggcccaucucccugcuuu

SEQ ID NO: 3140977 - RNA, 15 nt, Human
gcggugcggcaggga

SEQ ID NO: 3140978 - RNA, 13 nt, Human
gcuccguggagga

SEQ ID NO: 3140979 - RNA, 16 nt, Human
gcuccguggaggaggu

SEQ ID NO: 3140980 - RNA, 18 nt, Human
ggcgccccccccucccca

SEQ ID NO: 3140981 - RNA, 15 nt, Human
ggcuuuguauagaac

SEQ ID NO: 3140982 - RNA, 16 nt, Human
ggcuguggcuggugag

SEQ ID NO: 3140983 - RNA, 13 nt, Human
ggauucuuaaagu

SEQ ID NO: 3140984 - RNA, 14 nt, Human
ggccaggagaugga

SEQ ID NO: 3140985 - RNA, 15 nt, Human
ggagcguggacuggu

SEQ ID NO: 3140986 - RNA, 19 nt, Human
ggagcguggacugguuggu

SEQ ID NO: 3140987 - RNA, 17 nt, Human
ggacgcugaccguggag

SEQ ID NO: 3140988 - RNA, 18 nt, Human
ggacgcugaccguggagc

SEQ ID NO: 3140989 - RNA, 21 nt, Human
cacugauuugacauagucugg

SEQ ID NO: 3140990 - RNA, 23 nt, Human
cacugauuugacauagucuggcu

SEQ ID NO: 3140991 - RNA, 17 nt, Human
cacugcuccguggagga

SEQ ID NO: 3140992 - RNA, 15 nt, Human
cacugcgccacugcu

SEQ ID NO: 3140993 - RNA, 17 nt, Human
cacugcgccacugcucc

SEQ ID NO: 3140994 - RNA, 13 nt, Human
cacugccucuccc

SEQ ID NO: 3140995 - RNA, 14 nt, Human
cacugccucucccu

SEQ ID NO: 3140996 - RNA, 16 nt, Human
cacugccucucccucu

SEQ ID NO: 3140997 - RNA, 11 nt, Human
cacuucccugg

SEQ ID NO: 3140998 - RNA, 12 nt, Human
cacuucccuggc

SEQ ID NO: 3140999 - RNA, 13 nt, Human
cacuucccuggcg

SEQ ID NO: 3141000 - RNA, 19 nt, Human
cacuucccuggcggcccca

SEQ ID NO: 3141001 - RNA, 10 nt, Human
cacuucccug

SEQ ID NO: 3141002 - RNA, 22 nt, Human
cacggggccgacauugucuccc

SEQ ID NO: 3141003 - RNA, 20 nt, Human
cacggugaauggcuuuguau

SEQ ID NO: 3141004 - RNA, 23 nt, Human
cacggugaauggcuuuguauaga

SEQ ID NO: 3141005 - RNA, 20 nt, Human
caccugucuugccuuuuuca

SEQ ID NO: 3141006 - RNA, 17 nt, Human
caccugucuugccuuuu

SEQ ID NO: 3141007 - RNA, 15 nt, Human
cacucuccauuuaau

SEQ ID NO: 3141008 - RNA, 17 nt, Human
cacucuccauuuaauaa

SEQ ID NO: 3141009 - RNA, 13 nt, Human
caccuccucucac

SEQ ID NO: 3141010 - RNA, 18 nt, Human
caccuccucucacucccc

SEQ ID NO: 3141011 - RNA, 23 nt, Human
cagaaucuaacugguggacaugg

SEQ ID NO: 3141012 - RNA, 16 nt, Human
cagaucuggaauguga

SEQ ID NO: 3141013 - RNA, 19 nt, Human
cagaucugccuaaggacuu

SEQ ID NO: 3141014 - RNA, 20 nt, Human
cagaucugccuaaggacuuc

SEQ ID NO: 3141015 - RNA, 21 nt, Human
cagaucugccuaaggacuucu

SEQ ID NO: 3141016 - RNA, 23 nt, Human
cagaucugccuaaggacuucuuu

SEQ ID NO: 3141017 - RNA, 16 nt, Human
cagaucugccuaagga

SEQ ID NO: 3141018 - RNA, 17 nt, Human
cagaucugccuaaggac

SEQ ID NO: 3141019 - RNA, 14 nt, Human
cagaucugccuaag

SEQ ID NO: 3141020 - RNA, 14 nt, Human
cagaggcuguggcu

SEQ ID NO: 3141021 - RNA, 17 nt, Human
cagaggcuguggcuggu

SEQ ID NO: 3141022 - RNA, 18 nt, Human
cagauucuauccucaucu

SEQ ID NO: 3141023 - RNA, 23 nt, Human
cagauuauucacugauuugacau

SEQ ID NO: 3141024 - RNA, 12 nt, Human
cagauuauucac

SEQ ID NO: 3141025 - RNA, 18 nt, Human
cagauuauucacugauuu

SEQ ID NO: 3141026 - RNA, 13 nt, Human
cagauuuuauuau

SEQ ID NO: 3141027 - RNA, 15 nt, Human
cagauuuuauuaugu

SEQ ID NO: 3141028 - RNA, 16 nt, Human
cagauuuuauuaugua

SEQ ID NO: 3141029 - RNA, 18 nt, Human
cagauuuuauuauguaaa

SEQ ID NO: 3141030 - RNA, 20 nt, Human
cagauuuuauuauguaaauc

SEQ ID NO: 3141031 - RNA, 21 nt, Human
cagauuuuauuauguaaaucc

SEQ ID NO: 3141032 - RNA, 22 nt, Human
cagauuuuauuauguaaauccc

SEQ ID NO: 3141033 - RNA, 17 nt, Human
cagcaaaaauauuuuau

SEQ ID NO: 3141034 - RNA, 14 nt, Human
cagcagauuauuca

SEQ ID NO: 3141035 - RNA, 15 nt, Human
cagcagauuauucac

SEQ ID NO: 3141036 - RNA, 19 nt, Human
cagcagauuauucacugau

SEQ ID NO: 3141037 - RNA, 13 nt, Human
cagcagcagcccu

SEQ ID NO: 3141038 - RNA, 14 nt, Human
cagcagcagcccug

SEQ ID NO: 3141039 - RNA, 15 nt, Human
cagcagcagcccugc

SEQ ID NO: 3141040 - RNA, 16 nt, Human
cagcagcagcccugcc

SEQ ID NO: 3141041 - RNA, 19 nt, Human
cagcagcccugccccacac

SEQ ID NO: 3141042 - RNA, 20 nt, Human
cagcagcccugccccacacc

SEQ ID NO: 3141043 - RNA, 18 nt, Human
cagcuggugcccugcuuu

SEQ ID NO: 3141044 - RNA, 19 nt, Human
cagcuggugcccugcuuuc

SEQ ID NO: 3141045 - RNA, 20 nt, Human
cagcuggugcccugcuuuca

SEQ ID NO: 3141046 - RNA, 21 nt, Human
cagcuggugcccugcuuucag

SEQ ID NO: 3141047 - RNA, 23 nt, Human
cagcuggugcccugcuuucagau

SEQ ID NO: 3141048 - RNA, 19 nt, Human
caggacgcugaccguggag

SEQ ID NO: 3141049 - RNA, 17 nt, Human
caggaauggagccugca

SEQ ID NO: 3141050 - RNA, 23 nt, Human
caggaauggagccugcacgguga

SEQ ID NO: 3141051 - RNA, 12 nt, Human
cagccugggccc

SEQ ID NO: 3141052 - RNA, 13 nt, Human
cagccugggccca

SEQ ID NO: 3141053 - RNA, 14 nt, Human
cagccugggcccau

SEQ ID NO: 3141054 - RNA, 18 nt, Human
cagccugggcccaucucc

SEQ ID NO: 3141055 - RNA, 21 nt, Human
cagccugggcccaucucccug

SEQ ID NO: 3141056 - RNA, 22 nt, Human
cagccugggcccaucucccugc

SEQ ID NO: 3141057 - RNA, 11 nt, Human
cagccugggcc

SEQ ID NO: 3141058 - RNA, 11 nt, Human
cagcccuagga

SEQ ID NO: 3141059 - RNA, 17 nt, Human
cagcccgcuaggcucgc

SEQ ID NO: 3141060 - RNA, 19 nt, Human
cagcccgcuaggcucgccu

SEQ ID NO: 3141061 - RNA, 20 nt, Human
cagcccugccccacaccucc

SEQ ID NO: 3141062 - RNA, 21 nt, Human
cagcccugccccacaccuccu

SEQ ID NO: 3141063 - RNA, 23 nt, Human
cagcccugccccacaccuccucu

SEQ ID NO: 3141064 - RNA, 14 nt, Human
cagggaagaggggu

SEQ ID NO: 3141065 - RNA, 19 nt, Human
cagggaagaggggugcaga

SEQ ID NO: 3141066 - RNA, 23 nt, Human
cagggaagaggggugcagaggcu

SEQ ID NO: 3141067 - RNA, 17 nt, Human
caggcugacguuccggg

SEQ ID NO: 3141068 - RNA, 18 nt, Human
caggcugacguuccgggc

SEQ ID NO: 3141069 - RNA, 19 nt, Human
caggcugacguuccgggca

SEQ ID NO: 3141070 - RNA, 16 nt, Human
cagugagcgcuugggc

SEQ ID NO: 3141071 - RNA, 14 nt, Human
caguccauugaaag

SEQ ID NO: 3141072 - RNA, 14 nt, Human
caguauaauuaaca

SEQ ID NO: 3141073 - RNA, 15 nt, Human
caguauaauuaacau

SEQ ID NO: 3141074 - RNA, 17 nt, Human
caguauaauuaacaugu

SEQ ID NO: 3141075 - RNA, 21 nt, Human
caguauaauuaacauguuaaa

SEQ ID NO: 3141076 - RNA, 21 nt, Human
caguaaguguuagagggaaca

SEQ ID NO: 3141077 - RNA, 19 nt, Human
cagguggugucgggcccuu

SEQ ID NO: 3141078 - RNA, 20 nt, Human
aaaauuggggauucuuaaag

SEQ ID NO: 3141079 - RNA, 22 nt, Human
cccaaguugggggucagugcug

SEQ ID NO: 3141080 - RNA, 15 nt, Human
cagggaagaggggug

SEQ ID NO: 3141081 - RNA, 13 nt, Human
cguggaggagguu

SEQ ID NO: 3141082 - RNA, 19 nt, Human
uguuagagggaacagggcg

SEQ ID NO: 3141083 - RNA, 23 nt, Human
ccuaggauaaaaagccagggcug

SEQ ID NO: 3141084 - RNA, 19 nt, Human
ccgggcaaaugccagggcc

SEQ ID NO: 3141085 - RNA, 22 nt, Human
aaggaaaaguuuaauauuaaag

SEQ ID NO: 3141086 - RNA, 16 nt, Human
augaugggucaguugu

SEQ ID NO: 3141087 - RNA, 19 nt, Human
auccagagucccugccugg

SEQ ID NO: 3141088 - RNA, 21 nt, Human
auccagagucccugccuggac

SEQ ID NO: 3141089 - RNA, 20 nt, Human
auccagagucccugccugga

SEQ ID NO: 3141090 - RNA, 16 nt, Human
agucugagagaggcca

SEQ ID NO: 3141091 - RNA, 23 nt, Human
agucugagagaggccauucuuuc

SEQ ID NO: 3141092 - RNA, 22 nt, Human
aggaacugcugggcuuggcagc

SEQ ID NO: 3141093 - RNA, 16 nt, Human
aggaaccgaggcaggg

SEQ ID NO: 3141094 - RNA, 16 nt, Human
aggaacugcugggcuu

SEQ ID NO: 3141095 - RNA, 19 nt, Human
agcuaauucuuugaccugu

SEQ ID NO: 3141096 - RNA, 17 nt, Human
agcuccuuaaggcucuu

SEQ ID NO: 3141097 - RNA, 16 nt, Human
agcuccuuaaggcucu

SEQ ID NO: 3141098 - RNA, 10 nt, Human
agagggcugc

SEQ ID NO: 3141099 - RNA, 13 nt, Human
aagggagggggag

SEQ ID NO: 3141100 - RNA, 18 nt, Human
aagagaagggcagggcug

SEQ ID NO: 3141101 - RNA, 19 nt, Human
accggggccugggcaggag

SEQ ID NO: 3141102 - RNA, 14 nt, Human
aauugugauguguc

SEQ ID NO: 3141103 - RNA, 15 nt, Human
aauugugaugugucc

SEQ ID NO: 3141104 - RNA, 11 nt, Human
aauugugaugu

SEQ ID NO: 3141105 - RNA, 23 nt, Human
acagaggacaguauuugugggga

SEQ ID NO: 3141106 - RNA, 14 nt, Human
accaucucuuuacc

SEQ ID NO: 3141107 - RNA, 16 nt, Human
aauuccacacccucac

SEQ ID NO: 3141108 - RNA, 14 nt, Human
uagaagaagugugu

SEQ ID NO: 3141109 - RNA, 21 nt, Human
uagacauuugcuaugagcugg

SEQ ID NO: 3141110 - RNA, 20 nt, Human
uaugccaccugaauaaagaa

SEQ ID NO: 3141111 - RNA, 21 nt, Human
uaugguaggaacugcugggcu

SEQ ID NO: 3141112 - RNA, 14 nt, Human
uaucagcacgugug

SEQ ID NO: 3141113 - RNA, 19 nt, Human
uaauuuaaaauugugaugu

SEQ ID NO: 3141114 - RNA, 20 nt, Human
uaauuuaaaauugugaugug

SEQ ID NO: 3141115 - RNA, 19 nt, Human
uaccagagaaaaagggagg

SEQ ID NO: 3141116 - RNA, 13 nt, Human
uaccucuuggcug

SEQ ID NO: 3141117 - RNA, 15 nt, Human
uacccccugugccuu

SEQ ID NO: 3141118 - RNA, 14 nt, Human
aaggcucuuuugua

SEQ ID NO: 3141119 - RNA, 19 nt, Human
gugggguagguugggagaa

SEQ ID NO: 3141120 - RNA, 14 nt, Human
gugugggucugugu

SEQ ID NO: 3141121 - RNA, 20 nt, Human
gugugucacccuuaggccag

SEQ ID NO: 3141122 - RNA, 13 nt, Human
guguguauguggg

SEQ ID NO: 3141123 - RNA, 15 nt, Human
guguguauguggggg

SEQ ID NO: 3141124 - RNA, 22 nt, Human
guggccuaaccugccgagaguc

SEQ ID NO: 3141125 - RNA, 21 nt, Human
guggccuaaccugccgagagu

SEQ ID NO: 3141126 - RNA, 15 nt, Human
aaauugugauguguc

SEQ ID NO: 3141127 - RNA, 12 nt, Human
aaauugugaugu

SEQ ID NO: 3141128 - RNA, 12 nt, Human
aaauuuauguga

SEQ ID NO: 3141129 - RNA, 15 nt, Human
aaauuuaugugaugg

SEQ ID NO: 3141130 - RNA, 13 nt, Human
gucaguuguauca

SEQ ID NO: 3141131 - RNA, 21 nt, Human
gucaguauguggaaguguggg

SEQ ID NO: 3141132 - RNA, 17 nt, Human
gucaguauguggaagug

SEQ ID NO: 3141133 - RNA, 19 nt, Human
gucuggcacagccuggcug

SEQ ID NO: 3141134 - RNA, 17 nt, Human
gucuggcacagccuggc

SEQ ID NO: 3141135 - RNA, 19 nt, Human
gucucccuccucugcccgg

SEQ ID NO: 3141136 - RNA, 22 nt, Human
agagggacuguucuuuuguccc

SEQ ID NO: 3141137 - RNA, 17 nt, Human
agagacgggcccuggug

SEQ ID NO: 3141138 - RNA, 23 nt, Human
ucuuggggaguuuaggguggggg

SEQ ID NO: 3141139 - RNA, 22 nt, Human
ucuuggggaguuuagggugggg

SEQ ID NO: 3141140 - RNA, 22 nt, Human
ucuggcacagccuggcuguggc

SEQ ID NO: 3141141 - RNA, 15 nt, Human
ucuaccucuuggcug

SEQ ID NO: 3141142 - RNA, 20 nt, Human
ucggggagccgggagccuga

SEQ ID NO: 3141143 - RNA, 16 nt, Human
acuggggcaggggccg

SEQ ID NO: 3141144 - RNA, 23 nt, Human
acucgugucuggcacagccuggc

SEQ ID NO: 3141145 - RNA, 22 nt, Human
acucgugucuggcacagccugg

SEQ ID NO: 3141146 - RNA, 13 nt, Human
uccucuccugucu

SEQ ID NO: 3141147 - RNA, 22 nt, Human
uccucugcccgggagcucagga

SEQ ID NO: 3141148 - RNA, 16 nt, Human
uccucugcccgggagc

SEQ ID NO: 3141149 - RNA, 20 nt, Human
uccauccuacccccugugcc

SEQ ID NO: 3141150 - RNA, 16 nt, Human
uccauccuacccccug

SEQ ID NO: 3141151 - RNA, 16 nt, Human
ucaguauguggaagug

SEQ ID NO: 3141152 - RNA, 18 nt, Human
uaugugggggucugugug

SEQ ID NO: 3141153 - RNA, 19 nt, Human
uaugugggggucugugugu

SEQ ID NO: 3141154 - RNA, 20 nt, Human
uaugugggggucuguguguu

SEQ ID NO: 3141155 - RNA, 16 nt, Human
uuagccuuugucccag

SEQ ID NO: 3141156 - RNA, 16 nt, Human
agugugggucugugug

SEQ ID NO: 3141157 - RNA, 17 nt, Human
agugugggucugugugu

SEQ ID NO: 3141158 - RNA, 15 nt, Human
agugugggucugugu

SEQ ID NO: 3141159 - RNA, 19 nt, Human
agugugggucugugugugu

SEQ ID NO: 3141160 - RNA, 23 nt, Human
agugugggucuguguguguguau

SEQ ID NO: 3141161 - RNA, 14 nt, Human
uguuguguguggga

SEQ ID NO: 3141162 - RNA, 15 nt, Human
uguugugugugggag

SEQ ID NO: 3141163 - RNA, 16 nt, Human
uguugugugugggagu

SEQ ID NO: 3141164 - RNA, 19 nt, Human
uguggcacuggggcagggg

SEQ ID NO: 3141165 - RNA, 16 nt, Human
uguguguguguaugug

SEQ ID NO: 3141166 - RNA, 13 nt, Human
uguguguguguau

SEQ ID NO: 3141167 - RNA, 23 nt, Human
agguugggagaaugucaguaugu

SEQ ID NO: 3141168 - RNA, 17 nt, Human
uguaauuuaaaauugug

SEQ ID NO: 3141169 - RNA, 18 nt, Human
uguaauuuaaaauuguga

SEQ ID NO: 3141170 - RNA, 20 nt, Human
uguaauuuaaaauugugaug

SEQ ID NO: 3141171 - RNA, 21 nt, Human
uguaauuuaaaauugugaugu

SEQ ID NO: 3141172 - RNA, 22 nt, Human
uguaauuuaaaauugugaugug

SEQ ID NO: 3141173 - RNA, 14 nt, Human
agucccugccugga

SEQ ID NO: 3141174 - RNA, 21 nt, Human
agucccugccuggaccagccu

SEQ ID NO: 3141175 - RNA, 15 nt, Human
agucccugccuggac

SEQ ID NO: 3141176 - RNA, 23 nt, Human
agucccugccuggaccagccucu

SEQ ID NO: 3141177 - RNA, 22 nt, Human
agucccugccuggaccagccuc

SEQ ID NO: 3141178 - RNA, 19 nt, Human
aguauguggaagugugggu

SEQ ID NO: 3141179 - RNA, 15 nt, Human
aguauguggaagugu

SEQ ID NO: 3141180 - RNA, 17 nt, Human
aguauguggaagugugg

SEQ ID NO: 3141181 - RNA, 22 nt, Human
ugucaguauguggaaguguggg

SEQ ID NO: 3141182 - RNA, 19 nt, Human
ugucaguauguggaagugu

SEQ ID NO: 3141183 - RNA, 20 nt, Human
ugucaguauguggaagugug

SEQ ID NO: 3141184 - RNA, 18 nt, Human
ugucaguauguggaagug

SEQ ID NO: 3141185 - RNA, 14 nt, Human
uggggcugauugua

SEQ ID NO: 3141186 - RNA, 21 nt, Human
ugggguagguugggagaaugu

SEQ ID NO: 3141187 - RNA, 15 nt, Human
ugggguagguuggga

SEQ ID NO: 3141188 - RNA, 19 nt, Human
uggggaguuuagggugggg

SEQ ID NO: 3141189 - RNA, 18 nt, Human
uggggaguuuaggguggg

SEQ ID NO: 3141190 - RNA, 12 nt, Human
ugggucugugug

SEQ ID NO: 3141191 - RNA, 13 nt, Human
ugguaggaacugc

SEQ ID NO: 3141192 - RNA, 20 nt, Human
ugguaggaacugcugggcuu

SEQ ID NO: 3141193 - RNA, 16 nt, Human
agggggagagggcugc

SEQ ID NO: 3141194 - RNA, 15 nt, Human
agggggagagggcug

SEQ ID NO: 3141195 - RNA, 21 nt, Human
agcugggacaccccgacuuuu

SEQ ID NO: 3141196 - RNA, 15 nt, Human
ugcuguagacauuug

SEQ ID NO: 3141197 - RNA, 23 nt, Human
ugcuguauccauccauggggcug

SEQ ID NO: 3141198 - RNA, 19 nt, Human
aggaucccaugagcuccuu

SEQ ID NO: 3141199 - RNA, 12 nt, Human
aggacaguauuu

SEQ ID NO: 3141200 - RNA, 19 nt, Human
aggacaguauuugugggga

SEQ ID NO: 3141201 - RNA, 23 nt, Human
uggccaguggcuggaucugugag

SEQ ID NO: 3141202 - RNA, 21 nt, Human
uggccuguucuucuauggguu

SEQ ID NO: 3141203 - RNA, 20 nt, Human
agcucaggaaccgaggcagg

SEQ ID NO: 3141204 - RNA, 22 nt, Human
agcucaggaaccgaggcaggga

SEQ ID NO: 3141205 - RNA, 21 nt, Human
agcucaggaaccgaggcaggg

SEQ ID NO: 3141206 - RNA, 18 nt, Human
agccugacccucaucuuu

SEQ ID NO: 3141207 - RNA, 17 nt, Human
agcauuucccuuccuuc

SEQ ID NO: 3141208 - RNA, 21 nt, Human
ugauagaaggcuauggggaua

SEQ ID NO: 3141209 - RNA, 24 nt, Human
ugauaagcagucauccucagauca

SEQ ID NO: 3141210 - RNA, 18 nt, Human
ugaguucauaaauuuaug

SEQ ID NO: 3141211 - RNA, 15 nt, Human
uucuaguucugccag

SEQ ID NO: 3141212 - RNA, 11 nt, Human
uuuaugugugu

SEQ ID NO: 3141213 - RNA, 13 nt, Human
uuuaugugugugu

SEQ ID NO: 3141214 - RNA, 12 nt, Human
uuuaugugaugg

SEQ ID NO: 3141215 - RNA, 16 nt, Human
auggccugggggaugu

SEQ ID NO: 3141216 - RNA, 21 nt, Human
auggaaugaugggucaguugu

SEQ ID NO: 3141217 - RNA, 16 nt, Human
aucuguaccucugccu

SEQ ID NO: 3141218 - RNA, 20 nt, Human
aucugagaggccacagugca

SEQ ID NO: 3141219 - RNA, 17 nt, Human
uuuguaaauuuauguga

SEQ ID NO: 3141220 - RNA, 19 nt, Human
uuugcuaugagcuggggau

SEQ ID NO: 3141221 - RNA, 14 nt, Human
augucaguaugugg

SEQ ID NO: 3141222 - RNA, 13 nt, Human
augucaguaugug

SEQ ID NO: 3141223 - RNA, 15 nt, Human
auguuuacagaggac

SEQ ID NO: 3141224 - RNA, 17 nt, Human
auguuuacagaggacag

SEQ ID NO: 3141225 - RNA, 19 nt, Human
auguuuacagaggacagua

SEQ ID NO: 3141226 - RNA, 19 nt, Human
auuuaaaauugugaugugu

SEQ ID NO: 3141227 - RNA, 20 nt, Human
auuuaaaauugugauguguc

SEQ ID NO: 3141228 - RNA, 23 nt, Human
auugcaggagucccugccaucau

SEQ ID NO: 3141229 - RNA, 18 nt, Human
cuuauuggcagcucuacu

SEQ ID NO: 3141230 - RNA, 17 nt, Human
cuggggaugucucucau

SEQ ID NO: 3141231 - RNA, 22 nt, Human
cuggggaugucucucaugacca

SEQ ID NO: 3141232 - RNA, 23 nt, Human
cugccaucauguuuacagaggac

SEQ ID NO: 3141233 - RNA, 17 nt, Human
cugccaucauguuuaca

SEQ ID NO: 3141234 - RNA, 22 nt, Human
cugccaucauguuuacagagga

SEQ ID NO: 3141235 - RNA, 19 nt, Human
gcaccggggccugggcagg

SEQ ID NO: 3141236 - RNA, 20 nt, Human
gcaccggggccugggcagga

SEQ ID NO: 3141237 - RNA, 16 nt, Human
gaucccaacacugcca

SEQ ID NO: 3141238 - RNA, 12 nt, Human
gaucccaacacu

SEQ ID NO: 3141239 - RNA, 13 nt, Human
gaguuggcuggga

SEQ ID NO: 3141240 - RNA, 15 nt, Human
gaguuuagggugggg

SEQ ID NO: 3141241 - RNA, 14 nt, Human
gaguuuaggguggg

SEQ ID NO: 3141242 - RNA, 18 nt, Human
gagugaggaugucugggc

SEQ ID NO: 3141243 - RNA, 16 nt, Human
gaguccaucagccucc

SEQ ID NO: 3141244 - RNA, 15 nt, Human
gaguccaucagccuc

SEQ ID NO: 3141245 - RNA, 14 nt, Human
gaguccaucagccu

SEQ ID NO: 3141246 - RNA, 13 nt, Human
gaguccaucagcc

SEQ ID NO: 3141247 - RNA, 19 nt, Human
gaagggcagggcugaggcc

SEQ ID NO: 3141248 - RNA, 15 nt, Human
gaaggcuauggggau

SEQ ID NO: 3141249 - RNA, 19 nt, Human
gaagugugggucugugugu

SEQ ID NO: 3141250 - RNA, 17 nt, Human
gaagugugggucugugu

SEQ ID NO: 3141251 - RNA, 18 nt, Human
gaagugugggucugugug

SEQ ID NO: 3141252 - RNA, 16 nt, Human
gacagguuagcugcuc

SEQ ID NO: 3141253 - RNA, 15 nt, Human
gacaguauuuguggg

SEQ ID NO: 3141254 - RNA, 19 nt, Human
gagcuggggaugucucuca

SEQ ID NO: 3141255 - RNA, 16 nt, Human
guaaauuuaugugaug

SEQ ID NO: 3141256 - RNA, 17 nt, Human
guaaauuuaugugaugg

SEQ ID NO: 3141257 - RNA, 21 nt, Human
gguggggagagacgggcccug

SEQ ID NO: 3141258 - RNA, 21 nt, Human
ggugcuucuaguucugccagg

SEQ ID NO: 3141259 - RNA, 20 nt, Human
ggucuguguguguguaugug

SEQ ID NO: 3141260 - RNA, 21 nt, Human
ggucuguguguguguaugugg

SEQ ID NO: 3141261 - RNA, 11 nt, Human
ggucugugugu

SEQ ID NO: 3141262 - RNA, 17 nt, Human
ggucuguguguguguau

SEQ ID NO: 3141263 - RNA, 23 nt, Human
ggguguccugcaccggggccugg

SEQ ID NO: 3141264 - RNA, 22 nt, Human
gggcccuggugguggcucggga

SEQ ID NO: 3141265 - RNA, 18 nt, Human
gggcucagagugggguag

SEQ ID NO: 3141266 - RNA, 14 nt, Human
aaaagggaggggga

SEQ ID NO: 3141267 - RNA, 14 nt, Human
gggaugucucucau

SEQ ID NO: 3141268 - RNA, 22 nt, Human
gggagaaugucaguauguggaa

SEQ ID NO: 3141269 - RNA, 19 nt, Human
gggagaaugucaguaugug

SEQ ID NO: 3141270 - RNA, 22 nt, Human
ggcauccagagucccugccugg

SEQ ID NO: 3141271 - RNA, 15 nt, Human
ggcacuggggcaggg

SEQ ID NO: 3141272 - RNA, 19 nt, Human
ggccaguggcuggaucugu

SEQ ID NO: 3141273 - RNA, 17 nt, Human
ggcccugugccuuggug

SEQ ID NO: 3141274 - RNA, 22 nt, Human
ggcgaagcguuguccucagccc

SEQ ID NO: 3141275 - RNA, 12 nt, Human
ggcacagccugg

SEQ ID NO: 3141276 - RNA, 13 nt, Human
ggcacagccuggc

SEQ ID NO: 3141277 - RNA, 14 nt, Human
ggaacugcugggcu

SEQ ID NO: 3141278 - RNA, 15 nt, Human
ggaacugcugggcuu

SEQ ID NO: 3141279 - RNA, 20 nt, Human
gcuguagacauuugcuauga

SEQ ID NO: 3141280 - RNA, 13 nt, Human
gcuggaucuguga

SEQ ID NO: 3141281 - RNA, 19 nt, Human
gcuuuccucaucaggccau

SEQ ID NO: 3141282 - RNA, 18 nt, Human
gcuccucgagaucccaac

SEQ ID NO: 3141283 - RNA, 14 nt, Human
gcugaggccucuca

SEQ ID NO: 3141284 - RNA, 22 nt, Human
gcugcuccccacgucagcuggg

SEQ ID NO: 3141285 - RNA, 13 nt, Human
gcugcuccccacg

SEQ ID NO: 3141286 - RNA, 14 nt, Human
gccaguggcuggau

SEQ ID NO: 3141287 - RNA, 23 nt, Human
gccaguggcuggaucugugaggg

SEQ ID NO: 3141288 - RNA, 14 nt, Human
gccaggauggaaug

SEQ ID NO: 3141289 - RNA, 14 nt, Human
gcggcugggaggag

SEQ ID NO: 3141290 - RNA, 13 nt, Human
gcggcugggagga

SEQ ID NO: 3141291 - RNA, 22 nt, Human
gcggcugggaggagggcaggca

SEQ ID NO: 3141292 - RNA, 19 nt, Human
gcggcugggaggagggcag

SEQ ID NO: 3141293 - RNA, 18 nt, Human
gcggcugggaggagggca

SEQ ID NO: 3141294 - RNA, 17 nt, Human
gcggcugggaggagggc

SEQ ID NO: 3141295 - RNA, 15 nt, Human
caguauuugugggga

SEQ ID NO: 3141296 - RNA, 23 nt, Human
cagaucauuaucagccugugcca

SEQ ID NO: 3141297 - RNA, 24 nt, Human
cagccucuccacucaugugacucu

SEQ ID NO: 3141298 - RNA, 24 nt, Human
cagccccgcguggaacucgugucu

SEQ ID NO: 3141299 - RNA, 15 nt, Human
caaacaggcucagag

SEQ ID NO: 3141300 - RNA, 14 nt, Human
caaacaggcucaga

SEQ ID NO: 3141301 - RNA, 22 nt, Human
auuuguggggagggauuugggg

SEQ ID NO: 3141302 - RNA, 16 nt, Human
auuugcuaugagcugg

SEQ ID NO: 3141303 - RNA, 20 nt, Human
auuugcuaugagcuggggau

SEQ ID NO: 3141304 - RNA, 19 nt, Human
auucuuucccaacaccucu

SEQ ID NO: 3141305 - RNA, 16 nt, Human
auucuuucccaacacc

SEQ ID NO: 3141306 - RNA, 13 nt, Human
auucuuucccaac

SEQ ID NO: 3141307 - RNA, 22 nt, Human
cacugccagcauuucccuuccu

SEQ ID NO: 3141308 - RNA, 18 nt, Human
cacugccagcauuucccu

SEQ ID NO: 3141309 - RNA, 19 nt, Human
cacuggggcaggggccggg

SEQ ID NO: 3141310 - RNA, 24 nt, Human
cccugugccuuggugugcuguauc

SEQ ID NO: 3141311 - RNA, 15 nt, Human
cccugugccuuguca

SEQ ID NO: 3141312 - RNA, 22 nt, Human
cccugugccuugucacgccaga

SEQ ID NO: 3141313 - RNA, 20 nt, Human
cccugugccuugucacgcca

SEQ ID NO: 3141314 - RNA, 22 nt, Human
ccugacccucaucuuucuucca

SEQ ID NO: 3141315 - RNA, 14 nt, Human
ccugacucucagca

SEQ ID NO: 3141316 - RNA, 16 nt, Human
ccagagucccugccug

SEQ ID NO: 3141317 - RNA, 22 nt, Human
ccagagucccugccuggaccag

SEQ ID NO: 3141318 - RNA, 19 nt, Human
ccagagucccugccuggac

SEQ ID NO: 3141319 - RNA, 18 nt, Human
ccagagucccugccugga

SEQ ID NO: 3141320 - RNA, 17 nt, Human
ccagagucccugccugg

SEQ ID NO: 3141321 - RNA, 14 nt, Human
cccgggagcucagg

SEQ ID NO: 3141322 - RNA, 14 nt, Human
ccccgacuuuuguu

SEQ ID NO: 3141323 - RNA, 23 nt, Human
cggcuccucgagaucccaacacu

SEQ ID NO: 3141324 - RNA, 21 nt, Human
cgugucuggcacagccuggcu

SEQ ID NO: 3141325 - RNA, 13 nt, Human
cgugucuggcaca

SEQ ID NO: 3141326 - RNA, 14 nt, Human
cgugucuggcacag

SEQ ID NO: 3141327 - RNA, 12 nt, Human
cuaaccugccga

SEQ ID NO: 3141328 - RNA, 21 nt, Human
cuaaccugccgagaguccauc

SEQ ID NO: 3141329 - RNA, 19 nt, Human
cuaaccugccgagagucca

SEQ ID NO: 3141330 - RNA, 16 nt, Human
cucaucuuucuuccaa

SEQ ID NO: 3141331 - RNA, 13 nt, Human
cucccuccucugc

SEQ ID NO: 3141332 - RNA, 14 nt, Human
cucccuccucugcc

SEQ ID NO: 3141333 - RNA, 17 nt, Human
caagccuuggcucuacc

SEQ ID NO: 3141334 - RNA, 15 nt, Human
ccggggccugggcag

SEQ ID NO: 3141335 - RNA, 19 nt, Human
ccggggccugggcaggagg

SEQ ID NO: 3141336 - RNA, 15 nt, Human
ccgggagcucaggaa

SEQ ID NO: 3141337 - RNA, 13 nt, Human
ccgggagcucagg

SEQ ID NO: 3141338 - RNA, 16 nt, Human
ccggcuuuguggcacu

SEQ ID NO: 3141339 - RNA, 19 nt, Human
ccggcuuuguggcacuggg

SEQ ID NO: 3141340 - RNA, 17 nt, Human
ccggcuuuguggcacug

SEQ ID NO: 3141341 - RNA, 18 nt, Human
ccucagccccgcguggaa

SEQ ID NO: 3141342 - RNA, 23 nt, Human
ccuccauccuacccccugugccu

SEQ ID NO: 3141343 - RNA, 22 nt, Human
ccuccauccuacccccugugcc

SEQ ID NO: 3141344 - RNA, 17 nt, Human
ccuccauccuacccccu

SEQ ID NO: 3141345 - RNA, 18 nt, Human
cccugccuggaccagccu

SEQ ID NO: 3141346 - RNA, 13 nt, Human
cccugccuggacc

SEQ ID NO: 3141347 - RNA, 12 nt, Human
cccugccuggac

SEQ ID NO: 3141348 - RNA, 20 nt, Human
cccugccaucauguuuacag

SEQ ID NO: 3141349 - RNA, 14 nt, Human
cccucaucuuucuu

SEQ ID NO: 3141350 - RNA, 18 nt, Human
cccagaaugccuccugca

SEQ ID NO: 3141351 - RNA, 21 nt, Human
cccagcuaugguucucucgca

SEQ ID NO: 3141352 - RNA, 20 nt, Human
ccaucauguuuacagaggac

SEQ ID NO: 3141353 - RNA, 22 nt, Human
ccaucauguuuacagaggacag

SEQ ID NO: 3141354 - RNA, 21 nt, Human
cauuaccucagugagaagcca

SEQ ID NO: 3141355 - RNA, 22 nt, Human
cauuaccucagugagaagccag

SEQ ID NO: 3141356 - RNA, 19 nt, Human
cauggggcugauuguauuu

SEQ ID NO: 3141357 - RNA, 15 nt, Human
cauaccuggcccugu

SEQ ID NO: 3141358 - RNA, 18 nt, Human
cauaaucacaacccuuca

SEQ ID NO: 3141359 - RNA, 18 nt, Human
caguggcuggaucuguga

SEQ ID NO: 3141360 - RNA, 20 nt, Human
caguggcuggaucugugagg

SEQ ID NO: 3141361 - RNA, 16 nt, Human
caguggcuggaucugu

SEQ ID NO: 3141362 - RNA, 19 nt, Human
cauccuacccccugugccu

SEQ ID NO: 3141363 - RNA, 15 nt, Human
gcccgggagcucagg

SEQ ID NO: 3141364 - RNA, 19 nt, Human
gcccgggagcucaggaacc

SEQ ID NO: 3141365 - RNA, 17 nt, Human
gcccgggagcucaggaa

SEQ ID NO: 3141366 - RNA, 17 nt, Human
gccaucauguuuacaga

SEQ ID NO: 3141367 - RNA, 21 nt, Human
gccaucauguuuacagaggac

SEQ ID NO: 3141368 - RNA, 19 nt, Human
gccucucauuccagaggaa

SEQ ID NO: 3141369 - RNA, 24 nt, Human
gccucuccacucaugugacucuuu

SEQ ID NO: 3141370 - RNA, 20 nt, Human
gccucucauuccagaggaag

SEQ ID NO: 3141371 - RNA, 21 nt, Human
gccucuccacucaugugacuc

SEQ ID NO: 3141372 - RNA, 17 nt, Human
gccugacccucaucuuu

SEQ ID NO: 3141373 - RNA, 12 nt, Human
gcgcggcuggga

SEQ ID NO: 3141374 - RNA, 18 nt, Human
gcgcggcugggaggaggg

SEQ ID NO: 3141375 - RNA, 18 nt, Human
gccuuuggacuugucccg

SEQ ID NO: 3141376 - RNA, 20 nt, Human
gcaggggccgggggcagucu

SEQ ID NO: 3141377 - RNA, 19 nt, Human
gcaggggccgggggcaguc

SEQ ID NO: 3141378 - RNA, 18 nt, Human
gcauuauauuuguaaauu

SEQ ID NO: 3141379 - RNA, 20 nt, Human
gauuuggggcucagaguggg

SEQ ID NO: 3141380 - RNA, 20 nt, Human
gauggcaaagaaggagagca

SEQ ID NO: 3141381 - RNA, 21 nt, Human
gaucugugaggggcucucuca

SEQ ID NO: 3141382 - RNA, 14 nt, Human
gaucauuaucagcc

SEQ ID NO: 3141383 - RNA, 15 nt, Human
gaucccaugagcucc

SEQ ID NO: 3141384 - RNA, 17 nt, Human
gaucccaugagcuccuu

SEQ ID NO: 3141385 - RNA, 13 nt, Human
gauagaugugugg

SEQ ID NO: 3141386 - RNA, 20 nt, Human
gagcuccuuaaggcucuuuu

SEQ ID NO: 3141387 - RNA, 20 nt, Human
gagcucaggaaccgaggcag

SEQ ID NO: 3141388 - RNA, 21 nt, Human
gagcucaggaaccgaggcagg

SEQ ID NO: 3141389 - RNA, 21 nt, Human
gagccugacccucaucuuucu

SEQ ID NO: 3141390 - RNA, 18 nt, Human
gacuugucccgggacacc

SEQ ID NO: 3141391 - RNA, 22 nt, Human
gagaagccagcuuuccucauca

SEQ ID NO: 3141392 - RNA, 21 nt, Human
gagagaggccauucuuuccca

SEQ ID NO: 3141393 - RNA, 13 nt, Human
gagagaggccauu

SEQ ID NO: 3141394 - RNA, 20 nt, Human
gacaccuaggcuaggguggg

SEQ ID NO: 3141395 - RNA, 16 nt, Human
gacaccuaggcuaggg

SEQ ID NO: 3141396 - RNA, 15 nt, Human
gacaccuaggcuagg

SEQ ID NO: 3141397 - RNA, 17 nt, Human
gaccuuuccugaggaag

SEQ ID NO: 3141398 - RNA, 21 nt, Human
cuuggggaguuuagggugggg

SEQ ID NO: 3141399 - RNA, 20 nt, Human
cuuggggaguuuaggguggg

SEQ ID NO: 3141400 - RNA, 23 nt, Human
cuugucacgccagacuucccacg

SEQ ID NO: 3141401 - RNA, 18 nt, Human
cuugucacgccagacuuc

SEQ ID NO: 3141402 - RNA, 12 nt, Human
cuuuggacuugu

SEQ ID NO: 3141403 - RNA, 13 nt, Human
cuuucuuccaaac

SEQ ID NO: 3141404 - RNA, 19 nt, Human
cuuucuuccaaacaggcuc

SEQ ID NO: 3141405 - RNA, 21 nt, Human
gaaggaucccaugagcuccuu

SEQ ID NO: 3141406 - RNA, 13 nt, Human
gaagaaguguguc

SEQ ID NO: 3141407 - RNA, 18 nt, Human
cugcccgggagcucagga

SEQ ID NO: 3141408 - RNA, 19 nt, Human
cugcccgggagcucaggaa

SEQ ID NO: 3141409 - RNA, 11 nt, Human
cugccaggaga

SEQ ID NO: 3141410 - RNA, 19 nt, Human
cugggaggagggcaggcau

SEQ ID NO: 3141411 - RNA, 18 nt, Human
cuggcuguggccuaaccu

SEQ ID NO: 3141412 - RNA, 23 nt, Human
cuggcacagccuggcuguggccu

SEQ ID NO: 3141413 - RNA, 15 nt, Human
cuggcacagccuggc

SEQ ID NO: 3141414 - RNA, 21 nt, Human
cuggcacagccuggcuguggc

SEQ ID NO: 3141415 - RNA, 16 nt, Human
cuggcacagccuggcu

SEQ ID NO: 3141416 - RNA, 14 nt, Human
cuguaccucugccu

SEQ ID NO: 3141417 - RNA, 17 nt, Human
cuccucgagaucccaac

SEQ ID NO: 3141418 - RNA, 24 nt, Human
cuccucgagaucccaacacugcca

SEQ ID NO: 3141419 - RNA, 21 nt, Human
cuccucgagaucccaacacug

SEQ ID NO: 3141420 - RNA, 18 nt, Human
cuccauccuacccccugu

SEQ ID NO: 3141421 - RNA, 23 nt, Human
cuccauccuacccccugugccuu

SEQ ID NO: 3141422 - RNA, 22 nt, Human
cuccauccuacccccugugccu

SEQ ID NO: 3141423 - RNA, 20 nt, Human
cuccauccuacccccugugc

SEQ ID NO: 3141424 - RNA, 17 nt, Human
cucuccugucucccucc

SEQ ID NO: 3141425 - RNA, 15 nt, Human
cucuccugucucccu

SEQ ID NO: 3141426 - RNA, 18 nt, Human
cucuccugucucccuccu

SEQ ID NO: 3141427 - RNA, 21 nt, Human
cucuccacucaugugacucuu

SEQ ID NO: 3141428 - RNA, 22 nt, Human
cucuccacucaugugacucuuu

SEQ ID NO: 3141429 - RNA, 21 nt, Human
cucuuggggaguuuagggugg

SEQ ID NO: 3141430 - RNA, 23 nt, Human
cucuuggggaguuuagggugggg

SEQ ID NO: 3141431 - RNA, 12 nt, Human
cggcugggagga

SEQ ID NO: 3141432 - RNA, 17 nt, Human
cgggagccugacccuca

SEQ ID NO: 3141433 - RNA, 17 nt, Human
cgggggcagucugagag

SEQ ID NO: 3141434 - RNA, 21 nt, Human
cgggggcagucugagagaggc

SEQ ID NO: 3141435 - RNA, 18 nt, Human
cgggggcagucugagaga

SEQ ID NO: 3141436 - RNA, 17 nt, Human
cggggccugggcaggag

SEQ ID NO: 3141437 - RNA, 19 nt, Human
cggggccugggcaggaggg

SEQ ID NO: 3141438 - RNA, 22 nt, Human
cgggucaucuguaccucugccu

SEQ ID NO: 3141439 - RNA, 15 nt, Human
cgggucaucuguacc

SEQ ID NO: 3141440 - RNA, 23 nt, Human
cguggcuguggcauccagagucc

SEQ ID NO: 3141441 - RNA, 16 nt, Human
cguuguccucagcccc

SEQ ID NO: 3141442 - RNA, 14 nt, Human
cuacccccugugcc

SEQ ID NO: 3141443 - RNA, 13 nt, Human
cuacccccugugc

SEQ ID NO: 3141444 - RNA, 16 nt, Human
gucccugaagagaagg

SEQ ID NO: 3141445 - RNA, 22 nt, Human
gucagcugggacaccccgacuu

SEQ ID NO: 3141446 - RNA, 19 nt, Human
guagugauuuuuaugccac

SEQ ID NO: 3141447 - RNA, 14 nt, Human
guagguugggagaa

SEQ ID NO: 3141448 - RNA, 21 nt, Human
gugauuuuuaugccaccugaa

SEQ ID NO: 3141449 - RNA, 14 nt, Human
gugccuuuugccau

SEQ ID NO: 3141450 - RNA, 21 nt, Human
gugccaggauggaaugauggg

SEQ ID NO: 3141451 - RNA, 21 nt, Human
gugacuauggagcugagcagg

SEQ ID NO: 3141452 - RNA, 11 nt, Human
gucugugugug

SEQ ID NO: 3141453 - RNA, 12 nt, Human
gucugugugugu

SEQ ID NO: 3141454 - RNA, 16 nt, Human
gucuguguguguguau

SEQ ID NO: 3141455 - RNA, 20 nt, Human
gucuguguguguguaugugg

SEQ ID NO: 3141456 - RNA, 11 nt, Human
gucuguguguu

SEQ ID NO: 3141457 - RNA, 21 nt, Human
gucuguguguuuaugugugug

SEQ ID NO: 3141458 - RNA, 22 nt, Human
gucuguguguuuaugugugugu

SEQ ID NO: 3141459 - RNA, 18 nt, Human
gucugagagaggccauuc

SEQ ID NO: 3141460 - RNA, 15 nt, Human
gucugagagaggcca

SEQ ID NO: 3141461 - RNA, 14 nt, Human
gucugagagaggcc

SEQ ID NO: 3141462 - RNA, 13 nt, Human
gucugagagaggc

SEQ ID NO: 3141463 - RNA, 13 nt, Human
gucccugccugga

SEQ ID NO: 3141464 - RNA, 12 nt, Human
guucugccagga

SEQ ID NO: 3141465 - RNA, 14 nt, Human
guucugccaggaga

SEQ ID NO: 3141466 - RNA, 13 nt, Human
guucugccaggag

SEQ ID NO: 3141467 - RNA, 21 nt, Human
guguccugcaccggggccugg

SEQ ID NO: 3141468 - RNA, 17 nt, Human
gugucuggcacagccug

SEQ ID NO: 3141469 - RNA, 17 nt, Human
gugugggaguguguaau

SEQ ID NO: 3141470 - RNA, 16 nt, Human
guguguuuaugugugu

SEQ ID NO: 3141471 - RNA, 14 nt, Human
guguguuuaugugu

SEQ ID NO: 3141472 - RNA, 15 nt, Human
guguguuuaugugug

SEQ ID NO: 3141473 - RNA, 12 nt, Human
guguguugugug

SEQ ID NO: 3141474 - RNA, 14 nt, Human
guguguugugugug

SEQ ID NO: 3141475 - RNA, 17 nt, Human
guguguuguguguggga

SEQ ID NO: 3141476 - RNA, 17 nt, Human
guggcuggaucugugag

SEQ ID NO: 3141477 - RNA, 21 nt, Human
guggggagagacgggcccugg

SEQ ID NO: 3141478 - RNA, 22 nt, Human
guguaauuuaaaauugugaugu

SEQ ID NO: 3141479 - RNA, 23 nt, Human
guguaauuuaaaauugugaugug

SEQ ID NO: 3141480 - RNA, 20 nt, Human
guguaauuuaaaauugugau

SEQ ID NO: 3141481 - RNA, 22 nt, Human
uauaaacaugcuugcauuauau

SEQ ID NO: 3141482 - RNA, 20 nt, Human
uauauuuguaaauuuaugug

SEQ ID NO: 3141483 - RNA, 16 nt, Human
guuuagaagaagugug

SEQ ID NO: 3141484 - RNA, 12 nt, Human
guuguguguggg

SEQ ID NO: 3141485 - RNA, 13 nt, Human
guuguguguggga

SEQ ID NO: 3141486 - RNA, 14 nt, Human
guugugugugggag

SEQ ID NO: 3141487 - RNA, 16 nt, Human
guugugugugggagug

SEQ ID NO: 3141488 - RNA, 22 nt, Human
guugugugugggaguguguaau

SEQ ID NO: 3141489 - RNA, 23 nt, Human
guuguccucagccccgcguggaa

SEQ ID NO: 3141490 - RNA, 17 nt, Human
guuguccucagccccgc

SEQ ID NO: 3141491 - RNA, 13 nt, Human
uaaauuuauguga

SEQ ID NO: 3141492 - RNA, 22 nt, Human
uaagugccaggauggaaugaug

SEQ ID NO: 3141493 - RNA, 11 nt, Human
uguguaugugg

SEQ ID NO: 3141494 - RNA, 12 nt, Human
uguguauguggg

SEQ ID NO: 3141495 - RNA, 14 nt, Human
ugugugggagugug

SEQ ID NO: 3141496 - RNA, 15 nt, Human
ugugugggagugugu

SEQ ID NO: 3141497 - RNA, 16 nt, Human
ugugugggagugugua

SEQ ID NO: 3141498 - RNA, 16 nt, Human
uguucuuuugucccag

SEQ ID NO: 3141499 - RNA, 11 nt, Human
uguguaauuua

SEQ ID NO: 3141500 - RNA, 18 nt, Human
uguguaauuuaaaauugu

SEQ ID NO: 3141501 - RNA, 19 nt, Human
uguguaauuuaaaauugug

SEQ ID NO: 3141502 - RNA, 22 nt, Human
uguguaauuuaaaauugugaug

SEQ ID NO: 3141503 - RNA, 23 nt, Human
uguguaauuuaaaauugugaugu

SEQ ID NO: 3141504 - RNA, 14 nt, Human
ugugggagugugua

SEQ ID NO: 3141505 - RNA, 15 nt, Human
ugugggaguguguaa

SEQ ID NO: 3141506 - RNA, 15 nt, Human
uguggaagugugggu

SEQ ID NO: 3141507 - RNA, 15 nt, Human
uguggccuaaccugc

SEQ ID NO: 3141508 - RNA, 16 nt, Human
ugugccuuuugccauc

SEQ ID NO: 3141509 - RNA, 20 nt, Human
ugugccuugucacgccagac

SEQ ID NO: 3141510 - RNA, 19 nt, Human
ugugccuugucacgccaga

SEQ ID NO: 3141511 - RNA, 17 nt, Human
ugugccuuggugugcug

SEQ ID NO: 3141512 - RNA, 17 nt, Human
ugugccuugucacgcca

SEQ ID NO: 3141513 - RNA, 17 nt, Human
ugucuggcacagccugg

SEQ ID NO: 3141514 - RNA, 22 nt, Human
ugucacccuuaggccagcacca

SEQ ID NO: 3141515 - RNA, 21 nt, Human
uguccucagccccgcguggaa

SEQ ID NO: 3141516 - RNA, 14 nt, Human
uguaccucugccuc

SEQ ID NO: 3141517 - RNA, 12 nt, Human
ugcaccggggcc

SEQ ID NO: 3141518 - RNA, 22 nt, Human
ugcaccggggccugggcaggag

SEQ ID NO: 3141519 - RNA, 16 nt, Human
ugcaccggggccuggg

SEQ ID NO: 3141520 - RNA, 18 nt, Human
ugccaggauggaaugaug

SEQ ID NO: 3141521 - RNA, 21 nt, Human
ugggagugaggaugucugggc

SEQ ID NO: 3141522 - RNA, 21 nt, Human
ugggacaccccgacuuuuguu

SEQ ID NO: 3141523 - RNA, 18 nt, Human
ugggggucuguguguuua

SEQ ID NO: 3141524 - RNA, 15 nt, Human
ugggggucugugugu

SEQ ID NO: 3141525 - RNA, 11 nt, Human
ugggggaugua

SEQ ID NO: 3141526 - RNA, 18 nt, Human
uggaacucgugucuggca

SEQ ID NO: 3141527 - RNA, 20 nt, Human
uggaaugaugggucaguugu

SEQ ID NO: 3141528 - RNA, 23 nt, Human
uccucgagaucccaacacugcca

SEQ ID NO: 3141529 - RNA, 16 nt, Human
uccucgagaucccaac

SEQ ID NO: 3141530 - RNA, 23 nt, Human
ucccaugagcuccuuaaggcucu

SEQ ID NO: 3141531 - RNA, 19 nt, Human
uccugucccucauccauag

SEQ ID NO: 3141532 - RNA, 20 nt, Human
ucagaucauuaucagccugu

SEQ ID NO: 3141533 - RNA, 23 nt, Human
ucagccuccauccuacccccugu

SEQ ID NO: 3141534 - RNA, 17 nt, Human
ucaucuuucuuccaaac

SEQ ID NO: 3141535 - RNA, 14 nt, Human
ucaucuuucuucca

SEQ ID NO: 3141536 - RNA, 12 nt, Human
ucaucuuucuuc

SEQ ID NO: 3141537 - RNA, 16 nt, Human
ucccaacacugccagc

SEQ ID NO: 3141538 - RNA, 15 nt, Human
ucccaacacugccag

SEQ ID NO: 3141539 - RNA, 14 nt, Human
ucccaacacugcca

SEQ ID NO: 3141540 - RNA, 15 nt, Human
uccagagucccugcc

SEQ ID NO: 3141541 - RNA, 22 nt, Human
ucuucauuaccucagugagaag

SEQ ID NO: 3141542 - RNA, 11 nt, Human
ucugugugugu

SEQ ID NO: 3141543 - RNA, 19 nt, Human
ucuuuccaaccggcuuugu

SEQ ID NO: 3141544 - RNA, 16 nt, Human
ugacucuuuccaaccg

SEQ ID NO: 3141545 - RNA, 14 nt, Human
ugacucuuuccaac

SEQ ID NO: 3141546 - RNA, 13 nt, Human
ugacucuuuccaa

SEQ ID NO: 3141547 - RNA, 19 nt, Human
ugacucuuuccaaccggcu

SEQ ID NO: 3141548 - RNA, 20 nt, Human
ugaagagaagggcagggcug

SEQ ID NO: 3141549 - RNA, 22 nt, Human
ugaagagaagggcagggcugag

SEQ ID NO: 3141550 - RNA, 13 nt, Human
aggaugucugggc

SEQ ID NO: 3141551 - RNA, 15 nt, Human
aggagggcaggcauc

SEQ ID NO: 3141552 - RNA, 13 nt, Human
aggagggcaggca

SEQ ID NO: 3141553 - RNA, 15 nt, Human
aggagggaggugcuu

SEQ ID NO: 3141554 - RNA, 20 nt, Human
aggagacagguuagcugcuc

SEQ ID NO: 3141555 - RNA, 19 nt, Human
aggcaucggggagccggga

SEQ ID NO: 3141556 - RNA, 22 nt, Human
agggauuuggggcucagagugg

SEQ ID NO: 3141557 - RNA, 19 nt, Human
aggcuaggguggggagaga

SEQ ID NO: 3141558 - RNA, 16 nt, Human
aggcuaggguggggag

SEQ ID NO: 3141559 - RNA, 15 nt, Human
aggcuagggugggga

SEQ ID NO: 3141560 - RNA, 14 nt, Human
aggcuagggugggg

SEQ ID NO: 3141561 - RNA, 19 nt, Human
agagugggguagguuggga

SEQ ID NO: 3141562 - RNA, 13 nt, Human
agcaucucccagu

SEQ ID NO: 3141563 - RNA, 23 nt, Human
agagaggccauucuuucccaaca

SEQ ID NO: 3141564 - RNA, 22 nt, Human
agagaggccauucuuucccaac

SEQ ID NO: 3141565 - RNA, 12 nt, Human
agagaggccauu

SEQ ID NO: 3141566 - RNA, 13 nt, Human
accggggccuggg

SEQ ID NO: 3141567 - RNA, 14 nt, Human
acccucaucuuucu

SEQ ID NO: 3141568 - RNA, 13 nt, Human
acccucaucuuuc

SEQ ID NO: 3141569 - RNA, 19 nt, Human
acccucaucuuucuuccaa

SEQ ID NO: 3141570 - RNA, 16 nt, Human
acccucaucuuucuuc

SEQ ID NO: 3141571 - RNA, 14 nt, Human
aacaggcucagagg

SEQ ID NO: 3141572 - RNA, 16 nt, Human
cugcaccggggccugg

SEQ ID NO: 3141573 - RNA, 14 nt, Human
cugcaccggggccu

SEQ ID NO: 3141574 - RNA, 19 nt, Human
cugcaccggggccugggca

SEQ ID NO: 3141575 - RNA, 18 nt, Human
cugcaccggggccugggc

SEQ ID NO: 3141576 - RNA, 13 nt, Human
cugggcaggaggg

SEQ ID NO: 3141577 - RNA, 13 nt, Human
cuggcccugugcc

SEQ ID NO: 3141578 - RNA, 14 nt, Human
cuggaucugugagg

SEQ ID NO: 3141579 - RNA, 17 nt, Human
gaacugcugggcuuggc

SEQ ID NO: 3141580 - RNA, 20 nt, Human
gaacugcugggcuuggcagc

SEQ ID NO: 3141581 - RNA, 15 nt, Human
gaaccgaggcaggga

SEQ ID NO: 3141582 - RNA, 12 nt, Human
gaaccgaggcag

SEQ ID NO: 3141583 - RNA, 21 nt, Human
gaagugugggucugugugugu

SEQ ID NO: 3141584 - RNA, 24 nt, Human
gaagugugggucugugugugugua

SEQ ID NO: 3141585 - RNA, 14 nt, Human
gcaccggggccugg

SEQ ID NO: 3141586 - RNA, 16 nt, Human
gcaccggggccugggc

SEQ ID NO: 3141587 - RNA, 23 nt, Human
gaggugcuucuaguucugccagg

SEQ ID NO: 3141588 - RNA, 22 nt, Human
gaggugcuucuaguucugccag

SEQ ID NO: 3141589 - RNA, 18 nt, Human
gagucagggagagcugaa

SEQ ID NO: 3141590 - RNA, 17 nt, Human
gaguccaucagccucca

SEQ ID NO: 3141591 - RNA, 16 nt, Human
gagggcugccuuugga

SEQ ID NO: 3141592 - RNA, 9 nt, Human
gagggcugc

SEQ ID NO: 3141593 - RNA, 23 nt, Human
ggggucuguguguuuaugugugu

SEQ ID NO: 3141594 - RNA, 12 nt, Human
ggggccugggca

SEQ ID NO: 3141595 - RNA, 15 nt, Human
ggggccugggcagga

SEQ ID NO: 3141596 - RNA, 16 nt, Human
aaaauugugauguguc

SEQ ID NO: 3141597 - RNA, 14 nt, Human
gggagggggagagg

SEQ ID NO: 3141598 - RNA, 15 nt, Human
aaaaagggaggggga

SEQ ID NO: 3141599 - RNA, 17 nt, Human
ggcuggaucugugaggg

SEQ ID NO: 3141600 - RNA, 20 nt, Human
ggcuccucgagaucccaaca

SEQ ID NO: 3141601 - RNA, 17 nt, Human
ggagagacgggcccugg

SEQ ID NO: 3141602 - RNA, 15 nt, Human
ggagagacgggcccu

SEQ ID NO: 3141603 - RNA, 13 nt, Human
ggaugucugggcc

SEQ ID NO: 3141604 - RNA, 23 nt, Human
ggcaggcaucggggagccgggag

SEQ ID NO: 3141605 - RNA, 18 nt, Human
ggccagcaccaucucuuu

SEQ ID NO: 3141606 - RNA, 21 nt, Human
gcuauggggauagaugugugg

SEQ ID NO: 3141607 - RNA, 19 nt, Human
gcuauggggauagaugugu

SEQ ID NO: 3141608 - RNA, 14 nt, Human
cucaugugacucuu

SEQ ID NO: 3141609 - RNA, 16 nt, Human
cuccugucucccuccu

SEQ ID NO: 3141610 - RNA, 24 nt, Human
cuccucugcccgggagcucaggaa

SEQ ID NO: 3141611 - RNA, 22 nt, Human
cuccucugcccgggagcucagg

SEQ ID NO: 3141612 - RNA, 23 nt, Human
cucaugauagaaggcuaugggga

SEQ ID NO: 3141613 - RNA, 20 nt, Human
cucaggccugacucucagca

SEQ ID NO: 3141614 - RNA, 23 nt, Human
cucaggccgaaggaggagucagg

SEQ ID NO: 3141615 - RNA, 22 nt, Human
ccucugcccgggagcucaggaa

SEQ ID NO: 3141616 - RNA, 21 nt, Human
ccucugcccgggagcucagga

SEQ ID NO: 3141617 - RNA, 12 nt, Human
ccugccuggacc

SEQ ID NO: 3141618 - RNA, 19 nt, Human
ccugccuggaccagccucu

SEQ ID NO: 3141619 - RNA, 23 nt, Human
ccucuuggggaguuuaggguggg

SEQ ID NO: 3141620 - RNA, 15 nt, Human
ccucuuggcugccuu

SEQ ID NO: 3141621 - RNA, 22 nt, Human
ccucuuggggaguuuagggugg

SEQ ID NO: 3141622 - RNA, 21 nt, Human
ccaugagcuccuuaaggcucu

SEQ ID NO: 3141623 - RNA, 12 nt, Human
ccaugagcuccu

SEQ ID NO: 3141624 - RNA, 13 nt, Human
ccauugguguuga

SEQ ID NO: 3141625 - RNA, 22 nt, Human
cccccugugccuugucacgcca

SEQ ID NO: 3141626 - RNA, 21 nt, Human
ccccgcguggaacucgugucu

SEQ ID NO: 3141627 - RNA, 18 nt, Human
ccagagaaaaagggaggg

SEQ ID NO: 3141628 - RNA, 23 nt, Human
ccagacuucccacggcuccucga

SEQ ID NO: 3141629 - RNA, 17 nt, Human
cagcacguguggccugu

SEQ ID NO: 3141630 - RNA, 17 nt, Human
caucuguaccucugccu

SEQ ID NO: 3141631 - RNA, 17 nt, Human
auucauggccuggggga

SEQ ID NO: 3141632 - RNA, 17 nt, Human
auuuuuaugccaccuga

SEQ ID NO: 3141633 - RNA, 17 nt, Human
caccuaggcuagggugg

SEQ ID NO: 3141634 - RNA, 19 nt, Human
caccuaggcuagggugggg

SEQ ID NO: 3141635 - RNA, 18 nt, Human
caccuaggcuaggguggg

SEQ ID NO: 3141636 - RNA, 14 nt, Human
uacagaggacagua

SEQ ID NO: 3141637 - RNA, 18 nt, Human
uacagaggacaguauuug

SEQ ID NO: 3141638 - RNA, 15 nt, Human
uaauuuaaaauugug

SEQ ID NO: 3141639 - RNA, 16 nt, Human
uaauuuaaaauuguga

SEQ ID NO: 3141640 - RNA, 17 nt, Human
acaccccgacuuuuguu

SEQ ID NO: 3141641 - RNA, 16 nt, Human
guuuucuuaacuuaaa

SEQ ID NO: 3141642 - RNA, 23 nt, Human
aaggcuauggggauagaugugug

SEQ ID NO: 3141643 - RNA, 13 nt, Human
guuuaugugugug

SEQ ID NO: 3141644 - RNA, 16 nt, Human
guuuaugugugugugu

SEQ ID NO: 3141645 - RNA, 18 nt, Human
guuguaucagcacgugug

SEQ ID NO: 3141646 - RNA, 14 nt, Human
guggcacuggggca

SEQ ID NO: 3141647 - RNA, 21 nt, Human
guggaagugugggucugugug

SEQ ID NO: 3141648 - RNA, 22 nt, Human
guggaagugugggucugugugu

SEQ ID NO: 3141649 - RNA, 23 nt, Human
gugcuauuguagagccagagguc

SEQ ID NO: 3141650 - RNA, 14 nt, Human
guggaagugugggu

SEQ ID NO: 3141651 - RNA, 15 nt, Human
guggaaguguggguc

SEQ ID NO: 3141652 - RNA, 19 nt, Human
guggaagugugggucugug

SEQ ID NO: 3141653 - RNA, 20 nt, Human
guggaagugugggucugugu

SEQ ID NO: 3141654 - RNA, 13 nt, Human
gugggagugugua

SEQ ID NO: 3141655 - RNA, 14 nt, Human
gugggaguguguaa

SEQ ID NO: 3141656 - RNA, 14 nt, Human
gugguggcucggga

SEQ ID NO: 3141657 - RNA, 13 nt, Human
gugggucugugug

SEQ ID NO: 3141658 - RNA, 16 nt, Human
gugggucugugugugu

SEQ ID NO: 3141659 - RNA, 23 nt, Human
guggggggggggcgcggcuggga

SEQ ID NO: 3141660 - RNA, 12 nt, Human
guguguaugugg

SEQ ID NO: 3141661 - RNA, 15 nt, Human
guguuguguguggga

SEQ ID NO: 3141662 - RNA, 14 nt, Human
guguguaauuuaaa

SEQ ID NO: 3141663 - RNA, 16 nt, Human
guaggaacugcugggc

SEQ ID NO: 3141664 - RNA, 18 nt, Human
guauguggaagugugggu

SEQ ID NO: 3141665 - RNA, 21 nt, Human
guauguggaagugugggucug

SEQ ID NO: 3141666 - RNA, 19 nt, Human
guaugugggggucugugug

SEQ ID NO: 3141667 - RNA, 20 nt, Human
guaugugggggucugugugu

SEQ ID NO: 3141668 - RNA, 16 nt, Human
guauguggaagugugg

SEQ ID NO: 3141669 - RNA, 17 nt, Human
guauguggaaguguggg

SEQ ID NO: 3141670 - RNA, 15 nt, Human
guauguggaagugug

SEQ ID NO: 3141671 - RNA, 19 nt, Human
aacucgugucuggcacagc

SEQ ID NO: 3141672 - RNA, 16 nt, Human
gucucccuccucugcc

SEQ ID NO: 3141673 - RNA, 12 nt, Human
gucucccuccuc

SEQ ID NO: 3141674 - RNA, 22 nt, Human
aacacugccagcauuucccuuc

SEQ ID NO: 3141675 - RNA, 12 nt, Human
aacacugccagc

SEQ ID NO: 3141676 - RNA, 19 nt, Human
agacuucccacggcuccuc

SEQ ID NO: 3141677 - RNA, 13 nt, Human
ucuuucuuccaaa

SEQ ID NO: 3141678 - RNA, 21 nt, Human
agacauuugcuaugagcuggg

SEQ ID NO: 3141679 - RNA, 17 nt, Human
agaaugucaguaugugg

SEQ ID NO: 3141680 - RNA, 19 nt, Human
agaaugucaguauguggaa

SEQ ID NO: 3141681 - RNA, 15 nt, Human
agaaugucaguaugu

SEQ ID NO: 3141682 - RNA, 16 nt, Human
agaaugucaguaugug

SEQ ID NO: 3141683 - RNA, 13 nt, Human
agaaugucaguau

SEQ ID NO: 3141684 - RNA, 23 nt, Human
agaguccaucagccuccauccua

SEQ ID NO: 3141685 - RNA, 17 nt, Human
agagucccugccuggac

SEQ ID NO: 3141686 - RNA, 14 nt, Human
agagucccugccug

SEQ ID NO: 3141687 - RNA, 18 nt, Human
agaucccaacacugccag

SEQ ID NO: 3141688 - RNA, 20 nt, Human
agaucccaacacugccagca

SEQ ID NO: 3141689 - RNA, 19 nt, Human
agaucccaacacugccagc

SEQ ID NO: 3141690 - RNA, 21 nt, Human
agaggccauucuuucccaaca

SEQ ID NO: 3141691 - RNA, 17 nt, Human
ucgagaucccaacacug

SEQ ID NO: 3141692 - RNA, 21 nt, Human
ucgagaucccaacacugccag

SEQ ID NO: 3141693 - RNA, 18 nt, Human
ucgagaucccaacacugc

SEQ ID NO: 3141694 - RNA, 23 nt, Human
acuggccaguggcuggaucugug

SEQ ID NO: 3141695 - RNA, 23 nt, Human
acuugucccgggacaccuaggcu

SEQ ID NO: 3141696 - RNA, 16 nt, Human
ucucauuccagaggaa

SEQ ID NO: 3141697 - RNA, 20 nt, Human
ucugagagaggccauucuuu

SEQ ID NO: 3141698 - RNA, 14 nt, Human
ucugagagaggcca

SEQ ID NO: 3141699 - RNA, 21 nt, Human
ucccgggacaccuaggcuagg

SEQ ID NO: 3141700 - RNA, 19 nt, Human
acucaugugacucuuucca

SEQ ID NO: 3141701 - RNA, 18 nt, Human
acucaugugacucuuucc

SEQ ID NO: 3141702 - RNA, 21 nt, Human
uccaaccggcuuuguggcacu

SEQ ID NO: 3141703 - RNA, 21 nt, Human
uccacucaugugacucuuucc

SEQ ID NO: 3141704 - RNA, 14 nt, Human
uccacucaugugac

SEQ ID NO: 3141705 - RNA, 17 nt, Human
uauuuguaaauuuaugu

SEQ ID NO: 3141706 - RNA, 22 nt, Human
uauuuguaaauuuaugugaugg

SEQ ID NO: 3141707 - RNA, 16 nt, Human
uauuuguaaauuuaug

SEQ ID NO: 3141708 - RNA, 12 nt, Human
ugugugugggag

SEQ ID NO: 3141709 - RNA, 20 nt, Human
ugugugugggaguguguaau

SEQ ID NO: 3141710 - RNA, 14 nt, Human
uguguguguaugug

SEQ ID NO: 3141711 - RNA, 16 nt, Human
uguggcauccagaguc

SEQ ID NO: 3141712 - RNA, 21 nt, Human
uguggcauccagagucccugc

SEQ ID NO: 3141713 - RNA, 19 nt, Human
uguggcauccagagucccu

SEQ ID NO: 3141714 - RNA, 14 nt, Human
ugugacucuuucca

SEQ ID NO: 3141715 - RNA, 12 nt, Human
ugugacucuuuc

SEQ ID NO: 3141716 - RNA, 17 nt, Human
ugugacucuuuccaacc

SEQ ID NO: 3141717 - RNA, 15 nt, Human
ugugacucuuuccaa

SEQ ID NO: 3141718 - RNA, 16 nt, Human
uuagaagaaguguguc

SEQ ID NO: 3141719 - RNA, 14 nt, Human
uuagaagaagugug

SEQ ID NO: 3141720 - RNA, 15 nt, Human
uuagaagaagugugu

SEQ ID NO: 3141721 - RNA, 14 nt, Human
aguuuagggugggg

SEQ ID NO: 3141722 - RNA, 13 nt, Human
aguuuaggguggg

SEQ ID NO: 3141723 - RNA, 12 nt, Human
aguuuagggugg

SEQ ID NO: 3141724 - RNA, 13 nt, Human
uuaaaauugugau

SEQ ID NO: 3141725 - RNA, 18 nt, Human
uuaaaauugugauguguc

SEQ ID NO: 3141726 - RNA, 16 nt, Human
uguuuaugugugugug

SEQ ID NO: 3141727 - RNA, 13 nt, Human
uguuuaugugugu

SEQ ID NO: 3141728 - RNA, 12 nt, Human
aguucugccagg

SEQ ID NO: 3141729 - RNA, 20 nt, Human
aguucugccaggagacaggu

SEQ ID NO: 3141730 - RNA, 14 nt, Human
aguucugccaggag

SEQ ID NO: 3141731 - RNA, 13 nt, Human
aguucugccagga

SEQ ID NO: 3141732 - RNA, 22 nt, Human
agggaaggaucccaugagcucc

SEQ ID NO: 3141733 - RNA, 15 nt, Human
agggaaggaucccau

SEQ ID NO: 3141734 - RNA, 23 nt, Human
agggaaggaucccaugagcuccu

SEQ ID NO: 3141735 - RNA, 19 nt, Human
ugggagaaugucaguaugu

SEQ ID NO: 3141736 - RNA, 20 nt, Human
ugggagaaugucaguaugug

SEQ ID NO: 3141737 - RNA, 22 nt, Human
ugggagaaugucaguaugugga

SEQ ID NO: 3141738 - RNA, 21 nt, Human
aggguggggggggggcgcggc

SEQ ID NO: 3141739 - RNA, 15 nt, Human
uggggcucagagugg

SEQ ID NO: 3141740 - RNA, 22 nt, Human
uggggagggauuuggggcucag

SEQ ID NO: 3141741 - RNA, 13 nt, Human
uggggagagacgg

SEQ ID NO: 3141742 - RNA, 14 nt, Human
uggggagggauuug

SEQ ID NO: 3141743 - RNA, 12 nt, Human
uguauguggggg

SEQ ID NO: 3141744 - RNA, 19 nt, Human
agguuuuuguagugauuuu

SEQ ID NO: 3141745 - RNA, 23 nt, Human
agguuuguuuagaagaagugugu

SEQ ID NO: 3141746 - RNA, 21 nt, Human
uguagugauuuuuaugccacc

SEQ ID NO: 3141747 - RNA, 15 nt, Human
ugccuugucacgcca

SEQ ID NO: 3141748 - RNA, 16 nt, Human
ugccuuggugugcugu

SEQ ID NO: 3141749 - RNA, 22 nt, Human
ugcuaugagcuggggaugucuc

SEQ ID NO: 3141750 - RNA, 19 nt, Human
ugcuaugagcuggggaugu

SEQ ID NO: 3141751 - RNA, 20 nt, Human
ugcuaugagcuggggauguc

SEQ ID NO: 3141752 - RNA, 16 nt, Human
ugcuaugagcugggga

SEQ ID NO: 3141753 - RNA, 16 nt, Human
ugccaucauguuuaca

SEQ ID NO: 3141754 - RNA, 22 nt, Human
ugccgagaguccaucagccucc

SEQ ID NO: 3141755 - RNA, 23 nt, Human
agccccgcguggaacucgugucu

SEQ ID NO: 3141756 - RNA, 16 nt, Human
agccucuccacucaug

SEQ ID NO: 3141757 - RNA, 15 nt, Human
ugaugggucaguugu

SEQ ID NO: 3141758 - RNA, 17 nt, Human
auuguagagccagaggu

SEQ ID NO: 3141759 - RNA, 18 nt, Human
auuguagagccagagguc

SEQ ID NO: 3141760 - RNA, 15 nt, Human
auuuaaaauugugau

SEQ ID NO: 3141761 - RNA, 18 nt, Human
auguguguguguugugug

SEQ ID NO: 3141762 - RNA, 22 nt, Human
auguguguguguuguguguggg

SEQ ID NO: 3141763 - RNA, 23 nt, Human
auguguguguguuguguguggga

SEQ ID NO: 3141764 - RNA, 17 nt, Human
auguauauaaacaugcu

SEQ ID NO: 3141765 - RNA, 19 nt, Human
uuucccuuccuuccucucc

SEQ ID NO: 3141766 - RNA, 23 nt, Human
uuugaccuguugggagugaggau

SEQ ID NO: 3141767 - RNA, 15 nt, Human
uuuguagugauuuuu

SEQ ID NO: 3141768 - RNA, 22 nt, Human
uuuguagugauuuuuaugccac

SEQ ID NO: 3141769 - RNA, 18 nt, Human
uuuguaagguuuuuguag

SEQ ID NO: 3141770 - RNA, 20 nt, Human
auauuuguaaauuuauguga

SEQ ID NO: 3141771 - RNA, 12 nt, Human
uucugccaggag

SEQ ID NO: 3141772 - RNA, 17 nt, Human
aucccaacacugccagc

SEQ ID NO: 3141773 - RNA, 16 nt, Human
aucccaacacugccag

SEQ ID NO: 3141774 - RNA, 15 nt, Human
aucccaacacugcca

SEQ ID NO: 3141775 - RNA, 11 nt, Human
aucccaacacu

SEQ ID NO: 3141776 - RNA, 18 nt, Human
aucauguuuacagaggac

SEQ ID NO: 3141777 - RNA, 23 nt, Human
aucauguuuacagaggacaguau

SEQ ID NO: 3141778 - RNA, 17 nt, Human
uucuaguucugccagga

SEQ ID NO: 3141779 - RNA, 16 nt, Human
uucuaguucugccagg

SEQ ID NO: 3141780 - RNA, 19 nt, Human
uuguaaauuuaugugaugg

SEQ ID NO: 3141781 - RNA, 16 nt, Human
uuggacuugucccggg

SEQ ID NO: 3141782 - RNA, 21 nt, Human
aucugugaggggcucucucau

SEQ ID NO: 3141783 - RNA, 22 nt, Human
aucugugaggggcucucucaug

SEQ ID NO: 3141784 - RNA, 18 nt, Human
augaguuggcugggaaua

SEQ ID NO: 3141785 - RNA, 12 nt, Human
uugugauguguc

SEQ ID NO: 3141786 - RNA, 15 nt, Human
gggaaggaucccaug

SEQ ID NO: 3141787 - RNA, 13 nt, Human
gggauagaugugu

SEQ ID NO: 3141788 - RNA, 14 nt, Human
gggauagaugugug

SEQ ID NO: 3141789 - RNA, 11 nt, Human
gggagugugua

SEQ ID NO: 3141790 - RNA, 16 nt, Human
gggaguuuaggguggg

SEQ ID NO: 3141791 - RNA, 23 nt, Human
gggaggugcuucuaguucugcca

SEQ ID NO: 3141792 - RNA, 17 nt, Human
gggcagucugagagagg

SEQ ID NO: 3141793 - RNA, 19 nt, Human
gggcagucugagagaggcc

SEQ ID NO: 3141794 - RNA, 18 nt, Human
gggcagucugagagaggc

SEQ ID NO: 3141795 - RNA, 12 nt, Human
gggccugggcag

SEQ ID NO: 3141796 - RNA, 15 nt, Human
gggccugggcaggag

SEQ ID NO: 3141797 - RNA, 13 nt, Human
gggccugggcagg

SEQ ID NO: 3141798 - RNA, 21 nt, Human
gggcagucugagagaggccau

SEQ ID NO: 3141799 - RNA, 20 nt, Human
gggcagucugagagaggcca

SEQ ID NO: 3141800 - RNA, 17 nt, Human
gggccugggcaggaggg

SEQ ID NO: 3141801 - RNA, 16 nt, Human
gggccugggcaggagg

SEQ ID NO: 3141802 - RNA, 19 nt, Human
ggggcagucugagagaggc

SEQ ID NO: 3141803 - RNA, 15 nt, Human
ggggcagucugagag

SEQ ID NO: 3141804 - RNA, 18 nt, Human
ggggcagucugagagagg

SEQ ID NO: 3141805 - RNA, 16 nt, Human
ggggcgcggcugggag

SEQ ID NO: 3141806 - RNA, 15 nt, Human
ggggcgcggcuggga

SEQ ID NO: 3141807 - RNA, 15 nt, Human
gggggagagggcugc

SEQ ID NO: 3141808 - RNA, 15 nt, Human
ggugguggcucggga

SEQ ID NO: 3141809 - RNA, 21 nt, Human
gguguccugcaccggggccug

SEQ ID NO: 3141810 - RNA, 12 nt, Human
ggagggauuugg

SEQ ID NO: 3141811 - RNA, 13 nt, Human
ggagggcaggcau

SEQ ID NO: 3141812 - RNA, 16 nt, Human
ggagccgggagccuga

SEQ ID NO: 3141813 - RNA, 20 nt, Human
ggaggagggcaggcaucggg

SEQ ID NO: 3141814 - RNA, 15 nt, Human
ggaggagggcaggca

SEQ ID NO: 3141815 - RNA, 14 nt, Human
ggaggagggcaggc

SEQ ID NO: 3141816 - RNA, 13 nt, Human
ggauagaugugug

SEQ ID NO: 3141817 - RNA, 14 nt, Human
ggauagaugugugg

SEQ ID NO: 3141818 - RNA, 15 nt, Human
ggauagaugugugga

SEQ ID NO: 3141819 - RNA, 17 nt, Human
ggaaggaucccaugagc

SEQ ID NO: 3141820 - RNA, 20 nt, Human
ggcagucugagagaggccau

SEQ ID NO: 3141821 - RNA, 20 nt, Human
ggaucccaugagcuccuuaa

SEQ ID NO: 3141822 - RNA, 17 nt, Human
ggaucccaugagcuccu

SEQ ID NO: 3141823 - RNA, 19 nt, Human
gcugggaggagggcaggca

SEQ ID NO: 3141824 - RNA, 17 nt, Human
gcugggaggagggcagg

SEQ ID NO: 3141825 - RNA, 20 nt, Human
gcugccuuuggacuuguccc

SEQ ID NO: 3141826 - RNA, 15 nt, Human
gcugccuuuggacuu

SEQ ID NO: 3141827 - RNA, 23 nt, Human
gcugggacaccccgacuuuuguu

SEQ ID NO: 3141828 - RNA, 20 nt, Human
ggaaccgaggcagggaagga

SEQ ID NO: 3141829 - RNA, 16 nt, Human
ggaaccgaggcaggga

SEQ ID NO: 3141830 - RNA, 15 nt, Human
ggaaccgaggcaggg

SEQ ID NO: 3141831 - RNA, 17 nt, Human
ggaacucgugucuggca

SEQ ID NO: 3141832 - RNA, 18 nt, Human
gcuucuaguucugccagg

SEQ ID NO: 3141833 - RNA, 21 nt, Human
gcuucuaguucugccaggaga

SEQ ID NO: 3141834 - RNA, 20 nt, Human
gcuucuaguucugccaggag

SEQ ID NO: 3141835 - RNA, 19 nt, Human
gcuucuaguucugccagga

SEQ ID NO: 3141836 - RNA, 13 nt, Human
gccccgcguggaa

SEQ ID NO: 3141837 - RNA, 21 nt, Human
gccgagaguccaucagccucc

SEQ ID NO: 3141838 - RNA, 14 nt, Human
gccgggagccugac

SEQ ID NO: 3141839 - RNA, 13 nt, Human
gccgggagccuga

SEQ ID NO: 3141840 - RNA, 19 nt, Human
gccgggagccugacccuca

SEQ ID NO: 3141841 - RNA, 17 nt, Human
gccuaaccugccgagag

SEQ ID NO: 3141842 - RNA, 15 nt, Human
gcaggagggaggugc

SEQ ID NO: 3141843 - RNA, 19 nt, Human
gcacagccuggcuguggcc

SEQ ID NO: 3141844 - RNA, 12 nt, Human
gcacagccuggc

SEQ ID NO: 3141845 - RNA, 21 nt, Human
gaguguguaauuuaaaauugu

SEQ ID NO: 3141846 - RNA, 22 nt, Human
gaguguguaauuuaaaauugug

SEQ ID NO: 3141847 - RNA, 18 nt, Human
gacuucccacggcuccuc

SEQ ID NO: 3141848 - RNA, 17 nt, Human
gaagagaagggcagggc

SEQ ID NO: 3141849 - RNA, 19 nt, Human
gaagcguuguccucagccc

SEQ ID NO: 3141850 - RNA, 13 nt, Human
gaagcguuguccu

SEQ ID NO: 3141851 - RNA, 20 nt, Human
gaagcguuguccucagcccc

SEQ ID NO: 3141852 - RNA, 14 nt, Human
cuuccuuccucucc

SEQ ID NO: 3141853 - RNA, 19 nt, Human
cucuccacucaugugacuc

SEQ ID NO: 3141854 - RNA, 21 nt, Human
cugaagagaagggcagggcug

SEQ ID NO: 3141855 - RNA, 13 nt, Human
cuccuuaaggcuc

SEQ ID NO: 3141856 - RNA, 22 nt, Human
cuccuuaaggcucuuuuguaag

SEQ ID NO: 3141857 - RNA, 17 nt, Human
cucauuccagaggaagg

SEQ ID NO: 3141858 - RNA, 15 nt, Human
cucauuccagaggaa

SEQ ID NO: 3141859 - RNA, 17 nt, Human
cuccauugguguugaca

SEQ ID NO: 3141860 - RNA, 12 nt, Human
cuggaccagccu

SEQ ID NO: 3141861 - RNA, 14 nt, Human
cuggcacagccugg

SEQ ID NO: 3141862 - RNA, 16 nt, Human
cugccaggagacaggu

SEQ ID NO: 3141863 - RNA, 20 nt, Human
cugccagcauuucccuuccu

SEQ ID NO: 3141864 - RNA, 14 nt, Human
ccuggaccagccuc

SEQ ID NO: 3141865 - RNA, 16 nt, Human
ccuggaccagccucuc

SEQ ID NO: 3141866 - RNA, 15 nt, Human
ccuggaccagccucu

SEQ ID NO: 3141867 - RNA, 19 nt, Human
cgucagcugggacaccccg

SEQ ID NO: 3141868 - RNA, 16 nt, Human
cgggagcucaggaacc

SEQ ID NO: 3141869 - RNA, 23 nt, Human
cggcugggaggagggcaggcauc

SEQ ID NO: 3141870 - RNA, 18 nt, Human
cggcugggaggagggcag

SEQ ID NO: 3141871 - RNA, 22 nt, Human
cggcugggaggagggcaggcau

SEQ ID NO: 3141872 - RNA, 21 nt, Human
cgauugcaggagucccugcca

SEQ ID NO: 3141873 - RNA, 23 nt, Human
cgauugcaggagucccugccauc

SEQ ID NO: 3141874 - RNA, 15 nt, Human
ccuccucugcccggg

SEQ ID NO: 3141875 - RNA, 14 nt, Human
ccuccucugcccgg

SEQ ID NO: 3141876 - RNA, 23 nt, Human
ccucuccacucaugugacucuuu

SEQ ID NO: 3141877 - RNA, 22 nt, Human
ccgacuuuuguuuaccagagaa

SEQ ID NO: 3141878 - RNA, 19 nt, Human
cauugucccugaagagaag

SEQ ID NO: 3141879 - RNA, 16 nt, Human
ccaaacaggcucagag

SEQ ID NO: 3141880 - RNA, 13 nt, Human
ccaacacugccag

SEQ ID NO: 3141881 - RNA, 16 nt, Human
ccaacacugccagcau

SEQ ID NO: 3141882 - RNA, 15 nt, Human
ccaacacugccagca

SEQ ID NO: 3141883 - RNA, 14 nt, Human
ccaacacugccagc

SEQ ID NO: 3141884 - RNA, 19 nt, Human
ccaagccuuggcucuaccc

SEQ ID NO: 3141885 - RNA, 16 nt, Human
ccacacccucacugcu

SEQ ID NO: 3141886 - RNA, 20 nt, Human
ccacacagacuugggcaggg

SEQ ID NO: 3141887 - RNA, 21 nt, Human
ccacgucagcugggacacccc

SEQ ID NO: 3141888 - RNA, 13 nt, Human
cccaacaccucuu

SEQ ID NO: 3141889 - RNA, 13 nt, Human
ccaucagccucca

SEQ ID NO: 3141890 - RNA, 19 nt, Human
uuuagaagaagugugucac

SEQ ID NO: 3141891 - RNA, 17 nt, Human
uuuagaagaaguguguc

SEQ ID NO: 3141892 - RNA, 11 nt, Human
uguguguaugu

SEQ ID NO: 3141893 - RNA, 15 nt, Human
uguguuuaugugugu

SEQ ID NO: 3141894 - RNA, 13 nt, Human
uguguuuaugugu

SEQ ID NO: 3141895 - RNA, 14 nt, Human
uguguugugugugg

SEQ ID NO: 3141896 - RNA, 23 nt, Human
uguguugugugugggagugugua

SEQ ID NO: 3141897 - RNA, 23 nt, Human
uguguaugugggggucugugugu

SEQ ID NO: 3141898 - RNA, 14 nt, Human
uguguauguggggg

SEQ ID NO: 3141899 - RNA, 13 nt, Human
uguguaugugggg

SEQ ID NO: 3141900 - RNA, 14 nt, Human
uguuuacagaggac

SEQ ID NO: 3141901 - RNA, 21 nt, Human
uguuuacagaggacaguauuu

SEQ ID NO: 3141902 - RNA, 15 nt, Human
uuacagaggacagua

SEQ ID NO: 3141903 - RNA, 16 nt, Human
ugugggggucugugug

SEQ ID NO: 3141904 - RNA, 14 nt, Human
ugugggucugugug

SEQ ID NO: 3141905 - RNA, 16 nt, Human
ugugggucugugugug

SEQ ID NO: 3141906 - RNA, 20 nt, Human
ugugggucugugugugugua

SEQ ID NO: 3141907 - RNA, 18 nt, Human
ugugaggggcucucucau

SEQ ID NO: 3141908 - RNA, 15 nt, Human
uguaaauuuauguga

SEQ ID NO: 3141909 - RNA, 16 nt, Human
uguaaauuuaugugau

SEQ ID NO: 3141910 - RNA, 14 nt, Human
ugucacgccagacu

SEQ ID NO: 3141911 - RNA, 20 nt, Human
ugcuucuaguucugccagga

SEQ ID NO: 3141912 - RNA, 19 nt, Human
ugcuucuaguucugccagg

SEQ ID NO: 3141913 - RNA, 18 nt, Human
ugcuucuaguucugccag

SEQ ID NO: 3141914 - RNA, 21 nt, Human
uggaagugugggucugugugu

SEQ ID NO: 3141915 - RNA, 23 nt, Human
uggaagugugggucugugugugu

SEQ ID NO: 3141916 - RNA, 18 nt, Human
uggggcaggggccggggg

SEQ ID NO: 3141917 - RNA, 16 nt, Human
uggggcaggggccggg

SEQ ID NO: 3141918 - RNA, 19 nt, Human
gguugggagaaugucagua

SEQ ID NO: 3141919 - RNA, 19 nt, Human
uaauucuuugaccuguugg

SEQ ID NO: 3141920 - RNA, 11 nt, Human
uagaugugugg

SEQ ID NO: 3141921 - RNA, 15 nt, Human
uaggaacugcugggc

SEQ ID NO: 3141922 - RNA, 18 nt, Human
uaggaacugcugggcuug

SEQ ID NO: 3141923 - RNA, 15 nt, Human
uaucagcacgugugg

SEQ ID NO: 3141924 - RNA, 13 nt, Human
uaggcuagggugg

SEQ ID NO: 3141925 - RNA, 22 nt, Human
uagugauuuuuaugccaccuga

SEQ ID NO: 3141926 - RNA, 21 nt, Human
uagugauuuuuaugccaccug

SEQ ID NO: 3141927 - RNA, 20 nt, Human
uagugauuuuuaugccaccu

SEQ ID NO: 3141928 - RNA, 15 nt, Human
ucuguguguuuaugu

SEQ ID NO: 3141929 - RNA, 16 nt, Human
ucuguguguuuaugug

SEQ ID NO: 3141930 - RNA, 22 nt, Human
ucuguguguguguauguggggg

SEQ ID NO: 3141931 - RNA, 19 nt, Human
ucuguguguuuaugugugu

SEQ ID NO: 3141932 - RNA, 20 nt, Human
ucuguguguuuaugugugug

SEQ ID NO: 3141933 - RNA, 15 nt, Human
ucuguguguguguau

SEQ ID NO: 3141934 - RNA, 18 nt, Human
ucuguguguguguaugug

SEQ ID NO: 3141935 - RNA, 19 nt, Human
ucuguguguguguaugugg

SEQ ID NO: 3141936 - RNA, 21 nt, Human
ucuguguguguguaugugggg

SEQ ID NO: 3141937 - RNA, 13 nt, Human
ucugugugugugu

SEQ ID NO: 3141938 - RNA, 19 nt, Human
ucuuuuguaagguuuuugu

SEQ ID NO: 3141939 - RNA, 19 nt, Human
uccuuaaggcucuuuugua

SEQ ID NO: 3141940 - RNA, 16 nt, Human
uccuuaaggcucuuuu

SEQ ID NO: 3141941 - RNA, 18 nt, Human
ucacgccagacuucccac

SEQ ID NO: 3141942 - RNA, 18 nt, Human
cugaggaagagggacugu

SEQ ID NO: 3141943 - RNA, 23 nt, Human
cugaggaagagggacuguucuuu

SEQ ID NO: 3141944 - RNA, 18 nt, Human
cugacccucaucuuucuu

SEQ ID NO: 3141945 - RNA, 15 nt, Human
cuaggcuaggguggg

SEQ ID NO: 3141946 - RNA, 16 nt, Human
cuaguucugccaggag

SEQ ID NO: 3141947 - RNA, 15 nt, Human
cuaguucugccagga

SEQ ID NO: 3141948 - RNA, 14 nt, Human
cuaguucugccagg

SEQ ID NO: 3141949 - RNA, 15 nt, Human
cuaggguggggagag

SEQ ID NO: 3141950 - RNA, 13 nt, Human
cuaguucugccag

SEQ ID NO: 3141951 - RNA, 12 nt, Human
ccauucuuuccc

SEQ ID NO: 3141952 - RNA, 20 nt, Human
ccauucuuucccaacaccuc

SEQ ID NO: 3141953 - RNA, 14 nt, Human
ccauucuuucccaa

SEQ ID NO: 3141954 - RNA, 21 nt, Human
ccuggugguggcucgggaggc

SEQ ID NO: 3141955 - RNA, 18 nt, Human
ccuggugguggcucggga

SEQ ID NO: 3141956 - RNA, 21 nt, Human
ccugucucccuccucugcccg

SEQ ID NO: 3141957 - RNA, 18 nt, Human
ccugccaucauguuuaca

SEQ ID NO: 3141958 - RNA, 20 nt, Human
ccugccaucauguuuacaga

SEQ ID NO: 3141959 - RNA, 19 nt, Human
ccugacccucaucuuucuu

SEQ ID NO: 3141960 - RNA, 18 nt, Human
ccugacccucaucuuucu

SEQ ID NO: 3141961 - RNA, 18 nt, Human
cagucugagagaggccau

SEQ ID NO: 3141962 - RNA, 15 nt, Human
caggccugacucuca

SEQ ID NO: 3141963 - RNA, 19 nt, Human
cauccauggggcugauugu

SEQ ID NO: 3141964 - RNA, 14 nt, Human
cuuugaccuguugg

SEQ ID NO: 3141965 - RNA, 16 nt, Human
cuucuaguucugccag

SEQ ID NO: 3141966 - RNA, 18 nt, Human
cuucuaguucugccagga

SEQ ID NO: 3141967 - RNA, 17 nt, Human
cuucuaguucugccagg

SEQ ID NO: 3141968 - RNA, 19 nt, Human
cuucuaguucugccaggag

SEQ ID NO: 3141969 - RNA, 16 nt, Human
cuggggaugucucuca

SEQ ID NO: 3141970 - RNA, 18 nt, Human
cugggaauaagugccagg

SEQ ID NO: 3141971 - RNA, 15 nt, Human
cuuaggccagcacca

SEQ ID NO: 3141972 - RNA, 16 nt, Human
cugugccuuuugccau

SEQ ID NO: 3141973 - RNA, 20 nt, Human
cugugccuugucacgccaga

SEQ ID NO: 3141974 - RNA, 18 nt, Human
gcauuucccuuccuuccu

SEQ ID NO: 3141975 - RNA, 20 nt, Human
gacccucaucuuucuuccaa

SEQ ID NO: 3141976 - RNA, 19 nt, Human
gacccucaucuuucuucca

SEQ ID NO: 3141977 - RNA, 15 nt, Human
gacccucaucuuucu

SEQ ID NO: 3141978 - RNA, 15 nt, Human
gacuauggagcugag

SEQ ID NO: 3141979 - RNA, 23 nt, Human
guaauuuaaaauugugauguguc

SEQ ID NO: 3141980 - RNA, 19 nt, Human
guaauuuaaaauugugaug

SEQ ID NO: 3141981 - RNA, 20 nt, Human
guaauuuaaaauugugaugu

SEQ ID NO: 3141982 - RNA, 15 nt, Human
guagagccagagguc

SEQ ID NO: 3141983 - RNA, 17 nt, Human
ggggccgggggcagucu

SEQ ID NO: 3141984 - RNA, 18 nt, Human
gggggcgcggcugggagg

SEQ ID NO: 3141985 - RNA, 14 nt, Human
ggguggggagagac

SEQ ID NO: 3141986 - RNA, 13 nt, Human
ggguggggagaga

SEQ ID NO: 3141987 - RNA, 18 nt, Human
ggguggggagagacgggc

SEQ ID NO: 3141988 - RNA, 22 nt, Human
ggugcuucuaguucugccagga

SEQ ID NO: 3141989 - RNA, 22 nt, Human
gggacaccuaggcuaggguggg

SEQ ID NO: 3141990 - RNA, 14 nt, Human
ggcucagagugggg

SEQ ID NO: 3141991 - RNA, 20 nt, Human
ggcucagaggguguccugca

SEQ ID NO: 3141992 - RNA, 15 nt, Human
ggcagggcugaggcc

SEQ ID NO: 3141993 - RNA, 20 nt, Human
ggaacugcugggcuuggcag

SEQ ID NO: 3141994 - RNA, 21 nt, Human
ggaagugugggucugugugug
